(19) United States
(12) Patent Application Publication
(10) Pub. No.: US 2025/0297309 A1
(43) Pub. Date: Sep. 25, 2025

(54) METHODS FOR AMYOTROPHIC LATERAL SCLEROSIS

(71) Applicant: Thomas Jefferson University, Philadelphia, PA (US)

(72) Inventors: Isidore Rigoutsos, Astoria, NY (US); Phillipe Loher, Davidson, NC (US)

(21) Appl. No.: 18/715,608

(22) PCT Filed: Dec. 8, 2022
(86) PCT No.: PCT/US2022/081183

§ 371 Date: May 31, 2024

Related U.S. Application Data
(60) Provisional application No. 63/287,312, filed on Dec. 8, 2021.

(51) Int. Cl. C12Q 1/6883; A61K 31/428; A61K 45/06

(52) U.S. Cl. CPC C12Q 1/6883; A61K 31/428; A61K 45/06; C12Q 2600/112; C12Q 2600/118; C12Q 2600/158

(57) ABSTRACT

Disclosed herein are methods for treating or preventing amyotrophic lateral sclerosis (ALS) in a subject in need thereof. The method comprises isolating RNAs from a sample obtained from the subject; characterizing the RNAs and their relative abundance in the sample to identify a signature, wherein the signature is indicative of presence or absence of ALS; and administering to the subject a treatment for ALS. Also disclosed herein are methods for diagnosis of ALS, determining the stage of ALS and predicting speed of progression of ALS, using short RNA signatures associated with diagnosis, stage or progression speed of ALS.

### CROSS-REFERENCE TO RELATED APPLICATIONS

[0001] The present application claims priority under 35 U.S.C. § 119(e) to U.S. Provisional Patent Application No. 63/287,312, filed December 8. 2021, which is incorporated herein by reference in its entirety.

### SEQUENCE LISTING

[0002] The ASCII text file named “205-7080WOJ(00314) Seq Listing. xml” created on Dec. 8, 2022, comprising 58,205 Kbytes, is hereby incorporated by reference in its entirety.

### BACKGROUND

[0003] Amyotrophic lateral sclerosis (ALS), also referred to as Lou Gehrig's disease is neurodegenerative disease that results in the progressive loss of motor neurons that control voluntary muscles.

[0004] Currently, there is no single test that can provide definitive diagnosis of amyotrophic lateral sclerosis (ALS). Rather, ALS is diagnosed based on a detailed history of the symptoms observed by a physician as well as a series of tests to, among others, rule out other diseases. Accordingly, there is a need for novel methods to diagnose ALS so that the disease can be treated al early stages.

[0005] Furthermore, ALS progresses differently in individuals. It is difficult to determine the stage or the speed of progression of the disease in an individual. Accordingly, there is a need for novel method to evaluate in individuals the stage and speed of progression of ALS.

[0006] The present invention addresses the above needs.

### SUMMARY

[0007] In some aspects, the present invention is directed to a method for treating or preventing amyotrophic lateral sclerosis (ALS) in a subject in need thereof.

[0008] In some embodiments, the method comprises: isolating fragments of short RNAs from a sample obtained from the subject: characterizing the short RNAs and their relative abundance in the sample to identify a signature, wherein when the signature is indicative of a presence or absence of ALS; and if the identified signature indicates a presence of ALS, administering to the subject a treatment of ALS. In some aspects, the present invention is directed to a method of estimating a speed of progression of amyotrophic lateral sclerosis (ALS) in a subject. In some embodiments, the method comprises: isolating fragments of short RNAs from a sample obtained from the subject, characterizing the short RNAs and their relative abundance in the sample to identify a signature, wherein when the signature is indicative of a progression speed of ALS; and determining the speed of ALS progression in the subject based on the identified signature.

[0009] In some aspects, the present invention is directed to a method of determining a stage of amyotrophic lateral sclerosis (ALS) in a subject. In some embodiments, the method comprises: isolating fragments of short RNAs from a sample obtained from the subject; characterizing the short RNAs and their relative abundance in the sample to identify a signature, wherein when the signature is indicative of a stage of ALS; and determining the stage of the ALS in the subject based on the identified signature.

### BRIEF DESCRIPTION OF THE DRAWINGS

[0010] The following detailed description of exemplary embodiments will be better understood when read in conjunction with the appended drawings. For the purpose of illustrating, non-limiting embodiments are shown in the drawing s. It should be understood, however, that the instant specification is not limited to the precise arrangements and instrumentalities of the embodiments shown in the drawings.

[0011] FIGS. 1A-1J: non-limiting short RNA sequences that are associated with ALS patient survival in a statistically significant manner, in accordance with some embodiments. The sequences shown in FIGS. 1A-1J are also listed below:

GUCGACGUAUAGGGUGUG (SEQ ID NO: 2328)
GCGGGCGUCGUUCAAUGGUAGGACCUGAGCU (SEQ ID NO: 2758)
UGCAAGUCGAACGGUA (SEQ ID NO: 2522)
GUAAUGGCGGGAACUCUGGACAGACUGCCU (SEQ ID NO: 1194)
GAUUUCCCCUUGGGGUUGUAGGACCA (SEQ ID NO: 1120)
UAAAGUGCUUAUAGUGCAGGUAG (SEQ ID NO: 1369)
UCUUUGGUUAUCUAGCUGUAU (SEQ ID NO: 3004)
GCCGUGAUCGUAUAGUGGUUAGUACUCUGC (SEQ ID NO: 1236)
CGACUCUUAGCGGUGGAUCACUCGGCUCGUGCGUCGAUGAAGA
(SEQ ID NO: 727)
CGCGACCUCAGAUCAGACGUGGCGACCCGCU (SEQ ID NO: 758)

### DETAILED DESCRIPTION

[0012] The following disclosure provides many different embodiments, or examples, for implementing different features of the provided subject matter Specific examples of components and arrangements are described below to simplify the present disclosure. These are, of course, merely examples and are not intended to be limiting. For example, the formation of a first feature over or on a second feature in the description that follows may include embodiments in which the first and second features are formed in direct contact, and may also include embodiments in which additional features may be formed between the first and second features, such that the first and second features may not be in direct contact. In addition, the present disclosure may repeat reference numerals and/or letters in the various examples. This repetition is for the purpose of simplicity and clarity and does not in itself dictate a relationship between the various embodiments and/or configurations discussed

### Definitions

[0013] As used herein, each of the following terms has the meaning associated with it in this section. Unless defined otherwise, all technical and scientific terms used herein generally have the same meaning as commonly understood by one of ordinary skill in the art to which this disclosure belongs. Generally, the nomenclature used herein and the laboratory procedures in animal pharmacology, pharmaceutical science, peptide chemistry, and organic chemistry are those well-known and commonly employed in the art. It should be understood that the order of steps or order for performing certain actions is immaterial, so long as the present teachings remain operable. Any use of section headings is intended to aid reading of the document and is not to be interpreted as limiting; information that is relevant to a section heading may occur within or outside of that particular section. All publications, patents, and patent documents referred to in this document are incorporated by reference herein in their entirety, as though individually incorporated by reference.

[0014] In the application, where an element or component is included in and/or selected from a list of recited elements or components, it should be understood that the element or component can be any one of the recited elements or components and can be selected from a group consisting of two or more of the recited elements of components.

[0015] In the methods described herein, the acts can be carried out in any order, except when a temporal of operational sequence is explicitly recited. Furthermore, specified acts can be carried out concurrently unless explicit claim language recites that they be carried out separately. For example, a claimed act of doing X and a claimed act of doing Y can be conducted simultaneously within a single operation, and the resulting process will fall within the literal scope of the claimed process.

[0016] In this document, the terms or “the” are used to include one or more than one unless the context clearly dictates otherwise. The term “or” is used to refer to a nonexclusive “or” unless otherwise indicated. The statement “at least one of A and B” or “at least one of Å of B” has the same meaning as “A. B, or A and B.”

[0017] “About” as used herein when referring to a measurable value such as an amount, a temporal duration, and the like, is meant to encompass variations of ±20% or ±10%, in certain embodiments ±5%, in certain embodiments ±1%, in certain embodiments ±0.1% from the specified value, as such variations are appropriate to perform the disclosed methods

### Methods for Diagnosing, Treating, or Preventing Amyotrophic Lateral Sclerosis (ALS)

[0018] The study described herein (“the present study”) analyzed short RNA datasets from two public repositories. The first repository comprises datasets generated from plasma samples of ALS patients and healthy controls, and the second repository comprises datasets generated from serum samples of ALS patients and healthy controls. The analyses show that a set of short RNAs as well as their level In the samples correlate with ALS, and therefor can be used for diagnosing ALS, as well as for treating or preventing the disease by providing guidance for the administration of medications and therapies.

[0019] Accordingly, in some aspects, the present invention is directed to a method for diagnosing ALS.

[0020] In some embodiments, the method for diagnosing ALS comprises isolating short RNAs from a sample obtained from the subject; and characterizing the short RNAs and their relative abundance in the sample to identify a signature, wherein when the signature is indicative of a presence or absence of ALS.

[0021] In some aspects, the present invention is directed to a method for treating, ameliorating and/or preventing ALS.

[0022] In some embodiments, the method for treating or preventing ALS comprises: isolating short RNAs from a sample obtained from the subject; characterizing the short RNAs and their relative abundance in the sample to identify a signature, wherein when the signature is indicative of a presence or absence of ALS; and if the identified signature indicates a presence of ALS, administering to the a treatment of ALS.

[0023] In some embodiments, the short RNA is an RNA molecule having a length of about 100 nucleotides or less, such as about 90 nucleotides or less, about 80 nucleotides or less, about 70 nucleotides or less, about 60 nucleotides or less, or about 50 nucleotides or less.

[0024] In some embodiments, the signature indicating the presence of ALS comprises at least one short RNA selected from the group consisting of RNAs set forth in SEQ ID NOs: 1-1679 and 65683-66986.

[0025] In some embodiments, the signature indicating the presence of ALS comprises at least one selected from the group consisting of: GCUGUGAUGGCCGAGUGG (SEQ ID NO:1222), GGGGAUGUAGCUCAGUGG (SEQ ID NO:1231), CGGGCCUGGUUAGUACUUGGAUGU (SEQ ID NO:32), and UCGGCUGUUAACCGAAAGGUUGGUGGU (SEQ ID NO:484).

[0026] In some embodiments, the signature comprises at least one short RNA selected from the group consisting of RNAs set forth in SEQ ID NOs: 1-711, 1481-1545, 65683-65745, 66521-66593, 66632-66674, and 66876-66986, and an increased level of the at least one short RNA In comparison to a baseline level (e.g., the level found in control subjects that do not have ALS) is indicative of a presence of ALS.

[0027] In some embodiments, the signature comprises at least one short RNA selected from the group consisting of RNAs set forth in SEQ ID NOs: 712-1480, 1546-1679, 65746-66520, 66594-66631, 66675-66875, and 66987-67130, and a decreased level of the at least one short RNA in comparison to a base line is indicative of a presence of ALS.

[0028] In some embodiments, the level of the at least one short RNA of the signature changes (such as increases or decreases) by about 2 folds or more, such as about 5 folds or more, about 10 folds or more, about 20 folds or more, about 50 folds or more, about 100 folds or more, about 200 folds or more, about 500 folds or more, or about 1000 folds or more, based on the base line level

[0029] In some embodiments, the sample is isolated from a cell, tissue or body fluid obtained from the subject.

[0030] In some embodiments, the sample is isolated from a body fluid, and the body fluid is a plasma, a serum, a cerebrospinal fluid, or combinations thereof.

[0031] In some embodiments, the treatment of ALS comprises a glutamate blocker, a muscle relaxant, a physical therapy, or combinations thereof.

[0032] Non-limiting examples of glutamate blocker useful for treating ALS include riluzole, and the like.

[0033] Non-limiting examples of muscle relaxant useful for treating ALS include baclofen, tizanidine, and the like.

[0034] The present study has discovered that short RNAs derived from some bacteria, such as, for example, those from the phylum Verumicrobia and the phylum Proteabacteria, are associated with ALS. Accordingly, in some embodiments, the method of treating or preventing ALS further comprises reducing and/or eliminating these bacteria in the body of the subject: Medications, such as antibiotics, for reducing and/or eliminating bacteria, such as Verumicrobia and/or Proteobacteria, are well known in the art and will not be described herein.

[0035] Accordingly, in some embodiments, the at least one of the signature indicatives of the presence of ALS identified in the sample comprises at least one short RNA originated from a bacterium, and wherein subject is further administered with a medication for an infection of the bacterium.

[0036] In some embodiments, the bacterium comprises at least one bacterium of the phylum Verumicrobia and/or at least one bacterium from the phylum Proteobacteria.

[0037] In some embodiments, the medication for the infection of the bacterium comprises an antibiotic.

[0038] In some embodiments, the subject is a mammal, such as a human.

### Methods for Estimating Speed of ALS Progression

[0039] The present study identified short RNAs in ALS patient samples that correlate with neurofilament light chain (NfL), which is a quantitative biomarker of ALS aggressiveness, as well as short RNAs that correlate with the rate of disease progression rate/velocity of ALSFRS (also referred to as the “slope”) These short RNAs, as well as their levels, can be used to estimate ALS aggressiveness.

[0040] Accordingly, in some aspects, the present invention is directed to a method for estimating a speed of progression of amyotrophic lateral sclerosis (ALS) in a subject.

[0041] In some embodiments, the method comprises: isolating short RNAs from a sample obtained from the subject; characterizing the short RNAs and their relative abundance in the sample to identify a signature, wherein when the signature is indicative of a progression speed of ALS; and determining the speed of ALS progression in the subject based on the identified signature.

[0042] In some embodiments, the short RNA is an RNA molecule having a length of about 100 nucleotides or less, such as about 90 nucleotides or less, about 80 nucleotides or less, about 70 nucleotides or less, about 60 nucleotides or less, or about 50 nucleotides or less.

[0043] In some embodiments, the signature comprises at least one short RNAs selected from the group set forth in SEQ ID NOs: 1680-2725. In some embodiments, an altered level of at least one short RNAs selected from the group set forth in SEQ ID NOs: 1680-2725 in comparison to a reference level (e.g., a level of the short RNAs in control subjects that do not have ALS) is Indicative of fast ALS progression.

[0044] In some embodiments, the sample is isolated from a cell, tissue or body fluid obtained from the subject.

[0045] In some embodiments, the sample is isolated from a body fluid, and the body fluid is a plasma, a serum, a cerebrospinal fluid, or combinations thereof.

[0046] In some embodiments, the subject is a mammal, such as a human.

### Methods for Determining Stage of ALS

[0047] The present study identified short RNAs in ALS patient samples that correlate with the stage of ALS, such as correlate with the predict time-to-death of the disease.

[0048] Accordingly, in some aspects, the present invention is directed to a method for estimating a stage of amyotrophic lateral sclerosis (ALS) in a subject.

[0049] In some embodiments, the method comprises isolating short RNAs from a sample obtained from the subject; characterizing the short RNAs and their relative abundance in the sample to identify a signature, wherein when the signature is indicative of a stage of ALS; and determining the stage of ALS progression in the subject based on the identified signature.

[0050] In some embodiments, the short RNA is an RNA molecule having a length of about 100 nucleotides or less, such as about 90 nucleotides or less, about 80 nucleotides or less, about 70 nucleotides or less, about 60 nucleotides or less, or about 50 nucleotides or less.

[0051] In some embodiments, the signature comprises at least one short RNA selected from the group consisting of RNAs set forth in SEQ ID NOs: 2726-650 In some embodiments, an altered level of at least one short RNA selected from the group set forth in SEQ ID NOs: 2726-65054 in comparison to a reference level (e.g., a level of the short RNAs in control subjects that do not have ALS) is indicative of the stage of ALS.

[0052] In some embodiments, the signature comprises at least one short RNAs selected from the group consisting of

(SEQ ID NO: 727)
CGACUCUUAGCGGUGGAUCACUCGGCUCGUGCGUCGAUGAAGA,
(SEQ ID NO: 758)
CGCGACCUCAGAUCAGACGUGGCGACCCGCU,
(SEQ ID NO: 1120)
GAUUUCCCCUUGGGGUUGUAGGACCA,
(SEQ ID NO: 1194)
GUAAUGGCGGGAACUCUGGACAGACUGCCU,
(SEQ ID NO: 1236)
GCCGUGAUCGUAUAGUGGUUAGUACUCUGC,
(SEQ ID NO: 1369)
UAAAGUGCUUAUAGUGCAGGUAG,
(SEQ ID NO: 2328)
GUCGACGUAUAGGGUGUG,
(SEQ ID NO: 2522)
UGCAAGUCGAACGGUA,
(SEQ ID NO: 2758)
GCGGGCGUCGUUCAAUGGUAGGACCUGAGCU,
and
(SEQ ID NO: 3004)
UCUUUGGUUAUCUAGCUGUAU.

[0053] In some embodiments, the sample is isolated from a cell, tissue or body fluid obtained from the subject.

[0054] In some embodiments, the sample is isolated from a body fluid, and the body fluid is a plasma, a serum, a cerebrospinal fluid, or combinations thereof.

[0055] In some embodiments, the subject is a mammal, such as a human.

### Examples

[0056] The instant specification further describes in detail by reference to the following experimental examples. These examples are provided for purposes of illustration only, and are not intended to be limiting unless so specified. Thus, the instant specification should in no way be construed as being limited to the following examples, but rather, should be construed to encompass any and all variations which become evident as a result of the teaching provided herein

[0057] In this section, analyses of two collections of public data (RNA-seq) that were generated from patients with amyotrophic lateral sclerosis (ALS) and controls will be described. The analyses led to the identification of multiple short RNA molecules that individually or in combinations can be used to: 1) diagnose ALS; 2) determine how quickly the disease is progressing; and/or 3) serve as candidate therapeutic targets.

[0058] The RNA molecules belong to the following classes: a) miRNA isoforms, also referred to as isomiRs; b) tRNA-derived fragments, also referred to as tRFs; c) rRNA-derived fragments, also referred to as rRFs, and d) “Not-TRF-ISO-KRF,” short RNA that cannot be categorized as human isomiRs, tRFs or rRFs using exact matching.

[0059] The present study analyzed datasets from two public repositories. The first repository comprised datasets generated from plasma samples of ALS patients and healthy controls described in Magen et al., Circulating miR-181 is a prognostic biomarker for amyotrophic lateral sclerosis. Nature Neuroscience. 2021 (https://doi.org/10.1101/833079). The second repository comprised datasets generated from serum samples of ALS patients and healthy controls described in Dobrowolny et al, A longitudinal study defined circulating microRNAs as reliable biomarkers for disease prognosis and progression in ALS human patients, Cell Death Discov. 2021 (https://doi.org/10.1038/s41420-020-00397-6)

[0060] The Example section herein describes t present study in reference to several tables (Tables 1-9), which are shown after the “Enumerated Embodiments” section. any thymine (T) nucleotide recited in the nucleotide sequences disclosed in Tables 1-9 is intended to represent a uracil (U) nucleotide and is consistence with the WIPO Standard ST.26.

### Example 1: First of the Two Collections-GSE168714

### About the Data

[0061] The RNA-seq data of the first collection appear on NIH's Gene Expression Omnibus (GEO) under accession number GSE168714. Table 1 lists the datasets that the present study analyzed from this collection, their GEO and Sequence Read Archive (SRA) identifiers, and associated information

### Preprocessing of the Deep Sequencing Datasets

[0062] To help control for library amplification bias, random unique molecular identifiers (UMIs) were used during the preparation of the libraries from the samples comprising the GSE168714 collection. The UMIs are 12 nucleotides (nts) in length and are added to the sequencing libraries before any PCR amplification. UMIs are meant to tag the unique molecules during the adapter ligation step. Their incorporation in this instance is meant to help identify instances of biased amplification during the PCR step: by accounting for any bias that may be present, one can avoid potentially erroneous quantitation estimates for the sequenced molecules.

[0063] After sequencing and prior to quantifying the present molecules, this process needs to be reversed and the UMIs removed from the sequenced reads. To this end, the present study used a filtering strategy similar to what is described in Potla et al. “A bioinformatics approach to microRNA-sequencing analysis,” Osteoarthritis and Cartilage Open 2021 (https://doi.org/10.1016/j.ocarto.2020.100131). For the purpose of UMI-deduplication, the analysis leveraged the opensource “UMI-Tools” package, originally described in Smith et al. “UMI-tools: Modelling sequencing errors in Unique Molecular Identifiers to improve quantification accuracy” Genome Research 2017 (http://www.genome.org/cgi/doi/10.1101/gr.209601.116) Following a quality-assessment filtering step, the present study used the ‘extract’ command from the UMI-tools package to remove the 3 adapter, while allowing up to 2 mismatches, and to identify the UMI tag for each read. At this stage, any reads that did not contain a 3′ adapter were discarded. After identified the different UMI tags for each read, the package's ‘count top’ command was used to form clusters with shared tags and to remove duplicates (“de-duplication” step). The present study used the default arguments with count_tab (method=“directional”) that relies on Hamming distance to Identify identical and near-Identical UMI tags. Once the UMI-containing reads were deduplicated, only reads with length≥15 nts were kept for further processing.

### Mining of the Deep Sequencing Datasets

[0064] The present study preprocessed each raw dataset from Table 2 as outlined above. The present study profiled the short RNA in each dataset by focusing on four classes. The first three classes are: isomiRs; tRPs; and rRFs. The fourth class, Not-TRE-ISO-RRF, comprises all RNAs that cannot be labeled as human isomiRs, tRFs, or rRFs using exact sequence matching. Note that the Not-TRE-ISO-RRF class can comprise: unannotated isomiRs, tRFs, or rRFs; SNP- or mutation-containing isomiRs, tRFs, or rREs, repeat-element-derived fragments, i.e. short RNAs that map to repeat elements, other short RNA of human origin that cannot be mapped to the standard human genome assembly using exact sequence matching; isomiR, tRF, rRF or other types of short RNA do not originate in the human genome.

[0065] The present study used the following approaches to identify and quantify the short RNAs of each class:
[0066] isoMiRmap (Loher et al, “IsoMiRmap-fast, deterministic, and exhaustive mining of isomiRs from short RNA-seq datasets.” Bioinformatics 2021-https://doi.org/10.1093/bioinformatics/btab016) for isomiRs. Here, the present study sought isomiRs from the miRNAs contained in miRCarta Rel. 1. 1 described in Backes,C. et al. “miRCarta: a central repository for collecting miRNA candidates” Nucleic Acids Res. 2017 (https://doi.org/10.1093/mar/gkx851)
[0067] MINTmap (Loher et al. “MINTmap: fast and exhaustive profiling of nuclear and mitochondrial tRNA fragments from short RNA-seq data,” Sci Rep 2017-https://10.1038/srep41184) for tRFs. Here, the present study sought tRFs from the nuclear and mitochondrial tRNAs described in the MINTmap publication.
[0068] MINRmap (unpublished) for rRFs. Here, the present study sought tRFs that arise from the six rRNAs described in Cherlin et al. “Ribosomal RNA fragmentation into short RNAs (rRFs) is modulated in a sex-and population of origin-specific manner” BMC Biology 2020 . . . https://doi.org/10.1186/s12915-020-0763-0.
[0069] The present study labeled Not-TRP-ISO-RRF those reads that remained from the starting collection of sequenced reads after accounting for those reads that can be assigned to human isomiRs, tRFs, and rRFs using exact sequence matching. Since these reads are already UMI-deduplicated, the present study identified the unique sequences among them, calculated the copy number for each such sequence (=“abundance”), and assigned it to the corresponding sequence/molecule.

### Statistics

[0070] In Table 2, statistics from the analyses of the 422 datasets that belong to 1^{st} analyzed collection is described. These include starting number of sequenced reads, reads remaining after adapter removal, reads remaining after UMI removal, reads mapping to known miRNAs, reads mapping to known tRNAs, etc.

### Method for Identifying Differentially Abundant Molecules

[0071] Separately for each of the four RNA classes of interest, the present study used DESeq2 described in Love et al 2014 “Moderated estimation of fold change and dispersion for RNA-seq data with DESeq2” (https://doi.org/10.1186/s13059-014-0550-8) to identify those molecules that changed between conditions of interest.

[0072] If a patient participated in the longitudinal portion of the study, only the first sample that was collected from this patient was used to avoid counting the patient more than once. To help eliminate outlier sequencing runs, pairwise Spearman correlations using isomiR expression were calculated across the samples. The present study excluded from the DESeq2 runs those samples whose mean Spearman correlations placed them in the lowest 5 percentile range.

Differential Abundance Results—Healthy Controls vs. ALS

[0073] The present study used DESeq2 to compare the profiles of each of the four classes of interest in healthy controls (101 datasets) and ALS patients (231 datasets). The present study found a total of 1480 short RNA sequences that satisfy the above thresholds: 456 isomiRs, 40 tRFs, 143 rRFs, and 841 Not-TRF-ISO-RRE RNAs Four of the 1480 sequences appear under multiple annotations in public databases, leaving 1476 unique short RNA sequences. The four sequences are:
[0074] GCUGUGAUGGCCGAGUGG (SEQ ID NO:1222) is a tRF from tRNA^{SerCGA} and also listed as a miRNA in miRCarta Rel 1.1;
[0075] GGGGAUGUAGCUCAGUGG (SEO ID NO:1231) is a tRF from tRNA^{AtaCGC} and also listed as a miRNA in miRCarta Rel 1.1;
[0076] CGGGCCUGGUUAGUACUUGGAUGG (SEQ ID NO:32) is an rRF from 5S rRNA and also listed as a miRNA in miRCarta Rel 1.1; and,
[0077] UCGGCUGUUAACCGAAAGGUUGGUGGU (SEQ ID NO:484) is a tRF from tRNA^{AsnGTT} and also listed as a miRNA in miRCarta Rel 1.1.

[0078] Furthermore, the present study discarded molecules whose mean expression in either the Control or ALS groups was fewer than in 5 raw reads Raw reads were then normalized using DESeq2's defaults (based on median of ratios). The present study only considered differentially abundant short RNA with absolute values of log₂ fold change ≥0,4, and a corresponding False Discovery Rate (FDR) ≤5.0E-02. Additionally, the present study discarded molecules whose mean expression following DESeq2 normalization) was less than 5 in either the Control or ALS groups.

[0079] The present study used DESeq2 to compare Healthy Controls with ALS patients (independently of whether the ALS patients were treated with Riluzole or not when the sample was collected/recorded).

[0080] Of the 1480 short RNAs:
[0081] 215 isomiRs increase in ALS (compared to controls)
[0082] 241 isomiRs decrease in ALS (compared to controls)
[0083] 13 tRFs increase in ALS (compared to controls)
[0084] 27 tRFs decrease in ALS (compared to controls)
[0085] 44 rRFs increase in ALS (compared to controls)
[0086] 99 rRFs decrease in ALS (compared to controls)
[0087] 439 “other” short RNAs increase in ALS (compared to controls)
[0088] 402 “other” short RNAs decrease in ALS (compared to controls)

[0089] Table 3 shows a list of these molecules. These molecules, individually, or in combinations of two or more, can serve as biomarkers that can distinguish ALS patients from healthy individuals.

### Correlation Methods and Results

[0090] The cerebrospinal fluid neurofilament light chain (NfL) is a known quantitative biomarker of ALS aggressiveness. Similarly, the rate of disease progression rate/velocity of ALSFRS, known as “slope,” is another such quantitative measure. The present study evaluated the relevance of all four classes of molecules by computing their correlations with NfL and the slope.

[0091] For this analysis all ALS samples of the 1^{st} collection for which metadata were available were started with. Analogously to what the present study did with the differential abundance analysis, if a patient participated in the longitudinal portion of the study, only their first sample was used to avoid counting the patient more than once. A total of 248 ALS samples were used in the correlations. The present study used the same expression threshold and DESeq2 normalization thresholds as before to filter molecules.

[0092] Tables 4A and 4B summarize the results. As shown in Table 4A, 1004 comparisons (comprising 709 unique molecules) were found correlated with either the NfL or the slope measures across the 248 ALS samples. The Table shows both Spearman and Pearson correlations. The shown molecules satisfied the following criteria: Spearman correlation pVal≤0.05 and FDR≤0.05 for either Spearman of Pearson correlation. The “treatment” column indicates stratification: (a) patients are treated with Riluzole; (b) patients are not treated with Riluzole; and, (c) patients are considered regardless of treatment status. Table 4B provides additional results. In some embodiments of the methods of the present invention, the signature comprises one or more RNAs as set forth in Tables 3 or 4. In other embodiments, the signature comprises one or more RNAs as set forth in Table 3B or 4B.

### Survival Analysis Methods and Results

[0093] In this analysis the relevance of the four classes of molecules were evaluated by determining whether they can predict time-to-death. The present study sought to also perform these predictions after stratifying by treatment status (Riluzole or not) and controlling for demographic and disease characteristics.

[0094] The present study started with all diseased ALS samples for which metadata were available. Analogously to what the present study did with the differential abundance analysis, if a patient participated in the longitudinal portion of the study, only their first sample was used to avoid counting the patient more than once. A total of 248 ALS samples were used in the Cox models. The present study used the same expression threshold and DESeq2 normalization thresholds as before to filter molecules.

[0095] The present study created Cox models for each combination of:
[0096] All 4 classes of molecules;
[0097] Expression data and log-transformed expression data;
[0098] Stratification by the presence of absence of treatment with Riluzole treatment, and by ignoring the treatment status; and,
[0099] Survival from onset and survival from enrollment.

[0100] For the univariate analysis, Kaplan-Meier curves and statistics were also generated using the molecules' mean expression to form a “low expression” and a “high expression” group. Multivariate analysis was also performed to control for demographics and disease characteristics. The following separate multivariate runs were analyzed:
[0101] (a) Expression (molecule expression)+Demographics (age at onset, age at enrollment, sex); and,
[0102] (b) Expression (molecule expression)+Demographics (age at onset, age at enrollment, sex) +Disease-related information (onset type, ALSFRS, rd50).

[0103] For both the univariate and multivariate results, a molecule was deemed significant if and only if the following two criteria were met: (i) the probability of the estimated coefficient of the molecule must be ≤5.0E-02 and (ii) the pVal of one or both of the “likelihood ratio test” of “Wald test” must be ≤5.0E-02.

[0104] The short RNAs identified in the univariate analyses are set forth in SEQ ID NOs:2726-19896. The short RNAs identified in the multivariate analyses that considered expression and demographics are set froth in SEQ ID NOs:19897-40953. The short RNAs identified in the multivariate analyses that considered expression, demographics and disease-related information. are set forth in SEQ ID NOs:40954-65054. A total of 2320 short RNAs met the thresholds in the univariate analysis. For the multivariate runs, 2378 and 2509 short RNAs, respectively, satisfied the thresholds. The union of these three collections of short RNAs yielded a total of 2815 unique sequences/short RNAs.

### Notes on the Analysis of the First Collection of Datasets (Plasma Samples)

[0105] Many of the short RNAs that satisfy the various thresholds are not those encountered in public databases (e.g. the 0|0 isomiRs found in miRBase), but variants that contain e.g. post-transcriptional modifications, SNPs, or mutations.
[0106] Several of the isomiRs that emerge from the analysis are prefixed with “TJU” and refer to miRNAs that the present study identified and reported previously (in a previous patent disclosure and in Londin et al PNAS 2015). For example: a) several short RNAs from the TJD_CMC_MD2.ID03138 precursor show increased expression in ALS patients compared to controls; b) analogously, several short RNAs from the TJU_CMC_MD2.TD00898 precursor show decreased expression in ALS patients compared to controls.
[0107] Short RNAs from the two precursors mentioned in the previous bullet and from the precursors labeled TJU_CMC_MD2.ID01326 and TJU_CMC_MD2.ID02236 are statistically significant in survival analysis.
[0108] A short RNA from TJU_CMC_MD2.ID03138 is negatively correlated with NIL.
[0109] The present study found multiple examples of “groups of short RNAs” satisfying the following properties:
   [0110] They belong to the Not-TRF-ISO-RRF class;
   [0111] Each member of a given group closely resembles a known short RNA, e.g. a miRNA isoform, but differs from the known sequence at a single nucleotide;
   [0112] The location of the single nucleotide difference within the wildtype sequence (reference) is different for each member of the group at hand;
   [0113] Each modified sequence is present in multiple samples (controls and ALS patients); and
   [0114] One or more of the modified sequences belonging to a group are differentially abundant between controls and ALS patients in a statistically-significant manner.

[0115] Table 5A shows a few such groups of short RNAs. It was also noted that the present study observed molecules with these modifications in the other analyses (correlations and survival analysis).
[0116] The present study found multiple short RNAs satisfying the following properties:
   [0117] They belong to the Not-TRE-ISO-RRF class;
   [0118] They also do not map elsewhere on the human genome;
   [0119] They map exactly (zero insertions, zero deletions, zero replacements) to sequences of microbial origin.

[0120] To help identify the bacterium that could be the of these short RNAs, the present study used the public database “SILVA”—described in Glöckner et al 25 years of serving the community with ribosomal RNA gene reference databases and tools, Journal of Biotechnology. 2017. Silva contains of 16S/18S and 23S/28S rRNA sequences from bacteria, archaea and eukarya. The present study focused on reads that receive a lot of support across many of the analyzed samples and mapped them to the rRNAs contained in the silva database. The present study found that in various combinations these reads map to the rRNAs of different organisms, e.g. bacteria from the phylum Verumicrohia and bacteria from the phylum Proteobacteria. One such example is the short RNA GUAAUGGCGGGAACUCUGGACAGACUGCCU (SEQ ID NO:1194) (see Tables 5A, 5B, and 5C) that has an exact match in an rRNA sequence from Veramicrobia.

[0121] Table 5B lists 349 short RNAs that emerge as statistically significant in the analyses and have exact matches (zero insertions, zero deletions, and zero replacements) to RNA from the genus Pelomonas.

[0122] Table 5C contains 838 short RNAs that have exact matches (zero insertions, zero deletions, and zero replacements) to rRNA from the SILVA database (matching rRNA from Pelomonas and other organisms) as well as emerged from the Fisher-Exact enrichment analysis as being statistically significant differences between Controls and ALS.

[0123] Table 5D contains an additional 111 molecules from those that were analyzed using the Fisher's Exact enrichment analysis and further satisfy the following criteria: their mean unnormalized abundance in either Controls or ALS is ≥10; their FDR ≤1.0 E-09; and, they are not already included in Table 5C. Tables 5C and 5D are non-exhaustive lists.

[0124] Because of these findings, it was believed that the microbiome and its fragments may aid in the diagnosis and prognosis of ALS and could be candidates for therapeutic exploration. From a prognosis perspective, a large number of these short RNAs associate significantly with survival and correlate with NfL.

[0125] Given their properties, many of which the present study enumerated above, the short RNAs that emerge from the analyses and are listed in Tables 3, 4, 5A, 5B, 5C, 5D and 6E hold the potential to serve as diagnostic or prognostic biomarkers. For the purpose they can be used in isolation or in groups of two or more molecules. Additionally, the short RNAs hold the potential to serve as candidate therapeutic targets.

[0126] It should be noted that many of the observations that result from the analyses of the 1^{st} collection of datasets (plasma samples—Example 2) hold for the 200 collection (serum samples—Example 2) discussed below, and many short RNAs are differentially abundant between controls and ALS patients in both collections.

[0127] Examples of association of different short RNAs with survival: A few examples of sequences that associate with ALS patient survival in a statistically significant manner are be presented in FIGS. 1A-1J.

### Example 2: Second of the Two Collections—GSE148097

About the data

[0128] The RNA-seq data of the second collection appear on NIH's Gene Expression Omnibus (GEO) under accession number GSE148097. Table 6 lists the 19 datasets that the present study analyzed, and associated information.

### Preprocessing of The Deep Sequencing Datasets

[0129] Unlike in Example 1, in Example 2, UMI-tools were not use because UMI tags were not utilized during library construction. Instead, sequencer reads were processed using the tool cutadapt described in Martin, Marcel, Cutadapt Removes Adapter Sequences From High-Throughput Sequencing Reads, EMBNetJ, 2011 (https://doi.org/10.14806/ej.17.1.200) in order to remove the sequencing adapters. An error rate of 12% was used with a quality cutoff of 15. As before, reads were discarded for further analysis if the 3′ adapter was not identified or if they were <15 nts.

### Mining of the Deep Sequencing Datasets

[0130] The present study preprocessed each raw dataset from Table 6 as outlined above. The present study profiled the short RNA in each dataset by focusing on the same four RNA classes as with the first collection: isomiRs; tRFs; rRFs, and Not-TRF-ISO-RRF short RNAs. The present study identified and quantified the short RNAs of each class similarly to how the first collection was analyzed: isoMiRmap was used to profile isomiRs; MINTmap was used to profile tRFs; the unpublished tool MINRmap was used to profile rRFs; and those short RNAs that received above-threshold support and remained after accounting for isomiRs, tRFs, and rRFs were labeled as “Not-TRF-ISO-RRF.”

### Method for Identifying Differentially Abundant Molecules

[0131] Mirroring what was done with the first collection, for each of the four RNA classes of interest, the present study used DESeq2 to identify those molecules that changed between ALS patients and healthy Controls. Molecules were discarded if they did not have a mean expression ≥5 reads in either the healthy Control or ALS patient groups. Raw reads were then normalized using DESeq2's defaults (based on median of ratios). The present study only considered differentially abundant short RNA whose absolute value of log fold change ≥0.4, and corresponding FDR ≤5.0E-02. Molecules were again discarded that did not have at least a mean expression (DESeq2 normalization) of 5 reads in either the Control or ALS groups.

[0132] The present study used DESeq2 to compare Healthy Controls with ALS patients.

### Statistics

[0133] In Table 7, statistics from the analyses of the 19 datasets of this second collection is described. These include: starting number of sequenced reads, reads remaining after adapter removal, reads mapping to known miRNAs, reads mapping to known tRNAs, etc.

Differential Abundance Results—Healthy Controls vs. ALS

[0134] The present study used DESeq2 to compare the profiles of each of the four classes of interest in controls (6 datasets) and ALS patients (13 datasets). The present study found a total of 255 short RNA sequences that satisfy the above thresholds: 6 isomiRs, 34 tRFs, 5 rRFs, and 210 short RNAs that cannot be classified as isomiR, tRF, or rRF. One of the 253 sequences appears under multiple annotations in public databases: GGGGAUGUAGCUCAGUGGUAGA (SEQ ID NO:66693) is a tRF from tRNA^{AlaCGC} and also listed as a miRNA in miRCarta Rel 1.1. This leaves 254 unique short RNA sequences.

[0135] Of the 255 short RNAs:
[0136] 3 isomiRs increase in ALS (compared to controls)
[0137] 3 isomiRs decrease in ALS (compared to controls)
[0138] 20 tRFs increase in ALS (compared to controls)
[0139] 14 tRFs decrease in ALS (compared to controls)
[0140] 2 rRFs increase in ALS (compared to controls)
[0141] 3 rRFs decrease in ALS (compared to controls)
[0142] 86 “other” short RNAs increase in ALS (compared to controls)
[0143] 124 “other” short RNAs decrease in ALS (compared to controls)

[0144] Table 8 shows a list of these molecules. These molecules, individually, or in combinations of two or more, can serve as biomarkers that can distinguish ALS patients from healthy individuals. The molecules could also serve as candidate therapeutic targets.

### Enumerated Embodiments

[0145] In some aspects, the present invention is directed to the following non-limiting embodiments:

[0146] Embodiment 1: A method for treating or preventing amyotrophic lateral sclerosis (ALS) in a subject in need thereof, the method comprising: isolating RNAs from a sample obtained from the subject, wherein the RNAs have a length of 100 nucleotides or less; characterizing the RNAs and their relative abundance in the sample to determine a signature. wherein the signature is indicative of presence or absence of ALS; and administering to the subject a treatment for ALS if the identified signature indicates presence of ALS.

[0147] Embodiment 2: The method of Embodiment 1, wherein: (a) the signature comprises at least one RNA selected from the group consisting of RNAs set forth in SEQ ID NOs: 1-711, 1481-1545, 65683-65745, 66521-66593, 66632-66674, and 66876-66986, and an increased level of the at least one RNA in comparison to a baseline level is indicative of presence of ALS, and/or (b) the signature comprises at least one RNA selected from the group consisting of RNAs set forth in SEQ ID NOs: 712-1480, 1546-1679, 65746-66520, 66594-66631, 66675-66875, and 66987-67130 and a decreased level of the at least one RNA in comparison to a base fine is Indicative of presence of ALS.

[0148] Embodiment 3: The method of Embodiment 1 or 2, wherein the sample is isolated from a cell, tissue or body fluid of the subject.

[0149] Embodiment 4; The method of any one of Embodiments 1-3, wherein the sample is isolated from a body fluid, and the body fluid is a plasma, a serum, a cerebrospinal fluid, of combinations thereof.

[0150] Embodiment 5: The method of any one of Embodiments 1-4, wherein the treatment for ALS comprises a glutamate blocker, a muscle relaxant, a physical therapy, or combinations thereof.

[0151] Embodiment 6: The method of Embodiment 5, wherein the treatment for ALS comprises the glutamate blocker, and wherein the glutamate blocker comprises riluzole.

[0152] Embodiment 7: The method of any one of Embodiments 1-6 further comprising treating the subject for a bacterial infection by a bacterium, wherein the signature comprises at least one RNA of the bacterium.

[0153] Embodiment 8: The method of Embodiment 7, wherein the bacterium is a Verumicrobia or a Proteobacteria.

[0154] Embodiment 9: The method of any one of Embodiments 7-8, wherein the treating for the infection comprises an antibiotic.

[0155] Embodiment 10: The method of any one of Embodiments 1-9, wherein the subject is a mammal.

[0156] Embodiment 11: The method of any one of Embodiments 1-10, wherein the subject is a human.

[0157] Embodiment 12: A method for determining speed of amyotrophic lateral sclerosis (ALS) progression in a subject in need thereof, the method comprising: isolating RNAs from a sample obtained from the subject, wherein the RNAs have length of 100 nucleotides or less; characterizing the RNAs and their relative abundance in the sample to identify a signature; wherein the signature is indicative of speed of ALS progression, and determining the speed of ALS progression to the subject based on the identified signature.

[0158] Embodiment 13: The method of Embodiment 12, wherein the signature comprises at least one RNA selected from the group consisting of RNAs set forth in SEQ ID NOs: 1680-2725, and wherein an altered level of the at least one RNA in comparison to a reference level is indicative of fast ALS progression.

[0159] Embodiment 14: A method for determining a stage of amyotrophic lateral sclerosis (ALS) in a subject, the method comprising: isolating RNAs from a sample obtained from the subject, wherein the RNAs have a length of 100 nucleotides or less; and characterizing the RNAs and their relative abundance in the sample to identify a signature, wherein the signature is indicative of a stage of ALS; and determining the stage of the ALS in the subject based on the identified signature.

[0160] Embodiment 15: The method of Embodiment 14, wherein the signature comprises at least one RNA selected from the group consisting of RNAs set forth in SEQ ID NOs: 2726-65054, and wherein an altered level of the at least one RNA in comparison to a reference level is indicative of a later stage of ALS.

[0161] Embodiment 16: The method of any one of Embodiments 12-15, wherein the sample is isolated from a cell, tissue or body fluid of the subject

[0162] Embodiment 17: The method of any one of Embodiments 12-16, wherein the sample is isolated from a body fluid, and the body fluid is a plasma, a serum, a cerebrospinal fluid, or combinations thereof.

[0163] Embodiment 18: The method of any one of Embodiments 12-17, wherein the subject is a mammal.

[0164] Embodiment 19: The method of any one of Embodiments 12-18, wherein the subject is a human.

[0165] The foregoing outlines features of several embodiments so that those skilled in the art may better understand the aspects of the present disclosure. Those skilled in the art should appreciate that they may readily use the present disclosure as a basis for designing or modifying other processes and structures for carrying out the same purposes and/or achieving the same advantages of the embodiments introduced herein. Those skilled in the art should also realize that such equivalent constructions do not depart from the spirit and scope of the present disclosure, and that they may make various changes, substitutions, and alterations herein without departing from the spirit and scope of the present disclosure.

Lengthy table referenced here
US20250297309A1-20250925-T00001
Please refer to the end of the specification for access instructions.

Lengthy table referenced here
US20250297309A1-20250925-T00002
Please refer to the end of the specification for access instructions.

Lengthy table referenced here
US20250297309A1-20250925-T00003
Please refer to the end of the specification for access instructions.

Lengthy table referenced here
US20250297309A1-20250925-T00004
Please refer to the end of the specification for access instructions.

Lengthy table referenced here
US20250297309A1-20250925-T00005
Please refer to the end of the specification for access instructions.

Lengthy table referenced here
US20250297309A1-20250925-T00006
Please refer to the end of the specification for access instructions.

Lengthy table referenced here
US20250297309A1-20250925-T00007
Please refer to the end of the specification for access instructions.

Lengthy table referenced here
US20250297309A1-20250925-T00008
Please refer to the end of the specification for access instructions.

Lengthy table referenced here
US20250297309A1-20250925-T00009
Please refer to the end of the specification for access instructions.

Lengthy table referenced here
US20250297309A1-20250925-T00010
Please refer to the end of the specification for access instructions.

Lengthy table referenced here
US20250297309A1-20250925-T00011
Please refer to the end of the specification for access instructions.

Lengthy table referenced here
US20250297309A1-20250925-T00012
Please refer to the end of the specification for access instructions.

Lengthy table referenced here
US20250297309A1-20250925-T00013
Please refer to the end of the specification for access instructions.

Lengthy table referenced here
US20250297309A1-20250925-T00014
Please refer to the end of the specification for access instructions.

LENGTHY TABLES
The patent application contains a lengthy table section. A copy of the table is available in electronic form from the USPTO web site (https://seqdata.uspto.gov/?pageRequest=docDetail&DocID=US20250297309A1). An electronic copy of the table will also be available from the USPTO upon request and payment of the fee set forth in 37 CFR 1.19(b)(3).

The application's sequence listing, which the Patent Office published only in electronic form, follows.

SEQUENCE LISTING (67130 sequences)

SEQ ID NO: 1 - RNA, 20 nt, Synthetic Construct
  source 1..20: mol_type = other RNA
gcatggccgttcttagttgg

SEQ ID NO: 2 - RNA, 19 nt, Synthetic Construct
  source 1..19: mol_type = other RNA
catggccgttcttagttgg

SEQ ID NO: 3 - RNA, 22 nt, Synthetic Construct
  source 1..22: mol_type = other RNA
gtgcatggccgttcttagttgg

SEQ ID NO: 4 - RNA, 16 nt, Synthetic Construct
  source 1..16: mol_type = other RNA
ggccgttcttagttgg

SEQ ID NO: 5 - RNA, 16 nt, Synthetic Construct
  source 1..16: mol_type = other RNA
gtctacggccatacca

SEQ ID NO: 6 - RNA, 27 nt, Synthetic Construct
  source 1..27: mol_type = other RNA
cgcgggtaaacggcgggagtaactatg

SEQ ID NO: 7 - RNA, 22 nt, Synthetic Construct
  source 1..22: mol_type = other RNA
gtaaacggcgggagtaactatg

SEQ ID NO: 8 - RNA, 20 nt, Synthetic Construct
  source 1..20: mol_type = other RNA
aaacggcgggagtaactatg

SEQ ID NO: 9 - RNA, 21 nt, Synthetic Construct
  source 1..21: mol_type = other RNA
taaacggcgggagtaactatg

SEQ ID NO: 10 - RNA, 17 nt, Synthetic Construct
  source 1..17: mol_type = other RNA
aagacgatcagataccg

SEQ ID NO: 11 - RNA, 16 nt, Synthetic Construct
  source 1..16: mol_type = other RNA
ttccggggggagtatg

SEQ ID NO: 12 - RNA, 17 nt, Synthetic Construct
  source 1..17: mol_type = other RNA
gttcgattccggagagg

SEQ ID NO: 13 - RNA, 25 nt, Synthetic Construct
  source 1..25: mol_type = other RNA
cgggtaaacggcgggagtaactatg

SEQ ID NO: 14 - RNA, 22 nt, Synthetic Construct
  source 1..22: mol_type = other RNA
gctttttgatccttcgatgtcg

SEQ ID NO: 15 - RNA, 16 nt, Synthetic Construct
  source 1..16: mol_type = other RNA
taactatgactctctt

SEQ ID NO: 16 - RNA, 28 nt, Synthetic Construct
  source 1..28: mol_type = other RNA
gcgcgggtaaacggcgggagtaactatg

SEQ ID NO: 17 - RNA, 18 nt, Synthetic Construct
  source 1..18: mol_type = other RNA
ggttccggggggagtatg

SEQ ID NO: 18 - RNA, 17 nt, Synthetic Construct
  source 1..17: mol_type = other RNA
tggccgttcttagttgg

SEQ ID NO: 19 - RNA, 17 nt, Synthetic Construct
  source 1..17: mol_type = other RNA
gcaataacaggtctgtg

SEQ ID NO: 20 - RNA, 36 nt, Synthetic Construct
  source 1..36: mol_type = other RNA
atctattgaaagtcagccctcgacacaagggtttgt

SEQ ID NO: 21 - RNA, 18 nt, Synthetic Construct
  source 1..18: mol_type = other RNA
atggccgttcttagttgg

SEQ ID NO: 22 - RNA, 19 nt, Synthetic Construct
  source 1..19: mol_type = other RNA
acggaagggcaccaccagg

SEQ ID NO: 23 - RNA, 19 nt, Synthetic Construct
  source 1..19: mol_type = other RNA
gaagaccctgttgagcttg

SEQ ID NO: 24 - RNA, 19 nt, Synthetic Construct
  source 1..19: mol_type = other RNA
aacggcgggagtaactatg

SEQ ID NO: 25 - RNA, 35 nt, Synthetic Construct
  source 1..35: mol_type = other RNA
tctattgaaagtcagccctcgacacaagggtttgt

SEQ ID NO: 26 - RNA, 17 nt, Synthetic Construct
  source 1..17: mol_type = other RNA
aagcgaatgattagagg

SEQ ID NO: 27 - RNA, 18 nt, Synthetic Construct
  source 1..18: mol_type = other RNA
gggataactggcttgtgg

SEQ ID NO: 28 - RNA, 16 nt, Synthetic Construct
  source 1..16: mol_type = other RNA
ggcgggagtaactatg

SEQ ID NO: 29 - RNA, 16 nt, Synthetic Construct
  source 1..16: mol_type = other RNA
agacgatcagataccg

SEQ ID NO: 30 - RNA, 16 nt, Synthetic Construct
  source 1..16: mol_type = other RNA
ccgttcttagttggtg

SEQ ID NO: 31 - RNA, 16 nt, Synthetic Construct
  source 1..16: mol_type = other RNA
cgtgagctgggtttag

SEQ ID NO: 32 - RNA, 24 nt, Synthetic Construct
  source 1..24: mol_type = other RNA
cgggcctggttagtacttggatgg

SEQ ID NO: 33 - RNA, 24 nt, Synthetic Construct
  source 1..24: mol_type = other RNA
caggacggtggccatggaagtcgg

SEQ ID NO: 34 - RNA, 17 nt, Synthetic Construct
  source 1..17: mol_type = other RNA
acgtgagctgggtttag

SEQ ID NO: 35 - RNA, 20 nt, Synthetic Construct
  source 1..20: mol_type = other RNA
ctcgtagttggatcttggga

SEQ ID NO: 36 - RNA, 23 nt, Synthetic Construct
  source 1..23: mol_type = other RNA
ggtaaacggcgggagtaactatg

SEQ ID NO: 37 - RNA, 17 nt, Synthetic Construct
  source 1..17: mol_type = other RNA
agaccctgttgagcttg

SEQ ID NO: 38 - RNA, 17 nt, Synthetic Construct
  source 1..17: mol_type = other RNA
ttggagggcaagtctgg

SEQ ID NO: 39 - RNA, 27 nt, Synthetic Construct
  source 1..27: mol_type = other RNA
cgcgacctcagatcagacgtggcgacc

SEQ ID NO: 40 - RNA, 19 nt, Synthetic Construct
  source 1..19: mol_type = other RNA
gggttcgattccggagagg

SEQ ID NO: 41 - RNA, 16 nt, Synthetic Construct
  source 1..16: mol_type = other RNA
tacacaccgcccgtcg

SEQ ID NO: 42 - RNA, 17 nt, Synthetic Construct
  source 1..17: mol_type = other RNA
tagggaacgtgagctgg

SEQ ID NO: 43 - RNA, 16 nt, Synthetic Construct
  source 1..16: mol_type = other RNA
agcgaatgattagagg

SEQ ID NO: 44 - RNA, 16 nt, Synthetic Construct
  source 1..16: mol_type = other RNA
tagggaacgtgagctg

SEQ ID NO: 45 - RNA, 15 nt, Synthetic Construct
  source 1..15: mol_type = other RNA
tcctgacggccatag

SEQ ID NO: 46 - RNA, 21 nt, Synthetic Construct
  source 1..21: mol_type = other RNA
ngaggtagtaggttgtgtggt

SEQ ID NO: 47 - RNA, 22 nt, Synthetic Construct
  source 1..22: mol_type = other RNA
ngaggtagtaggttgtgtggtt

SEQ ID NO: 48 - RNA, 22 nt, Synthetic Construct
  source 1..22: mol_type = other RNA
agagttctacagtccgacgatc

SEQ ID NO: 49 - RNA, 22 nt, Synthetic Construct
  source 1..22: mol_type = other RNA
tgaggaagtaggttgtgtggtt

SEQ ID NO: 50 - RNA, 21 nt, Synthetic Construct
  source 1..21: mol_type = other RNA
tgaggaagtaggttgtgtggt

SEQ ID NO: 51 - RNA, 21 nt, Synthetic Construct
  source 1..21: mol_type = other RNA
tgaggtaataggttgtgtggt

SEQ ID NO: 52 - RNA, 23 nt, Synthetic Construct
  source 1..23: mol_type = other RNA
cagagttctacagtccgacgatc

SEQ ID NO: 53 - RNA, 20 nt, Synthetic Construct
  source 1..20: mol_type = other RNA
tgaggaagtaggttgtgtgg

SEQ ID NO: 54 - RNA, 22 nt, Synthetic Construct
  source 1..22: mol_type = other RNA
gaagaggacttggaactcgatc

SEQ ID NO: 55 - RNA, 23 nt, Synthetic Construct
  source 1..23: mol_type = other RNA
tggaaatacgacgtacttagtgt

SEQ ID NO: 56 - RNA, 21 nt, Synthetic Construct
  source 1..21: mol_type = other RNA
tggggtagtaggttgtgtggt

SEQ ID NO: 57 - RNA, 21 nt, Synthetic Construct
  source 1..21: mol_type = other RNA
cgaggtagtaggttgtgtggt

SEQ ID NO: 58 - RNA, 22 nt, Synthetic Construct
  source 1..22: mol_type = other RNA
gaagaggacttggagctcgatc

SEQ ID NO: 59 - RNA, 21 nt, Synthetic Construct
  source 1..21: mol_type = other RNA
tgaggtagtaggttatgtggt

SEQ ID NO: 60 - RNA, 23 nt, Synthetic Construct
  source 1..23: mol_type = other RNA
aggtaatacgacgtacttagtgt

SEQ ID NO: 61 - RNA, 21 nt, Synthetic Construct
  source 1..21: mol_type = other RNA
tgaggtagtaggctgtgtggt

SEQ ID NO: 62 - RNA, 21 nt, Synthetic Construct
  source 1..21: mol_type = other RNA
tgaggtagtaggtcgtgtggt

SEQ ID NO: 63 - RNA, 21 nt, Synthetic Construct
  source 1..21: mol_type = other RNA
tgaggtagtaggttgtgcggt

SEQ ID NO: 64 - RNA, 21 nt, Synthetic Construct
  source 1..21: mol_type = other RNA
tgaggtagtaggttgcgtggt

SEQ ID NO: 65 - RNA, 21 nt, Synthetic Construct
  source 1..21: mol_type = other RNA
tgaggtagcaggttgtgtggt

SEQ ID NO: 66 - RNA, 22 nt, Synthetic Construct
  source 1..22: mol_type = other RNA
tggggtagtaggttgtgtggtt

SEQ ID NO: 67 - RNA, 20 nt, Synthetic Construct
  source 1..20: mol_type = other RNA
agttctacagtccgacgatc

SEQ ID NO: 68 - RNA, 23 nt, Synthetic Construct
  source 1..23: mol_type = other RNA
tgaggaagtaggttgtgtggttt

SEQ ID NO: 69 - RNA, 22 nt, Synthetic Construct
  source 1..22: mol_type = other RNA
cgaggtagtaggttgtgtggtt

SEQ ID NO: 70 - RNA, 22 nt, Synthetic Construct
  source 1..22: mol_type = other RNA
tgaggtagtaggctgtgtggtt

SEQ ID NO: 71 - RNA, 22 nt, Synthetic Construct
  source 1..22: mol_type = other RNA
tgaggtagtaggttgcgtggtt

SEQ ID NO: 72 - RNA, 25 nt, Synthetic Construct
  source 1..25: mol_type = other RNA
gtgaggatatgagatcgagacgaca

SEQ ID NO: 73 - RNA, 22 nt, Synthetic Construct
  source 1..22: mol_type = other RNA
tgaggtagtaggtcgtgtggtt

SEQ ID NO: 74 - RNA, 21 nt, Synthetic Construct
  source 1..21: mol_type = other RNA
tgaggtagtagattgtgtggt

SEQ ID NO: 75 - RNA, 19 nt, Synthetic Construct
  source 1..19: mol_type = other RNA
gttctacagtccgacgatc

SEQ ID NO: 76 - RNA, 21 nt, Synthetic Construct
  source 1..21: mol_type = other RNA
tgaggtggtaggttgtgtggt

SEQ ID NO: 77 - RNA, 21 nt, Synthetic Construct
  source 1..21: mol_type = other RNA
tgaggcagtaggttgtgtggt

SEQ ID NO: 78 - RNA, 21 nt, Synthetic Construct
  source 1..21: mol_type = other RNA
tgaggtagtgggttgtgtggt

SEQ ID NO: 79 - RNA, 21 nt, Synthetic Construct
  source 1..21: mol_type = other RNA
cgaggggcagagagcgagact

SEQ ID NO: 80 - RNA, 25 nt, Synthetic Construct
  source 1..25: mol_type = other RNA
ttgaggatatgaggtcgagacgaca

SEQ ID NO: 81 - RNA, 16 nt, Synthetic Construct
  source 1..16: mol_type = other RNA
gtcaacggccatacca

SEQ ID NO: 82 - RNA, 22 nt, Synthetic Construct
  source 1..22: mol_type = other RNA
tgaggtagcaggttgtgtggtt

SEQ ID NO: 83 - RNA, 23 nt, Synthetic Construct
  source 1..23: mol_type = other RNA
tggcaatacgacgtacttagtgt

SEQ ID NO: 84 - RNA, 25 nt, Synthetic Construct
  source 1..25: mol_type = other RNA
ttgagggtatgagatcgagacgaca

SEQ ID NO: 85 - RNA, 18 nt, Synthetic Construct
  source 1..18: mol_type = other RNA
ttctacagtccgacgatc

SEQ ID NO: 86 - RNA, 25 nt, Synthetic Construct
  source 1..25: mol_type = other RNA
ttggggatatgagatcgagacgaca

SEQ ID NO: 87 - RNA, 21 nt, Synthetic Construct
  source 1..21: mol_type = other RNA
ggaggtagtaggttgtgtggt

SEQ ID NO: 88 - RNA, 21 nt, Synthetic Construct
  source 1..21: mol_type = other RNA
tgaggtagtaggttgtgtgat

SEQ ID NO: 89 - RNA, 21 nt, Synthetic Construct
  source 1..21: mol_type = other RNA
taaggtagtaggttgtgtggt

SEQ ID NO: 90 - RNA, 22 nt, Synthetic Construct
  source 1..22: mol_type = other RNA
ngaggtagtagtttgtgctgtt

SEQ ID NO: 91 - RNA, 25 nt, Synthetic Construct
  source 1..25: mol_type = other RNA
ctgaggatatgagatcgagacgaca

SEQ ID NO: 92 - RNA, 22 nt, Synthetic Construct
  source 1..22: mol_type = other RNA
tgaggtggtaggttgtgtggtt

SEQ ID NO: 93 - RNA, 22 nt, Synthetic Construct
  source 1..22: mol_type = other RNA
tgggatgtaaagaagtatgtat

SEQ ID NO: 94 - RNA, 23 nt, Synthetic Construct
  source 1..23: mol_type = other RNA
tggtaatacggcgtacttagtgt

SEQ ID NO: 95 - RNA, 25 nt, Synthetic Construct
  source 1..25: mol_type = other RNA
ttgaggatatgagatcgagacaaca

SEQ ID NO: 96 - RNA, 22 nt, Synthetic Construct
  source 1..22: mol_type = other RNA
tggaatgtaaggaagtatgtat

SEQ ID NO: 97 - RNA, 22 nt, Synthetic Construct
  source 1..22: mol_type = other RNA
tgaggaagtagtttgtgctgtt

SEQ ID NO: 98 - RNA, 25 nt, Synthetic Construct
  source 1..25: mol_type = other RNA
ttgaggatatgagatcgagacgacg

SEQ ID NO: 99 - RNA, 23 nt, Synthetic Construct
  source 1..23: mol_type = other RNA
gggtaatacgacgtacttagtgt

SEQ ID NO: 100 - RNA, 22 nt, Synthetic Construct
  source 1..22: mol_type = other RNA
tggaatgtagagaagtatgtat

SEQ ID NO: 101 - RNA, 22 nt, Synthetic Construct
  source 1..22: mol_type = other RNA
ncctgtactgagctgccccgag

SEQ ID NO: 102 - RNA, 21 nt, Synthetic Construct
  source 1..21: mol_type = other RNA
tgaggtagaaggttgtgtggt

SEQ ID NO: 103 - RNA, 21 nt, Synthetic Construct
  source 1..21: mol_type = other RNA
tgagatagtaggttgtgtggt

SEQ ID NO: 104 - RNA, 25 nt, Synthetic Construct
  source 1..25: mol_type = other RNA
ttgaggatatgggatcgagacgaca

SEQ ID NO: 105 - RNA, 22 nt, Synthetic Construct
  source 1..22: mol_type = other RNA
tcctgaactgagctgccccgag

SEQ ID NO: 106 - RNA, 22 nt, Synthetic Construct
  source 1..22: mol_type = other RNA
tggagtgtaaagaagtatgtat

SEQ ID NO: 107 - RNA, 23 nt, Synthetic Construct
  source 1..23: mol_type = other RNA
tggtaatacgacgtacttagcgt

SEQ ID NO: 108 - RNA, 22 nt, Synthetic Construct
  source 1..22: mol_type = other RNA
tgaggtagtaggttgtgtggct

SEQ ID NO: 109 - RNA, 23 nt, Synthetic Construct
  source 1..23: mol_type = other RNA
tggtaacacgacgtacttagtgt

SEQ ID NO: 110 - RNA, 21 nt, Synthetic Construct
  source 1..21: mol_type = other RNA
tgaggtagtaggttgagtggt

SEQ ID NO: 111 - RNA, 22 nt, Synthetic Construct
  source 1..22: mol_type = other RNA
tgaggtagtaggttgtgcggtt

SEQ ID NO: 112 - RNA, 21 nt, Synthetic Construct
  source 1..21: mol_type = other RNA
gagttctacagtccgacgatc

SEQ ID NO: 113 - RNA, 20 nt, Synthetic Construct
  source 1..20: mol_type = other RNA
tgaggtagtaggtcgtgtgg

SEQ ID NO: 114 - RNA, 21 nt, Synthetic Construct
  source 1..21: mol_type = other RNA
tgaagtagtaggttgtgtggt

SEQ ID NO: 115 - RNA, 16 nt, Synthetic Construct
  source 1..16: mol_type = other RNA
ctacagtccgacgatc

SEQ ID NO: 116 - RNA, 22 nt, Synthetic Construct
  source 1..22: mol_type = other RNA
tggaatgtaaagaggtatgtat

SEQ ID NO: 117 - RNA, 20 nt, Synthetic Construct
  source 1..20: mol_type = other RNA
tgaggtagtaggttgcgtgg

SEQ ID NO: 118 - RNA, 23 nt, Synthetic Construct
  source 1..23: mol_type = other RNA
tggtaatacgacgtacttagtgc

SEQ ID NO: 119 - RNA, 21 nt, Synthetic Construct
  source 1..21: mol_type = other RNA
tgaggtagtaagttgtgtggt

SEQ ID NO: 120 - RNA, 23 nt, Synthetic Construct
  source 1..23: mol_type = other RNA
tggtgatacgacgtacttagtgt

SEQ ID NO: 121 - RNA, 23 nt, Synthetic Construct
  source 1..23: mol_type = other RNA
tggtaatacgacgtacctagtgt

SEQ ID NO: 122 - RNA, 22 nt, Synthetic Construct
  source 1..22: mol_type = other RNA
tgaggtagtgggttgtgtggtt

SEQ ID NO: 123 - RNA, 17 nt, Synthetic Construct
  source 1..17: mol_type = other RNA
tctacagtccgacgatc

SEQ ID NO: 124 - RNA, 20 nt, Synthetic Construct
  source 1..20: mol_type = other RNA
cgaggtagtaggttgtgtgg

SEQ ID NO: 125 - RNA, 20 nt, Synthetic Construct
  source 1..20: mol_type = other RNA
tgaggtggtaggttgtgtgg

SEQ ID NO: 126 - RNA, 25 nt, Synthetic Construct
  source 1..25: mol_type = other RNA
ttgaggatatgagatcgagacggca

SEQ ID NO: 127 - RNA, 22 nt, Synthetic Construct
  source 1..22: mol_type = other RNA
tgaggcagtaggttgtgtggtt

SEQ ID NO: 128 - RNA, 23 nt, Synthetic Construct
  source 1..23: mol_type = other RNA
cggtaatacgacgtacttagtgt

SEQ ID NO: 129 - RNA, 20 nt, Synthetic Construct
  source 1..20: mol_type = other RNA
tgaggtagtaggctgtgtgg

SEQ ID NO: 130 - RNA, 25 nt, Synthetic Construct
  source 1..25: mol_type = other RNA
ttgaggatatgagatcgaggcgaca

SEQ ID NO: 131 - RNA, 15 nt, Synthetic Construct
  source 1..15: mol_type = other RNA
tacagtccgacgatc

SEQ ID NO: 132 - RNA, 25 nt, Synthetic Construct
  source 1..25: mol_type = other RNA
ttgaggatatgagatcgggacgaca

SEQ ID NO: 133 - RNA, 20 nt, Synthetic Construct
  source 1..20: mol_type = other RNA
tggggtagtaggttgtgtgg

SEQ ID NO: 134 - RNA, 22 nt, Synthetic Construct
  source 1..22: mol_type = other RNA
tgaggtagtaggttatgtggtt

SEQ ID NO: 135 - RNA, 22 nt, Synthetic Construct
  source 1..22: mol_type = other RNA
nagcagcacgtaaatattggcg

SEQ ID NO: 136 - RNA, 22 nt, Synthetic Construct
  source 1..22: mol_type = other RNA
ngaggtagtaggttgtatagtt

SEQ ID NO: 137 - RNA, 20 nt, Synthetic Construct
  source 1..20: mol_type = other RNA
tgaggtagcaggttgtgtgg

SEQ ID NO: 138 - RNA, 23 nt, Synthetic Construct
  source 1..23: mol_type = other RNA
tggtagtacgacgtacttagtgt

SEQ ID NO: 139 - RNA, 20 nt, Synthetic Construct
  source 1..20: mol_type = other RNA
tgaggtagtaggttgtgcgg

SEQ ID NO: 140 - RNA, 22 nt, Synthetic Construct
  source 1..22: mol_type = other RNA
tgaggtagtaggttgtgtgatt

SEQ ID NO: 141 - RNA, 23 nt, Synthetic Construct
  source 1..23: mol_type = other RNA
tcctgaactgagctgccccgagt

SEQ ID NO: 142 - RNA, 21 nt, Synthetic Construct
  source 1..21: mol_type = other RNA
tgaggggcggagagcgagact

SEQ ID NO: 143 - RNA, 23 nt, Synthetic Construct
  source 1..23: mol_type = other RNA
tggtaatgcgacgtacttagtgt

SEQ ID NO: 144 - RNA, 25 nt, Synthetic Construct
  source 1..25: mol_type = other RNA
ttgaggatatgagatcgagacgaca

SEQ ID NO: 145 - RNA, 22 nt, Synthetic Construct
  source 1..22: mol_type = other RNA
tgaggtagtaagttgtgtggtt

SEQ ID NO: 146 - RNA, 23 nt, Synthetic Construct
  source 1..23: mol_type = other RNA
tggtaatacgacgtgcttagtgt

SEQ ID NO: 147 - RNA, 20 nt, Synthetic Construct
  source 1..20: mol_type = other RNA
tgaggtagtgggttgtgtgg

SEQ ID NO: 148 - RNA, 23 nt, Synthetic Construct
  source 1..23: mol_type = other RNA
tggtaatacgacgtactcagtgt

SEQ ID NO: 149 - RNA, 23 nt, Synthetic Construct
  source 1..23: mol_type = other RNA
tcctgaactgagctgccccgaga

SEQ ID NO: 150 - RNA, 20 nt, Synthetic Construct
  source 1..20: mol_type = other RNA
tgaggcagtaggttgtgtgg

SEQ ID NO: 151 - RNA, 21 nt, Synthetic Construct
  source 1..21: mol_type = other RNA
tgaggtagtaggatgtgtggt

SEQ ID NO: 152 - RNA, 23 nt, Synthetic Construct
  source 1..23: mol_type = other RNA
tggtaatacgatgtacttagtgt

SEQ ID NO: 153 - RNA, 16 nt, Synthetic Construct
  source 1..16: mol_type = other RNA
gtccacggccatacca

SEQ ID NO: 154 - RNA, 23 nt, Synthetic Construct
  source 1..23: mol_type = other RNA
tggtaatacgacgtacttggtgt

SEQ ID NO: 155 - RNA, 23 nt, Synthetic Construct
  source 1..23: mol_type = other RNA
tggtaatacgacgcacttagtgt

SEQ ID NO: 156 - RNA, 22 nt, Synthetic Construct
  source 1..22: mol_type = other RNA
tgagatagtaggttgtgtggtt

SEQ ID NO: 157 - RNA, 22 nt, Synthetic Construct
  source 1..22: mol_type = other RNA
tgaggtaataggttgtgtggtt

SEQ ID NO: 158 - RNA, 22 nt, Synthetic Construct
  source 1..22: mol_type = other RNA
ngaggtagtagattgtatagtt

SEQ ID NO: 159 - RNA, 22 nt, Synthetic Construct
  source 1..22: mol_type = other RNA
tgaggtagtaggttgtgttgtt

SEQ ID NO: 160 - RNA, 22 nt, Synthetic Construct
  source 1..22: mol_type = other RNA
ggaggtagtaggttgtgtggtt

SEQ ID NO: 161 - RNA, 32 nt, Synthetic Construct
  source 1..32: mol_type = other RNA
ggctggtccgatggtagtgggttatcagaact

SEQ ID NO: 162 - RNA, 22 nt, Synthetic Construct
  source 1..22: mol_type = other RNA
tgaggaagtaggttgtatagtt

SEQ ID NO: 163 - RNA, 22 nt, Synthetic Construct
  source 1..22: mol_type = other RNA
tgaggtagtagattgtgtggtt

SEQ ID NO: 164 - RNA, 16 nt, Synthetic Construct
  source 1..16: mol_type = other RNA
gcctacggccatacca

SEQ ID NO: 165 - RNA, 20 nt, Synthetic Construct
  source 1..20: mol_type = other RNA
tgaggaagtaggttgtatag

SEQ ID NO: 166 - RNA, 22 nt, Synthetic Construct
  source 1..22: mol_type = other RNA
nattgcacttgtcccggcctgt

SEQ ID NO: 167 - RNA, 23 nt, Synthetic Construct
  source 1..23: mol_type = other RNA
tgaggggcagagagcgagactct

SEQ ID NO: 168 - RNA, 23 nt, Synthetic Construct
  source 1..23: mol_type = other RNA
tggtaatatgacgtacttagtgt

SEQ ID NO: 169 - RNA, 21 nt, Synthetic Construct
  source 1..21: mol_type = other RNA
tgaggggcagagagcgggact

SEQ ID NO: 170 - RNA, 22 nt, Synthetic Construct
  source 1..22: mol_type = other RNA
tccagtactgagctgccccgag

SEQ ID NO: 171 - RNA, 21 nt, Synthetic Construct
  source 1..21: mol_type = other RNA
tgaggaagtaggttgtatagt

SEQ ID NO: 172 - RNA, 22 nt, Synthetic Construct
  source 1..22: mol_type = other RNA
taaggtagtaggttgtgtggtt

SEQ ID NO: 173 - RNA, 21 nt, Synthetic Construct
  source 1..21: mol_type = other RNA
tgaggggcagagagcgaggct

SEQ ID NO: 174 - RNA, 23 nt, Synthetic Construct
  source 1..23: mol_type = other RNA
caaagagctgttcgtgcaggtag

SEQ ID NO: 175 - RNA, 23 nt, Synthetic Construct
  source 1..23: mol_type = other RNA
tagtaatacgacgtacttagtgt

SEQ ID NO: 176 - RNA, 21 nt, Synthetic Construct
  source 1..21: mol_type = other RNA
tcctgaactgagctgccccga

SEQ ID NO: 177 - RNA, 21 nt, Synthetic Construct
  source 1..21: mol_type = other RNA
tgaggggcagagggcgagact

SEQ ID NO: 178 - RNA, 21 nt, Synthetic Construct
  source 1..21: mol_type = other RNA
agaggtagtaggttgtgtggt

SEQ ID NO: 179 - RNA, 23 nt, Synthetic Construct
  source 1..23: mol_type = other RNA
cgaggggcagagagcgagacttt

SEQ ID NO: 180 - RNA, 22 nt, Synthetic Construct
  source 1..22: mol_type = other RNA
tgaggtagaaggttgtgtggtt

SEQ ID NO: 181 - RNA, 20 nt, Synthetic Construct
  source 1..20: mol_type = other RNA
tgaggtagtaggctgtatag

SEQ ID NO: 182 - RNA, 23 nt, Synthetic Construct
  source 1..23: mol_type = other RNA
tggtaataagacgtacttagtgt

SEQ ID NO: 183 - RNA, 23 nt, Synthetic Construct
  source 1..23: mol_type = other RNA
tggtaatacgacatacttagtgt

SEQ ID NO: 184 - RNA, 23 nt, Synthetic Construct
  source 1..23: mol_type = other RNA
tccagtactgagctgccccgaga

SEQ ID NO: 185 - RNA, 21 nt, Synthetic Construct
  source 1..21: mol_type = other RNA
tgaggtagtaggttgtgaggt

SEQ ID NO: 186 - RNA, 23 nt, Synthetic Construct
  source 1..23: mol_type = other RNA
tgaggggcagagagcgagacctt

SEQ ID NO: 187 - RNA, 20 nt, Synthetic Construct
  source 1..20: mol_type = other RNA
ggaggtagtaggttgtgtgg

SEQ ID NO: 188 - RNA, 22 nt, Synthetic Construct
  source 1..22: mol_type = other RNA
tgaagtagtaggttgtgtggtt

SEQ ID NO: 189 - RNA, 23 nt, Synthetic Construct
  source 1..23: mol_type = other RNA
tccagtactgagctgccccgagt

SEQ ID NO: 190 - RNA, 16 nt, Synthetic Construct
  source 1..16: mol_type = other RNA
gtctacggccacacca

SEQ ID NO: 191 - RNA, 23 nt, Synthetic Construct
  source 1..23: mol_type = other RNA
tgaggggcggagagcgagacttt

SEQ ID NO: 192 - RNA, 23 nt, Synthetic Construct
  source 1..23: mol_type = other RNA
tggtaatacaacgtacttagtgt

SEQ ID NO: 193 - RNA, 20 nt, Synthetic Construct
  source 1..20: mol_type = other RNA
tggggtagtaggttgtatag

SEQ ID NO: 194 - RNA, 21 nt, Synthetic Construct
  source 1..21: mol_type = other RNA
tgaggaagtagattgtatagt

SEQ ID NO: 195 - RNA, 20 nt, Synthetic Construct
  source 1..20: mol_type = other RNA
tgaggtagtaggttgtacag

SEQ ID NO: 196 - RNA, 23 nt, Synthetic Construct
  source 1..23: mol_type = other RNA
tggggggcagagagcgagacttt

SEQ ID NO: 197 - RNA, 23 nt, Synthetic Construct
  source 1..23: mol_type = other RNA
tggtaatacgacgtactaagtgt

SEQ ID NO: 198 - RNA, 23 nt, Synthetic Construct
  source 1..23: mol_type = other RNA
tggtaatacgacgtacttagtat

SEQ ID NO: 199 - RNA, 20 nt, Synthetic Construct
  source 1..20: mol_type = other RNA
tgaggtagtaggtcgtatag

SEQ ID NO: 200 - RNA, 23 nt, Synthetic Construct
  source 1..23: mol_type = other RNA
tgaggggcagggagcgagacttt

SEQ ID NO: 201 - RNA, 20 nt, Synthetic Construct
  source 1..20: mol_type = other RNA
cgaggtagtaggttgtatag

SEQ ID NO: 202 - RNA, 23 nt, Synthetic Construct
  source 1..23: mol_type = other RNA
ccctgtactgagctgccccgaga

SEQ ID NO: 203 - RNA, 23 nt, Synthetic Construct
  source 1..23: mol_type = other RNA
cgaggtagtaggttgtgtggttt

SEQ ID NO: 204 - RNA, 16 nt, Synthetic Construct
  source 1..16: mol_type = other RNA
gtctgcggccatacca

SEQ ID NO: 205 - RNA, 16 nt, Synthetic Construct
  source 1..16: mol_type = other RNA
gtctacggccgtacca

SEQ ID NO: 206 - RNA, 23 nt, Synthetic Construct
  source 1..23: mol_type = other RNA
tgaggggcagagagcaagacttt

SEQ ID NO: 207 - RNA, 22 nt, Synthetic Construct
  source 1..22: mol_type = other RNA
tgaggtagtaggttgagtggtt

SEQ ID NO: 208 - RNA, 23 nt, Synthetic Construct
  source 1..23: mol_type = other RNA
tgaggcagtaggttgtgtggttt

SEQ ID NO: 209 - RNA, 23 nt, Synthetic Construct
  source 1..23: mol_type = other RNA
tgataatacgacgtacttagtgt

SEQ ID NO: 210 - RNA, 16 nt, Synthetic Construct
  source 1..16: mol_type = other RNA
gtctacggccataccg

SEQ ID NO: 211 - RNA, 23 nt, Synthetic Construct
  source 1..23: mol_type = other RNA
tgaggggcagagagcgggacttt

SEQ ID NO: 212 - RNA, 21 nt, Synthetic Construct
  source 1..21: mol_type = other RNA
tccagtactgagctgccccga

SEQ ID NO: 213 - RNA, 20 nt, Synthetic Construct
  source 1..20: mol_type = other RNA
tgaggtagcaggttgtatag

SEQ ID NO: 214 - RNA, 23 nt, Synthetic Construct
  source 1..23: mol_type = other RNA
tcctgtaccgagctgccccgagt

SEQ ID NO: 215 - RNA, 23 nt, Synthetic Construct
  source 1..23: mol_type = other RNA
tggtaatacgacgtacttaatgt

SEQ ID NO: 216 - RNA, 22 nt, Synthetic Construct
  source 1..22: mol_type = other RNA
tgaggaagtagattgtatagtt

SEQ ID NO: 217 - RNA, 16 nt, Synthetic Construct
  source 1..16: mol_type = other RNA
gtctacagccatacca

SEQ ID NO: 218 - RNA, 24 nt, Synthetic Construct
  source 1..24: mol_type = other RNA
gaggtgtagaataggtgggagctt

SEQ ID NO: 219 - RNA, 21 nt, Synthetic Construct
  source 1..21: mol_type = other RNA
ggaggggcagagagcgagact

SEQ ID NO: 220 - RNA, 20 nt, Synthetic Construct
  source 1..20: mol_type = other RNA
tgaggtggtaggttgtatag

SEQ ID NO: 221 - RNA, 23 nt, Synthetic Construct
  source 1..23: mol_type = other RNA
tgaggggcagagagtgagacttt

SEQ ID NO: 222 - RNA, 23 nt, Synthetic Construct
  source 1..23: mol_type = other RNA
tcctgtactgagccgccccgagt

SEQ ID NO: 223 - RNA, 23 nt, Synthetic Construct
  source 1..23: mol_type = other RNA
tgaggggcagagggcgagacttt

SEQ ID NO: 224 - RNA, 23 nt, Synthetic Construct
  source 1..23: mol_type = other RNA
tcctgtaccgagctgccccgaga

SEQ ID NO: 225 - RNA, 16 nt, Synthetic Construct
  source 1..16: mol_type = other RNA
atctacggccatacca

SEQ ID NO: 226 - RNA, 20 nt, Synthetic Construct
  source 1..20: mol_type = other RNA
tgaggtagtgggttgtatag

SEQ ID NO: 227 - RNA, 23 nt, Synthetic Construct
  source 1..23: mol_type = other RNA
tgaggtagtaggttgtgtggtct

SEQ ID NO: 228 - RNA, 22 nt, Synthetic Construct
  source 1..22: mol_type = other RNA
tgaggtagtaggttgtgtggat

SEQ ID NO: 229 - RNA, 20 nt, Synthetic Construct
  source 1..20: mol_type = other RNA
agaggtagtaggttgtgtgg

SEQ ID NO: 230 - RNA, 20 nt, Synthetic Construct
  source 1..20: mol_type = other RNA
tgaggcagtaggttgtatag

SEQ ID NO: 231 - RNA, 23 nt, Synthetic Construct
  source 1..23: mol_type = other RNA
tggtaatacgacgtacttagtgt

SEQ ID NO: 232 - RNA, 23 nt, Synthetic Construct
  source 1..23: mol_type = other RNA
taaggggcagagagcgagacttt

SEQ ID NO: 233 - RNA, 23 nt, Synthetic Construct
  source 1..23: mol_type = other RNA
ccctgtactgagctgccccgagt

SEQ ID NO: 234 - RNA, 22 nt, Synthetic Construct
  source 1..22: mol_type = other RNA
tgaggtagtagtctgtgctgtt

SEQ ID NO: 235 - RNA, 22 nt, Synthetic Construct
  source 1..22: mol_type = other RNA
tgaggtagtaggatgtgtggtt

SEQ ID NO: 236 - RNA, 22 nt, Synthetic Construct
  source 1..22: mol_type = other RNA
tgaggtagtaggtagtgtggtt

SEQ ID NO: 237 - RNA, 23 nt, Synthetic Construct
  source 1..23: mol_type = other RNA
tgaggtagcaggttgtgtggttt

SEQ ID NO: 238 - RNA, 23 nt, Synthetic Construct
  source 1..23: mol_type = other RNA
tgaggtagtaggtcgtgtggttt

SEQ ID NO: 239 - RNA, 22 nt, Synthetic Construct
  source 1..22: mol_type = other RNA
tgaggtagtagcttgtgctgtt

SEQ ID NO: 240 - RNA, 20 nt, Synthetic Construct
  source 1..20: mol_type = other RNA
tgaggtagtaggttgcatag

SEQ ID NO: 241 - RNA, 23 nt, Synthetic Construct
  source 1..23: mol_type = other RNA
tgaggggcagagagcgaggcttt

SEQ ID NO: 242 - RNA, 25 nt, Synthetic Construct
  source 1..25: mol_type = other RNA
atgaggatatgagatcgagacgaca

SEQ ID NO: 243 - RNA, 22 nt, Synthetic Construct
  source 1..22: mol_type = other RNA
tgaggtagtagttcgtgctgtt

SEQ ID NO: 244 - RNA, 20 nt, Synthetic Construct
  source 1..20: mol_type = other RNA
tgaggtagtaggttgtgagg

SEQ ID NO: 245 - RNA, 21 nt, Synthetic Construct
  source 1..21: mol_type = other RNA
agagttctacagtccgacgat

SEQ ID NO: 246 - RNA, 22 nt, Synthetic Construct
  source 1..22: mol_type = other RNA
ccctgtactgagctgccccgag

SEQ ID NO: 247 - RNA, 22 nt, Synthetic Construct
  source 1..22: mol_type = other RNA
tcctgtactgagccgccccgag

SEQ ID NO: 248 - RNA, 23 nt, Synthetic Construct
  source 1..23: mol_type = other RNA
tgaggtagtaggctgtgtggttt

SEQ ID NO: 249 - RNA, 23 nt, Synthetic Construct
  source 1..23: mol_type = other RNA
tcccgtactgagctgccccgaga

SEQ ID NO: 250 - RNA, 23 nt, Synthetic Construct
  source 1..23: mol_type = other RNA
tcctgtacagagctgccccgaga

SEQ ID NO: 251 - RNA, 22 nt, Synthetic Construct
  source 1..22: mol_type = other RNA
tgaggtagtaggttgtgaggtt

SEQ ID NO: 252 - RNA, 23 nt, Synthetic Construct
  source 1..23: mol_type = other RNA
tcctgtactgagccgccccgaga

SEQ ID NO: 253 - RNA, 16 nt, Synthetic Construct
  source 1..16: mol_type = other RNA
gtctacggccatgcca

SEQ ID NO: 254 - RNA, 23 nt, Synthetic Construct
  source 1..23: mol_type = other RNA
tcctgtgctgagctgccccgagt

SEQ ID NO: 255 - RNA, 23 nt, Synthetic Construct
  source 1..23: mol_type = other RNA
tcctgtgctgagctgccccgaga

SEQ ID NO: 256 - RNA, 23 nt, Synthetic Construct
  source 1..23: mol_type = other RNA
tgaggtagtaggttgtgtggctt

SEQ ID NO: 257 - RNA, 22 nt, Synthetic Construct
  source 1..22: mol_type = other RNA
tggggtagtagtttgtgctgtt

SEQ ID NO: 258 - RNA, 22 nt, Synthetic Construct
  source 1..22: mol_type = other RNA
cgaggtagtagtttgtgctgtt

SEQ ID NO: 259 - RNA, 21 nt, Synthetic Construct
  source 1..21: mol_type = other RNA
tgaggtagtagtctgtgctgt

SEQ ID NO: 260 - RNA, 22 nt, Synthetic Construct
  source 1..22: mol_type = other RNA
ncgtaccgtgagtaataatgcg

SEQ ID NO: 261 - RNA, 22 nt, Synthetic Construct
  source 1..22: mol_type = other RNA
tgaggtagtagtttgcgctgtt

SEQ ID NO: 262 - RNA, 22 nt, Synthetic Construct
  source 1..22: mol_type = other RNA
tcctgtaccgagctgccccgag

SEQ ID NO: 263 - RNA, 23 nt, Synthetic Construct
  source 1..23: mol_type = other RNA
tgaggtagtaggttgcgtggttt

SEQ ID NO: 264 - RNA, 22 nt, Synthetic Construct
  source 1..22: mol_type = other RNA
tgaggtggtagtttgtgctgtt

SEQ ID NO: 265 - RNA, 22 nt, Synthetic Construct
  source 1..22: mol_type = other RNA
tgaggtagcagtttgtgctgtt

SEQ ID NO: 266 - RNA, 23 nt, Synthetic Construct
  source 1..23: mol_type = other RNA
tgaggtagtaggttgtgcggttt

SEQ ID NO: 267 - RNA, 23 nt, Synthetic Construct
  source 1..23: mol_type = other RNA
tggtaatacgtcgtacttagtgt

SEQ ID NO: 268 - RNA, 23 nt, Synthetic Construct
  source 1..23: mol_type = other RNA
tggggtagtaggttgtgtggttt

SEQ ID NO: 269 - RNA, 21 nt, Synthetic Construct
  source 1..21: mol_type = other RNA
tgaggtagtagcttgtgctgt

SEQ ID NO: 270 - RNA, 22 nt, Synthetic Construct
  source 1..22: mol_type = other RNA
agaggtagtaggttgtgtggtt

SEQ ID NO: 271 - RNA, 23 nt, Synthetic Construct
  source 1..23: mol_type = other RNA
tcctgtactgggctgccccgaga

SEQ ID NO: 272 - RNA, 23 nt, Synthetic Construct
  source 1..23: mol_type = other RNA
tgaggagcagagagcgagacttt

SEQ ID NO: 273 - RNA, 21 nt, Synthetic Construct
  source 1..21: mol_type = other RNA
tgaggtagtagtttgcgctgt

SEQ ID NO: 274 - RNA, 21 nt, Synthetic Construct
  source 1..21: mol_type = other RNA
tgaggtagtaggttgcatagt

SEQ ID NO: 275 - RNA, 22 nt, Synthetic Construct
  source 1..22: mol_type = other RNA
tcctgtacagagctgccccgag

SEQ ID NO: 276 - RNA, 22 nt, Synthetic Construct
  source 1..22: mol_type = other RNA
tgaggtagtagtttgtgccgtt

SEQ ID NO: 277 - RNA, 21 nt, Synthetic Construct
  source 1..21: mol_type = other RNA
tggggtagtaggttgtatagt

SEQ ID NO: 278 - RNA, 21 nt, Synthetic Construct
  source 1..21: mol_type = other RNA
tgaggtagtaggtcgtatagt

SEQ ID NO: 279 - RNA, 21 nt, Synthetic Construct
  source 1..21: mol_type = other RNA
tgaggtagcaggttgtatagt

SEQ ID NO: 280 - RNA, 21 nt, Synthetic Construct
  source 1..21: mol_type = other RNA
tggagagtgacaatggtgttt

SEQ ID NO: 281 - RNA, 22 nt, Synthetic Construct
  source 1..22: mol_type = other RNA
cagagttctacagtccgacgat

SEQ ID NO: 282 - RNA, 21 nt, Synthetic Construct
  source 1..21: mol_type = other RNA
tgaggtagtaggctgtatagt

SEQ ID NO: 283 - RNA, 23 nt, Synthetic Construct
  source 1..23: mol_type = other RNA
tcctgcactgagctgccccgagt

SEQ ID NO: 284 - RNA, 23 nt, Synthetic Construct
  source 1..23: mol_type = other RNA
tcctgtactgagctgccctgagt

SEQ ID NO: 285 - RNA, 31 nt, Synthetic Construct
  source 1..31: mol_type = other RNA
ggctggtccgatggtagtgggttatcagaac

SEQ ID NO: 286 - RNA, 27 nt, Synthetic Construct
  source 1..27: mol_type = other RNA
ncccccactgctaaatttgactggctt

SEQ ID NO: 287 - RNA, 22 nt, Synthetic Construct
  source 1..22: mol_type = other RNA
tcccgtactgagctgccccgag

SEQ ID NO: 288 - RNA, 17 nt, Synthetic Construct
  source 1..17: mol_type = other RNA
gttctacagtccgacga

SEQ ID NO: 289 - RNA, 22 nt, Synthetic Construct
  source 1..22: mol_type = other RNA
tgaggtagtagtttgtgctgct

SEQ ID NO: 290 - RNA, 22 nt, Synthetic Construct
  source 1..22: mol_type = other RNA
tatcagcacgtaaatattggcg

SEQ ID NO: 291 - RNA, 23 nt, Synthetic Construct
  source 1..23: mol_type = other RNA
tgaggtagtgggttgtgtggttt

SEQ ID NO: 292 - RNA, 21 nt, Synthetic Construct
  source 1..21: mol_type = other RNA
cgaggtagtaggttgtatagt

SEQ ID NO: 293 - RNA, 23 nt, Synthetic Construct
  source 1..23: mol_type = other RNA
tgaggtggtaggttgtgtggttt

SEQ ID NO: 294 - RNA, 22 nt, Synthetic Construct
  source 1..22: mol_type = other RNA
tgaggtagtggtttgtgctgtt

SEQ ID NO: 295 - RNA, 21 nt, Synthetic Construct
  source 1..21: mol_type = other RNA
tgaggtagtagattgcatagt

SEQ ID NO: 296 - RNA, 21 nt, Synthetic Construct
  source 1..21: mol_type = other RNA
tgaggtagtagatcgtatagt

SEQ ID NO: 297 - RNA, 23 nt, Synthetic Construct
  source 1..23: mol_type = other RNA
tgaggggcagagagcgagactat

SEQ ID NO: 298 - RNA, 23 nt, Synthetic Construct
  source 1..23: mol_type = other RNA
gcctgtactgagctgccccgaga

SEQ ID NO: 299 - RNA, 21 nt, Synthetic Construct
  source 1..21: mol_type = other RNA
cagagttctacagtccgacga

SEQ ID NO: 300 - RNA, 21 nt, Synthetic Construct
  source 1..21: mol_type = other RNA
cgaggtagtagtttgtgctgt

SEQ ID NO: 301 - RNA, 21 nt, Synthetic Construct
  source 1..21: mol_type = other RNA
tggggtagtagtttgtgctgt

SEQ ID NO: 302 - RNA, 21 nt, Synthetic Construct
  source 1..21: mol_type = other RNA
tgaggtagtagactgtatagt

SEQ ID NO: 303 - RNA, 22 nt, Synthetic Construct
  source 1..22: mol_type = other RNA
tcctgcactgagctgccccgag

SEQ ID NO: 304 - RNA, 23 nt, Synthetic Construct
  source 1..23: mol_type = other RNA
tcctgcactgagctgccccgaga

SEQ ID NO: 305 - RNA, 22 nt, Synthetic Construct
  source 1..22: mol_type = other RNA
tcctgtgctgagctgccccgag

SEQ ID NO: 306 - RNA, 23 nt, Synthetic Construct
  source 1..23: mol_type = other RNA
tcctgtactgggctgccccgagt

SEQ ID NO: 307 - RNA, 27 nt, Synthetic Construct
  source 1..27: mol_type = other RNA
cagagttctacagtccgacgatcgatc

SEQ ID NO: 308 - RNA, 23 nt, Synthetic Construct
  source 1..23: mol_type = other RNA
tcccgtactgagctgccccgagt

SEQ ID NO: 309 - RNA, 21 nt, Synthetic Construct
  source 1..21: mol_type = other RNA
tggggtagtagattgtatagt

SEQ ID NO: 310 - RNA, 20 nt, Synthetic Construct
  source 1..20: mol_type = other RNA
tgaggtagaaggttgtatag

SEQ ID NO: 311 - RNA, 22 nt, Synthetic Construct
  source 1..22: mol_type = other RNA
tcctgtactgggctgccccgag

SEQ ID NO: 312 - RNA, 21 nt, Synthetic Construct
  source 1..21: mol_type = other RNA
tgaggtggtaggttgtatagt

SEQ ID NO: 313 - RNA, 21 nt, Synthetic Construct
  source 1..21: mol_type = other RNA
tcctgtaccgagctgccccga

SEQ ID NO: 314 - RNA, 21 nt, Synthetic Construct
  source 1..21: mol_type = other RNA
ccctgtactgagctgccccga

SEQ ID NO: 315 - RNA, 23 nt, Synthetic Construct
  source 1..23: mol_type = other RNA
tcctgtactgagctgccccggga

SEQ ID NO: 316 - RNA, 23 nt, Synthetic Construct
  source 1..23: mol_type = other RNA
tgagaggcagagagcgagacttt

SEQ ID NO: 317 - RNA, 21 nt, Synthetic Construct
  source 1..21: mol_type = other RNA
tcctgtactgagccgccccga

SEQ ID NO: 318 - RNA, 22 nt, Synthetic Construct
  source 1..22: mol_type = other RNA
tgaggcagtagtttgtgctgtt

SEQ ID NO: 319 - RNA, 22 nt, Synthetic Construct
  source 1..22: mol_type = other RNA
tagcagcacgtaaatactggcg

SEQ ID NO: 320 - RNA, 21 nt, Synthetic Construct
  source 1..21: mol_type = other RNA
tgaggtagtgggttgtatagt

SEQ ID NO: 321 - RNA, 21 nt, Synthetic Construct
  source 1..21: mol_type = other RNA
tgaggtagtagtttgtgccgt

SEQ ID NO: 322 - RNA, 21 nt, Synthetic Construct
  source 1..21: mol_type = other RNA
tgaggcagtaggttgtatagt

SEQ ID NO: 323 - RNA, 22 nt, Synthetic Construct
  source 1..22: mol_type = other RNA
tgaggtagaagtttgtgctgtt

SEQ ID NO: 324 - RNA, 22 nt, Synthetic Construct
  source 1..22: mol_type = other RNA
tcctgtactgagctgccctgag

SEQ ID NO: 325 - RNA, 21 nt, Synthetic Construct
  source 1..21: mol_type = other RNA
tgaggtagcagattgtatagt

SEQ ID NO: 326 - RNA, 21 nt, Synthetic Construct
  source 1..21: mol_type = other RNA
tgaggtagtaggttgtacagt

SEQ ID NO: 327 - RNA, 16 nt, Synthetic Construct
  source 1..16: mol_type = other RNA
gtctacggccatacaa

SEQ ID NO: 328 - RNA, 15 nt, Synthetic Construct
  source 1..15: mol_type = other RNA
tctacagtccgacga

SEQ ID NO: 329 - RNA, 21 nt, Synthetic Construct
  source 1..21: mol_type = other RNA
tgaggtagtagattgtacagt

SEQ ID NO: 330 - RNA, 23 nt, Synthetic Construct
  source 1..23: mol_type = other RNA
ggaggggcagagagcgagacttt

SEQ ID NO: 331 - RNA, 19 nt, Synthetic Construct
  source 1..19: mol_type = other RNA
gagttctacagtccgacga

SEQ ID NO: 332 - RNA, 22 nt, Synthetic Construct
  source 1..22: mol_type = other RNA
tgaggtagtagttagtgctgtt

SEQ ID NO: 333 - RNA, 21 nt, Synthetic Construct
  source 1..21: mol_type = other RNA
cgaggtagtagattgtatagt

SEQ ID NO: 334 - RNA, 23 nt, Synthetic Construct
  source 1..23: mol_type = other RNA
tcctgtactgagctgccctgaga

SEQ ID NO: 335 - RNA, 21 nt, Synthetic Construct
  source 1..21: mol_type = other RNA
tgaggtagtggattgtatagt

SEQ ID NO: 336 - RNA, 23 nt, Synthetic Construct
  source 1..23: mol_type = other RNA
tcctgtactgagctgctccgaga

SEQ ID NO: 337 - RNA, 23 nt, Synthetic Construct
  source 1..23: mol_type = other RNA
tcctgtactgagctgccccgggt

SEQ ID NO: 338 - RNA, 23 nt, Synthetic Construct
  source 1..23: mol_type = other RNA
tcctgtactgagctgcctcgaga

SEQ ID NO: 339 - RNA, 23 nt, Synthetic Construct
  source 1..23: mol_type = other RNA
tgaagggcagagagcgagacttt

SEQ ID NO: 340 - RNA, 22 nt, Synthetic Construct
  source 1..22: mol_type = other RNA
tgaggtagtaggttgtatagct

SEQ ID NO: 341 - RNA, 23 nt, Synthetic Construct
  source 1..23: mol_type = other RNA
cagagtgctgttcgtgcaggtag

SEQ ID NO: 342 - RNA, 23 nt, Synthetic Construct
  source 1..23: mol_type = other RNA
acctgtactgagctgccccgaga

SEQ ID NO: 343 - RNA, 21 nt, Synthetic Construct
  source 1..21: mol_type = other RNA
tcctgtacagagctgccccga

SEQ ID NO: 344 - RNA, 30 nt, Synthetic Construct
  source 1..30: mol_type = other RNA
gggattgtagttcaattggttagagcaccg

SEQ ID NO: 345 - RNA, 22 nt, Synthetic Construct
  source 1..22: mol_type = other RNA
tgaggtagtaggtcgtatagtt

SEQ ID NO: 346 - RNA, 22 nt, Synthetic Construct
  source 1..22: mol_type = other RNA
tggggtagtaggttgtatagtt

SEQ ID NO: 347 - RNA, 23 nt, Synthetic Construct
  source 1..23: mol_type = other RNA
tgaggggcagagagagagacttt

SEQ ID NO: 348 - RNA, 20 nt, Synthetic Construct
  source 1..20: mol_type = other RNA
agagttctacagtccgacga

SEQ ID NO: 349 - RNA, 22 nt, Synthetic Construct
  source 1..22: mol_type = other RNA
tgaggtagtagtttgtgcagtt

SEQ ID NO: 350 - RNA, 22 nt, Synthetic Construct
  source 1..22: mol_type = other RNA
tatagcacttgtcccggcctgt

SEQ ID NO: 351 - RNA, 22 nt, Synthetic Construct
  source 1..22: mol_type = other RNA
tgaggtagtagtttgtgttgtt

SEQ ID NO: 352 - RNA, 22 nt, Synthetic Construct
  source 1..22: mol_type = other RNA
tgaggtagtagtatgtgctgtt

SEQ ID NO: 353 - RNA, 22 nt, Synthetic Construct
  source 1..22: mol_type = other RNA
tagcagcacgtaagtattggcg

SEQ ID NO: 354 - RNA, 22 nt, Synthetic Construct
  source 1..22: mol_type = other RNA
tagcagcacgtaaacattggcg

SEQ ID NO: 355 - RNA, 22 nt, Synthetic Construct
  source 1..22: mol_type = other RNA
gcctgtactgagctgccccgag

SEQ ID NO: 356 - RNA, 22 nt, Synthetic Construct
  source 1..22: mol_type = other RNA
tcgtaccgggagtaataatgcg

SEQ ID NO: 357 - RNA, 23 nt, Synthetic Construct
  source 1..23: mol_type = other RNA
caaagtgctgttcgcgcaggtag

SEQ ID NO: 358 - RNA, 22 nt, Synthetic Construct
  source 1..22: mol_type = other RNA
catagcacttgtctcggtctga

SEQ ID NO: 359 - RNA, 21 nt, Synthetic Construct
  source 1..21: mol_type = other RNA
tcccgtactgagctgccccga

SEQ ID NO: 360 - RNA, 22 nt, Synthetic Construct
  source 1..22: mol_type = other RNA
tgaggtagtaggttgtacagtt

SEQ ID NO: 361 - RNA, 21 nt, Synthetic Construct
  source 1..21: mol_type = other RNA
tgaggtagaaggttgtatagt

SEQ ID NO: 362 - RNA, 21 nt, Synthetic Construct
  source 1..21: mol_type = other RNA
tgaggtggtagattgtatagt

SEQ ID NO: 363 - RNA, 21 nt, Synthetic Construct
  source 1..21: mol_type = other RNA
tcctgtactgggctgccccga

SEQ ID NO: 364 - RNA, 21 nt, Synthetic Construct
  source 1..21: mol_type = other RNA
tcctgcactgagctgccccga

SEQ ID NO: 365 - RNA, 19 nt, Synthetic Construct
  source 1..19: mol_type = other RNA
cagagttctacagtccgac

SEQ ID NO: 366 - RNA, 22 nt, Synthetic Construct
  source 1..22: mol_type = other RNA
tgaggtagtaggctgtatagtt

SEQ ID NO: 367 - RNA, 22 nt, Synthetic Construct
  source 1..22: mol_type = other RNA
tcctgtactgagctgccccaag

SEQ ID NO: 368 - RNA, 22 nt, Synthetic Construct
  source 1..22: mol_type = other RNA
tgaggtagtagtttgtgctatt

SEQ ID NO: 369 - RNA, 23 nt, Synthetic Construct
  source 1..23: mol_type = other RNA
caaagtgctgttcgtgcaggcag

SEQ ID NO: 370 - RNA, 23 nt, Synthetic Construct
  source 1..23: mol_type = other RNA
acctgtactgagctgccccgagt

SEQ ID NO: 371 - RNA, 21 nt, Synthetic Construct
  source 1..21: mol_type = other RNA
agaggggcagagagcgagact

SEQ ID NO: 372 - RNA, 22 nt, Synthetic Construct
  source 1..22: mol_type = other RNA
tgaggtagtagattgtgctgtt

SEQ ID NO: 373 - RNA, 22 nt, Synthetic Construct
  source 1..22: mol_type = other RNA
tgaggtagcaggttgtatagtt

SEQ ID NO: 374 - RNA, 22 nt, Synthetic Construct
  source 1..22: mol_type = other RNA
tgtggtagtagtttgtgctgtt

SEQ ID NO: 375 - RNA, 21 nt, Synthetic Construct
  source 1..21: mol_type = other RNA
tcctgtgctgagctgccccga

SEQ ID NO: 376 - RNA, 23 nt, Synthetic Construct
  source 1..23: mol_type = other RNA
tggtaatacgacgtactttgtgt

SEQ ID NO: 377 - RNA, 16 nt, Synthetic Construct
  source 1..16: mol_type = other RNA
gtctacggacatacca

SEQ ID NO: 378 - RNA, 22 nt, Synthetic Construct
  source 1..22: mol_type = other RNA
tcctgtactaagctgccccgag

SEQ ID NO: 379 - RNA, 21 nt, Synthetic Construct
  source 1..21: mol_type = other RNA
tgaagtagtaggttgtatagt

SEQ ID NO: 380 - RNA, 22 nt, Synthetic Construct
  source 1..22: mol_type = other RNA
tagcagcacgcaaatattggcg

SEQ ID NO: 381 - RNA, 23 nt, Synthetic Construct
  source 1..23: mol_type = other RNA
caaagtgctgtccgtgcaggtag

SEQ ID NO: 382 - RNA, 23 nt, Synthetic Construct
  source 1..23: mol_type = other RNA
gcctgtactgagctgccccgagt

SEQ ID NO: 383 - RNA, 22 nt, Synthetic Construct
  source 1..22: mol_type = other RNA
tgaggtagtaggttgcatagtt

SEQ ID NO: 384 - RNA, 22 nt, Synthetic Construct
  source 1..22: mol_type = other RNA
tgaggtagtagatcgtatagtt

SEQ ID NO: 385 - RNA, 34 nt, Synthetic Construct
  source 1..34: mol_type = other RNA
cgggctgtggcgcagtttggtagcgcacttgact

SEQ ID NO: 386 - RNA, 22 nt, Synthetic Construct
  source 1..22: mol_type = other RNA
tgaggcagtaggttgtatagtt

SEQ ID NO: 387 - RNA, 21 nt, Synthetic Construct
  source 1..21: mol_type = other RNA
tgaggcagtagattgtatagt

SEQ ID NO: 388 - RNA, 22 nt, Synthetic Construct
  source 1..22: mol_type = other RNA
cgaggtagtaggttgtatagtt

SEQ ID NO: 389 - RNA, 22 nt, Synthetic Construct
  source 1..22: mol_type = other RNA
tagcagcacgtaaatatcggcg

SEQ ID NO: 390 - RNA, 20 nt, Synthetic Construct
  source 1..20: mol_type = other RNA
ggaggtagtaggttgtatag

SEQ ID NO: 391 - RNA, 22 nt, Synthetic Construct
  source 1..22: mol_type = other RNA
tgaggtagtagtttgagctgtt

SEQ ID NO: 392 - RNA, 23 nt, Synthetic Construct
  source 1..23: mol_type = other RNA
caaagtgctgctcgtgcaggtag

SEQ ID NO: 393 - RNA, 16 nt, Synthetic Construct
  source 1..16: mol_type = other RNA
ttctacagtccgacga

SEQ ID NO: 394 - RNA, 21 nt, Synthetic Construct
  source 1..21: mol_type = other RNA
gcctgtactgagctgccccga

SEQ ID NO: 395 - RNA, 22 nt, Synthetic Construct
  source 1..22: mol_type = other RNA
tgaggtaatagtttgtgctgtt

SEQ ID NO: 396 - RNA, 22 nt, Synthetic Construct
  source 1..22: mol_type = other RNA
tgaggtagtagtttatgctgtt

SEQ ID NO: 397 - RNA, 21 nt, Synthetic Construct
  source 1..21: mol_type = other RNA
tcctgtactgagctaccccga

SEQ ID NO: 398 - RNA, 22 nt, Synthetic Construct
  source 1..22: mol_type = other RNA
tgaggtggtaggttgtatagtt

SEQ ID NO: 399 - RNA, 21 nt, Synthetic Construct
  source 1..21: mol_type = other RNA
tggggtgtgacaatggtgttt

SEQ ID NO: 400 - RNA, 23 nt, Synthetic Construct
  source 1..23: mol_type = other RNA
caaagtgccgttcgtgcaggtag

SEQ ID NO: 401 - RNA, 22 nt, Synthetic Construct
  source 1..22: mol_type = other RNA
tgaggtagtaatttgtgctgtt

SEQ ID NO: 402 - RNA, 22 nt, Synthetic Construct
  source 1..22: mol_type = other RNA
tattgcacctgtcccggcctgt

SEQ ID NO: 403 - RNA, 22 nt, Synthetic Construct
  source 1..22: mol_type = other RNA
tattgcacttgccccggcctgt

SEQ ID NO: 404 - RNA, 22 nt, Synthetic Construct
  source 1..22: mol_type = other RNA
tgaggtagtgggttgtatagtt

SEQ ID NO: 405 - RNA, 22 nt, Synthetic Construct
  source 1..22: mol_type = other RNA
ttctgtactgagctgccccgag

SEQ ID NO: 406 - RNA, 18 nt, Synthetic Construct
  source 1..18: mol_type = other RNA
agttctacagtccgacga

SEQ ID NO: 407 - RNA, 20 nt, Synthetic Construct
  source 1..20: mol_type = other RNA
cagagttctacagtccgacg

SEQ ID NO: 408 - RNA, 23 nt, Synthetic Construct
  source 1..23: mol_type = other RNA
caaagtgctgtacgtgcaggtag

SEQ ID NO: 409 - RNA, 21 nt, Synthetic Construct
  source 1..21: mol_type = other RNA
tgaggtagtagattgtatggt

SEQ ID NO: 410 - RNA, 21 nt, Synthetic Construct
  source 1..21: mol_type = other RNA
tggagtgtgacaatggtgctt

SEQ ID NO: 411 - RNA, 21 nt, Synthetic Construct
  source 1..21: mol_type = other RNA
tcctgtactgagctgctccga

SEQ ID NO: 412 - RNA, 22 nt, Synthetic Construct
  source 1..22: mol_type = other RNA
tgaggtagtagtttgtggtgtt

SEQ ID NO: 413 - RNA, 23 nt, Synthetic Construct
  source 1..23: mol_type = other RNA
tcctgtactgagttgccccgaga

SEQ ID NO: 414 - RNA, 16 nt, Synthetic Construct
  source 1..16: mol_type = other RNA
gactacggccatacca

SEQ ID NO: 415 - RNA, 22 nt, Synthetic Construct
  source 1..22: mol_type = other RNA
tgaggtagtagactgtatagtt

SEQ ID NO: 416 - RNA, 23 nt, Synthetic Construct
  source 1..23: mol_type = other RNA
agaggggcagagagcgagacttt

SEQ ID NO: 417 - RNA, 22 nt, Synthetic Construct
  source 1..22: mol_type = other RNA
tcctatactgagctgccccgag

SEQ ID NO: 418 - RNA, 22 nt, Synthetic Construct
  source 1..22: mol_type = other RNA
tcttgtactgagctgccccgag

SEQ ID NO: 419 - RNA, 22 nt, Synthetic Construct
  source 1..22: mol_type = other RNA
cattgcacctgtctcggtctga

SEQ ID NO: 420 - RNA, 22 nt, Synthetic Construct
  source 1..22: mol_type = other RNA
tatcgcacttgtcccggcctgt

SEQ ID NO: 421 - RNA, 23 nt, Synthetic Construct
  source 1..23: mol_type = other RNA
ggaggtagtaggttgtgtggttt

SEQ ID NO: 422 - RNA, 21 nt, Synthetic Construct
  source 1..21: mol_type = other RNA
tcctatactgagctgccccga

SEQ ID NO: 423 - RNA, 22 nt, Synthetic Construct
  source 1..22: mol_type = other RNA
tcctgtactgagctaccccgag

SEQ ID NO: 424 - RNA, 22 nt, Synthetic Construct
  source 1..22: mol_type = other RNA
tgaggtagtagtttgtatagtt

SEQ ID NO: 425 - RNA, 21 nt, Synthetic Construct
  source 1..21: mol_type = other RNA
tgaggtagtagattgtgtagt

SEQ ID NO: 426 - RNA, 22 nt, Synthetic Construct
  source 1..22: mol_type = other RNA
tcctgtattgagctgccccgag

SEQ ID NO: 427 - RNA, 21 nt, Synthetic Construct
  source 1..21: mol_type = other RNA
tggagtgtgacaatggtgtct

SEQ ID NO: 428 - RNA, 23 nt, Synthetic Construct
  source 1..23: mol_type = other RNA
cgaagtgctgttcgtgcaggtag

SEQ ID NO: 429 - RNA, 22 nt, Synthetic Construct
  source 1..22: mol_type = other RNA
tagcagcacgtgaatattggcg

SEQ ID NO: 430 - RNA, 22 nt, Synthetic Construct
  source 1..22: mol_type = other RNA
tgtggtagtaggttgtatagtt

SEQ ID NO: 431 - RNA, 15 nt, Synthetic Construct
  source 1..15: mol_type = other RNA
cagagttctacagtc

SEQ ID NO: 432 - RNA, 22 nt, Synthetic Construct
  source 1..22: mol_type = other RNA
cattgcacttgtcccggcctgt

SEQ ID NO: 433 - RNA, 21 nt, Synthetic Construct
  source 1..21: mol_type = other RNA
cggagtgtgacaatggtgttt

SEQ ID NO: 434 - RNA, 21 nt, Synthetic Construct
  source 1..21: mol_type = other RNA
tggagtgtgacgatggtgttt

SEQ ID NO: 435 - RNA, 21 nt, Synthetic Construct
  source 1..21: mol_type = other RNA
tggagtgcgacaatggtgttt

SEQ ID NO: 436 - RNA, 22 nt, Synthetic Construct
  source 1..22: mol_type = other RNA
tcctgtactgaactgccccgag

SEQ ID NO: 437 - RNA, 20 nt, Synthetic Construct
  source 1..20: mol_type = other RNA
agaggtagtaggttgtatag

SEQ ID NO: 438 - RNA, 22 nt, Synthetic Construct
  source 1..22: mol_type = other RNA
tagcagcacgtaaatataggcg

SEQ ID NO: 439 - RNA, 22 nt, Synthetic Construct
  source 1..22: mol_type = other RNA
tattgcactcgtcccggcctgt

SEQ ID NO: 440 - RNA, 22 nt, Synthetic Construct
  source 1..22: mol_type = other RNA
tgaggtagtaggttgtggggtt

SEQ ID NO: 441 - RNA, 21 nt, Synthetic Construct
  source 1..21: mol_type = other RNA
tggagtgtgacaatggcgttt

SEQ ID NO: 442 - RNA, 22 nt, Synthetic Construct
  source 1..22: mol_type = other RNA
tgaggtagtagtttgtactgtt

SEQ ID NO: 443 - RNA, 22 nt, Synthetic Construct
  source 1..22: mol_type = other RNA
tgaagtagtagtttgtgctgtt

SEQ ID NO: 444 - RNA, 22 nt, Synthetic Construct
  source 1..22: mol_type = other RNA
cattgcactcgtctcggtctga

SEQ ID NO: 445 - RNA, 22 nt, Synthetic Construct
  source 1..22: mol_type = other RNA
tgagatagtagtttgtgctgtt

SEQ ID NO: 446 - RNA, 16 nt, Synthetic Construct
  source 1..16: mol_type = other RNA
cagagttctacagtcc

SEQ ID NO: 447 - RNA, 20 nt, Synthetic Construct
  source 1..20: mol_type = other RNA
atcaagtaatccaggatagg

SEQ ID NO: 448 - RNA, 22 nt, Synthetic Construct
  source 1..22: mol_type = other RNA
tggggtagtagattgtatagtt

SEQ ID NO: 449 - RNA, 22 nt, Synthetic Construct
  source 1..22: mol_type = other RNA
tactgtactgagctgccccgag

SEQ ID NO: 450 - RNA, 22 nt, Synthetic Construct
  source 1..22: mol_type = other RNA
tgaggtagcagattgtatagtt

SEQ ID NO: 451 - RNA, 22 nt, Synthetic Construct
  source 1..22: mol_type = other RNA
tcctgtactgagctgctccgag

SEQ ID NO: 452 - RNA, 21 nt, Synthetic Construct
  source 1..21: mol_type = other RNA
tggagcgtgacaatggtgttt

SEQ ID NO: 453 - RNA, 22 nt, Synthetic Construct
  source 1..22: mol_type = other RNA
tgaggtagtagtttgtgatgtt

SEQ ID NO: 454 - RNA, 22 nt, Synthetic Construct
  source 1..22: mol_type = other RNA
tcgaaccgtgagtaataatgcg

SEQ ID NO: 455 - RNA, 22 nt, Synthetic Construct
  source 1..22: mol_type = other RNA
tgttgcacttgtcccggcctgt

SEQ ID NO: 456 - RNA, 22 nt, Synthetic Construct
  source 1..22: mol_type = other RNA
tgaggtagtagattgcatagtt

SEQ ID NO: 457 - RNA, 22 nt, Synthetic Construct
  source 1..22: mol_type = other RNA
tcgcagcacgtaaatattggcg

SEQ ID NO: 458 - RNA, 22 nt, Synthetic Construct
  source 1..22: mol_type = other RNA
tgaggtagtagtttgtgctgat

SEQ ID NO: 459 - RNA, 22 nt, Synthetic Construct
  source 1..22: mol_type = other RNA
tgaggtagtagattgtacagtt

SEQ ID NO: 460 - RNA, 22 nt, Synthetic Construct
  source 1..22: mol_type = other RNA
taaggtagtagtttgtgctgtt

SEQ ID NO: 461 - RNA, 22 nt, Synthetic Construct
  source 1..22: mol_type = other RNA
cattgcacttgtctcggtccga

SEQ ID NO: 462 - RNA, 21 nt, Synthetic Construct
  source 1..21: mol_type = other RNA
ctagaccgaagctccttgagg

SEQ ID NO: 463 - RNA, 22 nt, Synthetic Construct
  source 1..22: mol_type = other RNA
ggcagcattgtacagggctatg

SEQ ID NO: 464 - RNA, 22 nt, Synthetic Construct
  source 1..22: mol_type = other RNA
tcctgtactgagctgtcccgag

SEQ ID NO: 465 - RNA, 22 nt, Synthetic Construct
  source 1..22: mol_type = other RNA
tagcagcacgtaaatatttgcg

SEQ ID NO: 466 - RNA, 22 nt, Synthetic Construct
  source 1..22: mol_type = other RNA
tgaggtagtagattgtatagct

SEQ ID NO: 467 - RNA, 21 nt, Synthetic Construct
  source 1..21: mol_type = other RNA
tggagtgtgacaacggtgttt

SEQ ID NO: 468 - RNA, 23 nt, Synthetic Construct
  source 1..23: mol_type = other RNA
caaagcgctgttcgtgcaggtag

SEQ ID NO: 469 - RNA, 23 nt, Synthetic Construct
  source 1..23: mol_type = other RNA
caaggtgctgttcgtgcaggtag

SEQ ID NO: 470 - RNA, 22 nt, Synthetic Construct
  source 1..22: mol_type = other RNA
tgaggtagtggattgtatagtt

SEQ ID NO: 471 - RNA, 21 nt, Synthetic Construct
  source 1..21: mol_type = other RNA
ctagactgaagctccctgagg

SEQ ID NO: 472 - RNA, 22 nt, Synthetic Construct
  source 1..22: mol_type = other RNA
tggagtgtgacaatggtgcttg

SEQ ID NO: 473 - RNA, 18 nt, Synthetic Construct
  source 1..18: mol_type = other RNA
cagagttctacagtccga

SEQ ID NO: 474 - RNA, 15 nt, Synthetic Construct
  source 1..15: mol_type = other RNA
agagttctacagtcc

SEQ ID NO: 475 - RNA, 22 nt, Synthetic Construct
  source 1..22: mol_type = other RNA
cgaggtagtagattgtatagtt

SEQ ID NO: 476 - RNA, 23 nt, Synthetic Construct
  source 1..23: mol_type = other RNA
caaagtgctgttcatgcaggtag

SEQ ID NO: 477 - RNA, 22 nt, Synthetic Construct
  source 1..22: mol_type = other RNA
cgttgcacttgtctcggtctga

SEQ ID NO: 478 - RNA, 22 nt, Synthetic Construct
  source 1..22: mol_type = other RNA
acctgtactgagctgccccgag

SEQ ID NO: 479 - RNA, 21 nt, Synthetic Construct
  source 1..21: mol_type = other RNA
tcctgtactgagctgccctga

SEQ ID NO: 480 - RNA, 22 nt, Synthetic Construct
  source 1..22: mol_type = other RNA
tgaggtggtagattgtatagtt

SEQ ID NO: 481 - RNA, 23 nt, Synthetic Construct
  source 1..23: mol_type = other RNA
tcatgtactgagctgccccgaga

SEQ ID NO: 482 - RNA, 27 nt, Synthetic Construct
  source 1..27: mol_type = other RNA
ccccccactgctaaatctgactggctt

SEQ ID NO: 483 - RNA, 22 nt, Synthetic Construct
  source 1..22: mol_type = other RNA
tgaggtagtaggttatatagtt

SEQ ID NO: 484 - RNA, 27 nt, Synthetic Construct
  source 1..27: mol_type = other RNA
tcggctgttaaccgaaaggttggtggt

SEQ ID NO: 485 - RNA, 17 nt, Synthetic Construct
  source 1..17: mol_type = other RNA
cttgaccgctctgacca

SEQ ID NO: 486 - RNA, 25 nt, Synthetic Construct
  source 1..25: mol_type = other RNA
ggtaaaatggctgagtgaagcattg

SEQ ID NO: 487 - RNA, 16 nt, Synthetic Construct
  source 1..16: mol_type = other RNA
ttgaccgctctgacca

SEQ ID NO: 488 - RNA, 18 nt, Synthetic Construct
  source 1..18: mol_type = other RNA
cattcttgcgacccgggt

SEQ ID NO: 489 - RNA, 20 nt, Synthetic Construct
  source 1..20: mol_type = other RNA
cggagctggggattgtgggt

SEQ ID NO: 490 - RNA, 34 nt, Synthetic Construct
  source 1..34: mol_type = other RNA
gcattggtggttcagtggtagaattctcgcctgc

SEQ ID NO: 491 - RNA, 41 nt, Synthetic Construct
  source 1..41: mol_type = other RNA
tgaatctgacaacagaggcttacgaccccttatttacccca

SEQ ID NO: 492 - RNA, 37 nt, Synthetic Construct
  source 1..37: mol_type = other RNA
atcattggtcgtggttgtagtccgtgcgagaatacca

SEQ ID NO: 493 - RNA, 22 nt, Synthetic Construct
  source 1..22: mol_type = other RNA
cttaacttgaccgctctgacca

SEQ ID NO: 494 - RNA, 33 nt, Synthetic Construct
  source 1..33: mol_type = other RNA
gtttccgtagtgtagtggtcatcacgttcgcct

SEQ ID NO: 495 - RNA, 34 nt, Synthetic Construct
  source 1..34: mol_type = other RNA
gcccggctagctcagtcggtagagcatgggactc

SEQ ID NO: 496 - RNA, 21 nt, Synthetic Construct
  source 1..21: mol_type = other RNA
ttaacttgaccgctctgacca

SEQ ID NO: 497 - RNA, 23 nt, Synthetic Construct
  source 1..23: mol_type = other RNA
tggaatgtaaagaagtatgtatt

SEQ ID NO: 498 - RNA, 22 nt, Synthetic Construct
  source 1..22: mol_type = other RNA
cggaatgtaaagaagtatgtat

SEQ ID NO: 499 - RNA, 23 nt, Synthetic Construct
  source 1..23: mol_type = other RNA
tggaatgtaaagaagtatgtata

SEQ ID NO: 500 - RNA, 21 nt, Synthetic Construct
  source 1..21: mol_type = other RNA
tctttggttatctagctgtat

SEQ ID NO: 501 - RNA, 22 nt, Synthetic Construct
  source 1..22: mol_type = other RNA
tctttggttatctagctgtatg

SEQ ID NO: 502 - RNA, 22 nt, Synthetic Construct
  source 1..22: mol_type = other RNA
tgaggtagtaggttgtgtggtc

SEQ ID NO: 503 - RNA, 23 nt, Synthetic Construct
  source 1..23: mol_type = other RNA
tgaggggcagagagcgagacttc

SEQ ID NO: 504 - RNA, 21 nt, Synthetic Construct
  source 1..21: mol_type = other RNA
tgaggtagtaggttgtgtggc

SEQ ID NO: 505 - RNA, 21 nt, Synthetic Construct
  source 1..21: mol_type = other RNA
tggaatgtaaagaagtatgta

SEQ ID NO: 506 - RNA, 23 nt, Synthetic Construct
  source 1..23: mol_type = other RNA
tctttggttatctagctgtatga

SEQ ID NO: 507 - RNA, 21 nt, Synthetic Construct
  source 1..21: mol_type = other RNA
tgaggtagtaggttgtgtagt

SEQ ID NO: 508 - RNA, 22 nt, Synthetic Construct
  source 1..22: mol_type = other RNA
tgaggtagtagtttgtgctgtc

SEQ ID NO: 509 - RNA, 21 nt, Synthetic Construct
  source 1..21: mol_type = other RNA
tgaggtagtaggttgtatggt

SEQ ID NO: 510 - RNA, 21 nt, Synthetic Construct
  source 1..21: mol_type = other RNA
tgaggtagtaggttgtatagc

SEQ ID NO: 511 - RNA, 23 nt, Synthetic Construct
  source 1..23: mol_type = other RNA
caaagtgctgtttgtgcaggtag

SEQ ID NO: 512 - RNA, 24 nt, Synthetic Construct
  source 1..24: mol_type = other RNA
tgtaaacacccccgactggaagct

SEQ ID NO: 513 - RNA, 20 nt, Synthetic Construct
  source 1..20: mol_type = other RNA
tgaggtagtaggttgtgtag

SEQ ID NO: 514 - RNA, 21 nt, Synthetic Construct
  source 1..21: mol_type = other RNA
tgaggtagtagtttgtgctgc

SEQ ID NO: 515 - RNA, 23 nt, Synthetic Construct
  source 1..23: mol_type = other RNA
tggcagtgtcttagctggttgtt

SEQ ID NO: 516 - RNA, 22 nt, Synthetic Construct
  source 1..22: mol_type = other RNA
tgaggtagtaggttgtatagtc

SEQ ID NO: 517 - RNA, 21 nt, Synthetic Construct
  source 1..21: mol_type = other RNA
tgaggtagtagattgtatagc

SEQ ID NO: 518 - RNA, 22 nt, Synthetic Construct
  source 1..22: mol_type = other RNA
tggaatgtaaagaagtatgtat

SEQ ID NO: 519 - RNA, 22 nt, Synthetic Construct
  source 1..22: mol_type = other RNA
tgaggtagtaggttgtgtagtt

SEQ ID NO: 520 - RNA, 22 nt, Synthetic Construct
  source 1..22: mol_type = other RNA
tggaatgtaaagaagtatgtac

SEQ ID NO: 521 - RNA, 22 nt, Synthetic Construct
  source 1..22: mol_type = other RNA
tgaggtagtagtttgtgctgta

SEQ ID NO: 522 - RNA, 22 nt, Synthetic Construct
  source 1..22: mol_type = other RNA
tgaggtagtaggttgtatattt

SEQ ID NO: 523 - RNA, 22 nt, Synthetic Construct
  source 1..22: mol_type = other RNA
tggaatgtaaagaagtatgtaa

SEQ ID NO: 524 - RNA, 22 nt, Synthetic Construct
  source 1..22: mol_type = other RNA
tgaggtagtagattgtatagtc

SEQ ID NO: 525 - RNA, 23 nt, Synthetic Construct
  source 1..23: mol_type = other RNA
caaagtgctgttcgtgcaggtgg

SEQ ID NO: 526 - RNA, 24 nt, Synthetic Construct
  source 1..24: mol_type = other RNA
tgtaaacatccccgactggaagcc

SEQ ID NO: 527 - RNA, 22 nt, Synthetic Construct
  source 1..22: mol_type = other RNA
tcggatccgtctgagcttggct

SEQ ID NO: 528 - RNA, 20 nt, Synthetic Construct
  source 1..20: mol_type = other RNA
tgaggtagtaggttgtataa

SEQ ID NO: 529 - RNA, 24 nt, Synthetic Construct
  source 1..24: mol_type = other RNA
tcggatccgtctgagcttggcttt

SEQ ID NO: 530 - RNA, 23 nt, Synthetic Construct
  source 1..23: mol_type = other RNA
tgaggtagtaggttgtgtagttt

SEQ ID NO: 531 - RNA, 20 nt, Synthetic Construct
  source 1..20: mol_type = other RNA
tgaggtagtaggttgtatgg

SEQ ID NO: 532 - RNA, 20 nt, Synthetic Construct
  source 1..20: mol_type = other RNA
tggaatgtaaagaagtatgt

SEQ ID NO: 533 - RNA, 21 nt, Synthetic Construct
  source 1..21: mol_type = other RNA
tgaggtagtaggttgtgtgga

SEQ ID NO: 534 - RNA, 23 nt, Synthetic Construct
  source 1..23: mol_type = other RNA
taccctgtagaaccgaatttgtg

SEQ ID NO: 535 - RNA, 23 nt, Synthetic Construct
  source 1..23: mol_type = other RNA
tgaggtagtaggttgtgtggttc

SEQ ID NO: 536 - RNA, 24 nt, Synthetic Construct
  source 1..24: mol_type = other RNA
tgtaaacatccctgactggaagct

SEQ ID NO: 537 - RNA, 21 nt, Synthetic Construct
  source 1..21: mol_type = other RNA
ctagactgaagctccttgggg

SEQ ID NO: 538 - RNA, 22 nt, Synthetic Construct
  source 1..22: mol_type = other RNA
tgaggtagtagattgtatagta

SEQ ID NO: 539 - RNA, 23 nt, Synthetic Construct
  source 1..23: mol_type = other RNA
tcctgtactgagctgccccgagc

SEQ ID NO: 540 - RNA, 22 nt, Synthetic Construct
  source 1..22: mol_type = other RNA
actggacttggagtcagaaggc

SEQ ID NO: 541 - RNA, 25 nt, Synthetic Construct
  source 1..25: mol_type = other RNA
tcggatccgtctgagcttggctttt

SEQ ID NO: 542 - RNA, 22 nt, Synthetic Construct
  source 1..22: mol_type = other RNA
tgaggtagtaaattgtatagtt

SEQ ID NO: 543 - RNA, 23 nt, Synthetic Construct
  source 1..23: mol_type = other RNA
tcggatccgtctgagcttggctt

SEQ ID NO: 544 - RNA, 21 nt, Synthetic Construct
  source 1..21: mol_type = other RNA
tcctgtactgagctgccccaa

SEQ ID NO: 545 - RNA, 22 nt, Synthetic Construct
  source 1..22: mol_type = other RNA
tgtaaacatccccgactggagg

SEQ ID NO: 546 - RNA, 21 nt, Synthetic Construct
  source 1..21: mol_type = other RNA
tgaggtagtagattgtataga

SEQ ID NO: 547 - RNA, 22 nt, Synthetic Construct
  source 1..22: mol_type = other RNA
tgaggtagtaggttgtatagta

SEQ ID NO: 548 - RNA, 22 nt, Synthetic Construct
  source 1..22: mol_type = other RNA
tgaggtagtaggttgtgtggta

SEQ ID NO: 549 - RNA, 21 nt, Synthetic Construct
  source 1..21: mol_type = other RNA
tgaggggcagagagcgagaca

SEQ ID NO: 550 - RNA, 22 nt, Synthetic Construct
  source 1..22: mol_type = other RNA
cattgcacttgtctcggtctgg

SEQ ID NO: 551 - RNA, 24 nt, Synthetic Construct
  source 1..24: mol_type = other RNA
tctcacacagaaatcgcacccgcc

SEQ ID NO: 552 - RNA, 20 nt, Synthetic Construct
  source 1..20: mol_type = other RNA
tgaggtagtaggttgtgtga

SEQ ID NO: 553 - RNA, 21 nt, Synthetic Construct
  source 1..21: mol_type = other RNA
tcctgtactgagctgccccgg

SEQ ID NO: 554 - RNA, 21 nt, Synthetic Construct
  source 1..21: mol_type = other RNA
tcctgtactgagctgcctcga

SEQ ID NO: 555 - RNA, 24 nt, Synthetic Construct
  source 1..24: mol_type = other RNA
tgtaaacatccccgactggaagtt

SEQ ID NO: 556 - RNA, 23 nt, Synthetic Construct
  source 1..23: mol_type = other RNA
tcctgtactgagctgccccgagg

SEQ ID NO: 557 - RNA, 22 nt, Synthetic Construct
  source 1..22: mol_type = other RNA
tggcagtgtcttagctggttgt

SEQ ID NO: 558 - RNA, 22 nt, Synthetic Construct
  source 1..22: mol_type = other RNA
tcctgtactgagctgccccggg

SEQ ID NO: 559 - RNA, 22 nt, Synthetic Construct
  source 1..22: mol_type = other RNA
tcgtaccgtgagtaataatgca

SEQ ID NO: 560 - RNA, 23 nt, Synthetic Construct
  source 1..23: mol_type = other RNA
ttggtccccttcaaccagctgtt

SEQ ID NO: 561 - RNA, 22 nt, Synthetic Construct
  source 1..22: mol_type = other RNA
tccagcatcagtgattttgttg

SEQ ID NO: 562 - RNA, 20 nt, Synthetic Construct
  source 1..20: mol_type = other RNA
tgaggtagtaggttgtgtgt

SEQ ID NO: 563 - RNA, 21 nt, Synthetic Construct
  source 1..21: mol_type = other RNA
tgaggtagtaggttgtgtggt

SEQ ID NO: 564 - RNA, 22 nt, Synthetic Construct
  source 1..22: mol_type = other RNA
tgaggtagtaggttgtatggtt

SEQ ID NO: 565 - RNA, 23 nt, Synthetic Construct
  source 1..23: mol_type = other RNA
tagcaccatttgaaatcagtgtt

SEQ ID NO: 566 - RNA, 22 nt, Synthetic Construct
  source 1..22: mol_type = other RNA
tcagtgcactacagaactttgc

SEQ ID NO: 567 - RNA, 22 nt, Synthetic Construct
  source 1..22: mol_type = other RNA
tcctgtactgagctgcctcgag

SEQ ID NO: 568 - RNA, 22 nt, Synthetic Construct
  source 1..22: mol_type = other RNA
tattgcacttgtcccggcctgc

SEQ ID NO: 569 - RNA, 23 nt, Synthetic Construct
  source 1..23: mol_type = other RNA
caaagtgctgttcgtgcaggtaa

SEQ ID NO: 570 - RNA, 21 nt, Synthetic Construct
  source 1..21: mol_type = other RNA
tgaggtagtaggttgtataga

SEQ ID NO: 571 - RNA, 22 nt, Synthetic Construct
  source 1..22: mol_type = other RNA
cagggctggcagtgacatgggt

SEQ ID NO: 572 - RNA, 23 nt, Synthetic Construct
  source 1..23: mol_type = other RNA
agctacattgtctgctgggttcc

SEQ ID NO: 573 - RNA, 21 nt, Synthetic Construct
  source 1..21: mol_type = other RNA
tccctgagaccctaacttgtg

SEQ ID NO: 574 - RNA, 21 nt, Synthetic Construct
  source 1..21: mol_type = other RNA
actggacttggagtcagaagg

SEQ ID NO: 575 - RNA, 22 nt, Synthetic Construct
  source 1..22: mol_type = other RNA
tgagaactgaattccatgggtc

SEQ ID NO: 576 - RNA, 23 nt, Synthetic Construct
  source 1..23: mol_type = other RNA
tgaggggcagagagcgagactta

SEQ ID NO: 577 - RNA, 21 nt, Synthetic Construct
  source 1..21: mol_type = other RNA
tggagtgtgacaatggtgttc

SEQ ID NO: 578 - RNA, 22 nt, Synthetic Construct
  source 1..22: mol_type = other RNA
tgaggtagtaggttgtgtggtt

SEQ ID NO: 579 - RNA, 24 nt, Synthetic Construct
  source 1..24: mol_type = other RNA
agctacattgtctgctgggtttcc

SEQ ID NO: 580 - RNA, 24 nt, Synthetic Construct
  source 1..24: mol_type = other RNA
caaagtgctgttcgtgcaggtagc

SEQ ID NO: 581 - RNA, 22 nt, Synthetic Construct
  source 1..22: mol_type = other RNA
tagcttatcagactgatgttgg

SEQ ID NO: 582 - RNA, 22 nt, Synthetic Construct
  source 1..22: mol_type = other RNA
tgaggtagtaggttgtatggta

SEQ ID NO: 583 - RNA, 24 nt, Synthetic Construct
  source 1..24: mol_type = other RNA
tgaggtagtaggttgtgtggttaa

SEQ ID NO: 584 - RNA, 22 nt, Synthetic Construct
  source 1..22: mol_type = other RNA
ttcaagtaatccaggataggtt

SEQ ID NO: 585 - RNA, 23 nt, Synthetic Construct
  source 1..23: mol_type = other RNA
tgggctaagggagatgattgggt

SEQ ID NO: 586 - RNA, 21 nt, Synthetic Construct
  source 1..21: mol_type = other RNA
tcttggagtaggtcattgggt

SEQ ID NO: 587 - RNA, 24 nt, Synthetic Construct
  source 1..24: mol_type = other RNA
tgaggtagtaggttgtgtggtttc

SEQ ID NO: 588 - RNA, 22 nt, Synthetic Construct
  source 1..22: mol_type = other RNA
ttcaagtaatccaggataggcc

SEQ ID NO: 589 - RNA, 21 nt, Synthetic Construct
  source 1..21: mol_type = other RNA
acagtagcctgcacattggtt

SEQ ID NO: 590 - RNA, 22 nt, Synthetic Construct
  source 1..22: mol_type = other RNA
taccctgtagaaccgaatttgt

SEQ ID NO: 591 - RNA, 22 nt, Synthetic Construct
  source 1..22: mol_type = other RNA
tagcagcacgtaaatattggtg

SEQ ID NO: 592 - RNA, 22 nt, Synthetic Construct
  source 1..22: mol_type = other RNA
ttcaagtaattcaggataggtc

SEQ ID NO: 593 - RNA, 24 nt, Synthetic Construct
  source 1..24: mol_type = other RNA
caaagtgctgttcgtgcaggtagg

SEQ ID NO: 594 - RNA, 23 nt, Synthetic Construct
  source 1..23: mol_type = other RNA
tgaggtagtaggttgtatagttc

SEQ ID NO: 595 - RNA, 22 nt, Synthetic Construct
  source 1..22: mol_type = other RNA
actggacttggagtcagaagga

SEQ ID NO: 596 - RNA, 22 nt, Synthetic Construct
  source 1..22: mol_type = other RNA
tgtcagtttgccaaatacccca

SEQ ID NO: 597 - RNA, 20 nt, Synthetic Construct
  source 1..20: mol_type = other RNA
tgaggtaggaggttgtatag

SEQ ID NO: 598 - RNA, 22 nt, Synthetic Construct
  source 1..22: mol_type = other RNA
tgaggtagtaggttgtgtggaa

SEQ ID NO: 599 - RNA, 22 nt, Synthetic Construct
  source 1..22: mol_type = other RNA
tagcagcacgtaaatattggca

SEQ ID NO: 600 - RNA, 23 nt, Synthetic Construct
  source 1..23: mol_type = other RNA
tgaggtagtaggttgtgtggtaa

SEQ ID NO: 601 - RNA, 21 nt, Synthetic Construct
  source 1..21: mol_type = other RNA
tgaggggcagagagcgagact

SEQ ID NO: 602 - RNA, 23 nt, Synthetic Construct
  source 1..23: mol_type = other RNA
tgaggtagtaggttgtatggttt

SEQ ID NO: 603 - RNA, 23 nt, Synthetic Construct
  source 1..23: mol_type = other RNA
tgaggtagtagattgtatagttc

SEQ ID NO: 604 - RNA, 23 nt, Synthetic Construct
  source 1..23: mol_type = other RNA
actggacttggagtcagaaggca

SEQ ID NO: 605 - RNA, 22 nt, Synthetic Construct
  source 1..22: mol_type = other RNA
aaaagctgggttgagagggcgg

SEQ ID NO: 606 - RNA, 20 nt, Synthetic Construct
  source 1..20: mol_type = other RNA
tgaggtagtaggttgtgtgg

SEQ ID NO: 607 - RNA, 21 nt, Synthetic Construct
  source 1..21: mol_type = other RNA
tgaggtagtagtttgtgctga

SEQ ID NO: 608 - RNA, 23 nt, Synthetic Construct
  source 1..23: mol_type = other RNA
tgaggtagtaggttgtgtggtta

SEQ ID NO: 609 - RNA, 23 nt, Synthetic Construct
  source 1..23: mol_type = other RNA
tcttggagtaggtcattgggtgg

SEQ ID NO: 610 - RNA, 22 nt, Synthetic Construct
  source 1..22: mol_type = other RNA
tgaggtagtaggttgtgtggtg

SEQ ID NO: 611 - RNA, 23 nt, Synthetic Construct
  source 1..23: mol_type = other RNA
tgaggtagtagtttgtgctgttc

SEQ ID NO: 612 - RNA, 22 nt, Synthetic Construct
  source 1..22: mol_type = other RNA
acagtagtctgcacattggttg

SEQ ID NO: 613 - RNA, 22 nt, Synthetic Construct
  source 1..22: mol_type = other RNA
ctttcagtcggatgtttgcagc

SEQ ID NO: 614 - RNA, 22 nt, Synthetic Construct
  source 1..22: mol_type = other RNA
tattgcacttgtcccgacctgt

SEQ ID NO: 615 - RNA, 22 nt, Synthetic Construct
  source 1..22: mol_type = other RNA
tccctgagaccctaacttgtga

SEQ ID NO: 616 - RNA, 21 nt, Synthetic Construct
  source 1..21: mol_type = other RNA
cgtaccgtgagtaataatgca

SEQ ID NO: 617 - RNA, 24 nt, Synthetic Construct
  source 1..24: mol_type = other RNA
tgaggtagtaggttgtatggtttt

SEQ ID NO: 618 - RNA, 20 nt, Synthetic Construct
  source 1..20: mol_type = other RNA
tagcaccatttgaaatcagt

SEQ ID NO: 619 - RNA, 21 nt, Synthetic Construct
  source 1..21: mol_type = other RNA
tgggatgagggattgaagtgg

SEQ ID NO: 620 - RNA, 22 nt, Synthetic Construct
  source 1..22: mol_type = other RNA
tcctgtactgagctgccccgat

SEQ ID NO: 621 - RNA, 23 nt, Synthetic Construct
  source 1..23: mol_type = other RNA
tggagtgtgacaatggtgtttgg

SEQ ID NO: 622 - RNA, 22 nt, Synthetic Construct
  source 1..22: mol_type = other RNA
tagcagcacgtaaatattggct

SEQ ID NO: 623 - RNA, 21 nt, Synthetic Construct
  source 1..21: mol_type = other RNA
tgtcagtttgccaaatacccc

SEQ ID NO: 624 - RNA, 23 nt, Synthetic Construct
  source 1..23: mol_type = other RNA
tgaggtagtaggttgtgtggttg

SEQ ID NO: 625 - RNA, 24 nt, Synthetic Construct
  source 1..24: mol_type = other RNA
tcttggagtaggtcattgggtgtt

SEQ ID NO: 626 - RNA, 22 nt, Synthetic Construct
  source 1..22: mol_type = other RNA
tgtcagtttgtcaaatacccaa

SEQ ID NO: 627 - RNA, 22 nt, Synthetic Construct
  source 1..22: mol_type = other RNA
acagtagcctgcacattggtta

SEQ ID NO: 628 - RNA, 24 nt, Synthetic Construct
  source 1..24: mol_type = other RNA
tgaggtagtaggttgtgtggttta

SEQ ID NO: 629 - RNA, 21 nt, Synthetic Construct
  source 1..21: mol_type = other RNA
ctggacttggagtcagaaggc

SEQ ID NO: 630 - RNA, 22 nt, Synthetic Construct
  source 1..22: mol_type = other RNA
tcttggagtaggtcattgggtg

SEQ ID NO: 631 - RNA, 22 nt, Synthetic Construct
  source 1..22: mol_type = other RNA
tccctgagaccctttaacctga

SEQ ID NO: 632 - RNA, 20 nt, Synthetic Construct
  source 1..20: mol_type = other RNA
tggagtgtgacaatggtgtt

SEQ ID NO: 633 - RNA, 23 nt, Synthetic Construct
  source 1..23: mol_type = other RNA
tgtcagtttgccaaataccccaa

SEQ ID NO: 634 - RNA, 23 nt, Synthetic Construct
  source 1..23: mol_type = other RNA
agcagcattgtacagggctataa

SEQ ID NO: 635 - RNA, 23 nt, Synthetic Construct
  source 1..23: mol_type = other RNA
tgaggtagtaggttgtatggtta

SEQ ID NO: 636 - RNA, 21 nt, Synthetic Construct
  source 1..21: mol_type = other RNA
tgtcagtttgtcaaataccca

SEQ ID NO: 637 - RNA, 24 nt, Synthetic Construct
  source 1..24: mol_type = other RNA
tgaggtagtaggttgtgtggtttg

SEQ ID NO: 638 - RNA, 19 nt, Synthetic Construct
  source 1..19: mol_type = other RNA
tgaggtagtaggttgtgtg

SEQ ID NO: 639 - RNA, 22 nt, Synthetic Construct
  source 1..22: mol_type = other RNA
tgagaactgaattccataggtt

SEQ ID NO: 640 - RNA, 24 nt, Synthetic Construct
  source 1..24: mol_type = other RNA
tcttggagtaggtcattgggtggt

SEQ ID NO: 641 - RNA, 22 nt, Synthetic Construct
  source 1..22: mol_type = other RNA
tcctgtactgagctgccccgac

SEQ ID NO: 642 - RNA, 22 nt, Synthetic Construct
  source 1..22: mol_type = other RNA
caacggaatcccaaaagcagcc

SEQ ID NO: 643 - RNA, 20 nt, Synthetic Construct
  source 1..20: mol_type = other RNA
tgagatgaagcactgtagct

SEQ ID NO: 644 - RNA, 23 nt, Synthetic Construct
  source 1..23: mol_type = other RNA
tcttggagtaggtcattgggtgt

SEQ ID NO: 645 - RNA, 23 nt, Synthetic Construct
  source 1..23: mol_type = other RNA
tcttggagtaggtcattgggtga

SEQ ID NO: 646 - RNA, 23 nt, Synthetic Construct
  source 1..23: mol_type = other RNA
aggggtgctatctgtgattgagg

SEQ ID NO: 647 - RNA, 22 nt, Synthetic Construct
  source 1..22: mol_type = other RNA
tggaatgtaaggaagtgtgtgg

SEQ ID NO: 648 - RNA, 23 nt, Synthetic Construct
  source 1..23: mol_type = other RNA
agcagcattgtacagggctatgg

SEQ ID NO: 649 - RNA, 21 nt, Synthetic Construct
  source 1..21: mol_type = other RNA
atggcactggtagaattcact

SEQ ID NO: 650 - RNA, 22 nt, Synthetic Construct
  source 1..22: mol_type = other RNA
ctttcagtcggatgtttgcagt

SEQ ID NO: 651 - RNA, 25 nt, Synthetic Construct
  source 1..25: mol_type = other RNA
tgaggtagtaggttgtgtggtttct

SEQ ID NO: 652 - RNA, 20 nt, Synthetic Construct
  source 1..20: mol_type = other RNA
aaaagctgggttgagagggt

SEQ ID NO: 653 - RNA, 20 nt, Synthetic Construct
  source 1..20: mol_type = other RNA
ctggacttggagtcagaagg

SEQ ID NO: 654 - RNA, 23 nt, Synthetic Construct
  source 1..23: mol_type = other RNA
tgaggtagtagtttgtgctgtaa

SEQ ID NO: 655 - RNA, 22 nt, Synthetic Construct
  source 1..22: mol_type = other RNA
tgaggtagtagtttgtgctgtg

SEQ ID NO: 656 - RNA, 22 nt, Synthetic Construct
  source 1..22: mol_type = other RNA
tgtcagtttgtcaaataccccg

SEQ ID NO: 657 - RNA, 27 nt, Synthetic Construct
  source 1..27: mol_type = other RNA
tcggctgttaaccgaaaggttggtggt

SEQ ID NO: 658 - RNA, 21 nt, Synthetic Construct
  source 1..21: mol_type = other RNA
tggcagtgtcttagctggttg

SEQ ID NO: 659 - RNA, 22 nt, Synthetic Construct
  source 1..22: mol_type = other RNA
tcagtgcactacagaactttga

SEQ ID NO: 660 - RNA, 20 nt, Synthetic Construct
  source 1..20: mol_type = other RNA
ttcaagtaatccaggatagg

SEQ ID NO: 661 - RNA, 22 nt, Synthetic Construct
  source 1..22: mol_type = other RNA
taacagtctacagccatggtcg

SEQ ID NO: 662 - RNA, 25 nt, Synthetic Construct
  source 1..25: mol_type = other RNA
tgaggtagtaggttgtgtggtttaa

SEQ ID NO: 663 - RNA, 22 nt, Synthetic Construct
  source 1..22: mol_type = other RNA
aacccgtagatccgatcttgtg

SEQ ID NO: 664 - RNA, 23 nt, Synthetic Construct
  source 1..23: mol_type = other RNA
tgaggggcagagagcgagacttg

SEQ ID NO: 665 - RNA, 20 nt, Synthetic Construct
  source 1..20: mol_type = other RNA
tgaggtagtaggttgtatag

SEQ ID NO: 666 - RNA, 23 nt, Synthetic Construct
  source 1..23: mol_type = other RNA
tgaggggcagagagcgagacttt

SEQ ID NO: 667 - RNA, 21 nt, Synthetic Construct
  source 1..21: mol_type = other RNA
tcgtaccgtgagtaataatga

SEQ ID NO: 668 - RNA, 22 nt, Synthetic Construct
  source 1..22: mol_type = other RNA
ttcaagtaattcaggataggta

SEQ ID NO: 669 - RNA, 22 nt, Synthetic Construct
  source 1..22: mol_type = other RNA
tgagatgaagcactgtagctct

SEQ ID NO: 670 - RNA, 22 nt, Synthetic Construct
  source 1..22: mol_type = other RNA
tgaggtagtagtttgtgctgtt

SEQ ID NO: 671 - RNA, 19 nt, Synthetic Construct
  source 1..19: mol_type = other RNA
atggatttttggagcaggg

SEQ ID NO: 672 - RNA, 23 nt, Synthetic Construct
  source 1..23: mol_type = other RNA
tttggtccccttcaaccagctgt

SEQ ID NO: 673 - RNA, 22 nt, Synthetic Construct
  source 1..22: mol_type = other RNA
ttcaagtaatccaggataggca

SEQ ID NO: 674 - RNA, 23 nt, Synthetic Construct
  source 1..23: mol_type = other RNA
tcctgtactgagctgccccgaaa

SEQ ID NO: 675 - RNA, 22 nt, Synthetic Construct
  source 1..22: mol_type = other RNA
tgtgactggttgaccagagggt

SEQ ID NO: 676 - RNA, 21 nt, Synthetic Construct
  source 1..21: mol_type = other RNA
cgtaccgtgagtaataatgct

SEQ ID NO: 677 - RNA, 23 nt, Synthetic Construct
  source 1..23: mol_type = other RNA
ttggtccccttcaaccagctgta

SEQ ID NO: 678 - RNA, 20 nt, Synthetic Construct
  source 1..20: mol_type = other RNA
tgaggggcagagagcgagac

SEQ ID NO: 679 - RNA, 24 nt, Synthetic Construct
  source 1..24: mol_type = other RNA
tgtaaacatccccgactggaagcg

SEQ ID NO: 680 - RNA, 22 nt, Synthetic Construct
  source 1..22: mol_type = other RNA
tagcagcacgtaaatattggcc

SEQ ID NO: 681 - RNA, 22 nt, Synthetic Construct
  source 1..22: mol_type = other RNA
tggagtgtgacaatggtgttta

SEQ ID NO: 682 - RNA, 21 nt, Synthetic Construct
  source 1..21: mol_type = other RNA
ttcacagtggctaagttctgt

SEQ ID NO: 683 - RNA, 22 nt, Synthetic Construct
  source 1..22: mol_type = other RNA
tgggatgagggattgaagtgga

SEQ ID NO: 684 - RNA, 21 nt, Synthetic Construct
  source 1..21: mol_type = other RNA
tgagatgaagcactgtagctc

SEQ ID NO: 685 - RNA, 23 nt, Synthetic Construct
  source 1..23: mol_type = other RNA
tgtaaacatcctcgactggaagc

SEQ ID NO: 686 - RNA, 21 nt, Synthetic Construct
  source 1..21: mol_type = other RNA
tggagtgtgacaatggtgtta

SEQ ID NO: 687 - RNA, 22 nt, Synthetic Construct
  source 1..22: mol_type = other RNA
gggagccaggaagtattgatgt

SEQ ID NO: 688 - RNA, 19 nt, Synthetic Construct
  source 1..19: mol_type = other RNA
tgggtctttgcgggcgaga

SEQ ID NO: 689 - RNA, 22 nt, Synthetic Construct
  source 1..22: mol_type = other RNA
tgtgactggttgaccagaggga

SEQ ID NO: 690 - RNA, 21 nt, Synthetic Construct
  source 1..21: mol_type = other RNA
tgtaaacatcctcgactggaa

SEQ ID NO: 691 - RNA, 19 nt, Synthetic Construct
  source 1..19: mol_type = other RNA
ttcaagtaatccaggatag

SEQ ID NO: 692 - RNA, 18 nt, Synthetic Construct
  source 1..18: mol_type = other RNA
tggatttttggagcaggg

SEQ ID NO: 693 - RNA, 19 nt, Synthetic Construct
  source 1..19: mol_type = other RNA
tagcaccatctgaaatcgg

SEQ ID NO: 694 - RNA, 22 nt, Synthetic Construct
  source 1..22: mol_type = other RNA
tccctgagaccctaacttgtgt

SEQ ID NO: 695 - RNA, 22 nt, Synthetic Construct
  source 1..22: mol_type = other RNA
tgagatgaagcactgtagctca

SEQ ID NO: 696 - RNA, 22 nt, Synthetic Construct
  source 1..22: mol_type = other RNA
ctggacttggagtcagaaggct

SEQ ID NO: 697 - RNA, 20 nt, Synthetic Construct
  source 1..20: mol_type = other RNA
actggacttggagtcagaag

SEQ ID NO: 698 - RNA, 22 nt, Synthetic Construct
  source 1..22: mol_type = other RNA
tatggcactggtagaattcact

SEQ ID NO: 699 - RNA, 20 nt, Synthetic Construct
  source 1..20: mol_type = other RNA
tgtaaacatcctcgactgga

SEQ ID NO: 700 - RNA, 24 nt, Synthetic Construct
  source 1..24: mol_type = other RNA
tgtaaacatcctcgactggaagct

SEQ ID NO: 701 - RNA, 21 nt, Synthetic Construct
  source 1..21: mol_type = other RNA
tagcaccatttgaaatcggtt

SEQ ID NO: 702 - RNA, 22 nt, Synthetic Construct
  source 1..22: mol_type = other RNA
tttggtccccttcaaccagctg

SEQ ID NO: 703 - RNA, 22 nt, Synthetic Construct
  source 1..22: mol_type = other RNA
tgtaaacatcctcgactggaag

SEQ ID NO: 704 - RNA, 19 nt, Synthetic Construct
  source 1..19: mol_type = other RNA
tgtaaacatcctcgactgg

SEQ ID NO: 705 - RNA, 24 nt, Synthetic Construct
  source 1..24: mol_type = other RNA
cgggcctggttagtacttggatgg

SEQ ID NO: 706 - RNA, 22 nt, Synthetic Construct
  source 1..22: mol_type = other RNA
acagtagtctgcacattggtaa

SEQ ID NO: 707 - RNA, 22 nt, Synthetic Construct
  source 1..22: mol_type = other RNA
tggagtgtgacaatggtgtttt

SEQ ID NO: 708 - RNA, 21 nt, Synthetic Construct
  source 1..21: mol_type = other RNA
acagtagtctgcacattggta

SEQ ID NO: 709 - RNA, 22 nt, Synthetic Construct
  source 1..22: mol_type = other RNA
ttggtccccttcaaccagctgt

SEQ ID NO: 710 - RNA, 20 nt, Synthetic Construct
  source 1..20: mol_type = other RNA
aaaccgttaccattactggg

SEQ ID NO: 711 - RNA, 23 nt, Synthetic Construct
  source 1..23: mol_type = other RNA
tgagatgaagcactgtagctctt

SEQ ID NO: 712 - RNA, 22 nt, Synthetic Construct
  source 1..22: mol_type = other RNA
ctccctcgggagggcgcgcggg

SEQ ID NO: 713 - RNA, 23 nt, Synthetic Construct
  source 1..23: mol_type = other RNA
cctccctcgggagggcgcgcggg

SEQ ID NO: 714 - RNA, 26 nt, Synthetic Construct
  source 1..26: mol_type = other RNA
tgtccccgcgaggggcccggggcggg

SEQ ID NO: 715 - RNA, 37 nt, Synthetic Construct
  source 1..37: mol_type = other RNA
tacctggttgatcctgccagtagcatatgcttgtctc

SEQ ID NO: 716 - RNA, 24 nt, Synthetic Construct
  source 1..24: mol_type = other RNA
tcctccctcgggagggcgcgcggg

SEQ ID NO: 717 - RNA, 21 nt, Synthetic Construct
  source 1..21: mol_type = other RNA
tccctcgggagggcgcgcggg

SEQ ID NO: 718 - RNA, 22 nt, Synthetic Construct
  source 1..22: mol_type = other RNA
ggtcggcccacggccctggcgg

SEQ ID NO: 719 - RNA, 29 nt, Synthetic Construct
  source 1..29: mol_type = other RNA
cgctaaaccattcgtagacgacctgcttc

SEQ ID NO: 720 - RNA, 44 nt, Synthetic Construct
  source 1..44: mol_type = other RNA
gcagccgacttagaactggtgcggaccaggggaatccgactgtt

SEQ ID NO: 721 - RNA, 21 nt, Synthetic Construct
  source 1..21: mol_type = other RNA
actggtgcggaccaggggaat

SEQ ID NO: 722 - RNA, 44 nt, Synthetic Construct
  source 1..44: mol_type = other RNA
gaagcgtttactttgaaaaaattagagtgttcaaagcaggcccg

SEQ ID NO: 723 - RNA, 28 nt, Synthetic Construct
  source 1..28: mol_type = other RNA
gactcttagcggtggatcactcggctcg

SEQ ID NO: 724 - RNA, 17 nt, Synthetic Construct
  source 1..17: mol_type = other RNA
cgactcttagcggtgga

SEQ ID NO: 725 - RNA, 43 nt, Synthetic Construct
  source 1..43: mol_type = other RNA
cgctgcgatctattgaaagtcagccctcgacacaagggtttgt

SEQ ID NO: 726 - RNA, 37 nt, Synthetic Construct
  source 1..37: mol_type = other RNA
cgcgacctcagatcagacgtggcgacccgctgaattt

SEQ ID NO: 727 - RNA, 43 nt, Synthetic Construct
  source 1..43: mol_type = other RNA
cgactcttagcggtggatcactcggctcgtgcgtcgatgaaga

SEQ ID NO: 728 - RNA, 16 nt, Synthetic Construct
  source 1..16: mol_type = other RNA
cgactcttagcggtgg

SEQ ID NO: 729 - RNA, 41 nt, Synthetic Construct
  source 1..41: mol_type = other RNA
cgcgacctcagatcagacgtggcgacccgctgaatttaagc

SEQ ID NO: 730 - RNA, 35 nt, Synthetic Construct
  source 1..35: mol_type = other RNA
tacctggttgatcctgccagtagcatatgcttgtc

SEQ ID NO: 731 - RNA, 42 nt, Synthetic Construct
  source 1..42: mol_type = other RNA
agcgtttactttgaaaaaattagagtgttcaaagcaggcccg

SEQ ID NO: 732 - RNA, 17 nt, Synthetic Construct
  source 1..17: mol_type = other RNA
cgcgacctcagatcaga

SEQ ID NO: 733 - RNA, 42 nt, Synthetic Construct
  source 1..42: mol_type = other RNA
gctgcgatctattgaaagtcagccctcgacacaagggtttgt

SEQ ID NO: 734 - RNA, 32 nt, Synthetic Construct
  source 1..32: mol_type = other RNA
ataggtttggtcctagcctttctattagctct

SEQ ID NO: 735 - RNA, 38 nt, Synthetic Construct
  source 1..38: mol_type = other RNA
tacctggttgatcctgccagtagcatatgcttgtctca

SEQ ID NO: 736 - RNA, 31 nt, Synthetic Construct
  source 1..31: mol_type = other RNA
agcaggacggtggccatggaagtcggaatcc

SEQ ID NO: 737 - RNA, 35 nt, Synthetic Construct
  source 1..35: mol_type = other RNA
gagaccgcctgggaataccgggtgctgtaggcttt

SEQ ID NO: 738 - RNA, 21 nt, Synthetic Construct
  source 1..21: mol_type = other RNA
tacctggttgatcctgccagt

SEQ ID NO: 739 - RNA, 30 nt, Synthetic Construct
  source 1..30: mol_type = other RNA
tgaacgcgcccgatctcgtctgatctcgga

SEQ ID NO: 740 - RNA, 32 nt, Synthetic Construct
  source 1..32: mol_type = other RNA
ctcccggggctacgcctgtctgagcgtcgctt

SEQ ID NO: 741 - RNA, 22 nt, Synthetic Construct
  source 1..22: mol_type = other RNA
acaatgtaggtaagggaagtcg

SEQ ID NO: 742 - RNA, 21 nt, Synthetic Construct
  source 1..21: mol_type = other RNA
cgcgacctcagatcagacgtg

SEQ ID NO: 743 - RNA, 37 nt, Synthetic Construct
  source 1..37: mol_type = other RNA
cgtccccgccccttgcctctcggcgccccctcgatgc

SEQ ID NO: 744 - RNA, 36 nt, Synthetic Construct
  source 1..36: mol_type = other RNA
cgcgacctcagatcagacgtggcgacccgctgaatt

SEQ ID NO: 745 - RNA, 18 nt, Synthetic Construct
  source 1..18: mol_type = other RNA
cgcgacctcagatcagac

SEQ ID NO: 746 - RNA, 23 nt, Synthetic Construct
  source 1..23: mol_type = other RNA
accattcgtagacgacctgcttc

SEQ ID NO: 747 - RNA, 19 nt, Synthetic Construct
  source 1..19: mol_type = other RNA
cgactcttagcggtggatc

SEQ ID NO: 748 - RNA, 42 nt, Synthetic Construct
  source 1..42: mol_type = other RNA
cgctgcgatctattgaaagtcagccctcgacacaagggtttg

SEQ ID NO: 749 - RNA, 34 nt, Synthetic Construct
  source 1..34: mol_type = other RNA
cgactcttagcggtggatcactcggctcgtgcgt

SEQ ID NO: 750 - RNA, 22 nt, Synthetic Construct
  source 1..22: mol_type = other RNA
cgactcttagcggtggatcact

SEQ ID NO: 751 - RNA, 30 nt, Synthetic Construct
  source 1..30: mol_type = other RNA
cgactcttagcggtggatcactcggctcgt

SEQ ID NO: 752 - RNA, 36 nt, Synthetic Construct
  source 1..36: mol_type = other RNA
tcttagctgagtgtcccgcggggcccgaagcgttta

SEQ ID NO: 753 - RNA, 32 nt, Synthetic Construct
  source 1..32: mol_type = other RNA
cgcgacctcagatcagacgtggcgacccgctg

SEQ ID NO: 754 - RNA, 38 nt, Synthetic Construct
  source 1..38: mol_type = other RNA
ggctttggtgactctagataacctcgggccgatcgcac

SEQ ID NO: 755 - RNA, 28 nt, Synthetic Construct
  source 1..28: mol_type = other RNA
cgactcttagcggtggatcactcggctc

SEQ ID NO: 756 - RNA, 16 nt, Synthetic Construct
  source 1..16: mol_type = other RNA
cgcgacctcagatcag

SEQ ID NO: 757 - RNA, 35 nt, Synthetic Construct
  source 1..35: mol_type = other RNA
cgactcttagcggtggatcactcggctcgtgcgtc

SEQ ID NO: 758 - RNA, 31 nt, Synthetic Construct
  source 1..31: mol_type = other RNA
cgcgacctcagatcagacgtggcgacccgct

SEQ ID NO: 759 - RNA, 39 nt, Synthetic Construct
  source 1..39: mol_type = other RNA
cgactcttagcggtggatcactcggctcgtgcgtcgatg

SEQ ID NO: 760 - RNA, 24 nt, Synthetic Construct
  source 1..24: mol_type = other RNA
cgactcttagcggtggatcactcg

SEQ ID NO: 761 - RNA, 21 nt, Synthetic Construct
  source 1..21: mol_type = other RNA
agcaggacggtggccatggaa

SEQ ID NO: 762 - RNA, 18 nt, Synthetic Construct
  source 1..18: mol_type = other RNA
cgactcttagcggtggat

SEQ ID NO: 763 - RNA, 38 nt, Synthetic Construct
  source 1..38: mol_type = other RNA
cgtccccgccccttgcctctcggcgccccctcgatgct

SEQ ID NO: 764 - RNA, 29 nt, Synthetic Construct
  source 1..29: mol_type = other RNA
cccggggctacgcctgtctgagcgtcgct

SEQ ID NO: 765 - RNA, 23 nt, Synthetic Construct
  source 1..23: mol_type = other RNA
cgactcttagcggtggatcactc

SEQ ID NO: 766 - RNA, 22 nt, Synthetic Construct
  source 1..22: mol_type = other RNA
cgcgacctcagatcagacgtgg

SEQ ID NO: 767 - RNA, 19 nt, Synthetic Construct
  source 1..19: mol_type = other RNA
cgtagttggatcttgggag

SEQ ID NO: 768 - RNA, 30 nt, Synthetic Construct
  source 1..30: mol_type = other RNA
cgcgacctcagatcagacgtggcgacccgc

SEQ ID NO: 769 - RNA, 21 nt, Synthetic Construct
  source 1..21: mol_type = other RNA
tacgcctgtctgagcgtcgct

SEQ ID NO: 770 - RNA, 32 nt, Synthetic Construct
  source 1..32: mol_type = other RNA
cgactcttagcggtggatcactcggctcgtgc

SEQ ID NO: 771 - RNA, 27 nt, Synthetic Construct
  source 1..27: mol_type = other RNA
cgactcttagcggtggatcactcggct

SEQ ID NO: 772 - RNA, 29 nt, Synthetic Construct
  source 1..29: mol_type = other RNA
gactcttagcggtggatcactcggctcgt

SEQ ID NO: 773 - RNA, 39 nt, Synthetic Construct
  source 1..39: mol_type = other RNA
ggctttggtgactctagataacctcgggccgatcgcacg

SEQ ID NO: 774 - RNA, 31 nt, Synthetic Construct
  source 1..31: mol_type = other RNA
cgactcttagcggtggatcactcggctcgtg

SEQ ID NO: 775 - RNA, 29 nt, Synthetic Construct
  source 1..29: mol_type = other RNA
cgactcttagcggtggatcactcggctcg

SEQ ID NO: 776 - RNA, 27 nt, Synthetic Construct
  source 1..27: mol_type = other RNA
gactcttagcggtggatcactcggctc

SEQ ID NO: 777 - RNA, 36 nt, Synthetic Construct
  source 1..36: mol_type = other RNA
cgactcttagcggtggatcactcggctcgtgcgtcg

SEQ ID NO: 778 - RNA, 24 nt, Synthetic Construct
  source 1..24: mol_type = other RNA
gctaaacctagccccaaacccact

SEQ ID NO: 779 - RNA, 30 nt, Synthetic Construct
  source 1..30: mol_type = other RNA
gttaaaaagctcgtagttggatcttgggag

SEQ ID NO: 780 - RNA, 22 nt, Synthetic Construct
  source 1..22: mol_type = other RNA
tacgcctgtctgagcgtcgctt

SEQ ID NO: 781 - RNA, 41 nt, Synthetic Construct
  source 1..41: mol_type = other RNA
gctgcgatctattgaaagtcagccctcgacacaagggtttg

SEQ ID NO: 782 - RNA, 44 nt, Synthetic Construct
  source 1..44: mol_type = other RNA
ttaaagttgctgcagttaaaaagctcgtagttggatcttgggag

SEQ ID NO: 783 - RNA, 26 nt, Synthetic Construct
  source 1..26: mol_type = other RNA
cgactcttagcggtggatcactcggc

SEQ ID NO: 784 - RNA, 34 nt, Synthetic Construct
  source 1..34: mol_type = other RNA
tcctcccggggctacgcctgtctgagcgtcgctt

SEQ ID NO: 785 - RNA, 22 nt, Synthetic Construct
  source 1..22: mol_type = other RNA
gctcgtagttggatcttgggag

SEQ ID NO: 786 - RNA, 22 nt, Synthetic Construct
  source 1..22: mol_type = other RNA
gctaaacctagccccaaaccca

SEQ ID NO: 787 - RNA, 35 nt, Synthetic Construct
  source 1..35: mol_type = other RNA
cgcgacctcagatcagacgtggcgacccgctgaat

SEQ ID NO: 788 - RNA, 29 nt, Synthetic Construct
  source 1..29: mol_type = other RNA
cgcgacctcagatcagacgtggcgacccg

SEQ ID NO: 789 - RNA, 29 nt, Synthetic Construct
  source 1..29: mol_type = other RNA
gctaaacctagccccaaacccactccacc

SEQ ID NO: 790 - RNA, 20 nt, Synthetic Construct
  source 1..20: mol_type = other RNA
cgcgacctcagatcagacgt

SEQ ID NO: 791 - RNA, 23 nt, Synthetic Construct
  source 1..23: mol_type = other RNA
acaatgtaggtaagggaagtcgg

SEQ ID NO: 792 - RNA, 24 nt, Synthetic Construct
  source 1..24: mol_type = other RNA
ctgagaagacggtcgaacttgact

SEQ ID NO: 793 - RNA, 23 nt, Synthetic Construct
  source 1..23: mol_type = other RNA
cgcgacctcagatcagacgtggc

SEQ ID NO: 794 - RNA, 18 nt, Synthetic Construct
  source 1..18: mol_type = other RNA
aagcggggctgggcgcgc

SEQ ID NO: 795 - RNA, 26 nt, Synthetic Construct
  source 1..26: mol_type = other RNA
gctaaacctagccccaaacccactcc

SEQ ID NO: 796 - RNA, 21 nt, Synthetic Construct
  source 1..21: mol_type = other RNA
gctaaacctagccccaaaccc

SEQ ID NO: 797 - RNA, 20 nt, Synthetic Construct
  source 1..20: mol_type = other RNA
tcgtagttggatcttgggag

SEQ ID NO: 798 - RNA, 28 nt, Synthetic Construct
  source 1..28: mol_type = other RNA
agcgctgagaagacggtcgaacttgact

SEQ ID NO: 799 - RNA, 19 nt, Synthetic Construct
  source 1..19: mol_type = other RNA
cgcgacctcagatcagacg

SEQ ID NO: 800 - RNA, 24 nt, Synthetic Construct
  source 1..24: mol_type = other RNA
cgcgacctcagatcagacgtggcg

SEQ ID NO: 801 - RNA, 22 nt, Synthetic Construct
  source 1..22: mol_type = other RNA
agcaggacggtggccatggaag

SEQ ID NO: 802 - RNA, 26 nt, Synthetic Construct
  source 1..26: mol_type = other RNA
gactcttagcggtggatcactcggct

SEQ ID NO: 803 - RNA, 34 nt, Synthetic Construct
  source 1..34: mol_type = other RNA
gctaaacctagccccaaacccactccaccttact

SEQ ID NO: 804 - RNA, 39 nt, Synthetic Construct
  source 1..39: mol_type = other RNA
gtctacggccataccaccctgaacgcgcccgatctcgtc

SEQ ID NO: 805 - RNA, 41 nt, Synthetic Construct
  source 1..41: mol_type = other RNA
agcaggacggtggccatggaagtcggaatccgctaaggagt

SEQ ID NO: 806 - RNA, 30 nt, Synthetic Construct
  source 1..30: mol_type = other RNA
gctaaacctagccccaaacccactccacct

SEQ ID NO: 807 - RNA, 27 nt, Synthetic Construct
  source 1..27: mol_type = other RNA
agggctgggtcggtcgggctggggcgc

SEQ ID NO: 808 - RNA, 32 nt, Synthetic Construct
  source 1..32: mol_type = other RNA
gctaaacctagccccaaacccactccacctta

SEQ ID NO: 809 - RNA, 43 nt, Synthetic Construct
  source 1..43: mol_type = other RNA
ttaaagttgctgcagttaaaaagctcgtagttggatcttggga

SEQ ID NO: 810 - RNA, 25 nt, Synthetic Construct
  source 1..25: mol_type = other RNA
cgactcttagcggtggatcactcgg

SEQ ID NO: 811 - RNA, 28 nt, Synthetic Construct
  source 1..28: mol_type = other RNA
ccccccactgctaaatttgactggctta

SEQ ID NO: 812 - RNA, 26 nt, Synthetic Construct
  source 1..26: mol_type = other RNA
ccccccactgctaaatttgactggct

SEQ ID NO: 813 - RNA, 29 nt, Synthetic Construct
  source 1..29: mol_type = other RNA
ccccccactgctaaatttgactggctttt

SEQ ID NO: 814 - RNA, 26 nt, Synthetic Construct
  source 1..26: mol_type = other RNA
cccccactgctaaatttgactggctt

SEQ ID NO: 815 - RNA, 28 nt, Synthetic Construct
  source 1..28: mol_type = other RNA
ccccccactgctaaatttgactggcttt

SEQ ID NO: 816 - RNA, 29 nt, Synthetic Construct
  source 1..29: mol_type = other RNA
ccccccactgctaaatttgactggcttta

SEQ ID NO: 817 - RNA, 27 nt, Synthetic Construct
  source 1..27: mol_type = other RNA
ccccccactgctaaatttgactggttt

SEQ ID NO: 818 - RNA, 27 nt, Synthetic Construct
  source 1..27: mol_type = other RNA
cccccactgctaaatttgactggcttt

SEQ ID NO: 819 - RNA, 30 nt, Synthetic Construct
  source 1..30: mol_type = other RNA
ccccccactgctaaatttgactggcttttt

SEQ ID NO: 820 - RNA, 27 nt, Synthetic Construct
  source 1..27: mol_type = other RNA
ccccccactgctaaatttgactggcta

SEQ ID NO: 821 - RNA, 27 nt, Synthetic Construct
  source 1..27: mol_type = other RNA
ccccccactgctaaatttgactggctt

SEQ ID NO: 822 - RNA, 27 nt, Synthetic Construct
  source 1..27: mol_type = other RNA
cccccactgctaaatttgactggctta

SEQ ID NO: 823 - RNA, 28 nt, Synthetic Construct
  source 1..28: mol_type = other RNA
cccccactgctaaatttgactggctttt

SEQ ID NO: 824 - RNA, 26 nt, Synthetic Construct
  source 1..26: mol_type = other RNA
ccccccactgctaaatttgactggtt

SEQ ID NO: 825 - RNA, 32 nt, Synthetic Construct
  source 1..32: mol_type = other RNA
ccccccactgctaaatttgactggcttttttt

SEQ ID NO: 826 - RNA, 26 nt, Synthetic Construct
  source 1..26: mol_type = other RNA
cccccactgctaaatttgactggcta

SEQ ID NO: 827 - RNA, 26 nt, Synthetic Construct
  source 1..26: mol_type = other RNA
ccccccactgctaaatttgactggta

SEQ ID NO: 828 - RNA, 32 nt, Synthetic Construct
  source 1..32: mol_type = other RNA
tacaaccccccactgctaaatttgactggctt

SEQ ID NO: 829 - RNA, 28 nt, Synthetic Construct
  source 1..28: mol_type = other RNA
ccccccacaaccgcgcttgactagcttg

SEQ ID NO: 830 - RNA, 28 nt, Synthetic Construct
  source 1..28: mol_type = other RNA
ccccccactgctaaatttgactggctat

SEQ ID NO: 831 - RNA, 25 nt, Synthetic Construct
  source 1..25: mol_type = other RNA
cccccactgctaaatttgactggct

SEQ ID NO: 832 - RNA, 20 nt, Synthetic Construct
  source 1..20: mol_type = other RNA
ggctggtccgagtgcagtgg

SEQ ID NO: 833 - RNA, 29 nt, Synthetic Construct
  source 1..29: mol_type = other RNA
ccccccactgctaaatttgactggctatt

SEQ ID NO: 834 - RNA, 25 nt, Synthetic Construct
  source 1..25: mol_type = other RNA
ccccccactgctaaatttgactggt

SEQ ID NO: 835 - RNA, 33 nt, Synthetic Construct
  source 1..33: mol_type = other RNA
tacaaccccccactgctaaatttgactggcttt

SEQ ID NO: 836 - RNA, 36 nt, Synthetic Construct
  source 1..36: mol_type = other RNA
ctccagcctgagcaacatagcgagaccccgtctcta

SEQ ID NO: 837 - RNA, 31 nt, Synthetic Construct
  source 1..31: mol_type = other RNA
ccccccactgctaaatttgactggctttttt

SEQ ID NO: 838 - RNA, 28 nt, Synthetic Construct
  source 1..28: mol_type = other RNA
ccccccactgctaaatttgactggtttt

SEQ ID NO: 839 - RNA, 24 nt, Synthetic Construct
  source 1..24: mol_type = other RNA
ccccccactgctaaatttgactgg

SEQ ID NO: 840 - RNA, 33 nt, Synthetic Construct
  source 1..33: mol_type = other RNA
ccccccactgctaaatttgactggctttttttt

SEQ ID NO: 841 - RNA, 37 nt, Synthetic Construct
  source 1..37: mol_type = other RNA
ctccagcctgagcaacatagcgagaccccgtctctta

SEQ ID NO: 842 - RNA, 27 nt, Synthetic Construct
  source 1..27: mol_type = other RNA
cccccacaaccgcgcttgactagcttg

SEQ ID NO: 843 - RNA, 25 nt, Synthetic Construct
  source 1..25: mol_type = other RNA
ccccccactgctaaatttgactggc

SEQ ID NO: 844 - RNA, 18 nt, Synthetic Construct
  source 1..18: mol_type = other RNA
tagtgggttatcagaact

SEQ ID NO: 845 - RNA, 19 nt, Synthetic Construct
  source 1..19: mol_type = other RNA
gtagtgggttatcagaact

SEQ ID NO: 846 - RNA, 28 nt, Synthetic Construct
  source 1..28: mol_type = other RNA
ccccccactgctaaatttgactggcttg

SEQ ID NO: 847 - RNA, 26 nt, Synthetic Construct
  source 1..26: mol_type = other RNA
cccccactgctaaatttgactggttt

SEQ ID NO: 848 - RNA, 27 nt, Synthetic Construct
  source 1..27: mol_type = other RNA
ctcccactgcttcacttgactagcctt

SEQ ID NO: 849 - RNA, 17 nt, Synthetic Construct
  source 1..17: mol_type = other RNA
tagtgggttatcagaac

SEQ ID NO: 850 - RNA, 27 nt, Synthetic Construct
  source 1..27: mol_type = other RNA
ccccccactgctaaatttgactggtta

SEQ ID NO: 851 - RNA, 29 nt, Synthetic Construct
  source 1..29: mol_type = other RNA
ccccccactgctaaatttgactggcttaa

SEQ ID NO: 852 - RNA, 34 nt, Synthetic Construct
  source 1..34: mol_type = other RNA
tacaaccccccactgctaaatttgactggctttt

SEQ ID NO: 853 - RNA, 29 nt, Synthetic Construct
  source 1..29: mol_type = other RNA
cccccactgctaaatttgactggcttttt

SEQ ID NO: 854 - RNA, 36 nt, Synthetic Construct
  source 1..36: mol_type = other RNA
ctccagcctgagcaacatagcgagaccccgtctctt

SEQ ID NO: 855 - RNA, 28 nt, Synthetic Construct
  source 1..28: mol_type = other RNA
cccccactgctaaatttgactggcttta

SEQ ID NO: 856 - RNA, 27 nt, Synthetic Construct
  source 1..27: mol_type = other RNA
ccccccactgctaaatttgactggctg

SEQ ID NO: 857 - RNA, 19 nt, Synthetic Construct
  source 1..19: mol_type = other RNA
tagtgggttatcagaactt

SEQ ID NO: 858 - RNA, 28 nt, Synthetic Construct
  source 1..28: mol_type = other RNA
ccccccactgctaaaatttgactggctt

SEQ ID NO: 859 - RNA, 18 nt, Synthetic Construct
  source 1..18: mol_type = other RNA
tagtgggttatcagaaca

SEQ ID NO: 860 - RNA, 15 nt, Synthetic Construct
  source 1..15: mol_type = other RNA
gcggaaggatcattg

SEQ ID NO: 861 - RNA, 37 nt, Synthetic Construct
  source 1..37: mol_type = other RNA
ctccagcctgggcaacatagcgagaccccgtctctta

SEQ ID NO: 862 - RNA, 24 nt, Synthetic Construct
  source 1..24: mol_type = other RNA
tattgcacttgtcccggcctgtat

SEQ ID NO: 863 - RNA, 26 nt, Synthetic Construct
  source 1..26: mol_type = other RNA
ctcccactgcttcacttgactagcct

SEQ ID NO: 864 - RNA, 28 nt, Synthetic Construct
  source 1..28: mol_type = other RNA
accccccactgctaaatttgactggctt

SEQ ID NO: 865 - RNA, 34 nt, Synthetic Construct
  source 1..34: mol_type = other RNA
tatacaaccccccactgctaaatttgactggctt

SEQ ID NO: 866 - RNA, 25 nt, Synthetic Construct
  source 1..25: mol_type = other RNA
cccccactgctaaatttgactggtt

SEQ ID NO: 867 - RNA, 27 nt, Synthetic Construct
  source 1..27: mol_type = other RNA
ctcccactgcttcacttgactagccta

SEQ ID NO: 868 - RNA, 33 nt, Synthetic Construct
  source 1..33: mol_type = other RNA
tacaaccccccactgctaaatttgactggctta

SEQ ID NO: 869 - RNA, 29 nt, Synthetic Construct
  source 1..29: mol_type = other RNA
ccccccactgctaaatttgactggctata

SEQ ID NO: 870 - RNA, 27 nt, Synthetic Construct
  source 1..27: mol_type = other RNA
ccccccactgctaaatttgactggtat

SEQ ID NO: 871 - RNA, 32 nt, Synthetic Construct
  source 1..32: mol_type = other RNA
tacaaccccccactgctaaatttgactggcta

SEQ ID NO: 872 - RNA, 36 nt, Synthetic Construct
  source 1..36: mol_type = other RNA
ctccagcctgggcaacatagcgagaccccgtctcta

SEQ ID NO: 873 - RNA, 30 nt, Synthetic Construct
  source 1..30: mol_type = other RNA
ccccccactgctaaatttgactggcttatt

SEQ ID NO: 874 - RNA, 26 nt, Synthetic Construct
  source 1..26: mol_type = other RNA
tcccactgcttcacttgactagcctt

SEQ ID NO: 875 - RNA, 30 nt, Synthetic Construct
  source 1..30: mol_type = other RNA
ccccccactgctaaatttgactggcttaaa

SEQ ID NO: 876 - RNA, 15 nt, Synthetic Construct
  source 1..15: mol_type = other RNA
ccccccacaaccgcg

SEQ ID NO: 877 - RNA, 36 nt, Synthetic Construct
  source 1..36: mol_type = other RNA
ctccagcctgggcaacatagcgagaccccgtctctt

SEQ ID NO: 878 - RNA, 26 nt, Synthetic Construct
  source 1..26: mol_type = other RNA
ccccccactgctaaatttgactggaa

SEQ ID NO: 879 - RNA, 34 nt, Synthetic Construct
  source 1..34: mol_type = other RNA
ccccccactgctaaatttgactggcttttttttt

SEQ ID NO: 880 - RNA, 27 nt, Synthetic Construct
  source 1..27: mol_type = other RNA
cttctcactactgcacttgactagtct

SEQ ID NO: 881 - RNA, 25 nt, Synthetic Construct
  source 1..25: mol_type = other RNA
tcccactgcttcacttgactagcct

SEQ ID NO: 882 - RNA, 29 nt, Synthetic Construct
  source 1..29: mol_type = other RNA
ccccccactgctaaatttgactggcttat

SEQ ID NO: 883 - RNA, 24 nt, Synthetic Construct
  source 1..24: mol_type = other RNA
tgtcagtttgtcaaataccccata

SEQ ID NO: 884 - RNA, 16 nt, Synthetic Construct
  source 1..16: mol_type = other RNA
tgcggaaggatcattg

SEQ ID NO: 885 - RNA, 17 nt, Synthetic Construct
  source 1..17: mol_type = other RNA
ctgcggaaggatcattg

SEQ ID NO: 886 - RNA, 22 nt, Synthetic Construct
  source 1..22: mol_type = other RNA
aaggtagatagaacaggtcttg

SEQ ID NO: 887 - RNA, 25 nt, Synthetic Construct
  source 1..25: mol_type = other RNA
ccccactgctaaatttgactggctt

SEQ ID NO: 888 - RNA, 18 nt, Synthetic Construct
  source 1..18: mol_type = other RNA
gtagtgggttatcagaac

SEQ ID NO: 889 - RNA, 27 nt, Synthetic Construct
  source 1..27: mol_type = other RNA
ccccccactgctaaatttgactggatt

SEQ ID NO: 890 - RNA, 26 nt, Synthetic Construct
  source 1..26: mol_type = other RNA
ccccccactgctaaatttgactggat

SEQ ID NO: 891 - RNA, 28 nt, Synthetic Construct
  source 1..28: mol_type = other RNA
ccccccactgctaaatttgactggttta

SEQ ID NO: 892 - RNA, 23 nt, Synthetic Construct
  source 1..23: mol_type = other RNA
ccccccactgctaaatttgactg

SEQ ID NO: 893 - RNA, 31 nt, Synthetic Construct
  source 1..31: mol_type = other RNA
cccccactgctaaatttgactggcttttttt

SEQ ID NO: 894 - RNA, 17 nt, Synthetic Construct
  source 1..17: mol_type = other RNA
ggctggtccgatggtag

SEQ ID NO: 895 - RNA, 28 nt, Synthetic Construct
  source 1..28: mol_type = other RNA
ccccccactgctaaatttgactggcttc

SEQ ID NO: 896 - RNA, 25 nt, Synthetic Construct
  source 1..25: mol_type = other RNA
cccccactgctaaatttgactggta

SEQ ID NO: 897 - RNA, 24 nt, Synthetic Construct
  source 1..24: mol_type = other RNA
agcagcattgtacagggctatgta

SEQ ID NO: 898 - RNA, 22 nt, Synthetic Construct
  source 1..22: mol_type = other RNA
ccccccactgctaaatttgact

SEQ ID NO: 899 - RNA, 19 nt, Synthetic Construct
  source 1..19: mol_type = other RNA
agttggtccgagtgttgtg

SEQ ID NO: 900 - RNA, 29 nt, Synthetic Construct
  source 1..29: mol_type = other RNA
ccccccactgctaaatttgactggctttg

SEQ ID NO: 901 - RNA, 23 nt, Synthetic Construct
  source 1..23: mol_type = other RNA
ttatggtttgcctgggactgaat

SEQ ID NO: 902 - RNA, 29 nt, Synthetic Construct
  source 1..29: mol_type = other RNA
ccccccactgctaaatttgactggttttt

SEQ ID NO: 903 - RNA, 24 nt, Synthetic Construct
  source 1..24: mol_type = other RNA
ttcaagtaatccaggataggctat

SEQ ID NO: 904 - RNA, 35 nt, Synthetic Construct
  source 1..35: mol_type = other RNA
tatacaaccccccactgctaaatttgactggcttt

SEQ ID NO: 905 - RNA, 27 nt, Synthetic Construct
  source 1..27: mol_type = other RNA
ccccccacaaccgcgcttgactagctt

SEQ ID NO: 906 - RNA, 34 nt, Synthetic Construct
  source 1..34: mol_type = other RNA
ttctccactcccactgcttcacttgactagcctt

SEQ ID NO: 907 - RNA, 28 nt, Synthetic Construct
  source 1..28: mol_type = other RNA
cttctcactactgcacttgactagtctt

SEQ ID NO: 908 - RNA, 20 nt, Synthetic Construct
  source 1..20: mol_type = other RNA
tccccggcatctccaccatt

SEQ ID NO: 909 - RNA, 26 nt, Synthetic Construct
  source 1..26: mol_type = other RNA
cttctcactactgcacttgactagtc

SEQ ID NO: 910 - RNA, 30 nt, Synthetic Construct
  source 1..30: mol_type = other RNA
ccccccactgctaaatttgactggctattt

SEQ ID NO: 911 - RNA, 16 nt, Synthetic Construct
  source 1..16: mol_type = other RNA
ccccccactgctaatt

SEQ ID NO: 912 - RNA, 27 nt, Synthetic Construct
  source 1..27: mol_type = other RNA
ccccccactgcgaaatttgactggctt

SEQ ID NO: 913 - RNA, 21 nt, Synthetic Construct
  source 1..21: mol_type = other RNA
aggtagatagaacaggtcttg

SEQ ID NO: 914 - RNA, 31 nt, Synthetic Construct
  source 1..31: mol_type = other RNA
tacaaccccccactgctaaatttgactggct

SEQ ID NO: 915 - RNA, 32 nt, Synthetic Construct
  source 1..32: mol_type = other RNA
cccccactgctaaatttgactggctttttttt

SEQ ID NO: 916 - RNA, 25 nt, Synthetic Construct
  source 1..25: mol_type = other RNA
tattgcacttgtcccggcctgtaat

SEQ ID NO: 917 - RNA, 25 nt, Synthetic Construct
  source 1..25: mol_type = other RNA
agcagcattgtacagggctatgagt

SEQ ID NO: 918 - RNA, 25 nt, Synthetic Construct
  source 1..25: mol_type = other RNA
ccccccactgctaaatttgactgga

SEQ ID NO: 919 - RNA, 33 nt, Synthetic Construct
  source 1..33: mol_type = other RNA
tctccactcccactgcttcacttgactagccta

SEQ ID NO: 920 - RNA, 26 nt, Synthetic Construct
  source 1..26: mol_type = other RNA
tcccactgcttcacttgactagccta

SEQ ID NO: 921 - RNA, 20 nt, Synthetic Construct
  source 1..20: mol_type = other RNA
atcccactcctgacaccatt

SEQ ID NO: 922 - RNA, 33 nt, Synthetic Construct
  source 1..33: mol_type = other RNA
tctccactcccactgcttcacttgactagcctt

SEQ ID NO: 923 - RNA, 23 nt, Synthetic Construct
  source 1..23: mol_type = other RNA
aaggtagatagaacaggtcttgt

SEQ ID NO: 924 - RNA, 24 nt, Synthetic Construct
  source 1..24: mol_type = other RNA
tgagaactgaattccatgggttat

SEQ ID NO: 925 - RNA, 29 nt, Synthetic Construct
  source 1..29: mol_type = other RNA
ccccccactgctaaaaatttgactggctt

SEQ ID NO: 926 - RNA, 22 nt, Synthetic Construct
  source 1..22: mol_type = other RNA
tagtgggttatcagaacttatt

SEQ ID NO: 927 - RNA, 31 nt, Synthetic Construct
  source 1..31: mol_type = other RNA
ccccccactgctaaatttgactggctatttt

SEQ ID NO: 928 - RNA, 24 nt, Synthetic Construct
  source 1..24: mol_type = other RNA
tggctcagttcagcaggaacagta

SEQ ID NO: 929 - RNA, 29 nt, Synthetic Construct
  source 1..29: mol_type = other RNA
ccccccactgctaaatttgactggcttct

SEQ ID NO: 930 - RNA, 31 nt, Synthetic Construct
  source 1..31: mol_type = other RNA
ccccccactgctaaatttgactggcttattt

SEQ ID NO: 931 - RNA, 27 nt, Synthetic Construct
  source 1..27: mol_type = other RNA
ccccccactgctaaatttgactggcgt

SEQ ID NO: 932 - RNA, 34 nt, Synthetic Construct
  source 1..34: mol_type = other RNA
ttctccactcccactgcttcacttgactagccta

SEQ ID NO: 933 - RNA, 23 nt, Synthetic Construct
  source 1..23: mol_type = other RNA
cccccactgctaaatttgactgg

SEQ ID NO: 934 - RNA, 30 nt, Synthetic Construct
  source 1..30: mol_type = other RNA
caaccccccactgctaaatttgactggctt

SEQ ID NO: 935 - RNA, 32 nt, Synthetic Construct
  source 1..32: mol_type = other RNA
ccccccactgctaaatttgactggtttttttt

SEQ ID NO: 936 - RNA, 28 nt, Synthetic Construct
  source 1..28: mol_type = other RNA
ccccccacaaccgcgcttgactagcttt

SEQ ID NO: 937 - RNA, 23 nt, Synthetic Construct
  source 1..23: mol_type = other RNA
agtcagtttgtcaaataccccaa

SEQ ID NO: 938 - RNA, 15 nt, Synthetic Construct
  source 1..15: mol_type = other RNA
gagaggtcccgggtt

SEQ ID NO: 939 - RNA, 33 nt, Synthetic Construct
  source 1..33: mol_type = other RNA
ttctccactcccactgcttcacttgactagcct

SEQ ID NO: 940 - RNA, 34 nt, Synthetic Construct
  source 1..34: mol_type = other RNA
tacaaccccccactgctaaatttgactggcttta

SEQ ID NO: 941 - RNA, 27 nt, Synthetic Construct
  source 1..27: mol_type = other RNA
cccccactgctaaatttgactggctat

SEQ ID NO: 942 - RNA, 25 nt, Synthetic Construct
  source 1..25: mol_type = other RNA
tattgcacttgtcccggcctgtatt

SEQ ID NO: 943 - RNA, 30 nt, Synthetic Construct
  source 1..30: mol_type = other RNA
cccccactgctaaatttgactggctttttt

SEQ ID NO: 944 - RNA, 37 nt, Synthetic Construct
  source 1..37: mol_type = other RNA
ctccagcctgagcaacatagcgagaccccgtctcttt

SEQ ID NO: 945 - RNA, 24 nt, Synthetic Construct
  source 1..24: mol_type = other RNA
tggagagaaaggcagttcctgaat

SEQ ID NO: 946 - RNA, 27 nt, Synthetic Construct
  source 1..27: mol_type = other RNA
cccccaactgctaaatttgactggctt

SEQ ID NO: 947 - RNA, 24 nt, Synthetic Construct
  source 1..24: mol_type = other RNA
tgagaactgaattccatgggttta

SEQ ID NO: 948 - RNA, 25 nt, Synthetic Construct
  source 1..25: mol_type = other RNA
agctcggtctgaggcccctcagtat

SEQ ID NO: 949 - RNA, 17 nt, Synthetic Construct
  source 1..17: mol_type = other RNA
agtgggttatcagaact

SEQ ID NO: 950 - RNA, 30 nt, Synthetic Construct
  source 1..30: mol_type = other RNA
ccccccactgctaaatttgactggctttta

SEQ ID NO: 951 - RNA, 28 nt, Synthetic Construct
  source 1..28: mol_type = other RNA
actcccactgcttcacttgactagccta

SEQ ID NO: 952 - RNA, 24 nt, Synthetic Construct
  source 1..24: mol_type = other RNA
tgaggtagtagtttgtgctgttat

SEQ ID NO: 953 - RNA, 22 nt, Synthetic Construct
  source 1..22: mol_type = other RNA
aggtagatagaacaggtcttgt

SEQ ID NO: 954 - RNA, 32 nt, Synthetic Construct
  source 1..32: mol_type = other RNA
tctccactcccactgcttcacttgactagcct

SEQ ID NO: 955 - RNA, 31 nt, Synthetic Construct
  source 1..31: mol_type = other RNA
acaaccccccactgctaaatttgactggctt

SEQ ID NO: 956 - RNA, 27 nt, Synthetic Construct
  source 1..27: mol_type = other RNA
ccccccactggtaaatttgactggctt

SEQ ID NO: 957 - RNA, 27 nt, Synthetic Construct
  source 1..27: mol_type = other RNA
ccccccactgctaaatttgagtggctt

SEQ ID NO: 958 - RNA, 33 nt, Synthetic Construct
  source 1..33: mol_type = other RNA
cccccacaaccgcgcttgactagcttgctgttt

SEQ ID NO: 959 - RNA, 27 nt, Synthetic Construct
  source 1..27: mol_type = other RNA
ccccccactgctaaagttgactggctt

SEQ ID NO: 960 - RNA, 31 nt, Synthetic Construct
  source 1..31: mol_type = other RNA
ctgcatggactacatatggttgagggttgta

SEQ ID NO: 961 - RNA, 28 nt, Synthetic Construct
  source 1..28: mol_type = other RNA
ccccccactgctaaatttgactggctaa

SEQ ID NO: 962 - RNA, 15 nt, Synthetic Construct
  source 1..15: mol_type = other RNA
gctatgggatttgtt

SEQ ID NO: 963 - RNA, 28 nt, Synthetic Construct
  source 1..28: mol_type = other RNA
cccccactgctaaatttgactggctatt

SEQ ID NO: 964 - RNA, 28 nt, Synthetic Construct
  source 1..28: mol_type = other RNA
actcccactgcttcacttgactagcctt

SEQ ID NO: 965 - RNA, 28 nt, Synthetic Construct
  source 1..28: mol_type = other RNA
ccccccactgctaaatttgactggctct

SEQ ID NO: 966 - RNA, 27 nt, Synthetic Construct
  source 1..27: mol_type = other RNA
acccccactgctaaatttgactggctt

SEQ ID NO: 967 - RNA, 35 nt, Synthetic Construct
  source 1..35: mol_type = other RNA
ccccccactgctaaatttgactggctttttttttt

SEQ ID NO: 968 - RNA, 19 nt, Synthetic Construct
  source 1..19: mol_type = other RNA
tccccggcatctccaccat

SEQ ID NO: 969 - RNA, 27 nt, Synthetic Construct
  source 1..27: mol_type = other RNA
ccccccactgctaaatttgactgggtt

SEQ ID NO: 970 - RNA, 30 nt, Synthetic Construct
  source 1..30: mol_type = other RNA
tccctgtggtctagtggttaggattcggcg

SEQ ID NO: 971 - RNA, 31 nt, Synthetic Construct
  source 1..31: mol_type = other RNA
ccccccactgctaaatttgactggttttttt

SEQ ID NO: 972 - RNA, 18 nt, Synthetic Construct
  source 1..18: mol_type = other RNA
agttggtccgagtgttgt

SEQ ID NO: 973 - RNA, 15 nt, Synthetic Construct
  source 1..15: mol_type = other RNA
tgaggtagtagtttg

SEQ ID NO: 974 - RNA, 25 nt, Synthetic Construct
  source 1..25: mol_type = other RNA
tgtcagtttgtcaaataccccaata

SEQ ID NO: 975 - RNA, 19 nt, Synthetic Construct
  source 1..19: mol_type = other RNA
atcccactcctgacaccat

SEQ ID NO: 976 - RNA, 26 nt, Synthetic Construct
  source 1..26: mol_type = other RNA
ttctcactactgcacttgactagtct

SEQ ID NO: 977 - RNA, 27 nt, Synthetic Construct
  source 1..27: mol_type = other RNA
ccccccactcctaaatttgactggctt

SEQ ID NO: 978 - RNA, 27 nt, Synthetic Construct
  source 1..27: mol_type = other RNA
ccccccagtgctaaatttgactggctt

SEQ ID NO: 979 - RNA, 20 nt, Synthetic Construct
  source 1..20: mol_type = other RNA
accctgctcgctgcgccatt

SEQ ID NO: 980 - RNA, 28 nt, Synthetic Construct
  source 1..28: mol_type = other RNA
cttctcactactgcacttgactagtcta

SEQ ID NO: 981 - RNA, 20 nt, Synthetic Construct
  source 1..20: mol_type = other RNA
gtagtgggttatcagaactt

SEQ ID NO: 982 - RNA, 27 nt, Synthetic Construct
  source 1..27: mol_type = other RNA
ccccccactgctaaatttgactcgctt

SEQ ID NO: 983 - RNA, 27 nt, Synthetic Construct
  source 1..27: mol_type = other RNA
cccccccctgctaaatttgactggctt

SEQ ID NO: 984 - RNA, 22 nt, Synthetic Construct
  source 1..22: mol_type = other RNA
tagcagcacgtaaagattggcg

SEQ ID NO: 985 - RNA, 24 nt, Synthetic Construct
  source 1..24: mol_type = other RNA
ttcaagtaatccaggataggctta

SEQ ID NO: 986 - RNA, 15 nt, Synthetic Construct
  source 1..15: mol_type = other RNA
tgaggtagtaggttg

SEQ ID NO: 987 - RNA, 23 nt, Synthetic Construct
  source 1..23: mol_type = other RNA
tgtcagtttgtcaaatacaccaa

SEQ ID NO: 988 - RNA, 35 nt, Synthetic Construct
  source 1..35: mol_type = other RNA
tacaaccccccactgctaaatttgactggcttttt

SEQ ID NO: 989 - RNA, 32 nt, Synthetic Construct
  source 1..32: mol_type = other RNA
ccccccacaaccgcgcttgactagcttgcttt

SEQ ID NO: 990 - RNA, 35 nt, Synthetic Construct
  source 1..35: mol_type = other RNA
ctccagcctgagcaacatagcgagaccccgtctct

SEQ ID NO: 991 - RNA, 20 nt, Synthetic Construct
  source 1..20: mol_type = other RNA
tccccggcacctccaccatt

SEQ ID NO: 992 - RNA, 22 nt, Synthetic Construct
  source 1..22: mol_type = other RNA
tagcagcacgtaaatatgggcg

SEQ ID NO: 993 - RNA, 18 nt, Synthetic Construct
  source 1..18: mol_type = other RNA
cctgcggaaggatcattg

SEQ ID NO: 994 - RNA, 22 nt, Synthetic Construct
  source 1..22: mol_type = other RNA
gtgccgaagctgtgggattgat

SEQ ID NO: 995 - RNA, 27 nt, Synthetic Construct
  source 1..27: mol_type = other RNA
ccccccactgctaaatttgacgggctt

SEQ ID NO: 996 - RNA, 27 nt, Synthetic Construct
  source 1..27: mol_type = other RNA
ttctcactactgcacttgactagtctt

SEQ ID NO: 997 - RNA, 22 nt, Synthetic Construct
  source 1..22: mol_type = other RNA
ccccttggggttgtaggaccac

SEQ ID NO: 998 - RNA, 15 nt, Synthetic Construct
  source 1..15: mol_type = other RNA
cgactcttagcggtg

SEQ ID NO: 999 - RNA, 16 nt, Synthetic Construct
  source 1..16: mol_type = other RNA
tccctgagacccttta

SEQ ID NO: 1000 - RNA, 29 nt, Synthetic Construct
  source 1..29: mol_type = other RNA
gaaaaagtcatggaggccatggggttgga

SEQ ID NO: 1001 - RNA, 25 nt, Synthetic Construct
  source 1..25: mol_type = other RNA
ttcaagtaatccaggataggctatt

SEQ ID NO: 1002 - RNA, 27 nt, Synthetic Construct
  source 1..27: mol_type = other RNA
gcccccactgctaaatttgactggctt

SEQ ID NO: 1003 - RNA, 22 nt, Synthetic Construct
  source 1..22: mol_type = other RNA
tcgtacagtgagtaataatgcg

SEQ ID NO: 1004 - RNA, 16 nt, Synthetic Construct
  source 1..16: mol_type = other RNA
tattgcacttgtcccg

SEQ ID NO: 1005 - RNA, 17 nt, Synthetic Construct
  source 1..17: mol_type = other RNA
tgaggtagtaggttgta

SEQ ID NO: 1006 - RNA, 37 nt, Synthetic Construct
  source 1..37: mol_type = other RNA
ctccagcctgggcaacatagcgagaccccgtctcttt

SEQ ID NO: 1007 - RNA, 22 nt, Synthetic Construct
  source 1..22: mol_type = other RNA
tagcagcacgtaaatagtggcg

SEQ ID NO: 1008 - RNA, 21 nt, Synthetic Construct
  source 1..21: mol_type = other RNA
ggctggtccgaaggtagtgag

SEQ ID NO: 1009 - RNA, 23 nt, Synthetic Construct
  source 1..23: mol_type = other RNA
tcctgtactgagctgccccgaat

SEQ ID NO: 1010 - RNA, 20 nt, Synthetic Construct
  source 1..20: mol_type = other RNA
atccctgcggcgtctccatt

SEQ ID NO: 1011 - RNA, 19 nt, Synthetic Construct
  source 1..19: mol_type = other RNA
tccctgttcgggcgccatt

SEQ ID NO: 1012 - RNA, 25 nt, Synthetic Construct
  source 1..25: mol_type = other RNA
tattgcacttgtcccggcctgttat

SEQ ID NO: 1013 - RNA, 24 nt, Synthetic Construct
  source 1..24: mol_type = other RNA
tgtcagtttgtcaaataccccagt

SEQ ID NO: 1014 - RNA, 24 nt, Synthetic Construct
  source 1..24: mol_type = other RNA
tgtcagtttgtcaaataccccaga

SEQ ID NO: 1015 - RNA, 27 nt, Synthetic Construct
  source 1..27: mol_type = other RNA
ccccccactgctaaatgtgactggctt

SEQ ID NO: 1016 - RNA, 15 nt, Synthetic Construct
  source 1..15: mol_type = other RNA
tacctggttgatcct

SEQ ID NO: 1017 - RNA, 26 nt, Synthetic Construct
  source 1..26: mol_type = other RNA
gacccgcgggtgctttccagctcttt

SEQ ID NO: 1018 - RNA, 24 nt, Synthetic Construct
  source 1..24: mol_type = other RNA
ctagactgaagctccttgaggaat

SEQ ID NO: 1019 - RNA, 20 nt, Synthetic Construct
  source 1..20: mol_type = other RNA
ggtagtgggttatcagaact

SEQ ID NO: 1020 - RNA, 27 nt, Synthetic Construct
  source 1..27: mol_type = other RNA
ccccccactgctaaatttgcctggctt

SEQ ID NO: 1021 - RNA, 20 nt, Synthetic Construct
  source 1..20: mol_type = other RNA
tcccgggtttcggcaccatt

SEQ ID NO: 1022 - RNA, 19 nt, Synthetic Construct
  source 1..19: mol_type = other RNA
cggaagaaggggtgcctgg

SEQ ID NO: 1023 - RNA, 23 nt, Synthetic Construct
  source 1..23: mol_type = other RNA
tccccttggggttgtaggaccac

SEQ ID NO: 1024 - RNA, 21 nt, Synthetic Construct
  source 1..21: mol_type = other RNA
cccttggggttgtaggaccac

SEQ ID NO: 1025 - RNA, 27 nt, Synthetic Construct
  source 1..27: mol_type = other RNA
cccaccactgctaaatttgactggctt

SEQ ID NO: 1026 - RNA, 23 nt, Synthetic Construct
  source 1..23: mol_type = other RNA
aaggtagatagaacaggtcttga

SEQ ID NO: 1027 - RNA, 26 nt, Synthetic Construct
  source 1..26: mol_type = other RNA
ccccccacaaccgcgcttgactagct

SEQ ID NO: 1028 - RNA, 22 nt, Synthetic Construct
  source 1..22: mol_type = other RNA
tcgtaccgtgaggaataatgcg

SEQ ID NO: 1029 - RNA, 27 nt, Synthetic Construct
  source 1..27: mol_type = other RNA
ccccccactgctaaatatgactggctt

SEQ ID NO: 1030 - RNA, 27 nt, Synthetic Construct
  source 1..27: mol_type = other RNA
ccccccactgctaaatttcactggctt

SEQ ID NO: 1031 - RNA, 28 nt, Synthetic Construct
  source 1..28: mol_type = other RNA
tccctgtggtctagtggttaggattcgg

SEQ ID NO: 1032 - RNA, 17 nt, Synthetic Construct
  source 1..17: mol_type = other RNA
ggctggtccgaaggtag

SEQ ID NO: 1033 - RNA, 18 nt, Synthetic Construct
  source 1..18: mol_type = other RNA
ggctggtccgaaggtagt

SEQ ID NO: 1034 - RNA, 24 nt, Synthetic Construct
  source 1..24: mol_type = other RNA
agctacattgtctgctgggtttat

SEQ ID NO: 1035 - RNA, 18 nt, Synthetic Construct
  source 1..18: mol_type = other RNA
ggctggtccgatggtagt

SEQ ID NO: 1036 - RNA, 21 nt, Synthetic Construct
  source 1..21: mol_type = other RNA
cgtaccgtgagtaataatgag

SEQ ID NO: 1037 - RNA, 26 nt, Synthetic Construct
  source 1..26: mol_type = other RNA
cccccactgctaaatttgactggctg

SEQ ID NO: 1038 - RNA, 32 nt, Synthetic Construct
  source 1..32: mol_type = other RNA
acaaccccccactgctaaatttgactggcttt

SEQ ID NO: 1039 - RNA, 26 nt, Synthetic Construct
  source 1..26: mol_type = other RNA
gacccgcgggcgctctccagtccttt

SEQ ID NO: 1040 - RNA, 24 nt, Synthetic Construct
  source 1..24: mol_type = other RNA
ttggggtgcgagaggtcccgggtt

SEQ ID NO: 1041 - RNA, 23 nt, Synthetic Construct
  source 1..23: mol_type = other RNA
ctagactgaagctccttgaggta

SEQ ID NO: 1042 - RNA, 24 nt, Synthetic Construct
  source 1..24: mol_type = other RNA
tgtcagtttgtcaaataccccatg

SEQ ID NO: 1043 - RNA, 29 nt, Synthetic Construct
  source 1..29: mol_type = other RNA
accccccactgctaaatttgactggcttt

SEQ ID NO: 1044 - RNA, 27 nt, Synthetic Construct
  source 1..27: mol_type = other RNA
ccccccactgctaaatttgactggcat

SEQ ID NO: 1045 - RNA, 27 nt, Synthetic Construct
  source 1..27: mol_type = other RNA
gatttccccttggggttgtaggaccac

SEQ ID NO: 1046 - RNA, 23 nt, Synthetic Construct
  source 1..23: mol_type = other RNA
agtcagtttgtcaaataccccat

SEQ ID NO: 1047 - RNA, 15 nt, Synthetic Construct
  source 1..15: mol_type = other RNA
gttcggaagattttc

SEQ ID NO: 1048 - RNA, 33 nt, Synthetic Construct
  source 1..33: mol_type = other RNA
ccccccacaaccgcgcttgactagcttgctttt

SEQ ID NO: 1049 - RNA, 19 nt, Synthetic Construct
  source 1..19: mol_type = other RNA
accctgctcgctgcgccat

SEQ ID NO: 1050 - RNA, 17 nt, Synthetic Construct
  source 1..17: mol_type = other RNA
gtgttcggaagattttc

SEQ ID NO: 1051 - RNA, 17 nt, Synthetic Construct
  source 1..17: mol_type = other RNA
ggagtttggctggggcg

SEQ ID NO: 1052 - RNA, 20 nt, Synthetic Construct
  source 1..20: mol_type = other RNA
cccttggggttgtaggacca

SEQ ID NO: 1053 - RNA, 26 nt, Synthetic Construct
  source 1..26: mol_type = other RNA
cccccactgctaaatttgcctggctt

SEQ ID NO: 1054 - RNA, 24 nt, Synthetic Construct
  source 1..24: mol_type = other RNA
ttcaagtaatccaggataggctct

SEQ ID NO: 1055 - RNA, 16 nt, Synthetic Construct
  source 1..16: mol_type = other RNA
agctatgggatttgtt

SEQ ID NO: 1056 - RNA, 22 nt, Synthetic Construct
  source 1..22: mol_type = other RNA
tcgtaacgtgagtaataatgcg

SEQ ID NO: 1057 - RNA, 19 nt, Synthetic Construct
  source 1..19: mol_type = other RNA
ccttggggttgtaggacca

SEQ ID NO: 1058 - RNA, 20 nt, Synthetic Construct
  source 1..20: mol_type = other RNA
ccttggggttgtaggaccac

SEQ ID NO: 1059 - RNA, 24 nt, Synthetic Construct
  source 1..24: mol_type = other RNA
ttccccttggggttgtaggaccac

SEQ ID NO: 1060 - RNA, 27 nt, Synthetic Construct
  source 1..27: mol_type = other RNA
ccccccactgctaaatttgaatggctt

SEQ ID NO: 1061 - RNA, 22 nt, Synthetic Construct
  source 1..22: mol_type = other RNA
cgactggtaactgggatgaagt

SEQ ID NO: 1062 - RNA, 20 nt, Synthetic Construct
  source 1..20: mol_type = other RNA
aaccgggcggaaacaccatt

SEQ ID NO: 1063 - RNA, 19 nt, Synthetic Construct
  source 1..19: mol_type = other RNA
atccctgcggcgtctccat

SEQ ID NO: 1064 - RNA, 23 nt, Synthetic Construct
  source 1..23: mol_type = other RNA
accagcattgtacagggctatga

SEQ ID NO: 1065 - RNA, 22 nt, Synthetic Construct
  source 1..22: mol_type = other RNA
taccagcacgtaaatattggcg

SEQ ID NO: 1066 - RNA, 23 nt, Synthetic Construct
  source 1..23: mol_type = other RNA
ggctggtccgaaggtagtgagtt

SEQ ID NO: 1067 - RNA, 20 nt, Synthetic Construct
  source 1..20: mol_type = other RNA
tcggaagaaggggtgcctgg

SEQ ID NO: 1068 - RNA, 23 nt, Synthetic Construct
  source 1..23: mol_type = other RNA
tgtcagtttgtcaaataccccta

SEQ ID NO: 1069 - RNA, 27 nt, Synthetic Construct
  source 1..27: mol_type = other RNA
gacccgcgggtgctttccagctctttt

SEQ ID NO: 1070 - RNA, 26 nt, Synthetic Construct
  source 1..26: mol_type = other RNA
atgcgagagtaggacgttgccaggtt

SEQ ID NO: 1071 - RNA, 19 nt, Synthetic Construct
  source 1..19: mol_type = other RNA
aaccgggcggaaacaccat

SEQ ID NO: 1072 - RNA, 22 nt, Synthetic Construct
  source 1..22: mol_type = other RNA
taggagcacgtaaatattggcg

SEQ ID NO: 1073 - RNA, 20 nt, Synthetic Construct
  source 1..20: mol_type = other RNA
tccccggcatctccaccaaa

SEQ ID NO: 1074 - RNA, 22 nt, Synthetic Construct
  source 1..22: mol_type = other RNA
gaagcacattcgcacatcatat

SEQ ID NO: 1075 - RNA, 15 nt, Synthetic Construct
  source 1..15: mol_type = other RNA
tgtcagtttgtcaaa

SEQ ID NO: 1076 - RNA, 27 nt, Synthetic Construct
  source 1..27: mol_type = other RNA
gcgggcgtagctcaggggtagagcgca

SEQ ID NO: 1077 - RNA, 27 nt, Synthetic Construct
  source 1..27: mol_type = other RNA
cggtataccgaagctctaggtgcggca

SEQ ID NO: 1078 - RNA, 27 nt, Synthetic Construct
  source 1..27: mol_type = other RNA
ccccccactgctaaatttgactgcctt

SEQ ID NO: 1079 - RNA, 30 nt, Synthetic Construct
  source 1..30: mol_type = other RNA
tgcttggactacatatggttgagggttgta

SEQ ID NO: 1080 - RNA, 18 nt, Synthetic Construct
  source 1..18: mol_type = other RNA
gcccccatcgtttagagg

SEQ ID NO: 1081 - RNA, 27 nt, Synthetic Construct
  source 1..27: mol_type = other RNA
ccccccactgctaattttgactggctt

SEQ ID NO: 1082 - RNA, 22 nt, Synthetic Construct
  source 1..22: mol_type = other RNA
tccccttggggttgtaggacca

SEQ ID NO: 1083 - RNA, 35 nt, Synthetic Construct
  source 1..35: mol_type = other RNA
taggatgggtgtgataggtggcacggagaattcca

SEQ ID NO: 1084 - RNA, 22 nt, Synthetic Construct
  source 1..22: mol_type = other RNA
acgcctgtctgagcgtcgcttt

SEQ ID NO: 1085 - RNA, 22 nt, Synthetic Construct
  source 1..22: mol_type = other RNA
tcgtttcccggccaatgcacca

SEQ ID NO: 1086 - RNA, 21 nt, Synthetic Construct
  source 1..21: mol_type = other RNA
gactggtaactgggatgaagt

SEQ ID NO: 1087 - RNA, 19 nt, Synthetic Construct
  source 1..19: mol_type = other RNA
tccccggcacctccaccat

SEQ ID NO: 1088 - RNA, 25 nt, Synthetic Construct
  source 1..25: mol_type = other RNA
gacccgcgggtgctttccagctctt

SEQ ID NO: 1089 - RNA, 18 nt, Synthetic Construct
  source 1..18: mol_type = other RNA
tcttcggtagtatagtgg

SEQ ID NO: 1090 - RNA, 35 nt, Synthetic Construct
  source 1..35: mol_type = other RNA
ttctccactcccactgcttcacttgactagccttt

SEQ ID NO: 1091 - RNA, 19 nt, Synthetic Construct
  source 1..19: mol_type = other RNA
atctgctggaactgcaact

SEQ ID NO: 1092 - RNA, 24 nt, Synthetic Construct
  source 1..24: mol_type = other RNA
ttcaagtaatccaggataggctag

SEQ ID NO: 1093 - RNA, 27 nt, Synthetic Construct
  source 1..27: mol_type = other RNA
catgcgagagtaggacgttgccaggtt

SEQ ID NO: 1094 - RNA, 23 nt, Synthetic Construct
  source 1..23: mol_type = other RNA
agcagcattgtacagggatatga

SEQ ID NO: 1095 - RNA, 35 nt, Synthetic Construct
  source 1..35: mol_type = other RNA
tccctgtggtctagtggttaggattcggcgctctc

SEQ ID NO: 1096 - RNA, 15 nt, Synthetic Construct
  source 1..15: mol_type = other RNA
tgtctgagcgtcgct

SEQ ID NO: 1097 - RNA, 15 nt, Synthetic Construct
  source 1..15: mol_type = other RNA
cgatatggcatgaga

SEQ ID NO: 1098 - RNA, 25 nt, Synthetic Construct
  source 1..25: mol_type = other RNA
ttctcactactgcacttgactagtc

SEQ ID NO: 1099 - RNA, 25 nt, Synthetic Construct
  source 1..25: mol_type = other RNA
ccccccacaaccgcgcttgactagc

SEQ ID NO: 1100 - RNA, 21 nt, Synthetic Construct
  source 1..21: mol_type = other RNA
cgtaccgtgagtaataaagcg

SEQ ID NO: 1101 - RNA, 21 nt, Synthetic Construct
  source 1..21: mol_type = other RNA
agtaccgtgagtaataatgcg

SEQ ID NO: 1102 - RNA, 23 nt, Synthetic Construct
  source 1..23: mol_type = other RNA
cgcagcattgtacagggctatga

SEQ ID NO: 1103 - RNA, 16 nt, Synthetic Construct
  source 1..16: mol_type = other RNA
ttggcctcaagtcagg

SEQ ID NO: 1104 - RNA, 25 nt, Synthetic Construct
  source 1..25: mol_type = other RNA
gctcagtggaaaggatgtgaatcta

SEQ ID NO: 1105 - RNA, 24 nt, Synthetic Construct
  source 1..24: mol_type = other RNA
agtcagtttgtcaaataccccaat

SEQ ID NO: 1106 - RNA, 15 nt, Synthetic Construct
  source 1..15: mol_type = other RNA
cgagtgacgtagtgt

SEQ ID NO: 1107 - RNA, 24 nt, Synthetic Construct
  source 1..24: mol_type = other RNA
tataccgaagctctaggtgcggca

SEQ ID NO: 1108 - RNA, 25 nt, Synthetic Construct
  source 1..25: mol_type = other RNA
gcgggcatagcttagtggtaaagtt

SEQ ID NO: 1109 - RNA, 24 nt, Synthetic Construct
  source 1..24: mol_type = other RNA
gcgagagtaggacgttgccaggtt

SEQ ID NO: 1110 - RNA, 16 nt, Synthetic Construct
  source 1..16: mol_type = other RNA
tgaggtagtaggttgt

SEQ ID NO: 1111 - RNA, 34 nt, Synthetic Construct
  source 1..34: mol_type = other RNA
tccctgtggtctagtggttaggattcggcgctct

SEQ ID NO: 1112 - RNA, 21 nt, Synthetic Construct
  source 1..21: mol_type = other RNA
ccccttggggttgtaggacca

SEQ ID NO: 1113 - RNA, 23 nt, Synthetic Construct
  source 1..23: mol_type = other RNA
cgagagtaggacgttgccaggtt

SEQ ID NO: 1114 - RNA, 18 nt, Synthetic Construct
  source 1..18: mol_type = other RNA
ggagagatggctgagtgg

SEQ ID NO: 1115 - RNA, 20 nt, Synthetic Construct
  source 1..20: mol_type = other RNA
gtgccgaagctgtgggattg

SEQ ID NO: 1116 - RNA, 32 nt, Synthetic Construct
  source 1..32: mol_type = other RNA
cccccacaaccgcgcttgactagcttgctgtt

SEQ ID NO: 1117 - RNA, 34 nt, Synthetic Construct
  source 1..34: mol_type = other RNA
ccccccacaaccgcgcttgactagcttgctgttt

SEQ ID NO: 1118 - RNA, 21 nt, Synthetic Construct
  source 1..21: mol_type = other RNA
atcccactcctgacaccattt

SEQ ID NO: 1119 - RNA, 33 nt, Synthetic Construct
  source 1..33: mol_type = other RNA
atacaaccccccactgctaaatttgactggctt

SEQ ID NO: 1120 - RNA, 26 nt, Synthetic Construct
  source 1..26: mol_type = other RNA
gatttccccttggggttgtaggacca

SEQ ID NO: 1121 - RNA, 35 nt, Synthetic Construct
  source 1..35: mol_type = other RNA
agtaaggtcagctaaataagctatcgggcccacca

SEQ ID NO: 1122 - RNA, 30 nt, Synthetic Construct
  source 1..30: mol_type = other RNA
gcatttgtggttcagtggtagaattctcgc

SEQ ID NO: 1123 - RNA, 22 nt, Synthetic Construct
  source 1..22: mol_type = other RNA
tcccactgcttcacttgactag

SEQ ID NO: 1124 - RNA, 25 nt, Synthetic Construct
  source 1..25: mol_type = other RNA
tttccccttggggttgtaggaccac

SEQ ID NO: 1125 - RNA, 21 nt, Synthetic Construct
  source 1..21: mol_type = other RNA
gcccgtgttcggaagattttc

SEQ ID NO: 1126 - RNA, 15 nt, Synthetic Construct
  source 1..15: mol_type = other RNA
ggctctcgtcgcggg

SEQ ID NO: 1127 - RNA, 25 nt, Synthetic Construct
  source 1..25: mol_type = other RNA
tgcgagagtaggacgttgccaggtt

SEQ ID NO: 1128 - RNA, 32 nt, Synthetic Construct
  source 1..32: mol_type = other RNA
tccctgtggtctagtggttaggattcggcgct

SEQ ID NO: 1129 - RNA, 24 nt, Synthetic Construct
  source 1..24: mol_type = other RNA
gaatgttgctcggtgaacccctat

SEQ ID NO: 1130 - RNA, 26 nt, Synthetic Construct
  source 1..26: mol_type = other RNA
ttcgggaagtccaggtgctgttaact

SEQ ID NO: 1131 - RNA, 25 nt, Synthetic Construct
  source 1..25: mol_type = other RNA
gacccgcgggcgctctccagtcctt

SEQ ID NO: 1132 - RNA, 22 nt, Synthetic Construct
  source 1..22: mol_type = other RNA
gcgggtgtagttcaatggtaga

SEQ ID NO: 1133 - RNA, 29 nt, Synthetic Construct
  source 1..29: mol_type = other RNA
cgagacccgcgggcgctctccagtccttt

SEQ ID NO: 1134 - RNA, 22 nt, Synthetic Construct
  source 1..22: mol_type = other RNA
tcaggtagtaggttgtatagtt

SEQ ID NO: 1135 - RNA, 17 nt, Synthetic Construct
  source 1..17: mol_type = other RNA
ctagggattggcaagga

SEQ ID NO: 1136 - RNA, 15 nt, Synthetic Construct
  source 1..15: mol_type = other RNA
ctagggattggcgga

SEQ ID NO: 1137 - RNA, 16 nt, Synthetic Construct
  source 1..16: mol_type = other RNA
agtgggttatcagaac

SEQ ID NO: 1138 - RNA, 25 nt, Synthetic Construct
  source 1..25: mol_type = other RNA
aaaagctgggttgagagggcgaagt

SEQ ID NO: 1139 - RNA, 24 nt, Synthetic Construct
  source 1..24: mol_type = other RNA
tattgcacttgtcccggcctgtag

SEQ ID NO: 1140 - RNA, 18 nt, Synthetic Construct
  source 1..18: mol_type = other RNA
cgtgttcggaagattttc

SEQ ID NO: 1141 - RNA, 27 nt, Synthetic Construct
  source 1..27: mol_type = other RNA
tcctgagtagctcagcggcagagcggg

SEQ ID NO: 1142 - RNA, 19 nt, Synthetic Construct
  source 1..19: mol_type = other RNA
cttggggttgtaggaccac

SEQ ID NO: 1143 - RNA, 22 nt, Synthetic Construct
  source 1..22: mol_type = other RNA
tagcaggacgtaaatattggcg

SEQ ID NO: 1144 - RNA, 21 nt, Synthetic Construct
  source 1..21: mol_type = other RNA
gtaagtgggagacgttgaagg

SEQ ID NO: 1145 - RNA, 19 nt, Synthetic Construct
  source 1..19: mol_type = other RNA
gtggtacgatcatacctgg

SEQ ID NO: 1146 - RNA, 16 nt, Synthetic Construct
  source 1..16: mol_type = other RNA
ggggatgtagctcaca

SEQ ID NO: 1147 - RNA, 21 nt, Synthetic Construct
  source 1..21: mol_type = other RNA
acatctgctggaactgcaact

SEQ ID NO: 1148 - RNA, 16 nt, Synthetic Construct
  source 1..16: mol_type = other RNA
tagggattggcaagga

SEQ ID NO: 1149 - RNA, 29 nt, Synthetic Construct
  source 1..29: mol_type = other RNA
gcgggcgtagctcaggggtagagcgcaac

SEQ ID NO: 1150 - RNA, 24 nt, Synthetic Construct
  source 1..24: mol_type = other RNA
tcctgtactgagctgccccgagta

SEQ ID NO: 1151 - RNA, 23 nt, Synthetic Construct
  source 1..23: mol_type = other RNA
aaacggaatcccaaaagcagctg

SEQ ID NO: 1152 - RNA, 21 nt, Synthetic Construct
  source 1..21: mol_type = other RNA
aaggtagatagaacaggtctt

SEQ ID NO: 1153 - RNA, 22 nt, Synthetic Construct
  source 1..22: mol_type = other RNA
gagagtaggacgttgccaggtt

SEQ ID NO: 1154 - RNA, 15 nt, Synthetic Construct
  source 1..15: mol_type = other RNA
ctgtcacgcgggaga

SEQ ID NO: 1155 - RNA, 20 nt, Synthetic Construct
  source 1..20: mol_type = other RNA
tccccggcacctccaccaaa

SEQ ID NO: 1156 - RNA, 20 nt, Synthetic Construct
  source 1..20: mol_type = other RNA
gagtaggacgttgccaggtt

SEQ ID NO: 1157 - RNA, 26 nt, Synthetic Construct
  source 1..26: mol_type = other RNA
gcgggcgtagctcaggggtagagcgc

SEQ ID NO: 1158 - RNA, 24 nt, Synthetic Construct
  source 1..24: mol_type = other RNA
agtcagtttgtcaaataccccatt

SEQ ID NO: 1159 - RNA, 21 nt, Synthetic Construct
  source 1..21: mol_type = other RNA
cgtacagtgagtaataatgcg

SEQ ID NO: 1160 - RNA, 35 nt, Synthetic Construct
  source 1..35: mol_type = other RNA
cgataggccatgcgagagtaggacgttgccaggtt

SEQ ID NO: 1161 - RNA, 18 nt, Synthetic Construct
  source 1..18: mol_type = other RNA
tcgacgctagcggatcct

SEQ ID NO: 1162 - RNA, 23 nt, Synthetic Construct
  source 1..23: mol_type = other RNA
tacgcctgtctgagcgtcgcttt

SEQ ID NO: 1163 - RNA, 17 nt, Synthetic Construct
  source 1..17: mol_type = other RNA
ctttcgggcccgcctga

SEQ ID NO: 1164 - RNA, 17 nt, Synthetic Construct
  source 1..17: mol_type = other RNA
cccgagtgacgtagtgt

SEQ ID NO: 1165 - RNA, 21 nt, Synthetic Construct
  source 1..21: mol_type = other RNA
tgtcctctgttcctcagtttt

SEQ ID NO: 1166 - RNA, 29 nt, Synthetic Construct
  source 1..29: mol_type = other RNA
gcattgtggttcagtggtagaattctcgc

SEQ ID NO: 1167 - RNA, 16 nt, Synthetic Construct
  source 1..16: mol_type = other RNA
tgttcggaagattttc

SEQ ID NO: 1168 - RNA, 27 nt, Synthetic Construct
  source 1..27: mol_type = other RNA
ggatttccccttggggttgtaggacca

SEQ ID NO: 1169 - RNA, 27 nt, Synthetic Construct
  source 1..27: mol_type = other RNA
gacccgcgggcgctctccagtcctttt

SEQ ID NO: 1170 - RNA, 36 nt, Synthetic Construct
  source 1..36: mol_type = other RNA
taggatggggtgtgataggtggcacggagaattcca

SEQ ID NO: 1171 - RNA, 27 nt, Synthetic Construct
  source 1..27: mol_type = other RNA
ccccgcactgctaaatttgactggctt

SEQ ID NO: 1172 - RNA, 20 nt, Synthetic Construct
  source 1..20: mol_type = other RNA
ctcacagtgtgaatcggcgc

SEQ ID NO: 1173 - RNA, 26 nt, Synthetic Construct
  source 1..26: mol_type = other RNA
atttccccttggggttgtaggaccac

SEQ ID NO: 1174 - RNA, 23 nt, Synthetic Construct
  source 1..23: mol_type = other RNA
ttccccttggggttgtaggacca

SEQ ID NO: 1175 - RNA, 27 nt, Synthetic Construct
  source 1..27: mol_type = other RNA
ccccccactgctaaattttactggctt

SEQ ID NO: 1176 - RNA, 22 nt, Synthetic Construct
  source 1..22: mol_type = other RNA
cattgcacttgtctcggactga

SEQ ID NO: 1177 - RNA, 23 nt, Synthetic Construct
  source 1..23: mol_type = other RNA
agaagcattgtacagggctatga

SEQ ID NO: 1178 - RNA, 18 nt, Synthetic Construct
  source 1..18: mol_type = other RNA
ccccgagtgacgtagtgt

SEQ ID NO: 1179 - RNA, 26 nt, Synthetic Construct
  source 1..26: mol_type = other RNA
ccccactgctaaatttgactggcttt

SEQ ID NO: 1180 - RNA, 24 nt, Synthetic Construct
  source 1..24: mol_type = other RNA
gaaagattaaggcaagaggttagc

SEQ ID NO: 1181 - RNA, 21 nt, Synthetic Construct
  source 1..21: mol_type = other RNA
gtgccgaagctgtgggattga

SEQ ID NO: 1182 - RNA, 30 nt, Synthetic Construct
  source 1..30: mol_type = other RNA
ggagcggtagctcagttggttagagcgacg

SEQ ID NO: 1183 - RNA, 25 nt, Synthetic Construct
  source 1..25: mol_type = other RNA
tgaggtagtaggttgtgtggtttat

SEQ ID NO: 1184 - RNA, 26 nt, Synthetic Construct
  source 1..26: mol_type = other RNA
acgttctcggatgatctagcactgta

SEQ ID NO: 1185 - RNA, 23 nt, Synthetic Construct
  source 1..23: mol_type = other RNA
gcgtaagtgggagacgttgaagg

SEQ ID NO: 1186 - RNA, 30 nt, Synthetic Construct
  source 1..30: mol_type = other RNA
gcgggcgtagctcaggggtagagcgcaacc

SEQ ID NO: 1187 - RNA, 21 nt, Synthetic Construct
  source 1..21: mol_type = other RNA
ttcggaagaaggggtgcctgg

SEQ ID NO: 1188 - RNA, 20 nt, Synthetic Construct
  source 1..20: mol_type = other RNA
tccccggcatctccaccaat

SEQ ID NO: 1189 - RNA, 26 nt, Synthetic Construct
  source 1..26: mol_type = other RNA
gaggaacactagtggcgtaggcgaga

SEQ ID NO: 1190 - RNA, 28 nt, Synthetic Construct
  source 1..28: mol_type = other RNA
ggatttccccttggggttgtaggaccac

SEQ ID NO: 1191 - RNA, 20 nt, Synthetic Construct
  source 1..20: mol_type = other RNA
ggggatgtagctcacatggt

SEQ ID NO: 1192 - RNA, 22 nt, Synthetic Construct
  source 1..22: mol_type = other RNA
aaacggaatcccaaaagcagct

SEQ ID NO: 1193 - RNA, 19 nt, Synthetic Construct
  source 1..19: mol_type = other RNA
tccccggcatctccaccaa

SEQ ID NO: 1194 - RNA, 30 nt, Synthetic Construct
  source 1..30: mol_type = other RNA
gtaatggcgggaactctggacagactgcct

SEQ ID NO: 1195 - RNA, 20 nt, Synthetic Construct
  source 1..20: mol_type = other RNA
aaggtagatagaacaggtct

SEQ ID NO: 1196 - RNA, 22 nt, Synthetic Construct
  source 1..22: mol_type = other RNA
tgtcagtttgtcaaatacacca

SEQ ID NO: 1197 - RNA, 24 nt, Synthetic Construct
  source 1..24: mol_type = other RNA
tgaggtagtagattgtatagttat

SEQ ID NO: 1198 - RNA, 15 nt, Synthetic Construct
  source 1..15: mol_type = other RNA
ggagagatggctgag

SEQ ID NO: 1199 - RNA, 15 nt, Synthetic Construct
  source 1..15: mol_type = other RNA
gttttcggattgcgg

SEQ ID NO: 1200 - RNA, 22 nt, Synthetic Construct
  source 1..22: mol_type = other RNA
gcgggcgtagctcaggggtaga

SEQ ID NO: 1201 - RNA, 28 nt, Synthetic Construct
  source 1..28: mol_type = other RNA
cccccaactgctaaatttgactggcttt

SEQ ID NO: 1202 - RNA, 21 nt, Synthetic Construct
  source 1..21: mol_type = other RNA
tccccggcatctccaccattt

SEQ ID NO: 1203 - RNA, 22 nt, Synthetic Construct
  source 1..22: mol_type = other RNA
tagcagcaggtaaatattggcg

SEQ ID NO: 1204 - RNA, 43 nt, Synthetic Construct
  source 1..43: mol_type = other RNA
atgattggcgatcaagcggtataccgaagctctaggtgcggca

SEQ ID NO: 1205 - RNA, 22 nt, Synthetic Construct
  source 1..22: mol_type = other RNA
accaccaccatcagcaccacgg

SEQ ID NO: 1206 - RNA, 29 nt, Synthetic Construct
  source 1..29: mol_type = other RNA
cgagacccgcgggtgctttccagctcttt

SEQ ID NO: 1207 - RNA, 28 nt, Synthetic Construct
  source 1..28: mol_type = other RNA
ccatgcgagagtaggacgttgccaggtt

SEQ ID NO: 1208 - RNA, 15 nt, Synthetic Construct
  source 1..15: mol_type = other RNA
ctaccgtgcgtagga

SEQ ID NO: 1209 - RNA, 21 nt, Synthetic Construct
  source 1..21: mol_type = other RNA
tgtcagtttgtcaaatacacc

SEQ ID NO: 1210 - RNA, 22 nt, Synthetic Construct
  source 1..22: mol_type = other RNA
tggaatgtaaagaagtgtgtat

SEQ ID NO: 1211 - RNA, 22 nt, Synthetic Construct
  source 1..22: mol_type = other RNA
aattgcacttgtctcggtctga

SEQ ID NO: 1212 - RNA, 18 nt, Synthetic Construct
  source 1..18: mol_type = other RNA
cttggggttgtaggacca

SEQ ID NO: 1213 - RNA, 36 nt, Synthetic Construct
  source 1..36: mol_type = other RNA
gtagaattctcgcctgccacgcgggaggcccgggtt

SEQ ID NO: 1214 - RNA, 17 nt, Synthetic Construct
  source 1..17: mol_type = other RNA
ccccggcatctccacca

SEQ ID NO: 1215 - RNA, 17 nt, Synthetic Construct
  source 1..17: mol_type = other RNA
tcccggacgagccccca

SEQ ID NO: 1216 - RNA, 18 nt, Synthetic Construct
  source 1..18: mol_type = other RNA
tccccggcatctccacca

SEQ ID NO: 1217 - RNA, 18 nt, Synthetic Construct
  source 1..18: mol_type = other RNA
atcccggacgagccccca

SEQ ID NO: 1218 - RNA, 25 nt, Synthetic Construct
  source 1..25: mol_type = other RNA
gagaaagctcacaagaactgctaac

SEQ ID NO: 1219 - RNA, 21 nt, Synthetic Construct
  source 1..21: mol_type = other RNA
gagaaagctcacaagaactgc

SEQ ID NO: 1220 - RNA, 30 nt, Synthetic Construct
  source 1..30: mol_type = other RNA
gcattggtggttcagtggtagaattctcgc

SEQ ID NO: 1221 - RNA, 29 nt, Synthetic Construct
  source 1..29: mol_type = other RNA
gcattggtggttcagtggtagaattctcg

SEQ ID NO: 1222 - RNA, 18 nt, Synthetic Construct
  source 1..18: mol_type = other RNA
gctgtgatggccgagtgg

SEQ ID NO: 1223 - RNA, 44 nt, Synthetic Construct
  source 1..44: mol_type = other RNA
agtaaggtcagctaaataagctatcgggcccataccccgaaaat

SEQ ID NO: 1224 - RNA, 42 nt, Synthetic Construct
  source 1..42: mol_type = other RNA
cccattcttgcgacccgggttcgattcccgggcggcgcacca

SEQ ID NO: 1225 - RNA, 31 nt, Synthetic Construct
  source 1..31: mol_type = other RNA
ggctcgttggtctaggggtatgattctcgct

SEQ ID NO: 1226 - RNA, 16 nt, Synthetic Construct
  source 1..16: mol_type = other RNA
gaaaaagtcatggagg

SEQ ID NO: 1227 - RNA, 25 nt, Synthetic Construct
  source 1..25: mol_type = other RNA
tcccacatggtctagcggttaggat

SEQ ID NO: 1228 - RNA, 29 nt, Synthetic Construct
  source 1..29: mol_type = other RNA
agtaaggtcagctaaataagctatcgggc

SEQ ID NO: 1229 - RNA, 19 nt, Synthetic Construct
  source 1..19: mol_type = other RNA
gagaaagctcacaagaact

SEQ ID NO: 1230 - RNA, 23 nt, Synthetic Construct
  source 1..23: mol_type = other RNA
tccctggtggtctagtggttagg

SEQ ID NO: 1231 - RNA, 18 nt, Synthetic Construct
  source 1..18: mol_type = other RNA
ggggatgtagctcagtgg

SEQ ID NO: 1232 - RNA, 22 nt, Synthetic Construct
  source 1..22: mol_type = other RNA
gagaaagctcacaagaactgct

SEQ ID NO: 1233 - RNA, 41 nt, Synthetic Construct
  source 1..41: mol_type = other RNA
gcttctgtagtgtagtggttatcacgttcgcctcacacgcg

SEQ ID NO: 1234 - RNA, 29 nt, Synthetic Construct
  source 1..29: mol_type = other RNA
gcatgggtggttcagtggtagaattctcg

SEQ ID NO: 1235 - RNA, 32 nt, Synthetic Construct
  source 1..32: mol_type = other RNA
tcctcgttagtatagtggtgagtatccccgcc

SEQ ID NO: 1236 - RNA, 30 nt, Synthetic Construct
  source 1..30: mol_type = other RNA
gccgtgatcgtatagtggttagtactctgc

SEQ ID NO: 1237 - RNA, 32 nt, Synthetic Construct
  source 1..32: mol_type = other RNA
gcattggtggttcagtggtagaattctcgcct

SEQ ID NO: 1238 - RNA, 32 nt, Synthetic Construct
  source 1..32: mol_type = other RNA
gcatgggtggttcagtggtagaattctcgcct

SEQ ID NO: 1239 - RNA, 29 nt, Synthetic Construct
  source 1..29: mol_type = other RNA
gcgccgctggtgtagtggtatcatgcaag

SEQ ID NO: 1240 - RNA, 22 nt, Synthetic Construct
  source 1..22: mol_type = other RNA
cataaagtagaaagcactacta

SEQ ID NO: 1241 - RNA, 24 nt, Synthetic Construct
  source 1..24: mol_type = other RNA
atcacattgccagggattaccact

SEQ ID NO: 1242 - RNA, 24 nt, Synthetic Construct
  source 1..24: mol_type = other RNA
agcagcattgtacagggctatgat

SEQ ID NO: 1243 - RNA, 23 nt, Synthetic Construct
  source 1..23: mol_type = other RNA
agcagcattgtacagggctatgt

SEQ ID NO: 1244 - RNA, 24 nt, Synthetic Construct
  source 1..24: mol_type = other RNA
agcagcattgtacagggctatgtt

SEQ ID NO: 1245 - RNA, 22 nt, Synthetic Construct
  source 1..22: mol_type = other RNA
cccataaagtagaaagcactac

SEQ ID NO: 1246 - RNA, 21 nt, Synthetic Construct
  source 1..21: mol_type = other RNA
cccataaagtagaaagcacta

SEQ ID NO: 1247 - RNA, 24 nt, Synthetic Construct
  source 1..24: mol_type = other RNA
atcacattgccagggatttccaat

SEQ ID NO: 1248 - RNA, 23 nt, Synthetic Construct
  source 1..23: mol_type = other RNA
atcacattgccagggatttccaa

SEQ ID NO: 1249 - RNA, 23 nt, Synthetic Construct
  source 1..23: mol_type = other RNA
ctcgtaccgtgagtaataatgcg

SEQ ID NO: 1250 - RNA, 25 nt, Synthetic Construct
  source 1..25: mol_type = other RNA
agcagcattgtacagggctatgatt

SEQ ID NO: 1251 - RNA, 21 nt, Synthetic Construct
  source 1..21: mol_type = other RNA
cgtaccgtgagtaataatgcg

SEQ ID NO: 1252 - RNA, 21 nt, Synthetic Construct
  source 1..21: mol_type = other RNA
cataaagtagaaagcactact

SEQ ID NO: 1253 - RNA, 22 nt, Synthetic Construct
  source 1..22: mol_type = other RNA
gtcagtttgtcaaataccccaa

SEQ ID NO: 1254 - RNA, 23 nt, Synthetic Construct
  source 1..23: mol_type = other RNA
cccataaagtagaaagcactaca

SEQ ID NO: 1255 - RNA, 20 nt, Synthetic Construct
  source 1..20: mol_type = other RNA
cataaagtagaaagcactac

SEQ ID NO: 1256 - RNA, 23 nt, Synthetic Construct
  source 1..23: mol_type = other RNA
atcacattgccagggattaccac

SEQ ID NO: 1257 - RNA, 22 nt, Synthetic Construct
  source 1..22: mol_type = other RNA
caacggaatcccaaaagcagct

SEQ ID NO: 1258 - RNA, 25 nt, Synthetic Construct
  source 1..25: mol_type = other RNA
agctacatctggctactgggtctct

SEQ ID NO: 1259 - RNA, 22 nt, Synthetic Construct
  source 1..22: mol_type = other RNA
atcacattgccagggatttcca

SEQ ID NO: 1260 - RNA, 26 nt, Synthetic Construct
  source 1..26: mol_type = other RNA
agctacatctggctactgggtctctt

SEQ ID NO: 1261 - RNA, 23 nt, Synthetic Construct
  source 1..23: mol_type = other RNA
agcagcattgtacagggctatga

SEQ ID NO: 1262 - RNA, 24 nt, Synthetic Construct
  source 1..24: mol_type = other RNA
agcagcattgtacagggctatgaa

SEQ ID NO: 1263 - RNA, 23 nt, Synthetic Construct
  source 1..23: mol_type = other RNA
cccataaagtagaaagcactacc

SEQ ID NO: 1264 - RNA, 23 nt, Synthetic Construct
  source 1..23: mol_type = other RNA
gtcagtttgtcaaataccccaat

SEQ ID NO: 1265 - RNA, 20 nt, Synthetic Construct
  source 1..20: mol_type = other RNA
cgtaccgtgagtaataatgc

SEQ ID NO: 1266 - RNA, 24 nt, Synthetic Construct
  source 1..24: mol_type = other RNA
tagtgcaatattgcttatagggtt

SEQ ID NO: 1267 - RNA, 23 nt, Synthetic Construct
  source 1..23: mol_type = other RNA
gtcagtttgtcaaataccccaaa

SEQ ID NO: 1268 - RNA, 22 nt, Synthetic Construct
  source 1..22: mol_type = other RNA
gtcagtttgtcaaataccccat

SEQ ID NO: 1269 - RNA, 25 nt, Synthetic Construct
  source 1..25: mol_type = other RNA
tagtgcaatattgcttatagggttt

SEQ ID NO: 1270 - RNA, 22 nt, Synthetic Construct
  source 1..22: mol_type = other RNA
agctacattgtctgctgggttt

SEQ ID NO: 1271 - RNA, 25 nt, Synthetic Construct
  source 1..25: mol_type = other RNA
agcagcattgtacagggctatgaaa

SEQ ID NO: 1272 - RNA, 25 nt, Synthetic Construct
  source 1..25: mol_type = other RNA
aacattcaacgctgtcggtgagttt

SEQ ID NO: 1273 - RNA, 23 nt, Synthetic Construct
  source 1..23: mol_type = other RNA
atcacattgccagggatttccat

SEQ ID NO: 1274 - RNA, 24 nt, Synthetic Construct
  source 1..24: mol_type = other RNA
agctcggtctgaggcccctcagtt

SEQ ID NO: 1275 - RNA, 23 nt, Synthetic Construct
  source 1..23: mol_type = other RNA
agctcggtctgaggcccctcagt

SEQ ID NO: 1276 - RNA, 22 nt, Synthetic Construct
  source 1..22: mol_type = other RNA
tggctcagttcagcaggaacag

SEQ ID NO: 1277 - RNA, 21 nt, Synthetic Construct
  source 1..21: mol_type = other RNA
atcacattgccagggatttcc

SEQ ID NO: 1278 - RNA, 23 nt, Synthetic Construct
  source 1..23: mol_type = other RNA
agctacattgtctgctgggtttt

SEQ ID NO: 1279 - RNA, 24 nt, Synthetic Construct
  source 1..24: mol_type = other RNA
tccctgagaccctttaacctgtgt

SEQ ID NO: 1280 - RNA, 24 nt, Synthetic Construct
  source 1..24: mol_type = other RNA
tggctcagttcagcaggaacagtt

SEQ ID NO: 1281 - RNA, 24 nt, Synthetic Construct
  source 1..24: mol_type = other RNA
aacattcaacgctgtcggtgagtt

SEQ ID NO: 1282 - RNA, 20 nt, Synthetic Construct
  source 1..20: mol_type = other RNA
gtcagtttgtcaaatacccc

SEQ ID NO: 1283 - RNA, 21 nt, Synthetic Construct
  source 1..21: mol_type = other RNA
agctacattgtctgctgggtt

SEQ ID NO: 1284 - RNA, 22 nt, Synthetic Construct
  source 1..22: mol_type = other RNA
cgtaccgtgagtaataatgcgt

SEQ ID NO: 1285 - RNA, 23 nt, Synthetic Construct
  source 1..23: mol_type = other RNA
agcagcattgtacagggctatct

SEQ ID NO: 1286 - RNA, 22 nt, Synthetic Construct
  source 1..22: mol_type = other RNA
agcagcattgtacagggctatg

SEQ ID NO: 1287 - RNA, 23 nt, Synthetic Construct
  source 1..23: mol_type = other RNA
tggctcagttcagcaggaacaga

SEQ ID NO: 1288 - RNA, 23 nt, Synthetic Construct
  source 1..23: mol_type = other RNA
tggctcagttcagcaggaacagt

SEQ ID NO: 1289 - RNA, 25 nt, Synthetic Construct
  source 1..25: mol_type = other RNA
aatgacacgatcactcccgttgagt

SEQ ID NO: 1290 - RNA, 24 nt, Synthetic Construct
  source 1..24: mol_type = other RNA
agctcggtctgaggcccctcagta

SEQ ID NO: 1291 - RNA, 24 nt, Synthetic Construct
  source 1..24: mol_type = other RNA
tagcttatcagactgatgttgact

SEQ ID NO: 1292 - RNA, 23 nt, Synthetic Construct
  source 1..23: mol_type = other RNA
tgtcagtttgtcaaataccccat

SEQ ID NO: 1293 - RNA, 26 nt, Synthetic Construct
  source 1..26: mol_type = other RNA
aatgacacgatcactcccgttgagtt

SEQ ID NO: 1294 - RNA, 24 nt, Synthetic Construct
  source 1..24: mol_type = other RNA
actcggcgtggcgtcggtcgtggt

SEQ ID NO: 1295 - RNA, 24 nt, Synthetic Construct
  source 1..24: mol_type = other RNA
tagcttatcagactgatgttgaca

SEQ ID NO: 1296 - RNA, 23 nt, Synthetic Construct
  source 1..23: mol_type = other RNA
ttatcagaatctccaggggtact

SEQ ID NO: 1297 - RNA, 23 nt, Synthetic Construct
  source 1..23: mol_type = other RNA
actcggcgtggcgtcggtcgtgt

SEQ ID NO: 1298 - RNA, 23 nt, Synthetic Construct
  source 1..23: mol_type = other RNA
tgagaactgaattccatgggttt

SEQ ID NO: 1299 - RNA, 22 nt, Synthetic Construct
  source 1..22: mol_type = other RNA
atataatacaacctgctaagtg

SEQ ID NO: 1300 - RNA, 26 nt, Synthetic Construct
  source 1..26: mol_type = other RNA
acctggcatacaatgtagatttctgt

SEQ ID NO: 1301 - RNA, 24 nt, Synthetic Construct
  source 1..24: mol_type = other RNA
acagtagtctgcacattggttatt

SEQ ID NO: 1302 - RNA, 25 nt, Synthetic Construct
  source 1..25: mol_type = other RNA
agctcggtctgaggcccctcagttt

SEQ ID NO: 1303 - RNA, 24 nt, Synthetic Construct
  source 1..24: mol_type = other RNA
tcagtgcatcacagaactttgttt

SEQ ID NO: 1304 - RNA, 24 nt, Synthetic Construct
  source 1..24: mol_type = other RNA
atcacattgccagggattaccaca

SEQ ID NO: 1305 - RNA, 25 nt, Synthetic Construct
  source 1..25: mol_type = other RNA
tgtcagtttgtcaaataccccattt

SEQ ID NO: 1306 - RNA, 23 nt, Synthetic Construct
  source 1..23: mol_type = other RNA
ttcaagtaatccaggataggctt

SEQ ID NO: 1307 - RNA, 25 nt, Synthetic Construct
  source 1..25: mol_type = other RNA
agcagcattgtacagggctatgaat

SEQ ID NO: 1308 - RNA, 21 nt, Synthetic Construct
  source 1..21: mol_type = other RNA
agctacatctggctactgggt

SEQ ID NO: 1309 - RNA, 22 nt, Synthetic Construct
  source 1..22: mol_type = other RNA
atcacattgccagggattacca

SEQ ID NO: 1310 - RNA, 24 nt, Synthetic Construct
  source 1..24: mol_type = other RNA
aggaagccctggaggggctggagg

SEQ ID NO: 1311 - RNA, 26 nt, Synthetic Construct
  source 1..26: mol_type = other RNA
agctacattgtctgctgggtttcttt

SEQ ID NO: 1312 - RNA, 22 nt, Synthetic Construct
  source 1..22: mol_type = other RNA
aacattcaacgctgtcggtgag

SEQ ID NO: 1313 - RNA, 20 nt, Synthetic Construct
  source 1..20: mol_type = other RNA
cccataaagtagaaagcact

SEQ ID NO: 1314 - RNA, 23 nt, Synthetic Construct
  source 1..23: mol_type = other RNA
aacattcaacgctgtcggtgagt

SEQ ID NO: 1315 - RNA, 25 nt, Synthetic Construct
  source 1..25: mol_type = other RNA
tgtcagtttgtcaaataccccaatt

SEQ ID NO: 1316 - RNA, 23 nt, Synthetic Construct
  source 1..23: mol_type = other RNA
tccctgtcctccaggagctcacg

SEQ ID NO: 1317 - RNA, 24 nt, Synthetic Construct
  source 1..24: mol_type = other RNA
tgtcagtttgtcaaataccccaat

SEQ ID NO: 1318 - RNA, 22 nt, Synthetic Construct
  source 1..22: mol_type = other RNA
tcagtgcatgacagaacttggg

SEQ ID NO: 1319 - RNA, 18 nt, Synthetic Construct
  source 1..18: mol_type = other RNA
gctgtgatggccgagtgg

SEQ ID NO: 1320 - RNA, 20 nt, Synthetic Construct
  source 1..20: mol_type = other RNA
agctacattgtctgctgggt

SEQ ID NO: 1321 - RNA, 23 nt, Synthetic Construct
  source 1..23: mol_type = other RNA
tggagagaaaggcagttcctgat

SEQ ID NO: 1322 - RNA, 21 nt, Synthetic Construct
  source 1..21: mol_type = other RNA
tgtagtgtttcctactttatg

SEQ ID NO: 1323 - RNA, 22 nt, Synthetic Construct
  source 1..22: mol_type = other RNA
actcggcgtggcgtcggtcgtg

SEQ ID NO: 1324 - RNA, 23 nt, Synthetic Construct
  source 1..23: mol_type = other RNA
tgtcagtttgtcaaataccccaa

SEQ ID NO: 1325 - RNA, 25 nt, Synthetic Construct
  source 1..25: mol_type = other RNA
tgtcagtttgtcaaataccccaaaa

SEQ ID NO: 1326 - RNA, 24 nt, Synthetic Construct
  source 1..24: mol_type = other RNA
atcacattgccagggatttccatt

SEQ ID NO: 1327 - RNA, 22 nt, Synthetic Construct
  source 1..22: mol_type = other RNA
agtggggaacccttccatgagg

SEQ ID NO: 1328 - RNA, 24 nt, Synthetic Construct
  source 1..24: mol_type = other RNA
atgacacgatcactcccgttgagt

SEQ ID NO: 1329 - RNA, 23 nt, Synthetic Construct
  source 1..23: mol_type = other RNA
agaggtagtaggttgcatagttt

SEQ ID NO: 1330 - RNA, 23 nt, Synthetic Construct
  source 1..23: mol_type = other RNA
tgtagtgtttcctactttatgga

SEQ ID NO: 1331 - RNA, 24 nt, Synthetic Construct
  source 1..24: mol_type = other RNA
agctacatctggctactgggtctc

SEQ ID NO: 1332 - RNA, 23 nt, Synthetic Construct
  source 1..23: mol_type = other RNA
actcggcgtggcgtcggtcgtgg

SEQ ID NO: 1333 - RNA, 23 nt, Synthetic Construct
  source 1..23: mol_type = other RNA
tggagagaaaggcagttcctgaa

SEQ ID NO: 1334 - RNA, 24 nt, Synthetic Construct
  source 1..24: mol_type = other RNA
actcggcgtggcgtcggtcgtgga

SEQ ID NO: 1335 - RNA, 23 nt, Synthetic Construct
  source 1..23: mol_type = other RNA
gtcagtttgtcaaataccccatt

SEQ ID NO: 1336 - RNA, 24 nt, Synthetic Construct
  source 1..24: mol_type = other RNA
ttcaagtaatccaggataggcttt

SEQ ID NO: 1337 - RNA, 24 nt, Synthetic Construct
  source 1..24: mol_type = other RNA
aagctcggtctgaggcccctcagt

SEQ ID NO: 1338 - RNA, 23 nt, Synthetic Construct
  source 1..23: mol_type = other RNA
ttcaagtaattcaggataggttt

SEQ ID NO: 1339 - RNA, 21 nt, Synthetic Construct
  source 1..21: mol_type = other RNA
tggctcagttcagcaggaaca

SEQ ID NO: 1340 - RNA, 22 nt, Synthetic Construct
  source 1..22: mol_type = other RNA
tcgtaccgtgagtaataatgcg

SEQ ID NO: 1341 - RNA, 24 nt, Synthetic Construct
  source 1..24: mol_type = other RNA
caaagaattctccttttgggcttt

SEQ ID NO: 1342 - RNA, 25 nt, Synthetic Construct
  source 1..25: mol_type = other RNA
agctacattgtctgctgggtttctt

SEQ ID NO: 1343 - RNA, 23 nt, Synthetic Construct
  source 1..23: mol_type = other RNA
cccagtgttcagactacctgttc

SEQ ID NO: 1344 - RNA, 26 nt, Synthetic Construct
  source 1..26: mol_type = other RNA
tagtgcaatattgcttatagggtttt

SEQ ID NO: 1345 - RNA, 24 nt, Synthetic Construct
  source 1..24: mol_type = other RNA
tgagaactgaattccatgggttgt

SEQ ID NO: 1346 - RNA, 23 nt, Synthetic Construct
  source 1..23: mol_type = other RNA
caaagaattctccttttgggctt

SEQ ID NO: 1347 - RNA, 24 nt, Synthetic Construct
  source 1..24: mol_type = other RNA
tgtcagtttgtcaaataccccaaa

SEQ ID NO: 1348 - RNA, 22 nt, Synthetic Construct
  source 1..22: mol_type = other RNA
ttcaagtaatccaggataggct

SEQ ID NO: 1349 - RNA, 25 nt, Synthetic Construct
  source 1..25: mol_type = other RNA
ttcaagtaatccaggataggctttt

SEQ ID NO: 1350 - RNA, 23 nt, Synthetic Construct
  source 1..23: mol_type = other RNA
tcgtaccgtgagtaataatgcgt

SEQ ID NO: 1351 - RNA, 19 nt, Synthetic Construct
  source 1..19: mol_type = other RNA
agctacattgtctgctggg

SEQ ID NO: 1352 - RNA, 24 nt, Synthetic Construct
  source 1..24: mol_type = other RNA
aatgacacgatcactcccgttgag

SEQ ID NO: 1353 - RNA, 23 nt, Synthetic Construct
  source 1..23: mol_type = other RNA
agctacatctggctactgggtct

SEQ ID NO: 1354 - RNA, 23 nt, Synthetic Construct
  source 1..23: mol_type = other RNA
agcagcattgtacagggctatca

SEQ ID NO: 1355 - RNA, 22 nt, Synthetic Construct
  source 1..22: mol_type = other RNA
tgtagtgtttcctactttatgg

SEQ ID NO: 1356 - RNA, 25 nt, Synthetic Construct
  source 1..25: mol_type = other RNA
caagtcactagtggttccgtttagt

SEQ ID NO: 1357 - RNA, 25 nt, Synthetic Construct
  source 1..25: mol_type = other RNA
caacggaatcccaaaagcagctgtt

SEQ ID NO: 1358 - RNA, 23 nt, Synthetic Construct
  source 1..23: mol_type = other RNA
tacagtagtctgcacattggtta

SEQ ID NO: 1359 - RNA, 23 nt, Synthetic Construct
  source 1..23: mol_type = other RNA
caacggaatcccaaaagcagctt

SEQ ID NO: 1360 - RNA, 22 nt, Synthetic Construct
  source 1..22: mol_type = other RNA
tgtcagtttgtcaaatacccct

SEQ ID NO: 1361 - RNA, 24 nt, Synthetic Construct
  source 1..24: mol_type = other RNA
tgtagtgtttcctactttatggaa

SEQ ID NO: 1362 - RNA, 21 nt, Synthetic Construct
  source 1..21: mol_type = other RNA
cattattacttttggtacgcg

SEQ ID NO: 1363 - RNA, 24 nt, Synthetic Construct
  source 1..24: mol_type = other RNA
caacggaatcccaaaagcagctgt

SEQ ID NO: 1364 - RNA, 24 nt, Synthetic Construct
  source 1..24: mol_type = other RNA
caacggaatcccaaaagcagcttt

SEQ ID NO: 1365 - RNA, 23 nt, Synthetic Construct
  source 1..23: mol_type = other RNA
tcagtgcatgacagaacttggga

SEQ ID NO: 1366 - RNA, 24 nt, Synthetic Construct
  source 1..24: mol_type = other RNA
tccctgtcctccaggagctcacgt

SEQ ID NO: 1367 - RNA, 22 nt, Synthetic Construct
  source 1..22: mol_type = other RNA
tggagagaaaggcagttcctga

SEQ ID NO: 1368 - RNA, 22 nt, Synthetic Construct
  source 1..22: mol_type = other RNA
gtagtgtttcctactttatgga

SEQ ID NO: 1369 - RNA, 23 nt, Synthetic Construct
  source 1..23: mol_type = other RNA
taaagtgcttatagtgcaggtag

SEQ ID NO: 1370 - RNA, 22 nt, Synthetic Construct
  source 1..22: mol_type = other RNA
ttcaagtaattcaggataggtt

SEQ ID NO: 1371 - RNA, 23 nt, Synthetic Construct
  source 1..23: mol_type = other RNA
tcgaccggacctcgaccggctcg

SEQ ID NO: 1372 - RNA, 22 nt, Synthetic Construct
  source 1..22: mol_type = other RNA
cccagtgttcagactacctgtt

SEQ ID NO: 1373 - RNA, 23 nt, Synthetic Construct
  source 1..23: mol_type = other RNA
tgagaactgaattccatgggtta

SEQ ID NO: 1374 - RNA, 22 nt, Synthetic Construct
  source 1..22: mol_type = other RNA
atgtcccacccccactcctgtt

SEQ ID NO: 1375 - RNA, 21 nt, Synthetic Construct
  source 1..21: mol_type = other RNA
agcagcattgtacagggctat

SEQ ID NO: 1376 - RNA, 20 nt, Synthetic Construct
  source 1..20: mol_type = other RNA
tgagaactgaattccatggg

SEQ ID NO: 1377 - RNA, 24 nt, Synthetic Construct
  source 1..24: mol_type = other RNA
tgtcagtttgtcaaataccccatt

SEQ ID NO: 1378 - RNA, 22 nt, Synthetic Construct
  source 1..22: mol_type = other RNA
tcaagagcaataacgaaaaatg

SEQ ID NO: 1379 - RNA, 22 nt, Synthetic Construct
  source 1..22: mol_type = other RNA
atcgggaatgtcgtgtccgccc

SEQ ID NO: 1380 - RNA, 24 nt, Synthetic Construct
  source 1..24: mol_type = other RNA
tccctgagaccctttaacctgtga

SEQ ID NO: 1381 - RNA, 23 nt, Synthetic Construct
  source 1..23: mol_type = other RNA
ttcaagtaatccaggataggcta

SEQ ID NO: 1382 - RNA, 24 nt, Synthetic Construct
  source 1..24: mol_type = other RNA
acctggcatacaatgtagatttct

SEQ ID NO: 1383 - RNA, 26 nt, Synthetic Construct
  source 1..26: mol_type = other RNA
caacggaatcccaaaagcagctgttt

SEQ ID NO: 1384 - RNA, 23 nt, Synthetic Construct
  source 1..23: mol_type = other RNA
tagtgcaatattgcttatagggt

SEQ ID NO: 1385 - RNA, 22 nt, Synthetic Construct
  source 1..22: mol_type = other RNA
cagtgcaatgttaaaagggcat

SEQ ID NO: 1386 - RNA, 22 nt, Synthetic Construct
  source 1..22: mol_type = other RNA
accatcgaccgttgattgtacc

SEQ ID NO: 1387 - RNA, 22 nt, Synthetic Construct
  source 1..22: mol_type = other RNA
ctcgtaccgtgagtaataatgc

SEQ ID NO: 1388 - RNA, 22 nt, Synthetic Construct
  source 1..22: mol_type = other RNA
tcgaggagctcacagtctagta

SEQ ID NO: 1389 - RNA, 24 nt, Synthetic Construct
  source 1..24: mol_type = other RNA
tgagaactgaattccatgggttga

SEQ ID NO: 1390 - RNA, 22 nt, Synthetic Construct
  source 1..22: mol_type = other RNA
ttataatacaacctgataagtg

SEQ ID NO: 1391 - RNA, 22 nt, Synthetic Construct
  source 1..22: mol_type = other RNA
catcgggaatgtcgtgtccgcc

SEQ ID NO: 1392 - RNA, 23 nt, Synthetic Construct
  source 1..23: mol_type = other RNA
acagtagtctgcacattggttaa

SEQ ID NO: 1393 - RNA, 23 nt, Synthetic Construct
  source 1..23: mol_type = other RNA
caagtcactagtggttccgttta

SEQ ID NO: 1394 - RNA, 24 nt, Synthetic Construct
  source 1..24: mol_type = other RNA
agctacattgtctgctgggttttt

SEQ ID NO: 1395 - RNA, 24 nt, Synthetic Construct
  source 1..24: mol_type = other RNA
agctacattgtctgctgggtttct

SEQ ID NO: 1396 - RNA, 23 nt, Synthetic Construct
  source 1..23: mol_type = other RNA
ttcaagtaattcaggataggtta

SEQ ID NO: 1397 - RNA, 20 nt, Synthetic Construct
  source 1..20: mol_type = other RNA
ataaagtagaaagcactact

SEQ ID NO: 1398 - RNA, 22 nt, Synthetic Construct
  source 1..22: mol_type = other RNA
aatcgtacagggtcatccactt

SEQ ID NO: 1399 - RNA, 22 nt, Synthetic Construct
  source 1..22: mol_type = other RNA
acagtagtctgcacattggtta

SEQ ID NO: 1400 - RNA, 25 nt, Synthetic Construct
  source 1..25: mol_type = other RNA
ttgcagctgcctgggagtgacttct

SEQ ID NO: 1401 - RNA, 21 nt, Synthetic Construct
  source 1..21: mol_type = other RNA
tgagaactgaattccatgggt

SEQ ID NO: 1402 - RNA, 26 nt, Synthetic Construct
  source 1..26: mol_type = other RNA
aacattcaacgctgtcggtgagtttt

SEQ ID NO: 1403 - RNA, 19 nt, Synthetic Construct
  source 1..19: mol_type = other RNA
tgtcagtttgtcaaatacc

SEQ ID NO: 1404 - RNA, 22 nt, Synthetic Construct
  source 1..22: mol_type = other RNA
tctcccaacccttgtaccagtg

SEQ ID NO: 1405 - RNA, 22 nt, Synthetic Construct
  source 1..22: mol_type = other RNA
ttatcagaatctccaggggtat

SEQ ID NO: 1406 - RNA, 21 nt, Synthetic Construct
  source 1..21: mol_type = other RNA
tgtcagtttgtcaaatacccc

SEQ ID NO: 1407 - RNA, 24 nt, Synthetic Construct
  source 1..24: mol_type = other RNA
tgagaactgaattccatgggtttt

SEQ ID NO: 1408 - RNA, 20 nt, Synthetic Construct
  source 1..20: mol_type = other RNA
tgtcagtttgtcaaataccc

SEQ ID NO: 1409 - RNA, 19 nt, Synthetic Construct
  source 1..19: mol_type = other RNA
caacggaatcccaaaagca

SEQ ID NO: 1410 - RNA, 25 nt, Synthetic Construct
  source 1..25: mol_type = other RNA
tgtaaacatccttgactggaagctt

SEQ ID NO: 1411 - RNA, 24 nt, Synthetic Construct
  source 1..24: mol_type = other RNA
tgtaaacatccttgactggaagct

SEQ ID NO: 1412 - RNA, 23 nt, Synthetic Construct
  source 1..23: mol_type = other RNA
tgtagtgtttcctactttatggt

SEQ ID NO: 1413 - RNA, 24 nt, Synthetic Construct
  source 1..24: mol_type = other RNA
tagcagcacgtaaatattggcgtt

SEQ ID NO: 1414 - RNA, 20 nt, Synthetic Construct
  source 1..20: mol_type = other RNA
attgcacggtatccatctgt

SEQ ID NO: 1415 - RNA, 23 nt, Synthetic Construct
  source 1..23: mol_type = other RNA
atgtcccacccccactcctgttt

SEQ ID NO: 1416 - RNA, 22 nt, Synthetic Construct
  source 1..22: mol_type = other RNA
tgagaactgaattccatgggtt

SEQ ID NO: 1417 - RNA, 23 nt, Synthetic Construct
  source 1..23: mol_type = other RNA
gtagtgtttcctactttatggaa

SEQ ID NO: 1418 - RNA, 20 nt, Synthetic Construct
  source 1..20: mol_type = other RNA
tagcagcacataatggtttg

SEQ ID NO: 1419 - RNA, 25 nt, Synthetic Construct
  source 1..25: mol_type = other RNA
caaagaattctccttttgggctttt

SEQ ID NO: 1420 - RNA, 21 nt, Synthetic Construct
  source 1..21: mol_type = other RNA
tcgtaccgtgagtaataatgc

SEQ ID NO: 1421 - RNA, 23 nt, Synthetic Construct
  source 1..23: mol_type = other RNA
gactatagaactttccccctcaa

SEQ ID NO: 1422 - RNA, 24 nt, Synthetic Construct
  source 1..24: mol_type = other RNA
ttcaagtaattcaggataggtttt

SEQ ID NO: 1423 - RNA, 23 nt, Synthetic Construct
  source 1..23: mol_type = other RNA
tagcagcacgtaaatattggcgt

SEQ ID NO: 1424 - RNA, 23 nt, Synthetic Construct
  source 1..23: mol_type = other RNA
attctaatttctccacgtctttg

SEQ ID NO: 1425 - RNA, 21 nt, Synthetic Construct
  source 1..21: mol_type = other RNA
tgtcccacccccactcctgtt

SEQ ID NO: 1426 - RNA, 23 nt, Synthetic Construct
  source 1..23: mol_type = other RNA
tgagaactgaattccatgggttg

SEQ ID NO: 1427 - RNA, 22 nt, Synthetic Construct
  source 1..22: mol_type = other RNA
agggggaaagttctatagtcct

SEQ ID NO: 1428 - RNA, 21 nt, Synthetic Construct
  source 1..21: mol_type = other RNA
cgaatcattatttgctgctct

SEQ ID NO: 1429 - RNA, 24 nt, Synthetic Construct
  source 1..24: mol_type = other RNA
ttgcagctgcctgggagtgacttc

SEQ ID NO: 1430 - RNA, 26 nt, Synthetic Construct
  source 1..26: mol_type = other RNA
tgtaaacatccttgactggaagcttt

SEQ ID NO: 1431 - RNA, 20 nt, Synthetic Construct
  source 1..20: mol_type = other RNA
caacggaatcccaaaagcag

SEQ ID NO: 1432 - RNA, 21 nt, Synthetic Construct
  source 1..21: mol_type = other RNA
atgtcccacccccactcctgt

SEQ ID NO: 1433 - RNA, 23 nt, Synthetic Construct
  source 1..23: mol_type = other RNA
acagtagtctgcacattggttat

SEQ ID NO: 1434 - RNA, 22 nt, Synthetic Construct
  source 1..22: mol_type = other RNA
caagtcactagtggttccgttt

SEQ ID NO: 1435 - RNA, 19 nt, Synthetic Construct
  source 1..19: mol_type = other RNA
agcagcattgtacagggct

SEQ ID NO: 1436 - RNA, 21 nt, Synthetic Construct
  source 1..21: mol_type = other RNA
aattgcacggtatccatctgt

SEQ ID NO: 1437 - RNA, 20 nt, Synthetic Construct
  source 1..20: mol_type = other RNA
aaaccgttaccattactgag

SEQ ID NO: 1438 - RNA, 18 nt, Synthetic Construct
  source 1..18: mol_type = other RNA
agcagcattgtacagggc

SEQ ID NO: 1439 - RNA, 23 nt, Synthetic Construct
  source 1..23: mol_type = other RNA
gcctgctggggtggaacctggtt

SEQ ID NO: 1440 - RNA, 22 nt, Synthetic Construct
  source 1..22: mol_type = other RNA
gagaactgaattccatgggttg

SEQ ID NO: 1441 - RNA, 20 nt, Synthetic Construct
  source 1..20: mol_type = other RNA
cattattacttttggtacgc

SEQ ID NO: 1442 - RNA, 23 nt, Synthetic Construct
  source 1..23: mol_type = other RNA
tagcttatcagactgatgttgac

SEQ ID NO: 1443 - RNA, 24 nt, Synthetic Construct
  source 1..24: mol_type = other RNA
tgatatgtttgatatattaggttg

SEQ ID NO: 1444 - RNA, 23 nt, Synthetic Construct
  source 1..23: mol_type = other RNA
gtaaacatccttgactggaagct

SEQ ID NO: 1445 - RNA, 18 nt, Synthetic Construct
  source 1..18: mol_type = other RNA
tagcagcacatcatggtt

SEQ ID NO: 1446 - RNA, 21 nt, Synthetic Construct
  source 1..21: mol_type = other RNA
cagcattgtacagggctatga

SEQ ID NO: 1447 - RNA, 22 nt, Synthetic Construct
  source 1..22: mol_type = other RNA
tatatatatatatgtacgtatg

SEQ ID NO: 1448 - RNA, 24 nt, Synthetic Construct
  source 1..24: mol_type = other RNA
tacagtagtctgcacattggttat

SEQ ID NO: 1449 - RNA, 24 nt, Synthetic Construct
  source 1..24: mol_type = other RNA
agaggtagtaggttgcatagtttt

SEQ ID NO: 1450 - RNA, 20 nt, Synthetic Construct
  source 1..20: mol_type = other RNA
tctcccaacccttgtaccag

SEQ ID NO: 1451 - RNA, 20 nt, Synthetic Construct
  source 1..20: mol_type = other RNA
ctatacgacctgctgccttt

SEQ ID NO: 1452 - RNA, 18 nt, Synthetic Construct
  source 1..18: mol_type = other RNA
cataaagtagaaagcact

SEQ ID NO: 1453 - RNA, 22 nt, Synthetic Construct
  source 1..22: mol_type = other RNA
tgtcccacccccactcctgtta

SEQ ID NO: 1454 - RNA, 20 nt, Synthetic Construct
  source 1..20: mol_type = other RNA
tccctgtcctccaggagctc

SEQ ID NO: 1455 - RNA, 27 nt, Synthetic Construct
  source 1..27: mol_type = other RNA
agctacattgtctgctgggtttctttt

SEQ ID NO: 1456 - RNA, 22 nt, Synthetic Construct
  source 1..22: mol_type = other RNA
tagcagcacataatggtttgtg

SEQ ID NO: 1457 - RNA, 26 nt, Synthetic Construct
  source 1..26: mol_type = other RNA
ttcaagtaatccaggataggcttttt

SEQ ID NO: 1458 - RNA, 20 nt, Synthetic Construct
  source 1..20: mol_type = other RNA
caaagaattctccttttggg

SEQ ID NO: 1459 - RNA, 23 nt, Synthetic Construct
  source 1..23: mol_type = other RNA
tgtgcaaatccatgcaaaactga

SEQ ID NO: 1460 - RNA, 21 nt, Synthetic Construct
  source 1..21: mol_type = other RNA
caaagaattctccttttgggc

SEQ ID NO: 1461 - RNA, 18 nt, Synthetic Construct
  source 1..18: mol_type = other RNA
ggggatgtagctcagtgg

SEQ ID NO: 1462 - RNA, 19 nt, Synthetic Construct
  source 1..19: mol_type = other RNA
aaaccgttaccattactga

SEQ ID NO: 1463 - RNA, 23 nt, Synthetic Construct
  source 1..23: mol_type = other RNA
tcaagagcaataacgaaaaatgt

SEQ ID NO: 1464 - RNA, 21 nt, Synthetic Construct
  source 1..21: mol_type = other RNA
tctcccaacccttgtaccagt

SEQ ID NO: 1465 - RNA, 21 nt, Synthetic Construct
  source 1..21: mol_type = other RNA
ttataatacaacctgataagt

SEQ ID NO: 1466 - RNA, 22 nt, Synthetic Construct
  source 1..22: mol_type = other RNA
actccagccccacagcctcagc

SEQ ID NO: 1467 - RNA, 21 nt, Synthetic Construct
  source 1..21: mol_type = other RNA
tgtaacagcaactccatgtgg

SEQ ID NO: 1468 - RNA, 21 nt, Synthetic Construct
  source 1..21: mol_type = other RNA
aagctgccagttgaagaactg

SEQ ID NO: 1469 - RNA, 23 nt, Synthetic Construct
  source 1..23: mol_type = other RNA
aacattcattgttgtcggtgggt

SEQ ID NO: 1470 - RNA, 20 nt, Synthetic Construct
  source 1..20: mol_type = other RNA
aattgcacggtatccatctg

SEQ ID NO: 1471 - RNA, 22 nt, Synthetic Construct
  source 1..22: mol_type = other RNA
tgtgcaaatccatgcaaaactg

SEQ ID NO: 1472 - RNA, 22 nt, Synthetic Construct
  source 1..22: mol_type = other RNA
tgtgcaaatctatgcaaaactg

SEQ ID NO: 1473 - RNA, 19 nt, Synthetic Construct
  source 1..19: mol_type = other RNA
caaagtgctgttcgtgcag

SEQ ID NO: 1474 - RNA, 19 nt, Synthetic Construct
  source 1..19: mol_type = other RNA
tagcagcacgtaaatattg

SEQ ID NO: 1475 - RNA, 23 nt, Synthetic Construct
  source 1..23: mol_type = other RNA
tgtgcaaatctatgcaaaactga

SEQ ID NO: 1476 - RNA, 21 nt, Synthetic Construct
  source 1..21: mol_type = other RNA
tatatatatatatgtacgtat

SEQ ID NO: 1477 - RNA, 19 nt, Synthetic Construct
  source 1..19: mol_type = other RNA
tccctgagaccctaacttg

SEQ ID NO: 1478 - RNA, 23 nt, Synthetic Construct
  source 1..23: mol_type = other RNA
ggatatcatcatatactgtaagt

SEQ ID NO: 1479 - RNA, 21 nt, Synthetic Construct
  source 1..21: mol_type = other RNA
tccttcattccaccggagtct

SEQ ID NO: 1480 - RNA, 23 nt, Synthetic Construct
  source 1..23: mol_type = other RNA
tctcccaacccttgtaccagtga

SEQ ID NO: 1481 - RNA, 23 nt, Synthetic Construct
  source 1..23: mol_type = other RNA
tggaatgtaaagaagtatgtacc

SEQ ID NO: 1482 - RNA, 22 nt, Synthetic Construct
  source 1..22: mol_type = other RNA
tgaggtagtagtttgtgctttt

SEQ ID NO: 1483 - RNA, 22 nt, Synthetic Construct
  source 1..22: mol_type = other RNA
tggaatgtaaaggagtatgtat

SEQ ID NO: 1484 - RNA, 22 nt, Synthetic Construct
  source 1..22: mol_type = other RNA
tggaacgtaaagaagtatgtat

SEQ ID NO: 1485 - RNA, 22 nt, Synthetic Construct
  source 1..22: mol_type = other RNA
tggaatgtaaagaagtatgtgt

SEQ ID NO: 1486 - RNA, 22 nt, Synthetic Construct
  source 1..22: mol_type = other RNA
tggaatgtaaagaagtacgtat

SEQ ID NO: 1487 - RNA, 22 nt, Synthetic Construct
  source 1..22: mol_type = other RNA
aggaatgtaaagaagtatgtat

SEQ ID NO: 1488 - RNA, 20 nt, Synthetic Construct
  source 1..20: mol_type = other RNA
taaggtagtaggttgtgtgg

SEQ ID NO: 1489 - RNA, 21 nt, Synthetic Construct
  source 1..21: mol_type = other RNA
taggtagtttcctgttgttgg

SEQ ID NO: 1490 - RNA, 35 nt, Synthetic Construct
  source 1..35: mol_type = other RNA
gcattggtggttcagtggtagaattctcgcctgcc

SEQ ID NO: 1491 - RNA, 21 nt, Synthetic Construct
  source 1..21: mol_type = other RNA
ttcaagtaatccaggatagga

SEQ ID NO: 1492 - RNA, 22 nt, Synthetic Construct
  source 1..22: mol_type = other RNA
tagcaccatttgaaatcggtta

SEQ ID NO: 1493 - RNA, 22 nt, Synthetic Construct
  source 1..22: mol_type = other RNA
taggtagtttcctgttgttggg

SEQ ID NO: 1494 - RNA, 22 nt, Synthetic Construct
  source 1..22: mol_type = other RNA
tcgtaccgtgagtaataatgct

SEQ ID NO: 1495 - RNA, 22 nt, Synthetic Construct
  source 1..22: mol_type = other RNA
tcacagtgaaccggtctcttta

SEQ ID NO: 1496 - RNA, 20 nt, Synthetic Construct
  source 1..20: mol_type = other RNA
tccctgagaccctaacttgt

SEQ ID NO: 1497 - RNA, 35 nt, Synthetic Construct
  source 1..35: mol_type = other RNA
gcccggctagctcagtcggtagagcatgggactct

SEQ ID NO: 1498 - RNA, 23 nt, Synthetic Construct
  source 1..23: mol_type = other RNA
taacagtctacagccatggtcgt

SEQ ID NO: 1499 - RNA, 21 nt, Synthetic Construct
  source 1..21: mol_type = other RNA
ttcacagtggctaagttctga

SEQ ID NO: 1500 - RNA, 22 nt, Synthetic Construct
  source 1..22: mol_type = other RNA
taccctgtagatccgaatttgt

SEQ ID NO: 1501 - RNA, 35 nt, Synthetic Construct
  source 1..35: mol_type = other RNA
gcccggctagctcagtcggtagagcatgagactct

SEQ ID NO: 1502 - RNA, 23 nt, Synthetic Construct
  source 1..23: mol_type = other RNA
tggaagactagtgattttgttgt

SEQ ID NO: 1503 - RNA, 20 nt, Synthetic Construct
  source 1..20: mol_type = other RNA
tggaatgtaaggaagtgtgt

SEQ ID NO: 1504 - RNA, 23 nt, Synthetic Construct
  source 1..23: mol_type = other RNA
tgtaaacatcctacactctcagc

SEQ ID NO: 1505 - RNA, 18 nt, Synthetic Construct
  source 1..18: mol_type = other RNA
tgaggtagtagattgtat

SEQ ID NO: 1506 - RNA, 34 nt, Synthetic Construct
  source 1..34: mol_type = other RNA
gcatgggtggttcagtggtagaattctcgcctgc

SEQ ID NO: 1507 - RNA, 21 nt, Synthetic Construct
  source 1..21: mol_type = other RNA
tgaggtagaagattgtatagt

SEQ ID NO: 1508 - RNA, 23 nt, Synthetic Construct
  source 1..23: mol_type = other RNA
tccagcatcagtgattttgttga

SEQ ID NO: 1509 - RNA, 21 nt, Synthetic Construct
  source 1..21: mol_type = other RNA
aacccgtagatccgaacttgt

SEQ ID NO: 1510 - RNA, 22 nt, Synthetic Construct
  source 1..22: mol_type = other RNA
accctgtagatccgaatttgtg

SEQ ID NO: 1511 - RNA, 22 nt, Synthetic Construct
  source 1..22: mol_type = other RNA
tagcaccatctgaaatcggtta

SEQ ID NO: 1512 - RNA, 21 nt, Synthetic Construct
  source 1..21: mol_type = other RNA
accctgtagatccgaatttgt

SEQ ID NO: 1513 - RNA, 22 nt, Synthetic Construct
  source 1..22: mol_type = other RNA
tgtaaacatccccgactggaaa

SEQ ID NO: 1514 - RNA, 16 nt, Synthetic Construct
  source 1..16: mol_type = other RNA
ctctacggccatacca

SEQ ID NO: 1515 - RNA, 21 nt, Synthetic Construct
  source 1..21: mol_type = other RNA
ttggtccccttcaaccagctg

SEQ ID NO: 1516 - RNA, 23 nt, Synthetic Construct
  source 1..23: mol_type = other RNA
taccctgtagatccgaatttgtg

SEQ ID NO: 1517 - RNA, 23 nt, Synthetic Construct
  source 1..23: mol_type = other RNA
actggacttggagtcagaaggct

SEQ ID NO: 1518 - RNA, 20 nt, Synthetic Construct
  source 1..20: mol_type = other RNA
tagcaccatctgaaatcggt

SEQ ID NO: 1519 - RNA, 25 nt, Synthetic Construct
  source 1..25: mol_type = other RNA
tgtaaacatcctcgactggaagctt

SEQ ID NO: 1520 - RNA, 21 nt, Synthetic Construct
  source 1..21: mol_type = other RNA
ctagcaccatctgaaatcggt

SEQ ID NO: 1521 - RNA, 39 nt, Synthetic Construct
  source 1..39: mol_type = other RNA
atatcattggtcgtggttgtagtccgtgcgagaatacca

SEQ ID NO: 1522 - RNA, 21 nt, Synthetic Construct
  source 1..21: mol_type = other RNA
tagcaccatctgaaatcggtt

SEQ ID NO: 1523 - RNA, 20 nt, Synthetic Construct
  source 1..20: mol_type = other RNA
tggtagactatggaacgtag

SEQ ID NO: 1524 - RNA, 22 nt, Synthetic Construct
  source 1..22: mol_type = other RNA
ctagcaccatctgaaatcggtt

SEQ ID NO: 1525 - RNA, 22 nt, Synthetic Construct
  source 1..22: mol_type = other RNA
tacagtactgtgataactgaat

SEQ ID NO: 1526 - RNA, 34 nt, Synthetic Construct
  source 1..34: mol_type = other RNA
ctattgaaagtcagccctcgacacaagggtttgt

SEQ ID NO: 1527 - RNA, 22 nt, Synthetic Construct
  source 1..22: mol_type = other RNA
taggttatccgtgttgccttcg

SEQ ID NO: 1528 - RNA, 21 nt, Synthetic Construct
  source 1..21: mol_type = other RNA
tagcaccatttgaaatcagtg

SEQ ID NO: 1529 - RNA, 19 nt, Synthetic Construct
  source 1..19: mol_type = other RNA
tagcaccatttgaaatcgg

SEQ ID NO: 1530 - RNA, 34 nt, Synthetic Construct
  source 1..34: mol_type = other RNA
gtttccgtagtgtagtggttatcacgttcgcctc

SEQ ID NO: 1531 - RNA, 20 nt, Synthetic Construct
  source 1..20: mol_type = other RNA
ctttcagtcggatgtttaca

SEQ ID NO: 1532 - RNA, 29 nt, Synthetic Construct
  source 1..29: mol_type = other RNA
gcccggctagctcagtcggtagagcatgg

SEQ ID NO: 1533 - RNA, 21 nt, Synthetic Construct
  source 1..21: mol_type = other RNA
taccctgtagaaccgaatttg

SEQ ID NO: 1534 - RNA, 22 nt, Synthetic Construct
  source 1..22: mol_type = other RNA
tagcaccatctgaaatcggttt

SEQ ID NO: 1535 - RNA, 30 nt, Synthetic Construct
  source 1..30: mol_type = other RNA
gtttccgtagtgtagtggttatcacgttcg

SEQ ID NO: 1536 - RNA, 22 nt, Synthetic Construct
  source 1..22: mol_type = other RNA
tgtagtgtctcctactttatgg

SEQ ID NO: 1537 - RNA, 38 nt, Synthetic Construct
  source 1..38: mol_type = other RNA
agggctgggtcggtcgggctggggcgcgaagcggggct

SEQ ID NO: 1538 - RNA, 21 nt, Synthetic Construct
  source 1..21: mol_type = other RNA
ggaggtagtaggttgtatagt

SEQ ID NO: 1539 - RNA, 22 nt, Synthetic Construct
  source 1..22: mol_type = other RNA
cattgcgcttgtctcggtctga

SEQ ID NO: 1540 - RNA, 22 nt, Synthetic Construct
  source 1..22: mol_type = other RNA
cattgcacttgtcccggtctga

SEQ ID NO: 1541 - RNA, 26 nt, Synthetic Construct
  source 1..26: mol_type = other RNA
ttaagtgacgatagcctaggagatac

SEQ ID NO: 1542 - RNA, 22 nt, Synthetic Construct
  source 1..22: mol_type = other RNA
tgtggtagtagattgtatagtt

SEQ ID NO: 1543 - RNA, 22 nt, Synthetic Construct
  source 1..22: mol_type = other RNA
tgaggtagaaggttgtatagtt

SEQ ID NO: 1544 - RNA, 22 nt, Synthetic Construct
  source 1..22: mol_type = other RNA
cactgcacttgtctcggtctga

SEQ ID NO: 1545 - RNA, 21 nt, Synthetic Construct
  source 1..21: mol_type = other RNA
gcagtagtctgcacattggtt

SEQ ID NO: 1546 - RNA, 23 nt, Synthetic Construct
  source 1..23: mol_type = other RNA
tgtcagtttgtcaaatacccctt

SEQ ID NO: 1547 - RNA, 24 nt, Synthetic Construct
  source 1..24: mol_type = other RNA
tcccccaggtgtgattctgatttg

SEQ ID NO: 1548 - RNA, 23 nt, Synthetic Construct
  source 1..23: mol_type = other RNA
tcccccaggtgtgattctgattt

SEQ ID NO: 1549 - RNA, 21 nt, Synthetic Construct
  source 1..21: mol_type = other RNA
ttatcagaatctccaggggta

SEQ ID NO: 1550 - RNA, 22 nt, Synthetic Construct
  source 1..22: mol_type = other RNA
cacccgtagaaccgaccttgcg

SEQ ID NO: 1551 - RNA, 21 nt, Synthetic Construct
  source 1..21: mol_type = other RNA
caacggaatcccaaaagcagc

SEQ ID NO: 1552 - RNA, 23 nt, Synthetic Construct
  source 1..23: mol_type = other RNA
ttatggtttgcctgggactgaaa

SEQ ID NO: 1553 - RNA, 21 nt, Synthetic Construct
  source 1..21: mol_type = other RNA
aatggcgccactagggttgtg

SEQ ID NO: 1554 - RNA, 24 nt, Synthetic Construct
  source 1..24: mol_type = other RNA
gtcagtttgtcaaataccccaatt

SEQ ID NO: 1555 - RNA, 23 nt, Synthetic Construct
  source 1..23: mol_type = other RNA
caacggaatcccaaaagcagctg

SEQ ID NO: 1556 - RNA, 23 nt, Synthetic Construct
  source 1..23: mol_type = other RNA
aacggaatcccaaaagcagctgt

SEQ ID NO: 1557 - RNA, 22 nt, Synthetic Construct
  source 1..22: mol_type = other RNA
caaagaattctccttttgggct

SEQ ID NO: 1558 - RNA, 22 nt, Synthetic Construct
  source 1..22: mol_type = other RNA
tgtcagtttgtcaaatacccca

SEQ ID NO: 1559 - RNA, 23 nt, Synthetic Construct
  source 1..23: mol_type = other RNA
tctcacacagaaatcgcacccgt

SEQ ID NO: 1560 - RNA, 22 nt, Synthetic Construct
  source 1..22: mol_type = other RNA
ttatcagaatctccaggggtac

SEQ ID NO: 1561 - RNA, 19 nt, Synthetic Construct
  source 1..19: mol_type = other RNA
tagcagcacatcatggttt

SEQ ID NO: 1562 - RNA, 23 nt, Synthetic Construct
  source 1..23: mol_type = other RNA
tgagcgcctcgacgacagagccg

SEQ ID NO: 1563 - RNA, 21 nt, Synthetic Construct
  source 1..21: mol_type = other RNA
ctcggcgtggcgtcggtcgtg

SEQ ID NO: 1564 - RNA, 22 nt, Synthetic Construct
  source 1..22: mol_type = other RNA
tagcagcacatcatggtttaca

SEQ ID NO: 1565 - RNA, 20 nt, Synthetic Construct
  source 1..20: mol_type = other RNA
tagaattctcgcctgccacg

SEQ ID NO: 1566 - RNA, 22 nt, Synthetic Construct
  source 1..22: mol_type = other RNA
actagattgtgagctcctggag

SEQ ID NO: 1567 - RNA, 25 nt, Synthetic Construct
  source 1..25: mol_type = other RNA
tgtcagtttgtcaaataccccaagt

SEQ ID NO: 1568 - RNA, 21 nt, Synthetic Construct
  source 1..21: mol_type = other RNA
tccctgtcctccaggagctca

SEQ ID NO: 1569 - RNA, 25 nt, Synthetic Construct
  source 1..25: mol_type = other RNA
ttgcagctgcctgggagtgacttca

SEQ ID NO: 1570 - RNA, 22 nt, Synthetic Construct
  source 1..22: mol_type = other RNA
aaaagtaattgcggtctttggt

SEQ ID NO: 1571 - RNA, 22 nt, Synthetic Construct
  source 1..22: mol_type = other RNA
cctctgggcccttcctccagtt

SEQ ID NO: 1572 - RNA, 23 nt, Synthetic Construct
  source 1..23: mol_type = other RNA
agctacattgtctgctgggtttc

SEQ ID NO: 1573 - RNA, 20 nt, Synthetic Construct
  source 1..20: mol_type = other RNA
ctagactgaagctccttgag

SEQ ID NO: 1574 - RNA, 25 nt, Synthetic Construct
  source 1..25: mol_type = other RNA
tattgcacttgtcccggcctgtttt

SEQ ID NO: 1575 - RNA, 24 nt, Synthetic Construct
  source 1..24: mol_type = other RNA
tgagaactgaattccataggctgt

SEQ ID NO: 1576 - RNA, 18 nt, Synthetic Construct
  source 1..18: mol_type = other RNA
accctgctcgctgcgcca

SEQ ID NO: 1577 - RNA, 23 nt, Synthetic Construct
  source 1..23: mol_type = other RNA
tcagtgcatcacagaactttgtt

SEQ ID NO: 1578 - RNA, 21 nt, Synthetic Construct
  source 1..21: mol_type = other RNA
aacggaatcccaaaagcagct

SEQ ID NO: 1579 - RNA, 22 nt, Synthetic Construct
  source 1..22: mol_type = other RNA
tctcacacagaaatcgcacccg

SEQ ID NO: 1580 - RNA, 25 nt, Synthetic Construct
  source 1..25: mol_type = other RNA
tcagtgcatcacagaactttgtttt

SEQ ID NO: 1581 - RNA, 24 nt, Synthetic Construct
  source 1..24: mol_type = other RNA
tattgcacttgtcccggcctgtta

SEQ ID NO: 1582 - RNA, 23 nt, Synthetic Construct
  source 1..23: mol_type = other RNA
tcagtgcatcacagaactttgta

SEQ ID NO: 1583 - RNA, 23 nt, Synthetic Construct
  source 1..23: mol_type = other RNA
gactatagaactttccccctcat

SEQ ID NO: 1584 - RNA, 18 nt, Synthetic Construct
  source 1..18: mol_type = other RNA
gcagcgatggccgagtgg

SEQ ID NO: 1585 - RNA, 23 nt, Synthetic Construct
  source 1..23: mol_type = other RNA
atgacacgatcactcccgttgag

SEQ ID NO: 1586 - RNA, 24 nt, Synthetic Construct
  source 1..24: mol_type = other RNA
gactatagaactttccccctcatt

SEQ ID NO: 1587 - RNA, 23 nt, Synthetic Construct
  source 1..23: mol_type = other RNA
aatgacacgatcactcccgttgt

SEQ ID NO: 1588 - RNA, 23 nt, Synthetic Construct
  source 1..23: mol_type = other RNA
ctcggcgtggcgtcggtcgtgga

SEQ ID NO: 1589 - RNA, 23 nt, Synthetic Construct
  source 1..23: mol_type = other RNA
tgaaacatacacgggaaacctct

SEQ ID NO: 1590 - RNA, 24 nt, Synthetic Construct
  source 1..24: mol_type = other RNA
caagtcactagtggttccgtttag

SEQ ID NO: 1591 - RNA, 20 nt, Synthetic Construct
  source 1..20: mol_type = other RNA
cctcccacacccaaggcttg

SEQ ID NO: 1592 - RNA, 25 nt, Synthetic Construct
  source 1..25: mol_type = other RNA
tgagaactgaattccataggctgtt

SEQ ID NO: 1593 - RNA, 30 nt, Synthetic Construct
  source 1..30: mol_type = other RNA
ggctcgttggtctaggggtatgattctcgc

SEQ ID NO: 1594 - RNA, 23 nt, Synthetic Construct
  source 1..23: mol_type = other RNA
tcccacatggtctagcggttagg

SEQ ID NO: 1595 - RNA, 23 nt, Synthetic Construct
  source 1..23: mol_type = other RNA
tgggtttacgttgggagaacttt

SEQ ID NO: 1596 - RNA, 20 nt, Synthetic Construct
  source 1..20: mol_type = other RNA
tagcagcacatcatggttta

SEQ ID NO: 1597 - RNA, 24 nt, Synthetic Construct
  source 1..24: mol_type = other RNA
ttcaagtaattcaggataggttgt

SEQ ID NO: 1598 - RNA, 22 nt, Synthetic Construct
  source 1..22: mol_type = other RNA
tatgtcccacccccactcctgt

SEQ ID NO: 1599 - RNA, 20 nt, Synthetic Construct
  source 1..20: mol_type = other RNA
agcagcattgtacagggcta

SEQ ID NO: 1600 - RNA, 25 nt, Synthetic Construct
  source 1..25: mol_type = other RNA
actcggcgtggcgtcggtcgtggtt

SEQ ID NO: 1601 - RNA, 21 nt, Synthetic Construct
  source 1..21: mol_type = other RNA
tatgtctgctgaccatcacct

SEQ ID NO: 1602 - RNA, 29 nt, Synthetic Construct
  source 1..29: mol_type = other RNA
tccctggtggtctagtggttaggattcgg

SEQ ID NO: 1603 - RNA, 22 nt, Synthetic Construct
  source 1..22: mol_type = other RNA
tcgattcccggccaatgcacca

SEQ ID NO: 1604 - RNA, 23 nt, Synthetic Construct
  source 1..23: mol_type = other RNA
gcctgctggggtggaacctggta

SEQ ID NO: 1605 - RNA, 17 nt, Synthetic Construct
  source 1..17: mol_type = other RNA
tccccggcatctccacc

SEQ ID NO: 1606 - RNA, 23 nt, Synthetic Construct
  source 1..23: mol_type = other RNA
ttgagaactgaattccatgggtt

SEQ ID NO: 1607 - RNA, 18 nt, Synthetic Construct
  source 1..18: mol_type = other RNA
aaccgggcggaaacacca

SEQ ID NO: 1608 - RNA, 20 nt, Synthetic Construct
  source 1..20: mol_type = other RNA
tattgcacttgtcccggcct

SEQ ID NO: 1609 - RNA, 21 nt, Synthetic Construct
  source 1..21: mol_type = other RNA
gtagtgtttcctactttatgg

SEQ ID NO: 1610 - RNA, 22 nt, Synthetic Construct
  source 1..22: mol_type = other RNA
aattgcacggtatccatctgta

SEQ ID NO: 1611 - RNA, 23 nt, Synthetic Construct
  source 1..23: mol_type = other RNA
atgtcccacccccactcctgtta

SEQ ID NO: 1612 - RNA, 19 nt, Synthetic Construct
  source 1..19: mol_type = other RNA
cgcgcgtcccccgaagagg

SEQ ID NO: 1613 - RNA, 18 nt, Synthetic Construct
  source 1..18: mol_type = other RNA
ttgggagcgggcgggcgg

SEQ ID NO: 1614 - RNA, 29 nt, Synthetic Construct
  source 1..29: mol_type = other RNA
gagcgctgagaagacggtcgaacttgact

SEQ ID NO: 1615 - RNA, 24 nt, Synthetic Construct
  source 1..24: mol_type = other RNA
tacagtagtctgcacattggttaa

SEQ ID NO: 1616 - RNA, 22 nt, Synthetic Construct
  source 1..22: mol_type = other RNA
taacactgtctggtaacgatgt

SEQ ID NO: 1617 - RNA, 24 nt, Synthetic Construct
  source 1..24: mol_type = other RNA
tgtcagtttgtcaaataccccatc

SEQ ID NO: 1618 - RNA, 42 nt, Synthetic Construct
  source 1..42: mol_type = other RNA
gcttctgtagtgtagtggttatcacgttcgcctcacacgcga

SEQ ID NO: 1619 - RNA, 40 nt, Synthetic Construct
  source 1..40: mol_type = other RNA
gctaaacctagccccaaacccactccaccttactaccaga

SEQ ID NO: 1620 - RNA, 37 nt, Synthetic Construct
  source 1..37: mol_type = other RNA
gctaaacctagccccaaacccactccaccttactacc

SEQ ID NO: 1621 - RNA, 16 nt, Synthetic Construct
  source 1..16: mol_type = other RNA
tggagtgtgacaatgg

SEQ ID NO: 1622 - RNA, 21 nt, Synthetic Construct
  source 1..21: mol_type = other RNA
aatgacacgatcactcccgtt

SEQ ID NO: 1623 - RNA, 15 nt, Synthetic Construct
  source 1..15: mol_type = other RNA
tgaggtagtagattg

SEQ ID NO: 1624 - RNA, 22 nt, Synthetic Construct
  source 1..22: mol_type = other RNA
agtagtgtttcctactttatgg

SEQ ID NO: 1625 - RNA, 23 nt, Synthetic Construct
  source 1..23: mol_type = other RNA
tgtcagtttgtcaaatacaccat

SEQ ID NO: 1626 - RNA, 32 nt, Synthetic Construct
  source 1..32: mol_type = other RNA
ggtaaaatggctgagtgaagcattggactgta

SEQ ID NO: 1627 - RNA, 31 nt, Synthetic Construct
  source 1..31: mol_type = other RNA
gtaatggcgggaactctggacagactgccta

SEQ ID NO: 1628 - RNA, 18 nt, Synthetic Construct
  source 1..18: mol_type = other RNA
cacagtgtgaatcggcgc

SEQ ID NO: 1629 - RNA, 29 nt, Synthetic Construct
  source 1..29: mol_type = other RNA
cccccccactgctaaatttgactggcttt

SEQ ID NO: 1630 - RNA, 16 nt, Synthetic Construct
  source 1..16: mol_type = other RNA
ttaatccagccagtcc

SEQ ID NO: 1631 - RNA, 16 nt, Synthetic Construct
  source 1..16: mol_type = other RNA
gcggtggagcatgtgg

SEQ ID NO: 1632 - RNA, 24 nt, Synthetic Construct
  source 1..24: mol_type = other RNA
tgaggtagtagtttgtgctgttta

SEQ ID NO: 1633 - RNA, 24 nt, Synthetic Construct
  source 1..24: mol_type = other RNA
tgtcagtttgtcaaatacaccatt

SEQ ID NO: 1634 - RNA, 18 nt, Synthetic Construct
  source 1..18: mol_type = other RNA
gcgggcgtagctcagggg

SEQ ID NO: 1635 - RNA, 27 nt, Synthetic Construct
  source 1..27: mol_type = other RNA
tcccccactgctaaatttgactggctt

SEQ ID NO: 1636 - RNA, 21 nt, Synthetic Construct
  source 1..21: mol_type = other RNA
taactccttaagcaatctcgc

SEQ ID NO: 1637 - RNA, 17 nt, Synthetic Construct
  source 1..17: mol_type = other RNA
acagtgtgaatcggcgc

SEQ ID NO: 1638 - RNA, 21 nt, Synthetic Construct
  source 1..21: mol_type = other RNA
agagtaggacgttgccaggtt

SEQ ID NO: 1639 - RNA, 22 nt, Synthetic Construct
  source 1..22: mol_type = other RNA
tcgtttcccgggcggcgcacca

SEQ ID NO: 1640 - RNA, 43 nt, Synthetic Construct
  source 1..43: mol_type = other RNA
gctaaacctagccccaaacccactccaccttactaccagacaa

SEQ ID NO: 1641 - RNA, 30 nt, Synthetic Construct
  source 1..30: mol_type = other RNA
tcgcgcgttcgaatcgcgtcatccgctcca

SEQ ID NO: 1642 - RNA, 16 nt, Synthetic Construct
  source 1..16: mol_type = other RNA
ccgagtgacgtagtgt

SEQ ID NO: 1643 - RNA, 25 nt, Synthetic Construct
  source 1..25: mol_type = other RNA
gactcttagcggtggatcactcggc

SEQ ID NO: 1644 - RNA, 44 nt, Synthetic Construct
  source 1..44: mol_type = other RNA
gctaaacctagccccaaacccactccaccttactaccagacaac

SEQ ID NO: 1645 - RNA, 20 nt, Synthetic Construct
  source 1..20: mol_type = other RNA
atcccaccgctgccaccatt

SEQ ID NO: 1646 - RNA, 27 nt, Synthetic Construct
  source 1..27: mol_type = other RNA
gcgggtgatgcgaactggagtctgagc

SEQ ID NO: 1647 - RNA, 22 nt, Synthetic Construct
  source 1..22: mol_type = other RNA
agagaactgaattccatgggtt

SEQ ID NO: 1648 - RNA, 30 nt, Synthetic Construct
  source 1..30: mol_type = other RNA
cgagacccgcgggtgctttccagctctttt

SEQ ID NO: 1649 - RNA, 22 nt, Synthetic Construct
  source 1..22: mol_type = other RNA
ggctggtccgaaggtagtgagt

SEQ ID NO: 1650 - RNA, 27 nt, Synthetic Construct
  source 1..27: mol_type = other RNA
ctccccactgctaaatttgactggctt

SEQ ID NO: 1651 - RNA, 23 nt, Synthetic Construct
  source 1..23: mol_type = other RNA
tcctgtactgagctgccccgact

SEQ ID NO: 1652 - RNA, 18 nt, Synthetic Construct
  source 1..18: mol_type = other RNA
gtctgcctcagcgtcggt

SEQ ID NO: 1653 - RNA, 29 nt, Synthetic Construct
  source 1..29: mol_type = other RNA
cgcggggtggagcagcccggtagctcgtc

SEQ ID NO: 1654 - RNA, 19 nt, Synthetic Construct
  source 1..19: mol_type = other RNA
ccgtgttcggaagattttc

SEQ ID NO: 1655 - RNA, 20 nt, Synthetic Construct
  source 1..20: mol_type = other RNA
cccgtgttcggaagattttc

SEQ ID NO: 1656 - RNA, 22 nt, Synthetic Construct
  source 1..22: mol_type = other RNA
aaatggatttttggagcaggga

SEQ ID NO: 1657 - RNA, 16 nt, Synthetic Construct
  source 1..16: mol_type = other RNA
cgatatggcatgagat

SEQ ID NO: 1658 - RNA, 29 nt, Synthetic Construct
  source 1..29: mol_type = other RNA
gatgcgaaagcaggtcaaagtgatccggc

SEQ ID NO: 1659 - RNA, 27 nt, Synthetic Construct
  source 1..27: mol_type = other RNA
ccccccactgataaatttgactggctt

SEQ ID NO: 1660 - RNA, 25 nt, Synthetic Construct
  source 1..25: mol_type = other RNA
ctgggaaccccgagtgacgtagtgt

SEQ ID NO: 1661 - RNA, 30 nt, Synthetic Construct
  source 1..30: mol_type = other RNA
gcgccgctggtgtagtggtatcatgcaaga

SEQ ID NO: 1662 - RNA, 23 nt, Synthetic Construct
  source 1..23: mol_type = other RNA
gttgaattgtggtctgtggacgt

SEQ ID NO: 1663 - RNA, 15 nt, Synthetic Construct
  source 1..15: mol_type = other RNA
tgcctcagcgtcggt

SEQ ID NO: 1664 - RNA, 20 nt, Synthetic Construct
  source 1..20: mol_type = other RNA
agttggtccgagtgttgtgg

SEQ ID NO: 1665 - RNA, 24 nt, Synthetic Construct
  source 1..24: mol_type = other RNA
gcgggcgtagctcaggggtagagc

SEQ ID NO: 1666 - RNA, 28 nt, Synthetic Construct
  source 1..28: mol_type = other RNA
agggcggtagctcaattggtagagtagc

SEQ ID NO: 1667 - RNA, 41 nt, Synthetic Construct
  source 1..41: mol_type = other RNA
gattggcgatcaagcggtataccgaagctctaggtgcggca

SEQ ID NO: 1668 - RNA, 33 nt, Synthetic Construct
  source 1..33: mol_type = other RNA
atcaagcggtataccgaagctctaggtgcggca

SEQ ID NO: 1669 - RNA, 17 nt, Synthetic Construct
  source 1..17: mol_type = other RNA
cgacgctagcggatcct

SEQ ID NO: 1670 - RNA, 23 nt, Synthetic Construct
  source 1..23: mol_type = other RNA
gcgactggtaactgggatgaagt

SEQ ID NO: 1671 - RNA, 19 nt, Synthetic Construct
  source 1..19: mol_type = other RNA
tcacagtgtgaatcggcgc

SEQ ID NO: 1672 - RNA, 24 nt, Synthetic Construct
  source 1..24: mol_type = other RNA
tgtcagtttgtcaaatacaccaat

SEQ ID NO: 1673 - RNA, 22 nt, Synthetic Construct
  source 1..22: mol_type = other RNA
taactccttaagcgaatctcgc

SEQ ID NO: 1674 - RNA, 26 nt, Synthetic Construct
  source 1..26: mol_type = other RNA
gtgtgaaagtaggtcatcgtcaggct

SEQ ID NO: 1675 - RNA, 32 nt, Synthetic Construct
  source 1..32: mol_type = other RNA
tcctcagtagctcagtggtagagcggtcggct

SEQ ID NO: 1676 - RNA, 30 nt, Synthetic Construct
  source 1..30: mol_type = other RNA
cccccacaaccgcgcttgactagcttgctg

SEQ ID NO: 1677 - RNA, 35 nt, Synthetic Construct
  source 1..35: mol_type = other RNA
gtgttatcgcaaggcatttacgtatgagtgtcagc

SEQ ID NO: 1678 - RNA, 27 nt, Synthetic Construct
  source 1..27: mol_type = other RNA
ccccccactgctaaatttgactgtctt

SEQ ID NO: 1679 - RNA, 24 nt, Synthetic Construct
  source 1..24: mol_type = other RNA
aaaagctgggttgagagggcgtat

SEQ ID NO: 1680 - RNA, 23 nt, Synthetic Construct
  source 1..23: mol_type = other RNA
tgaggtagtagtttgtgctgttg

SEQ ID NO: 1681 - RNA, 22 nt, Synthetic Construct
  source 1..22: mol_type = other RNA
tgaggtagtaggttgtgaggtt

SEQ ID NO: 1682 - RNA, 18 nt, Synthetic Construct
  source 1..18: mol_type = other RNA
gtaggtcatcgtcaggct

SEQ ID NO: 1683 - RNA, 22 nt, Synthetic Construct
  source 1..22: mol_type = other RNA
tgaggtagtaggttgtgtggtt

SEQ ID NO: 1684 - RNA, 22 nt, Synthetic Construct
  source 1..22: mol_type = other RNA
tgaagtagtaggttgtgtggtt

SEQ ID NO: 1685 - RNA, 21 nt, Synthetic Construct
  source 1..21: mol_type = other RNA
tggagcgtgacaatggtgttt

SEQ ID NO: 1686 - RNA, 24 nt, Synthetic Construct
  source 1..24: mol_type = other RNA
tgtaaacatccccgactggaagcc

SEQ ID NO: 1687 - RNA, 19 nt, Synthetic Construct
  source 1..19: mol_type = other RNA
tacagtatagatgatgtac

SEQ ID NO: 1688 - RNA, 22 nt, Synthetic Construct
  source 1..22: mol_type = other RNA
tgaggtagtaggttgtgtgatt

SEQ ID NO: 1689 - RNA, 21 nt, Synthetic Construct
  source 1..21: mol_type = other RNA
tgaggtagtagtctgtgctgt

SEQ ID NO: 1690 - RNA, 23 nt, Synthetic Construct
  source 1..23: mol_type = other RNA
tgaggtagtaggttgtgtggttc

SEQ ID NO: 1691 - RNA, 22 nt, Synthetic Construct
  source 1..22: mol_type = other RNA
tgaggtagtaggttgtgtggtc

SEQ ID NO: 1692 - RNA, 22 nt, Synthetic Construct
  source 1..22: mol_type = other RNA
tgaggtagtaggttgtgtggat

SEQ ID NO: 1693 - RNA, 21 nt, Synthetic Construct
  source 1..21: mol_type = other RNA
tgaggtagtagattgtgtggt

SEQ ID NO: 1694 - RNA, 21 nt, Synthetic Construct
  source 1..21: mol_type = other RNA
tgaggtagtaggttgtatagc

SEQ ID NO: 1695 - RNA, 23 nt, Synthetic Construct
  source 1..23: mol_type = other RNA
tgaggtagtaggttgtgtggttt

SEQ ID NO: 1696 - RNA, 21 nt, Synthetic Construct
  source 1..21: mol_type = other RNA
tggagtgtgacaatggtgttc

SEQ ID NO: 1697 - RNA, 21 nt, Synthetic Construct
  source 1..21: mol_type = other RNA
tggagtgtgacaatggtgctt

SEQ ID NO: 1698 - RNA, 21 nt, Synthetic Construct
  source 1..21: mol_type = other RNA
tgaggtagtaggttgtgtggc

SEQ ID NO: 1699 - RNA, 22 nt, Synthetic Construct
  source 1..22: mol_type = other RNA
tggagtgtgacaatggtgcttg

SEQ ID NO: 1700 - RNA, 23 nt, Synthetic Construct
  source 1..23: mol_type = other RNA
tcctgtactgagttgccccgaga

SEQ ID NO: 1701 - RNA, 21 nt, Synthetic Construct
  source 1..21: mol_type = other RNA
tgaggtagtaggttgtgtgga

SEQ ID NO: 1702 - RNA, 21 nt, Synthetic Construct
  source 1..21: mol_type = other RNA
cggagtgtgacaatggtgttt

SEQ ID NO: 1703 - RNA, 17 nt, Synthetic Construct
  source 1..17: mol_type = other RNA
taggtcatcgtcaggct

SEQ ID NO: 1704 - RNA, 24 nt, Synthetic Construct
  source 1..24: mol_type = other RNA
tgaggtagtaggttgtgtggtttt

SEQ ID NO: 1705 - RNA, 22 nt, Synthetic Construct
  source 1..22: mol_type = other RNA
gtacagtactgtgataactgaa

SEQ ID NO: 1706 - RNA, 22 nt, Synthetic Construct
  source 1..22: mol_type = other RNA
tgaggtagtaggttgtgtagtt

SEQ ID NO: 1707 - RNA, 23 nt, Synthetic Construct
  source 1..23: mol_type = other RNA
caaagtgctgttcgtgcaggtgg

SEQ ID NO: 1708 - RNA, 24 nt, Synthetic Construct
  source 1..24: mol_type = other RNA
tgtaaacatccccgactggaagcg

SEQ ID NO: 1709 - RNA, 21 nt, Synthetic Construct
  source 1..21: mol_type = other RNA
tggagcgtgacaatggtgttt

SEQ ID NO: 1710 - RNA, 24 nt, Synthetic Construct
  source 1..24: mol_type = other RNA
tgaggtagtaggttgtgtggtttc

SEQ ID NO: 1711 - RNA, 21 nt, Synthetic Construct
  source 1..21: mol_type = other RNA
tgaggcagtaggttgtgtggt

SEQ ID NO: 1712 - RNA, 22 nt, Synthetic Construct
  source 1..22: mol_type = other RNA
tggagtgtggcaatggtgtttg

SEQ ID NO: 1713 - RNA, 23 nt, Synthetic Construct
  source 1..23: mol_type = other RNA
tcctgtaccgagctgccccgagt

SEQ ID NO: 1714 - RNA, 22 nt, Synthetic Construct
  source 1..22: mol_type = other RNA
tgaggtagtagtttgtgctgta

SEQ ID NO: 1715 - RNA, 23 nt, Synthetic Construct
  source 1..23: mol_type = other RNA
tgaggtagtaggttgtgtggtta

SEQ ID NO: 1716 - RNA, 24 nt, Synthetic Construct
  source 1..24: mol_type = other RNA
tgaggtagtaggttgtgtggttta

SEQ ID NO: 1717 - RNA, 21 nt, Synthetic Construct
  source 1..21: mol_type = other RNA
tggagtgtgacaacggtgttt

SEQ ID NO: 1718 - RNA, 23 nt, Synthetic Construct
  source 1..23: mol_type = other RNA
cagagtgctgttcgtgcaggtag

SEQ ID NO: 1719 - RNA, 22 nt, Synthetic Construct
  source 1..22: mol_type = other RNA
cgaggtagtaggttgtgtggtt

SEQ ID NO: 1720 - RNA, 21 nt, Synthetic Construct
  source 1..21: mol_type = other RNA
tgaggtagtagtttgtgccgt

SEQ ID NO: 1721 - RNA, 22 nt, Synthetic Construct
  source 1..22: mol_type = other RNA
tgaggtagtaagttgtgtggtt

SEQ ID NO: 1722 - RNA, 21 nt, Synthetic Construct
  source 1..21: mol_type = other RNA
tgaggtagtaggttatgtggt

SEQ ID NO: 1723 - RNA, 22 nt, Synthetic Construct
  source 1..22: mol_type = other RNA
tgaggtagtaggttgtgcggtt

SEQ ID NO: 1724 - RNA, 22 nt, Synthetic Construct
  source 1..22: mol_type = other RNA
tgaggtagtaggttgagtggtt

SEQ ID NO: 1725 - RNA, 22 nt, Synthetic Construct
  source 1..22: mol_type = other RNA
tgaggaagtaggttgtgtggtt

SEQ ID NO: 1726 - RNA, 23 nt, Synthetic Construct
  source 1..23: mol_type = other RNA
tcctgtgctgagctgccccgaga

SEQ ID NO: 1727 - RNA, 23 nt, Synthetic Construct
  source 1..23: mol_type = other RNA
tacagtactgtgataactgaagt

SEQ ID NO: 1728 - RNA, 21 nt, Synthetic Construct
  source 1..21: mol_type = other RNA
tggagtgtgacaacggtgttt

SEQ ID NO: 1729 - RNA, 20 nt, Synthetic Construct
  source 1..20: mol_type = other RNA
tagcttatcagactgatgtt

SEQ ID NO: 1730 - RNA, 21 nt, Synthetic Construct
  source 1..21: mol_type = other RNA
tgaggtagaaggttgtgtggt

SEQ ID NO: 1731 - RNA, 21 nt, Synthetic Construct
  source 1..21: mol_type = other RNA
tggagtgtgacaatggtgctt

SEQ ID NO: 1732 - RNA, 22 nt, Synthetic Construct
  source 1..22: mol_type = other RNA
tggagtgtggcaatggtgtttg

SEQ ID NO: 1733 - RNA, 22 nt, Synthetic Construct
  source 1..22: mol_type = other RNA
tgaggtagtaggttgtatagtc

SEQ ID NO: 1734 - RNA, 22 nt, Synthetic Construct
  source 1..22: mol_type = other RNA
tgaggtagtaggttgtgtggta

SEQ ID NO: 1735 - RNA, 21 nt, Synthetic Construct
  source 1..21: mol_type = other RNA
tgaggtaataggttgtgtggt

SEQ ID NO: 1736 - RNA, 23 nt, Synthetic Construct
  source 1..23: mol_type = other RNA
caaagtgctgtacgtgcaggtag

SEQ ID NO: 1737 - RNA, 23 nt, Synthetic Construct
  source 1..23: mol_type = other RNA
tcctgtactgagctgccctgaga

SEQ ID NO: 1738 - RNA, 19 nt, Synthetic Construct
  source 1..19: mol_type = other RNA
aaaccgttaccattactga

SEQ ID NO: 1739 - RNA, 22 nt, Synthetic Construct
  source 1..22: mol_type = other RNA
tgaggtagtaggttgtgttgtt

SEQ ID NO: 1740 - RNA, 22 nt, Synthetic Construct
  source 1..22: mol_type = other RNA
tgaggcagtaggttgtgtggtt

SEQ ID NO: 1741 - RNA, 23 nt, Synthetic Construct
  source 1..23: mol_type = other RNA
tcctgcactgagctgccccgagt

SEQ ID NO: 1742 - RNA, 21 nt, Synthetic Construct
  source 1..21: mol_type = other RNA
tgaggtagtaggctgtgtggt

SEQ ID NO: 1743 - RNA, 25 nt, Synthetic Construct
  source 1..25: mol_type = other RNA
tgaggtagtaggttgtgtggttttt

SEQ ID NO: 1744 - RNA, 23 nt, Synthetic Construct
  source 1..23: mol_type = other RNA
tgtaaacatccttgactggaagc

SEQ ID NO: 1745 - RNA, 15 nt, Synthetic Construct
  source 1..15: mol_type = other RNA
ggtcatcgtcaggct

SEQ ID NO: 1746 - RNA, 21 nt, Synthetic Construct
  source 1..21: mol_type = other RNA
tgaggaagtaggttgtgtggt

SEQ ID NO: 1747 - RNA, 21 nt, Synthetic Construct
  source 1..21: mol_type = other RNA
tgaggtagtagtttgtgctgc

SEQ ID NO: 1748 - RNA, 21 nt, Synthetic Construct
  source 1..21: mol_type = other RNA
tgaggtagtaggttgtgcggt

SEQ ID NO: 1749 - RNA, 21 nt, Synthetic Construct
  source 1..21: mol_type = other RNA
cggagtgtgacaatggtgttt

SEQ ID NO: 1750 - RNA, 21 nt, Synthetic Construct
  source 1..21: mol_type = other RNA
tgaggtagtaggatgtgtggt

SEQ ID NO: 1751 - RNA, 23 nt, Synthetic Construct
  source 1..23: mol_type = other RNA
cgaggtagtaggttgtgtggttt

SEQ ID NO: 1752 - RNA, 22 nt, Synthetic Construct
  source 1..22: mol_type = other RNA
tgaggtagtagtttgtgctgtc

SEQ ID NO: 1753 - RNA, 21 nt, Synthetic Construct
  source 1..21: mol_type = other RNA
tgaggtagtaggttgtatagt

SEQ ID NO: 1754 - RNA, 22 nt, Synthetic Construct
  source 1..22: mol_type = other RNA
tgaggtagtagtttgtgctgtg

SEQ ID NO: 1755 - RNA, 21 nt, Synthetic Construct
  source 1..21: mol_type = other RNA
tgaggtagtaggttgtgtagt

SEQ ID NO: 1756 - RNA, 22 nt, Synthetic Construct
  source 1..22: mol_type = other RNA
tgaggtagtaggttgtatagta

SEQ ID NO: 1757 - RNA, 22 nt, Synthetic Construct
  source 1..22: mol_type = other RNA
tggggtagtaggttgtgtggtt

SEQ ID NO: 1758 - RNA, 21 nt, Synthetic Construct
  source 1..21: mol_type = other RNA
tgagatagtaggttgtgtggt

SEQ ID NO: 1759 - RNA, 21 nt, Synthetic Construct
  source 1..21: mol_type = other RNA
tgaggtagtaggttgcgtggt

SEQ ID NO: 1760 - RNA, 22 nt, Synthetic Construct
  source 1..22: mol_type = other RNA
actggctagggaaaatgattgg

SEQ ID NO: 1761 - RNA, 21 nt, Synthetic Construct
  source 1..21: mol_type = other RNA
tgaggtagtaggtcgtgtggt

SEQ ID NO: 1762 - RNA, 21 nt, Synthetic Construct
  source 1..21: mol_type = other RNA
tgaggtagtagtttgtgccgt

SEQ ID NO: 1763 - RNA, 23 nt, Synthetic Construct
  source 1..23: mol_type = other RNA
tcctgtgctgagctgccccgagt

SEQ ID NO: 1764 - RNA, 22 nt, Synthetic Construct
  source 1..22: mol_type = other RNA
cattgcacttgtctcggcctga

SEQ ID NO: 1765 - RNA, 22 nt, Synthetic Construct
  source 1..22: mol_type = other RNA
tgaggtagtaggatgtgtggtt

SEQ ID NO: 1766 - RNA, 22 nt, Synthetic Construct
  source 1..22: mol_type = other RNA
tgaggtagtaggttgtgtgatt

SEQ ID NO: 1767 - RNA, 21 nt, Synthetic Construct
  source 1..21: mol_type = other RNA
tggagtgtggcaatggtgttt

SEQ ID NO: 1768 - RNA, 21 nt, Synthetic Construct
  source 1..21: mol_type = other RNA
tggagtgtgacaatggtgtct

SEQ ID NO: 1769 - RNA, 23 nt, Synthetic Construct
  source 1..23: mol_type = other RNA
tgaggggcagagagcgagacttc

SEQ ID NO: 1770 - RNA, 21 nt, Synthetic Construct
  source 1..21: mol_type = other RNA
tggagtgtggcaatggtgttt

SEQ ID NO: 1771 - RNA, 30 nt, Synthetic Construct
  source 1..30: mol_type = other RNA
tcccgtgtgaaagtaggtcatcgtcaggct

SEQ ID NO: 1772 - RNA, 22 nt, Synthetic Construct
  source 1..22: mol_type = other RNA
taaggtagtaggttgtgtggtt

SEQ ID NO: 1773 - RNA, 21 nt, Synthetic Construct
  source 1..21: mol_type = other RNA
cgaggtagtaggttgtgtggt

SEQ ID NO: 1774 - RNA, 20 nt, Synthetic Construct
  source 1..20: mol_type = other RNA
tgcggggctagggctaacag

SEQ ID NO: 1775 - RNA, 23 nt, Synthetic Construct
  source 1..23: mol_type = other RNA
tgaggtagtaggttgtgtagttt

SEQ ID NO: 1776 - RNA, 22 nt, Synthetic Construct
  source 1..22: mol_type = other RNA
catcgcacttgtctcggtctga

SEQ ID NO: 1777 - RNA, 22 nt, Synthetic Construct
  source 1..22: mol_type = other RNA
cgttgcacttgtctcggtctga

SEQ ID NO: 1778 - RNA, 23 nt, Synthetic Construct
  source 1..23: mol_type = other RNA
tcctgtaccgagctgccccgaga

SEQ ID NO: 1779 - RNA, 22 nt, Synthetic Construct
  source 1..22: mol_type = other RNA
accacagggtagaaccacggac

SEQ ID NO: 1780 - RNA, 20 nt, Synthetic Construct
  source 1..20: mol_type = other RNA
tgaggcagtaggttgtatag

SEQ ID NO: 1781 - RNA, 23 nt, Synthetic Construct
  source 1..23: mol_type = other RNA
tgaggtagtaggttgtgtggttg

SEQ ID NO: 1782 - RNA, 21 nt, Synthetic Construct
  source 1..21: mol_type = other RNA
tggagagtgacaatggtgttt

SEQ ID NO: 1783 - RNA, 21 nt, Synthetic Construct
  source 1..21: mol_type = other RNA
tggagtgtgacgatggtgttt

SEQ ID NO: 1784 - RNA, 22 nt, Synthetic Construct
  source 1..22: mol_type = other RNA
tgaggtagtagattgtatagtc

SEQ ID NO: 1785 - RNA, 21 nt, Synthetic Construct
  source 1..21: mol_type = other RNA
tgaggtagcaggttgtgtggt

SEQ ID NO: 1786 - RNA, 23 nt, Synthetic Construct
  source 1..23: mol_type = other RNA
ccctgtactgagctgccccgagt

SEQ ID NO: 1787 - RNA, 22 nt, Synthetic Construct
  source 1..22: mol_type = other RNA
tgaggtagaaggttgtgtggtt

SEQ ID NO: 1788 - RNA, 23 nt, Synthetic Construct
  source 1..23: mol_type = other RNA
tcctgtactgagctgccccggga

SEQ ID NO: 1789 - RNA, 21 nt, Synthetic Construct
  source 1..21: mol_type = other RNA
ctagactgaagctccttgggg

SEQ ID NO: 1790 - RNA, 28 nt, Synthetic Construct
  source 1..28: mol_type = other RNA
gcattgtggttcagtggtagaattctcg

SEQ ID NO: 1791 - RNA, 21 nt, Synthetic Construct
  source 1..21: mol_type = other RNA
tgaggtagtaggttgtgtggt

SEQ ID NO: 1792 - RNA, 23 nt, Synthetic Construct
  source 1..23: mol_type = other RNA
tgaggtagtaggttgtatagttg

SEQ ID NO: 1793 - RNA, 21 nt, Synthetic Construct
  source 1..21: mol_type = other RNA
tgaggcagtaggttgtgtggt

SEQ ID NO: 1794 - RNA, 23 nt, Synthetic Construct
  source 1..23: mol_type = other RNA
tcctatactgagctgccccgaga

SEQ ID NO: 1795 - RNA, 22 nt, Synthetic Construct
  source 1..22: mol_type = other RNA
tgaggtagtaggctgtgtggtt

SEQ ID NO: 1796 - RNA, 23 nt, Synthetic Construct
  source 1..23: mol_type = other RNA
cagagtgctgttcgtgcaggtag

SEQ ID NO: 1797 - RNA, 21 nt, Synthetic Construct
  source 1..21: mol_type = other RNA
tgaggtagtagattgtgtggt

SEQ ID NO: 1798 - RNA, 21 nt, Synthetic Construct
  source 1..21: mol_type = other RNA
tgaggtagtaggttgtgtgat

SEQ ID NO: 1799 - RNA, 23 nt, Synthetic Construct
  source 1..23: mol_type = other RNA
tcccgtactgagctgccccgaga

SEQ ID NO: 1800 - RNA, 21 nt, Synthetic Construct
  source 1..21: mol_type = other RNA
tggagtgtgacgatggtgttt

SEQ ID NO: 1801 - RNA, 22 nt, Synthetic Construct
  source 1..22: mol_type = other RNA
tgaggtagtaggttgtgtggct

SEQ ID NO: 1802 - RNA, 19 nt, Synthetic Construct
  source 1..19: mol_type = other RNA
agtaggtcatcgtcaggct

SEQ ID NO: 1803 - RNA, 20 nt, Synthetic Construct
  source 1..20: mol_type = other RNA
cgaggtagtaggttgtgtgg

SEQ ID NO: 1804 - RNA, 22 nt, Synthetic Construct
  source 1..22: mol_type = other RNA
tgaggtagtaggttgcgtggtt

SEQ ID NO: 1805 - RNA, 23 nt, Synthetic Construct
  source 1..23: mol_type = other RNA
tcctgtactgagctgccctgaga

SEQ ID NO: 1806 - RNA, 21 nt, Synthetic Construct
  source 1..21: mol_type = other RNA
ggaggtagtaggttgtgtggt

SEQ ID NO: 1807 - RNA, 23 nt, Synthetic Construct
  source 1..23: mol_type = other RNA
tgaggtagtaggttgtgtggtct

SEQ ID NO: 1808 - RNA, 21 nt, Synthetic Construct
  source 1..21: mol_type = other RNA
tgaggtaataggttgtgtggt

SEQ ID NO: 1809 - RNA, 23 nt, Synthetic Construct
  source 1..23: mol_type = other RNA
tcctgaactgagctgccccgagt

SEQ ID NO: 1810 - RNA, 22 nt, Synthetic Construct
  source 1..22: mol_type = other RNA
cgaggtagtagtttgtgctgtt

SEQ ID NO: 1811 - RNA, 21 nt, Synthetic Construct
  source 1..21: mol_type = other RNA
tgaggtagtaggttgtgaggt

SEQ ID NO: 1812 - RNA, 24 nt, Synthetic Construct
  source 1..24: mol_type = other RNA
tgtaaacacccccgactggaagct

SEQ ID NO: 1813 - RNA, 22 nt, Synthetic Construct
  source 1..22: mol_type = other RNA
aagctgccagttgaagaactgt

SEQ ID NO: 1814 - RNA, 21 nt, Synthetic Construct
  source 1..21: mol_type = other RNA
ctaggctgaagctccttgagg

SEQ ID NO: 1815 - RNA, 22 nt, Synthetic Construct
  source 1..22: mol_type = other RNA
tggagtgtgacaatggcgtttg

SEQ ID NO: 1816 - RNA, 21 nt, Synthetic Construct
  source 1..21: mol_type = other RNA
tgaagtagtaggttgtgtggt

SEQ ID NO: 1817 - RNA, 22 nt, Synthetic Construct
  source 1..22: mol_type = other RNA
tgaggtagtaggtcgtgtggtt

SEQ ID NO: 1818 - RNA, 21 nt, Synthetic Construct
  source 1..21: mol_type = other RNA
tgaggtagtaggttgcatagt

SEQ ID NO: 1819 - RNA, 21 nt, Synthetic Construct
  source 1..21: mol_type = other RNA
tgaggtagtaggttatgtggt

SEQ ID NO: 1820 - RNA, 20 nt, Synthetic Construct
  source 1..20: mol_type = other RNA
tggggtagtaggttgtgtgg

SEQ ID NO: 1821 - RNA, 23 nt, Synthetic Construct
  source 1..23: mol_type = other RNA
tcccgtactgagctgccccgagt

SEQ ID NO: 1822 - RNA, 23 nt, Synthetic Construct
  source 1..23: mol_type = other RNA
caaagtgctgatcgtgcaggtag

SEQ ID NO: 1823 - RNA, 23 nt, Synthetic Construct
  source 1..23: mol_type = other RNA
tgaggtagtaggttgtatagtta

SEQ ID NO: 1824 - RNA, 22 nt, Synthetic Construct
  source 1..22: mol_type = other RNA
cattgcacttgtcccggtctga

SEQ ID NO: 1825 - RNA, 21 nt, Synthetic Construct
  source 1..21: mol_type = other RNA
tgaggtggtaggttgtgtggt

SEQ ID NO: 1826 - RNA, 16 nt, Synthetic Construct
  source 1..16: mol_type = other RNA
aggtcatcgtcaggct

SEQ ID NO: 1827 - RNA, 16 nt, Synthetic Construct
  source 1..16: mol_type = other RNA
cccagaaacccggtcg

SEQ ID NO: 1828 - RNA, 22 nt, Synthetic Construct
  source 1..22: mol_type = other RNA
cattgcacttgtctcggcctga

SEQ ID NO: 1829 - RNA, 18 nt, Synthetic Construct
  source 1..18: mol_type = other RNA
atcacattgccagggatt

SEQ ID NO: 1830 - RNA, 22 nt, Synthetic Construct
  source 1..22: mol_type = other RNA
tggctcagttcagcaggaacag

SEQ ID NO: 1831 - RNA, 23 nt, Synthetic Construct
  source 1..23: mol_type = other RNA
tggggtagtaggttgtgtggttt

SEQ ID NO: 1832 - RNA, 23 nt, Synthetic Construct
  source 1..23: mol_type = other RNA
tcttggagtaggtcattgggtgg

SEQ ID NO: 1833 - RNA, 22 nt, Synthetic Construct
  source 1..22: mol_type = other RNA
tgtggtagtaggttgtgtggtt

SEQ ID NO: 1834 - RNA, 20 nt, Synthetic Construct
  source 1..20: mol_type = other RNA
tgaggtagtaggttgtgagg

SEQ ID NO: 1835 - RNA, 22 nt, Synthetic Construct
  source 1..22: mol_type = other RNA
tgaggtagtaggttgtatagtg

SEQ ID NO: 1836 - RNA, 23 nt, Synthetic Construct
  source 1..23: mol_type = other RNA
tcctgtgctgagctgccccgaga

SEQ ID NO: 1837 - RNA, 22 nt, Synthetic Construct
  source 1..22: mol_type = other RNA
tgaggtagcaggttgtgtggtt

SEQ ID NO: 1838 - RNA, 21 nt, Synthetic Construct
  source 1..21: mol_type = other RNA
caaagaattctccttttgggc

SEQ ID NO: 1839 - RNA, 21 nt, Synthetic Construct
  source 1..21: mol_type = other RNA
tgaggtagtaagttgtgtggt

SEQ ID NO: 1840 - RNA, 21 nt, Synthetic Construct
  source 1..21: mol_type = other RNA
taactccttaagcgaatctgc

SEQ ID NO: 1841 - RNA, 22 nt, Synthetic Construct
  source 1..22: mol_type = other RNA
tgaggtagtaagttgtatagtt

SEQ ID NO: 1842 - RNA, 22 nt, Synthetic Construct
  source 1..22: mol_type = other RNA
tggagagaaaggcagttcctga

SEQ ID NO: 1843 - RNA, 23 nt, Synthetic Construct
  source 1..23: mol_type = other RNA
tgaggaagtaggttgtgtggttt

SEQ ID NO: 1844 - RNA, 23 nt, Synthetic Construct
  source 1..23: mol_type = other RNA
tgtgcaaatccatgcaaaactga

SEQ ID NO: 1845 - RNA, 23 nt, Synthetic Construct
  source 1..23: mol_type = other RNA
tgggctaagggagatgattgggt

SEQ ID NO: 1846 - RNA, 21 nt, Synthetic Construct
  source 1..21: mol_type = other RNA
tgaggtagtaggttgtgtgat

SEQ ID NO: 1847 - RNA, 23 nt, Synthetic Construct
  source 1..23: mol_type = other RNA
tcctgtactgggctgccccgagt

SEQ ID NO: 1848 - RNA, 22 nt, Synthetic Construct
  source 1..22: mol_type = other RNA
tgaggaagtagtttgtgctgtt

SEQ ID NO: 1849 - RNA, 21 nt, Synthetic Construct
  source 1..21: mol_type = other RNA
taaggtagtaggttgtgtggt

SEQ ID NO: 1850 - RNA, 22 nt, Synthetic Construct
  source 1..22: mol_type = other RNA
tgaggtagtagttcgtgctgtt

SEQ ID NO: 1851 - RNA, 22 nt, Synthetic Construct
  source 1..22: mol_type = other RNA
ncctgtactgagctgccccgag

SEQ ID NO: 1852 - RNA, 22 nt, Synthetic Construct
  source 1..22: mol_type = other RNA
cgaggtagtaggttgtatagtt

SEQ ID NO: 1853 - RNA, 23 nt, Synthetic Construct
  source 1..23: mol_type = other RNA
caaagtgctgttcatgcaggtag

SEQ ID NO: 1854 - RNA, 21 nt, Synthetic Construct
  source 1..21: mol_type = other RNA
tgagatagtaggttgtgtggt

SEQ ID NO: 1855 - RNA, 23 nt, Synthetic Construct
  source 1..23: mol_type = other RNA
tagcagcacgtaaatattggcga

SEQ ID NO: 1856 - RNA, 22 nt, Synthetic Construct
  source 1..22: mol_type = other RNA
tcttggagtaggtcattgggtg

SEQ ID NO: 1857 - RNA, 21 nt, Synthetic Construct
  source 1..21: mol_type = other RNA
tgaggtagtgggttgtgtggt

SEQ ID NO: 1858 - RNA, 21 nt, Synthetic Construct
  source 1..21: mol_type = other RNA
tggagtgtgacaatggcgttt

SEQ ID NO: 1859 - RNA, 23 nt, Synthetic Construct
  source 1..23: mol_type = other RNA
caaagtgctgttcgtgcagatag

SEQ ID NO: 1860 - RNA, 21 nt, Synthetic Construct
  source 1..21: mol_type = other RNA
tggggtagtaggttgtgtggt

SEQ ID NO: 1861 - RNA, 22 nt, Synthetic Construct
  source 1..22: mol_type = other RNA
tgaggtagtgggttgtgtggtt

SEQ ID NO: 1862 - RNA, 22 nt, Synthetic Construct
  source 1..22: mol_type = other RNA
tgaggtagtaggctgtatagtt

SEQ ID NO: 1863 - RNA, 22 nt, Synthetic Construct
  source 1..22: mol_type = other RNA
tgaggtagtaggatgtatagtt

SEQ ID NO: 1864 - RNA, 21 nt, Synthetic Construct
  source 1..21: mol_type = other RNA
taactccttaagcgaatctcg

SEQ ID NO: 1865 - RNA, 23 nt, Synthetic Construct
  source 1..23: mol_type = other RNA
tcctgtactgagctaccccgaga

SEQ ID NO: 1866 - RNA, 21 nt, Synthetic Construct
  source 1..21: mol_type = other RNA
tggagtgtgacagtggtgttt

SEQ ID NO: 1867 - RNA, 24 nt, Synthetic Construct
  source 1..24: mol_type = other RNA
tcggatccgtctgagcttggcttt

SEQ ID NO: 1868 - RNA, 23 nt, Synthetic Construct
  source 1..23: mol_type = other RNA
caaagtgttgttcgtgcaggtag

SEQ ID NO: 1869 - RNA, 21 nt, Synthetic Construct
  source 1..21: mol_type = other RNA
aggagtgtgacaatggtgttt

SEQ ID NO: 1870 - RNA, 22 nt, Synthetic Construct
  source 1..22: mol_type = other RNA
tgagatagtaggttgtgtggtt

SEQ ID NO: 1871 - RNA, 22 nt, Synthetic Construct
  source 1..22: mol_type = other RNA
tgaagtagtaggttgtgtggtt

SEQ ID NO: 1872 - RNA, 22 nt, Synthetic Construct
  source 1..22: mol_type = other RNA
tgaggcagtaggttgtgtggtt

SEQ ID NO: 1873 - RNA, 21 nt, Synthetic Construct
  source 1..21: mol_type = other RNA
tgaggtagtaggttgagtggt

SEQ ID NO: 1874 - RNA, 21 nt, Synthetic Construct
  source 1..21: mol_type = other RNA
tggagtgtgacaatggtgtct

SEQ ID NO: 1875 - RNA, 19 nt, Synthetic Construct
  source 1..19: mol_type = other RNA
caacggaatcccaaaagca

SEQ ID NO: 1876 - RNA, 23 nt, Synthetic Construct
  source 1..23: mol_type = other RNA
tgaggggcagggagcgagacttt

SEQ ID NO: 1877 - RNA, 19 nt, Synthetic Construct
  source 1..19: mol_type = other RNA
tagcttatcagactgatgt

SEQ ID NO: 1878 - RNA, 20 nt, Synthetic Construct
  source 1..20: mol_type = other RNA
tgaggcagtaggttgtgtgg

SEQ ID NO: 1879 - RNA, 23 nt, Synthetic Construct
  source 1..23: mol_type = other RNA
tgaggggcagagagtgagacttt

SEQ ID NO: 1880 - RNA, 20 nt, Synthetic Construct
  source 1..20: mol_type = other RNA
tggggtagtaggttgtatag

SEQ ID NO: 1881 - RNA, 31 nt, Synthetic Construct
  source 1..31: mol_type = other RNA
ttcccgtgtgaaagtaggtcatcgtcaggct

SEQ ID NO: 1882 - RNA, 26 nt, Synthetic Construct
  source 1..26: mol_type = other RNA
tgaggtagtaggttgtgtggtttttt

SEQ ID NO: 1883 - RNA, 23 nt, Synthetic Construct
  source 1..23: mol_type = other RNA
tcttggagtaggtcattgggtga

SEQ ID NO: 1884 - RNA, 22 nt, Synthetic Construct
  source 1..22: mol_type = other RNA
tgaggtagtagcttgtgctgtt

SEQ ID NO: 1885 - RNA, 24 nt, Synthetic Construct
  source 1..24: mol_type = other RNA
tgtaaacatccccgactgggagct

SEQ ID NO: 1886 - RNA, 24 nt, Synthetic Construct
  source 1..24: mol_type = other RNA
tgtaaacatccctgactggaagct

SEQ ID NO: 1887 - RNA, 22 nt, Synthetic Construct
  source 1..22: mol_type = other RNA
tgaggtagtaagttgtgtggtt

SEQ ID NO: 1888 - RNA, 19 nt, Synthetic Construct
  source 1..19: mol_type = other RNA
tgtcagtttgtcaaatacc

SEQ ID NO: 1889 - RNA, 23 nt, Synthetic Construct
  source 1..23: mol_type = other RNA
caaagtgccgttcgtgcaggtag

SEQ ID NO: 1890 - RNA, 22 nt, Synthetic Construct
  source 1..22: mol_type = other RNA
tgaggtagtaggttgtatagtt

SEQ ID NO: 1891 - RNA, 22 nt, Synthetic Construct
  source 1..22: mol_type = other RNA
tgaggtagaagtttgtgctgtt

SEQ ID NO: 1892 - RNA, 23 nt, Synthetic Construct
  source 1..23: mol_type = other RNA
tcctgtactgggctgccccgaga

SEQ ID NO: 1893 - RNA, 25 nt, Synthetic Construct
  source 1..25: mol_type = other RNA
tgtaaacatccttgactggaagctt

SEQ ID NO: 1894 - RNA, 23 nt, Synthetic Construct
  source 1..23: mol_type = other RNA
caaagagctgttcgtgcaggtag

SEQ ID NO: 1895 - RNA, 23 nt, Synthetic Construct
  source 1..23: mol_type = other RNA
tcctgtactgagctgctccgaga

SEQ ID NO: 1896 - RNA, 23 nt, Synthetic Construct
  source 1..23: mol_type = other RNA
tcctgtactgagctgccccgggt

SEQ ID NO: 1897 - RNA, 23 nt, Synthetic Construct
  source 1..23: mol_type = other RNA
tacagtactgtgataactgaaga

SEQ ID NO: 1898 - RNA, 21 nt, Synthetic Construct
  source 1..21: mol_type = other RNA
tgaggtggtaggttgtatagt

SEQ ID NO: 1899 - RNA, 23 nt, Synthetic Construct
  source 1..23: mol_type = other RNA
caaagtgctgttcgtgcaggaag

SEQ ID NO: 1900 - RNA, 20 nt, Synthetic Construct
  source 1..20: mol_type = other RNA
tggggtagtaggttgtatag

SEQ ID NO: 1901 - RNA, 23 nt, Synthetic Construct
  source 1..23: mol_type = other RNA
tcctgtaccgagctgccccgagt

SEQ ID NO: 1902 - RNA, 20 nt, Synthetic Construct
  source 1..20: mol_type = other RNA
tgaggcagtaggttgtatag

SEQ ID NO: 1903 - RNA, 23 nt, Synthetic Construct
  source 1..23: mol_type = other RNA
tcctgtaccgagctgccccgaga

SEQ ID NO: 1904 - RNA, 22 nt, Synthetic Construct
  source 1..22: mol_type = other RNA
tgaggtggtaggttgtgtggtt

SEQ ID NO: 1905 - RNA, 22 nt, Synthetic Construct
  source 1..22: mol_type = other RNA
tggggtagtaggttgtgtggtt

SEQ ID NO: 1906 - RNA, 23 nt, Synthetic Construct
  source 1..23: mol_type = other RNA
taaagtgctgttcgtgcaggtag

SEQ ID NO: 1907 - RNA, 22 nt, Synthetic Construct
  source 1..22: mol_type = other RNA
tgaggtagtaggttgtatagct

SEQ ID NO: 1908 - RNA, 23 nt, Synthetic Construct
  source 1..23: mol_type = other RNA
tcccgtactgagctgccccgaga

SEQ ID NO: 1909 - RNA, 20 nt, Synthetic Construct
  source 1..20: mol_type = other RNA
tgaggtagtaggttgcgtgg

SEQ ID NO: 1910 - RNA, 23 nt, Synthetic Construct
  source 1..23: mol_type = other RNA
caaagtgctgttcatgcaggtag

SEQ ID NO: 1911 - RNA, 21 nt, Synthetic Construct
  source 1..21: mol_type = other RNA
tgaggtagtaggttgtacagt

SEQ ID NO: 1912 - RNA, 23 nt, Synthetic Construct
  source 1..23: mol_type = other RNA
tcctgtactgagctgtcccgaga

SEQ ID NO: 1913 - RNA, 21 nt, Synthetic Construct
  source 1..21: mol_type = other RNA
tgaggtagtagtctgtgctgt

SEQ ID NO: 1914 - RNA, 21 nt, Synthetic Construct
  source 1..21: mol_type = other RNA
ngaggtagtaggttgtgtggt

SEQ ID NO: 1915 - RNA, 20 nt, Synthetic Construct
  source 1..20: mol_type = other RNA
tgaggaagtaggttgtgtgg

SEQ ID NO: 1916 - RNA, 22 nt, Synthetic Construct
  source 1..22: mol_type = other RNA
tgaggtagtagtttgagctgtt

SEQ ID NO: 1917 - RNA, 23 nt, Synthetic Construct
  source 1..23: mol_type = other RNA
caaagcgctgttcgtgcaggtag

SEQ ID NO: 1918 - RNA, 21 nt, Synthetic Construct
  source 1..21: mol_type = other RNA
tgaggtagtaggttgcgtggt

SEQ ID NO: 1919 - RNA, 23 nt, Synthetic Construct
  source 1..23: mol_type = other RNA
tgaggggcagagagcgaggcttt

SEQ ID NO: 1920 - RNA, 22 nt, Synthetic Construct
  source 1..22: mol_type = other RNA
tgaggtagtaggttgtgaggtt

SEQ ID NO: 1921 - RNA, 23 nt, Synthetic Construct
  source 1..23: mol_type = other RNA
tgaggggcagagagcgagactat

SEQ ID NO: 1922 - RNA, 22 nt, Synthetic Construct
  source 1..22: mol_type = other RNA
tgaggtagtaggttgtgcggtt

SEQ ID NO: 1923 - RNA, 21 nt, Synthetic Construct
  source 1..21: mol_type = other RNA
tgcggggctagggctaacagt

SEQ ID NO: 1924 - RNA, 21 nt, Synthetic Construct
  source 1..21: mol_type = other RNA
tgaggtagtaggttgtacagt

SEQ ID NO: 1925 - RNA, 23 nt, Synthetic Construct
  source 1..23: mol_type = other RNA
caaagtgctgttcgtgcaggcag

SEQ ID NO: 1926 - RNA, 22 nt, Synthetic Construct
  source 1..22: mol_type = other RNA
tgaggtagtaggttgagtggtt

SEQ ID NO: 1927 - RNA, 23 nt, Synthetic Construct
  source 1..23: mol_type = other RNA
tcttggagtaggtcattgggtgt

SEQ ID NO: 1928 - RNA, 17 nt, Synthetic Construct
  source 1..17: mol_type = other RNA
agtccggatcgtagtct

SEQ ID NO: 1929 - RNA, 22 nt, Synthetic Construct
  source 1..22: mol_type = other RNA
tgaggtagtagtctgtgctgtt

SEQ ID NO: 1930 - RNA, 15 nt, Synthetic Construct
  source 1..15: mol_type = other RNA
gtcgacgtatagggt

SEQ ID NO: 1931 - RNA, 23 nt, Synthetic Construct
  source 1..23: mol_type = other RNA
agcagcattgtacagggctatgg

SEQ ID NO: 1932 - RNA, 22 nt, Synthetic Construct
  source 1..22: mol_type = other RNA
tgaggtagtaggtagtgtggtt

SEQ ID NO: 1933 - RNA, 22 nt, Synthetic Construct
  source 1..22: mol_type = other RNA
catcgcacttgtctcggtctga

SEQ ID NO: 1934 - RNA, 21 nt, Synthetic Construct
  source 1..21: mol_type = other RNA
tgaggtagtagattgtatagc

SEQ ID NO: 1935 - RNA, 22 nt, Synthetic Construct
  source 1..22: mol_type = other RNA
ggaggtagtaggttgtgtggtt

SEQ ID NO: 1936 - RNA, 22 nt, Synthetic Construct
  source 1..22: mol_type = other RNA
cgttgcacttgtctcggtctga

SEQ ID NO: 1937 - RNA, 22 nt, Synthetic Construct
  source 1..22: mol_type = other RNA
tgaggtagtagtttgtgctgct

SEQ ID NO: 1938 - RNA, 20 nt, Synthetic Construct
  source 1..20: mol_type = other RNA
tgaggtagcaggttgtgtgg

SEQ ID NO: 1939 - RNA, 22 nt, Synthetic Construct
  source 1..22: mol_type = other RNA
tgaggtagtagattgtgctgtt

SEQ ID NO: 1940 - RNA, 22 nt, Synthetic Construct
  source 1..22: mol_type = other RNA
tgaggtagtaggttgtaaagtt

SEQ ID NO: 1941 - RNA, 22 nt, Synthetic Construct
  source 1..22: mol_type = other RNA
tggagtgtgacaatggtgcttg

SEQ ID NO: 1942 - RNA, 21 nt, Synthetic Construct
  source 1..21: mol_type = other RNA
tgaggtagtagtttgcgctgt

SEQ ID NO: 1943 - RNA, 21 nt, Synthetic Construct
  source 1..21: mol_type = other RNA
tgaggtagtaggctgtatagt

SEQ ID NO: 1944 - RNA, 21 nt, Synthetic Construct
  source 1..21: mol_type = other RNA
tgaggtagtaggtcgtatagt

SEQ ID NO: 1945 - RNA, 23 nt, Synthetic Construct
  source 1..23: mol_type = other RNA
tccagtactgagctgccccgaga

SEQ ID NO: 1946 - RNA, 21 nt, Synthetic Construct
  source 1..21: mol_type = other RNA
tgaagtagtaggttgtgtggt

SEQ ID NO: 1947 - RNA, 22 nt, Synthetic Construct
  source 1..22: mol_type = other RNA
tgaggtagtagtttgcgctgtt

SEQ ID NO: 1948 - RNA, 21 nt, Synthetic Construct
  source 1..21: mol_type = other RNA
taactccttaagcgaattcgc

SEQ ID NO: 1949 - RNA, 21 nt, Synthetic Construct
  source 1..21: mol_type = other RNA
cgaggtagtagtttgtgctgt

SEQ ID NO: 1950 - RNA, 21 nt, Synthetic Construct
  source 1..21: mol_type = other RNA
tgaggtagtaggttgtgcggt

SEQ ID NO: 1951 - RNA, 20 nt, Synthetic Construct
  source 1..20: mol_type = other RNA
tgaggtagtaggtcgtatag

SEQ ID NO: 1952 - RNA, 22 nt, Synthetic Construct
  source 1..22: mol_type = other RNA
tcctgtactgagcagccccgag

SEQ ID NO: 1953 - RNA, 21 nt, Synthetic Construct
  source 1..21: mol_type = other RNA
atggatttttggagcagggag

SEQ ID NO: 1954 - RNA, 22 nt, Synthetic Construct
  source 1..22: mol_type = other RNA
tcctgtactgaactgccccgag

SEQ ID NO: 1955 - RNA, 22 nt, Synthetic Construct
  source 1..22: mol_type = other RNA
taacactgtctggtaacgatgt

SEQ ID NO: 1956 - RNA, 23 nt, Synthetic Construct
  source 1..23: mol_type = other RNA
caaagtgctgttcgtacaggtag

SEQ ID NO: 1957 - RNA, 20 nt, Synthetic Construct
  source 1..20: mol_type = other RNA
tgaggtagtaggttgtgtag

SEQ ID NO: 1958 - RNA, 30 nt, Synthetic Construct
  source 1..30: mol_type = other RNA
gggtctgtagctcagtcggttagagcaccg

SEQ ID NO: 1959 - RNA, 23 nt, Synthetic Construct
  source 1..23: mol_type = other RNA
tcctgcactgagctgccccgagt

SEQ ID NO: 1960 - RNA, 23 nt, Synthetic Construct
  source 1..23: mol_type = other RNA
tgaggggcagagagcgggacttt

SEQ ID NO: 1961 - RNA, 22 nt, Synthetic Construct
  source 1..22: mol_type = other RNA
tgaggaagtaggttgtatagtt

SEQ ID NO: 1962 - RNA, 21 nt, Synthetic Construct
  source 1..21: mol_type = other RNA
cgaggtagtaggttgtatagt

SEQ ID NO: 1963 - RNA, 22 nt, Synthetic Construct
  source 1..22: mol_type = other RNA
tgagaactgaattccatgggtc

SEQ ID NO: 1964 - RNA, 23 nt, Synthetic Construct
  source 1..23: mol_type = other RNA
caaagtgctgttcgtgcagatag

SEQ ID NO: 1965 - RNA, 23 nt, Synthetic Construct
  source 1..23: mol_type = other RNA
tcctgtactgagctgccccgagc

SEQ ID NO: 1966 - RNA, 22 nt, Synthetic Construct
  source 1..22: mol_type = other RNA
tgaggtagtagttagtgctgtt

SEQ ID NO: 1967 - RNA, 22 nt, Synthetic Construct
  source 1..22: mol_type = other RNA
gtagtgtttcctactttatgga

SEQ ID NO: 1968 - RNA, 21 nt, Synthetic Construct
  source 1..21: mol_type = other RNA
cgaggtagtaggttgtgtggt

SEQ ID NO: 1969 - RNA, 21 nt, Synthetic Construct
  source 1..21: mol_type = other RNA
tgaggtagtagcttgtgctgt

SEQ ID NO: 1970 - RNA, 23 nt, Synthetic Construct
  source 1..23: mol_type = other RNA
tgagaggcagagagcgagacttt

SEQ ID NO: 1971 - RNA, 20 nt, Synthetic Construct
  source 1..20: mol_type = other RNA
tgagatagtaggttgtgtgg

SEQ ID NO: 1972 - RNA, 23 nt, Synthetic Construct
  source 1..23: mol_type = other RNA
ccctgtactgagctgccccgaga

SEQ ID NO: 1973 - RNA, 17 nt, Synthetic Construct
  source 1..17: mol_type = other RNA
taggtcatcgtcaggct

SEQ ID NO: 1974 - RNA, 21 nt, Synthetic Construct
  source 1..21: mol_type = other RNA
tggggtagtaggttgtatagt

SEQ ID NO: 1975 - RNA, 20 nt, Synthetic Construct
  source 1..20: mol_type = other RNA
tgaggtagtaggtcgtgtgg

SEQ ID NO: 1976 - RNA, 23 nt, Synthetic Construct
  source 1..23: mol_type = other RNA
tggggggcagagagcgagacttt

SEQ ID NO: 1977 - RNA, 22 nt, Synthetic Construct
  source 1..22: mol_type = other RNA
tggggtagtaggttgtatagtt

SEQ ID NO: 1978 - RNA, 22 nt, Synthetic Construct
  source 1..22: mol_type = other RNA
tgaggtagtagtttgtgccgtt

SEQ ID NO: 1979 - RNA, 16 nt, Synthetic Construct
  source 1..16: mol_type = other RNA
gggtgaaagcggggga

SEQ ID NO: 1980 - RNA, 22 nt, Synthetic Construct
  source 1..22: mol_type = other RNA
tgaggtagtagtatgtgctgtt

SEQ ID NO: 1981 - RNA, 23 nt, Synthetic Construct
  source 1..23: mol_type = other RNA
tgagaggcagagagcgagacttt

SEQ ID NO: 1982 - RNA, 33 nt, Synthetic Construct
  source 1..33: mol_type = other RNA
gcggctgtagctcagttggatagagtacttggc

SEQ ID NO: 1983 - RNA, 20 nt, Synthetic Construct
  source 1..20: mol_type = other RNA
cgaggtagtaggttgtatag

SEQ ID NO: 1984 - RNA, 21 nt, Synthetic Construct
  source 1..21: mol_type = other RNA
tgaggtagtaggttgcatagt

SEQ ID NO: 1985 - RNA, 22 nt, Synthetic Construct
  source 1..22: mol_type = other RNA
tggggtagtagtttgtgctgtt

SEQ ID NO: 1986 - RNA, 21 nt, Synthetic Construct
  source 1..21: mol_type = other RNA
tgaggtagtaggtcgtgtggt

SEQ ID NO: 1987 - RNA, 21 nt, Synthetic Construct
  source 1..21: mol_type = other RNA
ctaggctgaagctccttgagg

SEQ ID NO: 1988 - RNA, 15 nt, Synthetic Construct
  source 1..15: mol_type = other RNA
ggtagcgtggccgag

SEQ ID NO: 1989 - RNA, 22 nt, Synthetic Construct
  source 1..22: mol_type = other RNA
cgaggtagtaggttgtgtggtt

SEQ ID NO: 1990 - RNA, 20 nt, Synthetic Construct
  source 1..20: mol_type = other RNA
tgaagtagtaggttgtgtgg

SEQ ID NO: 1991 - RNA, 22 nt, Synthetic Construct
  source 1..22: mol_type = other RNA
tgaggtagtagtttgtgcagtt

SEQ ID NO: 1992 - RNA, 23 nt, Synthetic Construct
  source 1..23: mol_type = other RNA
tcctgtactgagccgccccgaga

SEQ ID NO: 1993 - RNA, 23 nt, Synthetic Construct
  source 1..23: mol_type = other RNA
ggaggtagtaggttgtgtggttt

SEQ ID NO: 1994 - RNA, 22 nt, Synthetic Construct
  source 1..22: mol_type = other RNA
tgaggtagtaggttgtatagat

SEQ ID NO: 1995 - RNA, 23 nt, Synthetic Construct
  source 1..23: mol_type = other RNA
tgaggtagtaggttgtgtggtct

SEQ ID NO: 1996 - RNA, 21 nt, Synthetic Construct
  source 1..21: mol_type = other RNA
tcctatactgagctgccccga

SEQ ID NO: 1997 - RNA, 23 nt, Synthetic Construct
  source 1..23: mol_type = other RNA
tcctgtacagagctgccccgaga

SEQ ID NO: 1998 - RNA, 20 nt, Synthetic Construct
  source 1..20: mol_type = other RNA
tgaggtagtaggttgtgcgg

SEQ ID NO: 1999 - RNA, 21 nt, Synthetic Construct
  source 1..21: mol_type = other RNA
tgaggtagtgggttgtatagt

SEQ ID NO: 2000 - RNA, 23 nt, Synthetic Construct
  source 1..23: mol_type = other RNA
caaggtgctgttcgtgcaggtag

SEQ ID NO: 2001 - RNA, 29 nt, Synthetic Construct
  source 1..29: mol_type = other RNA
cccgtgtgaaagtaggtcatcgtcaggct

SEQ ID NO: 2002 - RNA, 21 nt, Synthetic Construct
  source 1..21: mol_type = other RNA
tggagtgcgacaatggtgttt

SEQ ID NO: 2003 - RNA, 20 nt, Synthetic Construct
  source 1..20: mol_type = other RNA
tgaggtagtaggctgtgtgg

SEQ ID NO: 2004 - RNA, 22 nt, Synthetic Construct
  source 1..22: mol_type = other RNA
ngaggtagtagtttgtgctgtt

SEQ ID NO: 2005 - RNA, 22 nt, Synthetic Construct
  source 1..22: mol_type = other RNA
tgtggtagtagtttgtgctgtt

SEQ ID NO: 2006 - RNA, 23 nt, Synthetic Construct
  source 1..23: mol_type = other RNA
caaagtgctgttcgtgcaggcag

SEQ ID NO: 2007 - RNA, 17 nt, Synthetic Construct
  source 1..17: mol_type = other RNA
tcccagaaacccggtcg

SEQ ID NO: 2008 - RNA, 20 nt, Synthetic Construct
  source 1..20: mol_type = other RNA
tgaggtagcaggttgtatag

SEQ ID NO: 2009 - RNA, 22 nt, Synthetic Construct
  source 1..22: mol_type = other RNA
tgaggtagtagtttgtggtgtt

SEQ ID NO: 2010 - RNA, 23 nt, Synthetic Construct
  source 1..23: mol_type = other RNA
caaagtgctattcgtgcaggtag

SEQ ID NO: 2011 - RNA, 21 nt, Synthetic Construct
  source 1..21: mol_type = other RNA
tgaggtagtgggttgtgtggt

SEQ ID NO: 2012 - RNA, 23 nt, Synthetic Construct
  source 1..23: mol_type = other RNA
tcctgtactgagccgccccgaga

SEQ ID NO: 2013 - RNA, 22 nt, Synthetic Construct
  source 1..22: mol_type = other RNA
tgaggcagtaggttgtatagtt

SEQ ID NO: 2014 - RNA, 21 nt, Synthetic Construct
  source 1..21: mol_type = other RNA
tgaggtagcaggttgtatagt

SEQ ID NO: 2015 - RNA, 22 nt, Synthetic Construct
  source 1..22: mol_type = other RNA
tgaggtagtaggttatgtggtt

SEQ ID NO: 2016 - RNA, 21 nt, Synthetic Construct
  source 1..21: mol_type = other RNA
tgaggaagtaggttgtatagt

SEQ ID NO: 2017 - RNA, 21 nt, Synthetic Construct
  source 1..21: mol_type = other RNA
tgaggtagcaggttgtgtggt

SEQ ID NO: 2018 - RNA, 22 nt, Synthetic Construct
  source 1..22: mol_type = other RNA
tgaggtagtaggttgtacagtt

SEQ ID NO: 2019 - RNA, 34 nt, Synthetic Construct
  source 1..34: mol_type = other RNA
tccgttggtcgaaggttcgaatccttcagggccc

SEQ ID NO: 2020 - RNA, 22 nt, Synthetic Construct
  source 1..22: mol_type = other RNA
tccagtactgagctgccccgag

SEQ ID NO: 2021 - RNA, 18 nt, Synthetic Construct
  source 1..18: mol_type = other RNA
gtaggtcatcgtcaggct

SEQ ID NO: 2022 - RNA, 23 nt, Synthetic Construct
  source 1..23: mol_type = other RNA
tcctgtactgagctgctccgaga

SEQ ID NO: 2023 - RNA, 23 nt, Synthetic Construct
  source 1..23: mol_type = other RNA
ccctgtactgagctgccccgaga

SEQ ID NO: 2024 - RNA, 23 nt, Synthetic Construct
  source 1..23: mol_type = other RNA
cgaggggcagagagcgagacttt

SEQ ID NO: 2025 - RNA, 22 nt, Synthetic Construct
  source 1..22: mol_type = other RNA
tgaggtagtaggatgtatagtt

SEQ ID NO: 2026 - RNA, 23 nt, Synthetic Construct
  source 1..23: mol_type = other RNA
tcctatactgagctgccccgaga

SEQ ID NO: 2027 - RNA, 20 nt, Synthetic Construct
  source 1..20: mol_type = other RNA
cccagtaaacggcggccgta

SEQ ID NO: 2028 - RNA, 23 nt, Synthetic Construct
  source 1..23: mol_type = other RNA
tcctgcactgagctgccccgaga

SEQ ID NO: 2029 - RNA, 22 nt, Synthetic Construct
  source 1..22: mol_type = other RNA
cattgcacttgcctcggtctga

SEQ ID NO: 2030 - RNA, 25 nt, Synthetic Construct
  source 1..25: mol_type = other RNA
tgtgaaagtaggtcatcgtcaggct

SEQ ID NO: 2031 - RNA, 21 nt, Synthetic Construct
  source 1..21: mol_type = other RNA
tgaggtagtaggctgtgtggt

SEQ ID NO: 2032 - RNA, 20 nt, Synthetic Construct
  source 1..20: mol_type = other RNA
tgaggaagtaggttgtatag

SEQ ID NO: 2033 - RNA, 15 nt, Synthetic Construct
  source 1..15: mol_type = other RNA
gcgtagatatgcgga

SEQ ID NO: 2034 - RNA, 23 nt, Synthetic Construct
  source 1..23: mol_type = other RNA
tgaggtagtaggtcgtgtggttt

SEQ ID NO: 2035 - RNA, 23 nt, Synthetic Construct
  source 1..23: mol_type = other RNA
tgaggggcagagagcgagacctt

SEQ ID NO: 2036 - RNA, 22 nt, Synthetic Construct
  source 1..22: mol_type = other RNA
tgaggtagtgggttgtatagtt

SEQ ID NO: 2037 - RNA, 23 nt, Synthetic Construct
  source 1..23: mol_type = other RNA
caaagtgctgctcgtgcaggtag

SEQ ID NO: 2038 - RNA, 23 nt, Synthetic Construct
  source 1..23: mol_type = other RNA
caaagtgttgttcgtgcaggtag

SEQ ID NO: 2039 - RNA, 23 nt, Synthetic Construct
  source 1..23: mol_type = other RNA
tcctgtactgagctgccctgagt

SEQ ID NO: 2040 - RNA, 20 nt, Synthetic Construct
  source 1..20: mol_type = other RNA
tgaggtggtaggttgtgtgg

SEQ ID NO: 2041 - RNA, 21 nt, Synthetic Construct
  source 1..21: mol_type = other RNA
tgaggtggtaggttgtatagt

SEQ ID NO: 2042 - RNA, 23 nt, Synthetic Construct
  source 1..23: mol_type = other RNA
caaggtgctgttcgtgcaggtag

SEQ ID NO: 2043 - RNA, 22 nt, Synthetic Construct
  source 1..22: mol_type = other RNA
tgaggtagtaggttgtgtggct

SEQ ID NO: 2044 - RNA, 27 nt, Synthetic Construct
  source 1..27: mol_type = other RNA
ccccccattgctaaatttgactggctt

SEQ ID NO: 2045 - RNA, 20 nt, Synthetic Construct
  source 1..20: mol_type = other RNA
tgaggtagtaggctgtatag

SEQ ID NO: 2046 - RNA, 22 nt, Synthetic Construct
  source 1..22: mol_type = other RNA
tgaggtagtgggttgtgtggtt

SEQ ID NO: 2047 - RNA, 21 nt, Synthetic Construct
  source 1..21: mol_type = other RNA
tgaggtagtgggttgtatagt

SEQ ID NO: 2048 - RNA, 23 nt, Synthetic Construct
  source 1..23: mol_type = other RNA
tgaggtagtaggttgtgtggctt

SEQ ID NO: 2049 - RNA, 21 nt, Synthetic Construct
  source 1..21: mol_type = other RNA
tgaagtagtaggttgtatagt

SEQ ID NO: 2050 - RNA, 22 nt, Synthetic Construct
  source 1..22: mol_type = other RNA
tgaggtagtaggttgtaaagtt

SEQ ID NO: 2051 - RNA, 20 nt, Synthetic Construct
  source 1..20: mol_type = other RNA
tggggtagtaggttgtgtgg

SEQ ID NO: 2052 - RNA, 32 nt, Synthetic Construct
  source 1..32: mol_type = other RNA
tcctcgatagctcagtcggtagagcgccggac

SEQ ID NO: 2053 - RNA, 27 nt, Synthetic Construct
  source 1..27: mol_type = other RNA
ccccccactgctaaatttgactggcct

SEQ ID NO: 2054 - RNA, 21 nt, Synthetic Construct
  source 1..21: mol_type = other RNA
cgaggtagtagattgtatagt

SEQ ID NO: 2055 - RNA, 22 nt, Synthetic Construct
  source 1..22: mol_type = other RNA
tgaggtagtaggatgtgtggtt

SEQ ID NO: 2056 - RNA, 21 nt, Synthetic Construct
  source 1..21: mol_type = other RNA
tgaggtagtaggttgagtggt

SEQ ID NO: 2057 - RNA, 22 nt, Synthetic Construct
  source 1..22: mol_type = other RNA
tgaggtagcaggttgtatagtt

SEQ ID NO: 2058 - RNA, 23 nt, Synthetic Construct
  source 1..23: mol_type = other RNA
caaagtgctgtccgtgcaggtag

SEQ ID NO: 2059 - RNA, 29 nt, Synthetic Construct
  source 1..29: mol_type = other RNA
cccccccactgctaaatttgactggctta

SEQ ID NO: 2060 - RNA, 21 nt, Synthetic Construct
  source 1..21: mol_type = other RNA
tgaggtagtaggctgtatagt

SEQ ID NO: 2061 - RNA, 23 nt, Synthetic Construct
  source 1..23: mol_type = other RNA
caaagtgctgttcgcgcaggtag

SEQ ID NO: 2062 - RNA, 19 nt, Synthetic Construct
  source 1..19: mol_type = other RNA
ccagtaaacggcggccgta

SEQ ID NO: 2063 - RNA, 27 nt, Synthetic Construct
  source 1..27: mol_type = other RNA
ccccccactgccaaatttgactggctt

SEQ ID NO: 2064 - RNA, 22 nt, Synthetic Construct
  source 1..22: mol_type = other RNA
tcctgtaccgagctgccccgag

SEQ ID NO: 2065 - RNA, 23 nt, Synthetic Construct
  source 1..23: mol_type = other RNA
tcctgtactgagctgccccggga

SEQ ID NO: 2066 - RNA, 21 nt, Synthetic Construct
  source 1..21: mol_type = other RNA
tgaggtagtaggatgtgtggt

SEQ ID NO: 2067 - RNA, 21 nt, Synthetic Construct
  source 1..21: mol_type = other RNA
tgaggtagaaggttgtatagt

SEQ ID NO: 2068 - RNA, 20 nt, Synthetic Construct
  source 1..20: mol_type = other RNA
tgaggtagtgggttgtgtgg

SEQ ID NO: 2069 - RNA, 35 nt, Synthetic Construct
  source 1..35: mol_type = other RNA
acccaaaggtcgtcggttcaaatccggcccccgca

SEQ ID NO: 2070 - RNA, 23 nt, Synthetic Construct
  source 1..23: mol_type = other RNA
caacggaatcccagaagcagctg

SEQ ID NO: 2071 - RNA, 22 nt, Synthetic Construct
  source 1..22: mol_type = other RNA
tcctgtactgagccgccccgag

SEQ ID NO: 2072 - RNA, 15 nt, Synthetic Construct
  source 1..15: mol_type = other RNA
gtccggatcgtagtc

SEQ ID NO: 2073 - RNA, 21 nt, Synthetic Construct
  source 1..21: mol_type = other RNA
cgaggtagtaggttgtatagt

SEQ ID NO: 2074 - RNA, 28 nt, Synthetic Construct
  source 1..28: mol_type = other RNA
ccccccaccgctaaatttgactggcttt

SEQ ID NO: 2075 - RNA, 18 nt, Synthetic Construct
  source 1..18: mol_type = other RNA
gcgaaattccttgtcggg

SEQ ID NO: 2076 - RNA, 18 nt, Synthetic Construct
  source 1..18: mol_type = other RNA
catgcaagtcgaacggta

SEQ ID NO: 2077 - RNA, 21 nt, Synthetic Construct
  source 1..21: mol_type = other RNA
gggagtgtgacaatggtgttt

SEQ ID NO: 2078 - RNA, 17 nt, Synthetic Construct
  source 1..17: mol_type = other RNA
gggtctgtagctcagtc

SEQ ID NO: 2079 - RNA, 23 nt, Synthetic Construct
  source 1..23: mol_type = other RNA
tcctgaactgagctgccccgaga

SEQ ID NO: 2080 - RNA, 22 nt, Synthetic Construct
  source 1..22: mol_type = other RNA
tgaggtagtagtttgtatagtt

SEQ ID NO: 2081 - RNA, 23 nt, Synthetic Construct
  source 1..23: mol_type = other RNA
tgaggtagtaggttgcgtggttt

SEQ ID NO: 2082 - RNA, 21 nt, Synthetic Construct
  source 1..21: mol_type = other RNA
tgaggcagtaggttgtatagt

SEQ ID NO: 2083 - RNA, 20 nt, Synthetic Construct
  source 1..20: mol_type = other RNA
tgaggtagtaggtcgtatag

SEQ ID NO: 2084 - RNA, 27 nt, Synthetic Construct
  source 1..27: mol_type = other RNA
cgtgtgaaagtaggtcatcgtcaggct

SEQ ID NO: 2085 - RNA, 22 nt, Synthetic Construct
  source 1..22: mol_type = other RNA
tgaggcagtagtttgtgctgtt

SEQ ID NO: 2086 - RNA, 32 nt, Synthetic Construct
  source 1..32: mol_type = other RNA
gcggctgtagctcagttggatagagtacttgg

SEQ ID NO: 2087 - RNA, 20 nt, Synthetic Construct
  source 1..20: mol_type = other RNA
ggaggtagtaggttgtgtgg

SEQ ID NO: 2088 - RNA, 22 nt, Synthetic Construct
  source 1..22: mol_type = other RNA
tgaggtagtaggtcgtgtggtt

SEQ ID NO: 2089 - RNA, 20 nt, Synthetic Construct
  source 1..20: mol_type = other RNA
cgaggtagtaggttgtatag

SEQ ID NO: 2090 - RNA, 22 nt, Synthetic Construct
  source 1..22: mol_type = other RNA
tgaggtagtagattgtgctgtt

SEQ ID NO: 2091 - RNA, 22 nt, Synthetic Construct
  source 1..22: mol_type = other RNA
tgaggtagtggtttgtgctgtt

SEQ ID NO: 2092 - RNA, 20 nt, Synthetic Construct
  source 1..20: mol_type = other RNA
tgaggtagtaggttgcatag

SEQ ID NO: 2093 - RNA, 22 nt, Synthetic Construct
  source 1..22: mol_type = other RNA
tcctgtactgagctgccccaag

SEQ ID NO: 2094 - RNA, 22 nt, Synthetic Construct
  source 1..22: mol_type = other RNA
tgaggtagtagtttgtactgtt

SEQ ID NO: 2095 - RNA, 22 nt, Synthetic Construct
  source 1..22: mol_type = other RNA
tgaggtagtaggttgtgtggat

SEQ ID NO: 2096 - RNA, 21 nt, Synthetic Construct
  source 1..21: mol_type = other RNA
tgaggggcagagagcgggact

SEQ ID NO: 2097 - RNA, 23 nt, Synthetic Construct
  source 1..23: mol_type = other RNA
tgaggggcagagggcgagacttt

SEQ ID NO: 2098 - RNA, 23 nt, Synthetic Construct
  source 1..23: mol_type = other RNA
tgaggtagtgggttgtgtggttt

SEQ ID NO: 2099 - RNA, 22 nt, Synthetic Construct
  source 1..22: mol_type = other RNA
tgaggtggtaggttgtgtggtt

SEQ ID NO: 2100 - RNA, 21 nt, Synthetic Construct
  source 1..21: mol_type = other RNA
tcctgtactgagctgctccga

SEQ ID NO: 2101 - RNA, 27 nt, Synthetic Construct
  source 1..27: mol_type = other RNA
ccccccattgctaaatttgactggctt

SEQ ID NO: 2102 - RNA, 22 nt, Synthetic Construct
  source 1..22: mol_type = other RNA
cgaggtagtagtttgtgctgtt

SEQ ID NO: 2103 - RNA, 23 nt, Synthetic Construct
  source 1..23: mol_type = other RNA
tgaggtagtaggttgtgtggtaa

SEQ ID NO: 2104 - RNA, 22 nt, Synthetic Construct
  source 1..22: mol_type = other RNA
tgaagtagtagtttgtgctgtt

SEQ ID NO: 2105 - RNA, 22 nt, Synthetic Construct
  source 1..22: mol_type = other RNA
tcctgtactgagctgccctgag

SEQ ID NO: 2106 - RNA, 22 nt, Synthetic Construct
  source 1..22: mol_type = other RNA
tgaggtagtaagttgtatagtt

SEQ ID NO: 2107 - RNA, 15 nt, Synthetic Construct
  source 1..15: mol_type = other RNA
tgcaagtcgaacggt

SEQ ID NO: 2108 - RNA, 22 nt, Synthetic Construct
  source 1..22: mol_type = other RNA
tgaggtagtagtttgtgctgat

SEQ ID NO: 2109 - RNA, 21 nt, Synthetic Construct
  source 1..21: mol_type = other RNA
ggaatcgctagtaatcgcgga

SEQ ID NO: 2110 - RNA, 22 nt, Synthetic Construct
  source 1..22: mol_type = other RNA
tcctgaactgagctgccccgag

SEQ ID NO: 2111 - RNA, 23 nt, Synthetic Construct
  source 1..23: mol_type = other RNA
tcctgtactgggctgccccgaga

SEQ ID NO: 2112 - RNA, 21 nt, Synthetic Construct
  source 1..21: mol_type = other RNA
tgaggtagtaggttgtgaggt

SEQ ID NO: 2113 - RNA, 16 nt, Synthetic Construct
  source 1..16: mol_type = other RNA
gtccggatcgtagtct

SEQ ID NO: 2114 - RNA, 19 nt, Synthetic Construct
  source 1..19: mol_type = other RNA
agtaggtcatcgtcaggct

SEQ ID NO: 2115 - RNA, 22 nt, Synthetic Construct
  source 1..22: mol_type = other RNA
tgaggtagtaggttgtatagct

SEQ ID NO: 2116 - RNA, 22 nt, Synthetic Construct
  source 1..22: mol_type = other RNA
tgaggtagtaggctgtatagtt

SEQ ID NO: 2117 - RNA, 15 nt, Synthetic Construct
  source 1..15: mol_type = other RNA
tagagtagggcggga

SEQ ID NO: 2118 - RNA, 21 nt, Synthetic Construct
  source 1..21: mol_type = other RNA
tcctgtactgagccgccccga

SEQ ID NO: 2119 - RNA, 28 nt, Synthetic Construct
  source 1..28: mol_type = other RNA
ccgtgtgaaagtaggtcatcgtcaggct

SEQ ID NO: 2120 - RNA, 19 nt, Synthetic Construct
  source 1..19: mol_type = other RNA
agtcgacgtatagggtgtg

SEQ ID NO: 2121 - RNA, 23 nt, Synthetic Construct
  source 1..23: mol_type = other RNA
taaagtgctgttcgtgcaggtag

SEQ ID NO: 2122 - RNA, 20 nt, Synthetic Construct
  source 1..20: mol_type = other RNA
tgaggtagtaggttgcatag

SEQ ID NO: 2123 - RNA, 22 nt, Synthetic Construct
  source 1..22: mol_type = other RNA
tcctgtaccgagctgccccgag

SEQ ID NO: 2124 - RNA, 23 nt, Synthetic Construct
  source 1..23: mol_type = other RNA
tgaggggtagagagcgagacttt

SEQ ID NO: 2125 - RNA, 22 nt, Synthetic Construct
  source 1..22: mol_type = other RNA
tgaggtggtagtttgtgctgtt

SEQ ID NO: 2126 - RNA, 33 nt, Synthetic Construct
  source 1..33: mol_type = other RNA
gcggggtggagcagtctggtagctcgttgggct

SEQ ID NO: 2127 - RNA, 23 nt, Synthetic Construct
  source 1..23: mol_type = other RNA
tcctgtactgagccgccccgagt

SEQ ID NO: 2128 - RNA, 22 nt, Synthetic Construct
  source 1..22: mol_type = other RNA
tgaggtagtaggttgcgtggtt

SEQ ID NO: 2129 - RNA, 23 nt, Synthetic Construct
  source 1..23: mol_type = other RNA
caaagtgctgttcgagcaggtag

SEQ ID NO: 2130 - RNA, 23 nt, Synthetic Construct
  source 1..23: mol_type = other RNA
caaagtgccgttcgtgcaggtag

SEQ ID NO: 2131 - RNA, 22 nt, Synthetic Construct
  source 1..22: mol_type = other RNA
tgaggtagtaggctgtgtggtt

SEQ ID NO: 2132 - RNA, 22 nt, Synthetic Construct
  source 1..22: mol_type = other RNA
tgaggtagtaggtcgtatagtt

SEQ ID NO: 2133 - RNA, 21 nt, Synthetic Construct
  source 1..21: mol_type = other RNA
tggagtgtgacagtggtgttt

SEQ ID NO: 2134 - RNA, 22 nt, Synthetic Construct
  source 1..22: mol_type = other RNA
tgaggtagtagtttgtgctgct

SEQ ID NO: 2135 - RNA, 21 nt, Synthetic Construct
  source 1..21: mol_type = other RNA
tcctgtactgggctgccccga

SEQ ID NO: 2136 - RNA, 22 nt, Synthetic Construct
  source 1..22: mol_type = other RNA
tcctgtgctgagctgccccgag

SEQ ID NO: 2137 - RNA, 16 nt, Synthetic Construct
  source 1..16: mol_type = other RNA
gatttgggagtgctcg

SEQ ID NO: 2138 - RNA, 23 nt, Synthetic Construct
  source 1..23: mol_type = other RNA
naaagtgctgttcgtgcaggtag

SEQ ID NO: 2139 - RNA, 20 nt, Synthetic Construct
  source 1..20: mol_type = other RNA
tgaggtagcaggttgtgtgg

SEQ ID NO: 2140 - RNA, 23 nt, Synthetic Construct
  source 1..23: mol_type = other RNA
tgaggggcagagagcgaggcttt

SEQ ID NO: 2141 - RNA, 21 nt, Synthetic Construct
  source 1..21: mol_type = other RNA
tgaggtagtagtttgcgctgt

SEQ ID NO: 2142 - RNA, 16 nt, Synthetic Construct
  source 1..16: mol_type = other RNA
ccgcttttgtcaggga

SEQ ID NO: 2143 - RNA, 22 nt, Synthetic Construct
  source 1..22: mol_type = other RNA
ccctgtactgagctgccccgag

SEQ ID NO: 2144 - RNA, 15 nt, Synthetic Construct
  source 1..15: mol_type = other RNA
gagctgtggataggg

SEQ ID NO: 2145 - RNA, 22 nt, Synthetic Construct
  source 1..22: mol_type = other RNA
tcctgtattgagctgccccgag

SEQ ID NO: 2146 - RNA, 16 nt, Synthetic Construct
  source 1..16: mol_type = other RNA
cccagaaacccggtcg

SEQ ID NO: 2147 - RNA, 31 nt, Synthetic Construct
  source 1..31: mol_type = other RNA
gcattgtggttcagtggtagaattctcgcct

SEQ ID NO: 2148 - RNA, 22 nt, Synthetic Construct
  source 1..22: mol_type = other RNA
tgaggtaataggttgtgtggtt

SEQ ID NO: 2149 - RNA, 22 nt, Synthetic Construct
  source 1..22: mol_type = other RNA
tgaggtagtaggttgtgtggtg

SEQ ID NO: 2150 - RNA, 22 nt, Synthetic Construct
  source 1..22: mol_type = other RNA
tgaggtagtagttcgtgctgtt

SEQ ID NO: 2151 - RNA, 23 nt, Synthetic Construct
  source 1..23: mol_type = other RNA
tgaggggcagggagcgagacttt

SEQ ID NO: 2152 - RNA, 22 nt, Synthetic Construct
  source 1..22: mol_type = other RNA
tgaggtggtaggttgtatagtt

SEQ ID NO: 2153 - RNA, 22 nt, Synthetic Construct
  source 1..22: mol_type = other RNA
tgaggtagtagtttgtgctatt

SEQ ID NO: 2154 - RNA, 23 nt, Synthetic Construct
  source 1..23: mol_type = other RNA
caaagtactgttcgtgcaggtag

SEQ ID NO: 2155 - RNA, 27 nt, Synthetic Construct
  source 1..27: mol_type = other RNA
ccccccactgctaaatttgactggctg

SEQ ID NO: 2156 - RNA, 16 nt, Synthetic Construct
  source 1..16: mol_type = other RNA
gaaattccttgtcggg

SEQ ID NO: 2157 - RNA, 23 nt, Synthetic Construct
  source 1..23: mol_type = other RNA
tggggtagtaggttgtgtggttt

SEQ ID NO: 2158 - RNA, 22 nt, Synthetic Construct
  source 1..22: mol_type = other RNA
tgaggtagcaggttgtgtggtt

SEQ ID NO: 2159 - RNA, 21 nt, Synthetic Construct
  source 1..21: mol_type = other RNA
tgaggtggtaggttgtgtggt

SEQ ID NO: 2160 - RNA, 22 nt, Synthetic Construct
  source 1..22: mol_type = other RNA
tggggtagtagtttgtgctgtt

SEQ ID NO: 2161 - RNA, 22 nt, Synthetic Construct
  source 1..22: mol_type = other RNA
tgaggtaatagtttgtgctgtt

SEQ ID NO: 2162 - RNA, 23 nt, Synthetic Construct
  source 1..23: mol_type = other RNA
tcctgtactgagttgccccgaga

SEQ ID NO: 2163 - RNA, 26 nt, Synthetic Construct
  source 1..26: mol_type = other RNA
gagcagctaataccgcatacgacctg

SEQ ID NO: 2164 - RNA, 20 nt, Synthetic Construct
  source 1..20: mol_type = other RNA
cacatgcaagtcgaacggta

SEQ ID NO: 2165 - RNA, 20 nt, Synthetic Construct
  source 1..20: mol_type = other RNA
tgaggtagcaggttgtatag

SEQ ID NO: 2166 - RNA, 22 nt, Synthetic Construct
  source 1..22: mol_type = other RNA
cgaggtagtaggttgtatagtt

SEQ ID NO: 2167 - RNA, 21 nt, Synthetic Construct
  source 1..21: mol_type = other RNA
tcctgtgctgagctgccccga

SEQ ID NO: 2168 - RNA, 22 nt, Synthetic Construct
  source 1..22: mol_type = other RNA
taaggtagtaggttgtatagtt

SEQ ID NO: 2169 - RNA, 20 nt, Synthetic Construct
  source 1..20: mol_type = other RNA
caatggccgggacagagggc

SEQ ID NO: 2170 - RNA, 23 nt, Synthetic Construct
  source 1..23: mol_type = other RNA
tgaggggcagagagcgagactat

SEQ ID NO: 2171 - RNA, 20 nt, Synthetic Construct
  source 1..20: mol_type = other RNA
tgaggtagtgggttgtatag

SEQ ID NO: 2172 - RNA, 22 nt, Synthetic Construct
  source 1..22: mol_type = other RNA
tcctgtactgggctgccccgag

SEQ ID NO: 2173 - RNA, 22 nt, Synthetic Construct
  source 1..22: mol_type = other RNA
tgaggtagtaggttgtgttgtt

SEQ ID NO: 2174 - RNA, 22 nt, Synthetic Construct
  source 1..22: mol_type = other RNA
ngaggtagtagtttgtgctgtt

SEQ ID NO: 2175 - RNA, 20 nt, Synthetic Construct
  source 1..20: mol_type = other RNA
cgaggtagtaggttgtgtgg

SEQ ID NO: 2176 - RNA, 21 nt, Synthetic Construct
  source 1..21: mol_type = other RNA
tgaggggcggagagcgagact

SEQ ID NO: 2177 - RNA, 23 nt, Synthetic Construct
  source 1..23: mol_type = other RNA
cgaggtagtaggttgtgtggttt

SEQ ID NO: 2178 - RNA, 23 nt, Synthetic Construct
  source 1..23: mol_type = other RNA
tggggggcagagagcgagacttt

SEQ ID NO: 2179 - RNA, 23 nt, Synthetic Construct
  source 1..23: mol_type = other RNA
tggtaatacggcgtacttagtgt

SEQ ID NO: 2180 - RNA, 27 nt, Synthetic Construct
  source 1..27: mol_type = other RNA
ccccccactgctaaatttgaccggctt

SEQ ID NO: 2181 - RNA, 29 nt, Synthetic Construct
  source 1..29: mol_type = other RNA
cccccccactgctaaatttgactggctta

SEQ ID NO: 2182 - RNA, 22 nt, Synthetic Construct
  source 1..22: mol_type = other RNA
taaggtagtagtttgtgctgtt

SEQ ID NO: 2183 - RNA, 34 nt, Synthetic Construct
  source 1..34: mol_type = other RNA
cccaaaggtcgtcggttcaaatccggcccccgca

SEQ ID NO: 2184 - RNA, 23 nt, Synthetic Construct
  source 1..23: mol_type = other RNA
tcctgcactgagctgccccgaga

SEQ ID NO: 2185 - RNA, 21 nt, Synthetic Construct
  source 1..21: mol_type = other RNA
tgaggtagaaggttgtgtggt

SEQ ID NO: 2186 - RNA, 34 nt, Synthetic Construct
  source 1..34: mol_type = other RNA
gggtctgtagctcagtcggttagagcaccgtctt

SEQ ID NO: 2187 - RNA, 23 nt, Synthetic Construct
  source 1..23: mol_type = other RNA
tcctgtgctgagctgccccgagt

SEQ ID NO: 2188 - RNA, 23 nt, Synthetic Construct
  source 1..23: mol_type = other RNA
tgaggggcagagggcgagacttt

SEQ ID NO: 2189 - RNA, 20 nt, Synthetic Construct
  source 1..20: mol_type = other RNA
tgaggtagtaggctgtatag

SEQ ID NO: 2190 - RNA, 23 nt, Synthetic Construct
  source 1..23: mol_type = other RNA
caaagtgctgttcgtgcaagtag

SEQ ID NO: 2191 - RNA, 20 nt, Synthetic Construct
  source 1..20: mol_type = other RNA
tcagtagctcgaggaaaaga

SEQ ID NO: 2192 - RNA, 22 nt, Synthetic Construct
  source 1..22: mol_type = other RNA
tgaggtagtagattgtgtggtt

SEQ ID NO: 2193 - RNA, 23 nt, Synthetic Construct
  source 1..23: mol_type = other RNA
tcggaatcgctagtaatcgcgga

SEQ ID NO: 2194 - RNA, 23 nt, Synthetic Construct
  source 1..23: mol_type = other RNA
ccctgtactgagctgccccgagt

SEQ ID NO: 2195 - RNA, 21 nt, Synthetic Construct
  source 1..21: mol_type = other RNA
aggagtgtgacaatggtgttt

SEQ ID NO: 2196 - RNA, 22 nt, Synthetic Construct
  source 1..22: mol_type = other RNA
tgaggtagtagcttgtgctgtt

SEQ ID NO: 2197 - RNA, 22 nt, Synthetic Construct
  source 1..22: mol_type = other RNA
tgaggtagtagtttgtgccgtt

SEQ ID NO: 2198 - RNA, 21 nt, Synthetic Construct
  source 1..21: mol_type = other RNA
tggggtagtaggttgtgtggt

SEQ ID NO: 2199 - RNA, 16 nt, Synthetic Construct
  source 1..16: mol_type = other RNA
aggtcatcattatctg

SEQ ID NO: 2200 - RNA, 23 nt, Synthetic Construct
  source 1..23: mol_type = other RNA
tgaggggcagagagtgagacttt

SEQ ID NO: 2201 - RNA, 21 nt, Synthetic Construct
  source 1..21: mol_type = other RNA
tgaggtagcaggttgtatagt

SEQ ID NO: 2202 - RNA, 21 nt, Synthetic Construct
  source 1..21: mol_type = other RNA
ngaggtagtaggttgtgtggt

SEQ ID NO: 2203 - RNA, 20 nt, Synthetic Construct
  source 1..20: mol_type = other RNA
tgaggtagtgggttgtatag

SEQ ID NO: 2204 - RNA, 15 nt, Synthetic Construct
  source 1..15: mol_type = other RNA
ggtggctgtagctca

SEQ ID NO: 2205 - RNA, 20 nt, Synthetic Construct
  source 1..20: mol_type = other RNA
tgaggtggtaggttgtatag

SEQ ID NO: 2206 - RNA, 23 nt, Synthetic Construct
  source 1..23: mol_type = other RNA
tcctgtactgggctgccccgagt

SEQ ID NO: 2207 - RNA, 22 nt, Synthetic Construct
  source 1..22: mol_type = other RNA
tgaggtagtagtttgcgctgtt

SEQ ID NO: 2208 - RNA, 17 nt, Synthetic Construct
  source 1..17: mol_type = other RNA
gaagttgaccgcctggg

SEQ ID NO: 2209 - RNA, 33 nt, Synthetic Construct
  source 1..33: mol_type = other RNA
gtgggcgtttgaagtgaagtgatgttgcaaggc

SEQ ID NO: 2210 - RNA, 23 nt, Synthetic Construct
  source 1..23: mol_type = other RNA
tcctgtactgagctgtcccgaga

SEQ ID NO: 2211 - RNA, 37 nt, Synthetic Construct
  source 1..37: mol_type = other RNA
aaggcgggggtcgctggttcgaatccagccagaccca

SEQ ID NO: 2212 - RNA, 23 nt, Synthetic Construct
  source 1..23: mol_type = other RNA
caaagtactgttcgtgcaggtag

SEQ ID NO: 2213 - RNA, 22 nt, Synthetic Construct
  source 1..22: mol_type = other RNA
tattgcactcgtcccggcctgt

SEQ ID NO: 2214 - RNA, 21 nt, Synthetic Construct
  source 1..21: mol_type = other RNA
cgaggtagtagattgtatagt

SEQ ID NO: 2215 - RNA, 31 nt, Synthetic Construct
  source 1..31: mol_type = other RNA
gggtctgtagctcagtcggttagagcaccgt

SEQ ID NO: 2216 - RNA, 27 nt, Synthetic Construct
  source 1..27: mol_type = other RNA
ccccccactgctaaattcgactggctt

SEQ ID NO: 2217 - RNA, 22 nt, Synthetic Construct
  source 1..22: mol_type = other RNA
tgaggtagtaggtagtgtggtt

SEQ ID NO: 2218 - RNA, 20 nt, Synthetic Construct
  source 1..20: mol_type = other RNA
tgaggtagtaggtcgtgtgg

SEQ ID NO: 2219 - RNA, 23 nt, Synthetic Construct
  source 1..23: mol_type = other RNA
tgaggggcagagagcgggacttt

SEQ ID NO: 2220 - RNA, 22 nt, Synthetic Construct
  source 1..22: mol_type = other RNA
ncctgtactgagctgccccgag

SEQ ID NO: 2221 - RNA, 21 nt, Synthetic Construct
  source 1..21: mol_type = other RNA
tggggtagtaggttgtatagt

SEQ ID NO: 2222 - RNA, 22 nt, Synthetic Construct
  source 1..22: mol_type = other RNA
tgaggcagtaggttgtatagtt

SEQ ID NO: 2223 - RNA, 21 nt, Synthetic Construct
  source 1..21: mol_type = other RNA
tgaggtagtaggtcgtatagt

SEQ ID NO: 2224 - RNA, 23 nt, Synthetic Construct
  source 1..23: mol_type = other RNA
ggcagggttcgtgactggggtga

SEQ ID NO: 2225 - RNA, 16 nt, Synthetic Construct
  source 1..16: mol_type = other RNA
gcggtggatgatgtgg

SEQ ID NO: 2226 - RNA, 19 nt, Synthetic Construct
  source 1..19: mol_type = other RNA
acatgcaagtcgaacggta

SEQ ID NO: 2227 - RNA, 22 nt, Synthetic Construct
  source 1..22: mol_type = other RNA
tgaggtagtagtctgtgctgtt

SEQ ID NO: 2228 - RNA, 23 nt, Synthetic Construct
  source 1..23: mol_type = other RNA
tgaggggcagagagcgagacctt

SEQ ID NO: 2229 - RNA, 22 nt, Synthetic Construct
  source 1..22: mol_type = other RNA
taaggtagtaggttgtgtggtt

SEQ ID NO: 2230 - RNA, 29 nt, Synthetic Construct
  source 1..29: mol_type = other RNA
ttacaggggttcgaatcccctaggggacg

SEQ ID NO: 2231 - RNA, 22 nt, Synthetic Construct
  source 1..22: mol_type = other RNA
tgaggtagtagttagtgctgtt

SEQ ID NO: 2232 - RNA, 17 nt, Synthetic Construct
  source 1..17: mol_type = other RNA
cgatctgtagctggtct

SEQ ID NO: 2233 - RNA, 16 nt, Synthetic Construct
  source 1..16: mol_type = other RNA
gtcaacggccatacca

SEQ ID NO: 2234 - RNA, 15 nt, Synthetic Construct
  source 1..15: mol_type = other RNA
tccggatcgtagtct

SEQ ID NO: 2235 - RNA, 17 nt, Synthetic Construct
  source 1..17: mol_type = other RNA
gtccggatcgtagtctg

SEQ ID NO: 2236 - RNA, 23 nt, Synthetic Construct
  source 1..23: mol_type = other RNA
atatcggaacgtgcccagtcgtg

SEQ ID NO: 2237 - RNA, 22 nt, Synthetic Construct
  source 1..22: mol_type = other RNA
tggggtagtaggttgtatagtt

SEQ ID NO: 2238 - RNA, 23 nt, Synthetic Construct
  source 1..23: mol_type = other RNA
caaagtgctattcgtgcaggtag

SEQ ID NO: 2239 - RNA, 21 nt, Synthetic Construct
  source 1..21: mol_type = other RNA
tcctgtacagagctgccccga

SEQ ID NO: 2240 - RNA, 21 nt, Synthetic Construct
  source 1..21: mol_type = other RNA
tgaggcagtaggttgtatagt

SEQ ID NO: 2241 - RNA, 20 nt, Synthetic Construct
  source 1..20: mol_type = other RNA
tgaggcagtaggttgtgtgg

SEQ ID NO: 2242 - RNA, 21 nt, Synthetic Construct
  source 1..21: mol_type = other RNA
tcctgcactgagctgccccga

SEQ ID NO: 2243 - RNA, 15 nt, Synthetic Construct
  source 1..15: mol_type = other RNA
gtcaggatggccgag

SEQ ID NO: 2244 - RNA, 18 nt, Synthetic Construct
  source 1..18: mol_type = other RNA
atggccgggacagagggc

SEQ ID NO: 2245 - RNA, 22 nt, Synthetic Construct
  source 1..22: mol_type = other RNA
tgaggtagtaggttgtacagtt

SEQ ID NO: 2246 - RNA, 29 nt, Synthetic Construct
  source 1..29: mol_type = other RNA
tgaaggtgggttgtgaagcctgctggagg

SEQ ID NO: 2247 - RNA, 22 nt, Synthetic Construct
  source 1..22: mol_type = other RNA
tcctgtattgagctgccccgag

SEQ ID NO: 2248 - RNA, 36 nt, Synthetic Construct
  source 1..36: mol_type = other RNA
aacccaaaggtcgtcggttcaaatccggcccccgca

SEQ ID NO: 2249 - RNA, 18 nt, Synthetic Construct
  source 1..18: mol_type = other RNA
atcgctagtaatcgcgga

SEQ ID NO: 2250 - RNA, 23 nt, Synthetic Construct
  source 1..23: mol_type = other RNA
tgaggtagtaggttgtgtggctt

SEQ ID NO: 2251 - RNA, 22 nt, Synthetic Construct
  source 1..22: mol_type = other RNA
tcctgtactgaactgccccgag

SEQ ID NO: 2252 - RNA, 20 nt, Synthetic Construct
  source 1..20: mol_type = other RNA
tgaggtagtaggttgcgtgg

SEQ ID NO: 2253 - RNA, 33 nt, Synthetic Construct
  source 1..33: mol_type = other RNA
gggtctgtagctcagtcggttagagcaccgtct

SEQ ID NO: 2254 - RNA, 22 nt, Synthetic Construct
  source 1..22: mol_type = other RNA
tgaggtggtagtttgtgctgtt

SEQ ID NO: 2255 - RNA, 22 nt, Synthetic Construct
  source 1..22: mol_type = other RNA
tatcggaacgtgcccagtcgtg

SEQ ID NO: 2256 - RNA, 24 nt, Synthetic Construct
  source 1..24: mol_type = other RNA
tgtaaacatccccgactgggagct

SEQ ID NO: 2257 - RNA, 15 nt, Synthetic Construct
  source 1..15: mol_type = other RNA
ccgcttttgtcaggg

SEQ ID NO: 2258 - RNA, 22 nt, Synthetic Construct
  source 1..22: mol_type = other RNA
tgaggtaatagtttgtgctgtt

SEQ ID NO: 2259 - RNA, 19 nt, Synthetic Construct
  source 1..19: mol_type = other RNA
agcgaaattccttgtcggg

SEQ ID NO: 2260 - RNA, 22 nt, Synthetic Construct
  source 1..22: mol_type = other RNA
tcctgtactgggctgccccgag

SEQ ID NO: 2261 - RNA, 22 nt, Synthetic Construct
  source 1..22: mol_type = other RNA
ggaggtagtagtttgtgctgtt

SEQ ID NO: 2262 - RNA, 20 nt, Synthetic Construct
  source 1..20: mol_type = other RNA
tgaagtagtaggttgtgtgg

SEQ ID NO: 2263 - RNA, 31 nt, Synthetic Construct
  source 1..31: mol_type = other RNA
gcgggagtagttcaatggtagaaccttagcc

SEQ ID NO: 2264 - RNA, 23 nt, Synthetic Construct
  source 1..23: mol_type = other RNA
tgaggggcagagagcgagactct

SEQ ID NO: 2265 - RNA, 34 nt, Synthetic Construct
  source 1..34: mol_type = other RNA
cgcggggtggagcagtctggtagctcgttgggct

SEQ ID NO: 2266 - RNA, 33 nt, Synthetic Construct
  source 1..33: mol_type = other RNA
tcctcgatagctcagtcggtagagcgccggact

SEQ ID NO: 2267 - RNA, 27 nt, Synthetic Construct
  source 1..27: mol_type = other RNA
ccccccactgctaaattcgactggctt

SEQ ID NO: 2268 - RNA, 15 nt, Synthetic Construct
  source 1..15: mol_type = other RNA
gtacgtgagctgggt

SEQ ID NO: 2269 - RNA, 35 nt, Synthetic Construct
  source 1..35: mol_type = other RNA
ccaaggggtcgtgggttcgaatcctgccagccgca

SEQ ID NO: 2270 - RNA, 15 nt, Synthetic Construct
  source 1..15: mol_type = other RNA
ggtcatcgtcaggct

SEQ ID NO: 2271 - RNA, 20 nt, Synthetic Construct
  source 1..20: mol_type = other RNA
tgaggtagtaggttgtgagg

SEQ ID NO: 2272 - RNA, 17 nt, Synthetic Construct
  source 1..17: mol_type = other RNA
tcccagaaacccggtcg

SEQ ID NO: 2273 - RNA, 18 nt, Synthetic Construct
  source 1..18: mol_type = other RNA
ccaaggggtcgtgggttc

SEQ ID NO: 2274 - RNA, 30 nt, Synthetic Construct
  source 1..30: mol_type = other RNA
gcgggcgtcgttcaatggtaggacctgagc

SEQ ID NO: 2275 - RNA, 18 nt, Synthetic Construct
  source 1..18: mol_type = other RNA
tcccaagggtatggctgt

SEQ ID NO: 2276 - RNA, 22 nt, Synthetic Construct
  source 1..22: mol_type = other RNA
ggcagggttcgtgactggggtg

SEQ ID NO: 2277 - RNA, 27 nt, Synthetic Construct
  source 1..27: mol_type = other RNA
ctcccactgcttcacttgactagcctt

SEQ ID NO: 2278 - RNA, 31 nt, Synthetic Construct
  source 1..31: mol_type = other RNA
tcccctggacctgtactgacgctcatgcacg

SEQ ID NO: 2279 - RNA, 34 nt, Synthetic Construct; identical to SEQ ID NO: 2019
  source 1..34: mol_type = other RNA

SEQ ID NO: 2280 - RNA, 20 nt, Synthetic Construct
  source 1..20: mol_type = other RNA
ggaggtagtaggttgtatag

SEQ ID NO: 2281 - RNA, 22 nt, Synthetic Construct
  source 1..22: mol_type = other RNA
tgagatagtaggttgtgtggtt

SEQ ID NO: 2282 - RNA, 21 nt, Synthetic Construct
  source 1..21: mol_type = other RNA
tcctgtactgagccgccccga

SEQ ID NO: 2283 - RNA, 27 nt, Synthetic Construct
  source 1..27: mol_type = other RNA
ccccccactgctaaatttgaccggctt

SEQ ID NO: 2284 - RNA, 20 nt, Synthetic Construct
  source 1..20: mol_type = other RNA
tgaggtagtgggttgtgtgg

SEQ ID NO: 2285 - RNA, 17 nt, Synthetic Construct
  source 1..17: mol_type = other RNA
gcgtagatatgcggagg

SEQ ID NO: 2286 - RNA, 22 nt, Synthetic Construct
  source 1..22: mol_type = other RNA
caatgcacttgtctcggtctga

SEQ ID NO: 2287 - RNA, 27 nt, Synthetic Construct
  source 1..27: mol_type = other RNA
cccaccactgctaaatttgactggctt

SEQ ID NO: 2288 - RNA, 22 nt, Synthetic Construct
  source 1..22: mol_type = other RNA
agaggtagtaggttgtgtggtt

SEQ ID NO: 2289 - RNA, 27 nt, Synthetic Construct
  source 1..27: mol_type = other RNA
ccccccactgccaaatttgactggctt

SEQ ID NO: 2290 - RNA, 21 nt, Synthetic Construct
  source 1..21: mol_type = other RNA
ccctgtactgagctgccccga

SEQ ID NO: 2291 - RNA, 34 nt, Synthetic Construct
  source 1..34: mol_type = other RNA
cggggcgtagcgcagcctggtagcgcacttgcat

SEQ ID NO: 2292 - RNA, 20 nt, Synthetic Construct
  source 1..20: mol_type = other RNA
agaggtagtaggttgtgtgg

SEQ ID NO: 2293 - RNA, 31 nt, Synthetic Construct
  source 1..31: mol_type = other RNA
ggggagtcgccaagttggtcaaggcatcgga

SEQ ID NO: 2294 - RNA, 23 nt, Synthetic Construct
  source 1..23: mol_type = other RNA
caaagtgctgttcgcgcaggtag

SEQ ID NO: 2295 - RNA, 31 nt, Synthetic Construct
  source 1..31: mol_type = other RNA
tcctcgatagctcagtcggtagagcgccgga

SEQ ID NO: 2296 - RNA, 32 nt, Synthetic Construct
  source 1..32: mol_type = other RNA
aggggagtcgccaagttggtcaaggcatcgga

SEQ ID NO: 2297 - RNA, 27 nt, Synthetic Construct
  source 1..27: mol_type = other RNA
ccccccactgctaaatttgactagctt

SEQ ID NO: 2298 - RNA, 34 nt, Synthetic Construct
  source 1..34: mol_type = other RNA
cggggtgtagcttagcctggtagagcgctacgtt

SEQ ID NO: 2299 - RNA, 17 nt, Synthetic Construct
  source 1..17: mol_type = other RNA
gccatgccgcgtgcggg

SEQ ID NO: 2300 - RNA, 23 nt, Synthetic Construct
  source 1..23: mol_type = other RNA
gcgtggtaggagagcgttctgta

SEQ ID NO: 2301 - RNA, 27 nt, Synthetic Construct
  source 1..27: mol_type = other RNA
ccccccactgctagatttgactggctt

SEQ ID NO: 2302 - RNA, 21 nt, Synthetic Construct
  source 1..21: mol_type = other RNA
agaggtagtaggttgtgtggt

SEQ ID NO: 2303 - RNA, 16 nt, Synthetic Construct
  source 1..16: mol_type = other RNA
ctgacgctcatgcacg

SEQ ID NO: 2304 - RNA, 19 nt, Synthetic Construct
  source 1..19: mol_type = other RNA
tcagtagctcgaggaaaag

SEQ ID NO: 2305 - RNA, 22 nt, Synthetic Construct
  source 1..22: mol_type = other RNA
cattgcacttgtcccggtctga

SEQ ID NO: 2306 - RNA, 15 nt, Synthetic Construct
  source 1..15: mol_type = other RNA
gctttgatccggaga

SEQ ID NO: 2307 - RNA, 16 nt, Synthetic Construct
  source 1..16: mol_type = other RNA
cgctagtaatcgcgga

SEQ ID NO: 2308 - RNA, 30 nt, Synthetic Construct
  source 1..30: mol_type = other RNA
gggctcttagctcagttggtagagcagcgg

SEQ ID NO: 2309 - RNA, 23 nt, Synthetic Construct
  source 1..23: mol_type = other RNA
caacggagtcccaaaagcagctg

SEQ ID NO: 2310 - RNA, 31 nt, Synthetic Construct
  source 1..31: mol_type = other RNA
cccctggacctgtactgacgctcatgcacga

SEQ ID NO: 2311 - RNA, 20 nt, Synthetic Construct
  source 1..20: mol_type = other RNA
tgaggtagtaggctgtgtgg

SEQ ID NO: 2312 - RNA, 16 nt, Synthetic Construct
  source 1..16: mol_type = other RNA
gtcgacgtatagggtg

SEQ ID NO: 2313 - RNA, 24 nt, Synthetic Construct
  source 1..24: mol_type = other RNA
gggttgtaaaccgcttttgtcagg

SEQ ID NO: 2314 - RNA, 23 nt, Synthetic Construct
  source 1..23: mol_type = other RNA
tgaggtagtaggttgcgtggttt

SEQ ID NO: 2315 - RNA, 43 nt, Synthetic Construct
  source 1..43: mol_type = other RNA
cgaacaggacagtgaaacgagtcagcgccgatgatagtgcgga

SEQ ID NO: 2316 - RNA, 17 nt, Synthetic Construct
  source 1..17: mol_type = other RNA
gtcgacgtatagggtgt

SEQ ID NO: 2317 - RNA, 34 nt, Synthetic Construct
  source 1..34: mol_type = other RNA
gcggctgtagctcagttggatagagtacttggct

SEQ ID NO: 2318 - RNA, 32 nt, Synthetic Construct
  source 1..32: mol_type = other RNA
gggtctgtagctcagtcggttagagcaccgtc

SEQ ID NO: 2319 - RNA, 22 nt, Synthetic Construct
  source 1..22: mol_type = other RNA
tcctgtgctgagctgccccgag

SEQ ID NO: 2320 - RNA, 22 nt, Synthetic Construct
  source 1..22: mol_type = other RNA
tcctgtactgagcagccccgag

SEQ ID NO: 2321 - RNA, 22 nt, Synthetic Construct
  source 1..22: mol_type = other RNA
tgaggcagtagtttgtgctgtt

SEQ ID NO: 2322 - RNA, 15 nt, Synthetic Construct
  source 1..15: mol_type = other RNA
gggtgaaagcggggg

SEQ ID NO: 2323 - RNA, 23 nt, Synthetic Construct
  source 1..23: mol_type = other RNA
tgaggggtagagagcgagacttt

SEQ ID NO: 2324 - RNA, 20 nt, Synthetic Construct
  source 1..20: mol_type = other RNA
tgaggtggtaggttgtgtgg

SEQ ID NO: 2325 - RNA, 33 nt, Synthetic Construct; identical to SEQ ID NO: 1982
  source 1..33: mol_type = other RNA

SEQ ID NO: 2326 - RNA, 24 nt, Synthetic Construct
  source 1..24: mol_type = other RNA
tatatcggaacgtgcccagtcgtg

SEQ ID NO: 2327 - RNA, 19 nt, Synthetic Construct
  source 1..19: mol_type = other RNA
tctaatgagactgccggtg

SEQ ID NO: 2328 - RNA, 18 nt, Synthetic Construct
  source 1..18: mol_type = other RNA
gtcgacgtatagggtgtg

SEQ ID NO: 2329 - RNA, 21 nt, Synthetic Construct
  source 1..21: mol_type = other RNA
tcctgtgctgagctgccccga

SEQ ID NO: 2330 - RNA, 21 nt, Synthetic Construct
  source 1..21: mol_type = other RNA
ggaggtagtaggttgtgtggt

SEQ ID NO: 2331 - RNA, 19 nt, Synthetic Construct
  source 1..19: mol_type = other RNA
tcagtagctcgaggaaaag

SEQ ID NO: 2332 - RNA, 22 nt, Synthetic Construct
  source 1..22: mol_type = other RNA
tcagtagctcgaggaaaagaca

SEQ ID NO: 2333 - RNA, 31 nt, Synthetic Construct
  source 1..31: mol_type = other RNA
cctcgatagctcagtcggtagagcgccggac

SEQ ID NO: 2334 - RNA, 24 nt, Synthetic Construct
  source 1..24: mol_type = other RNA
tgaggtagtaggttgtgtggttga

SEQ ID NO: 2335 - RNA, 21 nt, Synthetic Construct
  source 1..21: mol_type = other RNA
tgaggggcagagagcgaggct

SEQ ID NO: 2336 - RNA, 16 nt, Synthetic Construct
  source 1..16: mol_type = other RNA
tgcgtagatatgcgga

SEQ ID NO: 2337 - RNA, 22 nt, Synthetic Construct
  source 1..22: mol_type = other RNA
tgaggtagaaggttgtgtggtt

SEQ ID NO: 2338 - RNA, 22 nt, Synthetic Construct
  source 1..22: mol_type = other RNA
cctcgcgcgattggagcggccg

SEQ ID NO: 2339 - RNA, 25 nt, Synthetic Construct
  source 1..25: mol_type = other RNA
gggttgtaaaccgcttttgtcaggg

SEQ ID NO: 2340 - RNA, 17 nt, Synthetic Construct
  source 1..17: mol_type = other RNA
tggccgggacagagggc

SEQ ID NO: 2341 - RNA, 20 nt, Synthetic Construct
  source 1..20: mol_type = other RNA
gcgtgcttgactgcgagact

SEQ ID NO: 2342 - RNA, 27 nt, Synthetic Construct
  source 1..27: mol_type = other RNA
ccgtgtgaaagtaggtcatcgtcaggc

SEQ ID NO: 2343 - RNA, 23 nt, Synthetic Construct
  source 1..23: mol_type = other RNA
nggtaatacgacgtacttagtgt

SEQ ID NO: 2344 - RNA, 36 nt, Synthetic Construct
  source 1..36: mol_type = other RNA
cggcaggggtcgcaggttcgaaccctgcaccgccca

SEQ ID NO: 2345 - RNA, 23 nt, Synthetic Construct
  source 1..23: mol_type = other RNA
tgaggcagtaggttgtgtggttt

SEQ ID NO: 2346 - RNA, 18 nt, Synthetic Construct
  source 1..18: mol_type = other RNA
tctaatgagactgccggt

SEQ ID NO: 2347 - RNA, 21 nt, Synthetic Construct
  source 1..21: mol_type = other RNA
tcctgtacagagctgccccga

SEQ ID NO: 2348 - RNA, 22 nt, Synthetic Construct
  source 1..22: mol_type = other RNA
tgaggtaataggttgtatagtt

SEQ ID NO: 2349 - RNA, 22 nt, Synthetic Construct
  source 1..22: mol_type = other RNA
tgagatagtaggttgtatagtt

SEQ ID NO: 2350 - RNA, 18 nt, Synthetic Construct
  source 1..18: mol_type = other RNA
ctaatgagactgccggtg

SEQ ID NO: 2351 - RNA, 22 nt, Synthetic Construct
  source 1..22: mol_type = other RNA
gagagcctggacacaggtgctg

SEQ ID NO: 2352 - RNA, 22 nt, Synthetic Construct
  source 1..22: mol_type = other RNA
nagcagcacgtaaatattggcg

SEQ ID NO: 2353 - RNA, 30 nt, Synthetic Construct
  source 1..30: mol_type = other RNA
cccctggacctgtactgacgctcatgcacg

SEQ ID NO: 2354 - RNA, 35 nt, Synthetic Construct
  source 1..35: mol_type = other RNA
tccgttggtcgcaggttcgaatcctgcacatccca

SEQ ID NO: 2355 - RNA, 17 nt, Synthetic Construct
  source 1..17: mol_type = other RNA
cccctggacctgtactg

SEQ ID NO: 2356 - RNA, 22 nt, Synthetic Construct
  source 1..22: mol_type = other RNA
tgaggtagtaggttgtatagat

SEQ ID NO: 2357 - RNA, 17 nt, Synthetic Construct
  source 1..17: mol_type = other RNA
agcggtggatgatgtgg

SEQ ID NO: 2358 - RNA, 21 nt, Synthetic Construct
  source 1..21: mol_type = other RNA
tcccgtactgagctgccccga

SEQ ID NO: 2359 - RNA, 15 nt, Synthetic Construct
  source 1..15: mol_type = other RNA
cctcgcgcgattgga

SEQ ID NO: 2360 - RNA, 22 nt, Synthetic Construct
  source 1..22: mol_type = other RNA
tgaggtagtagtttgtgctatt

SEQ ID NO: 2361 - RNA, 15 nt, Synthetic Construct
  source 1..15: mol_type = other RNA
gagtagggcgggaca

SEQ ID NO: 2362 - RNA, 20 nt, Synthetic Construct
  source 1..20: mol_type = other RNA
tgaggtagtaggttatgtgg

SEQ ID NO: 2363 - RNA, 20 nt, Synthetic Construct
  source 1..20: mol_type = other RNA
tgaggtagtaggttgtgcgg

SEQ ID NO: 2364 - RNA, 34 nt, Synthetic Construct
  source 1..34: mol_type = other RNA
tgccaggaatcctgaagagatttgggagtgctcg

SEQ ID NO: 2365 - RNA, 37 nt, Synthetic Construct
  source 1..37: mol_type = other RNA
ccggagtggacgcacctctggtgtatcggttgtcacg

SEQ ID NO: 2366 - RNA, 36 nt, Synthetic Construct
  source 1..36: mol_type = other RNA
gagagcctggacacaggtgctgcatggccgtcgtca

SEQ ID NO: 2367 - RNA, 34 nt, Synthetic Construct
  source 1..34: mol_type = other RNA
tccgtaggtccctggttcgagcccaggtcgggga

SEQ ID NO: 2368 - RNA, 27 nt, Synthetic Construct
  source 1..27: mol_type = other RNA
ccccccactgctagatttgactggctt

SEQ ID NO: 2369 - RNA, 22 nt, Synthetic Construct
  source 1..22: mol_type = other RNA
tgaggtagtgggttgtatagtt

SEQ ID NO: 2370 - RNA, 16 nt, Synthetic Construct
  source 1..16: mol_type = other RNA
cccctggacctgtact

SEQ ID NO: 2371 - RNA, 27 nt, Synthetic Construct
  source 1..27: mol_type = other RNA
ccccccactgctaaatttgattggctt

SEQ ID NO: 2372 - RNA, 21 nt, Synthetic Construct
  source 1..21: mol_type = other RNA
atcggaacgtgcccagtcgtg

SEQ ID NO: 2373 - RNA, 18 nt, Synthetic Construct
  source 1..18: mol_type = other RNA
tgcgtagatatgcggagg

SEQ ID NO: 2374 - RNA, 22 nt, Synthetic Construct
  source 1..22: mol_type = other RNA
tgaagtagtaggttgtatagtt

SEQ ID NO: 2375 - RNA, 34 nt, Synthetic Construct
  source 1..34: mol_type = other RNA
gcgggtgtagctcagttggtagagcgcaaccttg

SEQ ID NO: 2376 - RNA, 22 nt, Synthetic Construct
  source 1..22: mol_type = other RNA
tgaggaagtaggttgtgtggtt

SEQ ID NO: 2377 - RNA, 15 nt, Synthetic Construct
  source 1..15: mol_type = other RNA
gagagcctggacaca

SEQ ID NO: 2378 - RNA, 21 nt, Synthetic Construct
  source 1..21: mol_type = other RNA
tcccagtaaacggcggccgta

SEQ ID NO: 2379 - RNA, 23 nt, Synthetic Construct
  source 1..23: mol_type = other RNA
tcccgtactgagctgccccgagt

SEQ ID NO: 2380 - RNA, 22 nt, Synthetic Construct
  source 1..22: mol_type = other RNA
tcctgtactgagctgccccaag

SEQ ID NO: 2381 - RNA, 22 nt, Synthetic Construct
  source 1..22: mol_type = other RNA
tgaggtagtagtttgtgcagtt

SEQ ID NO: 2382 - RNA, 16 nt, Synthetic Construct
  source 1..16: mol_type = other RNA
cagtcaggatgttggc

SEQ ID NO: 2383 - RNA, 20 nt, Synthetic Construct
  source 1..20: mol_type = other RNA
tgaggtggtaggttgtatag

SEQ ID NO: 2384 - RNA, 27 nt, Synthetic Construct
  source 1..27: mol_type = other RNA
agagcagctaataccgcatacgacctg

SEQ ID NO: 2385 - RNA, 18 nt, Synthetic Construct
  source 1..18: mol_type = other RNA
cgccgatgatagtgcgga

SEQ ID NO: 2386 - RNA, 33 nt, Synthetic Construct
  source 1..33: mol_type = other RNA
gccaggaatcctgaagagatttgggagtgctcg

SEQ ID NO: 2387 - RNA, 27 nt, Synthetic Construct
  source 1..27: mol_type = other RNA
ccccccactgctaaatttggctggcta

SEQ ID NO: 2388 - RNA, 16 nt, Synthetic Construct
  source 1..16: mol_type = other RNA
gcagacgaagtgagtg

SEQ ID NO: 2389 - RNA, 18 nt, Synthetic Construct
  source 1..18: mol_type = other RNA
cctcgcgcgattggagcg

SEQ ID NO: 2390 - RNA, 24 nt, Synthetic Construct
  source 1..24: mol_type = other RNA
cggagaaggttagctcagccaact

SEQ ID NO: 2391 - RNA, 22 nt, Synthetic Construct
  source 1..22: mol_type = other RNA
caatgcacttgtctcggtctga

SEQ ID NO: 2392 - RNA, 15 nt, Synthetic Construct
  source 1..15: mol_type = other RNA
cagtgaaacgagtca

SEQ ID NO: 2393 - RNA, 27 nt, Synthetic Construct
  source 1..27: mol_type = other RNA
ccccccactgctaaatctgactggctt

SEQ ID NO: 2394 - RNA, 15 nt, Synthetic Construct
  source 1..15: mol_type = other RNA
tccggatcgtagtct

SEQ ID NO: 2395 - RNA, 33 nt, Synthetic Construct
  source 1..33: mol_type = other RNA
gcccaggtggcggaattggtagacgcactagtt

SEQ ID NO: 2396 - RNA, 21 nt, Synthetic Construct
  source 1..21: mol_type = other RNA
gctttgatccggagatttccg

SEQ ID NO: 2397 - RNA, 35 nt, Synthetic Construct
  source 1..35: mol_type = other RNA
tccgcaggtccggggttcgaatccctgaagcgcca

SEQ ID NO: 2398 - RNA, 39 nt, Synthetic Construct
  source 1..39: mol_type = other RNA
gctttgatccggagatttccgaatggggaaacccgaccg

SEQ ID NO: 2399 - RNA, 35 nt, Synthetic Construct
  source 1..35: mol_type = other RNA
ggcaggggtcgcaggttcgaaccctgcaccgccca

SEQ ID NO: 2400 - RNA, 21 nt, Synthetic Construct
  source 1..21: mol_type = other RNA
ctaatcccagaaacccggtcg

SEQ ID NO: 2401 - RNA, 15 nt, Synthetic Construct
  source 1..15: mol_type = other RNA
tgcaagtcgaacggt

SEQ ID NO: 2402 - RNA, 35 nt, Synthetic Construct
  source 1..35: mol_type = other RNA
gcaagaggtcagcggttcgatcccgcttacctcca

SEQ ID NO: 2403 - RNA, 21 nt, Synthetic Construct
  source 1..21: mol_type = other RNA
gtagcgaaattccttgtcggg

SEQ ID NO: 2404 - RNA, 17 nt, Synthetic Construct
  source 1..17: mol_type = other RNA
atgcaagtcgaacggta

SEQ ID NO: 2405 - RNA, 15 nt, Synthetic Construct
  source 1..15: mol_type = other RNA
tgaggtagtagtttg

SEQ ID NO: 2406 - RNA, 22 nt, Synthetic Construct
  source 1..22: mol_type = other RNA
tgaggtagtagtttgtgatgtt

SEQ ID NO: 2407 - RNA, 30 nt, Synthetic Construct
  source 1..30: mol_type = other RNA
gcgggagtagttcaatggtagaaccttagc

SEQ ID NO: 2408 - RNA, 18 nt, Synthetic Construct
  source 1..18: mol_type = other RNA
ggctttgaagtaaggtcg

SEQ ID NO: 2409 - RNA, 22 nt, Synthetic Construct
  source 1..22: mol_type = other RNA
cggaatcgctagtaatcgcgga

SEQ ID NO: 2410 - RNA, 28 nt, Synthetic Construct
  source 1..28: mol_type = other RNA
ccccccaccgctaaatttgactggcttt

SEQ ID NO: 2411 - RNA, 32 nt, Synthetic Construct; identical to SEQ ID NO: 2052
  source 1..32: mol_type = other RNA

SEQ ID NO: 2412 - RNA, 31 nt, Synthetic Construct
  source 1..31: mol_type = other RNA
accggaggaaggtggggatgacgtcaggtca

SEQ ID NO: 2413 - RNA, 23 nt, Synthetic Construct
  source 1..23: mol_type = other RNA
tcctgtactgagctgcccagaga

SEQ ID NO: 2414 - RNA, 22 nt, Synthetic Construct
  source 1..22: mol_type = other RNA
tgaggtagtaatttgtgctgtt

SEQ ID NO: 2415 - RNA, 15 nt, Synthetic Construct
  source 1..15: mol_type = other RNA
ggtgaaagcggggga

SEQ ID NO: 2416 - RNA, 22 nt, Synthetic Construct
  source 1..22: mol_type = other RNA
tcagtagctcgaggaaaagaca

SEQ ID NO: 2417 - RNA, 26 nt, Synthetic Construct
  source 1..26: mol_type = other RNA
gatgcgtggtaggagagcgttctgta

SEQ ID NO: 2418 - RNA, 25 nt, Synthetic Construct
  source 1..25: mol_type = other RNA
cctcgcgcgattggagcggccgata

SEQ ID NO: 2419 - RNA, 33 nt, Synthetic Construct
  source 1..33: mol_type = other RNA
acctcccggggctacgcctgtctgagcgtcgct

SEQ ID NO: 2420 - RNA, 19 nt, Synthetic Construct
  source 1..19: mol_type = other RNA
ccagtaaacggcggccgta

SEQ ID NO: 2421 - RNA, 16 nt, Synthetic Construct
  source 1..16: mol_type = other RNA
gagctgtggatagggg

SEQ ID NO: 2422 - RNA, 27 nt, Synthetic Construct
  source 1..27: mol_type = other RNA
ccccccactgataaatttgactggctt

SEQ ID NO: 2423 - RNA, 31 nt, Synthetic Construct
  source 1..31: mol_type = other RNA
gccggcatagctcagttggtagagcagcgca

SEQ ID NO: 2424 - RNA, 19 nt, Synthetic Construct
  source 1..19: mol_type = other RNA
aggacagtgaaacgagtca

SEQ ID NO: 2425 - RNA, 27 nt, Synthetic Construct
  source 1..27: mol_type = other RNA
ccccccactgctaaatttgattggctt

SEQ ID NO: 2426 - RNA, 23 nt, Synthetic Construct
  source 1..23: mol_type = other RNA
tcctgtactgagctgccccgggt

SEQ ID NO: 2427 - RNA, 31 nt, Synthetic Construct
  source 1..31: mol_type = other RNA
gggatgttagctcagtcggtagagcagcgga

SEQ ID NO: 2428 - RNA, 21 nt, Synthetic Construct
  source 1..21: mol_type = other RNA
cggtcccaagggtatggctgt

SEQ ID NO: 2429 - RNA, 17 nt, Synthetic Construct
  source 1..17: mol_type = other RNA
catgcaagtcgaacggt

SEQ ID NO: 2430 - RNA, 22 nt, Synthetic Construct
  source 1..22: mol_type = other RNA
tgaggtagtggtttgtgctgtt

SEQ ID NO: 2431 - RNA, 31 nt, Synthetic Construct; identical to SEQ ID NO: 1881
  source 1..31: mol_type = other RNA

SEQ ID NO: 2432 - RNA, 24 nt, Synthetic Construct
  source 1..24: mol_type = other RNA
gcagctaataccgcatacgacctg

SEQ ID NO: 2433 - RNA, 16 nt, Synthetic Construct
  source 1..16: mol_type = other RNA
ctcagtagctcgagga

SEQ ID NO: 2434 - RNA, 21 nt, Synthetic Construct
  source 1..21: mol_type = other RNA
tgaggggcagagagcgaggct

SEQ ID NO: 2435 - RNA, 32 nt, Synthetic Construct
  source 1..32: mol_type = other RNA
gcgggtgtagctcagttggtagagcgcaacct

SEQ ID NO: 2436 - RNA, 22 nt, Synthetic Construct
  source 1..22: mol_type = other RNA
tgaggtagtaggttgtggggtt

SEQ ID NO: 2437 - RNA, 16 nt, Synthetic Construct
  source 1..16: mol_type = other RNA
gcaagaggtcagcggt

SEQ ID NO: 2438 - RNA, 22 nt, Synthetic Construct
  source 1..22: mol_type = other RNA
tgaggtagtagtatgtgctgtt

SEQ ID NO: 2439 - RNA, 24 nt, Synthetic Construct
  source 1..24: mol_type = other RNA
ctggccctctctgcccttccgttt

SEQ ID NO: 2440 - RNA, 16 nt, Synthetic Construct
  source 1..16: mol_type = other RNA
gtctacggccacacca

SEQ ID NO: 2441 - RNA, 41 nt, Synthetic Construct
  source 1..41: mol_type = other RNA
tcccctggacctgtactgacgctcatgcacgaaagcgtggg

SEQ ID NO: 2442 - RNA, 31 nt, Synthetic Construct
  source 1..31: mol_type = other RNA
gggctcttagctcagttggtagagcagcgga

SEQ ID NO: 2443 - RNA, 27 nt, Synthetic Construct
  source 1..27: mol_type = other RNA
atagtctttgttcgattccgttgagta

SEQ ID NO: 2444 - RNA, 36 nt, Synthetic Construct
  source 1..36: mol_type = other RNA
tgcaagaggtcagcggttcgatcccgcttacctcca

SEQ ID NO: 2445 - RNA, 18 nt, Synthetic Construct
  source 1..18: mol_type = other RNA
accggaggaaggtgggga

SEQ ID NO: 2446 - RNA, 21 nt, Synthetic Construct
  source 1..21: mol_type = other RNA
tgaggggcagagagcgggact

SEQ ID NO: 2447 - RNA, 37 nt, Synthetic Construct
  source 1..37: mol_type = other RNA
ttcctgttgtcgtgggttcgagtcccatcagccaccc

SEQ ID NO: 2448 - RNA, 16 nt, Synthetic Construct
  source 1..16: mol_type = other RNA
ggccgtcgtcagctcg

SEQ ID NO: 2449 - RNA, 21 nt, Synthetic Construct
  source 1..21: mol_type = other RNA
cgaggtagtagtttgtgctgt

SEQ ID NO: 2450 - RNA, 35 nt, Synthetic Construct
  source 1..35: mol_type = other RNA
tccgttggtcgaaggttcgaatccttcagggccca

SEQ ID NO: 2451 - RNA, 18 nt, Synthetic Construct
  source 1..18: mol_type = other RNA
ctaatgagactgccggtg

SEQ ID NO: 2452 - RNA, 35 nt, Synthetic Construct
  source 1..35: mol_type = other RNA
gctcttgactgaagtcccagtaaacggcggccgta

SEQ ID NO: 2453 - RNA, 21 nt, Synthetic Construct
  source 1..21: mol_type = other RNA
agcgtgcttgactgcgagact

SEQ ID NO: 2454 - RNA, 30 nt, Synthetic Construct; identical to SEQ ID NO: 1771
  source 1..30: mol_type = other RNA

SEQ ID NO: 2455 - RNA, 18 nt, Synthetic Construct
  source 1..18: mol_type = other RNA
ccaaggggtcgtgggttc

SEQ ID NO: 2456 - RNA, 36 nt, Synthetic Construct
  source 1..36: mol_type = other RNA
aggttgaggtcacgagttcgagcctcgttacccgct

SEQ ID NO: 2457 - RNA, 23 nt, Synthetic Construct
  source 1..23: mol_type = other RNA
ccccccactgctaaatttgactg

SEQ ID NO: 2458 - RNA, 22 nt, Synthetic Construct
  source 1..22: mol_type = other RNA
ctttgttcgattccgttgagta

SEQ ID NO: 2459 - RNA, 23 nt, Synthetic Construct
  source 1..23: mol_type = other RNA
caacggaatcccagaagcagctg

SEQ ID NO: 2460 - RNA, 21 nt, Synthetic Construct
  source 1..21: mol_type = other RNA
agaggtagtaggttgtatagt

SEQ ID NO: 2461 - RNA, 19 nt, Synthetic Construct
  source 1..19: mol_type = other RNA
gcgccgatgatagtgcgga

SEQ ID NO: 2462 - RNA, 22 nt, Synthetic Construct
  source 1..22: mol_type = other RNA
tgaggtagtaggtcgtatagtt

SEQ ID NO: 2463 - RNA, 23 nt, Synthetic Construct
  source 1..23: mol_type = other RNA
tgaggggaagagagcgagacttt

SEQ ID NO: 2464 - RNA, 18 nt, Synthetic Construct
  source 1..18: mol_type = other RNA
gctattgacgaccgtacc

SEQ ID NO: 2465 - RNA, 16 nt, Synthetic Construct
  source 1..16: mol_type = other RNA
aggtcatcgtcaggct

SEQ ID NO: 2466 - RNA, 23 nt, Synthetic Construct
  source 1..23: mol_type = other RNA
naaagtgctgttcgtgcaggtag

SEQ ID NO: 2467 - RNA, 32 nt, Synthetic Construct
  source 1..32: mol_type = other RNA
gtgggcgtttgaagtgaagtgatgttgcaagg

SEQ ID NO: 2468 - RNA, 21 nt, Synthetic Construct
  source 1..21: mol_type = other RNA
tgaagtagtaggttgtatagt

SEQ ID NO: 2469 - RNA, 36 nt, Synthetic Construct
  source 1..36: mol_type = other RNA
cgactgcgtgaagtcggaatcgctagtaatcgcgga

SEQ ID NO: 2470 - RNA, 21 nt, Synthetic Construct
  source 1..21: mol_type = other RNA
tgaggaagtaggttgtgtggt

SEQ ID NO: 2471 - RNA, 20 nt, Synthetic Construct
  source 1..20: mol_type = other RNA
cccagtaaacggcggccgta

SEQ ID NO: 2472 - RNA, 16 nt, Synthetic Construct
  source 1..16: mol_type = other RNA
gcgtagatatgcggag

SEQ ID NO: 2473 - RNA, 18 nt, Synthetic Construct
  source 1..18: mol_type = other RNA
tcccaagggtatggctgt

SEQ ID NO: 2474 - RNA, 22 nt, Synthetic Construct
  source 1..22: mol_type = other RNA
tgaggtagtagtttatgctgtt

SEQ ID NO: 2475 - RNA, 22 nt, Synthetic Construct
  source 1..22: mol_type = other RNA
tgaggtagaagtttgtgctgtt

SEQ ID NO: 2476 - RNA, 27 nt, Synthetic Construct
  source 1..27: mol_type = other RNA
ccccccactgctaaatctgactggctt

SEQ ID NO: 2477 - RNA, 17 nt, Synthetic Construct
  source 1..17: mol_type = other RNA
gggtctgtagctcagtc

SEQ ID NO: 2478 - RNA, 36 nt, Synthetic Construct
  source 1..36: mol_type = other RNA
tcctgttgtcgtgggttcgagtcccatcagccaccc

SEQ ID NO: 2479 - RNA, 33 nt, Synthetic Construct
  source 1..33: mol_type = other RNA
ggcgctttagctcagccggttagagcgacggaa

SEQ ID NO: 2480 - RNA, 22 nt, Synthetic Construct
  source 1..22: mol_type = other RNA
tcctgcactgagctgccccgag

SEQ ID NO: 2481 - RNA, 22 nt, Synthetic Construct
  source 1..22: mol_type = other RNA
cattgcacttgtcccggcctgt

SEQ ID NO: 2482 - RNA, 37 nt, Synthetic Construct
  source 1..37: mol_type = other RNA
tccggagagcttagatgaggcgtgataacgagtctgc

SEQ ID NO: 2483 - RNA, 26 nt, Synthetic Construct
  source 1..26: mol_type = other RNA
gacttaccaaacctatgcaaactccg

SEQ ID NO: 2484 - RNA, 23 nt, Synthetic Construct
  source 1..23: mol_type = other RNA
tcggaatcgctagtaatcgcgga

SEQ ID NO: 2485 - RNA, 18 nt, Synthetic Construct
  source 1..18: mol_type = other RNA
cctgtaccgatcaatagt

SEQ ID NO: 2486 - RNA, 21 nt, Synthetic Construct
  source 1..21: mol_type = other RNA
taaggtagtaggttgtatagt

SEQ ID NO: 2487 - RNA, 15 nt, Synthetic Construct
  source 1..15: mol_type = other RNA
gtcgacgtatagggt

SEQ ID NO: 2488 - RNA, 17 nt, Synthetic Construct
  source 1..17: mol_type = other RNA
cagtcaggatgttggct

SEQ ID NO: 2489 - RNA, 20 nt, Synthetic Construct
  source 1..20: mol_type = other RNA
acccttgtcattagttgcta

SEQ ID NO: 2490 - RNA, 16 nt, Synthetic Construct
  source 1..16: mol_type = other RNA
gtctacggccgtacca

SEQ ID NO: 2491 - RNA, 16 nt, Synthetic Construct
  source 1..16: mol_type = other RNA
gtctgcggccatacca

SEQ ID NO: 2492 - RNA, 38 nt, Synthetic Construct
  source 1..38: mol_type = other RNA
gcctttgtgactgcatggctagagtacggtagaggggg

SEQ ID NO: 2493 - RNA, 16 nt, Synthetic Construct
  source 1..16: mol_type = other RNA
agcaagtcgaacggta

SEQ ID NO: 2494 - RNA, 21 nt, Synthetic Construct
  source 1..21: mol_type = other RNA
tgaggtagtagcttgtgctgt

SEQ ID NO: 2495 - RNA, 22 nt, Synthetic Construct
  source 1..22: mol_type = other RNA
cggaggagttcgaaggtacgct

SEQ ID NO: 2496 - RNA, 17 nt, Synthetic Construct
  source 1..17: mol_type = other RNA
tcgctagtaatcgcgga

SEQ ID NO: 2497 - RNA, 22 nt, Synthetic Construct
  source 1..22: mol_type = other RNA
tgagatagtagtttgtgctgtt

SEQ ID NO: 2498 - RNA, 18 nt, Synthetic Construct
  source 1..18: mol_type = other RNA
cccaaaggtcgtcggttc

SEQ ID NO: 2499 - RNA, 15 nt, Synthetic Construct
  source 1..15: mol_type = other RNA
gtcaggatgttggct

SEQ ID NO: 2500 - RNA, 19 nt, Synthetic Construct
  source 1..19: mol_type = other RNA
cccttgtcattagttgcta

SEQ ID NO: 2501 - RNA, 17 nt, Synthetic Construct
  source 1..17: mol_type = other RNA
tggccgggacagagggc

SEQ ID NO: 2502 - RNA, 19 nt, Synthetic Construct
  source 1..19: mol_type = other RNA
aacagtcaggatgttggct

SEQ ID NO: 2503 - RNA, 21 nt, Synthetic Construct
  source 1..21: mol_type = other RNA
gggagtgtgacaatggtgttt

SEQ ID NO: 2504 - RNA, 16 nt, Synthetic Construct
  source 1..16: mol_type = other RNA
cccaaaggtcgtcggt

SEQ ID NO: 2505 - RNA, 35 nt, Synthetic Construct
  source 1..35: mol_type = other RNA
gcagggggtcgtcggttcgatcccgtcatcctcca

SEQ ID NO: 2506 - RNA, 36 nt, Synthetic Construct
  source 1..36: mol_type = other RNA
accaaggggtcgtgggttcgaatcctgccagccgca

SEQ ID NO: 2507 - RNA, 31 nt, Synthetic Construct
  source 1..31: mol_type = other RNA
gcgggtgtagctcagttggtagagcgcaacc

SEQ ID NO: 2508 - RNA, 22 nt, Synthetic Construct
  source 1..22: mol_type = other RNA
tcctgtactaagctgccccgag

SEQ ID NO: 2509 - RNA, 16 nt, Synthetic Construct
  source 1..16: mol_type = other RNA
tgcacgaaagcgtggg

SEQ ID NO: 2510 - RNA, 24 nt, Synthetic Construct
  source 1..24: mol_type = other RNA
tgtagacatccccgactggaagct

SEQ ID NO: 2511 - RNA, 20 nt, Synthetic Construct
  source 1..20: mol_type = other RNA
tcagtagctcgaggaaaaga

SEQ ID NO: 2512 - RNA, 23 nt, Synthetic Construct
  source 1..23: mol_type = other RNA
tgaggaagtaggttgtgtggttt

SEQ ID NO: 2513 - RNA, 22 nt, Synthetic Construct
  source 1..22: mol_type = other RNA
tcctgtactgagctgccccgtg

SEQ ID NO: 2514 - RNA, 35 nt, Synthetic Construct
  source 1..35: mol_type = other RNA
gccgggggtcgcgggttcgagccccgtccactccg

SEQ ID NO: 2515 - RNA, 23 nt, Synthetic Construct
  source 1..23: mol_type = other RNA
caaagagctgttcgtgcaggtag

SEQ ID NO: 2516 - RNA, 24 nt, Synthetic Construct
  source 1..24: mol_type = other RNA
tgaggtagtaggttgtgtggttga

SEQ ID NO: 2517 - RNA, 15 nt, Synthetic Construct
  source 1..15: mol_type = other RNA
cggcccagactccta

SEQ ID NO: 2518 - RNA, 35 nt, Synthetic Construct
  source 1..35: mol_type = other RNA
tgcggaggtcgggagttcgatcctcctcctctcca

SEQ ID NO: 2519 - RNA, 18 nt, Synthetic Construct
  source 1..18: mol_type = other RNA
catgcaagtcgaacggta

SEQ ID NO: 2520 - RNA, 36 nt, Synthetic Construct
  source 1..36: mol_type = other RNA
cggagtggacgcacctctggtgtatcggttgtcacg

SEQ ID NO: 2521 - RNA, 16 nt, Synthetic Construct
  source 1..16: mol_type = other RNA
gactacggccatacca

SEQ ID NO: 2522 - RNA, 16 nt, Synthetic Construct
  source 1..16: mol_type = other RNA
tgcaagtcgaacggta

SEQ ID NO: 2523 - RNA, 16 nt, Synthetic Construct
  source 1..16: mol_type = other RNA
tcgtgacgatagtgca

SEQ ID NO: 2524 - RNA, 16 nt, Synthetic Construct
  source 1..16: mol_type = other RNA
agttgaccgcctgggg

SEQ ID NO: 2525 - RNA, 22 nt, Synthetic Construct
  source 1..22: mol_type = other RNA
tgtggtagtagtttgtgctgtt

SEQ ID NO: 2526 - RNA, 18 nt, Synthetic Construct
  source 1..18: mol_type = other RNA
gcgaaattccttgtcggg

SEQ ID NO: 2527 - RNA, 22 nt, Synthetic Construct
  source 1..22: mol_type = other RNA
tgaggtagtagattgtgtggtt

SEQ ID NO: 2528 - RNA, 17 nt, Synthetic Construct
  source 1..17: mol_type = other RNA
agtccggatcgtagtct

SEQ ID NO: 2529 - RNA, 34 nt, Synthetic Construct
  source 1..34: mol_type = other RNA
gcgggggtcgctggttcgaatccagccagaccca

SEQ ID NO: 2530 - RNA, 19 nt, Synthetic Construct
  source 1..19: mol_type = other RNA
cagcactctgcaaagacga

SEQ ID NO: 2531 - RNA, 27 nt, Synthetic Construct
  source 1..27: mol_type = other RNA
ccccccactgctaaattagactggctt

SEQ ID NO: 2532 - RNA, 22 nt, Synthetic Construct
  source 1..22: mol_type = other RNA
tgaggaagtagtttgtgctgtt

SEQ ID NO: 2533 - RNA, 23 nt, Synthetic Construct
  source 1..23: mol_type = other RNA
gtctttgttcgattccgttgagt

SEQ ID NO: 2534 - RNA, 19 nt, Synthetic Construct
  source 1..19: mol_type = other RNA
tctaatgagactgccggtg

SEQ ID NO: 2535 - RNA, 19 nt, Synthetic Construct
  source 1..19: mol_type = other RNA
acatgcaagtcgaacggta

SEQ ID NO: 2536 - RNA, 22 nt, Synthetic Construct
  source 1..22: mol_type = other RNA
ccggtcccaagggtatggctgt

SEQ ID NO: 2537 - RNA, 22 nt, Synthetic Construct
  source 1..22: mol_type = other RNA
tgtcaactggttgttgggaggg

SEQ ID NO: 2538 - RNA, 19 nt, Synthetic Construct
  source 1..19: mol_type = other RNA
gctattgacgaccgtaccg

SEQ ID NO: 2539 - RNA, 15 nt, Synthetic Construct
  source 1..15: mol_type = other RNA
tagagtagggcggga

SEQ ID NO: 2540 - RNA, 15 nt, Synthetic Construct
  source 1..15: mol_type = other RNA
ccagaaacccggtcg

SEQ ID NO: 2541 - RNA, 22 nt, Synthetic Construct
  source 1..22: mol_type = other RNA
tattacacttgtcccggcctgt

SEQ ID NO: 2542 - RNA, 16 nt, Synthetic Construct
  source 1..16: mol_type = other RNA
tccgaaccgactagtg

SEQ ID NO: 2543 - RNA, 15 nt, Synthetic Construct
  source 1..15: mol_type = other RNA
aaattccttgtcggg

SEQ ID NO: 2544 - RNA, 18 nt, Synthetic Construct
  source 1..18: mol_type = other RNA
ggccgtcgtcagctcgtg

SEQ ID NO: 2545 - RNA, 15 nt, Synthetic Construct
  source 1..15: mol_type = other RNA
gtagctcgttgggct

SEQ ID NO: 2546 - RNA, 36 nt, Synthetic Construct
  source 1..36: mol_type = other RNA
cgccgggggtcgcgggttcgagccccgtccactccg

SEQ ID NO: 2547 - RNA, 17 nt, Synthetic Construct
  source 1..17: mol_type = other RNA
accaaggggtcgtgggt

SEQ ID NO: 2548 - RNA, 35 nt, Synthetic Construct
  source 1..35: mol_type = other RNA
tgcgaaggtcgggggttcgactcctcttgccggca

SEQ ID NO: 2549 - RNA, 22 nt, Synthetic Construct
  source 1..22: mol_type = other RNA
tcactgatcgagtcgtcctgcg

SEQ ID NO: 2550 - RNA, 17 nt, Synthetic Construct
  source 1..17: mol_type = other RNA
cccctggacctgtactg

SEQ ID NO: 2551 - RNA, 20 nt, Synthetic Construct
  source 1..20: mol_type = other RNA
cacatgcaagtcgaacggta

SEQ ID NO: 2552 - RNA, 20 nt, Synthetic Construct
  source 1..20: mol_type = other RNA
tcctgtaccgatcaatagtg

SEQ ID NO: 2553 - RNA, 34 nt, Synthetic Construct
  source 1..34: mol_type = other RNA
cgtagaggccggaggttcgaatcctctcaccccg

SEQ ID NO: 2554 - RNA, 22 nt, Synthetic Construct
  source 1..22: mol_type = other RNA
tgaggtaataggttgtgtggtt

SEQ ID NO: 2555 - RNA, 21 nt, Synthetic Construct
  source 1..21: mol_type = other RNA
gtagcgaaattccttgtcggg

SEQ ID NO: 2556 - RNA, 33 nt, Synthetic Construct
  source 1..33: mol_type = other RNA
cgggggtcgctggttcgaatccagccagaccca

SEQ ID NO: 2557 - RNA, 23 nt, Synthetic Construct
  source 1..23: mol_type = other RNA
atatcggaacgtgcccagtcgtg

SEQ ID NO: 2558 - RNA, 18 nt, Synthetic Construct
  source 1..18: mol_type = other RNA
tctaatgagactgccggt

SEQ ID NO: 2559 - RNA, 34 nt, Synthetic Construct; identical to SEQ ID NO: 2364
  source 1..34: mol_type = other RNA

SEQ ID NO: 2560 - RNA, 23 nt, Synthetic Construct
  source 1..23: mol_type = other RNA
tcctgtacagagctgccccgaga

SEQ ID NO: 2561 - RNA, 17 nt, Synthetic Construct
  source 1..17: mol_type = other RNA
acagtcaggatgttggc

SEQ ID NO: 2562 - RNA, 16 nt, Synthetic Construct
  source 1..16: mol_type = other RNA
ccatgccgcgtgcggg

SEQ ID NO: 2563 - RNA, 16 nt, Synthetic Construct
  source 1..16: mol_type = other RNA
gtccggatcgtagtct

SEQ ID NO: 2564 - RNA, 16 nt, Synthetic Construct
  source 1..16: mol_type = other RNA
gaaattccttgtcggg

SEQ ID NO: 2565 - RNA, 24 nt, Synthetic Construct
  source 1..24: mol_type = other RNA
tcctgtactgagctgccccgagat

SEQ ID NO: 2566 - RNA, 27 nt, Synthetic Construct
  source 1..27: mol_type = other RNA
cccaccactgctaaatttgactggctt

SEQ ID NO: 2567 - RNA, 35 nt, Synthetic Construct
  source 1..35: mol_type = other RNA
ggttgaggtcacgagttcgagcctcgttacccgct

SEQ ID NO: 2568 - RNA, 18 nt, Synthetic Construct
  source 1..18: mol_type = other RNA
gggagtatggtcgcaagg

SEQ ID NO: 2569 - RNA, 22 nt, Synthetic Construct
  source 1..22: mol_type = other RNA
tcctgtactgagctgtcccgag

SEQ ID NO: 2570 - RNA, 18 nt, Synthetic Construct
  source 1..18: mol_type = other RNA
acagtcaggatgttggct

SEQ ID NO: 2571 - RNA, 16 nt, Synthetic Construct
  source 1..16: mol_type = other RNA
ggtgggggtcgttggt

SEQ ID NO: 2572 - RNA, 17 nt, Synthetic Construct
  source 1..17: mol_type = other RNA
accggaggaaggtgggg

SEQ ID NO: 2573 - RNA, 17 nt, Synthetic Construct
  source 1..17: mol_type = other RNA
cagtagctcgaggaaaa

SEQ ID NO: 2574 - RNA, 16 nt, Synthetic Construct
  source 1..16: mol_type = other RNA
gcggctgtagctcagt

SEQ ID NO: 2575 - RNA, 16 nt, Synthetic Construct
  source 1..16: mol_type = other RNA
gtctgcggccatacca

SEQ ID NO: 2576 - RNA, 17 nt, Synthetic Construct
  source 1..17: mol_type = other RNA
ccaaggggtcgtgggtt

SEQ ID NO: 2577 - RNA, 18 nt, Synthetic Construct
  source 1..18: mol_type = other RNA
gaagttgaccgcctgggg

SEQ ID NO: 2578 - RNA, 30 nt, Synthetic Construct
  source 1..30: mol_type = other RNA
cctcgatagctcagtcggtagagcgccgga

SEQ ID NO: 2579 - RNA, 21 nt, Synthetic Construct
  source 1..21: mol_type = other RNA
ggaatcgctagtaatcgcgga

SEQ ID NO: 2580 - RNA, 22 nt, Synthetic Construct
  source 1..22: mol_type = other RNA
tgaggtagtagactgtatagtt

SEQ ID NO: 2581 - RNA, 23 nt, Synthetic Construct
  source 1..23: mol_type = other RNA
tcctgaactgagctgccccgagt

SEQ ID NO: 2582 - RNA, 32 nt, Synthetic Construct
  source 1..32: mol_type = other RNA
cggggtgtagcttagcctggtagagcgctacg

SEQ ID NO: 2583 - RNA, 27 nt, Synthetic Construct
  source 1..27: mol_type = other RNA
ccccccactgctaaatttgactggctc

SEQ ID NO: 2584 - RNA, 20 nt, Synthetic Construct
  source 1..20: mol_type = other RNA
tcctgtctgaatatgggggg

SEQ ID NO: 2585 - RNA, 21 nt, Synthetic Construct
  source 1..21: mol_type = other RNA
tggagagtgacaatggtgttt

SEQ ID NO: 2586 - RNA, 27 nt, Synthetic Construct
  source 1..27: mol_type = other RNA
ccccccactgctaaatttgactggctc

SEQ ID NO: 2587 - RNA, 23 nt, Synthetic Construct
  source 1..23: mol_type = other RNA
tccagtactgagctgccccgaga

SEQ ID NO: 2588 - RNA, 31 nt, Synthetic Construct; identical to SEQ ID NO: 2295
  source 1..31: mol_type = other RNA

SEQ ID NO: 2589 - RNA, 29 nt, Synthetic Construct
  source 1..29: mol_type = other RNA
tgaaggtgggttgtgaagcctgctggagg

SEQ ID NO: 2590 - RNA, 24 nt, Synthetic Construct
  source 1..24: mol_type = other RNA
tgtagacatccccgactggaagct

SEQ ID NO: 2591 - RNA, 22 nt, Synthetic Construct
  source 1..22: mol_type = other RNA
tcctatactgagctgccccgag

SEQ ID NO: 2592 - RNA, 21 nt, Synthetic Construct
  source 1..21: mol_type = other RNA
tgaggggcggagagcgagact

SEQ ID NO: 2593 - RNA, 33 nt, Synthetic Construct; identical to SEQ ID NO: 2266
  source 1..33: mol_type = other RNA

SEQ ID NO: 2594 - RNA, 30 nt, Synthetic Construct; identical to SEQ ID NO: 1958
  source 1..30: mol_type = other RNA

SEQ ID NO: 2595 - RNA, 33 nt, Synthetic Construct; identical to SEQ ID NO: 2209
  source 1..33: mol_type = other RNA

SEQ ID NO: 2596 - RNA, 20 nt, Synthetic Construct
  source 1..20: mol_type = other RNA
tgaggaagtaggttgtatag

SEQ ID NO: 2597 - RNA, 20 nt, Synthetic Construct
  source 1..20: mol_type = other RNA
tgaggtagaaggttgtatag

SEQ ID NO: 2598 - RNA, 34 nt, Synthetic Construct
  source 1..34: mol_type = other RNA
ttcctcccggggctacgcctgtctgagcgtcgct

SEQ ID NO: 2599 - RNA, 17 nt, Synthetic Construct
  source 1..17: mol_type = other RNA
tggccgtcgtcagctcg

SEQ ID NO: 2600 - RNA, 20 nt, Synthetic Construct
  source 1..20: mol_type = other RNA
agaggtagtaggttgtatag

SEQ ID NO: 2601 - RNA, 15 nt, Synthetic Construct
  source 1..15: mol_type = other RNA
ggccgtcgtcagctc

SEQ ID NO: 2602 - RNA, 22 nt, Synthetic Construct
  source 1..22: mol_type = other RNA
tatcggaacgtgcccagtcgtg

SEQ ID NO: 2603 - RNA, 16 nt, Synthetic Construct
  source 1..16: mol_type = other RNA
atctacggccatacca

SEQ ID NO: 2604 - RNA, 17 nt, Synthetic Construct
  source 1..17: mol_type = other RNA
tcccctggacctgtact

SEQ ID NO: 2605 - RNA, 16 nt, Synthetic Construct
  source 1..16: mol_type = other RNA
tcgtgacgatagtgca

SEQ ID NO: 2606 - RNA, 18 nt, Synthetic Construct
  source 1..18: mol_type = other RNA
tgcgtagatatgcggagg

SEQ ID NO: 2607 - RNA, 37 nt, Synthetic Construct
  source 1..37: mol_type = other RNA
tatcggaacgtgcccagtcgtgggggataactgctcg

SEQ ID NO: 2608 - RNA, 20 nt, Synthetic Construct
  source 1..20: mol_type = other RNA
tagcgaaattccttgtcggg

SEQ ID NO: 2609 - RNA, 21 nt, Synthetic Construct
  source 1..21: mol_type = other RNA
ctttgttcgattccgttgagt

SEQ ID NO: 2610 - RNA, 16 nt, Synthetic Construct
  source 1..16: mol_type = other RNA
agcaagtcgaacggta

SEQ ID NO: 2611 - RNA, 23 nt, Synthetic Construct
  source 1..23: mol_type = other RNA
tggtaatacggcgtacttagtgt

SEQ ID NO: 2612 - RNA, 22 nt, Synthetic Construct
  source 1..22: mol_type = other RNA
gctcacggaaagagaatgaagc

SEQ ID NO: 2613 - RNA, 16 nt, Synthetic Construct
  source 1..16: mol_type = other RNA
gtctacggccatgcca

SEQ ID NO: 2614 - RNA, 15 nt, Synthetic Construct
  source 1..15: mol_type = other RNA
gcaagtcgaacggta

SEQ ID NO: 2615 - RNA, 35 nt, Synthetic Construct
  source 1..35: mol_type = other RNA
ggagtggacgcacctctggtgtatcggttgtcacg

SEQ ID NO: 2616 - RNA, 35 nt, Synthetic Construct; identical to SEQ ID NO: 2354
  source 1..35: mol_type = other RNA

SEQ ID NO: 2617 - RNA, 20 nt, Synthetic Construct
  source 1..20: mol_type = other RNA
tgaggtagaaggttgtatag

SEQ ID NO: 2618 - RNA, 27 nt, Synthetic Construct
  source 1..27: mol_type = other RNA
ccccccactgctaaatttgactggctg

SEQ ID NO: 2619 - RNA, 33 nt, Synthetic Construct; identical to SEQ ID NO: 2126
  source 1..33: mol_type = other RNA

SEQ ID NO: 2620 - RNA, 17 nt, Synthetic Construct
  source 1..17: mol_type = other RNA
aagttgaccgcctgggg

SEQ ID NO: 2621 - RNA, 27 nt, Synthetic Construct
  source 1..27: mol_type = other RNA
ccccccactgataaatttgactggctt

SEQ ID NO: 2622 - RNA, 16 nt, Synthetic Construct
  source 1..16: mol_type = other RNA
gcctacggccatacca

SEQ ID NO: 2623 - RNA, 24 nt, Synthetic Construct
  source 1..24: mol_type = other RNA
ccccccactgctaaatttgactgg

SEQ ID NO: 2624 - RNA, 16 nt, Synthetic Construct
  source 1..16: mol_type = other RNA
ggcgggggtcgctggt

SEQ ID NO: 2625 - RNA, 17 nt, Synthetic Construct
  source 1..17: mol_type = other RNA
cagagacgagtcgacca

SEQ ID NO: 2626 - RNA, 22 nt, Synthetic Construct
  source 1..22: mol_type = other RNA
tattgcacttgtcctggcctgt

SEQ ID NO: 2627 - RNA, 19 nt, Synthetic Construct
  source 1..19: mol_type = other RNA
tcctgtaccgatcaatagt

SEQ ID NO: 2628 - RNA, 23 nt, Synthetic Construct
  source 1..23: mol_type = other RNA
tgaggtagtaggttgtatggttt

SEQ ID NO: 2629 - RNA, 17 nt, Synthetic Construct
  source 1..17: mol_type = other RNA
cctcgcgcgattggagc

SEQ ID NO: 2630 - RNA, 18 nt, Synthetic Construct
  source 1..18: mol_type = other RNA
ggtgcaagcgttaatcgg

SEQ ID NO: 2631 - RNA, 23 nt, Synthetic Construct
  source 1..23: mol_type = other RNA
cccccactgctaaatttgactgg

SEQ ID NO: 2632 - RNA, 19 nt, Synthetic Construct
  source 1..19: mol_type = other RNA
cacatgcaagtcgaacggt

SEQ ID NO: 2633 - RNA, 22 nt, Synthetic Construct
  source 1..22: mol_type = other RNA
tgaggaagtaggttgtatagtt

SEQ ID NO: 2634 - RNA, 15 nt, Synthetic Construct
  source 1..15: mol_type = other RNA
acctgcatcgagggt

SEQ ID NO: 2635 - RNA, 35 nt, Synthetic Construct; identical to SEQ ID NO: 2397
  source 1..35: mol_type = other RNA

SEQ ID NO: 2636 - RNA, 16 nt, Synthetic Construct
  source 1..16: mol_type = other RNA
gtctacggccgtacca

SEQ ID NO: 2637 - RNA, 19 nt, Synthetic Construct
  source 1..19: mol_type = other RNA
cctgtaccgatcaatagtg

SEQ ID NO: 2638 - RNA, 33 nt, Synthetic Construct
  source 1..33: mol_type = other RNA
cccgtaccgagggttcgaatccctccctctccg

SEQ ID NO: 2639 - RNA, 16 nt, Synthetic Construct
  source 1..16: mol_type = other RNA
atgcaagtcgaacggt

SEQ ID NO: 2640 - RNA, 31 nt, Synthetic Construct; identical to SEQ ID NO: 2278
  source 1..31: mol_type = other RNA

SEQ ID NO: 2641 - RNA, 35 nt, Synthetic Construct; identical to SEQ ID NO: 2069
  source 1..35: mol_type = other RNA

SEQ ID NO: 2642 - RNA, 24 nt, Synthetic Construct
  source 1..24: mol_type = other RNA
gtctttgttcgattccgttgagta

SEQ ID NO: 2643 - RNA, 24 nt, Synthetic Construct
  source 1..24: mol_type = other RNA
gatgaggcgtgataacgagtctgc

SEQ ID NO: 2644 - RNA, 18 nt, Synthetic Construct
  source 1..18: mol_type = other RNA
cccttgtcattagttgct

SEQ ID NO: 2645 - RNA, 16 nt, Synthetic Construct
  source 1..16: mol_type = other RNA
gcctacggccatacca

SEQ ID NO: 2646 - RNA, 15 nt, Synthetic Construct
  source 1..15: mol_type = other RNA
gggagtttggctggg

SEQ ID NO: 2647 - RNA, 22 nt, Synthetic Construct
  source 1..22: mol_type = other RNA
tcttgtactgagctgccccgag

SEQ ID NO: 2648 - RNA, 16 nt, Synthetic Construct
  source 1..16: mol_type = other RNA
gatctgtagctggtct

SEQ ID NO: 2649 - RNA, 27 nt, Synthetic Construct
  source 1..27: mol_type = other RNA
ccccccactgctgaatttgactggctt

SEQ ID NO: 2650 - RNA, 21 nt, Synthetic Construct
  source 1..21: mol_type = other RNA
acacatgcaagtcgaacggta

SEQ ID NO: 2651 - RNA, 22 nt, Synthetic Construct
  source 1..22: mol_type = other RNA
tgaagtagtagtttgtgctgtt

SEQ ID NO: 2652 - RNA, 23 nt, Synthetic Construct
  source 1..23: mol_type = other RNA
tcctgtactgagctgccacgaga

SEQ ID NO: 2653 - RNA, 22 nt, Synthetic Construct
  source 1..22: mol_type = other RNA
tgaggtagtagattgtacagtt

SEQ ID NO: 2654 - RNA, 16 nt, Synthetic Construct
  source 1..16: mol_type = other RNA
gcggtggatgatgtgg

SEQ ID NO: 2655 - RNA, 16 nt, Synthetic Construct
  source 1..16: mol_type = other RNA
ccaaggggtcgtgggt

SEQ ID NO: 2656 - RNA, 15 nt, Synthetic Construct
  source 1..15: mol_type = other RNA
gcagagcgtcggtct

SEQ ID NO: 2657 - RNA, 15 nt, Synthetic Construct
  source 1..15: mol_type = other RNA
ccgcttttgtcaggg

SEQ ID NO: 2658 - RNA, 16 nt, Synthetic Construct
  source 1..16: mol_type = other RNA
tgcacgaaagcgtggg

SEQ ID NO: 2659 - RNA, 18 nt, Synthetic Construct
  source 1..18: mol_type = other RNA
cctgtaccgatcaatagt

SEQ ID NO: 2660 - RNA, 36 nt, Synthetic Construct
  source 1..36: mol_type = other RNA
atcggaacgtgcccagtcgtgggggataactgctcg

SEQ ID NO: 2661 - RNA, 15 nt, Synthetic Construct
  source 1..15: mol_type = other RNA
gcaagtcgagcggta

SEQ ID NO: 2662 - RNA, 23 nt, Synthetic Construct
  source 1..23: mol_type = other RNA
tggtaatacgacatacttagtgt

SEQ ID NO: 2663 - RNA, 35 nt, Synthetic Construct; identical to SEQ ID NO: 2450
  source 1..35: mol_type = other RNA

SEQ ID NO: 2664 - RNA, 20 nt, Synthetic Construct
  source 1..20: mol_type = other RNA
tccccggcacctccaccatt

SEQ ID NO: 2665 - RNA, 27 nt, Synthetic Construct
  source 1..27: mol_type = other RNA
acccccactgctaaatttgactggctt

SEQ ID NO: 2666 - RNA, 29 nt, Synthetic Construct
  source 1..29: mol_type = other RNA
ttacaggggttcgaatcccctaggggacg

SEQ ID NO: 2667 - RNA, 23 nt, Synthetic Construct
  source 1..23: mol_type = other RNA
ctcactgatcgagtcgtcctgcg

SEQ ID NO: 2668 - RNA, 27 nt, Synthetic Construct
  source 1..27: mol_type = other RNA
gttggttcaagcgtgtagtcgtgctct

SEQ ID NO: 2669 - RNA, 20 nt, Synthetic Construct
  source 1..20: mol_type = other RNA
caatggccgggacagagggc

SEQ ID NO: 2670 - RNA, 16 nt, Synthetic Construct
  source 1..16: mol_type = other RNA
gtctacggccataccg

SEQ ID NO: 2671 - RNA, 23 nt, Synthetic Construct
  source 1..23: mol_type = other RNA
tcctgaactgagctgccccgaga

SEQ ID NO: 2672 - RNA, 28 nt, Synthetic Construct
  source 1..28: mol_type = other RNA
tgttggttcaagcgtgtagtcgtgctct

SEQ ID NO: 2673 - RNA, 16 nt, Synthetic Construct
  source 1..16: mol_type = other RNA
agtcaggatgttggct

SEQ ID NO: 2674 - RNA, 23 nt, Synthetic Construct
  source 1..23: mol_type = other RNA
cctcgcgcgattggagcggccga

SEQ ID NO: 2675 - RNA, 15 nt, Synthetic Construct
  source 1..15: mol_type = other RNA
ttccgaaagtagtgg

SEQ ID NO: 2676 - RNA, 22 nt, Synthetic Construct
  source 1..22: mol_type = other RNA
tactgcacttgtcccggcctgt

SEQ ID NO: 2677 - RNA, 18 nt, Synthetic Construct
  source 1..18: mol_type = other RNA
cagcactctgcaaagacg

SEQ ID NO: 2678 - RNA, 15 nt, Synthetic Construct
  source 1..15: mol_type = other RNA
cccagaaacccggtc

SEQ ID NO: 2679 - RNA, 22 nt, Synthetic Construct
  source 1..22: mol_type = other RNA
taaggtagtagtttgtgctgtt

SEQ ID NO: 2680 - RNA, 17 nt, Synthetic Construct
  source 1..17: mol_type = other RNA
ccagtaaacggcggccg

SEQ ID NO: 2681 - RNA, 15 nt, Synthetic Construct
  source 1..15: mol_type = other RNA
gtccggatcgtagtc

SEQ ID NO: 2682 - RNA, 16 nt, Synthetic Construct
  source 1..16: mol_type = other RNA
gtccacggccatacca

SEQ ID NO: 2683 - RNA, 21 nt, Synthetic Construct
  source 1..21: mol_type = other RNA
gctattgacgaccgtaccgca

SEQ ID NO: 2684 - RNA, 40 nt, Synthetic Construct
  source 1..40: mol_type = other RNA
agtaaggtcagctaaataagctatcgggcccataccccga

SEQ ID NO: 2685 - RNA, 23 nt, Synthetic Construct
  source 1..23: mol_type = other RNA
tgaggtagtaggttgtatagttc

SEQ ID NO: 2686 - RNA, 23 nt, Synthetic Construct
  source 1..23: mol_type = other RNA
caacggaatcccaaaagcagctc

SEQ ID NO: 2687 - RNA, 24 nt, Synthetic Construct
  source 1..24: mol_type = other RNA
tgaggtagtaggttgtgtggtttg

SEQ ID NO: 2688 - RNA, 21 nt, Synthetic Construct
  source 1..21: mol_type = other RNA
tgggatgagggattgaagtgg

SEQ ID NO: 2689 - RNA, 23 nt, Synthetic Construct
  source 1..23: mol_type = other RNA
taacactgtctggtaacgatgtt

SEQ ID NO: 2690 - RNA, 20 nt, Synthetic Construct
  source 1..20: mol_type = other RNA
tgagaactgaattccatggg

SEQ ID NO: 2691 - RNA, 24 nt, Synthetic Construct
  source 1..24: mol_type = other RNA
tctcacacagaaatcgcacccgcc

SEQ ID NO: 2692 - RNA, 22 nt, Synthetic Construct
  source 1..22: mol_type = other RNA
agaggtagtaggttgcatagta

SEQ ID NO: 2693 - RNA, 23 nt, Synthetic Construct
  source 1..23: mol_type = other RNA
caaagtgctgtttgtgcaggtag

SEQ ID NO: 2694 - RNA, 22 nt, Synthetic Construct
  source 1..22: mol_type = other RNA
tcccgtactgagctgccccgag

SEQ ID NO: 2695 - RNA, 27 nt, Synthetic Construct
  source 1..27: mol_type = other RNA
ccccccactgctaaacttgactggctt

SEQ ID NO: 2696 - RNA, 22 nt, Synthetic Construct
  source 1..22: mol_type = other RNA
tgaggtaggaggttgtatagta

SEQ ID NO: 2697 - RNA, 20 nt, Synthetic Construct
  source 1..20: mol_type = other RNA
tacagtactgtgataactga

SEQ ID NO: 2698 - RNA, 27 nt, Synthetic Construct
  source 1..27: mol_type = other RNA
ccccccactgctaaatttggctggctt

SEQ ID NO: 2699 - RNA, 30 nt, Synthetic Construct
  source 1..30: mol_type = other RNA
tcccctgtggtctagtggttaggattcggc

SEQ ID NO: 2700 - RNA, 22 nt, Synthetic Construct
  source 1..22: mol_type = other RNA
tattgcgcttgtcccggcctgt

SEQ ID NO: 2701 - RNA, 22 nt, Synthetic Construct
  source 1..22: mol_type = other RNA
tcctgtacagagctgccccgag

SEQ ID NO: 2702 - RNA, 27 nt, Synthetic Construct
  source 1..27: mol_type = other RNA
ccccccactgctaaaattgactggctt

SEQ ID NO: 2703 - RNA, 22 nt, Synthetic Construct
  source 1..22: mol_type = other RNA
tattgcactagtcccggcctgt

SEQ ID NO: 2704 - RNA, 22 nt, Synthetic Construct
  source 1..22: mol_type = other RNA
tgaggtagaaggttgtatagtt

SEQ ID NO: 2705 - RNA, 24 nt, Synthetic Construct
  source 1..24: mol_type = other RNA
ttcaagtaatccaggataggctct

SEQ ID NO: 2706 - RNA, 29 nt, Synthetic Construct
  source 1..29: mol_type = other RNA
gcattgtggttcagtggtagaattctcgc

SEQ ID NO: 2707 - RNA, 23 nt, Synthetic Construct
  source 1..23: mol_type = other RNA
tgaggggcggagagcgagacttt

SEQ ID NO: 2708 - RNA, 22 nt, Synthetic Construct
  source 1..22: mol_type = other RNA
tagcagcacgtaaatataggcg

SEQ ID NO: 2709 - RNA, 24 nt, Synthetic Construct
  source 1..24: mol_type = other RNA
tctcacacagaaatcgcacccgcc

SEQ ID NO: 2710 - RNA, 25 nt, Synthetic Construct
  source 1..25: mol_type = other RNA
ttctcactactgcacttgactagtc

SEQ ID NO: 2711 - RNA, 28 nt, Synthetic Construct
  source 1..28: mol_type = other RNA
actcccactgcttcacttgactagccta

SEQ ID NO: 2712 - RNA, 22 nt, Synthetic Construct
  source 1..22: mol_type = other RNA
tagcagcacgtaaatactggcg

SEQ ID NO: 2713 - RNA, 22 nt, Synthetic Construct
  source 1..22: mol_type = other RNA
tgaggtagtaggttgtgtggaa

SEQ ID NO: 2714 - RNA, 20 nt, Synthetic Construct
  source 1..20: mol_type = other RNA
tgaggtagtaggttgtacag

SEQ ID NO: 2715 - RNA, 21 nt, Synthetic Construct
  source 1..21: mol_type = other RNA
tcctgtactgagctgccacga

SEQ ID NO: 2716 - RNA, 22 nt, Synthetic Construct
  source 1..22: mol_type = other RNA
tcctgtactgagctgctccgag

SEQ ID NO: 2717 - RNA, 35 nt, Synthetic Construct
  source 1..35: mol_type = other RNA
tccattgtcgtctagtccggttaggatacctggct

SEQ ID NO: 2718 - RNA, 22 nt, Synthetic Construct
  source 1..22: mol_type = other RNA
tcgtttcccggccaatgcacca

SEQ ID NO: 2719 - RNA, 22 nt, Synthetic Construct
  source 1..22: mol_type = other RNA
tagcagcacgtaaatataggcg

SEQ ID NO: 2720 - RNA, 18 nt, Synthetic Construct
  source 1..18: mol_type = other RNA
atcccggacgagccccca

SEQ ID NO: 2721 - RNA, 32 nt, Synthetic Construct; identical to SEQ ID NO: 740
  source 1..32: mol_type = other RNA

SEQ ID NO: 2722 - RNA, 27 nt, Synthetic Construct
  source 1..27: mol_type = other RNA
ccccccactgctaaatgtgactggctt

SEQ ID NO: 2723 - RNA, 26 nt, Synthetic Construct
  source 1..26: mol_type = other RNA
ccccccactgctaaatttgactggaa

SEQ ID NO: 2724 - RNA, 21 nt, Synthetic Construct
  source 1..21: mol_type = other RNA
tccagtactgagctgccccga

SEQ ID NO: 2725 - RNA, 28 nt, Synthetic Construct
  source 1..28: mol_type = other RNA
actcccactgcttcacttgactagcctt

SEQ ID NO: 2726 - RNA, 23 nt, Synthetic Construct
  source 1..23: mol_type = other RNA
taaagtgcttatagtgcaggtag

SEQ ID NO: 2727 - RNA, 23 nt, Synthetic Construct
  source 1..23: mol_type = other RNA
taaagtgcttatagtgcaggtag

SEQ ID NO: 2728 - RNA, 15 nt, Synthetic Construct
  source 1..15: mol_type = other RNA
tcctgacggccatag

SEQ ID NO: 2729 - RNA, 15 nt, Synthetic Construct
  source 1..15: mol_type = other RNA
tcctgacggccatag

SEQ ID NO: 2730 - RNA, 30 nt, Synthetic Construct; identical to SEQ ID NO: 1194
  source 1..30: mol_type = other RNA

SEQ ID NO: 2731 - RNA, 30 nt, Synthetic Construct; identical to SEQ ID NO: 1194
  source 1..30: mol_type = other RNA

SEQ ID NO: 2732 - RNA, 26 nt, Synthetic Construct
  source 1..26: mol_type = other RNA
gatttccccttggggttgtaggacca

SEQ ID NO: 2733 - RNA, 26 nt, Synthetic Construct
  source 1..26: mol_type = other RNA
gatttccccttggggttgtaggacca

SEQ ID NO: 2734 - RNA, 17 nt, Synthetic Construct
  source 1..17: mol_type = other RNA
gtgttcggaagattttc

SEQ ID NO: 2735 - RNA, 17 nt, Synthetic Construct
  source 1..17: mol_type = other RNA
gtgttcggaagattttc

SEQ ID NO: 2736 - RNA, 18 nt, Synthetic Construct
  source 1..18: mol_type = other RNA
cgtgttcggaagattttc

SEQ ID NO: 2737 - RNA, 18 nt, Synthetic Construct
  source 1..18: mol_type = other RNA
cgtgttcggaagattttc

SEQ ID NO: 2738 - RNA, 18 nt, Synthetic Construct
  source 1..18: mol_type = other RNA
gtcgacgtatagggtgtg

SEQ ID NO: 2739 - RNA, 18 nt, Synthetic Construct
  source 1..18: mol_type = other RNA
gtcgacgtatagggtgtg

SEQ ID NO: 2740 - RNA, 27 nt, Synthetic Construct
  source 1..27: mol_type = other RNA
gatttccccttggggttgtaggaccac

SEQ ID NO: 2741 - RNA, 27 nt, Synthetic Construct
  source 1..27: mol_type = other RNA
gatttccccttggggttgtaggaccac

SEQ ID NO: 2742 - RNA, 15 nt, Synthetic Construct
  source 1..15: mol_type = other RNA
gcaagtcgaacggta

SEQ ID NO: 2743 - RNA, 15 nt, Synthetic Construct
  source 1..15: mol_type = other RNA
gcaagtcgaacggta

SEQ ID NO: 2744 - RNA, 28 nt, Synthetic Construct
  source 1..28: mol_type = other RNA
ccgtgtgaaagtaggtcatcgtcaggct

SEQ ID NO: 2745 - RNA, 28 nt, Synthetic Construct
  source 1..28: mol_type = other RNA
ccgtgtgaaagtaggtcatcgtcaggct

SEQ ID NO: 2746 - RNA, 19 nt, Synthetic Construct
  source 1..19: mol_type = other RNA
ccgtgttcggaagattttc

SEQ ID NO: 2747 - RNA, 19 nt, Synthetic Construct
  source 1..19: mol_type = other RNA
ccgtgttcggaagattttc

SEQ ID NO: 2748 - RNA, 23 nt, Synthetic Construct
  source 1..23: mol_type = other RNA
tggtaatacgacgtgcttagtgt

SEQ ID NO: 2749 - RNA, 23 nt, Synthetic Construct
  source 1..23: mol_type = other RNA
tggtaatacgacgtgcttagtgt

SEQ ID NO: 2750 - RNA, 28 nt, Synthetic Construct
  source 1..28: mol_type = other RNA
ggatttccccttggggttgtaggaccac

SEQ ID NO: 2751 - RNA, 28 nt, Synthetic Construct
  source 1..28: mol_type = other RNA
ggatttccccttggggttgtaggaccac

SEQ ID NO: 2752 - RNA, 23 nt, Synthetic Construct
  source 1..23: mol_type = other RNA
tggtagtacgacgtacttagtgt

SEQ ID NO: 2753 - RNA, 23 nt, Synthetic Construct
  source 1..23: mol_type = other RNA
tggtagtacgacgtacttagtgt

SEQ ID NO: 2754 - RNA, 43 nt, Synthetic Construct; identical to SEQ ID NO: 727
  source 1..43: mol_type = other RNA

SEQ ID NO: 2755 - RNA, 43 nt, Synthetic Construct; identical to SEQ ID NO: 727
  source 1..43: mol_type = other RNA

SEQ ID NO: 2756 - RNA, 23 nt, Synthetic Construct
  source 1..23: mol_type = other RNA
tggtaatacgacgcacttagtgt

SEQ ID NO: 2757 - RNA, 23 nt, Synthetic Construct
  source 1..23: mol_type = other RNA
tggtaatacgacgcacttagtgt

SEQ ID NO: 2758 - RNA, 31 nt, Synthetic Construct
  source 1..31: mol_type = other RNA
gcgggcgtcgttcaatggtaggacctgagct

SEQ ID NO: 2759 - RNA, 31 nt, Synthetic Construct; identical to SEQ ID NO: 2758
  source 1..31: mol_type = other RNA

SEQ ID NO: 2760 - RNA, 27 nt, Synthetic Construct
  source 1..27: mol_type = other RNA
ggatttccccttggggttgtaggacca

SEQ ID NO: 2761 - RNA, 27 nt, Synthetic Construct
  source 1..27: mol_type = other RNA
ggatttccccttggggttgtaggacca

SEQ ID NO: 2762 - RNA, 35 nt, Synthetic Construct
  source 1..35: mol_type = other RNA
ggcgggggtcgctggttcgaatccagccagaccca

SEQ ID NO: 2763 - RNA, 35 nt, Synthetic Construct; identical to SEQ ID NO: 2762
  source 1..35: mol_type = other RNA

SEQ ID NO: 2764 - RNA, 23 nt, Synthetic Construct
  source 1..23: mol_type = other RNA
tggtaatacgacgtacttagcgt

SEQ ID NO: 2765 - RNA, 23 nt, Synthetic Construct
  source 1..23: mol_type = other RNA
tggtaatacgacgtacttagcgt

SEQ ID NO: 2766 - RNA, 16 nt, Synthetic Construct
  source 1..16: mol_type = other RNA
gtcaacggccatacca

SEQ ID NO: 2767 - RNA, 16 nt, Synthetic Construct
  source 1..16: mol_type = other RNA
gtcaacggccatacca

SEQ ID NO: 2768 - RNA, 32 nt, Synthetic Construct; identical to SEQ ID NO: 2318
  source 1..32: mol_type = other RNA

SEQ ID NO: 2769 - RNA, 32 nt, Synthetic Construct; identical to SEQ ID NO: 2318
  source 1..32: mol_type = other RNA

SEQ ID NO: 2770 - RNA, 23 nt, Synthetic Construct
  source 1..23: mol_type = other RNA
tggaaatacgacgtacttagtgt

SEQ ID NO: 2771 - RNA, 23 nt, Synthetic Construct
  source 1..23: mol_type = other RNA
tggaaatacgacgtacttagtgt

SEQ ID NO: 2772 - RNA, 35 nt, Synthetic Construct; identical to SEQ ID NO: 2069
  source 1..35: mol_type = other RNA

SEQ ID NO: 2773 - RNA, 35 nt, Synthetic Construct; identical to SEQ ID NO: 2069
  source 1..35: mol_type = other RNA

SEQ ID NO: 2774 - RNA, 26 nt, Synthetic Construct
  source 1..26: mol_type = other RNA
atgcgagagtaggacgttgccaggtt

SEQ ID NO: 2775 - RNA, 26 nt, Synthetic Construct
  source 1..26: mol_type = other RNA
atgcgagagtaggacgttgccaggtt

SEQ ID NO: 2776 - RNA, 23 nt, Synthetic Construct
  source 1..23: mol_type = other RNA
tggtaatacgacgtacttagtgc

SEQ ID NO: 2777 - RNA, 23 nt, Synthetic Construct
  source 1..23: mol_type = other RNA
tggtaatacgacgtacttagtgc

SEQ ID NO: 2778 - RNA, 23 nt, Synthetic Construct
  source 1..23: mol_type = other RNA
tggtaatacgacgtacttggtgt

SEQ ID NO: 2779 - RNA, 23 nt, Synthetic Construct
  source 1..23: mol_type = other RNA
tggtaatacgacgtacttggtgt

SEQ ID NO: 2780 - RNA, 16 nt, Synthetic Construct
  source 1..16: mol_type = other RNA
cgctagtaatcgcgga

SEQ ID NO: 2781 - RNA, 16 nt, Synthetic Construct
  source 1..16: mol_type = other RNA
cgctagtaatcgcgga

SEQ ID NO: 2782 - RNA, 30 nt, Synthetic Construct; identical to SEQ ID NO: 2353
  source 1..30: mol_type = other RNA

SEQ ID NO: 2783 - RNA, 30 nt, Synthetic Construct; identical to SEQ ID NO: 2353
  source 1..30: mol_type = other RNA

SEQ ID NO: 2784 - RNA, 33 nt, Synthetic Construct; identical to SEQ ID NO: 2253
  source 1..33: mol_type = other RNA

SEQ ID NO: 2785 - RNA, 33 nt, Synthetic Construct; identical to SEQ ID NO: 2253
  source 1..33: mol_type = other RNA

SEQ ID NO: 2786 - RNA, 15 nt, Synthetic Construct
  source 1..15: mol_type = other RNA
gttcggaagattttc

SEQ ID NO: 2787 - RNA, 15 nt, Synthetic Construct
  source 1..15: mol_type = other RNA
gttcggaagattttc

SEQ ID NO: 2788 - RNA, 35 nt, Synthetic Construct; identical to SEQ ID NO: 757
  source 1..35: mol_type = other RNA

SEQ ID NO: 2789 - RNA, 35 nt, Synthetic Construct; identical to SEQ ID NO: 757
  source 1..35: mol_type = other RNA

SEQ ID NO: 2790 - RNA, 25 nt, Synthetic Construct
  source 1..25: mol_type = other RNA
ctgaggatatgagatcgagacgaca

SEQ ID NO: 2791 - RNA, 25 nt, Synthetic Construct
  source 1..25: mol_type = other RNA
ctgaggatatgagatcgagacgaca

SEQ ID NO: 2792 - RNA, 23 nt, Synthetic Construct
  source 1..23: mol_type = other RNA
tggcaatacgacgtacttagtgt

SEQ ID NO: 2793 - RNA, 23 nt, Synthetic Construct
  source 1..23: mol_type = other RNA
tggcaatacgacgtacttagtgt

SEQ ID NO: 2794 - RNA, 34 nt, Synthetic Construct; identical to SEQ ID NO: 2183
  source 1..34: mol_type = other RNA

SEQ ID NO: 2795 - RNA, 34 nt, Synthetic Construct; identical to SEQ ID NO: 2183
  source 1..34: mol_type = other RNA

SEQ ID NO: 2796 - RNA, 23 nt, Synthetic Construct
  source 1..23: mol_type = other RNA
tggtaatacaacgtacttagtgt

SEQ ID NO: 2797 - RNA, 23 nt, Synthetic Construct
  source 1..23: mol_type = other RNA
tggtaatacaacgtacttagtgt

SEQ ID NO: 2798 - RNA, 32 nt, Synthetic Construct
  source 1..32: mol_type = other RNA
ggcgctttagctcagccggttagagcgacgga

SEQ ID NO: 2799 - RNA, 32 nt, Synthetic Construct; identical to SEQ ID NO: 2798
  source 1..32: mol_type = other RNA

SEQ ID NO: 2800 - RNA, 22 nt, Synthetic Construct
  source 1..22: mol_type = other RNA
caaagtgctgttcgtgcaggta

SEQ ID NO: 2801 - RNA, 22 nt, Synthetic Construct
  source 1..22: mol_type = other RNA
caaagtgctgttcgtgcaggta

SEQ ID NO: 2802 - RNA, 23 nt, Synthetic Construct
  source 1..23: mol_type = other RNA
gtaaacatccttgactggaagct

SEQ ID NO: 2803 - RNA, 23 nt, Synthetic Construct
  source 1..23: mol_type = other RNA
gtaaacatccttgactggaagct

SEQ ID NO: 2804 - RNA, 25 nt, Synthetic Construct
  source 1..25: mol_type = other RNA
tttccccttggggttgtaggaccac

SEQ ID NO: 2805 - RNA, 25 nt, Synthetic Construct
  source 1..25: mol_type = other RNA
tttccccttggggttgtaggaccac

SEQ ID NO: 2806 - RNA, 22 nt, Synthetic Construct
  source 1..22: mol_type = other RNA
cggaatcgctagtaatcgcgga

SEQ ID NO: 2807 - RNA, 22 nt, Synthetic Construct
  source 1..22: mol_type = other RNA
cggaatcgctagtaatcgcgga

SEQ ID NO: 2808 - RNA, 30 nt, Synthetic Construct; identical to SEQ ID NO: 2578
  source 1..30: mol_type = other RNA

SEQ ID NO: 2809 - RNA, 30 nt, Synthetic Construct; identical to SEQ ID NO: 2578
  source 1..30: mol_type = other RNA

SEQ ID NO: 2810 - RNA, 23 nt, Synthetic Construct
  source 1..23: mol_type = other RNA
nggtaatacgacgtacttagtgt

SEQ ID NO: 2811 - RNA, 23 nt, Synthetic Construct
  source 1..23: mol_type = other RNA
nggtaatacgacgtacttagtgt

SEQ ID NO: 2812 - RNA, 16 nt, Synthetic Construct
  source 1..16: mol_type = other RNA
tgcaagtcgaacggta

SEQ ID NO: 2813 - RNA, 16 nt, Synthetic Construct
  source 1..16: mol_type = other RNA
tgcaagtcgaacggta

SEQ ID NO: 2814 - RNA, 31 nt, Synthetic Construct; identical to SEQ ID NO: 1627
  source 1..31: mol_type = other RNA

SEQ ID NO: 2815 - RNA, 31 nt, Synthetic Construct; identical to SEQ ID NO: 1627
  source 1..31: mol_type = other RNA

SEQ ID NO: 2816 - RNA, 22 nt, Synthetic Construct
  source 1..22: mol_type = other RNA
tgaggtagtagtttgtgctgtc

SEQ ID NO: 2817 - RNA, 16 nt, Synthetic Construct
  source 1..16: mol_type = other RNA
gcgtagatatgcggag

SEQ ID NO: 2818 - RNA, 16 nt, Synthetic Construct
  source 1..16: mol_type = other RNA
gcgtagatatgcggag

SEQ ID NO: 2819 - RNA, 31 nt, Synthetic Construct; identical to SEQ ID NO: 2427
  source 1..31: mol_type = other RNA

SEQ ID NO: 2820 - RNA, 31 nt, Synthetic Construct; identical to SEQ ID NO: 2427
  source 1..31: mol_type = other RNA

SEQ ID NO: 2821 - RNA, 35 nt, Synthetic Construct; identical to SEQ ID NO: 2450
  source 1..35: mol_type = other RNA

SEQ ID NO: 2822 - RNA, 35 nt, Synthetic Construct; identical to SEQ ID NO: 2450
  source 1..35: mol_type = other RNA

SEQ ID NO: 2823 - RNA, 15 nt, Synthetic Construct
  source 1..15: mol_type = other RNA
gagtagggcgggaca

SEQ ID NO: 2824 - RNA, 15 nt, Synthetic Construct
  source 1..15: mol_type = other RNA
gagtagggcgggaca

SEQ ID NO: 2825 - RNA, 23 nt, Synthetic Construct
  source 1..23: mol_type = other RNA
tggtaatgcgacgtacttagtgt

SEQ ID NO: 2826 - RNA, 23 nt, Synthetic Construct
  source 1..23: mol_type = other RNA
tggtaatgcgacgtacttagtgt

SEQ ID NO: 2827 - RNA, 20 nt, Synthetic Construct
  source 1..20: mol_type = other RNA
tcggaagaaggggtgcctgg

SEQ ID NO: 2828 - RNA, 20 nt, Synthetic Construct
  source 1..20: mol_type = other RNA
tcggaagaaggggtgcctgg

SEQ ID NO: 2829 - RNA, 16 nt, Synthetic Construct
  source 1..16: mol_type = other RNA
ccggaggaaggtgggg

SEQ ID NO: 2830 - RNA, 16 nt, Synthetic Construct
  source 1..16: mol_type = other RNA
ccggaggaaggtgggg

SEQ ID NO: 2831 - RNA, 25 nt, Synthetic Construct
  source 1..25: mol_type = other RNA
aaaccgttaccattactgagtttag

SEQ ID NO: 2832 - RNA, 25 nt, Synthetic Construct
  source 1..25: mol_type = other RNA
aaaccgttaccattactgagtttag

SEQ ID NO: 2833 - RNA, 23 nt, Synthetic Construct
  source 1..23: mol_type = other RNA
tggtaacacgacgtacttagtgt

SEQ ID NO: 2834 - RNA, 23 nt, Synthetic Construct
  source 1..23: mol_type = other RNA
tggtaacacgacgtacttagtgt

SEQ ID NO: 2835 - RNA, 25 nt, Synthetic Construct
  source 1..25: mol_type = other RNA
gtgaggatatgagatcgagacgaca

SEQ ID NO: 2836 - RNA, 25 nt, Synthetic Construct
  source 1..25: mol_type = other RNA
gtgaggatatgagatcgagacgaca

SEQ ID NO: 2837 - RNA, 21 nt, Synthetic Construct
  source 1..21: mol_type = other RNA
ctagactgaagctccttgggg

SEQ ID NO: 2838 - RNA, 34 nt, Synthetic Construct; identical to SEQ ID NO: 2265
  source 1..34: mol_type = other RNA

SEQ ID NO: 2839 - RNA, 34 nt, Synthetic Construct; identical to SEQ ID NO: 2265
  source 1..34: mol_type = other RNA

SEQ ID NO: 2840 - RNA, 30 nt, Synthetic Construct
  source 1..30: mol_type = other RNA
ccggagtggacgcacctctggtgtatcggt

SEQ ID NO: 2841 - RNA, 30 nt, Synthetic Construct; identical to SEQ ID NO: 2840
  source 1..30: mol_type = other RNA

SEQ ID NO: 2842 - RNA, 23 nt, Synthetic Construct
  source 1..23: mol_type = other RNA
tagtaatacgacgtacttagtgt

SEQ ID NO: 2843 - RNA, 23 nt, Synthetic Construct
  source 1..23: mol_type = other RNA
tagtaatacgacgtacttagtgt

SEQ ID NO: 2844 - RNA, 23 nt, Synthetic Construct
  source 1..23: mol_type = other RNA
tggtgatacgacgtacttagtgt

SEQ ID NO: 2845 - RNA, 23 nt, Synthetic Construct
  source 1..23: mol_type = other RNA
tggtgatacgacgtacttagtgt

SEQ ID NO: 2846 - RNA, 37 nt, Synthetic Construct; identical to SEQ ID NO: 2365
  source 1..37: mol_type = other RNA

SEQ ID NO: 2847 - RNA, 37 nt, Synthetic Construct; identical to SEQ ID NO: 2365
  source 1..37: mol_type = other RNA

SEQ ID NO: 2848 - RNA, 24 nt, Synthetic Construct
  source 1..24: mol_type = other RNA
ttccccttggggttgtaggaccac

SEQ ID NO: 2849 - RNA, 24 nt, Synthetic Construct
  source 1..24: mol_type = other RNA
ttccccttggggttgtaggaccac

SEQ ID NO: 2850 - RNA, 32 nt, Synthetic Construct
  source 1..32: mol_type = other RNA
gcgggcgtcgttcaatggtaggacctgagctt

SEQ ID NO: 2851 - RNA, 32 nt, Synthetic Construct; identical to SEQ ID NO: 2850
  source 1..32: mol_type = other RNA

SEQ ID NO: 2852 - RNA, 33 nt, Synthetic Construct; identical to SEQ ID NO: 2126
  source 1..33: mol_type = other RNA

SEQ ID NO: 2853 - RNA, 33 nt, Synthetic Construct; identical to SEQ ID NO: 2126
  source 1..33: mol_type = other RNA

SEQ ID NO: 2854 - RNA, 22 nt, Synthetic Construct
  source 1..22: mol_type = other RNA
ccccttggggttgtaggaccac

SEQ ID NO: 2855 - RNA, 22 nt, Synthetic Construct
  source 1..22: mol_type = other RNA
ccccttggggttgtaggaccac

SEQ ID NO: 2856 - RNA, 27 nt, Synthetic Construct
  source 1..27: mol_type = other RNA
gatttccccttggggttgtaggaccac

SEQ ID NO: 2857 - RNA, 27 nt, Synthetic Construct
  source 1..27: mol_type = other RNA
gatttccccttggggttgtaggaccac

SEQ ID NO: 2858 - RNA, 20 nt, Synthetic Construct
  source 1..20: mol_type = other RNA
ccttggggttgtaggaccac

SEQ ID NO: 2859 - RNA, 20 nt, Synthetic Construct
  source 1..20: mol_type = other RNA
ccttggggttgtaggaccac

SEQ ID NO: 2860 - RNA, 17 nt, Synthetic Construct
  source 1..17: mol_type = other RNA
gcgtagatatgcggagg

SEQ ID NO: 2861 - RNA, 17 nt, Synthetic Construct
  source 1..17: mol_type = other RNA
gcgtagatatgcggagg

SEQ ID NO: 2862 - RNA, 23 nt, Synthetic Construct
  source 1..23: mol_type = other RNA
tggtaatacgacgtacctagtgt

SEQ ID NO: 2863 - RNA, 23 nt, Synthetic Construct
  source 1..23: mol_type = other RNA
tggtaatacgacgtacctagtgt

SEQ ID NO: 2864 - RNA, 15 nt, Synthetic Construct
  source 1..15: mol_type = other RNA
gggtgaaagcggggg

SEQ ID NO: 2865 - RNA, 15 nt, Synthetic Construct
  source 1..15: mol_type = other RNA
gggtgaaagcggggg

SEQ ID NO: 2866 - RNA, 32 nt, Synthetic Construct; identical to SEQ ID NO: 2582
  source 1..32: mol_type = other RNA

SEQ ID NO: 2867 - RNA, 32 nt, Synthetic Construct; identical to SEQ ID NO: 2582
  source 1..32: mol_type = other RNA

SEQ ID NO: 2868 - RNA, 22 nt, Synthetic Construct
  source 1..22: mol_type = other RNA
ggcagggttcgtgactggggtg

SEQ ID NO: 2869 - RNA, 22 nt, Synthetic Construct
  source 1..22: mol_type = other RNA
ggcagggttcgtgactggggtg

SEQ ID NO: 2870 - RNA, 21 nt, Synthetic Construct
  source 1..21: mol_type = other RNA
cggtcccaagggtatggctgt

SEQ ID NO: 2871 - RNA, 21 nt, Synthetic Construct
  source 1..21: mol_type = other RNA
cggtcccaagggtatggctgt

SEQ ID NO: 2872 - RNA, 23 nt, Synthetic Construct
  source 1..23: mol_type = other RNA
tggtaatacgacgtactcagtgt

SEQ ID NO: 2873 - RNA, 23 nt, Synthetic Construct
  source 1..23: mol_type = other RNA
tggtaatacgacgtactcagtgt

SEQ ID NO: 2874 - RNA, 36 nt, Synthetic Construct; identical to SEQ ID NO: 2344
  source 1..36: mol_type = other RNA

SEQ ID NO: 2875 - RNA, 36 nt, Synthetic Construct; identical to SEQ ID NO: 2344
  source 1..36: mol_type = other RNA

SEQ ID NO: 2876 - RNA, 31 nt, Synthetic Construct; identical to SEQ ID NO: 2263
  source 1..31: mol_type = other RNA

SEQ ID NO: 2877 - RNA, 31 nt, Synthetic Construct; identical to SEQ ID NO: 2263
  source 1..31: mol_type = other RNA

SEQ ID NO: 2878 - RNA, 22 nt, Synthetic Construct
  source 1..22: mol_type = other RNA
tggaatgtaaggaagtatgtat

SEQ ID NO: 2879 - RNA, 22 nt, Synthetic Construct
  source 1..22: mol_type = other RNA
tggaatgtaaggaagtatgtat

SEQ ID NO: 2880 - RNA, 30 nt, Synthetic Construct; identical to SEQ ID NO: 2308
  source 1..30: mol_type = other RNA

SEQ ID NO: 2881 - RNA, 30 nt, Synthetic Construct; identical to SEQ ID NO: 2308
  source 1..30: mol_type = other RNA

SEQ ID NO: 2882 - RNA, 16 nt, Synthetic Construct
  source 1..16: mol_type = other RNA
gtcgacgtatagggtg

SEQ ID NO: 2883 - RNA, 16 nt, Synthetic Construct
  source 1..16: mol_type = other RNA
gtcgacgtatagggtg

SEQ ID NO: 2884 - RNA, 18 nt, Synthetic Construct
  source 1..18: mol_type = other RNA
gcgaaattccttgtcggg

SEQ ID NO: 2885 - RNA, 18 nt, Synthetic Construct
  source 1..18: mol_type = other RNA
gcgaaattccttgtcggg

SEQ ID NO: 2886 - RNA, 34 nt, Synthetic Construct; identical to SEQ ID NO: 2298
  source 1..34: mol_type = other RNA

SEQ ID NO: 2887 - RNA, 34 nt, Synthetic Construct; identical to SEQ ID NO: 2298
  source 1..34: mol_type = other RNA

SEQ ID NO: 2888 - RNA, 25 nt, Synthetic Construct
  source 1..25: mol_type = other RNA
ttgaggatatgagatcgagacaaca

SEQ ID NO: 2889 - RNA, 25 nt, Synthetic Construct
  source 1..25: mol_type = other RNA
ttgaggatatgagatcgagacaaca

SEQ ID NO: 2890 - RNA, 22 nt, Synthetic Construct
  source 1..22: mol_type = other RNA
tgaggtagtagtttgtgctgtc

SEQ ID NO: 2891 - RNA, 22 nt, Synthetic Construct
  source 1..22: mol_type = other RNA
tgaggtagtagtttgtgctgtc

SEQ ID NO: 2892 - RNA, 22 nt, Synthetic Construct
  source 1..22: mol_type = other RNA
tcggatccgtctgagcttggct

SEQ ID NO: 2893 - RNA, 31 nt, Synthetic Construct
  source 1..31: mol_type = other RNA
gcggggtggagcagtctggtagctcgttggg

SEQ ID NO: 2894 - RNA, 31 nt, Synthetic Construct; identical to SEQ ID NO: 2893
  source 1..31: mol_type = other RNA

SEQ ID NO: 2895 - RNA, 36 nt, Synthetic Construct; identical to SEQ ID NO: 2506
  source 1..36: mol_type = other RNA

SEQ ID NO: 2896 - RNA, 36 nt, Synthetic Construct; identical to SEQ ID NO: 2506
  source 1..36: mol_type = other RNA

SEQ ID NO: 2897 - RNA, 17 nt, Synthetic Construct
  source 1..17: mol_type = other RNA
accggaggaaggtgggg

SEQ ID NO: 2898 - RNA, 17 nt, Synthetic Construct
  source 1..17: mol_type = other RNA
accggaggaaggtgggg

SEQ ID NO: 2899 - RNA, 27 nt, Synthetic Construct
  source 1..27: mol_type = other RNA
cggtataccgaagctctaggtgcggca

SEQ ID NO: 2900 - RNA, 27 nt, Synthetic Construct
  source 1..27: mol_type = other RNA
cggtataccgaagctctaggtgcggca

SEQ ID NO: 2901 - RNA, 34 nt, Synthetic Construct; identical to SEQ ID NO: 2186
  source 1..34: mol_type = other RNA

SEQ ID NO: 2902 - RNA, 34 nt, Synthetic Construct; identical to SEQ ID NO: 2186
  source 1..34: mol_type = other RNA

SEQ ID NO: 2903 - RNA, 31 nt, Synthetic Construct; identical to SEQ ID NO: 2442
  source 1..31: mol_type = other RNA

SEQ ID NO: 2904 - RNA, 31 nt, Synthetic Construct; identical to SEQ ID NO: 2442
  source 1..31: mol_type = other RNA

SEQ ID NO: 2905 - RNA, 33 nt, Synthetic Construct; identical to SEQ ID NO: 2386
  source 1..33: mol_type = other RNA

SEQ ID NO: 2906 - RNA, 33 nt, Synthetic Construct; identical to SEQ ID NO: 2386
  source 1..33: mol_type = other RNA

SEQ ID NO: 2907 - RNA, 21 nt, Synthetic Construct
  source 1..21: mol_type = other RNA
atcggaacgtgcccagtcgtg

SEQ ID NO: 2908 - RNA, 21 nt, Synthetic Construct
  source 1..21: mol_type = other RNA
atcggaacgtgcccagtcgtg

SEQ ID NO: 2909 - RNA, 21 nt, Synthetic Construct
  source 1..21: mol_type = other RNA
cataaagtagaaagcactact

SEQ ID NO: 2910 - RNA, 21 nt, Synthetic Construct
  source 1..21: mol_type = other RNA
cataaagtagaaagcactact

SEQ ID NO: 2911 - RNA, 21 nt, Synthetic Construct
  source 1..21: mol_type = other RNA
tgaggtagtagattgtatagc

SEQ ID NO: 2912 - RNA, 23 nt, Synthetic Construct
  source 1..23: mol_type = other RNA
gggtaatacgacgtacttagtgt

SEQ ID NO: 2913 - RNA, 23 nt, Synthetic Construct
  source 1..23: mol_type = other RNA
gggtaatacgacgtacttagtgt

SEQ ID NO: 2914 - RNA, 17 nt, Synthetic Construct
  source 1..17: mol_type = other RNA
gtcgacgtatagggtgt

SEQ ID NO: 2915 - RNA, 17 nt, Synthetic Construct
  source 1..17: mol_type = other RNA
gtcgacgtatagggtgt

SEQ ID NO: 2916 - RNA, 22 nt, Synthetic Construct
  source 1..22: mol_type = other RNA
tgaggtagtagtttgtgctgta

SEQ ID NO: 2917 - RNA, 27 nt, Synthetic Construct
  source 1..27: mol_type = other RNA
gcgggcgtagctcaggggtagagcgca

SEQ ID NO: 2918 - RNA, 27 nt, Synthetic Construct
  source 1..27: mol_type = other RNA
gcgggcgtagctcaggggtagagcgca

SEQ ID NO: 2919 - RNA, 16 nt, Synthetic Construct
  source 1..16: mol_type = other RNA
gtccggatcgtagtct

SEQ ID NO: 2920 - RNA, 16 nt, Synthetic Construct
  source 1..16: mol_type = other RNA
gtccggatcgtagtct

SEQ ID NO: 2921 - RNA, 15 nt, Synthetic Construct
  source 1..15: mol_type = other RNA
cctcgcgcgattgga

SEQ ID NO: 2922 - RNA, 15 nt, Synthetic Construct
  source 1..15: mol_type = other RNA
cctcgcgcgattgga

SEQ ID NO: 2923 - RNA, 39 nt, Synthetic Construct; identical to SEQ ID NO: 2398
  source 1..39: mol_type = other RNA

SEQ ID NO: 2924 - RNA, 39 nt, Synthetic Construct; identical to SEQ ID NO: 2398
  source 1..39: mol_type = other RNA

SEQ ID NO: 2925 - RNA, 20 nt, Synthetic Construct
  source 1..20: mol_type = other RNA
tgtcagtttgtcaaataccc

SEQ ID NO: 2926 - RNA, 20 nt, Synthetic Construct
  source 1..20: mol_type = other RNA
tgtcagtttgtcaaataccc

SEQ ID NO: 2927 - RNA, 16 nt, Synthetic Construct
  source 1..16: mol_type = other RNA
ctgacgctcatgcacg

SEQ ID NO: 2928 - RNA, 16 nt, Synthetic Construct
  source 1..16: mol_type = other RNA
ctgacgctcatgcacg

SEQ ID NO: 2929 - RNA, 34 nt, Synthetic Construct; identical to SEQ ID NO: 2317
  source 1..34: mol_type = other RNA

SEQ ID NO: 2930 - RNA, 34 nt, Synthetic Construct; identical to SEQ ID NO: 2317
  source 1..34: mol_type = other RNA

SEQ ID NO: 2931 - RNA, 21 nt, Synthetic Construct
  source 1..21: mol_type = other RNA
gctttgatccggagatttccg

SEQ ID NO: 2932 - RNA, 21 nt, Synthetic Construct
  source 1..21: mol_type = other RNA
gctttgatccggagatttccg

SEQ ID NO: 2933 - RNA, 26 nt, Synthetic Construct
  source 1..26: mol_type = other RNA
gaggaacactagtggcgtaggcgaga

SEQ ID NO: 2934 - RNA, 26 nt, Synthetic Construct
  source 1..26: mol_type = other RNA
gaggaacactagtggcgtaggcgaga

SEQ ID NO: 2935 - RNA, 21 nt, Synthetic Construct
  source 1..21: mol_type = other RNA
ctaatcccagaaacccggtcg

SEQ ID NO: 2936 - RNA, 21 nt, Synthetic Construct
  source 1..21: mol_type = other RNA
ctaatcccagaaacccggtcg

SEQ ID NO: 2937 - RNA, 30 nt, Synthetic Construct; identical to SEQ ID NO: 2274
  source 1..30: mol_type = other RNA

SEQ ID NO: 2938 - RNA, 30 nt, Synthetic Construct; identical to SEQ ID NO: 2274
  source 1..30: mol_type = other RNA

SEQ ID NO: 2939 - RNA, 15 nt, Synthetic Construct
  source 1..15: mol_type = other RNA
gagctgtggataggg

SEQ ID NO: 2940 - RNA, 15 nt, Synthetic Construct
  source 1..15: mol_type = other RNA
gagctgtggataggg

SEQ ID NO: 2941 - RNA, 15 nt, Synthetic Construct
  source 1..15: mol_type = other RNA
gctttgatccggaga

SEQ ID NO: 2942 - RNA, 15 nt, Synthetic Construct
  source 1..15: mol_type = other RNA
gctttgatccggaga

SEQ ID NO: 2943 - RNA, 25 nt, Synthetic Construct
  source 1..25: mol_type = other RNA
ttgaggatatgggatcgagacgaca

SEQ ID NO: 2944 - RNA, 25 nt, Synthetic Construct
  source 1..25: mol_type = other RNA
ttgaggatatgggatcgagacgaca

SEQ ID NO: 2945 - RNA, 24 nt, Synthetic Construct
  source 1..24: mol_type = other RNA
tgtaaacacccccgactggaagct

SEQ ID NO: 2946 - RNA, 29 nt, Synthetic Construct
  source 1..29: mol_type = other RNA
gtaatggcgggaactctggacagactgcc

SEQ ID NO: 2947 - RNA, 29 nt, Synthetic Construct
  source 1..29: mol_type = other RNA
gtaatggcgggaactctggacagactgcc

SEQ ID NO: 2948 - RNA, 15 nt, Synthetic Construct
  source 1..15: mol_type = other RNA
gtcgacgtatagggt

SEQ ID NO: 2949 - RNA, 15 nt, Synthetic Construct
  source 1..15: mol_type = other RNA
gtcgacgtatagggt

SEQ ID NO: 2950 - RNA, 21 nt, Synthetic Construct
  source 1..21: mol_type = other RNA
caaagtgctgttcgtgcaggt

SEQ ID NO: 2951 - RNA, 21 nt, Synthetic Construct
  source 1..21: mol_type = other RNA
caaagtgctgttcgtgcaggt

SEQ ID NO: 2952 - RNA, 15 nt, Synthetic Construct
  source 1..15: mol_type = other RNA
gagagcctggacaca

SEQ ID NO: 2953 - RNA, 15 nt, Synthetic Construct
  source 1..15: mol_type = other RNA
gagagcctggacaca

SEQ ID NO: 2954 - RNA, 31 nt, Synthetic Construct; identical to SEQ ID NO: 960
  source 1..31: mol_type = other RNA

SEQ ID NO: 2955 - RNA, 31 nt, Synthetic Construct; identical to SEQ ID NO: 960
  source 1..31: mol_type = other RNA

SEQ ID NO: 2956 - RNA, 22 nt, Synthetic Construct
  source 1..22: mol_type = other RNA
tctttggttatctagctgtatg

SEQ ID NO: 2957 - RNA, 22 nt, Synthetic Construct
  source 1..22: mol_type = other RNA
tctttggttatctagctgtatg

SEQ ID NO: 2958 - RNA, 31 nt, Synthetic Construct; identical to SEQ ID NO: 2215
  source 1..31: mol_type = other RNA

SEQ ID NO: 2959 - RNA, 31 nt, Synthetic Construct; identical to SEQ ID NO: 2215
  source 1..31: mol_type = other RNA

SEQ ID NO: 2960 - RNA, 31 nt, Synthetic Construct; identical to SEQ ID NO: 758
  source 1..31: mol_type = other RNA

SEQ ID NO: 2961 - RNA, 31 nt, Synthetic Construct; identical to SEQ ID NO: 758
  source 1..31: mol_type = other RNA

SEQ ID NO: 2962 - RNA, 23 nt, Synthetic Construct
  source 1..23: mol_type = other RNA
tgaggggcagagagcgagactct

SEQ ID NO: 2963 - RNA, 23 nt, Synthetic Construct
  source 1..23: mol_type = other RNA
tgaggggcagagagcgagactct

SEQ ID NO: 2964 - RNA, 23 nt, Synthetic Construct
  source 1..23: mol_type = other RNA
tggtaatacgacgtacttagtga

SEQ ID NO: 2965 - RNA, 23 nt, Synthetic Construct
  source 1..23: mol_type = other RNA
tggtaatacgacgtacttagtga

SEQ ID NO: 2966 - RNA, 35 nt, Synthetic Construct; identical to SEQ ID NO: 2615
  source 1..35: mol_type = other RNA

SEQ ID NO: 2967 - RNA, 35 nt, Synthetic Construct; identical to SEQ ID NO: 2615
  source 1..35: mol_type = other RNA

SEQ ID NO: 2968 - RNA, 31 nt, Synthetic Construct; identical to SEQ ID NO: 2507
  source 1..31: mol_type = other RNA

SEQ ID NO: 2969 - RNA, 31 nt, Synthetic Construct; identical to SEQ ID NO: 2507
  source 1..31: mol_type = other RNA

SEQ ID NO: 2970 - RNA, 16 nt, Synthetic Construct
  source 1..16: mol_type = other RNA
tgttcggaagattttc

SEQ ID NO: 2971 - RNA, 16 nt, Synthetic Construct
  source 1..16: mol_type = other RNA
tgttcggaagattttc

SEQ ID NO: 2972 - RNA, 23 nt, Synthetic Construct
  source 1..23: mol_type = other RNA
cggtaatacgacgtacttagtgt

SEQ ID NO: 2973 - RNA, 23 nt, Synthetic Construct
  source 1..23: mol_type = other RNA
cggtaatacgacgtacttagtgt

SEQ ID NO: 2974 - RNA, 25 nt, Synthetic Construct
  source 1..25: mol_type = other RNA
ttgaggatatgaggtcgagacgaca

SEQ ID NO: 2975 - RNA, 25 nt, Synthetic Construct
  source 1..25: mol_type = other RNA
ttgaggatatgaggtcgagacgaca

SEQ ID NO: 2976 - RNA, 16 nt, Synthetic Construct
  source 1..16: mol_type = other RNA
gccagcagccgcggta

SEQ ID NO: 2977 - RNA, 16 nt, Synthetic Construct
  source 1..16: mol_type = other RNA
gccagcagccgcggta

SEQ ID NO: 2978 - RNA, 19 nt, Synthetic Construct
  source 1..19: mol_type = other RNA
cggaagaaggggtgcctgg

SEQ ID NO: 2979 - RNA, 19 nt, Synthetic Construct
  source 1..19: mol_type = other RNA
cggaagaaggggtgcctgg

SEQ ID NO: 2980 - RNA, 39 nt, Synthetic Construct
  source 1..39: mol_type = other RNA
agtaaggtcagctaaataagctatcgggcccataccccg

SEQ ID NO: 2981 - RNA, 39 nt, Synthetic Construct; identical to SEQ ID NO: 2980
  source 1..39: mol_type = other RNA

SEQ ID NO: 2982 - RNA, 22 nt, Synthetic Construct
  source 1..22: mol_type = other RNA
tcggatccgtctgagcttggct

SEQ ID NO: 2983 - RNA, 16 nt, Synthetic Construct
  source 1..16: mol_type = other RNA
tgttcggaagattttc

SEQ ID NO: 2984 - RNA, 16 nt, Synthetic Construct
  source 1..16: mol_type = other RNA
tgttcggaagattttc

SEQ ID NO: 2985 - RNA, 35 nt, Synthetic Construct; identical to SEQ ID NO: 2269
  source 1..35: mol_type = other RNA

SEQ ID NO: 2986 - RNA, 35 nt, Synthetic Construct; identical to SEQ ID NO: 2269
  source 1..35: mol_type = other RNA

SEQ ID NO: 2987 - RNA, 43 nt, Synthetic Construct; identical to SEQ ID NO: 1204
  source 1..43: mol_type = other RNA

SEQ ID NO: 2988 - RNA, 43 nt, Synthetic Construct; identical to SEQ ID NO: 1204
  source 1..43: mol_type = other RNA

SEQ ID NO: 2989 - RNA, 26 nt, Synthetic Construct
  source 1..26: mol_type = other RNA
gatttccccttggggttgtaggacca

SEQ ID NO: 2990 - RNA, 26 nt, Synthetic Construct
  source 1..26: mol_type = other RNA
gatttccccttggggttgtaggacca

SEQ ID NO: 2991 - RNA, 23 nt, Synthetic Construct
  source 1..23: mol_type = other RNA
tctttggttatctagctgtatga

SEQ ID NO: 2992 - RNA, 23 nt, Synthetic Construct
  source 1..23: mol_type = other RNA
tctttggttatctagctgtatga

SEQ ID NO: 2993 - RNA, 22 nt, Synthetic Construct
  source 1..22: mol_type = other RNA
nattgcacttgtcccggcctgt

SEQ ID NO: 2994 - RNA, 22 nt, Synthetic Construct
  source 1..22: mol_type = other RNA
nattgcacttgtcccggcctgt

SEQ ID NO: 2995 - RNA, 18 nt, Synthetic Construct
  source 1..18: mol_type = other RNA
accggaggaaggtgggga

SEQ ID NO: 2996 - RNA, 18 nt, Synthetic Construct
  source 1..18: mol_type = other RNA
accggaggaaggtgggga

SEQ ID NO: 2997 - RNA, 36 nt, Synthetic Construct; identical to SEQ ID NO: 2248
  source 1..36: mol_type = other RNA

SEQ ID NO: 2998 - RNA, 36 nt, Synthetic Construct; identical to SEQ ID NO: 2248
  source 1..36: mol_type = other RNA

SEQ ID NO: 2999 - RNA, 22 nt, Synthetic Construct
  source 1..22: mol_type = other RNA
tggaatgtagagaagtatgtat

SEQ ID NO: 3000 - RNA, 22 nt, Synthetic Construct
  source 1..22: mol_type = other RNA
tggaatgtagagaagtatgtat

SEQ ID NO: 3001 - RNA, 15 nt, Synthetic Construct
  source 1..15: mol_type = other RNA
gctagtaatcgcgga

SEQ ID NO: 3002 - RNA, 15 nt, Synthetic Construct
  source 1..15: mol_type = other RNA
gctagtaatcgcgga

SEQ ID NO: 3003 - RNA, 22 nt, Synthetic Construct
  source 1..22: mol_type = other RNA
tgaggtagtagtttgtggtgtt

SEQ ID NO: 3004 - RNA, 21 nt, Synthetic Construct
  source 1..21: mol_type = other RNA
tctttggttatctagctgtat

SEQ ID NO: 3005 - RNA, 21 nt, Synthetic Construct
  source 1..21: mol_type = other RNA
tctttggttatctagctgtat

SEQ ID NO: 3006 - RNA, 23 nt, Synthetic Construct
  source 1..23: mol_type = other RNA
tggtaatacggcgtacttagtgt

SEQ ID NO: 3007 - RNA, 23 nt, Synthetic Construct
  source 1..23: mol_type = other RNA
tggtaatacggcgtacttagtgt

SEQ ID NO: 3008 - RNA, 21 nt, Synthetic Construct
  source 1..21: mol_type = other RNA
gcccgtgttcggaagattttc

SEQ ID NO: 3009 - RNA, 21 nt, Synthetic Construct
  source 1..21: mol_type = other RNA
gcccgtgttcggaagattttc

SEQ ID NO: 3010 - RNA, 33 nt, Synthetic Construct; identical to SEQ ID NO: 2395
  source 1..33: mol_type = other RNA

SEQ ID NO: 3011 - RNA, 33 nt, Synthetic Construct; identical to SEQ ID NO: 2395
  source 1..33: mol_type = other RNA

SEQ ID NO: 3012 - RNA, 34 nt, Synthetic Construct; identical to SEQ ID NO: 2529
  source 1..34: mol_type = other RNA

SEQ ID NO: 3013 - RNA, 34 nt, Synthetic Construct; identical to SEQ ID NO: 2529
  source 1..34: mol_type = other RNA

SEQ ID NO: 3014 - RNA, 29 nt, Synthetic Construct
  source 1..29: mol_type = other RNA
cccgtgtgaaagtaggtcatcgtcaggct

SEQ ID NO: 3015 - RNA, 29 nt, Synthetic Construct
  source 1..29: mol_type = other RNA
cccgtgtgaaagtaggtcatcgtcaggct

SEQ ID NO: 3016 - RNA, 36 nt, Synthetic Construct; identical to SEQ ID NO: 2366
  source 1..36: mol_type = other RNA

SEQ ID NO: 3017 - RNA, 36 nt, Synthetic Construct; identical to SEQ ID NO: 2366
  source 1..36: mol_type = other RNA

SEQ ID NO: 3018 - RNA, 34 nt, Synthetic Construct; identical to SEQ ID NO: 2553
  source 1..34: mol_type = other RNA

SEQ ID NO: 3019 - RNA, 34 nt, Synthetic Construct; identical to SEQ ID NO: 2553
  source 1..34: mol_type = other RNA

SEQ ID NO: 3020 - RNA, 22 nt, Synthetic Construct
  source 1..22: mol_type = other RNA
ccggtcccaagggtatggctgt

SEQ ID NO: 3021 - RNA, 22 nt, Synthetic Construct
  source 1..22: mol_type = other RNA
ccggtcccaagggtatggctgt

SEQ ID NO: 3022 - RNA, 25 nt, Synthetic Construct
  source 1..25: mol_type = other RNA
ttgaggatatgagatcgaggcgaca

SEQ ID NO: 3023 - RNA, 25 nt, Synthetic Construct
  source 1..25: mol_type = other RNA
ttgaggatatgagatcgaggcgaca

SEQ ID NO: 3024 - RNA, 21 nt, Synthetic Construct
  source 1..21: mol_type = other RNA
aagaaagattgcaagaactgc

SEQ ID NO: 3025 - RNA, 21 nt, Synthetic Construct
  source 1..21: mol_type = other RNA
aagaaagattgcaagaactgc

SEQ ID NO: 3026 - RNA, 30 nt, Synthetic Construct; identical to SEQ ID NO: 1194
  source 1..30: mol_type = other RNA

SEQ ID NO: 3027 - RNA, 30 nt, Synthetic Construct; identical to SEQ ID NO: 1194
  source 1..30: mol_type = other RNA

SEQ ID NO: 3028 - RNA, 23 nt, Synthetic Construct
  source 1..23: mol_type = other RNA
tggaatgtaaagaagtatgtacc

SEQ ID NO: 3029 - RNA, 23 nt, Synthetic Construct
  source 1..23: mol_type = other RNA
tggaatgtaaagaagtatgtacc

SEQ ID NO: 3030 - RNA, 25 nt, Synthetic Construct
  source 1..25: mol_type = other RNA
ttgaggatacgagatcgagacgaca

SEQ ID NO: 3031 - RNA, 25 nt, Synthetic Construct
  source 1..25: mol_type = other RNA
ttgaggatacgagatcgagacgaca

SEQ ID NO: 3032 - RNA, 23 nt, Synthetic Construct
  source 1..23: mol_type = other RNA
tccccttggggttgtaggaccac

SEQ ID NO: 3033 - RNA, 23 nt, Synthetic Construct
  source 1..23: mol_type = other RNA
tccccttggggttgtaggaccac

SEQ ID NO: 3034 - RNA, 34 nt, Synthetic Construct; identical to SEQ ID NO: 2291
  source 1..34: mol_type = other RNA

SEQ ID NO: 3035 - RNA, 34 nt, Synthetic Construct; identical to SEQ ID NO: 2291
  source 1..34: mol_type = other RNA

SEQ ID NO: 3036 - RNA, 22 nt, Synthetic Construct
  source 1..22: mol_type = other RNA
tggaatgtaaagaggtatgtat

SEQ ID NO: 3037 - RNA, 22 nt, Synthetic Construct
  source 1..22: mol_type = other RNA
tggaatgtaaagaggtatgtat

SEQ ID NO: 3038 - RNA, 27 nt, Synthetic Construct
  source 1..27: mol_type = other RNA
ggatttccccttggggttgtaggacca

SEQ ID NO: 3039 - RNA, 27 nt, Synthetic Construct
  source 1..27: mol_type = other RNA
ggatttccccttggggttgtaggacca

SEQ ID NO: 3040 - RNA, 31 nt, Synthetic Construct; identical to SEQ ID NO: 2310
  source 1..31: mol_type = other RNA

SEQ ID NO: 3041 - RNA, 31 nt, Synthetic Construct; identical to SEQ ID NO: 2310
  source 1..31: mol_type = other RNA

SEQ ID NO: 3042 - RNA, 36 nt, Synthetic Construct; identical to SEQ ID NO: 2520
  source 1..36: mol_type = other RNA

SEQ ID NO: 3043 - RNA, 36 nt, Synthetic Construct; identical to SEQ ID NO: 2520
  source 1..36: mol_type = other RNA

SEQ ID NO: 3044 - RNA, 23 nt, Synthetic Construct
  source 1..23: mol_type = other RNA
taccctgtagaaccgaatttgtg

SEQ ID NO: 3045 - RNA, 22 nt, Synthetic Construct
  source 1..22: mol_type = other RNA
tggagtgtaaagaagtatgtat

SEQ ID NO: 3046 - RNA, 22 nt, Synthetic Construct
  source 1..22: mol_type = other RNA
tggagtgtaaagaagtatgtat

SEQ ID NO: 3047 - RNA, 20 nt, Synthetic Construct
  source 1..20: mol_type = other RNA
cccataaagtagaaagcact

SEQ ID NO: 3048 - RNA, 20 nt, Synthetic Construct
  source 1..20: mol_type = other RNA
cccataaagtagaaagcact

SEQ ID NO: 3049 - RNA, 20 nt, Synthetic Construct
  source 1..20: mol_type = other RNA
ctgacctatgaattgacagc

SEQ ID NO: 3050 - RNA, 20 nt, Synthetic Construct
  source 1..20: mol_type = other RNA
ctgacctatgaattgacagc

SEQ ID NO: 3051 - RNA, 22 nt, Synthetic Construct
  source 1..22: mol_type = other RNA
ttcaagtaatccaggataggcc

SEQ ID NO: 3052 - RNA, 32 nt, Synthetic Construct; identical to SEQ ID NO: 2435
  source 1..32: mol_type = other RNA

SEQ ID NO: 3053 - RNA, 32 nt, Synthetic Construct; identical to SEQ ID NO: 2435
  source 1..32: mol_type = other RNA

SEQ ID NO: 3054 - RNA, 15 nt, Synthetic Construct
  source 1..15: mol_type = other RNA
gcgtagatatgcgga

SEQ ID NO: 3055 - RNA, 15 nt, Synthetic Construct
  source 1..15: mol_type = other RNA
gcgtagatatgcgga

SEQ ID NO: 3056 - RNA, 36 nt, Synthetic Construct; identical to SEQ ID NO: 2546
  source 1..36: mol_type = other RNA

SEQ ID NO: 3057 - RNA, 36 nt, Synthetic Construct; identical to SEQ ID NO: 2546
  source 1..36: mol_type = other RNA

SEQ ID NO: 3058 - RNA, 23 nt, Synthetic Construct
  source 1..23: mol_type = other RNA
gcgtggtaggagagcgttctgta

SEQ ID NO: 3059 - RNA, 23 nt, Synthetic Construct
  source 1..23: mol_type = other RNA
gcgtggtaggagagcgttctgta

SEQ ID NO: 3060 - RNA, 19 nt, Synthetic Construct
  source 1..19: mol_type = other RNA
gtactgacgctcatgcacg

SEQ ID NO: 3061 - RNA, 19 nt, Synthetic Construct
  source 1..19: mol_type = other RNA
gtactgacgctcatgcacg

SEQ ID NO: 3062 - RNA, 23 nt, Synthetic Construct
  source 1..23: mol_type = other RNA
tggcagtgtcttagctggttgtt

SEQ ID NO: 3063 - RNA, 22 nt, Synthetic Construct
  source 1..22: mol_type = other RNA
cctcgcgcgattggagcggccg

SEQ ID NO: 3064 - RNA, 22 nt, Synthetic Construct
  source 1..22: mol_type = other RNA
cctcgcgcgattggagcggccg

SEQ ID NO: 3065 - RNA, 23 nt, Synthetic Construct
  source 1..23: mol_type = other RNA
tggtaatacgacgtacttagtat

SEQ ID NO: 3066 - RNA, 23 nt, Synthetic Construct
  source 1..23: mol_type = other RNA
tggtaatacgacgtacttagtat

SEQ ID NO: 3067 - RNA, 23 nt, Synthetic Construct
  source 1..23: mol_type = other RNA
tggtaatacgtcgtacttagtgt

SEQ ID NO: 3068 - RNA, 23 nt, Synthetic Construct
  source 1..23: mol_type = other RNA
tggtaatacgtcgtacttagtgt

SEQ ID NO: 3069 - RNA, 17 nt, Synthetic Construct
  source 1..17: mol_type = other RNA
gtgttcggaagattttc

SEQ ID NO: 3070 - RNA, 17 nt, Synthetic Construct
  source 1..17: mol_type = other RNA
gtgttcggaagattttc

SEQ ID NO: 3071 - RNA, 15 nt, Synthetic Construct
  source 1..15: mol_type = other RNA
ccgcttttgtcaggg

SEQ ID NO: 3072 - RNA, 15 nt, Synthetic Construct
  source 1..15: mol_type = other RNA
ccgcttttgtcaggg

SEQ ID NO: 3073 - RNA, 32 nt, Synthetic Construct; identical to SEQ ID NO: 2296
  source 1..32: mol_type = other RNA

SEQ ID NO: 3074 - RNA, 32 nt, Synthetic Construct; identical to SEQ ID NO: 2296
  source 1..32: mol_type = other RNA

SEQ ID NO: 3075 - RNA, 21 nt, Synthetic Construct
  source 1..21: mol_type = other RNA
tgaggggcagagagcgagacc

SEQ ID NO: 3076 - RNA, 23 nt, Synthetic Construct
  source 1..23: mol_type = other RNA
taaagtgcttatagtgcaggtag

SEQ ID NO: 3077 - RNA, 23 nt, Synthetic Construct
  source 1..23: mol_type = other RNA
taaagtgcttatagtgcaggtag

SEQ ID NO: 3078 - RNA, 24 nt, Synthetic Construct
  source 1..24: mol_type = other RNA
gggttgtaaaccgcttttgtcagg

SEQ ID NO: 3079 - RNA, 24 nt, Synthetic Construct
  source 1..24: mol_type = other RNA
gggttgtaaaccgcttttgtcagg

SEQ ID NO: 3080 - RNA, 23 nt, Synthetic Construct
  source 1..23: mol_type = other RNA
tggtaatacgacgtacttagtgt

SEQ ID NO: 3081 - RNA, 23 nt, Synthetic Construct
  source 1..23: mol_type = other RNA
tggtaatacgacgtacttagtgt

SEQ ID NO: 3082 - RNA, 33 nt, Synthetic Construct
  source 1..33: mol_type = other RNA
gggctcttagctcagttggtagagcagcggact

SEQ ID NO: 3083 - RNA, 33 nt, Synthetic Construct; identical to SEQ ID NO: 3082
  source 1..33: mol_type = other RNA

SEQ ID NO: 3084 - RNA, 25 nt, Synthetic Construct
  source 1..25: mol_type = other RNA
gggttgtaaaccgcttttgtcaggg

SEQ ID NO: 3085 - RNA, 25 nt, Synthetic Construct
  source 1..25: mol_type = other RNA
gggttgtaaaccgcttttgtcaggg

SEQ ID NO: 3086 - RNA, 19 nt, Synthetic Construct
  source 1..19: mol_type = other RNA
ccagtaaacggcggccgta

SEQ ID NO: 3087 - RNA, 19 nt, Synthetic Construct
  source 1..19: mol_type = other RNA
ccagtaaacggcggccgta

SEQ ID NO: 3088 - RNA, 23 nt, Synthetic Construct
  source 1..23: mol_type = other RNA
tggtaatacgatgtacttagtgt

SEQ ID NO: 3089 - RNA, 23 nt, Synthetic Construct
  source 1..23: mol_type = other RNA
tggtaatacgatgtacttagtgt

SEQ ID NO: 3090 - RNA, 22 nt, Synthetic Construct
  source 1..22: mol_type = other RNA
cggaggagttcgaaggtacgct

SEQ ID NO: 3091 - RNA, 22 nt, Synthetic Construct
  source 1..22: mol_type = other RNA
cggaggagttcgaaggtacgct

SEQ ID NO: 3092 - RNA, 32 nt, Synthetic Construct
  source 1..32: mol_type = other RNA
ggtggctgtagctcagttggtagagtccagga

SEQ ID NO: 3093 - RNA, 32 nt, Synthetic Construct; identical to SEQ ID NO: 3092
  source 1..32: mol_type = other RNA

SEQ ID NO: 3094 - RNA, 26 nt, Synthetic Construct
  source 1..26: mol_type = other RNA
atttccccttggggttgtaggaccac

SEQ ID NO: 3095 - RNA, 26 nt, Synthetic Construct
  source 1..26: mol_type = other RNA
atttccccttggggttgtaggaccac

SEQ ID NO: 3096 - RNA, 25 nt, Synthetic Construct
  source 1..25: mol_type = other RNA
ttggggatatgagatcgagacgaca

SEQ ID NO: 3097 - RNA, 25 nt, Synthetic Construct
  source 1..25: mol_type = other RNA
ttggggatatgagatcgagacgaca

SEQ ID NO: 3098 - RNA, 30 nt, Synthetic Construct; identical to SEQ ID NO: 1958
  source 1..30: mol_type = other RNA

SEQ ID NO: 3099 - RNA, 30 nt, Synthetic Construct; identical to SEQ ID NO: 1958
  source 1..30: mol_type = other RNA

SEQ ID NO: 3100 - RNA, 22 nt, Synthetic Construct
  source 1..22: mol_type = other RNA
tgagaactgaattccatgggtc

SEQ ID NO: 3101 - RNA, 22 nt, Synthetic Construct
  source 1..22: mol_type = other RNA
gagagcctggacacaggtgctg

SEQ ID NO: 3102 - RNA, 22 nt, Synthetic Construct
  source 1..22: mol_type = other RNA
gagagcctggacacaggtgctg

SEQ ID NO: 3103 - RNA, 23 nt, Synthetic Construct
  source 1..23: mol_type = other RNA
ggcagggttcgtgactggggtga

SEQ ID NO: 3104 - RNA, 23 nt, Synthetic Construct
  source 1..23: mol_type = other RNA
ggcagggttcgtgactggggtga

SEQ ID NO: 3105 - RNA, 23 nt, Synthetic Construct
  source 1..23: mol_type = other RNA
tggtaatacgacatacttagtgt

SEQ ID NO: 3106 - RNA, 23 nt, Synthetic Construct
  source 1..23: mol_type = other RNA
tggtaatacgacatacttagtgt

SEQ ID NO: 3107 - RNA, 23 nt, Synthetic Construct
  source 1..23: mol_type = other RNA
tagcaccatttgaaatcagtgtt

SEQ ID NO: 3108 - RNA, 31 nt, Synthetic Construct; identical to SEQ ID NO: 2333
  source 1..31: mol_type = other RNA

SEQ ID NO: 3109 - RNA, 31 nt, Synthetic Construct; identical to SEQ ID NO: 2333
  source 1..31: mol_type = other RNA

SEQ ID NO: 3110 - RNA, 16 nt, Synthetic Construct
  source 1..16: mol_type = other RNA
gccagcagccgcggta

SEQ ID NO: 3111 - RNA, 16 nt, Synthetic Construct
  source 1..16: mol_type = other RNA
gccagcagccgcggta

SEQ ID NO: 3112 - RNA, 21 nt, Synthetic Construct
  source 1..21: mol_type = other RNA
tgaggggcggagagcgagact

SEQ ID NO: 3113 - RNA, 21 nt, Synthetic Construct
  source 1..21: mol_type = other RNA
tgaggggcggagagcgagact

SEQ ID NO: 3114 - RNA, 23 nt, Synthetic Construct
  source 1..23: mol_type = other RNA
aatgacacgatcactcccgttga

SEQ ID NO: 3115 - RNA, 23 nt, Synthetic Construct
  source 1..23: mol_type = other RNA
aatgacacgatcactcccgttga

SEQ ID NO: 3116 - RNA, 22 nt, Synthetic Construct
  source 1..22: mol_type = other RNA
tggaatgtaaagaagtacgtat

SEQ ID NO: 3117 - RNA, 22 nt, Synthetic Construct
  source 1..22: mol_type = other RNA
tggaatgtaaagaagtacgtat

SEQ ID NO: 3118 - RNA, 22 nt, Synthetic Construct
  source 1..22: mol_type = other RNA
tgggatgtaaagaagtatgtat

SEQ ID NO: 3119 - RNA, 22 nt, Synthetic Construct
  source 1..22: mol_type = other RNA
tgggatgtaaagaagtatgtat

SEQ ID NO: 3120 - RNA, 22 nt, Synthetic Construct
  source 1..22: mol_type = other RNA
ncctgtactgagctgccccgag

SEQ ID NO: 3121 - RNA, 22 nt, Synthetic Construct
  source 1..22: mol_type = other RNA
ncctgtactgagctgccccgag

SEQ ID NO: 3122 - RNA, 22 nt, Synthetic Construct
  source 1..22: mol_type = other RNA
tcggatccgtctgagcttggct

SEQ ID NO: 3123 - RNA, 22 nt, Synthetic Construct
  source 1..22: mol_type = other RNA
tcggatccgtctgagcttggct

SEQ ID NO: 3124 - RNA, 18 nt, Synthetic Construct
  source 1..18: mol_type = other RNA
accggaggaaggtgggga

SEQ ID NO: 3125 - RNA, 23 nt, Synthetic Construct
  source 1..23: mol_type = other RNA
gggtaatacgacgtacttagtgt

SEQ ID NO: 3126 - RNA, 23 nt, Synthetic Construct
  source 1..23: mol_type = other RNA
tgataatacgacgtacttagtgt

SEQ ID NO: 3127 - RNA, 23 nt, Synthetic Construct
  source 1..23: mol_type = other RNA
tgataatacgacgtacttagtgt

SEQ ID NO: 3128 - RNA, 20 nt, Synthetic Construct
  source 1..20: mol_type = other RNA
caatggccgggacagagggc

SEQ ID NO: 3129 - RNA, 20 nt, Synthetic Construct
  source 1..20: mol_type = other RNA
caatggccgggacagagggc

SEQ ID NO: 3130 - RNA, 35 nt, Synthetic Construct; identical to SEQ ID NO: 2399
  source 1..35: mol_type = other RNA

SEQ ID NO: 3131 - RNA, 35 nt, Synthetic Construct; identical to SEQ ID NO: 2399
  source 1..35: mol_type = other RNA

SEQ ID NO: 3132 - RNA, 16 nt, Synthetic Construct
  source 1..16: mol_type = other RNA
gtcgacgtatagggtg

SEQ ID NO: 3133 - RNA, 26 nt, Synthetic Construct
  source 1..26: mol_type = other RNA
gatgcgtggtaggagagcgttctgta

SEQ ID NO: 3134 - RNA, 26 nt, Synthetic Construct
  source 1..26: mol_type = other RNA
gatgcgtggtaggagagcgttctgta

SEQ ID NO: 3135 - RNA, 35 nt, Synthetic Construct; identical to SEQ ID NO: 2069
  source 1..35: mol_type = other RNA

SEQ ID NO: 3136 - RNA, 29 nt, Synthetic Construct
  source 1..29: mol_type = other RNA
ttacaggggttcgaatcccctaggggacg

SEQ ID NO: 3137 - RNA, 29 nt, Synthetic Construct
  source 1..29: mol_type = other RNA
ttacaggggttcgaatcccctaggggacg

SEQ ID NO: 3138 - RNA, 31 nt, Synthetic Construct; identical to SEQ ID NO: 2295
  source 1..31: mol_type = other RNA

SEQ ID NO: 3139 - RNA, 31 nt, Synthetic Construct; identical to SEQ ID NO: 2295
  source 1..31: mol_type = other RNA

SEQ ID NO: 3140 - RNA, 30 nt, Synthetic Construct; identical to SEQ ID NO: 1236
  source 1..30: mol_type = other RNA

SEQ ID NO: 3141 - RNA, 30 nt, Synthetic Construct; identical to SEQ ID NO: 1236
  source 1..30: mol_type = other RNA

SEQ ID NO: 3142 - RNA, 22 nt, Synthetic Construct
  source 1..22: mol_type = other RNA
tggaatgtaaaggagtatgtat

SEQ ID NO: 3143 - RNA, 22 nt, Synthetic Construct
  source 1..22: mol_type = other RNA
tggaatgtaaaggagtatgtat

SEQ ID NO: 3144 - RNA, 25 nt, Synthetic Construct
  source 1..25: mol_type = other RNA
ttgaggatatgagatcgagacgaca

SEQ ID NO: 3145 - RNA, 25 nt, Synthetic Construct
  source 1..25: mol_type = other RNA
ttgaggatatgagatcgagacgaca

SEQ ID NO: 3146 - RNA, 25 nt, Synthetic Construct
  source 1..25: mol_type = other RNA
ttgaggatatgagatcgagacgacg

SEQ ID NO: 3147 - RNA, 25 nt, Synthetic Construct
  source 1..25: mol_type = other RNA
ttgaggatatgagatcgagacgacg

SEQ ID NO: 3148 - RNA, 31 nt, Synthetic Construct; identical to SEQ ID NO: 2278
  source 1..31: mol_type = other RNA

SEQ ID NO: 3149 - RNA, 31 nt, Synthetic Construct; identical to SEQ ID NO: 2278
  source 1..31: mol_type = other RNA

SEQ ID NO: 3150 - RNA, 34 nt, Synthetic Construct; identical to SEQ ID NO: 2364
  source 1..34: mol_type = other RNA

SEQ ID NO: 3151 - RNA, 34 nt, Synthetic Construct; identical to SEQ ID NO: 2364
  source 1..34: mol_type = other RNA

SEQ ID NO: 3152 - RNA, 24 nt, Synthetic Construct
  source 1..24: mol_type = other RNA
gatgaggcgtgataacgagtctgc

SEQ ID NO: 3153 - RNA, 24 nt, Synthetic Construct
  source 1..24: mol_type = other RNA
gatgaggcgtgataacgagtctgc

SEQ ID NO: 3154 - RNA, 31 nt, Synthetic Construct; identical to SEQ ID NO: 2423
  source 1..31: mol_type = other RNA

SEQ ID NO: 3155 - RNA, 31 nt, Synthetic Construct; identical to SEQ ID NO: 2423
  source 1..31: mol_type = other RNA

SEQ ID NO: 3156 - RNA, 17 nt, Synthetic Construct
  source 1..17: mol_type = other RNA
gtcgacgtatagggtgt

SEQ ID NO: 3157 - RNA, 16 nt, Synthetic Construct
  source 1..16: mol_type = other RNA
cccagaaacccggtcg

SEQ ID NO: 3158 - RNA, 16 nt, Synthetic Construct
  source 1..16: mol_type = other RNA
cccagaaacccggtcg

SEQ ID NO: 3159 - RNA, 23 nt, Synthetic Construct
  source 1..23: mol_type = other RNA
tggtaatatgacgtacttagtgt

SEQ ID NO: 3160 - RNA, 23 nt, Synthetic Construct
  source 1..23: mol_type = other RNA
tggtaatatgacgtacttagtgt

SEQ ID NO: 3161 - RNA, 23 nt, Synthetic Construct
  source 1..23: mol_type = other RNA
agcagcattgtacagggctatgg

SEQ ID NO: 3162 - RNA, 28 nt, Synthetic Construct
  source 1..28: mol_type = other RNA
cgactcttagcggtggatcactcggctc

SEQ ID NO: 3163 - RNA, 28 nt, Synthetic Construct
  source 1..28: mol_type = other RNA
cgactcttagcggtggatcactcggctc

SEQ ID NO: 3164 - RNA, 22 nt, Synthetic Construct
  source 1..22: mol_type = other RNA
tggaacgtaaagaagtatgtat

SEQ ID NO: 3165 - RNA, 22 nt, Synthetic Construct
  source 1..22: mol_type = other RNA
tggaacgtaaagaagtatgtat

SEQ ID NO: 3166 - RNA, 22 nt, Synthetic Construct
  source 1..22: mol_type = other RNA
tagcttatcagactgatgttgg

SEQ ID NO: 3167 - RNA, 22 nt, Synthetic Construct
  source 1..22: mol_type = other RNA
taggtagtttcctgttgttggg

SEQ ID NO: 3168 - RNA, 27 nt, Synthetic Construct
  source 1..27: mol_type = other RNA
tcctgagtagctcagcggcagagcggg

SEQ ID NO: 3169 - RNA, 27 nt, Synthetic Construct
  source 1..27: mol_type = other RNA
tcctgagtagctcagcggcagagcggg

SEQ ID NO: 3170 - RNA, 16 nt, Synthetic Construct
  source 1..16: mol_type = other RNA
gggtgaaagcggggga

SEQ ID NO: 3171 - RNA, 16 nt, Synthetic Construct
  source 1..16: mol_type = other RNA
gggtgaaagcggggga

SEQ ID NO: 3172 - RNA, 23 nt, Synthetic Construct
  source 1..23: mol_type = other RNA
cgaggggcagagagcgagacttt

SEQ ID NO: 3173 - RNA, 29 nt, Synthetic Construct
  source 1..29: mol_type = other RNA
tgaaggtgggttgtgaagcctgctggagg

SEQ ID NO: 3174 - RNA, 29 nt, Synthetic Construct
  source 1..29: mol_type = other RNA
tgaaggtgggttgtgaagcctgctggagg

SEQ ID NO: 3175 - RNA, 17 nt, Synthetic Construct
  source 1..17: mol_type = other RNA
accggaggaaggtgggg

SEQ ID NO: 3176 - RNA, 15 nt, Synthetic Construct
  source 1..15: mol_type = other RNA
gcaagtcgaacggta

SEQ ID NO: 3177 - RNA, 15 nt, Synthetic Construct
  source 1..15: mol_type = other RNA
gcaagtcgaacggta

SEQ ID NO: 3178 - RNA, 21 nt, Synthetic Construct
  source 1..21: mol_type = other RNA
tgaggtagtaggttgtgtagt

SEQ ID NO: 3179 - RNA, 21 nt, Synthetic Construct
  source 1..21: mol_type = other RNA
tgaggtagtaggttgtgtagt

SEQ ID NO: 3180 - RNA, 18 nt, Synthetic Construct
  source 1..18: mol_type = other RNA
tcccaagggtatggctgt

SEQ ID NO: 3181 - RNA, 18 nt, Synthetic Construct
  source 1..18: mol_type = other RNA
tcccaagggtatggctgt

SEQ ID NO: 3182 - RNA, 15 nt, Synthetic Construct
  source 1..15: mol_type = other RNA
ggtcatcgtcaggct

SEQ ID NO: 3183 - RNA, 15 nt, Synthetic Construct
  source 1..15: mol_type = other RNA
ggtcatcgtcaggct

SEQ ID NO: 3184 - RNA, 19 nt, Synthetic Construct
  source 1..19: mol_type = other RNA
agtcgacgtatagggtgtg

SEQ ID NO: 3185 - RNA, 19 nt, Synthetic Construct
  source 1..19: mol_type = other RNA
agtcgacgtatagggtgtg

SEQ ID NO: 3186 - RNA, 21 nt, Synthetic Construct
  source 1..21: mol_type = other RNA
tgaggtagtaggttgtatggt

SEQ ID NO: 3187 - RNA, 20 nt, Synthetic Construct
  source 1..20: mol_type = other RNA
tgaggtagtaggttgcgtgg

SEQ ID NO: 3188 - RNA, 20 nt, Synthetic Construct
  source 1..20: mol_type = other RNA
tgaggtagtaggttgcgtgg

SEQ ID NO: 3189 - RNA, 22 nt, Synthetic Construct
  source 1..22: mol_type = other RNA
tccagcatcagtgattttgttg

SEQ ID NO: 3190 - RNA, 22 nt, Synthetic Construct
  source 1..22: mol_type = other RNA
tgaggtagtagattgtatagtc

SEQ ID NO: 3191 - RNA, 23 nt, Synthetic Construct
  source 1..23: mol_type = other RNA
agcagcattgtacagggctatgg

SEQ ID NO: 3192 - RNA, 36 nt, Synthetic Construct; identical to SEQ ID NO: 2469
  source 1..36: mol_type = other RNA

SEQ ID NO: 3193 - RNA, 36 nt, Synthetic Construct; identical to SEQ ID NO: 2469
  source 1..36: mol_type = other RNA

SEQ ID NO: 3194 - RNA, 15 nt, Synthetic Construct
  source 1..15: mol_type = other RNA
gtccggatcgtagtc

SEQ ID NO: 3195 - RNA, 15 nt, Synthetic Construct
  source 1..15: mol_type = other RNA
gtccggatcgtagtc

SEQ ID NO: 3196 - RNA, 18 nt, Synthetic Construct
  source 1..18: mol_type = other RNA
agcagcattgtacagggc

SEQ ID NO: 3197 - RNA, 18 nt, Synthetic Construct
  source 1..18: mol_type = other RNA
agcagcattgtacagggc

SEQ ID NO: 3198 - RNA, 21 nt, Synthetic Construct
  source 1..21: mol_type = other RNA
tgaggtagcaggttgtgtggt

SEQ ID NO: 3199 - RNA, 21 nt, Synthetic Construct
  source 1..21: mol_type = other RNA
tgaggtagcaggttgtgtggt

SEQ ID NO: 3200 - RNA, 22 nt, Synthetic Construct
  source 1..22: mol_type = other RNA
tctttggttatctagctgtatg

SEQ ID NO: 3201 - RNA, 16 nt, Synthetic Construct
  source 1..16: mol_type = other RNA
ttggcctcaagtcagg

SEQ ID NO: 3202 - RNA, 16 nt, Synthetic Construct
  source 1..16: mol_type = other RNA
ttggcctcaagtcagg

SEQ ID NO: 3203 - RNA, 21 nt, Synthetic Construct
  source 1..21: mol_type = other RNA
taggtagtttcctgttgttgg

SEQ ID NO: 3204 - RNA, 24 nt, Synthetic Construct
  source 1..24: mol_type = other RNA
tgtaaacatccctgactggaagct

SEQ ID NO: 3205 - RNA, 28 nt, Synthetic Construct
  source 1..28: mol_type = other RNA
ggatttccccttggggttgtaggaccac

SEQ ID NO: 3206 - RNA, 28 nt, Synthetic Construct
  source 1..28: mol_type = other RNA
ggatttccccttggggttgtaggaccac

SEQ ID NO: 3207 - RNA, 22 nt, Synthetic Construct
  source 1..22: mol_type = other RNA
tcacagtgaaccggtctctttt

SEQ ID NO: 3208 - RNA, 20 nt, Synthetic Construct
  source 1..20: mol_type = other RNA
tagcaccatttgaaatcagt

SEQ ID NO: 3209 - RNA, 22 nt, Synthetic Construct
  source 1..22: mol_type = other RNA
tggaatgcaaagaagtatgtat

SEQ ID NO: 3210 - RNA, 22 nt, Synthetic Construct
  source 1..22: mol_type = other RNA
tggaatgcaaagaagtatgtat

SEQ ID NO: 3211 - RNA, 17 nt, Synthetic Construct
  source 1..17: mol_type = other RNA
tcgctagtaatcgcgga

SEQ ID NO: 3212 - RNA, 17 nt, Synthetic Construct
  source 1..17: mol_type = other RNA
tcgctagtaatcgcgga

SEQ ID NO: 3213 - RNA, 23 nt, Synthetic Construct
  source 1..23: mol_type = other RNA
tctttggttatctagctgtatga

SEQ ID NO: 3214 - RNA, 23 nt, Synthetic Construct
  source 1..23: mol_type = other RNA
tgaggggcagagagcgagacttc

SEQ ID NO: 3215 - RNA, 15 nt, Synthetic Construct
  source 1..15: mol_type = other RNA
tccggatcgtagtct

SEQ ID NO: 3216 - RNA, 15 nt, Synthetic Construct
  source 1..15: mol_type = other RNA
tccggatcgtagtct

SEQ ID NO: 3217 - RNA, 33 nt, Synthetic Construct; identical to SEQ ID NO: 1982
  source 1..33: mol_type = other RNA

SEQ ID NO: 3218 - RNA, 33 nt, Synthetic Construct; identical to SEQ ID NO: 1982
  source 1..33: mol_type = other RNA

SEQ ID NO: 3219 - RNA, 21 nt, Synthetic Construct
  source 1..21: mol_type = other RNA
tgaggtagtaggttgtatggt

SEQ ID NO: 3220 - RNA, 21 nt, Synthetic Construct
  source 1..21: mol_type = other RNA
tgaggtagtaggttgtatggt

SEQ ID NO: 3221 - RNA, 22 nt, Synthetic Construct
  source 1..22: mol_type = other RNA
tgaggtagtaggttgtatggtt

SEQ ID NO: 3222 - RNA, 18 nt, Synthetic Construct
  source 1..18: mol_type = other RNA
tgcgtagatatgcggagg

SEQ ID NO: 3223 - RNA, 18 nt, Synthetic Construct
  source 1..18: mol_type = other RNA
tgcgtagatatgcggagg

SEQ ID NO: 3224 - RNA, 22 nt, Synthetic Construct
  source 1..22: mol_type = other RNA
tggaatgtaaagaagtatgtgt

SEQ ID NO: 3225 - RNA, 22 nt, Synthetic Construct
  source 1..22: mol_type = other RNA
tggaatgtaaagaagtatgtgt

SEQ ID NO: 3226 - RNA, 26 nt, Synthetic Construct
  source 1..26: mol_type = other RNA
gagcagctaataccgcatacgacctg

SEQ ID NO: 3227 - RNA, 26 nt, Synthetic Construct
  source 1..26: mol_type = other RNA
gagcagctaataccgcatacgacctg

SEQ ID NO: 3228 - RNA, 31 nt, Synthetic Construct; identical to SEQ ID NO: 2293
  source 1..31: mol_type = other RNA

SEQ ID NO: 3229 - RNA, 31 nt, Synthetic Construct; identical to SEQ ID NO: 2293
  source 1..31: mol_type = other RNA

SEQ ID NO: 3230 - RNA, 26 nt, Synthetic Construct
  source 1..26: mol_type = other RNA
cgactcttagcggtggatcactcggc

SEQ ID NO: 3231 - RNA, 26 nt, Synthetic Construct
  source 1..26: mol_type = other RNA
cgactcttagcggtggatcactcggc

SEQ ID NO: 3232 - RNA, 17 nt, Synthetic Construct
  source 1..17: mol_type = other RNA
gtccggatcgtagtctg

SEQ ID NO: 3233 - RNA, 17 nt, Synthetic Construct
  source 1..17: mol_type = other RNA
gtccggatcgtagtctg

SEQ ID NO: 3234 - RNA, 23 nt, Synthetic Construct
  source 1..23: mol_type = other RNA
tgaggggcagagggcgagacttt

SEQ ID NO: 3235 - RNA, 23 nt, Synthetic Construct
  source 1..23: mol_type = other RNA
tgaggggcagagggcgagacttt

SEQ ID NO: 3236 - RNA, 24 nt, Synthetic Construct
  source 1..24: mol_type = other RNA
tgtaaacatccccgactggaagcc

SEQ ID NO: 3237 - RNA, 25 nt, Synthetic Construct
  source 1..25: mol_type = other RNA
ttgagggtatgagatcgagacgaca

SEQ ID NO: 3238 - RNA, 25 nt, Synthetic Construct
  source 1..25: mol_type = other RNA
ttgagggtatgagatcgagacgaca

SEQ ID NO: 3239 - RNA, 16 nt, Synthetic Construct
  source 1..16: mol_type = other RNA
tgcgtagatatgcgga

SEQ ID NO: 3240 - RNA, 16 nt, Synthetic Construct
  source 1..16: mol_type = other RNA
tgcgtagatatgcgga

SEQ ID NO: 3241 - RNA, 23 nt, Synthetic Construct
  source 1..23: mol_type = other RNA
tgaggggtagagagcgagacttt

SEQ ID NO: 3242 - RNA, 23 nt, Synthetic Construct
  source 1..23: mol_type = other RNA
tgaggggtagagagcgagacttt

SEQ ID NO: 3243 - RNA, 23 nt, Synthetic Construct
  source 1..23: mol_type = other RNA
tggaatgtaaagaagtatgtata

SEQ ID NO: 3244 - RNA, 23 nt, Synthetic Construct
  source 1..23: mol_type = other RNA
tggaatgtaaagaagtatgtata

SEQ ID NO: 3245 - RNA, 20 nt, Synthetic Construct
  source 1..20: mol_type = other RNA
tcggaagaaggggtgcctgg

SEQ ID NO: 3246 - RNA, 20 nt, Synthetic Construct
  source 1..20: mol_type = other RNA
tcggaagaaggggtgcctgg

SEQ ID NO: 3247 - RNA, 35 nt, Synthetic Construct; identical to SEQ ID NO: 2548
  source 1..35: mol_type = other RNA

SEQ ID NO: 3248 - RNA, 35 nt, Synthetic Construct; identical to SEQ ID NO: 2548
  source 1..35: mol_type = other RNA

SEQ ID NO: 3249 - RNA, 23 nt, Synthetic Construct
  source 1..23: mol_type = other RNA
tggtaattcgacgtacttagtgt

SEQ ID NO: 3250 - RNA, 23 nt, Synthetic Construct
  source 1..23: mol_type = other RNA
tggtaattcgacgtacttagtgt

SEQ ID NO: 3251 - RNA, 23 nt, Synthetic Construct
  source 1..23: mol_type = other RNA
tggtaaaacgacgtacttagtgt

SEQ ID NO: 3252 - RNA, 23 nt, Synthetic Construct
  source 1..23: mol_type = other RNA
tggtaaaacgacgtacttagtgt

SEQ ID NO: 3253 - RNA, 20 nt, Synthetic Construct
  source 1..20: mol_type = other RNA
ccttggggttgtaggaccac

SEQ ID NO: 3254 - RNA, 20 nt, Synthetic Construct
  source 1..20: mol_type = other RNA
ccttggggttgtaggaccac

SEQ ID NO: 3255 - RNA, 22 nt, Synthetic Construct
  source 1..22: mol_type = other RNA
ccggtcccaagggtatggctgt

SEQ ID NO: 3256 - RNA, 15 nt, Synthetic Construct
  source 1..15: mol_type = other RNA
tcctgacggccatag

SEQ ID NO: 3257 - RNA, 15 nt, Synthetic Construct
  source 1..15: mol_type = other RNA
tcctgacggccatag

SEQ ID NO: 3258 - RNA, 34 nt, Synthetic Construct; identical to SEQ ID NO: 2375
  source 1..34: mol_type = other RNA

SEQ ID NO: 3259 - RNA, 34 nt, Synthetic Construct; identical to SEQ ID NO: 2375
  source 1..34: mol_type = other RNA

SEQ ID NO: 3260 - RNA, 34 nt, Synthetic Construct; identical to SEQ ID NO: 2019
  source 1..34: mol_type = other RNA

SEQ ID NO: 3261 - RNA, 34 nt, Synthetic Construct; identical to SEQ ID NO: 2019
  source 1..34: mol_type = other RNA

SEQ ID NO: 3262 - RNA, 32 nt, Synthetic Construct; identical to SEQ ID NO: 2086
  source 1..32: mol_type = other RNA

SEQ ID NO: 3263 - RNA, 32 nt, Synthetic Construct; identical to SEQ ID NO: 2086
  source 1..32: mol_type = other RNA

SEQ ID NO: 3264 - RNA, 22 nt, Synthetic Construct
  source 1..22: mol_type = other RNA
tgaggtagtaggttgtgtagtt

SEQ ID NO: 3265 - RNA, 22 nt, Synthetic Construct
  source 1..22: mol_type = other RNA
tgaggtagtaggttgtgtagtt

SEQ ID NO: 3266 - RNA, 22 nt, Synthetic Construct
  source 1..22: mol_type = other RNA
tggaatgtaaagaagtatgcat

SEQ ID NO: 3267 - RNA, 22 nt, Synthetic Construct
  source 1..22: mol_type = other RNA
tggaatgtaaagaagtatgcat

SEQ ID NO: 3268 - RNA, 22 nt, Synthetic Construct
  source 1..22: mol_type = other RNA
cgactcttagcggtggatcact

SEQ ID NO: 3269 - RNA, 22 nt, Synthetic Construct
  source 1..22: mol_type = other RNA
cgactcttagcggtggatcact

SEQ ID NO: 3270 - RNA, 22 nt, Synthetic Construct
  source 1..22: mol_type = other RNA
ttcaagtaatccaggataggcc

SEQ ID NO: 3271 - RNA, 23 nt, Synthetic Construct
  source 1..23: mol_type = other RNA
tctttggttatctagctgtatgt

SEQ ID NO: 3272 - RNA, 23 nt, Synthetic Construct
  source 1..23: mol_type = other RNA
tgaggggcagagagcgaggcttt

SEQ ID NO: 3273 - RNA, 20 nt, Synthetic Construct
  source 1..20: mol_type = other RNA
tgaggaagtaggttgtgtgg

SEQ ID NO: 3274 - RNA, 20 nt, Synthetic Construct
  source 1..20: mol_type = other RNA
tgaggaagtaggttgtgtgg

SEQ ID NO: 3275 - RNA, 20 nt, Synthetic Construct
  source 1..20: mol_type = other RNA
gtgccgaagctgtgggattg

SEQ ID NO: 3276 - RNA, 20 nt, Synthetic Construct
  source 1..20: mol_type = other RNA
gtgccgaagctgtgggattg

SEQ ID NO: 3277 - RNA, 22 nt, Synthetic Construct
  source 1..22: mol_type = other RNA
ngaggtagtaggttgtgtggtt

SEQ ID NO: 3278 - RNA, 22 nt, Synthetic Construct
  source 1..22: mol_type = other RNA
ngaggtagtaggttgtgtggtt

SEQ ID NO: 3279 - RNA, 18 nt, Synthetic Construct
  source 1..18: mol_type = other RNA
cgcgacctcagatcagac

SEQ ID NO: 3280 - RNA, 18 nt, Synthetic Construct
  source 1..18: mol_type = other RNA
cgcgacctcagatcagac

SEQ ID NO: 3281 - RNA, 25 nt, Synthetic Construct
  source 1..25: mol_type = other RNA
ttgaggatatgagatcgagacggca

SEQ ID NO: 3282 - RNA, 25 nt, Synthetic Construct
  source 1..25: mol_type = other RNA
ttgaggatatgagatcgagacggca

SEQ ID NO: 3283 - RNA, 17 nt, Synthetic Construct
  source 1..17: mol_type = other RNA
agcggtggatgatgtgg

SEQ ID NO: 3284 - RNA, 17 nt, Synthetic Construct
  source 1..17: mol_type = other RNA
agcggtggatgatgtgg

SEQ ID NO: 3285 - RNA, 23 nt, Synthetic Construct
  source 1..23: mol_type = other RNA
tctttggttatctagctgtatgt

SEQ ID NO: 3286 - RNA, 23 nt, Synthetic Construct
  source 1..23: mol_type = other RNA
tctttggttatctagctgtatgt

SEQ ID NO: 3287 - RNA, 21 nt, Synthetic Construct
  source 1..21: mol_type = other RNA
tggggtagtaggttgtgtggt

SEQ ID NO: 3288 - RNA, 21 nt, Synthetic Construct
  source 1..21: mol_type = other RNA
tggggtagtaggttgtgtggt

SEQ ID NO: 3289 - RNA, 25 nt, Synthetic Construct
  source 1..25: mol_type = other RNA
tcgaggatatgagatcgagacgaca

SEQ ID NO: 3290 - RNA, 25 nt, Synthetic Construct
  source 1..25: mol_type = other RNA
tcgaggatatgagatcgagacgaca

SEQ ID NO: 3291 - RNA, 34 nt, Synthetic Construct; identical to SEQ ID NO: 2553
  source 1..34: mol_type = other RNA

SEQ ID NO: 3292 - RNA, 21 nt, Synthetic Construct
  source 1..21: mol_type = other RNA
tctttggttatctagctgtat

SEQ ID NO: 3293 - RNA, 27 nt, Synthetic Construct
  source 1..27: mol_type = other RNA
ccgtgtgaaagtaggtcatcgtcaggc

SEQ ID NO: 3294 - RNA, 27 nt, Synthetic Construct
  source 1..27: mol_type = other RNA
ccgtgtgaaagtaggtcatcgtcaggc

SEQ ID NO: 3295 - RNA, 37 nt, Synthetic Construct; identical to SEQ ID NO: 2211
  source 1..37: mol_type = other RNA

SEQ ID NO: 3296 - RNA, 37 nt, Synthetic Construct; identical to SEQ ID NO: 2211
  source 1..37: mol_type = other RNA

SEQ ID NO: 3297 - RNA, 20 nt, Synthetic Construct
  source 1..20: mol_type = other RNA
tgaggtagtaggctgtgtgg

SEQ ID NO: 3298 - RNA, 20 nt, Synthetic Construct
  source 1..20: mol_type = other RNA
tgaggtagtaggctgtgtgg

SEQ ID NO: 3299 - RNA, 16 nt, Synthetic Construct
  source 1..16: mol_type = other RNA
ccggaggaaggtgggg

SEQ ID NO: 3300 - RNA, 18 nt, Synthetic Construct
  source 1..18: mol_type = other RNA
atcgctagtaatcgcgga

SEQ ID NO: 3301 - RNA, 18 nt, Synthetic Construct
  source 1..18: mol_type = other RNA
atcgctagtaatcgcgga

SEQ ID NO: 3302 - RNA, 18 nt, Synthetic Construct
  source 1..18: mol_type = other RNA
gtcgacgtatagggtgtg

SEQ ID NO: 3303 - RNA, 31 nt, Synthetic Construct; identical to SEQ ID NO: 2442
  source 1..31: mol_type = other RNA

SEQ ID NO: 3304 - RNA, 18 nt, Synthetic Construct
  source 1..18: mol_type = other RNA
gtctgcctcagcgtcggt

SEQ ID NO: 3305 - RNA, 18 nt, Synthetic Construct
  source 1..18: mol_type = other RNA
gtctgcctcagcgtcggt

SEQ ID NO: 3306 - RNA, 17 nt, Synthetic Construct
  source 1..17: mol_type = other RNA
agtccggatcgtagtct

SEQ ID NO: 3307 - RNA, 17 nt, Synthetic Construct
  source 1..17: mol_type = other RNA
agtccggatcgtagtct

SEQ ID NO: 3308 - RNA, 15 nt, Synthetic Construct
  source 1..15: mol_type = other RNA
gctatgggatttgtt

SEQ ID NO: 3309 - RNA, 15 nt, Synthetic Construct
  source 1..15: mol_type = other RNA
gctatgggatttgtt

SEQ ID NO: 3310 - RNA, 34 nt, Synthetic Construct; identical to SEQ ID NO: 2367
  source 1..34: mol_type = other RNA

SEQ ID NO: 3311 - RNA, 34 nt, Synthetic Construct; identical to SEQ ID NO: 2367
  source 1..34: mol_type = other RNA

SEQ ID NO: 3312 - RNA, 23 nt, Synthetic Construct
  source 1..23: mol_type = other RNA
ggcagggttcgtgactggggtga

SEQ ID NO: 3313 - RNA, 23 nt, Synthetic Construct
  source 1..23: mol_type = other RNA
taaagtgcttatagtgcaggtag

SEQ ID NO: 3314 - RNA, 33 nt, Synthetic Construct; identical to SEQ ID NO: 2266
  source 1..33: mol_type = other RNA

SEQ ID NO: 3315 - RNA, 33 nt, Synthetic Construct; identical to SEQ ID NO: 2266
  source 1..33: mol_type = other RNA

SEQ ID NO: 3316 - RNA, 17 nt, Synthetic Construct
  source 1..17: mol_type = other RNA
gggtctgtagctcagtc

SEQ ID NO: 3317 - RNA, 17 nt, Synthetic Construct
  source 1..17: mol_type = other RNA
gggtctgtagctcagtc

SEQ ID NO: 3318 - RNA, 16 nt, Synthetic Construct
  source 1..16: mol_type = other RNA
gcggtggatgatgtgg

SEQ ID NO: 3319 - RNA, 16 nt, Synthetic Construct
  source 1..16: mol_type = other RNA
gcggtggatgatgtgg

SEQ ID NO: 3320 - RNA, 16 nt, Synthetic Construct
  source 1..16: mol_type = other RNA
cccctggacctgtact

SEQ ID NO: 3321 - RNA, 16 nt, Synthetic Construct
  source 1..16: mol_type = other RNA
cccctggacctgtact

SEQ ID NO: 3322 - RNA, 36 nt, Synthetic Construct; identical to SEQ ID NO: 2506
  source 1..36: mol_type = other RNA

SEQ ID NO: 3323 - RNA, 23 nt, Synthetic Construct
  source 1..23: mol_type = other RNA
tgaggggcagggagcgagacttt

SEQ ID NO: 3324 - RNA, 16 nt, Synthetic Construct
  source 1..16: mol_type = other RNA
ggcgggggtcgctggt

SEQ ID NO: 3325 - RNA, 16 nt, Synthetic Construct
  source 1..16: mol_type = other RNA
ggcgggggtcgctggt

SEQ ID NO: 3326 - RNA, 35 nt, Synthetic Construct; identical to SEQ ID NO: 2354
  source 1..35: mol_type = other RNA

SEQ ID NO: 3327 - RNA, 35 nt, Synthetic Construct; identical to SEQ ID NO: 2354
  source 1..35: mol_type = other RNA

SEQ ID NO: 3328 - RNA, 18 nt, Synthetic Construct
  source 1..18: mol_type = other RNA
catgcaagtcgaacggta

SEQ ID NO: 3329 - RNA, 18 nt, Synthetic Construct
  source 1..18: mol_type = other RNA
catgcaagtcgaacggta

SEQ ID NO: 3330 - RNA, 19 nt, Synthetic Construct
  source 1..19: mol_type = other RNA
tgagatgaagcactgtagc

SEQ ID NO: 3331 - RNA, 16 nt, Synthetic Construct
  source 1..16: mol_type = other RNA
ctcagtagctcgagga

SEQ ID NO: 3332 - RNA, 16 nt, Synthetic Construct
  source 1..16: mol_type = other RNA
ctcagtagctcgagga

SEQ ID NO: 3333 - RNA, 32 nt, Synthetic Construct; identical to SEQ ID NO: 3092
  source 1..32: mol_type = other RNA

SEQ ID NO: 3334 - RNA, 22 nt, Synthetic Construct
  source 1..22: mol_type = other RNA
aacccgtagatccgatcttgtg

SEQ ID NO: 3335 - RNA, 20 nt, Synthetic Construct
  source 1..20: mol_type = other RNA
cccagtaaacggcggccgta

SEQ ID NO: 3336 - RNA, 20 nt, Synthetic Construct
  source 1..20: mol_type = other RNA
cccagtaaacggcggccgta

SEQ ID NO: 3337 - RNA, 35 nt, Synthetic Construct; identical to SEQ ID NO: 2397
  source 1..35: mol_type = other RNA

SEQ ID NO: 3338 - RNA, 35 nt, Synthetic Construct; identical to SEQ ID NO: 2397
  source 1..35: mol_type = other RNA

SEQ ID NO: 3339 - RNA, 22 nt, Synthetic Construct
  source 1..22: mol_type = other RNA
cctcgcgcgattggagcggccg

SEQ ID NO: 3340 - RNA, 20 nt, Synthetic Construct
  source 1..20: mol_type = other RNA
tgaggtagtaggttgtgcgg

SEQ ID NO: 3341 - RNA, 20 nt, Synthetic Construct
  source 1..20: mol_type = other RNA
tgaggtagtaggttgtgcgg

SEQ ID NO: 3342 - RNA, 22 nt, Synthetic Construct
  source 1..22: mol_type = other RNA
tggaatgtgaagaagtatgtat

SEQ ID NO: 3343 - RNA, 22 nt, Synthetic Construct
  source 1..22: mol_type = other RNA
tggaatgtgaagaagtatgtat

SEQ ID NO: 3344 - RNA, 24 nt, Synthetic Construct
  source 1..24: mol_type = other RNA
gcgagagtaggacgttgccaggtt

SEQ ID NO: 3345 - RNA, 24 nt, Synthetic Construct
  source 1..24: mol_type = other RNA
gcgagagtaggacgttgccaggtt

SEQ ID NO: 3346 - RNA, 31 nt, Synthetic Construct; identical to SEQ ID NO: 1627
  source 1..31: mol_type = other RNA

SEQ ID NO: 3347 - RNA, 31 nt, Synthetic Construct; identical to SEQ ID NO: 1627
  source 1..31: mol_type = other RNA

SEQ ID NO: 3348 - RNA, 36 nt, Synthetic Construct; identical to SEQ ID NO: 2444
  source 1..36: mol_type = other RNA

SEQ ID NO: 3349 - RNA, 36 nt, Synthetic Construct; identical to SEQ ID NO: 2444
  source 1..36: mol_type = other RNA

SEQ ID NO: 3350 - RNA, 24 nt, Synthetic Construct
  source 1..24: mol_type = other RNA
tgtaaacatccctgactggaagct

SEQ ID NO: 3351 - RNA, 23 nt, Synthetic Construct
  source 1..23: mol_type = other RNA
tggtaatacgacgtacttaatgt

SEQ ID NO: 3352 - RNA, 23 nt, Synthetic Construct
  source 1..23: mol_type = other RNA
tggtaatacgacgtacttaatgt

SEQ ID NO: 3353 - RNA, 25 nt, Synthetic Construct
  source 1..25: mol_type = other RNA
gtgaggatatgagatcgagacgaca

SEQ ID NO: 3354 - RNA, 41 nt, Synthetic Construct; identical to SEQ ID NO: 781
  source 1..41: mol_type = other RNA

SEQ ID NO: 3355 - RNA, 41 nt, Synthetic Construct; identical to SEQ ID NO: 2441
  source 1..41: mol_type = other RNA

SEQ ID NO: 3356 - RNA, 41 nt, Synthetic Construct; identical to SEQ ID NO: 2441
  source 1..41: mol_type = other RNA

SEQ ID NO: 3357 - RNA, 25 nt, Synthetic Construct
  source 1..25: mol_type = other RNA
tgtcagtttgtcaaataccccaatt

SEQ ID NO: 3358 - RNA, 25 nt, Synthetic Construct
  source 1..25: mol_type = other RNA
tgtcagtttgtcaaataccccaatt

SEQ ID NO: 3359 - RNA, 17 nt, Synthetic Construct
  source 1..17: mol_type = other RNA
cgcgacctcagatcaga

SEQ ID NO: 3360 - RNA, 17 nt, Synthetic Construct
  source 1..17: mol_type = other RNA
cgcgacctcagatcaga

SEQ ID NO: 3361 - RNA, 28 nt, Synthetic Construct
  source 1..28: mol_type = other RNA
ccccccactgctaaatttgactggcctt

SEQ ID NO: 3362 - RNA, 31 nt, Synthetic Construct; identical to SEQ ID NO: 2427
  source 1..31: mol_type = other RNA

SEQ ID NO: 3363 - RNA, 16 nt, Synthetic Construct
  source 1..16: mol_type = other RNA
gagctgtggatagggg

SEQ ID NO: 3364 - RNA, 16 nt, Synthetic Construct
  source 1..16: mol_type = other RNA
gagctgtggatagggg

SEQ ID NO: 3365 - RNA, 21 nt, Synthetic Construct
  source 1..21: mol_type = other RNA
tcccagtaaacggcggccgta

SEQ ID NO: 3366 - RNA, 21 nt, Synthetic Construct
  source 1..21: mol_type = other RNA
tcccagtaaacggcggccgta

SEQ ID NO: 3367 - RNA, 21 nt, Synthetic Construct
  source 1..21: mol_type = other RNA
taacactgtctggtaaagatg

SEQ ID NO: 3368 - RNA, 21 nt, Synthetic Construct
  source 1..21: mol_type = other RNA
taacactgtctggtaaagatg

SEQ ID NO: 3369 - RNA, 35 nt, Synthetic Construct
  source 1..35: mol_type = other RNA
gactgcgtgaagtcggaatcgctagtaatcgcgga

SEQ ID NO: 3370 - RNA, 35 nt, Synthetic Construct; identical to SEQ ID NO: 3369
  source 1..35: mol_type = other RNA

SEQ ID NO: 3371 - RNA, 33 nt, Synthetic Construct; identical to SEQ ID NO: 2386
  source 1..33: mol_type = other RNA

SEQ ID NO: 3372 - RNA, 21 nt, Synthetic Construct
  source 1..21: mol_type = other RNA
tgaggggcagagagcgggact

SEQ ID NO: 3373 - RNA, 21 nt, Synthetic Construct
  source 1..21: mol_type = other RNA
tgaggggcagagagcgggact

SEQ ID NO: 3374 - RNA, 38 nt, Synthetic Construct; identical to SEQ ID NO: 2492
  source 1..38: mol_type = other RNA

SEQ ID NO: 3375 - RNA, 38 nt, Synthetic Construct; identical to SEQ ID NO: 2492
  source 1..38: mol_type = other RNA

SEQ ID NO: 3376 - RNA, 35 nt, Synthetic Construct; identical to SEQ ID NO: 1095
  source 1..35: mol_type = other RNA

SEQ ID NO: 3377 - RNA, 21 nt, Synthetic Construct
  source 1..21: mol_type = other RNA
tgaggggcagggagcgagact

SEQ ID NO: 3378 - RNA, 21 nt, Synthetic Construct
  source 1..21: mol_type = other RNA
tgaggggcagggagcgagact

SEQ ID NO: 3379 - RNA, 21 nt, Synthetic Construct
  source 1..21: mol_type = other RNA
ctagactgaagctccttgaga

SEQ ID NO: 3380 - RNA, 20 nt, Synthetic Construct
  source 1..20: mol_type = other RNA
cacatgcaagtcgaacggta

SEQ ID NO: 3381 - RNA, 20 nt, Synthetic Construct
  source 1..20: mol_type = other RNA
cacatgcaagtcgaacggta

SEQ ID NO: 3382 - RNA, 18 nt, Synthetic Construct
  source 1..18: mol_type = other RNA
cctcgcgcgattggagcg

SEQ ID NO: 3383 - RNA, 18 nt, Synthetic Construct
  source 1..18: mol_type = other RNA
cctcgcgcgattggagcg

SEQ ID NO: 3384 - RNA, 16 nt, Synthetic Construct
  source 1..16: mol_type = other RNA
cgactcttagcggtgg

SEQ ID NO: 3385 - RNA, 16 nt, Synthetic Construct
  source 1..16: mol_type = other RNA
cgactcttagcggtgg

SEQ ID NO: 3386 - RNA, 16 nt, Synthetic Construct
  source 1..16: mol_type = other RNA
gaaattccttgtcggg

SEQ ID NO: 3387 - RNA, 16 nt, Synthetic Construct
  source 1..16: mol_type = other RNA
gaaattccttgtcggg

SEQ ID NO: 3388 - RNA, 33 nt, Synthetic Construct; identical to SEQ ID NO: 2126
  source 1..33: mol_type = other RNA

SEQ ID NO: 3389 - RNA, 33 nt, Synthetic Construct; identical to SEQ ID NO: 2556
  source 1..33: mol_type = other RNA

SEQ ID NO: 3390 - RNA, 33 nt, Synthetic Construct; identical to SEQ ID NO: 2556
  source 1..33: mol_type = other RNA

SEQ ID NO: 3391 - RNA, 22 nt, Synthetic Construct
  source 1..22: mol_type = other RNA
tatcggaacgtgcccagtcgtg

SEQ ID NO: 3392 - RNA, 22 nt, Synthetic Construct
  source 1..22: mol_type = other RNA
tatcggaacgtgcccagtcgtg

SEQ ID NO: 3393 - RNA, 21 nt, Synthetic Construct
  source 1..21: mol_type = other RNA
tgaggtggtaggttgtgtggt

SEQ ID NO: 3394 - RNA, 21 nt, Synthetic Construct
  source 1..21: mol_type = other RNA
tgaggtggtaggttgtgtggt

SEQ ID NO: 3395 - RNA, 30 nt, Synthetic Construct; identical to SEQ ID NO: 768
  source 1..30: mol_type = other RNA

SEQ ID NO: 3396 - RNA, 30 nt, Synthetic Construct; identical to SEQ ID NO: 768
  source 1..30: mol_type = other RNA

SEQ ID NO: 3397 - RNA, 29 nt, Synthetic Construct
  source 1..29: mol_type = other RNA
gtgcatgcactctggggttgtgggacagc

SEQ ID NO: 3398 - RNA, 29 nt, Synthetic Construct
  source 1..29: mol_type = other RNA
gtgcatgcactctggggttgtgggacagc

SEQ ID NO: 3399 - RNA, 35 nt, Synthetic Construct; identical to SEQ ID NO: 2505
  source 1..35: mol_type = other RNA

SEQ ID NO: 3400 - RNA, 35 nt, Synthetic Construct; identical to SEQ ID NO: 2505
  source 1..35: mol_type = other RNA

SEQ ID NO: 3401 - RNA, 15 nt, Synthetic Construct
  source 1..15: mol_type = other RNA
tgcaagtcgaacggt

SEQ ID NO: 3402 - RNA, 15 nt, Synthetic Construct
  source 1..15: mol_type = other RNA
tgcaagtcgaacggt

SEQ ID NO: 3403 - RNA, 24 nt, Synthetic Construct
  source 1..24: mol_type = other RNA
tttccccttggggttgtaggacca

SEQ ID NO: 3404 - RNA, 24 nt, Synthetic Construct
  source 1..24: mol_type = other RNA
tttccccttggggttgtaggacca

SEQ ID NO: 3405 - RNA, 20 nt, Synthetic Construct
  source 1..20: mol_type = other RNA
atcacattgccagggatttc

SEQ ID NO: 3406 - RNA, 20 nt, Synthetic Construct
  source 1..20: mol_type = other RNA
atcacattgccagggatttc

SEQ ID NO: 3407 - RNA, 25 nt, Synthetic Construct
  source 1..25: mol_type = other RNA
ttgaggatgtgagatcgagacgaca

SEQ ID NO: 3408 - RNA, 25 nt, Synthetic Construct
  source 1..25: mol_type = other RNA
ttgaggatgtgagatcgagacgaca

SEQ ID NO: 3409 - RNA, 35 nt, Synthetic Construct; identical to SEQ ID NO: 2514
  source 1..35: mol_type = other RNA

SEQ ID NO: 3410 - RNA, 35 nt, Synthetic Construct; identical to SEQ ID NO: 2514
  source 1..35: mol_type = other RNA

SEQ ID NO: 3411 - RNA, 16 nt, Synthetic Construct
  source 1..16: mol_type = other RNA
aggtcatcattatctg

SEQ ID NO: 3412 - RNA, 16 nt, Synthetic Construct
  source 1..16: mol_type = other RNA
aggtcatcattatctg

SEQ ID NO: 3413 - RNA, 23 nt, Synthetic Construct
  source 1..23: mol_type = other RNA
tgaggggcagagagcgggacttt

SEQ ID NO: 3414 - RNA, 34 nt, Synthetic Construct; identical to SEQ ID NO: 2291
  source 1..34: mol_type = other RNA

SEQ ID NO: 3415 - RNA, 21 nt, Synthetic Construct
  source 1..21: mol_type = other RNA
atcggaacgtgcccagtcgtg

SEQ ID NO: 3416 - RNA, 34 nt, Synthetic Construct; identical to SEQ ID NO: 2183
  source 1..34: mol_type = other RNA

SEQ ID NO: 3417 - RNA, 19 nt, Synthetic Construct
  source 1..19: mol_type = other RNA
cacatgcaagtcgaacggt

SEQ ID NO: 3418 - RNA, 19 nt, Synthetic Construct
  source 1..19: mol_type = other RNA
cacatgcaagtcgaacggt

SEQ ID NO: 3419 - RNA, 26 nt, Synthetic Construct
  source 1..26: mol_type = other RNA
ggcgcttgagagaactctggagaagg

SEQ ID NO: 3420 - RNA, 26 nt, Synthetic Construct
  source 1..26: mol_type = other RNA
ggcgcttgagagaactctggagaagg

SEQ ID NO: 3421 - RNA, 22 nt, Synthetic Construct
  source 1..22: mol_type = other RNA
tgtggtagtagtttgtgctgtt

SEQ ID NO: 3422 - RNA, 22 nt, Synthetic Construct
  source 1..22: mol_type = other RNA
tgaggtagtagtttgtgctgtg

SEQ ID NO: 3423 - RNA, 23 nt, Synthetic Construct
  source 1..23: mol_type = other RNA
agctacattgtctgctgggttcc

SEQ ID NO: 3424 - RNA, 15 nt, Synthetic Construct
  source 1..15: mol_type = other RNA
ggtgaaagcggggga

SEQ ID NO: 3425 - RNA, 15 nt, Synthetic Construct
  source 1..15: mol_type = other RNA
ggtgaaagcggggga

SEQ ID NO: 3426 - RNA, 22 nt, Synthetic Construct
  source 1..22: mol_type = other RNA
ttcaagtaatccaggataggcc

SEQ ID NO: 3427 - RNA, 22 nt, Synthetic Construct
  source 1..22: mol_type = other RNA
tccctgagaccctaacttgtga

SEQ ID NO: 3428 - RNA, 30 nt, Synthetic Construct; identical to SEQ ID NO: 2407
  source 1..30: mol_type = other RNA

SEQ ID NO: 3429 - RNA, 30 nt, Synthetic Construct; identical to SEQ ID NO: 2407
  source 1..30: mol_type = other RNA

SEQ ID NO: 3430 - RNA, 30 nt, Synthetic Construct; identical to SEQ ID NO: 1958
  source 1..30: mol_type = other RNA

SEQ ID NO: 3431 - RNA, 21 nt, Synthetic Construct
  source 1..21: mol_type = other RNA
tccctgagaccctaacttgtg

SEQ ID NO: 3432 - RNA, 15 nt, Synthetic Construct
  source 1..15: mol_type = other RNA
gtcgacgtatagggt

SEQ ID NO: 3433 - RNA, 26 nt, Synthetic Construct
  source 1..26: mol_type = other RNA
atgcgagagtaggacgttgccaggtt

SEQ ID NO: 3434 - RNA, 26 nt, Synthetic Construct
  source 1..26: mol_type = other RNA
atgcgagagtaggacgttgccaggtt

SEQ ID NO: 3435 - RNA, 17 nt, Synthetic Construct
  source 1..17: mol_type = other RNA
catgcaagtcgaacggt

SEQ ID NO: 3436 - RNA, 17 nt, Synthetic Construct
  source 1..17: mol_type = other RNA
catgcaagtcgaacggt

SEQ ID NO: 3437 - RNA, 18 nt, Synthetic Construct
  source 1..18: mol_type = other RNA
ggctttgaagtaaggtcg

SEQ ID NO: 3438 - RNA, 18 nt, Synthetic Construct
  source 1..18: mol_type = other RNA
ggctttgaagtaaggtcg

SEQ ID NO: 3439 - RNA, 22 nt, Synthetic Construct
  source 1..22: mol_type = other RNA
cggaggagttcgaaggtacgct

SEQ ID NO: 3440 - RNA, 23 nt, Synthetic Construct
  source 1..23: mol_type = other RNA
tcctgtactgagctgccccgggt

SEQ ID NO: 3441 - RNA, 15 nt, Synthetic Construct
  source 1..15: mol_type = other RNA
accggaggaaggtgg

SEQ ID NO: 3442 - RNA, 15 nt, Synthetic Construct
  source 1..15: mol_type = other RNA
accggaggaaggtgg

SEQ ID NO: 3443 - RNA, 33 nt, Synthetic Construct; identical to SEQ ID NO: 3082
  source 1..33: mol_type = other RNA

SEQ ID NO: 3444 - RNA, 20 nt, Synthetic Construct
  source 1..20: mol_type = other RNA
tggggtagtaggttgtgtgg

SEQ ID NO: 3445 - RNA, 20 nt, Synthetic Construct
  source 1..20: mol_type = other RNA
tggggtagtaggttgtgtgg

SEQ ID NO: 3446 - RNA, 23 nt, Synthetic Construct
  source 1..23: mol_type = other RNA
tgaggtagtaggttgtgtggttc

SEQ ID NO: 3447 - RNA, 44 nt, Synthetic Construct
  source 1..44: mol_type = other RNA
ctcgctgcgatctattgaaagtcagccctcgacacaagggtttg

SEQ ID NO: 3448 - RNA, 21 nt, Synthetic Construct
  source 1..21: mol_type = other RNA
tgaggggcagagagcgagacc

SEQ ID NO: 3449 - RNA, 34 nt, Synthetic Construct; identical to SEQ ID NO: 2317
  source 1..34: mol_type = other RNA

SEQ ID NO: 3450 - RNA, 33 nt, Synthetic Construct; identical to SEQ ID NO: 2638
  source 1..33: mol_type = other RNA

SEQ ID NO: 3451 - RNA, 33 nt, Synthetic Construct; identical to SEQ ID NO: 2638
  source 1..33: mol_type = other RNA

SEQ ID NO: 3452 - RNA, 35 nt, Synthetic Construct; identical to SEQ ID NO: 2269
  source 1..35: mol_type = other RNA

SEQ ID NO: 3453 - RNA, 18 nt, Synthetic Construct
  source 1..18: mol_type = other RNA
cagcactctgcaaagacg

SEQ ID NO: 3454 - RNA, 18 nt, Synthetic Construct
  source 1..18: mol_type = other RNA
cagcactctgcaaagacg

SEQ ID NO: 3455 - RNA, 36 nt, Synthetic Construct; identical to SEQ ID NO: 2456
  source 1..36: mol_type = other RNA

SEQ ID NO: 3456 - RNA, 36 nt, Synthetic Construct; identical to SEQ ID NO: 2456
  source 1..36: mol_type = other RNA

SEQ ID NO: 3457 - RNA, 24 nt, Synthetic Construct
  source 1..24: mol_type = other RNA
cggagaaggttagctcagccaact

SEQ ID NO: 3458 - RNA, 24 nt, Synthetic Construct
  source 1..24: mol_type = other RNA
cggagaaggttagctcagccaact

SEQ ID NO: 3459 - RNA, 17 nt, Synthetic Construct
  source 1..17: mol_type = other RNA
cagtcaggatgttggct

SEQ ID NO: 3460 - RNA, 17 nt, Synthetic Construct
  source 1..17: mol_type = other RNA
cagtcaggatgttggct

SEQ ID NO: 3461 - RNA, 32 nt, Synthetic Construct; identical to SEQ ID NO: 2582
  source 1..32: mol_type = other RNA

SEQ ID NO: 3462 - RNA, 22 nt, Synthetic Construct
  source 1..22: mol_type = other RNA
tgttggttcaagcgtgtagtcg

SEQ ID NO: 3463 - RNA, 22 nt, Synthetic Construct
  source 1..22: mol_type = other RNA
tgttggttcaagcgtgtagtcg

SEQ ID NO: 3464 - RNA, 22 nt, Synthetic Construct
  source 1..22: mol_type = other RNA
ttcaagtaatccaggataggtt

SEQ ID NO: 3465 - RNA, 42 nt, Synthetic Construct; identical to SEQ ID NO: 748
  source 1..42: mol_type = other RNA

SEQ ID NO: 3466 - RNA, 22 nt, Synthetic Construct
  source 1..22: mol_type = other RNA
ggatatcatcatatactgtaag

SEQ ID NO: 3467 - RNA, 22 nt, Synthetic Construct
  source 1..22: mol_type = other RNA
ggatatcatcatatactgtaag

SEQ ID NO: 3468 - RNA, 18 nt, Synthetic Construct
  source 1..18: mol_type = other RNA
cgccgatgatagtgcgga

SEQ ID NO: 3469 - RNA, 18 nt, Synthetic Construct
  source 1..18: mol_type = other RNA
cgccgatgatagtgcgga

SEQ ID NO: 3470 - RNA, 23 nt, Synthetic Construct
  source 1..23: mol_type = other RNA
tgaggggcagagggcgagacttt

SEQ ID NO: 3471 - RNA, 22 nt, Synthetic Construct
  source 1..22: mol_type = other RNA
ggcagggttcgtgactggggtg

SEQ ID NO: 3472 - RNA, 15 nt, Synthetic Construct
  source 1..15: mol_type = other RNA
acggtcctaaggtag

SEQ ID NO: 3473 - RNA, 15 nt, Synthetic Construct
  source 1..15: mol_type = other RNA
acggtcctaaggtag

SEQ ID NO: 3474 - RNA, 25 nt, Synthetic Construct
  source 1..25: mol_type = other RNA
cctcgcgcgattggagcggccgata

SEQ ID NO: 3475 - RNA, 25 nt, Synthetic Construct
  source 1..25: mol_type = other RNA
cctcgcgcgattggagcggccgata

SEQ ID NO: 3476 - RNA, 23 nt, Synthetic Construct
  source 1..23: mol_type = other RNA
tgaggggcagagagcgaggcttt

SEQ ID NO: 3477 - RNA, 23 nt, Synthetic Construct
  source 1..23: mol_type = other RNA
tgaggggcagagagcgaggcttt

SEQ ID NO: 3478 - RNA, 23 nt, Synthetic Construct
  source 1..23: mol_type = other RNA
tggaaatacgacgtacttagtgt

SEQ ID NO: 3479 - RNA, 23 nt, Synthetic Construct
  source 1..23: mol_type = other RNA
tggaaatacgacgtacttagtgt

SEQ ID NO: 3480 - RNA, 18 nt, Synthetic Construct
  source 1..18: mol_type = other RNA
acagtcaggatgttggct

SEQ ID NO: 3481 - RNA, 18 nt, Synthetic Construct
  source 1..18: mol_type = other RNA
acagtcaggatgttggct

SEQ ID NO: 3482 - RNA, 23 nt, Synthetic Construct
  source 1..23: mol_type = other RNA
tcggatccgtctgagcttggctt

SEQ ID NO: 3483 - RNA, 23 nt, Synthetic Construct
  source 1..23: mol_type = other RNA
tcggatccgtctgagcttggctt

SEQ ID NO: 3484 - RNA, 23 nt, Synthetic Construct
  source 1..23: mol_type = other RNA
ttccccttggggttgtaggacca

SEQ ID NO: 3485 - RNA, 23 nt, Synthetic Construct
  source 1..23: mol_type = other RNA
ttccccttggggttgtaggacca

SEQ ID NO: 3486 - RNA, 16 nt, Synthetic Construct
  source 1..16: mol_type = other RNA
gatttgggagtgctcg

SEQ ID NO: 3487 - RNA, 16 nt, Synthetic Construct
  source 1..16: mol_type = other RNA
gatttgggagtgctcg

SEQ ID NO: 3488 - RNA, 16 nt, Synthetic Construct
  source 1..16: mol_type = other RNA
gatctgtagctggtct

SEQ ID NO: 3489 - RNA, 16 nt, Synthetic Construct
  source 1..16: mol_type = other RNA
gatctgtagctggtct

SEQ ID NO: 3490 - RNA, 19 nt, Synthetic Construct
  source 1..19: mol_type = other RNA
cttggggttgtaggaccac

SEQ ID NO: 3491 - RNA, 19 nt, Synthetic Construct
  source 1..19: mol_type = other RNA
cttggggttgtaggaccac

SEQ ID NO: 3492 - RNA, 33 nt, Synthetic Construct; identical to SEQ ID NO: 2479
  source 1..33: mol_type = other RNA

SEQ ID NO: 3493 - RNA, 33 nt, Synthetic Construct; identical to SEQ ID NO: 2479
  source 1..33: mol_type = other RNA

SEQ ID NO: 3494 - RNA, 26 nt, Synthetic Construct
  source 1..26: mol_type = other RNA
gcgggcgtagctcaggggtagagcgc

SEQ ID NO: 3495 - RNA, 26 nt, Synthetic Construct
  source 1..26: mol_type = other RNA
gcgggcgtagctcaggggtagagcgc

SEQ ID NO: 3496 - RNA, 18 nt, Synthetic Construct
  source 1..18: mol_type = other RNA
cgtgttcggaagattttc

SEQ ID NO: 3497 - RNA, 18 nt, Synthetic Construct
  source 1..18: mol_type = other RNA
cgtgttcggaagattttc

SEQ ID NO: 3498 - RNA, 17 nt, Synthetic Construct
  source 1..17: mol_type = other RNA
gtgttcggaagattttc

SEQ ID NO: 3499 - RNA, 17 nt, Synthetic Construct
  source 1..17: mol_type = other RNA
gtgttcggaagattttc

SEQ ID NO: 3500 - RNA, 15 nt, Synthetic Construct
  source 1..15: mol_type = other RNA
gagtagggcgggaca

SEQ ID NO: 3501 - RNA, 21 nt, Synthetic Construct
  source 1..21: mol_type = other RNA
ngaggtagtaggttgtgtggt

SEQ ID NO: 3502 - RNA, 21 nt, Synthetic Construct
  source 1..21: mol_type = other RNA
ngaggtagtaggttgtgtggt

SEQ ID NO: 3503 - RNA, 21 nt, Synthetic Construct
  source 1..21: mol_type = other RNA
tcacagtgaaccggtctcttt

SEQ ID NO: 3504 - RNA, 23 nt, Synthetic Construct
  source 1..23: mol_type = other RNA
tggaaatacgacgtacttagtgt

SEQ ID NO: 3505 - RNA, 35 nt, Synthetic Construct; identical to SEQ ID NO: 2452
  source 1..35: mol_type = other RNA

SEQ ID NO: 3506 - RNA, 35 nt, Synthetic Construct; identical to SEQ ID NO: 2452
  source 1..35: mol_type = other RNA

SEQ ID NO: 3507 - RNA, 21 nt, Synthetic Construct
  source 1..21: mol_type = other RNA
cgtaccgtgagtaataatgca

SEQ ID NO: 3508 - RNA, 22 nt, Synthetic Construct
  source 1..22: mol_type = other RNA
tgaggtagtagattgtatagta

SEQ ID NO: 3509 - RNA, 17 nt, Synthetic Construct
  source 1..17: mol_type = other RNA
cgatctgtagctggtct

SEQ ID NO: 3510 - RNA, 17 nt, Synthetic Construct
  source 1..17: mol_type = other RNA
cgatctgtagctggtct

SEQ ID NO: 3511 - RNA, 32 nt, Synthetic Construct; identical to SEQ ID NO: 2052
  source 1..32: mol_type = other RNA

SEQ ID NO: 3512 - RNA, 32 nt, Synthetic Construct; identical to SEQ ID NO: 2052
  source 1..32: mol_type = other RNA

SEQ ID NO: 3513 - RNA, 33 nt, Synthetic Construct; identical to SEQ ID NO: 2395
  source 1..33: mol_type = other RNA

SEQ ID NO: 3514 - RNA, 21 nt, Synthetic Construct
  source 1..21: mol_type = other RNA
attagtgacgcgcatgaatgg

SEQ ID NO: 3515 - RNA, 21 nt, Synthetic Construct
  source 1..21: mol_type = other RNA
attagtgacgcgcatgaatgg

SEQ ID NO: 3516 - RNA, 23 nt, Synthetic Construct
  source 1..23: mol_type = other RNA
atatcggaacgtgcccagtcgtg

SEQ ID NO: 3517 - RNA, 23 nt, Synthetic Construct
  source 1..23: mol_type = other RNA
atatcggaacgtgcccagtcgtg

SEQ ID NO: 3518 - RNA, 25 nt, Synthetic Construct
  source 1..25: mol_type = other RNA
tttccccttggggttgtaggaccac

SEQ ID NO: 3519 - RNA, 25 nt, Synthetic Construct
  source 1..25: mol_type = other RNA
tttccccttggggttgtaggaccac

SEQ ID NO: 3520 - RNA, 23 nt, Synthetic Construct
  source 1..23: mol_type = other RNA
tggaatgtaaagaagtatgtatt

SEQ ID NO: 3521 - RNA, 23 nt, Synthetic Construct
  source 1..23: mol_type = other RNA
tggaatgtaaagaagtatgtatt

SEQ ID NO: 3522 - RNA, 23 nt, Synthetic Construct
  source 1..23: mol_type = other RNA
caaagtgctgttcgtgcaggtgg

SEQ ID NO: 3523 - RNA, 20 nt, Synthetic Construct
  source 1..20: mol_type = other RNA
tgagatagtaggttgtgtgg

SEQ ID NO: 3524 - RNA, 20 nt, Synthetic Construct
  source 1..20: mol_type = other RNA
tgagatagtaggttgtgtgg

SEQ ID NO: 3525 - RNA, 22 nt, Synthetic Construct
  source 1..22: mol_type = other RNA
gtcagtttgtcaaataccccat

SEQ ID NO: 3526 - RNA, 22 nt, Synthetic Construct
  source 1..22: mol_type = other RNA
gtcagtttgtcaaataccccat

SEQ ID NO: 3527 - RNA, 16 nt, Synthetic Construct
  source 1..16: mol_type = other RNA
ggtgggggtcgttggt

SEQ ID NO: 3528 - RNA, 16 nt, Synthetic Construct
  source 1..16: mol_type = other RNA
ggtgggggtcgttggt

SEQ ID NO: 3529 - RNA, 31 nt, Synthetic Construct; identical to SEQ ID NO: 2507
  source 1..31: mol_type = other RNA

SEQ ID NO: 3530 - RNA, 17 nt, Synthetic Construct
  source 1..17: mol_type = other RNA
tcccagaaacccggtcg

SEQ ID NO: 3531 - RNA, 17 nt, Synthetic Construct
  source 1..17: mol_type = other RNA
tcccagaaacccggtcg

SEQ ID NO: 3532 - RNA, 15 nt, Synthetic Construct
  source 1..15: mol_type = other RNA
gagagcctggacaca

SEQ ID NO: 3533 - RNA, 34 nt, Synthetic Construct; identical to SEQ ID NO: 2364
  source 1..34: mol_type = other RNA

SEQ ID NO: 3534 - RNA, 21 nt, Synthetic Construct
  source 1..21: mol_type = other RNA
cataaagtagaaagcactact

SEQ ID NO: 3535 - RNA, 21 nt, Synthetic Construct
  source 1..21: mol_type = other RNA
cataaagtagaaagcactact

SEQ ID NO: 3536 - RNA, 19 nt, Synthetic Construct
  source 1..19: mol_type = other RNA
cccttgtcattagttgcta

SEQ ID NO: 3537 - RNA, 19 nt, Synthetic Construct
  source 1..19: mol_type = other RNA
cccttgtcattagttgcta

SEQ ID NO: 3538 - RNA, 23 nt, Synthetic Construct
  source 1..23: mol_type = other RNA
tgaggggcagagagcgggacttt

SEQ ID NO: 3539 - RNA, 23 nt, Synthetic Construct
  source 1..23: mol_type = other RNA
tgaggggcagagagcgggacttt

SEQ ID NO: 3540 - RNA, 23 nt, Synthetic Construct
  source 1..23: mol_type = other RNA
tgaggggcggagagcgagacttt

SEQ ID NO: 3541 - RNA, 32 nt, Synthetic Construct
  source 1..32: mol_type = other RNA
gggctcttagctcagttggtagagcagcggac

SEQ ID NO: 3542 - RNA, 32 nt, Synthetic Construct; identical to SEQ ID NO: 3541
  source 1..32: mol_type = other RNA

SEQ ID NO: 3543 - RNA, 23 nt, Synthetic Construct
  source 1..23: mol_type = other RNA
gtaaacatccttgactggaagct

SEQ ID NO: 3544 - RNA, 23 nt, Synthetic Construct
  source 1..23: mol_type = other RNA
gtaaacatccttgactggaagct

SEQ ID NO: 3545 - RNA, 22 nt, Synthetic Construct
  source 1..22: mol_type = other RNA
cgaggtagtagtttgtgctgtt

SEQ ID NO: 3546 - RNA, 21 nt, Synthetic Construct
  source 1..21: mol_type = other RNA
cgaggggcagagagcgagact

SEQ ID NO: 3547 - RNA, 21 nt, Synthetic Construct
  source 1..21: mol_type = other RNA
cgaggggcagagagcgagact

SEQ ID NO: 3548 - RNA, 19 nt, Synthetic Construct
  source 1..19: mol_type = other RNA
cgactcttagcggtggatc

SEQ ID NO: 3549 - RNA, 19 nt, Synthetic Construct
  source 1..19: mol_type = other RNA
cgactcttagcggtggatc

SEQ ID NO: 3550 - RNA, 22 nt, Synthetic Construct
  source 1..22: mol_type = other RNA
tggcagtgtcttagctggttgt

SEQ ID NO: 3551 - RNA, 21 nt, Synthetic Construct
  source 1..21: mol_type = other RNA
tgaggtagtaggttgcgtggt

SEQ ID NO: 3552 - RNA, 21 nt, Synthetic Construct
  source 1..21: mol_type = other RNA
tgaggtagtaggttgcgtggt

SEQ ID NO: 3553 - RNA, 23 nt, Synthetic Construct
  source 1..23: mol_type = other RNA
tgaggggcagagagcgagacctt

SEQ ID NO: 3554 - RNA, 16 nt, Synthetic Construct
  source 1..16: mol_type = other RNA
ggccgtcgtcagctcg

SEQ ID NO: 3555 - RNA, 16 nt, Synthetic Construct
  source 1..16: mol_type = other RNA
ggccgtcgtcagctcg

SEQ ID NO: 3556 - RNA, 25 nt, Synthetic Construct
  source 1..25: mol_type = other RNA
tgcgagagtaggacgttgccaggtt

SEQ ID NO: 3557 - RNA, 25 nt, Synthetic Construct
  source 1..25: mol_type = other RNA
tgcgagagtaggacgttgccaggtt

SEQ ID NO: 3558 - RNA, 20 nt, Synthetic Construct
  source 1..20: mol_type = other RNA
cgaggtagtaggttgtgtgg

SEQ ID NO: 3559 - RNA, 20 nt, Synthetic Construct
  source 1..20: mol_type = other RNA
cgaggtagtaggttgtgtgg

SEQ ID NO: 3560 - RNA, 26 nt, Synthetic Construct
  source 1..26: mol_type = other RNA
gcataagcgtgcttgactgcgagact

SEQ ID NO: 3561 - RNA, 26 nt, Synthetic Construct
  source 1..26: mol_type = other RNA
gcataagcgtgcttgactgcgagact

SEQ ID NO: 3562 - RNA, 43 nt, Synthetic Construct
  source 1..43: mol_type = other RNA
tcgctgcgatctattgaaagtcagccctcgacacaagggtttg

SEQ ID NO: 3563 - RNA, 24 nt, Synthetic Construct
  source 1..24: mol_type = other RNA
ttccccttggggttgtaggaccac

SEQ ID NO: 3564 - RNA, 24 nt, Synthetic Construct
  source 1..24: mol_type = other RNA
ttccccttggggttgtaggaccac

SEQ ID NO: 3565 - RNA, 21 nt, Synthetic Construct
  source 1..21: mol_type = other RNA
tggcagtgtcttagctggttg

SEQ ID NO: 3566 - RNA, 24 nt, Synthetic Construct
  source 1..24: mol_type = other RNA
tgtaaacatccccgactggaagcc

SEQ ID NO: 3567 - RNA, 19 nt, Synthetic Construct
  source 1..19: mol_type = other RNA
ccgtgttcggaagattttc

SEQ ID NO: 3568 - RNA, 19 nt, Synthetic Construct
  source 1..19: mol_type = other RNA
ccgtgttcggaagattttc

SEQ ID NO: 3569 - RNA, 23 nt, Synthetic Construct
  source 1..23: mol_type = other RNA
tggaatgtaaagaagtatgtacc

SEQ ID NO: 3570 - RNA, 23 nt, Synthetic Construct
  source 1..23: mol_type = other RNA
tggtaatacgacgtacttggtgt

SEQ ID NO: 3571 - RNA, 23 nt, Synthetic Construct
  source 1..23: mol_type = other RNA
tggtaatacgacgtacttggtgt

SEQ ID NO: 3572 - RNA, 21 nt, Synthetic Construct
  source 1..21: mol_type = other RNA
agagtaggacgttgccaggtt

SEQ ID NO: 3573 - RNA, 21 nt, Synthetic Construct
  source 1..21: mol_type = other RNA
agagtaggacgttgccaggtt

SEQ ID NO: 3574 - RNA, 21 nt, Synthetic Construct
  source 1..21: mol_type = other RNA
tgaggggcagagagcgagaca

SEQ ID NO: 3575 - RNA, 23 nt, Synthetic Construct
  source 1..23: mol_type = other RNA
cgagagtaggacgttgccaggtt

SEQ ID NO: 3576 - RNA, 23 nt, Synthetic Construct
  source 1..23: mol_type = other RNA
cgagagtaggacgttgccaggtt

SEQ ID NO: 3577 - RNA, 27 nt, Synthetic Construct
  source 1..27: mol_type = other RNA
atagtctttgttcgattccgttgagta

SEQ ID NO: 3578 - RNA, 27 nt, Synthetic Construct
  source 1..27: mol_type = other RNA
atagtctttgttcgattccgttgagta

SEQ ID NO: 3579 - RNA, 21 nt, Synthetic Construct
  source 1..21: mol_type = other RNA
taaggtagtaggttgtgtggt

SEQ ID NO: 3580 - RNA, 21 nt, Synthetic Construct
  source 1..21: mol_type = other RNA
taaggtagtaggttgtgtggt

SEQ ID NO: 3581 - RNA, 34 nt, Synthetic Construct; identical to SEQ ID NO: 2019
  source 1..34: mol_type = other RNA

SEQ ID NO: 3582 - RNA, 21 nt, Synthetic Construct
  source 1..21: mol_type = other RNA
tgaggtagtaggtcgtgtggt

SEQ ID NO: 3583 - RNA, 21 nt, Synthetic Construct
  source 1..21: mol_type = other RNA
tgaggtagtaggtcgtgtggt

SEQ ID NO: 3584 - RNA, 21 nt, Synthetic Construct
  source 1..21: mol_type = other RNA
tggaatgtaaagaagtatgta

SEQ ID NO: 3585 - RNA, 21 nt, Synthetic Construct
  source 1..21: mol_type = other RNA
tggaatgtaaagaagtatgta

SEQ ID NO: 3586 - RNA, 21 nt, Synthetic Construct
  source 1..21: mol_type = other RNA
gttggttcaagcgtgtagtcg

SEQ ID NO: 3587 - RNA, 21 nt, Synthetic Construct
  source 1..21: mol_type = other RNA
gttggttcaagcgtgtagtcg

SEQ ID NO: 3588 - RNA, 25 nt, Synthetic Construct
  source 1..25: mol_type = other RNA
gggttgtaaaccgcttttgtcaggg

SEQ ID NO: 3589 - RNA, 15 nt, Synthetic Construct
  source 1..15: mol_type = other RNA
ggtcatcgtcaggct

SEQ ID NO: 3590 - RNA, 36 nt, Synthetic Construct; identical to SEQ ID NO: 2248
  source 1..36: mol_type = other RNA

SEQ ID NO: 3591 - RNA, 15 nt, Synthetic Construct
  source 1..15: mol_type = other RNA
gcgtagatatgcgga

SEQ ID NO: 3592 - RNA, 21 nt, Synthetic Construct
  source 1..21: mol_type = other RNA
acagcaggacggtggccatgg

SEQ ID NO: 3593 - RNA, 21 nt, Synthetic Construct
  source 1..21: mol_type = other RNA
acagcaggacggtggccatgg

SEQ ID NO: 3594 - RNA, 34 nt, Synthetic Construct; identical to SEQ ID NO: 2186
  source 1..34: mol_type = other RNA

SEQ ID NO: 3595 - RNA, 15 nt, Synthetic Construct
  source 1..15: mol_type = other RNA
gctagtaatcgcgga

SEQ ID NO: 3596 - RNA, 36 nt, Synthetic Construct
  source 1..36: mol_type = other RNA
ctctggacagttactgacgctgaggcacgaaggcca

SEQ ID NO: 3597 - RNA, 36 nt, Synthetic Construct; identical to SEQ ID NO: 3596
  source 1..36: mol_type = other RNA

SEQ ID NO: 3598 - RNA, 30 nt, Synthetic Construct; identical to SEQ ID NO: 2578
  source 1..30: mol_type = other RNA

SEQ ID NO: 3599 - RNA, 22 nt, Synthetic Construct
  source 1..22: mol_type = other RNA
tgaggtagtagtttgtgctggt

SEQ ID NO: 3600 - RNA, 30 nt, Synthetic Construct; identical to SEQ ID NO: 751
  source 1..30: mol_type = other RNA

SEQ ID NO: 3601 - RNA, 30 nt, Synthetic Construct; identical to SEQ ID NO: 751
  source 1..30: mol_type = other RNA

SEQ ID NO: 3602 - RNA, 22 nt, Synthetic Construct
  source 1..22: mol_type = other RNA
ttctgtactgagctgccccgag

SEQ ID NO: 3603 - RNA, 22 nt, Synthetic Construct
  source 1..22: mol_type = other RNA
ttctgtactgagctgccccgag

SEQ ID NO: 3604 - RNA, 21 nt, Synthetic Construct
  source 1..21: mol_type = other RNA
ggaatcgctagtaatcgcgga

SEQ ID NO: 3605 - RNA, 21 nt, Synthetic Construct
  source 1..21: mol_type = other RNA
ggaatcgctagtaatcgcgga

SEQ ID NO: 3606 - RNA, 34 nt, Synthetic Construct; identical to SEQ ID NO: 385
  source 1..34: mol_type = other RNA

SEQ ID NO: 3607 - RNA, 20 nt, Synthetic Construct
  source 1..20: mol_type = other RNA
acccttgtcattagttgcta

SEQ ID NO: 3608 - RNA, 20 nt, Synthetic Construct
  source 1..20: mol_type = other RNA
acccttgtcattagttgcta

SEQ ID NO: 3609 - RNA, 23 nt, Synthetic Construct
  source 1..23: mol_type = other RNA
caaagtgcttacagtgcaggtag

SEQ ID NO: 3610 - RNA, 23 nt, Synthetic Construct
  source 1..23: mol_type = other RNA
caaagtgcttacagtgcaggtag

SEQ ID NO: 3611 - RNA, 21 nt, Synthetic Construct
  source 1..21: mol_type = other RNA
tgaggtagtaggctgtgtggt

SEQ ID NO: 3612 - RNA, 21 nt, Synthetic Construct
  source 1..21: mol_type = other RNA
tgaggtagtaggctgtgtggt

SEQ ID NO: 3613 - RNA, 15 nt, Synthetic Construct
  source 1..15: mol_type = other RNA
cgatatggcatgaga

SEQ ID NO: 3614 - RNA, 15 nt, Synthetic Construct
  source 1..15: mol_type = other RNA
cgatatggcatgaga

SEQ ID NO: 3615 - RNA, 29 nt, Synthetic Construct
  source 1..29: mol_type = other RNA
gatgcgaaagcaggtcaaagtgatccggc

SEQ ID NO: 3616 - RNA, 29 nt, Synthetic Construct
  source 1..29: mol_type = other RNA
gatgcgaaagcaggtcaaagtgatccggc

SEQ ID NO: 3617 - RNA, 22 nt, Synthetic Construct
  source 1..22: mol_type = other RNA
tgaggtagtaggttgtgtagtt

SEQ ID NO: 3618 - RNA, 32 nt, Synthetic Construct; identical to SEQ ID NO: 2467
  source 1..32: mol_type = other RNA

SEQ ID NO: 3619 - RNA, 32 nt, Synthetic Construct; identical to SEQ ID NO: 2467
  source 1..32: mol_type = other RNA

SEQ ID NO: 3620 - RNA, 21 nt, Synthetic Construct
  source 1..21: mol_type = other RNA
tgaggtagtagattgtataga

SEQ ID NO: 3621 - RNA, 23 nt, Synthetic Construct
  source 1..23: mol_type = other RNA
tcggatccgtctgagcttggctt

SEQ ID NO: 3622 - RNA, 43 nt, Synthetic Construct; identical to SEQ ID NO: 2315
  source 1..43: mol_type = other RNA

SEQ ID NO: 3623 - RNA, 43 nt, Synthetic Construct; identical to SEQ ID NO: 2315
  source 1..43: mol_type = other RNA

SEQ ID NO: 3624 - RNA, 22 nt, Synthetic Construct
  source 1..22: mol_type = other RNA
tggaatgtaaagaagcatgtat

SEQ ID NO: 3625 - RNA, 22 nt, Synthetic Construct
  source 1..22: mol_type = other RNA
tggaatgtaaagaagcatgtat

SEQ ID NO: 3626 - RNA, 22 nt, Synthetic Construct
  source 1..22: mol_type = other RNA
gtgccgaagctgtgggattgat

SEQ ID NO: 3627 - RNA, 22 nt, Synthetic Construct
  source 1..22: mol_type = other RNA
gtgccgaagctgtgggattgat

SEQ ID NO: 3628 - RNA, 21 nt, Synthetic Construct
  source 1..21: mol_type = other RNA
agcgtgcttgactgcgagact

SEQ ID NO: 3629 - RNA, 21 nt, Synthetic Construct
  source 1..21: mol_type = other RNA
agcgtgcttgactgcgagact

SEQ ID NO: 3630 - RNA, 36 nt, Synthetic Construct; identical to SEQ ID NO: 2546
  source 1..36: mol_type = other RNA

SEQ ID NO: 3631 - RNA, 18 nt, Synthetic Construct
  source 1..18: mol_type = other RNA
gaagttgaccgcctgggg

SEQ ID NO: 3632 - RNA, 18 nt, Synthetic Construct
  source 1..18: mol_type = other RNA
gaagttgaccgcctgggg

SEQ ID NO: 3633 - RNA, 20 nt, Synthetic Construct
  source 1..20: mol_type = other RNA
tgaggtagtgggttgtgtgg

SEQ ID NO: 3634 - RNA, 20 nt, Synthetic Construct
  source 1..20: mol_type = other RNA
tgaggtagtgggttgtgtgg

SEQ ID NO: 3635 - RNA, 20 nt, Synthetic Construct
  source 1..20: mol_type = other RNA
aatgacacgatcactcccgt

SEQ ID NO: 3636 - RNA, 20 nt, Synthetic Construct
  source 1..20: mol_type = other RNA
aatgacacgatcactcccgt

SEQ ID NO: 3637 - RNA, 23 nt, Synthetic Construct
  source 1..23: mol_type = other RNA
tagtaatacgacgtacttagtgt

SEQ ID NO: 3638 - RNA, 20 nt, Synthetic Construct
  source 1..20: mol_type = other RNA
tcagtagctcgaggaaaaga

SEQ ID NO: 3639 - RNA, 20 nt, Synthetic Construct
  source 1..20: mol_type = other RNA
tcagtagctcgaggaaaaga

SEQ ID NO: 3640 - RNA, 22 nt, Synthetic Construct
  source 1..22: mol_type = other RNA
tgaggtagtaggttgtgtagtt

SEQ ID NO: 3641 - RNA, 31 nt, Synthetic Construct; identical to SEQ ID NO: 758
  source 1..31: mol_type = other RNA

SEQ ID NO: 3642 - RNA, 31 nt, Synthetic Construct; identical to SEQ ID NO: 758
  source 1..31: mol_type = other RNA

SEQ ID NO: 3643 - RNA, 36 nt, Synthetic Construct; identical to SEQ ID NO: 2366
  source 1..36: mol_type = other RNA

SEQ ID NO: 3644 - RNA, 19 nt, Synthetic Construct
  source 1..19: mol_type = other RNA
ccttggggttgtaggacca

SEQ ID NO: 3645 - RNA, 19 nt, Synthetic Construct
  source 1..19: mol_type = other RNA
ccttggggttgtaggacca

SEQ ID NO: 3646 - RNA, 16 nt, Synthetic Construct
  source 1..16: mol_type = other RNA
gtccccttcgtctaga

SEQ ID NO: 3647 - RNA, 16 nt, Synthetic Construct
  source 1..16: mol_type = other RNA
gtccccttcgtctaga

SEQ ID NO: 3648 - RNA, 22 nt, Synthetic Construct
  source 1..22: mol_type = other RNA
nattgcacttgtcccggcctgt

SEQ ID NO: 3649 - RNA, 20 nt, Synthetic Construct
  source 1..20: mol_type = other RNA
caatggccgggacagagggc

SEQ ID NO: 3650 - RNA, 24 nt, Synthetic Construct
  source 1..24: mol_type = other RNA
tgtagacatccccgactggaagct

SEQ ID NO: 3651 - RNA, 16 nt, Synthetic Construct
  source 1..16: mol_type = other RNA
gcaagaggtcagcggt

SEQ ID NO: 3652 - RNA, 16 nt, Synthetic Construct
  source 1..16: mol_type = other RNA
gcaagaggtcagcggt

SEQ ID NO: 3653 - RNA, 25 nt, Synthetic Construct
  source 1..25: mol_type = other RNA
gagaaagctcacaagaactgctaac

SEQ ID NO: 3654 - RNA, 25 nt, Synthetic Construct
  source 1..25: mol_type = other RNA
gagaaagctcacaagaactgctaac

SEQ ID NO: 3655 - RNA, 23 nt, Synthetic Construct
  source 1..23: mol_type = other RNA
tgaggggcagagagcaagacttt

SEQ ID NO: 3656 - RNA, 23 nt, Synthetic Construct
  source 1..23: mol_type = other RNA
tgaggggcagagagcaagacttt

SEQ ID NO: 3657 - RNA, 21 nt, Synthetic Construct
  source 1..21: mol_type = other RNA
ttcacagtggctaagttctgc

SEQ ID NO: 3658 - RNA, 17 nt, Synthetic Construct
  source 1..17: mol_type = other RNA
gaagttgaccgcctggg

SEQ ID NO: 3659 - RNA, 17 nt, Synthetic Construct
  source 1..17: mol_type = other RNA
gaagttgaccgcctggg

SEQ ID NO: 3660 - RNA, 43 nt, Synthetic Construct; identical to SEQ ID NO: 725
  source 1..43: mol_type = other RNA

SEQ ID NO: 3661 - RNA, 22 nt, Synthetic Construct
  source 1..22: mol_type = other RNA
cggaatgtaaagaagtatgtat

SEQ ID NO: 3662 - RNA, 22 nt, Synthetic Construct
  source 1..22: mol_type = other RNA
cggaatgtaaagaagtatgtat

SEQ ID NO: 3663 - RNA, 27 nt, Synthetic Construct
  source 1..27: mol_type = other RNA
agagcagctaataccgcatacgacctg

SEQ ID NO: 3664 - RNA, 27 nt, Synthetic Construct
  source 1..27: mol_type = other RNA
agagcagctaataccgcatacgacctg

SEQ ID NO: 3665 - RNA, 21 nt, Synthetic Construct
  source 1..21: mol_type = other RNA
gctttgatccggagatttccg

SEQ ID NO: 3666 - RNA, 20 nt, Synthetic Construct
  source 1..20: mol_type = other RNA
tgaggtggtaggttgtgtgg

SEQ ID NO: 3667 - RNA, 20 nt, Synthetic Construct
  source 1..20: mol_type = other RNA
tgaggtggtaggttgtgtgg

SEQ ID NO: 3668 - RNA, 15 nt, Synthetic Construct
  source 1..15: mol_type = other RNA
gggtgaaagcggggg

SEQ ID NO: 3669 - RNA, 21 nt, Synthetic Construct
  source 1..21: mol_type = other RNA
tgaggggcagagggcgagact

SEQ ID NO: 3670 - RNA, 21 nt, Synthetic Construct
  source 1..21: mol_type = other RNA
tgaggggcagagggcgagact

SEQ ID NO: 3671 - RNA, 38 nt, Synthetic Construct; identical to SEQ ID NO: 2492
  source 1..38: mol_type = other RNA

SEQ ID NO: 3672 - RNA, 22 nt, Synthetic Construct
  source 1..22: mol_type = other RNA
tgaggtagtagtctgtgctgtt

SEQ ID NO: 3673 - RNA, 17 nt, Synthetic Construct
  source 1..17: mol_type = other RNA
gcgtagatatgcggagg

SEQ ID NO: 3674 - RNA, 21 nt, Synthetic Construct
  source 1..21: mol_type = other RNA
tgaggtagtgggttgtgtggt

SEQ ID NO: 3675 - RNA, 21 nt, Synthetic Construct
  source 1..21: mol_type = other RNA
tgaggtagtgggttgtgtggt

SEQ ID NO: 3676 - RNA, 23 nt, Synthetic Construct
  source 1..23: mol_type = other RNA
tcggaatcgctagtaatcgcgga

SEQ ID NO: 3677 - RNA, 23 nt, Synthetic Construct
  source 1..23: mol_type = other RNA
tcggaatcgctagtaatcgcgga

SEQ ID NO: 3678 - RNA, 22 nt, Synthetic Construct
  source 1..22: mol_type = other RNA
tgaggtagtagttcgtgctgtt

SEQ ID NO: 3679 - RNA, 24 nt, Synthetic Construct
  source 1..24: mol_type = other RNA
tgtaaacatccccgactggaagtt

SEQ ID NO: 3680 - RNA, 23 nt, Synthetic Construct
  source 1..23: mol_type = other RNA
tggtaatacgacgtgcttagtgt

SEQ ID NO: 3681 - RNA, 23 nt, Synthetic Construct
  source 1..23: mol_type = other RNA
tggtaatacgacgtgcttagtgt

SEQ ID NO: 3682 - RNA, 28 nt, Synthetic Construct
  source 1..28: mol_type = other RNA
ccgtgtgaaagtaggtcatcgtcaggct

SEQ ID NO: 3683 - RNA, 28 nt, Synthetic Construct
  source 1..28: mol_type = other RNA
ccgtgtgaaagtaggtcatcgtcaggct

SEQ ID NO: 3684 - RNA, 22 nt, Synthetic Construct
  source 1..22: mol_type = other RNA
ngaggtagtagtttgtgctgtt

SEQ ID NO: 3685 - RNA, 22 nt, Synthetic Construct
  source 1..22: mol_type = other RNA
ngaggtagtagtttgtgctgtt

SEQ ID NO: 3686 - RNA, 20 nt, Synthetic Construct
  source 1..20: mol_type = other RNA
tgaggtagtaggttgtatgg

SEQ ID NO: 3687 - RNA, 16 nt, Synthetic Construct
  source 1..16: mol_type = other RNA
ccgcttttgtcaggga

SEQ ID NO: 3688 - RNA, 16 nt, Synthetic Construct
  source 1..16: mol_type = other RNA
ccgcttttgtcaggga

SEQ ID NO: 3689 - RNA, 35 nt, Synthetic Construct; identical to SEQ ID NO: 2402
  source 1..35: mol_type = other RNA

SEQ ID NO: 3690 - RNA, 35 nt, Synthetic Construct; identical to SEQ ID NO: 2402
  source 1..35: mol_type = other RNA

SEQ ID NO: 3691 - RNA, 21 nt, Synthetic Construct
  source 1..21: mol_type = other RNA
cgcgacctcagatcagacgtg

SEQ ID NO: 3692 - RNA, 21 nt, Synthetic Construct
  source 1..21: mol_type = other RNA
cgcgacctcagatcagacgtg

SEQ ID NO: 3693 - RNA, 22 nt, Synthetic Construct
  source 1..22: mol_type = other RNA
tgaggtagtaaattgtatagtt

SEQ ID NO: 3694 - RNA, 22 nt, Synthetic Construct
  source 1..22: mol_type = other RNA
tgaggaagtagtttgtgctgtt

SEQ ID NO: 3695 - RNA, 17 nt, Synthetic Construct
  source 1..17: mol_type = other RNA
gccatgccgcgtgcggg

SEQ ID NO: 3696 - RNA, 17 nt, Synthetic Construct
  source 1..17: mol_type = other RNA
gccatgccgcgtgcggg

SEQ ID NO: 3697 - RNA, 16 nt, Synthetic Construct
  source 1..16: mol_type = other RNA
acggcgggagtaacta

SEQ ID NO: 3698 - RNA, 16 nt, Synthetic Construct
  source 1..16: mol_type = other RNA
acggcgggagtaacta

SEQ ID NO: 3699 - RNA, 21 nt, Synthetic Construct
  source 1..21: mol_type = other RNA
tgaggaagtaggttgtgtggt

SEQ ID NO: 3700 - RNA, 21 nt, Synthetic Construct
  source 1..21: mol_type = other RNA
tgaggaagtaggttgtgtggt

SEQ ID NO: 3701 - RNA, 23 nt, Synthetic Construct
  source 1..23: mol_type = other RNA
tcctgtactgagccgccccgaga

SEQ ID NO: 3702 - RNA, 23 nt, Synthetic Construct
  source 1..23: mol_type = other RNA
tcctgtactgagccgccccgaga

SEQ ID NO: 3703 - RNA, 23 nt, Synthetic Construct
  source 1..23: mol_type = other RNA
tccagtactgagctgccccgagt

SEQ ID NO: 3704 - RNA, 23 nt, Synthetic Construct
  source 1..23: mol_type = other RNA
tccagtactgagctgccccgagt

SEQ ID NO: 3705 - RNA, 17 nt, Synthetic Construct
  source 1..17: mol_type = other RNA
cctcgcgcgattggagc

SEQ ID NO: 3706 - RNA, 17 nt, Synthetic Construct
  source 1..17: mol_type = other RNA
cctcgcgcgattggagc

SEQ ID NO: 3707 - RNA, 25 nt, Synthetic Construct
  source 1..25: mol_type = other RNA
ttgaggatatgagatcgagacaaca

SEQ ID NO: 3708 - RNA, 23 nt, Synthetic Construct
  source 1..23: mol_type = other RNA
tgaggggcagagagcgagactct

SEQ ID NO: 3709 - RNA, 35 nt, Synthetic Construct; identical to SEQ ID NO: 2567
  source 1..35: mol_type = other RNA

SEQ ID NO: 3710 - RNA, 35 nt, Synthetic Construct; identical to SEQ ID NO: 2567
  source 1..35: mol_type = other RNA

SEQ ID NO: 3711 - RNA, 24 nt, Synthetic Construct
  source 1..24: mol_type = other RNA
aaaccgttaccattactgagttta

SEQ ID NO: 3712 - RNA, 24 nt, Synthetic Construct
  source 1..24: mol_type = other RNA
aaaccgttaccattactgagttta

SEQ ID NO: 3713 - RNA, 32 nt, Synthetic Construct
  source 1..32: mol_type = other RNA
ccgtaccgagggttcgaatccctccctctccg

SEQ ID NO: 3714 - RNA, 32 nt, Synthetic Construct; identical to SEQ ID NO: 3713
  source 1..32: mol_type = other RNA

SEQ ID NO: 3715 - RNA, 31 nt, Synthetic Construct; identical to SEQ ID NO: 960
  source 1..31: mol_type = other RNA

SEQ ID NO: 3716 - RNA, 31 nt, Synthetic Construct; identical to SEQ ID NO: 960
  source 1..31: mol_type = other RNA

SEQ ID NO: 3717 - RNA, 18 nt, Synthetic Construct
  source 1..18: mol_type = other RNA
gtcgacgtatagggtgtg

SEQ ID NO: 3718 - RNA, 18 nt, Synthetic Construct
  source 1..18: mol_type = other RNA
gtcgacgtatagggtgtg

SEQ ID NO: 3719 - RNA, 36 nt, Synthetic Construct; identical to SEQ ID NO: 777
  source 1..36: mol_type = other RNA

SEQ ID NO: 3720 - RNA, 36 nt, Synthetic Construct; identical to SEQ ID NO: 777
  source 1..36: mol_type = other RNA

SEQ ID NO: 3721 - RNA, 18 nt, Synthetic Construct
  source 1..18: mol_type = other RNA
atggccgggacagagggc

SEQ ID NO: 3722 - RNA, 18 nt, Synthetic Construct
  source 1..18: mol_type = other RNA
atggccgggacagagggc

SEQ ID NO: 3723 - RNA, 17 nt, Synthetic Construct
  source 1..17: mol_type = other RNA
tgccagcagccgcggta

SEQ ID NO: 3724 - RNA, 17 nt, Synthetic Construct
  source 1..17: mol_type = other RNA
tgccagcagccgcggta

SEQ ID NO: 3725 - RNA, 22 nt, Synthetic Construct
  source 1..22: mol_type = other RNA
taccctgtagaaccgaatttgt

SEQ ID NO: 3726 - RNA, 36 nt, Synthetic Construct; identical to SEQ ID NO: 2478
  source 1..36: mol_type = other RNA

SEQ ID NO: 3727 - RNA, 36 nt, Synthetic Construct; identical to SEQ ID NO: 2478
  source 1..36: mol_type = other RNA

SEQ ID NO: 3728 - RNA, 22 nt, Synthetic Construct
  source 1..22: mol_type = other RNA
tcgaaccgtgagtaataatgcg

SEQ ID NO: 3729 - RNA, 37 nt, Synthetic Construct; identical to SEQ ID NO: 2447
  source 1..37: mol_type = other RNA

SEQ ID NO: 3730 - RNA, 37 nt, Synthetic Construct; identical to SEQ ID NO: 2447
  source 1..37: mol_type = other RNA

SEQ ID NO: 3731 - RNA, 16 nt, Synthetic Construct
  source 1..16: mol_type = other RNA
ccatgccgcgtgcggg

SEQ ID NO: 3732 - RNA, 16 nt, Synthetic Construct
  source 1..16: mol_type = other RNA
ccatgccgcgtgcggg

SEQ ID NO: 3733 - RNA, 21 nt, Synthetic Construct
  source 1..21: mol_type = other RNA
cgaggtagtaggttgtgtggt

SEQ ID NO: 3734 - RNA, 21 nt, Synthetic Construct
  source 1..21: mol_type = other RNA
cgaggtagtaggttgtgtggt

SEQ ID NO: 3735 - RNA, 32 nt, Synthetic Construct; identical to SEQ ID NO: 2318
  source 1..32: mol_type = other RNA

SEQ ID NO: 3736 - RNA, 41 nt, Synthetic Construct; identical to SEQ ID NO: 781
  source 1..41: mol_type = other RNA

SEQ ID NO: 3737 - RNA, 24 nt, Synthetic Construct
  source 1..24: mol_type = other RNA
gtctttgttcgattccgttgagta

SEQ ID NO: 3738 - RNA, 24 nt, Synthetic Construct
  source 1..24: mol_type = other RNA
gtctttgttcgattccgttgagta

SEQ ID NO: 3739 - RNA, 22 nt, Synthetic Construct
  source 1..22: mol_type = other RNA
tgaagtagtaggttgtgtggtt

SEQ ID NO: 3740 - RNA, 15 nt, Synthetic Construct
  source 1..15: mol_type = other RNA
gttcggaagattttc

SEQ ID NO: 3741 - RNA, 15 nt, Synthetic Construct
  source 1..15: mol_type = other RNA
gttcggaagattttc

SEQ ID NO: 3742 - RNA, 21 nt, Synthetic Construct
  source 1..21: mol_type = other RNA
aagaaagattgcaagaactgc

SEQ ID NO: 3743 - RNA, 22 nt, Synthetic Construct
  source 1..22: mol_type = other RNA
tggggtagtaggttgtgtggtt

SEQ ID NO: 3744 - RNA, 22 nt, Synthetic Construct
  source 1..22: mol_type = other RNA
tggggtagtaggttgtgtggtt

SEQ ID NO: 3745 - RNA, 22 nt, Synthetic Construct
  source 1..22: mol_type = other RNA
tgaagtagtagtttgtgctgtt

SEQ ID NO: 3746 - RNA, 27 nt, Synthetic Construct
  source 1..27: mol_type = other RNA
catgcgagagtaggacgttgccaggtt

SEQ ID NO: 3747 - RNA, 27 nt, Synthetic Construct
  source 1..27: mol_type = other RNA
catgcgagagtaggacgttgccaggtt

SEQ ID NO: 3748 - RNA, 32 nt, Synthetic Construct
  source 1..32: mol_type = other RNA
gcatcatttgtttagtggtagaatggaacgtt

SEQ ID NO: 3749 - RNA, 32 nt, Synthetic Construct; identical to SEQ ID NO: 3748
  source 1..32: mol_type = other RNA

SEQ ID NO: 3750 - RNA, 23 nt, Synthetic Construct
  source 1..23: mol_type = other RNA
taaggggcagagagcgagacttt

SEQ ID NO: 3751 - RNA, 23 nt, Synthetic Construct
  source 1..23: mol_type = other RNA
taaggggcagagagcgagacttt

SEQ ID NO: 3752 - RNA, 25 nt, Synthetic Construct
  source 1..25: mol_type = other RNA
ttgaggatatgagatcgaggcgaca

SEQ ID NO: 3753 - RNA, 22 nt, Synthetic Construct
  source 1..22: mol_type = other RNA
taacagtctacagccatggtcg

SEQ ID NO: 3754 - RNA, 23 nt, Synthetic Construct
  source 1..23: mol_type = other RNA
tgaggggcagagagcaagacttt

SEQ ID NO: 3755 - RNA, 24 nt, Synthetic Construct
  source 1..24: mol_type = other RNA
tcggatccgtctgagcttggcttt

SEQ ID NO: 3756 - RNA, 35 nt, Synthetic Construct; identical to SEQ ID NO: 2354
  source 1..35: mol_type = other RNA

SEQ ID NO: 3757 - RNA, 23 nt, Synthetic Construct
  source 1..23: mol_type = other RNA
cctcgcgcgattggagcggccga

SEQ ID NO: 3758 - RNA, 23 nt, Synthetic Construct
  source 1..23: mol_type = other RNA
cctcgcgcgattggagcggccga

SEQ ID NO: 3759 - RNA, 18 nt, Synthetic Construct
  source 1..18: mol_type = other RNA
ggccgtcgtcagctcgtg

SEQ ID NO: 3760 - RNA, 18 nt, Synthetic Construct
  source 1..18: mol_type = other RNA
ggccgtcgtcagctcgtg

SEQ ID NO: 3761 - RNA, 24 nt, Synthetic Construct
  source 1..24: mol_type = other RNA
tcggatccgtctgagcttggcttt

SEQ ID NO: 3762 - RNA, 23 nt, Synthetic Construct
  source 1..23: mol_type = other RNA
tggtagtacgacgtacttagtgt

SEQ ID NO: 3763 - RNA, 31 nt, Synthetic Construct; identical to SEQ ID NO: 2310
  source 1..31: mol_type = other RNA

SEQ ID NO: 3764 - RNA, 23 nt, Synthetic Construct
  source 1..23: mol_type = other RNA
tgaggtagtaggttgtgtggttc

SEQ ID NO: 3765 - RNA, 22 nt, Synthetic Construct
  source 1..22: mol_type = other RNA
tgaggtagtggtttgtgctgtt

SEQ ID NO: 3766 - RNA, 22 nt, Synthetic Construct
  source 1..22: mol_type = other RNA
tgaggtagtggtttgtgctgtt

SEQ ID NO: 3767 - RNA, 16 nt, Synthetic Construct
  source 1..16: mol_type = other RNA
gtctacagccatacca

SEQ ID NO: 3768 - RNA, 16 nt, Synthetic Construct
  source 1..16: mol_type = other RNA
gtctacagccatacca

SEQ ID NO: 3769 - RNA, 22 nt, Synthetic Construct
  source 1..22: mol_type = other RNA
tgaggtagtggtttgtgctgtt

SEQ ID NO: 3770 - RNA, 21 nt, Synthetic Construct
  source 1..21: mol_type = other RNA
tgaggtagtagtttgtgctgc

SEQ ID NO: 3771 - RNA, 21 nt, Synthetic Construct
  source 1..21: mol_type = other RNA
aatggcgccactagggttgtg

SEQ ID NO: 3772 - RNA, 21 nt, Synthetic Construct
  source 1..21: mol_type = other RNA
aatggcgccactagggttgtg

SEQ ID NO: 3773 - RNA, 23 nt, Synthetic Construct
  source 1..23: mol_type = other RNA
tgaggggcagagagcgagacttc

SEQ ID NO: 3774 - RNA, 23 nt, Synthetic Construct
  source 1..23: mol_type = other RNA
tgaggggcagagagcgagacttc

SEQ ID NO: 3775 - RNA, 25 nt, Synthetic Construct
  source 1..25: mol_type = other RNA
ttgaggatatgagatcgggacgaca

SEQ ID NO: 3776 - RNA, 25 nt, Synthetic Construct
  source 1..25: mol_type = other RNA
ttgaggatatgagatcgggacgaca

SEQ ID NO: 3777 - RNA, 17 nt, Synthetic Construct
  source 1..17: mol_type = other RNA
cgaaattccttgtcggg

SEQ ID NO: 3778 - RNA, 17 nt, Synthetic Construct
  source 1..17: mol_type = other RNA
cgaaattccttgtcggg

SEQ ID NO: 3779 - RNA, 34 nt, Synthetic Construct; identical to SEQ ID NO: 2529
  source 1..34: mol_type = other RNA

SEQ ID NO: 3780 - RNA, 23 nt, Synthetic Construct
  source 1..23: mol_type = other RNA
ggcagcattgtacagggctatga

SEQ ID NO: 3781 - RNA, 25 nt, Synthetic Construct
  source 1..25: mol_type = other RNA
atttccccttggggttgtaggacca

SEQ ID NO: 3782 - RNA, 25 nt, Synthetic Construct
  source 1..25: mol_type = other RNA
atttccccttggggttgtaggacca

SEQ ID NO: 3783 - RNA, 15 nt, Synthetic Construct
  source 1..15: mol_type = other RNA
cgagtgacgtagtgt

SEQ ID NO: 3784 - RNA, 15 nt, Synthetic Construct
  source 1..15: mol_type = other RNA
cgagtgacgtagtgt

SEQ ID NO: 3785 - RNA, 29 nt, Synthetic Construct
  source 1..29: mol_type = other RNA
cccgtgtgaaagtaggtcatcgtcaggct

SEQ ID NO: 3786 - RNA, 21 nt, Synthetic Construct
  source 1..21: mol_type = other RNA
aacccgtagatccgaacttgt

SEQ ID NO: 3787 - RNA, 31 nt, Synthetic Construct; identical to SEQ ID NO: 2412
  source 1..31: mol_type = other RNA

SEQ ID NO: 3788 - RNA, 31 nt, Synthetic Construct; identical to SEQ ID NO: 2412
  source 1..31: mol_type = other RNA

SEQ ID NO: 3789 - RNA, 22 nt, Synthetic Construct
  source 1..22: mol_type = other RNA
tggaatgtaaagaagtatgtac

SEQ ID NO: 3790 - RNA, 22 nt, Synthetic Construct
  source 1..22: mol_type = other RNA
tggaatgtaaagaagtatgtac

SEQ ID NO: 3791 - RNA, 18 nt, Synthetic Construct
  source 1..18: mol_type = other RNA
cataaagtagaaagcact

SEQ ID NO: 3792 - RNA, 18 nt, Synthetic Construct
  source 1..18: mol_type = other RNA
cataaagtagaaagcact

SEQ ID NO: 3793 - RNA, 16 nt, Synthetic Construct
  source 1..16: mol_type = other RNA
cccctggacctgtact

SEQ ID NO: 3794 - RNA, 16 nt, Synthetic Construct
  source 1..16: mol_type = other RNA
ctcagtagctcgagga

SEQ ID NO: 3795 - RNA, 22 nt, Synthetic Construct
  source 1..22: mol_type = other RNA
tgaggtggtagtttgtgctgtt

SEQ ID NO: 3796 - RNA, 20 nt, Synthetic Construct
  source 1..20: mol_type = other RNA
caggacagtgaaacgagtca

SEQ ID NO: 3797 - RNA, 20 nt, Synthetic Construct
  source 1..20: mol_type = other RNA
caggacagtgaaacgagtca

SEQ ID NO: 3798 - RNA, 22 nt, Synthetic Construct
  source 1..22: mol_type = other RNA
tgagatagtagtttgtgctgtt

SEQ ID NO: 3799 - RNA, 22 nt, Synthetic Construct
  source 1..22: mol_type = other RNA
gcactctaatgagactgccggt

SEQ ID NO: 3800 - RNA, 22 nt, Synthetic Construct
  source 1..22: mol_type = other RNA
gcactctaatgagactgccggt

SEQ ID NO: 3801 - RNA, 19 nt, Synthetic Construct
  source 1..19: mol_type = other RNA
cggaagaaggggtgcctgg

SEQ ID NO: 3802 - RNA, 19 nt, Synthetic Construct
  source 1..19: mol_type = other RNA
cggaagaaggggtgcctgg

SEQ ID NO: 3803 - RNA, 22 nt, Synthetic Construct
  source 1..22: mol_type = other RNA
ngaggtagtaggttgtatagtt

SEQ ID NO: 3804 - RNA, 22 nt, Synthetic Construct
  source 1..22: mol_type = other RNA
ngaggtagtaggttgtatagtt

SEQ ID NO: 3805 - RNA, 27 nt, Synthetic Construct
  source 1..27: mol_type = other RNA
gcgggcgtagctcaggggtagagcgca

SEQ ID NO: 3806 - RNA, 27 nt, Synthetic Construct
  source 1..27: mol_type = other RNA
gcgggcgtagctcaggggtagagcgca

SEQ ID NO: 3807 - RNA, 22 nt, Synthetic Construct
  source 1..22: mol_type = other RNA
tgaagtagtaggttgtgtggtt

SEQ ID NO: 3808 - RNA, 22 nt, Synthetic Construct
  source 1..22: mol_type = other RNA
tgaagtagtaggttgtgtggtt

SEQ ID NO: 3809 - RNA, 24 nt, Synthetic Construct
  source 1..24: mol_type = other RNA
tcggatccgtctgagcttggcttt

SEQ ID NO: 3810 - RNA, 24 nt, Synthetic Construct
  source 1..24: mol_type = other RNA
tcggatccgtctgagcttggcttt

SEQ ID NO: 3811 - RNA, 21 nt, Synthetic Construct
  source 1..21: mol_type = other RNA
gcccgtgttcggaagattttc

SEQ ID NO: 3812 - RNA, 21 nt, Synthetic Construct
  source 1..21: mol_type = other RNA
gcccgtgttcggaagattttc

SEQ ID NO: 3813 - RNA, 21 nt, Synthetic Construct
  source 1..21: mol_type = other RNA
gtagcgaaattccttgtcggg

SEQ ID NO: 3814 - RNA, 21 nt, Synthetic Construct
  source 1..21: mol_type = other RNA
gtagcgaaattccttgtcggg

SEQ ID NO: 3815 - RNA, 23 nt, Synthetic Construct
  source 1..23: mol_type = other RNA
ggaggggcagagagcgagacttt

SEQ ID NO: 3816 - RNA, 23 nt, Synthetic Construct
  source 1..23: mol_type = other RNA
tggtaattcgacgtacttagtgt

SEQ ID NO: 3817 - RNA, 33 nt, Synthetic Construct; identical to SEQ ID NO: 2253
  source 1..33: mol_type = other RNA

SEQ ID NO: 3818 - RNA, 24 nt, Synthetic Construct
  source 1..24: mol_type = other RNA
gcagctaataccgcatacgacctg

SEQ ID NO: 3819 - RNA, 24 nt, Synthetic Construct
  source 1..24: mol_type = other RNA
gcagctaataccgcatacgacctg

SEQ ID NO: 3820 - RNA, 23 nt, Synthetic Construct
  source 1..23: mol_type = other RNA
tgaggggtagagagcgagacttt

SEQ ID NO: 3821 - RNA, 23 nt, Synthetic Construct
  source 1..23: mol_type = other RNA
tgaggggtagagagcgagacttt

SEQ ID NO: 3822 - RNA, 16 nt, Synthetic Construct
  source 1..16: mol_type = other RNA
gggtctgtagctcagt

SEQ ID NO: 3823 - RNA, 16 nt, Synthetic Construct
  source 1..16: mol_type = other RNA
gggtctgtagctcagt

SEQ ID NO: 3824 - RNA, 21 nt, Synthetic Construct
  source 1..21: mol_type = other RNA
aacggaatcccaaaagcagct

SEQ ID NO: 3825 - RNA, 21 nt, Synthetic Construct
  source 1..21: mol_type = other RNA
aacggaatcccaaaagcagct

SEQ ID NO: 3826 - RNA, 21 nt, Synthetic Construct
  source 1..21: mol_type = other RNA
cggtcccaagggtatggctgt

SEQ ID NO: 3827 - RNA, 24 nt, Synthetic Construct
  source 1..24: mol_type = other RNA
tgtaaacatccccgactgggagct

SEQ ID NO: 3828 - RNA, 25 nt, Synthetic Construct
  source 1..25: mol_type = other RNA
gcgccgctggtgtagtggtatcatg

SEQ ID NO: 3829 - RNA, 25 nt, Synthetic Construct
  source 1..25: mol_type = other RNA
gcgccgctggtgtagtggtatcatg

SEQ ID NO: 3830 - RNA, 23 nt, Synthetic Construct
  source 1..23: mol_type = other RNA
tggtaatacgacgtactttgtgt

SEQ ID NO: 3831 - RNA, 23 nt, Synthetic Construct
  source 1..23: mol_type = other RNA
tggtaatacgacgtactttgtgt

SEQ ID NO: 3832 - RNA, 35 nt, Synthetic Construct; identical to SEQ ID NO: 2518
  source 1..35: mol_type = other RNA

SEQ ID NO: 3833 - RNA, 35 nt, Synthetic Construct; identical to SEQ ID NO: 2518
  source 1..35: mol_type = other RNA

SEQ ID NO: 3834 - RNA, 22 nt, Synthetic Construct
  source 1..22: mol_type = other RNA
tgaggtagtaggttgtatggta

SEQ ID NO: 3835 - RNA, 32 nt, Synthetic Construct; identical to SEQ ID NO: 2798
  source 1..32: mol_type = other RNA

SEQ ID NO: 3836 - RNA, 25 nt, Synthetic Construct
  source 1..25: mol_type = other RNA
tttccccttggggttgtaggaccac

SEQ ID NO: 3837 - RNA, 25 nt, Synthetic Construct
  source 1..25: mol_type = other RNA
tttccccttggggttgtaggaccac

SEQ ID NO: 3838 - RNA, 32 nt, Synthetic Construct; identical to SEQ ID NO: 3748
  source 1..32: mol_type = other RNA

SEQ ID NO: 3839 - RNA, 32 nt, Synthetic Construct; identical to SEQ ID NO: 3748
  source 1..32: mol_type = other RNA

SEQ ID NO: 3840 - RNA, 23 nt, Synthetic Construct
  source 1..23: mol_type = other RNA
tgaggggcggagagcgagacttt

SEQ ID NO: 3841 - RNA, 23 nt, Synthetic Construct
  source 1..23: mol_type = other RNA
tgaggggcggagagcgagacttt

SEQ ID NO: 3842 - RNA, 20 nt, Synthetic Construct
  source 1..20: mol_type = other RNA
ctctaatgagactgccggtg

SEQ ID NO: 3843 - RNA, 20 nt, Synthetic Construct
  source 1..20: mol_type = other RNA
ctctaatgagactgccggtg

SEQ ID NO: 3844 - RNA, 22 nt, Synthetic Construct
  source 1..22: mol_type = other RNA
cgactggtaactgggatgaagt

SEQ ID NO: 3845 - RNA, 22 nt, Synthetic Construct
  source 1..22: mol_type = other RNA
cgactggtaactgggatgaagt

SEQ ID NO: 3846 - RNA, 25 nt, Synthetic Construct
  source 1..25: mol_type = other RNA
ctgaggatatgagatcgagacgaca

SEQ ID NO: 3847 - RNA, 25 nt, Synthetic Construct
  source 1..25: mol_type = other RNA
ctgaggatatgagatcgagacgaca

SEQ ID NO: 3848 - RNA, 21 nt, Synthetic Construct
  source 1..21: mol_type = other RNA
tgaggtagtaggttgtgcggt

SEQ ID NO: 3849 - RNA, 21 nt, Synthetic Construct
  source 1..21: mol_type = other RNA
tgaggtagtaggttgtgcggt

SEQ ID NO: 3850 - RNA, 30 nt, Synthetic Construct; identical to SEQ ID NO: 2274
  source 1..30: mol_type = other RNA

SEQ ID NO: 3851 - RNA, 15 nt, Synthetic Construct
  source 1..15: mol_type = other RNA
cctcgcgcgattgga

SEQ ID NO: 3852 - RNA, 28 nt, Synthetic Construct
  source 1..28: mol_type = other RNA
tcccacatggtctagcggttaggattcc

SEQ ID NO: 3853 - RNA, 28 nt, Synthetic Construct
  source 1..28: mol_type = other RNA
tcccacatggtctagcggttaggattcc

SEQ ID NO: 3854 - RNA, 26 nt, Synthetic Construct
  source 1..26: mol_type = other RNA
atttccccttggggttgtaggaccac

SEQ ID NO: 3855 - RNA, 26 nt, Synthetic Construct
  source 1..26: mol_type = other RNA
atttccccttggggttgtaggaccac

SEQ ID NO: 3856 - RNA, 20 nt, Synthetic Construct
  source 1..20: mol_type = other RNA
tgaggtagtaggttgtacag

SEQ ID NO: 3857 - RNA, 20 nt, Synthetic Construct
  source 1..20: mol_type = other RNA
tgaggtagtaggttgtacag

SEQ ID NO: 3858 - RNA, 18 nt, Synthetic Construct
  source 1..18: mol_type = other RNA
cgtgttcggaagattttc

SEQ ID NO: 3859 - RNA, 18 nt, Synthetic Construct
  source 1..18: mol_type = other RNA
cgtgttcggaagattttc

SEQ ID NO: 3860 - RNA, 16 nt, Synthetic Construct
  source 1..16: mol_type = other RNA
gcgtagatatgcggag

SEQ ID NO: 3861 - RNA, 28 nt, Synthetic Construct
  source 1..28: mol_type = other RNA
ccgtgtgaaagtaggtcatcgtcaggct

SEQ ID NO: 3862 - RNA, 22 nt, Synthetic Construct
  source 1..22: mol_type = other RNA
tgaggtagtagtttgtgctgtg

SEQ ID NO: 3863 - RNA, 16 nt, Synthetic Construct
  source 1..16: mol_type = other RNA
tgcaagtcgaacggta

SEQ ID NO: 3864 - RNA, 16 nt, Synthetic Construct
  source 1..16: mol_type = other RNA
tgcaagtcgaacggta

SEQ ID NO: 3865 - RNA, 15 nt, Synthetic Construct
  source 1..15: mol_type = other RNA
gttgaccgcctgggg

SEQ ID NO: 3866 - RNA, 15 nt, Synthetic Construct
  source 1..15: mol_type = other RNA
gttgaccgcctgggg

SEQ ID NO: 3867 - RNA, 20 nt, Synthetic Construct
  source 1..20: mol_type = other RNA
atcacattgccagggatttc

SEQ ID NO: 3868 - RNA, 20 nt, Synthetic Construct
  source 1..20: mol_type = other RNA
atcacattgccagggatttc

SEQ ID NO: 3869 - RNA, 33 nt, Synthetic Construct; identical to SEQ ID NO: 2638
  source 1..33: mol_type = other RNA

SEQ ID NO: 3870 - RNA, 25 nt, Synthetic Construct
  source 1..25: mol_type = other RNA
gtcaggatggccgagcggtctaagg

SEQ ID NO: 3871 - RNA, 25 nt, Synthetic Construct
  source 1..25: mol_type = other RNA
gtcaggatggccgagcggtctaagg

SEQ ID NO: 3872 - RNA, 15 nt, Synthetic Construct
  source 1..15: mol_type = other RNA
ccagaaacccggtcg

SEQ ID NO: 3873 - RNA, 15 nt, Synthetic Construct
  source 1..15: mol_type = other RNA
ccagaaacccggtcg

SEQ ID NO: 3874 - RNA, 24 nt, Synthetic Construct
  source 1..24: mol_type = other RNA
tatatcggaacgtgcccagtcgtg

SEQ ID NO: 3875 - RNA, 24 nt, Synthetic Construct
  source 1..24: mol_type = other RNA
tatatcggaacgtgcccagtcgtg

SEQ ID NO: 3876 - RNA, 24 nt, Synthetic Construct
  source 1..24: mol_type = other RNA
cgggcctggttagtacttggatgg

SEQ ID NO: 3877 - RNA, 25 nt, Synthetic Construct
  source 1..25: mol_type = other RNA
ttgaggatatgagatagagacgaca

SEQ ID NO: 3878 - RNA, 25 nt, Synthetic Construct
  source 1..25: mol_type = other RNA
ttgaggatatgagatagagacgaca

SEQ ID NO: 3879 - RNA, 23 nt, Synthetic Construct
  source 1..23: mol_type = other RNA
tggtaatacgacgtacttagtgt

SEQ ID NO: 3880 - RNA, 20 nt, Synthetic Construct
  source 1..20: mol_type = other RNA
gagtaggacgttgccaggtt

SEQ ID NO: 3881 - RNA, 20 nt, Synthetic Construct
  source 1..20: mol_type = other RNA
gagtaggacgttgccaggtt

SEQ ID NO: 3882 - RNA, 42 nt, Synthetic Construct; identical to SEQ ID NO: 748
  source 1..42: mol_type = other RNA

SEQ ID NO: 3883 - RNA, 21 nt, Synthetic Construct
  source 1..21: mol_type = other RNA
cgcatcccctagggcattggt

SEQ ID NO: 3884 - RNA, 21 nt, Synthetic Construct
  source 1..21: mol_type = other RNA
cgcatcccctagggcattggt

SEQ ID NO: 3885 - RNA, 21 nt, Synthetic Construct
  source 1..21: mol_type = other RNA
tcccgtactgagctgccccga

SEQ ID NO: 3886 - RNA, 21 nt, Synthetic Construct
  source 1..21: mol_type = other RNA
tcccgtactgagctgccccga

SEQ ID NO: 3887 - RNA, 16 nt, Synthetic Construct
  source 1..16: mol_type = other RNA
agttgaccgcctgggg

SEQ ID NO: 3888 - RNA, 16 nt, Synthetic Construct
  source 1..16: mol_type = other RNA
agttgaccgcctgggg

SEQ ID NO: 3889 - RNA, 27 nt, Synthetic Construct
  source 1..27: mol_type = other RNA
cggtataccgaagctctaggtgcggca

SEQ ID NO: 3890 - RNA, 27 nt, Synthetic Construct
  source 1..27: mol_type = other RNA
cggtataccgaagctctaggtgcggca

SEQ ID NO: 3891 - RNA, 20 nt, Synthetic Construct
  source 1..20: mol_type = other RNA
gcaataacaggtctgtgatg

SEQ ID NO: 3892 - RNA, 20 nt, Synthetic Construct
  source 1..20: mol_type = other RNA
gcaataacaggtctgtgatg

SEQ ID NO: 3893 - RNA, 22 nt, Synthetic Construct
  source 1..22: mol_type = other RNA
ncgtaccgtgagtaataatgcg

SEQ ID NO: 3894 - RNA, 35 nt, Synthetic Construct; identical to SEQ ID NO: 2450
  source 1..35: mol_type = other RNA

SEQ ID NO: 3895 - RNA, 21 nt, Synthetic Construct
  source 1..21: mol_type = other RNA
ctagactgaagctccttgggg

SEQ ID NO: 3896 - RNA, 23 nt, Synthetic Construct
  source 1..23: mol_type = other RNA
tgaggggcagagagcgagacctt

SEQ ID NO: 3897 - RNA, 23 nt, Synthetic Construct
  source 1..23: mol_type = other RNA
tgaggggcagagagcgagacctt

SEQ ID NO: 3898 - RNA, 42 nt, Synthetic Construct; identical to SEQ ID NO: 733
  source 1..42: mol_type = other RNA

SEQ ID NO: 3899 - RNA, 15 nt, Synthetic Construct
  source 1..15: mol_type = other RNA
ggtgaaagcggggga

SEQ ID NO: 3900 - RNA, 21 nt, Synthetic Construct
  source 1..21: mol_type = other RNA
ggctggtccgaaggtagtgag

SEQ ID NO: 3901 - RNA, 21 nt, Synthetic Construct
  source 1..21: mol_type = other RNA
ggctggtccgaaggtagtgag

SEQ ID NO: 3902 - RNA, 23 nt, Synthetic Construct
  source 1..23: mol_type = other RNA
tgaggggcagagagcgagacttc

SEQ ID NO: 3903 - RNA, 18 nt, Synthetic Construct
  source 1..18: mol_type = other RNA
cctcgcgcgattggagcg

SEQ ID NO: 3904 - RNA, 22 nt, Synthetic Construct
  source 1..22: mol_type = other RNA
tgaggtagtagtttgcgctgtt

SEQ ID NO: 3905 - RNA, 21 nt, Synthetic Construct
  source 1..21: mol_type = other RNA
tgaggggcagagggcgagact

SEQ ID NO: 3906 - RNA, 22 nt, Synthetic Construct
  source 1..22: mol_type = other RNA
tgaggtagtaggttgtatagtc

SEQ ID NO: 3907 - RNA, 24 nt, Synthetic Construct
  source 1..24: mol_type = other RNA
tcggatccgtctgagcttggcttt

SEQ ID NO: 3908 - RNA, 24 nt, Synthetic Construct
  source 1..24: mol_type = other RNA
tcggatccgtctgagcttggcttt

SEQ ID NO: 3909 - RNA, 16 nt, Synthetic Construct
  source 1..16: mol_type = other RNA
gtctgcggccatacca

SEQ ID NO: 3910 - RNA, 16 nt, Synthetic Construct
  source 1..16: mol_type = other RNA
gtctgcggccatacca

SEQ ID NO: 3911 - RNA, 16 nt, Synthetic Construct
  source 1..16: mol_type = other RNA
gtcaacggccatacca

SEQ ID NO: 3912 - RNA, 16 nt, Synthetic Construct
  source 1..16: mol_type = other RNA
gtcaacggccatacca

SEQ ID NO: 3913 - RNA, 16 nt, Synthetic Construct
  source 1..16: mol_type = other RNA
ggcgggggtcgctggt

SEQ ID NO: 3914 - RNA, 22 nt, Synthetic Construct
  source 1..22: mol_type = other RNA
tgaggtagtaggctgtgtggtt

SEQ ID NO: 3915 - RNA, 22 nt, Synthetic Construct
  source 1..22: mol_type = other RNA
tgaggtagtaggctgtgtggtt

SEQ ID NO: 3916 - RNA, 21 nt, Synthetic Construct
  source 1..21: mol_type = other RNA
taggtagtttcctgttgttgg

SEQ ID NO: 3917 - RNA, 16 nt, Synthetic Construct
  source 1..16: mol_type = other RNA
tgcgtagatatgcgga

SEQ ID NO: 3918 - RNA, 23 nt, Synthetic Construct
  source 1..23: mol_type = other RNA
tggtaatacgacgcacttagtgt

SEQ ID NO: 3919 - RNA, 23 nt, Synthetic Construct
  source 1..23: mol_type = other RNA
tggtaatacgacgcacttagtgt

SEQ ID NO: 3920 - RNA, 23 nt, Synthetic Construct
  source 1..23: mol_type = other RNA
tccagtactgagctgccccgagt

SEQ ID NO: 3921 - RNA, 23 nt, Synthetic Construct
  source 1..23: mol_type = other RNA
tccagtactgagctgccccgagt

SEQ ID NO: 3922 - RNA, 23 nt, Synthetic Construct
  source 1..23: mol_type = other RNA
tggtaatacaacgtacttagtgt

SEQ ID NO: 3923 - RNA, 28 nt, Synthetic Construct
  source 1..28: mol_type = other RNA
gcatgggtggttcagtggtagaattctc

SEQ ID NO: 3924 - RNA, 28 nt, Synthetic Construct
  source 1..28: mol_type = other RNA
gcatgggtggttcagtggtagaattctc

SEQ ID NO: 3925 - RNA, 23 nt, Synthetic Construct
  source 1..23: mol_type = other RNA
tcctgtactgagctgccccgggt

SEQ ID NO: 3926 - RNA, 23 nt, Synthetic Construct
  source 1..23: mol_type = other RNA
tcctgtactgagctgccccgggt

SEQ ID NO: 3927 - RNA, 23 nt, Synthetic Construct
  source 1..23: mol_type = other RNA
tggcagtgtcttagctggttgtt

SEQ ID NO: 3928 - RNA, 23 nt, Synthetic Construct
  source 1..23: mol_type = other RNA
tggcagtgtcttagctggttgtt

SEQ ID NO: 3929 - RNA, 23 nt, Synthetic Construct
  source 1..23: mol_type = other RNA
cgactcttagcggtggatcactc

SEQ ID NO: 3930 - RNA, 23 nt, Synthetic Construct
  source 1..23: mol_type = other RNA
cgactcttagcggtggatcactc

SEQ ID NO: 3931 - RNA, 21 nt, Synthetic Construct
  source 1..21: mol_type = other RNA
tcgtaccgtgagtaataatga

SEQ ID NO: 3932 - RNA, 35 nt, Synthetic Construct; identical to SEQ ID NO: 2762
  source 1..35: mol_type = other RNA

SEQ ID NO: 3933 - RNA, 30 nt, Synthetic Construct
  source 1..30: mol_type = other RNA
ggcgcgatagcaaagcggttatgccccgga

SEQ ID NO: 3934 - RNA, 30 nt, Synthetic Construct; identical to SEQ ID NO: 3933
  source 1..30: mol_type = other RNA

SEQ ID NO: 3935 - RNA, 21 nt, Synthetic Construct
  source 1..21: mol_type = other RNA
gctattgacgaccgtaccgca

SEQ ID NO: 3936 - RNA, 21 nt, Synthetic Construct
  source 1..21: mol_type = other RNA
gctattgacgaccgtaccgca

SEQ ID NO: 3937 - RNA, 36 nt, Synthetic Construct; identical to SEQ ID NO: 2344
  source 1..36: mol_type = other RNA

SEQ ID NO: 3938 - RNA, 20 nt, Synthetic Construct
  source 1..20: mol_type = other RNA
gcgtgcttgactgcgagact

SEQ ID NO: 3939 - RNA, 20 nt, Synthetic Construct
  source 1..20: mol_type = other RNA
gcgtgcttgactgcgagact

SEQ ID NO: 3940 - RNA, 22 nt, Synthetic Construct
  source 1..22: mol_type = other RNA
tgaggtagtagtttgtgctatt

SEQ ID NO: 3941 - RNA, 21 nt, Synthetic Construct
  source 1..21: mol_type = other RNA
tccagtactgagctgccccga

SEQ ID NO: 3942 - RNA, 21 nt, Synthetic Construct
  source 1..21: mol_type = other RNA
tccagtactgagctgccccga

SEQ ID NO: 3943 - RNA, 22 nt, Synthetic Construct
  source 1..22: mol_type = other RNA
tgaggtagcaggttgtgtggtt

SEQ ID NO: 3944 - RNA, 22 nt, Synthetic Construct
  source 1..22: mol_type = other RNA
tgaggtagcaggttgtgtggtt

SEQ ID NO: 3945 - RNA, 40 nt, Synthetic Construct; identical to SEQ ID NO: 2684
  source 1..40: mol_type = other RNA

SEQ ID NO: 3946 - RNA, 40 nt, Synthetic Construct; identical to SEQ ID NO: 2684
  source 1..40: mol_type = other RNA

SEQ ID NO: 3947 - RNA, 20 nt, Synthetic Construct
  source 1..20: mol_type = other RNA
tgagatagtaggttgtgtgg

SEQ ID NO: 3948 - RNA, 20 nt, Synthetic Construct
  source 1..20: mol_type = other RNA
tgagatagtaggttgtgtgg

SEQ ID NO: 3949 - RNA, 43 nt, Synthetic Construct; identical to SEQ ID NO: 727
  source 1..43: mol_type = other RNA

SEQ ID NO: 3950 - RNA, 43 nt, Synthetic Construct; identical to SEQ ID NO: 727
  source 1..43: mol_type = other RNA

SEQ ID NO: 3951 - RNA, 23 nt, Synthetic Construct
  source 1..23: mol_type = other RNA
tggtaatacgacgtacatagtgt

SEQ ID NO: 3952 - RNA, 23 nt, Synthetic Construct
  source 1..23: mol_type = other RNA
tggtaatacgacgtacatagtgt

SEQ ID NO: 3953 - RNA, 22 nt, Synthetic Construct
  source 1..22: mol_type = other RNA
ctttgttcgattccgttgagta

SEQ ID NO: 3954 - RNA, 22 nt, Synthetic Construct
  source 1..22: mol_type = other RNA
ctttgttcgattccgttgagta

SEQ ID NO: 3955 - RNA, 27 nt, Synthetic Construct
  source 1..27: mol_type = other RNA
gactcttagcggtggatcactcggctc

SEQ ID NO: 3956 - RNA, 27 nt, Synthetic Construct
  source 1..27: mol_type = other RNA
gactcttagcggtggatcactcggctc

SEQ ID NO: 3957 - RNA, 25 nt, Synthetic Construct
  source 1..25: mol_type = other RNA
ttgaggatatgggatcgagacgaca

SEQ ID NO: 3958 - RNA, 34 nt, Synthetic Construct; identical to SEQ ID NO: 2298
  source 1..34: mol_type = other RNA

SEQ ID NO: 3959 - RNA, 20 nt, Synthetic Construct
  source 1..20: mol_type = other RNA
tgaggtagtaggtcgtgtgg

SEQ ID NO: 3960 - RNA, 20 nt, Synthetic Construct
  source 1..20: mol_type = other RNA
tgaggtagtaggtcgtgtgg

SEQ ID NO: 3961 - RNA, 22 nt, Synthetic Construct
  source 1..22: mol_type = other RNA
gaagaggacttggaactcgatc

SEQ ID NO: 3962 - RNA, 22 nt, Synthetic Construct
  source 1..22: mol_type = other RNA
gaagaggacttggaactcgatc

SEQ ID NO: 3963 - RNA, 31 nt, Synthetic Construct; identical to SEQ ID NO: 2215
  source 1..31: mol_type = other RNA

SEQ ID NO: 3964 - RNA, 23 nt, Synthetic Construct
  source 1..23: mol_type = other RNA
gcgtggtaggagagcgttctgta

SEQ ID NO: 3965 - RNA, 23 nt, Synthetic Construct
  source 1..23: mol_type = other RNA
taaggggcagagagcgagacttt

SEQ ID NO: 3966 - RNA, 23 nt, Synthetic Construct
  source 1..23: mol_type = other RNA
taaggggcagagagcgagacttt

SEQ ID NO: 3967 - RNA, 22 nt, Synthetic Construct
  source 1..22: mol_type = other RNA
tgagatagtaggttgtgtggtt

SEQ ID NO: 3968 - RNA, 25 nt, Synthetic Construct
  source 1..25: mol_type = other RNA
ctgaggatatgagatcgagacgaca

SEQ ID NO: 3969 - RNA, 35 nt, Synthetic Construct; identical to SEQ ID NO: 2548
  source 1..35: mol_type = other RNA

SEQ ID NO: 3970 - RNA, 20 nt, Synthetic Construct
  source 1..20: mol_type = other RNA
tgaggtagtaggttgtgtag

SEQ ID NO: 3971 - RNA, 20 nt, Synthetic Construct
  source 1..20: mol_type = other RNA
tgaggtagtaggttgtgtag

SEQ ID NO: 3972 - RNA, 17 nt, Synthetic Construct
  source 1..17: mol_type = other RNA
gtccggatcgtagtctg

SEQ ID NO: 3973 - RNA, 16 nt, Synthetic Construct
  source 1..16: mol_type = other RNA
gtccacggccatacca

SEQ ID NO: 3974 - RNA, 16 nt, Synthetic Construct
  source 1..16: mol_type = other RNA
gtccacggccatacca

SEQ ID NO: 3975 - RNA, 22 nt, Synthetic Construct
  source 1..22: mol_type = other RNA
tgaggtagtaggttatgtggtt

SEQ ID NO: 3976 - RNA, 22 nt, Synthetic Construct
  source 1..22: mol_type = other RNA
tgaggtagtaggttatgtggtt

SEQ ID NO: 3977 - RNA, 32 nt, Synthetic Construct; identical to SEQ ID NO: 2086
  source 1..32: mol_type = other RNA

SEQ ID NO: 3978 - RNA, 23 nt, Synthetic Construct
  source 1..23: mol_type = other RNA
tgaagggcagagagcgagacttt

SEQ ID NO: 3979 - RNA, 23 nt, Synthetic Construct
  source 1..23: mol_type = other RNA
tgaagggcagagagcgagacttt

SEQ ID NO: 3980 - RNA, 21 nt, Synthetic Construct
  source 1..21: mol_type = other RNA
actggacttggagtcagaagg

SEQ ID NO: 3981 - RNA, 27 nt, Synthetic Construct
  source 1..27: mol_type = other RNA
ccccccactgctgaatttgactggctt

SEQ ID NO: 3982 - RNA, 24 nt, Synthetic Construct
  source 1..24: mol_type = other RNA
gaaagattaaggcaagaggttagc

SEQ ID NO: 3983 - RNA, 24 nt, Synthetic Construct
  source 1..24: mol_type = other RNA
gaaagattaaggcaagaggttagc

SEQ ID NO: 3984 - RNA, 21 nt, Synthetic Construct
  source 1..21: mol_type = other RNA
tgaggggcagagagcgaggct

SEQ ID NO: 3985 - RNA, 21 nt, Synthetic Construct
  source 1..21: mol_type = other RNA
tgaggggcagagagcgaggct

SEQ ID NO: 3986 - RNA, 15 nt, Synthetic Construct
  source 1..15: mol_type = other RNA
acggtcctaaggtag

SEQ ID NO: 3987 - RNA, 21 nt, Synthetic Construct
  source 1..21: mol_type = other RNA
ctagactgaggctccttgagg

SEQ ID NO: 3988 - RNA, 16 nt, Synthetic Construct
  source 1..16: mol_type = other RNA
gtgacgcgcatgaatg

SEQ ID NO: 3989 - RNA, 16 nt, Synthetic Construct
  source 1..16: mol_type = other RNA
gtgacgcgcatgaatg

SEQ ID NO: 3990 - RNA, 30 nt, Synthetic Construct; identical to SEQ ID NO: 2578
  source 1..30: mol_type = other RNA

SEQ ID NO: 3991 - RNA, 30 nt, Synthetic Construct; identical to SEQ ID NO: 2578
  source 1..30: mol_type = other RNA

SEQ ID NO: 3992 - RNA, 23 nt, Synthetic Construct
  source 1..23: mol_type = other RNA
tccagtactgagctgccccgaga

SEQ ID NO: 3993 - RNA, 23 nt, Synthetic Construct
  source 1..23: mol_type = other RNA
tccagtactgagctgccccgaga

SEQ ID NO: 3994 - RNA, 22 nt, Synthetic Construct
  source 1..22: mol_type = other RNA
ctccctcgggagggcgcgcggg

SEQ ID NO: 3995 - RNA, 22 nt, Synthetic Construct
  source 1..22: mol_type = other RNA
ctccctcgggagggcgcgcggg

SEQ ID NO: 3996 - RNA, 23 nt, Synthetic Construct
  source 1..23: mol_type = other RNA
agctacattgtctgctgggttcc

SEQ ID NO: 3997 - RNA, 15 nt, Synthetic Construct
  source 1..15: mol_type = other RNA
ggccgtcgtcagctc

SEQ ID NO: 3998 - RNA, 15 nt, Synthetic Construct
  source 1..15: mol_type = other RNA
ggccgtcgtcagctc

SEQ ID NO: 3999 - RNA, 25 nt, Synthetic Construct
  source 1..25: mol_type = other RNA
ttgaggatatgagatagagacgaca

SEQ ID NO: 4000 - RNA, 20 nt, Synthetic Construct
  source 1..20: mol_type = other RNA
tgaggtagtaggttgtgcgg

SEQ ID NO: 4001 - RNA, 20 nt, Synthetic Construct
  source 1..20: mol_type = other RNA
tgaggtagtaggttgtgcgg

SEQ ID NO: 4002 - RNA, 23 nt, Synthetic Construct
  source 1..23: mol_type = other RNA
tggtaacacgacgtacttagtgt

SEQ ID NO: 4003 - RNA, 23 nt, Synthetic Construct
  source 1..23: mol_type = other RNA
tggtaacacgacgtacttagtgt

SEQ ID NO: 4004 - RNA, 20 nt, Synthetic Construct
  source 1..20: mol_type = other RNA
gtgccgaagctgtgggattg

SEQ ID NO: 4005 - RNA, 20 nt, Synthetic Construct
  source 1..20: mol_type = other RNA
gtgccgaagctgtgggattg

SEQ ID NO: 4006 - RNA, 15 nt, Synthetic Construct
  source 1..15: mol_type = other RNA
gtcaggatgttggct

SEQ ID NO: 4007 - RNA, 15 nt, Synthetic Construct
  source 1..15: mol_type = other RNA
gtcaggatgttggct

SEQ ID NO: 4008 - RNA, 22 nt, Synthetic Construct
  source 1..22: mol_type = other RNA
cgaggtagtaggttgtgtggtt

SEQ ID NO: 4009 - RNA, 31 nt, Synthetic Construct; identical to SEQ ID NO: 2758
  source 1..31: mol_type = other RNA

SEQ ID NO: 4010 - RNA, 21 nt, Synthetic Construct
  source 1..21: mol_type = other RNA
cgaggggcagagagcgagact

SEQ ID NO: 4011 - RNA, 21 nt, Synthetic Construct
  source 1..21: mol_type = other RNA
cgaggggcagagagcgagact

SEQ ID NO: 4012 - RNA, 22 nt, Synthetic Construct
  source 1..22: mol_type = other RNA
caaagtgctgttcgtgcaggta

SEQ ID NO: 4013 - RNA, 25 nt, Synthetic Construct
  source 1..25: mol_type = other RNA
ttgaggatgtgagatcgagacgaca

SEQ ID NO: 4014 - RNA, 36 nt, Synthetic Construct; identical to SEQ ID NO: 777
  source 1..36: mol_type = other RNA

SEQ ID NO: 4015 - RNA, 36 nt, Synthetic Construct; identical to SEQ ID NO: 777
  source 1..36: mol_type = other RNA

SEQ ID NO: 4016 - RNA, 31 nt, Synthetic Construct; identical to SEQ ID NO: 2278
  source 1..31: mol_type = other RNA

SEQ ID NO: 4017 - RNA, 30 nt, Synthetic Construct; identical to SEQ ID NO: 2353
  source 1..30: mol_type = other RNA

SEQ ID NO: 4018 - RNA, 22 nt, Synthetic Construct
  source 1..22: mol_type = other RNA
tgaggtagtagcttgtgctgtt

SEQ ID NO: 4019 - RNA, 39 nt, Synthetic Construct; identical to SEQ ID NO: 2398
  source 1..39: mol_type = other RNA

SEQ ID NO: 4020 - RNA, 17 nt, Synthetic Construct
  source 1..17: mol_type = other RNA
cccctggacctgtactg

SEQ ID NO: 4021 - RNA, 17 nt, Synthetic Construct
  source 1..17: mol_type = other RNA
cccctggacctgtactg

SEQ ID NO: 4022 - RNA, 24 nt, Synthetic Construct
  source 1..24: mol_type = other RNA
tgtaaacacccccgactggaagct

SEQ ID NO: 4023 - RNA, 22 nt, Synthetic Construct
  source 1..22: mol_type = other RNA
tgaggtagtgggttgtgtggtt

SEQ ID NO: 4024 - RNA, 22 nt, Synthetic Construct
  source 1..22: mol_type = other RNA
tgaggtagtgggttgtgtggtt

SEQ ID NO: 4025 - RNA, 18 nt, Synthetic Construct
  source 1..18: mol_type = other RNA
gtccggatcgtagtctgc

SEQ ID NO: 4026 - RNA, 18 nt, Synthetic Construct
  source 1..18: mol_type = other RNA
gtccggatcgtagtctgc

SEQ ID NO: 4027 - RNA, 22 nt, Synthetic Construct
  source 1..22: mol_type = other RNA
tgaggtagtaggttgtatggtt

SEQ ID NO: 4028 - RNA, 22 nt, Synthetic Construct
  source 1..22: mol_type = other RNA
tgaggtagtaggttgtatggtt

SEQ ID NO: 4029 - RNA, 32 nt, Synthetic Construct; identical to SEQ ID NO: 2850
  source 1..32: mol_type = other RNA

SEQ ID NO: 4030 - RNA, 24 nt, Synthetic Construct
  source 1..24: mol_type = other RNA
cggagaaggttagctcagccaact

SEQ ID NO: 4031 - RNA, 23 nt, Synthetic Construct
  source 1..23: mol_type = other RNA
tgaggtagtaggttgtgtggttc

SEQ ID NO: 4032 - RNA, 23 nt, Synthetic Construct
  source 1..23: mol_type = other RNA
tgaggtagtaggttgtgtggttc

SEQ ID NO: 4033 - RNA, 23 nt, Synthetic Construct
  source 1..23: mol_type = other RNA
tgaggggcagagagtgagacttt

SEQ ID NO: 4034 - RNA, 23 nt, Synthetic Construct
  source 1..23: mol_type = other RNA
tgaggggcagagagtgagacttt

SEQ ID NO: 4035 - RNA, 23 nt, Synthetic Construct
  source 1..23: mol_type = other RNA
cctcgcgcgattggagcggccga

SEQ ID NO: 4036 - RNA, 19 nt, Synthetic Construct
  source 1..19: mol_type = other RNA
agtcgacgtatagggtgtg

SEQ ID NO: 4037 - RNA, 21 nt, Synthetic Construct
  source 1..21: mol_type = other RNA
gtgggcgtttgaagtgaagtg

SEQ ID NO: 4038 - RNA, 21 nt, Synthetic Construct
  source 1..21: mol_type = other RNA
gtgggcgtttgaagtgaagtg

SEQ ID NO: 4039 - RNA, 22 nt, Synthetic Construct
  source 1..22: mol_type = other RNA
tgaggtagtaggttgtatagta

SEQ ID NO: 4040 - RNA, 23 nt, Synthetic Construct
  source 1..23: mol_type = other RNA
tggtagtacgacgtacttagtgt

SEQ ID NO: 4041 - RNA, 23 nt, Synthetic Construct
  source 1..23: mol_type = other RNA
tggtagtacgacgtacttagtgt

SEQ ID NO: 4042 - RNA, 34 nt, Synthetic Construct; identical to SEQ ID NO: 2186
  source 1..34: mol_type = other RNA

SEQ ID NO: 4043 - RNA, 34 nt, Synthetic Construct; identical to SEQ ID NO: 2186
  source 1..34: mol_type = other RNA

SEQ ID NO: 4044 - RNA, 23 nt, Synthetic Construct
  source 1..23: mol_type = other RNA
tgaggggcagggagcgagacttt

SEQ ID NO: 4045 - RNA, 23 nt, Synthetic Construct
  source 1..23: mol_type = other RNA
tgaggggcagggagcgagacttt

SEQ ID NO: 4046 - RNA, 16 nt, Synthetic Construct
  source 1..16: mol_type = other RNA
cgctagtaatcgcgga

SEQ ID NO: 4047 - RNA, 20 nt, Synthetic Construct
  source 1..20: mol_type = other RNA
gaatcgctagtaatcgcgga

SEQ ID NO: 4048 - RNA, 20 nt, Synthetic Construct
  source 1..20: mol_type = other RNA
gaatcgctagtaatcgcgga

SEQ ID NO: 4049 - RNA, 25 nt, Synthetic Construct
  source 1..25: mol_type = other RNA
caaagtgctgttcgtgcaggtagtt

SEQ ID NO: 4050 - RNA, 22 nt, Synthetic Construct
  source 1..22: mol_type = other RNA
tgaggtagcagtttgtgctgtt

SEQ ID NO: 4051 - RNA, 22 nt, Synthetic Construct
  source 1..22: mol_type = other RNA
tgaggtagcagtttgtgctgtt

SEQ ID NO: 4052 - RNA, 20 nt, Synthetic Construct
  source 1..20: mol_type = other RNA
tagaattctcgcctgccacg

SEQ ID NO: 4053 - RNA, 20 nt, Synthetic Construct
  source 1..20: mol_type = other RNA
tagaattctcgcctgccacg

SEQ ID NO: 4054 - RNA, 36 nt, Synthetic Construct; identical to SEQ ID NO: 2660
  source 1..36: mol_type = other RNA

SEQ ID NO: 4055 - RNA, 36 nt, Synthetic Construct; identical to SEQ ID NO: 2660
  source 1..36: mol_type = other RNA

SEQ ID NO: 4056 - RNA, 35 nt, Synthetic Construct; identical to SEQ ID NO: 2762
  source 1..35: mol_type = other RNA

SEQ ID NO: 4057 - RNA, 35 nt, Synthetic Construct; identical to SEQ ID NO: 2762
  source 1..35: mol_type = other RNA

SEQ ID NO: 4058 - RNA, 22 nt, Synthetic Construct
  source 1..22: mol_type = other RNA
tgaggtagtaggttgtatagtc

SEQ ID NO: 4059 - RNA, 22 nt, Synthetic Construct
  source 1..22: mol_type = other RNA
tgaggtggtagtttgtgctgtt

SEQ ID NO: 4060 - RNA, 22 nt, Synthetic Construct
  source 1..22: mol_type = other RNA
tgaggtggtagtttgtgctgtt

SEQ ID NO: 4061 - RNA, 23 nt, Synthetic Construct
  source 1..23: mol_type = other RNA
tggtaatacgacgtacttagagt

SEQ ID NO: 4062 - RNA, 23 nt, Synthetic Construct
  source 1..23: mol_type = other RNA
tggtaatacgacgtacttagagt

SEQ ID NO: 4063 - RNA, 23 nt, Synthetic Construct
  source 1..23: mol_type = other RNA
naaagtgctgttcgtgcaggtag

SEQ ID NO: 4064 - RNA, 23 nt, Synthetic Construct
  source 1..23: mol_type = other RNA
naaagtgctgttcgtgcaggtag

SEQ ID NO: 4065 - RNA, 22 nt, Synthetic Construct
  source 1..22: mol_type = other RNA
ngaggtagtaggttgtgtggtt

SEQ ID NO: 4066 - RNA, 22 nt, Synthetic Construct
  source 1..22: mol_type = other RNA
ngaggtagtaggttgtgtggtt

SEQ ID NO: 4067 - RNA, 21 nt, Synthetic Construct
  source 1..21: mol_type = other RNA
tgaggtagtagattgtatagc

SEQ ID NO: 4068 - RNA, 17 nt, Synthetic Construct
  source 1..17: mol_type = other RNA
tggccgtcgtcagctcg

SEQ ID NO: 4069 - RNA, 17 nt, Synthetic Construct
  source 1..17: mol_type = other RNA
tggccgtcgtcagctcg

SEQ ID NO: 4070 - RNA, 23 nt, Synthetic Construct
  source 1..23: mol_type = other RNA
tggtaatacgacgtacttagcgt

SEQ ID NO: 4071 - RNA, 23 nt, Synthetic Construct
  source 1..23: mol_type = other RNA
tggtaatacgacgtacttagcgt

SEQ ID NO: 4072 - RNA, 22 nt, Synthetic Construct
  source 1..22: mol_type = other RNA
tgaagtagtaggttgtgtggtt

SEQ ID NO: 4073 - RNA, 22 nt, Synthetic Construct
  source 1..22: mol_type = other RNA
tgaagtagtaggttgtgtggtt

SEQ ID NO: 4074 - RNA, 16 nt, Synthetic Construct
  source 1..16: mol_type = other RNA
ggccgtcgtcagctcg

SEQ ID NO: 4075 - RNA, 23 nt, Synthetic Construct
  source 1..23: mol_type = other RNA
tgaggtagtaggttgtatggttt

SEQ ID NO: 4076 - RNA, 17 nt, Synthetic Construct
  source 1..17: mol_type = other RNA
gcgtagatatgcggagg

SEQ ID NO: 4077 - RNA, 17 nt, Synthetic Construct
  source 1..17: mol_type = other RNA
gcgtagatatgcggagg

SEQ ID NO: 4078 - RNA, 18 nt, Synthetic Construct
  source 1..18: mol_type = other RNA
tgcgtagatatgcggagg

SEQ ID NO: 4079 - RNA, 25 nt, Synthetic Construct
  source 1..25: mol_type = other RNA
ttgaggatatgagatcgagacggca

SEQ ID NO: 4080 - RNA, 25 nt, Synthetic Construct
  source 1..25: mol_type = other RNA
ttgaggatacgagatcgagacgaca

SEQ ID NO: 4081 - RNA, 20 nt, Synthetic Construct
  source 1..20: mol_type = other RNA
tgaggtagtaggttgtatgg

SEQ ID NO: 4082 - RNA, 23 nt, Synthetic Construct
  source 1..23: mol_type = other RNA
tcctgtactgagctgccccggga

SEQ ID NO: 4083 - RNA, 23 nt, Synthetic Construct
  source 1..23: mol_type = other RNA
tcctgtactgagctgccccggga

SEQ ID NO: 4084 - RNA, 21 nt, Synthetic Construct
  source 1..21: mol_type = other RNA
tcctgtaccgagctgccccga

SEQ ID NO: 4085 - RNA, 21 nt, Synthetic Construct
  source 1..21: mol_type = other RNA
tcctgtaccgagctgccccga

SEQ ID NO: 4086 - RNA, 15 nt, Synthetic Construct
  source 1..15: mol_type = other RNA
gagctgtggataggg

SEQ ID NO: 4087 - RNA, 22 nt, Synthetic Construct
  source 1..22: mol_type = other RNA
tgaggtagtaggttgcgtggtt

SEQ ID NO: 4088 - RNA, 22 nt, Synthetic Construct
  source 1..22: mol_type = other RNA
tgaggtagtaggttgcgtggtt

SEQ ID NO: 4089 - RNA, 19 nt, Synthetic Construct
  source 1..19: mol_type = other RNA
cgactcttagcggtggatc

SEQ ID NO: 4090 - RNA, 19 nt, Synthetic Construct
  source 1..19: mol_type = other RNA
cgactcttagcggtggatc

SEQ ID NO: 4091 - RNA, 27 nt, Synthetic Construct
  source 1..27: mol_type = other RNA
ccccccactgctaagtttgactggctt

SEQ ID NO: 4092 - RNA, 23 nt, Synthetic Construct
  source 1..23: mol_type = other RNA
tctctcggctcctcgcggctcgt

SEQ ID NO: 4093 - RNA, 23 nt, Synthetic Construct
  source 1..23: mol_type = other RNA
tctctcggctcctcgcggctcgt

SEQ ID NO: 4094 - RNA, 34 nt, Synthetic Construct; identical to SEQ ID NO: 385
  source 1..34: mol_type = other RNA

SEQ ID NO: 4095 - RNA, 34 nt, Synthetic Construct; identical to SEQ ID NO: 385
  source 1..34: mol_type = other RNA

SEQ ID NO: 4096 - RNA, 17 nt, Synthetic Construct
  source 1..17: mol_type = other RNA
tcccctggacctgtact

SEQ ID NO: 4097 - RNA, 17 nt, Synthetic Construct
  source 1..17: mol_type = other RNA
tcccctggacctgtact

SEQ ID NO: 4098 - RNA, 23 nt, Synthetic Construct
  source 1..23: mol_type = other RNA
cgaggggcagagagcgagacttt

SEQ ID NO: 4099 - RNA, 23 nt, Synthetic Construct
  source 1..23: mol_type = other RNA
cgaggggcagagagcgagacttt

SEQ ID NO: 4100 - RNA, 25 nt, Synthetic Construct
  source 1..25: mol_type = other RNA
cctcgcgcgattggagcggccgata

SEQ ID NO: 4101 - RNA, 40 nt, Synthetic Construct; identical to SEQ ID NO: 2684
  source 1..40: mol_type = other RNA

SEQ ID NO: 4102 - RNA, 40 nt, Synthetic Construct; identical to SEQ ID NO: 2684
  source 1..40: mol_type = other RNA

SEQ ID NO: 4103 - RNA, 30 nt, Synthetic Construct; identical to SEQ ID NO: 2840
  source 1..30: mol_type = other RNA

SEQ ID NO: 4104 - RNA, 30 nt, Synthetic Construct; identical to SEQ ID NO: 2840
  source 1..30: mol_type = other RNA

SEQ ID NO: 4105 - RNA, 34 nt, Synthetic Construct; identical to SEQ ID NO: 2298
  source 1..34: mol_type = other RNA

SEQ ID NO: 4106 - RNA, 34 nt, Synthetic Construct; identical to SEQ ID NO: 2298
  source 1..34: mol_type = other RNA

SEQ ID NO: 4107 - RNA, 16 nt, Synthetic Construct
  source 1..16: mol_type = other RNA
cgactcttagcggtgg

SEQ ID NO: 4108 - RNA, 16 nt, Synthetic Construct
  source 1..16: mol_type = other RNA
cgactcttagcggtgg

SEQ ID NO: 4109 - RNA, 23 nt, Synthetic Construct
  source 1..23: mol_type = other RNA
tcccgtactgagctgccccgagt

SEQ ID NO: 4110 - RNA, 23 nt, Synthetic Construct
  source 1..23: mol_type = other RNA
tcccgtactgagctgccccgagt

SEQ ID NO: 4111 - RNA, 35 nt, Synthetic Construct; identical to SEQ ID NO: 2450
  source 1..35: mol_type = other RNA

SEQ ID NO: 4112 - RNA, 35 nt, Synthetic Construct; identical to SEQ ID NO: 2450
  source 1..35: mol_type = other RNA

SEQ ID NO: 4113 - RNA, 16 nt, Synthetic Construct
  source 1..16: mol_type = other RNA
gtctacggccataccg

SEQ ID NO: 4114 - RNA, 16 nt, Synthetic Construct
  source 1..16: mol_type = other RNA
gtctacggccataccg

SEQ ID NO: 4115 - RNA, 23 nt, Synthetic Construct
  source 1..23: mol_type = other RNA
aggtaatacgacgtacttagtgt

SEQ ID NO: 4116 - RNA, 31 nt, Synthetic Construct; identical to SEQ ID NO: 2758
  source 1..31: mol_type = other RNA

SEQ ID NO: 4117 - RNA, 31 nt, Synthetic Construct; identical to SEQ ID NO: 2758
  source 1..31: mol_type = other RNA

SEQ ID NO: 4118 - RNA, 24 nt, Synthetic Construct
  source 1..24: mol_type = other RNA
ttccccttggggttgtaggaccac

SEQ ID NO: 4119 - RNA, 24 nt, Synthetic Construct
  source 1..24: mol_type = other RNA
ttccccttggggttgtaggaccac

SEQ ID NO: 4120 - RNA, 35 nt, Synthetic Construct; identical to SEQ ID NO: 757
  source 1..35: mol_type = other RNA

SEQ ID NO: 4121 - RNA, 35 nt, Synthetic Construct; identical to SEQ ID NO: 757
  source 1..35: mol_type = other RNA

SEQ ID NO: 4122 - RNA, 22 nt, Synthetic Construct
  source 1..22: mol_type = other RNA
tgaggaagtaggttgtgtggtt

SEQ ID NO: 4123 - RNA, 22 nt, Synthetic Construct
  source 1..22: mol_type = other RNA
tgaggaagtaggttgtgtggtt

SEQ ID NO: 4124 - RNA, 16 nt, Synthetic Construct
  source 1..16: mol_type = other RNA
gcctacggccatacca

SEQ ID NO: 4125 - RNA, 16 nt, Synthetic Construct
  source 1..16: mol_type = other RNA
gcctacggccatacca

SEQ ID NO: 4126 - RNA, 22 nt, Synthetic Construct
  source 1..22: mol_type = other RNA
acagtagtctgcacattggttg

SEQ ID NO: 4127 - RNA, 22 nt, Synthetic Construct
  source 1..22: mol_type = other RNA
tgaggtagtagcttgtgctgtt

SEQ ID NO: 4128 - RNA, 22 nt, Synthetic Construct
  source 1..22: mol_type = other RNA
tgaggtagtagcttgtgctgtt

SEQ ID NO: 4129 - RNA, 19 nt, Synthetic Construct
  source 1..19: mol_type = other RNA
gcgccgatgatagtgcgga

SEQ ID NO: 4130 - RNA, 19 nt, Synthetic Construct
  source 1..19: mol_type = other RNA
gcgccgatgatagtgcgga

SEQ ID NO: 4131 - RNA, 15 nt, Synthetic Construct
  source 1..15: mol_type = other RNA
cgccatttaaagagg

SEQ ID NO: 4132 - RNA, 15 nt, Synthetic Construct
  source 1..15: mol_type = other RNA
cgccatttaaagagg

SEQ ID NO: 4133 - RNA, 22 nt, Synthetic Construct
  source 1..22: mol_type = other RNA
tgaggtagtagtttgtgctgct

SEQ ID NO: 4134 - RNA, 22 nt, Synthetic Construct
  source 1..22: mol_type = other RNA
tggaatgtaaagaagtatgtat

SEQ ID NO: 4135 - RNA, 22 nt, Synthetic Construct
  source 1..22: mol_type = other RNA
tggaatgtaaagaagtatgtat

SEQ ID NO: 4136 - RNA, 22 nt, Synthetic Construct
  source 1..22: mol_type = other RNA
cgaggtagtaggttgtgtggtt

SEQ ID NO: 4137 - RNA, 22 nt, Synthetic Construct
  source 1..22: mol_type = other RNA
cgaggtagtaggttgtgtggtt

SEQ ID NO: 4138 - RNA, 23 nt, Synthetic Construct
  source 1..23: mol_type = other RNA
tcctgtgctgagctgccccgagt

SEQ ID NO: 4139 - RNA, 23 nt, Synthetic Construct
  source 1..23: mol_type = other RNA
tcggatccgtctgagcttggctt

SEQ ID NO: 4140 - RNA, 32 nt, Synthetic Construct; identical to SEQ ID NO: 2318
  source 1..32: mol_type = other RNA

SEQ ID NO: 4141 - RNA, 32 nt, Synthetic Construct; identical to SEQ ID NO: 2318
  source 1..32: mol_type = other RNA

SEQ ID NO: 4142 - RNA, 33 nt, Synthetic Construct; identical to SEQ ID NO: 2266
  source 1..33: mol_type = other RNA

SEQ ID NO: 4143 - RNA, 18 nt, Synthetic Construct
  source 1..18: mol_type = other RNA
gaagttgaccgcctgggg

SEQ ID NO: 4144 - RNA, 22 nt, Synthetic Construct
  source 1..22: mol_type = other RNA
tccccttggggttgtaggacca

SEQ ID NO: 4145 - RNA, 22 nt, Synthetic Construct
  source 1..22: mol_type = other RNA
tccccttggggttgtaggacca

SEQ ID NO: 4146 - RNA, 23 nt, Synthetic Construct
  source 1..23: mol_type = other RNA
tgaggagcagagagcgagacttt

SEQ ID NO: 4147 - RNA, 23 nt, Synthetic Construct
  source 1..23: mol_type = other RNA
tgaggagcagagagcgagacttt

SEQ ID NO: 4148 - RNA, 28 nt, Synthetic Construct
  source 1..28: mol_type = other RNA
ccccccactgctaaatttgactggcctt

SEQ ID NO: 4149 - RNA, 20 nt, Synthetic Construct
  source 1..20: mol_type = other RNA
tggaatgtaaagaagtatgt

SEQ ID NO: 4150 - RNA, 20 nt, Synthetic Construct
  source 1..20: mol_type = other RNA
tggaatgtaaagaagtatgt

SEQ ID NO: 4151 - RNA, 22 nt, Synthetic Construct
  source 1..22: mol_type = other RNA
tgaggtagtagtttgtgctgtc

SEQ ID NO: 4152 - RNA, 22 nt, Synthetic Construct
  source 1..22: mol_type = other RNA
tgaggtagtagtttgtgctgtc

SEQ ID NO: 4153 - RNA, 21 nt, Synthetic Construct
  source 1..21: mol_type = other RNA
ngaggtagtaggttgtgtggt

SEQ ID NO: 4154 - RNA, 21 nt, Synthetic Construct
  source 1..21: mol_type = other RNA
ngaggtagtaggttgtgtggt

SEQ ID NO: 4155 - RNA, 43 nt, Synthetic Construct; identical to SEQ ID NO: 1204
  source 1..43: mol_type = other RNA

SEQ ID NO: 4156 - RNA, 43 nt, Synthetic Construct; identical to SEQ ID NO: 1204
  source 1..43: mol_type = other RNA

SEQ ID NO: 4157 - RNA, 26 nt, Synthetic Construct
  source 1..26: mol_type = other RNA
gacttaccaaacctatgcaaactccg

SEQ ID NO: 4158 - RNA, 26 nt, Synthetic Construct
  source 1..26: mol_type = other RNA
gacttaccaaacctatgcaaactccg

SEQ ID NO: 4159 - RNA, 17 nt, Synthetic Construct
  source 1..17: mol_type = other RNA
ctaatgagactgccggt

SEQ ID NO: 4160 - RNA, 17 nt, Synthetic Construct
  source 1..17: mol_type = other RNA
ctaatgagactgccggt

SEQ ID NO: 4161 - RNA, 39 nt, Synthetic Construct; identical to SEQ ID NO: 2980
  source 1..39: mol_type = other RNA

SEQ ID NO: 4162 - RNA, 39 nt, Synthetic Construct; identical to SEQ ID NO: 2980
  source 1..39: mol_type = other RNA

SEQ ID NO: 4163 - RNA, 19 nt, Synthetic Construct
  source 1..19: mol_type = other RNA
gtccggatcgtagtctgca

SEQ ID NO: 4164 - RNA, 19 nt, Synthetic Construct
  source 1..19: mol_type = other RNA
gtccggatcgtagtctgca

SEQ ID NO: 4165 - RNA, 22 nt, Synthetic Construct
  source 1..22: mol_type = other RNA
tgaggtagtaggttgtatagtg

SEQ ID NO: 4166 - RNA, 22 nt, Synthetic Construct
  source 1..22: mol_type = other RNA
tgaggtagtaggttgtgcggtt

SEQ ID NO: 4167 - RNA, 22 nt, Synthetic Construct
  source 1..22: mol_type = other RNA
tgaggtagtaggttgtgcggtt

SEQ ID NO: 4168 - RNA, 22 nt, Synthetic Construct
  source 1..22: mol_type = other RNA
acagtagtctgcacattggttg

SEQ ID NO: 4169 - RNA, 23 nt, Synthetic Construct
  source 1..23: mol_type = other RNA
tggtaatacgacgcacttagtgt

SEQ ID NO: 4170 - RNA, 23 nt, Synthetic Construct
  source 1..23: mol_type = other RNA
tggtaatacgacgcacttagtgt

SEQ ID NO: 4171 - RNA, 25 nt, Synthetic Construct
  source 1..25: mol_type = other RNA
ggtaaaatggctgagtgaagcattg

SEQ ID NO: 4172 - RNA, 25 nt, Synthetic Construct
  source 1..25: mol_type = other RNA
ggtaaaatggctgagtgaagcattg

SEQ ID NO: 4173 - RNA, 27 nt, Synthetic Construct
  source 1..27: mol_type = other RNA
gatttccccttggggttgtaggaccac

SEQ ID NO: 4174 - RNA, 27 nt, Synthetic Construct
  source 1..27: mol_type = other RNA
gatttccccttggggttgtaggaccac

SEQ ID NO: 4175 - RNA, 21 nt, Synthetic Construct
  source 1..21: mol_type = other RNA
tgaggtagtagattgtatggt

SEQ ID NO: 4176 - RNA, 21 nt, Synthetic Construct
  source 1..21: mol_type = other RNA
tgaggtagtagattgtatggt

SEQ ID NO: 4177 - RNA, 21 nt, Synthetic Construct
  source 1..21: mol_type = other RNA
acagtagcctgcacattggtt

SEQ ID NO: 4178 - RNA, 16 nt, Synthetic Construct
  source 1..16: mol_type = other RNA
gctattgacgaccgta

SEQ ID NO: 4179 - RNA, 16 nt, Synthetic Construct
  source 1..16: mol_type = other RNA
gctattgacgaccgta

SEQ ID NO: 4180 - RNA, 23 nt, Synthetic Construct
  source 1..23: mol_type = other RNA
tggtagtacgacgtacttagtgt

SEQ ID NO: 4181 - RNA, 23 nt, Synthetic Construct
  source 1..23: mol_type = other RNA
tggtagtacgacgtacttagtgt

SEQ ID NO: 4182 - RNA, 30 nt, Synthetic Construct; identical to SEQ ID NO: 1236
  source 1..30: mol_type = other RNA

SEQ ID NO: 4183 - RNA, 30 nt, Synthetic Construct; identical to SEQ ID NO: 1236
  source 1..30: mol_type = other RNA

SEQ ID NO: 4184 - RNA, 22 nt, Synthetic Construct
  source 1..22: mol_type = other RNA
tgaggtagtaggttgtgtggtc

SEQ ID NO: 4185 - RNA, 22 nt, Synthetic Construct
  source 1..22: mol_type = other RNA
tgaggtagtaggttgtgtggtc

SEQ ID NO: 4186 - RNA, 22 nt, Synthetic Construct
  source 1..22: mol_type = other RNA
ngaggtagtagtttgtgctgtt

SEQ ID NO: 4187 - RNA, 21 nt, Synthetic Construct
  source 1..21: mol_type = other RNA
tgaggtagtaggttgtgtggc

SEQ ID NO: 4188 - RNA, 21 nt, Synthetic Construct
  source 1..21: mol_type = other RNA
tgaggtagtaggttgtgtggc

SEQ ID NO: 4189 - RNA, 20 nt, Synthetic Construct
  source 1..20: mol_type = other RNA
tgaggaagtaggttgtatag

SEQ ID NO: 4190 - RNA, 20 nt, Synthetic Construct
  source 1..20: mol_type = other RNA
tgaggaagtaggttgtatag

SEQ ID NO: 4191 - RNA, 22 nt, Synthetic Construct
  source 1..22: mol_type = other RNA
tgaggtagtagtctgtgctgtt

SEQ ID NO: 4192 - RNA, 22 nt, Synthetic Construct
  source 1..22: mol_type = other RNA
tgaggtagtagtctgtgctgtt

SEQ ID NO: 4193 - RNA, 17 nt, Synthetic Construct
  source 1..17: mol_type = other RNA
tggccgggacagagggc

SEQ ID NO: 4194 - RNA, 17 nt, Synthetic Construct
  source 1..17: mol_type = other RNA
tggccgggacagagggc

SEQ ID NO: 4195 - RNA, 20 nt, Synthetic Construct
  source 1..20: mol_type = other RNA
agcagcattgtacagggcta

SEQ ID NO: 4196 - RNA, 20 nt, Synthetic Construct
  source 1..20: mol_type = other RNA
agcagcattgtacagggcta

SEQ ID NO: 4197 - RNA, 28 nt, Synthetic Construct
  source 1..28: mol_type = other RNA
gctttgatccggagatttccgaatgggg

SEQ ID NO: 4198 - RNA, 28 nt, Synthetic Construct
  source 1..28: mol_type = other RNA
gctttgatccggagatttccgaatgggg

SEQ ID NO: 4199 - RNA, 20 nt, Synthetic Construct
  source 1..20: mol_type = other RNA
tgaggtagtaggttgcatag

SEQ ID NO: 4200 - RNA, 20 nt, Synthetic Construct
  source 1..20: mol_type = other RNA
tgaggtagtaggttgcatag

SEQ ID NO: 4201 - RNA, 22 nt, Synthetic Construct
  source 1..22: mol_type = other RNA
nattgcacttgtcccggcctgt

SEQ ID NO: 4202 - RNA, 21 nt, Synthetic Construct
  source 1..21: mol_type = other RNA
ggaggagttcgaaggtacgct

SEQ ID NO: 4203 - RNA, 21 nt, Synthetic Construct
  source 1..21: mol_type = other RNA
ggaggagttcgaaggtacgct

SEQ ID NO: 4204 - RNA, 21 nt, Synthetic Construct
  source 1..21: mol_type = other RNA
tgaggaagtaggttgtatagt

SEQ ID NO: 4205 - RNA, 22 nt, Synthetic Construct
  source 1..22: mol_type = other RNA
tgaggtagtagtttgtgctgtc

SEQ ID NO: 4206 - RNA, 22 nt, Synthetic Construct
  source 1..22: mol_type = other RNA
tgaggtagtagtttgtgctgtc

SEQ ID NO: 4207 - RNA, 23 nt, Synthetic Construct
  source 1..23: mol_type = other RNA
tggcaatacgacgtacttagtgt

SEQ ID NO: 4208 - RNA, 23 nt, Synthetic Construct
  source 1..23: mol_type = other RNA
tggcaatacgacgtacttagtgt

SEQ ID NO: 4209 - RNA, 17 nt, Synthetic Construct
  source 1..17: mol_type = other RNA
cacggcccagactccta

SEQ ID NO: 4210 - RNA, 17 nt, Synthetic Construct
  source 1..17: mol_type = other RNA
cacggcccagactccta

SEQ ID NO: 4211 - RNA, 23 nt, Synthetic Construct
  source 1..23: mol_type = other RNA
taaagtgcttatagtgcaggtag

SEQ ID NO: 4212 - RNA, 23 nt, Synthetic Construct
  source 1..23: mol_type = other RNA
taaagtgcttatagtgcaggtag

SEQ ID NO: 4213 - RNA, 23 nt, Synthetic Construct
  source 1..23: mol_type = other RNA
ccctgtactgagctgccccgaga

SEQ ID NO: 4214 - RNA, 23 nt, Synthetic Construct
  source 1..23: mol_type = other RNA
ccctgtactgagctgccccgaga

SEQ ID NO: 4215 - RNA, 16 nt, Synthetic Construct
  source 1..16: mol_type = other RNA
gggtgaaagcggggga

SEQ ID NO: 4216 - RNA, 20 nt, Synthetic Construct
  source 1..20: mol_type = other RNA
tgaggtagtaggttgtacag

SEQ ID NO: 4217 - RNA, 20 nt, Synthetic Construct
  source 1..20: mol_type = other RNA
tgaggtagtaggttgtacag

SEQ ID NO: 4218 - RNA, 23 nt, Synthetic Construct
  source 1..23: mol_type = other RNA
tggtaatacgacgtacttagtgc

SEQ ID NO: 4219 - RNA, 23 nt, Synthetic Construct
  source 1..23: mol_type = other RNA
tggtaatacgacgtacttagtgc

SEQ ID NO: 4220 - RNA, 22 nt, Synthetic Construct
  source 1..22: mol_type = other RNA
tgaggtagcagtttgtgctgtt

SEQ ID NO: 4221 - RNA, 22 nt, Synthetic Construct
  source 1..22: mol_type = other RNA
ncctgtactgagctgccccgag

SEQ ID NO: 4222 - RNA, 20 nt, Synthetic Construct
  source 1..20: mol_type = other RNA
tgaggtagtaggttgcgtgg

SEQ ID NO: 4223 - RNA, 20 nt, Synthetic Construct
  source 1..20: mol_type = other RNA
tgaggtagtaggttgcgtgg

SEQ ID NO: 4224 - RNA, 20 nt, Synthetic Construct
  source 1..20: mol_type = other RNA
tgaggtagtaggctgtgtgg

SEQ ID NO: 4225 - RNA, 20 nt, Synthetic Construct
  source 1..20: mol_type = other RNA
tgaggtagtaggctgtgtgg

SEQ ID NO: 4226 - RNA, 17 nt, Synthetic Construct
  source 1..17: mol_type = other RNA
agcggtggatgatgtgg

SEQ ID NO: 4227 - RNA, 35 nt, Synthetic Construct; identical to SEQ ID NO: 757
  source 1..35: mol_type = other RNA

SEQ ID NO: 4228 - RNA, 35 nt, Synthetic Construct; identical to SEQ ID NO: 757
  source 1..35: mol_type = other RNA

SEQ ID NO: 4229 - RNA, 23 nt, Synthetic Construct
  source 1..23: mol_type = other RNA
taaggggcagagagcgagacttt

SEQ ID NO: 4230 - RNA, 16 nt, Synthetic Construct
  source 1..16: mol_type = other RNA
gcggtggatgatgtgg

SEQ ID NO: 4231 - RNA, 25 nt, Synthetic Construct
  source 1..25: mol_type = other RNA
ttgaggatatgagatcgggacgaca

SEQ ID NO: 4232 - RNA, 21 nt, Synthetic Construct
  source 1..21: mol_type = other RNA
ctaatcccagaaacccggtcg

SEQ ID NO: 4233 - RNA, 23 nt, Synthetic Construct
  source 1..23: mol_type = other RNA
tggtaatacgacatacttagtgt

SEQ ID NO: 4234 - RNA, 23 nt, Synthetic Construct
  source 1..23: mol_type = other RNA
tggtaatacgacatacttagtgt

SEQ ID NO: 4235 - RNA, 22 nt, Synthetic Construct
  source 1..22: mol_type = other RNA
tcctatactgagctgccccgag

SEQ ID NO: 4236 - RNA, 22 nt, Synthetic Construct
  source 1..22: mol_type = other RNA
tcctatactgagctgccccgag

SEQ ID NO: 4237 - RNA, 33 nt, Synthetic Construct; identical to SEQ ID NO: 2209
  source 1..33: mol_type = other RNA

SEQ ID NO: 4238 - RNA, 33 nt, Synthetic Construct; identical to SEQ ID NO: 2209
  source 1..33: mol_type = other RNA

SEQ ID NO: 4239 - RNA, 21 nt, Synthetic Construct
  source 1..21: mol_type = other RNA
tgaggtagtaggttgcgtggt

SEQ ID NO: 4240 - RNA, 21 nt, Synthetic Construct
  source 1..21: mol_type = other RNA
tgaggtagtaggttgcgtggt

SEQ ID NO: 4241 - RNA, 16 nt, Synthetic Construct
  source 1..16: mol_type = other RNA
ttggcctcaagtcagg

SEQ ID NO: 4242 - RNA, 16 nt, Synthetic Construct
  source 1..16: mol_type = other RNA
ttggcctcaagtcagg

SEQ ID NO: 4243 - RNA, 22 nt, Synthetic Construct
  source 1..22: mol_type = other RNA
tgaggtagtagtttgtggtgtt

SEQ ID NO: 4244 - RNA, 23 nt, Synthetic Construct
  source 1..23: mol_type = other RNA
gactcttagcggtggatcactcg

SEQ ID NO: 4245 - RNA, 23 nt, Synthetic Construct
  source 1..23: mol_type = other RNA
gactcttagcggtggatcactcg

SEQ ID NO: 4246 - RNA, 20 nt, Synthetic Construct
  source 1..20: mol_type = other RNA
caaagtgctgttcgtgcagg

SEQ ID NO: 4247 - RNA, 20 nt, Synthetic Construct
  source 1..20: mol_type = other RNA
caaagtgctgttcgtgcagg

SEQ ID NO: 4248 - RNA, 21 nt, Synthetic Construct
  source 1..21: mol_type = other RNA
actcggcgtggcgtcggtcgt

SEQ ID NO: 4249 - RNA, 21 nt, Synthetic Construct
  source 1..21: mol_type = other RNA
actcggcgtggcgtcggtcgt

SEQ ID NO: 4250 - RNA, 20 nt, Synthetic Construct
  source 1..20: mol_type = other RNA
tgaggcagtaggttgtgtgg

SEQ ID NO: 4251 - RNA, 20 nt, Synthetic Construct
  source 1..20: mol_type = other RNA
tgaggcagtaggttgtgtgg

SEQ ID NO: 4252 - RNA, 22 nt, Synthetic Construct
  source 1..22: mol_type = other RNA
tcagtagctcgaggaaaagaca

SEQ ID NO: 4253 - RNA, 22 nt, Synthetic Construct
  source 1..22: mol_type = other RNA
tcagtagctcgaggaaaagaca

SEQ ID NO: 4254 - RNA, 22 nt, Synthetic Construct
  source 1..22: mol_type = other RNA
taaggtagtagtttgtgctgtt

SEQ ID NO: 4255 - RNA, 15 nt, Synthetic Construct
  source 1..15: mol_type = other RNA
gtcgacgtatagggt

SEQ ID NO: 4256 - RNA, 15 nt, Synthetic Construct
  source 1..15: mol_type = other RNA
gtcgacgtatagggt

SEQ ID NO: 4257 - RNA, 21 nt, Synthetic Construct
  source 1..21: mol_type = other RNA
tgaggtagtaggttgtatagc

SEQ ID NO: 4258 - RNA, 15 nt, Synthetic Construct
  source 1..15: mol_type = other RNA
ttccgaaagtagtgg

SEQ ID NO: 4259 - RNA, 15 nt, Synthetic Construct
  source 1..15: mol_type = other RNA
ttccgaaagtagtgg

SEQ ID NO: 4260 - RNA, 22 nt, Synthetic Construct
  source 1..22: mol_type = other RNA
tcgtaccgtgagtaataatgca

SEQ ID NO: 4261 - RNA, 22 nt, Synthetic Construct
  source 1..22: mol_type = other RNA
tgaggcagtagtttgtgctgtt

SEQ ID NO: 4262 - RNA, 44 nt, Synthetic Construct
  source 1..44: mol_type = other RNA
tcgctgcgatctattgaaagtcagccctcgacacaagggtttgt

SEQ ID NO: 4263 - RNA, 21 nt, Synthetic Construct
  source 1..21: mol_type = other RNA
tgaggggcagagagcgagacc

SEQ ID NO: 4264 - RNA, 21 nt, Synthetic Construct
  source 1..21: mol_type = other RNA
tgaggggcagagagcgagacc

SEQ ID NO: 4265 - RNA, 22 nt, Synthetic Construct
  source 1..22: mol_type = other RNA
tgaggtagtagtttgtggtgtt

SEQ ID NO: 4266 - RNA, 22 nt, Synthetic Construct
  source 1..22: mol_type = other RNA
tgaggtagtagtttgtggtgtt

SEQ ID NO: 4267 - RNA, 21 nt, Synthetic Construct
  source 1..21: mol_type = other RNA
tcctgtactgggctgccccga

SEQ ID NO: 4268 - RNA, 21 nt, Synthetic Construct
  source 1..21: mol_type = other RNA
tcctgtactgggctgccccga

SEQ ID NO: 4269 - RNA, 23 nt, Synthetic Construct
  source 1..23: mol_type = other RNA
tggtaatacgacgtgcttagtgt

SEQ ID NO: 4270 - RNA, 21 nt, Synthetic Construct
  source 1..21: mol_type = other RNA
attagtgacgcgcatgaatgg

SEQ ID NO: 4271 - RNA, 21 nt, Synthetic Construct
  source 1..21: mol_type = other RNA
attagtgacgcgcatgaatgg

SEQ ID NO: 4272 - RNA, 22 nt, Synthetic Construct
  source 1..22: mol_type = other RNA
tgaggtagtagattgtatagta

SEQ ID NO: 4273 - RNA, 22 nt, Synthetic Construct
  source 1..22: mol_type = other RNA
tgaggtagtagattgtatagta

SEQ ID NO: 4274 - RNA, 23 nt, Synthetic Construct
  source 1..23: mol_type = other RNA
cgaggggcagagagcgagacttt

SEQ ID NO: 4275 - RNA, 20 nt, Synthetic Construct
  source 1..20: mol_type = other RNA
cgaggtagtaggttgtgtgg

SEQ ID NO: 4276 - RNA, 20 nt, Synthetic Construct
  source 1..20: mol_type = other RNA
cgaggtagtaggttgtgtgg

SEQ ID NO: 4277 - RNA, 37 nt, Synthetic Construct
  source 1..37: mol_type = other RNA
aatccgttggtcgaaggttcgaatccttcagggccca

SEQ ID NO: 4278 - RNA, 37 nt, Synthetic Construct; identical to SEQ ID NO: 4277
  source 1..37: mol_type = other RNA

SEQ ID NO: 4279 - RNA, 32 nt, Synthetic Construct
  source 1..32: mol_type = other RNA
gggatgttagctcagtcggtagagcagcggac

SEQ ID NO: 4280 - RNA, 32 nt, Synthetic Construct; identical to SEQ ID NO: 4279
  source 1..32: mol_type = other RNA

SEQ ID NO: 4281 - RNA, 23 nt, Synthetic Construct
  source 1..23: mol_type = other RNA
tggtaatacaacgtacttagtgt

SEQ ID NO: 4282 - RNA, 23 nt, Synthetic Construct
  source 1..23: mol_type = other RNA
tggtaatacaacgtacttagtgt

SEQ ID NO: 4283 - RNA, 23 nt, Synthetic Construct
  source 1..23: mol_type = other RNA
tggaatgtaaagaagtatgtata

SEQ ID NO: 4284 - RNA, 22 nt, Synthetic Construct
  source 1..22: mol_type = other RNA
acagtagcctgcacattggtta

SEQ ID NO: 4285 - RNA, 23 nt, Synthetic Construct
  source 1..23: mol_type = other RNA
nggtaatacgacgtacttagtgt

SEQ ID NO: 4286 - RNA, 23 nt, Synthetic Construct
  source 1..23: mol_type = other RNA
nggtaatacgacgtacttagtgt

SEQ ID NO: 4287 - RNA, 35 nt, Synthetic Construct; identical to SEQ ID NO: 2069
  source 1..35: mol_type = other RNA

SEQ ID NO: 4288 - RNA, 35 nt, Synthetic Construct; identical to SEQ ID NO: 2069
  source 1..35: mol_type = other RNA

SEQ ID NO: 4289 - RNA, 21 nt, Synthetic Construct
  source 1..21: mol_type = other RNA
cctctgggcccttcctccagt

SEQ ID NO: 4290 - RNA, 21 nt, Synthetic Construct
  source 1..21: mol_type = other RNA
cctctgggcccttcctccagt

SEQ ID NO: 4291 - RNA, 22 nt, Synthetic Construct
  source 1..22: mol_type = other RNA
tcctgtactgagctgccctgag

SEQ ID NO: 4292 - RNA, 22 nt, Synthetic Construct
  source 1..22: mol_type = other RNA
tcctgtactgagctgccctgag

SEQ ID NO: 4293 - RNA, 22 nt, Synthetic Construct
  source 1..22: mol_type = other RNA
gctcacggaaagagaatgaagc

SEQ ID NO: 4294 - RNA, 22 nt, Synthetic Construct
  source 1..22: mol_type = other RNA
gctcacggaaagagaatgaagc

SEQ ID NO: 4295 - RNA, 43 nt, Synthetic Construct; identical to SEQ ID NO: 727
  source 1..43: mol_type = other RNA

SEQ ID NO: 4296 - RNA, 23 nt, Synthetic Construct
  source 1..23: mol_type = other RNA
aggtaatacgacgtacttagtgt

SEQ ID NO: 4297 - RNA, 23 nt, Synthetic Construct
  source 1..23: mol_type = other RNA
aggtaatacgacgtacttagtgt

SEQ ID NO: 4298 - RNA, 21 nt, Synthetic Construct
  source 1..21: mol_type = other RNA
acagcaggacggtggccatgg

SEQ ID NO: 4299 - RNA, 21 nt, Synthetic Construct
  source 1..21: mol_type = other RNA
acagcaggacggtggccatgg

SEQ ID NO: 4300 - RNA, 18 nt, Synthetic Construct
  source 1..18: mol_type = other RNA
ggtgcaagcgttaatcgg

SEQ ID NO: 4301 - RNA, 18 nt, Synthetic Construct
  source 1..18: mol_type = other RNA
ggtgcaagcgttaatcgg

SEQ ID NO: 4302 - RNA, 24 nt, Synthetic Construct
  source 1..24: mol_type = other RNA
ggctacattgtctgctgggtttct

SEQ ID NO: 4303 - RNA, 23 nt, Synthetic Construct
  source 1..23: mol_type = other RNA
tggtaatgcgacgtacttagtgt

SEQ ID NO: 4304 - RNA, 37 nt, Synthetic Construct; identical to SEQ ID NO: 2607
  source 1..37: mol_type = other RNA

SEQ ID NO: 4305 - RNA, 37 nt, Synthetic Construct; identical to SEQ ID NO: 2607
  source 1..37: mol_type = other RNA

SEQ ID NO: 4306 - RNA, 23 nt, Synthetic Construct
  source 1..23: mol_type = other RNA
tgagaggcagagagcgagacttt

SEQ ID NO: 4307 - RNA, 23 nt, Synthetic Construct
  source 1..23: mol_type = other RNA
tgagaggcagagagcgagacttt

SEQ ID NO: 4308 - RNA, 21 nt, Synthetic Construct
  source 1..21: mol_type = other RNA
tgaggtagtaggttgtgaggt

SEQ ID NO: 4309 - RNA, 21 nt, Synthetic Construct
  source 1..21: mol_type = other RNA
tgaggtagtaggttgtgaggt

SEQ ID NO: 4310 - RNA, 21 nt, Synthetic Construct
  source 1..21: mol_type = other RNA
tgaggggcggagagcgagact

SEQ ID NO: 4311 - RNA, 21 nt, Synthetic Construct
  source 1..21: mol_type = other RNA
tgaggggcggagagcgagact

SEQ ID NO: 4312 - RNA, 23 nt, Synthetic Construct
  source 1..23: mol_type = other RNA
taaagtgcttatagtgcaggtag

SEQ ID NO: 4313 - RNA, 23 nt, Synthetic Construct
  source 1..23: mol_type = other RNA
taaagtgcttatagtgcaggtag

SEQ ID NO: 4314 - RNA, 23 nt, Synthetic Construct
  source 1..23: mol_type = other RNA
tggtaatacgacgtacctagtgt

SEQ ID NO: 4315 - RNA, 23 nt, Synthetic Construct
  source 1..23: mol_type = other RNA
tggtaatacgacgtacctagtgt

SEQ ID NO: 4316 - RNA, 18 nt, Synthetic Construct
  source 1..18: mol_type = other RNA
tcagtagctcgaggaaaa

SEQ ID NO: 4317 - RNA, 18 nt, Synthetic Construct
  source 1..18: mol_type = other RNA
tcagtagctcgaggaaaa

SEQ ID NO: 4318 - RNA, 22 nt, Synthetic Construct
  source 1..22: mol_type = other RNA
tgaagtagtaggttgtgtggtt

SEQ ID NO: 4319 - RNA, 22 nt, Synthetic Construct
  source 1..22: mol_type = other RNA
tgaggtagtagattgtatagtc

SEQ ID NO: 4320 - RNA, 22 nt, Synthetic Construct
  source 1..22: mol_type = other RNA
tgaggtagtagattgtatagtc

SEQ ID NO: 4321 - RNA, 16 nt, Synthetic Construct
  source 1..16: mol_type = other RNA
ccaaggggtcgtgggt

SEQ ID NO: 4322 - RNA, 16 nt, Synthetic Construct
  source 1..16: mol_type = other RNA
ccaaggggtcgtgggt

SEQ ID NO: 4323 - RNA, 18 nt, Synthetic Construct
  source 1..18: mol_type = other RNA
cgccgatgatagtgcgga

SEQ ID NO: 4324 - RNA, 23 nt, Synthetic Construct
  source 1..23: mol_type = other RNA
tggtaatacgacgtacttagcgt

SEQ ID NO: 4325 - RNA, 23 nt, Synthetic Construct
  source 1..23: mol_type = other RNA
tggtaatacgacgtacttagcgt

SEQ ID NO: 4326 - RNA, 25 nt, Synthetic Construct
  source 1..25: mol_type = other RNA
ggtaaaatagctgagtgaagcattg

SEQ ID NO: 4327 - RNA, 25 nt, Synthetic Construct
  source 1..25: mol_type = other RNA
ggtaaaatagctgagtgaagcattg

SEQ ID NO: 4328 - RNA, 26 nt, Synthetic Construct
  source 1..26: mol_type = other RNA
gaggaacactagtggcgtaggcgaga

SEQ ID NO: 4329 - RNA, 26 nt, Synthetic Construct
  source 1..26: mol_type = other RNA
gaggaacactagtggcgtaggcgaga

SEQ ID NO: 4330 - RNA, 20 nt, Synthetic Construct
  source 1..20: mol_type = other RNA
ggtcccaagggtatggctgt

SEQ ID NO: 4331 - RNA, 20 nt, Synthetic Construct
  source 1..20: mol_type = other RNA
ggtcccaagggtatggctgt

SEQ ID NO: 4332 - RNA, 23 nt, Synthetic Construct
  source 1..23: mol_type = other RNA
taaggtgcatctagtgcagatag

SEQ ID NO: 4333 - RNA, 23 nt, Synthetic Construct
  source 1..23: mol_type = other RNA
taaggtgcatctagtgcagatag

SEQ ID NO: 4334 - RNA, 22 nt, Synthetic Construct
  source 1..22: mol_type = other RNA
ttcaagtaatccaggataggcc

SEQ ID NO: 4335 - RNA, 21 nt, Synthetic Construct
  source 1..21: mol_type = other RNA
tgaggggcagagagcgagaca

SEQ ID NO: 4336 - RNA, 21 nt, Synthetic Construct
  source 1..21: mol_type = other RNA
caaagtgctgttcgtgcaggt

SEQ ID NO: 4337 - RNA, 19 nt, Synthetic Construct
  source 1..19: mol_type = other RNA
cctgtctgaatatgggggg

SEQ ID NO: 4338 - RNA, 19 nt, Synthetic Construct
  source 1..19: mol_type = other RNA
cctgtctgaatatgggggg

SEQ ID NO: 4339 - RNA, 21 nt, Synthetic Construct
  source 1..21: mol_type = other RNA
aagaaagattgcaagaactgc

SEQ ID NO: 4340 - RNA, 21 nt, Synthetic Construct
  source 1..21: mol_type = other RNA
aagaaagattgcaagaactgc

SEQ ID NO: 4341 - RNA, 22 nt, Synthetic Construct
  source 1..22: mol_type = other RNA
tgaggtagtaggttgtatagtc

SEQ ID NO: 4342 - RNA, 22 nt, Synthetic Construct
  source 1..22: mol_type = other RNA
tgaggtagtaggttgtatagtc

SEQ ID NO: 4343 - RNA, 21 nt, Synthetic Construct
  source 1..21: mol_type = other RNA
tgaggggcggagagcgagact

SEQ ID NO: 4344 - RNA, 16 nt, Synthetic Construct
  source 1..16: mol_type = other RNA
gtccccttcgtctaga

SEQ ID NO: 4345 - RNA, 23 nt, Synthetic Construct
  source 1..23: mol_type = other RNA
ggctacattgtctgctgggtttc

SEQ ID NO: 4346 - RNA, 21 nt, Synthetic Construct
  source 1..21: mol_type = other RNA
tgaggtggtaggttgtgtggt

SEQ ID NO: 4347 - RNA, 21 nt, Synthetic Construct
  source 1..21: mol_type = other RNA
tgaggtggtaggttgtgtggt

SEQ ID NO: 4348 - RNA, 20 nt, Synthetic Construct
  source 1..20: mol_type = other RNA
ctctaatgagactgccggtg

SEQ ID NO: 4349 - RNA, 22 nt, Synthetic Construct
  source 1..22: mol_type = other RNA
nattgcacttgtcccggcctgt

SEQ ID NO: 4350 - RNA, 22 nt, Synthetic Construct
  source 1..22: mol_type = other RNA
nattgcacttgtcccggcctgt

SEQ ID NO: 4351 - RNA, 20 nt, Synthetic Construct
  source 1..20: mol_type = other RNA
tggggtagtaggttgtatag

SEQ ID NO: 4352 - RNA, 20 nt, Synthetic Construct
  source 1..20: mol_type = other RNA
tggggtagtaggttgtatag

SEQ ID NO: 4353 - RNA, 25 nt, Synthetic Construct
  source 1..25: mol_type = other RNA
ttggggatatgagatcgagacgaca

SEQ ID NO: 4354 - RNA, 23 nt, Synthetic Construct
  source 1..23: mol_type = other RNA
tggtaatacgacgcacttagtgt

SEQ ID NO: 4355 - RNA, 23 nt, Synthetic Construct
  source 1..23: mol_type = other RNA
tggtaatacgacgcacttagtgt

SEQ ID NO: 4356 - RNA, 37 nt, Synthetic Construct; identical to SEQ ID NO: 2365
  source 1..37: mol_type = other RNA

SEQ ID NO: 4357 - RNA, 37 nt, Synthetic Construct; identical to SEQ ID NO: 2365
  source 1..37: mol_type = other RNA

SEQ ID NO: 4358 - RNA, 22 nt, Synthetic Construct
  source 1..22: mol_type = other RNA
tatcgcacttgtcccggcctgt

SEQ ID NO: 4359 - RNA, 17 nt, Synthetic Construct
  source 1..17: mol_type = other RNA
tcccctggacctgtact

SEQ ID NO: 4360 - RNA, 21 nt, Synthetic Construct
  source 1..21: mol_type = other RNA
tgaggtagtaggttgtgtagt

SEQ ID NO: 4361 - RNA, 27 nt, Synthetic Construct
  source 1..27: mol_type = other RNA
ccccccactgctaagtttgactggctt

SEQ ID NO: 4362 - RNA, 21 nt, Synthetic Construct
  source 1..21: mol_type = other RNA
tgaggtaggaggttgtatagt

SEQ ID NO: 4363 - RNA, 23 nt, Synthetic Construct
  source 1..23: mol_type = other RNA
ggatatcatcatatactgtaagt

SEQ ID NO: 4364 - RNA, 23 nt, Synthetic Construct
  source 1..23: mol_type = other RNA
ggatatcatcatatactgtaagt

SEQ ID NO: 4365 - RNA, 16 nt, Synthetic Construct
  source 1..16: mol_type = other RNA
gtcaacggccatacca

SEQ ID NO: 4366 - RNA, 16 nt, Synthetic Construct
  source 1..16: mol_type = other RNA
gtcaacggccatacca

SEQ ID NO: 4367 - RNA, 34 nt, Synthetic Construct; identical to SEQ ID NO: 2183
  source 1..34: mol_type = other RNA

SEQ ID NO: 4368 - RNA, 34 nt, Synthetic Construct; identical to SEQ ID NO: 2183
  source 1..34: mol_type = other RNA

SEQ ID NO: 4369 - RNA, 21 nt, Synthetic Construct
  source 1..21: mol_type = other RNA
tgaggtagtaggttgtgtagt

SEQ ID NO: 4370 - RNA, 21 nt, Synthetic Construct
  source 1..21: mol_type = other RNA
tgaggtagtaggttgtgtagt

SEQ ID NO: 4371 - RNA, 23 nt, Synthetic Construct
  source 1..23: mol_type = other RNA
tcctgtactgggctgccccgagt

SEQ ID NO: 4372 - RNA, 23 nt, Synthetic Construct
  source 1..23: mol_type = other RNA
tcctgtactgggctgccccgagt

SEQ ID NO: 4373 - RNA, 25 nt, Synthetic Construct
  source 1..25: mol_type = other RNA
gagaaagctcacaagaactgctaac

SEQ ID NO: 4374 - RNA, 25 nt, Synthetic Construct
  source 1..25: mol_type = other RNA
gagaaagctcacaagaactgctaac

SEQ ID NO: 4375 - RNA, 15 nt, Synthetic Construct
  source 1..15: mol_type = other RNA
tcctgacggccatag

SEQ ID NO: 4376 - RNA, 15 nt, Synthetic Construct
  source 1..15: mol_type = other RNA
tcctgacggccatag

SEQ ID NO: 4377 - RNA, 23 nt, Synthetic Construct
  source 1..23: mol_type = other RNA
tggtaatacgtcgtacttagtgt

SEQ ID NO: 4378 - RNA, 22 nt, Synthetic Construct
  source 1..22: mol_type = other RNA
ctttcagtcggatgtttgcagc

SEQ ID NO: 4379 - RNA, 16 nt, Synthetic Construct
  source 1..16: mol_type = other RNA
gccagcagccgcggta

SEQ ID NO: 4380 - RNA, 16 nt, Synthetic Construct
  source 1..16: mol_type = other RNA
gccagcagccgcggta

SEQ ID NO: 4381 - RNA, 25 nt, Synthetic Construct
  source 1..25: mol_type = other RNA
ttgaggatatgggatcgagacgaca

SEQ ID NO: 4382 - RNA, 25 nt, Synthetic Construct
  source 1..25: mol_type = other RNA
ttgaggatatgggatcgagacgaca

SEQ ID NO: 4383 - RNA, 19 nt, Synthetic Construct
  source 1..19: mol_type = other RNA
gcgaaattccttgtcgggt

SEQ ID NO: 4384 - RNA, 19 nt, Synthetic Construct
  source 1..19: mol_type = other RNA
gcgaaattccttgtcgggt

SEQ ID NO: 4385 - RNA, 21 nt, Synthetic Construct
  source 1..21: mol_type = other RNA
tgaggggcagggagcgagact

SEQ ID NO: 4386 - RNA, 22 nt, Synthetic Construct
  source 1..22: mol_type = other RNA
tgaggtagtagtatgtgctgtt

SEQ ID NO: 4387 - RNA, 21 nt, Synthetic Construct
  source 1..21: mol_type = other RNA
tggaatgtaaagaagtatgta

SEQ ID NO: 4388 - RNA, 25 nt, Synthetic Construct
  source 1..25: mol_type = other RNA
ttgaggatatgaggtcgagacgaca

SEQ ID NO: 4389 - RNA, 23 nt, Synthetic Construct
  source 1..23: mol_type = other RNA
tctttggttatctagctgtatga

SEQ ID NO: 4390 - RNA, 25 nt, Synthetic Construct
  source 1..25: mol_type = other RNA
ttgagggtatgagatcgagacgaca

SEQ ID NO: 4391 - RNA, 23 nt, Synthetic Construct
  source 1..23: mol_type = other RNA
tggtaatacgacgtacttagtgc

SEQ ID NO: 4392 - RNA, 22 nt, Synthetic Construct
  source 1..22: mol_type = other RNA
tgaggtagtaggttgtgtagtt

SEQ ID NO: 4393 - RNA, 22 nt, Synthetic Construct
  source 1..22: mol_type = other RNA
tgaggtagtaggttgtgtagtt

SEQ ID NO: 4394 - RNA, 22 nt, Synthetic Construct
  source 1..22: mol_type = other RNA
gtgccgaagctgtgggattgat

SEQ ID NO: 4395 - RNA, 22 nt, Synthetic Construct
  source 1..22: mol_type = other RNA
gtgccgaagctgtgggattgat

SEQ ID NO: 4396 - RNA, 21 nt, Synthetic Construct
  source 1..21: mol_type = other RNA
cgcgacctcagatcagacgtg

SEQ ID NO: 4397 - RNA, 21 nt, Synthetic Construct
  source 1..21: mol_type = other RNA
cgcgacctcagatcagacgtg

SEQ ID NO: 4398 - RNA, 23 nt, Synthetic Construct
  source 1..23: mol_type = other RNA
ggcggttatgcaagacagaggtg

SEQ ID NO: 4399 - RNA, 23 nt, Synthetic Construct
  source 1..23: mol_type = other RNA
ggcggttatgcaagacagaggtg

SEQ ID NO: 4400 - RNA, 39 nt, Synthetic Construct
  source 1..39: mol_type = other RNA
tgcctttgtgactgcatggctagagtacggtagaggggg

SEQ ID NO: 4401 - RNA, 39 nt, Synthetic Construct; identical to SEQ ID NO: 4400
  source 1..39: mol_type = other RNA

SEQ ID NO: 4402 - RNA, 18 nt, Synthetic Construct
  source 1..18: mol_type = other RNA
tctaatgagactgccggt

SEQ ID NO: 4403 - RNA, 18 nt, Synthetic Construct
  source 1..18: mol_type = other RNA
tctaatgagactgccggt

SEQ ID NO: 4404 - RNA, 20 nt, Synthetic Construct
  source 1..20: mol_type = other RNA
agcagcattgtacagggcta

SEQ ID NO: 4405 - RNA, 20 nt, Synthetic Construct
  source 1..20: mol_type = other RNA
agcagcattgtacagggcta

SEQ ID NO: 4406 - RNA, 20 nt, Synthetic Construct
  source 1..20: mol_type = other RNA
cccataaagtagaaagcact

SEQ ID NO: 4407 - RNA, 20 nt, Synthetic Construct
  source 1..20: mol_type = other RNA
cccataaagtagaaagcact

SEQ ID NO: 4408 - RNA, 22 nt, Synthetic Construct
  source 1..22: mol_type = other RNA
tgaggtagtaggttgtgtggtc

SEQ ID NO: 4409 - RNA, 22 nt, Synthetic Construct
  source 1..22: mol_type = other RNA
tgaggtagtaggttgtgtggtc

SEQ ID NO: 4410 - RNA, 22 nt, Synthetic Construct
  source 1..22: mol_type = other RNA
tcctgtactgagctgctccgag

SEQ ID NO: 4411 - RNA, 22 nt, Synthetic Construct
  source 1..22: mol_type = other RNA
tcctgtactgagctgctccgag

SEQ ID NO: 4412 - RNA, 21 nt, Synthetic Construct
  source 1..21: mol_type = other RNA
aagaaagattgcaagaactgc

SEQ ID NO: 4413 - RNA, 17 nt, Synthetic Construct
  source 1..17: mol_type = other RNA
gaagttgaccgcctggg

SEQ ID NO: 4414 - RNA, 23 nt, Synthetic Construct
  source 1..23: mol_type = other RNA
tggtaatacgacgtacttagtgc

SEQ ID NO: 4415 - RNA, 23 nt, Synthetic Construct
  source 1..23: mol_type = other RNA
tggtaatacgacgtacttagtgc

SEQ ID NO: 4416 - RNA, 22 nt, Synthetic Construct
  source 1..22: mol_type = other RNA
tgaagtagtagtttgtgctgtt

SEQ ID NO: 4417 - RNA, 22 nt, Synthetic Construct
  source 1..22: mol_type = other RNA
tgaagtagtagtttgtgctgtt

SEQ ID NO: 4418 - RNA, 17 nt, Synthetic Construct
  source 1..17: mol_type = other RNA
ccagtaaacggcggccg

SEQ ID NO: 4419 - RNA, 17 nt, Synthetic Construct
  source 1..17: mol_type = other RNA
ccagtaaacggcggccg

SEQ ID NO: 4420 - RNA, 22 nt, Synthetic Construct
  source 1..22: mol_type = other RNA
tgagatagtaggttgtgtggtt

SEQ ID NO: 4421 - RNA, 22 nt, Synthetic Construct
  source 1..22: mol_type = other RNA
tgagatagtaggttgtgtggtt

SEQ ID NO: 4422 - RNA, 22 nt, Synthetic Construct
  source 1..22: mol_type = other RNA
tgaggcagtagtttgtgctgtt

SEQ ID NO: 4423 - RNA, 22 nt, Synthetic Construct
  source 1..22: mol_type = other RNA
tgaggcagtagtttgtgctgtt

SEQ ID NO: 4424 - RNA, 23 nt, Synthetic Construct
  source 1..23: mol_type = other RNA
tgaggtagtaggctgtgtggttt

SEQ ID NO: 4425 - RNA, 21 nt, Synthetic Construct
  source 1..21: mol_type = other RNA
tgaggtagcaggttgtgtggt

SEQ ID NO: 4426 - RNA, 21 nt, Synthetic Construct
  source 1..21: mol_type = other RNA
tgaggtagcaggttgtgtggt

SEQ ID NO: 4427 - RNA, 16 nt, Synthetic Construct
  source 1..16: mol_type = other RNA
gtcaacggccatacca

SEQ ID NO: 4428 - RNA, 22 nt, Synthetic Construct
  source 1..22: mol_type = other RNA
tgaggtagtaggttgtgtggct

SEQ ID NO: 4429 - RNA, 22 nt, Synthetic Construct
  source 1..22: mol_type = other RNA
tgaggtagtaggttgtgtggct

SEQ ID NO: 4430 - RNA, 23 nt, Synthetic Construct
  source 1..23: mol_type = other RNA
tggaaatacgacgtacttagtgt

SEQ ID NO: 4431 - RNA, 23 nt, Synthetic Construct
  source 1..23: mol_type = other RNA
tggtaatacggcgtacttagtgt

SEQ ID NO: 4432 - RNA, 17 nt, Synthetic Construct
  source 1..17: mol_type = other RNA
gccatgccgcgtgcggg

SEQ ID NO: 4433 - RNA, 22 nt, Synthetic Construct
  source 1..22: mol_type = other RNA
tcggatccgtctgagcttggct

SEQ ID NO: 4434 - RNA, 22 nt, Synthetic Construct
  source 1..22: mol_type = other RNA
tcggatccgtctgagcttggct

SEQ ID NO: 4435 - RNA, 21 nt, Synthetic Construct
  source 1..21: mol_type = other RNA
tcctgcactgagctgccccga

SEQ ID NO: 4436 - RNA, 21 nt, Synthetic Construct
  source 1..21: mol_type = other RNA
tcctgcactgagctgccccga

SEQ ID NO: 4437 - RNA, 22 nt, Synthetic Construct
  source 1..22: mol_type = other RNA
tgaggtagtaggtcgtgtggtt

SEQ ID NO: 4438 - RNA, 22 nt, Synthetic Construct
  source 1..22: mol_type = other RNA
tgaggtagtaggtcgtgtggtt

SEQ ID NO: 4439 - RNA, 26 nt, Synthetic Construct
  source 1..26: mol_type = other RNA
gatgcgtggtaggagagcgttctgta

SEQ ID NO: 4440 - RNA, 21 nt, Synthetic Construct
  source 1..21: mol_type = other RNA
tgaggggcagggagcgagact

SEQ ID NO: 4441 - RNA, 21 nt, Synthetic Construct
  source 1..21: mol_type = other RNA
tgaggggcagggagcgagact

SEQ ID NO: 4442 - RNA, 30 nt, Synthetic Construct; identical to SEQ ID NO: 2353
  source 1..30: mol_type = other RNA

SEQ ID NO: 4443 - RNA, 30 nt, Synthetic Construct; identical to SEQ ID NO: 2353
  source 1..30: mol_type = other RNA

SEQ ID NO: 4444 - RNA, 23 nt, Synthetic Construct
  source 1..23: mol_type = other RNA
tggtaatacgacatacttagtgt

SEQ ID NO: 4445 - RNA, 20 nt, Synthetic Construct
  source 1..20: mol_type = other RNA
cccttggggttgtaggacca

SEQ ID NO: 4446 - RNA, 20 nt, Synthetic Construct
  source 1..20: mol_type = other RNA
cccttggggttgtaggacca

SEQ ID NO: 4447 - RNA, 23 nt, Synthetic Construct
  source 1..23: mol_type = other RNA
cgcgacctcagatcagacgtggc

SEQ ID NO: 4448 - RNA, 23 nt, Synthetic Construct
  source 1..23: mol_type = other RNA
cgcgacctcagatcagacgtggc

SEQ ID NO: 4449 - RNA, 25 nt, Synthetic Construct
  source 1..25: mol_type = other RNA
tcggatccgtctgagcttggctttt

SEQ ID NO: 4450 - RNA, 25 nt, Synthetic Construct
  source 1..25: mol_type = other RNA
tcggatccgtctgagcttggctttt

SEQ ID NO: 4451 - RNA, 18 nt, Synthetic Construct
  source 1..18: mol_type = other RNA
cgcgacctcagatcagac

SEQ ID NO: 4452 - RNA, 18 nt, Synthetic Construct
  source 1..18: mol_type = other RNA
cgcgacctcagatcagac

SEQ ID NO: 4453 - RNA, 23 nt, Synthetic Construct
  source 1..23: mol_type = other RNA
cattgcacttgtctcggtctgaa

SEQ ID NO: 4454 - RNA, 23 nt, Synthetic Construct
  source 1..23: mol_type = other RNA
cattgcacttgtctcggtctgaa

SEQ ID NO: 4455 - RNA, 22 nt, Synthetic Construct
  source 1..22: mol_type = other RNA
tgaggtagtagtttatgctgtt

SEQ ID NO: 4456 - RNA, 23 nt, Synthetic Construct
  source 1..23: mol_type = other RNA
cggtaatacgacgtacttagtgt

SEQ ID NO: 4457 - RNA, 23 nt, Synthetic Construct
  source 1..23: mol_type = other RNA
cggtaatacgacgtacttagtgt

SEQ ID NO: 4458 - RNA, 16 nt, Synthetic Construct
  source 1..16: mol_type = other RNA
gccagcagccgcggta

SEQ ID NO: 4459 - RNA, 16 nt, Synthetic Construct
  source 1..16: mol_type = other RNA
gccagcagccgcggta

SEQ ID NO: 4460 - RNA, 22 nt, Synthetic Construct
  source 1..22: mol_type = other RNA
tgaggtagtagtttgtgccgtt

SEQ ID NO: 4461 - RNA, 23 nt, Synthetic Construct
  source 1..23: mol_type = other RNA
tggtaattcgacgtacttagtgt

SEQ ID NO: 4462 - RNA, 23 nt, Synthetic Construct
  source 1..23: mol_type = other RNA
tggtaattcgacgtacttagtgt

SEQ ID NO: 4463 - RNA, 29 nt, Synthetic Construct
  source 1..29: mol_type = other RNA
ccccccccactgctaaatttgactggctt

SEQ ID NO: 4464 - RNA, 29 nt, Synthetic Construct
  source 1..29: mol_type = other RNA
ccccccccactgctaaatttgactggctt

SEQ ID NO: 4465 - RNA, 22 nt, Synthetic Construct
  source 1..22: mol_type = other RNA
gagagcctggacacaggtgctg

SEQ ID NO: 4466 - RNA, 31 nt, Synthetic Construct; identical to SEQ ID NO: 2333
  source 1..31: mol_type = other RNA

SEQ ID NO: 4467 - RNA, 16 nt, Synthetic Construct
  source 1..16: mol_type = other RNA
cgctagtaatcgcgga

SEQ ID NO: 4468 - RNA, 16 nt, Synthetic Construct
  source 1..16: mol_type = other RNA
cgctagtaatcgcgga

SEQ ID NO: 4469 - RNA, 26 nt, Synthetic Construct
  source 1..26: mol_type = other RNA
tgtcggctcatctcatcctggggctg

SEQ ID NO: 4470 - RNA, 26 nt, Synthetic Construct
  source 1..26: mol_type = other RNA
tgtcggctcatctcatcctggggctg

SEQ ID NO: 4471 - RNA, 23 nt, Synthetic Construct
  source 1..23: mol_type = other RNA
tgtaaacatcctacactctcagc

SEQ ID NO: 4472 - RNA, 17 nt, Synthetic Construct
  source 1..17: mol_type = other RNA
taggtcatcgtcaggct

SEQ ID NO: 4473 - RNA, 17 nt, Synthetic Construct
  source 1..17: mol_type = other RNA
taggtcatcgtcaggct

SEQ ID NO: 4474 - RNA, 23 nt, Synthetic Construct
  source 1..23: mol_type = other RNA
ccctgtactgagctgccccgagt

SEQ ID NO: 4475 - RNA, 23 nt, Synthetic Construct
  source 1..23: mol_type = other RNA
tcctgtaccgagctgccccgaga

SEQ ID NO: 4476 - RNA, 23 nt, Synthetic Construct
  source 1..23: mol_type = other RNA
tcctgtaccgagctgccccgaga

SEQ ID NO: 4477 - RNA, 18 nt, Synthetic Construct
  source 1..18: mol_type = other RNA
tcttcggtagtatagtgg

SEQ ID NO: 4478 - RNA, 18 nt, Synthetic Construct
  source 1..18: mol_type = other RNA
tcttcggtagtatagtgg

SEQ ID NO: 4479 - RNA, 23 nt, Synthetic Construct
  source 1..23: mol_type = other RNA
tggtaatacggcgtacttagtgt

SEQ ID NO: 4480 - RNA, 23 nt, Synthetic Construct
  source 1..23: mol_type = other RNA
tggtaatacggcgtacttagtgt

SEQ ID NO: 4481 - RNA, 22 nt, Synthetic Construct
  source 1..22: mol_type = other RNA
tccagtactgagctgccccgag

SEQ ID NO: 4482 - RNA, 22 nt, Synthetic Construct
  source 1..22: mol_type = other RNA
tccagtactgagctgccccgag

SEQ ID NO: 4483 - RNA, 22 nt, Synthetic Construct
  source 1..22: mol_type = other RNA
ccccttggggttgtaggaccac

SEQ ID NO: 4484 - RNA, 22 nt, Synthetic Construct
  source 1..22: mol_type = other RNA
ccccttggggttgtaggaccac

SEQ ID NO: 4485 - RNA, 22 nt, Synthetic Construct
  source 1..22: mol_type = other RNA
ttctgtactgagctgccccgag

SEQ ID NO: 4486 - RNA, 32 nt, Synthetic Construct; identical to SEQ ID NO: 3713
  source 1..32: mol_type = other RNA

SEQ ID NO: 4487 - RNA, 23 nt, Synthetic Construct
  source 1..23: mol_type = other RNA
tggtaatacgacgtacttagtgt

SEQ ID NO: 4488 - RNA, 28 nt, Synthetic Construct
  source 1..28: mol_type = other RNA
gctttgatccggagatttccgaatgggg

SEQ ID NO: 4489 - RNA, 23 nt, Synthetic Construct
  source 1..23: mol_type = other RNA
caaagtgctgttcgtgcaggtgg

SEQ ID NO: 4490 - RNA, 25 nt, Synthetic Construct
  source 1..25: mol_type = other RNA
caaagtgctgttcgtgcaggtagtt

SEQ ID NO: 4491 - RNA, 23 nt, Synthetic Construct
  source 1..23: mol_type = other RNA
tggtaatacgacgtacttggtgt

SEQ ID NO: 4492 - RNA, 23 nt, Synthetic Construct
  source 1..23: mol_type = other RNA
tcctgtactgggctgccccgaga

SEQ ID NO: 4493 - RNA, 23 nt, Synthetic Construct
  source 1..23: mol_type = other RNA
tcctgtactgggctgccccgaga

SEQ ID NO: 4494 - RNA, 19 nt, Synthetic Construct
  source 1..19: mol_type = other RNA
aacagtcaggatgttggct

SEQ ID NO: 4495 - RNA, 19 nt, Synthetic Construct
  source 1..19: mol_type = other RNA
aacagtcaggatgttggct

SEQ ID NO: 4496 - RNA, 43 nt, Synthetic Construct; identical to SEQ ID NO: 3562
  source 1..43: mol_type = other RNA

SEQ ID NO: 4497 - RNA, 15 nt, Synthetic Construct
  source 1..15: mol_type = other RNA
gctttgatccggaga

SEQ ID NO: 4498 - RNA, 20 nt, Synthetic Construct
  source 1..20: mol_type = other RNA
tgaggtagcaggttgtgtgg

SEQ ID NO: 4499 - RNA, 20 nt, Synthetic Construct
  source 1..20: mol_type = other RNA
tgaggtagcaggttgtgtgg

SEQ ID NO: 4500 - RNA, 22 nt, Synthetic Construct
  source 1..22: mol_type = other RNA
tgaggtagtagattgtatagtc

SEQ ID NO: 4501 - RNA, 23 nt, Synthetic Construct
  source 1..23: mol_type = other RNA
tggtaatacgacgtgcttagtgt

SEQ ID NO: 4502 - RNA, 23 nt, Synthetic Construct
  source 1..23: mol_type = other RNA
tggtaatacgacgtgcttagtgt

SEQ ID NO: 4503 - RNA, 23 nt, Synthetic Construct
  source 1..23: mol_type = other RNA
tggtaatacgacgtacttagtat

SEQ ID NO: 4504 - RNA, 23 nt, Synthetic Construct
  source 1..23: mol_type = other RNA
tggtaatacgacgtacttagtat

SEQ ID NO: 4505 - RNA, 23 nt, Synthetic Construct
  source 1..23: mol_type = other RNA
tggtaatacgacgtacttagtat

SEQ ID NO: 4506 - RNA, 22 nt, Synthetic Construct
  source 1..22: mol_type = other RNA
tcctgtactgagctgctccgag

SEQ ID NO: 4507 - RNA, 22 nt, Synthetic Construct
  source 1..22: mol_type = other RNA
tcctgtactgagctgctccgag

SEQ ID NO: 4508 - RNA, 22 nt, Synthetic Construct
  source 1..22: mol_type = other RNA
tgaggtaatagtttgtgctgtt

SEQ ID NO: 4509 - RNA, 32 nt, Synthetic Construct
  source 1..32: mol_type = other RNA
gcgctcgtagtctagtggtatgataggtccct

SEQ ID NO: 4510 - RNA, 32 nt, Synthetic Construct; identical to SEQ ID NO: 4509
  source 1..32: mol_type = other RNA

SEQ ID NO: 4511 - RNA, 16 nt, Synthetic Construct
  source 1..16: mol_type = other RNA
gtctacggccgtacca

SEQ ID NO: 4512 - RNA, 16 nt, Synthetic Construct
  source 1..16: mol_type = other RNA
gtctacggccgtacca

SEQ ID NO: 4513 - RNA, 23 nt, Synthetic Construct
  source 1..23: mol_type = other RNA
tctttggttatctagctgtatga

SEQ ID NO: 4514 - RNA, 23 nt, Synthetic Construct
  source 1..23: mol_type = other RNA
tctttggttatctagctgtatga

SEQ ID NO: 4515 - RNA, 15 nt, Synthetic Construct
  source 1..15: mol_type = other RNA
gttgaccgcctgggg

SEQ ID NO: 4516 - RNA, 22 nt, Synthetic Construct
  source 1..22: mol_type = other RNA
tctttggttatctagctgtatg

SEQ ID NO: 4517 - RNA, 35 nt, Synthetic Construct; identical to SEQ ID NO: 757
  source 1..35: mol_type = other RNA

SEQ ID NO: 4518 - RNA, 30 nt, Synthetic Construct; identical to SEQ ID NO: 2407
  source 1..30: mol_type = other RNA

SEQ ID NO: 4519 - RNA, 19 nt, Synthetic Construct
  source 1..19: mol_type = other RNA
aaaccgttaccattactga

SEQ ID NO: 4520 - RNA, 19 nt, Synthetic Construct
  source 1..19: mol_type = other RNA
aaaccgttaccattactga

SEQ ID NO: 4521 - RNA, 16 nt, Synthetic Construct
  source 1..16: mol_type = other RNA
ccctttgtacacaccg

SEQ ID NO: 4522 - RNA, 16 nt, Synthetic Construct
  source 1..16: mol_type = other RNA
ccctttgtacacaccg

SEQ ID NO: 4523 - RNA, 21 nt, Synthetic Construct
  source 1..21: mol_type = other RNA
tcccagtaaacggcggccgta

SEQ ID NO: 4524 - RNA, 22 nt, Synthetic Construct
  source 1..22: mol_type = other RNA
tagcttatcagactgatgttgg

SEQ ID NO: 4525 - RNA, 15 nt, Synthetic Construct
  source 1..15: mol_type = other RNA
catgccgcgtgcggg

SEQ ID NO: 4526 - RNA, 15 nt, Synthetic Construct
  source 1..15: mol_type = other RNA
catgccgcgtgcggg

SEQ ID NO: 4527 - RNA, 22 nt, Synthetic Construct
  source 1..22: mol_type = other RNA
tgaggtagcaggttgtatagtt

SEQ ID NO: 4528 - RNA, 22 nt, Synthetic Construct
  source 1..22: mol_type = other RNA
tgaggtagcaggttgtatagtt

SEQ ID NO: 4529 - RNA, 19 nt, Synthetic Construct
  source 1..19: mol_type = other RNA
ctgatcgagtcgtcctgcg

SEQ ID NO: 4530 - RNA, 19 nt, Synthetic Construct
  source 1..19: mol_type = other RNA
ctgatcgagtcgtcctgcg

SEQ ID NO: 4531 - RNA, 22 nt, Synthetic Construct
  source 1..22: mol_type = other RNA
ncctgtactgagctgccccgag

SEQ ID NO: 4532 - RNA, 22 nt, Synthetic Construct
  source 1..22: mol_type = other RNA
ncctgtactgagctgccccgag

SEQ ID NO: 4533 - RNA, 21 nt, Synthetic Construct
  source 1..21: mol_type = other RNA
aacattcattgctgtcggtgg

SEQ ID NO: 4534 - RNA, 23 nt, Synthetic Construct
  source 1..23: mol_type = other RNA
taaggggcagagagcgagacttt

SEQ ID NO: 4535 - RNA, 16 nt, Synthetic Construct
  source 1..16: mol_type = other RNA
tcagtagctcgaggaa

SEQ ID NO: 4536 - RNA, 16 nt, Synthetic Construct
  source 1..16: mol_type = other RNA
tcagtagctcgaggaa

SEQ ID NO: 4537 - RNA, 20 nt, Synthetic Construct
  source 1..20: mol_type = other RNA
cccagtaaacggcggccgta

SEQ ID NO: 4538 - RNA, 15 nt, Synthetic Construct
  source 1..15: mol_type = other RNA
agttgaccgcctggg

SEQ ID NO: 4539 - RNA, 15 nt, Synthetic Construct
  source 1..15: mol_type = other RNA
agttgaccgcctggg

SEQ ID NO: 4540 - RNA, 33 nt, Synthetic Construct; identical to SEQ ID NO: 2253
  source 1..33: mol_type = other RNA

SEQ ID NO: 4541 - RNA, 33 nt, Synthetic Construct; identical to SEQ ID NO: 2253
  source 1..33: mol_type = other RNA

SEQ ID NO: 4542 - RNA, 23 nt, Synthetic Construct
  source 1..23: mol_type = other RNA
tgaggggcagagagcgagacttc

SEQ ID NO: 4543 - RNA, 23 nt, Synthetic Construct
  source 1..23: mol_type = other RNA
tgaggggcagagagcgagacttc

SEQ ID NO: 4544 - RNA, 24 nt, Synthetic Construct
  source 1..24: mol_type = other RNA
tgaggtagtaggttgtgtggtttc

SEQ ID NO: 4545 - RNA, 22 nt, Synthetic Construct
  source 1..22: mol_type = other RNA
tcctgtgctgagctgccccgag

SEQ ID NO: 4546 - RNA, 22 nt, Synthetic Construct
  source 1..22: mol_type = other RNA
tcctgtgctgagctgccccgag

SEQ ID NO: 4547 - RNA, 23 nt, Synthetic Construct
  source 1..23: mol_type = other RNA
tggtaatacgacgtgcttagtgt

SEQ ID NO: 4548 - RNA, 23 nt, Synthetic Construct
  source 1..23: mol_type = other RNA
tggtaatacgacgtgcttagtgt

SEQ ID NO: 4549 - RNA, 19 nt, Synthetic Construct
  source 1..19: mol_type = other RNA
cccttgtcattagttgcta

SEQ ID NO: 4550 - RNA, 22 nt, Synthetic Construct
  source 1..22: mol_type = other RNA
tagcatatcgagcctgagaaca

SEQ ID NO: 4551 - RNA, 22 nt, Synthetic Construct
  source 1..22: mol_type = other RNA
tagcatatcgagcctgagaaca

SEQ ID NO: 4552 - RNA, 17 nt, Synthetic Construct
  source 1..17: mol_type = other RNA
cctcgcgcgattggagc

SEQ ID NO: 4553 - RNA, 21 nt, Synthetic Construct
  source 1..21: mol_type = other RNA
tcccgtactgagctgccccga

SEQ ID NO: 4554 - RNA, 21 nt, Synthetic Construct
  source 1..21: mol_type = other RNA
tcccgtactgagctgccccga

SEQ ID NO: 4555 - RNA, 30 nt, Synthetic Construct; identical to SEQ ID NO: 1958
  source 1..30: mol_type = other RNA

SEQ ID NO: 4556 - RNA, 30 nt, Synthetic Construct; identical to SEQ ID NO: 1958
  source 1..30: mol_type = other RNA

SEQ ID NO: 4557 - RNA, 24 nt, Synthetic Construct
  source 1..24: mol_type = other RNA
tgtaaacatcctacactctcagct

SEQ ID NO: 4558 - RNA, 22 nt, Synthetic Construct
  source 1..22: mol_type = other RNA
taaggtagtaggttgtgtggtt

SEQ ID NO: 4559 - RNA, 22 nt, Synthetic Construct
  source 1..22: mol_type = other RNA
taaggtagtaggttgtgtggtt

SEQ ID NO: 4560 - RNA, 23 nt, Synthetic Construct
  source 1..23: mol_type = other RNA
tggggggcagagagcgagacttt

SEQ ID NO: 4561 - RNA, 23 nt, Synthetic Construct
  source 1..23: mol_type = other RNA
tggggggcagagagcgagacttt

SEQ ID NO: 4562 - RNA, 22 nt, Synthetic Construct
  source 1..22: mol_type = other RNA
tgaggtagaagtttgtgctgtt

SEQ ID NO: 4563 - RNA, 35 nt, Synthetic Construct; identical to SEQ ID NO: 1490
  source 1..35: mol_type = other RNA

SEQ ID NO: 4564 - RNA, 22 nt, Synthetic Construct
  source 1..22: mol_type = other RNA
ctttcagtcggatgtttgcagt

SEQ ID NO: 4565 - RNA, 19 nt, Synthetic Construct
  source 1..19: mol_type = other RNA
gggataactggcttgtggc

SEQ ID NO: 4566 - RNA, 19 nt, Synthetic Construct
  source 1..19: mol_type = other RNA
gggataactggcttgtggc

SEQ ID NO: 4567 - RNA, 16 nt, Synthetic Construct
  source 1..16: mol_type = other RNA
ccggaggaaggtgggg

SEQ ID NO: 4568 - RNA, 16 nt, Synthetic Construct
  source 1..16: mol_type = other RNA
ccggaggaaggtgggg

SEQ ID NO: 4569 - RNA, 22 nt, Synthetic Construct
  source 1..22: mol_type = other RNA
tgtggtagtaggttgtatagtt

SEQ ID NO: 4570 - RNA, 18 nt, Synthetic Construct
  source 1..18: mol_type = other RNA
gtcgacgtatagggtgtg

SEQ ID NO: 4571 - RNA, 18 nt, Synthetic Construct
  source 1..18: mol_type = other RNA
gtcgacgtatagggtgtg

SEQ ID NO: 4572 - RNA, 22 nt, Synthetic Construct
  source 1..22: mol_type = other RNA
tcgtaccgtgagtaataacgcg

SEQ ID NO: 4573 - RNA, 37 nt, Synthetic Construct; identical to SEQ ID NO: 2365
  source 1..37: mol_type = other RNA

SEQ ID NO: 4574 - RNA, 23 nt, Synthetic Construct
  source 1..23: mol_type = other RNA
tccccttggggttgtaggaccac

SEQ ID NO: 4575 - RNA, 23 nt, Synthetic Construct
  source 1..23: mol_type = other RNA
tccccttggggttgtaggaccac

SEQ ID NO: 4576 - RNA, 22 nt, Synthetic Construct
  source 1..22: mol_type = other RNA
tatcgcacttgtcccggcctgt

SEQ ID NO: 4577 - RNA, 22 nt, Synthetic Construct
  source 1..22: mol_type = other RNA
tatcgcacttgtcccggcctgt

SEQ ID NO: 4578 - RNA, 20 nt, Synthetic Construct
  source 1..20: mol_type = other RNA
gctattgacgaccgtaccgc

SEQ ID NO: 4579 - RNA, 20 nt, Synthetic Construct
  source 1..20: mol_type = other RNA
gctattgacgaccgtaccgc

SEQ ID NO: 4580 - RNA, 23 nt, Synthetic Construct
  source 1..23: mol_type = other RNA
tggtaatgcgacgtacttagtgt

SEQ ID NO: 4581 - RNA, 23 nt, Synthetic Construct
  source 1..23: mol_type = other RNA
tggtaatgcgacgtacttagtgt

SEQ ID NO: 4582 - RNA, 21 nt, Synthetic Construct
  source 1..21: mol_type = other RNA
cgaggtagtagtttgtgctgt

SEQ ID NO: 4583 - RNA, 23 nt, Synthetic Construct
  source 1..23: mol_type = other RNA
tggtaatacgacgtactttgtgt

SEQ ID NO: 4584 - RNA, 22 nt, Synthetic Construct
  source 1..22: mol_type = other RNA
tgaggtagtaggttgtgtgatt

SEQ ID NO: 4585 - RNA, 43 nt, Synthetic Construct
  source 1..43: mol_type = other RNA
acattgatcatcgacacttcgaacgcacttgcggccccgggtt

SEQ ID NO: 4586 - RNA, 16 nt, Synthetic Construct
  source 1..16: mol_type = other RNA
ccatgccgcgtgcggg

SEQ ID NO: 4587 - RNA, 22 nt, Synthetic Construct
  source 1..22: mol_type = other RNA
cattgcgcttgtctcggtctga

SEQ ID NO: 4588 - RNA, 27 nt, Synthetic Construct
  source 1..27: mol_type = other RNA
gttggttcaagcgtgtagtcgtgctct

SEQ ID NO: 4589 - RNA, 27 nt, Synthetic Construct
  source 1..27: mol_type = other RNA
gttggttcaagcgtgtagtcgtgctct

SEQ ID NO: 4590 - RNA, 21 nt, Synthetic Construct
  source 1..21: mol_type = other RNA
tgaggaagtaggttgtatagt

SEQ ID NO: 4591 - RNA, 22 nt, Synthetic Construct
  source 1..22: mol_type = other RNA
gcgttgcaaccagtgccggggg

SEQ ID NO: 4592 - RNA, 16 nt, Synthetic Construct
  source 1..16: mol_type = other RNA
agtcaggatgttggct

SEQ ID NO: 4593 - RNA, 16 nt, Synthetic Construct
  source 1..16: mol_type = other RNA
agtcaggatgttggct

SEQ ID NO: 4594 - RNA, 16 nt, Synthetic Construct
  source 1..16: mol_type = other RNA
atgcaagtcgaacggt

SEQ ID NO: 4595 - RNA, 16 nt, Synthetic Construct
  source 1..16: mol_type = other RNA
atgcaagtcgaacggt

SEQ ID NO: 4596 - RNA, 15 nt, Synthetic Construct
  source 1..15: mol_type = other RNA
tcctgacggccatag

SEQ ID NO: 4597 - RNA, 29 nt, Synthetic Construct
  source 1..29: mol_type = other RNA
gtgcatgcactctggggttgtgggacagc

SEQ ID NO: 4598 - RNA, 29 nt, Synthetic Construct
  source 1..29: mol_type = other RNA
gtgcatgcactctggggttgtgggacagc

SEQ ID NO: 4599 - RNA, 18 nt, Synthetic Construct
  source 1..18: mol_type = other RNA
cgactcttagcggtggat

SEQ ID NO: 4600 - RNA, 18 nt, Synthetic Construct
  source 1..18: mol_type = other RNA
cgactcttagcggtggat

SEQ ID NO: 4601 - RNA, 18 nt, Synthetic Construct
  source 1..18: mol_type = other RNA
tcccaagggtatggctgt

SEQ ID NO: 4602 - RNA, 22 nt, Synthetic Construct
  source 1..22: mol_type = other RNA
tgaggtagtaggttgtacagtt

SEQ ID NO: 4603 - RNA, 22 nt, Synthetic Construct
  source 1..22: mol_type = other RNA
tgaggtagtaggttgtacagtt

SEQ ID NO: 4604 - RNA, 16 nt, Synthetic Construct
  source 1..16: mol_type = other RNA
ggtagctcgttgggct

SEQ ID NO: 4605 - RNA, 16 nt, Synthetic Construct
  source 1..16: mol_type = other RNA
ggtagctcgttgggct

SEQ ID NO: 4606 - RNA, 35 nt, Synthetic Construct; identical to SEQ ID NO: 2269
  source 1..35: mol_type = other RNA

SEQ ID NO: 4607 - RNA, 35 nt, Synthetic Construct; identical to SEQ ID NO: 2269
  source 1..35: mol_type = other RNA

SEQ ID NO: 4608 - RNA, 31 nt, Synthetic Construct; identical to SEQ ID NO: 2215
  source 1..31: mol_type = other RNA

SEQ ID NO: 4609 - RNA, 31 nt, Synthetic Construct; identical to SEQ ID NO: 2215
  source 1..31: mol_type = other RNA

SEQ ID NO: 4610 - RNA, 16 nt, Synthetic Construct
  source 1..16: mol_type = other RNA
gtcgacgtatagggtg

SEQ ID NO: 4611 - RNA, 16 nt, Synthetic Construct
  source 1..16: mol_type = other RNA
gtcgacgtatagggtg

SEQ ID NO: 4612 - RNA, 22 nt, Synthetic Construct
  source 1..22: mol_type = other RNA
tattgcactcgtcccggcctgt

SEQ ID NO: 4613 - RNA, 25 nt, Synthetic Construct
  source 1..25: mol_type = other RNA
gtcaggatggccgagcggtctaagg

SEQ ID NO: 4614 - RNA, 25 nt, Synthetic Construct
  source 1..25: mol_type = other RNA
gtcaggatggccgagcggtctaagg

SEQ ID NO: 4615 - RNA, 27 nt, Synthetic Construct
  source 1..27: mol_type = other RNA
ggggagctaatcccagaaacccggtcg

SEQ ID NO: 4616 - RNA, 27 nt, Synthetic Construct
  source 1..27: mol_type = other RNA
ggggagctaatcccagaaacccggtcg

SEQ ID NO: 4617 - RNA, 21 nt, Synthetic Construct
  source 1..21: mol_type = other RNA
tcctgaactgagctgccccga

SEQ ID NO: 4618 - RNA, 21 nt, Synthetic Construct
  source 1..21: mol_type = other RNA
tcctgaactgagctgccccga

SEQ ID NO: 4619 - RNA, 20 nt, Synthetic Construct
  source 1..20: mol_type = other RNA
actgatcgagtcgtcctgcg

SEQ ID NO: 4620 - RNA, 20 nt, Synthetic Construct
  source 1..20: mol_type = other RNA
actgatcgagtcgtcctgcg

SEQ ID NO: 4621 - RNA, 21 nt, Synthetic Construct
  source 1..21: mol_type = other RNA
tcctgtactgagctgccccgg

SEQ ID NO: 4622 - RNA, 21 nt, Synthetic Construct
  source 1..21: mol_type = other RNA
tcctgtactgagctgccccgg

SEQ ID NO: 4623 - RNA, 23 nt, Synthetic Construct
  source 1..23: mol_type = other RNA
naaagtgctgttcgtgcaggtag

SEQ ID NO: 4624 - RNA, 23 nt, Synthetic Construct
  source 1..23: mol_type = other RNA
naaagtgctgttcgtgcaggtag

SEQ ID NO: 4625 - RNA, 22 nt, Synthetic Construct
  source 1..22: mol_type = other RNA
tatcggaacgtgcccagtcgtg

SEQ ID NO: 4626 - RNA, 23 nt, Synthetic Construct
  source 1..23: mol_type = other RNA
tggggggcagagagcgagacttt

SEQ ID NO: 4627 - RNA, 23 nt, Synthetic Construct
  source 1..23: mol_type = other RNA
agcagcattgtacagggctatgt

SEQ ID NO: 4628 - RNA, 20 nt, Synthetic Construct
  source 1..20: mol_type = other RNA
tgaggtagtaggttgtatgg

SEQ ID NO: 4629 - RNA, 20 nt, Synthetic Construct
  source 1..20: mol_type = other RNA
tgaggtagtaggttgtatgg

SEQ ID NO: 4630 - RNA, 22 nt, Synthetic Construct
  source 1..22: mol_type = other RNA
tggggtagtagtttgtgctgtt

SEQ ID NO: 4631 - RNA, 22 nt, Synthetic Construct
  source 1..22: mol_type = other RNA
tggggtagtagtttgtgctgtt

SEQ ID NO: 4632 - RNA, 36 nt, Synthetic Construct; identical to SEQ ID NO: 2344
  source 1..36: mol_type = other RNA

SEQ ID NO: 4633 - RNA, 36 nt, Synthetic Construct; identical to SEQ ID NO: 2344
  source 1..36: mol_type = other RNA

SEQ ID NO: 4634 - RNA, 23 nt, Synthetic Construct
  source 1..23: mol_type = other RNA
tggtaatacgacgtactcagtgt

SEQ ID NO: 4635 - RNA, 23 nt, Synthetic Construct
  source 1..23: mol_type = other RNA
tggtaatacgacgtactcagtgt

SEQ ID NO: 4636 - RNA, 23 nt, Synthetic Construct
  source 1..23: mol_type = other RNA
tggtaatgcgacgtacttagtgt

SEQ ID NO: 4637 - RNA, 23 nt, Synthetic Construct
  source 1..23: mol_type = other RNA
tggtaatgcgacgtacttagtgt

SEQ ID NO: 4638 - RNA, 22 nt, Synthetic Construct
  source 1..22: mol_type = other RNA
tgaggtagtagtttgtgctgtc

SEQ ID NO: 4639 - RNA, 22 nt, Synthetic Construct
  source 1..22: mol_type = other RNA
tgaggtagtagtttgtgttgtt

SEQ ID NO: 4640 - RNA, 15 nt, Synthetic Construct
  source 1..15: mol_type = other RNA
tagagtagggcggga

SEQ ID NO: 4641 - RNA, 15 nt, Synthetic Construct
  source 1..15: mol_type = other RNA
tagagtagggcggga

SEQ ID NO: 4642 - RNA, 22 nt, Synthetic Construct
  source 1..22: mol_type = other RNA
tgaggtagtagtttgtgccgtt

SEQ ID NO: 4643 - RNA, 22 nt, Synthetic Construct
  source 1..22: mol_type = other RNA
tgaggtagtagtttgtgccgtt

SEQ ID NO: 4644 - RNA, 22 nt, Synthetic Construct
  source 1..22: mol_type = other RNA
caaagtgctgttcgtgcaggta

SEQ ID NO: 4645 - RNA, 22 nt, Synthetic Construct
  source 1..22: mol_type = other RNA
caaagtgctgttcgtgcaggta

SEQ ID NO: 4646 - RNA, 22 nt, Synthetic Construct
  source 1..22: mol_type = other RNA
aggttccggataagtaagagcc

SEQ ID NO: 4647 - RNA, 22 nt, Synthetic Construct
  source 1..22: mol_type = other RNA
aggttccggataagtaagagcc

SEQ ID NO: 4648 - RNA, 22 nt, Synthetic Construct
  source 1..22: mol_type = other RNA
tgaggtagtagtttgtgctgtc

SEQ ID NO: 4649 - RNA, 33 nt, Synthetic Construct; identical to SEQ ID NO: 1982
  source 1..33: mol_type = other RNA

SEQ ID NO: 4650 - RNA, 23 nt, Synthetic Construct
  source 1..23: mol_type = other RNA
tggtgatacgacgtacttagtgt

SEQ ID NO: 4651 - RNA, 23 nt, Synthetic Construct
  source 1..23: mol_type = other RNA
tggtgatacgacgtacttagtgt

SEQ ID NO: 4652 - RNA, 15 nt, Synthetic Construct
  source 1..15: mol_type = other RNA
gcgtagatatgcgga

SEQ ID NO: 4653 - RNA, 15 nt, Synthetic Construct
  source 1..15: mol_type = other RNA
gcgtagatatgcgga

SEQ ID NO: 4654 - RNA, 23 nt, Synthetic Construct
  source 1..23: mol_type = other RNA
tcctgtactgagctgccccgggt

SEQ ID NO: 4655 - RNA, 23 nt, Synthetic Construct
  source 1..23: mol_type = other RNA
tcctgtactgagctgccccgggt

SEQ ID NO: 4656 - RNA, 23 nt, Synthetic Construct
  source 1..23: mol_type = other RNA
tggtaatacgatgtacttagtgt

SEQ ID NO: 4657 - RNA, 23 nt, Synthetic Construct
  source 1..23: mol_type = other RNA
tggtaatacgatgtacttagtgt

SEQ ID NO: 4658 - RNA, 23 nt, Synthetic Construct
  source 1..23: mol_type = other RNA
tgagaggcagagagcgagacttt

SEQ ID NO: 4659 - RNA, 16 nt, Synthetic Construct
  source 1..16: mol_type = other RNA
cgctagtaatcgcgga

SEQ ID NO: 4660 - RNA, 16 nt, Synthetic Construct
  source 1..16: mol_type = other RNA
cgctagtaatcgcgga

SEQ ID NO: 4661 - RNA, 31 nt, Synthetic Construct; identical to SEQ ID NO: 2442
  source 1..31: mol_type = other RNA

SEQ ID NO: 4662 - RNA, 31 nt, Synthetic Construct; identical to SEQ ID NO: 2442
  source 1..31: mol_type = other RNA

SEQ ID NO: 4663 - RNA, 17 nt, Synthetic Construct
  source 1..17: mol_type = other RNA
atgcaagtcgaacggta

SEQ ID NO: 4664 - RNA, 17 nt, Synthetic Construct
  source 1..17: mol_type = other RNA
atgcaagtcgaacggta

SEQ ID NO: 4665 - RNA, 17 nt, Synthetic Construct
  source 1..17: mol_type = other RNA
ccgtgtgaaagtaggtc

SEQ ID NO: 4666 - RNA, 17 nt, Synthetic Construct
  source 1..17: mol_type = other RNA
ccgtgtgaaagtaggtc

SEQ ID NO: 4667 - RNA, 22 nt, Synthetic Construct
  source 1..22: mol_type = other RNA
cgaggtagtaggttgtgtggtt

SEQ ID NO: 4668 - RNA, 23 nt, Synthetic Construct
  source 1..23: mol_type = other RNA
taaggtgcatctagtgcagatag

SEQ ID NO: 4669 - RNA, 23 nt, Synthetic Construct
  source 1..23: mol_type = other RNA
taaggtgcatctagtgcagatag

SEQ ID NO: 4670 - RNA, 23 nt, Synthetic Construct
  source 1..23: mol_type = other RNA
tcctgtactgagccgccccgaga

SEQ ID NO: 4671 - RNA, 23 nt, Synthetic Construct
  source 1..23: mol_type = other RNA
tcctgtactgagccgccccgaga

SEQ ID NO: 4672 - RNA, 21 nt, Synthetic Construct
  source 1..21: mol_type = other RNA
caatggccgggacagagggct

SEQ ID NO: 4673 - RNA, 21 nt, Synthetic Construct
  source 1..21: mol_type = other RNA
caatggccgggacagagggct

SEQ ID NO: 4674 - RNA, 22 nt, Synthetic Construct
  source 1..22: mol_type = other RNA
tcctgtactgagctgccctgag

SEQ ID NO: 4675 - RNA, 22 nt, Synthetic Construct
  source 1..22: mol_type = other RNA
tcctgtactgagctgccctgag

SEQ ID NO: 4676 - RNA, 23 nt, Synthetic Construct
  source 1..23: mol_type = other RNA
tgaggggtagagagcgagacttt

SEQ ID NO: 4677 - RNA, 18 nt, Synthetic Construct
  source 1..18: mol_type = other RNA
atagggaacgtgagctgg

SEQ ID NO: 4678 - RNA, 18 nt, Synthetic Construct
  source 1..18: mol_type = other RNA
atagggaacgtgagctgg

SEQ ID NO: 4679 - RNA, 23 nt, Synthetic Construct
  source 1..23: mol_type = other RNA
tggtaatacgacgtacttagcgt

SEQ ID NO: 4680 - RNA, 23 nt, Synthetic Construct
  source 1..23: mol_type = other RNA
tggtaatacgacgtacttagcgt

SEQ ID NO: 4681 - RNA, 19 nt, Synthetic Construct
  source 1..19: mol_type = other RNA
aggacagtgaaacgagtca

SEQ ID NO: 4682 - RNA, 19 nt, Synthetic Construct
  source 1..19: mol_type = other RNA
aggacagtgaaacgagtca

SEQ ID NO: 4683 - RNA, 23 nt, Synthetic Construct
  source 1..23: mol_type = other RNA
taaggtgcatctagtgcagatag

SEQ ID NO: 4684 - RNA, 23 nt, Synthetic Construct
  source 1..23: mol_type = other RNA
taaggtgcatctagtgcagatag

SEQ ID NO: 4685 - RNA, 32 nt, Synthetic Construct; identical to SEQ ID NO: 3092
  source 1..32: mol_type = other RNA

SEQ ID NO: 4686 - RNA, 32 nt, Synthetic Construct; identical to SEQ ID NO: 3092
  source 1..32: mol_type = other RNA

SEQ ID NO: 4687 - RNA, 26 nt, Synthetic Construct
  source 1..26: mol_type = other RNA
gatttccccttggggttgtaggacca

SEQ ID NO: 4688 - RNA, 26 nt, Synthetic Construct
  source 1..26: mol_type = other RNA
gatttccccttggggttgtaggacca

SEQ ID NO: 4689 - RNA, 16 nt, Synthetic Construct
  source 1..16: mol_type = other RNA
gtcgacgtatagggtg

SEQ ID NO: 4690 - RNA, 25 nt, Synthetic Construct
  source 1..25: mol_type = other RNA
tcggatccgtctgagcttggctttt

SEQ ID NO: 4691 - RNA, 33 nt, Synthetic Construct; identical to SEQ ID NO: 2395
  source 1..33: mol_type = other RNA

SEQ ID NO: 4692 - RNA, 33 nt, Synthetic Construct; identical to SEQ ID NO: 2395
  source 1..33: mol_type = other RNA

SEQ ID NO: 4693 - RNA, 22 nt, Synthetic Construct
  source 1..22: mol_type = other RNA
tgaggtagtagatcgtatagtt

SEQ ID NO: 4694 - RNA, 22 nt, Synthetic Construct
  source 1..22: mol_type = other RNA
tgaggtagtagatcgtatagtt

SEQ ID NO: 4695 - RNA, 30 nt, Synthetic Construct; identical to SEQ ID NO: 1194
  source 1..30: mol_type = other RNA

SEQ ID NO: 4696 - RNA, 30 nt, Synthetic Construct; identical to SEQ ID NO: 1194
  source 1..30: mol_type = other RNA

SEQ ID NO: 4697 - RNA, 25 nt, Synthetic Construct
  source 1..25: mol_type = other RNA
tcggatccgtctgagcttggctttt

SEQ ID NO: 4698 - RNA, 31 nt, Synthetic Construct; identical to SEQ ID NO: 2412
  source 1..31: mol_type = other RNA

SEQ ID NO: 4699 - RNA, 20 nt, Synthetic Construct
  source 1..20: mol_type = other RNA
tgaggtagcaggttgtatag

SEQ ID NO: 4700 - RNA, 20 nt, Synthetic Construct
  source 1..20: mol_type = other RNA
tgaggtagcaggttgtatag

SEQ ID NO: 4701 - RNA, 22 nt, Synthetic Construct
  source 1..22: mol_type = other RNA
tggggtagtagtttgtgctgtt

SEQ ID NO: 4702 - RNA, 20 nt, Synthetic Construct
  source 1..20: mol_type = other RNA
tgaggtaggaggttgtatag

SEQ ID NO: 4703 - RNA, 22 nt, Synthetic Construct
  source 1..22: mol_type = other RNA
tggaatgtaaggaagtatgtat

SEQ ID NO: 4704 - RNA, 22 nt, Synthetic Construct
  source 1..22: mol_type = other RNA
tggaatgtaaggaagtatgtat

SEQ ID NO: 4705 - RNA, 23 nt, Synthetic Construct
  source 1..23: mol_type = other RNA
tggtaatacgacgtacttggtgt

SEQ ID NO: 4706 - RNA, 23 nt, Synthetic Construct
  source 1..23: mol_type = other RNA
tggtaatacgacgtacttggtgt

SEQ ID NO: 4707 - RNA, 23 nt, Synthetic Construct
  source 1..23: mol_type = other RNA
ggctacattgtctgctgggtttc

SEQ ID NO: 4708 - RNA, 17 nt, Synthetic Construct
  source 1..17: mol_type = other RNA
gtgttcggaagattttc

SEQ ID NO: 4709 - RNA, 17 nt, Synthetic Construct
  source 1..17: mol_type = other RNA
gtgttcggaagattttc

SEQ ID NO: 4710 - RNA, 32 nt, Synthetic Construct
  source 1..32: mol_type = other RNA
ggcgcgatagcaaagcggttatgccccggatt

SEQ ID NO: 4711 - RNA, 32 nt, Synthetic Construct; identical to SEQ ID NO: 4710
  source 1..32: mol_type = other RNA

SEQ ID NO: 4712 - RNA, 23 nt, Synthetic Construct
  source 1..23: mol_type = other RNA
tcctgtactgagccgccccgagt

SEQ ID NO: 4713 - RNA, 23 nt, Synthetic Construct
  source 1..23: mol_type = other RNA
tcctgtactgagccgccccgagt

SEQ ID NO: 4714 - RNA, 20 nt, Synthetic Construct
  source 1..20: mol_type = other RNA
ctgacctatgaattgacagc

SEQ ID NO: 4715 - RNA, 20 nt, Synthetic Construct
  source 1..20: mol_type = other RNA
ctgacctatgaattgacagc

SEQ ID NO: 4716 - RNA, 19 nt, Synthetic Construct
  source 1..19: mol_type = other RNA
tagcagcacgtaaatattg

SEQ ID NO: 4717 - RNA, 19 nt, Synthetic Construct
  source 1..19: mol_type = other RNA
tagcagcacgtaaatattg

SEQ ID NO: 4718 - RNA, 21 nt, Synthetic Construct
  source 1..21: mol_type = other RNA
tgaggcagtaggttgtgtggt

SEQ ID NO: 4719 - RNA, 21 nt, Synthetic Construct
  source 1..21: mol_type = other RNA
tgaggcagtaggttgtgtggt

SEQ ID NO: 4720 - RNA, 19 nt, Synthetic Construct
  source 1..19: mol_type = other RNA
accaaggggtcgtgggttc

SEQ ID NO: 4721 - RNA, 19 nt, Synthetic Construct
  source 1..19: mol_type = other RNA
accaaggggtcgtgggttc

SEQ ID NO: 4722 - RNA, 19 nt, Synthetic Construct
  source 1..19: mol_type = other RNA
ccagtaaacggcggccgta

SEQ ID NO: 4723 - RNA, 19 nt, Synthetic Construct
  source 1..19: mol_type = other RNA
tggccgtcgtcagctcgtg

SEQ ID NO: 4724 - RNA, 19 nt, Synthetic Construct
  source 1..19: mol_type = other RNA
tggccgtcgtcagctcgtg

SEQ ID NO: 4725 - RNA, 18 nt, Synthetic Construct
  source 1..18: mol_type = other RNA
accggaggaaggtgggga

SEQ ID NO: 4726 - RNA, 18 nt, Synthetic Construct
  source 1..18: mol_type = other RNA
accggaggaaggtgggga

SEQ ID NO: 4727 - RNA, 31 nt, Synthetic Construct; identical to SEQ ID NO: 2758
  source 1..31: mol_type = other RNA

SEQ ID NO: 4728 - RNA, 31 nt, Synthetic Construct; identical to SEQ ID NO: 2758
  source 1..31: mol_type = other RNA

SEQ ID NO: 4729 - RNA, 19 nt, Synthetic Construct
  source 1..19: mol_type = other RNA
ccgtgttcggaagattttc

SEQ ID NO: 4730 - RNA, 19 nt, Synthetic Construct
  source 1..19: mol_type = other RNA
ccgtgttcggaagattttc

SEQ ID NO: 4731 - RNA, 15 nt, Synthetic Construct
  source 1..15: mol_type = other RNA
gagctgtggataggg

SEQ ID NO: 4732 - RNA, 15 nt, Synthetic Construct
  source 1..15: mol_type = other RNA
gagctgtggataggg

SEQ ID NO: 4733 - RNA, 23 nt, Synthetic Construct
  source 1..23: mol_type = other RNA
gggtaatacgacgtacttagtgt

SEQ ID NO: 4734 - RNA, 32 nt, Synthetic Construct
  source 1..32: mol_type = other RNA
gtgggaaggctaaaacagtcaggatgttggct

SEQ ID NO: 4735 - RNA, 32 nt, Synthetic Construct; identical to SEQ ID NO: 4734
  source 1..32: mol_type = other RNA

SEQ ID NO: 4736 - RNA, 22 nt, Synthetic Construct
  source 1..22: mol_type = other RNA
tgagatagtaggttgtgtggtt

SEQ ID NO: 4737 - RNA, 19 nt, Synthetic Construct
  source 1..19: mol_type = other RNA
agcagcattgtacagggct

SEQ ID NO: 4738 - RNA, 19 nt, Synthetic Construct
  source 1..19: mol_type = other RNA
agcagcattgtacagggct

SEQ ID NO: 4739 - RNA, 22 nt, Synthetic Construct
  source 1..22: mol_type = other RNA
tcacagtgaaccggtctcttta

SEQ ID NO: 4740 - RNA, 30 nt, Synthetic Construct; identical to SEQ ID NO: 3933
  source 1..30: mol_type = other RNA

SEQ ID NO: 4741 - RNA, 22 nt, Synthetic Construct
  source 1..22: mol_type = other RNA
tcctgcactgagctgccccgag

SEQ ID NO: 4742 - RNA, 22 nt, Synthetic Construct
  source 1..22: mol_type = other RNA
tcctgcactgagctgccccgag

SEQ ID NO: 4743 - RNA, 21 nt, Synthetic Construct
  source 1..21: mol_type = other RNA
tgaggtagtaggttgtgtggc

SEQ ID NO: 4744 - RNA, 21 nt, Synthetic Construct
  source 1..21: mol_type = other RNA
tgaggtagtaggttgtgtggc

SEQ ID NO: 4745 - RNA, 17 nt, Synthetic Construct
  source 1..17: mol_type = other RNA
gcggctgtagctcagtt

SEQ ID NO: 4746 - RNA, 17 nt, Synthetic Construct
  source 1..17: mol_type = other RNA
gcggctgtagctcagtt

SEQ ID NO: 4747 - RNA, 23 nt, Synthetic Construct
  source 1..23: mol_type = other RNA
tggtaataagacgtacttagtgt

SEQ ID NO: 4748 - RNA, 23 nt, Synthetic Construct
  source 1..23: mol_type = other RNA
tggtaataagacgtacttagtgt

SEQ ID NO: 4749 - RNA, 20 nt, Synthetic Construct
  source 1..20: mol_type = other RNA
gtcagtttgtcaaatacccc

SEQ ID NO: 4750 - RNA, 20 nt, Synthetic Construct
  source 1..20: mol_type = other RNA
gtcagtttgtcaaatacccc

SEQ ID NO: 4751 - RNA, 30 nt, Synthetic Construct; identical to SEQ ID NO: 1194
  source 1..30: mol_type = other RNA

SEQ ID NO: 4752 - RNA, 30 nt, Synthetic Construct; identical to SEQ ID NO: 1194
  source 1..30: mol_type = other RNA

SEQ ID NO: 4753 - RNA, 15 nt, Synthetic Construct
  source 1..15: mol_type = other RNA
ggtcatcgtcaggct

SEQ ID NO: 4754 - RNA, 15 nt, Synthetic Construct
  source 1..15: mol_type = other RNA
ggtcatcgtcaggct

SEQ ID NO: 4755 - RNA, 23 nt, Synthetic Construct
  source 1..23: mol_type = other RNA
tgaggaagtaggttgtgtggttt

SEQ ID NO: 4756 - RNA, 24 nt, Synthetic Construct
  source 1..24: mol_type = other RNA
tgtaaacgtccccgactggaagct

SEQ ID NO: 4757 - RNA, 15 nt, Synthetic Construct
  source 1..15: mol_type = other RNA
cggcccagactccta

SEQ ID NO: 4758 - RNA, 15 nt, Synthetic Construct
  source 1..15: mol_type = other RNA
cggcccagactccta

SEQ ID NO: 4759 - RNA, 22 nt, Synthetic Construct
  source 1..22: mol_type = other RNA
tctttggttatctagctgtatg

SEQ ID NO: 4760 - RNA, 22 nt, Synthetic Construct
  source 1..22: mol_type = other RNA
tctttggttatctagctgtatg

SEQ ID NO: 4761 - RNA, 21 nt, Synthetic Construct
  source 1..21: mol_type = other RNA
ccccttggggttgtaggacca

SEQ ID NO: 4762 - RNA, 21 nt, Synthetic Construct
  source 1..21: mol_type = other RNA
ccccttggggttgtaggacca

SEQ ID NO: 4763 - RNA, 31 nt, Synthetic Construct; identical to SEQ ID NO: 2427
  source 1..31: mol_type = other RNA

SEQ ID NO: 4764 - RNA, 31 nt, Synthetic Construct; identical to SEQ ID NO: 2427
  source 1..31: mol_type = other RNA

SEQ ID NO: 4765 - RNA, 22 nt, Synthetic Construct
  source 1..22: mol_type = other RNA
ctccctcgggagggcgcgcggg

SEQ ID NO: 4766 - RNA, 22 nt, Synthetic Construct
  source 1..22: mol_type = other RNA
ctccctcgggagggcgcgcggg

SEQ ID NO: 4767 - RNA, 24 nt, Synthetic Construct
  source 1..24: mol_type = other RNA
cgactcttagcggtggatcactcg

SEQ ID NO: 4768 - RNA, 24 nt, Synthetic Construct
  source 1..24: mol_type = other RNA
cgactcttagcggtggatcactcg

SEQ ID NO: 4769 - RNA, 33 nt, Synthetic Construct; identical to SEQ ID NO: 2253
  source 1..33: mol_type = other RNA

SEQ ID NO: 4770 - RNA, 33 nt, Synthetic Construct; identical to SEQ ID NO: 2253
  source 1..33: mol_type = other RNA

SEQ ID NO: 4771 - RNA, 23 nt, Synthetic Construct
  source 1..23: mol_type = other RNA
tagtaatacgacgtacttagtgt

SEQ ID NO: 4772 - RNA, 23 nt, Synthetic Construct
  source 1..23: mol_type = other RNA
tagtaatacgacgtacttagtgt

SEQ ID NO: 4773 - RNA, 23 nt, Synthetic Construct
  source 1..23: mol_type = other RNA
tcccgtactgagctgccccgaga

SEQ ID NO: 4774 - RNA, 23 nt, Synthetic Construct
  source 1..23: mol_type = other RNA
tcccgtactgagctgccccgaga

SEQ ID NO: 4775 - RNA, 17 nt, Synthetic Construct
  source 1..17: mol_type = other RNA
gtcgacgtatagggtgt

SEQ ID NO: 4776 - RNA, 17 nt, Synthetic Construct
  source 1..17: mol_type = other RNA
gtcgacgtatagggtgt

SEQ ID NO: 4777 - RNA, 23 nt, Synthetic Construct
  source 1..23: mol_type = other RNA
caaagtgcttacagtgcaggtag

SEQ ID NO: 4778 - RNA, 23 nt, Synthetic Construct
  source 1..23: mol_type = other RNA
tggcaatacgacgtacttagtgt

SEQ ID NO: 4779 - RNA, 37 nt, Synthetic Construct; identical to SEQ ID NO: 2447
  source 1..37: mol_type = other RNA

SEQ ID NO: 4780 - RNA, 20 nt, Synthetic Construct
  source 1..20: mol_type = other RNA
tcctgtaccgatcaatagtg

SEQ ID NO: 4781 - RNA, 20 nt, Synthetic Construct
  source 1..20: mol_type = other RNA
tcctgtaccgatcaatagtg

SEQ ID NO: 4782 - RNA, 26 nt, Synthetic Construct
  source 1..26: mol_type = other RNA
gactcttagcggtggatcactcggct

SEQ ID NO: 4783 - RNA, 26 nt, Synthetic Construct
  source 1..26: mol_type = other RNA
gactcttagcggtggatcactcggct

SEQ ID NO: 4784 - RNA, 19 nt, Synthetic Construct
  source 1..19: mol_type = other RNA
gggtgcaagcgttaatcgg

SEQ ID NO: 4785 - RNA, 19 nt, Synthetic Construct
  source 1..19: mol_type = other RNA
gggtgcaagcgttaatcgg

SEQ ID NO: 4786 - RNA, 36 nt, Synthetic Construct; identical to SEQ ID NO: 2478
  source 1..36: mol_type = other RNA

SEQ ID NO: 4787 - RNA, 21 nt, Synthetic Construct
  source 1..21: mol_type = other RNA
tcctgtgctgagctgccccga

SEQ ID NO: 4788 - RNA, 21 nt, Synthetic Construct
  source 1..21: mol_type = other RNA
tcctgtgctgagctgccccga

SEQ ID NO: 4789 - RNA, 17 nt, Synthetic Construct
  source 1..17: mol_type = other RNA
cgaaattccttgtcggg

SEQ ID NO: 4790 - RNA, 24 nt, Synthetic Construct
  source 1..24: mol_type = other RNA
tgtaaacgtccccgactggaagct

SEQ ID NO: 4791 - RNA, 26 nt, Synthetic Construct
  source 1..26: mol_type = other RNA
gcataagcgtgcttgactgcgagact

SEQ ID NO: 4792 - RNA, 23 nt, Synthetic Construct
  source 1..23: mol_type = other RNA
tcctgtactgagccgccccgagt

SEQ ID NO: 4793 - RNA, 18 nt, Synthetic Construct
  source 1..18: mol_type = other RNA
gcgccgatgatagtgcgg

SEQ ID NO: 4794 - RNA, 18 nt, Synthetic Construct
  source 1..18: mol_type = other RNA
gcgccgatgatagtgcgg

SEQ ID NO: 4795 - RNA, 22 nt, Synthetic Construct
  source 1..22: mol_type = other RNA
tgaggtggtagattgtatagtt

SEQ ID NO: 4796 - RNA, 22 nt, Synthetic Construct
  source 1..22: mol_type = other RNA
tgaggtggtagattgtatagtt

SEQ ID NO: 4797 - RNA, 23 nt, Synthetic Construct
  source 1..23: mol_type = other RNA
caaagtgctgttcgtgcaggtaa

SEQ ID NO: 4798 - RNA, 30 nt, Synthetic Construct; identical to SEQ ID NO: 2308
  source 1..30: mol_type = other RNA

SEQ ID NO: 4799 - RNA, 30 nt, Synthetic Construct; identical to SEQ ID NO: 2308
  source 1..30: mol_type = other RNA

SEQ ID NO: 4800 - RNA, 23 nt, Synthetic Construct
  source 1..23: mol_type = other RNA
tctttggttatctagctgtatgt

SEQ ID NO: 4801 - RNA, 22 nt, Synthetic Construct
  source 1..22: mol_type = other RNA
gcgttgcaaccagtgccggggg

SEQ ID NO: 4802 - RNA, 22 nt, Synthetic Construct
  source 1..22: mol_type = other RNA
gcgttgcaaccagtgccggggg

SEQ ID NO: 4803 - RNA, 24 nt, Synthetic Construct
  source 1..24: mol_type = other RNA
tgtcagtttgtcaaataccccatt

SEQ ID NO: 4804 - RNA, 24 nt, Synthetic Construct
  source 1..24: mol_type = other RNA
tgtcagtttgtcaaataccccatt

SEQ ID NO: 4805 - RNA, 21 nt, Synthetic Construct
  source 1..21: mol_type = other RNA
tgaggtagtaggttgtatggt

SEQ ID NO: 4806 - RNA, 21 nt, Synthetic Construct
  source 1..21: mol_type = other RNA
tgaggtagtaggttgtatggt

SEQ ID NO: 4807 - RNA, 24 nt, Synthetic Construct
  source 1..24: mol_type = other RNA
tgtaaacatccccgaccggaagct

SEQ ID NO: 4808 - RNA, 23 nt, Synthetic Construct
  source 1..23: mol_type = other RNA
tggtgatacgacgtacttagtgt

SEQ ID NO: 4809 - RNA, 23 nt, Synthetic Construct
  source 1..23: mol_type = other RNA
tggtgatacgacgtacttagtgt

SEQ ID NO: 4810 - RNA, 21 nt, Synthetic Construct
  source 1..21: mol_type = other RNA
aatggcgccactagggttgtg

SEQ ID NO: 4811 - RNA, 21 nt, Synthetic Construct
  source 1..21: mol_type = other RNA
aatggcgccactagggttgtg

SEQ ID NO: 4812 - RNA, 23 nt, Synthetic Construct
  source 1..23: mol_type = other RNA
tcctgtgctgagctgccccgagt

SEQ ID NO: 4813 - RNA, 23 nt, Synthetic Construct
  source 1..23: mol_type = other RNA
tcctgtgctgagctgccccgagt

SEQ ID NO: 4814 - RNA, 17 nt, Synthetic Construct
  source 1..17: mol_type = other RNA
gtcgacgtatagggtgt

SEQ ID NO: 4815 - RNA, 23 nt, Synthetic Construct
  source 1..23: mol_type = other RNA
ccctgtactgagctgccccgagt

SEQ ID NO: 4816 - RNA, 23 nt, Synthetic Construct
  source 1..23: mol_type = other RNA
ccctgtactgagctgccccgagt

SEQ ID NO: 4817 - RNA, 15 nt, Synthetic Construct
  source 1..15: mol_type = other RNA
cagtgaaacgagtca

SEQ ID NO: 4818 - RNA, 15 nt, Synthetic Construct
  source 1..15: mol_type = other RNA
cagtgaaacgagtca

SEQ ID NO: 4819 - RNA, 22 nt, Synthetic Construct
  source 1..22: mol_type = other RNA
tcgtaccgtgagtaataatgca

SEQ ID NO: 4820 - RNA, 32 nt, Synthetic Construct; identical to SEQ ID NO: 2798
  source 1..32: mol_type = other RNA

SEQ ID NO: 4821 - RNA, 32 nt, Synthetic Construct; identical to SEQ ID NO: 2798
  source 1..32: mol_type = other RNA

SEQ ID NO: 4822 - RNA, 15 nt, Synthetic Construct
  source 1..15: mol_type = other RNA
cctcgcgcgattgga

SEQ ID NO: 4823 - RNA, 15 nt, Synthetic Construct
  source 1..15: mol_type = other RNA
cctcgcgcgattgga

SEQ ID NO: 4824 - RNA, 15 nt, Synthetic Construct
  source 1..15: mol_type = other RNA
gctatgggatttgtt

SEQ ID NO: 4825 - RNA, 15 nt, Synthetic Construct
  source 1..15: mol_type = other RNA
gctatgggatttgtt

SEQ ID NO: 4826 - RNA, 23 nt, Synthetic Construct
  source 1..23: mol_type = other RNA
tgtcagtttgccaaataccccaa

SEQ ID NO: 4827 - RNA, 20 nt, Synthetic Construct
  source 1..20: mol_type = other RNA
tagcaccatttgaaatcagt

SEQ ID NO: 4828 - RNA, 19 nt, Synthetic Construct
  source 1..19: mol_type = other RNA
cgactcttagcggtggatc

SEQ ID NO: 4829 - RNA, 19 nt, Synthetic Construct
  source 1..19: mol_type = other RNA
cgactcttagcggtggatc

SEQ ID NO: 4830 - RNA, 23 nt, Synthetic Construct
  source 1..23: mol_type = other RNA
tagtaatacgacgtacttagtgt

SEQ ID NO: 4831 - RNA, 23 nt, Synthetic Construct
  source 1..23: mol_type = other RNA
tagtaatacgacgtacttagtgt

SEQ ID NO: 4832 - RNA, 23 nt, Synthetic Construct
  source 1..23: mol_type = other RNA
tggcaatacgacgtacttagtgt

SEQ ID NO: 4833 - RNA, 23 nt, Synthetic Construct
  source 1..23: mol_type = other RNA
tggcaatacgacgtacttagtgt

SEQ ID NO: 4834 - RNA, 21 nt, Synthetic Construct
  source 1..21: mol_type = other RNA
tcctgtactgagctgccccgg

SEQ ID NO: 4835 - RNA, 21 nt, Synthetic Construct
  source 1..21: mol_type = other RNA
tgaggtagtagattgtatggt

SEQ ID NO: 4836 - RNA, 22 nt, Synthetic Construct
  source 1..22: mol_type = other RNA
tccagcatcagtgattttgttg

SEQ ID NO: 4837 - RNA, 23 nt, Synthetic Construct
  source 1..23: mol_type = other RNA
agcaacattgtctgctgggtttc

SEQ ID NO: 4838 - RNA, 20 nt, Synthetic Construct
  source 1..20: mol_type = other RNA
cccataaagtagaaagcact

SEQ ID NO: 4839 - RNA, 20 nt, Synthetic Construct
  source 1..20: mol_type = other RNA
cccataaagtagaaagcact

SEQ ID NO: 4840 - RNA, 25 nt, Synthetic Construct
  source 1..25: mol_type = other RNA
gtgaggatatgagatcgagacgaca

SEQ ID NO: 4841 - RNA, 25 nt, Synthetic Construct
  source 1..25: mol_type = other RNA
gtgaggatatgagatcgagacgaca

SEQ ID NO: 4842 - RNA, 33 nt, Synthetic Construct; identical to SEQ ID NO: 2126
  source 1..33: mol_type = other RNA

SEQ ID NO: 4843 - RNA, 33 nt, Synthetic Construct; identical to SEQ ID NO: 2126
  source 1..33: mol_type = other RNA

SEQ ID NO: 4844 - RNA, 22 nt, Synthetic Construct
  source 1..22: mol_type = other RNA
tcagcgccgatgatagtgcgga

SEQ ID NO: 4845 - RNA, 22 nt, Synthetic Construct
  source 1..22: mol_type = other RNA
tcagcgccgatgatagtgcgga

SEQ ID NO: 4846 - RNA, 23 nt, Synthetic Construct
  source 1..23: mol_type = other RNA
ggctacattgtctgctgggtttc

SEQ ID NO: 4847 - RNA, 22 nt, Synthetic Construct
  source 1..22: mol_type = other RNA
agggctgggtcggtcgggctgg

SEQ ID NO: 4848 - RNA, 22 nt, Synthetic Construct
  source 1..22: mol_type = other RNA
agggctgggtcggtcgggctgg

SEQ ID NO: 4849 - RNA, 29 nt, Synthetic Construct
  source 1..29: mol_type = other RNA
cgcgacctcagatcagacgtggcgacccg

SEQ ID NO: 4850 - RNA, 29 nt, Synthetic Construct
  source 1..29: mol_type = other RNA
cgcgacctcagatcagacgtggcgacccg

SEQ ID NO: 4851 - RNA, 21 nt, Synthetic Construct
  source 1..21: mol_type = other RNA
tgaggggcagagagcgggact

SEQ ID NO: 4852 - RNA, 16 nt, Synthetic Construct
  source 1..16: mol_type = other RNA
gtccggatcgtagtct

SEQ ID NO: 4853 - RNA, 16 nt, Synthetic Construct
  source 1..16: mol_type = other RNA
gtccggatcgtagtct

SEQ ID NO: 4854 - RNA, 21 nt, Synthetic Construct
  source 1..21: mol_type = other RNA
ttcacagtggctaagttctgt

SEQ ID NO: 4855 - RNA, 34 nt, Synthetic Construct; identical to SEQ ID NO: 2317
  source 1..34: mol_type = other RNA

SEQ ID NO: 4856 - RNA, 34 nt, Synthetic Construct; identical to SEQ ID NO: 2317
  source 1..34: mol_type = other RNA

SEQ ID NO: 4857 - RNA, 25 nt, Synthetic Construct
  source 1..25: mol_type = other RNA
ttgaggatacgagatcgagacgaca

SEQ ID NO: 4858 - RNA, 25 nt, Synthetic Construct
  source 1..25: mol_type = other RNA
ttgaggatacgagatcgagacgaca

SEQ ID NO: 4859 - RNA, 22 nt, Synthetic Construct
  source 1..22: mol_type = other RNA
ttctgtactgagctgccccgag

SEQ ID NO: 4860 - RNA, 22 nt, Synthetic Construct
  source 1..22: mol_type = other RNA
ttctgtactgagctgccccgag

SEQ ID NO: 4861 - RNA, 21 nt, Synthetic Construct
  source 1..21: mol_type = other RNA
tgaggtagtaggttgtgtgat

SEQ ID NO: 4862 - RNA, 21 nt, Synthetic Construct
  source 1..21: mol_type = other RNA
tgaggtagtaggttgtgtgat

SEQ ID NO: 4863 - RNA, 35 nt, Synthetic Construct; identical to SEQ ID NO: 2069
  source 1..35: mol_type = other RNA

SEQ ID NO: 4864 - RNA, 35 nt, Synthetic Construct; identical to SEQ ID NO: 2069
  source 1..35: mol_type = other RNA

SEQ ID NO: 4865 - RNA, 22 nt, Synthetic Construct
  source 1..22: mol_type = other RNA
ggcagggttcgtgactggggtg

SEQ ID NO: 4866 - RNA, 22 nt, Synthetic Construct
  source 1..22: mol_type = other RNA
ggcagggttcgtgactggggtg

SEQ ID NO: 4867 - RNA, 15 nt, Synthetic Construct
  source 1..15: mol_type = other RNA
tcgagtcgtcctgcg

SEQ ID NO: 4868 - RNA, 15 nt, Synthetic Construct
  source 1..15: mol_type = other RNA
tcgagtcgtcctgcg

SEQ ID NO: 4869 - RNA, 20 nt, Synthetic Construct
  source 1..20: mol_type = other RNA
tggggtagtaggttgtgtgg

SEQ ID NO: 4870 - RNA, 20 nt, Synthetic Construct
  source 1..20: mol_type = other RNA
tggggtagtaggttgtgtgg

SEQ ID NO: 4871 - RNA, 23 nt, Synthetic Construct
  source 1..23: mol_type = other RNA
tgaggtagtaggttgtgtagttt

SEQ ID NO: 4872 - RNA, 25 nt, Synthetic Construct
  source 1..25: mol_type = other RNA
tcgaggatatgagatcgagacgaca

SEQ ID NO: 4873 - RNA, 25 nt, Synthetic Construct
  source 1..25: mol_type = other RNA
tcgaggatatgagatcgagacgaca

SEQ ID NO: 4874 - RNA, 22 nt, Synthetic Construct
  source 1..22: mol_type = other RNA
tgaggtagtagtttgtgctgtc

SEQ ID NO: 4875 - RNA, 16 nt, Synthetic Construct
  source 1..16: mol_type = other RNA
gcgtagatatgcggag

SEQ ID NO: 4876 - RNA, 16 nt, Synthetic Construct
  source 1..16: mol_type = other RNA
gcgtagatatgcggag

SEQ ID NO: 4877 - RNA, 22 nt, Synthetic Construct
  source 1..22: mol_type = other RNA
tgaggtggtaggttgtgtggtt

SEQ ID NO: 4878 - RNA, 22 nt, Synthetic Construct
  source 1..22: mol_type = other RNA
tgaggtggtaggttgtgtggtt

SEQ ID NO: 4879 - RNA, 22 nt, Synthetic Construct
  source 1..22: mol_type = other RNA
tggaatgtaaggaagtatgtat

SEQ ID NO: 4880 - RNA, 22 nt, Synthetic Construct
  source 1..22: mol_type = other RNA
tggaatgtaaggaagtatgtat

SEQ ID NO: 4881 - RNA, 31 nt, Synthetic Construct
  source 1..31: mol_type = other RNA
gcgctcgtagtctagtggtatgataggtccc

SEQ ID NO: 4882 - RNA, 31 nt, Synthetic Construct; identical to SEQ ID NO: 4881
  source 1..31: mol_type = other RNA

SEQ ID NO: 4883 - RNA, 21 nt, Synthetic Construct
  source 1..21: mol_type = other RNA
agagtaggacgttgccaggtt

SEQ ID NO: 4884 - RNA, 21 nt, Synthetic Construct
  source 1..21: mol_type = other RNA
agagtaggacgttgccaggtt

SEQ ID NO: 4885 - RNA, 22 nt, Synthetic Construct
  source 1..22: mol_type = other RNA
tgaggaagtaggttgtgtggtt

SEQ ID NO: 4886 - RNA, 22 nt, Synthetic Construct
  source 1..22: mol_type = other RNA
tattgcactcgtcccggcctgt

SEQ ID NO: 4887 - RNA, 16 nt, Synthetic Construct
  source 1..16: mol_type = other RNA
ctgacgctcatgcacg

SEQ ID NO: 4888 - RNA, 16 nt, Synthetic Construct
  source 1..16: mol_type = other RNA
ctgacgctcatgcacg

SEQ ID NO: 4889 - RNA, 21 nt, Synthetic Construct
  source 1..21: mol_type = other RNA
ctaatcccagaaacccggtcg

SEQ ID NO: 4890 - RNA, 21 nt, Synthetic Construct
  source 1..21: mol_type = other RNA
ctaatcccagaaacccggtcg

SEQ ID NO: 4891 - RNA, 22 nt, Synthetic Construct
  source 1..22: mol_type = other RNA
cattgcacttgtctcggtctgg

SEQ ID NO: 4892 - RNA, 22 nt, Synthetic Construct
  source 1..22: mol_type = other RNA
cattgcacttgtctcggtctgg

SEQ ID NO: 4893 - RNA, 23 nt, Synthetic Construct
  source 1..23: mol_type = other RNA
cgctcacggaaagagaatgaagc

SEQ ID NO: 4894 - RNA, 23 nt, Synthetic Construct
  source 1..23: mol_type = other RNA
cgctcacggaaagagaatgaagc

SEQ ID NO: 4895 - RNA, 22 nt, Synthetic Construct
  source 1..22: mol_type = other RNA
tgaggaagtagtttgtgctgtt

SEQ ID NO: 4896 - RNA, 22 nt, Synthetic Construct
  source 1..22: mol_type = other RNA
tgaggaagtagtttgtgctgtt

SEQ ID NO: 4897 - RNA, 20 nt, Synthetic Construct
  source 1..20: mol_type = other RNA
tggaatgtaaagaagtatgt

SEQ ID NO: 4898 - RNA, 21 nt, Synthetic Construct
  source 1..21: mol_type = other RNA
tggggtagtaggttgtatagt

SEQ ID NO: 4899 - RNA, 21 nt, Synthetic Construct
  source 1..21: mol_type = other RNA
tggggtagtaggttgtatagt

SEQ ID NO: 4900 - RNA, 22 nt, Synthetic Construct
  source 1..22: mol_type = other RNA
tggggtagtaggttgtatagtt

SEQ ID NO: 4901 - RNA, 22 nt, Synthetic Construct
  source 1..22: mol_type = other RNA
tggggtagtaggttgtatagtt

SEQ ID NO: 4902 - RNA, 21 nt, Synthetic Construct
  source 1..21: mol_type = other RNA
aacggaatcccaaaagcagct

SEQ ID NO: 4903 - RNA, 17 nt, Synthetic Construct
  source 1..17: mol_type = other RNA
ggcccttatgggtaggg

SEQ ID NO: 4904 - RNA, 17 nt, Synthetic Construct
  source 1..17: mol_type = other RNA
ggcccttatgggtaggg

SEQ ID NO: 4905 - RNA, 22 nt, Synthetic Construct
  source 1..22: mol_type = other RNA
cggaatcgctagtaatcgcgga

SEQ ID NO: 4906 - RNA, 22 nt, Synthetic Construct
  source 1..22: mol_type = other RNA
cggaatcgctagtaatcgcgga

SEQ ID NO: 4907 - RNA, 22 nt, Synthetic Construct
  source 1..22: mol_type = other RNA
tgaggtagtaggttgtatagtc

SEQ ID NO: 4908 - RNA, 22 nt, Synthetic Construct
  source 1..22: mol_type = other RNA
tgaggtagtaggttgtatagtc

SEQ ID NO: 4909 - RNA, 17 nt, Synthetic Construct
  source 1..17: mol_type = other RNA
cgatctgtagctggtct

SEQ ID NO: 4910 - RNA, 21 nt, Synthetic Construct
  source 1..21: mol_type = other RNA
tctttggttatctagctgtat

SEQ ID NO: 4911 - RNA, 21 nt, Synthetic Construct
  source 1..21: mol_type = other RNA
tctttggttatctagctgtat

SEQ ID NO: 4912 - RNA, 25 nt, Synthetic Construct
  source 1..25: mol_type = other RNA
gtgaggatatgagatcgagacgaca

SEQ ID NO: 4913 - RNA, 25 nt, Synthetic Construct
  source 1..25: mol_type = other RNA
gtgaggatatgagatcgagacgaca

SEQ ID NO: 4914 - RNA, 22 nt, Synthetic Construct
  source 1..22: mol_type = other RNA
tgaggtagcaggttgtgtggtt

SEQ ID NO: 4915 - RNA, 22 nt, Synthetic Construct
  source 1..22: mol_type = other RNA
tgaggtagcaggttgtgtggtt

SEQ ID NO: 4916 - RNA, 22 nt, Synthetic Construct
  source 1..22: mol_type = other RNA
gtcagtttgtcaaataccccaa

SEQ ID NO: 4917 - RNA, 22 nt, Synthetic Construct
  source 1..22: mol_type = other RNA
gtcagtttgtcaaataccccaa

SEQ ID NO: 4918 - RNA, 30 nt, Synthetic Construct; identical to SEQ ID NO: 1771
  source 1..30: mol_type = other RNA

SEQ ID NO: 4919 - RNA, 30 nt, Synthetic Construct; identical to SEQ ID NO: 1771
  source 1..30: mol_type = other RNA

SEQ ID NO: 4920 - RNA, 22 nt, Synthetic Construct
  source 1..22: mol_type = other RNA
tgtggtagtagtttgtgctgtt

SEQ ID NO: 4921 - RNA, 22 nt, Synthetic Construct
  source 1..22: mol_type = other RNA
tgtggtagtagtttgtgctgtt

SEQ ID NO: 4922 - RNA, 24 nt, Synthetic Construct
  source 1..24: mol_type = other RNA
tttccccttggggttgtaggacca

SEQ ID NO: 4923 - RNA, 24 nt, Synthetic Construct
  source 1..24: mol_type = other RNA
tttccccttggggttgtaggacca

SEQ ID NO: 4924 - RNA, 22 nt, Synthetic Construct
  source 1..22: mol_type = other RNA
tgaggaagtagattgtatagtt

SEQ ID NO: 4925 - RNA, 23 nt, Synthetic Construct
  source 1..23: mol_type = other RNA
tcctgtactgggctgccccgagt

SEQ ID NO: 4926 - RNA, 22 nt, Synthetic Construct
  source 1..22: mol_type = other RNA
tcgtaccgtgagtgataatgcg

SEQ ID NO: 4927 - RNA, 28 nt, Synthetic Construct
  source 1..28: mol_type = other RNA
gctttacattggactttgaacagatctg

SEQ ID NO: 4928 - RNA, 28 nt, Synthetic Construct
  source 1..28: mol_type = other RNA
gctttacattggactttgaacagatctg

SEQ ID NO: 4929 - RNA, 23 nt, Synthetic Construct
  source 1..23: mol_type = other RNA
tgaggtagcaggttgtgtggttt

SEQ ID NO: 4930 - RNA, 18 nt, Synthetic Construct
  source 1..18: mol_type = other RNA
ggccgtcgtcagctcgtg

SEQ ID NO: 4931 - RNA, 20 nt, Synthetic Construct
  source 1..20: mol_type = other RNA
tgaggtagtaggttgtgtag

SEQ ID NO: 4932 - RNA, 20 nt, Synthetic Construct
  source 1..20: mol_type = other RNA
tgaggtagtaggttgtgtag

SEQ ID NO: 4933 - RNA, 21 nt, Synthetic Construct
  source 1..21: mol_type = other RNA
tggggtagtaggttgtgtggt

SEQ ID NO: 4934 - RNA, 21 nt, Synthetic Construct
  source 1..21: mol_type = other RNA
tggggtagtaggttgtgtggt

SEQ ID NO: 4935 - RNA, 25 nt, Synthetic Construct
  source 1..25: mol_type = other RNA
tcgaggatatgagatcgagacgaca

SEQ ID NO: 4936 - RNA, 22 nt, Synthetic Construct
  source 1..22: mol_type = other RNA
tgaggaagtagtttgtgctgtt

SEQ ID NO: 4937 - RNA, 23 nt, Synthetic Construct
  source 1..23: mol_type = other RNA
gtaaacatccttgactggaagct

SEQ ID NO: 4938 - RNA, 23 nt, Synthetic Construct
  source 1..23: mol_type = other RNA
gtaaacatccttgactggaagct

SEQ ID NO: 4939 - RNA, 39 nt, Synthetic Construct
  source 1..39: mol_type = other RNA
gcgtggatatcgtgaggaacactagtggcgtaggcgaga

SEQ ID NO: 4940 - RNA, 39 nt, Synthetic Construct; identical to SEQ ID NO: 4939
  source 1..39: mol_type = other RNA

SEQ ID NO: 4941 - RNA, 22 nt, Synthetic Construct
  source 1..22: mol_type = other RNA
tgaggaagtaggttgtatagtt

SEQ ID NO: 4942 - RNA, 19 nt, Synthetic Construct
  source 1..19: mol_type = other RNA
agcgaaattccttgtcggg

SEQ ID NO: 4943 - RNA, 19 nt, Synthetic Construct
  source 1..19: mol_type = other RNA
agcgaaattccttgtcggg

SEQ ID NO: 4944 - RNA, 22 nt, Synthetic Construct
  source 1..22: mol_type = other RNA
tgaggtagtaggctgtgtggtt

SEQ ID NO: 4945 - RNA, 15 nt, Synthetic Construct
  source 1..15: mol_type = other RNA
gtccggcccgaggca

SEQ ID NO: 4946 - RNA, 15 nt, Synthetic Construct
  source 1..15: mol_type = other RNA
gtccggcccgaggca

SEQ ID NO: 4947 - RNA, 33 nt, Synthetic Construct
  source 1..33: mol_type = other RNA
ttggtcgtggttgtagtccgtgcgagaatacca

SEQ ID NO: 4948 - RNA, 22 nt, Synthetic Construct
  source 1..22: mol_type = other RNA
tgaggtagtaggttgtgtagtt

SEQ ID NO: 4949 - RNA, 22 nt, Synthetic Construct
  source 1..22: mol_type = other RNA
tgaggtagtaggttgtgtagtt

SEQ ID NO: 4950 - RNA, 18 nt, Synthetic Construct
  source 1..18: mol_type = other RNA
cctgaagaataagcaccg

SEQ ID NO: 4951 - RNA, 18 nt, Synthetic Construct
  source 1..18: mol_type = other RNA
cctgaagaataagcaccg

SEQ ID NO: 4952 - RNA, 23 nt, Synthetic Construct
  source 1..23: mol_type = other RNA
gtaaacatccttgactggaagct

SEQ ID NO: 4953 - RNA, 23 nt, Synthetic Construct
  source 1..23: mol_type = other RNA
gtaaacatccttgactggaagct

SEQ ID NO: 4954 - RNA, 22 nt, Synthetic Construct
  source 1..22: mol_type = other RNA
ccggtcccaagggtatggctgt

SEQ ID NO: 4955 - RNA, 22 nt, Synthetic Construct
  source 1..22: mol_type = other RNA
ccggtcccaagggtatggctgt

SEQ ID NO: 4956 - RNA, 22 nt, Synthetic Construct
  source 1..22: mol_type = other RNA
cggaatcgctagtaatcgcgga

SEQ ID NO: 4957 - RNA, 23 nt, Synthetic Construct
  source 1..23: mol_type = other RNA
gcgtggtaggagagcgttctgta

SEQ ID NO: 4958 - RNA, 23 nt, Synthetic Construct
  source 1..23: mol_type = other RNA
gcgtggtaggagagcgttctgta

SEQ ID NO: 4959 - RNA, 23 nt, Synthetic Construct
  source 1..23: mol_type = other RNA
tcctgtaccgagctgccccgaga

SEQ ID NO: 4960 - RNA, 23 nt, Synthetic Construct
  source 1..23: mol_type = other RNA
tcctgtaccgagctgccccgaga

SEQ ID NO: 4961 - RNA, 23 nt, Synthetic Construct
  source 1..23: mol_type = other RNA
aacggaatcccaaaagcagctgt

SEQ ID NO: 4962 - RNA, 23 nt, Synthetic Construct
  source 1..23: mol_type = other RNA
aacggaatcccaaaagcagctgt

SEQ ID NO: 4963 - RNA, 24 nt, Synthetic Construct
  source 1..24: mol_type = other RNA
tgtaaacatccccgaccggaagct

SEQ ID NO: 4964 - RNA, 23 nt, Synthetic Construct
  source 1..23: mol_type = other RNA
tgaggaagtaggttgtgtggttt

SEQ ID NO: 4965 - RNA, 23 nt, Synthetic Construct
  source 1..23: mol_type = other RNA
tgaggaagtaggttgtgtggttt

SEQ ID NO: 4966 - RNA, 15 nt, Synthetic Construct
  source 1..15: mol_type = other RNA
gagtagggcgggaca

SEQ ID NO: 4967 - RNA, 15 nt, Synthetic Construct
  source 1..15: mol_type = other RNA
gagtagggcgggaca

SEQ ID NO: 4968 - RNA, 20 nt, Synthetic Construct
  source 1..20: mol_type = other RNA
tgaggtagtaggttgtgtgt

SEQ ID NO: 4969 - RNA, 23 nt, Synthetic Construct
  source 1..23: mol_type = other RNA
taccctgtagaaccgaatttgtg

SEQ ID NO: 4970 - RNA, 18 nt, Synthetic Construct
  source 1..18: mol_type = other RNA
atcgctagtaatcgcgga

SEQ ID NO: 4971 - RNA, 39 nt, Synthetic Construct; identical to SEQ ID NO: 2398
  source 1..39: mol_type = other RNA

SEQ ID NO: 4972 - RNA, 39 nt, Synthetic Construct; identical to SEQ ID NO: 2398
  source 1..39: mol_type = other RNA

SEQ ID NO: 4973 - RNA, 16 nt, Synthetic Construct
  source 1..16: mol_type = other RNA
acggcccagactccta

SEQ ID NO: 4974 - RNA, 16 nt, Synthetic Construct
  source 1..16: mol_type = other RNA
acggcccagactccta

SEQ ID NO: 4975 - RNA, 15 nt, Synthetic Construct
  source 1..15: mol_type = other RNA
tcctgacggccatag

SEQ ID NO: 4976 - RNA, 15 nt, Synthetic Construct
  source 1..15: mol_type = other RNA
tcctgacggccatag

SEQ ID NO: 4977 - RNA, 18 nt, Synthetic Construct
  source 1..18: mol_type = other RNA
cagcactctgcaaagacg

SEQ ID NO: 4978 - RNA, 20 nt, Synthetic Construct
  source 1..20: mol_type = other RNA
tgaggtagtaggtcgtgtgg

SEQ ID NO: 4979 - RNA, 20 nt, Synthetic Construct
  source 1..20: mol_type = other RNA
tgaggtagtaggtcgtgtgg

SEQ ID NO: 4980 - RNA, 21 nt, Synthetic Construct
  source 1..21: mol_type = other RNA
tggagtgtgacaatggtgttc

SEQ ID NO: 4981 - RNA, 21 nt, Synthetic Construct
  source 1..21: mol_type = other RNA
tggagtgtgacaatggtgttc

SEQ ID NO: 4982 - RNA, 25 nt, Synthetic Construct
  source 1..25: mol_type = other RNA
ttgaggatatgagatcgagacgacg

SEQ ID NO: 4983 - RNA, 16 nt, Synthetic Construct
  source 1..16: mol_type = other RNA
atctacggccatacca

SEQ ID NO: 4984 - RNA, 16 nt, Synthetic Construct
  source 1..16: mol_type = other RNA
atctacggccatacca

SEQ ID NO: 4985 - RNA, 22 nt, Synthetic Construct
  source 1..22: mol_type = other RNA
tgaggtagtagattgtatagct

SEQ ID NO: 4986 - RNA, 22 nt, Synthetic Construct
  source 1..22: mol_type = other RNA
tgaggtagtagattgtatagct

SEQ ID NO: 4987 - RNA, 23 nt, Synthetic Construct
  source 1..23: mol_type = other RNA
tctttgttcgattccgttgagta

SEQ ID NO: 4988 - RNA, 23 nt, Synthetic Construct
  source 1..23: mol_type = other RNA
tctttgttcgattccgttgagta

SEQ ID NO: 4989 - RNA, 23 nt, Synthetic Construct
  source 1..23: mol_type = other RNA
tagcagcacgtaaatattggcgt

SEQ ID NO: 4990 - RNA, 23 nt, Synthetic Construct
  source 1..23: mol_type = other RNA
tagcagcacgtaaatattggcgt

SEQ ID NO: 4991 - RNA, 32 nt, Synthetic Construct; identical to SEQ ID NO: 2318
  source 1..32: mol_type = other RNA

SEQ ID NO: 4992 - RNA, 32 nt, Synthetic Construct; identical to SEQ ID NO: 2318
  source 1..32: mol_type = other RNA

SEQ ID NO: 4993 - RNA, 23 nt, Synthetic Construct
  source 1..23: mol_type = other RNA
tagtaatacgacgtacttagtgt

SEQ ID NO: 4994 - RNA, 23 nt, Synthetic Construct
  source 1..23: mol_type = other RNA
tagtaatacgacgtacttagtgt

SEQ ID NO: 4995 - RNA, 17 nt, Synthetic Construct
  source 1..17: mol_type = other RNA
atcgtgacgatagtgca

SEQ ID NO: 4996 - RNA, 17 nt, Synthetic Construct
  source 1..17: mol_type = other RNA
atcgtgacgatagtgca

SEQ ID NO: 4997 - RNA, 35 nt, Synthetic Construct; identical to SEQ ID NO: 2615
  source 1..35: mol_type = other RNA

SEQ ID NO: 4998 - RNA, 23 nt, Synthetic Construct
  source 1..23: mol_type = other RNA
tggaaatacgacgtacttagtgt

SEQ ID NO: 4999 - RNA, 23 nt, Synthetic Construct
  source 1..23: mol_type = other RNA
tggaaatacgacgtacttagtgt

SEQ ID NO: 5000 - RNA, 27 nt, Synthetic Construct
  source 1..27: mol_type = other RNA
ccccccactgctgaatttgactggctt

SEQ ID NO: 5001 - RNA, 34 nt, Synthetic Construct; identical to SEQ ID NO: 385
  source 1..34: mol_type = other RNA

SEQ ID NO: 5002 - RNA, 28 nt, Synthetic Construct
  source 1..28: mol_type = other RNA
gtggcattgccgagtagctaagtgcgga

SEQ ID NO: 5003 - RNA, 28 nt, Synthetic Construct
  source 1..28: mol_type = other RNA
gtggcattgccgagtagctaagtgcgga

SEQ ID NO: 5004 - RNA, 23 nt, Synthetic Construct
  source 1..23: mol_type = other RNA
tccctggtggtctagtggttagg

SEQ ID NO: 5005 - RNA, 22 nt, Synthetic Construct
  source 1..22: mol_type = other RNA
tggaatgtagagaagtatgtat

SEQ ID NO: 5006 - RNA, 22 nt, Synthetic Construct
  source 1..22: mol_type = other RNA
tggaatgtagagaagtatgtat

SEQ ID NO: 5007 - RNA, 22 nt, Synthetic Construct
  source 1..22: mol_type = other RNA
tagcagcacgtaagtattggcg

SEQ ID NO: 5008 - RNA, 22 nt, Synthetic Construct
  source 1..22: mol_type = other RNA
tagcagcacgtaagtattggcg

SEQ ID NO: 5009 - RNA, 24 nt, Synthetic Construct
  source 1..24: mol_type = other RNA
tgtaaacatccccgactggaagtt

SEQ ID NO: 5010 - RNA, 15 nt, Synthetic Construct
  source 1..15: mol_type = other RNA
ttccgaaagtagtgg

SEQ ID NO: 5011 - RNA, 20 nt, Synthetic Construct
  source 1..20: mol_type = other RNA
tgaggtggtaggttgtgtgg

SEQ ID NO: 5012 - RNA, 20 nt, Synthetic Construct
  source 1..20: mol_type = other RNA
tgaggtggtaggttgtgtgg

SEQ ID NO: 5013 - RNA, 22 nt, Synthetic Construct
  source 1..22: mol_type = other RNA
tgaggtagtgggttgtgtggtt

SEQ ID NO: 5014 - RNA, 20 nt, Synthetic Construct
  source 1..20: mol_type = other RNA
ccgcagagtacagcttggga

SEQ ID NO: 5015 - RNA, 20 nt, Synthetic Construct
  source 1..20: mol_type = other RNA
ccgcagagtacagcttggga

SEQ ID NO: 5016 - RNA, 29 nt, Synthetic Construct
  source 1..29: mol_type = other RNA
cgggatggggacagtgtatggtgggcagt

SEQ ID NO: 5017 - RNA, 29 nt, Synthetic Construct
  source 1..29: mol_type = other RNA
cgggatggggacagtgtatggtgggcagt

SEQ ID NO: 5018 - RNA, 22 nt, Synthetic Construct
  source 1..22: mol_type = other RNA
tggaatgtaaagaggtatgtat

SEQ ID NO: 5019 - RNA, 22 nt, Synthetic Construct
  source 1..22: mol_type = other RNA
tggaatgtaaagaggtatgtat

SEQ ID NO: 5020 - RNA, 22 nt, Synthetic Construct
  source 1..22: mol_type = other RNA
tcctgtactgagctaccccgag

SEQ ID NO: 5021 - RNA, 22 nt, Synthetic Construct
  source 1..22: mol_type = other RNA
tcctgtactgagctaccccgag

SEQ ID NO: 5022 - RNA, 23 nt, Synthetic Construct
  source 1..23: mol_type = other RNA
tggtaatacgacgtacttagtga

SEQ ID NO: 5023 - RNA, 23 nt, Synthetic Construct
  source 1..23: mol_type = other RNA
tggtaatacgacgtacttagtga

SEQ ID NO: 5024 - RNA, 34 nt, Synthetic Construct; identical to SEQ ID NO: 2265
  source 1..34: mol_type = other RNA

SEQ ID NO: 5025 - RNA, 34 nt, Synthetic Construct; identical to SEQ ID NO: 2265
  source 1..34: mol_type = other RNA

SEQ ID NO: 5026 - RNA, 18 nt, Synthetic Construct
  source 1..18: mol_type = other RNA
tcccctggacctgtactg

SEQ ID NO: 5027 - RNA, 18 nt, Synthetic Construct
  source 1..18: mol_type = other RNA
tcccctggacctgtactg

SEQ ID NO: 5028 - RNA, 23 nt, Synthetic Construct
  source 1..23: mol_type = other RNA
tggtaatacggcgtacttagtgt

SEQ ID NO: 5029 - RNA, 36 nt, Synthetic Construct; identical to SEQ ID NO: 2366
  source 1..36: mol_type = other RNA

SEQ ID NO: 5030 - RNA, 36 nt, Synthetic Construct; identical to SEQ ID NO: 2366
  source 1..36: mol_type = other RNA

SEQ ID NO: 5031 - RNA, 18 nt, Synthetic Construct
  source 1..18: mol_type = other RNA
acagtcaggatgttggct

SEQ ID NO: 5032 - RNA, 25 nt, Synthetic Construct
  source 1..25: mol_type = other RNA
agctcactgatcgagtcgtcctgcg

SEQ ID NO: 5033 - RNA, 25 nt, Synthetic Construct
  source 1..25: mol_type = other RNA
agctcactgatcgagtcgtcctgcg

SEQ ID NO: 5034 - RNA, 15 nt, Synthetic Construct
  source 1..15: mol_type = other RNA
gggtgaaagcggggg

SEQ ID NO: 5035 - RNA, 15 nt, Synthetic Construct
  source 1..15: mol_type = other RNA
gggtgaaagcggggg

SEQ ID NO: 5036 - RNA, 23 nt, Synthetic Construct
  source 1..23: mol_type = other RNA
tgaggggcagggagcgagacttt

SEQ ID NO: 5037 - RNA, 22 nt, Synthetic Construct
  source 1..22: mol_type = other RNA
tgaggtggtaggttgtgtggtt

SEQ ID NO: 5038 - RNA, 22 nt, Synthetic Construct
  source 1..22: mol_type = other RNA
tgaagtagtaggttgtatagtt

SEQ ID NO: 5039 - RNA, 27 nt, Synthetic Construct
  source 1..27: mol_type = other RNA
cagagttctacagtccgacgatcgatc

SEQ ID NO: 5040 - RNA, 27 nt, Synthetic Construct
  source 1..27: mol_type = other RNA
cagagttctacagtccgacgatcgatc

SEQ ID NO: 5041 - RNA, 36 nt, Synthetic Construct; identical to SEQ ID NO: 2248
  source 1..36: mol_type = other RNA

SEQ ID NO: 5042 - RNA, 36 nt, Synthetic Construct; identical to SEQ ID NO: 2248
  source 1..36: mol_type = other RNA

SEQ ID NO: 5043 - RNA, 23 nt, Synthetic Construct
  source 1..23: mol_type = other RNA
ccctgtactgagctgccccgaga

SEQ ID NO: 5044 - RNA, 23 nt, Synthetic Construct
  source 1..23: mol_type = other RNA
ccctgtactgagctgccccgaga

SEQ ID NO: 5045 - RNA, 33 nt, Synthetic Construct; identical to SEQ ID NO: 2386
  source 1..33: mol_type = other RNA

SEQ ID NO: 5046 - RNA, 33 nt, Synthetic Construct; identical to SEQ ID NO: 2386
  source 1..33: mol_type = other RNA

SEQ ID NO: 5047 - RNA, 36 nt, Synthetic Construct; identical to SEQ ID NO: 2506
  source 1..36: mol_type = other RNA

SEQ ID NO: 5048 - RNA, 36 nt, Synthetic Construct; identical to SEQ ID NO: 2506
  source 1..36: mol_type = other RNA

SEQ ID NO: 5049 - RNA, 32 nt, Synthetic Construct; identical to SEQ ID NO: 2798
  source 1..32: mol_type = other RNA

SEQ ID NO: 5050 - RNA, 32 nt, Synthetic Construct; identical to SEQ ID NO: 2798
  source 1..32: mol_type = other RNA

SEQ ID NO: 5051 - RNA, 26 nt, Synthetic Construct
  source 1..26: mol_type = other RNA
gatttccccttggggttgtaggacca

SEQ ID NO: 5052 - RNA, 26 nt, Synthetic Construct
  source 1..26: mol_type = other RNA
gatttccccttggggttgtaggacca

SEQ ID NO: 5053 - RNA, 21 nt, Synthetic Construct
  source 1..21: mol_type = other RNA
ttcggaagaaggggtgcctgg

SEQ ID NO: 5054 - RNA, 21 nt, Synthetic Construct
  source 1..21: mol_type = other RNA
ttcggaagaaggggtgcctgg

SEQ ID NO: 5055 - RNA, 20 nt, Synthetic Construct
  source 1..20: mol_type = other RNA
tccctgagaccctaacttgt

SEQ ID NO: 5056 - RNA, 16 nt, Synthetic Construct
  source 1..16: mol_type = other RNA
gcggctgtagctcagt

SEQ ID NO: 5057 - RNA, 16 nt, Synthetic Construct
  source 1..16: mol_type = other RNA
gcggctgtagctcagt

SEQ ID NO: 5058 - RNA, 21 nt, Synthetic Construct
  source 1..21: mol_type = other RNA
tggcagtgtcttagctggttg

SEQ ID NO: 5059 - RNA, 28 nt, Synthetic Construct
  source 1..28: mol_type = other RNA
ggcagggttcgtgactggggtgaagtcg

SEQ ID NO: 5060 - RNA, 28 nt, Synthetic Construct
  source 1..28: mol_type = other RNA
ggcagggttcgtgactggggtgaagtcg

SEQ ID NO: 5061 - RNA, 21 nt, Synthetic Construct
  source 1..21: mol_type = other RNA
tgaggtagtaggctgtgtggt

SEQ ID NO: 5062 - RNA, 21 nt, Synthetic Construct
  source 1..21: mol_type = other RNA
tgaggtagtaggctgtgtggt

SEQ ID NO: 5063 - RNA, 16 nt, Synthetic Construct
  source 1..16: mol_type = other RNA
tggccgtcgtcagctc

SEQ ID NO: 5064 - RNA, 16 nt, Synthetic Construct
  source 1..16: mol_type = other RNA
tggccgtcgtcagctc

SEQ ID NO: 5065 - RNA, 21 nt, Synthetic Construct
  source 1..21: mol_type = other RNA
cactgatcgagtcgtcctgcg

SEQ ID NO: 5066 - RNA, 21 nt, Synthetic Construct
  source 1..21: mol_type = other RNA
cactgatcgagtcgtcctgcg

SEQ ID NO: 5067 - RNA, 23 nt, Synthetic Construct
  source 1..23: mol_type = other RNA
tgaagggcagagagcgagacttt

SEQ ID NO: 5068 - RNA, 32 nt, Synthetic Construct; identical to SEQ ID NO: 2850
  source 1..32: mol_type = other RNA

SEQ ID NO: 5069 - RNA, 32 nt, Synthetic Construct; identical to SEQ ID NO: 2850
  source 1..32: mol_type = other RNA

SEQ ID NO: 5070 - RNA, 24 nt, Synthetic Construct
  source 1..24: mol_type = other RNA
agcaacattgtctgctgggtttct

SEQ ID NO: 5071 - RNA, 15 nt, Synthetic Construct
  source 1..15: mol_type = other RNA
tcgagtcgtcctgcg

SEQ ID NO: 5072 - RNA, 23 nt, Synthetic Construct
  source 1..23: mol_type = other RNA
tgaggagcagagagcgagacttt

SEQ ID NO: 5073 - RNA, 36 nt, Synthetic Construct; identical to SEQ ID NO: 2660
  source 1..36: mol_type = other RNA

SEQ ID NO: 5074 - RNA, 23 nt, Synthetic Construct
  source 1..23: mol_type = other RNA
tctctcggctcctcgcggctcgt

SEQ ID NO: 5075 - RNA, 23 nt, Synthetic Construct
  source 1..23: mol_type = other RNA
tctctcggctcctcgcggctcgt

SEQ ID NO: 5076 - RNA, 22 nt, Synthetic Construct
  source 1..22: mol_type = other RNA
tctttggttatctagctgtatg

SEQ ID NO: 5077 - RNA, 22 nt, Synthetic Construct
  source 1..22: mol_type = other RNA
tctttggttatctagctgtatg

SEQ ID NO: 5078 - RNA, 20 nt, Synthetic Construct
  source 1..20: mol_type = other RNA
tgaggtagtaggttgtgtgt

SEQ ID NO: 5079 - RNA, 17 nt, Synthetic Construct
  source 1..17: mol_type = other RNA
ccaaggggtcgtgggtt

SEQ ID NO: 5080 - RNA, 17 nt, Synthetic Construct
  source 1..17: mol_type = other RNA
ccaaggggtcgtgggtt

SEQ ID NO: 5081 - RNA, 21 nt, Synthetic Construct
  source 1..21: mol_type = other RNA
tgaggtagtagcttgtgctgt

SEQ ID NO: 5082 - RNA, 21 nt, Synthetic Construct
  source 1..21: mol_type = other RNA
tgaggtagtagcttgtgctgt

SEQ ID NO: 5083 - RNA, 21 nt, Synthetic Construct
  source 1..21: mol_type = other RNA
cgaggggcagagagcgagact

SEQ ID NO: 5084 - RNA, 21 nt, Synthetic Construct
  source 1..21: mol_type = other RNA
tgaggaagtaggttgtgtggt

SEQ ID NO: 5085 - RNA, 21 nt, Synthetic Construct
  source 1..21: mol_type = other RNA
tgaggaagtaggttgtgtggt

SEQ ID NO: 5086 - RNA, 27 nt, Synthetic Construct
  source 1..27: mol_type = other RNA
ncccccactgctaaatttgactggctt

SEQ ID NO: 5087 - RNA, 27 nt, Synthetic Construct
  source 1..27: mol_type = other RNA
ncccccactgctaaatttgactggctt

SEQ ID NO: 5088 - RNA, 22 nt, Synthetic Construct
  source 1..22: mol_type = other RNA
tggaatgtaaagaggtatgtat

SEQ ID NO: 5089 - RNA, 22 nt, Synthetic Construct
  source 1..22: mol_type = other RNA
tggaatgtaaagaggtatgtat

SEQ ID NO: 5090 - RNA, 24 nt, Synthetic Construct
  source 1..24: mol_type = other RNA
tcactgatcgagtcgtcctgcgcg

SEQ ID NO: 5091 - RNA, 24 nt, Synthetic Construct
  source 1..24: mol_type = other RNA
tcactgatcgagtcgtcctgcgcg

SEQ ID NO: 5092 - RNA, 31 nt, Synthetic Construct; identical to SEQ ID NO: 1881
  source 1..31: mol_type = other RNA

SEQ ID NO: 5093 - RNA, 31 nt, Synthetic Construct; identical to SEQ ID NO: 1881
  source 1..31: mol_type = other RNA

SEQ ID NO: 5094 - RNA, 21 nt, Synthetic Construct
  source 1..21: mol_type = other RNA
tgaggtagtagatcgtatagt

SEQ ID NO: 5095 - RNA, 16 nt, Synthetic Construct
  source 1..16: mol_type = other RNA
tgcacgaaagcgtggg

SEQ ID NO: 5096 - RNA, 16 nt, Synthetic Construct
  source 1..16: mol_type = other RNA
tgcacgaaagcgtggg

SEQ ID NO: 5097 - RNA, 22 nt, Synthetic Construct
  source 1..22: mol_type = other RNA
tgaggtagtagtttgtgctgta

SEQ ID NO: 5098 - RNA, 22 nt, Synthetic Construct
  source 1..22: mol_type = other RNA
tgtggtagtaggttgtgtggtt

SEQ ID NO: 5099 - RNA, 22 nt, Synthetic Construct
  source 1..22: mol_type = other RNA
tgtggtagtaggttgtgtggtt

SEQ ID NO: 5100 - RNA, 22 nt, Synthetic Construct
  source 1..22: mol_type = other RNA
tggagtgtaaagaagtatgtat

SEQ ID NO: 5101 - RNA, 22 nt, Synthetic Construct
  source 1..22: mol_type = other RNA
tggagtgtaaagaagtatgtat

SEQ ID NO: 5102 - RNA, 23 nt, Synthetic Construct
  source 1..23: mol_type = other RNA
tcccgtactgagctgccccgaga

SEQ ID NO: 5103 - RNA, 23 nt, Synthetic Construct
  source 1..23: mol_type = other RNA
tcccgtactgagctgccccgaga

SEQ ID NO: 5104 - RNA, 23 nt, Synthetic Construct
  source 1..23: mol_type = other RNA
agctcggtctgaggcccctcaga

SEQ ID NO: 5105 - RNA, 23 nt, Synthetic Construct
  source 1..23: mol_type = other RNA
agctcggtctgaggcccctcaga

SEQ ID NO: 5106 - RNA, 22 nt, Synthetic Construct
  source 1..22: mol_type = other RNA
tggagtgtaaagaagtatgtat

SEQ ID NO: 5107 - RNA, 22 nt, Synthetic Construct
  source 1..22: mol_type = other RNA
tggagtgtaaagaagtatgtat

SEQ ID NO: 5108 - RNA, 31 nt, Synthetic Construct; identical to SEQ ID NO: 2333
  source 1..31: mol_type = other RNA

SEQ ID NO: 5109 - RNA, 31 nt, Synthetic Construct; identical to SEQ ID NO: 2333
  source 1..31: mol_type = other RNA

SEQ ID NO: 5110 - RNA, 22 nt, Synthetic Construct
  source 1..22: mol_type = other RNA
cgaggtagtagtttgtgctgtt

SEQ ID NO: 5111 - RNA, 22 nt, Synthetic Construct
  source 1..22: mol_type = other RNA
cgaggtagtagtttgtgctgtt

SEQ ID NO: 5112 - RNA, 27 nt, Synthetic Construct
  source 1..27: mol_type = other RNA
gctttacattggactttgaacagatct

SEQ ID NO: 5113 - RNA, 27 nt, Synthetic Construct
  source 1..27: mol_type = other RNA
gctttacattggactttgaacagatct

SEQ ID NO: 5114 - RNA, 19 nt, Synthetic Construct
  source 1..19: mol_type = other RNA
tgtcaactggttgttggga

SEQ ID NO: 5115 - RNA, 19 nt, Synthetic Construct
  source 1..19: mol_type = other RNA
tgtcaactggttgttggga

SEQ ID NO: 5116 - RNA, 21 nt, Synthetic Construct
  source 1..21: mol_type = other RNA
tgaggtaggaggttgtatagt

SEQ ID NO: 5117 - RNA, 19 nt, Synthetic Construct
  source 1..19: mol_type = other RNA
gtactgacgctcatgcacg

SEQ ID NO: 5118 - RNA, 19 nt, Synthetic Construct
  source 1..19: mol_type = other RNA
gtactgacgctcatgcacg

SEQ ID NO: 5119 - RNA, 15 nt, Synthetic Construct
  source 1..15: mol_type = other RNA
cccagaaacccggtc

SEQ ID NO: 5120 - RNA, 15 nt, Synthetic Construct
  source 1..15: mol_type = other RNA
cccagaaacccggtc

SEQ ID NO: 5121 - RNA, 23 nt, Synthetic Construct
  source 1..23: mol_type = other RNA
tggaatgtaaagaagtatgtacc

SEQ ID NO: 5122 - RNA, 23 nt, Synthetic Construct
  source 1..23: mol_type = other RNA
tggaatgtaaagaagtatgtacc

SEQ ID NO: 5123 - RNA, 23 nt, Synthetic Construct
  source 1..23: mol_type = other RNA
tcctgtaccgagctgccccgagt

SEQ ID NO: 5124 - RNA, 23 nt, Synthetic Construct
  source 1..23: mol_type = other RNA
tcctgtaccgagctgccccgagt

SEQ ID NO: 5125 - RNA, 37 nt, Synthetic Construct
  source 1..37: mol_type = other RNA
gacttaccaaacctatgcaaactccgaataccgcaga

SEQ ID NO: 5126 - RNA, 37 nt, Synthetic Construct; identical to SEQ ID NO: 5125
  source 1..37: mol_type = other RNA

SEQ ID NO: 5127 - RNA, 21 nt, Synthetic Construct
  source 1..21: mol_type = other RNA
ggaggggcagagagcgagact

SEQ ID NO: 5128 - RNA, 21 nt, Synthetic Construct
  source 1..21: mol_type = other RNA
tgaggtagtgggttgtgtggt

SEQ ID NO: 5129 - RNA, 21 nt, Synthetic Construct
  source 1..21: mol_type = other RNA
tgaggtagtgggttgtgtggt

SEQ ID NO: 5130 - RNA, 15 nt, Synthetic Construct
  source 1..15: mol_type = other RNA
gagagcctggacaca

SEQ ID NO: 5131 - RNA, 15 nt, Synthetic Construct
  source 1..15: mol_type = other RNA
gagagcctggacaca

SEQ ID NO: 5132 - RNA, 15 nt, Synthetic Construct
  source 1..15: mol_type = other RNA
gtctcgccgacggca

SEQ ID NO: 5133 - RNA, 15 nt, Synthetic Construct
  source 1..15: mol_type = other RNA
gtctcgccgacggca

SEQ ID NO: 5134 - RNA, 18 nt, Synthetic Construct
  source 1..18: mol_type = other RNA
cgactcttagcggtggat

SEQ ID NO: 5135 - RNA, 18 nt, Synthetic Construct
  source 1..18: mol_type = other RNA
cgactcttagcggtggat

SEQ ID NO: 5136 - RNA, 21 nt, Synthetic Construct
  source 1..21: mol_type = other RNA
ctagcaccatctgaaatcggt

SEQ ID NO: 5137 - RNA, 23 nt, Synthetic Construct
  source 1..23: mol_type = other RNA
tgataatacgacgtacttagtgt

SEQ ID NO: 5138 - RNA, 23 nt, Synthetic Construct
  source 1..23: mol_type = other RNA
tgataatacgacgtacttagtgt

SEQ ID NO: 5139 - RNA, 18 nt, Synthetic Construct
  source 1..18: mol_type = other RNA
gttcgattccggagaggg

SEQ ID NO: 5140 - RNA, 18 nt, Synthetic Construct
  source 1..18: mol_type = other RNA
gttcgattccggagaggg

SEQ ID NO: 5141 - RNA, 19 nt, Synthetic Construct
  source 1..19: mol_type = other RNA
gcgccgatgatagtgcgga

SEQ ID NO: 5142 - RNA, 25 nt, Synthetic Construct
  source 1..25: mol_type = other RNA
agctcactgatcgagtcgtcctgcg

SEQ ID NO: 5143 - RNA, 21 nt, Synthetic Construct
  source 1..21: mol_type = other RNA
tgaggggcagagagcgaggct

SEQ ID NO: 5144 - RNA, 22 nt, Synthetic Construct
  source 1..22: mol_type = other RNA
cggaatcgctagtaatcgcgga

SEQ ID NO: 5145 - RNA, 22 nt, Synthetic Construct
  source 1..22: mol_type = other RNA
cggaatcgctagtaatcgcgga

SEQ ID NO: 5146 - RNA, 23 nt, Synthetic Construct
  source 1..23: mol_type = other RNA
agcaacattgtctgctgggtttc

SEQ ID NO: 5147 - RNA, 22 nt, Synthetic Construct
  source 1..22: mol_type = other RNA
ggtagcgaaattccttgtcggg

SEQ ID NO: 5148 - RNA, 22 nt, Synthetic Construct
  source 1..22: mol_type = other RNA
ggtagcgaaattccttgtcggg

SEQ ID NO: 5149 - RNA, 25 nt, Synthetic Construct
  source 1..25: mol_type = other RNA
ttgaggatatgaggtcgagacgaca

SEQ ID NO: 5150 - RNA, 25 nt, Synthetic Construct
  source 1..25: mol_type = other RNA
ttgaggatatgaggtcgagacgaca

SEQ ID NO: 5151 - RNA, 22 nt, Synthetic Construct
  source 1..22: mol_type = other RNA
tgaggtagtagtttgtggtgtt

SEQ ID NO: 5152 - RNA, 15 nt, Synthetic Construct
  source 1..15: mol_type = other RNA
tggccgtcgtcagct

SEQ ID NO: 5153 - RNA, 15 nt, Synthetic Construct
  source 1..15: mol_type = other RNA
tggccgtcgtcagct

SEQ ID NO: 5154 - RNA, 23 nt, Synthetic Construct
  source 1..23: mol_type = other RNA
tggtaatacgacgtactaagtgt

SEQ ID NO: 5155 - RNA, 23 nt, Synthetic Construct
  source 1..23: mol_type = other RNA
tggtaatacgacgtactaagtgt

SEQ ID NO: 5156 - RNA, 23 nt, Synthetic Construct
  source 1..23: mol_type = other RNA
tcctgtaccgagctgccccgagt

SEQ ID NO: 5157 - RNA, 23 nt, Synthetic Construct
  source 1..23: mol_type = other RNA
tcctgtaccgagctgccccgagt

SEQ ID NO: 5158 - RNA, 15 nt, Synthetic Construct
  source 1..15: mol_type = other RNA
acctgcatcgagggt

SEQ ID NO: 5159 - RNA, 15 nt, Synthetic Construct
  source 1..15: mol_type = other RNA
acctgcatcgagggt

SEQ ID NO: 5160 - RNA, 22 nt, Synthetic Construct
  source 1..22: mol_type = other RNA
gtaaacggcgggagtaactatg

SEQ ID NO: 5161 - RNA, 20 nt, Synthetic Construct
  source 1..20: mol_type = other RNA
tgaggtagtaggttgcatag

SEQ ID NO: 5162 - RNA, 20 nt, Synthetic Construct
  source 1..20: mol_type = other RNA
tgaggtagtaggttgcatag

SEQ ID NO: 5163 - RNA, 21 nt, Synthetic Construct
  source 1..21: mol_type = other RNA
tgaggaagtagattgtatagt

SEQ ID NO: 5164 - RNA, 22 nt, Synthetic Construct
  source 1..22: mol_type = other RNA
gtcagtttgtcaaataccccat

SEQ ID NO: 5165 - RNA, 22 nt, Synthetic Construct
  source 1..22: mol_type = other RNA
gtcagtttgtcaaataccccat

SEQ ID NO: 5166 - RNA, 17 nt, Synthetic Construct
  source 1..17: mol_type = other RNA
aagttgaccgcctgggg

SEQ ID NO: 5167 - RNA, 17 nt, Synthetic Construct
  source 1..17: mol_type = other RNA
aagttgaccgcctgggg

SEQ ID NO: 5168 - RNA, 22 nt, Synthetic Construct
  source 1..22: mol_type = other RNA
tgaggtagtaatttgtgctgtt

SEQ ID NO: 5169 - RNA, 23 nt, Synthetic Construct
  source 1..23: mol_type = other RNA
cgaggtagtaggttgtgtggttt

SEQ ID NO: 5170 - RNA, 20 nt, Synthetic Construct
  source 1..20: mol_type = other RNA
ctgacctatgaattgacagc

SEQ ID NO: 5171 - RNA, 20 nt, Synthetic Construct
  source 1..20: mol_type = other RNA
ctgacctatgaattgacagc

SEQ ID NO: 5172 - RNA, 18 nt, Synthetic Construct
  source 1..18: mol_type = other RNA
accaaggggtcgtgggtt

SEQ ID NO: 5173 - RNA, 18 nt, Synthetic Construct
  source 1..18: mol_type = other RNA
accaaggggtcgtgggtt

SEQ ID NO: 5174 - RNA, 22 nt, Synthetic Construct
  source 1..22: mol_type = other RNA
tgaggtagtaggttgtgtgatt

SEQ ID NO: 5175 - RNA, 22 nt, Synthetic Construct
  source 1..22: mol_type = other RNA
tgaggtagtaggttgtgtgatt

SEQ ID NO: 5176 - RNA, 25 nt, Synthetic Construct
  source 1..25: mol_type = other RNA
atgaggatatgagatcgagacgaca

SEQ ID NO: 5177 - RNA, 25 nt, Synthetic Construct
  source 1..25: mol_type = other RNA
atgaggatatgagatcgagacgaca

SEQ ID NO: 5178 - RNA, 16 nt, Synthetic Construct
  source 1..16: mol_type = other RNA
gccagcagccgcggta

SEQ ID NO: 5179 - RNA, 23 nt, Synthetic Construct
  source 1..23: mol_type = other RNA
taacagtctacagccatggtcgt

SEQ ID NO: 5180 - RNA, 21 nt, Synthetic Construct
  source 1..21: mol_type = other RNA
tgaggggcagagggcgagact

SEQ ID NO: 5181 - RNA, 21 nt, Synthetic Construct
  source 1..21: mol_type = other RNA
tgaggggcagagggcgagact

SEQ ID NO: 5182 - RNA, 23 nt, Synthetic Construct
  source 1..23: mol_type = other RNA
tggtaatacgacgtacttagcgt

SEQ ID NO: 5183 - RNA, 23 nt, Synthetic Construct
  source 1..23: mol_type = other RNA
tcggatccgtctgagcttggctt

SEQ ID NO: 5184 - RNA, 15 nt, Synthetic Construct
  source 1..15: mol_type = other RNA
atccctccgactccg

SEQ ID NO: 5185 - RNA, 15 nt, Synthetic Construct
  source 1..15: mol_type = other RNA
atccctccgactccg

SEQ ID NO: 5186 - RNA, 22 nt, Synthetic Construct
  source 1..22: mol_type = other RNA
gtcagtttgtcaaataccccat

SEQ ID NO: 5187 - RNA, 32 nt, Synthetic Construct; identical to SEQ ID NO: 2582
  source 1..32: mol_type = other RNA

SEQ ID NO: 5188 - RNA, 32 nt, Synthetic Construct; identical to SEQ ID NO: 2582
  source 1..32: mol_type = other RNA

SEQ ID NO: 5189 - RNA, 24 nt, Synthetic Construct
  source 1..24: mol_type = other RNA
ggctacattgtctgctgggtttct

SEQ ID NO: 5190 - RNA, 23 nt, Synthetic Construct
  source 1..23: mol_type = other RNA
tggtaatacgtcgtacttagtgt

SEQ ID NO: 5191 - RNA, 23 nt, Synthetic Construct
  source 1..23: mol_type = other RNA
tggtaatacgtcgtacttagtgt

SEQ ID NO: 5192 - RNA, 23 nt, Synthetic Construct
  source 1..23: mol_type = other RNA
tggtaatacgacgtacttagtgc

SEQ ID NO: 5193 - RNA, 23 nt, Synthetic Construct
  source 1..23: mol_type = other RNA
tggtaatacgacgtacttagtgc

SEQ ID NO: 5194 - RNA, 21 nt, Synthetic Construct
  source 1..21: mol_type = other RNA
cggtcccaagggtatggctgt

SEQ ID NO: 5195 - RNA, 21 nt, Synthetic Construct
  source 1..21: mol_type = other RNA
cggtcccaagggtatggctgt

SEQ ID NO: 5196 - RNA, 15 nt, Synthetic Construct
  source 1..15: mol_type = other RNA
gctttgatccggaga

SEQ ID NO: 5197 - RNA, 15 nt, Synthetic Construct
  source 1..15: mol_type = other RNA
gctttgatccggaga

SEQ ID NO: 5198 - RNA, 23 nt, Synthetic Construct
  source 1..23: mol_type = other RNA
ctcactgatcgagtcgtcctgcg

SEQ ID NO: 5199 - RNA, 23 nt, Synthetic Construct
  source 1..23: mol_type = other RNA
ctcactgatcgagtcgtcctgcg

SEQ ID NO: 5200 - RNA, 23 nt, Synthetic Construct
  source 1..23: mol_type = other RNA
tggtaatacgatgtacttagtgt

SEQ ID NO: 5201 - RNA, 22 nt, Synthetic Construct
  source 1..22: mol_type = other RNA
tgaggtagcaggttgtgtggtt

SEQ ID NO: 5202 - RNA, 21 nt, Synthetic Construct
  source 1..21: mol_type = other RNA
agccatcatttaaagaaagcg

SEQ ID NO: 5203 - RNA, 21 nt, Synthetic Construct
  source 1..21: mol_type = other RNA
agccatcatttaaagaaagcg

SEQ ID NO: 5204 - RNA, 22 nt, Synthetic Construct
  source 1..22: mol_type = other RNA
tgaggaagtagtttgtgctgtt

SEQ ID NO: 5205 - RNA, 29 nt, Synthetic Construct
  source 1..29: mol_type = other RNA
gtaatggcgggaactctggacagactgcc

SEQ ID NO: 5206 - RNA, 29 nt, Synthetic Construct
  source 1..29: mol_type = other RNA
gtaatggcgggaactctggacagactgcc

SEQ ID NO: 5207 - RNA, 22 nt, Synthetic Construct
  source 1..22: mol_type = other RNA
tggaatgtagagaagtatgtat

SEQ ID NO: 5208 - RNA, 22 nt, Synthetic Construct
  source 1..22: mol_type = other RNA
tggaatgtagagaagtatgtat

SEQ ID NO: 5209 - RNA, 21 nt, Synthetic Construct
  source 1..21: mol_type = other RNA
gactatagaactttccccctc

SEQ ID NO: 5210 - RNA, 21 nt, Synthetic Construct
  source 1..21: mol_type = other RNA
gactatagaactttccccctc

SEQ ID NO: 5211 - RNA, 22 nt, Synthetic Construct
  source 1..22: mol_type = other RNA
tggaatgtaaagaagtacgtat

SEQ ID NO: 5212 - RNA, 22 nt, Synthetic Construct
  source 1..22: mol_type = other RNA
tggaatgtaaagaagtacgtat

SEQ ID NO: 5213 - RNA, 30 nt, Synthetic Construct; identical to SEQ ID NO: 2274
  source 1..30: mol_type = other RNA

SEQ ID NO: 5214 - RNA, 30 nt, Synthetic Construct; identical to SEQ ID NO: 2274
  source 1..30: mol_type = other RNA

SEQ ID NO: 5215 - RNA, 22 nt, Synthetic Construct
  source 1..22: mol_type = other RNA
ttcaagtaatccaggataggtt

SEQ ID NO: 5216 - RNA, 23 nt, Synthetic Construct
  source 1..23: mol_type = other RNA
tggtaataagacgtacttagtgt

SEQ ID NO: 5217 - RNA, 22 nt, Synthetic Construct
  source 1..22: mol_type = other RNA
ccccttggggttgtaggaccac

SEQ ID NO: 5218 - RNA, 22 nt, Synthetic Construct
  source 1..22: mol_type = other RNA
ccccttggggttgtaggaccac

SEQ ID NO: 5219 - RNA, 19 nt, Synthetic Construct
  source 1..19: mol_type = other RNA
cctgtctgaatatgggggg

SEQ ID NO: 5220 - RNA, 23 nt, Synthetic Construct
  source 1..23: mol_type = other RNA
tcctgaactgagctgccccgaga

SEQ ID NO: 5221 - RNA, 23 nt, Synthetic Construct
  source 1..23: mol_type = other RNA
tcctgaactgagctgccccgaga

SEQ ID NO: 5222 - RNA, 23 nt, Synthetic Construct
  source 1..23: mol_type = other RNA
tcctgtaccgagctgccccgagt

SEQ ID NO: 5223 - RNA, 22 nt, Synthetic Construct
  source 1..22: mol_type = other RNA
ncgtaccgtgagtaataatgcg

SEQ ID NO: 5224 - RNA, 22 nt, Synthetic Construct
  source 1..22: mol_type = other RNA
tgaggtagtagtttgtgcggtt

SEQ ID NO: 5225 - RNA, 39 nt, Synthetic Construct; identical to SEQ ID NO: 4400
  source 1..39: mol_type = other RNA

SEQ ID NO: 5226 - RNA, 21 nt, Synthetic Construct
  source 1..21: mol_type = other RNA
tcctgtactgggctgccccga

SEQ ID NO: 5227 - RNA, 21 nt, Synthetic Construct
  source 1..21: mol_type = other RNA
tcctgtactgggctgccccga

SEQ ID NO: 5228 - RNA, 19 nt, Synthetic Construct
  source 1..19: mol_type = other RNA
tctaatgagactgccggtg

SEQ ID NO: 5229 - RNA, 19 nt, Synthetic Construct
  source 1..19: mol_type = other RNA
tctaatgagactgccggtg

SEQ ID NO: 5230 - RNA, 22 nt, Synthetic Construct
  source 1..22: mol_type = other RNA
gtcagtttgtcaaataccccat

SEQ ID NO: 5231 - RNA, 22 nt, Synthetic Construct
  source 1..22: mol_type = other RNA
gtcagtttgtcaaataccccat

SEQ ID NO: 5232 - RNA, 23 nt, Synthetic Construct
  source 1..23: mol_type = other RNA
tgaggggcagagagtgagacttt

SEQ ID NO: 5233 - RNA, 23 nt, Synthetic Construct
  source 1..23: mol_type = other RNA
tgaggggcagagagtgagacttt

SEQ ID NO: 5234 - RNA, 16 nt, Synthetic Construct
  source 1..16: mol_type = other RNA
ctgcctcagcgtcggt

SEQ ID NO: 5235 - RNA, 16 nt, Synthetic Construct
  source 1..16: mol_type = other RNA
ctgcctcagcgtcggt

SEQ ID NO: 5236 - RNA, 32 nt, Synthetic Construct; identical to SEQ ID NO: 2296
  source 1..32: mol_type = other RNA

SEQ ID NO: 5237 - RNA, 22 nt, Synthetic Construct
  source 1..22: mol_type = other RNA
tgaggtagtaggttgtatagtg

SEQ ID NO: 5238 - RNA, 18 nt, Synthetic Construct
  source 1..18: mol_type = other RNA
gtctgcctcagcgtcggt

SEQ ID NO: 5239 - RNA, 18 nt, Synthetic Construct
  source 1..18: mol_type = other RNA
gtctgcctcagcgtcggt

SEQ ID NO: 5240 - RNA, 28 nt, Synthetic Construct
  source 1..28: mol_type = other RNA
ccgtgtgaaagtaggtcatcgtcaggct

SEQ ID NO: 5241 - RNA, 28 nt, Synthetic Construct
  source 1..28: mol_type = other RNA
ccgtgtgaaagtaggtcatcgtcaggct

SEQ ID NO: 5242 - RNA, 23 nt, Synthetic Construct
  source 1..23: mol_type = other RNA
tggtaatacgacgtacttagtga

SEQ ID NO: 5243 - RNA, 23 nt, Synthetic Construct
  source 1..23: mol_type = other RNA
tggtaatacgacgtacttagtga

SEQ ID NO: 5244 - RNA, 20 nt, Synthetic Construct
  source 1..20: mol_type = other RNA
gcatggccgttcttagttgg

SEQ ID NO: 5245 - RNA, 27 nt, Synthetic Construct
  source 1..27: mol_type = other RNA
tcctgagtagctcagcggcagagcggg

SEQ ID NO: 5246 - RNA, 27 nt, Synthetic Construct
  source 1..27: mol_type = other RNA
tcctgagtagctcagcggcagagcggg

SEQ ID NO: 5247 - RNA, 24 nt, Synthetic Construct
  source 1..24: mol_type = other RNA
tcggatccgtctgagcttggcttt

SEQ ID NO: 5248 - RNA, 23 nt, Synthetic Construct
  source 1..23: mol_type = other RNA
tgaagggcagagagcgagacttt

SEQ ID NO: 5249 - RNA, 23 nt, Synthetic Construct
  source 1..23: mol_type = other RNA
tgaagggcagagagcgagacttt

SEQ ID NO: 5250 - RNA, 15 nt, Synthetic Construct
  source 1..15: mol_type = other RNA
gtcgacgtatagggt

SEQ ID NO: 5251 - RNA, 22 nt, Synthetic Construct
  source 1..22: mol_type = other RNA
tgaggtagtaaattgtatagtt

SEQ ID NO: 5252 - RNA, 23 nt, Synthetic Construct
  source 1..23: mol_type = other RNA
tgtcagtttgtcaaataccccaa

SEQ ID NO: 5253 - RNA, 23 nt, Synthetic Construct
  source 1..23: mol_type = other RNA
tgtcagtttgtcaaataccccaa

SEQ ID NO: 5254 - RNA, 21 nt, Synthetic Construct
  source 1..21: mol_type = other RNA
gctttgatccggagatttccg

SEQ ID NO: 5255 - RNA, 21 nt, Synthetic Construct
  source 1..21: mol_type = other RNA
gctttgatccggagatttccg

SEQ ID NO: 5256 - RNA, 22 nt, Synthetic Construct
  source 1..22: mol_type = other RNA
tcagtgcactacagagctttgt

SEQ ID NO: 5257 - RNA, 15 nt, Synthetic Construct
  source 1..15: mol_type = other RNA
gctagtaatcgcgga

SEQ ID NO: 5258 - RNA, 15 nt, Synthetic Construct
  source 1..15: mol_type = other RNA
gctagtaatcgcgga

SEQ ID NO: 5259 - RNA, 22 nt, Synthetic Construct
  source 1..22: mol_type = other RNA
tctttgttcgattccgttgagt

SEQ ID NO: 5260 - RNA, 22 nt, Synthetic Construct
  source 1..22: mol_type = other RNA
tctttgttcgattccgttgagt

SEQ ID NO: 5261 - RNA, 23 nt, Synthetic Construct
  source 1..23: mol_type = other RNA
tggcaatacgacgtacttagtgt

SEQ ID NO: 5262 - RNA, 23 nt, Synthetic Construct
  source 1..23: mol_type = other RNA
tggcaatacgacgtacttagtgt

SEQ ID NO: 5263 - RNA, 17 nt, Synthetic Construct
  source 1..17: mol_type = other RNA
acagtcaggatgttggc

SEQ ID NO: 5264 - RNA, 17 nt, Synthetic Construct
  source 1..17: mol_type = other RNA
acagtcaggatgttggc

SEQ ID NO: 5265 - RNA, 20 nt, Synthetic Construct
  source 1..20: mol_type = other RNA
tgaggaagtaggttgtgtgg

SEQ ID NO: 5266 - RNA, 20 nt, Synthetic Construct
  source 1..20: mol_type = other RNA
tgaggaagtaggttgtgtgg

SEQ ID NO: 5267 - RNA, 22 nt, Synthetic Construct
  source 1..22: mol_type = other RNA
tgaggtagtaggttgtgtagtt

SEQ ID NO: 5268 - RNA, 21 nt, Synthetic Construct
  source 1..21: mol_type = other RNA
tcctgaactgagctgccccga

SEQ ID NO: 5269 - RNA, 21 nt, Synthetic Construct
  source 1..21: mol_type = other RNA
tcctgaactgagctgccccga

SEQ ID NO: 5270 - RNA, 16 nt, Synthetic Construct
  source 1..16: mol_type = other RNA
caggacggtggccatg

SEQ ID NO: 5271 - RNA, 16 nt, Synthetic Construct
  source 1..16: mol_type = other RNA
caggacggtggccatg

SEQ ID NO: 5272 - RNA, 22 nt, Synthetic Construct
  source 1..22: mol_type = other RNA
tcctgtactgagccgccccgag

SEQ ID NO: 5273 - RNA, 22 nt, Synthetic Construct
  source 1..22: mol_type = other RNA
tcctgtactgagccgccccgag

SEQ ID NO: 5274 - RNA, 18 nt, Synthetic Construct
  source 1..18: mol_type = other RNA
ccaaggggtcgtgggttc

SEQ ID NO: 5275 - RNA, 18 nt, Synthetic Construct
  source 1..18: mol_type = other RNA
ccaaggggtcgtgggttc

SEQ ID NO: 5276 - RNA, 30 nt, Synthetic Construct; identical to SEQ ID NO: 2308
  source 1..30: mol_type = other RNA

SEQ ID NO: 5277 - RNA, 21 nt, Synthetic Construct
  source 1..21: mol_type = other RNA
tgaggtagtagcttgtgctgt

SEQ ID NO: 5278 - RNA, 22 nt, Synthetic Construct
  source 1..22: mol_type = other RNA
tgaggtagtagtttgtgcagtt

SEQ ID NO: 5279 - RNA, 19 nt, Synthetic Construct
  source 1..19: mol_type = other RNA
ccagtaaacggcggccgta

SEQ ID NO: 5280 - RNA, 19 nt, Synthetic Construct
  source 1..19: mol_type = other RNA
ccagtaaacggcggccgta

SEQ ID NO: 5281 - RNA, 24 nt, Synthetic Construct
  source 1..24: mol_type = other RNA
gctcactgatcgagtcgtcctgcg

SEQ ID NO: 5282 - RNA, 24 nt, Synthetic Construct
  source 1..24: mol_type = other RNA
gctcactgatcgagtcgtcctgcg

SEQ ID NO: 5283 - RNA, 18 nt, Synthetic Construct
  source 1..18: mol_type = other RNA
gcgaaattccttgtcggg

SEQ ID NO: 5284 - RNA, 21 nt, Synthetic Construct
  source 1..21: mol_type = other RNA
atcacattgccagggattacc

SEQ ID NO: 5285 - RNA, 19 nt, Synthetic Construct
  source 1..19: mol_type = other RNA
tcagtagctcgaggaaaag

SEQ ID NO: 5286 - RNA, 19 nt, Synthetic Construct
  source 1..19: mol_type = other RNA
tcagtagctcgaggaaaag

SEQ ID NO: 5287 - RNA, 25 nt, Synthetic Construct
  source 1..25: mol_type = other RNA
ttggggatatgagatcgagacgaca

SEQ ID NO: 5288 - RNA, 25 nt, Synthetic Construct
  source 1..25: mol_type = other RNA
ttggggatatgagatcgagacgaca

SEQ ID NO: 5289 - RNA, 21 nt, Synthetic Construct
  source 1..21: mol_type = other RNA
tcctgtactgagctgccccaa

SEQ ID NO: 5290 - RNA, 26 nt, Synthetic Construct
  source 1..26: mol_type = other RNA
gagcagctaataccgcatacgacctg

SEQ ID NO: 5291 - RNA, 22 nt, Synthetic Construct
  source 1..22: mol_type = other RNA
tggaatgtaaagaagtatgtac

SEQ ID NO: 5292 - RNA, 31 nt, Synthetic Construct; identical to SEQ ID NO: 2295
  source 1..31: mol_type = other RNA

SEQ ID NO: 5293 - RNA, 30 nt, Synthetic Construct; identical to SEQ ID NO: 1641
  source 1..30: mol_type = other RNA

SEQ ID NO: 5294 - RNA, 30 nt, Synthetic Construct; identical to SEQ ID NO: 1641
  source 1..30: mol_type = other RNA

SEQ ID NO: 5295 - RNA, 23 nt, Synthetic Construct
  source 1..23: mol_type = other RNA
tgaggtagtaggttgtgcggttt

SEQ ID NO: 5296 - RNA, 35 nt, Synthetic Construct; identical to SEQ ID NO: 2762
  source 1..35: mol_type = other RNA

SEQ ID NO: 5297 - RNA, 35 nt, Synthetic Construct; identical to SEQ ID NO: 2762
  source 1..35: mol_type = other RNA

SEQ ID NO: 5298 - RNA, 17 nt, Synthetic Construct
  source 1..17: mol_type = other RNA
cagagacgagtcgacca

SEQ ID NO: 5299 - RNA, 17 nt, Synthetic Construct
  source 1..17: mol_type = other RNA
cagagacgagtcgacca

SEQ ID NO: 5300 - RNA, 23 nt, Synthetic Construct
  source 1..23: mol_type = other RNA
cggtaatacgacgtacttagtgt

SEQ ID NO: 5301 - RNA, 21 nt, Synthetic Construct
  source 1..21: mol_type = other RNA
caaagtgctgttcgtgcaggt

SEQ ID NO: 5302 - RNA, 21 nt, Synthetic Construct
  source 1..21: mol_type = other RNA
caaagtgctgttcgtgcaggt

SEQ ID NO: 5303 - RNA, 23 nt, Synthetic Construct
  source 1..23: mol_type = other RNA
tcctgtactgagctgccccggga

SEQ ID NO: 5304 - RNA, 23 nt, Synthetic Construct
  source 1..23: mol_type = other RNA
tcctgtactgagctgccccggga

SEQ ID NO: 5305 - RNA, 23 nt, Synthetic Construct
  source 1..23: mol_type = other RNA
tctttggttatctagctgtatga

SEQ ID NO: 5306 - RNA, 23 nt, Synthetic Construct
  source 1..23: mol_type = other RNA
tctttggttatctagctgtatga

SEQ ID NO: 5307 - RNA, 23 nt, Synthetic Construct
  source 1..23: mol_type = other RNA
tggcagtgtcttagctggttgtt

SEQ ID NO: 5308 - RNA, 20 nt, Synthetic Construct
  source 1..20: mol_type = other RNA
cataaagtagaaagcactac

SEQ ID NO: 5309 - RNA, 20 nt, Synthetic Construct
  source 1..20: mol_type = other RNA
cataaagtagaaagcactac

SEQ ID NO: 5310 - RNA, 30 nt, Synthetic Construct; identical to SEQ ID NO: 2840
  source 1..30: mol_type = other RNA

SEQ ID NO: 5311 - RNA, 22 nt, Synthetic Construct
  source 1..22: mol_type = other RNA
tggaatgcaaagaagtatgtat

SEQ ID NO: 5312 - RNA, 22 nt, Synthetic Construct
  source 1..22: mol_type = other RNA
tggaatgcaaagaagtatgtat

SEQ ID NO: 5313 - RNA, 15 nt, Synthetic Construct
  source 1..15: mol_type = other RNA
ccgcttttgtcaggg

SEQ ID NO: 5314 - RNA, 15 nt, Synthetic Construct
  source 1..15: mol_type = other RNA
ccgcttttgtcaggg

SEQ ID NO: 5315 - RNA, 15 nt, Synthetic Construct
  source 1..15: mol_type = other RNA
cgatatggcatgaga

SEQ ID NO: 5316 - RNA, 15 nt, Synthetic Construct
  source 1..15: mol_type = other RNA
cgatatggcatgaga

SEQ ID NO: 5317 - RNA, 20 nt, Synthetic Construct
  source 1..20: mol_type = other RNA
tgaggtagtaggtcgtatag

SEQ ID NO: 5318 - RNA, 20 nt, Synthetic Construct
  source 1..20: mol_type = other RNA
tgaggtagtaggtcgtatag

SEQ ID NO: 5319 - RNA, 16 nt, Synthetic Construct
  source 1..16: mol_type = other RNA
gcgtagatatgcggag

SEQ ID NO: 5320 - RNA, 16 nt, Synthetic Construct
  source 1..16: mol_type = other RNA
gcgtagatatgcggag

SEQ ID NO: 5321 - RNA, 23 nt, Synthetic Construct
  source 1..23: mol_type = other RNA
tcggatccgtctgagcttggctt

SEQ ID NO: 5322 - RNA, 23 nt, Synthetic Construct
  source 1..23: mol_type = other RNA
tcggatccgtctgagcttggctt

SEQ ID NO: 5323 - RNA, 22 nt, Synthetic Construct
  source 1..22: mol_type = other RNA
tgaggtagtagattgtgtggtt

SEQ ID NO: 5324 - RNA, 22 nt, Synthetic Construct
  source 1..22: mol_type = other RNA
tgaggtagtagattgtgtggtt

SEQ ID NO: 5325 - RNA, 21 nt, Synthetic Construct
  source 1..21: mol_type = other RNA
tggagtgtgacaatggtgttc

SEQ ID NO: 5326 - RNA, 21 nt, Synthetic Construct
  source 1..21: mol_type = other RNA
tggagtgtgacaatggtgttc

SEQ ID NO: 5327 - RNA, 17 nt, Synthetic Construct
  source 1..17: mol_type = other RNA
caggacggtggccatgg

SEQ ID NO: 5328 - RNA, 17 nt, Synthetic Construct
  source 1..17: mol_type = other RNA
caggacggtggccatgg

SEQ ID NO: 5329 - RNA, 33 nt, Synthetic Construct; identical to SEQ ID NO: 2556
  source 1..33: mol_type = other RNA

SEQ ID NO: 5330 - RNA, 17 nt, Synthetic Construct
  source 1..17: mol_type = other RNA
gggaacgtgagctgggt

SEQ ID NO: 5331 - RNA, 17 nt, Synthetic Construct
  source 1..17: mol_type = other RNA
gggaacgtgagctgggt

SEQ ID NO: 5332 - RNA, 23 nt, Synthetic Construct
  source 1..23: mol_type = other RNA
tagcagcacgtaaatattggcgt

SEQ ID NO: 5333 - RNA, 22 nt, Synthetic Construct
  source 1..22: mol_type = other RNA
tgaggtagtaggttatgtggtt

SEQ ID NO: 5334 - RNA, 19 nt, Synthetic Construct
  source 1..19: mol_type = other RNA
ctgatcgagtcgtcctgcg

SEQ ID NO: 5335 - RNA, 23 nt, Synthetic Construct
  source 1..23: mol_type = other RNA
atatcggaacgtgcccagtcgtg

SEQ ID NO: 5336 - RNA, 17 nt, Synthetic Construct
  source 1..17: mol_type = other RNA
tggccgtcgtcagctcg

SEQ ID NO: 5337 - RNA, 30 nt, Synthetic Construct; identical to SEQ ID NO: 768
  source 1..30: mol_type = other RNA

SEQ ID NO: 5338 - RNA, 30 nt, Synthetic Construct; identical to SEQ ID NO: 768
  source 1..30: mol_type = other RNA

SEQ ID NO: 5339 - RNA, 22 nt, Synthetic Construct
  source 1..22: mol_type = other RNA
tatcgcacttgtcccggcctgt

SEQ ID NO: 5340 - RNA, 22 nt, Synthetic Construct
  source 1..22: mol_type = other RNA
tgaggtagtagattgtatggtt

SEQ ID NO: 5341 - RNA, 22 nt, Synthetic Construct
  source 1..22: mol_type = other RNA
tgaggtagtagattgtatggtt

SEQ ID NO: 5342 - RNA, 22 nt, Synthetic Construct
  source 1..22: mol_type = other RNA
tgaggtagtagattgtatagtc

SEQ ID NO: 5343 - RNA, 15 nt, Synthetic Construct
  source 1..15: mol_type = other RNA
catgccgcgtgcggg

SEQ ID NO: 5344 - RNA, 23 nt, Synthetic Construct
  source 1..23: mol_type = other RNA
tggtaatgcgacgtacttagtgt

SEQ ID NO: 5345 - RNA, 23 nt, Synthetic Construct
  source 1..23: mol_type = other RNA
tggtaatgcgacgtacttagtgt

SEQ ID NO: 5346 - RNA, 23 nt, Synthetic Construct
  source 1..23: mol_type = other RNA
tggtaatacgacgtacttagagt

SEQ ID NO: 5347 - RNA, 22 nt, Synthetic Construct
  source 1..22: mol_type = other RNA
tcactgatcgagtcgtcctgcg

SEQ ID NO: 5348 - RNA, 22 nt, Synthetic Construct
  source 1..22: mol_type = other RNA
tcactgatcgagtcgtcctgcg

SEQ ID NO: 5349 - RNA, 25 nt, Synthetic Construct
  source 1..25: mol_type = other RNA
ttgcagctgcctgggagtgacttct

SEQ ID NO: 5350 - RNA, 25 nt, Synthetic Construct
  source 1..25: mol_type = other RNA
ttgcagctgcctgggagtgacttct

SEQ ID NO: 5351 - RNA, 22 nt, Synthetic Construct
  source 1..22: mol_type = other RNA
tagcagcacgtgaatattggcg

SEQ ID NO: 5352 - RNA, 22 nt, Synthetic Construct
  source 1..22: mol_type = other RNA
tagcagcacgtgaatattggcg

SEQ ID NO: 5353 - RNA, 31 nt, Synthetic Construct; identical to SEQ ID NO: 2507
  source 1..31: mol_type = other RNA

SEQ ID NO: 5354 - RNA, 31 nt, Synthetic Construct; identical to SEQ ID NO: 2507
  source 1..31: mol_type = other RNA

SEQ ID NO: 5355 - RNA, 15 nt, Synthetic Construct
  source 1..15: mol_type = other RNA
gagtagggcgggaca

SEQ ID NO: 5356 - RNA, 15 nt, Synthetic Construct
  source 1..15: mol_type = other RNA
gagtagggcgggaca

SEQ ID NO: 5357 - RNA, 20 nt, Synthetic Construct
  source 1..20: mol_type = other RNA
tgaggcagtaggttgtgtgg

SEQ ID NO: 5358 - RNA, 20 nt, Synthetic Construct
  source 1..20: mol_type = other RNA
tgaggcagtaggttgtgtgg

SEQ ID NO: 5359 - RNA, 20 nt, Synthetic Construct
  source 1..20: mol_type = other RNA
tgaggtagtaggctgtatag

SEQ ID NO: 5360 - RNA, 20 nt, Synthetic Construct
  source 1..20: mol_type = other RNA
tgaggtagtaggctgtatag

SEQ ID NO: 5361 - RNA, 19 nt, Synthetic Construct
  source 1..19: mol_type = other RNA
gtggtacgatcatacctgg

SEQ ID NO: 5362 - RNA, 19 nt, Synthetic Construct
  source 1..19: mol_type = other RNA
gtggtacgatcatacctgg

SEQ ID NO: 5363 - RNA, 34 nt, Synthetic Construct; identical to SEQ ID NO: 2265
  source 1..34: mol_type = other RNA

SEQ ID NO: 5364 - RNA, 23 nt, Synthetic Construct
  source 1..23: mol_type = other RNA
tccctggtggtctagtggttagg

SEQ ID NO: 5365 - RNA, 23 nt, Synthetic Construct
  source 1..23: mol_type = other RNA
tccctggtggtctagtggttagg

SEQ ID NO: 5366 - RNA, 19 nt, Synthetic Construct
  source 1..19: mol_type = other RNA
cctgtaccgatcaatagtg

SEQ ID NO: 5367 - RNA, 19 nt, Synthetic Construct
  source 1..19: mol_type = other RNA
cctgtaccgatcaatagtg

SEQ ID NO: 5368 - RNA, 23 nt, Synthetic Construct
  source 1..23: mol_type = other RNA
tggtagtacgacgtacttagtgt

SEQ ID NO: 5369 - RNA, 23 nt, Synthetic Construct
  source 1..23: mol_type = other RNA
tggtagtacgacgtacttagtgt

SEQ ID NO: 5370 - RNA, 22 nt, Synthetic Construct
  source 1..22: mol_type = other RNA
aaaccgttaccattactgagtt

SEQ ID NO: 5371 - RNA, 22 nt, Synthetic Construct
  source 1..22: mol_type = other RNA
aaaccgttaccattactgagtt

SEQ ID NO: 5372 - RNA, 22 nt, Synthetic Construct
  source 1..22: mol_type = other RNA
tgtagtgtttcctactttatgg

SEQ ID NO: 5373 - RNA, 22 nt, Synthetic Construct
  source 1..22: mol_type = other RNA
taaggtagtaggttgtatagtt

SEQ ID NO: 5374 - RNA, 22 nt, Synthetic Construct
  source 1..22: mol_type = other RNA
tgaggtagtaggttgtgtggct

SEQ ID NO: 5375 - RNA, 34 nt, Synthetic Construct; identical to SEQ ID NO: 2291
  source 1..34: mol_type = other RNA

SEQ ID NO: 5376 - RNA, 34 nt, Synthetic Construct; identical to SEQ ID NO: 2291
  source 1..34: mol_type = other RNA

SEQ ID NO: 5377 - RNA, 23 nt, Synthetic Construct
  source 1..23: mol_type = other RNA
tcctgtgctgagctgccccgaga

SEQ ID NO: 5378 - RNA, 23 nt, Synthetic Construct
  source 1..23: mol_type = other RNA
tcctgtgctgagctgccccgaga

SEQ ID NO: 5379 - RNA, 22 nt, Synthetic Construct
  source 1..22: mol_type = other RNA
cccataaagtagaaagcactac

SEQ ID NO: 5380 - RNA, 22 nt, Synthetic Construct
  source 1..22: mol_type = other RNA
cccataaagtagaaagcactac

SEQ ID NO: 5381 - RNA, 15 nt, Synthetic Construct
  source 1..15: mol_type = other RNA
gtccggcccgaggca

SEQ ID NO: 5382 - RNA, 25 nt, Synthetic Construct
  source 1..25: mol_type = other RNA
ttgaggatatgagatcgagacgacg

SEQ ID NO: 5383 - RNA, 25 nt, Synthetic Construct
  source 1..25: mol_type = other RNA
ttgaggatatgagatcgagacgacg

SEQ ID NO: 5384 - RNA, 21 nt, Synthetic Construct
  source 1..21: mol_type = other RNA
ttcacagtggctaagttctga

SEQ ID NO: 5385 - RNA, 18 nt, Synthetic Construct
  source 1..18: mol_type = other RNA
atagggaacgtgagctgg

SEQ ID NO: 5386 - RNA, 18 nt, Synthetic Construct
  source 1..18: mol_type = other RNA
atagggaacgtgagctgg

SEQ ID NO: 5387 - RNA, 34 nt, Synthetic Construct; identical to SEQ ID NO: 2553
  source 1..34: mol_type = other RNA

SEQ ID NO: 5388 - RNA, 34 nt, Synthetic Construct; identical to SEQ ID NO: 2553
  source 1..34: mol_type = other RNA

SEQ ID NO: 5389 - RNA, 20 nt, Synthetic Construct
  source 1..20: mol_type = other RNA
tgaggtagtagtttgtacag

SEQ ID NO: 5390 - RNA, 20 nt, Synthetic Construct
  source 1..20: mol_type = other RNA
tgaggtagtagtttgtacag

SEQ ID NO: 5391 - RNA, 24 nt, Synthetic Construct
  source 1..24: mol_type = other RNA
gcagctaataccgcatacgacctg

SEQ ID NO: 5392 - RNA, 23 nt, Synthetic Construct
  source 1..23: mol_type = other RNA
caaagtgcttacagtgcaggtag

SEQ ID NO: 5393 - RNA, 18 nt, Synthetic Construct
  source 1..18: mol_type = other RNA
aagcggtggatgatgtgg

SEQ ID NO: 5394 - RNA, 18 nt, Synthetic Construct
  source 1..18: mol_type = other RNA
aagcggtggatgatgtgg

SEQ ID NO: 5395 - RNA, 19 nt, Synthetic Construct
  source 1..19: mol_type = other RNA
atcacattgccagggattt

SEQ ID NO: 5396 - RNA, 19 nt, Synthetic Construct
  source 1..19: mol_type = other RNA
atcacattgccagggattt

SEQ ID NO: 5397 - RNA, 22 nt, Synthetic Construct
  source 1..22: mol_type = other RNA
ccccttggggttgtaggaccac

SEQ ID NO: 5398 - RNA, 22 nt, Synthetic Construct
  source 1..22: mol_type = other RNA
ccccttggggttgtaggaccac

SEQ ID NO: 5399 - RNA, 16 nt, Synthetic Construct
  source 1..16: mol_type = other RNA
gtcaacggccatacca

SEQ ID NO: 5400 - RNA, 19 nt, Synthetic Construct
  source 1..19: mol_type = other RNA
agtcgacgtatagggtgtg

SEQ ID NO: 5401 - RNA, 19 nt, Synthetic Construct
  source 1..19: mol_type = other RNA
agtcgacgtatagggtgtg

SEQ ID NO: 5402 - RNA, 23 nt, Synthetic Construct
  source 1..23: mol_type = other RNA
caaagtgctgtttgtgcaggtag

SEQ ID NO: 5403 - RNA, 31 nt, Synthetic Construct; identical to SEQ ID NO: 2263
  source 1..31: mol_type = other RNA

SEQ ID NO: 5404 - RNA, 31 nt, Synthetic Construct; identical to SEQ ID NO: 2263
  source 1..31: mol_type = other RNA

SEQ ID NO: 5405 - RNA, 22 nt, Synthetic Construct
  source 1..22: mol_type = other RNA
tattgcacctgtcccggcctgt

SEQ ID NO: 5406 - RNA, 22 nt, Synthetic Construct
  source 1..22: mol_type = other RNA
tgtgcaaatctatgcaaaactg

SEQ ID NO: 5407 - RNA, 22 nt, Synthetic Construct
  source 1..22: mol_type = other RNA
tgtgcaaatctatgcaaaactg

SEQ ID NO: 5408 - RNA, 16 nt, Synthetic Construct
  source 1..16: mol_type = other RNA
gagctgtggatagggg

SEQ ID NO: 5409 - RNA, 29 nt, Synthetic Construct
  source 1..29: mol_type = other RNA
ccccccccactgctaaatttgactggctt

SEQ ID NO: 5410 - RNA, 22 nt, Synthetic Construct
  source 1..22: mol_type = other RNA
taggtagtttcctgttgttggg

SEQ ID NO: 5411 - RNA, 23 nt, Synthetic Construct
  source 1..23: mol_type = other RNA
tggtaatacaacgtacttagtgt

SEQ ID NO: 5412 - RNA, 23 nt, Synthetic Construct
  source 1..23: mol_type = other RNA
tggtaatacaacgtacttagtgt

SEQ ID NO: 5413 - RNA, 22 nt, Synthetic Construct
  source 1..22: mol_type = other RNA
tcagcgccgatgatagtgcgga

SEQ ID NO: 5414 - RNA, 21 nt, Synthetic Construct
  source 1..21: mol_type = other RNA
tgaagtagtaggttgtgtggt

SEQ ID NO: 5415 - RNA, 21 nt, Synthetic Construct
  source 1..21: mol_type = other RNA
tgaagtagtaggttgtgtggt

SEQ ID NO: 5416 - RNA, 20 nt, Synthetic Construct
  source 1..20: mol_type = other RNA
tgagatgaagcactgtagct

SEQ ID NO: 5417 - RNA, 20 nt, Synthetic Construct
  source 1..20: mol_type = other RNA
tgaggtagtaggctgtatag

SEQ ID NO: 5418 - RNA, 20 nt, Synthetic Construct
  source 1..20: mol_type = other RNA
tgaggtagtaggctgtatag

SEQ ID NO: 5419 - RNA, 35 nt, Synthetic Construct; identical to SEQ ID NO: 2615
  source 1..35: mol_type = other RNA

SEQ ID NO: 5420 - RNA, 35 nt, Synthetic Construct; identical to SEQ ID NO: 2615
  source 1..35: mol_type = other RNA

SEQ ID NO: 5421 - RNA, 27 nt, Synthetic Construct
  source 1..27: mol_type = other RNA
gcccaggtggcggaattggtagacgca

SEQ ID NO: 5422 - RNA, 27 nt, Synthetic Construct
  source 1..27: mol_type = other RNA
gcccaggtggcggaattggtagacgca

SEQ ID NO: 5423 - RNA, 24 nt, Synthetic Construct
  source 1..24: mol_type = other RNA
tatatcggaacgtgcccagtcgtg

SEQ ID NO: 5424 - RNA, 24 nt, Synthetic Construct
  source 1..24: mol_type = other RNA
tgtaaacatccccgactggaagcc

SEQ ID NO: 5425 - RNA, 24 nt, Synthetic Construct
  source 1..24: mol_type = other RNA
tgtaaacatccccgactggaagcc

SEQ ID NO: 5426 - RNA, 27 nt, Synthetic Construct
  source 1..27: mol_type = other RNA
ccgtgtgaaagtaggtcatcgtcaggc

SEQ ID NO: 5427 - RNA, 18 nt, Synthetic Construct
  source 1..18: mol_type = other RNA
ctaatgagactgccggtg

SEQ ID NO: 5428 - RNA, 18 nt, Synthetic Construct
  source 1..18: mol_type = other RNA
ctaatgagactgccggtg

SEQ ID NO: 5429 - RNA, 22 nt, Synthetic Construct
  source 1..22: mol_type = other RNA
tcctgtgctgagctgccccgag

SEQ ID NO: 5430 - RNA, 22 nt, Synthetic Construct
  source 1..22: mol_type = other RNA
tcctgtgctgagctgccccgag

SEQ ID NO: 5431 - RNA, 23 nt, Synthetic Construct
  source 1..23: mol_type = other RNA
tggtaatacgacgtacctagtgt

SEQ ID NO: 5432 - RNA, 21 nt, Synthetic Construct
  source 1..21: mol_type = other RNA
tcctgtactgagccgccccga

SEQ ID NO: 5433 - RNA, 21 nt, Synthetic Construct
  source 1..21: mol_type = other RNA
tcctgtactgagccgccccga

SEQ ID NO: 5434 - RNA, 30 nt, Synthetic Construct; identical to SEQ ID NO: 751
  source 1..30: mol_type = other RNA

SEQ ID NO: 5435 - RNA, 30 nt, Synthetic Construct; identical to SEQ ID NO: 751
  source 1..30: mol_type = other RNA

SEQ ID NO: 5436 - RNA, 20 nt, Synthetic Construct
  source 1..20: mol_type = other RNA
tgaggtagaaggttgtgtgg

SEQ ID NO: 5437 - RNA, 20 nt, Synthetic Construct
  source 1..20: mol_type = other RNA
tgaggtagaaggttgtgtgg

SEQ ID NO: 5438 - RNA, 30 nt, Synthetic Construct; identical to SEQ ID NO: 2353
  source 1..30: mol_type = other RNA

SEQ ID NO: 5439 - RNA, 30 nt, Synthetic Construct; identical to SEQ ID NO: 2353
  source 1..30: mol_type = other RNA

SEQ ID NO: 5440 - RNA, 16 nt, Synthetic Construct
  source 1..16: mol_type = other RNA
gtctacagccatacca

SEQ ID NO: 5441 - RNA, 23 nt, Synthetic Construct
  source 1..23: mol_type = other RNA
gggtaatacgacgtacttagtgt

SEQ ID NO: 5442 - RNA, 23 nt, Synthetic Construct
  source 1..23: mol_type = other RNA
gggtaatacgacgtacttagtgt

SEQ ID NO: 5443 - RNA, 27 nt, Synthetic Construct
  source 1..27: mol_type = other RNA
ccccccactgctaagtttgactggctt

SEQ ID NO: 5444 - RNA, 22 nt, Synthetic Construct
  source 1..22: mol_type = other RNA
gcactctaatgagactgccggt

SEQ ID NO: 5445 - RNA, 16 nt, Synthetic Construct
  source 1..16: mol_type = other RNA
atctacggccatacca

SEQ ID NO: 5446 - RNA, 18 nt, Synthetic Construct
  source 1..18: mol_type = other RNA
cctgtaccgatcaatagt

SEQ ID NO: 5447 - RNA, 18 nt, Synthetic Construct
  source 1..18: mol_type = other RNA
cctgtaccgatcaatagt

SEQ ID NO: 5448 - RNA, 20 nt, Synthetic Construct
  source 1..20: mol_type = other RNA
gtcagtttgtcaaatacccc

SEQ ID NO: 5449 - RNA, 20 nt, Synthetic Construct
  source 1..20: mol_type = other RNA
gtcagtttgtcaaatacccc

SEQ ID NO: 5450 - RNA, 22 nt, Synthetic Construct
  source 1..22: mol_type = other RNA
tcctgtaccgagctgccccgag

SEQ ID NO: 5451 - RNA, 22 nt, Synthetic Construct
  source 1..22: mol_type = other RNA
tcctgtaccgagctgccccgag

SEQ ID NO: 5452 - RNA, 21 nt, Synthetic Construct
  source 1..21: mol_type = other RNA
tggagagtgacaatggtgttt

SEQ ID NO: 5453 - RNA, 21 nt, Synthetic Construct
  source 1..21: mol_type = other RNA
tggagagtgacaatggtgttt

SEQ ID NO: 5454 - RNA, 22 nt, Synthetic Construct
  source 1..22: mol_type = other RNA
tcgtaccgtgagtaataatgca

SEQ ID NO: 5455 - RNA, 28 nt, Synthetic Construct
  source 1..28: mol_type = other RNA
tgttggttcaagcgtgtagtcgtgctct

SEQ ID NO: 5456 - RNA, 28 nt, Synthetic Construct
  source 1..28: mol_type = other RNA
tgttggttcaagcgtgtagtcgtgctct

SEQ ID NO: 5457 - RNA, 20 nt, Synthetic Construct
  source 1..20: mol_type = other RNA
tggggtagtaggttgtatag

SEQ ID NO: 5458 - RNA, 20 nt, Synthetic Construct
  source 1..20: mol_type = other RNA
tggggtagtaggttgtatag

SEQ ID NO: 5459 - RNA, 34 nt, Synthetic Construct; identical to SEQ ID NO: 2183
  source 1..34: mol_type = other RNA

SEQ ID NO: 5460 - RNA, 34 nt, Synthetic Construct; identical to SEQ ID NO: 2183
  source 1..34: mol_type = other RNA

SEQ ID NO: 5461 - RNA, 23 nt, Synthetic Construct
  source 1..23: mol_type = other RNA
tggtaatacgacgtacttagtat

SEQ ID NO: 5462 - RNA, 19 nt, Synthetic Construct
  source 1..19: mol_type = other RNA
ccttggggttgtaggacca

SEQ ID NO: 5463 - RNA, 19 nt, Synthetic Construct
  source 1..19: mol_type = other RNA
ccttggggttgtaggacca

SEQ ID NO: 5464 - RNA, 23 nt, Synthetic Construct
  source 1..23: mol_type = other RNA
tcctgaactgagctgccccgaga

SEQ ID NO: 5465 - RNA, 23 nt, Synthetic Construct
  source 1..23: mol_type = other RNA
tcctgaactgagctgccccgaga

SEQ ID NO: 5466 - RNA, 20 nt, Synthetic Construct
  source 1..20: mol_type = other RNA
ttcaagtaatccaggatagg

SEQ ID NO: 5467 - RNA, 16 nt, Synthetic Construct
  source 1..16: mol_type = other RNA
gggtgaaagcggggga

SEQ ID NO: 5468 - RNA, 16 nt, Synthetic Construct
  source 1..16: mol_type = other RNA
gggtgaaagcggggga

SEQ ID NO: 5469 - RNA, 25 nt, Synthetic Construct
  source 1..25: mol_type = other RNA
gtcaggatggccgagcggtctaagg

SEQ ID NO: 5470 - RNA, 25 nt, Synthetic Construct
  source 1..25: mol_type = other RNA
gtcaggatggccgagcggtctaagg

SEQ ID NO: 5471 - RNA, 21 nt, Synthetic Construct
  source 1..21: mol_type = other RNA
tcctgtactgagctgccccgg

SEQ ID NO: 5472 - RNA, 23 nt, Synthetic Construct
  source 1..23: mol_type = other RNA
tgaggggcagagagcgagactat

SEQ ID NO: 5473 - RNA, 31 nt, Synthetic Construct; identical to SEQ ID NO: 2310
  source 1..31: mol_type = other RNA

SEQ ID NO: 5474 - RNA, 31 nt, Synthetic Construct; identical to SEQ ID NO: 2310
  source 1..31: mol_type = other RNA

SEQ ID NO: 5475 - RNA, 21 nt, Synthetic Construct
  source 1..21: mol_type = other RNA
tgaggtagtagattgtatagc

SEQ ID NO: 5476 - RNA, 36 nt, Synthetic Construct; identical to SEQ ID NO: 2520
  source 1..36: mol_type = other RNA

SEQ ID NO: 5477 - RNA, 36 nt, Synthetic Construct; identical to SEQ ID NO: 2520
  source 1..36: mol_type = other RNA

SEQ ID NO: 5478 - RNA, 29 nt, Synthetic Construct
  source 1..29: mol_type = other RNA
cccgtgtgaaagtaggtcatcgtcaggct

SEQ ID NO: 5479 - RNA, 29 nt, Synthetic Construct
  source 1..29: mol_type = other RNA
cccgtgtgaaagtaggtcatcgtcaggct

SEQ ID NO: 5480 - RNA, 22 nt, Synthetic Construct
  source 1..22: mol_type = other RNA
tggaacgtaaagaagtatgtat

SEQ ID NO: 5481 - RNA, 22 nt, Synthetic Construct
  source 1..22: mol_type = other RNA
tggaacgtaaagaagtatgtat

SEQ ID NO: 5482 - RNA, 26 nt, Synthetic Construct
  source 1..26: mol_type = other RNA
gatgcgtggtaggagagcgttctgta

SEQ ID NO: 5483 - RNA, 26 nt, Synthetic Construct
  source 1..26: mol_type = other RNA
gatgcgtggtaggagagcgttctgta

SEQ ID NO: 5484 - RNA, 18 nt, Synthetic Construct
  source 1..18: mol_type = other RNA
cgtgttcggaagattttc

SEQ ID NO: 5485 - RNA, 18 nt, Synthetic Construct
  source 1..18: mol_type = other RNA
cgtgttcggaagattttc

SEQ ID NO: 5486 - RNA, 23 nt, Synthetic Construct
  source 1..23: mol_type = other RNA
tgaggggcagagggcgagacttt

SEQ ID NO: 5487 - RNA, 23 nt, Synthetic Construct
  source 1..23: mol_type = other RNA
tgaggggcagagggcgagacttt

SEQ ID NO: 5488 - RNA, 34 nt, Synthetic Construct; identical to SEQ ID NO: 2529
  source 1..34: mol_type = other RNA

SEQ ID NO: 5489 - RNA, 34 nt, Synthetic Construct; identical to SEQ ID NO: 2529
  source 1..34: mol_type = other RNA

SEQ ID NO: 5490 - RNA, 27 nt, Synthetic Construct
  source 1..27: mol_type = other RNA
ccccccactgctgaatttgactggctt

SEQ ID NO: 5491 - RNA, 21 nt, Synthetic Construct
  source 1..21: mol_type = other RNA
tcctgtactgagccgccccga

SEQ ID NO: 5492 - RNA, 21 nt, Synthetic Construct
  source 1..21: mol_type = other RNA
tcctgtactgagccgccccga

SEQ ID NO: 5493 - RNA, 22 nt, Synthetic Construct
  source 1..22: mol_type = other RNA
tatagcacttgtcccggcctgt

SEQ ID NO: 5494 - RNA, 22 nt, Synthetic Construct
  source 1..22: mol_type = other RNA
tatagcacttgtcccggcctgt

SEQ ID NO: 5495 - RNA, 21 nt, Synthetic Construct
  source 1..21: mol_type = other RNA
tccagtactgagctgccccga

SEQ ID NO: 5496 - RNA, 21 nt, Synthetic Construct
  source 1..21: mol_type = other RNA
tccagtactgagctgccccga

SEQ ID NO: 5497 - RNA, 26 nt, Synthetic Construct
  source 1..26: mol_type = other RNA
gagcagctaataccgcatacgacctg

SEQ ID NO: 5498 - RNA, 26 nt, Synthetic Construct
  source 1..26: mol_type = other RNA
gagcagctaataccgcatacgacctg

SEQ ID NO: 5499 - RNA, 22 nt, Synthetic Construct
  source 1..22: mol_type = other RNA
tcgtaccgtgagtaataatgca

SEQ ID NO: 5500 - RNA, 23 nt, Synthetic Construct
  source 1..23: mol_type = other RNA
nggtaatacgacgtacttagtgt

SEQ ID NO: 5501 - RNA, 23 nt, Synthetic Construct
  source 1..23: mol_type = other RNA
nggtaatacgacgtacttagtgt

SEQ ID NO: 5502 - RNA, 17 nt, Synthetic Construct
  source 1..17: mol_type = other RNA
accaaggggtcgtgggt

SEQ ID NO: 5503 - RNA, 17 nt, Synthetic Construct
  source 1..17: mol_type = other RNA
accaaggggtcgtgggt

SEQ ID NO: 5504 - RNA, 31 nt, Synthetic Construct; identical to SEQ ID NO: 2263
  source 1..31: mol_type = other RNA

SEQ ID NO: 5505 - RNA, 21 nt, Synthetic Construct
  source 1..21: mol_type = other RNA
caacggaatcccaaaagcagc

SEQ ID NO: 5506 - RNA, 31 nt, Synthetic Construct
  source 1..31: mol_type = other RNA
gagcttagatgaggcgtgataacgagtctgc

SEQ ID NO: 5507 - RNA, 31 nt, Synthetic Construct; identical to SEQ ID NO: 5506
  source 1..31: mol_type = other RNA

SEQ ID NO: 5508 - RNA, 22 nt, Synthetic Construct
  source 1..22: mol_type = other RNA
tgggatgtaaagaagtatgtat

SEQ ID NO: 5509 - RNA, 22 nt, Synthetic Construct
  source 1..22: mol_type = other RNA
tgggatgtaaagaagtatgtat

SEQ ID NO: 5510 - RNA, 22 nt, Synthetic Construct
  source 1..22: mol_type = other RNA
tgaggtagtaggtcgtgtggtt

SEQ ID NO: 5511 - RNA, 23 nt, Synthetic Construct
  source 1..23: mol_type = other RNA
tgaggggcagagagcgaggcttt

SEQ ID NO: 5512 - RNA, 20 nt, Synthetic Construct
  source 1..20: mol_type = other RNA
cccgtgttcggaagattttc

SEQ ID NO: 5513 - RNA, 20 nt, Synthetic Construct
  source 1..20: mol_type = other RNA
cccgtgttcggaagattttc

SEQ ID NO: 5514 - RNA, 22 nt, Synthetic Construct
  source 1..22: mol_type = other RNA
cattgcacttgtcccggcctgt

SEQ ID NO: 5515 - RNA, 25 nt, Synthetic Construct
  source 1..25: mol_type = other RNA
ggtaaaatcgctgagtgaagcattg

SEQ ID NO: 5516 - RNA, 25 nt, Synthetic Construct
  source 1..25: mol_type = other RNA
ggtaaaatcgctgagtgaagcattg

SEQ ID NO: 5517 - RNA, 27 nt, Synthetic Construct
  source 1..27: mol_type = other RNA
ccccccactgctaaatctgactggctt

SEQ ID NO: 5518 - RNA, 17 nt, Synthetic Construct
  source 1..17: mol_type = other RNA
tcgctagtaatcgcgga

SEQ ID NO: 5519 - RNA, 23 nt, Synthetic Construct
  source 1..23: mol_type = other RNA
tgtcagtttgtcaaataccccat

SEQ ID NO: 5520 - RNA, 23 nt, Synthetic Construct
  source 1..23: mol_type = other RNA
tgtcagtttgtcaaataccccat

SEQ ID NO: 5521 - RNA, 22 nt, Synthetic Construct
  source 1..22: mol_type = other RNA
ttcaagtaattcaggataggtc

SEQ ID NO: 5522 - RNA, 22 nt, Synthetic Construct
  source 1..22: mol_type = other RNA
tgggatgtaaagaagtatgtat

SEQ ID NO: 5523 - RNA, 22 nt, Synthetic Construct
  source 1..22: mol_type = other RNA
tgggatgtaaagaagtatgtat

SEQ ID NO: 5524 - RNA, 23 nt, Synthetic Construct
  source 1..23: mol_type = other RNA
tgaagggcagagagcgagacttt

SEQ ID NO: 5525 - RNA, 20 nt, Synthetic Construct
  source 1..20: mol_type = other RNA
tgaggcagtaggttgtatag

SEQ ID NO: 5526 - RNA, 20 nt, Synthetic Construct
  source 1..20: mol_type = other RNA
tgaggcagtaggttgtatag

SEQ ID NO: 5527 - RNA, 21 nt, Synthetic Construct
  source 1..21: mol_type = other RNA
atcggaacgtgcccagtcgtg

SEQ ID NO: 5528 - RNA, 21 nt, Synthetic Construct
  source 1..21: mol_type = other RNA
atcggaacgtgcccagtcgtg

SEQ ID NO: 5529 - RNA, 18 nt, Synthetic Construct
  source 1..18: mol_type = other RNA
gcgaaattccttgtcggg

SEQ ID NO: 5530 - RNA, 18 nt, Synthetic Construct
  source 1..18: mol_type = other RNA
gcgaaattccttgtcggg

SEQ ID NO: 5531 - RNA, 23 nt, Synthetic Construct
  source 1..23: mol_type = other RNA
tcactgatcgagtcgtcctgcgc

SEQ ID NO: 5532 - RNA, 23 nt, Synthetic Construct
  source 1..23: mol_type = other RNA
tcactgatcgagtcgtcctgcgc

SEQ ID NO: 5533 - RNA, 27 nt, Synthetic Construct
  source 1..27: mol_type = other RNA
gacttaccaaacctatgcaaactccga

SEQ ID NO: 5534 - RNA, 27 nt, Synthetic Construct
  source 1..27: mol_type = other RNA
gacttaccaaacctatgcaaactccga

SEQ ID NO: 5535 - RNA, 23 nt, Synthetic Construct
  source 1..23: mol_type = other RNA
tgaggaagtaggttgtgtggttt

SEQ ID NO: 5536 - RNA, 44 nt, Synthetic Construct
  source 1..44: mol_type = other RNA
agtcgagcaggtacgaaagtaggacaaagtgatccggtggttct

SEQ ID NO: 5537 - RNA, 44 nt, Synthetic Construct; identical to SEQ ID NO: 5536
  source 1..44: mol_type = other RNA

SEQ ID NO: 5538 - RNA, 16 nt, Synthetic Construct
  source 1..16: mol_type = other RNA
gaacgtgagctgggtt

SEQ ID NO: 5539 - RNA, 16 nt, Synthetic Construct
  source 1..16: mol_type = other RNA
gaacgtgagctgggtt

SEQ ID NO: 5540 - RNA, 22 nt, Synthetic Construct
  source 1..22: mol_type = other RNA
tcctatactgagctgccccgag

SEQ ID NO: 5541 - RNA, 22 nt, Synthetic Construct
  source 1..22: mol_type = other RNA
tcctatactgagctgccccgag

SEQ ID NO: 5542 - RNA, 17 nt, Synthetic Construct
  source 1..17: mol_type = other RNA
cagtcaggatgttggct

SEQ ID NO: 5543 - RNA, 21 nt, Synthetic Construct
  source 1..21: mol_type = other RNA
gtgggcgtttgaagtgaagtg

SEQ ID NO: 5544 - RNA, 22 nt, Synthetic Construct
  source 1..22: mol_type = other RNA
tcctgcactgagctgccccgag

SEQ ID NO: 5545 - RNA, 22 nt, Synthetic Construct
  source 1..22: mol_type = other RNA
tcctgcactgagctgccccgag

SEQ ID NO: 5546 - RNA, 25 nt, Synthetic Construct
  source 1..25: mol_type = other RNA
ttgaggatatgagatcgaggcgaca

SEQ ID NO: 5547 - RNA, 25 nt, Synthetic Construct
  source 1..25: mol_type = other RNA
ttgaggatatgagatcgaggcgaca

SEQ ID NO: 5548 - RNA, 17 nt, Synthetic Construct
  source 1..17: mol_type = other RNA
accggaggaaggtgggg

SEQ ID NO: 5549 - RNA, 17 nt, Synthetic Construct
  source 1..17: mol_type = other RNA
accggaggaaggtgggg

SEQ ID NO: 5550 - RNA, 17 nt, Synthetic Construct
  source 1..17: mol_type = other RNA
cgtgagctgggtttaga

SEQ ID NO: 5551 - RNA, 17 nt, Synthetic Construct
  source 1..17: mol_type = other RNA
cgtgagctgggtttaga

SEQ ID NO: 5552 - RNA, 21 nt, Synthetic Construct
  source 1..21: mol_type = other RNA
taacactgtctggtaaagatg

SEQ ID NO: 5553 - RNA, 21 nt, Synthetic Construct
  source 1..21: mol_type = other RNA
taacactgtctggtaaagatg

SEQ ID NO: 5554 - RNA, 28 nt, Synthetic Construct
  source 1..28: mol_type = other RNA
ggcagggttcgtgactggggtgaagtcg

SEQ ID NO: 5555 - RNA, 21 nt, Synthetic Construct
  source 1..21: mol_type = other RNA
tgaggtagtagattgtatagc

SEQ ID NO: 5556 - RNA, 21 nt, Synthetic Construct
  source 1..21: mol_type = other RNA
tgaggtagtagattgtatagc

SEQ ID NO: 5557 - RNA, 21 nt, Synthetic Construct
  source 1..21: mol_type = other RNA
tcctgtctgaatatgggggga

SEQ ID NO: 5558 - RNA, 21 nt, Synthetic Construct
  source 1..21: mol_type = other RNA
tcctgtctgaatatgggggga

SEQ ID NO: 5559 - RNA, 22 nt, Synthetic Construct
  source 1..22: mol_type = other RNA
tgtcaactggttgttgggaggg

SEQ ID NO: 5560 - RNA, 22 nt, Synthetic Construct
  source 1..22: mol_type = other RNA
tgtcaactggttgttgggaggg

SEQ ID NO: 5561 - RNA, 23 nt, Synthetic Construct
  source 1..23: mol_type = other RNA
tggtaatacgacgtacctagtgt

SEQ ID NO: 5562 - RNA, 23 nt, Synthetic Construct
  source 1..23: mol_type = other RNA
tggtaatacgacgtacctagtgt

SEQ ID NO: 5563 - RNA, 25 nt, Synthetic Construct
  source 1..25: mol_type = other RNA
ttgaggatatgagatcgagacaaca

SEQ ID NO: 5564 - RNA, 25 nt, Synthetic Construct
  source 1..25: mol_type = other RNA
ttgaggatatgagatcgagacaaca

SEQ ID NO: 5565 - RNA, 17 nt, Synthetic Construct
  source 1..17: mol_type = other RNA
agtccggatcgtagtct

SEQ ID NO: 5566 - RNA, 17 nt, Synthetic Construct
  source 1..17: mol_type = other RNA
agtccggatcgtagtct

SEQ ID NO: 5567 - RNA, 22 nt, Synthetic Construct
  source 1..22: mol_type = other RNA
tgaggtagtaggttgtgtggct

SEQ ID NO: 5568 - RNA, 22 nt, Synthetic Construct
  source 1..22: mol_type = other RNA
tgaggtagtaggttgtgtggct

SEQ ID NO: 5569 - RNA, 23 nt, Synthetic Construct
  source 1..23: mol_type = other RNA
agcaacattgtctgctgggtttc

SEQ ID NO: 5570 - RNA, 21 nt, Synthetic Construct
  source 1..21: mol_type = other RNA
ctttgttcgattccgttgagt

SEQ ID NO: 5571 - RNA, 21 nt, Synthetic Construct
  source 1..21: mol_type = other RNA
ctttgttcgattccgttgagt

SEQ ID NO: 5572 - RNA, 23 nt, Synthetic Construct
  source 1..23: mol_type = other RNA
gggtaatacgacgtacttagtgt

SEQ ID NO: 5573 - RNA, 23 nt, Synthetic Construct
  source 1..23: mol_type = other RNA
gggtaatacgacgtacttagtgt

SEQ ID NO: 5574 - RNA, 22 nt, Synthetic Construct
  source 1..22: mol_type = other RNA
ngaggtagtagattgtatagtt

SEQ ID NO: 5575 - RNA, 22 nt, Synthetic Construct
  source 1..22: mol_type = other RNA
ngaggtagtagattgtatagtt

SEQ ID NO: 5576 - RNA, 23 nt, Synthetic Construct
  source 1..23: mol_type = other RNA
tgaggtggtaggttgtgtggttt

SEQ ID NO: 5577 - RNA, 23 nt, Synthetic Construct
  source 1..23: mol_type = other RNA
tgaggtggtaggttgtgtggttt

SEQ ID NO: 5578 - RNA, 23 nt, Synthetic Construct
  source 1..23: mol_type = other RNA
tggtagtacgacgtacttagtgt

SEQ ID NO: 5579 - RNA, 23 nt, Synthetic Construct
  source 1..23: mol_type = other RNA
tccagtactgagctgccccgaga

SEQ ID NO: 5580 - RNA, 23 nt, Synthetic Construct
  source 1..23: mol_type = other RNA
tccagtactgagctgccccgaga

SEQ ID NO: 5581 - RNA, 32 nt, Synthetic Construct; identical to SEQ ID NO: 3541
  source 1..32: mol_type = other RNA

SEQ ID NO: 5582 - RNA, 32 nt, Synthetic Construct
  source 1..32: mol_type = other RNA
ctgcatggactacatatggttgagggttgtaa

SEQ ID NO: 5583 - RNA, 32 nt, Synthetic Construct; identical to SEQ ID NO: 5582
  source 1..32: mol_type = other RNA

SEQ ID NO: 5584 - RNA, 20 nt, Synthetic Construct
  source 1..20: mol_type = other RNA
gtcagtttgtcaaatacccc

SEQ ID NO: 5585 - RNA, 21 nt, Synthetic Construct
  source 1..21: mol_type = other RNA
atcacattgccagggatttcc

SEQ ID NO: 5586 - RNA, 21 nt, Synthetic Construct
  source 1..21: mol_type = other RNA
atcacattgccagggatttcc

SEQ ID NO: 5587 - RNA, 23 nt, Synthetic Construct
  source 1..23: mol_type = other RNA
tggtaattcgacgtacttagtgt

SEQ ID NO: 5588 - RNA, 25 nt, Synthetic Construct
  source 1..25: mol_type = other RNA
aaaccgttaccattactgagtttag

SEQ ID NO: 5589 - RNA, 25 nt, Synthetic Construct
  source 1..25: mol_type = other RNA
aaaccgttaccattactgagtttag

SEQ ID NO: 5590 - RNA, 22 nt, Synthetic Construct
  source 1..22: mol_type = other RNA
tgaggtagtaggttgtgtggtc

SEQ ID NO: 5591 - RNA, 16 nt, Synthetic Construct
  source 1..16: mol_type = other RNA
acggcgggagtaacta

SEQ ID NO: 5592 - RNA, 16 nt, Synthetic Construct
  source 1..16: mol_type = other RNA
acggcgggagtaacta

SEQ ID NO: 5593 - RNA, 23 nt, Synthetic Construct
  source 1..23: mol_type = other RNA
ggaggggcagagagcgagacttt

SEQ ID NO: 5594 - RNA, 23 nt, Synthetic Construct
  source 1..23: mol_type = other RNA
tgaggggcagagagtgagacttt

SEQ ID NO: 5595 - RNA, 34 nt, Synthetic Construct
  source 1..34: mol_type = other RNA
tcctcgttagtatagtggtgagtatccccgcctg

SEQ ID NO: 5596 - RNA, 34 nt, Synthetic Construct; identical to SEQ ID NO: 5595
  source 1..34: mol_type = other RNA

SEQ ID NO: 5597 - RNA, 22 nt, Synthetic Construct
  source 1..22: mol_type = other RNA
ggcagcattgtacagggctatg

SEQ ID NO: 5598 - RNA, 18 nt, Synthetic Construct
  source 1..18: mol_type = other RNA
ggtagcgtggccgagcgg

SEQ ID NO: 5599 - RNA, 18 nt, Synthetic Construct
  source 1..18: mol_type = other RNA
ggtagcgtggccgagcgg

SEQ ID NO: 5600 - RNA, 21 nt, Synthetic Construct
  source 1..21: mol_type = other RNA
ggaggggcagagagcgagact

SEQ ID NO: 5601 - RNA, 25 nt, Synthetic Construct
  source 1..25: mol_type = other RNA
ttgagggtatgagatcgagacgaca

SEQ ID NO: 5602 - RNA, 25 nt, Synthetic Construct
  source 1..25: mol_type = other RNA
ttgagggtatgagatcgagacgaca

SEQ ID NO: 5603 - RNA, 16 nt, Synthetic Construct
  source 1..16: mol_type = other RNA
gtctacggccgtacca

SEQ ID NO: 5604 - RNA, 16 nt, Synthetic Construct
  source 1..16: mol_type = other RNA
gtctacggccgtacca

SEQ ID NO: 5605 - RNA, 37 nt, Synthetic Construct; identical to SEQ ID NO: 2607
  source 1..37: mol_type = other RNA

SEQ ID NO: 5606 - RNA, 23 nt, Synthetic Construct
  source 1..23: mol_type = other RNA
tgaggggcagagagcgagactct

SEQ ID NO: 5607 - RNA, 23 nt, Synthetic Construct
  source 1..23: mol_type = other RNA
tgaggggcagagagcgagactct

SEQ ID NO: 5608 - RNA, 22 nt, Synthetic Construct
  source 1..22: mol_type = other RNA
caaagtgctgttcgtgcaggta

SEQ ID NO: 5609 - RNA, 22 nt, Synthetic Construct
  source 1..22: mol_type = other RNA
caaagtgctgttcgtgcaggta

SEQ ID NO: 5610 - RNA, 22 nt, Synthetic Construct
  source 1..22: mol_type = other RNA
tggaatgtaaaggagtatgtat

SEQ ID NO: 5611 - RNA, 22 nt, Synthetic Construct
  source 1..22: mol_type = other RNA
tggaatgtaaaggagtatgtat

SEQ ID NO: 5612 - RNA, 25 nt, Synthetic Construct
  source 1..25: mol_type = other RNA
ttgaggatatgagatcgagacgaca

SEQ ID NO: 5613 - RNA, 16 nt, Synthetic Construct
  source 1..16: mol_type = other RNA
accgcttttgtcaggg

SEQ ID NO: 5614 - RNA, 16 nt, Synthetic Construct
  source 1..16: mol_type = other RNA
accgcttttgtcaggg

SEQ ID NO: 5615 - RNA, 18 nt, Synthetic Construct
  source 1..18: mol_type = other RNA
gcgccgatgatagtgcgg

SEQ ID NO: 5616 - RNA, 22 nt, Synthetic Construct
  source 1..22: mol_type = other RNA
tgaggtagtaggttgtgcggtt

SEQ ID NO: 5617 - RNA, 22 nt, Synthetic Construct
  source 1..22: mol_type = other RNA
tgaggtagtaggttgcgtggtt

SEQ ID NO: 5618 - RNA, 20 nt, Synthetic Construct
  source 1..20: mol_type = other RNA
tacagtatagatgatgtact

SEQ ID NO: 5619 - RNA, 20 nt, Synthetic Construct
  source 1..20: mol_type = other RNA
tacagtatagatgatgtact

SEQ ID NO: 5620 - RNA, 27 nt, Synthetic Construct
  source 1..27: mol_type = other RNA
ggatttccccttggggttgtaggacca

SEQ ID NO: 5621 - RNA, 27 nt, Synthetic Construct
  source 1..27: mol_type = other RNA
ggatttccccttggggttgtaggacca

SEQ ID NO: 5622 - RNA, 33 nt, Synthetic Construct; identical to SEQ ID NO: 3082
  source 1..33: mol_type = other RNA

SEQ ID NO: 5623 - RNA, 33 nt, Synthetic Construct; identical to SEQ ID NO: 3082
  source 1..33: mol_type = other RNA

SEQ ID NO: 5624 - RNA, 21 nt, Synthetic Construct
  source 1..21: mol_type = other RNA
ggaatcgctagtaatcgcgga

SEQ ID NO: 5625 - RNA, 19 nt, Synthetic Construct
  source 1..19: mol_type = other RNA
tagcaccatctgaaatcgg

SEQ ID NO: 5626 - RNA, 23 nt, Synthetic Construct
  source 1..23: mol_type = other RNA
tctttggttatctagctgtatgt

SEQ ID NO: 5627 - RNA, 23 nt, Synthetic Construct
  source 1..23: mol_type = other RNA
tctttggttatctagctgtatgt

SEQ ID NO: 5628 - RNA, 22 nt, Synthetic Construct
  source 1..22: mol_type = other RNA
tggaatgtaaagaagtatgtaa

SEQ ID NO: 5629 - RNA, 22 nt, Synthetic Construct
  source 1..22: mol_type = other RNA
tggaatgtaaagaagtatgtaa

SEQ ID NO: 5630 - RNA, 23 nt, Synthetic Construct
  source 1..23: mol_type = other RNA
tgggctaagggagatgattgggt

SEQ ID NO: 5631 - RNA, 19 nt, Synthetic Construct
  source 1..19: mol_type = other RNA
caagcggtggatgatgtgg

SEQ ID NO: 5632 - RNA, 19 nt, Synthetic Construct
  source 1..19: mol_type = other RNA
caagcggtggatgatgtgg

SEQ ID NO: 5633 - RNA, 23 nt, Synthetic Construct
  source 1..23: mol_type = other RNA
tgaggggaagagagcgagacttt

SEQ ID NO: 5634 - RNA, 32 nt, Synthetic Construct; identical to SEQ ID NO: 2296
  source 1..32: mol_type = other RNA

SEQ ID NO: 5635 - RNA, 32 nt, Synthetic Construct; identical to SEQ ID NO: 2296
  source 1..32: mol_type = other RNA

SEQ ID NO: 5636 - RNA, 22 nt, Synthetic Construct
  source 1..22: mol_type = other RNA
tgtggtagtagtttgtgctgtt

SEQ ID NO: 5637 - RNA, 22 nt, Synthetic Construct
  source 1..22: mol_type = other RNA
tgaggtagtagattgtgtggtt

SEQ ID NO: 5638 - RNA, 23 nt, Synthetic Construct
  source 1..23: mol_type = other RNA
tgaggtggtaggttgtgtggttt

SEQ ID NO: 5639 - RNA, 23 nt, Synthetic Construct
  source 1..23: mol_type = other RNA
gtctttgttcgattccgttgagt

SEQ ID NO: 5640 - RNA, 23 nt, Synthetic Construct
  source 1..23: mol_type = other RNA
gtctttgttcgattccgttgagt

SEQ ID NO: 5641 - RNA, 21 nt, Synthetic Construct
  source 1..21: mol_type = other RNA
atcacattgccagggatttcc

SEQ ID NO: 5642 - RNA, 21 nt, Synthetic Construct
  source 1..21: mol_type = other RNA
atcacattgccagggatttcc

SEQ ID NO: 5643 - RNA, 20 nt, Synthetic Construct
  source 1..20: mol_type = other RNA
tgaggtggtaggttgtatag

SEQ ID NO: 5644 - RNA, 20 nt, Synthetic Construct
  source 1..20: mol_type = other RNA
tgaggtggtaggttgtatag

SEQ ID NO: 5645 - RNA, 22 nt, Synthetic Construct
  source 1..22: mol_type = other RNA
tgaggtggtaggttgtatagtt

SEQ ID NO: 5646 - RNA, 22 nt, Synthetic Construct
  source 1..22: mol_type = other RNA
tgaggtggtaggttgtatagtt

SEQ ID NO: 5647 - RNA, 25 nt, Synthetic Construct
  source 1..25: mol_type = other RNA
gggttgtaaaccgcttttgtcaggg

SEQ ID NO: 5648 - RNA, 25 nt, Synthetic Construct
  source 1..25: mol_type = other RNA
gggttgtaaaccgcttttgtcaggg

SEQ ID NO: 5649 - RNA, 22 nt, Synthetic Construct
  source 1..22: mol_type = other RNA
ttctgtactgagctgccccgag

SEQ ID NO: 5650 - RNA, 25 nt, Synthetic Construct
  source 1..25: mol_type = other RNA
aaaccgttaccattactgagtttag

SEQ ID NO: 5651 - RNA, 25 nt, Synthetic Construct
  source 1..25: mol_type = other RNA
aaaccgttaccattactgagtttag

SEQ ID NO: 5652 - RNA, 20 nt, Synthetic Construct
  source 1..20: mol_type = other RNA
gtcagtttgtcaaatacccc

SEQ ID NO: 5653 - RNA, 20 nt, Synthetic Construct
  source 1..20: mol_type = other RNA
gtcagtttgtcaaatacccc

SEQ ID NO: 5654 - RNA, 24 nt, Synthetic Construct
  source 1..24: mol_type = other RNA
tgggtaatacgacgtacttagtgt

SEQ ID NO: 5655 - RNA, 18 nt, Synthetic Construct
  source 1..18: mol_type = other RNA
tcccaagggtatggctgt

SEQ ID NO: 5656 - RNA, 18 nt, Synthetic Construct
  source 1..18: mol_type = other RNA
tcccaagggtatggctgt

SEQ ID NO: 5657 - RNA, 15 nt, Synthetic Construct
  source 1..15: mol_type = other RNA
aggtgggaggctttg

SEQ ID NO: 5658 - RNA, 15 nt, Synthetic Construct
  source 1..15: mol_type = other RNA
aggtgggaggctttg

SEQ ID NO: 5659 - RNA, 21 nt, Synthetic Construct
  source 1..21: mol_type = other RNA
tgaggtagtagattgtatagc

SEQ ID NO: 5660 - RNA, 26 nt, Synthetic Construct
  source 1..26: mol_type = other RNA
cgactcttagcggtggatcactcggc

SEQ ID NO: 5661 - RNA, 26 nt, Synthetic Construct
  source 1..26: mol_type = other RNA
cgactcttagcggtggatcactcggc

SEQ ID NO: 5662 - RNA, 23 nt, Synthetic Construct
  source 1..23: mol_type = other RNA
caaagtgctgttcgtgcaggtgg

SEQ ID NO: 5663 - RNA, 23 nt, Synthetic Construct
  source 1..23: mol_type = other RNA
caaagtgctgttcgtgcaggtgg

SEQ ID NO: 5664 - RNA, 35 nt, Synthetic Construct; identical to SEQ ID NO: 2762
  source 1..35: mol_type = other RNA

SEQ ID NO: 5665 - RNA, 35 nt, Synthetic Construct; identical to SEQ ID NO: 2762
  source 1..35: mol_type = other RNA

SEQ ID NO: 5666 - RNA, 25 nt, Synthetic Construct
  source 1..25: mol_type = other RNA
gtgaggatatgagatcgagacgaca

SEQ ID NO: 5667 - RNA, 25 nt, Synthetic Construct
  source 1..25: mol_type = other RNA
gtgaggatatgagatcgagacgaca

SEQ ID NO: 5668 - RNA, 24 nt, Synthetic Construct
  source 1..24: mol_type = other RNA
tgtaaacacccccgactggaagct

SEQ ID NO: 5669 - RNA, 24 nt, Synthetic Construct
  source 1..24: mol_type = other RNA
tgtaaacacccccgactggaagct

SEQ ID NO: 5670 - RNA, 23 nt, Synthetic Construct
  source 1..23: mol_type = other RNA
tggaagactagtgattttgttgt

SEQ ID NO: 5671 - RNA, 22 nt, Synthetic Construct
  source 1..22: mol_type = other RNA
caaagtgctgttcgtgcaggta

SEQ ID NO: 5672 - RNA, 22 nt, Synthetic Construct
  source 1..22: mol_type = other RNA
caaagtgctgttcgtgcaggta

SEQ ID NO: 5673 - RNA, 27 nt, Synthetic Construct
  source 1..27: mol_type = other RNA
ccccccactgctaaatctgactggctt

SEQ ID NO: 5674 - RNA, 31 nt, Synthetic Construct; identical to SEQ ID NO: 2427
  source 1..31: mol_type = other RNA

SEQ ID NO: 5675 - RNA, 31 nt, Synthetic Construct; identical to SEQ ID NO: 2427
  source 1..31: mol_type = other RNA

SEQ ID NO: 5676 - RNA, 22 nt, Synthetic Construct
  source 1..22: mol_type = other RNA
tgaggtagtagattgtatagta

SEQ ID NO: 5677 - RNA, 23 nt, Synthetic Construct
  source 1..23: mol_type = other RNA
tgaggggcagagagcgagactta

SEQ ID NO: 5678 - RNA, 22 nt, Synthetic Construct
  source 1..22: mol_type = other RNA
tgaggtagtaggtcgtatagtt

SEQ ID NO: 5679 - RNA, 22 nt, Synthetic Construct
  source 1..22: mol_type = other RNA
tgaggtagtaggtcgtatagtt

SEQ ID NO: 5680 - RNA, 25 nt, Synthetic Construct
  source 1..25: mol_type = other RNA
ttgaggatatgagatcgaggcgaca

SEQ ID NO: 5681 - RNA, 25 nt, Synthetic Construct
  source 1..25: mol_type = other RNA
ttgaggatatgagatcgaggcgaca

SEQ ID NO: 5682 - RNA, 23 nt, Synthetic Construct
  source 1..23: mol_type = other RNA
tcccgtactgagctgccccgagt

SEQ ID NO: 5683 - RNA, 22 nt, Synthetic Construct
  source 1..22: mol_type = other RNA
tgaggtagtagttcgtgctgtt

SEQ ID NO: 5684 - RNA, 22 nt, Synthetic Construct
  source 1..22: mol_type = other RNA
tgaggtagtagttcgtgctgtt

SEQ ID NO: 5685 - RNA, 23 nt, Synthetic Construct
  source 1..23: mol_type = other RNA
tggaatgtaaagaagtatgtacc

SEQ ID NO: 5686 - RNA, 23 nt, Synthetic Construct
  source 1..23: mol_type = other RNA
tggaatgtaaagaagtatgtacc

SEQ ID NO: 5687 - RNA, 44 nt, Synthetic Construct; identical to SEQ ID NO: 3447
  source 1..44: mol_type = other RNA

SEQ ID NO: 5688 - RNA, 34 nt, Synthetic Construct; identical to SEQ ID NO: 2265
  source 1..34: mol_type = other RNA

SEQ ID NO: 5689 - RNA, 34 nt, Synthetic Construct; identical to SEQ ID NO: 2265
  source 1..34: mol_type = other RNA

SEQ ID NO: 5690 - RNA, 22 nt, Synthetic Construct
  source 1..22: mol_type = other RNA
ggtagcgaaattccttgtcggg

SEQ ID NO: 5691 - RNA, 16 nt, Synthetic Construct
  source 1..16: mol_type = other RNA
gtcaacggccatacca

SEQ ID NO: 5692 - RNA, 16 nt, Synthetic Construct
  source 1..16: mol_type = other RNA
gtcaacggccatacca

SEQ ID NO: 5693 - RNA, 23 nt, Synthetic Construct
  source 1..23: mol_type = other RNA
tccagcatcagtgattttgttga

SEQ ID NO: 5694 - RNA, 22 nt, Synthetic Construct
  source 1..22: mol_type = other RNA
tgaggtagcagattgtatagtt

SEQ ID NO: 5695 - RNA, 22 nt, Synthetic Construct
  source 1..22: mol_type = other RNA
tgaggtagcagattgtatagtt

SEQ ID NO: 5696 - RNA, 21 nt, Synthetic Construct
  source 1..21: mol_type = other RNA
ctagactgaagctccttgggg

SEQ ID NO: 5697 - RNA, 31 nt, Synthetic Construct; identical to SEQ ID NO: 2263
  source 1..31: mol_type = other RNA

SEQ ID NO: 5698 - RNA, 31 nt, Synthetic Construct; identical to SEQ ID NO: 2263
  source 1..31: mol_type = other RNA

SEQ ID NO: 5699 - RNA, 22 nt, Synthetic Construct
  source 1..22: mol_type = other RNA
tgtcagtttgtcaaataccccg

SEQ ID NO: 5700 - RNA, 30 nt, Synthetic Construct; identical to SEQ ID NO: 1079
  source 1..30: mol_type = other RNA

SEQ ID NO: 5701 - RNA, 30 nt, Synthetic Construct; identical to SEQ ID NO: 1079
  source 1..30: mol_type = other RNA

SEQ ID NO: 5702 - RNA, 19 nt, Synthetic Construct
  source 1..19: mol_type = other RNA
tgaggtagtaggttgtata

SEQ ID NO: 5703 - RNA, 19 nt, Synthetic Construct
  source 1..19: mol_type = other RNA
tgaggtagtaggttgtata

SEQ ID NO: 5704 - RNA, 17 nt, Synthetic Construct
  source 1..17: mol_type = other RNA
tcagtagctcgaggaaa

SEQ ID NO: 5705 - RNA, 17 nt, Synthetic Construct
  source 1..17: mol_type = other RNA
tcagtagctcgaggaaa

SEQ ID NO: 5706 - RNA, 22 nt, Synthetic Construct
  source 1..22: mol_type = other RNA
tgaggtaataggttgtgtggtt

SEQ ID NO: 5707 - RNA, 22 nt, Synthetic Construct
  source 1..22: mol_type = other RNA
tgaggtaataggttgtgtggtt

SEQ ID NO: 5708 - RNA, 17 nt, Synthetic Construct
  source 1..17: mol_type = other RNA
gcggctgtagctcagtt

SEQ ID NO: 5709 - RNA, 15 nt, Synthetic Construct
  source 1..15: mol_type = other RNA
gcaagccgaacggta

SEQ ID NO: 5710 - RNA, 15 nt, Synthetic Construct
  source 1..15: mol_type = other RNA
gcaagccgaacggta

SEQ ID NO: 5711 - RNA, 19 nt, Synthetic Construct
  source 1..19: mol_type = other RNA
aacagtcaggatgttggct

SEQ ID NO: 5712 - RNA, 19 nt, Synthetic Construct
  source 1..19: mol_type = other RNA
cagcactctgcaaagacga

SEQ ID NO: 5713 - RNA, 19 nt, Synthetic Construct
  source 1..19: mol_type = other RNA
cagcactctgcaaagacga

SEQ ID NO: 5714 - RNA, 19 nt, Synthetic Construct
  source 1..19: mol_type = other RNA
cgactcttagcggtggatc

SEQ ID NO: 5715 - RNA, 19 nt, Synthetic Construct
  source 1..19: mol_type = other RNA
cgactcttagcggtggatc

SEQ ID NO: 5716 - RNA, 21 nt, Synthetic Construct
  source 1..21: mol_type = other RNA
cggtcccaagggtatggctgt

SEQ ID NO: 5717 - RNA, 21 nt, Synthetic Construct
  source 1..21: mol_type = other RNA
cggtcccaagggtatggctgt

SEQ ID NO: 5718 - RNA, 21 nt, Synthetic Construct
  source 1..21: mol_type = other RNA
tgaggtagtagattgcatagt

SEQ ID NO: 5719 - RNA, 21 nt, Synthetic Construct
  source 1..21: mol_type = other RNA
tgaggtagtagattgcatagt

SEQ ID NO: 5720 - RNA, 20 nt, Synthetic Construct
  source 1..20: mol_type = other RNA
aacattcaacgctgtcggtg

SEQ ID NO: 5721 - RNA, 22 nt, Synthetic Construct
  source 1..22: mol_type = other RNA
tgaggaagtagattgtatagtt

SEQ ID NO: 5722 - RNA, 22 nt, Synthetic Construct
  source 1..22: mol_type = other RNA
acagtagtctgcacattggttg

SEQ ID NO: 5723 - RNA, 21 nt, Synthetic Construct
  source 1..21: mol_type = other RNA
ggctggtccgaaggtagtgag

SEQ ID NO: 5724 - RNA, 21 nt, Synthetic Construct
  source 1..21: mol_type = other RNA
ggctggtccgaaggtagtgag

SEQ ID NO: 5725 - RNA, 23 nt, Synthetic Construct
  source 1..23: mol_type = other RNA
tggtaatacgacgtacttaatgt

SEQ ID NO: 5726 - RNA, 35 nt, Synthetic Construct; identical to SEQ ID NO: 2069
  source 1..35: mol_type = other RNA

SEQ ID NO: 5727 - RNA, 20 nt, Synthetic Construct
  source 1..20: mol_type = other RNA
tgaggtagtaggttgtgtga

SEQ ID NO: 5728 - RNA, 20 nt, Synthetic Construct
  source 1..20: mol_type = other RNA
tgaggtagtaggttgtgtga

SEQ ID NO: 5729 - RNA, 16 nt, Synthetic Construct
  source 1..16: mol_type = other RNA
gtctacggctatacca

SEQ ID NO: 5730 - RNA, 16 nt, Synthetic Construct
  source 1..16: mol_type = other RNA
gtctacggctatacca

SEQ ID NO: 5731 - RNA, 23 nt, Synthetic Construct
  source 1..23: mol_type = other RNA
cggtaatacgacgtacttagtgt

SEQ ID NO: 5732 - RNA, 22 nt, Synthetic Construct
  source 1..22: mol_type = other RNA
tgaggaagtaggttgtgtggtt

SEQ ID NO: 5733 - RNA, 20 nt, Synthetic Construct
  source 1..20: mol_type = other RNA
tgaggtagtaggttatgtgg

SEQ ID NO: 5734 - RNA, 20 nt, Synthetic Construct
  source 1..20: mol_type = other RNA
tgaggtagtaggttatgtgg

SEQ ID NO: 5735 - RNA, 20 nt, Synthetic Construct
  source 1..20: mol_type = other RNA
ttcacagtggctaagttctg

SEQ ID NO: 5736 - RNA, 22 nt, Synthetic Construct
  source 1..22: mol_type = other RNA
ggcagcattgtacagggctatg

SEQ ID NO: 5737 - RNA, 27 nt, Synthetic Construct
  source 1..27: mol_type = other RNA
gactcttagcggtggatcactcggctc

SEQ ID NO: 5738 - RNA, 27 nt, Synthetic Construct
  source 1..27: mol_type = other RNA
gactcttagcggtggatcactcggctc

SEQ ID NO: 5739 - RNA, 23 nt, Synthetic Construct
  source 1..23: mol_type = other RNA
tgataatacgacgtacttagtgt

SEQ ID NO: 5740 - RNA, 23 nt, Synthetic Construct
  source 1..23: mol_type = other RNA
tgataatacgacgtacttagtgt

SEQ ID NO: 5741 - RNA, 23 nt, Synthetic Construct
  source 1..23: mol_type = other RNA
nggtaatacgacgtacttagtgt

SEQ ID NO: 5742 - RNA, 23 nt, Synthetic Construct
  source 1..23: mol_type = other RNA
nggtaatacgacgtacttagtgt

SEQ ID NO: 5743 - RNA, 22 nt, Synthetic Construct
  source 1..22: mol_type = other RNA
tcccgtactgagctgccccgag

SEQ ID NO: 5744 - RNA, 22 nt, Synthetic Construct
  source 1..22: mol_type = other RNA
tcccgtactgagctgccccgag

SEQ ID NO: 5745 - RNA, 23 nt, Synthetic Construct
  source 1..23: mol_type = other RNA
aatgacacgatcactcccgttga

SEQ ID NO: 5746 - RNA, 15 nt, Synthetic Construct
  source 1..15: mol_type = other RNA
acccttgtcattagt

SEQ ID NO: 5747 - RNA, 15 nt, Synthetic Construct
  source 1..15: mol_type = other RNA
acccttgtcattagt

SEQ ID NO: 5748 - RNA, 16 nt, Synthetic Construct
  source 1..16: mol_type = other RNA
tcgtgacgatagtgca

SEQ ID NO: 5749 - RNA, 16 nt, Synthetic Construct
  source 1..16: mol_type = other RNA
tcgtgacgatagtgca

SEQ ID NO: 5750 - RNA, 15 nt, Synthetic Construct
  source 1..15: mol_type = other RNA
gttcggaagattttc

SEQ ID NO: 5751 - RNA, 15 nt, Synthetic Construct
  source 1..15: mol_type = other RNA
gttcggaagattttc

SEQ ID NO: 5752 - RNA, 22 nt, Synthetic Construct
  source 1..22: mol_type = other RNA
tgaggtagtagattgtatagtc

SEQ ID NO: 5753 - RNA, 22 nt, Synthetic Construct
  source 1..22: mol_type = other RNA
tgaggtagtagattgtatagtc

SEQ ID NO: 5754 - RNA, 22 nt, Synthetic Construct
  source 1..22: mol_type = other RNA
tgaggtagtaggctgtgtggtt

SEQ ID NO: 5755 - RNA, 25 nt, Synthetic Construct
  source 1..25: mol_type = other RNA
ttgaggatatgagatcgagacaaca

SEQ ID NO: 5756 - RNA, 25 nt, Synthetic Construct
  source 1..25: mol_type = other RNA
ttgaggatatgagatcgagacaaca

SEQ ID NO: 5757 - RNA, 22 nt, Synthetic Construct
  source 1..22: mol_type = other RNA
tgagaactgaattccatgggtc

SEQ ID NO: 5758 - RNA, 25 nt, Synthetic Construct
  source 1..25: mol_type = other RNA
ttgaggatatgagatcgagacgaca

SEQ ID NO: 5759 - RNA, 25 nt, Synthetic Construct
  source 1..25: mol_type = other RNA
ttgaggatatgagatcgagacgaca

SEQ ID NO: 5760 - RNA, 18 nt, Synthetic Construct
  source 1..18: mol_type = other RNA
agcagcattgtacagggc

SEQ ID NO: 5761 - RNA, 18 nt, Synthetic Construct
  source 1..18: mol_type = other RNA
agcagcattgtacagggc

SEQ ID NO: 5762 - RNA, 24 nt, Synthetic Construct
  source 1..24: mol_type = other RNA
cgggcctggttagtacttggatgg

SEQ ID NO: 5763 - RNA, 23 nt, Synthetic Construct
  source 1..23: mol_type = other RNA
tcctgtgctgagctgccccgagt

SEQ ID NO: 5764 - RNA, 23 nt, Synthetic Construct
  source 1..23: mol_type = other RNA
tcctgtgctgagctgccccgagt

SEQ ID NO: 5765 - RNA, 20 nt, Synthetic Construct
  source 1..20: mol_type = other RNA
tcctgtctgaatatgggggg

SEQ ID NO: 5766 - RNA, 20 nt, Synthetic Construct
  source 1..20: mol_type = other RNA
tcctgtctgaatatgggggg

SEQ ID NO: 5767 - RNA, 22 nt, Synthetic Construct
  source 1..22: mol_type = other RNA
tgaggtagtgggttgtatagtt

SEQ ID NO: 5768 - RNA, 22 nt, Synthetic Construct
  source 1..22: mol_type = other RNA
tgaggtagtgggttgtatagtt

SEQ ID NO: 5769 - RNA, 31 nt, Synthetic Construct; identical to SEQ ID NO: 2893
  source 1..31: mol_type = other RNA

SEQ ID NO: 5770 - RNA, 31 nt, Synthetic Construct; identical to SEQ ID NO: 2893
  source 1..31: mol_type = other RNA

SEQ ID NO: 5771 - RNA, 23 nt, Synthetic Construct
  source 1..23: mol_type = other RNA
tgaggtagcaggttgtgtggttt

SEQ ID NO: 5772 - RNA, 23 nt, Synthetic Construct
  source 1..23: mol_type = other RNA
tgaggtagcaggttgtgtggttt

SEQ ID NO: 5773 - RNA, 20 nt, Synthetic Construct
  source 1..20: mol_type = other RNA
ttggcctcaagtcaggcagg

SEQ ID NO: 5774 - RNA, 20 nt, Synthetic Construct
  source 1..20: mol_type = other RNA
ttggcctcaagtcaggcagg

SEQ ID NO: 5775 - RNA, 23 nt, Synthetic Construct
  source 1..23: mol_type = other RNA
aatgacacgatcactcccgttga

SEQ ID NO: 5776 - RNA, 23 nt, Synthetic Construct
  source 1..23: mol_type = other RNA
aatgacacgatcactcccgttga

SEQ ID NO: 5777 - RNA, 23 nt, Synthetic Construct
  source 1..23: mol_type = other RNA
tccccttggggttgtaggaccac

SEQ ID NO: 5778 - RNA, 23 nt, Synthetic Construct
  source 1..23: mol_type = other RNA
tccccttggggttgtaggaccac

SEQ ID NO: 5779 - RNA, 24 nt, Synthetic Construct
  source 1..24: mol_type = other RNA
gggttgtaaaccgcttttgtcagg

SEQ ID NO: 5780 - RNA, 24 nt, Synthetic Construct
  source 1..24: mol_type = other RNA
gggttgtaaaccgcttttgtcagg

SEQ ID NO: 5781 - RNA, 22 nt, Synthetic Construct
  source 1..22: mol_type = other RNA
tggaatgtaaagaggtatgtat

SEQ ID NO: 5782 - RNA, 23 nt, Synthetic Construct
  source 1..23: mol_type = other RNA
tggtaatacgacgtactcagtgt

SEQ ID NO: 5783 - RNA, 23 nt, Synthetic Construct
  source 1..23: mol_type = other RNA
tggtaatacgacgtactcagtgt

SEQ ID NO: 5784 - RNA, 26 nt, Synthetic Construct
  source 1..26: mol_type = other RNA
atttccccttggggttgtaggaccac

SEQ ID NO: 5785 - RNA, 26 nt, Synthetic Construct
  source 1..26: mol_type = other RNA
atttccccttggggttgtaggaccac

SEQ ID NO: 5786 - RNA, 15 nt, Synthetic Construct
  source 1..15: mol_type = other RNA
gggtgaaagcggggg

SEQ ID NO: 5787 - RNA, 15 nt, Synthetic Construct
  source 1..15: mol_type = other RNA
gggtgaaagcggggg

SEQ ID NO: 5788 - RNA, 22 nt, Synthetic Construct
  source 1..22: mol_type = other RNA
tgaggtagtagtttgtgctgat

SEQ ID NO: 5789 - RNA, 18 nt, Synthetic Construct
  source 1..18: mol_type = other RNA
cccaaaggtcgtcggttc

SEQ ID NO: 5790 - RNA, 18 nt, Synthetic Construct
  source 1..18: mol_type = other RNA
cccaaaggtcgtcggttc

SEQ ID NO: 5791 - RNA, 29 nt, Synthetic Construct
  source 1..29: mol_type = other RNA
gatgcgaaagcaggtcaaagtgatccggc

SEQ ID NO: 5792 - RNA, 29 nt, Synthetic Construct
  source 1..29: mol_type = other RNA
gatgcgaaagcaggtcaaagtgatccggc

SEQ ID NO: 5793 - RNA, 23 nt, Synthetic Construct
  source 1..23: mol_type = other RNA
tgaggtagtagattgtatagttc

SEQ ID NO: 5794 - RNA, 21 nt, Synthetic Construct
  source 1..21: mol_type = other RNA
cccttggggttgtaggaccac

SEQ ID NO: 5795 - RNA, 21 nt, Synthetic Construct
  source 1..21: mol_type = other RNA
cccttggggttgtaggaccac

SEQ ID NO: 5796 - RNA, 20 nt, Synthetic Construct
  source 1..20: mol_type = other RNA
taaggtagtaggttgtgtgg

SEQ ID NO: 5797 - RNA, 20 nt, Synthetic Construct
  source 1..20: mol_type = other RNA
taaggtagtaggttgtgtgg

SEQ ID NO: 5798 - RNA, 21 nt, Synthetic Construct
  source 1..21: mol_type = other RNA
tggggggcagagagcgagact

SEQ ID NO: 5799 - RNA, 21 nt, Synthetic Construct
  source 1..21: mol_type = other RNA
tggggggcagagagcgagact

SEQ ID NO: 5800 - RNA, 20 nt, Synthetic Construct
  source 1..20: mol_type = other RNA
tagaattctcgcctgccacg

SEQ ID NO: 5801 - RNA, 20 nt, Synthetic Construct
  source 1..20: mol_type = other RNA
tagaattctcgcctgccacg

SEQ ID NO: 5802 - RNA, 23 nt, Synthetic Construct
  source 1..23: mol_type = other RNA
tcctgcactgagctgccccgaga

SEQ ID NO: 5803 - RNA, 23 nt, Synthetic Construct
  source 1..23: mol_type = other RNA
tcctgcactgagctgccccgaga

SEQ ID NO: 5804 - RNA, 25 nt, Synthetic Construct
  source 1..25: mol_type = other RNA
gagaaagctcacaagaactgctaac

SEQ ID NO: 5805 - RNA, 21 nt, Synthetic Construct
  source 1..21: mol_type = other RNA
ttataatacaacctgataagt

SEQ ID NO: 5806 - RNA, 21 nt, Synthetic Construct
  source 1..21: mol_type = other RNA
ttataatacaacctgataagt

SEQ ID NO: 5807 - RNA, 22 nt, Synthetic Construct
  source 1..22: mol_type = other RNA
tggaatgtaaagaagtatgtgt

SEQ ID NO: 5808 - RNA, 22 nt, Synthetic Construct
  source 1..22: mol_type = other RNA
tggaatgtaaagaagtatgtgt

SEQ ID NO: 5809 - RNA, 22 nt, Synthetic Construct
  source 1..22: mol_type = other RNA
tgtagtgtttcctactttatgg

SEQ ID NO: 5810 - RNA, 22 nt, Synthetic Construct
  source 1..22: mol_type = other RNA
tgtagtgtttcctactttatgg

SEQ ID NO: 5811 - RNA, 23 nt, Synthetic Construct
  source 1..23: mol_type = other RNA
tggaatgtaaagaagtatgtatt

SEQ ID NO: 5812 - RNA, 21 nt, Synthetic Construct
  source 1..21: mol_type = other RNA
accctgtagatccgaatttgt

SEQ ID NO: 5813 - RNA, 23 nt, Synthetic Construct
  source 1..23: mol_type = other RNA
tgtgcaaatctatgcaaaactga

SEQ ID NO: 5814 - RNA, 23 nt, Synthetic Construct
  source 1..23: mol_type = other RNA
tgtgcaaatctatgcaaaactga

SEQ ID NO: 5815 - RNA, 25 nt, Synthetic Construct
  source 1..25: mol_type = other RNA
ctgaggatatgagatcgagacgaca

SEQ ID NO: 5816 - RNA, 25 nt, Synthetic Construct
  source 1..25: mol_type = other RNA
ctgaggatatgagatcgagacgaca

SEQ ID NO: 5817 - RNA, 21 nt, Synthetic Construct
  source 1..21: mol_type = other RNA
atgtcccacccccactcctgt

SEQ ID NO: 5818 - RNA, 21 nt, Synthetic Construct
  source 1..21: mol_type = other RNA
atgtcccacccccactcctgt

SEQ ID NO: 5819 - RNA, 23 nt, Synthetic Construct
  source 1..23: mol_type = other RNA
taaagtgcttatagtgcaggtag

SEQ ID NO: 5820 - RNA, 18 nt, Synthetic Construct
  source 1..18: mol_type = other RNA
ggacgttgataggctggg

SEQ ID NO: 5821 - RNA, 18 nt, Synthetic Construct
  source 1..18: mol_type = other RNA
ggacgttgataggctggg

SEQ ID NO: 5822 - RNA, 32 nt, Synthetic Construct; identical to SEQ ID NO: 2435
  source 1..32: mol_type = other RNA

SEQ ID NO: 5823 - RNA, 32 nt, Synthetic Construct; identical to SEQ ID NO: 2435
  source 1..32: mol_type = other RNA

SEQ ID NO: 5824 - RNA, 22 nt, Synthetic Construct
  source 1..22: mol_type = other RNA
tgaggtagtagattgcatagtt

SEQ ID NO: 5825 - RNA, 22 nt, Synthetic Construct
  source 1..22: mol_type = other RNA
tgaggtagtagattgcatagtt

SEQ ID NO: 5826 - RNA, 21 nt, Synthetic Construct
  source 1..21: mol_type = other RNA
acagtagcctgcacattggtt

SEQ ID NO: 5827 - RNA, 21 nt, Synthetic Construct
  source 1..21: mol_type = other RNA
tgaggggcagagagcgagacc

SEQ ID NO: 5828 - RNA, 21 nt, Synthetic Construct
  source 1..21: mol_type = other RNA
tgaggggcagagagcgagacc

SEQ ID NO: 5829 - RNA, 24 nt, Synthetic Construct
  source 1..24: mol_type = other RNA
ttccccttggggttgtaggaccac

SEQ ID NO: 5830 - RNA, 24 nt, Synthetic Construct
  source 1..24: mol_type = other RNA
ttccccttggggttgtaggaccac

SEQ ID NO: 5831 - RNA, 21 nt, Synthetic Construct
  source 1..21: mol_type = other RNA
ccctgtactgagctgccccga

SEQ ID NO: 5832 - RNA, 21 nt, Synthetic Construct
  source 1..21: mol_type = other RNA
ccctgtactgagctgccccga

SEQ ID NO: 5833 - RNA, 31 nt, Synthetic Construct; identical to SEQ ID NO: 2758
  source 1..31: mol_type = other RNA

SEQ ID NO: 5834 - RNA, 31 nt, Synthetic Construct; identical to SEQ ID NO: 2758
  source 1..31: mol_type = other RNA

SEQ ID NO: 5835 - RNA, 23 nt, Synthetic Construct
  source 1..23: mol_type = other RNA
tggtaatacaacgtacttagtgt

SEQ ID NO: 5836 - RNA, 23 nt, Synthetic Construct
  source 1..23: mol_type = other RNA
tggtaatacaacgtacttagtgt

SEQ ID NO: 5837 - RNA, 16 nt, Synthetic Construct
  source 1..16: mol_type = other RNA
agcaagtcgaacggta

SEQ ID NO: 5838 - RNA, 16 nt, Synthetic Construct
  source 1..16: mol_type = other RNA
agcaagtcgaacggta

SEQ ID NO: 5839 - RNA, 21 nt, Synthetic Construct
  source 1..21: mol_type = other RNA
cagtgcaatgttaaaagggca

SEQ ID NO: 5840 - RNA, 21 nt, Synthetic Construct
  source 1..21: mol_type = other RNA
cagtgcaatgttaaaagggca

SEQ ID NO: 5841 - RNA, 22 nt, Synthetic Construct
  source 1..22: mol_type = other RNA
tgaggcagtagattgtatagtt

SEQ ID NO: 5842 - RNA, 22 nt, Synthetic Construct
  source 1..22: mol_type = other RNA
tgaggcagtagattgtatagtt

SEQ ID NO: 5843 - RNA, 22 nt, Synthetic Construct
  source 1..22: mol_type = other RNA
tggaatgtaaagaagtatgtaa

SEQ ID NO: 5844 - RNA, 21 nt, Synthetic Construct
  source 1..21: mol_type = other RNA
tgaggaagtaggttgtatagt

SEQ ID NO: 5845 - RNA, 22 nt, Synthetic Construct
  source 1..22: mol_type = other RNA
tgaggtagtagtttgtgctgct

SEQ ID NO: 5846 - RNA, 22 nt, Synthetic Construct
  source 1..22: mol_type = other RNA
tgaggtagtagtttgtgctgct

SEQ ID NO: 5847 - RNA, 20 nt, Synthetic Construct
  source 1..20: mol_type = other RNA
cccagtaaacggcggccgta

SEQ ID NO: 5848 - RNA, 20 nt, Synthetic Construct
  source 1..20: mol_type = other RNA
cccagtaaacggcggccgta

SEQ ID NO: 5849 - RNA, 25 nt, Synthetic Construct
  source 1..25: mol_type = other RNA
aaaccgttaccattactgagtttag

SEQ ID NO: 5850 - RNA, 25 nt, Synthetic Construct
  source 1..25: mol_type = other RNA
aaaccgttaccattactgagtttag

SEQ ID NO: 5851 - RNA, 20 nt, Synthetic Construct
  source 1..20: mol_type = other RNA
tgaggtagtgggttgtgtgg

SEQ ID NO: 5852 - RNA, 20 nt, Synthetic Construct
  source 1..20: mol_type = other RNA
tgaggtagtgggttgtgtgg

SEQ ID NO: 5853 - RNA, 26 nt, Synthetic Construct
  source 1..26: mol_type = other RNA
gcgggcgtagctcaggggtagagcgc

SEQ ID NO: 5854 - RNA, 26 nt, Synthetic Construct
  source 1..26: mol_type = other RNA
gcgggcgtagctcaggggtagagcgc

SEQ ID NO: 5855 - RNA, 16 nt, Synthetic Construct
  source 1..16: mol_type = other RNA
ccggaggaaggtgggg

SEQ ID NO: 5856 - RNA, 16 nt, Synthetic Construct
  source 1..16: mol_type = other RNA
ccggaggaaggtgggg

SEQ ID NO: 5857 - RNA, 35 nt, Synthetic Construct; identical to SEQ ID NO: 787
  source 1..35: mol_type = other RNA

SEQ ID NO: 5858 - RNA, 35 nt, Synthetic Construct; identical to SEQ ID NO: 787
  source 1..35: mol_type = other RNA

SEQ ID NO: 5859 - RNA, 20 nt, Synthetic Construct
  source 1..20: mol_type = other RNA
tgaggtagtaggtcgtatag

SEQ ID NO: 5860 - RNA, 20 nt, Synthetic Construct
  source 1..20: mol_type = other RNA
tgaggtagtaggtcgtatag

SEQ ID NO: 5861 - RNA, 25 nt, Synthetic Construct
  source 1..25: mol_type = other RNA
ggtaaaattgctgagtgaagcattg

SEQ ID NO: 5862 - RNA, 25 nt, Synthetic Construct
  source 1..25: mol_type = other RNA
ggtaaaattgctgagtgaagcattg

SEQ ID NO: 5863 - RNA, 16 nt, Synthetic Construct
  source 1..16: mol_type = other RNA
cccaaaggtcgtcggt

SEQ ID NO: 5864 - RNA, 16 nt, Synthetic Construct
  source 1..16: mol_type = other RNA
cccaaaggtcgtcggt

SEQ ID NO: 5865 - RNA, 21 nt, Synthetic Construct
  source 1..21: mol_type = other RNA
tgtagtgtttcctactttatg

SEQ ID NO: 5866 - RNA, 22 nt, Synthetic Construct
  source 1..22: mol_type = other RNA
cattgcacttgtcccggcctgt

SEQ ID NO: 5867 - RNA, 22 nt, Synthetic Construct
  source 1..22: mol_type = other RNA
cattgcacttgtcccggcctgt

SEQ ID NO: 5868 - RNA, 21 nt, Synthetic Construct
  source 1..21: mol_type = other RNA
tctttggttatctagctgtat

SEQ ID NO: 5869 - RNA, 22 nt, Synthetic Construct
  source 1..22: mol_type = other RNA
tagcagcacgtaaatatcggcg

SEQ ID NO: 5870 - RNA, 22 nt, Synthetic Construct
  source 1..22: mol_type = other RNA
tagcagcacgtaaatatcggcg

SEQ ID NO: 5871 - RNA, 19 nt, Synthetic Construct
  source 1..19: mol_type = other RNA
tgtcaactggttgttggga

SEQ ID NO: 5872 - RNA, 20 nt, Synthetic Construct
  source 1..20: mol_type = other RNA
gcgtgcttgactgcgagact

SEQ ID NO: 5873 - RNA, 22 nt, Synthetic Construct
  source 1..22: mol_type = other RNA
tcctgtactgagctgctccgag

SEQ ID NO: 5874 - RNA, 17 nt, Synthetic Construct
  source 1..17: mol_type = other RNA
ggcccttatgggtaggg

SEQ ID NO: 5875 - RNA, 18 nt, Synthetic Construct
  source 1..18: mol_type = other RNA
ggtgcaagcgttaatcgg

SEQ ID NO: 5876 - RNA, 27 nt, Synthetic Construct
  source 1..27: mol_type = other RNA
catgcgagagtaggacgttgccaggtt

SEQ ID NO: 5877 - RNA, 27 nt, Synthetic Construct
  source 1..27: mol_type = other RNA
catgcgagagtaggacgttgccaggtt

SEQ ID NO: 5878 - RNA, 23 nt, Synthetic Construct
  source 1..23: mol_type = other RNA
tgaggggcagagagcgggacttt

SEQ ID NO: 5879 - RNA, 30 nt, Synthetic Construct
  source 1..30: mol_type = other RNA
gactcttagcggtggatcactcggctcgtg

SEQ ID NO: 5880 - RNA, 30 nt, Synthetic Construct; identical to SEQ ID NO: 5879
  source 1..30: mol_type = other RNA

SEQ ID NO: 5881 - RNA, 28 nt, Synthetic Construct
  source 1..28: mol_type = other RNA
ggatttccccttggggttgtaggaccac

SEQ ID NO: 5882 - RNA, 28 nt, Synthetic Construct
  source 1..28: mol_type = other RNA
ggatttccccttggggttgtaggaccac

SEQ ID NO: 5883 - RNA, 22 nt, Synthetic Construct
  source 1..22: mol_type = other RNA
tccagtactgagctgccccgag

SEQ ID NO: 5884 - RNA, 22 nt, Synthetic Construct
  source 1..22: mol_type = other RNA
tccagtactgagctgccccgag

SEQ ID NO: 5885 - RNA, 22 nt, Synthetic Construct
  source 1..22: mol_type = other RNA
tgaggaagtaggttgtatagtt

SEQ ID NO: 5886 - RNA, 16 nt, Synthetic Construct
  source 1..16: mol_type = other RNA
cacaccgcccgtcgct

SEQ ID NO: 5887 - RNA, 16 nt, Synthetic Construct
  source 1..16: mol_type = other RNA
cacaccgcccgtcgct

SEQ ID NO: 5888 - RNA, 22 nt, Synthetic Construct
  source 1..22: mol_type = other RNA
tggaatgtaaaggagtatgtat

SEQ ID NO: 5889 - RNA, 22 nt, Synthetic Construct
  source 1..22: mol_type = other RNA
tggaatgtaaaggagtatgtat

SEQ ID NO: 5890 - RNA, 20 nt, Synthetic Construct
  source 1..20: mol_type = other RNA
tcctgtctgaatatgggggg

SEQ ID NO: 5891 - RNA, 22 nt, Synthetic Construct
  source 1..22: mol_type = other RNA
tgaggtagtaggttgtgtggtc

SEQ ID NO: 5892 - RNA, 22 nt, Synthetic Construct
  source 1..22: mol_type = other RNA
tggaatgtaaagaagtacgtat

SEQ ID NO: 5893 - RNA, 22 nt, Synthetic Construct
  source 1..22: mol_type = other RNA
tggaatgtaaagaagtacgtat

SEQ ID NO: 5894 - RNA, 22 nt, Synthetic Construct
  source 1..22: mol_type = other RNA
tgaggtagtaggctgtatagtt

SEQ ID NO: 5895 - RNA, 22 nt, Synthetic Construct
  source 1..22: mol_type = other RNA
tgaggtagtaggctgtatagtt

SEQ ID NO: 5896 - RNA, 21 nt, Synthetic Construct
  source 1..21: mol_type = other RNA
acacatgcaagtcgaacggta

SEQ ID NO: 5897 - RNA, 21 nt, Synthetic Construct
  source 1..21: mol_type = other RNA
acacatgcaagtcgaacggta

SEQ ID NO: 5898 - RNA, 38 nt, Synthetic Construct; identical to SEQ ID NO: 2492
  source 1..38: mol_type = other RNA

SEQ ID NO: 5899 - RNA, 21 nt, Synthetic Construct
  source 1..21: mol_type = other RNA
tgaggtagtagatcgtatagt

SEQ ID NO: 5900 - RNA, 21 nt, Synthetic Construct
  source 1..21: mol_type = other RNA
tgaggtagtagatcgtatagt

SEQ ID NO: 5901 - RNA, 21 nt, Synthetic Construct
  source 1..21: mol_type = other RNA
tgaggtagaaggttgtgtggt

SEQ ID NO: 5902 - RNA, 21 nt, Synthetic Construct
  source 1..21: mol_type = other RNA
tgaggtagaaggttgtgtggt

SEQ ID NO: 5903 - RNA, 24 nt, Synthetic Construct
  source 1..24: mol_type = other RNA
tgtaaacatccccgactgggagct

SEQ ID NO: 5904 - RNA, 18 nt, Synthetic Construct
  source 1..18: mol_type = other RNA
gtcgacgtatagggtgtg

SEQ ID NO: 5905 - RNA, 18 nt, Synthetic Construct
  source 1..18: mol_type = other RNA
gtcgacgtatagggtgtg

SEQ ID NO: 5906 - RNA, 27 nt, Synthetic Construct
  source 1..27: mol_type = other RNA
cgtgtgaaagtaggtcatcgtcaggct

SEQ ID NO: 5907 - RNA, 27 nt, Synthetic Construct
  source 1..27: mol_type = other RNA
cgtgtgaaagtaggtcatcgtcaggct

SEQ ID NO: 5908 - RNA, 16 nt, Synthetic Construct
  source 1..16: mol_type = other RNA
agttgaccgcctgggg

SEQ ID NO: 5909 - RNA, 18 nt, Synthetic Construct
  source 1..18: mol_type = other RNA
atcgctagtaatcgcgga

SEQ ID NO: 5910 - RNA, 18 nt, Synthetic Construct
  source 1..18: mol_type = other RNA
atcgctagtaatcgcgga

SEQ ID NO: 5911 - RNA, 22 nt, Synthetic Construct
  source 1..22: mol_type = other RNA
aattgcacggtatccatctgta

SEQ ID NO: 5912 - RNA, 22 nt, Synthetic Construct
  source 1..22: mol_type = other RNA
aattgcacggtatccatctgta

SEQ ID NO: 5913 - RNA, 22 nt, Synthetic Construct
  source 1..22: mol_type = other RNA
tgagatagtaggttgtgtggtt

SEQ ID NO: 5914 - RNA, 22 nt, Synthetic Construct
  source 1..22: mol_type = other RNA
tgagatagtaggttgtgtggtt

SEQ ID NO: 5915 - RNA, 33 nt, Synthetic Construct; identical to SEQ ID NO: 2479
  source 1..33: mol_type = other RNA

SEQ ID NO: 5916 - RNA, 23 nt, Synthetic Construct
  source 1..23: mol_type = other RNA
tggtaacacgacgtacttagtgt

SEQ ID NO: 5917 - RNA, 32 nt, Synthetic Construct; identical to SEQ ID NO: 2086
  source 1..32: mol_type = other RNA

SEQ ID NO: 5918 - RNA, 32 nt, Synthetic Construct; identical to SEQ ID NO: 2086
  source 1..32: mol_type = other RNA

SEQ ID NO: 5919 - RNA, 19 nt, Synthetic Construct
  source 1..19: mol_type = other RNA
gctattgacgaccgtaccg

SEQ ID NO: 5920 - RNA, 19 nt, Synthetic Construct
  source 1..19: mol_type = other RNA
gctattgacgaccgtaccg

SEQ ID NO: 5921 - RNA, 16 nt, Synthetic Construct
  source 1..16: mol_type = other RNA
gtccacggccatacca

SEQ ID NO: 5922 - RNA, 15 nt, Synthetic Construct
  source 1..15: mol_type = other RNA
ggccgtcgtcagctc

SEQ ID NO: 5923 - RNA, 15 nt, Synthetic Construct
  source 1..15: mol_type = other RNA
ggtggctgtagctca

SEQ ID NO: 5924 - RNA, 15 nt, Synthetic Construct
  source 1..15: mol_type = other RNA
ggtggctgtagctca

SEQ ID NO: 5925 - RNA, 15 nt, Synthetic Construct
  source 1..15: mol_type = other RNA
gcaagtcgagcggta

SEQ ID NO: 5926 - RNA, 15 nt, Synthetic Construct
  source 1..15: mol_type = other RNA
gcaagtcgagcggta

SEQ ID NO: 5927 - RNA, 21 nt, Synthetic Construct
  source 1..21: mol_type = other RNA
tgaggtagtaggtcgtgtggt

SEQ ID NO: 5928 - RNA, 21 nt, Synthetic Construct
  source 1..21: mol_type = other RNA
tgaggtagtaggtcgtgtggt

SEQ ID NO: 5929 - RNA, 23 nt, Synthetic Construct
  source 1..23: mol_type = other RNA
caaagagctgttcgtgcaggtag

SEQ ID NO: 5930 - RNA, 21 nt, Synthetic Construct
  source 1..21: mol_type = other RNA
tgaggtagtaggttgtgcggt

SEQ ID NO: 5931 - RNA, 21 nt, Synthetic Construct
  source 1..21: mol_type = other RNA
tgaggtagtaggttgtgcggt

SEQ ID NO: 5932 - RNA, 15 nt, Synthetic Construct
  source 1..15: mol_type = other RNA
gcagagcgtcggtct

SEQ ID NO: 5933 - RNA, 15 nt, Synthetic Construct
  source 1..15: mol_type = other RNA
gcagagcgtcggtct

SEQ ID NO: 5934 - RNA, 16 nt, Synthetic Construct
  source 1..16: mol_type = other RNA
ctgacgctcatgcacg

SEQ ID NO: 5935 - RNA, 21 nt, Synthetic Construct
  source 1..21: mol_type = other RNA
tgaggggcagagagcgaggct

SEQ ID NO: 5936 - RNA, 21 nt, Synthetic Construct
  source 1..21: mol_type = other RNA
tgaggggcagagagcgaggct

SEQ ID NO: 5937 - RNA, 23 nt, Synthetic Construct
  source 1..23: mol_type = other RNA
aacggaatcccaaaagcagctgt

SEQ ID NO: 5938 - RNA, 23 nt, Synthetic Construct
  source 1..23: mol_type = other RNA
aacggaatcccaaaagcagctgt

SEQ ID NO: 5939 - RNA, 21 nt, Synthetic Construct
  source 1..21: mol_type = other RNA
tgaggtagtagattgtatagc

SEQ ID NO: 5940 - RNA, 21 nt, Synthetic Construct
  source 1..21: mol_type = other RNA
tgaggtagtagattgtatagc

SEQ ID NO: 5941 - RNA, 21 nt, Synthetic Construct
  source 1..21: mol_type = other RNA
tcctgtaccgagctgccccga

SEQ ID NO: 5942 - RNA, 21 nt, Synthetic Construct
  source 1..21: mol_type = other RNA
tcctgtaccgagctgccccga

SEQ ID NO: 5943 - RNA, 31 nt, Synthetic Construct
  source 1..31: mol_type = other RNA
gcccggatagctcagtcggtagagcatcaga

SEQ ID NO: 5944 - RNA, 31 nt, Synthetic Construct; identical to SEQ ID NO: 5943
  source 1..31: mol_type = other RNA

SEQ ID NO: 5945 - RNA, 22 nt, Synthetic Construct
  source 1..22: mol_type = other RNA
tgaggtagtagtttgcgctgtt

SEQ ID NO: 5946 - RNA, 22 nt, Synthetic Construct
  source 1..22: mol_type = other RNA
tgaggtagtagtttgcgctgtt

SEQ ID NO: 5947 - RNA, 23 nt, Synthetic Construct
  source 1..23: mol_type = other RNA
tagtaatacgacgtacttagtgt

SEQ ID NO: 5948 - RNA, 22 nt, Synthetic Construct
  source 1..22: mol_type = other RNA
ngaggtagtaggttgtatagtt

SEQ ID NO: 5949 - RNA, 18 nt, Synthetic Construct
  source 1..18: mol_type = other RNA
tccgacatgcgagggttc

SEQ ID NO: 5950 - RNA, 18 nt, Synthetic Construct
  source 1..18: mol_type = other RNA
tccgacatgcgagggttc

SEQ ID NO: 5951 - RNA, 27 nt, Synthetic Construct
  source 1..27: mol_type = other RNA
gcgggcgtagctcaggggtagagcgca

SEQ ID NO: 5952 - RNA, 27 nt, Synthetic Construct
  source 1..27: mol_type = other RNA
gcgggcgtagctcaggggtagagcgca

SEQ ID NO: 5953 - RNA, 16 nt, Synthetic Construct
  source 1..16: mol_type = other RNA
tgcacgaaagcgtggg

SEQ ID NO: 5954 - RNA, 21 nt, Synthetic Construct
  source 1..21: mol_type = other RNA
tcctgtgctgagctgccccga

SEQ ID NO: 5955 - RNA, 35 nt, Synthetic Construct; identical to SEQ ID NO: 757
  source 1..35: mol_type = other RNA

SEQ ID NO: 5956 - RNA, 35 nt, Synthetic Construct; identical to SEQ ID NO: 757
  source 1..35: mol_type = other RNA

SEQ ID NO: 5957 - RNA, 26 nt, Synthetic Construct
  source 1..26: mol_type = other RNA
ggcgcttgagagaactctggagaagg

SEQ ID NO: 5958 - RNA, 18 nt, Synthetic Construct
  source 1..18: mol_type = other RNA
cctgaagaataagcaccg

SEQ ID NO: 5959 - RNA, 17 nt, Synthetic Construct
  source 1..17: mol_type = other RNA
cagtagctcgaggaaaa

SEQ ID NO: 5960 - RNA, 17 nt, Synthetic Construct
  source 1..17: mol_type = other RNA
cagtagctcgaggaaaa

SEQ ID NO: 5961 - RNA, 28 nt, Synthetic Construct
  source 1..28: mol_type = other RNA
ggatttccccttggggttgtaggaccac

SEQ ID NO: 5962 - RNA, 28 nt, Synthetic Construct
  source 1..28: mol_type = other RNA
ggatttccccttggggttgtaggaccac

SEQ ID NO: 5963 - RNA, 23 nt, Synthetic Construct
  source 1..23: mol_type = other RNA
cggtaatacgacgtacttagtgt

SEQ ID NO: 5964 - RNA, 23 nt, Synthetic Construct
  source 1..23: mol_type = other RNA
cggtaatacgacgtacttagtgt

SEQ ID NO: 5965 - RNA, 27 nt, Synthetic Construct
  source 1..27: mol_type = other RNA
gttggttcaagcgtgtagtcgtgctct

SEQ ID NO: 5966 - RNA, 15 nt, Synthetic Construct
  source 1..15: mol_type = other RNA
gttcggaagattttc

SEQ ID NO: 5967 - RNA, 15 nt, Synthetic Construct
  source 1..15: mol_type = other RNA
gttcggaagattttc

SEQ ID NO: 5968 - RNA, 16 nt, Synthetic Construct
  source 1..16: mol_type = other RNA
gcaagaggtcagcggt

SEQ ID NO: 5969 - RNA, 22 nt, Synthetic Construct
  source 1..22: mol_type = other RNA
tgaggcagtaggttgtgtggtt

SEQ ID NO: 5970 - RNA, 22 nt, Synthetic Construct
  source 1..22: mol_type = other RNA
tgaggcagtaggttgtgtggtt

SEQ ID NO: 5971 - RNA, 22 nt, Synthetic Construct
  source 1..22: mol_type = other RNA
tacccattgcatatcggagttg

SEQ ID NO: 5972 - RNA, 22 nt, Synthetic Construct
  source 1..22: mol_type = other RNA
tacccattgcatatcggagttg

SEQ ID NO: 5973 - RNA, 26 nt, Synthetic Construct
  source 1..26: mol_type = other RNA
tgtcggctcatctcatcctggggctg

SEQ ID NO: 5974 - RNA, 26 nt, Synthetic Construct
  source 1..26: mol_type = other RNA
cgactcttagcggtggatcactcggc

SEQ ID NO: 5975 - RNA, 26 nt, Synthetic Construct
  source 1..26: mol_type = other RNA
cgactcttagcggtggatcactcggc

SEQ ID NO: 5976 - RNA, 33 nt, Synthetic Construct; identical to SEQ ID NO: 2126
  source 1..33: mol_type = other RNA

SEQ ID NO: 5977 - RNA, 33 nt, Synthetic Construct; identical to SEQ ID NO: 2126
  source 1..33: mol_type = other RNA

SEQ ID NO: 5978 - RNA, 23 nt, Synthetic Construct
  source 1..23: mol_type = other RNA
tgaggggcggagagcgagacttt

SEQ ID NO: 5979 - RNA, 22 nt, Synthetic Construct
  source 1..22: mol_type = other RNA
tgaggtagtaggttgtgtggat

SEQ ID NO: 5980 - RNA, 24 nt, Synthetic Construct
  source 1..24: mol_type = other RNA
tcggatccgtctgagcttggcttt

SEQ ID NO: 5981 - RNA, 29 nt, Synthetic Construct
  source 1..29: mol_type = other RNA
gtaatggcgggaactctggacagactgcc

SEQ ID NO: 5982 - RNA, 29 nt, Synthetic Construct
  source 1..29: mol_type = other RNA
gtaatggcgggaactctggacagactgcc

SEQ ID NO: 5983 - RNA, 16 nt, Synthetic Construct
  source 1..16: mol_type = other RNA
gaaattccttgtcggg

SEQ ID NO: 5984 - RNA, 16 nt, Synthetic Construct
  source 1..16: mol_type = other RNA
gtctacgaccatacca

SEQ ID NO: 5985 - RNA, 16 nt, Synthetic Construct
  source 1..16: mol_type = other RNA
gtctacgaccatacca

SEQ ID NO: 5986 - RNA, 30 nt, Synthetic Construct; identical to SEQ ID NO: 1641
  source 1..30: mol_type = other RNA

SEQ ID NO: 5987 - RNA, 30 nt, Synthetic Construct; identical to SEQ ID NO: 1641
  source 1..30: mol_type = other RNA

SEQ ID NO: 5988 - RNA, 23 nt, Synthetic Construct
  source 1..23: mol_type = other RNA
aacattcaacgctgtcggtgaga

SEQ ID NO: 5989 - RNA, 23 nt, Synthetic Construct
  source 1..23: mol_type = other RNA
tggtaatacgacgtactttgtgt

SEQ ID NO: 5990 - RNA, 23 nt, Synthetic Construct
  source 1..23: mol_type = other RNA
ggcagggttcgtgactggggtga

SEQ ID NO: 5991 - RNA, 23 nt, Synthetic Construct
  source 1..23: mol_type = other RNA
ggcagggttcgtgactggggtga

SEQ ID NO: 5992 - RNA, 23 nt, Synthetic Construct
  source 1..23: mol_type = other RNA
tcctgtactgggctgccccgaga

SEQ ID NO: 5993 - RNA, 23 nt, Synthetic Construct
  source 1..23: mol_type = other RNA
tcctgtactgggctgccccgaga

SEQ ID NO: 5994 - RNA, 23 nt, Synthetic Construct
  source 1..23: mol_type = other RNA
tagcaccatttgaaatcagtgtt

SEQ ID NO: 5995 - RNA, 23 nt, Synthetic Construct
  source 1..23: mol_type = other RNA
tagcaccatttgaaatcagtgtt

SEQ ID NO: 5996 - RNA, 22 nt, Synthetic Construct
  source 1..22: mol_type = other RNA
ttcaagtaatccaggataggtt

SEQ ID NO: 5997 - RNA, 32 nt, Synthetic Construct; identical to SEQ ID NO: 2582
  source 1..32: mol_type = other RNA

SEQ ID NO: 5998 - RNA, 32 nt, Synthetic Construct; identical to SEQ ID NO: 2582
  source 1..32: mol_type = other RNA

SEQ ID NO: 5999 - RNA, 15 nt, Synthetic Construct
  source 1..15: mol_type = other RNA
tcagtagctcgagga

SEQ ID NO: 6000 - RNA, 15 nt, Synthetic Construct
  source 1..15: mol_type = other RNA
tcagtagctcgagga

SEQ ID NO: 6001 - RNA, 31 nt, Synthetic Construct
  source 1..31: mol_type = other RNA
cgtaatggcgggaactctggacagactgcct

SEQ ID NO: 6002 - RNA, 31 nt, Synthetic Construct; identical to SEQ ID NO: 6001
  source 1..31: mol_type = other RNA

SEQ ID NO: 6003 - RNA, 23 nt, Synthetic Construct
  source 1..23: mol_type = other RNA
tgaggtagtaggttgtgcggttt

SEQ ID NO: 6004 - RNA, 23 nt, Synthetic Construct
  source 1..23: mol_type = other RNA
tgaggtagtaggttgtgcggttt

SEQ ID NO: 6005 - RNA, 20 nt, Synthetic Construct
  source 1..20: mol_type = other RNA
gcaataacaggtctgtgatg

SEQ ID NO: 6006 - RNA, 20 nt, Synthetic Construct
  source 1..20: mol_type = other RNA
gcaataacaggtctgtgatg

SEQ ID NO: 6007 - RNA, 18 nt, Synthetic Construct
  source 1..18: mol_type = other RNA
ggctttgaagtaaggtcg

SEQ ID NO: 6008 - RNA, 25 nt, Synthetic Construct
  source 1..25: mol_type = other RNA
ttgaggatatgaggtcgagacgaca

SEQ ID NO: 6009 - RNA, 25 nt, Synthetic Construct
  source 1..25: mol_type = other RNA
ttgaggatatgaggtcgagacgaca

SEQ ID NO: 6010 - RNA, 16 nt, Synthetic Construct
  source 1..16: mol_type = other RNA
gtctacggccatacta

SEQ ID NO: 6011 - RNA, 16 nt, Synthetic Construct
  source 1..16: mol_type = other RNA
gtctacggccatacta

SEQ ID NO: 6012 - RNA, 21 nt, Synthetic Construct
  source 1..21: mol_type = other RNA
agcgtgcttgactgcgagact

SEQ ID NO: 6013 - RNA, 23 nt, Synthetic Construct
  source 1..23: mol_type = other RNA
tggtaatacgacgtacttagtgt

SEQ ID NO: 6014 - RNA, 23 nt, Synthetic Construct
  source 1..23: mol_type = other RNA
tggtaatacgacgtacttagtgt

SEQ ID NO: 6015 - RNA, 23 nt, Synthetic Construct
  source 1..23: mol_type = other RNA
taaggtgcatctagtgcagatag

SEQ ID NO: 6016 - RNA, 23 nt, Synthetic Construct
  source 1..23: mol_type = other RNA
tggcaatacgacgtacttagtgt

SEQ ID NO: 6017 - RNA, 22 nt, Synthetic Construct
  source 1..22: mol_type = other RNA
caaagtgcttacagtgcaggta

SEQ ID NO: 6018 - RNA, 22 nt, Synthetic Construct
  source 1..22: mol_type = other RNA
caaagtgcttacagtgcaggta

SEQ ID NO: 6019 - RNA, 22 nt, Synthetic Construct
  source 1..22: mol_type = other RNA
tgaggtagtaggttgtgcggtt

SEQ ID NO: 6020 - RNA, 21 nt, Synthetic Construct
  source 1..21: mol_type = other RNA
tgaggcagtaggttgtgtggt

SEQ ID NO: 6021 - RNA, 21 nt, Synthetic Construct
  source 1..21: mol_type = other RNA
tgaggcagtaggttgtgtggt

SEQ ID NO: 6022 - RNA, 16 nt, Synthetic Construct
  source 1..16: mol_type = other RNA
gtgacgcgcatgaatg

SEQ ID NO: 6023 - RNA, 16 nt, Synthetic Construct
  source 1..16: mol_type = other RNA
gtgacgcgcatgaatg

SEQ ID NO: 6024 - RNA, 21 nt, Synthetic Construct
  source 1..21: mol_type = other RNA
ggaggagttcgaaggtacgct

SEQ ID NO: 6025 - RNA, 23 nt, Synthetic Construct
  source 1..23: mol_type = other RNA
tggtgatacgacgtacttagtgt

SEQ ID NO: 6026 - RNA, 23 nt, Synthetic Construct
  source 1..23: mol_type = other RNA
tggtgatacgacgtacttagtgt

SEQ ID NO: 6027 - RNA, 23 nt, Synthetic Construct
  source 1..23: mol_type = other RNA
tggtaataagacgtacttagtgt

SEQ ID NO: 6028 - RNA, 21 nt, Synthetic Construct
  source 1..21: mol_type = other RNA
tgaggaagtaggttgtatagt

SEQ ID NO: 6029 - RNA, 21 nt, Synthetic Construct
  source 1..21: mol_type = other RNA
tgaggaagtaggttgtatagt

SEQ ID NO: 6030 - RNA, 23 nt, Synthetic Construct
  source 1..23: mol_type = other RNA
tggtaatacgacgtactcagtgt

SEQ ID NO: 6031 - RNA, 24 nt, Synthetic Construct
  source 1..24: mol_type = other RNA
tataccgaagctctaggtgcggca

SEQ ID NO: 6032 - RNA, 24 nt, Synthetic Construct
  source 1..24: mol_type = other RNA
tataccgaagctctaggtgcggca

SEQ ID NO: 6033 - RNA, 24 nt, Synthetic Construct
  source 1..24: mol_type = other RNA
gttgaattgtggtctgtggacgtg

SEQ ID NO: 6034 - RNA, 24 nt, Synthetic Construct
  source 1..24: mol_type = other RNA
gttgaattgtggtctgtggacgtg

SEQ ID NO: 6035 - RNA, 23 nt, Synthetic Construct
  source 1..23: mol_type = other RNA
ccctgtactgagctgccccgagt

SEQ ID NO: 6036 - RNA, 23 nt, Synthetic Construct
  source 1..23: mol_type = other RNA
ccctgtactgagctgccccgagt

SEQ ID NO: 6037 - RNA, 19 nt, Synthetic Construct
  source 1..19: mol_type = other RNA
tcctgtaccgatcaatagt

SEQ ID NO: 6038 - RNA, 19 nt, Synthetic Construct
  source 1..19: mol_type = other RNA
tcctgtaccgatcaatagt

SEQ ID NO: 6039 - RNA, 27 nt, Synthetic Construct
  source 1..27: mol_type = other RNA
cgactcttagcggtggatcactcggct

SEQ ID NO: 6040 - RNA, 27 nt, Synthetic Construct
  source 1..27: mol_type = other RNA
cgactcttagcggtggatcactcggct

SEQ ID NO: 6041 - RNA, 22 nt, Synthetic Construct
  source 1..22: mol_type = other RNA
tggaatgtaaagaagtatgtac

SEQ ID NO: 6042 - RNA, 22 nt, Synthetic Construct
  source 1..22: mol_type = other RNA
tggaatgtaaagaagtatgtac

SEQ ID NO: 6043 - RNA, 23 nt, Synthetic Construct
  source 1..23: mol_type = other RNA
aacggaatcccaaaagcagctgt

SEQ ID NO: 6044 - RNA, 22 nt, Synthetic Construct
  source 1..22: mol_type = other RNA
cgaggtagtaggttgtatagtt

SEQ ID NO: 6045 - RNA, 22 nt, Synthetic Construct
  source 1..22: mol_type = other RNA
tggaatgtaaagaagtatgcat

SEQ ID NO: 6046 - RNA, 22 nt, Synthetic Construct
  source 1..22: mol_type = other RNA
tggaatgtaaagaagtatgcat

SEQ ID NO: 6047 - RNA, 21 nt, Synthetic Construct
  source 1..21: mol_type = other RNA
cgaggtagtaggttgtgtggt

SEQ ID NO: 6048 - RNA, 21 nt, Synthetic Construct
  source 1..21: mol_type = other RNA
cgaggtagtaggttgtgtggt

SEQ ID NO: 6049 - RNA, 24 nt, Synthetic Construct
  source 1..24: mol_type = other RNA
acctggcatacaatgtagatttct

SEQ ID NO: 6050 - RNA, 24 nt, Synthetic Construct
  source 1..24: mol_type = other RNA
acctggcatacaatgtagatttct

SEQ ID NO: 6051 - RNA, 22 nt, Synthetic Construct
  source 1..22: mol_type = other RNA
tgtggtagtaggttgtatagtt

SEQ ID NO: 6052 - RNA, 22 nt, Synthetic Construct
  source 1..22: mol_type = other RNA
cggaatcgctagtaatcgcgga

SEQ ID NO: 6053 - RNA, 22 nt, Synthetic Construct
  source 1..22: mol_type = other RNA
cggaatcgctagtaatcgcgga

SEQ ID NO: 6054 - RNA, 21 nt, Synthetic Construct
  source 1..21: mol_type = other RNA
tgaggggcagagggcgagact

SEQ ID NO: 6055 - RNA, 16 nt, Synthetic Construct
  source 1..16: mol_type = other RNA
gcagacgaagtgagtg

SEQ ID NO: 6056 - RNA, 31 nt, Synthetic Construct; identical to SEQ ID NO: 2295
  source 1..31: mol_type = other RNA

SEQ ID NO: 6057 - RNA, 31 nt, Synthetic Construct; identical to SEQ ID NO: 2295
  source 1..31: mol_type = other RNA

SEQ ID NO: 6058 - RNA, 21 nt, Synthetic Construct
  source 1..21: mol_type = other RNA
tgaggtagaaggttgtgtggt

SEQ ID NO: 6059 - RNA, 21 nt, Synthetic Construct
  source 1..21: mol_type = other RNA
tgaggtagaaggttgtgtggt

SEQ ID NO: 6060 - RNA, 17 nt, Synthetic Construct
  source 1..17: mol_type = other RNA
gtgttcggaagattttc

SEQ ID NO: 6061 - RNA, 17 nt, Synthetic Construct
  source 1..17: mol_type = other RNA
gtgttcggaagattttc

SEQ ID NO: 6062 - RNA, 22 nt, Synthetic Construct
  source 1..22: mol_type = other RNA
tgaggtagtagtttgtgctgta

SEQ ID NO: 6063 - RNA, 22 nt, Synthetic Construct
  source 1..22: mol_type = other RNA
tgaggtagtaggttgcgtggtt

SEQ ID NO: 6064 - RNA, 22 nt, Synthetic Construct
  source 1..22: mol_type = other RNA
tgaggtagtaggttgcgtggtt

SEQ ID NO: 6065 - RNA, 22 nt, Synthetic Construct
  source 1..22: mol_type = other RNA
tgaggaagtagtttgtgctgtt

SEQ ID NO: 6066 - RNA, 24 nt, Synthetic Construct
  source 1..24: mol_type = other RNA
gatgaggcgtgataacgagtctgc

SEQ ID NO: 6067 - RNA, 20 nt, Synthetic Construct
  source 1..20: mol_type = other RNA
tgaggtagtaggttgtgtgt

SEQ ID NO: 6068 - RNA, 20 nt, Synthetic Construct
  source 1..20: mol_type = other RNA
tgaggtagtaggttgtgtgt

SEQ ID NO: 6069 - RNA, 20 nt, Synthetic Construct
  source 1..20: mol_type = other RNA
tagcgaaattccttgtcggg

SEQ ID NO: 6070 - RNA, 20 nt, Synthetic Construct
  source 1..20: mol_type = other RNA
tagcgaaattccttgtcggg

SEQ ID NO: 6071 - RNA, 21 nt, Synthetic Construct
  source 1..21: mol_type = other RNA
tgaggtagtaggttgtacagt

SEQ ID NO: 6072 - RNA, 21 nt, Synthetic Construct
  source 1..21: mol_type = other RNA
tgaggtagtaggttgtacagt

SEQ ID NO: 6073 - RNA, 23 nt, Synthetic Construct
  source 1..23: mol_type = other RNA
agcagcattgtacagggctatgg

SEQ ID NO: 6074 - RNA, 35 nt, Synthetic Construct; identical to SEQ ID NO: 2399
  source 1..35: mol_type = other RNA

SEQ ID NO: 6075 - RNA, 22 nt, Synthetic Construct
  source 1..22: mol_type = other RNA
agggctgggtcggtcgggctgg

SEQ ID NO: 6076 - RNA, 22 nt, Synthetic Construct
  source 1..22: mol_type = other RNA
agggctgggtcggtcgggctgg

SEQ ID NO: 6077 - RNA, 24 nt, Synthetic Construct
  source 1..24: mol_type = other RNA
tggaagactagtgattttgttgtt

SEQ ID NO: 6078 - RNA, 21 nt, Synthetic Construct
  source 1..21: mol_type = other RNA
ggagtatgcagagcaagatca

SEQ ID NO: 6079 - RNA, 21 nt, Synthetic Construct
  source 1..21: mol_type = other RNA
ggagtatgcagagcaagatca

SEQ ID NO: 6080 - RNA, 23 nt, Synthetic Construct
  source 1..23: mol_type = other RNA
agctcggtctgaggcccctcaga

SEQ ID NO: 6081 - RNA, 23 nt, Synthetic Construct
  source 1..23: mol_type = other RNA
agctcggtctgaggcccctcaga

SEQ ID NO: 6082 - RNA, 23 nt, Synthetic Construct
  source 1..23: mol_type = other RNA
gggtaatacgacgtacttagtgt

SEQ ID NO: 6083 - RNA, 23 nt, Synthetic Construct
  source 1..23: mol_type = other RNA
gggtaatacgacgtacttagtgt

SEQ ID NO: 6084 - RNA, 22 nt, Synthetic Construct
  source 1..22: mol_type = other RNA
tgaggtagtagtttgtgctgtg

SEQ ID NO: 6085 - RNA, 22 nt, Synthetic Construct
  source 1..22: mol_type = other RNA
tggaatgtgaagaagtatgtat

SEQ ID NO: 6086 - RNA, 22 nt, Synthetic Construct
  source 1..22: mol_type = other RNA
tggaatgtgaagaagtatgtat

SEQ ID NO: 6087 - RNA, 22 nt, Synthetic Construct
  source 1..22: mol_type = other RNA
tgaggtagtaggttgtatagta

SEQ ID NO: 6088 - RNA, 22 nt, Synthetic Construct
  source 1..22: mol_type = other RNA
tggaatgtaaagaagtatgcat

SEQ ID NO: 6089 - RNA, 22 nt, Synthetic Construct
  source 1..22: mol_type = other RNA
tggaatgtaaagaagtatgcat

SEQ ID NO: 6090 - RNA, 22 nt, Synthetic Construct
  source 1..22: mol_type = other RNA
ttcaagtaatccaggataggca

SEQ ID NO: 6091 - RNA, 21 nt, Synthetic Construct
  source 1..21: mol_type = other RNA
tgaggggcagagagcgggact

SEQ ID NO: 6092 - RNA, 21 nt, Synthetic Construct
  source 1..21: mol_type = other RNA
tgaggggcagagagcgggact

SEQ ID NO: 6093 - RNA, 33 nt, Synthetic Construct; identical to SEQ ID NO: 2395
  source 1..33: mol_type = other RNA

SEQ ID NO: 6094 - RNA, 22 nt, Synthetic Construct
  source 1..22: mol_type = other RNA
tggaatgtaaagaagtacgtat

SEQ ID NO: 6095 - RNA, 15 nt, Synthetic Construct
  source 1..15: mol_type = other RNA
tagagtagggcggga

SEQ ID NO: 6096 - RNA, 16 nt, Synthetic Construct
  source 1..16: mol_type = other RNA
cccagaaacccggtcg

SEQ ID NO: 6097 - RNA, 16 nt, Synthetic Construct
  source 1..16: mol_type = other RNA
cccagaaacccggtcg

SEQ ID NO: 6098 - RNA, 18 nt, Synthetic Construct
  source 1..18: mol_type = other RNA
gtctgcctcagcgtcggt

SEQ ID NO: 6099 - RNA, 18 nt, Synthetic Construct
  source 1..18: mol_type = other RNA
gtctgcctcagcgtcggt

SEQ ID NO: 6100 - RNA, 17 nt, Synthetic Construct
  source 1..17: mol_type = other RNA
tgccagcagccgcggta

SEQ ID NO: 6101 - RNA, 22 nt, Synthetic Construct
  source 1..22: mol_type = other RNA
caacggaatcccaaaagcagca

SEQ ID NO: 6102 - RNA, 25 nt, Synthetic Construct
  source 1..25: mol_type = other RNA
ttgaggatatgagatcgagacggca

SEQ ID NO: 6103 - RNA, 25 nt, Synthetic Construct
  source 1..25: mol_type = other RNA
ttgaggatatgagatcgagacggca

SEQ ID NO: 6104 - RNA, 22 nt, Synthetic Construct
  source 1..22: mol_type = other RNA
acagtagcctgcacattggtta

SEQ ID NO: 6105 - RNA, 22 nt, Synthetic Construct
  source 1..22: mol_type = other RNA
tggaatgtaaagaagtatgtgt

SEQ ID NO: 6106 - RNA, 22 nt, Synthetic Construct
  source 1..22: mol_type = other RNA
tggaatgtaaagaagtatgtgt

SEQ ID NO: 6107 - RNA, 20 nt, Synthetic Construct
  source 1..20: mol_type = other RNA
tcagtagctcgaggaaaaga

SEQ ID NO: 6108 - RNA, 22 nt, Synthetic Construct
  source 1..22: mol_type = other RNA
tgaggtaataggttgtgtggtt

SEQ ID NO: 6109 - RNA, 22 nt, Synthetic Construct
  source 1..22: mol_type = other RNA
tgaggtaataggttgtgtggtt

SEQ ID NO: 6110 - RNA, 22 nt, Synthetic Construct
  source 1..22: mol_type = other RNA
tctttggttatctagctgtatg

SEQ ID NO: 6111 - RNA, 22 nt, Synthetic Construct
  source 1..22: mol_type = other RNA
tctttggttatctagctgtatg

SEQ ID NO: 6112 - RNA, 29 nt, Synthetic Construct
  source 1..29: mol_type = other RNA
ttacaggggttcgaatcccctaggggacg

SEQ ID NO: 6113 - RNA, 29 nt, Synthetic Construct
  source 1..29: mol_type = other RNA
ttacaggggttcgaatcccctaggggacg

SEQ ID NO: 6114 - RNA, 19 nt, Synthetic Construct
  source 1..19: mol_type = other RNA
tggccgtcgtcagctcgtg

SEQ ID NO: 6115 - RNA, 15 nt, Synthetic Construct
  source 1..15: mol_type = other RNA
ggtggctgtagctca

SEQ ID NO: 6116 - RNA, 22 nt, Synthetic Construct
  source 1..22: mol_type = other RNA
accctgtagatccgaatttgtg

SEQ ID NO: 6117 - RNA, 21 nt, Synthetic Construct
  source 1..21: mol_type = other RNA
caacggaatcccaaaagcagc

SEQ ID NO: 6118 - RNA, 21 nt, Synthetic Construct
  source 1..21: mol_type = other RNA
caacggaatcccaaaagcagc

SEQ ID NO: 6119 - RNA, 16 nt, Synthetic Construct
  source 1..16: mol_type = other RNA
gtctacggccatgcca

SEQ ID NO: 6120 - RNA, 16 nt, Synthetic Construct
  source 1..16: mol_type = other RNA
gtctacggccatgcca

SEQ ID NO: 6121 - RNA, 22 nt, Synthetic Construct
  source 1..22: mol_type = other RNA
gagagcctggacacaggtgctg

SEQ ID NO: 6122 - RNA, 22 nt, Synthetic Construct
  source 1..22: mol_type = other RNA
gagagcctggacacaggtgctg

SEQ ID NO: 6123 - RNA, 23 nt, Synthetic Construct
  source 1..23: mol_type = other RNA
tggtaatatgacgtacttagtgt

SEQ ID NO: 6124 - RNA, 23 nt, Synthetic Construct
  source 1..23: mol_type = other RNA
tggtaatatgacgtacttagtgt

SEQ ID NO: 6125 - RNA, 25 nt, Synthetic Construct
  source 1..25: mol_type = other RNA
tgcgagagtaggacgttgccaggtt

SEQ ID NO: 6126 - RNA, 25 nt, Synthetic Construct
  source 1..25: mol_type = other RNA
tgcgagagtaggacgttgccaggtt

SEQ ID NO: 6127 - RNA, 22 nt, Synthetic Construct
  source 1..22: mol_type = other RNA
tattgcacctgtcccggcctgt

SEQ ID NO: 6128 - RNA, 22 nt, Synthetic Construct
  source 1..22: mol_type = other RNA
tattgcacctgtcccggcctgt

SEQ ID NO: 6129 - RNA, 21 nt, Synthetic Construct
  source 1..21: mol_type = other RNA
tgaggaagtagattgtatagt

SEQ ID NO: 6130 - RNA, 21 nt, Synthetic Construct
  source 1..21: mol_type = other RNA
tgaggaagtaggttgtatagt

SEQ ID NO: 6131 - RNA, 26 nt, Synthetic Construct
  source 1..26: mol_type = other RNA
tccctggtggtctagtggttaggatt

SEQ ID NO: 6132 - RNA, 26 nt, Synthetic Construct
  source 1..26: mol_type = other RNA
tccctggtggtctagtggttaggatt

SEQ ID NO: 6133 - RNA, 22 nt, Synthetic Construct
  source 1..22: mol_type = other RNA
tgaggtagtaggttgtggggtt

SEQ ID NO: 6134 - RNA, 22 nt, Synthetic Construct
  source 1..22: mol_type = other RNA
tgaggtagtaggttgtggggtt

SEQ ID NO: 6135 - RNA, 22 nt, Synthetic Construct
  source 1..22: mol_type = other RNA
ccggtcccaagggtatggctgt

SEQ ID NO: 6136 - RNA, 22 nt, Synthetic Construct
  source 1..22: mol_type = other RNA
cattgcacttgtctcggtctgg

SEQ ID NO: 6137 - RNA, 20 nt, Synthetic Construct
  source 1..20: mol_type = other RNA
tcctgtaccgatcaatagtg

SEQ ID NO: 6138 - RNA, 34 nt, Synthetic Construct; identical to SEQ ID NO: 2364
  source 1..34: mol_type = other RNA

SEQ ID NO: 6139 - RNA, 23 nt, Synthetic Construct
  source 1..23: mol_type = other RNA
tggtaatacgacgtgcttagtgt

SEQ ID NO: 6140 - RNA, 20 nt, Synthetic Construct
  source 1..20: mol_type = other RNA
tcgcgccgtcgggcccgggg

SEQ ID NO: 6141 - RNA, 20 nt, Synthetic Construct
  source 1..20: mol_type = other RNA
tcgcgccgtcgggcccgggg

SEQ ID NO: 6142 - RNA, 35 nt, Synthetic Construct; identical to SEQ ID NO: 2450
  source 1..35: mol_type = other RNA

SEQ ID NO: 6143 - RNA, 17 nt, Synthetic Construct
  source 1..17: mol_type = other RNA
aggaattgacggaaggg

SEQ ID NO: 6144 - RNA, 17 nt, Synthetic Construct
  source 1..17: mol_type = other RNA
aggaattgacggaaggg

SEQ ID NO: 6145 - RNA, 22 nt, Synthetic Construct
  source 1..22: mol_type = other RNA
tacccattgcatatcggagttg

SEQ ID NO: 6146 - RNA, 22 nt, Synthetic Construct
  source 1..22: mol_type = other RNA
tacccattgcatatcggagttg

SEQ ID NO: 6147 - RNA, 16 nt, Synthetic Construct
  source 1..16: mol_type = other RNA
gcagacgaagtgagtg

SEQ ID NO: 6148 - RNA, 16 nt, Synthetic Construct
  source 1..16: mol_type = other RNA
gcagacgaagtgagtg

SEQ ID NO: 6149 - RNA, 21 nt, Synthetic Construct
  source 1..21: mol_type = other RNA
tagcaccatctgaaatcggta

SEQ ID NO: 6150 - RNA, 23 nt, Synthetic Construct
  source 1..23: mol_type = other RNA
tcctgtactgagctgccccggga

SEQ ID NO: 6151 - RNA, 17 nt, Synthetic Construct
  source 1..17: mol_type = other RNA
accggaggaaggtgggg

SEQ ID NO: 6152 - RNA, 35 nt, Synthetic Construct; identical to SEQ ID NO: 2399
  source 1..35: mol_type = other RNA

SEQ ID NO: 6153 - RNA, 35 nt, Synthetic Construct; identical to SEQ ID NO: 2399
  source 1..35: mol_type = other RNA

SEQ ID NO: 6154 - RNA, 25 nt, Synthetic Construct
  source 1..25: mol_type = other RNA
tttccccttggggttgtaggaccac

SEQ ID NO: 6155 - RNA, 25 nt, Synthetic Construct
  source 1..25: mol_type = other RNA
tttccccttggggttgtaggaccac

SEQ ID NO: 6156 - RNA, 27 nt, Synthetic Construct
  source 1..27: mol_type = other RNA
gatttccccttggggttgtaggaccac

SEQ ID NO: 6157 - RNA, 27 nt, Synthetic Construct
  source 1..27: mol_type = other RNA
gatttccccttggggttgtaggaccac

SEQ ID NO: 6158 - RNA, 16 nt, Synthetic Construct
  source 1..16: mol_type = other RNA
gatttgggagtgctcg

SEQ ID NO: 6159 - RNA, 16 nt, Synthetic Construct
  source 1..16: mol_type = other RNA
cagtcaggatgttggc

SEQ ID NO: 6160 - RNA, 16 nt, Synthetic Construct
  source 1..16: mol_type = other RNA
cagtcaggatgttggc

SEQ ID NO: 6161 - RNA, 21 nt, Synthetic Construct
  source 1..21: mol_type = other RNA
tggagtgtgacaatggtgctt

SEQ ID NO: 6162 - RNA, 21 nt, Synthetic Construct
  source 1..21: mol_type = other RNA
tggagtgtgacaatggtgctt

SEQ ID NO: 6163 - RNA, 16 nt, Synthetic Construct
  source 1..16: mol_type = other RNA
ggtagctcgttgggct

SEQ ID NO: 6164 - RNA, 17 nt, Synthetic Construct
  source 1..17: mol_type = other RNA
accggaggaaggtgggg

SEQ ID NO: 6165 - RNA, 17 nt, Synthetic Construct
  source 1..17: mol_type = other RNA
accggaggaaggtgggg

SEQ ID NO: 6166 - RNA, 16 nt, Synthetic Construct
  source 1..16: mol_type = other RNA
agtcaggatgttggct

SEQ ID NO: 6167 - RNA, 21 nt, Synthetic Construct
  source 1..21: mol_type = other RNA
tcctgtactgagctgccccgg

SEQ ID NO: 6168 - RNA, 21 nt, Synthetic Construct
  source 1..21: mol_type = other RNA
tcctgtactgagctgccccgg

SEQ ID NO: 6169 - RNA, 16 nt, Synthetic Construct
  source 1..16: mol_type = other RNA
gtctatggccatacca

SEQ ID NO: 6170 - RNA, 16 nt, Synthetic Construct
  source 1..16: mol_type = other RNA
gtctatggccatacca

SEQ ID NO: 6171 - RNA, 21 nt, Synthetic Construct
  source 1..21: mol_type = other RNA
tgaggtagtagattgtacagt

SEQ ID NO: 6172 - RNA, 15 nt, Synthetic Construct
  source 1..15: mol_type = other RNA
cggcccagactccta

SEQ ID NO: 6173 - RNA, 22 nt, Synthetic Construct
  source 1..22: mol_type = other RNA
tcctgtactgagctaccccgag

SEQ ID NO: 6174 - RNA, 22 nt, Synthetic Construct
  source 1..22: mol_type = other RNA
tcctgtactgagctaccccgag

SEQ ID NO: 6175 - RNA, 22 nt, Synthetic Construct
  source 1..22: mol_type = other RNA
cgactggtaactgggatgaagt

SEQ ID NO: 6176 - RNA, 22 nt, Synthetic Construct
  source 1..22: mol_type = other RNA
cgactggtaactgggatgaagt

SEQ ID NO: 6177 - RNA, 23 nt, Synthetic Construct
  source 1..23: mol_type = other RNA
tggtaaaacgacgtacttagtgt

SEQ ID NO: 6178 - RNA, 23 nt, Synthetic Construct
  source 1..23: mol_type = other RNA
tggtaaaacgacgtacttagtgt

SEQ ID NO: 6179 - RNA, 23 nt, Synthetic Construct
  source 1..23: mol_type = other RNA
ggctcggtctgaggcccctcagt

SEQ ID NO: 6180 - RNA, 22 nt, Synthetic Construct
  source 1..22: mol_type = other RNA
tgaggtagtggattgtatagtt

SEQ ID NO: 6181 - RNA, 22 nt, Synthetic Construct
  source 1..22: mol_type = other RNA
tgaggtagtggattgtatagtt

SEQ ID NO: 6182 - RNA, 20 nt, Synthetic Construct
  source 1..20: mol_type = other RNA
tgaggcagtaggttgtatag

SEQ ID NO: 6183 - RNA, 20 nt, Synthetic Construct
  source 1..20: mol_type = other RNA
tgaggcagtaggttgtatag

SEQ ID NO: 6184 - RNA, 16 nt, Synthetic Construct
  source 1..16: mol_type = other RNA
gtccggatcgtagtct

SEQ ID NO: 6185 - RNA, 21 nt, Synthetic Construct
  source 1..21: mol_type = other RNA
gctattgacgaccgtaccgca

SEQ ID NO: 6186 - RNA, 23 nt, Synthetic Construct
  source 1..23: mol_type = other RNA
tggtaatacgacgtacttggtgt

SEQ ID NO: 6187 - RNA, 20 nt, Synthetic Construct
  source 1..20: mol_type = other RNA
tgaggaagtaggttgtatag

SEQ ID NO: 6188 - RNA, 20 nt, Synthetic Construct
  source 1..20: mol_type = other RNA
tgaggaagtaggttgtatag

SEQ ID NO: 6189 - RNA, 21 nt, Synthetic Construct
  source 1..21: mol_type = other RNA
tgaggtagtaagttgtgtggt

SEQ ID NO: 6190 - RNA, 21 nt, Synthetic Construct
  source 1..21: mol_type = other RNA
tgaggtagtaagttgtgtggt

SEQ ID NO: 6191 - RNA, 29 nt, Synthetic Construct
  source 1..29: mol_type = other RNA
tgaaggtgggttgtgaagcctgctggagg

SEQ ID NO: 6192 - RNA, 29 nt, Synthetic Construct
  source 1..29: mol_type = other RNA
tgaaggtgggttgtgaagcctgctggagg

SEQ ID NO: 6193 - RNA, 16 nt, Synthetic Construct
  source 1..16: mol_type = other RNA
gtctacggctatacca

SEQ ID NO: 6194 - RNA, 16 nt, Synthetic Construct
  source 1..16: mol_type = other RNA
gtctacggccatacaa

SEQ ID NO: 6195 - RNA, 16 nt, Synthetic Construct
  source 1..16: mol_type = other RNA
gtctacggccatacaa

SEQ ID NO: 6196 - RNA, 23 nt, Synthetic Construct
  source 1..23: mol_type = other RNA
tgaggtagtaggttgcgtggttt

SEQ ID NO: 6197 - RNA, 23 nt, Synthetic Construct
  source 1..23: mol_type = other RNA
tgaggtagtaggttgcgtggttt

SEQ ID NO: 6198 - RNA, 22 nt, Synthetic Construct
  source 1..22: mol_type = other RNA
tcgtaccgtgagtaacaatgcg

SEQ ID NO: 6199 - RNA, 23 nt, Synthetic Construct
  source 1..23: mol_type = other RNA
tgaggtagtaggttgtatggtta

SEQ ID NO: 6200 - RNA, 23 nt, Synthetic Construct
  source 1..23: mol_type = other RNA
tgaggtagtaggttgtatggtta

SEQ ID NO: 6201 - RNA, 37 nt, Synthetic Construct; identical to SEQ ID NO: 5125
  source 1..37: mol_type = other RNA

SEQ ID NO: 6202 - RNA, 43 nt, Synthetic Construct
  source 1..43: mol_type = other RNA
gagagcctggacacaggtgctgcatggccgtcgtcagctcgtg

SEQ ID NO: 6203 - RNA, 43 nt, Synthetic Construct; identical to SEQ ID NO: 6202
  source 1..43: mol_type = other RNA

SEQ ID NO: 6204 - RNA, 22 nt, Synthetic Construct
  source 1..22: mol_type = other RNA
ncgtaccgtgagtaataatgcg

SEQ ID NO: 6205 - RNA, 22 nt, Synthetic Construct
  source 1..22: mol_type = other RNA
gaagaggacttggagctcgatc

SEQ ID NO: 6206 - RNA, 22 nt, Synthetic Construct
  source 1..22: mol_type = other RNA
gaagaggacttggagctcgatc

SEQ ID NO: 6207 - RNA, 22 nt, Synthetic Construct
  source 1..22: mol_type = other RNA
actcggcgtggcgtcggtcgtg

SEQ ID NO: 6208 - RNA, 22 nt, Synthetic Construct
  source 1..22: mol_type = other RNA
actcggcgtggcgtcggtcgtg

SEQ ID NO: 6209 - RNA, 23 nt, Synthetic Construct
  source 1..23: mol_type = other RNA
tggtaatgcgacgtacttagtgt

SEQ ID NO: 6210 - RNA, 21 nt, Synthetic Construct
  source 1..21: mol_type = other RNA
tggggggcagagagcgagact

SEQ ID NO: 6211 - RNA, 16 nt, Synthetic Construct
  source 1..16: mol_type = other RNA
gtctacggccataccg

SEQ ID NO: 6212 - RNA, 16 nt, Synthetic Construct
  source 1..16: mol_type = other RNA
gtctacggccataccg

SEQ ID NO: 6213 - RNA, 21 nt, Synthetic Construct
  source 1..21: mol_type = other RNA
tcctgtactgagccgccccga

SEQ ID NO: 6214 - RNA, 16 nt, Synthetic Construct
  source 1..16: mol_type = other RNA
gggtctgtagctcagt

SEQ ID NO: 6215 - RNA, 30 nt, Synthetic Construct; identical to SEQ ID NO: 2578
  source 1..30: mol_type = other RNA

SEQ ID NO: 6216 - RNA, 30 nt, Synthetic Construct; identical to SEQ ID NO: 2578
  source 1..30: mol_type = other RNA

SEQ ID NO: 6217 - RNA, 37 nt, Synthetic Construct; identical to SEQ ID NO: 4277
  source 1..37: mol_type = other RNA

SEQ ID NO: 6218 - RNA, 20 nt, Synthetic Construct
  source 1..20: mol_type = other RNA
actgatcgagtcgtcctgcg

SEQ ID NO: 6219 - RNA, 15 nt, Synthetic Construct
  source 1..15: mol_type = other RNA
gcaagtcgaacggta

SEQ ID NO: 6220 - RNA, 15 nt, Synthetic Construct
  source 1..15: mol_type = other RNA
gcaagtcgaacggta

SEQ ID NO: 6221 - RNA, 32 nt, Synthetic Construct; identical to SEQ ID NO: 4710
  source 1..32: mol_type = other RNA

SEQ ID NO: 6222 - RNA, 23 nt, Synthetic Construct
  source 1..23: mol_type = other RNA
tgaggggcagggagcgagacttt

SEQ ID NO: 6223 - RNA, 23 nt, Synthetic Construct
  source 1..23: mol_type = other RNA
tgaggggcagggagcgagacttt

SEQ ID NO: 6224 - RNA, 25 nt, Synthetic Construct
  source 1..25: mol_type = other RNA
gtgaggatatgagatcgagacgaca

SEQ ID NO: 6225 - RNA, 20 nt, Synthetic Construct
  source 1..20: mol_type = other RNA
gaatcgctagtaatcgcgga

SEQ ID NO: 6226 - RNA, 18 nt, Synthetic Construct
  source 1..18: mol_type = other RNA
agcaggacggtggccatg

SEQ ID NO: 6227 - RNA, 22 nt, Synthetic Construct
  source 1..22: mol_type = other RNA
tgagatagtagtttgtgctgtt

SEQ ID NO: 6228 - RNA, 22 nt, Synthetic Construct
  source 1..22: mol_type = other RNA
tgagatagtagtttgtgctgtt

SEQ ID NO: 6229 - RNA, 20 nt, Synthetic Construct
  source 1..20: mol_type = other RNA
ggaggtagtaggttgtgtgg

SEQ ID NO: 6230 - RNA, 20 nt, Synthetic Construct
  source 1..20: mol_type = other RNA
tgaggtagaaggttgtgtgg

SEQ ID NO: 6231 - RNA, 20 nt, Synthetic Construct
  source 1..20: mol_type = other RNA
tgaggtagaaggttgtgtgg

SEQ ID NO: 6232 - RNA, 21 nt, Synthetic Construct
  source 1..21: mol_type = other RNA
tgaggtagcagattgtatagt

SEQ ID NO: 6233 - RNA, 21 nt, Synthetic Construct
  source 1..21: mol_type = other RNA
cactgatcgagtcgtcctgcg

SEQ ID NO: 6234 - RNA, 23 nt, Synthetic Construct
  source 1..23: mol_type = other RNA
tgaggggcagagagcgagactct

SEQ ID NO: 6235 - RNA, 23 nt, Synthetic Construct
  source 1..23: mol_type = other RNA
tgaggggcagagagcgagactct

SEQ ID NO: 6236 - RNA, 23 nt, Synthetic Construct
  source 1..23: mol_type = other RNA
tctcccaacccttgtaccagtga

SEQ ID NO: 6237 - RNA, 23 nt, Synthetic Construct
  source 1..23: mol_type = other RNA
tctcccaacccttgtaccagtga

SEQ ID NO: 6238 - RNA, 22 nt, Synthetic Construct
  source 1..22: mol_type = other RNA
cggaatgtaaagaagtatgtat

SEQ ID NO: 6239 - RNA, 22 nt, Synthetic Construct
  source 1..22: mol_type = other RNA
tgttggttcaagcgtgtagtcg

SEQ ID NO: 6240 - RNA, 23 nt, Synthetic Construct
  source 1..23: mol_type = other RNA
gtgcagatcttggtggtagtagc

SEQ ID NO: 6241 - RNA, 23 nt, Synthetic Construct
  source 1..23: mol_type = other RNA
gtgcagatcttggtggtagtagc

SEQ ID NO: 6242 - RNA, 26 nt, Synthetic Construct
  source 1..26: mol_type = other RNA
atgcgagagtaggacgttgccaggtt

SEQ ID NO: 6243 - RNA, 26 nt, Synthetic Construct
  source 1..26: mol_type = other RNA
atgcgagagtaggacgttgccaggtt

SEQ ID NO: 6244 - RNA, 22 nt, Synthetic Construct
  source 1..22: mol_type = other RNA
tgaggtagtagattgtgtagtt

SEQ ID NO: 6245 - RNA, 22 nt, Synthetic Construct
  source 1..22: mol_type = other RNA
tgaggtagtagattgtgtagtt

SEQ ID NO: 6246 - RNA, 27 nt, Synthetic Construct
  source 1..27: mol_type = other RNA
cggtataccgaagctctaggtgcggca

SEQ ID NO: 6247 - RNA, 27 nt, Synthetic Construct
  source 1..27: mol_type = other RNA
cggtataccgaagctctaggtgcggca

SEQ ID NO: 6248 - RNA, 19 nt, Synthetic Construct
  source 1..19: mol_type = other RNA
acatgcaagtcgaacggta

SEQ ID NO: 6249 - RNA, 19 nt, Synthetic Construct
  source 1..19: mol_type = other RNA
acatgcaagtcgaacggta

SEQ ID NO: 6250 - RNA, 21 nt, Synthetic Construct
  source 1..21: mol_type = other RNA
attagtgacgcgcatgaatgg

SEQ ID NO: 6251 - RNA, 21 nt, Synthetic Construct
  source 1..21: mol_type = other RNA
attagtgacgcgcatgaatgg

SEQ ID NO: 6252 - RNA, 21 nt, Synthetic Construct
  source 1..21: mol_type = other RNA
tcctgtactgagccgccccga

SEQ ID NO: 6253 - RNA, 21 nt, Synthetic Construct
  source 1..21: mol_type = other RNA
cgtaccgtgagtaataatgca

SEQ ID NO: 6254 - RNA, 22 nt, Synthetic Construct
  source 1..22: mol_type = other RNA
tgaggtagtagtttgtgctgta

SEQ ID NO: 6255 - RNA, 22 nt, Synthetic Construct
  source 1..22: mol_type = other RNA
tgaggtagtagtttgtgctgta

SEQ ID NO: 6256 - RNA, 23 nt, Synthetic Construct
  source 1..23: mol_type = other RNA
tggaatgtaaagaagtatgtata

SEQ ID NO: 6257 - RNA, 23 nt, Synthetic Construct
  source 1..23: mol_type = other RNA
tggaatgtaaagaagtatgtata

SEQ ID NO: 6258 - RNA, 20 nt, Synthetic Construct
  source 1..20: mol_type = other RNA
tagcagcacatcatggttta

SEQ ID NO: 6259 - RNA, 20 nt, Synthetic Construct
  source 1..20: mol_type = other RNA
tagcagcacatcatggttta

SEQ ID NO: 6260 - RNA, 21 nt, Synthetic Construct
  source 1..21: mol_type = other RNA
gtagcgaaattccttgtcggg

SEQ ID NO: 6261 - RNA, 20 nt, Synthetic Construct
  source 1..20: mol_type = other RNA
tacagtatagatgatgtact

SEQ ID NO: 6262 - RNA, 20 nt, Synthetic Construct
  source 1..20: mol_type = other RNA
tacagtatagatgatgtact

SEQ ID NO: 6263 - RNA, 22 nt, Synthetic Construct
  source 1..22: mol_type = other RNA
taaggtagtaggttgtatagtt

SEQ ID NO: 6264 - RNA, 22 nt, Synthetic Construct
  source 1..22: mol_type = other RNA
taaggtagtaggttgtatagtt

SEQ ID NO: 6265 - RNA, 22 nt, Synthetic Construct
  source 1..22: mol_type = other RNA
taacactgtctggtaacgatgt

SEQ ID NO: 6266 - RNA, 22 nt, Synthetic Construct
  source 1..22: mol_type = other RNA
taacactgtctggtaacgatgt

SEQ ID NO: 6267 - RNA, 22 nt, Synthetic Construct
  source 1..22: mol_type = other RNA
tgaggtagtaggctgtgtggtt

SEQ ID NO: 6268 - RNA, 22 nt, Synthetic Construct
  source 1..22: mol_type = other RNA
tgaggtagtaggctgtgtggtt

SEQ ID NO: 6269 - RNA, 22 nt, Synthetic Construct
  source 1..22: mol_type = other RNA
tcgtaccgtgggtaataatgcg

SEQ ID NO: 6270 - RNA, 15 nt, Synthetic Construct
  source 1..15: mol_type = other RNA
gtccggatcgtagtc

SEQ ID NO: 6271 - RNA, 15 nt, Synthetic Construct
  source 1..15: mol_type = other RNA
gtccggatcgtagtc

SEQ ID NO: 6272 - RNA, 22 nt, Synthetic Construct
  source 1..22: mol_type = other RNA
tcagtgcactacagagctttgt

SEQ ID NO: 6273 - RNA, 16 nt, Synthetic Construct
  source 1..16: mol_type = other RNA
gcctacggccatacca

SEQ ID NO: 6274 - RNA, 17 nt, Synthetic Construct
  source 1..17: mol_type = other RNA
cgcgacctcagatcaga

SEQ ID NO: 6275 - RNA, 17 nt, Synthetic Construct
  source 1..17: mol_type = other RNA
cgcgacctcagatcaga

SEQ ID NO: 6276 - RNA, 23 nt, Synthetic Construct
  source 1..23: mol_type = other RNA
cagcccgtgttcggaagattttc

SEQ ID NO: 6277 - RNA, 23 nt, Synthetic Construct
  source 1..23: mol_type = other RNA
cagcccgtgttcggaagattttc

SEQ ID NO: 6278 - RNA, 35 nt, Synthetic Construct; identical to SEQ ID NO: 1160
  source 1..35: mol_type = other RNA

SEQ ID NO: 6279 - RNA, 35 nt, Synthetic Construct; identical to SEQ ID NO: 1160
  source 1..35: mol_type = other RNA

SEQ ID NO: 6280 - RNA, 23 nt, Synthetic Construct
  source 1..23: mol_type = other RNA
tggtaatacggcgtacttagtgt

SEQ ID NO: 6281 - RNA, 23 nt, Synthetic Construct
  source 1..23: mol_type = other RNA
tggtaatacggcgtacttagtgt

SEQ ID NO: 6282 - RNA, 23 nt, Synthetic Construct
  source 1..23: mol_type = other RNA
tgataatacgacgtacttagtgt

SEQ ID NO: 6283 - RNA, 23 nt, Synthetic Construct
  source 1..23: mol_type = other RNA
tgataatacgacgtacttagtgt

SEQ ID NO: 6284 - RNA, 35 nt, Synthetic Construct; identical to SEQ ID NO: 2069
  source 1..35: mol_type = other RNA

SEQ ID NO: 6285 - RNA, 35 nt, Synthetic Construct; identical to SEQ ID NO: 2069
  source 1..35: mol_type = other RNA

SEQ ID NO: 6286 - RNA, 22 nt, Synthetic Construct
  source 1..22: mol_type = other RNA
tcctgtactgagctgtcccgag

SEQ ID NO: 6287 - RNA, 22 nt, Synthetic Construct
  source 1..22: mol_type = other RNA
tcctgtactgagctgtcccgag

SEQ ID NO: 6288 - RNA, 21 nt, Synthetic Construct
  source 1..21: mol_type = other RNA
aagaaagattgcaagaactgc

SEQ ID NO: 6289 - RNA, 21 nt, Synthetic Construct
  source 1..21: mol_type = other RNA
aagaaagattgcaagaactgc

SEQ ID NO: 6290 - RNA, 20 nt, Synthetic Construct
  source 1..20: mol_type = other RNA
tgaggaagtaggttgtgtgg

SEQ ID NO: 6291 - RNA, 16 nt, Synthetic Construct
  source 1..16: mol_type = other RNA
gtctacggccatacta

SEQ ID NO: 6292 - RNA, 23 nt, Synthetic Construct
  source 1..23: mol_type = other RNA
tgaggtagtaggttgcgtggttt

SEQ ID NO: 6293 - RNA, 22 nt, Synthetic Construct
  source 1..22: mol_type = other RNA
tgaggtagtgggttgtgtggtt

SEQ ID NO: 6294 - RNA, 22 nt, Synthetic Construct
  source 1..22: mol_type = other RNA
tgtaaacatccccgactggagg

SEQ ID NO: 6295 - RNA, 25 nt, Synthetic Construct
  source 1..25: mol_type = other RNA
ttgaggatatgagatagagacgaca

SEQ ID NO: 6296 - RNA, 17 nt, Synthetic Construct
  source 1..17: mol_type = other RNA
cccctggacctgtactg

SEQ ID NO: 6297 - RNA, 22 nt, Synthetic Construct
  source 1..22: mol_type = other RNA
tgaggaagtaggttgtgtggtt

SEQ ID NO: 6298 - RNA, 22 nt, Synthetic Construct
  source 1..22: mol_type = other RNA
tgaggaagtaggttgtgtggtt

SEQ ID NO: 6299 - RNA, 22 nt, Synthetic Construct
  source 1..22: mol_type = other RNA
tggaacgtaaagaagtatgtat

SEQ ID NO: 6300 - RNA, 37 nt, Synthetic Construct; identical to SEQ ID NO: 2482
  source 1..37: mol_type = other RNA

SEQ ID NO: 6301 - RNA, 37 nt, Synthetic Construct; identical to SEQ ID NO: 2482
  source 1..37: mol_type = other RNA

SEQ ID NO: 6302 - RNA, 23 nt, Synthetic Construct
  source 1..23: mol_type = other RNA
ttccccttggggttgtaggacca

SEQ ID NO: 6303 - RNA, 23 nt, Synthetic Construct
  source 1..23: mol_type = other RNA
ttccccttggggttgtaggacca

SEQ ID NO: 6304 - RNA, 23 nt, Synthetic Construct
  source 1..23: mol_type = other RNA
cggtaatacgacgtacttagtgt

SEQ ID NO: 6305 - RNA, 23 nt, Synthetic Construct
  source 1..23: mol_type = other RNA
cggtaatacgacgtacttagtgt

SEQ ID NO: 6306 - RNA, 35 nt, Synthetic Construct; identical to SEQ ID NO: 2567
  source 1..35: mol_type = other RNA

SEQ ID NO: 6307 - RNA, 35 nt, Synthetic Construct; identical to SEQ ID NO: 2567
  source 1..35: mol_type = other RNA

SEQ ID NO: 6308 - RNA, 28 nt, Synthetic Construct
  source 1..28: mol_type = other RNA
cgactcttagcggtggatcactcggctc

SEQ ID NO: 6309 - RNA, 28 nt, Synthetic Construct
  source 1..28: mol_type = other RNA
cgactcttagcggtggatcactcggctc

SEQ ID NO: 6310 - RNA, 16 nt, Synthetic Construct
  source 1..16: mol_type = other RNA
gtctacggccgtacca

SEQ ID NO: 6311 - RNA, 20 nt, Synthetic Construct
  source 1..20: mol_type = other RNA
tagaattctcgcctgccacg

SEQ ID NO: 6312 - RNA, 20 nt, Synthetic Construct
  source 1..20: mol_type = other RNA
tagaattctcgcctgccacg

SEQ ID NO: 6313 - RNA, 23 nt, Synthetic Construct
  source 1..23: mol_type = other RNA
tgaggtagtaggttgtgtggttc

SEQ ID NO: 6314 - RNA, 23 nt, Synthetic Construct
  source 1..23: mol_type = other RNA
tgaggtagtaggttgtgtggttc

SEQ ID NO: 6315 - RNA, 31 nt, Synthetic Construct; identical to SEQ ID NO: 1627
  source 1..31: mol_type = other RNA

SEQ ID NO: 6316 - RNA, 31 nt, Synthetic Construct; identical to SEQ ID NO: 1627
  source 1..31: mol_type = other RNA

SEQ ID NO: 6317 - RNA, 35 nt, Synthetic Construct; identical to SEQ ID NO: 2397
  source 1..35: mol_type = other RNA

SEQ ID NO: 6318 - RNA, 22 nt, Synthetic Construct
  source 1..22: mol_type = other RNA
tattgcgcttgtcccggcctgt

SEQ ID NO: 6319 - RNA, 22 nt, Synthetic Construct
  source 1..22: mol_type = other RNA
tattgcgcttgtcccggcctgt

SEQ ID NO: 6320 - RNA, 25 nt, Synthetic Construct
  source 1..25: mol_type = other RNA
ctgaggatatgagatcgagacgaca

SEQ ID NO: 6321 - RNA, 25 nt, Synthetic Construct
  source 1..25: mol_type = other RNA
ctgaggatatgagatcgagacgaca

SEQ ID NO: 6322 - RNA, 23 nt, Synthetic Construct
  source 1..23: mol_type = other RNA
tccagtactgagctgccccgagt

SEQ ID NO: 6323 - RNA, 23 nt, Synthetic Construct
  source 1..23: mol_type = other RNA
tccagtactgagctgccccgagt

SEQ ID NO: 6324 - RNA, 20 nt, Synthetic Construct
  source 1..20: mol_type = other RNA
agcagcattgtacagggcta

SEQ ID NO: 6325 - RNA, 20 nt, Synthetic Construct
  source 1..20: mol_type = other RNA
agcagcattgtacagggcta

SEQ ID NO: 6326 - RNA, 23 nt, Synthetic Construct
  source 1..23: mol_type = other RNA
tgaggtggtaggttgtgtggttt

SEQ ID NO: 6327 - RNA, 36 nt, Synthetic Construct; identical to SEQ ID NO: 2520
  source 1..36: mol_type = other RNA

SEQ ID NO: 6328 - RNA, 35 nt, Synthetic Construct; identical to SEQ ID NO: 2269
  source 1..35: mol_type = other RNA

SEQ ID NO: 6329 - RNA, 23 nt, Synthetic Construct
  source 1..23: mol_type = other RNA
tggtaatacgacgcacttagtgt

SEQ ID NO: 6330 - RNA, 22 nt, Synthetic Construct
  source 1..22: mol_type = other RNA
tagcagcacgcaaatattggcg

SEQ ID NO: 6331 - RNA, 22 nt, Synthetic Construct
  source 1..22: mol_type = other RNA
tagcagcacgcaaatattggcg

SEQ ID NO: 6332 - RNA, 20 nt, Synthetic Construct
  source 1..20: mol_type = other RNA
cgaggtagtaggttgtatag

SEQ ID NO: 6333 - RNA, 20 nt, Synthetic Construct
  source 1..20: mol_type = other RNA
cgaggtagtaggttgtatag

SEQ ID NO: 6334 - RNA, 24 nt, Synthetic Construct
  source 1..24: mol_type = other RNA
tgtagacatccccgactggaagct

SEQ ID NO: 6335 - RNA, 22 nt, Synthetic Construct
  source 1..22: mol_type = other RNA
tcactgatcgagtcgtcctgcg

SEQ ID NO: 6336 - RNA, 16 nt, Synthetic Construct
  source 1..16: mol_type = other RNA
ggaattgacggaaggg

SEQ ID NO: 6337 - RNA, 16 nt, Synthetic Construct
  source 1..16: mol_type = other RNA
ggaattgacggaaggg

SEQ ID NO: 6338 - RNA, 21 nt, Synthetic Construct
  source 1..21: mol_type = other RNA
taaggtagtaggttgtgtggt

SEQ ID NO: 6339 - RNA, 21 nt, Synthetic Construct
  source 1..21: mol_type = other RNA
taaggtagtaggttgtgtggt

SEQ ID NO: 6340 - RNA, 18 nt, Synthetic Construct
  source 1..18: mol_type = other RNA
agcaggacggtggccatg

SEQ ID NO: 6341 - RNA, 18 nt, Synthetic Construct
  source 1..18: mol_type = other RNA
tccgacatgcgagggttc

SEQ ID NO: 6342 - RNA, 23 nt, Synthetic Construct
  source 1..23: mol_type = other RNA
agcagcattgtacagggctataa

SEQ ID NO: 6343 - RNA, 20 nt, Synthetic Construct
  source 1..20: mol_type = other RNA
tgaggtaggaggttgtatag

SEQ ID NO: 6344 - RNA, 15 nt, Synthetic Construct
  source 1..15: mol_type = other RNA
gtcaggatgttggct

SEQ ID NO: 6345 - RNA, 22 nt, Synthetic Construct
  source 1..22: mol_type = other RNA
tcctgtaccgagctgccccgag

SEQ ID NO: 6346 - RNA, 22 nt, Synthetic Construct
  source 1..22: mol_type = other RNA
tcctgtaccgagctgccccgag

SEQ ID NO: 6347 - RNA, 23 nt, Synthetic Construct
  source 1..23: mol_type = other RNA
cgcgacctcagatcagacgtggc

SEQ ID NO: 6348 - RNA, 23 nt, Synthetic Construct
  source 1..23: mol_type = other RNA
cgcgacctcagatcagacgtggc

SEQ ID NO: 6349 - RNA, 22 nt, Synthetic Construct
  source 1..22: mol_type = other RNA
tgaggtagtgggttgtatagtt

SEQ ID NO: 6350 - RNA, 23 nt, Synthetic Construct
  source 1..23: mol_type = other RNA
tggtaatacgacgtacctagtgt

SEQ ID NO: 6351 - RNA, 23 nt, Synthetic Construct
  source 1..23: mol_type = other RNA
tggtaatacgacgtacctagtgt

SEQ ID NO: 6352 - RNA, 23 nt, Synthetic Construct
  source 1..23: mol_type = other RNA
ctcactgatcgagtcgtcctgcg

SEQ ID NO: 6353 - RNA, 28 nt, Synthetic Construct
  source 1..28: mol_type = other RNA
ccccccactgctaaatttggctggcttt

SEQ ID NO: 6354 - RNA, 20 nt, Synthetic Construct
  source 1..20: mol_type = other RNA
aaaccgttaccattactgag

SEQ ID NO: 6355 - RNA, 20 nt, Synthetic Construct
  source 1..20: mol_type = other RNA
aaaccgttaccattactgag

SEQ ID NO: 6356 - RNA, 19 nt, Synthetic Construct
  source 1..19: mol_type = other RNA
cttggggttgtaggaccac

SEQ ID NO: 6357 - RNA, 19 nt, Synthetic Construct
  source 1..19: mol_type = other RNA
cttggggttgtaggaccac

SEQ ID NO: 6358 - RNA, 15 nt, Synthetic Construct
  source 1..15: mol_type = other RNA
gtagctcgttgggct

SEQ ID NO: 6359 - RNA, 15 nt, Synthetic Construct
  source 1..15: mol_type = other RNA
gtagctcgttgggct

SEQ ID NO: 6360 - RNA, 22 nt, Synthetic Construct
  source 1..22: mol_type = other RNA
gaagaggacttggaactcgatc

SEQ ID NO: 6361 - RNA, 22 nt, Synthetic Construct
  source 1..22: mol_type = other RNA
gaagaggacttggaactcgatc

SEQ ID NO: 6362 - RNA, 23 nt, Synthetic Construct
  source 1..23: mol_type = other RNA
caaagtgctgttcgtgcaggtgg

SEQ ID NO: 6363 - RNA, 23 nt, Synthetic Construct
  source 1..23: mol_type = other RNA
caaagtgctgttcgtgcaggtgg

SEQ ID NO: 6364 - RNA, 37 nt, Synthetic Construct; identical to SEQ ID NO: 2211
  source 1..37: mol_type = other RNA

SEQ ID NO: 6365 - RNA, 16 nt, Synthetic Construct
  source 1..16: mol_type = other RNA
taacaggtctgtgatg

SEQ ID NO: 6366 - RNA, 16 nt, Synthetic Construct
  source 1..16: mol_type = other RNA
taacaggtctgtgatg

SEQ ID NO: 6367 - RNA, 23 nt, Synthetic Construct
  source 1..23: mol_type = other RNA
tggtaatacgacgtacttggtgt

SEQ ID NO: 6368 - RNA, 23 nt, Synthetic Construct
  source 1..23: mol_type = other RNA
tggtaatacgacgtacttggtgt

SEQ ID NO: 6369 - RNA, 21 nt, Synthetic Construct
  source 1..21: mol_type = other RNA
gctttgatccggagatttccg

SEQ ID NO: 6370 - RNA, 21 nt, Synthetic Construct
  source 1..21: mol_type = other RNA
gctttgatccggagatttccg

SEQ ID NO: 6371 - RNA, 31 nt, Synthetic Construct; identical to SEQ ID NO: 4881
  source 1..31: mol_type = other RNA

SEQ ID NO: 6372 - RNA, 31 nt, Synthetic Construct; identical to SEQ ID NO: 4881
  source 1..31: mol_type = other RNA

SEQ ID NO: 6373 - RNA, 22 nt, Synthetic Construct
  source 1..22: mol_type = other RNA
tagcttatcagactgatgttgg

SEQ ID NO: 6374 - RNA, 22 nt, Synthetic Construct
  source 1..22: mol_type = other RNA
tgaggtagtagtttgtgctgtg

SEQ ID NO: 6375 - RNA, 23 nt, Synthetic Construct
  source 1..23: mol_type = other RNA
tcctgtgctgagctgccccgaga

SEQ ID NO: 6376 - RNA, 26 nt, Synthetic Construct
  source 1..26: mol_type = other RNA
aacattcaacgctgtcggtgagtttt

SEQ ID NO: 6377 - RNA, 17 nt, Synthetic Construct
  source 1..17: mol_type = other RNA
gtccggatcgtagtctg

SEQ ID NO: 6378 - RNA, 17 nt, Synthetic Construct
  source 1..17: mol_type = other RNA
gtccggatcgtagtctg

SEQ ID NO: 6379 - RNA, 22 nt, Synthetic Construct
  source 1..22: mol_type = other RNA
tatcgcacttgtcccggcctgt

SEQ ID NO: 6380 - RNA, 22 nt, Synthetic Construct
  source 1..22: mol_type = other RNA
tatcgcacttgtcccggcctgt

SEQ ID NO: 6381 - RNA, 21 nt, Synthetic Construct
  source 1..21: mol_type = other RNA
tgaggtagcagattgtatagt

SEQ ID NO: 6382 - RNA, 21 nt, Synthetic Construct
  source 1..21: mol_type = other RNA
tgaggtagcagattgtatagt

SEQ ID NO: 6383 - RNA, 15 nt, Synthetic Construct
  source 1..15: mol_type = other RNA
ggagagatggctgag

SEQ ID NO: 6384 - RNA, 15 nt, Synthetic Construct
  source 1..15: mol_type = other RNA
ggagagatggctgag

SEQ ID NO: 6385 - RNA, 25 nt, Synthetic Construct
  source 1..25: mol_type = other RNA
tcggatccgtctgagcttggctttt

SEQ ID NO: 6386 - RNA, 21 nt, Synthetic Construct
  source 1..21: mol_type = other RNA
ctggacttggagtcagaaggc

SEQ ID NO: 6387 - RNA, 21 nt, Synthetic Construct
  source 1..21: mol_type = other RNA
tgaggtagtagtttgcgctgt

SEQ ID NO: 6388 - RNA, 21 nt, Synthetic Construct
  source 1..21: mol_type = other RNA
tgaggtagtagtttgcgctgt

SEQ ID NO: 6389 - RNA, 31 nt, Synthetic Construct; identical to SEQ ID NO: 2442
  source 1..31: mol_type = other RNA

SEQ ID NO: 6390 - RNA, 24 nt, Synthetic Construct
  source 1..24: mol_type = other RNA
gctcactgatcgagtcgtcctgcg

SEQ ID NO: 6391 - RNA, 21 nt, Synthetic Construct
  source 1..21: mol_type = other RNA
atcggaacgtgcccagtcgtg

SEQ ID NO: 6392 - RNA, 21 nt, Synthetic Construct
  source 1..21: mol_type = other RNA
atcggaacgtgcccagtcgtg

SEQ ID NO: 6393 - RNA, 34 nt, Synthetic Construct; identical to SEQ ID NO: 2364
  source 1..34: mol_type = other RNA

SEQ ID NO: 6394 - RNA, 34 nt, Synthetic Construct; identical to SEQ ID NO: 2364
  source 1..34: mol_type = other RNA

SEQ ID NO: 6395 - RNA, 22 nt, Synthetic Construct
  source 1..22: mol_type = other RNA
aatgacacgatcactcccgttg

SEQ ID NO: 6396 - RNA, 22 nt, Synthetic Construct
  source 1..22: mol_type = other RNA
aatgacacgatcactcccgttg

SEQ ID NO: 6397 - RNA, 23 nt, Synthetic Construct
  source 1..23: mol_type = other RNA
tggaatgtaaagaagtatgtatt

SEQ ID NO: 6398 - RNA, 23 nt, Synthetic Construct
  source 1..23: mol_type = other RNA
tggaatgtaaagaagtatgtatt

SEQ ID NO: 6399 - RNA, 18 nt, Synthetic Construct
  source 1..18: mol_type = other RNA
tcccctggacctgtactg

SEQ ID NO: 6400 - RNA, 35 nt, Synthetic Construct; identical to SEQ ID NO: 1095
  source 1..35: mol_type = other RNA

SEQ ID NO: 6401 - RNA, 37 nt, Synthetic Construct; identical to SEQ ID NO: 2211
  source 1..37: mol_type = other RNA

SEQ ID NO: 6402 - RNA, 37 nt, Synthetic Construct; identical to SEQ ID NO: 2211
  source 1..37: mol_type = other RNA

SEQ ID NO: 6403 - RNA, 22 nt, Synthetic Construct
  source 1..22: mol_type = other RNA
actcggcgtggcgtcggtcgtg

SEQ ID NO: 6404 - RNA, 22 nt, Synthetic Construct
  source 1..22: mol_type = other RNA
actcggcgtggcgtcggtcgtg

SEQ ID NO: 6405 - RNA, 30 nt, Synthetic Construct
  source 1..30: mol_type = other RNA
gcatgggtggttcagtggtagaattctcgc

SEQ ID NO: 6406 - RNA, 30 nt, Synthetic Construct; identical to SEQ ID NO: 6405
  source 1..30: mol_type = other RNA

SEQ ID NO: 6407 - RNA, 23 nt, Synthetic Construct
  source 1..23: mol_type = other RNA
tggtaacacgacgtacttagtgt

SEQ ID NO: 6408 - RNA, 23 nt, Synthetic Construct
  source 1..23: mol_type = other RNA
tggtaacacgacgtacttagtgt

SEQ ID NO: 6409 - RNA, 22 nt, Synthetic Construct
  source 1..22: mol_type = other RNA
tggaatgtagagaagtatgtat

SEQ ID NO: 6410 - RNA, 38 nt, Synthetic Construct; identical to SEQ ID NO: 2492
  source 1..38: mol_type = other RNA

SEQ ID NO: 6411 - RNA, 38 nt, Synthetic Construct; identical to SEQ ID NO: 2492
  source 1..38: mol_type = other RNA

SEQ ID NO: 6412 - RNA, 21 nt, Synthetic Construct
  source 1..21: mol_type = other RNA
gtagcgaaattccttgtcggg

SEQ ID NO: 6413 - RNA, 21 nt, Synthetic Construct
  source 1..21: mol_type = other RNA
gtagcgaaattccttgtcggg

SEQ ID NO: 6414 - RNA, 23 nt, Synthetic Construct
  source 1..23: mol_type = other RNA
cgaggggcagagagcgagacttt

SEQ ID NO: 6415 - RNA, 23 nt, Synthetic Construct
  source 1..23: mol_type = other RNA
cgaggggcagagagcgagacttt

SEQ ID NO: 6416 - RNA, 27 nt, Synthetic Construct
  source 1..27: mol_type = other RNA
tcctgagtagctcagcggcagagcggg

SEQ ID NO: 6417 - RNA, 27 nt, Synthetic Construct
  source 1..27: mol_type = other RNA
tcctgagtagctcagcggcagagcggg

SEQ ID NO: 6418 - RNA, 25 nt, Synthetic Construct
  source 1..25: mol_type = other RNA
ttgaggatatgggatcgagacgaca

SEQ ID NO: 6419 - RNA, 25 nt, Synthetic Construct
  source 1..25: mol_type = other RNA
ttgaggatatgggatcgagacgaca

SEQ ID NO: 6420 - RNA, 22 nt, Synthetic Construct
  source 1..22: mol_type = other RNA
ttcaagtaattcaggataggtc

SEQ ID NO: 6421 - RNA, 24 nt, Synthetic Construct
  source 1..24: mol_type = other RNA
tgggtaatacgacgtacttagtgt

SEQ ID NO: 6422 - RNA, 24 nt, Synthetic Construct
  source 1..24: mol_type = other RNA
tgggtaatacgacgtacttagtgt

SEQ ID NO: 6423 - RNA, 16 nt, Synthetic Construct
  source 1..16: mol_type = other RNA
ccgcttttgtcaggga

SEQ ID NO: 6424 - RNA, 21 nt, Synthetic Construct
  source 1..21: mol_type = other RNA
tgaggtagtaggtcgtatagt

SEQ ID NO: 6425 - RNA, 21 nt, Synthetic Construct
  source 1..21: mol_type = other RNA
tgaggtagtaggtcgtatagt

SEQ ID NO: 6426 - RNA, 23 nt, Synthetic Construct
  source 1..23: mol_type = other RNA
tgaggggcagagagcgagacctt

SEQ ID NO: 6427 - RNA, 22 nt, Synthetic Construct
  source 1..22: mol_type = other RNA
tattgcacttgccccggcctgt

SEQ ID NO: 6428 - RNA, 18 nt, Synthetic Construct
  source 1..18: mol_type = other RNA
cctgtaccgatcaatagt

SEQ ID NO: 6429 - RNA, 23 nt, Synthetic Construct
  source 1..23: mol_type = other RNA
tgaggtagtaggctgtgtggttt

SEQ ID NO: 6430 - RNA, 23 nt, Synthetic Construct
  source 1..23: mol_type = other RNA
tgaggtagtaggctgtgtggttt

SEQ ID NO: 6431 - RNA, 16 nt, Synthetic Construct
  source 1..16: mol_type = other RNA
tacctggttgatcctg

SEQ ID NO: 6432 - RNA, 16 nt, Synthetic Construct
  source 1..16: mol_type = other RNA
tacctggttgatcctg

SEQ ID NO: 6433 - RNA, 23 nt, Synthetic Construct
  source 1..23: mol_type = other RNA
tggggtagtaggttgtgtggttt

SEQ ID NO: 6434 - RNA, 23 nt, Synthetic Construct
  source 1..23: mol_type = other RNA
tggggtagtaggttgtgtggttt

SEQ ID NO: 6435 - RNA, 25 nt, Synthetic Construct
  source 1..25: mol_type = other RNA
ttgaggatgtgagatcgagacgaca

SEQ ID NO: 6436 - RNA, 25 nt, Synthetic Construct
  source 1..25: mol_type = other RNA
ttgaggatgtgagatcgagacgaca

SEQ ID NO: 6437 - RNA, 21 nt, Synthetic Construct
  source 1..21: mol_type = other RNA
tgaggtagtagtttgtgctgc

SEQ ID NO: 6438 - RNA, 21 nt, Synthetic Construct
  source 1..21: mol_type = other RNA
tgaggtagtagtttgtgctgc

SEQ ID NO: 6439 - RNA, 16 nt, Synthetic Construct
  source 1..16: mol_type = other RNA
gatctgtagctggtct

SEQ ID NO: 6440 - RNA, 31 nt, Synthetic Construct; identical to SEQ ID NO: 2423
  source 1..31: mol_type = other RNA

SEQ ID NO: 6441 - RNA, 23 nt, Synthetic Construct
  source 1..23: mol_type = other RNA
ggctcggtctgaggcccctcagt

SEQ ID NO: 6442 - RNA, 22 nt, Synthetic Construct
  source 1..22: mol_type = other RNA
tgtagtgtttcctactttatgg

SEQ ID NO: 6443 - RNA, 23 nt, Synthetic Construct
  source 1..23: mol_type = other RNA
aacattcattgctgtcggtgggt

SEQ ID NO: 6444 - RNA, 36 nt, Synthetic Construct; identical to SEQ ID NO: 2546
  source 1..36: mol_type = other RNA

SEQ ID NO: 6445 - RNA, 36 nt, Synthetic Construct; identical to SEQ ID NO: 2546
  source 1..36: mol_type = other RNA

SEQ ID NO: 6446 - RNA, 21 nt, Synthetic Construct
  source 1..21: mol_type = other RNA
agcagcattgtacagggctat

SEQ ID NO: 6447 - RNA, 21 nt, Synthetic Construct
  source 1..21: mol_type = other RNA
agcagcattgtacagggctat

SEQ ID NO: 6448 - RNA, 33 nt, Synthetic Construct; identical to SEQ ID NO: 1982
  source 1..33: mol_type = other RNA

SEQ ID NO: 6449 - RNA, 33 nt, Synthetic Construct; identical to SEQ ID NO: 1982
  source 1..33: mol_type = other RNA

SEQ ID NO: 6450 - RNA, 28 nt, Synthetic Construct
  source 1..28: mol_type = other RNA
gctttacattggactttgaacagatctg

SEQ ID NO: 6451 - RNA, 17 nt, Synthetic Construct
  source 1..17: mol_type = other RNA
ccaaggggtcgtgggtt

SEQ ID NO: 6452 - RNA, 22 nt, Synthetic Construct
  source 1..22: mol_type = other RNA
tgagaactgaattccatgggtc

SEQ ID NO: 6453 - RNA, 23 nt, Synthetic Construct
  source 1..23: mol_type = other RNA
tcggaatcgctagtaatcgcgga

SEQ ID NO: 6454 - RNA, 36 nt, Synthetic Construct; identical to SEQ ID NO: 2469
  source 1..36: mol_type = other RNA

SEQ ID NO: 6455 - RNA, 20 nt, Synthetic Construct
  source 1..20: mol_type = other RNA
cccataaagtagaaagcact

SEQ ID NO: 6456 - RNA, 20 nt, Synthetic Construct
  source 1..20: mol_type = other RNA
cccataaagtagaaagcact

SEQ ID NO: 6457 - RNA, 23 nt, Synthetic Construct
  source 1..23: mol_type = other RNA
aatgacacgatcactcccgttga

SEQ ID NO: 6458 - RNA, 23 nt, Synthetic Construct
  source 1..23: mol_type = other RNA
aatgacacgatcactcccgttga

SEQ ID NO: 6459 - RNA, 20 nt, Synthetic Construct
  source 1..20: mol_type = other RNA
tcggaagaaggggtgcctgg

SEQ ID NO: 6460 - RNA, 20 nt, Synthetic Construct
  source 1..20: mol_type = other RNA
tcggaagaaggggtgcctgg

SEQ ID NO: 6461 - RNA, 21 nt, Synthetic Construct
  source 1..21: mol_type = other RNA
agctacattgtctgctgggtt

SEQ ID NO: 6462 - RNA, 21 nt, Synthetic Construct
  source 1..21: mol_type = other RNA
agctacattgtctgctgggtt

SEQ ID NO: 6463 - RNA, 23 nt, Synthetic Construct
  source 1..23: mol_type = other RNA
tggtaatatgacgtacttagtgt

SEQ ID NO: 6464 - RNA, 23 nt, Synthetic Construct
  source 1..23: mol_type = other RNA
tggtaatatgacgtacttagtgt

SEQ ID NO: 6465 - RNA, 22 nt, Synthetic Construct
  source 1..22: mol_type = other RNA
atcacattgccagggatttcca

SEQ ID NO: 6466 - RNA, 22 nt, Synthetic Construct
  source 1..22: mol_type = other RNA
atcacattgccagggatttcca

SEQ ID NO: 6467 - RNA, 30 nt, Synthetic Construct
  source 1..30: mol_type = other RNA
tccctggtggtctagtggttaggattcggc

SEQ ID NO: 6468 - RNA, 30 nt, Synthetic Construct; identical to SEQ ID NO: 6467
  source 1..30: mol_type = other RNA

SEQ ID NO: 6469 - RNA, 23 nt, Synthetic Construct
  source 1..23: mol_type = other RNA
tcctgtactgagccgccccgagt

SEQ ID NO: 6470 - RNA, 23 nt, Synthetic Construct
  source 1..23: mol_type = other RNA
tcctgtactgagccgccccgagt

SEQ ID NO: 6471 - RNA, 22 nt, Synthetic Construct
  source 1..22: mol_type = other RNA
actggacttggagtcagaagga

SEQ ID NO: 6472 - RNA, 16 nt, Synthetic Construct
  source 1..16: mol_type = other RNA
aggtcatcattatctg

SEQ ID NO: 6473 - RNA, 16 nt, Synthetic Construct
  source 1..16: mol_type = other RNA
aggtcatcattatctg

SEQ ID NO: 6474 - RNA, 23 nt, Synthetic Construct
  source 1..23: mol_type = other RNA
agcagcattgtacagggctatgt

SEQ ID NO: 6475 - RNA, 23 nt, Synthetic Construct
  source 1..23: mol_type = other RNA
agcagcattgtacagggctatgt

SEQ ID NO: 6476 - RNA, 21 nt, Synthetic Construct
  source 1..21: mol_type = other RNA
tcctgtgctgagctgccccga

SEQ ID NO: 6477 - RNA, 21 nt, Synthetic Construct
  source 1..21: mol_type = other RNA
tcctgtgctgagctgccccga

SEQ ID NO: 6478 - RNA, 16 nt, Synthetic Construct
  source 1..16: mol_type = other RNA
ccggaggaaggtgggg

SEQ ID NO: 6479 - RNA, 22 nt, Synthetic Construct
  source 1..22: mol_type = other RNA
tcctgtactgagccgccccgag

SEQ ID NO: 6480 - RNA, 22 nt, Synthetic Construct
  source 1..22: mol_type = other RNA
tcctgtactgagccgccccgag

SEQ ID NO: 6481 - RNA, 30 nt, Synthetic Construct; identical to SEQ ID NO: 2353
  source 1..30: mol_type = other RNA

SEQ ID NO: 6482 - RNA, 30 nt, Synthetic Construct; identical to SEQ ID NO: 2353
  source 1..30: mol_type = other RNA

SEQ ID NO: 6483 - RNA, 23 nt, Synthetic Construct
  source 1..23: mol_type = other RNA
ggcagcattgtacagggctatga

SEQ ID NO: 6484 - RNA, 18 nt, Synthetic Construct
  source 1..18: mol_type = other RNA
accggaggaaggtgggga

SEQ ID NO: 6485 - RNA, 23 nt, Synthetic Construct
  source 1..23: mol_type = other RNA
tggtaatacgacgtacttggtgt

SEQ ID NO: 6486 - RNA, 22 nt, Synthetic Construct
  source 1..22: mol_type = other RNA
tgaggtagtaggttgcatagtt

SEQ ID NO: 6487 - RNA, 22 nt, Synthetic Construct
  source 1..22: mol_type = other RNA
tgaggtagtaggttgcatagtt

SEQ ID NO: 6488 - RNA, 27 nt, Synthetic Construct
  source 1..27: mol_type = other RNA
ccccccactgctagatttgactggctt

SEQ ID NO: 6489 - RNA, 23 nt, Synthetic Construct
  source 1..23: mol_type = other RNA
tcccacatggtctagcggttagg

SEQ ID NO: 6490 - RNA, 23 nt, Synthetic Construct
  source 1..23: mol_type = other RNA
tcccacatggtctagcggttagg

SEQ ID NO: 6491 - RNA, 22 nt, Synthetic Construct
  source 1..22: mol_type = other RNA
ggcagggttcgtgactggggtg

SEQ ID NO: 6492 - RNA, 22 nt, Synthetic Construct
  source 1..22: mol_type = other RNA
ggcagggttcgtgactggggtg

SEQ ID NO: 6493 - RNA, 34 nt, Synthetic Construct; identical to SEQ ID NO: 2367
  source 1..34: mol_type = other RNA

SEQ ID NO: 6494 - RNA, 23 nt, Synthetic Construct
  source 1..23: mol_type = other RNA
tggtaatacgacgtacttagtga

SEQ ID NO: 6495 - RNA, 23 nt, Synthetic Construct
  source 1..23: mol_type = other RNA
tggtaatacgacgtacttagtga

SEQ ID NO: 6496 - RNA, 22 nt, Synthetic Construct
  source 1..22: mol_type = other RNA
tagcagcacgtagatattggcg

SEQ ID NO: 6497 - RNA, 22 nt, Synthetic Construct
  source 1..22: mol_type = other RNA
tagcagcacgtagatattggcg

SEQ ID NO: 6498 - RNA, 23 nt, Synthetic Construct
  source 1..23: mol_type = other RNA
tcctgtactgagttgccccgaga

SEQ ID NO: 6499 - RNA, 23 nt, Synthetic Construct
  source 1..23: mol_type = other RNA
tcctgtactgagttgccccgaga

SEQ ID NO: 6500 - RNA, 22 nt, Synthetic Construct
  source 1..22: mol_type = other RNA
cataaagtagaaagcactacta

SEQ ID NO: 6501 - RNA, 22 nt, Synthetic Construct
  source 1..22: mol_type = other RNA
cataaagtagaaagcactacta

SEQ ID NO: 6502 - RNA, 23 nt, Synthetic Construct
  source 1..23: mol_type = other RNA
tcctgtactgagctgccccgggt

SEQ ID NO: 6503 - RNA, 22 nt, Synthetic Construct
  source 1..22: mol_type = other RNA
tgaggaagtaggttgtatagtt

SEQ ID NO: 6504 - RNA, 26 nt, Synthetic Construct
  source 1..26: mol_type = other RNA
atgcgagagtaggacgttgccaggtt

SEQ ID NO: 6505 - RNA, 26 nt, Synthetic Construct
  source 1..26: mol_type = other RNA
atgcgagagtaggacgttgccaggtt

SEQ ID NO: 6506 - RNA, 33 nt, Synthetic Construct; identical to SEQ ID NO: 2386
  source 1..33: mol_type = other RNA

SEQ ID NO: 6507 - RNA, 33 nt, Synthetic Construct; identical to SEQ ID NO: 2386
  source 1..33: mol_type = other RNA

SEQ ID NO: 6508 - RNA, 22 nt, Synthetic Construct
  source 1..22: mol_type = other RNA
tcagtagctcgaggaaaagaca

SEQ ID NO: 6509 - RNA, 22 nt, Synthetic Construct
  source 1..22: mol_type = other RNA
gaagaggacttggagctcgatc

SEQ ID NO: 6510 - RNA, 22 nt, Synthetic Construct
  source 1..22: mol_type = other RNA
gaagaggacttggagctcgatc

SEQ ID NO: 6511 - RNA, 21 nt, Synthetic Construct
  source 1..21: mol_type = other RNA
ccctgtactgagctgccccga

SEQ ID NO: 6512 - RNA, 21 nt, Synthetic Construct
  source 1..21: mol_type = other RNA
ccctgtactgagctgccccga

SEQ ID NO: 6513 - RNA, 22 nt, Synthetic Construct
  source 1..22: mol_type = other RNA
tggaatgcaaagaagtatgtat

SEQ ID NO: 6514 - RNA, 22 nt, Synthetic Construct
  source 1..22: mol_type = other RNA
tggaatgcaaagaagtatgtat

SEQ ID NO: 6515 - RNA, 23 nt, Synthetic Construct
  source 1..23: mol_type = other RNA
tgaggtagtaggtcgtgtggttt

SEQ ID NO: 6516 - RNA, 25 nt, Synthetic Construct
  source 1..25: mol_type = other RNA
gagaaagctcacaagaactgctaac

SEQ ID NO: 6517 - RNA, 25 nt, Synthetic Construct
  source 1..25: mol_type = other RNA
gagaaagctcacaagaactgctaac

SEQ ID NO: 6518 - RNA, 33 nt, Synthetic Construct; identical to SEQ ID NO: 2253
  source 1..33: mol_type = other RNA

SEQ ID NO: 6519 - RNA, 33 nt, Synthetic Construct; identical to SEQ ID NO: 2253
  source 1..33: mol_type = other RNA

SEQ ID NO: 6520 - RNA, 23 nt, Synthetic Construct
  source 1..23: mol_type = other RNA
tcctgtactgagccgccccgagt

SEQ ID NO: 6521 - RNA, 23 nt, Synthetic Construct
  source 1..23: mol_type = other RNA
tggtaatacgacgtactcagtgt

SEQ ID NO: 6522 - RNA, 23 nt, Synthetic Construct
  source 1..23: mol_type = other RNA
tggtaatacgacgtactcagtgt

SEQ ID NO: 6523 - RNA, 18 nt, Synthetic Construct
  source 1..18: mol_type = other RNA
gcgaaattccttgtcggg

SEQ ID NO: 6524 - RNA, 18 nt, Synthetic Construct
  source 1..18: mol_type = other RNA
gcgaaattccttgtcggg

SEQ ID NO: 6525 - RNA, 22 nt, Synthetic Construct
  source 1..22: mol_type = other RNA
gagagtaggacgttgccaggtt

SEQ ID NO: 6526 - RNA, 22 nt, Synthetic Construct
  source 1..22: mol_type = other RNA
gagagtaggacgttgccaggtt

SEQ ID NO: 6527 - RNA, 21 nt, Synthetic Construct
  source 1..21: mol_type = other RNA
tgaggtagtagattgtgtagt

SEQ ID NO: 6528 - RNA, 22 nt, Synthetic Construct
  source 1..22: mol_type = other RNA
tggggtagtaggttgtgtggtt

SEQ ID NO: 6529 - RNA, 22 nt, Synthetic Construct
  source 1..22: mol_type = other RNA
tggggtagtaggttgtgtggtt

SEQ ID NO: 6530 - RNA, 25 nt, Synthetic Construct
  source 1..25: mol_type = other RNA
gctcagtggaaaggatgtgaatcta

SEQ ID NO: 6531 - RNA, 25 nt, Synthetic Construct
  source 1..25: mol_type = other RNA
gctcagtggaaaggatgtgaatcta

SEQ ID NO: 6532 - RNA, 25 nt, Synthetic Construct
  source 1..25: mol_type = other RNA
tcggatccgtctgagcttggctttt

SEQ ID NO: 6533 - RNA, 22 nt, Synthetic Construct
  source 1..22: mol_type = other RNA
tgaggaagtagattgtatagtt

SEQ ID NO: 6534 - RNA, 22 nt, Synthetic Construct
  source 1..22: mol_type = other RNA
tgaggaagtagattgtatagtt

SEQ ID NO: 6535 - RNA, 43 nt, Synthetic Construct
  source 1..43: mol_type = other RNA
agtaaggtcagctaaataagctatcgggcccataccccgaaaa

SEQ ID NO: 6536 - RNA, 43 nt, Synthetic Construct; identical to SEQ ID NO: 6535
  source 1..43: mol_type = other RNA

SEQ ID NO: 6537 - RNA, 32 nt, Synthetic Construct; identical to SEQ ID NO: 2798
  source 1..32: mol_type = other RNA

SEQ ID NO: 6538 - RNA, 32 nt, Synthetic Construct; identical to SEQ ID NO: 2798
  source 1..32: mol_type = other RNA

SEQ ID NO: 6539 - RNA, 22 nt, Synthetic Construct
  source 1..22: mol_type = other RNA
tagcagcacgtaaatataggcg

SEQ ID NO: 6540 - RNA, 22 nt, Synthetic Construct
  source 1..22: mol_type = other RNA
tagcagcacgtaaatataggcg

SEQ ID NO: 6541 - RNA, 20 nt, Synthetic Construct
  source 1..20: mol_type = other RNA
tgaggtagtgggttgtatag

SEQ ID NO: 6542 - RNA, 20 nt, Synthetic Construct
  source 1..20: mol_type = other RNA
tgaggtagtgggttgtatag

SEQ ID NO: 6543 - RNA, 23 nt, Synthetic Construct
  source 1..23: mol_type = other RNA
tggtaatacgacgtacttagtgt

SEQ ID NO: 6544 - RNA, 23 nt, Synthetic Construct
  source 1..23: mol_type = other RNA
tggtaatacgacgtacttagtgt

SEQ ID NO: 6545 - RNA, 15 nt, Synthetic Construct
  source 1..15: mol_type = other RNA
tccggatcgtagtct

SEQ ID NO: 6546 - RNA, 15 nt, Synthetic Construct
  source 1..15: mol_type = other RNA
tccggatcgtagtct

SEQ ID NO: 6547 - RNA, 18 nt, Synthetic Construct
  source 1..18: mol_type = other RNA
gaagttgaccgcctgggg

SEQ ID NO: 6548 - RNA, 18 nt, Synthetic Construct
  source 1..18: mol_type = other RNA
gaagttgaccgcctgggg

SEQ ID NO: 6549 - RNA, 23 nt, Synthetic Construct
  source 1..23: mol_type = other RNA
aatgacacgatcactcccgttgt

SEQ ID NO: 6550 - RNA, 23 nt, Synthetic Construct
  source 1..23: mol_type = other RNA
aatgacacgatcactcccgttgt

SEQ ID NO: 6551 - RNA, 23 nt, Synthetic Construct
  source 1..23: mol_type = other RNA
ttatggtttgcctgggactgagg

SEQ ID NO: 6552 - RNA, 20 nt, Synthetic Construct
  source 1..20: mol_type = other RNA
aaaagctgggttgagaggga

SEQ ID NO: 6553 - RNA, 20 nt, Synthetic Construct
  source 1..20: mol_type = other RNA
aaaagctgggttgagaggga

SEQ ID NO: 6554 - RNA, 24 nt, Synthetic Construct
  source 1..24: mol_type = other RNA
tctctcggctcctcgcggctcgct

SEQ ID NO: 6555 - RNA, 24 nt, Synthetic Construct
  source 1..24: mol_type = other RNA
tctctcggctcctcgcggctcgct

SEQ ID NO: 6556 - RNA, 24 nt, Synthetic Construct
  source 1..24: mol_type = other RNA
aaaagctgggttgagagggcgaaa

SEQ ID NO: 6557 - RNA, 24 nt, Synthetic Construct
  source 1..24: mol_type = other RNA
aaaagctgggttgagagggcgaaa

SEQ ID NO: 6558 - RNA, 23 nt, Synthetic Construct
  source 1..23: mol_type = other RNA
ggcagggttcgtgactggggtga

SEQ ID NO: 6559 - RNA, 22 nt, Synthetic Construct
  source 1..22: mol_type = other RNA
tgaggtagtaggttgtataatt

SEQ ID NO: 6560 - RNA, 21 nt, Synthetic Construct
  source 1..21: mol_type = other RNA
tggggtagtagattgtatagt

SEQ ID NO: 6561 - RNA, 21 nt, Synthetic Construct
  source 1..21: mol_type = other RNA
tggggtagtagattgtatagt

SEQ ID NO: 6562 - RNA, 22 nt, Synthetic Construct
  source 1..22: mol_type = other RNA
cgactcttagcggtggatcact

SEQ ID NO: 6563 - RNA, 22 nt, Synthetic Construct
  source 1..22: mol_type = other RNA
cgactcttagcggtggatcact

SEQ ID NO: 6564 - RNA, 24 nt, Synthetic Construct
  source 1..24: mol_type = other RNA
tgtaaacatccccgactggaagcc

SEQ ID NO: 6565 - RNA, 24 nt, Synthetic Construct
  source 1..24: mol_type = other RNA
tgtaaacatccccgactggaagcc

SEQ ID NO: 6566 - RNA, 15 nt, Synthetic Construct
  source 1..15: mol_type = other RNA
gcaagtcgaacggta

SEQ ID NO: 6567 - RNA, 15 nt, Synthetic Construct
  source 1..15: mol_type = other RNA
gcaagtcgaacggta

SEQ ID NO: 6568 - RNA, 22 nt, Synthetic Construct
  source 1..22: mol_type = other RNA
tggaatgtgaagaagtatgtat

SEQ ID NO: 6569 - RNA, 22 nt, Synthetic Construct
  source 1..22: mol_type = other RNA
tggaatgtgaagaagtatgtat

SEQ ID NO: 6570 - RNA, 16 nt, Synthetic Construct
  source 1..16: mol_type = other RNA
cgctagtaatcgcgga

SEQ ID NO: 6571 - RNA, 16 nt, Synthetic Construct
  source 1..16: mol_type = other RNA
cgctagtaatcgcgga

SEQ ID NO: 6572 - RNA, 21 nt, Synthetic Construct
  source 1..21: mol_type = other RNA
cgaggtagtaggttgtatagt

SEQ ID NO: 6573 - RNA, 21 nt, Synthetic Construct
  source 1..21: mol_type = other RNA
cgaggtagtaggttgtatagt

SEQ ID NO: 6574 - RNA, 23 nt, Synthetic Construct
  source 1..23: mol_type = other RNA
gcgtggtaggagagcgttctgta

SEQ ID NO: 6575 - RNA, 22 nt, Synthetic Construct
  source 1..22: mol_type = other RNA
tgaggtagtagattgtatagtc

SEQ ID NO: 6576 - RNA, 27 nt, Synthetic Construct
  source 1..27: mol_type = other RNA
gactcttagcggtggatcactcggctc

SEQ ID NO: 6577 - RNA, 27 nt, Synthetic Construct
  source 1..27: mol_type = other RNA
gactcttagcggtggatcactcggctc

SEQ ID NO: 6578 - RNA, 30 nt, Synthetic Construct; identical to SEQ ID NO: 2578
  source 1..30: mol_type = other RNA

SEQ ID NO: 6579 - RNA, 30 nt, Synthetic Construct; identical to SEQ ID NO: 2578
  source 1..30: mol_type = other RNA

SEQ ID NO: 6580 - RNA, 22 nt, Synthetic Construct
  source 1..22: mol_type = other RNA
cattgcacttgtctcggtctgg

SEQ ID NO: 6581 - RNA, 22 nt, Synthetic Construct
  source 1..22: mol_type = other RNA
tgaggtagtaggtcgtatagtt

SEQ ID NO: 6582 - RNA, 25 nt, Synthetic Construct
  source 1..25: mol_type = other RNA
agctacatctggctactgggtctct

SEQ ID NO: 6583 - RNA, 25 nt, Synthetic Construct
  source 1..25: mol_type = other RNA
agctacatctggctactgggtctct

SEQ ID NO: 6584 - RNA, 24 nt, Synthetic Construct
  source 1..24: mol_type = other RNA
gatgaggcgtgataacgagtctgc

SEQ ID NO: 6585 - RNA, 24 nt, Synthetic Construct
  source 1..24: mol_type = other RNA
gatgaggcgtgataacgagtctgc

SEQ ID NO: 6586 - RNA, 18 nt, Synthetic Construct
  source 1..18: mol_type = other RNA
gctattgacgaccgtacc

SEQ ID NO: 6587 - RNA, 18 nt, Synthetic Construct
  source 1..18: mol_type = other RNA
gctattgacgaccgtacc

SEQ ID NO: 6588 - RNA, 22 nt, Synthetic Construct
  source 1..22: mol_type = other RNA
tgtggtagtaggttgtgtggtt

SEQ ID NO: 6589 - RNA, 16 nt, Synthetic Construct
  source 1..16: mol_type = other RNA
gtccggatcgtagtct

SEQ ID NO: 6590 - RNA, 16 nt, Synthetic Construct
  source 1..16: mol_type = other RNA
gtccggatcgtagtct

SEQ ID NO: 6591 - RNA, 20 nt, Synthetic Construct
  source 1..20: mol_type = other RNA
ccgcagagtacagcttggga

SEQ ID NO: 6592 - RNA, 22 nt, Synthetic Construct
  source 1..22: mol_type = other RNA
tcctgtactgggctgccccgag

SEQ ID NO: 6593 - RNA, 22 nt, Synthetic Construct
  source 1..22: mol_type = other RNA
tcctgtactgggctgccccgag

SEQ ID NO: 6594 - RNA, 34 nt, Synthetic Construct
  source 1..34: mol_type = other RNA
gcccggatagctcagtcggtagagcatcagactt

SEQ ID NO: 6595 - RNA, 34 nt, Synthetic Construct; identical to SEQ ID NO: 6594
  source 1..34: mol_type = other RNA

SEQ ID NO: 6596 - RNA, 21 nt, Synthetic Construct
  source 1..21: mol_type = other RNA
tgaggtagtaggttatgtggt

SEQ ID NO: 6597 - RNA, 21 nt, Synthetic Construct
  source 1..21: mol_type = other RNA
tgaggtagtaggttatgtggt

SEQ ID NO: 6598 - RNA, 17 nt, Synthetic Construct
  source 1..17: mol_type = other RNA
taggtcatcgtcaggct

SEQ ID NO: 6599 - RNA, 22 nt, Synthetic Construct
  source 1..22: mol_type = other RNA
tggaatgtaaggaagtatgtat

SEQ ID NO: 6600 - RNA, 22 nt, Synthetic Construct
  source 1..22: mol_type = other RNA
tggaatgtaaggaagtatgtat

SEQ ID NO: 6601 - RNA, 34 nt, Synthetic Construct; identical to SEQ ID NO: 2183
  source 1..34: mol_type = other RNA

SEQ ID NO: 6602 - RNA, 34 nt, Synthetic Construct; identical to SEQ ID NO: 2183
  source 1..34: mol_type = other RNA

SEQ ID NO: 6603 - RNA, 22 nt, Synthetic Construct
  source 1..22: mol_type = other RNA
tgagatagtaggttgtatagtt

SEQ ID NO: 6604 - RNA, 15 nt, Synthetic Construct
  source 1..15: mol_type = other RNA
cgagtgacgtagtgt

SEQ ID NO: 6605 - RNA, 15 nt, Synthetic Construct
  source 1..15: mol_type = other RNA
cgagtgacgtagtgt

SEQ ID NO: 6606 - RNA, 35 nt, Synthetic Construct; identical to SEQ ID NO: 2615
  source 1..35: mol_type = other RNA

SEQ ID NO: 6607 - RNA, 35 nt, Synthetic Construct; identical to SEQ ID NO: 2615
  source 1..35: mol_type = other RNA

SEQ ID NO: 6608 - RNA, 27 nt, Synthetic Construct
  source 1..27: mol_type = other RNA
ccccccactgctaaattcgactggctt

SEQ ID NO: 6609 - RNA, 23 nt, Synthetic Construct
  source 1..23: mol_type = other RNA
tgataatacgacgtacttagtgt

SEQ ID NO: 6610 - RNA, 37 nt, Synthetic Construct; identical to SEQ ID NO: 2365
  source 1..37: mol_type = other RNA

SEQ ID NO: 6611 - RNA, 37 nt, Synthetic Construct; identical to SEQ ID NO: 2365
  source 1..37: mol_type = other RNA

SEQ ID NO: 6612 - RNA, 36 nt, Synthetic Construct; identical to SEQ ID NO: 2506
  source 1..36: mol_type = other RNA

SEQ ID NO: 6613 - RNA, 36 nt, Synthetic Construct; identical to SEQ ID NO: 2506
  source 1..36: mol_type = other RNA

SEQ ID NO: 6614 - RNA, 37 nt, Synthetic Construct; identical to SEQ ID NO: 2365
  source 1..37: mol_type = other RNA

SEQ ID NO: 6615 - RNA, 37 nt, Synthetic Construct; identical to SEQ ID NO: 2365
  source 1..37: mol_type = other RNA

SEQ ID NO: 6616 - RNA, 16 nt, Synthetic Construct
  source 1..16: mol_type = other RNA
aggtcatcgtcaggct

SEQ ID NO: 6617 - RNA, 16 nt, Synthetic Construct
  source 1..16: mol_type = other RNA
aggtcatcgtcaggct

SEQ ID NO: 6618 - RNA, 34 nt, Synthetic Construct; identical to SEQ ID NO: 2183
  source 1..34: mol_type = other RNA

SEQ ID NO: 6619 - RNA, 22 nt, Synthetic Construct
  source 1..22: mol_type = other RNA
tgaggtagtaggttgtacagtt

SEQ ID NO: 6620 - RNA, 23 nt, Synthetic Construct
  source 1..23: mol_type = other RNA
cgaggtagtaggttgtgtggttt

SEQ ID NO: 6621 - RNA, 23 nt, Synthetic Construct
  source 1..23: mol_type = other RNA
tgaggaagtaggttgtgtggttt

SEQ ID NO: 6622 - RNA, 23 nt, Synthetic Construct
  source 1..23: mol_type = other RNA
tgaggaagtaggttgtgtggttt

SEQ ID NO: 6623 - RNA, 22 nt, Synthetic Construct
  source 1..22: mol_type = other RNA
tgaggtagtaggttgtatggtt

SEQ ID NO: 6624 - RNA, 22 nt, Synthetic Construct
  source 1..22: mol_type = other RNA
tgaggtagtaggttgtatggtt

SEQ ID NO: 6625 - RNA, 23 nt, Synthetic Construct
  source 1..23: mol_type = other RNA
tgaggggcagagagcgagactat

SEQ ID NO: 6626 - RNA, 17 nt, Synthetic Construct
  source 1..17: mol_type = other RNA
tcgctagtaatcgcgga

SEQ ID NO: 6627 - RNA, 17 nt, Synthetic Construct
  source 1..17: mol_type = other RNA
tcgctagtaatcgcgga

SEQ ID NO: 6628 - RNA, 15 nt, Synthetic Construct
  source 1..15: mol_type = other RNA
tcctgacggccatag

SEQ ID NO: 6629 - RNA, 23 nt, Synthetic Construct
  source 1..23: mol_type = other RNA
tggtaatacgacatacttagtgt

SEQ ID NO: 6630 - RNA, 34 nt, Synthetic Construct; identical to SEQ ID NO: 385
  source 1..34: mol_type = other RNA

SEQ ID NO: 6631 - RNA, 34 nt, Synthetic Construct; identical to SEQ ID NO: 385
  source 1..34: mol_type = other RNA

SEQ ID NO: 6632 - RNA, 23 nt, Synthetic Construct
  source 1..23: mol_type = other RNA
caaagtgcttacagtgcaggtag

SEQ ID NO: 6633 - RNA, 23 nt, Synthetic Construct
  source 1..23: mol_type = other RNA
caaagtgcttacagtgcaggtag

SEQ ID NO: 6634 - RNA, 16 nt, Synthetic Construct
  source 1..16: mol_type = other RNA
tgttcggaagattttc

SEQ ID NO: 6635 - RNA, 16 nt, Synthetic Construct
  source 1..16: mol_type = other RNA
tgttcggaagattttc

SEQ ID NO: 6636 - RNA, 31 nt, Synthetic Construct; identical to SEQ ID NO: 2423
  source 1..31: mol_type = other RNA

SEQ ID NO: 6637 - RNA, 31 nt, Synthetic Construct; identical to SEQ ID NO: 2423
  source 1..31: mol_type = other RNA

SEQ ID NO: 6638 - RNA, 21 nt, Synthetic Construct
  source 1..21: mol_type = other RNA
gttggttcaagcgtgtagtcg

SEQ ID NO: 6639 - RNA, 22 nt, Synthetic Construct
  source 1..22: mol_type = other RNA
tgttggttcaagcgtgtagtcg

SEQ ID NO: 6640 - RNA, 22 nt, Synthetic Construct
  source 1..22: mol_type = other RNA
tgttggttcaagcgtgtagtcg

SEQ ID NO: 6641 - RNA, 16 nt, Synthetic Construct
  source 1..16: mol_type = other RNA
gatttgggagtgctcg

SEQ ID NO: 6642 - RNA, 16 nt, Synthetic Construct
  source 1..16: mol_type = other RNA
gatttgggagtgctcg

SEQ ID NO: 6643 - RNA, 24 nt, Synthetic Construct
  source 1..24: mol_type = other RNA
tgtcagtttgtcaaataccccaat

SEQ ID NO: 6644 - RNA, 24 nt, Synthetic Construct
  source 1..24: mol_type = other RNA
tgtcagtttgtcaaataccccaat

SEQ ID NO: 6645 - RNA, 23 nt, Synthetic Construct
  source 1..23: mol_type = other RNA
tggaatgtaaagaagtatgtata

SEQ ID NO: 6646 - RNA, 23 nt, Synthetic Construct
  source 1..23: mol_type = other RNA
tggaatgtaaagaagtatgtata

SEQ ID NO: 6647 - RNA, 20 nt, Synthetic Construct
  source 1..20: mol_type = other RNA
tgaggtagtaggttgtgagg

SEQ ID NO: 6648 - RNA, 20 nt, Synthetic Construct
  source 1..20: mol_type = other RNA
tgaggtagtaggttgtgagg

SEQ ID NO: 6649 - RNA, 21 nt, Synthetic Construct
  source 1..21: mol_type = other RNA
ctagactggagctccttgagg

SEQ ID NO: 6650 - RNA, 23 nt, Synthetic Construct
  source 1..23: mol_type = other RNA
tgaggggcagagagcgagactct

SEQ ID NO: 6651 - RNA, 28 nt, Synthetic Construct
  source 1..28: mol_type = other RNA
ccccccactgctaaatttggctggcttt

SEQ ID NO: 6652 - RNA, 41 nt, Synthetic Construct; identical to SEQ ID NO: 2441
  source 1..41: mol_type = other RNA

SEQ ID NO: 6653 - RNA, 23 nt, Synthetic Construct
  source 1..23: mol_type = other RNA
tggtaatacgacgtacttagcgt

SEQ ID NO: 6654 - RNA, 22 nt, Synthetic Construct
  source 1..22: mol_type = other RNA
actggacttggagtcagaaggc

SEQ ID NO: 6655 - RNA, 22 nt, Synthetic Construct
  source 1..22: mol_type = other RNA
actggacttggagtcagaaggc

SEQ ID NO: 6656 - RNA, 22 nt, Synthetic Construct
  source 1..22: mol_type = other RNA
tgaggtagtaggtcgtgtggtt

SEQ ID NO: 6657 - RNA, 22 nt, Synthetic Construct
  source 1..22: mol_type = other RNA
tgaggtagtaggtcgtgtggtt

SEQ ID NO: 6658 - RNA, 32 nt, Synthetic Construct; identical to SEQ ID NO: 2435
  source 1..32: mol_type = other RNA

SEQ ID NO: 6659 - RNA, 32 nt, Synthetic Construct; identical to SEQ ID NO: 2435
  source 1..32: mol_type = other RNA

SEQ ID NO: 6660 - RNA, 35 nt, Synthetic Construct; identical to SEQ ID NO: 3369
  source 1..35: mol_type = other RNA

SEQ ID NO: 6661 - RNA, 35 nt, Synthetic Construct; identical to SEQ ID NO: 3369
  source 1..35: mol_type = other RNA

SEQ ID NO: 6662 - RNA, 32 nt, Synthetic Construct; identical to SEQ ID NO: 2318
  source 1..32: mol_type = other RNA

SEQ ID NO: 6663 - RNA, 32 nt, Synthetic Construct; identical to SEQ ID NO: 2318
  source 1..32: mol_type = other RNA

SEQ ID NO: 6664 - RNA, 23 nt, Synthetic Construct
  source 1..23: mol_type = other RNA
ttatggtttgcctgggactgaaa

SEQ ID NO: 6665 - RNA, 23 nt, Synthetic Construct
  source 1..23: mol_type = other RNA
ttatggtttgcctgggactgaaa

SEQ ID NO: 6666 - RNA, 24 nt, Synthetic Construct
  source 1..24: mol_type = other RNA
gaggtgtagaataggtgggagctt

SEQ ID NO: 6667 - RNA, 23 nt, Synthetic Construct
  source 1..23: mol_type = other RNA
tcccgtactgagctgccccgagt

SEQ ID NO: 6668 - RNA, 23 nt, Synthetic Construct
  source 1..23: mol_type = other RNA
tcccgtactgagctgccccgagt

SEQ ID NO: 6669 - RNA, 35 nt, Synthetic Construct; identical to SEQ ID NO: 2518
  source 1..35: mol_type = other RNA

SEQ ID NO: 6670 - RNA, 35 nt, Synthetic Construct; identical to SEQ ID NO: 2518
  source 1..35: mol_type = other RNA

SEQ ID NO: 6671 - RNA, 23 nt, Synthetic Construct
  source 1..23: mol_type = other RNA
tggtaaaacgacgtacttagtgt

SEQ ID NO: 6672 - RNA, 23 nt, Synthetic Construct
  source 1..23: mol_type = other RNA
tggtaaaacgacgtacttagtgt

SEQ ID NO: 6673 - RNA, 23 nt, Synthetic Construct
  source 1..23: mol_type = other RNA
tggcagtgtcttagctggttgtt

SEQ ID NO: 6674 - RNA, 23 nt, Synthetic Construct
  source 1..23: mol_type = other RNA
tggcagtgtcttagctggttgtt

SEQ ID NO: 6675 - RNA, 34 nt, Synthetic Construct; identical to SEQ ID NO: 2529
  source 1..34: mol_type = other RNA

SEQ ID NO: 6676 - RNA, 34 nt, Synthetic Construct; identical to SEQ ID NO: 2529
  source 1..34: mol_type = other RNA

SEQ ID NO: 6677 - RNA, 21 nt, Synthetic Construct
  source 1..21: mol_type = other RNA
gttggttcaagcgtgtagtcg

SEQ ID NO: 6678 - RNA, 21 nt, Synthetic Construct
  source 1..21: mol_type = other RNA
gttggttcaagcgtgtagtcg

SEQ ID NO: 6679 - RNA, 22 nt, Synthetic Construct
  source 1..22: mol_type = other RNA
tgaggtagtagattgtatggtt

SEQ ID NO: 6680 - RNA, 28 nt, Synthetic Construct
  source 1..28: mol_type = other RNA
ggtggctgtagctcagttggtagagtcc

SEQ ID NO: 6681 - RNA, 28 nt, Synthetic Construct
  source 1..28: mol_type = other RNA
ggtggctgtagctcagttggtagagtcc

SEQ ID NO: 6682 - RNA, 15 nt, Synthetic Construct
  source 1..15: mol_type = other RNA
tcctgacggccatag

SEQ ID NO: 6683 - RNA, 19 nt, Synthetic Construct
  source 1..19: mol_type = other RNA
cctgtaccgatcaatagtg

SEQ ID NO: 6684 - RNA, 22 nt, Synthetic Construct
  source 1..22: mol_type = other RNA
tgagatagtagtttgtgctgtt

SEQ ID NO: 6685 - RNA, 44 nt, Synthetic Construct
  source 1..44: mol_type = other RNA
aatgattggcgatcaagcggtataccgaagctctaggtgcggca

SEQ ID NO: 6686 - RNA, 44 nt, Synthetic Construct; identical to SEQ ID NO: 6685
  source 1..44: mol_type = other RNA

SEQ ID NO: 6687 - RNA, 36 nt, Synthetic Construct; identical to SEQ ID NO: 2366
  source 1..36: mol_type = other RNA

SEQ ID NO: 6688 - RNA, 15 nt, Synthetic Construct
  source 1..15: mol_type = other RNA
tgcctcagcgtcggt

SEQ ID NO: 6689 - RNA, 15 nt, Synthetic Construct
  source 1..15: mol_type = other RNA
tgcctcagcgtcggt

SEQ ID NO: 6690 - RNA, 21 nt, Synthetic Construct
  source 1..21: mol_type = other RNA
gaagaggacttggaactcgat

SEQ ID NO: 6691 - RNA, 21 nt, Synthetic Construct
  source 1..21: mol_type = other RNA
gaagaggacttggaactcgat

SEQ ID NO: 6692 - RNA, 21 nt, Synthetic Construct
  source 1..21: mol_type = other RNA
tcctgcactgagctgccccga

SEQ ID NO: 6693 - RNA, 21 nt, Synthetic Construct
  source 1..21: mol_type = other RNA
tcctgcactgagctgccccga

SEQ ID NO: 6694 - RNA, 15 nt, Synthetic Construct
  source 1..15: mol_type = other RNA
accggaggaaggtgg

SEQ ID NO: 6695 - RNA, 15 nt, Synthetic Construct
  source 1..15: mol_type = other RNA
accggaggaaggtgg

SEQ ID NO: 6696 - RNA, 23 nt, Synthetic Construct
  source 1..23: mol_type = other RNA
tggaatgtaaagaagtatgtacc

SEQ ID NO: 6697 - RNA, 23 nt, Synthetic Construct
  source 1..23: mol_type = other RNA
tggaatgtaaagaagtatgtacc

SEQ ID NO: 6698 - RNA, 21 nt, Synthetic Construct
  source 1..21: mol_type = other RNA
tgaggtaataggttgtgtggt

SEQ ID NO: 6699 - RNA, 21 nt, Synthetic Construct
  source 1..21: mol_type = other RNA
tgaggtaataggttgtgtggt

SEQ ID NO: 6700 - RNA, 22 nt, Synthetic Construct
  source 1..22: mol_type = other RNA
tgaggtagtaagttgtgtggtt

SEQ ID NO: 6701 - RNA, 22 nt, Synthetic Construct
  source 1..22: mol_type = other RNA
tgaggtagtaagttgtgtggtt

SEQ ID NO: 6702 - RNA, 23 nt, Synthetic Construct
  source 1..23: mol_type = other RNA
tggaaatacgacgtacttagtgt

SEQ ID NO: 6703 - RNA, 23 nt, Synthetic Construct
  source 1..23: mol_type = other RNA
tggaaatacgacgtacttagtgt

SEQ ID NO: 6704 - RNA, 22 nt, Synthetic Construct
  source 1..22: mol_type = other RNA
tgaggtagtagtttgtgcggtt

SEQ ID NO: 6705 - RNA, 22 nt, Synthetic Construct
  source 1..22: mol_type = other RNA
tgaggtagtagtttgtgcggtt

SEQ ID NO: 6706 - RNA, 35 nt, Synthetic Construct; identical to SEQ ID NO: 2548
  source 1..35: mol_type = other RNA

SEQ ID NO: 6707 - RNA, 35 nt, Synthetic Construct; identical to SEQ ID NO: 2548
  source 1..35: mol_type = other RNA

SEQ ID NO: 6708 - RNA, 22 nt, Synthetic Construct
  source 1..22: mol_type = other RNA
tgaggtagtaggttgcgtggtt

SEQ ID NO: 6709 - RNA, 22 nt, Synthetic Construct
  source 1..22: mol_type = other RNA
tcctgtactgagctgccccggg

SEQ ID NO: 6710 - RNA, 22 nt, Synthetic Construct
  source 1..22: mol_type = other RNA
tgaggaagtaggttgtatagtt

SEQ ID NO: 6711 - RNA, 20 nt, Synthetic Construct
  source 1..20: mol_type = other RNA
cggcggggacggcgattggt

SEQ ID NO: 6712 - RNA, 20 nt, Synthetic Construct
  source 1..20: mol_type = other RNA
cggcggggacggcgattggt

SEQ ID NO: 6713 - RNA, 22 nt, Synthetic Construct
  source 1..22: mol_type = other RNA
tcacagtgaaccggtctcttta

SEQ ID NO: 6714 - RNA, 28 nt, Synthetic Construct
  source 1..28: mol_type = other RNA
gcggtataccgaagctctaggtgcggca

SEQ ID NO: 6715 - RNA, 28 nt, Synthetic Construct
  source 1..28: mol_type = other RNA
gcggtataccgaagctctaggtgcggca

SEQ ID NO: 6716 - RNA, 33 nt, Synthetic Construct; identical to SEQ ID NO: 2126
  source 1..33: mol_type = other RNA

SEQ ID NO: 6717 - RNA, 23 nt, Synthetic Construct
  source 1..23: mol_type = other RNA
tctttggttatctagctgtatgt

SEQ ID NO: 6718 - RNA, 23 nt, Synthetic Construct
  source 1..23: mol_type = other RNA
tctttggttatctagctgtatgt

SEQ ID NO: 6719 - RNA, 22 nt, Synthetic Construct
  source 1..22: mol_type = other RNA
tgaggtagtaggttgtatagct

SEQ ID NO: 6720 - RNA, 22 nt, Synthetic Construct
  source 1..22: mol_type = other RNA
tgaggtagtaggttgtatagct

SEQ ID NO: 6721 - RNA, 23 nt, Synthetic Construct
  source 1..23: mol_type = other RNA
tgtcagtttgccaaataccccaa

SEQ ID NO: 6722 - RNA, 22 nt, Synthetic Construct
  source 1..22: mol_type = other RNA
tggaatgtaaggaagtatgtat

SEQ ID NO: 6723 - RNA, 23 nt, Synthetic Construct
  source 1..23: mol_type = other RNA
caaagtgctgttcgtgcaggtgg

SEQ ID NO: 6724 - RNA, 27 nt, Synthetic Construct
  source 1..27: mol_type = other RNA
gcatgggtggttcagtggtagaattct

SEQ ID NO: 6725 - RNA, 27 nt, Synthetic Construct
  source 1..27: mol_type = other RNA
gcatgggtggttcagtggtagaattct

SEQ ID NO: 6726 - RNA, 22 nt, Synthetic Construct
  source 1..22: mol_type = other RNA
tggaatgtaaagaagcatgtat

SEQ ID NO: 6727 - RNA, 22 nt, Synthetic Construct
  source 1..22: mol_type = other RNA
tggaatgtaaagaagcatgtat

SEQ ID NO: 6728 - RNA, 23 nt, Synthetic Construct
  source 1..23: mol_type = other RNA
tggtaatacgacgtacttaatgt

SEQ ID NO: 6729 - RNA, 23 nt, Synthetic Construct
  source 1..23: mol_type = other RNA
tggtaatacgacgtacttaatgt

SEQ ID NO: 6730 - RNA, 27 nt, Synthetic Construct
  source 1..27: mol_type = other RNA
ccccccactgctgaatttgactggctt

SEQ ID NO: 6731 - RNA, 23 nt, Synthetic Construct
  source 1..23: mol_type = other RNA
tcctgtaccgagctgccccgagt

SEQ ID NO: 6732 - RNA, 15 nt, Synthetic Construct
  source 1..15: mol_type = other RNA
cgccatttaaagagg

SEQ ID NO: 6733 - RNA, 36 nt, Synthetic Construct; identical to SEQ ID NO: 3596
  source 1..36: mol_type = other RNA

SEQ ID NO: 6734 - RNA, 36 nt, Synthetic Construct; identical to SEQ ID NO: 3596
  source 1..36: mol_type = other RNA

SEQ ID NO: 6735 - RNA, 23 nt, Synthetic Construct
  source 1..23: mol_type = other RNA
agcagcattgtacagggctatgg

SEQ ID NO: 6736 - RNA, 21 nt, Synthetic Construct
  source 1..21: mol_type = other RNA
tgaggtagtaggttgtatggt

SEQ ID NO: 6737 - RNA, 16 nt, Synthetic Construct
  source 1..16: mol_type = other RNA
acggcccagactccta

SEQ ID NO: 6738 - RNA, 31 nt, Synthetic Construct; identical to SEQ ID NO: 2893
  source 1..31: mol_type = other RNA

SEQ ID NO: 6739 - RNA, 36 nt, Synthetic Construct
  source 1..36: mol_type = other RNA
gtctacggccataccaccctgaacgcgcccgatctc

SEQ ID NO: 6740 - RNA, 36 nt, Synthetic Construct; identical to SEQ ID NO: 6739
  source 1..36: mol_type = other RNA

SEQ ID NO: 6741 - RNA, 23 nt, Synthetic Construct
  source 1..23: mol_type = other RNA
tggtaatacgacgtacttggtgt

SEQ ID NO: 6742 - RNA, 23 nt, Synthetic Construct
  source 1..23: mol_type = other RNA
tggtaatacgacgtacttggtgt

SEQ ID NO: 6743 - RNA, 24 nt, Synthetic Construct
  source 1..24: mol_type = other RNA
gaggtgtagaataggtgggagctt

SEQ ID NO: 6744 - RNA, 36 nt, Synthetic Construct; identical to SEQ ID NO: 2469
  source 1..36: mol_type = other RNA

SEQ ID NO: 6745 - RNA, 36 nt, Synthetic Construct; identical to SEQ ID NO: 2469
  source 1..36: mol_type = other RNA

SEQ ID NO: 6746 - RNA, 22 nt, Synthetic Construct
  source 1..22: mol_type = other RNA
tattgcacttgccccggcctgt

SEQ ID NO: 6747 - RNA, 22 nt, Synthetic Construct
  source 1..22: mol_type = other RNA
tattgcacttgccccggcctgt

SEQ ID NO: 6748 - RNA, 22 nt, Synthetic Construct
  source 1..22: mol_type = other RNA
tgaggtagtagatcgtatagtt

SEQ ID NO: 6749 - RNA, 22 nt, Synthetic Construct
  source 1..22: mol_type = other RNA
ggatatcatcatatactgtaag

SEQ ID NO: 6750 - RNA, 22 nt, Synthetic Construct
  source 1..22: mol_type = other RNA
ggatatcatcatatactgtaag

SEQ ID NO: 6751 - RNA, 28 nt, Synthetic Construct
  source 1..28: mol_type = other RNA
tgttggttcaagcgtgtagtcgtgctct

SEQ ID NO: 6752 - RNA, 31 nt, Synthetic Construct; identical to SEQ ID NO: 2507
  source 1..31: mol_type = other RNA

SEQ ID NO: 6753 - RNA, 31 nt, Synthetic Construct; identical to SEQ ID NO: 2507
  source 1..31: mol_type = other RNA

SEQ ID NO: 6754 - RNA, 22 nt, Synthetic Construct
  source 1..22: mol_type = other RNA
tggaatgtaaagaagtatgcat

SEQ ID NO: 6755 - RNA, 21 nt, Synthetic Construct
  source 1..21: mol_type = other RNA
tgaggtagtagtttgtgctgc

SEQ ID NO: 6756 - RNA, 20 nt, Synthetic Construct
  source 1..20: mol_type = other RNA
tgaggtagtaagttgtattg

SEQ ID NO: 6757 - RNA, 34 nt, Synthetic Construct
  source 1..34: mol_type = other RNA
tcccacatggtctagcggttaggattcctggttt

SEQ ID NO: 6758 - RNA, 34 nt, Synthetic Construct; identical to SEQ ID NO: 6757
  source 1..34: mol_type = other RNA

SEQ ID NO: 6759 - RNA, 22 nt, Synthetic Construct
  source 1..22: mol_type = other RNA
tgaagtagtaggttgtatagtt

SEQ ID NO: 6760 - RNA, 23 nt, Synthetic Construct
  source 1..23: mol_type = other RNA
atgacacgatcactcccgttgag

SEQ ID NO: 6761 - RNA, 23 nt, Synthetic Construct
  source 1..23: mol_type = other RNA
atgacacgatcactcccgttgag

SEQ ID NO: 6762 - RNA, 22 nt, Synthetic Construct
  source 1..22: mol_type = other RNA
tcctgtactgagctgtcccgag

SEQ ID NO: 6763 - RNA, 22 nt, Synthetic Construct
  source 1..22: mol_type = other RNA
tcctgtactgagctgtcccgag

SEQ ID NO: 6764 - RNA, 23 nt, Synthetic Construct
  source 1..23: mol_type = other RNA
gtaaacatccttgactggaagct

SEQ ID NO: 6765 - RNA, 18 nt, Synthetic Construct
  source 1..18: mol_type = other RNA
accggaggaaggtgggga

SEQ ID NO: 6766 - RNA, 22 nt, Synthetic Construct
  source 1..22: mol_type = other RNA
tgaggtagtaaattgtatagtt

SEQ ID NO: 6767 - RNA, 15 nt, Synthetic Construct
  source 1..15: mol_type = other RNA
gtccggatcgtagtc

SEQ ID NO: 6768 - RNA, 34 nt, Synthetic Construct; identical to SEQ ID NO: 2019
  source 1..34: mol_type = other RNA

SEQ ID NO: 6769 - RNA, 34 nt, Synthetic Construct; identical to SEQ ID NO: 2019
  source 1..34: mol_type = other RNA

SEQ ID NO: 6770 - RNA, 24 nt, Synthetic Construct
  source 1..24: mol_type = other RNA
agcaacattgtctgctgggtttct

SEQ ID NO: 6771 - RNA, 31 nt, Synthetic Construct; identical to SEQ ID NO: 2442
  source 1..31: mol_type = other RNA

SEQ ID NO: 6772 - RNA, 31 nt, Synthetic Construct; identical to SEQ ID NO: 2442
  source 1..31: mol_type = other RNA

SEQ ID NO: 6773 - RNA, 18 nt, Synthetic Construct
  source 1..18: mol_type = other RNA
tctaatgagactgccggt

SEQ ID NO: 6774 - RNA, 22 nt, Synthetic Construct
  source 1..22: mol_type = other RNA
tgaggaagtaggttgtatagtt

SEQ ID NO: 6775 - RNA, 22 nt, Synthetic Construct
  source 1..22: mol_type = other RNA
tgaggaagtaggttgtatagtt

SEQ ID NO: 6776 - RNA, 22 nt, Synthetic Construct
  source 1..22: mol_type = other RNA
tggagtgtaaagaagtatgtat

SEQ ID NO: 6777 - RNA, 22 nt, Synthetic Construct
  source 1..22: mol_type = other RNA
taaggtagtagtttgtgctgtt

SEQ ID NO: 6778 - RNA, 22 nt, Synthetic Construct
  source 1..22: mol_type = other RNA
taaggtagtagtttgtgctgtt

SEQ ID NO: 6779 - RNA, 16 nt, Synthetic Construct
  source 1..16: mol_type = other RNA
ctcagtagctcgagga

SEQ ID NO: 6780 - RNA, 16 nt, Synthetic Construct
  source 1..16: mol_type = other RNA
ctcagtagctcgagga

SEQ ID NO: 6781 - RNA, 23 nt, Synthetic Construct
  source 1..23: mol_type = other RNA
tgaggggcagagagcaagacttt

SEQ ID NO: 6782 - RNA, 23 nt, Synthetic Construct
  source 1..23: mol_type = other RNA
tgaggggcagagagcaagacttt

SEQ ID NO: 6783 - RNA, 16 nt, Synthetic Construct
  source 1..16: mol_type = other RNA
tgcgtagatatgcgga

SEQ ID NO: 6784 - RNA, 16 nt, Synthetic Construct
  source 1..16: mol_type = other RNA
tgcgtagatatgcgga

SEQ ID NO: 6785 - RNA, 22 nt, Synthetic Construct
  source 1..22: mol_type = other RNA
tcctgtactgagctgctccgag

SEQ ID NO: 6786 - RNA, 33 nt, Synthetic Construct; identical to SEQ ID NO: 2556
  source 1..33: mol_type = other RNA

SEQ ID NO: 6787 - RNA, 33 nt, Synthetic Construct; identical to SEQ ID NO: 2556
  source 1..33: mol_type = other RNA

SEQ ID NO: 6788 - RNA, 23 nt, Synthetic Construct
  source 1..23: mol_type = other RNA
tggtaatacaacgtacttagtgt

SEQ ID NO: 6789 - RNA, 17 nt, Synthetic Construct
  source 1..17: mol_type = other RNA
tcccagaaacccggtcg

SEQ ID NO: 6790 - RNA, 17 nt, Synthetic Construct
  source 1..17: mol_type = other RNA
tcccagaaacccggtcg

SEQ ID NO: 6791 - RNA, 22 nt, Synthetic Construct
  source 1..22: mol_type = other RNA
cgaggtagtaggttgtgtggtt

SEQ ID NO: 6792 - RNA, 22 nt, Synthetic Construct
  source 1..22: mol_type = other RNA
cgaggtagtaggttgtgtggtt

SEQ ID NO: 6793 - RNA, 20 nt, Synthetic Construct
  source 1..20: mol_type = other RNA
tgtcagtttgtcaaataccc

SEQ ID NO: 6794 - RNA, 20 nt, Synthetic Construct
  source 1..20: mol_type = other RNA
tgtcagtttgtcaaataccc

SEQ ID NO: 6795 - RNA, 31 nt, Synthetic Construct; identical to SEQ ID NO: 2278
  source 1..31: mol_type = other RNA

SEQ ID NO: 6796 - RNA, 31 nt, Synthetic Construct; identical to SEQ ID NO: 2278
  source 1..31: mol_type = other RNA

SEQ ID NO: 6797 - RNA, 23 nt, Synthetic Construct
  source 1..23: mol_type = other RNA
tgaggtagtaggttgtgtggttc

SEQ ID NO: 6798 - RNA, 23 nt, Synthetic Construct
  source 1..23: mol_type = other RNA
tggtaatacgacgtacatagtgt

SEQ ID NO: 6799 - RNA, 23 nt, Synthetic Construct
  source 1..23: mol_type = other RNA
tggtaatacgacgtacatagtgt

SEQ ID NO: 6800 - RNA, 20 nt, Synthetic Construct
  source 1..20: mol_type = other RNA
tgaagtagtaggttgtgtgg

SEQ ID NO: 6801 - RNA, 20 nt, Synthetic Construct
  source 1..20: mol_type = other RNA
tgaagtagtaggttgtgtgg

SEQ ID NO: 6802 - RNA, 24 nt, Synthetic Construct
  source 1..24: mol_type = other RNA
tgtaaacacccccgactggaagct

SEQ ID NO: 6803 - RNA, 21 nt, Synthetic Construct
  source 1..21: mol_type = other RNA
ctaatcccagaaacccggtcg

SEQ ID NO: 6804 - RNA, 31 nt, Synthetic Construct; identical to SEQ ID NO: 2427
  source 1..31: mol_type = other RNA

SEQ ID NO: 6805 - RNA, 25 nt, Synthetic Construct
  source 1..25: mol_type = other RNA
ttgaggatacgagatcgagacgaca

SEQ ID NO: 6806 - RNA, 25 nt, Synthetic Construct
  source 1..25: mol_type = other RNA
ttgaggatacgagatcgagacgaca

SEQ ID NO: 6807 - RNA, 24 nt, Synthetic Construct
  source 1..24: mol_type = other RNA
ggctacattgtctgctgggtttct

SEQ ID NO: 6808 - RNA, 21 nt, Synthetic Construct
  source 1..21: mol_type = other RNA
aatggcgccactagggttgtg

SEQ ID NO: 6809 - RNA, 22 nt, Synthetic Construct
  source 1..22: mol_type = other RNA
ngaggtagtaggttgtgtggtt

SEQ ID NO: 6810 - RNA, 22 nt, Synthetic Construct
  source 1..22: mol_type = other RNA
ngaggtagtaggttgtatagtt

SEQ ID NO: 6811 - RNA, 21 nt, Synthetic Construct
  source 1..21: mol_type = other RNA
tgaggtagtagtttgtgctga

SEQ ID NO: 6812 - RNA, 16 nt, Synthetic Construct
  source 1..16: mol_type = other RNA
ccatgccgcgtgcggg

SEQ ID NO: 6813 - RNA, 16 nt, Synthetic Construct
  source 1..16: mol_type = other RNA
ccatgccgcgtgcggg

SEQ ID NO: 6814 - RNA, 20 nt, Synthetic Construct
  source 1..20: mol_type = other RNA
atcacattgccagggatttc

SEQ ID NO: 6815 - RNA, 20 nt, Synthetic Construct
  source 1..20: mol_type = other RNA
atcacattgccagggatttc

SEQ ID NO: 6816 - RNA, 23 nt, Synthetic Construct
  source 1..23: mol_type = other RNA
tcctgtgctgagctgccccgaga

SEQ ID NO: 6817 - RNA, 23 nt, Synthetic Construct
  source 1..23: mol_type = other RNA
tcctgtgctgagctgccccgaga

SEQ ID NO: 6818 - RNA, 26 nt, Synthetic Construct
  source 1..26: mol_type = other RNA
gaggaacactagtggcgtaggcgaga

SEQ ID NO: 6819 - RNA, 26 nt, Synthetic Construct
  source 1..26: mol_type = other RNA
gaggaacactagtggcgtaggcgaga

SEQ ID NO: 6820 - RNA, 22 nt, Synthetic Construct
  source 1..22: mol_type = other RNA
tcctgtactgagctgccccggg

SEQ ID NO: 6821 - RNA, 22 nt, Synthetic Construct
  source 1..22: mol_type = other RNA
tcctgtactgagctgccccggg

SEQ ID NO: 6822 - RNA, 21 nt, Synthetic Construct
  source 1..21: mol_type = other RNA
tgaggcagtagattgtatagt

SEQ ID NO: 6823 - RNA, 21 nt, Synthetic Construct
  source 1..21: mol_type = other RNA
tgaggcagtagattgtatagt

SEQ ID NO: 6824 - RNA, 28 nt, Synthetic Construct
  source 1..28: mol_type = other RNA
cttctcactactgcacttgactagtctt

SEQ ID NO: 6825 - RNA, 24 nt, Synthetic Construct
  source 1..24: mol_type = other RNA
tgtcagtttgtcaaataccccaaa

SEQ ID NO: 6826 - RNA, 24 nt, Synthetic Construct
  source 1..24: mol_type = other RNA
tgtcagtttgtcaaataccccaaa

SEQ ID NO: 6827 - RNA, 18 nt, Synthetic Construct
  source 1..18: mol_type = other RNA
atggccgggacagagggc

SEQ ID NO: 6828 - RNA, 22 nt, Synthetic Construct
  source 1..22: mol_type = other RNA
tgttgcacttgtcccggcctgt

SEQ ID NO: 6829 - RNA, 33 nt, Synthetic Construct; identical to SEQ ID NO: 4947
  source 1..33: mol_type = other RNA

SEQ ID NO: 6830 - RNA, 22 nt, Synthetic Construct
  source 1..22: mol_type = other RNA
tgggatgtaaagaagtatgtat

SEQ ID NO: 6831 - RNA, 23 nt, Synthetic Construct
  source 1..23: mol_type = other RNA
tggtaatacgacatacttagtgt

SEQ ID NO: 6832 - RNA, 23 nt, Synthetic Construct
  source 1..23: mol_type = other RNA
tggtaatacgacatacttagtgt

SEQ ID NO: 6833 - RNA, 16 nt, Synthetic Construct
  source 1..16: mol_type = other RNA
gtctgcggccatacca

SEQ ID NO: 6834 - RNA, 24 nt, Synthetic Construct
  source 1..24: mol_type = other RNA
tgtaaacatccccgactggaggct

SEQ ID NO: 6835 - RNA, 29 nt, Synthetic Construct
  source 1..29: mol_type = other RNA
tgaaggtgggttgtgaagcctgctggagg

SEQ ID NO: 6836 - RNA, 25 nt, Synthetic Construct
  source 1..25: mol_type = other RNA
atttccccttggggttgtaggacca

SEQ ID NO: 6837 - RNA, 25 nt, Synthetic Construct
  source 1..25: mol_type = other RNA
atttccccttggggttgtaggacca

SEQ ID NO: 6838 - RNA, 23 nt, Synthetic Construct
  source 1..23: mol_type = other RNA
tgaggggcagagggcgagacttt

SEQ ID NO: 6839 - RNA, 21 nt, Synthetic Construct
  source 1..21: mol_type = other RNA
cggagtgtgacaatggtgttt

SEQ ID NO: 6840 - RNA, 21 nt, Synthetic Construct
  source 1..21: mol_type = other RNA
cggagtgtgacaatggtgttt

SEQ ID NO: 6841 - RNA, 20 nt, Synthetic Construct
  source 1..20: mol_type = other RNA
acccttgtcattagttgcta

SEQ ID NO: 6842 - RNA, 22 nt, Synthetic Construct
  source 1..22: mol_type = other RNA
tgaggtagtaggttgtgtggat

SEQ ID NO: 6843 - RNA, 22 nt, Synthetic Construct
  source 1..22: mol_type = other RNA
tggaacgtaaagaagtatgtat

SEQ ID NO: 6844 - RNA, 22 nt, Synthetic Construct
  source 1..22: mol_type = other RNA
tggaacgtaaagaagtatgtat

SEQ ID NO: 6845 - RNA, 39 nt, Synthetic Construct; identical to SEQ ID NO: 2398
  source 1..39: mol_type = other RNA

SEQ ID NO: 6846 - RNA, 39 nt, Synthetic Construct; identical to SEQ ID NO: 2398
  source 1..39: mol_type = other RNA

SEQ ID NO: 6847 - RNA, 22 nt, Synthetic Construct
  source 1..22: mol_type = other RNA
tgaggtagtaggttgtgtgatt

SEQ ID NO: 6848 - RNA, 27 nt, Synthetic Construct
  source 1..27: mol_type = other RNA
ccccccactgctaaacttgactggctt

SEQ ID NO: 6849 - RNA, 24 nt, Synthetic Construct
  source 1..24: mol_type = other RNA
tgtgatttctgcccagtgctctga

SEQ ID NO: 6850 - RNA, 24 nt, Synthetic Construct
  source 1..24: mol_type = other RNA
tgtgatttctgcccagtgctctga

SEQ ID NO: 6851 - RNA, 23 nt, Synthetic Construct
  source 1..23: mol_type = other RNA
tggggtagtaggttgtgtggttt

SEQ ID NO: 6852 - RNA, 35 nt, Synthetic Construct; identical to SEQ ID NO: 2505
  source 1..35: mol_type = other RNA

SEQ ID NO: 6853 - RNA, 35 nt, Synthetic Construct; identical to SEQ ID NO: 2505
  source 1..35: mol_type = other RNA

SEQ ID NO: 6854 - RNA, 27 nt, Synthetic Construct
  source 1..27: mol_type = other RNA
ccgtgtgaaagtaggtcatcgtcaggc

SEQ ID NO: 6855 - RNA, 27 nt, Synthetic Construct
  source 1..27: mol_type = other RNA
ccgtgtgaaagtaggtcatcgtcaggc

SEQ ID NO: 6856 - RNA, 22 nt, Synthetic Construct
  source 1..22: mol_type = other RNA
tgaggcagtaggttgtgtggtt

SEQ ID NO: 6857 - RNA, 22 nt, Synthetic Construct
  source 1..22: mol_type = other RNA
tcggatccgtctgagcttggct

SEQ ID NO: 6858 - RNA, 22 nt, Synthetic Construct
  source 1..22: mol_type = other RNA
nagcagcacgtaaatattggcg

SEQ ID NO: 6859 - RNA, 22 nt, Synthetic Construct
  source 1..22: mol_type = other RNA
nagcagcacgtaaatattggcg

SEQ ID NO: 6860 - RNA, 18 nt, Synthetic Construct
  source 1..18: mol_type = other RNA
cctcgcgcgattggagcg

SEQ ID NO: 6861 - RNA, 18 nt, Synthetic Construct
  source 1..18: mol_type = other RNA
cctcgcgcgattggagcg

SEQ ID NO: 6862 - RNA, 22 nt, Synthetic Construct
  source 1..22: mol_type = other RNA
gtaaacggcgggagtaactatg

SEQ ID NO: 6863 - RNA, 16 nt, Synthetic Construct
  source 1..16: mol_type = other RNA
ccaaggggtcgtgggt

SEQ ID NO: 6864 - RNA, 21 nt, Synthetic Construct
  source 1..21: mol_type = other RNA
tccttcattccaccggagtct

SEQ ID NO: 6865 - RNA, 21 nt, Synthetic Construct
  source 1..21: mol_type = other RNA
tccttcattccaccggagtct

SEQ ID NO: 6866 - RNA, 23 nt, Synthetic Construct
  source 1..23: mol_type = other RNA
cccagtgttcagactacctgttc

SEQ ID NO: 6867 - RNA, 17 nt, Synthetic Construct
  source 1..17: mol_type = other RNA
cacggcccagactccta

SEQ ID NO: 6868 - RNA, 21 nt, Synthetic Construct
  source 1..21: mol_type = other RNA
ctagactgaggctccttgagg

SEQ ID NO: 6869 - RNA, 23 nt, Synthetic Construct
  source 1..23: mol_type = other RNA
accattcgtagacgacctgcttc

SEQ ID NO: 6870 - RNA, 36 nt, Synthetic Construct; identical to SEQ ID NO: 2344
  source 1..36: mol_type = other RNA

SEQ ID NO: 6871 - RNA, 36 nt, Synthetic Construct; identical to SEQ ID NO: 2344
  source 1..36: mol_type = other RNA

SEQ ID NO: 6872 - RNA, 31 nt, Synthetic Construct; identical to SEQ ID NO: 2278
  source 1..31: mol_type = other RNA

SEQ ID NO: 6873 - RNA, 31 nt, Synthetic Construct; identical to SEQ ID NO: 2278
  source 1..31: mol_type = other RNA

SEQ ID NO: 6874 - RNA, 15 nt, Synthetic Construct
  source 1..15: mol_type = other RNA
gagagcctggacaca

SEQ ID NO: 6875 - RNA, 15 nt, Synthetic Construct
  source 1..15: mol_type = other RNA
gagagcctggacaca

SEQ ID NO: 6876 - RNA, 23 nt, Synthetic Construct
  source 1..23: mol_type = other RNA
gactatagaactttccccctcat

SEQ ID NO: 6877 - RNA, 23 nt, Synthetic Construct
  source 1..23: mol_type = other RNA
gactatagaactttccccctcat

SEQ ID NO: 6878 - RNA, 22 nt, Synthetic Construct
  source 1..22: mol_type = other RNA
tattgcgcttgtcccggcctgt

SEQ ID NO: 6879 - RNA, 16 nt, Synthetic Construct
  source 1..16: mol_type = other RNA
ggccgtcgtcagctcg

SEQ ID NO: 6880 - RNA, 16 nt, Synthetic Construct
  source 1..16: mol_type = other RNA
ggccgtcgtcagctcg

SEQ ID NO: 6881 - RNA, 21 nt, Synthetic Construct
  source 1..21: mol_type = other RNA
tcctgtaccgagctgccccga

SEQ ID NO: 6882 - RNA, 23 nt, Synthetic Construct
  source 1..23: mol_type = other RNA
tgacctatgaattgacagccagt

SEQ ID NO: 6883 - RNA, 23 nt, Synthetic Construct
  source 1..23: mol_type = other RNA
tgacctatgaattgacagccagt

SEQ ID NO: 6884 - RNA, 22 nt, Synthetic Construct
  source 1..22: mol_type = other RNA
tgaggtagtaggttgtatagtc

SEQ ID NO: 6885 - RNA, 22 nt, Synthetic Construct
  source 1..22: mol_type = other RNA
tgaggtagtagactgtatagtt

SEQ ID NO: 6886 - RNA, 22 nt, Synthetic Construct
  source 1..22: mol_type = other RNA
tgaggtagtagactgtatagtt

SEQ ID NO: 6887 - RNA, 21 nt, Synthetic Construct
  source 1..21: mol_type = other RNA
caacggaatcccaaaagcagc

SEQ ID NO: 6888 - RNA, 21 nt, Synthetic Construct
  source 1..21: mol_type = other RNA
caacggaatcccaaaagcagc

SEQ ID NO: 6889 - RNA, 19 nt, Synthetic Construct
  source 1..19: mol_type = other RNA
ccgtgttcggaagattttc

SEQ ID NO: 6890 - RNA, 19 nt, Synthetic Construct
  source 1..19: mol_type = other RNA
ccgtgttcggaagattttc

SEQ ID NO: 6891 - RNA, 17 nt, Synthetic Construct
  source 1..17: mol_type = other RNA
gggtctgtagctcagtc

SEQ ID NO: 6892 - RNA, 17 nt, Synthetic Construct
  source 1..17: mol_type = other RNA
gggtctgtagctcagtc

SEQ ID NO: 6893 - RNA, 25 nt, Synthetic Construct
  source 1..25: mol_type = other RNA
ttgaggatatgggatcgagacgaca

SEQ ID NO: 6894 - RNA, 25 nt, Synthetic Construct
  source 1..25: mol_type = other RNA
ttgaggatatgggatcgagacgaca

SEQ ID NO: 6895 - RNA, 20 nt, Synthetic Construct
  source 1..20: mol_type = other RNA
gtcagtttgtcaaatacccc

SEQ ID NO: 6896 - RNA, 15 nt, Synthetic Construct
  source 1..15: mol_type = other RNA
cctcgcgcgattgga

SEQ ID NO: 6897 - RNA, 15 nt, Synthetic Construct
  source 1..15: mol_type = other RNA
cctcgcgcgattgga

SEQ ID NO: 6898 - RNA, 23 nt, Synthetic Construct
  source 1..23: mol_type = other RNA
tggtgatacgacgtacttagtgt

SEQ ID NO: 6899 - RNA, 34 nt, Synthetic Construct; identical to SEQ ID NO: 2364
  source 1..34: mol_type = other RNA

SEQ ID NO: 6900 - RNA, 34 nt, Synthetic Construct; identical to SEQ ID NO: 2364
  source 1..34: mol_type = other RNA

SEQ ID NO: 6901 - RNA, 17 nt, Synthetic Construct
  source 1..17: mol_type = other RNA
cagtcaggatgttggct

SEQ ID NO: 6902 - RNA, 17 nt, Synthetic Construct
  source 1..17: mol_type = other RNA
cagtcaggatgttggct

SEQ ID NO: 6903 - RNA, 22 nt, Synthetic Construct
  source 1..22: mol_type = other RNA
tggaatgtaaagaagtatgtgt

SEQ ID NO: 6904 - RNA, 36 nt, Synthetic Construct; identical to SEQ ID NO: 2248
  source 1..36: mol_type = other RNA

SEQ ID NO: 6905 - RNA, 19 nt, Synthetic Construct
  source 1..19: mol_type = other RNA
gggtgcaagcgttaatcgg

SEQ ID NO: 6906 - RNA, 18 nt, Synthetic Construct
  source 1..18: mol_type = other RNA
ggctttgaagtaaggtcg

SEQ ID NO: 6907 - RNA, 18 nt, Synthetic Construct
  source 1..18: mol_type = other RNA
ggctttgaagtaaggtcg

SEQ ID NO: 6908 - RNA, 22 nt, Synthetic Construct
  source 1..22: mol_type = other RNA
catagcacttgtctcggtctga

SEQ ID NO: 6909 - RNA, 24 nt, Synthetic Construct
  source 1..24: mol_type = other RNA
gcgagagtaggacgttgccaggtt

SEQ ID NO: 6910 - RNA, 24 nt, Synthetic Construct
  source 1..24: mol_type = other RNA
gcgagagtaggacgttgccaggtt

SEQ ID NO: 6911 - RNA, 34 nt, Synthetic Construct; identical to SEQ ID NO: 2367
  source 1..34: mol_type = other RNA

SEQ ID NO: 6912 - RNA, 34 nt, Synthetic Construct; identical to SEQ ID NO: 2367
  source 1..34: mol_type = other RNA

SEQ ID NO: 6913 - RNA, 22 nt, Synthetic Construct
  source 1..22: mol_type = other RNA
ttcaagtaatccaggataggtt

SEQ ID NO: 6914 - RNA, 22 nt, Synthetic Construct
  source 1..22: mol_type = other RNA
tcctgtactgagctgccctgag

SEQ ID NO: 6915 - RNA, 25 nt, Synthetic Construct
  source 1..25: mol_type = other RNA
ttggggatatgagatcgagacgaca

SEQ ID NO: 6916 - RNA, 25 nt, Synthetic Construct
  source 1..25: mol_type = other RNA
ttggggatatgagatcgagacgaca

SEQ ID NO: 6917 - RNA, 18 nt, Synthetic Construct
  source 1..18: mol_type = other RNA
cttggggttgtaggacca

SEQ ID NO: 6918 - RNA, 18 nt, Synthetic Construct
  source 1..18: mol_type = other RNA
cttggggttgtaggacca

SEQ ID NO: 6919 - RNA, 22 nt, Synthetic Construct
  source 1..22: mol_type = other RNA
tattgcacctgtcccggcctgt

SEQ ID NO: 6920 - RNA, 23 nt, Synthetic Construct
  source 1..23: mol_type = other RNA
tggtaatacgacgtacttagtat

SEQ ID NO: 6921 - RNA, 23 nt, Synthetic Construct
  source 1..23: mol_type = other RNA
tggtaatacgacgtacttagtat

SEQ ID NO: 6922 - RNA, 23 nt, Synthetic Construct
  source 1..23: mol_type = other RNA
tgaggggcggagagcgagacttt

SEQ ID NO: 6923 - RNA, 23 nt, Synthetic Construct
  source 1..23: mol_type = other RNA
tgaggggcggagagcgagacttt

SEQ ID NO: 6924 - RNA, 21 nt, Synthetic Construct
  source 1..21: mol_type = other RNA
tcctgaactgagctgccccga

SEQ ID NO: 6925 - RNA, 15 nt, Synthetic Construct
  source 1..15: mol_type = other RNA
ccgcttttgtcaggg

SEQ ID NO: 6926 - RNA, 34 nt, Synthetic Construct; identical to SEQ ID NO: 2553
  source 1..34: mol_type = other RNA

SEQ ID NO: 6927 - RNA, 34 nt, Synthetic Construct; identical to SEQ ID NO: 2553
  source 1..34: mol_type = other RNA

SEQ ID NO: 6928 - RNA, 21 nt, Synthetic Construct
  source 1..21: mol_type = other RNA
tgaggtagtaggttgtataga

SEQ ID NO: 6929 - RNA, 36 nt, Synthetic Construct; identical to SEQ ID NO: 2546
  source 1..36: mol_type = other RNA

SEQ ID NO: 6930 - RNA, 22 nt, Synthetic Construct
  source 1..22: mol_type = other RNA
tattgcactcgtcccggcctgt

SEQ ID NO: 6931 - RNA, 22 nt, Synthetic Construct
  source 1..22: mol_type = other RNA
tattgcactcgtcccggcctgt

SEQ ID NO: 6932 - RNA, 31 nt, Synthetic Construct; identical to SEQ ID NO: 2423
  source 1..31: mol_type = other RNA

SEQ ID NO: 6933 - RNA, 31 nt, Synthetic Construct; identical to SEQ ID NO: 2423
  source 1..31: mol_type = other RNA

SEQ ID NO: 6934 - RNA, 26 nt, Synthetic Construct
  source 1..26: mol_type = other RNA
tccctggtggtctagtggttaggatt

SEQ ID NO: 6935 - RNA, 26 nt, Synthetic Construct
  source 1..26: mol_type = other RNA
tccctggtggtctagtggttaggatt

SEQ ID NO: 6936 - RNA, 23 nt, Synthetic Construct
  source 1..23: mol_type = other RNA
tgaggggcagagagcgggacttt

SEQ ID NO: 6937 - RNA, 23 nt, Synthetic Construct
  source 1..23: mol_type = other RNA
tgaggggcagagagcgggacttt

SEQ ID NO: 6938 - RNA, 32 nt, Synthetic Construct; identical to SEQ ID NO: 770
  source 1..32: mol_type = other RNA

SEQ ID NO: 6939 - RNA, 32 nt, Synthetic Construct; identical to SEQ ID NO: 770
  source 1..32: mol_type = other RNA

SEQ ID NO: 6940 - RNA, 16 nt, Synthetic Construct
  source 1..16: mol_type = other RNA
gagctgtggatagggg

SEQ ID NO: 6941 - RNA, 16 nt, Synthetic Construct
  source 1..16: mol_type = other RNA
gagctgtggatagggg

SEQ ID NO: 6942 - RNA, 30 nt, Synthetic Construct; identical to SEQ ID NO: 2308
  source 1..30: mol_type = other RNA

SEQ ID NO: 6943 - RNA, 30 nt, Synthetic Construct; identical to SEQ ID NO: 2308
  source 1..30: mol_type = other RNA

SEQ ID NO: 6944 - RNA, 16 nt, Synthetic Construct
  source 1..16: mol_type = other RNA
ccggaggaaggtgggg

SEQ ID NO: 6945 - RNA, 16 nt, Synthetic Construct
  source 1..16: mol_type = other RNA
ccggaggaaggtgggg

SEQ ID NO: 6946 - RNA, 23 nt, Synthetic Construct
  source 1..23: mol_type = other RNA
tggtaacacgacgtacttagtgt

SEQ ID NO: 6947 - RNA, 23 nt, Synthetic Construct
  source 1..23: mol_type = other RNA
tggtaacacgacgtacttagtgt

SEQ ID NO: 6948 - RNA, 23 nt, Synthetic Construct
  source 1..23: mol_type = other RNA
tgaggtagtaggttgtgcggttt

SEQ ID NO: 6949 - RNA, 16 nt, Synthetic Construct
  source 1..16: mol_type = other RNA
gtccacggccatacca

SEQ ID NO: 6950 - RNA, 23 nt, Synthetic Construct
  source 1..23: mol_type = other RNA
agctacattgtctgctgggttcc

SEQ ID NO: 6951 - RNA, 27 nt, Synthetic Construct
  source 1..27: mol_type = other RNA
agagcagctaataccgcatacgacctg

SEQ ID NO: 6952 - RNA, 22 nt, Synthetic Construct
  source 1..22: mol_type = other RNA
gcactctaatgagactgccggt

SEQ ID NO: 6953 - RNA, 22 nt, Synthetic Construct
  source 1..22: mol_type = other RNA
gcactctaatgagactgccggt

SEQ ID NO: 6954 - RNA, 26 nt, Synthetic Construct
  source 1..26: mol_type = other RNA
gaggaacactagtggcgtaggcgaga

SEQ ID NO: 6955 - RNA, 26 nt, Synthetic Construct
  source 1..26: mol_type = other RNA
gaggaacactagtggcgtaggcgaga

SEQ ID NO: 6956 - RNA, 23 nt, Synthetic Construct
  source 1..23: mol_type = other RNA
tccagcatcagtgattttgttga

SEQ ID NO: 6957 - RNA, 17 nt, Synthetic Construct
  source 1..17: mol_type = other RNA
agcggtggatgatgtgg

SEQ ID NO: 6958 - RNA, 17 nt, Synthetic Construct
  source 1..17: mol_type = other RNA
agcggtggatgatgtgg

SEQ ID NO: 6959 - RNA, 34 nt, Synthetic Construct; identical to SEQ ID NO: 2291
  source 1..34: mol_type = other RNA

SEQ ID NO: 6960 - RNA, 34 nt, Synthetic Construct; identical to SEQ ID NO: 2291
  source 1..34: mol_type = other RNA

SEQ ID NO: 6961 - RNA, 22 nt, Synthetic Construct
  source 1..22: mol_type = other RNA
tgaggtagtagtctgtgctgtt

SEQ ID NO: 6962 - RNA, 23 nt, Synthetic Construct
  source 1..23: mol_type = other RNA
tggtaatacgacgtgcttagtgt

SEQ ID NO: 6963 - RNA, 22 nt, Synthetic Construct
  source 1..22: mol_type = other RNA
ngaggtagtagattgtatagtt

SEQ ID NO: 6964 - RNA, 22 nt, Synthetic Construct
  source 1..22: mol_type = other RNA
tcccgtactgagctgccccgag

SEQ ID NO: 6965 - RNA, 22 nt, Synthetic Construct
  source 1..22: mol_type = other RNA
tcccgtactgagctgccccgag

SEQ ID NO: 6966 - RNA, 22 nt, Synthetic Construct
  source 1..22: mol_type = other RNA
ctttgttcgattccgttgagta

SEQ ID NO: 6967 - RNA, 15 nt, Synthetic Construct
  source 1..15: mol_type = other RNA
tgcaagtcgaacggt

SEQ ID NO: 6968 - RNA, 15 nt, Synthetic Construct
  source 1..15: mol_type = other RNA
tgcaagtcgaacggt

SEQ ID NO: 6969 - RNA, 22 nt, Synthetic Construct
  source 1..22: mol_type = other RNA
tccttcattccaccggagtctg

SEQ ID NO: 6970 - RNA, 22 nt, Synthetic Construct
  source 1..22: mol_type = other RNA
tccttcattccaccggagtctg

SEQ ID NO: 6971 - RNA, 22 nt, Synthetic Construct
  source 1..22: mol_type = other RNA
cagggctggcagtgacatgggt

SEQ ID NO: 6972 - RNA, 34 nt, Synthetic Construct; identical to SEQ ID NO: 2375
  source 1..34: mol_type = other RNA

SEQ ID NO: 6973 - RNA, 34 nt, Synthetic Construct; identical to SEQ ID NO: 2375
  source 1..34: mol_type = other RNA

SEQ ID NO: 6974 - RNA, 22 nt, Synthetic Construct
  source 1..22: mol_type = other RNA
tggggtagtagattgtatagtt

SEQ ID NO: 6975 - RNA, 22 nt, Synthetic Construct
  source 1..22: mol_type = other RNA
tggggtagtagattgtatagtt

SEQ ID NO: 6976 - RNA, 21 nt, Synthetic Construct
  source 1..21: mol_type = other RNA
aatggcgccactagggttgtg

SEQ ID NO: 6977 - RNA, 22 nt, Synthetic Construct
  source 1..22: mol_type = other RNA
tgaggtaataggttgtgtggtt

SEQ ID NO: 6978 - RNA, 21 nt, Synthetic Construct
  source 1..21: mol_type = other RNA
cataaagtagaaagcactact

SEQ ID NO: 6979 - RNA, 21 nt, Synthetic Construct
  source 1..21: mol_type = other RNA
cataaagtagaaagcactact

SEQ ID NO: 6980 - RNA, 21 nt, Synthetic Construct
  source 1..21: mol_type = other RNA
tatgtctgctgaccatcacct

SEQ ID NO: 6981 - RNA, 21 nt, Synthetic Construct
  source 1..21: mol_type = other RNA
tatgtctgctgaccatcacct

SEQ ID NO: 6982 - RNA, 18 nt, Synthetic Construct
  source 1..18: mol_type = other RNA
tgcgtagatatgcggagg

SEQ ID NO: 6983 - RNA, 18 nt, Synthetic Construct
  source 1..18: mol_type = other RNA
tgcgtagatatgcggagg

SEQ ID NO: 6984 - RNA, 22 nt, Synthetic Construct
  source 1..22: mol_type = other RNA
tggaatgtgaagaagtatgtat

SEQ ID NO: 6985 - RNA, 35 nt, Synthetic Construct; identical to SEQ ID NO: 2514
  source 1..35: mol_type = other RNA

SEQ ID NO: 6986 - RNA, 35 nt, Synthetic Construct; identical to SEQ ID NO: 2514
  source 1..35: mol_type = other RNA

SEQ ID NO: 6987 - RNA, 21 nt, Synthetic Construct
  source 1..21: mol_type = other RNA
tcctatactgagctgccccga

SEQ ID NO: 6988 - RNA, 19 nt, Synthetic Construct
  source 1..19: mol_type = other RNA
tagcagcacgtaaatattg

SEQ ID NO: 6989 - RNA, 19 nt, Synthetic Construct
  source 1..19: mol_type = other RNA
tagcagcacgtaaatattg

SEQ ID NO: 6990 - RNA, 42 nt, Synthetic Construct
  source 1..42: mol_type = other RNA
tgattggcgatcaagcggtataccgaagctctaggtgcggca

SEQ ID NO: 6991 - RNA, 42 nt, Synthetic Construct; identical to SEQ ID NO: 6990
  source 1..42: mol_type = other RNA

SEQ ID NO: 6992 - RNA, 22 nt, Synthetic Construct
  source 1..22: mol_type = other RNA
tgaggtagcaggttgtgtggtt

SEQ ID NO: 6993 - RNA, 23 nt, Synthetic Construct
  source 1..23: mol_type = other RNA
aatgacacgatcactcccgttgt

SEQ ID NO: 6994 - RNA, 22 nt, Synthetic Construct
  source 1..22: mol_type = other RNA
tgaggtagtagattgtatagta

SEQ ID NO: 6995 - RNA, 20 nt, Synthetic Construct
  source 1..20: mol_type = other RNA
tgaggtggtaggttgtatag

SEQ ID NO: 6996 - RNA, 20 nt, Synthetic Construct
  source 1..20: mol_type = other RNA
tgaggtggtaggttgtatag

SEQ ID NO: 6997 - RNA, 24 nt, Synthetic Construct
  source 1..24: mol_type = other RNA
agctacatctggctactgggtctc

SEQ ID NO: 6998 - RNA, 24 nt, Synthetic Construct
  source 1..24: mol_type = other RNA
agctacatctggctactgggtctc

SEQ ID NO: 6999 - RNA, 36 nt, Synthetic Construct; identical to SEQ ID NO: 2444
  source 1..36: mol_type = other RNA

SEQ ID NO: 7000 - RNA, 36 nt, Synthetic Construct; identical to SEQ ID NO: 2444
  source 1..36: mol_type = other RNA

SEQ ID NO: 7001 - RNA, 21 nt, Synthetic Construct
  source 1..21: mol_type = other RNA
tgaggtagtagattgtataga

SEQ ID NO: 7002 - RNA, 17 nt, Synthetic Construct
  source 1..17: mol_type = other RNA
gggtctgtagctcagtc

SEQ ID NO: 7003 - RNA, 34 nt, Synthetic Construct; identical to SEQ ID NO: 2553
  source 1..34: mol_type = other RNA

SEQ ID NO: 7004 - RNA, 23 nt, Synthetic Construct
  source 1..23: mol_type = other RNA
tccctggtggtctagtggttagg

SEQ ID NO: 7005 - RNA, 23 nt, Synthetic Construct
  source 1..23: mol_type = other RNA
tccctggtggtctagtggttagg

SEQ ID NO: 7006 - RNA, 23 nt, Synthetic Construct
  source 1..23: mol_type = other RNA
nggtaatacgacgtacttagtgt

SEQ ID NO: 7007 - RNA, 21 nt, Synthetic Construct
  source 1..21: mol_type = other RNA
cctctgggcccttcctccagt

SEQ ID NO: 7008 - RNA, 21 nt, Synthetic Construct
  source 1..21: mol_type = other RNA
cctctgggcccttcctccagt

SEQ ID NO: 7009 - RNA, 15 nt, Synthetic Construct
  source 1..15: mol_type = other RNA
gctttgatccggaga

SEQ ID NO: 7010 - RNA, 15 nt, Synthetic Construct
  source 1..15: mol_type = other RNA
gctttgatccggaga

SEQ ID NO: 7011 - RNA, 36 nt, Synthetic Construct; identical to SEQ ID NO: 2520
  source 1..36: mol_type = other RNA

SEQ ID NO: 7012 - RNA, 36 nt, Synthetic Construct; identical to SEQ ID NO: 2520
  source 1..36: mol_type = other RNA

SEQ ID NO: 7013 - RNA, 36 nt, Synthetic Construct; identical to SEQ ID NO: 2506
  source 1..36: mol_type = other RNA

SEQ ID NO: 7014 - RNA, 20 nt, Synthetic Construct
  source 1..20: mol_type = other RNA
tgaggtagtaggttgtatgg

SEQ ID NO: 7015 - RNA, 20 nt, Synthetic Construct
  source 1..20: mol_type = other RNA
tgaggtagtaggttgtatgg

SEQ ID NO: 7016 - RNA, 22 nt, Synthetic Construct
  source 1..22: mol_type = other RNA
cggaatgtaaagaagtatgtat

SEQ ID NO: 7017 - RNA, 22 nt, Synthetic Construct
  source 1..22: mol_type = other RNA
cggaatgtaaagaagtatgtat

SEQ ID NO: 7018 - RNA, 32 nt, Synthetic Construct; identical to SEQ ID NO: 770
  source 1..32: mol_type = other RNA

SEQ ID NO: 7019 - RNA, 32 nt, Synthetic Construct; identical to SEQ ID NO: 770
  source 1..32: mol_type = other RNA

SEQ ID NO: 7020 - RNA, 22 nt, Synthetic Construct
  source 1..22: mol_type = other RNA
tagcatatcgagcctgagaaca

SEQ ID NO: 7021 - RNA, 22 nt, Synthetic Construct
  source 1..22: mol_type = other RNA
tagcatatcgagcctgagaaca

SEQ ID NO: 7022 - RNA, 30 nt, Synthetic Construct; identical to SEQ ID NO: 2274
  source 1..30: mol_type = other RNA

SEQ ID NO: 7023 - RNA, 30 nt, Synthetic Construct; identical to SEQ ID NO: 2274
  source 1..30: mol_type = other RNA

SEQ ID NO: 7024 - RNA, 41 nt, Synthetic Construct; identical to SEQ ID NO: 1667
  source 1..41: mol_type = other RNA

SEQ ID NO: 7025 - RNA, 41 nt, Synthetic Construct; identical to SEQ ID NO: 1667
  source 1..41: mol_type = other RNA

SEQ ID NO: 7026 - RNA, 26 nt, Synthetic Construct
  source 1..26: mol_type = other RNA
gcgggcgtagctcaggggtagagcgc

SEQ ID NO: 7027 - RNA, 26 nt, Synthetic Construct
  source 1..26: mol_type = other RNA
gcgggcgtagctcaggggtagagcgc

SEQ ID NO: 7028 - RNA, 22 nt, Synthetic Construct
  source 1..22: mol_type = other RNA
tatagcacttgtcccggcctgt

SEQ ID NO: 7029 - RNA, 22 nt, Synthetic Construct
  source 1..22: mol_type = other RNA
tatagcacttgtcccggcctgt

SEQ ID NO: 7030 - RNA, 25 nt, Synthetic Construct
  source 1..25: mol_type = other RNA
ttgaggatatgagatagagacgaca

SEQ ID NO: 7031 - RNA, 25 nt, Synthetic Construct
  source 1..25: mol_type = other RNA
ttgaggatatgagatagagacgaca

SEQ ID NO: 7032 - RNA, 21 nt, Synthetic Construct
  source 1..21: mol_type = other RNA
tgaggtagtaggttgtatagc

SEQ ID NO: 7033 - RNA, 21 nt, Synthetic Construct
  source 1..21: mol_type = other RNA
tcctgtgctgagctgccccga

SEQ ID NO: 7034 - RNA, 28 nt, Synthetic Construct
  source 1..28: mol_type = other RNA
ggcagggttcgtgactggggtgaagtcg

SEQ ID NO: 7035 - RNA, 22 nt, Synthetic Construct
  source 1..22: mol_type = other RNA
taacagtctacagccatggtcg

SEQ ID NO: 7036 - RNA, 22 nt, Synthetic Construct
  source 1..22: mol_type = other RNA
tgaggtggtagtttgtgctgtt

SEQ ID NO: 7037 - RNA, 22 nt, Synthetic Construct
  source 1..22: mol_type = other RNA
tgagaactgaattccatgggtc

SEQ ID NO: 7038 - RNA, 22 nt, Synthetic Construct
  source 1..22: mol_type = other RNA
tgagaactgaattccatgggtc

SEQ ID NO: 7039 - RNA, 35 nt, Synthetic Construct; identical to SEQ ID NO: 2450
  source 1..35: mol_type = other RNA

SEQ ID NO: 7040 - RNA, 35 nt, Synthetic Construct; identical to SEQ ID NO: 2450
  source 1..35: mol_type = other RNA

SEQ ID NO: 7041 - RNA, 22 nt, Synthetic Construct
  source 1..22: mol_type = other RNA
gtcagtttgtcaaataccccat

SEQ ID NO: 7042 - RNA, 23 nt, Synthetic Construct
  source 1..23: mol_type = other RNA
tcctgcactgagctgccccgaga

SEQ ID NO: 7043 - RNA, 23 nt, Synthetic Construct
  source 1..23: mol_type = other RNA
tcctgcactgagctgccccgaga

SEQ ID NO: 7044 - RNA, 23 nt, Synthetic Construct
  source 1..23: mol_type = other RNA
tggtaatacgacgtacttagtga

SEQ ID NO: 7045 - RNA, 23 nt, Synthetic Construct
  source 1..23: mol_type = other RNA
tggtaatacgacgtacttagtga

SEQ ID NO: 7046 - RNA, 22 nt, Synthetic Construct
  source 1..22: mol_type = other RNA
tcgtaccgtgagcaataatgcg

SEQ ID NO: 7047 - RNA, 22 nt, Synthetic Construct
  source 1..22: mol_type = other RNA
nattgcacttgtcccggcctgt

SEQ ID NO: 7048 - RNA, 22 nt, Synthetic Construct
  source 1..22: mol_type = other RNA
nattgcacttgtcccggcctgt

SEQ ID NO: 7049 - RNA, 31 nt, Synthetic Construct; identical to SEQ ID NO: 2293
  source 1..31: mol_type = other RNA

SEQ ID NO: 7050 - RNA, 31 nt, Synthetic Construct; identical to SEQ ID NO: 2293
  source 1..31: mol_type = other RNA

SEQ ID NO: 7051 - RNA, 18 nt, Synthetic Construct
  source 1..18: mol_type = other RNA
gtcgacgtatagggtgtg

SEQ ID NO: 7052 - RNA, 24 nt, Synthetic Construct
  source 1..24: mol_type = other RNA
agcagcattgtacagggctatgag

SEQ ID NO: 7053 - RNA, 15 nt, Synthetic Construct
  source 1..15: mol_type = other RNA
gagtagggcgggaca

SEQ ID NO: 7054 - RNA, 15 nt, Synthetic Construct
  source 1..15: mol_type = other RNA
gagtagggcgggaca

SEQ ID NO: 7055 - RNA, 35 nt, Synthetic Construct; identical to SEQ ID NO: 2514
  source 1..35: mol_type = other RNA

SEQ ID NO: 7056 - RNA, 25 nt, Synthetic Construct
  source 1..25: mol_type = other RNA
tattgcacttgtcccggcctgtttt

SEQ ID NO: 7057 - RNA, 25 nt, Synthetic Construct
  source 1..25: mol_type = other RNA
tattgcacttgtcccggcctgtttt

SEQ ID NO: 7058 - RNA, 20 nt, Synthetic Construct
  source 1..20: mol_type = other RNA
cccttggggttgtaggacca

SEQ ID NO: 7059 - RNA, 20 nt, Synthetic Construct
  source 1..20: mol_type = other RNA
cccttggggttgtaggacca

SEQ ID NO: 7060 - RNA, 35 nt, Synthetic Construct; identical to SEQ ID NO: 2354
  source 1..35: mol_type = other RNA

SEQ ID NO: 7061 - RNA, 35 nt, Synthetic Construct; identical to SEQ ID NO: 2354
  source 1..35: mol_type = other RNA

SEQ ID NO: 7062 - RNA, 17 nt, Synthetic Construct
  source 1..17: mol_type = other RNA
tggccgggacagagggc

SEQ ID NO: 7063 - RNA, 32 nt, Synthetic Construct; identical to SEQ ID NO: 1238
  source 1..32: mol_type = other RNA

SEQ ID NO: 7064 - RNA, 32 nt, Synthetic Construct; identical to SEQ ID NO: 1238
  source 1..32: mol_type = other RNA

SEQ ID NO: 7065 - RNA, 23 nt, Synthetic Construct
  source 1..23: mol_type = other RNA
tgaggtagtaggttgtgtagttt

SEQ ID NO: 7066 - RNA, 21 nt, Synthetic Construct
  source 1..21: mol_type = other RNA
tccttcattccaccggagtct

SEQ ID NO: 7067 - RNA, 21 nt, Synthetic Construct
  source 1..21: mol_type = other RNA
tccttcattccaccggagtct

SEQ ID NO: 7068 - RNA, 30 nt, Synthetic Construct; identical to SEQ ID NO: 2840
  source 1..30: mol_type = other RNA

SEQ ID NO: 7069 - RNA, 30 nt, Synthetic Construct; identical to SEQ ID NO: 2840
  source 1..30: mol_type = other RNA

SEQ ID NO: 7070 - RNA, 21 nt, Synthetic Construct
  source 1..21: mol_type = other RNA
tggagtgtgacgatggtgttt

SEQ ID NO: 7071 - RNA, 21 nt, Synthetic Construct
  source 1..21: mol_type = other RNA
tggagtgtgacgatggtgttt

SEQ ID NO: 7072 - RNA, 18 nt, Synthetic Construct
  source 1..18: mol_type = other RNA
accaaggggtcgtgggtt

SEQ ID NO: 7073 - RNA, 23 nt, Synthetic Construct
  source 1..23: mol_type = other RNA
tgaggtagtaggctgtgtggttt

SEQ ID NO: 7074 - RNA, 16 nt, Synthetic Construct
  source 1..16: mol_type = other RNA
gtcgacgtatagggtg

SEQ ID NO: 7075 - RNA, 16 nt, Synthetic Construct
  source 1..16: mol_type = other RNA
gtcgacgtatagggtg

SEQ ID NO: 7076 - RNA, 29 nt, Synthetic Construct
  source 1..29: mol_type = other RNA
cccgtgtgaaagtaggtcatcgtcaggct

SEQ ID NO: 7077 - RNA, 29 nt, Synthetic Construct
  source 1..29: mol_type = other RNA
cccgtgtgaaagtaggtcatcgtcaggct

SEQ ID NO: 7078 - RNA, 36 nt, Synthetic Construct; identical to SEQ ID NO: 2456
  source 1..36: mol_type = other RNA

SEQ ID NO: 7079 - RNA, 36 nt, Synthetic Construct; identical to SEQ ID NO: 2456
  source 1..36: mol_type = other RNA

SEQ ID NO: 7080 - RNA, 23 nt, Synthetic Construct
  source 1..23: mol_type = other RNA
aatgacacgatcactcccgttga

SEQ ID NO: 7081 - RNA, 23 nt, Synthetic Construct
  source 1..23: mol_type = other RNA
aatgacacgatcactcccgttga

SEQ ID NO: 7082 - RNA, 25 nt, Synthetic Construct
  source 1..25: mol_type = other RNA
ttgaggatatgaggtcgagacgaca

SEQ ID NO: 7083 - RNA, 25 nt, Synthetic Construct
  source 1..25: mol_type = other RNA
ttgaggatatgaggtcgagacgaca

SEQ ID NO: 7084 - RNA, 23 nt, Synthetic Construct
  source 1..23: mol_type = other RNA
agcagcattgtacagggctatgg

SEQ ID NO: 7085 - RNA, 17 nt, Synthetic Construct
  source 1..17: mol_type = other RNA
aagttgaccgcctgggg

SEQ ID NO: 7086 - RNA, 35 nt, Synthetic Construct; identical to SEQ ID NO: 2399
  source 1..35: mol_type = other RNA

SEQ ID NO: 7087 - RNA, 35 nt, Synthetic Construct; identical to SEQ ID NO: 2399
  source 1..35: mol_type = other RNA

SEQ ID NO: 7088 - RNA, 23 nt, Synthetic Construct
  source 1..23: mol_type = other RNA
tgcggggctagggctaacagcat

SEQ ID NO: 7089 - RNA, 23 nt, Synthetic Construct
  source 1..23: mol_type = other RNA
tgcggggctagggctaacagcat

SEQ ID NO: 7090 - RNA, 34 nt, Synthetic Construct; identical to SEQ ID NO: 2375
  source 1..34: mol_type = other RNA

SEQ ID NO: 7091 - RNA, 21 nt, Synthetic Construct
  source 1..21: mol_type = other RNA
tgaggtagtagattgtacagt

SEQ ID NO: 7092 - RNA, 21 nt, Synthetic Construct
  source 1..21: mol_type = other RNA
tgaggtagtagattgtacagt

SEQ ID NO: 7093 - RNA, 22 nt, Synthetic Construct
  source 1..22: mol_type = other RNA
tccagtactgagctgccccgag

SEQ ID NO: 7094 - RNA, 23 nt, Synthetic Construct
  source 1..23: mol_type = other RNA
caaagtgctgttcgtgcaggtgg

SEQ ID NO: 7095 - RNA, 23 nt, Synthetic Construct
  source 1..23: mol_type = other RNA
tggtaatacgacgtacttagtgt

SEQ ID NO: 7096 - RNA, 23 nt, Synthetic Construct
  source 1..23: mol_type = other RNA
tggtaatacgacgtacttagtgt

SEQ ID NO: 7097 - RNA, 23 nt, Synthetic Construct
  source 1..23: mol_type = other RNA
tgagatgaagcactgtagctctt

SEQ ID NO: 7098 - RNA, 23 nt, Synthetic Construct
  source 1..23: mol_type = other RNA
tgaggggcagagagcaagacttt

SEQ ID NO: 7099 - RNA, 23 nt, Synthetic Construct
  source 1..23: mol_type = other RNA
ggcggttatgcaagacagaggtg

SEQ ID NO: 7100 - RNA, 27 nt, Synthetic Construct
  source 1..27: mol_type = other RNA
cttctcactactgcacttgactagtct

SEQ ID NO: 7101 - RNA, 25 nt, Synthetic Construct
  source 1..25: mol_type = other RNA
ggtaaaatagctgagtgaagcattg

SEQ ID NO: 7102 - RNA, 25 nt, Synthetic Construct
  source 1..25: mol_type = other RNA
ggtaaaatagctgagtgaagcattg

SEQ ID NO: 7103 - RNA, 16 nt, Synthetic Construct
  source 1..16: mol_type = other RNA
gcgtagatatgcggag

SEQ ID NO: 7104 - RNA, 16 nt, Synthetic Construct
  source 1..16: mol_type = other RNA
gcgtagatatgcggag

SEQ ID NO: 7105 - RNA, 22 nt, Synthetic Construct
  source 1..22: mol_type = other RNA
tgaggtagtaggttgtgtggat

SEQ ID NO: 7106 - RNA, 22 nt, Synthetic Construct
  source 1..22: mol_type = other RNA
tgaggtagtaggttgtgtggat

SEQ ID NO: 7107 - RNA, 23 nt, Synthetic Construct
  source 1..23: mol_type = other RNA
gtaaacatccttgactggaagct

SEQ ID NO: 7108 - RNA, 23 nt, Synthetic Construct
  source 1..23: mol_type = other RNA
gtaaacatccttgactggaagct

SEQ ID NO: 7109 - RNA, 24 nt, Synthetic Construct
  source 1..24: mol_type = other RNA
gatgaggcgtgataacgagtctgc

SEQ ID NO: 7110 - RNA, 24 nt, Synthetic Construct
  source 1..24: mol_type = other RNA
gatgaggcgtgataacgagtctgc

SEQ ID NO: 7111 - RNA, 16 nt, Synthetic Construct
  source 1..16: mol_type = other RNA
cccctggacctgtact

SEQ ID NO: 7112 - RNA, 16 nt, Synthetic Construct
  source 1..16: mol_type = other RNA
cccctggacctgtact

SEQ ID NO: 7113 - RNA, 24 nt, Synthetic Construct
  source 1..24: mol_type = other RNA
tgcaaacatccccgactggaagct

SEQ ID NO: 7114 - RNA, 23 nt, Synthetic Construct
  source 1..23: mol_type = other RNA
aggtaatacgacgtacttagtgt

SEQ ID NO: 7115 - RNA, 35 nt, Synthetic Construct; identical to SEQ ID NO: 2402
  source 1..35: mol_type = other RNA

SEQ ID NO: 7116 - RNA, 35 nt, Synthetic Construct; identical to SEQ ID NO: 2402
  source 1..35: mol_type = other RNA

SEQ ID NO: 7117 - RNA, 22 nt, Synthetic Construct
  source 1..22: mol_type = other RNA
tcgtaccgtgagcaataatgcg

SEQ ID NO: 7118 - RNA, 22 nt, Synthetic Construct
  source 1..22: mol_type = other RNA
tcgtaccgtgagcaataatgcg

SEQ ID NO: 7119 - RNA, 35 nt, Synthetic Construct; identical to SEQ ID NO: 2548
  source 1..35: mol_type = other RNA

SEQ ID NO: 7120 - RNA, 22 nt, Synthetic Construct
  source 1..22: mol_type = other RNA
tattgcatttgtcccggcctgt

SEQ ID NO: 7121 - RNA, 22 nt, Synthetic Construct
  source 1..22: mol_type = other RNA
tattgcatttgtcccggcctgt

SEQ ID NO: 7122 - RNA, 16 nt, Synthetic Construct
  source 1..16: mol_type = other RNA
ggtgggggtcgttggt

SEQ ID NO: 7123 - RNA, 16 nt, Synthetic Construct
  source 1..16: mol_type = other RNA
gcggtggatgatgtgg

SEQ ID NO: 7124 - RNA, 16 nt, Synthetic Construct
  source 1..16: mol_type = other RNA
gcggtggatgatgtgg

SEQ ID NO: 7125 - RNA, 18 nt, Synthetic Construct
  source 1..18: mol_type = other RNA
acagtcaggatgttggct

SEQ ID NO: 7126 - RNA, 18 nt, Synthetic Construct
  source 1..18: mol_type = other RNA
acagtcaggatgttggct

SEQ ID NO: 7127 - RNA, 21 nt, Synthetic Construct
  source 1..21: mol_type = other RNA
tgaggtagtagcttgtgctgt

SEQ ID NO: 7128 - RNA, 21 nt, Synthetic Construct
  source 1..21: mol_type = other RNA
tgaggtagtagcttgtgctgt

SEQ ID NO: 7129 - RNA, 23 nt, Synthetic Construct
  source 1..23: mol_type = other RNA
ggcagggttcgtgactggggtga

SEQ ID NO: 7130 - RNA, 23 nt, Synthetic Construct
  source 1..23: mol_type = other RNA
ggcagggttcgtgactggggtga

SEQ ID NO: 7131 - RNA, 22 nt, Synthetic Construct
  source 1..22: mol_type = other RNA
tgaggtggtaggttgtgtggtt

SEQ ID NO: 7132 - RNA, 22 nt, Synthetic Construct
  source 1..22: mol_type = other RNA
tgaggtggtaggttgtgtggtt

SEQ ID NO: 7133 - RNA, 23 nt, Synthetic Construct
  source 1..23: mol_type = other RNA
agcagcattgtacagggctatgg

SEQ ID NO: 7134 - RNA, 25 nt, Synthetic Construct
  source 1..25: mol_type = other RNA
ttgaggatatgagatcgagacaaca

SEQ ID NO: 7135 - RNA, 25 nt, Synthetic Construct
  source 1..25: mol_type = other RNA
ttgaggatatgagatcgagacaaca

SEQ ID NO: 7136 - RNA, 22 nt, Synthetic Construct
  source 1..22: mol_type = other RNA
gagagcctggacacaggtgctg

SEQ ID NO: 7137 - RNA, 22 nt, Synthetic Construct
  source 1..22: mol_type = other RNA
gagagcctggacacaggtgctg

SEQ ID NO: 7138 - RNA, 21 nt, Synthetic Construct
  source 1..21: mol_type = other RNA
ctagactgaagctccttgggg

SEQ ID NO: 7139 - RNA, 43 nt, Synthetic Construct; identical to SEQ ID NO: 1204
  source 1..43: mol_type = other RNA

SEQ ID NO: 7140 - RNA, 43 nt, Synthetic Construct; identical to SEQ ID NO: 1204
  source 1..43: mol_type = other RNA

SEQ ID NO: 7141 - RNA, 23 nt, Synthetic Construct
  source 1..23: mol_type = other RNA
tgaggtagtaggttgtgtggctt

SEQ ID NO: 7142 - RNA, 16 nt, Synthetic Construct
  source 1..16: mol_type = other RNA
ggccgttcttagttgg

SEQ ID NO: 7143 - RNA, 23 nt, Synthetic Construct
  source 1..23: mol_type = other RNA
tctttggttatctagctgtatga

SEQ ID NO: 7144 - RNA, 23 nt, Synthetic Construct
  source 1..23: mol_type = other RNA
tctttggttatctagctgtatga

SEQ ID NO: 7145 - RNA, 22 nt, Synthetic Construct
  source 1..22: mol_type = other RNA
tgaggtagaagtttgtgctgtt

SEQ ID NO: 7146 - RNA, 16 nt, Synthetic Construct
  source 1..16: mol_type = other RNA
ctgacgctcatgcacg

SEQ ID NO: 7147 - RNA, 16 nt, Synthetic Construct
  source 1..16: mol_type = other RNA
ctgacgctcatgcacg

SEQ ID NO: 7148 - RNA, 38 nt, Synthetic Construct
  source 1..38: mol_type = other RNA
cgactcttagcggtggatcactcggctcgtgcgtcgat

SEQ ID NO: 7149 - RNA, 38 nt, Synthetic Construct; identical to SEQ ID NO: 7148
  source 1..38: mol_type = other RNA

SEQ ID NO: 7150 - RNA, 22 nt, Synthetic Construct
  source 1..22: mol_type = other RNA
caaagtgctgttcgtgcaggta

SEQ ID NO: 7151 - RNA, 21 nt, Synthetic Construct
  source 1..21: mol_type = other RNA
ctagaccgaagctccttgagg

SEQ ID NO: 7152 - RNA, 19 nt, Synthetic Construct
  source 1..19: mol_type = other RNA
gtactgacgctcatgcacg

SEQ ID NO: 7153 - RNA, 36 nt, Synthetic Construct; identical to SEQ ID NO: 2469
  source 1..36: mol_type = other RNA

SEQ ID NO: 7154 - RNA, 36 nt, Synthetic Construct; identical to SEQ ID NO: 2469
  source 1..36: mol_type = other RNA

SEQ ID NO: 7155 - RNA, 25 nt, Synthetic Construct
  source 1..25: mol_type = other RNA
caaagtgctgttcgtgcaggtagtt

SEQ ID NO: 7156 - RNA, 32 nt, Synthetic Construct; identical to SEQ ID NO: 2582
  source 1..32: mol_type = other RNA

SEQ ID NO: 7157 - RNA, 32 nt, Synthetic Construct; identical to SEQ ID NO: 2582
  source 1..32: mol_type = other RNA

SEQ ID NO: 7158 - RNA, 22 nt, Synthetic Construct
  source 1..22: mol_type = other RNA
cgaggtagtaggttgtatagtt

SEQ ID NO: 7159 - RNA, 22 nt, Synthetic Construct
  source 1..22: mol_type = other RNA
cgaggtagtaggttgtatagtt

SEQ ID NO: 7160 - RNA, 31 nt, Synthetic Construct
  source 1..31: mol_type = other RNA
ggccgtgatcgtatagtggttagtactctgc

SEQ ID NO: 7161 - RNA, 31 nt, Synthetic Construct; identical to SEQ ID NO: 7160
  source 1..31: mol_type = other RNA

SEQ ID NO: 7162 - RNA, 19 nt, Synthetic Construct
  source 1..19: mol_type = other RNA
tcctgtaccgatcaatagt

SEQ ID NO: 7163 - RNA, 23 nt, Synthetic Construct
  source 1..23: mol_type = other RNA
tcctgaactgagctgccccgagt

SEQ ID NO: 7164 - RNA, 22 nt, Synthetic Construct
  source 1..22: mol_type = other RNA
tgaggtggtaggttgtatagtt

SEQ ID NO: 7165 - RNA, 23 nt, Synthetic Construct
  source 1..23: mol_type = other RNA
attctaatttctccacgtctttg

SEQ ID NO: 7166 - RNA, 23 nt, Synthetic Construct
  source 1..23: mol_type = other RNA
attctaatttctccacgtctttg

SEQ ID NO: 7167 - RNA, 23 nt, Synthetic Construct
  source 1..23: mol_type = other RNA
tgaggtggtaggttgtgtggttt

SEQ ID NO: 7168 - RNA, 23 nt, Synthetic Construct
  source 1..23: mol_type = other RNA
tgaggtggtaggttgtgtggttt

SEQ ID NO: 7169 - RNA, 22 nt, Synthetic Construct
  source 1..22: mol_type = other RNA
tggaatgtaaagaagtatgtat

SEQ ID NO: 7170 - RNA, 30 nt, Synthetic Construct; identical to SEQ ID NO: 2407
  source 1..30: mol_type = other RNA

SEQ ID NO: 7171 - RNA, 30 nt, Synthetic Construct; identical to SEQ ID NO: 2407
  source 1..30: mol_type = other RNA

SEQ ID NO: 7172 - RNA, 22 nt, Synthetic Construct
  source 1..22: mol_type = other RNA
tggggtagtaggttgtgtggtt

SEQ ID NO: 7173 - RNA, 24 nt, Synthetic Construct
  source 1..24: mol_type = other RNA
tgtaaacatccttgactggaagct

SEQ ID NO: 7174 - RNA, 24 nt, Synthetic Construct
  source 1..24: mol_type = other RNA
tgtaaacatccttgactggaagct

SEQ ID NO: 7175 - RNA, 21 nt, Synthetic Construct
  source 1..21: mol_type = other RNA
tgaggaagtagattgtatagt

SEQ ID NO: 7176 - RNA, 21 nt, Synthetic Construct
  source 1..21: mol_type = other RNA
tgaggaagtagattgtatagt

SEQ ID NO: 7177 - RNA, 22 nt, Synthetic Construct
  source 1..22: mol_type = other RNA
cgaggtagtagtttgtgctgtt

SEQ ID NO: 7178 - RNA, 27 nt, Synthetic Construct
  source 1..27: mol_type = other RNA
ccccccactgctagatttgactggctt

SEQ ID NO: 7179 - RNA, 34 nt, Synthetic Construct; identical to SEQ ID NO: 2317
  source 1..34: mol_type = other RNA

SEQ ID NO: 7180 - RNA, 34 nt, Synthetic Construct; identical to SEQ ID NO: 2317
  source 1..34: mol_type = other RNA

SEQ ID NO: 7181 - RNA, 16 nt, Synthetic Construct
  source 1..16: mol_type = other RNA
ggccgttcttagttgg

SEQ ID NO: 7182 - RNA, 22 nt, Synthetic Construct
  source 1..22: mol_type = other RNA
tgaggtagtagattgtgtagtt

SEQ ID NO: 7183 - RNA, 16 nt, Synthetic Construct
  source 1..16: mol_type = other RNA
ggcgggggtcgctggt

SEQ ID NO: 7184 - RNA, 16 nt, Synthetic Construct
  source 1..16: mol_type = other RNA
ggcgggggtcgctggt

SEQ ID NO: 7185 - RNA, 20 nt, Synthetic Construct
  source 1..20: mol_type = other RNA
ccttggggttgtaggaccac

SEQ ID NO: 7186 - RNA, 20 nt, Synthetic Construct
  source 1..20: mol_type = other RNA
ccttggggttgtaggaccac

SEQ ID NO: 7187 - RNA, 21 nt, Synthetic Construct
  source 1..21: mol_type = other RNA
caaagtgctgttcgtgcaggt

SEQ ID NO: 7188 - RNA, 21 nt, Synthetic Construct
  source 1..21: mol_type = other RNA
caaagtgctgttcgtgcaggt

SEQ ID NO: 7189 - RNA, 20 nt, Synthetic Construct
  source 1..20: mol_type = other RNA
cacatgcaagtcgaacggta

SEQ ID NO: 7190 - RNA, 20 nt, Synthetic Construct
  source 1..20: mol_type = other RNA
cacatgcaagtcgaacggta

SEQ ID NO: 7191 - RNA, 21 nt, Synthetic Construct
  source 1..21: mol_type = other RNA
ctaatcccagaaacccggtcg

SEQ ID NO: 7192 - RNA, 21 nt, Synthetic Construct
  source 1..21: mol_type = other RNA
ctaatcccagaaacccggtcg

SEQ ID NO: 7193 - RNA, 23 nt, Synthetic Construct
  source 1..23: mol_type = other RNA
tctctcggctcctcgcggctcgt

SEQ ID NO: 7194 - RNA, 23 nt, Synthetic Construct
  source 1..23: mol_type = other RNA
tctctcggctcctcgcggctcgt

SEQ ID NO: 7195 - RNA, 22 nt, Synthetic Construct
  source 1..22: mol_type = other RNA
tgaggtagcaggttgtatagtt

SEQ ID NO: 7196 - RNA, 22 nt, Synthetic Construct
  source 1..22: mol_type = other RNA
tgaggtagtaaattgtatagtt

SEQ ID NO: 7197 - RNA, 22 nt, Synthetic Construct
  source 1..22: mol_type = other RNA
ttcaccaccttctccacccagc

SEQ ID NO: 7198 - RNA, 22 nt, Synthetic Construct
  source 1..22: mol_type = other RNA
ttcaccaccttctccacccagc

SEQ ID NO: 7199 - RNA, 18 nt, Synthetic Construct
  source 1..18: mol_type = other RNA
tcttcggtagtatagtgg

SEQ ID NO: 7200 - RNA, 18 nt, Synthetic Construct
  source 1..18: mol_type = other RNA
tcttcggtagtatagtgg

SEQ ID NO: 7201 - RNA, 21 nt, Synthetic Construct
  source 1..21: mol_type = other RNA
tcctgtactgggctgccccga

SEQ ID NO: 7202 - RNA, 16 nt, Synthetic Construct
  source 1..16: mol_type = other RNA
gtctacggccatacta

SEQ ID NO: 7203 - RNA, 23 nt, Synthetic Construct
  source 1..23: mol_type = other RNA
tagcaccatttgaaatcagtgtt

SEQ ID NO: 7204 - RNA, 22 nt, Synthetic Construct
  source 1..22: mol_type = other RNA
tgaggtagaaggttgtgtggtt

SEQ ID NO: 7205 - RNA, 22 nt, Synthetic Construct
  source 1..22: mol_type = other RNA
tgaggtagaaggttgtgtggtt

SEQ ID NO: 7206 - RNA, 21 nt, Synthetic Construct
  source 1..21: mol_type = other RNA
gactatagaactttccccctc

SEQ ID NO: 7207 - RNA, 21 nt, Synthetic Construct
  source 1..21: mol_type = other RNA
gactatagaactttccccctc

SEQ ID NO: 7208 - RNA, 17 nt, Synthetic Construct
  source 1..17: mol_type = other RNA
gtcgacgtatagggtgt

SEQ ID NO: 7209 - RNA, 17 nt, Synthetic Construct
  source 1..17: mol_type = other RNA
gtcgacgtatagggtgt

SEQ ID NO: 7210 - RNA, 23 nt, Synthetic Construct
  source 1..23: mol_type = other RNA
tgaggggcagagagcgaggcttt

SEQ ID NO: 7211 - RNA, 23 nt, Synthetic Construct
  source 1..23: mol_type = other RNA
tgaggggcagagagcgaggcttt

SEQ ID NO: 7212 - RNA, 22 nt, Synthetic Construct
  source 1..22: mol_type = other RNA
ttcaagtaatccaggataggcc

SEQ ID NO: 7213 - RNA, 21 nt, Synthetic Construct
  source 1..21: mol_type = other RNA
tcaggctcagtcccctcccga

SEQ ID NO: 7214 - RNA, 21 nt, Synthetic Construct
  source 1..21: mol_type = other RNA
tcaggctcagtcccctcccga

SEQ ID NO: 7215 - RNA, 33 nt, Synthetic Construct; identical to SEQ ID NO: 3082
  source 1..33: mol_type = other RNA

SEQ ID NO: 7216 - RNA, 33 nt, Synthetic Construct; identical to SEQ ID NO: 3082
  source 1..33: mol_type = other RNA

SEQ ID NO: 7217 - RNA, 17 nt, Synthetic Construct
  source 1..17: mol_type = other RNA
catgcaagtcgaacggt

SEQ ID NO: 7218 - RNA, 22 nt, Synthetic Construct
  source 1..22: mol_type = other RNA
tcctgtactgggctgccccgag

SEQ ID NO: 7219 - RNA, 22 nt, Synthetic Construct
  source 1..22: mol_type = other RNA
tcctgtactgggctgccccgag

SEQ ID NO: 7220 - RNA, 24 nt, Synthetic Construct
  source 1..24: mol_type = other RNA
tgtaaacatccttgactggaagct

SEQ ID NO: 7221 - RNA, 31 nt, Synthetic Construct; identical to SEQ ID NO: 2295
  source 1..31: mol_type = other RNA

SEQ ID NO: 7222 - RNA, 31 nt, Synthetic Construct; identical to SEQ ID NO: 2295
  source 1..31: mol_type = other RNA

SEQ ID NO: 7223 - RNA, 35 nt, Synthetic Construct; identical to SEQ ID NO: 2354
  source 1..35: mol_type = other RNA

SEQ ID NO: 7224 - RNA, 33 nt, Synthetic Construct
  source 1..33: mol_type = other RNA
acgcgggagaccggggttcgattccccgacggg

SEQ ID NO: 7225 - RNA, 33 nt, Synthetic Construct; identical to SEQ ID NO: 7224
  source 1..33: mol_type = other RNA

SEQ ID NO: 7226 - RNA, 22 nt, Synthetic Construct
  source 1..22: mol_type = other RNA
tcctgtattgagctgccccgag

SEQ ID NO: 7227 - RNA, 22 nt, Synthetic Construct
  source 1..22: mol_type = other RNA
tcctgtattgagctgccccgag

SEQ ID NO: 7228 - RNA, 41 nt, Synthetic Construct; identical to SEQ ID NO: 2441
  source 1..41: mol_type = other RNA

SEQ ID NO: 7229 - RNA, 41 nt, Synthetic Construct; identical to SEQ ID NO: 2441
  source 1..41: mol_type = other RNA

SEQ ID NO: 7230 - RNA, 24 nt, Synthetic Construct
  source 1..24: mol_type = other RNA
tgtaagcatccccgactggaagct

SEQ ID NO: 7231 - RNA, 21 nt, Synthetic Construct
  source 1..21: mol_type = other RNA
tggggtgtgacaatggtgttt

SEQ ID NO: 7232 - RNA, 21 nt, Synthetic Construct
  source 1..21: mol_type = other RNA
tggggtgtgacaatggtgttt

SEQ ID NO: 7233 - RNA, 22 nt, Synthetic Construct
  source 1..22: mol_type = other RNA
caaagaattctccttttgggct

SEQ ID NO: 7234 - RNA, 22 nt, Synthetic Construct
  source 1..22: mol_type = other RNA
tggaatgtaaagaggtatgtat

SEQ ID NO: 7235 - RNA, 22 nt, Synthetic Construct
  source 1..22: mol_type = other RNA
tggaatgtaaagaggtatgtat

SEQ ID NO: 7236 - RNA, 18 nt, Synthetic Construct
  source 1..18: mol_type = other RNA
gtaggtcatcgtcaggct

SEQ ID NO: 7237 - RNA, 18 nt, Synthetic Construct
  source 1..18: mol_type = other RNA
gtaggtcatcgtcaggct

SEQ ID NO: 7238 - RNA, 20 nt, Synthetic Construct
  source 1..20: mol_type = other RNA
tcgcgccgtcgggcccgggg

SEQ ID NO: 7239 - RNA, 20 nt, Synthetic Construct
  source 1..20: mol_type = other RNA
tcgcgccgtcgggcccgggg

SEQ ID NO: 7240 - RNA, 22 nt, Synthetic Construct
  source 1..22: mol_type = other RNA
tgaggtagtagattgtatagta

SEQ ID NO: 7241 - RNA, 23 nt, Synthetic Construct
  source 1..23: mol_type = other RNA
taaggtgcatctagtgcagatag

SEQ ID NO: 7242 - RNA, 23 nt, Synthetic Construct
  source 1..23: mol_type = other RNA
taaggtgcatctagtgcagatag

SEQ ID NO: 7243 - RNA, 25 nt, Synthetic Construct
  source 1..25: mol_type = other RNA
cgactcttagcggtggatcactcgg

SEQ ID NO: 7244 - RNA, 25 nt, Synthetic Construct
  source 1..25: mol_type = other RNA
cgactcttagcggtggatcactcgg

SEQ ID NO: 7245 - RNA, 18 nt, Synthetic Construct
  source 1..18: mol_type = other RNA
catgcaagtcgaacggta

SEQ ID NO: 7246 - RNA, 18 nt, Synthetic Construct
  source 1..18: mol_type = other RNA
catgcaagtcgaacggta

SEQ ID NO: 7247 - RNA, 23 nt, Synthetic Construct
  source 1..23: mol_type = other RNA
tggtaatacgacgtactttgtgt

SEQ ID NO: 7248 - RNA, 23 nt, Synthetic Construct
  source 1..23: mol_type = other RNA
tggtaatacgacgtactttgtgt

SEQ ID NO: 7249 - RNA, 18 nt, Synthetic Construct
  source 1..18: mol_type = other RNA
tgcgtagatatgcggagg

SEQ ID NO: 7250 - RNA, 18 nt, Synthetic Construct
  source 1..18: mol_type = other RNA
tgcgtagatatgcggagg

SEQ ID NO: 7251 - RNA, 21 nt, Synthetic Construct
  source 1..21: mol_type = other RNA
tgagatgaagcactgtagctc

SEQ ID NO: 7252 - RNA, 21 nt, Synthetic Construct
  source 1..21: mol_type = other RNA
aaaagctgggttgagagggcg

SEQ ID NO: 7253 - RNA, 21 nt, Synthetic Construct
  source 1..21: mol_type = other RNA
aaaagctgggttgagagggcg

SEQ ID NO: 7254 - RNA, 21 nt, Synthetic Construct
  source 1..21: mol_type = other RNA
cgaggtagtagattgtatagt

SEQ ID NO: 7255 - RNA, 21 nt, Synthetic Construct
  source 1..21: mol_type = other RNA
cgaggtagtagattgtatagt

SEQ ID NO: 7256 - RNA, 22 nt, Synthetic Construct
  source 1..22: mol_type = other RNA
tcctgtaccgagctgccccgag

SEQ ID NO: 7257 - RNA, 15 nt, Synthetic Construct
  source 1..15: mol_type = other RNA
gctatgggatttgtt

SEQ ID NO: 7258 - RNA, 15 nt, Synthetic Construct
  source 1..15: mol_type = other RNA
gctatgggatttgtt

SEQ ID NO: 7259 - RNA, 22 nt, Synthetic Construct
  source 1..22: mol_type = other RNA
tgaggtagtagattgtatagtc

SEQ ID NO: 7260 - RNA, 22 nt, Synthetic Construct
  source 1..22: mol_type = other RNA
tgaggtagtaggatgtgtggtt

SEQ ID NO: 7261 - RNA, 22 nt, Synthetic Construct
  source 1..22: mol_type = other RNA
tgaggtagtaggatgtgtggtt

SEQ ID NO: 7262 - RNA, 23 nt, Synthetic Construct
  source 1..23: mol_type = other RNA
agcagcaatgtacagggctatga

SEQ ID NO: 7263 - RNA, 22 nt, Synthetic Construct
  source 1..22: mol_type = other RNA
tggaatgtaaagaagcatgtat

SEQ ID NO: 7264 - RNA, 22 nt, Synthetic Construct
  source 1..22: mol_type = other RNA
tggaatgtaaagaagcatgtat

SEQ ID NO: 7265 - RNA, 22 nt, Synthetic Construct
  source 1..22: mol_type = other RNA
ccctgtactgagctgccccgag

SEQ ID NO: 7266 - RNA, 22 nt, Synthetic Construct
  source 1..22: mol_type = other RNA
ccctgtactgagctgccccgag

SEQ ID NO: 7267 - RNA, 22 nt, Synthetic Construct
  source 1..22: mol_type = other RNA
tcctgtactgagctgccccggg

SEQ ID NO: 7268 - RNA, 22 nt, Synthetic Construct
  source 1..22: mol_type = other RNA
tcctgtactgagctgccccggg

SEQ ID NO: 7269 - RNA, 22 nt, Synthetic Construct
  source 1..22: mol_type = other RNA
gtcagtttgtcaaataccccaa

SEQ ID NO: 7270 - RNA, 22 nt, Synthetic Construct
  source 1..22: mol_type = other RNA
gtcagtttgtcaaataccccaa

SEQ ID NO: 7271 - RNA, 23 nt, Synthetic Construct
  source 1..23: mol_type = other RNA
tggtaatacgacgtactaagtgt

SEQ ID NO: 7272 - RNA, 37 nt, Synthetic Construct; identical to SEQ ID NO: 715
  source 1..37: mol_type = other RNA

SEQ ID NO: 7273 - RNA, 37 nt, Synthetic Construct; identical to SEQ ID NO: 715
  source 1..37: mol_type = other RNA

SEQ ID NO: 7274 - RNA, 21 nt, Synthetic Construct
  source 1..21: mol_type = other RNA
tagcagcacatcatggtttac

SEQ ID NO: 7275 - RNA, 21 nt, Synthetic Construct
  source 1..21: mol_type = other RNA
tagcagcacatcatggtttac

SEQ ID NO: 7276 - RNA, 17 nt, Synthetic Construct
  source 1..17: mol_type = other RNA
tcgctagtaatcgcgga

SEQ ID NO: 7277 - RNA, 17 nt, Synthetic Construct
  source 1..17: mol_type = other RNA
tcgctagtaatcgcgga

SEQ ID NO: 7278 - RNA, 21 nt, Synthetic Construct
  source 1..21: mol_type = other RNA
cgaggtagtagtttgtgctgt

SEQ ID NO: 7279 - RNA, 21 nt, Synthetic Construct
  source 1..21: mol_type = other RNA
cgaggtagtagtttgtgctgt

SEQ ID NO: 7280 - RNA, 15 nt, Synthetic Construct
  source 1..15: mol_type = other RNA
atccctccgactccg

SEQ ID NO: 7281 - RNA, 24 nt, Synthetic Construct
  source 1..24: mol_type = other RNA
gcgagagtaggacgttgccaggtt

SEQ ID NO: 7282 - RNA, 24 nt, Synthetic Construct
  source 1..24: mol_type = other RNA
gcgagagtaggacgttgccaggtt

SEQ ID NO: 7283 - RNA, 21 nt, Synthetic Construct
  source 1..21: mol_type = other RNA
tgaggcagtaggttgtatagt

SEQ ID NO: 7284 - RNA, 21 nt, Synthetic Construct
  source 1..21: mol_type = other RNA
tgaggcagtaggttgtatagt

SEQ ID NO: 7285 - RNA, 15 nt, Synthetic Construct
  source 1..15: mol_type = other RNA
agttgaccgcctggg

SEQ ID NO: 7286 - RNA, 36 nt, Synthetic Construct; identical to SEQ ID NO: 2456
  source 1..36: mol_type = other RNA

SEQ ID NO: 7287 - RNA, 23 nt, Synthetic Construct
  source 1..23: mol_type = other RNA
tcggatccgtctgagcttggctt

SEQ ID NO: 7288 - RNA, 21 nt, Synthetic Construct
  source 1..21: mol_type = other RNA
atcacattgccagggatttcc

SEQ ID NO: 7289 - RNA, 26 nt, Synthetic Construct
  source 1..26: mol_type = other RNA
ggtggctgtagctcagttggtagagt

SEQ ID NO: 7290 - RNA, 26 nt, Synthetic Construct
  source 1..26: mol_type = other RNA
ggtggctgtagctcagttggtagagt

SEQ ID NO: 7291 - RNA, 22 nt, Synthetic Construct
  source 1..22: mol_type = other RNA
tgaagtagtaggttgtatagtt

SEQ ID NO: 7292 - RNA, 15 nt, Synthetic Construct
  source 1..15: mol_type = other RNA
ttccgaaagtagtgg

SEQ ID NO: 7293 - RNA, 15 nt, Synthetic Construct
  source 1..15: mol_type = other RNA
ttccgaaagtagtgg

SEQ ID NO: 7294 - RNA, 21 nt, Synthetic Construct
  source 1..21: mol_type = other RNA
taactccttagcgaatctcgc

SEQ ID NO: 7295 - RNA, 21 nt, Synthetic Construct
  source 1..21: mol_type = other RNA
taactccttagcgaatctcgc

SEQ ID NO: 7296 - RNA, 33 nt, Synthetic Construct; identical to SEQ ID NO: 2266
  source 1..33: mol_type = other RNA

SEQ ID NO: 7297 - RNA, 33 nt, Synthetic Construct; identical to SEQ ID NO: 2266
  source 1..33: mol_type = other RNA

SEQ ID NO: 7298 - RNA, 16 nt, Synthetic Construct
  source 1..16: mol_type = other RNA
cccagaaacccggtcg

SEQ ID NO: 7299 - RNA, 16 nt, Synthetic Construct
  source 1..16: mol_type = other RNA
cccagaaacccggtcg

SEQ ID NO: 7300 - RNA, 34 nt, Synthetic Construct; identical to SEQ ID NO: 2553
  source 1..34: mol_type = other RNA

SEQ ID NO: 7301 - RNA, 23 nt, Synthetic Construct
  source 1..23: mol_type = other RNA
naaagtgctgttcgtgcaggtag

SEQ ID NO: 7302 - RNA, 23 nt, Synthetic Construct
  source 1..23: mol_type = other RNA
naaagtgctgttcgtgcaggtag

SEQ ID NO: 7303 - RNA, 23 nt, Synthetic Construct
  source 1..23: mol_type = other RNA
tgaggtagtaggttgtgtggtct

SEQ ID NO: 7304 - RNA, 23 nt, Synthetic Construct
  source 1..23: mol_type = other RNA
tgaggtagtaggttgtgtggtct

SEQ ID NO: 7305 - RNA, 26 nt, Synthetic Construct
  source 1..26: mol_type = other RNA
ccccccactgctaatttgactggctt

SEQ ID NO: 7306 - RNA, 23 nt, Synthetic Construct
  source 1..23: mol_type = other RNA
agcagcgttgtacagggctatga

SEQ ID NO: 7307 - RNA, 22 nt, Synthetic Construct
  source 1..22: mol_type = other RNA
cctcgcgcgattggagcggccg

SEQ ID NO: 7308 - RNA, 22 nt, Synthetic Construct
  source 1..22: mol_type = other RNA
cctcgcgcgattggagcggccg

SEQ ID NO: 7309 - RNA, 22 nt, Synthetic Construct
  source 1..22: mol_type = other RNA
tgaggaagtagattgtatagtt

SEQ ID NO: 7310 - RNA, 21 nt, Synthetic Construct
  source 1..21: mol_type = other RNA
tggggtagtagtttgtgctgt

SEQ ID NO: 7311 - RNA, 21 nt, Synthetic Construct
  source 1..21: mol_type = other RNA
tggggtagtagtttgtgctgt

SEQ ID NO: 7312 - RNA, 20 nt, Synthetic Construct
  source 1..20: mol_type = other RNA
caacggaatcccaaaagcag

SEQ ID NO: 7313 - RNA, 20 nt, Synthetic Construct
  source 1..20: mol_type = other RNA
caacggaatcccaaaagcag

SEQ ID NO: 7314 - RNA, 35 nt, Synthetic Construct; identical to SEQ ID NO: 2397
  source 1..35: mol_type = other RNA

SEQ ID NO: 7315 - RNA, 35 nt, Synthetic Construct; identical to SEQ ID NO: 2397
  source 1..35: mol_type = other RNA

SEQ ID NO: 7316 - RNA, 29 nt, Synthetic Construct
  source 1..29: mol_type = other RNA
ttacaggggttcgaatcccctaggggacg

SEQ ID NO: 7317 - RNA, 22 nt, Synthetic Construct
  source 1..22: mol_type = other RNA
acagtagtctgcacattggttg

SEQ ID NO: 7318 - RNA, 17 nt, Synthetic Construct
  source 1..17: mol_type = other RNA
gactcttagcggtggat

SEQ ID NO: 7319 - RNA, 17 nt, Synthetic Construct
  source 1..17: mol_type = other RNA
gactcttagcggtggat

SEQ ID NO: 7320 - RNA, 23 nt, Synthetic Construct
  source 1..23: mol_type = other RNA
tggtaatacgacgtacttagtat

SEQ ID NO: 7321 - RNA, 23 nt, Synthetic Construct
  source 1..23: mol_type = other RNA
tggtaatacgacgtacttagtat

SEQ ID NO: 7322 - RNA, 22 nt, Synthetic Construct
  source 1..22: mol_type = other RNA
ggcagggttcgtgactggggtg

SEQ ID NO: 7323 - RNA, 32 nt, Synthetic Construct
  source 1..32: mol_type = other RNA
gcatttgtggttcagtggtagaattctcgcct

SEQ ID NO: 7324 - RNA, 19 nt, Synthetic Construct
  source 1..19: mol_type = other RNA
agcgaaattccttgtcggg

SEQ ID NO: 7325 - RNA, 22 nt, Synthetic Construct
  source 1..22: mol_type = other RNA
tgaggtagtaggttgtggggtt

SEQ ID NO: 7326 - RNA, 23 nt, Synthetic Construct
  source 1..23: mol_type = other RNA
tcccgtactgagctgccccgaga

SEQ ID NO: 7327 - RNA, 31 nt, Synthetic Construct; identical to SEQ ID NO: 2310
  source 1..31: mol_type = other RNA

SEQ ID NO: 7328 - RNA, 31 nt, Synthetic Construct; identical to SEQ ID NO: 2310
  source 1..31: mol_type = other RNA

SEQ ID NO: 7329 - RNA, 23 nt, Synthetic Construct
  source 1..23: mol_type = other RNA
tcacacagaaatcgcacccgtct

SEQ ID NO: 7330 - RNA, 23 nt, Synthetic Construct
  source 1..23: mol_type = other RNA
tcacacagaaatcgcacccgtct

SEQ ID NO: 7331 - RNA, 25 nt, Synthetic Construct
  source 1..25: mol_type = other RNA
gggttgtaaaccgcttttgtcaggg

SEQ ID NO: 7332 - RNA, 25 nt, Synthetic Construct
  source 1..25: mol_type = other RNA
gggttgtaaaccgcttttgtcaggg

SEQ ID NO: 7333 - RNA, 31 nt, Synthetic Construct; identical to SEQ ID NO: 2427
  source 1..31: mol_type = other RNA

SEQ ID NO: 7334 - RNA, 31 nt, Synthetic Construct; identical to SEQ ID NO: 2427
  source 1..31: mol_type = other RNA

SEQ ID NO: 7335 - RNA, 33 nt, Synthetic Construct; identical to SEQ ID NO: 2479
  source 1..33: mol_type = other RNA

SEQ ID NO: 7336 - RNA, 33 nt, Synthetic Construct; identical to SEQ ID NO: 2479
  source 1..33: mol_type = other RNA

SEQ ID NO: 7337 - RNA, 15 nt, Synthetic Construct
  source 1..15: mol_type = other RNA
gagctgtggataggg

SEQ ID NO: 7338 - RNA, 15 nt, Synthetic Construct
  source 1..15: mol_type = other RNA
gagctgtggataggg

SEQ ID NO: 7339 - RNA, 25 nt, Synthetic Construct
  source 1..25: mol_type = other RNA
ttgaggatatgagatcgagacgaca

SEQ ID NO: 7340 - RNA, 25 nt, Synthetic Construct
  source 1..25: mol_type = other RNA
ttgaggatatgagatcgagacgaca

SEQ ID NO: 7341 - RNA, 20 nt, Synthetic Construct
  source 1..20: mol_type = other RNA
acccttgtcattagttgcta

SEQ ID NO: 7342 - RNA, 20 nt, Synthetic Construct
  source 1..20: mol_type = other RNA
acccttgtcattagttgcta

SEQ ID NO: 7343 - RNA, 16 nt, Synthetic Construct
  source 1..16: mol_type = other RNA
ctactctcagcaacgg

SEQ ID NO: 7344 - RNA, 16 nt, Synthetic Construct
  source 1..16: mol_type = other RNA
ctactctcagcaacgg

SEQ ID NO: 7345 - RNA, 16 nt, Synthetic Construct
  source 1..16: mol_type = other RNA
gtctacagccatacca

SEQ ID NO: 7346 - RNA, 20 nt, Synthetic Construct
  source 1..20: mol_type = other RNA
tgaggtagtaggttgtgagg

SEQ ID NO: 7347 - RNA, 20 nt, Synthetic Construct
  source 1..20: mol_type = other RNA
tgaggtagtaggttgtgagg

SEQ ID NO: 7348 - RNA, 24 nt, Synthetic Construct
  source 1..24: mol_type = other RNA
tagcagcacgtaaatattggcgtt

SEQ ID NO: 7349 - RNA, 24 nt, Synthetic Construct
  source 1..24: mol_type = other RNA
tagcagcacgtaaatattggcgtt

SEQ ID NO: 7350 - RNA, 22 nt, Synthetic Construct
  source 1..22: mol_type = other RNA
ncctgtactgagctgccccgag

SEQ ID NO: 7351 - RNA, 22 nt, Synthetic Construct
  source 1..22: mol_type = other RNA
ncctgtactgagctgccccgag

SEQ ID NO: 7352 - RNA, 19 nt, Synthetic Construct
  source 1..19: mol_type = other RNA
gtccggatcgtagtctgca

SEQ ID NO: 7353 - RNA, 22 nt, Synthetic Construct
  source 1..22: mol_type = other RNA
tcggatccgtctgagcttggct

SEQ ID NO: 7354 - RNA, 22 nt, Synthetic Construct
  source 1..22: mol_type = other RNA
tcggatccgtctgagcttggct

SEQ ID NO: 7355 - RNA, 22 nt, Synthetic Construct
  source 1..22: mol_type = other RNA
ggaggtagtaggttgtgtggtt

SEQ ID NO: 7356 - RNA, 23 nt, Synthetic Construct
  source 1..23: mol_type = other RNA
tggtaatacgtcgtacttagtgt

SEQ ID NO: 7357 - RNA, 23 nt, Synthetic Construct
  source 1..23: mol_type = other RNA
tggtaatacgtcgtacttagtgt

SEQ ID NO: 7358 - RNA, 33 nt, Synthetic Construct; identical to SEQ ID NO: 2386
  source 1..33: mol_type = other RNA

SEQ ID NO: 7359 - RNA, 24 nt, Synthetic Construct
  source 1..24: mol_type = other RNA
tcctgtactgagctgccccgagat

SEQ ID NO: 7360 - RNA, 18 nt, Synthetic Construct
  source 1..18: mol_type = other RNA
cataaagtagaaagcact

SEQ ID NO: 7361 - RNA, 18 nt, Synthetic Construct
  source 1..18: mol_type = other RNA
cataaagtagaaagcact

SEQ ID NO: 7362 - RNA, 24 nt, Synthetic Construct
  source 1..24: mol_type = other RNA
gggttgtaaaccgcttttgtcagg

SEQ ID NO: 7363 - RNA, 24 nt, Synthetic Construct
  source 1..24: mol_type = other RNA
gggttgtaaaccgcttttgtcagg

SEQ ID NO: 7364 - RNA, 21 nt, Synthetic Construct
  source 1..21: mol_type = other RNA
tgaggtagtagactgtatagt

SEQ ID NO: 7365 - RNA, 21 nt, Synthetic Construct
  source 1..21: mol_type = other RNA
tgaggtagtagactgtatagt

SEQ ID NO: 7366 - RNA, 22 nt, Synthetic Construct
  source 1..22: mol_type = other RNA
ttcaagtaatccaggataggtt

SEQ ID NO: 7367 - RNA, 17 nt, Synthetic Construct
  source 1..17: mol_type = other RNA
gcgtagatatgcggagg

SEQ ID NO: 7368 - RNA, 17 nt, Synthetic Construct
  source 1..17: mol_type = other RNA
gcgtagatatgcggagg

SEQ ID NO: 7369 - RNA, 24 nt, Synthetic Construct
  source 1..24: mol_type = other RNA
gtcagtttgtcaaataccccaatt

SEQ ID NO: 7370 - RNA, 24 nt, Synthetic Construct
  source 1..24: mol_type = other RNA
gtcagtttgtcaaataccccaatt

SEQ ID NO: 7371 - RNA, 35 nt, Synthetic Construct; identical to SEQ ID NO: 2450
  source 1..35: mol_type = other RNA

SEQ ID NO: 7372 - RNA, 35 nt, Synthetic Construct; identical to SEQ ID NO: 2450
  source 1..35: mol_type = other RNA

SEQ ID NO: 7373 - RNA, 19 nt, Synthetic Construct
  source 1..19: mol_type = other RNA
cacatgcaagtcgaacggt

SEQ ID NO: 7374 - RNA, 22 nt, Synthetic Construct
  source 1..22: mol_type = other RNA
tgaggtagtaggttgtgtagtt

SEQ ID NO: 7375 - RNA, 23 nt, Synthetic Construct
  source 1..23: mol_type = other RNA
aaaccgttaccattactgagttt

SEQ ID NO: 7376 - RNA, 23 nt, Synthetic Construct
  source 1..23: mol_type = other RNA
aaaccgttaccattactgagttt

SEQ ID NO: 7377 - RNA, 22 nt, Synthetic Construct
  source 1..22: mol_type = other RNA
tgaggtagtaggttgtatagct

SEQ ID NO: 7378 - RNA, 30 nt, Synthetic Construct; identical to SEQ ID NO: 1771
  source 1..30: mol_type = other RNA

SEQ ID NO: 7379 - RNA, 24 nt, Synthetic Construct
  source 1..24: mol_type = other RNA
tcactgatcgagtcgtcctgcgcg

SEQ ID NO: 7380 - RNA, 22 nt, Synthetic Construct
  source 1..22: mol_type = other RNA
tattgcactcgtcccggcctgt

SEQ ID NO: 7381 - RNA, 22 nt, Synthetic Construct
  source 1..22: mol_type = other RNA
tattgcactcgtcccggcctgt

SEQ ID NO: 7382 - RNA, 31 nt, Synthetic Construct; identical to SEQ ID NO: 2412
  source 1..31: mol_type = other RNA

SEQ ID NO: 7383 - RNA, 31 nt, Synthetic Construct; identical to SEQ ID NO: 2412
  source 1..31: mol_type = other RNA

SEQ ID NO: 7384 - RNA, 22 nt, Synthetic Construct
  source 1..22: mol_type = other RNA
tgaggtagtgggttgtgtggtt

SEQ ID NO: 7385 - RNA, 22 nt, Synthetic Construct
  source 1..22: mol_type = other RNA
tgaggtagtgggttgtgtggtt

SEQ ID NO: 7386 - RNA, 22 nt, Synthetic Construct
  source 1..22: mol_type = other RNA
tgtaaacatccccgactggagg

SEQ ID NO: 7387 - RNA, 21 nt, Synthetic Construct
  source 1..21: mol_type = other RNA
tgaggtagtagattgtgtggt

SEQ ID NO: 7388 - RNA, 21 nt, Synthetic Construct
  source 1..21: mol_type = other RNA
tgaggtagtagattgtgtggt

SEQ ID NO: 7389 - RNA, 16 nt, Synthetic Construct
  source 1..16: mol_type = other RNA
tgcaagtcgaacggta

SEQ ID NO: 7390 - RNA, 16 nt, Synthetic Construct
  source 1..16: mol_type = other RNA
tgcaagtcgaacggta

SEQ ID NO: 7391 - RNA, 16 nt, Synthetic Construct
  source 1..16: mol_type = other RNA
gcctacggccatacca

SEQ ID NO: 7392 - RNA, 16 nt, Synthetic Construct
  source 1..16: mol_type = other RNA
gcctacggccatacca

SEQ ID NO: 7393 - RNA, 24 nt, Synthetic Construct
  source 1..24: mol_type = other RNA
tatatcggaacgtgcccagtcgtg

SEQ ID NO: 7394 - RNA, 24 nt, Synthetic Construct
  source 1..24: mol_type = other RNA
tatatcggaacgtgcccagtcgtg

SEQ ID NO: 7395 - RNA, 19 nt, Synthetic Construct
  source 1..19: mol_type = other RNA
cacatgcaagtcgaacggt

SEQ ID NO: 7396 - RNA, 19 nt, Synthetic Construct
  source 1..19: mol_type = other RNA
cacatgcaagtcgaacggt

SEQ ID NO: 7397 - RNA, 18 nt, Synthetic Construct
  source 1..18: mol_type = other RNA
tcccaagggtatggctgt

SEQ ID NO: 7398 - RNA, 16 nt, Synthetic Construct
  source 1..16: mol_type = other RNA
gggtctgtagctcagt

SEQ ID NO: 7399 - RNA, 16 nt, Synthetic Construct
  source 1..16: mol_type = other RNA
gggtctgtagctcagt

SEQ ID NO: 7400 - RNA, 21 nt, Synthetic Construct
  source 1..21: mol_type = other RNA
cataaagtagaaagcactact

SEQ ID NO: 7401 - RNA, 22 nt, Synthetic Construct
  source 1..22: mol_type = other RNA
tcctgaactgagctgccccgag

SEQ ID NO: 7402 - RNA, 22 nt, Synthetic Construct
  source 1..22: mol_type = other RNA
tcctgaactgagctgccccgag

SEQ ID NO: 7403 - RNA, 34 nt, Synthetic Construct; identical to SEQ ID NO: 2019
  source 1..34: mol_type = other RNA

SEQ ID NO: 7404 - RNA, 22 nt, Synthetic Construct
  source 1..22: mol_type = other RNA
tgtggtagtaggttgtatagtt

SEQ ID NO: 7405 - RNA, 22 nt, Synthetic Construct
  source 1..22: mol_type = other RNA
tgtggtagtaggttgtatagtt

SEQ ID NO: 7406 - RNA, 22 nt, Synthetic Construct
  source 1..22: mol_type = other RNA
tggaatgtaaagaagtatgtac

SEQ ID NO: 7407 - RNA, 22 nt, Synthetic Construct
  source 1..22: mol_type = other RNA
tggaatgtaaagaagtatgtac

SEQ ID NO: 7408 - RNA, 20 nt, Synthetic Construct
  source 1..20: mol_type = other RNA
tgaggtagcaggttgtgtgg

SEQ ID NO: 7409 - RNA, 20 nt, Synthetic Construct
  source 1..20: mol_type = other RNA
tgaggtagcaggttgtgtgg

SEQ ID NO: 7410 - RNA, 23 nt, Synthetic Construct
  source 1..23: mol_type = other RNA
tcctgtacagagctgccccgaga

SEQ ID NO: 7411 - RNA, 21 nt, Synthetic Construct
  source 1..21: mol_type = other RNA
taatactgcctggtaatgatg

SEQ ID NO: 7412 - RNA, 21 nt, Synthetic Construct
  source 1..21: mol_type = other RNA
taatactgcctggtaatgatg

SEQ ID NO: 7413 - RNA, 32 nt, Synthetic Construct; identical to SEQ ID NO: 4279
  source 1..32: mol_type = other RNA

SEQ ID NO: 7414 - RNA, 31 nt, Synthetic Construct; identical to SEQ ID NO: 758
  source 1..31: mol_type = other RNA

SEQ ID NO: 7415 - RNA, 31 nt, Synthetic Construct; identical to SEQ ID NO: 758
  source 1..31: mol_type = other RNA

SEQ ID NO: 7416 - RNA, 21 nt, Synthetic Construct
  source 1..21: mol_type = other RNA
tggaatgtaaagaagtatgta

SEQ ID NO: 7417 - RNA, 21 nt, Synthetic Construct
  source 1..21: mol_type = other RNA
tggaatgtaaagaagtatgta

SEQ ID NO: 7418 - RNA, 21 nt, Synthetic Construct
  source 1..21: mol_type = other RNA
atcggaacgtgcccagtcgtg

SEQ ID NO: 7419 - RNA, 22 nt, Synthetic Construct
  source 1..22: mol_type = other RNA
tgaggtagtagtttgtgctgta

SEQ ID NO: 7420 - RNA, 22 nt, Synthetic Construct
  source 1..22: mol_type = other RNA
tgaggtagtaggttgtattgtt

SEQ ID NO: 7421 - RNA, 35 nt, Synthetic Construct; identical to SEQ ID NO: 2615
  source 1..35: mol_type = other RNA

SEQ ID NO: 7422 - RNA, 35 nt, Synthetic Construct; identical to SEQ ID NO: 2615
  source 1..35: mol_type = other RNA

SEQ ID NO: 7423 - RNA, 15 nt, Synthetic Construct
  source 1..15: mol_type = other RNA
tccggatcgtagtct

SEQ ID NO: 7424 - RNA, 15 nt, Synthetic Construct
  source 1..15: mol_type = other RNA
tccggatcgtagtct

SEQ ID NO: 7425 - RNA, 24 nt, Synthetic Construct
  source 1..24: mol_type = other RNA
gggttgtaaaccgcttttgtcagg

SEQ ID NO: 7426 - RNA, 22 nt, Synthetic Construct
  source 1..22: mol_type = other RNA
tacccattgcatatcggagttg

SEQ ID NO: 7427 - RNA, 22 nt, Synthetic Construct
  source 1..22: mol_type = other RNA
tacccattgcatatcggagttg

SEQ ID NO: 7428 - RNA, 15 nt, Synthetic Construct
  source 1..15: mol_type = other RNA
ccgcttttgtcaggg

SEQ ID NO: 7429 - RNA, 15 nt, Synthetic Construct
  source 1..15: mol_type = other RNA
ccgcttttgtcaggg

SEQ ID NO: 7430 - RNA, 21 nt, Synthetic Construct
  source 1..21: mol_type = other RNA
agcagcacgtaaatattggcg

SEQ ID NO: 7431 - RNA, 21 nt, Synthetic Construct
  source 1..21: mol_type = other RNA
agcagcacgtaaatattggcg

SEQ ID NO: 7432 - RNA, 21 nt, Synthetic Construct
  source 1..21: mol_type = other RNA
caacggaatcccaaaagcagc

SEQ ID NO: 7433 - RNA, 24 nt, Synthetic Construct
  source 1..24: mol_type = other RNA
cgaatgttgctcggtgaacccctt

SEQ ID NO: 7434 - RNA, 24 nt, Synthetic Construct
  source 1..24: mol_type = other RNA
cgaatgttgctcggtgaacccctt

SEQ ID NO: 7435 - RNA, 23 nt, Synthetic Construct
  source 1..23: mol_type = other RNA
cgactcttagcggtggatcactc

SEQ ID NO: 7436 - RNA, 23 nt, Synthetic Construct
  source 1..23: mol_type = other RNA
cgactcttagcggtggatcactc

SEQ ID NO: 7437 - RNA, 20 nt, Synthetic Construct
  source 1..20: mol_type = other RNA
gctattgacgaccgtaccgc

SEQ ID NO: 7438 - RNA, 22 nt, Synthetic Construct
  source 1..22: mol_type = other RNA
gtcagtttgtcaaataccccat

SEQ ID NO: 7439 - RNA, 21 nt, Synthetic Construct
  source 1..21: mol_type = other RNA
ccctgtactgagctgccccga

SEQ ID NO: 7440 - RNA, 23 nt, Synthetic Construct
  source 1..23: mol_type = other RNA
tgaggcagtaggttgtgtggttt

SEQ ID NO: 7441 - RNA, 21 nt, Synthetic Construct
  source 1..21: mol_type = other RNA
tgaggtagtagattgcatagt

SEQ ID NO: 7442 - RNA, 21 nt, Synthetic Construct
  source 1..21: mol_type = other RNA
cgaggggcagagagcgagact

SEQ ID NO: 7443 - RNA, 21 nt, Synthetic Construct
  source 1..21: mol_type = other RNA
tctttggttatctagctgtat

SEQ ID NO: 7444 - RNA, 21 nt, Synthetic Construct
  source 1..21: mol_type = other RNA
tctttggttatctagctgtat

SEQ ID NO: 7445 - RNA, 26 nt, Synthetic Construct
  source 1..26: mol_type = other RNA
ccccccactgctaatttgactggctt

SEQ ID NO: 7446 - RNA, 24 nt, Synthetic Construct
  source 1..24: mol_type = other RNA
tgtaaacacccccgactggaagct

SEQ ID NO: 7447 - RNA, 17 nt, Synthetic Construct
  source 1..17: mol_type = other RNA
gggtctgtagctcagtc

SEQ ID NO: 7448 - RNA, 17 nt, Synthetic Construct
  source 1..17: mol_type = other RNA
gggtctgtagctcagtc

SEQ ID NO: 7449 - RNA, 22 nt, Synthetic Construct
  source 1..22: mol_type = other RNA
ngaggtagtagtttgtgctgtt

SEQ ID NO: 7450 - RNA, 22 nt, Synthetic Construct
  source 1..22: mol_type = other RNA
ngaggtagtagtttgtgctgtt

SEQ ID NO: 7451 - RNA, 36 nt, Synthetic Construct; identical to SEQ ID NO: 2248
  source 1..36: mol_type = other RNA

SEQ ID NO: 7452 - RNA, 36 nt, Synthetic Construct; identical to SEQ ID NO: 2248
  source 1..36: mol_type = other RNA

SEQ ID NO: 7453 - RNA, 28 nt, Synthetic Construct
  source 1..28: mol_type = other RNA
cgactcttagcggtggatcactcggctc

SEQ ID NO: 7454 - RNA, 28 nt, Synthetic Construct
  source 1..28: mol_type = other RNA
cgactcttagcggtggatcactcggctc

SEQ ID NO: 7455 - RNA, 32 nt, Synthetic Construct; identical to SEQ ID NO: 3092
  source 1..32: mol_type = other RNA

SEQ ID NO: 7456 - RNA, 29 nt, Synthetic Construct
  source 1..29: mol_type = other RNA
ttacaggggttcgaatcccctaggggacg

SEQ ID NO: 7457 - RNA, 29 nt, Synthetic Construct
  source 1..29: mol_type = other RNA
ttacaggggttcgaatcccctaggggacg

SEQ ID NO: 7458 - RNA, 24 nt, Synthetic Construct
  source 1..24: mol_type = other RNA
tgtaaacacccccgactggaagct

SEQ ID NO: 7459 - RNA, 24 nt, Synthetic Construct
  source 1..24: mol_type = other RNA
tgtaaacacccccgactggaagct

SEQ ID NO: 7460 - RNA, 21 nt, Synthetic Construct
  source 1..21: mol_type = other RNA
ctaatcccagaaacccggtcg

SEQ ID NO: 7461 - RNA, 21 nt, Synthetic Construct
  source 1..21: mol_type = other RNA
ctaatcccagaaacccggtcg

SEQ ID NO: 7462 - RNA, 22 nt, Synthetic Construct
  source 1..22: mol_type = other RNA
ngaggtagtaggttgtgtggtt

SEQ ID NO: 7463 - RNA, 24 nt, Synthetic Construct
  source 1..24: mol_type = other RNA
tgtaaacatccctgactggaagct

SEQ ID NO: 7464 - RNA, 24 nt, Synthetic Construct
  source 1..24: mol_type = other RNA
tgtaaacatccctgactggaagct

SEQ ID NO: 7465 - RNA, 19 nt, Synthetic Construct
  source 1..19: mol_type = other RNA
atctgctggaactgcaact

SEQ ID NO: 7466 - RNA, 19 nt, Synthetic Construct
  source 1..19: mol_type = other RNA
atctgctggaactgcaact

SEQ ID NO: 7467 - RNA, 21 nt, Synthetic Construct
  source 1..21: mol_type = other RNA
tgagatagtaggttgtgtggt

SEQ ID NO: 7468 - RNA, 21 nt, Synthetic Construct
  source 1..21: mol_type = other RNA
tgagatagtaggttgtgtggt

SEQ ID NO: 7469 - RNA, 33 nt, Synthetic Construct
  source 1..33: mol_type = other RNA
gtctacggccataccaccctgaacgcgcccgat

SEQ ID NO: 7470 - RNA, 33 nt, Synthetic Construct; identical to SEQ ID NO: 7469
  source 1..33: mol_type = other RNA

SEQ ID NO: 7471 - RNA, 22 nt, Synthetic Construct
  source 1..22: mol_type = other RNA
ccactgccccaggtgctgctgg

SEQ ID NO: 7472 - RNA, 23 nt, Synthetic Construct
  source 1..23: mol_type = other RNA
cgagagtaggacgttgccaggtt

SEQ ID NO: 7473 - RNA, 23 nt, Synthetic Construct
  source 1..23: mol_type = other RNA
cgagagtaggacgttgccaggtt

SEQ ID NO: 7474 - RNA, 22 nt, Synthetic Construct
  source 1..22: mol_type = other RNA
tatcggaacgtgcccagtcgtg

SEQ ID NO: 7475 - RNA, 22 nt, Synthetic Construct
  source 1..22: mol_type = other RNA
tatcggaacgtgcccagtcgtg

SEQ ID NO: 7476 - RNA, 21 nt, Synthetic Construct
  source 1..21: mol_type = other RNA
tggaatgtaaagaagtatgta

SEQ ID NO: 7477 - RNA, 21 nt, Synthetic Construct
  source 1..21: mol_type = other RNA
tggaatgtaaagaagtatgta

SEQ ID NO: 7478 - RNA, 21 nt, Synthetic Construct
  source 1..21: mol_type = other RNA
tggagtgtgacagtggtgttt

SEQ ID NO: 7479 - RNA, 21 nt, Synthetic Construct
  source 1..21: mol_type = other RNA
tggagtgtgacagtggtgttt

SEQ ID NO: 7480 - RNA, 18 nt, Synthetic Construct
  source 1..18: mol_type = other RNA
aagaccctgttgagcttg

SEQ ID NO: 7481 - RNA, 18 nt, Synthetic Construct
  source 1..18: mol_type = other RNA
aagaccctgttgagcttg

SEQ ID NO: 7482 - RNA, 18 nt, Synthetic Construct
  source 1..18: mol_type = other RNA
agggaacgtgagctgggt

SEQ ID NO: 7483 - RNA, 20 nt, Synthetic Construct
  source 1..20: mol_type = other RNA
tgaggtagtgggttgtatag

SEQ ID NO: 7484 - RNA, 20 nt, Synthetic Construct
  source 1..20: mol_type = other RNA
tgaggtagtgggttgtatag

SEQ ID NO: 7485 - RNA, 21 nt, Synthetic Construct
  source 1..21: mol_type = other RNA
cagcattgtacagggctatga

SEQ ID NO: 7486 - RNA, 21 nt, Synthetic Construct
  source 1..21: mol_type = other RNA
cagcattgtacagggctatga

SEQ ID NO: 7487 - RNA, 34 nt, Synthetic Construct; identical to SEQ ID NO: 2529
  source 1..34: mol_type = other RNA

SEQ ID NO: 7488 - RNA, 23 nt, Synthetic Construct
  source 1..23: mol_type = other RNA
tcctgtactgggctgccccgagt

SEQ ID NO: 7489 - RNA, 23 nt, Synthetic Construct
  source 1..23: mol_type = other RNA
ttggtccccttcaaccagctgtt

SEQ ID NO: 7490 - RNA, 23 nt, Synthetic Construct
  source 1..23: mol_type = other RNA
ttggtccccttcaaccagctgtt

SEQ ID NO: 7491 - RNA, 22 nt, Synthetic Construct
  source 1..22: mol_type = other RNA
tcctgtactgaactgccccgag

SEQ ID NO: 7492 - RNA, 22 nt, Synthetic Construct
  source 1..22: mol_type = other RNA
tcctgtactgaactgccccgag

SEQ ID NO: 7493 - RNA, 22 nt, Synthetic Construct
  source 1..22: mol_type = other RNA
tagcagcacgtaaacattggcg

SEQ ID NO: 7494 - RNA, 22 nt, Synthetic Construct
  source 1..22: mol_type = other RNA
tagcagcacgtaaacattggcg

SEQ ID NO: 7495 - RNA, 18 nt, Synthetic Construct
  source 1..18: mol_type = other RNA
catgcaagtcgaacggta

SEQ ID NO: 7496 - RNA, 18 nt, Synthetic Construct
  source 1..18: mol_type = other RNA
catgcaagtcgaacggta

SEQ ID NO: 7497 - RNA, 22 nt, Synthetic Construct
  source 1..22: mol_type = other RNA
tagcagcacgtaaatgttggcg

SEQ ID NO: 7498 - RNA, 22 nt, Synthetic Construct
  source 1..22: mol_type = other RNA
tagcagcacgtaaatgttggcg

SEQ ID NO: 7499 - RNA, 19 nt, Synthetic Construct
  source 1..19: mol_type = other RNA
ccagtaaacggcggccgta

SEQ ID NO: 7500 - RNA, 19 nt, Synthetic Construct
  source 1..19: mol_type = other RNA
ccagtaaacggcggccgta

SEQ ID NO: 7501 - RNA, 19 nt, Synthetic Construct
  source 1..19: mol_type = other RNA
agcagcattgtacagggct

SEQ ID NO: 7502 - RNA, 19 nt, Synthetic Construct
  source 1..19: mol_type = other RNA
agcagcattgtacagggct

SEQ ID NO: 7503 - RNA, 37 nt, Synthetic Construct
  source 1..37: mol_type = other RNA
cgactcttagcggtggatcactcggctcgtgcgtcga

SEQ ID NO: 7504 - RNA, 37 nt, Synthetic Construct; identical to SEQ ID NO: 7503
  source 1..37: mol_type = other RNA

SEQ ID NO: 7505 - RNA, 32 nt, Synthetic Construct; identical to SEQ ID NO: 2296
  source 1..32: mol_type = other RNA

SEQ ID NO: 7506 - RNA, 32 nt, Synthetic Construct; identical to SEQ ID NO: 2296
  source 1..32: mol_type = other RNA

SEQ ID NO: 7507 - RNA, 15 nt, Synthetic Construct
  source 1..15: mol_type = other RNA
ggtgaaagcggggga

SEQ ID NO: 7508 - RNA, 15 nt, Synthetic Construct
  source 1..15: mol_type = other RNA
ggtgaaagcggggga

SEQ ID NO: 7509 - RNA, 17 nt, Synthetic Construct
  source 1..17: mol_type = other RNA
ccagtaaacggcggccg

SEQ ID NO: 7510 - RNA, 32 nt, Synthetic Construct; identical to SEQ ID NO: 2850
  source 1..32: mol_type = other RNA

SEQ ID NO: 7511 - RNA, 32 nt, Synthetic Construct; identical to SEQ ID NO: 2850
  source 1..32: mol_type = other RNA

SEQ ID NO: 7512 - RNA, 36 nt, Synthetic Construct; identical to SEQ ID NO: 2366
  source 1..36: mol_type = other RNA

SEQ ID NO: 7513 - RNA, 36 nt, Synthetic Construct; identical to SEQ ID NO: 2366
  source 1..36: mol_type = other RNA

SEQ ID NO: 7514 - RNA, 22 nt, Synthetic Construct
  source 1..22: mol_type = other RNA
tggaatgtagagaagtatgtat

SEQ ID NO: 7515 - RNA, 22 nt, Synthetic Construct
  source 1..22: mol_type = other RNA
tggaatgtagagaagtatgtat

SEQ ID NO: 7516 - RNA, 35 nt, Synthetic Construct; identical to SEQ ID NO: 2452
  source 1..35: mol_type = other RNA

SEQ ID NO: 7517 - RNA, 22 nt, Synthetic Construct
  source 1..22: mol_type = other RNA
tggcagtgtcttagctggttgt

SEQ ID NO: 7518 - RNA, 21 nt, Synthetic Construct
  source 1..21: mol_type = other RNA
gctttgatccggagatttccg

SEQ ID NO: 7519 - RNA, 22 nt, Synthetic Construct
  source 1..22: mol_type = other RNA
tgaggtagtagtttgagctgtt

SEQ ID NO: 7520 - RNA, 22 nt, Synthetic Construct
  source 1..22: mol_type = other RNA
cgactcttagcggtggatcact

SEQ ID NO: 7521 - RNA, 22 nt, Synthetic Construct
  source 1..22: mol_type = other RNA
cgactcttagcggtggatcact

SEQ ID NO: 7522 - RNA, 22 nt, Synthetic Construct
  source 1..22: mol_type = other RNA
tgaggtagtagtttgtactgtt

SEQ ID NO: 7523 - RNA, 17 nt, Synthetic Construct
  source 1..17: mol_type = other RNA
tcccctggacctgtact

SEQ ID NO: 7524 - RNA, 17 nt, Synthetic Construct
  source 1..17: mol_type = other RNA
tcccctggacctgtact

SEQ ID NO: 7525 - RNA, 24 nt, Synthetic Construct
  source 1..24: mol_type = other RNA
aacattcattgctgtcggtgggtt

SEQ ID NO: 7526 - RNA, 22 nt, Synthetic Construct
  source 1..22: mol_type = other RNA
tgttgcacttgtcccggcctgt

SEQ ID NO: 7527 - RNA, 22 nt, Synthetic Construct
  source 1..22: mol_type = other RNA
tgttgcacttgtcccggcctgt

SEQ ID NO: 7528 - RNA, 25 nt, Synthetic Construct
  source 1..25: mol_type = other RNA
tgagaactgaattccataggctgtt

SEQ ID NO: 7529 - RNA, 25 nt, Synthetic Construct
  source 1..25: mol_type = other RNA
tgagaactgaattccataggctgtt

SEQ ID NO: 7530 - RNA, 22 nt, Synthetic Construct
  source 1..22: mol_type = other RNA
tgaggtagtaggttgtggggtt

SEQ ID NO: 7531 - RNA, 22 nt, Synthetic Construct
  source 1..22: mol_type = other RNA
cattgcgcttgtctcggtctga

SEQ ID NO: 7532 - RNA, 22 nt, Synthetic Construct
  source 1..22: mol_type = other RNA
cattgcgcttgtctcggtctga

SEQ ID NO: 7533 - RNA, 22 nt, Synthetic Construct
  source 1..22: mol_type = other RNA
tcctgtactgagctgccccaag

SEQ ID NO: 7534 - RNA, 22 nt, Synthetic Construct
  source 1..22: mol_type = other RNA
tcctgtactgagctgccccaag

SEQ ID NO: 7535 - RNA, 31 nt, Synthetic Construct; identical to SEQ ID NO: 2507
  source 1..31: mol_type = other RNA

SEQ ID NO: 7536 - RNA, 23 nt, Synthetic Construct
  source 1..23: mol_type = other RNA
agctacattgtctgctgggttcc

SEQ ID NO: 7537 - RNA, 20 nt, Synthetic Construct
  source 1..20: mol_type = other RNA
tgaggtagtaggttgtgtag

SEQ ID NO: 7538 - RNA, 44 nt, Synthetic Construct; identical to SEQ ID NO: 5536
  source 1..44: mol_type = other RNA

SEQ ID NO: 7539 - RNA, 44 nt, Synthetic Construct; identical to SEQ ID NO: 5536
  source 1..44: mol_type = other RNA

SEQ ID NO: 7540 - RNA, 34 nt, Synthetic Construct; identical to SEQ ID NO: 2291
  source 1..34: mol_type = other RNA

SEQ ID NO: 7541 - RNA, 23 nt, Synthetic Construct
  source 1..23: mol_type = other RNA
tggtaatacgacgtacttaatgt

SEQ ID NO: 7542 - RNA, 23 nt, Synthetic Construct
  source 1..23: mol_type = other RNA
tggtaatacgacgtacttaatgt

SEQ ID NO: 7543 - RNA, 33 nt, Synthetic Construct; identical to SEQ ID NO: 2253
  source 1..33: mol_type = other RNA

SEQ ID NO: 7544 - RNA, 23 nt, Synthetic Construct
  source 1..23: mol_type = other RNA
tggtaatacgacatacttagtgt

SEQ ID NO: 7545 - RNA, 23 nt, Synthetic Construct
  source 1..23: mol_type = other RNA
tggtaatacgacatacttagtgt

SEQ ID NO: 7546 - RNA, 23 nt, Synthetic Construct
  source 1..23: mol_type = other RNA
tccccttggggttgtaggaccac

SEQ ID NO: 7547 - RNA, 23 nt, Synthetic Construct
  source 1..23: mol_type = other RNA
tccccttggggttgtaggaccac

SEQ ID NO: 7548 - RNA, 22 nt, Synthetic Construct
  source 1..22: mol_type = other RNA
tgtggtagtaggttgtatagtt

SEQ ID NO: 7549 - RNA, 20 nt, Synthetic Construct
  source 1..20: mol_type = other RNA
attgcacttgtcccggcctg

SEQ ID NO: 7550 - RNA, 20 nt, Synthetic Construct
  source 1..20: mol_type = other RNA
attgcacttgtcccggcctg

SEQ ID NO: 7551 - RNA, 16 nt, Synthetic Construct
  source 1..16: mol_type = other RNA
gtctacagccatacca

SEQ ID NO: 7552 - RNA, 16 nt, Synthetic Construct
  source 1..16: mol_type = other RNA
gtctacagccatacca

SEQ ID NO: 7553 - RNA, 15 nt, Synthetic Construct
  source 1..15: mol_type = other RNA
gttgaccgcctgggg

SEQ ID NO: 7554 - RNA, 15 nt, Synthetic Construct
  source 1..15: mol_type = other RNA
gttgaccgcctgggg

SEQ ID NO: 7555 - RNA, 16 nt, Synthetic Construct
  source 1..16: mol_type = other RNA
gtccacggccatacca

SEQ ID NO: 7556 - RNA, 16 nt, Synthetic Construct
  source 1..16: mol_type = other RNA
gtccacggccatacca

SEQ ID NO: 7557 - RNA, 22 nt, Synthetic Construct
  source 1..22: mol_type = other RNA
tgaggtagtagtttgtgctgtt

SEQ ID NO: 7558 - RNA, 31 nt, Synthetic Construct; identical to SEQ ID NO: 2293
  source 1..31: mol_type = other RNA

SEQ ID NO: 7559 - RNA, 31 nt, Synthetic Construct; identical to SEQ ID NO: 2293
  source 1..31: mol_type = other RNA

SEQ ID NO: 7560 - RNA, 36 nt, Synthetic Construct; identical to SEQ ID NO: 2444
  source 1..36: mol_type = other RNA

SEQ ID NO: 7561 - RNA, 23 nt, Synthetic Construct
  source 1..23: mol_type = other RNA
tggtaaaacgacgtacttagtgt

SEQ ID NO: 7562 - RNA, 23 nt, Synthetic Construct
  source 1..23: mol_type = other RNA
tggtaaaacgacgtacttagtgt

SEQ ID NO: 7563 - RNA, 30 nt, Synthetic Construct; identical to SEQ ID NO: 751
  source 1..30: mol_type = other RNA

SEQ ID NO: 7564 - RNA, 30 nt, Synthetic Construct; identical to SEQ ID NO: 751
  source 1..30: mol_type = other RNA

SEQ ID NO: 7565 - RNA, 22 nt, Synthetic Construct
  source 1..22: mol_type = other RNA
tcctgtactgagttgccccgag

SEQ ID NO: 7566 - RNA, 22 nt, Synthetic Construct
  source 1..22: mol_type = other RNA
tcctgtactgagttgccccgag

SEQ ID NO: 7567 - RNA, 20 nt, Synthetic Construct
  source 1..20: mol_type = other RNA
ggtcccaagggtatggctgt

SEQ ID NO: 7568 - RNA, 20 nt, Synthetic Construct
  source 1..20: mol_type = other RNA
tgaggtagtaggttgtgtga

SEQ ID NO: 7569 - RNA, 20 nt, Synthetic Construct
  source 1..20: mol_type = other RNA
tgaggtagtaggttgtgtga

SEQ ID NO: 7570 - RNA, 22 nt, Synthetic Construct
  source 1..22: mol_type = other RNA
tgaggtagtggattgtatagtt

SEQ ID NO: 7571 - RNA, 21 nt, Synthetic Construct
  source 1..21: mol_type = other RNA
gcagatcttggtggtagtagc

SEQ ID NO: 7572 - RNA, 21 nt, Synthetic Construct
  source 1..21: mol_type = other RNA
gcagatcttggtggtagtagc

SEQ ID NO: 7573 - RNA, 21 nt, Synthetic Construct
  source 1..21: mol_type = other RNA
tcctgcactgagctgccccga

SEQ ID NO: 7574 - RNA, 22 nt, Synthetic Construct
  source 1..22: mol_type = other RNA
cggaatgtaaagaagtatgtat

SEQ ID NO: 7575 - RNA, 22 nt, Synthetic Construct
  source 1..22: mol_type = other RNA
cggaatgtaaagaagtatgtat

SEQ ID NO: 7576 - RNA, 33 nt, Synthetic Construct; identical to SEQ ID NO: 2126
  source 1..33: mol_type = other RNA

SEQ ID NO: 7577 - RNA, 33 nt, Synthetic Construct; identical to SEQ ID NO: 2126
  source 1..33: mol_type = other RNA

SEQ ID NO: 7578 - RNA, 21 nt, Synthetic Construct
  source 1..21: mol_type = other RNA
tagcaccatctgaaatcggta

SEQ ID NO: 7579 - RNA, 16 nt, Synthetic Construct
  source 1..16: mol_type = other RNA
tgttcggaagattttc

SEQ ID NO: 7580 - RNA, 16 nt, Synthetic Construct
  source 1..16: mol_type = other RNA
tgttcggaagattttc

SEQ ID NO: 7581 - RNA, 20 nt, Synthetic Construct
  source 1..20: mol_type = other RNA
tgaggtagtaagttgtattg

SEQ ID NO: 7582 - RNA, 20 nt, Synthetic Construct
  source 1..20: mol_type = other RNA
tgaggtagtaagttgtattg

SEQ ID NO: 7583 - RNA, 27 nt, Synthetic Construct
  source 1..27: mol_type = other RNA
ncccccactgctaaatttgactggctt

SEQ ID NO: 7584 - RNA, 27 nt, Synthetic Construct
  source 1..27: mol_type = other RNA
ccccccactgctagatttgactggctt

SEQ ID NO: 7585 - RNA, 32 nt, Synthetic Construct; identical to SEQ ID NO: 2052
  source 1..32: mol_type = other RNA

SEQ ID NO: 7586 - RNA, 22 nt, Synthetic Construct
  source 1..22: mol_type = other RNA
tcgtaccatgagtaataatgcg

SEQ ID NO: 7587 - RNA, 23 nt, Synthetic Construct
  source 1..23: mol_type = other RNA
tctcccaacccttgtaccagtga

SEQ ID NO: 7588 - RNA, 23 nt, Synthetic Construct
  source 1..23: mol_type = other RNA
tctcccaacccttgtaccagtga

SEQ ID NO: 7589 - RNA, 22 nt, Synthetic Construct
  source 1..22: mol_type = other RNA
tggagtgtaaagaagtatgtat

SEQ ID NO: 7590 - RNA, 22 nt, Synthetic Construct
  source 1..22: mol_type = other RNA
tggagtgtaaagaagtatgtat

SEQ ID NO: 7591 - RNA, 21 nt, Synthetic Construct
  source 1..21: mol_type = other RNA
cgaggtagtagattgtatagt

SEQ ID NO: 7592 - RNA, 34 nt, Synthetic Construct; identical to SEQ ID NO: 749
  source 1..34: mol_type = other RNA

SEQ ID NO: 7593 - RNA, 34 nt, Synthetic Construct; identical to SEQ ID NO: 749
  source 1..34: mol_type = other RNA

SEQ ID NO: 7594 - RNA, 17 nt, Synthetic Construct
  source 1..17: mol_type = other RNA
acagtcaggatgttggc

SEQ ID NO: 7595 - RNA, 22 nt, Synthetic Construct
  source 1..22: mol_type = other RNA
tggaatgtaaagaagcatgtat

SEQ ID NO: 7596 - RNA, 17 nt, Synthetic Construct
  source 1..17: mol_type = other RNA
cgcgacctcagatcaga

SEQ ID NO: 7597 - RNA, 17 nt, Synthetic Construct
  source 1..17: mol_type = other RNA
cgcgacctcagatcaga

SEQ ID NO: 7598 - RNA, 22 nt, Synthetic Construct
  source 1..22: mol_type = other RNA
tgaggtagtagtttgtgctgtc

SEQ ID NO: 7599 - RNA, 21 nt, Synthetic Construct
  source 1..21: mol_type = other RNA
tgaggtagtaggttgtgaggt

SEQ ID NO: 7600 - RNA, 21 nt, Synthetic Construct
  source 1..21: mol_type = other RNA
tgaggtagtaggttgtgaggt

SEQ ID NO: 7601 - RNA, 22 nt, Synthetic Construct
  source 1..22: mol_type = other RNA
tcctgtacagagctgccccgag

SEQ ID NO: 7602 - RNA, 22 nt, Synthetic Construct
  source 1..22: mol_type = other RNA
tcctgtacagagctgccccgag

SEQ ID NO: 7603 - RNA, 30 nt, Synthetic Construct; identical to SEQ ID NO: 1958
  source 1..30: mol_type = other RNA

SEQ ID NO: 7604 - RNA, 23 nt, Synthetic Construct
  source 1..23: mol_type = other RNA
tggtaatacgtcgtacttagtgt

SEQ ID NO: 7605 - RNA, 23 nt, Synthetic Construct
  source 1..23: mol_type = other RNA
tggtaatacgacgcacttagtgt

SEQ ID NO: 7606 - RNA, 23 nt, Synthetic Construct
  source 1..23: mol_type = other RNA
tggtaatacgacgcacttagtgt

SEQ ID NO: 7607 - RNA, 22 nt, Synthetic Construct
  source 1..22: mol_type = other RNA
ccggtcccaagggtatggctgt

SEQ ID NO: 7608 - RNA, 22 nt, Synthetic Construct
  source 1..22: mol_type = other RNA
ccggtcccaagggtatggctgt

SEQ ID NO: 7609 - RNA, 18 nt, Synthetic Construct
  source 1..18: mol_type = other RNA
agtgacgcgcatgaatgg

SEQ ID NO: 7610 - RNA, 18 nt, Synthetic Construct
  source 1..18: mol_type = other RNA
agtgacgcgcatgaatgg

SEQ ID NO: 7611 - RNA, 29 nt, Synthetic Construct
  source 1..29: mol_type = other RNA
caacgctagacgaactgcatggaaaggca

SEQ ID NO: 7612 - RNA, 29 nt, Synthetic Construct
  source 1..29: mol_type = other RNA
caacgctagacgaactgcatggaaaggca

SEQ ID NO: 7613 - RNA, 22 nt, Synthetic Construct
  source 1..22: mol_type = other RNA
tattgcgcttgtcccggcctgt

SEQ ID NO: 7614 - RNA, 22 nt, Synthetic Construct
  source 1..22: mol_type = other RNA
tattgcgcttgtcccggcctgt

SEQ ID NO: 7615 - RNA, 21 nt, Synthetic Construct
  source 1..21: mol_type = other RNA
tacctggttgatcctgccagt

SEQ ID NO: 7616 - RNA, 21 nt, Synthetic Construct
  source 1..21: mol_type = other RNA
tacctggttgatcctgccagt

SEQ ID NO: 7617 - RNA, 23 nt, Synthetic Construct
  source 1..23: mol_type = other RNA
tgaggtagtaggttgtgtggtct

SEQ ID NO: 7618 - RNA, 17 nt, Synthetic Construct
  source 1..17: mol_type = other RNA
agcggtggatgatgtgg

SEQ ID NO: 7619 - RNA, 22 nt, Synthetic Construct
  source 1..22: mol_type = other RNA
tgaggtagtagttcgtgctgtt

SEQ ID NO: 7620 - RNA, 23 nt, Synthetic Construct
  source 1..23: mol_type = other RNA
tggcaatacgacgtacttagtgt

SEQ ID NO: 7621 - RNA, 33 nt, Synthetic Construct; identical to SEQ ID NO: 3082
  source 1..33: mol_type = other RNA

SEQ ID NO: 7622 - RNA, 17 nt, Synthetic Construct
  source 1..17: mol_type = other RNA
cgatctgtagctggtct

SEQ ID NO: 7623 - RNA, 17 nt, Synthetic Construct
  source 1..17: mol_type = other RNA
cgatctgtagctggtct

SEQ ID NO: 7624 - RNA, 23 nt, Synthetic Construct
  source 1..23: mol_type = other RNA
tcctgtactgagctgccctgaga

SEQ ID NO: 7625 - RNA, 23 nt, Synthetic Construct
  source 1..23: mol_type = other RNA
tcctgtactgagctgccctgaga

SEQ ID NO: 7626 - RNA, 15 nt, Synthetic Construct
  source 1..15: mol_type = other RNA
tggccgtcgtcagct

SEQ ID NO: 7627 - RNA, 22 nt, Synthetic Construct
  source 1..22: mol_type = other RNA
ggcagggttcgtgactggggtg

SEQ ID NO: 7628 - RNA, 22 nt, Synthetic Construct
  source 1..22: mol_type = other RNA
ggcagggttcgtgactggggtg

SEQ ID NO: 7629 - RNA, 22 nt, Synthetic Construct
  source 1..22: mol_type = other RNA
tggaatgcaaagaagtatgtat

SEQ ID NO: 7630 - RNA, 22 nt, Synthetic Construct
  source 1..22: mol_type = other RNA
cgaggtagtagattgtatagtt

SEQ ID NO: 7631 - RNA, 31 nt, Synthetic Construct; identical to SEQ ID NO: 2215
  source 1..31: mol_type = other RNA

SEQ ID NO: 7632 - RNA, 31 nt, Synthetic Construct; identical to SEQ ID NO: 2215
  source 1..31: mol_type = other RNA

SEQ ID NO: 7633 - RNA, 22 nt, Synthetic Construct
  source 1..22: mol_type = other RNA
ttgtaccgtgagtaataatgcg

SEQ ID NO: 7634 - RNA, 23 nt, Synthetic Construct
  source 1..23: mol_type = other RNA
tcctgtactgggctgccccgagt

SEQ ID NO: 7635 - RNA, 23 nt, Synthetic Construct
  source 1..23: mol_type = other RNA
tcctgtactgggctgccccgagt

SEQ ID NO: 7636 - RNA, 21 nt, Synthetic Construct
  source 1..21: mol_type = other RNA
tgaggggcagagagcgaggct

SEQ ID NO: 7637 - RNA, 16 nt, Synthetic Construct
  source 1..16: mol_type = other RNA
gatctgtagctggtct

SEQ ID NO: 7638 - RNA, 16 nt, Synthetic Construct
  source 1..16: mol_type = other RNA
gatctgtagctggtct

SEQ ID NO: 7639 - RNA, 23 nt, Synthetic Construct
  source 1..23: mol_type = other RNA
tgaggcagtaggttgtgtggttt

SEQ ID NO: 7640 - RNA, 22 nt, Synthetic Construct
  source 1..22: mol_type = other RNA
tagcagcacgtaaatactggcg

SEQ ID NO: 7641 - RNA, 22 nt, Synthetic Construct
  source 1..22: mol_type = other RNA
tagcagcacgtaaatactggcg

SEQ ID NO: 7642 - RNA, 23 nt, Synthetic Construct
  source 1..23: mol_type = other RNA
tcctgtactgggctgccccgaga

SEQ ID NO: 7643 - RNA, 22 nt, Synthetic Construct
  source 1..22: mol_type = other RNA
tatagcacttgtcccggcctgt

SEQ ID NO: 7644 - RNA, 18 nt, Synthetic Construct
  source 1..18: mol_type = other RNA
ggccgtcgtcagctcgtg

SEQ ID NO: 7645 - RNA, 18 nt, Synthetic Construct
  source 1..18: mol_type = other RNA
ggccgtcgtcagctcgtg

SEQ ID NO: 7646 - RNA, 24 nt, Synthetic Construct
  source 1..24: mol_type = other RNA
tcggatccgtctgagcttggcttt

SEQ ID NO: 7647 - RNA, 24 nt, Synthetic Construct
  source 1..24: mol_type = other RNA
tcggatccgtctgagcttggcttt

SEQ ID NO: 7648 - RNA, 17 nt, Synthetic Construct
  source 1..17: mol_type = other RNA
cgtgagctgggtttaga

SEQ ID NO: 7649 - RNA, 17 nt, Synthetic Construct
  source 1..17: mol_type = other RNA
cgtgagctgggtttaga

SEQ ID NO: 7650 - RNA, 17 nt, Synthetic Construct
  source 1..17: mol_type = other RNA
cgtgagctgggtttaga

SEQ ID NO: 7651 - RNA, 17 nt, Synthetic Construct
  source 1..17: mol_type = other RNA
cgtgagctgggtttaga

SEQ ID NO: 7652 - RNA, 23 nt, Synthetic Construct
  source 1..23: mol_type = other RNA
tggtaatacggcgtacttagtgt

SEQ ID NO: 7653 - RNA, 23 nt, Synthetic Construct
  source 1..23: mol_type = other RNA
tggtaatacggcgtacttagtgt

SEQ ID NO: 7654 - RNA, 21 nt, Synthetic Construct
  source 1..21: mol_type = other RNA
tgtcagtttgtcaaatacccc

SEQ ID NO: 7655 - RNA, 21 nt, Synthetic Construct
  source 1..21: mol_type = other RNA
tgtcagtttgtcaaatacccc

SEQ ID NO: 7656 - RNA, 22 nt, Synthetic Construct
  source 1..22: mol_type = other RNA
tgaggtagtggtttgtgctgtt

SEQ ID NO: 7657 - RNA, 17 nt, Synthetic Construct
  source 1..17: mol_type = other RNA
agacagcaggacggtgg

SEQ ID NO: 7658 - RNA, 17 nt, Synthetic Construct
  source 1..17: mol_type = other RNA
agacagcaggacggtgg

SEQ ID NO: 7659 - RNA, 21 nt, Synthetic Construct
  source 1..21: mol_type = other RNA
tgaggtagtagtttgtgctgc

SEQ ID NO: 7660 - RNA, 21 nt, Synthetic Construct
  source 1..21: mol_type = other RNA
tgaggtagtagtttgtgctgc

SEQ ID NO: 7661 - RNA, 33 nt, Synthetic Construct; identical to SEQ ID NO: 2638
  source 1..33: mol_type = other RNA

SEQ ID NO: 7662 - RNA, 33 nt, Synthetic Construct; identical to SEQ ID NO: 2638
  source 1..33: mol_type = other RNA

SEQ ID NO: 7663 - RNA, 34 nt, Synthetic Construct; identical to SEQ ID NO: 2291
  source 1..34: mol_type = other RNA

SEQ ID NO: 7664 - RNA, 22 nt, Synthetic Construct
  source 1..22: mol_type = other RNA
tgaggtagtaggttgtatggtt

SEQ ID NO: 7665 - RNA, 22 nt, Synthetic Construct
  source 1..22: mol_type = other RNA
tgaggtagtaggttgtatggtt

SEQ ID NO: 7666 - RNA, 22 nt, Synthetic Construct
  source 1..22: mol_type = other RNA
tgaggcagtagtttgtgctgtt

SEQ ID NO: 7667 - RNA, 35 nt, Synthetic Construct; identical to SEQ ID NO: 2069
  source 1..35: mol_type = other RNA

SEQ ID NO: 7668 - RNA, 16 nt, Synthetic Construct
  source 1..16: mol_type = other RNA
gtcaacggccatacca

SEQ ID NO: 7669 - RNA, 16 nt, Synthetic Construct
  source 1..16: mol_type = other RNA
gtcaacggccatacca

SEQ ID NO: 7670 - RNA, 25 nt, Synthetic Construct
  source 1..25: mol_type = other RNA
ttgaggatatgagatcgagacgacg

SEQ ID NO: 7671 - RNA, 25 nt, Synthetic Construct
  source 1..25: mol_type = other RNA
ttgaggatatgagatcgagacgacg

SEQ ID NO: 7672 - RNA, 22 nt, Synthetic Construct
  source 1..22: mol_type = other RNA
tagcagcacgtgaatattggcg

SEQ ID NO: 7673 - RNA, 22 nt, Synthetic Construct
  source 1..22: mol_type = other RNA
tagcagcacgtgaatattggcg

SEQ ID NO: 7674 - RNA, 22 nt, Synthetic Construct
  source 1..22: mol_type = other RNA
tcgtaccgtgagtgataatgcg

SEQ ID NO: 7675 - RNA, 16 nt, Synthetic Construct
  source 1..16: mol_type = other RNA
gtctgcggccatacca

SEQ ID NO: 7676 - RNA, 16 nt, Synthetic Construct
  source 1..16: mol_type = other RNA
gtctgcggccatacca

SEQ ID NO: 7677 - RNA, 23 nt, Synthetic Construct
  source 1..23: mol_type = other RNA
tcctgtactgagccgccccgaga

SEQ ID NO: 7678 - RNA, 21 nt, Synthetic Construct
  source 1..21: mol_type = other RNA
actcggcgtggcgtcggtcgt

SEQ ID NO: 7679 - RNA, 21 nt, Synthetic Construct
  source 1..21: mol_type = other RNA
actcggcgtggcgtcggtcgt

SEQ ID NO: 7680 - RNA, 16 nt, Synthetic Construct
  source 1..16: mol_type = other RNA
gcggctgtagctcagt

SEQ ID NO: 7681 - RNA, 17 nt, Synthetic Construct
  source 1..17: mol_type = other RNA
tggccgtcgtcagctcg

SEQ ID NO: 7682 - RNA, 17 nt, Synthetic Construct
  source 1..17: mol_type = other RNA
tggccgtcgtcagctcg

SEQ ID NO: 7683 - RNA, 20 nt, Synthetic Construct
  source 1..20: mol_type = other RNA
gcatggccgttcttagttgg

SEQ ID NO: 7684 - RNA, 22 nt, Synthetic Construct
  source 1..22: mol_type = other RNA
ngaggtagtaggttgtatagtt

SEQ ID NO: 7685 - RNA, 22 nt, Synthetic Construct
  source 1..22: mol_type = other RNA
ngaggtagtaggttgtatagtt

SEQ ID NO: 7686 - RNA, 22 nt, Synthetic Construct
  source 1..22: mol_type = other RNA
tgagatgaagcactgtagctct

SEQ ID NO: 7687 - RNA, 23 nt, Synthetic Construct
  source 1..23: mol_type = other RNA
caaagtgccgttcgtgcaggtag

SEQ ID NO: 7688 - RNA, 23 nt, Synthetic Construct
  source 1..23: mol_type = other RNA
caaagtgccgttcgtgcaggtag

SEQ ID NO: 7689 - RNA, 26 nt, Synthetic Construct
  source 1..26: mol_type = other RNA
tgtcggctcatctcatcctggggctg

SEQ ID NO: 7690 - RNA, 26 nt, Synthetic Construct
  source 1..26: mol_type = other RNA
tgtcggctcatctcatcctggggctg

SEQ ID NO: 7691 - RNA, 25 nt, Synthetic Construct
  source 1..25: mol_type = other RNA
ttgaggatatgagatcgagacggca

SEQ ID NO: 7692 - RNA, 25 nt, Synthetic Construct
  source 1..25: mol_type = other RNA
ttgaggatatgagatcgagacggca

SEQ ID NO: 7693 - RNA, 22 nt, Synthetic Construct
  source 1..22: mol_type = other RNA
tatagcacttgtcccggcctgt

SEQ ID NO: 7694 - RNA, 23 nt, Synthetic Construct
  source 1..23: mol_type = other RNA
naaagtgctgttcgtgcaggtag

SEQ ID NO: 7695 - RNA, 17 nt, Synthetic Construct
  source 1..17: mol_type = other RNA
accggaggaaggtgggg

SEQ ID NO: 7696 - RNA, 24 nt, Synthetic Construct
  source 1..24: mol_type = other RNA
tagcagcacgtaaatattggcgtt

SEQ ID NO: 7697 - RNA, 24 nt, Synthetic Construct
  source 1..24: mol_type = other RNA
tagcagcacgtaaatattggcgtt

SEQ ID NO: 7698 - RNA, 15 nt, Synthetic Construct
  source 1..15: mol_type = other RNA
accggaggaaggtgg

SEQ ID NO: 7699 - RNA, 29 nt, Synthetic Construct
  source 1..29: mol_type = other RNA
tgaaggtgggttgtgaagcctgctggagg

SEQ ID NO: 7700 - RNA, 29 nt, Synthetic Construct
  source 1..29: mol_type = other RNA
tgaaggtgggttgtgaagcctgctggagg

SEQ ID NO: 7701 - RNA, 22 nt, Synthetic Construct
  source 1..22: mol_type = other RNA
gtcagtttgtcaaataccccaa

SEQ ID NO: 7702 - RNA, 22 nt, Synthetic Construct
  source 1..22: mol_type = other RNA
gtcagtttgtcaaataccccaa

SEQ ID NO: 7703 - RNA, 21 nt, Synthetic Construct
  source 1..21: mol_type = other RNA
atcggaacgtgcccagtcgtg

SEQ ID NO: 7704 - RNA, 21 nt, Synthetic Construct
  source 1..21: mol_type = other RNA
atcggaacgtgcccagtcgtg

SEQ ID NO: 7705 - RNA, 32 nt, Synthetic Construct; identical to SEQ ID NO: 2052
  source 1..32: mol_type = other RNA

SEQ ID NO: 7706 - RNA, 32 nt, Synthetic Construct; identical to SEQ ID NO: 2052
  source 1..32: mol_type = other RNA

SEQ ID NO: 7707 - RNA, 23 nt, Synthetic Construct
  source 1..23: mol_type = other RNA
tggtaatacgacgtacttagtgc

SEQ ID NO: 7708 - RNA, 20 nt, Synthetic Construct
  source 1..20: mol_type = other RNA
ctgacctatgaattgacagc

SEQ ID NO: 7709 - RNA, 22 nt, Synthetic Construct
  source 1..22: mol_type = other RNA
tattgcgcttgtcccggcctgt

SEQ ID NO: 7710 - RNA, 36 nt, Synthetic Construct; identical to SEQ ID NO: 2506
  source 1..36: mol_type = other RNA

SEQ ID NO: 7711 - RNA, 36 nt, Synthetic Construct; identical to SEQ ID NO: 2506
  source 1..36: mol_type = other RNA

SEQ ID NO: 7712 - RNA, 22 nt, Synthetic Construct
  source 1..22: mol_type = other RNA
tgaggtggtaggttgtgtggtt

SEQ ID NO: 7713 - RNA, 25 nt, Synthetic Construct
  source 1..25: mol_type = other RNA
gcgccgctggtgtagtggtatcatg

SEQ ID NO: 7714 - RNA, 25 nt, Synthetic Construct
  source 1..25: mol_type = other RNA
gcgccgctggtgtagtggtatcatg

SEQ ID NO: 7715 - RNA, 23 nt, Synthetic Construct
  source 1..23: mol_type = other RNA
attctaatttctccacgtctttg

SEQ ID NO: 7716 - RNA, 23 nt, Synthetic Construct
  source 1..23: mol_type = other RNA
attctaatttctccacgtctttg

SEQ ID NO: 7717 - RNA, 22 nt, Synthetic Construct
  source 1..22: mol_type = other RNA
tgaggtagtagtttgcgctgtt

SEQ ID NO: 7718 - RNA, 21 nt, Synthetic Construct
  source 1..21: mol_type = other RNA
cgtaccgtgagtaataatgca

SEQ ID NO: 7719 - RNA, 24 nt, Synthetic Construct
  source 1..24: mol_type = other RNA
gcagctaataccgcatacgacctg

SEQ ID NO: 7720 - RNA, 24 nt, Synthetic Construct
  source 1..24: mol_type = other RNA
gcagctaataccgcatacgacctg

SEQ ID NO: 7721 - RNA, 33 nt, Synthetic Construct; identical to SEQ ID NO: 1982
  source 1..33: mol_type = other RNA

SEQ ID NO: 7722 - RNA, 33 nt, Synthetic Construct; identical to SEQ ID NO: 1982
  source 1..33: mol_type = other RNA

SEQ ID NO: 7723 - RNA, 18 nt, Synthetic Construct
  source 1..18: mol_type = other RNA
atagggaacgtgagctgg

SEQ ID NO: 7724 - RNA, 18 nt, Synthetic Construct
  source 1..18: mol_type = other RNA
atagggaacgtgagctgg

SEQ ID NO: 7725 - RNA, 23 nt, Synthetic Construct
  source 1..23: mol_type = other RNA
tgaggggcagagagcgagactat

SEQ ID NO: 7726 - RNA, 23 nt, Synthetic Construct
  source 1..23: mol_type = other RNA
tgaggggcagagagcgagactat

SEQ ID NO: 7727 - RNA, 16 nt, Synthetic Construct
  source 1..16: mol_type = other RNA
gcggtggatgatgtgg

SEQ ID NO: 7728 - RNA, 22 nt, Synthetic Construct
  source 1..22: mol_type = other RNA
gtagtgtttcctactttatgga

SEQ ID NO: 7729 - RNA, 22 nt, Synthetic Construct
  source 1..22: mol_type = other RNA
gtagtgtttcctactttatgga

SEQ ID NO: 7730 - RNA, 18 nt, Synthetic Construct
  source 1..18: mol_type = other RNA
cagcactctgcaaagacg

SEQ ID NO: 7731 - RNA, 18 nt, Synthetic Construct
  source 1..18: mol_type = other RNA
cagcactctgcaaagacg

SEQ ID NO: 7732 - RNA, 22 nt, Synthetic Construct
  source 1..22: mol_type = other RNA
tgaggtagtaggttgtatagta

SEQ ID NO: 7733 - RNA, 22 nt, Synthetic Construct
  source 1..22: mol_type = other RNA
tgaggtagtaggttgtatagta

SEQ ID NO: 7734 - RNA, 27 nt, Synthetic Construct
  source 1..27: mol_type = other RNA
gatttccccttggggttgtaggaccac

SEQ ID NO: 7735 - RNA, 27 nt, Synthetic Construct
  source 1..27: mol_type = other RNA
gatttccccttggggttgtaggaccac

SEQ ID NO: 7736 - RNA, 22 nt, Synthetic Construct
  source 1..22: mol_type = other RNA
tgaggtagtagattatatagtt

SEQ ID NO: 7737 - RNA, 22 nt, Synthetic Construct
  source 1..22: mol_type = other RNA
tgaggtagtagattatatagtt

SEQ ID NO: 7738 - RNA, 23 nt, Synthetic Construct
  source 1..23: mol_type = other RNA
tgaggggcagagagcgagacctt

SEQ ID NO: 7739 - RNA, 23 nt, Synthetic Construct
  source 1..23: mol_type = other RNA
tgaggggcagagagcgagacctt

SEQ ID NO: 7740 - RNA, 18 nt, Synthetic Construct
  source 1..18: mol_type = other RNA
accggaggaaggtgggga

SEQ ID NO: 7741 - RNA, 18 nt, Synthetic Construct
  source 1..18: mol_type = other RNA
accggaggaaggtgggga

SEQ ID NO: 7742 - RNA, 22 nt, Synthetic Construct
  source 1..22: mol_type = other RNA
tccccttggggttgtaggacca

SEQ ID NO: 7743 - RNA, 22 nt, Synthetic Construct
  source 1..22: mol_type = other RNA
tccccttggggttgtaggacca

SEQ ID NO: 7744 - RNA, 22 nt, Synthetic Construct
  source 1..22: mol_type = other RNA
ncctgtactgagctgccccgag

SEQ ID NO: 7745 - RNA, 32 nt, Synthetic Construct; identical to SEQ ID NO: 2467
  source 1..32: mol_type = other RNA

SEQ ID NO: 7746 - RNA, 32 nt, Synthetic Construct; identical to SEQ ID NO: 2467
  source 1..32: mol_type = other RNA

SEQ ID NO: 7747 - RNA, 25 nt, Synthetic Construct
  source 1..25: mol_type = other RNA
ttgagggtatgagatcgagacgaca

SEQ ID NO: 7748 - RNA, 25 nt, Synthetic Construct
  source 1..25: mol_type = other RNA
ttgagggtatgagatcgagacgaca

SEQ ID NO: 7749 - RNA, 16 nt, Synthetic Construct
  source 1..16: mol_type = other RNA
ggtgggggtcgttggt

SEQ ID NO: 7750 - RNA, 16 nt, Synthetic Construct
  source 1..16: mol_type = other RNA
ggtgggggtcgttggt

SEQ ID NO: 7751 - RNA, 22 nt, Synthetic Construct
  source 1..22: mol_type = other RNA
tcgtaccgtgagtagtaatgcg

SEQ ID NO: 7752 - RNA, 22 nt, Synthetic Construct
  source 1..22: mol_type = other RNA
gtcagtttgtcaaataccccaa

SEQ ID NO: 7753 - RNA, 22 nt, Synthetic Construct
  source 1..22: mol_type = other RNA
tgaggtagtagattgtacagtt

SEQ ID NO: 7754 - RNA, 22 nt, Synthetic Construct
  source 1..22: mol_type = other RNA
tgaggtagtagattgtacagtt

SEQ ID NO: 7755 - RNA, 21 nt, Synthetic Construct
  source 1..21: mol_type = other RNA
tcccagtaaacggcggccgta

SEQ ID NO: 7756 - RNA, 21 nt, Synthetic Construct
  source 1..21: mol_type = other RNA
tcccagtaaacggcggccgta

SEQ ID NO: 7757 - RNA, 23 nt, Synthetic Construct
  source 1..23: mol_type = other RNA
tgaggtagtagtttgtgctgttg

SEQ ID NO: 7758 - RNA, 32 nt, Synthetic Construct; identical to SEQ ID NO: 2798
  source 1..32: mol_type = other RNA

SEQ ID NO: 7759 - RNA, 21 nt, Synthetic Construct
  source 1..21: mol_type = other RNA
tgaggtagtagactgtatagt

SEQ ID NO: 7760 - RNA, 22 nt, Synthetic Construct
  source 1..22: mol_type = other RNA
tcctgaactgagctgccccgag

SEQ ID NO: 7761 - RNA, 22 nt, Synthetic Construct
  source 1..22: mol_type = other RNA
tcctgaactgagctgccccgag

SEQ ID NO: 7762 - RNA, 23 nt, Synthetic Construct
  source 1..23: mol_type = other RNA
caaagaattctccttttgggctt

SEQ ID NO: 7763 - RNA, 23 nt, Synthetic Construct
  source 1..23: mol_type = other RNA
caaagaattctccttttgggctt

SEQ ID NO: 7764 - RNA, 22 nt, Synthetic Construct
  source 1..22: mol_type = other RNA
cggaggagttcgaaggtacgct

SEQ ID NO: 7765 - RNA, 22 nt, Synthetic Construct
  source 1..22: mol_type = other RNA
cggaggagttcgaaggtacgct

SEQ ID NO: 7766 - RNA, 18 nt, Synthetic Construct
  source 1..18: mol_type = other RNA
cctcgcgcgattggagcg

SEQ ID NO: 7767 - RNA, 28 nt, Synthetic Construct
  source 1..28: mol_type = other RNA
ccgtgtgaaagtaggtcatcgtcaggct

SEQ ID NO: 7768 - RNA, 28 nt, Synthetic Construct
  source 1..28: mol_type = other RNA
ccgtgtgaaagtaggtcatcgtcaggct

SEQ ID NO: 7769 - RNA, 25 nt, Synthetic Construct
  source 1..25: mol_type = other RNA
tttccccttggggttgtaggaccac

SEQ ID NO: 7770 - RNA, 25 nt, Synthetic Construct
  source 1..25: mol_type = other RNA
tttccccttggggttgtaggaccac

SEQ ID NO: 7771 - RNA, 17 nt, Synthetic Construct
  source 1..17: mol_type = other RNA
gcgtagatatgcggagg

SEQ ID NO: 7772 - RNA, 17 nt, Synthetic Construct
  source 1..17: mol_type = other RNA
gcgtagatatgcggagg

SEQ ID NO: 7773 - RNA, 22 nt, Synthetic Construct
  source 1..22: mol_type = other RNA
agggggaaagttctatagtcct

SEQ ID NO: 7774 - RNA, 22 nt, Synthetic Construct
  source 1..22: mol_type = other RNA
agggggaaagttctatagtcct

SEQ ID NO: 7775 - RNA, 36 nt, Synthetic Construct; identical to SEQ ID NO: 2478
  source 1..36: mol_type = other RNA

SEQ ID NO: 7776 - RNA, 36 nt, Synthetic Construct; identical to SEQ ID NO: 2478
  source 1..36: mol_type = other RNA

SEQ ID NO: 7777 - RNA, 16 nt, Synthetic Construct
  source 1..16: mol_type = other RNA
tgcgtagatatgcgga

SEQ ID NO: 7778 - RNA, 16 nt, Synthetic Construct
  source 1..16: mol_type = other RNA
tgcgtagatatgcgga

SEQ ID NO: 7779 - RNA, 25 nt, Synthetic Construct
  source 1..25: mol_type = other RNA
ttgaggatatgagatcgggacgaca

SEQ ID NO: 7780 - RNA, 25 nt, Synthetic Construct
  source 1..25: mol_type = other RNA
ttgaggatatgagatcgggacgaca

SEQ ID NO: 7781 - RNA, 22 nt, Synthetic Construct
  source 1..22: mol_type = other RNA
tgagatagtaggttgtatagtt

SEQ ID NO: 7782 - RNA, 22 nt, Synthetic Construct
  source 1..22: mol_type = other RNA
tgagatagtaggttgtatagtt

SEQ ID NO: 7783 - RNA, 20 nt, Synthetic Construct
  source 1..20: mol_type = other RNA
tgaggtagcaggttgtatag

SEQ ID NO: 7784 - RNA, 20 nt, Synthetic Construct
  source 1..20: mol_type = other RNA
tgaggtagcaggttgtatag

SEQ ID NO: 7785 - RNA, 22 nt, Synthetic Construct
  source 1..22: mol_type = other RNA
tagcagcacgtaagtattggcg

SEQ ID NO: 7786 - RNA, 22 nt, Synthetic Construct
  source 1..22: mol_type = other RNA
tagcagcacgtaagtattggcg

SEQ ID NO: 7787 - RNA, 20 nt, Synthetic Construct
  source 1..20: mol_type = other RNA
ttggcctcaagtcaggcagg

SEQ ID NO: 7788 - RNA, 20 nt, Synthetic Construct
  source 1..20: mol_type = other RNA
ttggcctcaagtcaggcagg

SEQ ID NO: 7789 - RNA, 27 nt, Synthetic Construct
  source 1..27: mol_type = other RNA
ccccccactgctaaatctgactggctt

SEQ ID NO: 7790 - RNA, 23 nt, Synthetic Construct
  source 1..23: mol_type = other RNA
tggaatgtaaagaagtatgtatt

SEQ ID NO: 7791 - RNA, 23 nt, Synthetic Construct
  source 1..23: mol_type = other RNA
tggaatgtaaagaagtatgtatt

SEQ ID NO: 7792 - RNA, 21 nt, Synthetic Construct
  source 1..21: mol_type = other RNA
taactccttaagcgatctcgc

SEQ ID NO: 7793 - RNA, 21 nt, Synthetic Construct
  source 1..21: mol_type = other RNA
taactccttaagcgatctcgc

SEQ ID NO: 7794 - RNA, 21 nt, Synthetic Construct
  source 1..21: mol_type = other RNA
taacactgtctggtaaagatg

SEQ ID NO: 7795 - RNA, 21 nt, Synthetic Construct
  source 1..21: mol_type = other RNA
taacactgtctggtaaagatg

SEQ ID NO: 7796 - RNA, 27 nt, Synthetic Construct
  source 1..27: mol_type = other RNA
ggatttccccttggggttgtaggacca

SEQ ID NO: 7797 - RNA, 27 nt, Synthetic Construct
  source 1..27: mol_type = other RNA
ggatttccccttggggttgtaggacca

SEQ ID NO: 7798 - RNA, 22 nt, Synthetic Construct
  source 1..22: mol_type = other RNA
tgggatgtaaagaagtatgtat

SEQ ID NO: 7799 - RNA, 22 nt, Synthetic Construct
  source 1..22: mol_type = other RNA
tgggatgtaaagaagtatgtat

SEQ ID NO: 7800 - RNA, 33 nt, Synthetic Construct; identical to SEQ ID NO: 2266
  source 1..33: mol_type = other RNA

SEQ ID NO: 7801 - RNA, 33 nt, Synthetic Construct; identical to SEQ ID NO: 2266
  source 1..33: mol_type = other RNA

SEQ ID NO: 7802 - RNA, 21 nt, Synthetic Construct
  source 1..21: mol_type = other RNA
agcgtgcttgactgcgagact

SEQ ID NO: 7803 - RNA, 21 nt, Synthetic Construct
  source 1..21: mol_type = other RNA
agcgtgcttgactgcgagact

SEQ ID NO: 7804 - RNA, 22 nt, Synthetic Construct
  source 1..22: mol_type = other RNA
tggaatgtaaaggagtatgtat

SEQ ID NO: 7805 - RNA, 16 nt, Synthetic Construct
  source 1..16: mol_type = other RNA
tggccgtcgtcagctc

SEQ ID NO: 7806 - RNA, 34 nt, Synthetic Construct; identical to SEQ ID NO: 2317
  source 1..34: mol_type = other RNA

SEQ ID NO: 7807 - RNA, 21 nt, Synthetic Construct
  source 1..21: mol_type = other RNA
cctctgggcccttcctccagt

SEQ ID NO: 7808 - RNA, 22 nt, Synthetic Construct
  source 1..22: mol_type = other RNA
tcctgtactgagctgcctcgag

SEQ ID NO: 7809 - RNA, 23 nt, Synthetic Construct
  source 1..23: mol_type = other RNA
agcagcattgtacagggctataa

SEQ ID NO: 7810 - RNA, 22 nt, Synthetic Construct
  source 1..22: mol_type = other RNA
tgaggtagtagcttgtgctgtt

SEQ ID NO: 7811 - RNA, 18 nt, Synthetic Construct
  source 1..18: mol_type = other RNA
ctaatgagactgccggtg

SEQ ID NO: 7812 - RNA, 22 nt, Synthetic Construct
  source 1..22: mol_type = other RNA
tgaggtagtaggttgtatggtt

SEQ ID NO: 7813 - RNA, 31 nt, Synthetic Construct; identical to SEQ ID NO: 2893
  source 1..31: mol_type = other RNA

SEQ ID NO: 7814 - RNA, 31 nt, Synthetic Construct; identical to SEQ ID NO: 2893
  source 1..31: mol_type = other RNA

SEQ ID NO: 7815 - RNA, 20 nt, Synthetic Construct
  source 1..20: mol_type = other RNA
gggttcgattccggagaggg

SEQ ID NO: 7816 - RNA, 20 nt, Synthetic Construct
  source 1..20: mol_type = other RNA
gggttcgattccggagaggg

SEQ ID NO: 7817 - RNA, 16 nt, Synthetic Construct
  source 1..16: mol_type = other RNA
gtctacggccataccg

SEQ ID NO: 7818 - RNA, 30 nt, Synthetic Construct; identical to SEQ ID NO: 1236
  source 1..30: mol_type = other RNA

SEQ ID NO: 7819 - RNA, 30 nt, Synthetic Construct; identical to SEQ ID NO: 1236
  source 1..30: mol_type = other RNA

SEQ ID NO: 7820 - RNA, 22 nt, Synthetic Construct
  source 1..22: mol_type = other RNA
tgaggtagtaggttgtggggtt

SEQ ID NO: 7821 - RNA, 24 nt, Synthetic Construct
  source 1..24: mol_type = other RNA
tagcagcacgtaaatattggcgtt

SEQ ID NO: 7822 - RNA, 26 nt, Synthetic Construct
  source 1..26: mol_type = other RNA
gatgcgtggtaggagagcgttctgta

SEQ ID NO: 7823 - RNA, 26 nt, Synthetic Construct
  source 1..26: mol_type = other RNA
gatgcgtggtaggagagcgttctgta

SEQ ID NO: 7824 - RNA, 22 nt, Synthetic Construct
  source 1..22: mol_type = other RNA
tgaggtagtagattgtatagta

SEQ ID NO: 7825 - RNA, 22 nt, Synthetic Construct
  source 1..22: mol_type = other RNA
tgaggtagtagattgtatagta

SEQ ID NO: 7826 - RNA, 33 nt, Synthetic Construct; identical to SEQ ID NO: 2395
  source 1..33: mol_type = other RNA

SEQ ID NO: 7827 - RNA, 33 nt, Synthetic Construct; identical to SEQ ID NO: 2395
  source 1..33: mol_type = other RNA

SEQ ID NO: 7828 - RNA, 23 nt, Synthetic Construct
  source 1..23: mol_type = other RNA
tcggaatcgctagtaatcgcgga

SEQ ID NO: 7829 - RNA, 23 nt, Synthetic Construct
  source 1..23: mol_type = other RNA
tcggaatcgctagtaatcgcgga

SEQ ID NO: 7830 - RNA, 25 nt, Synthetic Construct
  source 1..25: mol_type = other RNA
tgagaactgaattccataggctgtt

SEQ ID NO: 7831 - RNA, 25 nt, Synthetic Construct
  source 1..25: mol_type = other RNA
tgagaactgaattccataggctgtt

SEQ ID NO: 7832 - RNA, 22 nt, Synthetic Construct
  source 1..22: mol_type = other RNA
tgaggtagtaggttgtgtggct

SEQ ID NO: 7833 - RNA, 27 nt, Synthetic Construct
  source 1..27: mol_type = other RNA
ccccccactgctaaatttgactggcct

SEQ ID NO: 7834 - RNA, 22 nt, Synthetic Construct
  source 1..22: mol_type = other RNA
tgaggtagtagtttgtgctgct

SEQ ID NO: 7835 - RNA, 24 nt, Synthetic Construct
  source 1..24: mol_type = other RNA
caacggaatcccaaaagcagctgc

SEQ ID NO: 7836 - RNA, 28 nt, Synthetic Construct
  source 1..28: mol_type = other RNA
ccccccactgctaaatttgaccggcttt

SEQ ID NO: 7837 - RNA, 35 nt, Synthetic Construct; identical to SEQ ID NO: 2397
  source 1..35: mol_type = other RNA

SEQ ID NO: 7838 - RNA, 35 nt, Synthetic Construct; identical to SEQ ID NO: 2397
  source 1..35: mol_type = other RNA

SEQ ID NO: 7839 - RNA, 23 nt, Synthetic Construct
  source 1..23: mol_type = other RNA
tagtgcaatattgcttatagggt

SEQ ID NO: 7840 - RNA, 24 nt, Synthetic Construct
  source 1..24: mol_type = other RNA
tgtaaacatccccggctggaagct

SEQ ID NO: 7841 - RNA, 18 nt, Synthetic Construct
  source 1..18: mol_type = other RNA
tgcgtagatatgcggagg

SEQ ID NO: 7842 - RNA, 22 nt, Synthetic Construct
  source 1..22: mol_type = other RNA
tcctgtgctgagctgccccgag

SEQ ID NO: 7843 - RNA, 22 nt, Synthetic Construct
  source 1..22: mol_type = other RNA
ncgtaccgtgagtaataatgcg

SEQ ID NO: 7844 - RNA, 24 nt, Synthetic Construct
  source 1..24: mol_type = other RNA
gttcgattccggagagggagcctg

SEQ ID NO: 7845 - RNA, 24 nt, Synthetic Construct
  source 1..24: mol_type = other RNA
gttcgattccggagagggagcctg

SEQ ID NO: 7846 - RNA, 22 nt, Synthetic Construct
  source 1..22: mol_type = other RNA
tgaggtagtaggttgtataatt

SEQ ID NO: 7847 - RNA, 31 nt, Synthetic Construct; identical to SEQ ID NO: 2758
  source 1..31: mol_type = other RNA

SEQ ID NO: 7848 - RNA, 21 nt, Synthetic Construct
  source 1..21: mol_type = other RNA
tcctgtactgagctgccctga

SEQ ID NO: 7849 - RNA, 22 nt, Synthetic Construct
  source 1..22: mol_type = other RNA
cggaatgtaaagaagtatgtat

SEQ ID NO: 7850 - RNA, 21 nt, Synthetic Construct
  source 1..21: mol_type = other RNA
tcaggctcagtcccctcccga

SEQ ID NO: 7851 - RNA, 21 nt, Synthetic Construct
  source 1..21: mol_type = other RNA
tcaggctcagtcccctcccga

SEQ ID NO: 7852 - RNA, 22 nt, Synthetic Construct
  source 1..22: mol_type = other RNA
actggacttggagtcagaaggt

SEQ ID NO: 7853 - RNA, 30 nt, Synthetic Construct; identical to SEQ ID NO: 2578
  source 1..30: mol_type = other RNA

SEQ ID NO: 7854 - RNA, 27 nt, Synthetic Construct
  source 1..27: mol_type = other RNA
ggatttccccttggggttgtaggacca

SEQ ID NO: 7855 - RNA, 27 nt, Synthetic Construct
  source 1..27: mol_type = other RNA
ggatttccccttggggttgtaggacca

SEQ ID NO: 7856 - RNA, 23 nt, Synthetic Construct
  source 1..23: mol_type = other RNA
cctcgcgcgattggagcggccga

SEQ ID NO: 7857 - RNA, 23 nt, Synthetic Construct
  source 1..23: mol_type = other RNA
cctcgcgcgattggagcggccga

SEQ ID NO: 7858 - RNA, 18 nt, Synthetic Construct
  source 1..18: mol_type = other RNA
tcctgtactgagctgccc

SEQ ID NO: 7859 - RNA, 18 nt, Synthetic Construct
  source 1..18: mol_type = other RNA
tcctgtactgagctgccc

SEQ ID NO: 7860 - RNA, 16 nt, Synthetic Construct
  source 1..16: mol_type = other RNA
gtctacgaccatacca

SEQ ID NO: 7861 - RNA, 23 nt, Synthetic Construct
  source 1..23: mol_type = other RNA
caaagtgctgtttgtgcaggtag

SEQ ID NO: 7862 - RNA, 20 nt, Synthetic Construct
  source 1..20: mol_type = other RNA
taaggtagtaggttgtatag

SEQ ID NO: 7863 - RNA, 20 nt, Synthetic Construct
  source 1..20: mol_type = other RNA
taaggtagtaggttgtatag

SEQ ID NO: 7864 - RNA, 21 nt, Synthetic Construct
  source 1..21: mol_type = other RNA
tgtagtgtttcctactttatg

SEQ ID NO: 7865 - RNA, 21 nt, Synthetic Construct
  source 1..21: mol_type = other RNA
tgtagtgtttcctactttatg

SEQ ID NO: 7866 - RNA, 23 nt, Synthetic Construct
  source 1..23: mol_type = other RNA
caaagtgcttacagtgcaggtag

SEQ ID NO: 7867 - RNA, 23 nt, Synthetic Construct
  source 1..23: mol_type = other RNA
caaagtgcttacagtgcaggtag

SEQ ID NO: 7868 - RNA, 20 nt, Synthetic Construct
  source 1..20: mol_type = other RNA
ctatacgacctgctgccttt

SEQ ID NO: 7869 - RNA, 20 nt, Synthetic Construct
  source 1..20: mol_type = other RNA
ctatacgacctgctgccttt

SEQ ID NO: 7870 - RNA, 21 nt, Synthetic Construct
  source 1..21: mol_type = other RNA
tctttggttatctagctgtat

SEQ ID NO: 7871 - RNA, 21 nt, Synthetic Construct
  source 1..21: mol_type = other RNA
tctttggttatctagctgtat

SEQ ID NO: 7872 - RNA, 15 nt, Synthetic Construct
  source 1..15: mol_type = other RNA
gctttgatccggaga

SEQ ID NO: 7873 - RNA, 15 nt, Synthetic Construct
  source 1..15: mol_type = other RNA
gctttgatccggaga

SEQ ID NO: 7874 - RNA, 21 nt, Synthetic Construct
  source 1..21: mol_type = other RNA
tgaggtagtaggctgtatagt

SEQ ID NO: 7875 - RNA, 21 nt, Synthetic Construct
  source 1..21: mol_type = other RNA
tgaggtagtaggctgtatagt

SEQ ID NO: 7876 - RNA, 37 nt, Synthetic Construct; identical to SEQ ID NO: 2447
  source 1..37: mol_type = other RNA

SEQ ID NO: 7877 - RNA, 37 nt, Synthetic Construct; identical to SEQ ID NO: 2447
  source 1..37: mol_type = other RNA

SEQ ID NO: 7878 - RNA, 21 nt, Synthetic Construct
  source 1..21: mol_type = other RNA
tgaggtggtaggttgtatagt

SEQ ID NO: 7879 - RNA, 21 nt, Synthetic Construct
  source 1..21: mol_type = other RNA
tgaggtggtaggttgtatagt

SEQ ID NO: 7880 - RNA, 16 nt, Synthetic Construct
  source 1..16: mol_type = other RNA
ggcgggggtcgctggt

SEQ ID NO: 7881 - RNA, 34 nt, Synthetic Construct; identical to SEQ ID NO: 2186
  source 1..34: mol_type = other RNA

SEQ ID NO: 7882 - RNA, 29 nt, Synthetic Construct
  source 1..29: mol_type = other RNA
gtaatggcgggaactctggacagactgcc

SEQ ID NO: 7883 - RNA, 29 nt, Synthetic Construct
  source 1..29: mol_type = other RNA
gtaatggcgggaactctggacagactgcc

SEQ ID NO: 7884 - RNA, 21 nt, Synthetic Construct
  source 1..21: mol_type = other RNA
tggagtgcgacaatggtgttt

SEQ ID NO: 7885 - RNA, 21 nt, Synthetic Construct
  source 1..21: mol_type = other RNA
tggagtgcgacaatggtgttt

SEQ ID NO: 7886 - RNA, 43 nt, Synthetic Construct; identical to SEQ ID NO: 2315
  source 1..43: mol_type = other RNA

SEQ ID NO: 7887 - RNA, 43 nt, Synthetic Construct; identical to SEQ ID NO: 2315
  source 1..43: mol_type = other RNA

SEQ ID NO: 7888 - RNA, 23 nt, Synthetic Construct
  source 1..23: mol_type = other RNA
agctcggtctgaggcccctcagt

SEQ ID NO: 7889 - RNA, 23 nt, Synthetic Construct
  source 1..23: mol_type = other RNA
agctcggtctgaggcccctcagt

SEQ ID NO: 7890 - RNA, 33 nt, Synthetic Construct; identical to SEQ ID NO: 2386
  source 1..33: mol_type = other RNA

SEQ ID NO: 7891 - RNA, 25 nt, Synthetic Construct
  source 1..25: mol_type = other RNA
cctcgcgcgattggagcggccgata

SEQ ID NO: 7892 - RNA, 25 nt, Synthetic Construct
  source 1..25: mol_type = other RNA
cctcgcgcgattggagcggccgata

SEQ ID NO: 7893 - RNA, 22 nt, Synthetic Construct
  source 1..22: mol_type = other RNA
tcctgtactaagctgccccgag

SEQ ID NO: 7894 - RNA, 22 nt, Synthetic Construct
  source 1..22: mol_type = other RNA
tcctgtactaagctgccccgag

SEQ ID NO: 7895 - RNA, 22 nt, Synthetic Construct
  source 1..22: mol_type = other RNA
tgaagtagtagattgtatagtt

SEQ ID NO: 7896 - RNA, 22 nt, Synthetic Construct
  source 1..22: mol_type = other RNA
tgaagtagtagattgtatagtt

SEQ ID NO: 7897 - RNA, 23 nt, Synthetic Construct
  source 1..23: mol_type = other RNA
tgacctatgaattgacagccagt

SEQ ID NO: 7898 - RNA, 23 nt, Synthetic Construct
  source 1..23: mol_type = other RNA
tgacctatgaattgacagccagt

SEQ ID NO: 7899 - RNA, 20 nt, Synthetic Construct
  source 1..20: mol_type = other RNA
tgaggaagtaggttgtatag

SEQ ID NO: 7900 - RNA, 28 nt, Synthetic Construct
  source 1..28: mol_type = other RNA
gcatgggtggttcagtggtagaattctc

SEQ ID NO: 7901 - RNA, 28 nt, Synthetic Construct
  source 1..28: mol_type = other RNA
gcatgggtggttcagtggtagaattctc

SEQ ID NO: 7902 - RNA, 15 nt, Synthetic Construct
  source 1..15: mol_type = other RNA
gagctgtggataggg

SEQ ID NO: 7903 - RNA, 22 nt, Synthetic Construct
  source 1..22: mol_type = other RNA
tgaggtagtaggttgcatagtt

SEQ ID NO: 7904 - RNA, 24 nt, Synthetic Construct
  source 1..24: mol_type = other RNA
tcctgtactgagctgccccgagat

SEQ ID NO: 7905 - RNA, 24 nt, Synthetic Construct
  source 1..24: mol_type = other RNA
gcgagagtaggacgttgccaggtt

SEQ ID NO: 7906 - RNA, 24 nt, Synthetic Construct
  source 1..24: mol_type = other RNA
gcgagagtaggacgttgccaggtt

SEQ ID NO: 7907 - RNA, 23 nt, Synthetic Construct
  source 1..23: mol_type = other RNA
tcctgtaccgagctgccccgaga

SEQ ID NO: 7908 - RNA, 16 nt, Synthetic Construct
  source 1..16: mol_type = other RNA
gaaattccttgtcggg

SEQ ID NO: 7909 - RNA, 16 nt, Synthetic Construct
  source 1..16: mol_type = other RNA
gaaattccttgtcggg

SEQ ID NO: 7910 - RNA, 24 nt, Synthetic Construct
  source 1..24: mol_type = other RNA
cggagaaggttagctcagccaact

SEQ ID NO: 7911 - RNA, 24 nt, Synthetic Construct
  source 1..24: mol_type = other RNA
cggagaaggttagctcagccaact

SEQ ID NO: 7912 - RNA, 17 nt, Synthetic Construct
  source 1..17: mol_type = other RNA
catgcaagtcgaacggt

SEQ ID NO: 7913 - RNA, 17 nt, Synthetic Construct
  source 1..17: mol_type = other RNA
catgcaagtcgaacggt

SEQ ID NO: 7914 - RNA, 20 nt, Synthetic Construct
  source 1..20: mol_type = other RNA
tgaggtagtaggttatgtgg

SEQ ID NO: 7915 - RNA, 20 nt, Synthetic Construct
  source 1..20: mol_type = other RNA
tgaggtagtaggttatgtgg

SEQ ID NO: 7916 - RNA, 21 nt, Synthetic Construct
  source 1..21: mol_type = other RNA
tgaggtagtaggttgtataga

SEQ ID NO: 7917 - RNA, 23 nt, Synthetic Construct
  source 1..23: mol_type = other RNA
tggtaatacgtcgtacttagtgt

SEQ ID NO: 7918 - RNA, 23 nt, Synthetic Construct
  source 1..23: mol_type = other RNA
tggtaatacgtcgtacttagtgt

SEQ ID NO: 7919 - RNA, 22 nt, Synthetic Construct
  source 1..22: mol_type = other RNA
cccagtgttcagactacctgtt

SEQ ID NO: 7920 - RNA, 22 nt, Synthetic Construct
  source 1..22: mol_type = other RNA
cccagtgttcagactacctgtt

SEQ ID NO: 7921 - RNA, 22 nt, Synthetic Construct
  source 1..22: mol_type = other RNA
cctcgcgcgattggagcggccg

SEQ ID NO: 7922 - RNA, 23 nt, Synthetic Construct
  source 1..23: mol_type = other RNA
ggatatcatcatatactgtaagt

SEQ ID NO: 7923 - RNA, 23 nt, Synthetic Construct
  source 1..23: mol_type = other RNA
ggatatcatcatatactgtaagt

SEQ ID NO: 7924 - RNA, 21 nt, Synthetic Construct
  source 1..21: mol_type = other RNA
aacattcattgctgtcggtgg

SEQ ID NO: 7925 - RNA, 23 nt, Synthetic Construct
  source 1..23: mol_type = other RNA
ggaggggcagagagcgagacttt

SEQ ID NO: 7926 - RNA, 23 nt, Synthetic Construct
  source 1..23: mol_type = other RNA
ggaggggcagagagcgagacttt

SEQ ID NO: 7927 - RNA, 21 nt, Synthetic Construct
  source 1..21: mol_type = other RNA
tgaggtagtaagttgtgtggt

SEQ ID NO: 7928 - RNA, 21 nt, Synthetic Construct
  source 1..21: mol_type = other RNA
tgaggtagtaagttgtgtggt

SEQ ID NO: 7929 - RNA, 23 nt, Synthetic Construct
  source 1..23: mol_type = other RNA
tcctgcactgagctgccccgaga

SEQ ID NO: 7930 - RNA, 19 nt, Synthetic Construct
  source 1..19: mol_type = other RNA
cctcgtcatctaattagtg

SEQ ID NO: 7931 - RNA, 19 nt, Synthetic Construct
  source 1..19: mol_type = other RNA
cctcgtcatctaattagtg

SEQ ID NO: 7932 - RNA, 22 nt, Synthetic Construct
  source 1..22: mol_type = other RNA
cgaggtagtagattgtatagtt

SEQ ID NO: 7933 - RNA, 22 nt, Synthetic Construct
  source 1..22: mol_type = other RNA
cgaggtagtagattgtatagtt

SEQ ID NO: 7934 - RNA, 25 nt, Synthetic Construct
  source 1..25: mol_type = other RNA
ttgagggtatgagatcgagacgaca

SEQ ID NO: 7935 - RNA, 25 nt, Synthetic Construct
  source 1..25: mol_type = other RNA
ttgagggtatgagatcgagacgaca

SEQ ID NO: 7936 - RNA, 16 nt, Synthetic Construct
  source 1..16: mol_type = other RNA
gtctacggccacacca

SEQ ID NO: 7937 - RNA, 16 nt, Synthetic Construct
  source 1..16: mol_type = other RNA
gtctacggccacacca

SEQ ID NO: 7938 - RNA, 23 nt, Synthetic Construct
  source 1..23: mol_type = other RNA
tgaggggcagagagcgaggcttt

SEQ ID NO: 7939 - RNA, 23 nt, Synthetic Construct
  source 1..23: mol_type = other RNA
tgaggggcagagagcgaggcttt

SEQ ID NO: 7940 - RNA, 22 nt, Synthetic Construct
  source 1..22: mol_type = other RNA
tcctgaactgagctgccccgag

SEQ ID NO: 7941 - RNA, 22 nt, Synthetic Construct
  source 1..22: mol_type = other RNA
cgcatcccctagggcattggtg

SEQ ID NO: 7942 - RNA, 22 nt, Synthetic Construct
  source 1..22: mol_type = other RNA
cgcatcccctagggcattggtg

SEQ ID NO: 7943 - RNA, 22 nt, Synthetic Construct
  source 1..22: mol_type = other RNA
tggaatgtaaaggagtatgtat

SEQ ID NO: 7944 - RNA, 22 nt, Synthetic Construct
  source 1..22: mol_type = other RNA
tggaatgtaaaggagtatgtat

SEQ ID NO: 7945 - RNA, 18 nt, Synthetic Construct
  source 1..18: mol_type = other RNA
cgccgatgatagtgcgga

SEQ ID NO: 7946 - RNA, 18 nt, Synthetic Construct
  source 1..18: mol_type = other RNA
cgccgatgatagtgcgga

SEQ ID NO: 7947 - RNA, 35 nt, Synthetic Construct; identical to SEQ ID NO: 2269
  source 1..35: mol_type = other RNA

SEQ ID NO: 7948 - RNA, 35 nt, Synthetic Construct; identical to SEQ ID NO: 2269
  source 1..35: mol_type = other RNA

SEQ ID NO: 7949 - RNA, 21 nt, Synthetic Construct
  source 1..21: mol_type = other RNA
cgcatcccctagggcattggt

SEQ ID NO: 7950 - RNA, 21 nt, Synthetic Construct
  source 1..21: mol_type = other RNA
cgcatcccctagggcattggt

SEQ ID NO: 7951 - RNA, 21 nt, Synthetic Construct
  source 1..21: mol_type = other RNA
cgtaccgtgagtaataatgca

SEQ ID NO: 7952 - RNA, 27 nt, Synthetic Construct
  source 1..27: mol_type = other RNA
agagcagctaataccgcatacgacctg

SEQ ID NO: 7953 - RNA, 27 nt, Synthetic Construct
  source 1..27: mol_type = other RNA
agagcagctaataccgcatacgacctg

SEQ ID NO: 7954 - RNA, 23 nt, Synthetic Construct
  source 1..23: mol_type = other RNA
caaagtgctgttcgcgcaggtag

SEQ ID NO: 7955 - RNA, 17 nt, Synthetic Construct
  source 1..17: mol_type = other RNA
gggaacgtgagctgggt

SEQ ID NO: 7956 - RNA, 17 nt, Synthetic Construct
  source 1..17: mol_type = other RNA
gggaacgtgagctgggt

SEQ ID NO: 7957 - RNA, 22 nt, Synthetic Construct
  source 1..22: mol_type = other RNA
ncgtaccgtgagtaataatgcg

SEQ ID NO: 7958 - RNA, 22 nt, Synthetic Construct
  source 1..22: mol_type = other RNA
ncgtaccgtgagtaataatgcg

SEQ ID NO: 7959 - RNA, 15 nt, Synthetic Construct
  source 1..15: mol_type = other RNA
ctaccgtgcgtagga

SEQ ID NO: 7960 - RNA, 15 nt, Synthetic Construct
  source 1..15: mol_type = other RNA
ctaccgtgcgtagga

SEQ ID NO: 7961 - RNA, 25 nt, Synthetic Construct
  source 1..25: mol_type = other RNA
ttgaggatatgagatcgagacaaca

SEQ ID NO: 7962 - RNA, 21 nt, Synthetic Construct
  source 1..21: mol_type = other RNA
tggggggcagagagcgagact

SEQ ID NO: 7963 - RNA, 21 nt, Synthetic Construct
  source 1..21: mol_type = other RNA
tggggggcagagagcgagact

SEQ ID NO: 7964 - RNA, 22 nt, Synthetic Construct
  source 1..22: mol_type = other RNA
tgtaaacatccccgactggagg

SEQ ID NO: 7965 - RNA, 34 nt, Synthetic Construct; identical to SEQ ID NO: 2298
  source 1..34: mol_type = other RNA

SEQ ID NO: 7966 - RNA, 34 nt, Synthetic Construct; identical to SEQ ID NO: 2298
  source 1..34: mol_type = other RNA

SEQ ID NO: 7967 - RNA, 19 nt, Synthetic Construct
  source 1..19: mol_type = other RNA
cgcgacctcagatcagacg

SEQ ID NO: 7968 - RNA, 19 nt, Synthetic Construct
  source 1..19: mol_type = other RNA
cgcgacctcagatcagacg

SEQ ID NO: 7969 - RNA, 21 nt, Synthetic Construct
  source 1..21: mol_type = other RNA
tcccagtaaacggcggccgta

SEQ ID NO: 7970 - RNA, 21 nt, Synthetic Construct
  source 1..21: mol_type = other RNA
tcccagtaaacggcggccgta

SEQ ID NO: 7971 - RNA, 21 nt, Synthetic Construct
  source 1..21: mol_type = other RNA
tgaggtagtaggttgtgtagt

SEQ ID NO: 7972 - RNA, 17 nt, Synthetic Construct
  source 1..17: mol_type = other RNA
gaagttgaccgcctggg

SEQ ID NO: 7973 - RNA, 17 nt, Synthetic Construct
  source 1..17: mol_type = other RNA
gaagttgaccgcctggg

SEQ ID NO: 7974 - RNA, 16 nt, Synthetic Construct
  source 1..16: mol_type = other RNA
ctcagtagctcgagga

SEQ ID NO: 7975 - RNA, 22 nt, Synthetic Construct
  source 1..22: mol_type = other RNA
tgaggtagtagtttgtgctgtc

SEQ ID NO: 7976 - RNA, 22 nt, Synthetic Construct
  source 1..22: mol_type = other RNA
tgaggtagtagtttgtgctgtc

SEQ ID NO: 7977 - RNA, 18 nt, Synthetic Construct
  source 1..18: mol_type = other RNA
agtgacgcgcatgaatgg

SEQ ID NO: 7978 - RNA, 18 nt, Synthetic Construct
  source 1..18: mol_type = other RNA
agtgacgcgcatgaatgg

SEQ ID NO: 7979 - RNA, 38 nt, Synthetic Construct; identical to SEQ ID NO: 7148
  source 1..38: mol_type = other RNA

SEQ ID NO: 7980 - RNA, 38 nt, Synthetic Construct; identical to SEQ ID NO: 7148
  source 1..38: mol_type = other RNA

SEQ ID NO: 7981 - RNA, 16 nt, Synthetic Construct
  source 1..16: mol_type = other RNA
gtctacggacatacca

SEQ ID NO: 7982 - RNA, 36 nt, Synthetic Construct; identical to SEQ ID NO: 2506
  source 1..36: mol_type = other RNA

SEQ ID NO: 7983 - RNA, 18 nt, Synthetic Construct
  source 1..18: mol_type = other RNA
aagaccctgttgagcttg

SEQ ID NO: 7984 - RNA, 18 nt, Synthetic Construct
  source 1..18: mol_type = other RNA
aagaccctgttgagcttg

SEQ ID NO: 7985 - RNA, 21 nt, Synthetic Construct
  source 1..21: mol_type = other RNA
tcccgtactgagctgccccga

SEQ ID NO: 7986 - RNA, 21 nt, Synthetic Construct
  source 1..21: mol_type = other RNA
tcctgtactgggctgccccga

SEQ ID NO: 7987 - RNA, 22 nt, Synthetic Construct
  source 1..22: mol_type = other RNA
tgaggtagtaggttgtgcggtt

SEQ ID NO: 7988 - RNA, 22 nt, Synthetic Construct
  source 1..22: mol_type = other RNA
tgaggtagtaggttgtgcggtt

SEQ ID NO: 7989 - RNA, 23 nt, Synthetic Construct
  source 1..23: mol_type = other RNA
tggtaatacgacgtacatagtgt

SEQ ID NO: 7990 - RNA, 34 nt, Synthetic Construct; identical to SEQ ID NO: 2019
  source 1..34: mol_type = other RNA

SEQ ID NO: 7991 - RNA, 34 nt, Synthetic Construct; identical to SEQ ID NO: 2019
  source 1..34: mol_type = other RNA

SEQ ID NO: 7992 - RNA, 22 nt, Synthetic Construct
  source 1..22: mol_type = other RNA
tgtggtagtaggttgtatagtt

SEQ ID NO: 7993 - RNA, 22 nt, Synthetic Construct
  source 1..22: mol_type = other RNA
tgtggtagtaggttgtatagtt

SEQ ID NO: 7994 - RNA, 21 nt, Synthetic Construct
  source 1..21: mol_type = other RNA
tgaggtagtaggttgtgtgat

SEQ ID NO: 7995 - RNA, 21 nt, Synthetic Construct
  source 1..21: mol_type = other RNA
tgaggtagtaggttgtgtgat

SEQ ID NO: 7996 - RNA, 32 nt, Synthetic Construct; identical to SEQ ID NO: 5582
  source 1..32: mol_type = other RNA

SEQ ID NO: 7997 - RNA, 32 nt, Synthetic Construct; identical to SEQ ID NO: 5582
  source 1..32: mol_type = other RNA

SEQ ID NO: 7998 - RNA, 22 nt, Synthetic Construct
  source 1..22: mol_type = other RNA
tcgaaccgtgagtaataatgcg

SEQ ID NO: 7999 - RNA, 22 nt, Synthetic Construct
  source 1..22: mol_type = other RNA
tgaagtagtagtttgtgctgtt

SEQ ID NO: 8000 - RNA, 16 nt, Synthetic Construct
  source 1..16: mol_type = other RNA
gtcgacgtatagggtg

SEQ ID NO: 8001 - RNA, 16 nt, Synthetic Construct
  source 1..16: mol_type = other RNA
gtcgacgtatagggtg

SEQ ID NO: 8002 - RNA, 23 nt, Synthetic Construct
  source 1..23: mol_type = other RNA
ccctgtactgagctgccccgaga

SEQ ID NO: 8003 - RNA, 22 nt, Synthetic Construct
  source 1..22: mol_type = other RNA
tagcatatcgagcctgagaaca

SEQ ID NO: 8004 - RNA, 22 nt, Synthetic Construct
  source 1..22: mol_type = other RNA
tagcatatcgagcctgagaaca

SEQ ID NO: 8005 - RNA, 23 nt, Synthetic Construct
  source 1..23: mol_type = other RNA
caaagtgctgtttgtgcaggtag

SEQ ID NO: 8006 - RNA, 23 nt, Synthetic Construct
  source 1..23: mol_type = other RNA
caaagtgctgtttgtgcaggtag

SEQ ID NO: 8007 - RNA, 27 nt, Synthetic Construct
  source 1..27: mol_type = other RNA
ccccccactgctaagtttgactggctt

SEQ ID NO: 8008 - RNA, 27 nt, Synthetic Construct
  source 1..27: mol_type = other RNA
ccccccactgctaagtttgactggctt

SEQ ID NO: 8009 - RNA, 42 nt, Synthetic Construct
  source 1..42: mol_type = other RNA
agtaaggtcagctaaataagctatcgggcccataccccgaaa

SEQ ID NO: 8010 - RNA, 42 nt, Synthetic Construct; identical to SEQ ID NO: 8009
  source 1..42: mol_type = other RNA

SEQ ID NO: 8011 - RNA, 17 nt, Synthetic Construct
  source 1..17: mol_type = other RNA
gtccggatcgtagtctg

SEQ ID NO: 8012 - RNA, 17 nt, Synthetic Construct
  source 1..17: mol_type = other RNA
gtccggatcgtagtctg

SEQ ID NO: 8013 - RNA, 21 nt, Synthetic Construct
  source 1..21: mol_type = other RNA
actcggcgtggcgtcggtcgt

SEQ ID NO: 8014 - RNA, 23 nt, Synthetic Construct
  source 1..23: mol_type = other RNA
tggaatgtaaagaagtatgtata

SEQ ID NO: 8015 - RNA, 23 nt, Synthetic Construct
  source 1..23: mol_type = other RNA
tggaatgtaaagaagtatgtata

SEQ ID NO: 8016 - RNA, 25 nt, Synthetic Construct
  source 1..25: mol_type = other RNA
ttgaggatatgagatcgaggcgaca

SEQ ID NO: 8017 - RNA, 25 nt, Synthetic Construct
  source 1..25: mol_type = other RNA
ttgaggatatgagatcgaggcgaca

SEQ ID NO: 8018 - RNA, 25 nt, Synthetic Construct
  source 1..25: mol_type = other RNA
ttgaggatacgagatcgagacgaca

SEQ ID NO: 8019 - RNA, 43 nt, Synthetic Construct; identical to SEQ ID NO: 6535
  source 1..43: mol_type = other RNA

SEQ ID NO: 8020 - RNA, 43 nt, Synthetic Construct; identical to SEQ ID NO: 6535
  source 1..43: mol_type = other RNA

SEQ ID NO: 8021 - RNA, 17 nt, Synthetic Construct
  source 1..17: mol_type = other RNA
tgccagcagccgcggta

SEQ ID NO: 8022 - RNA, 17 nt, Synthetic Construct
  source 1..17: mol_type = other RNA
tgccagcagccgcggta

SEQ ID NO: 8023 - RNA, 21 nt, Synthetic Construct
  source 1..21: mol_type = other RNA
tgaggtagtaggttgtatagc

SEQ ID NO: 8024 - RNA, 21 nt, Synthetic Construct
  source 1..21: mol_type = other RNA
tgaggtagtaggttgtatagc

SEQ ID NO: 8025 - RNA, 15 nt, Synthetic Construct
  source 1..15: mol_type = other RNA
ccagaaacccggtcg

SEQ ID NO: 8026 - RNA, 15 nt, Synthetic Construct
  source 1..15: mol_type = other RNA
ccagaaacccggtcg

SEQ ID NO: 8027 - RNA, 27 nt, Synthetic Construct
  source 1..27: mol_type = other RNA
ccccctactgctaaatttgactggctt

SEQ ID NO: 8028 - RNA, 23 nt, Synthetic Construct
  source 1..23: mol_type = other RNA
atcacattgccagggatttccaa

SEQ ID NO: 8029 - RNA, 23 nt, Synthetic Construct
  source 1..23: mol_type = other RNA
atcacattgccagggatttccaa

SEQ ID NO: 8030 - RNA, 22 nt, Synthetic Construct
  source 1..22: mol_type = other RNA
tgaggtagtaggttgagtggtt

SEQ ID NO: 8031 - RNA, 22 nt, Synthetic Construct
  source 1..22: mol_type = other RNA
tgaggtagtaggttgagtggtt

SEQ ID NO: 8032 - RNA, 31 nt, Synthetic Construct; identical to SEQ ID NO: 2442
  source 1..31: mol_type = other RNA

SEQ ID NO: 8033 - RNA, 31 nt, Synthetic Construct; identical to SEQ ID NO: 2442
  source 1..31: mol_type = other RNA

SEQ ID NO: 8034 - RNA, 22 nt, Synthetic Construct
  source 1..22: mol_type = other RNA
tgaggtagtagtatgtgctgtt

SEQ ID NO: 8035 - RNA, 19 nt, Synthetic Construct
  source 1..19: mol_type = other RNA
cccttgtcattagttgcta

SEQ ID NO: 8036 - RNA, 19 nt, Synthetic Construct
  source 1..19: mol_type = other RNA
cccttgtcattagttgcta

SEQ ID NO: 8037 - RNA, 20 nt, Synthetic Construct
  source 1..20: mol_type = other RNA
ctgacctatgaattgacagc

SEQ ID NO: 8038 - RNA, 20 nt, Synthetic Construct
  source 1..20: mol_type = other RNA
ctgacctatgaattgacagc

SEQ ID NO: 8039 - RNA, 21 nt, Synthetic Construct
  source 1..21: mol_type = other RNA
gaagaggacttggaactcgat

SEQ ID NO: 8040 - RNA, 21 nt, Synthetic Construct
  source 1..21: mol_type = other RNA
gaagaggacttggaactcgat

SEQ ID NO: 8041 - RNA, 21 nt, Synthetic Construct
  source 1..21: mol_type = other RNA
tcctgtactgagctgccccaa

SEQ ID NO: 8042 - RNA, 21 nt, Synthetic Construct
  source 1..21: mol_type = other RNA
tcctgtactgagctgccccaa

SEQ ID NO: 8043 - RNA, 23 nt, Synthetic Construct
  source 1..23: mol_type = other RNA
tgaggtagtaggtcgtgtggttt

SEQ ID NO: 8044 - RNA, 23 nt, Synthetic Construct
  source 1..23: mol_type = other RNA
tgaggtagtaggtcgtgtggttt

SEQ ID NO: 8045 - RNA, 22 nt, Synthetic Construct
  source 1..22: mol_type = other RNA
cattgcgcttgtctcggtctga

SEQ ID NO: 8046 - RNA, 21 nt, Synthetic Construct
  source 1..21: mol_type = other RNA
tgaggggcagagagcgggact

SEQ ID NO: 8047 - RNA, 32 nt, Synthetic Construct; identical to SEQ ID NO: 3092
  source 1..32: mol_type = other RNA

SEQ ID NO: 8048 - RNA, 18 nt, Synthetic Construct
  source 1..18: mol_type = other RNA
tcccaagggtatggctgt

SEQ ID NO: 8049 - RNA, 18 nt, Synthetic Construct
  source 1..18: mol_type = other RNA
tcccaagggtatggctgt

SEQ ID NO: 8050 - RNA, 21 nt, Synthetic Construct
  source 1..21: mol_type = other RNA
tgaagtagtaggttgtatagt

SEQ ID NO: 8051 - RNA, 15 nt, Synthetic Construct
  source 1..15: mol_type = other RNA
gagagcctggacaca

SEQ ID NO: 8052 - RNA, 22 nt, Synthetic Construct
  source 1..22: mol_type = other RNA
tgaggtagtagtttgtggtgtt

SEQ ID NO: 8053 - RNA, 34 nt, Synthetic Construct; identical to SEQ ID NO: 2186
  source 1..34: mol_type = other RNA

SEQ ID NO: 8054 - RNA, 34 nt, Synthetic Construct; identical to SEQ ID NO: 2186
  source 1..34: mol_type = other RNA

SEQ ID NO: 8055 - RNA, 16 nt, Synthetic Construct
  source 1..16: mol_type = other RNA
agttgaccgcctgggg

SEQ ID NO: 8056 - RNA, 16 nt, Synthetic Construct
  source 1..16: mol_type = other RNA
agttgaccgcctgggg

SEQ ID NO: 8057 - RNA, 21 nt, Synthetic Construct
  source 1..21: mol_type = other RNA
taactccttaagcaatctcgc

SEQ ID NO: 8058 - RNA, 21 nt, Synthetic Construct
  source 1..21: mol_type = other RNA
taactccttaagcaatctcgc

SEQ ID NO: 8059 - RNA, 31 nt, Synthetic Construct; identical to SEQ ID NO: 2333
  source 1..31: mol_type = other RNA

SEQ ID NO: 8060 - RNA, 31 nt, Synthetic Construct; identical to SEQ ID NO: 2333
  source 1..31: mol_type = other RNA

SEQ ID NO: 8061 - RNA, 24 nt, Synthetic Construct
  source 1..24: mol_type = other RNA
tgtcagtttgtcaaataccccaac

SEQ ID NO: 8062 - RNA, 17 nt, Synthetic Construct
  source 1..17: mol_type = other RNA
ccgtgtgaaagtaggtc

SEQ ID NO: 8063 - RNA, 36 nt, Synthetic Construct; identical to SEQ ID NO: 2344
  source 1..36: mol_type = other RNA

SEQ ID NO: 8064 - RNA, 36 nt, Synthetic Construct; identical to SEQ ID NO: 2344
  source 1..36: mol_type = other RNA

SEQ ID NO: 8065 - RNA, 22 nt, Synthetic Construct
  source 1..22: mol_type = other RNA
ggaggtagtaggttgtgtggtt

SEQ ID NO: 8066 - RNA, 35 nt, Synthetic Construct; identical to SEQ ID NO: 2548
  source 1..35: mol_type = other RNA

SEQ ID NO: 8067 - RNA, 35 nt, Synthetic Construct; identical to SEQ ID NO: 2548
  source 1..35: mol_type = other RNA

SEQ ID NO: 8068 - RNA, 20 nt, Synthetic Construct
  source 1..20: mol_type = other RNA
agcagcattgtacagggcta

SEQ ID NO: 8069 - RNA, 20 nt, Synthetic Construct
  source 1..20: mol_type = other RNA
agcagcattgtacagggcta

SEQ ID NO: 8070 - RNA, 25 nt, Synthetic Construct
  source 1..25: mol_type = other RNA
agctacatctggctactgggtctct

SEQ ID NO: 8071 - RNA, 25 nt, Synthetic Construct
  source 1..25: mol_type = other RNA
agctacatctggctactgggtctct

SEQ ID NO: 8072 - RNA, 23 nt, Synthetic Construct
  source 1..23: mol_type = other RNA
gactatagaactttccccctcaa

SEQ ID NO: 8073 - RNA, 23 nt, Synthetic Construct
  source 1..23: mol_type = other RNA
gactatagaactttccccctcaa

SEQ ID NO: 8074 - RNA, 23 nt, Synthetic Construct
  source 1..23: mol_type = other RNA
tgaggggcagagagcgagactat

SEQ ID NO: 8075 - RNA, 23 nt, Synthetic Construct
  source 1..23: mol_type = other RNA
tgaggggcagagagcgagactat

SEQ ID NO: 8076 - RNA, 21 nt, Synthetic Construct
  source 1..21: mol_type = other RNA
cggtcccaagggtatggctgt

SEQ ID NO: 8077 - RNA, 21 nt, Synthetic Construct
  source 1..21: mol_type = other RNA
cggtcccaagggtatggctgt

SEQ ID NO: 8078 - RNA, 22 nt, Synthetic Construct
  source 1..22: mol_type = other RNA
tcctgtactgaactgccccgag

SEQ ID NO: 8079 - RNA, 22 nt, Synthetic Construct
  source 1..22: mol_type = other RNA
tcctgtactgaactgccccgag

SEQ ID NO: 8080 - RNA, 23 nt, Synthetic Construct
  source 1..23: mol_type = other RNA
caaagtgctgttcgcgcaggtag

SEQ ID NO: 8081 - RNA, 16 nt, Synthetic Construct
  source 1..16: mol_type = other RNA
gtctatggccatacca

SEQ ID NO: 8082 - RNA, 26 nt, Synthetic Construct
  source 1..26: mol_type = other RNA
aacattcaacgctgtcggtgagtttt

SEQ ID NO: 8083 - RNA, 23 nt, Synthetic Construct
  source 1..23: mol_type = other RNA
tcctgtactgagctgctccgaga

SEQ ID NO: 8084 - RNA, 23 nt, Synthetic Construct
  source 1..23: mol_type = other RNA
tcctgtactgagctgctccgaga

SEQ ID NO: 8085 - RNA, 23 nt, Synthetic Construct
  source 1..23: mol_type = other RNA
tggtaatgcgacgtacttagtgt

SEQ ID NO: 8086 - RNA, 32 nt, Synthetic Construct; identical to SEQ ID NO: 2582
  source 1..32: mol_type = other RNA

SEQ ID NO: 8087 - RNA, 23 nt, Synthetic Construct
  source 1..23: mol_type = other RNA
tcctgtgctgagctgccccgagt

SEQ ID NO: 8088 - RNA, 23 nt, Synthetic Construct
  source 1..23: mol_type = other RNA
tggtgatacgacgtacttagtgt

SEQ ID NO: 8089 - RNA, 19 nt, Synthetic Construct
  source 1..19: mol_type = other RNA
tgagatgaagcactgtagc

SEQ ID NO: 8090 - RNA, 17 nt, Synthetic Construct
  source 1..17: mol_type = other RNA
agcggtggatgatgtgg

SEQ ID NO: 8091 - RNA, 17 nt, Synthetic Construct
  source 1..17: mol_type = other RNA
agcggtggatgatgtgg

SEQ ID NO: 8092 - RNA, 35 nt, Synthetic Construct; identical to SEQ ID NO: 2762
  source 1..35: mol_type = other RNA

SEQ ID NO: 8093 - RNA, 23 nt, Synthetic Construct
  source 1..23: mol_type = other RNA
tggtaatacgacgtacttagagt

SEQ ID NO: 8094 - RNA, 20 nt, Synthetic Construct
  source 1..20: mol_type = other RNA
gcgtgcttgactgcgagact

SEQ ID NO: 8095 - RNA, 20 nt, Synthetic Construct
  source 1..20: mol_type = other RNA
gcgtgcttgactgcgagact

SEQ ID NO: 8096 - RNA, 15 nt, Synthetic Construct
  source 1..15: mol_type = other RNA
gctagtaatcgcgga

SEQ ID NO: 8097 - RNA, 15 nt, Synthetic Construct
  source 1..15: mol_type = other RNA
gctagtaatcgcgga

SEQ ID NO: 8098 - RNA, 23 nt, Synthetic Construct
  source 1..23: mol_type = other RNA
cattgcacttgtctcggtctgaa

SEQ ID NO: 8099 - RNA, 23 nt, Synthetic Construct
  source 1..23: mol_type = other RNA
cattgcacttgtctcggtctgaa

SEQ ID NO: 8100 - RNA, 22 nt, Synthetic Construct
  source 1..22: mol_type = other RNA
cggaatgtaaagaagtatgtat

SEQ ID NO: 8101 - RNA, 16 nt, Synthetic Construct
  source 1..16: mol_type = other RNA
accgcttttgtcaggg

SEQ ID NO: 8102 - RNA, 27 nt, Synthetic Construct
  source 1..27: mol_type = other RNA
gcatgggtggttcagtggtagaattct

SEQ ID NO: 8103 - RNA, 27 nt, Synthetic Construct
  source 1..27: mol_type = other RNA
gcatgggtggttcagtggtagaattct

SEQ ID NO: 8104 - RNA, 17 nt, Synthetic Construct
  source 1..17: mol_type = other RNA
atcgtgacgatagtgca

SEQ ID NO: 8105 - RNA, 18 nt, Synthetic Construct
  source 1..18: mol_type = other RNA
gtcgacgtatagggtgtg

SEQ ID NO: 8106 - RNA, 20 nt, Synthetic Construct
  source 1..20: mol_type = other RNA
tggaatgtaaagaagtatgt

SEQ ID NO: 8107 - RNA, 20 nt, Synthetic Construct
  source 1..20: mol_type = other RNA
tggaatgtaaagaagtatgt

SEQ ID NO: 8108 - RNA, 22 nt, Synthetic Construct
  source 1..22: mol_type = other RNA
ttataatacaacctgataagtg

SEQ ID NO: 8109 - RNA, 32 nt, Synthetic Construct; identical to SEQ ID NO: 770
  source 1..32: mol_type = other RNA

SEQ ID NO: 8110 - RNA, 24 nt, Synthetic Construct
  source 1..24: mol_type = other RNA
tgaggtagtaggttgtgtggtttc

SEQ ID NO: 8111 - RNA, 15 nt, Synthetic Construct
  source 1..15: mol_type = other RNA
gagagcctggacaca

SEQ ID NO: 8112 - RNA, 15 nt, Synthetic Construct
  source 1..15: mol_type = other RNA
gagagcctggacaca

SEQ ID NO: 8113 - RNA, 21 nt, Synthetic Construct
  source 1..21: mol_type = other RNA
tgaggtagtaggttgtgtagt

SEQ ID NO: 8114 - RNA, 21 nt, Synthetic Construct
  source 1..21: mol_type = other RNA
tgaggtagtaggttgtgtagt

SEQ ID NO: 8115 - RNA, 25 nt, Synthetic Construct
  source 1..25: mol_type = other RNA
gggttgtaaaccgcttttgtcaggg

SEQ ID NO: 8116 - RNA, 35 nt, Synthetic Construct; identical to SEQ ID NO: 2354
  source 1..35: mol_type = other RNA

SEQ ID NO: 8117 - RNA, 35 nt, Synthetic Construct; identical to SEQ ID NO: 2354
  source 1..35: mol_type = other RNA

SEQ ID NO: 8118 - RNA, 22 nt, Synthetic Construct
  source 1..22: mol_type = other RNA
tgaggtagtagtttgtgctgta

SEQ ID NO: 8119 - RNA, 25 nt, Synthetic Construct
  source 1..25: mol_type = other RNA
caaagtgctgttcgtgcaggtagtt

SEQ ID NO: 8120 - RNA, 23 nt, Synthetic Construct
  source 1..23: mol_type = other RNA
tggtaatacgacgtacttagagt

SEQ ID NO: 8121 - RNA, 23 nt, Synthetic Construct
  source 1..23: mol_type = other RNA
tggtaatacgacgtacttagagt

SEQ ID NO: 8122 - RNA, 22 nt, Synthetic Construct
  source 1..22: mol_type = other RNA
tccctgagaccctaacttgtgt

SEQ ID NO: 8123 - RNA, 24 nt, Synthetic Construct
  source 1..24: mol_type = other RNA
tgtaaacatccccgactggaggct

SEQ ID NO: 8124 - RNA, 22 nt, Synthetic Construct
  source 1..22: mol_type = other RNA
gaagcacattcgcacatcatat

SEQ ID NO: 8125 - RNA, 22 nt, Synthetic Construct
  source 1..22: mol_type = other RNA
gaagcacattcgcacatcatat

SEQ ID NO: 8126 - RNA, 27 nt, Synthetic Construct
  source 1..27: mol_type = other RNA
ccgtgtgaaagtaggtcatcgtcaggc

SEQ ID NO: 8127 - RNA, 27 nt, Synthetic Construct
  source 1..27: mol_type = other RNA
ccgtgtgaaagtaggtcatcgtcaggc

SEQ ID NO: 8128 - RNA, 17 nt, Synthetic Construct
  source 1..17: mol_type = other RNA
cgaaattccttgtcggg

SEQ ID NO: 8129 - RNA, 17 nt, Synthetic Construct
  source 1..17: mol_type = other RNA
cgaaattccttgtcggg

SEQ ID NO: 8130 - RNA, 22 nt, Synthetic Construct
  source 1..22: mol_type = other RNA
tgaggtagaaggttgtgtggtt

SEQ ID NO: 8131 - RNA, 15 nt, Synthetic Construct
  source 1..15: mol_type = other RNA
gagtagggcgggaca

SEQ ID NO: 8132 - RNA, 25 nt, Synthetic Construct
  source 1..25: mol_type = other RNA
ttggggatatgagatcgagacgaca

SEQ ID NO: 8133 - RNA, 25 nt, Synthetic Construct
  source 1..25: mol_type = other RNA
ttggggatatgagatcgagacgaca

SEQ ID NO: 8134 - RNA, 21 nt, Synthetic Construct
  source 1..21: mol_type = other RNA
tcctgtactgagctgccccaa

SEQ ID NO: 8135 - RNA, 16 nt, Synthetic Construct
  source 1..16: mol_type = other RNA
ctgacgctcatgcacg

SEQ ID NO: 8136 - RNA, 16 nt, Synthetic Construct
  source 1..16: mol_type = other RNA
ctgacgctcatgcacg

SEQ ID NO: 8137 - RNA, 32 nt, Synthetic Construct; identical to SEQ ID NO: 3092
  source 1..32: mol_type = other RNA

SEQ ID NO: 8138 - RNA, 32 nt, Synthetic Construct; identical to SEQ ID NO: 3092
  source 1..32: mol_type = other RNA

SEQ ID NO: 8139 - RNA, 34 nt, Synthetic Construct; identical to SEQ ID NO: 2186
  source 1..34: mol_type = other RNA

SEQ ID NO: 8140 - RNA, 16 nt, Synthetic Construct
  source 1..16: mol_type = other RNA
gtctacggccacacca

SEQ ID NO: 8141 - RNA, 23 nt, Synthetic Construct
  source 1..23: mol_type = other RNA
tgaggtagtaggttgtatggttt

SEQ ID NO: 8142 - RNA, 23 nt, Synthetic Construct
  source 1..23: mol_type = other RNA
tgaggtagtaggttgtatggttt

SEQ ID NO: 8143 - RNA, 23 nt, Synthetic Construct
  source 1..23: mol_type = other RNA
tcctgaactgagctgccccgaga

SEQ ID NO: 8144 - RNA, 20 nt, Synthetic Construct
  source 1..20: mol_type = other RNA
tgaggtagtaggttgtgtga

SEQ ID NO: 8145 - RNA, 23 nt, Synthetic Construct
  source 1..23: mol_type = other RNA
atcacattgccagggatttccaa

SEQ ID NO: 8146 - RNA, 35 nt, Synthetic Construct; identical to SEQ ID NO: 757
  source 1..35: mol_type = other RNA

SEQ ID NO: 8147 - RNA, 23 nt, Synthetic Construct
  source 1..23: mol_type = other RNA
tgaggtagcaggttgtgtggttt

SEQ ID NO: 8148 - RNA, 23 nt, Synthetic Construct
  source 1..23: mol_type = other RNA
tgaggtagcaggttgtgtggttt

SEQ ID NO: 8149 - RNA, 17 nt, Synthetic Construct
  source 1..17: mol_type = other RNA
gtcgacgtatagggtgt

SEQ ID NO: 8150 - RNA, 17 nt, Synthetic Construct
  source 1..17: mol_type = other RNA
gtcgacgtatagggtgt

SEQ ID NO: 8151 - RNA, 15 nt, Synthetic Construct
  source 1..15: mol_type = other RNA
gtccggatcgtagtc

SEQ ID NO: 8152 - RNA, 15 nt, Synthetic Construct
  source 1..15: mol_type = other RNA
gtccggatcgtagtc

SEQ ID NO: 8153 - RNA, 15 nt, Synthetic Construct
  source 1..15: mol_type = other RNA
gagtagggcgggaca

SEQ ID NO: 8154 - RNA, 25 nt, Synthetic Construct
  source 1..25: mol_type = other RNA
atgaggatatgagatcgagacgaca

SEQ ID NO: 8155 - RNA, 27 nt, Synthetic Construct
  source 1..27: mol_type = other RNA
ccccccactgctaaatctgactggctt

SEQ ID NO: 8156 - RNA, 27 nt, Synthetic Construct
  source 1..27: mol_type = other RNA
ccccccactgctaaatctgactggctt

SEQ ID NO: 8157 - RNA, 19 nt, Synthetic Construct
  source 1..19: mol_type = other RNA
gcgaaattccttgtcgggt

SEQ ID NO: 8158 - RNA, 23 nt, Synthetic Construct
  source 1..23: mol_type = other RNA
agcagcattgtacagggctataa

SEQ ID NO: 8159 - RNA, 23 nt, Synthetic Construct
  source 1..23: mol_type = other RNA
tgaggtagcaggttgtgtggttt

SEQ ID NO: 8160 - RNA, 21 nt, Synthetic Construct
  source 1..21: mol_type = other RNA
tgaggggcagggagcgagact

SEQ ID NO: 8161 - RNA, 22 nt, Synthetic Construct
  source 1..22: mol_type = other RNA
caacggaatcccaaaagcagca

SEQ ID NO: 8162 - RNA, 18 nt, Synthetic Construct
  source 1..18: mol_type = other RNA
atggccgggacagagggc

SEQ ID NO: 8163 - RNA, 18 nt, Synthetic Construct
  source 1..18: mol_type = other RNA
atggccgggacagagggc

SEQ ID NO: 8164 - RNA, 19 nt, Synthetic Construct
  source 1..19: mol_type = other RNA
cggaagaaggggtgcctgg

SEQ ID NO: 8165 - RNA, 19 nt, Synthetic Construct
  source 1..19: mol_type = other RNA
cggaagaaggggtgcctgg

SEQ ID NO: 8166 - RNA, 20 nt, Synthetic Construct
  source 1..20: mol_type = other RNA
cataaagtagaaagcactac

SEQ ID NO: 8167 - RNA, 15 nt, Synthetic Construct
  source 1..15: mol_type = other RNA
gttgaccgcctgggg

SEQ ID NO: 8168 - RNA, 33 nt, Synthetic Construct; identical to SEQ ID NO: 7469
  source 1..33: mol_type = other RNA

SEQ ID NO: 8169 - RNA, 34 nt, Synthetic Construct; identical to SEQ ID NO: 2367
  source 1..34: mol_type = other RNA

SEQ ID NO: 8170 - RNA, 34 nt, Synthetic Construct; identical to SEQ ID NO: 2367
  source 1..34: mol_type = other RNA

SEQ ID NO: 8171 - RNA, 23 nt, Synthetic Construct
  source 1..23: mol_type = other RNA
caaagtgccgttcgtgcaggtag

SEQ ID NO: 8172 - RNA, 23 nt, Synthetic Construct
  source 1..23: mol_type = other RNA
caaagtgctgctcgtgcaggtag

SEQ ID NO: 8173 - RNA, 20 nt, Synthetic Construct
  source 1..20: mol_type = other RNA
cgcgacctcagatcagacgt

SEQ ID NO: 8174 - RNA, 20 nt, Synthetic Construct
  source 1..20: mol_type = other RNA
cgcgacctcagatcagacgt

SEQ ID NO: 8175 - RNA, 22 nt, Synthetic Construct
  source 1..22: mol_type = other RNA
tatgtcccacccccactcctgt

SEQ ID NO: 8176 - RNA, 22 nt, Synthetic Construct
  source 1..22: mol_type = other RNA
tatgtcccacccccactcctgt

SEQ ID NO: 8177 - RNA, 23 nt, Synthetic Construct
  source 1..23: mol_type = other RNA
tgaggtagtaggttgtatggtta

SEQ ID NO: 8178 - RNA, 21 nt, Synthetic Construct
  source 1..21: mol_type = other RNA
acagtagcctgcacattggtt

SEQ ID NO: 8179 - RNA, 17 nt, Synthetic Construct
  source 1..17: mol_type = other RNA
gccatgccgcgtgcggg

SEQ ID NO: 8180 - RNA, 17 nt, Synthetic Construct
  source 1..17: mol_type = other RNA
gccatgccgcgtgcggg

SEQ ID NO: 8181 - RNA, 33 nt, Synthetic Construct; identical to SEQ ID NO: 2386
  source 1..33: mol_type = other RNA

SEQ ID NO: 8182 - RNA, 33 nt, Synthetic Construct; identical to SEQ ID NO: 2386
  source 1..33: mol_type = other RNA

SEQ ID NO: 8183 - RNA, 21 nt, Synthetic Construct
  source 1..21: mol_type = other RNA
tgaggtagcaggttgtatagt

SEQ ID NO: 8184 - RNA, 21 nt, Synthetic Construct
  source 1..21: mol_type = other RNA
tgaggtagcaggttgtatagt

SEQ ID NO: 8185 - RNA, 26 nt, Synthetic Construct
  source 1..26: mol_type = other RNA
gatttccccttggggttgtaggacca

SEQ ID NO: 8186 - RNA, 26 nt, Synthetic Construct
  source 1..26: mol_type = other RNA
gatttccccttggggttgtaggacca

SEQ ID NO: 8187 - RNA, 22 nt, Synthetic Construct
  source 1..22: mol_type = other RNA
tgaggtagtaagttgtgtggtt

SEQ ID NO: 8188 - RNA, 23 nt, Synthetic Construct
  source 1..23: mol_type = other RNA
atatcggaacgtgcccagtcgtg

SEQ ID NO: 8189 - RNA, 23 nt, Synthetic Construct
  source 1..23: mol_type = other RNA
atatcggaacgtgcccagtcgtg

SEQ ID NO: 8190 - RNA, 19 nt, Synthetic Construct
  source 1..19: mol_type = other RNA
gtacagtactgtgataact

SEQ ID NO: 8191 - RNA, 19 nt, Synthetic Construct
  source 1..19: mol_type = other RNA
gtacagtactgtgataact

SEQ ID NO: 8192 - RNA, 22 nt, Synthetic Construct
  source 1..22: mol_type = other RNA
tgagatgaagcactgtagctca

SEQ ID NO: 8193 - RNA, 23 nt, Synthetic Construct
  source 1..23: mol_type = other RNA
tgataatacgacgtacttagtgt

SEQ ID NO: 8194 - RNA, 23 nt, Synthetic Construct
  source 1..23: mol_type = other RNA
nggtaatacgacgtacttagtgt

SEQ ID NO: 8195 - RNA, 23 nt, Synthetic Construct
  source 1..23: mol_type = other RNA
nggtaatacgacgtacttagtgt

SEQ ID NO: 8196 - RNA, 23 nt, Synthetic Construct
  source 1..23: mol_type = other RNA
gcgtggtaggagagcgttctgta

SEQ ID NO: 8197 - RNA, 23 nt, Synthetic Construct
  source 1..23: mol_type = other RNA
gcgtggtaggagagcgttctgta

SEQ ID NO: 8198 - RNA, 16 nt, Synthetic Construct
  source 1..16: mol_type = other RNA
cgctagtaatcgcgga

SEQ ID NO: 8199 - RNA, 22 nt, Synthetic Construct
  source 1..22: mol_type = other RNA
gctcacggaaagagaatgaagc

SEQ ID NO: 8200 - RNA, 22 nt, Synthetic Construct
  source 1..22: mol_type = other RNA
ttcaagtaattcaggataggtc

SEQ ID NO: 8201 - RNA, 18 nt, Synthetic Construct
  source 1..18: mol_type = other RNA
cataaagtagaaagcact

SEQ ID NO: 8202 - RNA, 22 nt, Synthetic Construct
  source 1..22: mol_type = other RNA
tgaggtagtagtttatgctgtt

SEQ ID NO: 8203 - RNA, 22 nt, Synthetic Construct
  source 1..22: mol_type = other RNA
tgaggtagtagtttatgctgtt

SEQ ID NO: 8204 - RNA, 16 nt, Synthetic Construct
  source 1..16: mol_type = other RNA
gaaattccttgtcggg

SEQ ID NO: 8205 - RNA, 16 nt, Synthetic Construct
  source 1..16: mol_type = other RNA
gaaattccttgtcggg

SEQ ID NO: 8206 - RNA, 34 nt, Synthetic Construct; identical to SEQ ID NO: 2375
  source 1..34: mol_type = other RNA

SEQ ID NO: 8207 - RNA, 34 nt, Synthetic Construct; identical to SEQ ID NO: 2375
  source 1..34: mol_type = other RNA

SEQ ID NO: 8208 - RNA, 33 nt, Synthetic Construct; identical to SEQ ID NO: 2266
  source 1..33: mol_type = other RNA

SEQ ID NO: 8209 - RNA, 23 nt, Synthetic Construct
  source 1..23: mol_type = other RNA
tcctgtactgagttgccccgaga

SEQ ID NO: 8210 - RNA, 22 nt, Synthetic Construct
  source 1..22: mol_type = other RNA
tgtggtagtagtttgtgctgtt

SEQ ID NO: 8211 - RNA, 22 nt, Synthetic Construct
  source 1..22: mol_type = other RNA
tgaggtagcagtttgtgctgtt

SEQ ID NO: 8212 - RNA, 22 nt, Synthetic Construct
  source 1..22: mol_type = other RNA
ttcaagtaacccaggataggct

SEQ ID NO: 8213 - RNA, 22 nt, Synthetic Construct
  source 1..22: mol_type = other RNA
tgaggtaataggttgtatagtt

SEQ ID NO: 8214 - RNA, 16 nt, Synthetic Construct
  source 1..16: mol_type = other RNA
gtcgacgtatagggtg

SEQ ID NO: 8215 - RNA, 19 nt, Synthetic Construct
  source 1..19: mol_type = other RNA
accaaggggtcgtgggttc

SEQ ID NO: 8216 - RNA, 22 nt, Synthetic Construct
  source 1..22: mol_type = other RNA
tcctgtactgagctgccccaag

SEQ ID NO: 8217 - RNA, 25 nt, Synthetic Construct
  source 1..25: mol_type = other RNA
gtcaggatggccgagcggtctaagg

SEQ ID NO: 8218 - RNA, 25 nt, Synthetic Construct
  source 1..25: mol_type = other RNA
gtcaggatggccgagcggtctaagg

SEQ ID NO: 8219 - RNA, 23 nt, Synthetic Construct
  source 1..23: mol_type = other RNA
cgctcacggaaagagaatgaagc

SEQ ID NO: 8220 - RNA, 35 nt, Synthetic Construct; identical to SEQ ID NO: 2452
  source 1..35: mol_type = other RNA

SEQ ID NO: 8221 - RNA, 35 nt, Synthetic Construct; identical to SEQ ID NO: 2452
  source 1..35: mol_type = other RNA

SEQ ID NO: 8222 - RNA, 22 nt, Synthetic Construct
  source 1..22: mol_type = other RNA
tagcagcgcgtaaatattggcg

SEQ ID NO: 8223 - RNA, 22 nt, Synthetic Construct
  source 1..22: mol_type = other RNA
tagcagcgcgtaaatattggcg

SEQ ID NO: 8224 - RNA, 21 nt, Synthetic Construct
  source 1..21: mol_type = other RNA
tgaggtagtaggttgtatggt

SEQ ID NO: 8225 - RNA, 21 nt, Synthetic Construct
  source 1..21: mol_type = other RNA
tgaggtagtaggttgtatggt

SEQ ID NO: 8226 - RNA, 23 nt, Synthetic Construct
  source 1..23: mol_type = other RNA
tgacctatgaattgacagccaga

SEQ ID NO: 8227 - RNA, 23 nt, Synthetic Construct
  source 1..23: mol_type = other RNA
tgacctatgaattgacagccaga

SEQ ID NO: 8228 - RNA, 23 nt, Synthetic Construct
  source 1..23: mol_type = other RNA
atgacacgatcactcccgttgag

SEQ ID NO: 8229 - RNA, 22 nt, Synthetic Construct
  source 1..22: mol_type = other RNA
tggaacgtaaagaagtatgtat

SEQ ID NO: 8230 - RNA, 22 nt, Synthetic Construct
  source 1..22: mol_type = other RNA
tggaacgtaaagaagtatgtat

SEQ ID NO: 8231 - RNA, 31 nt, Synthetic Construct; identical to SEQ ID NO: 2263
  source 1..31: mol_type = other RNA

SEQ ID NO: 8232 - RNA, 31 nt, Synthetic Construct; identical to SEQ ID NO: 2263
  source 1..31: mol_type = other RNA

SEQ ID NO: 8233 - RNA, 17 nt, Synthetic Construct
  source 1..17: mol_type = other RNA
agtccggatcgtagtct

SEQ ID NO: 8234 - RNA, 33 nt, Synthetic Construct; identical to SEQ ID NO: 3082
  source 1..33: mol_type = other RNA

SEQ ID NO: 8235 - RNA, 18 nt, Synthetic Construct
  source 1..18: mol_type = other RNA
agcaggacggtggccatg

SEQ ID NO: 8236 - RNA, 18 nt, Synthetic Construct
  source 1..18: mol_type = other RNA
agcaggacggtggccatg

SEQ ID NO: 8237 - RNA, 16 nt, Synthetic Construct
  source 1..16: mol_type = other RNA
ggccgtcgtcagctcg

SEQ ID NO: 8238 - RNA, 22 nt, Synthetic Construct
  source 1..22: mol_type = other RNA
tgaggcagtaggttgtgtggtt

SEQ ID NO: 8239 - RNA, 22 nt, Synthetic Construct
  source 1..22: mol_type = other RNA
tgaggcagtaggttgtgtggtt

SEQ ID NO: 8240 - RNA, 15 nt, Synthetic Construct
  source 1..15: mol_type = other RNA
acggtcctaaggtag

SEQ ID NO: 8241 - RNA, 15 nt, Synthetic Construct
  source 1..15: mol_type = other RNA
acggtcctaaggtag

SEQ ID NO: 8242 - RNA, 16 nt, Synthetic Construct
  source 1..16: mol_type = other RNA
cccctggacctgtact

SEQ ID NO: 8243 - RNA, 16 nt, Synthetic Construct
  source 1..16: mol_type = other RNA
cccctggacctgtact

SEQ ID NO: 8244 - RNA, 22 nt, Synthetic Construct
  source 1..22: mol_type = other RNA
taggtagtttcctgttgttggg

SEQ ID NO: 8245 - RNA, 22 nt, Synthetic Construct
  source 1..22: mol_type = other RNA
taggtagtttcctgttgttggg

SEQ ID NO: 8246 - RNA, 25 nt, Synthetic Construct
  source 1..25: mol_type = other RNA
ttgaggatatgagatcgagacgacg

SEQ ID NO: 8247 - RNA, 25 nt, Synthetic Construct
  source 1..25: mol_type = other RNA
ttgaggatatgagatcgagacgacg

SEQ ID NO: 8248 - RNA, 24 nt, Synthetic Construct
  source 1..24: mol_type = other RNA
actcggcgtggcgtcggtcgtggt

SEQ ID NO: 8249 - RNA, 24 nt, Synthetic Construct
  source 1..24: mol_type = other RNA
actcggcgtggcgtcggtcgtggt

SEQ ID NO: 8250 - RNA, 35 nt, Synthetic Construct; identical to SEQ ID NO: 2452
  source 1..35: mol_type = other RNA

SEQ ID NO: 8251 - RNA, 35 nt, Synthetic Construct; identical to SEQ ID NO: 2452
  source 1..35: mol_type = other RNA

SEQ ID NO: 8252 - RNA, 21 nt, Synthetic Construct
  source 1..21: mol_type = other RNA
tcctgtactgagctgccctga

SEQ ID NO: 8253 - RNA, 21 nt, Synthetic Construct
  source 1..21: mol_type = other RNA
tcctgtactgagctgccctga

SEQ ID NO: 8254 - RNA, 23 nt, Synthetic Construct
  source 1..23: mol_type = other RNA
caaagtgctgttcgcgcaggtag

SEQ ID NO: 8255 - RNA, 23 nt, Synthetic Construct
  source 1..23: mol_type = other RNA
caaagtgctgttcgcgcaggtag

SEQ ID NO: 8256 - RNA, 21 nt, Synthetic Construct
  source 1..21: mol_type = other RNA
tgaggtagtaggttgtgtgga

SEQ ID NO: 8257 - RNA, 21 nt, Synthetic Construct
  source 1..21: mol_type = other RNA
tgaggtagtaggttgtgtgga

SEQ ID NO: 8258 - RNA, 22 nt, Synthetic Construct
  source 1..22: mol_type = other RNA
tcctgtattgagctgccccgag

SEQ ID NO: 8259 - RNA, 22 nt, Synthetic Construct
  source 1..22: mol_type = other RNA
tcctgtattgagctgccccgag

SEQ ID NO: 8260 - RNA, 21 nt, Synthetic Construct
  source 1..21: mol_type = other RNA
aattgcacggtatccatctgt

SEQ ID NO: 8261 - RNA, 21 nt, Synthetic Construct
  source 1..21: mol_type = other RNA
aattgcacggtatccatctgt

SEQ ID NO: 8262 - RNA, 22 nt, Synthetic Construct
  source 1..22: mol_type = other RNA
tcctgtactaagctgccccgag

SEQ ID NO: 8263 - RNA, 22 nt, Synthetic Construct
  source 1..22: mol_type = other RNA
tcctgtactaagctgccccgag

SEQ ID NO: 8264 - RNA, 20 nt, Synthetic Construct
  source 1..20: mol_type = other RNA
cacatgcaagtcgaacggta

SEQ ID NO: 8265 - RNA, 20 nt, Synthetic Construct
  source 1..20: mol_type = other RNA
cacatgcaagtcgaacggta

SEQ ID NO: 8266 - RNA, 21 nt, Synthetic Construct
  source 1..21: mol_type = other RNA
tgaggcagtagattgtatagt

SEQ ID NO: 8267 - RNA, 18 nt, Synthetic Construct
  source 1..18: mol_type = other RNA
ccaaggggtcgtgggttc

SEQ ID NO: 8268 - RNA, 25 nt, Synthetic Construct
  source 1..25: mol_type = other RNA
ggtaaaatggctgagtgaagcattg

SEQ ID NO: 8269 - RNA, 25 nt, Synthetic Construct
  source 1..25: mol_type = other RNA
ggtaaaatggctgagtgaagcattg

SEQ ID NO: 8270 - RNA, 32 nt, Synthetic Construct
  source 1..32: mol_type = other RNA
agcggagtagcgcagtggaagcgtgatgggct

SEQ ID NO: 8271 - RNA, 32 nt, Synthetic Construct; identical to SEQ ID NO: 8270
  source 1..32: mol_type = other RNA

SEQ ID NO: 8272 - RNA, 23 nt, Synthetic Construct
  source 1..23: mol_type = other RNA
tggtaatacgatgtacttagtgt

SEQ ID NO: 8273 - RNA, 23 nt, Synthetic Construct
  source 1..23: mol_type = other RNA
tggtaatacgatgtacttagtgt

SEQ ID NO: 8274 - RNA, 34 nt, Synthetic Construct
  source 1..34: mol_type = other RNA
ggccgtgatcgtatagtggttagtactctgcgtt

SEQ ID NO: 8275 - RNA, 34 nt, Synthetic Construct; identical to SEQ ID NO: 8274
  source 1..34: mol_type = other RNA

SEQ ID NO: 8276 - RNA, 22 nt, Synthetic Construct
  source 1..22: mol_type = other RNA
ctggctagggaaaatgattgga

SEQ ID NO: 8277 - RNA, 22 nt, Synthetic Construct
  source 1..22: mol_type = other RNA
ctggctagggaaaatgattgga

SEQ ID NO: 8278 - RNA, 25 nt, Synthetic Construct
  source 1..25: mol_type = other RNA
ttgaggatatgagatcgaggcgaca

SEQ ID NO: 8279 - RNA, 20 nt, Synthetic Construct
  source 1..20: mol_type = other RNA
gagtaggacgttgccaggtt

SEQ ID NO: 8280 - RNA, 20 nt, Synthetic Construct
  source 1..20: mol_type = other RNA
gagtaggacgttgccaggtt

SEQ ID NO: 8281 - RNA, 22 nt, Synthetic Construct
  source 1..22: mol_type = other RNA
tcctgtactgagctgccccaag

SEQ ID NO: 8282 - RNA, 22 nt, Synthetic Construct
  source 1..22: mol_type = other RNA
tcctgtactgagctgccccaag

SEQ ID NO: 8283 - RNA, 19 nt, Synthetic Construct
  source 1..19: mol_type = other RNA
tgaggtagtaggttgtata

SEQ ID NO: 8284 - RNA, 19 nt, Synthetic Construct
  source 1..19: mol_type = other RNA
tgaggtagtaggttgtata

SEQ ID NO: 8285 - RNA, 22 nt, Synthetic Construct
  source 1..22: mol_type = other RNA
ttcaagtaattcaggataggtc

SEQ ID NO: 8286 - RNA, 18 nt, Synthetic Construct
  source 1..18: mol_type = other RNA
cgccgatgatagtgcgga

SEQ ID NO: 8287 - RNA, 18 nt, Synthetic Construct
  source 1..18: mol_type = other RNA
cgccgatgatagtgcgga

SEQ ID NO: 8288 - RNA, 23 nt, Synthetic Construct
  source 1..23: mol_type = other RNA
tctcccaacccttgtaccagtga

SEQ ID NO: 8289 - RNA, 23 nt, Synthetic Construct
  source 1..23: mol_type = other RNA
tctcccaacccttgtaccagtga

SEQ ID NO: 8290 - RNA, 23 nt, Synthetic Construct
  source 1..23: mol_type = other RNA
taaagtgcttatagtgcaggtag

SEQ ID NO: 8291 - RNA, 22 nt, Synthetic Construct
  source 1..22: mol_type = other RNA
tgaggtagtaggttatgtggtt

SEQ ID NO: 8292 - RNA, 22 nt, Synthetic Construct
  source 1..22: mol_type = other RNA
tgaggtagtaggttatgtggtt

SEQ ID NO: 8293 - RNA, 23 nt, Synthetic Construct
  source 1..23: mol_type = other RNA
cactagattgtgagctcctggaa

SEQ ID NO: 8294 - RNA, 23 nt, Synthetic Construct
  source 1..23: mol_type = other RNA
cactagattgtgagctcctggaa

SEQ ID NO: 8295 - RNA, 23 nt, Synthetic Construct
  source 1..23: mol_type = other RNA
cctccctcgggagggcgcgcggg

SEQ ID NO: 8296 - RNA, 23 nt, Synthetic Construct
  source 1..23: mol_type = other RNA
cctccctcgggagggcgcgcggg

SEQ ID NO: 8297 - RNA, 17 nt, Synthetic Construct
  source 1..17: mol_type = other RNA
gcgtagatatgcggagg

SEQ ID NO: 8298 - RNA, 23 nt, Synthetic Construct
  source 1..23: mol_type = other RNA
tggaaatacgacgtacttagtgt

SEQ ID NO: 8299 - RNA, 34 nt, Synthetic Construct; identical to SEQ ID NO: 2298
  source 1..34: mol_type = other RNA

SEQ ID NO: 8300 - RNA, 23 nt, Synthetic Construct
  source 1..23: mol_type = other RNA
tggaaatacgacgtacttagtgt

SEQ ID NO: 8301 - RNA, 23 nt, Synthetic Construct
  source 1..23: mol_type = other RNA
tggaaatacgacgtacttagtgt

SEQ ID NO: 8302 - RNA, 22 nt, Synthetic Construct
  source 1..22: mol_type = other RNA
tcctgtactgagctgccccaag

SEQ ID NO: 8303 - RNA, 39 nt, Synthetic Construct; identical to SEQ ID NO: 4400
  source 1..39: mol_type = other RNA

SEQ ID NO: 8304 - RNA, 18 nt, Synthetic Construct
  source 1..18: mol_type = other RNA
agcagcattgtacagggc

SEQ ID NO: 8305 - RNA, 18 nt, Synthetic Construct
  source 1..18: mol_type = other RNA
agcagcattgtacagggc

SEQ ID NO: 8306 - RNA, 23 nt, Synthetic Construct
  source 1..23: mol_type = other RNA
cgaggtagtaggttgtgtggttt

SEQ ID NO: 8307 - RNA, 23 nt, Synthetic Construct
  source 1..23: mol_type = other RNA
cgaggtagtaggttgtgtggttt

SEQ ID NO: 8308 - RNA, 32 nt, Synthetic Construct; identical to SEQ ID NO: 2582
  source 1..32: mol_type = other RNA

SEQ ID NO: 8309 - RNA, 25 nt, Synthetic Construct
  source 1..25: mol_type = other RNA
gtgaggatatgagatcgagacgaca

SEQ ID NO: 8310 - RNA, 36 nt, Synthetic Construct; identical to SEQ ID NO: 777
  source 1..36: mol_type = other RNA

SEQ ID NO: 8311 - RNA, 36 nt, Synthetic Construct; identical to SEQ ID NO: 777
  source 1..36: mol_type = other RNA

SEQ ID NO: 8312 - RNA, 22 nt, Synthetic Construct
  source 1..22: mol_type = other RNA
ccggtcccaagggtatggctgt

SEQ ID NO: 8313 - RNA, 15 nt, Synthetic Construct
  source 1..15: mol_type = other RNA
tccggatcgtagtct

SEQ ID NO: 8314 - RNA, 32 nt, Synthetic Construct; identical to SEQ ID NO: 3092
  source 1..32: mol_type = other RNA

SEQ ID NO: 8315 - RNA, 32 nt, Synthetic Construct; identical to SEQ ID NO: 3092
  source 1..32: mol_type = other RNA

SEQ ID NO: 8316 - RNA, 21 nt, Synthetic Construct
  source 1..21: mol_type = other RNA
actcggcgtggcgtcggtcgt

SEQ ID NO: 8317 - RNA, 21 nt, Synthetic Construct
  source 1..21: mol_type = other RNA
actcggcgtggcgtcggtcgt

SEQ ID NO: 8318 - RNA, 28 nt, Synthetic Construct
  source 1..28: mol_type = other RNA
cgactcttagcggtggatcactcggctc

SEQ ID NO: 8319 - RNA, 20 nt, Synthetic Construct
  source 1..20: mol_type = other RNA
atcacattgccagggatttc

SEQ ID NO: 8320 - RNA, 20 nt, Synthetic Construct
  source 1..20: mol_type = other RNA
atcacattgccagggatttc

SEQ ID NO: 8321 - RNA, 21 nt, Synthetic Construct
  source 1..21: mol_type = other RNA
gctttgatccggagatttccg

SEQ ID NO: 8322 - RNA, 21 nt, Synthetic Construct
  source 1..21: mol_type = other RNA
gctttgatccggagatttccg

SEQ ID NO: 8323 - RNA, 25 nt, Synthetic Construct
  source 1..25: mol_type = other RNA
ttgaggatgtgagatcgagacgaca

SEQ ID NO: 8324 - RNA, 25 nt, Synthetic Construct
  source 1..25: mol_type = other RNA
ttgaggatgtgagatcgagacgaca

SEQ ID NO: 8325 - RNA, 15 nt, Synthetic Construct
  source 1..15: mol_type = other RNA
gcgtagatatgcgga

SEQ ID NO: 8326 - RNA, 27 nt, Synthetic Construct
  source 1..27: mol_type = other RNA
ttctcactactgcacttgactagtctt

SEQ ID NO: 8327 - RNA, 15 nt, Synthetic Construct
  source 1..15: mol_type = other RNA
gcgtagatatgcgga

SEQ ID NO: 8328 - RNA, 15 nt, Synthetic Construct
  source 1..15: mol_type = other RNA
gcgtagatatgcgga

SEQ ID NO: 8329 - RNA, 23 nt, Synthetic Construct
  source 1..23: mol_type = other RNA
caaagagctgttcgtgcaggtag

SEQ ID NO: 8330 - RNA, 22 nt, Synthetic Construct
  source 1..22: mol_type = other RNA
ccacctcccctgcaaacgtcca

SEQ ID NO: 8331 - RNA, 22 nt, Synthetic Construct
  source 1..22: mol_type = other RNA
ccacctcccctgcaaacgtcca

SEQ ID NO: 8332 - RNA, 39 nt, Synthetic Construct; identical to SEQ ID NO: 2398
  source 1..39: mol_type = other RNA

SEQ ID NO: 8333 - RNA, 39 nt, Synthetic Construct; identical to SEQ ID NO: 2398
  source 1..39: mol_type = other RNA

SEQ ID NO: 8334 - RNA, 22 nt, Synthetic Construct
  source 1..22: mol_type = other RNA
tcgaaccgtgagtaataatgcg

SEQ ID NO: 8335 - RNA, 17 nt, Synthetic Construct
  source 1..17: mol_type = other RNA
accaaggggtcgtgggt

SEQ ID NO: 8336 - RNA, 21 nt, Synthetic Construct
  source 1..21: mol_type = other RNA
tgaggtagtaggttgagtggt

SEQ ID NO: 8337 - RNA, 21 nt, Synthetic Construct
  source 1..21: mol_type = other RNA
tgaggtagtaggttgagtggt

SEQ ID NO: 8338 - RNA, 21 nt, Synthetic Construct
  source 1..21: mol_type = other RNA
tcctgcactgagctgccccga

SEQ ID NO: 8339 - RNA, 22 nt, Synthetic Construct
  source 1..22: mol_type = other RNA
cgaggtagtaggttgtatagtt

SEQ ID NO: 8340 - RNA, 15 nt, Synthetic Construct
  source 1..15: mol_type = other RNA
cctcgcgcgattgga

SEQ ID NO: 8341 - RNA, 15 nt, Synthetic Construct
  source 1..15: mol_type = other RNA
cctcgcgcgattgga

SEQ ID NO: 8342 - RNA, 16 nt, Synthetic Construct
  source 1..16: mol_type = other RNA
ccgcttttgtcaggga

SEQ ID NO: 8343 - RNA, 16 nt, Synthetic Construct
  source 1..16: mol_type = other RNA
ccgcttttgtcaggga

SEQ ID NO: 8344 - RNA, 15 nt, Synthetic Construct
  source 1..15: mol_type = other RNA
cgatatggcatgaga

SEQ ID NO: 8345 - RNA, 15 nt, Synthetic Construct
  source 1..15: mol_type = other RNA
cgatatggcatgaga

SEQ ID NO: 8346 - RNA, 18 nt, Synthetic Construct
  source 1..18: mol_type = other RNA
gaagttgaccgcctgggg

SEQ ID NO: 8347 - RNA, 25 nt, Synthetic Construct
  source 1..25: mol_type = other RNA
ttgaggatatgagatcgagacggca

SEQ ID NO: 8348 - RNA, 25 nt, Synthetic Construct
  source 1..25: mol_type = other RNA
ttgaggatatgagatcgagacggca

SEQ ID NO: 8349 - RNA, 23 nt, Synthetic Construct
  source 1..23: mol_type = other RNA
tgtaaacatcctcgactggaagc

SEQ ID NO: 8350 - RNA, 36 nt, Synthetic Construct; identical to SEQ ID NO: 2366
  source 1..36: mol_type = other RNA

SEQ ID NO: 8351 - RNA, 36 nt, Synthetic Construct; identical to SEQ ID NO: 2366
  source 1..36: mol_type = other RNA

SEQ ID NO: 8352 - RNA, 18 nt, Synthetic Construct
  source 1..18: mol_type = other RNA
cgaggatccattggaggg

SEQ ID NO: 8353 - RNA, 18 nt, Synthetic Construct
  source 1..18: mol_type = other RNA
cgaggatccattggaggg

SEQ ID NO: 8354 - RNA, 24 nt, Synthetic Construct
  source 1..24: mol_type = other RNA
tgtaaacatccccggctggaagct

SEQ ID NO: 8355 - RNA, 22 nt, Synthetic Construct
  source 1..22: mol_type = other RNA
tgaggtagtaagttgtatagtt

SEQ ID NO: 8356 - RNA, 22 nt, Synthetic Construct
  source 1..22: mol_type = other RNA
tgaagtagtaggttgtatagtt

SEQ ID NO: 8357 - RNA, 22 nt, Synthetic Construct
  source 1..22: mol_type = other RNA
tgaagtagtaggttgtatagtt

SEQ ID NO: 8358 - RNA, 16 nt, Synthetic Construct
  source 1..16: mol_type = other RNA
gagctgtggatagggg

SEQ ID NO: 8359 - RNA, 22 nt, Synthetic Construct
  source 1..22: mol_type = other RNA
gcagtagtctgcacattggtta

SEQ ID NO: 8360 - RNA, 30 nt, Synthetic Construct; identical to SEQ ID NO: 1079
  source 1..30: mol_type = other RNA

SEQ ID NO: 8361 - RNA, 30 nt, Synthetic Construct; identical to SEQ ID NO: 1079
  source 1..30: mol_type = other RNA

SEQ ID NO: 8362 - RNA, 22 nt, Synthetic Construct
  source 1..22: mol_type = other RNA
tgaggtggtagattgtatagtt

SEQ ID NO: 8363 - RNA, 21 nt, Synthetic Construct
  source 1..21: mol_type = other RNA
tgaggtagtagattgtataga

SEQ ID NO: 8364 - RNA, 21 nt, Synthetic Construct
  source 1..21: mol_type = other RNA
tgaggtagtagattgtataga

SEQ ID NO: 8365 - RNA, 22 nt, Synthetic Construct
  source 1..22: mol_type = other RNA
tccagtactgagctgccccgag

SEQ ID NO: 8366 - RNA, 19 nt, Synthetic Construct
  source 1..19: mol_type = other RNA
tagcttatcagactgatgt

SEQ ID NO: 8367 - RNA, 19 nt, Synthetic Construct
  source 1..19: mol_type = other RNA
tagcttatcagactgatgt

SEQ ID NO: 8368 - RNA, 16 nt, Synthetic Construct
  source 1..16: mol_type = other RNA
gcgtagatatgcggag

SEQ ID NO: 8369 - RNA, 22 nt, Synthetic Construct
  source 1..22: mol_type = other RNA
tgaggtagtaaattgtatagtt

SEQ ID NO: 8370 - RNA, 22 nt, Synthetic Construct
  source 1..22: mol_type = other RNA
tgaggtagtaaattgtatagtt

SEQ ID NO: 8371 - RNA, 32 nt, Synthetic Construct
  source 1..32: mol_type = other RNA
tgaatctgacaacagaggcttacgacccctta

SEQ ID NO: 8372 - RNA, 32 nt, Synthetic Construct; identical to SEQ ID NO: 8371
  source 1..32: mol_type = other RNA

SEQ ID NO: 8373 - RNA, 25 nt, Synthetic Construct
  source 1..25: mol_type = other RNA
ttgaggatatgagatcgaggcgaca

SEQ ID NO: 8374 - RNA, 22 nt, Synthetic Construct
  source 1..22: mol_type = other RNA
tcgaaccgtgagtaataatgcg

SEQ ID NO: 8375 - RNA, 22 nt, Synthetic Construct
  source 1..22: mol_type = other RNA
tcgaaccgtgagtaataatgcg

SEQ ID NO: 8376 - RNA, 22 nt, Synthetic Construct
  source 1..22: mol_type = other RNA
tgaggtagtagtttgtgctggt

SEQ ID NO: 8377 - RNA, 22 nt, Synthetic Construct
  source 1..22: mol_type = other RNA
tgaggtagtagtttgtgctggt

SEQ ID NO: 8378 - RNA, 22 nt, Synthetic Construct
  source 1..22: mol_type = other RNA
tgaggtagtaggttgtatagtc

SEQ ID NO: 8379 - RNA, 27 nt, Synthetic Construct
  source 1..27: mol_type = other RNA
cggtataccgaagctctaggtgcggca

SEQ ID NO: 8380 - RNA, 27 nt, Synthetic Construct
  source 1..27: mol_type = other RNA
cggtataccgaagctctaggtgcggca

SEQ ID NO: 8381 - RNA, 37 nt, Synthetic Construct; identical to SEQ ID NO: 2607
  source 1..37: mol_type = other RNA

SEQ ID NO: 8382 - RNA, 37 nt, Synthetic Construct; identical to SEQ ID NO: 2607
  source 1..37: mol_type = other RNA

SEQ ID NO: 8383 - RNA, 20 nt, Synthetic Construct
  source 1..20: mol_type = other RNA
tgtcttgcaggccgtcatgc

SEQ ID NO: 8384 - RNA, 20 nt, Synthetic Construct
  source 1..20: mol_type = other RNA
tgtcttgcaggccgtcatgc

SEQ ID NO: 8385 - RNA, 22 nt, Synthetic Construct
  source 1..22: mol_type = other RNA
tggaatgtaaagaagtatgcat

SEQ ID NO: 8386 - RNA, 22 nt, Synthetic Construct
  source 1..22: mol_type = other RNA
tggaatgtaaagaagtatgcat

SEQ ID NO: 8387 - RNA, 23 nt, Synthetic Construct
  source 1..23: mol_type = other RNA
naaagtgctgttcgtgcaggtag

SEQ ID NO: 8388 - RNA, 22 nt, Synthetic Construct
  source 1..22: mol_type = other RNA
catagcacttgtctcggtctga

SEQ ID NO: 8389 - RNA, 22 nt, Synthetic Construct
  source 1..22: mol_type = other RNA
catagcacttgtctcggtctga

SEQ ID NO: 8390 - RNA, 30 nt, Synthetic Construct; identical to SEQ ID NO: 2274
  source 1..30: mol_type = other RNA

SEQ ID NO: 8391 - RNA, 30 nt, Synthetic Construct; identical to SEQ ID NO: 2274
  source 1..30: mol_type = other RNA

SEQ ID NO: 8392 - RNA, 17 nt, Synthetic Construct
  source 1..17: mol_type = other RNA
ctaatgagactgccggt

SEQ ID NO: 8393 - RNA, 32 nt, Synthetic Construct; identical to SEQ ID NO: 3541
  source 1..32: mol_type = other RNA

SEQ ID NO: 8394 - RNA, 32 nt, Synthetic Construct; identical to SEQ ID NO: 3541
  source 1..32: mol_type = other RNA

SEQ ID NO: 8395 - RNA, 29 nt, Synthetic Construct
  source 1..29: mol_type = other RNA
cccgtgtgaaagtaggtcatcgtcaggct

SEQ ID NO: 8396 - RNA, 16 nt, Synthetic Construct
  source 1..16: mol_type = other RNA
ccatgccgcgtgcggg

SEQ ID NO: 8397 - RNA, 21 nt, Synthetic Construct
  source 1..21: mol_type = other RNA
gtgggcgtttgaagtgaagtg

SEQ ID NO: 8398 - RNA, 20 nt, Synthetic Construct
  source 1..20: mol_type = other RNA
gtcagtttgtcaaatacccc

SEQ ID NO: 8399 - RNA, 36 nt, Synthetic Construct; identical to SEQ ID NO: 2520
  source 1..36: mol_type = other RNA

SEQ ID NO: 8400 - RNA, 36 nt, Synthetic Construct; identical to SEQ ID NO: 2520
  source 1..36: mol_type = other RNA

SEQ ID NO: 8401 - RNA, 22 nt, Synthetic Construct
  source 1..22: mol_type = other RNA
tggggtagtagtttgtgctgtt

SEQ ID NO: 8402 - RNA, 16 nt, Synthetic Construct
  source 1..16: mol_type = other RNA
gtctacggacatacca

SEQ ID NO: 8403 - RNA, 36 nt, Synthetic Construct; identical to SEQ ID NO: 744
  source 1..36: mol_type = other RNA

SEQ ID NO: 8404 - RNA, 36 nt, Synthetic Construct; identical to SEQ ID NO: 744
  source 1..36: mol_type = other RNA

SEQ ID NO: 8405 - RNA, 21 nt, Synthetic Construct
  source 1..21: mol_type = other RNA
tgaggtagtagattgtgtagt

SEQ ID NO: 8406 - RNA, 21 nt, Synthetic Construct
  source 1..21: mol_type = other RNA
tgaggtagtagattgtgtagt

SEQ ID NO: 8407 - RNA, 23 nt, Synthetic Construct
  source 1..23: mol_type = other RNA
cgagagtaggacgttgccaggtt

SEQ ID NO: 8408 - RNA, 23 nt, Synthetic Construct
  source 1..23: mol_type = other RNA
cgagagtaggacgttgccaggtt

SEQ ID NO: 8409 - RNA, 23 nt, Synthetic Construct
  source 1..23: mol_type = other RNA
tggtaatacgatgtacttagtgt

SEQ ID NO: 8410 - RNA, 23 nt, Synthetic Construct
  source 1..23: mol_type = other RNA
tggtaatacgatgtacttagtgt

SEQ ID NO: 8411 - RNA, 22 nt, Synthetic Construct
  source 1..22: mol_type = other RNA
tgaggtagtaggttgtatagta

SEQ ID NO: 8412 - RNA, 20 nt, Synthetic Construct
  source 1..20: mol_type = other RNA
caatggccgggacagagggc

SEQ ID NO: 8413 - RNA, 20 nt, Synthetic Construct
  source 1..20: mol_type = other RNA
caatggccgggacagagggc

SEQ ID NO: 8414 - RNA, 20 nt, Synthetic Construct
  source 1..20: mol_type = other RNA
acagtagtctgcacattggt

SEQ ID NO: 8415 - RNA, 20 nt, Synthetic Construct
  source 1..20: mol_type = other RNA
acagtagtctgcacattggt

SEQ ID NO: 8416 - RNA, 22 nt, Synthetic Construct
  source 1..22: mol_type = other RNA
tgaggtagtagtttgtgttgtt

SEQ ID NO: 8417 - RNA, 22 nt, Synthetic Construct
  source 1..22: mol_type = other RNA
tgaggtagtagtttgtgttgtt

SEQ ID NO: 8418 - RNA, 37 nt, Synthetic Construct; identical to SEQ ID NO: 2211
  source 1..37: mol_type = other RNA

SEQ ID NO: 8419 - RNA, 37 nt, Synthetic Construct; identical to SEQ ID NO: 2211
  source 1..37: mol_type = other RNA

SEQ ID NO: 8420 - RNA, 22 nt, Synthetic Construct
  source 1..22: mol_type = other RNA
tgtggtagtaggttgtgtggtt

SEQ ID NO: 8421 - RNA, 22 nt, Synthetic Construct
  source 1..22: mol_type = other RNA
tgtggtagtaggttgtgtggtt

SEQ ID NO: 8422 - RNA, 21 nt, Synthetic Construct
  source 1..21: mol_type = other RNA
tgaggtagcaggttgtgtggt

SEQ ID NO: 8423 - RNA, 21 nt, Synthetic Construct
  source 1..21: mol_type = other RNA
tgaggtagcaggttgtgtggt

SEQ ID NO: 8424 - RNA, 20 nt, Synthetic Construct
  source 1..20: mol_type = other RNA
tgaggtagtaagttgtattg

SEQ ID NO: 8425 - RNA, 22 nt, Synthetic Construct
  source 1..22: mol_type = other RNA
tgaggtagtaggttgtacagtt

SEQ ID NO: 8426 - RNA, 22 nt, Synthetic Construct
  source 1..22: mol_type = other RNA
tgaggtagtaggttgtacagtt

SEQ ID NO: 8427 - RNA, 22 nt, Synthetic Construct
  source 1..22: mol_type = other RNA
atcacattgccagggatttcca

SEQ ID NO: 8428 - RNA, 24 nt, Synthetic Construct
  source 1..24: mol_type = other RNA
tgagaactgaattccatgggttga

SEQ ID NO: 8429 - RNA, 24 nt, Synthetic Construct
  source 1..24: mol_type = other RNA
tgagaactgaattccatgggttga

SEQ ID NO: 8430 - RNA, 33 nt, Synthetic Construct; identical to SEQ ID NO: 2209
  source 1..33: mol_type = other RNA

SEQ ID NO: 8431 - RNA, 22 nt, Synthetic Construct
  source 1..22: mol_type = other RNA
cgaggtagtagtttgtgctgtt

SEQ ID NO: 8432 - RNA, 22 nt, Synthetic Construct
  source 1..22: mol_type = other RNA
tcgtgccgtgagtaataatgcg

SEQ ID NO: 8433 - RNA, 22 nt, Synthetic Construct
  source 1..22: mol_type = other RNA
taaggtagtaggttgtatagtt

SEQ ID NO: 8434 - RNA, 26 nt, Synthetic Construct
  source 1..26: mol_type = other RNA
aacattcaacgctgtcggtgagtttt

SEQ ID NO: 8435 - RNA, 30 nt, Synthetic Construct; identical to SEQ ID NO: 751
  source 1..30: mol_type = other RNA

SEQ ID NO: 8436 - RNA, 23 nt, Synthetic Construct
  source 1..23: mol_type = other RNA
atatcggaacgtgcccagtcgtg

SEQ ID NO: 8437 - RNA, 23 nt, Synthetic Construct
  source 1..23: mol_type = other RNA
atatcggaacgtgcccagtcgtg

SEQ ID NO: 8438 - RNA, 22 nt, Synthetic Construct
  source 1..22: mol_type = other RNA
tgaggtaataggttgtgtggtt

SEQ ID NO: 8439 - RNA, 23 nt, Synthetic Construct
  source 1..23: mol_type = other RNA
tggtaacacgacgtacttagtgt

SEQ ID NO: 8440 - RNA, 15 nt, Synthetic Construct
  source 1..15: mol_type = other RNA
gagagcctggacaca

SEQ ID NO: 8441 - RNA, 24 nt, Synthetic Construct
  source 1..24: mol_type = other RNA
tcctgtactgagctgccccgagat

SEQ ID NO: 8442 - RNA, 20 nt, Synthetic Construct
  source 1..20: mol_type = other RNA
tgaggaagtaggttgtgtgg

SEQ ID NO: 8443 - RNA, 22 nt, Synthetic Construct
  source 1..22: mol_type = other RNA
tgagatagtagattgtatagtt

SEQ ID NO: 8444 - RNA, 22 nt, Synthetic Construct
  source 1..22: mol_type = other RNA
tgagatagtagattgtatagtt

SEQ ID NO: 8445 - RNA, 22 nt, Synthetic Construct
  source 1..22: mol_type = other RNA
tgaggtagtagtctgtgctgtt

SEQ ID NO: 8446 - RNA, 22 nt, Synthetic Construct
  source 1..22: mol_type = other RNA
tgaggtagtagtctgtgctgtt

SEQ ID NO: 8447 - RNA, 23 nt, Synthetic Construct
  source 1..23: mol_type = other RNA
tggtaataagacgtacttagtgt

SEQ ID NO: 8448 - RNA, 23 nt, Synthetic Construct
  source 1..23: mol_type = other RNA
tggtaatacgacgtactcagtgt

SEQ ID NO: 8449 - RNA, 20 nt, Synthetic Construct
  source 1..20: mol_type = other RNA
tgaggtagaaggttgtgtgg

SEQ ID NO: 8450 - RNA, 15 nt, Synthetic Construct
  source 1..15: mol_type = other RNA
ttccgaaagtagtgg

SEQ ID NO: 8451 - RNA, 15 nt, Synthetic Construct
  source 1..15: mol_type = other RNA
gggtgaaagcggggg

SEQ ID NO: 8452 - RNA, 16 nt, Synthetic Construct
  source 1..16: mol_type = other RNA
gcctacggccatacca

SEQ ID NO: 8453 - RNA, 19 nt, Synthetic Construct
  source 1..19: mol_type = other RNA
tctaatgagactgccggtg

SEQ ID NO: 8454 - RNA, 24 nt, Synthetic Construct
  source 1..24: mol_type = other RNA
agcaacattgtctgctgggtttct

SEQ ID NO: 8455 - RNA, 22 nt, Synthetic Construct
  source 1..22: mol_type = other RNA
tcgtaccgtgagtaatgatgcg

SEQ ID NO: 8456 - RNA, 32 nt, Synthetic Construct; identical to SEQ ID NO: 8371
  source 1..32: mol_type = other RNA

SEQ ID NO: 8457 - RNA, 32 nt, Synthetic Construct; identical to SEQ ID NO: 8371
  source 1..32: mol_type = other RNA

SEQ ID NO: 8458 - RNA, 18 nt, Synthetic Construct
  source 1..18: mol_type = other RNA
gtccggatcgtagtctgc

SEQ ID NO: 8459 - RNA, 15 nt, Synthetic Construct
  source 1..15: mol_type = other RNA
gtcgacgtatagggt

SEQ ID NO: 8460 - RNA, 15 nt, Synthetic Construct
  source 1..15: mol_type = other RNA
gtcgacgtatagggt

SEQ ID NO: 8461 - RNA, 16 nt, Synthetic Construct
  source 1..16: mol_type = other RNA
gtctacggccgtacca

SEQ ID NO: 8462 - RNA, 18 nt, Synthetic Construct
  source 1..18: mol_type = other RNA
ggttcgattccggagagg

SEQ ID NO: 8463 - RNA, 18 nt, Synthetic Construct
  source 1..18: mol_type = other RNA
ggttcgattccggagagg

SEQ ID NO: 8464 - RNA, 21 nt, Synthetic Construct
  source 1..21: mol_type = other RNA
tccttcattccaccggagtct

SEQ ID NO: 8465 - RNA, 21 nt, Synthetic Construct
  source 1..21: mol_type = other RNA
tccttcattccaccggagtct

SEQ ID NO: 8466 - RNA, 22 nt, Synthetic Construct
  source 1..22: mol_type = other RNA
tcgtaccgtgggtaataatgcg

SEQ ID NO: 8467 - RNA, 22 nt, Synthetic Construct
  source 1..22: mol_type = other RNA
tcgtaccgtgggtaataatgcg

SEQ ID NO: 8468 - RNA, 22 nt, Synthetic Construct
  source 1..22: mol_type = other RNA
taaggtagtagtttgtgctgtt

SEQ ID NO: 8469 - RNA, 15 nt, Synthetic Construct
  source 1..15: mol_type = other RNA
cgactcttagcggtg

SEQ ID NO: 8470 - RNA, 15 nt, Synthetic Construct
  source 1..15: mol_type = other RNA
cgactcttagcggtg

SEQ ID NO: 8471 - RNA, 35 nt, Synthetic Construct; identical to SEQ ID NO: 787
  source 1..35: mol_type = other RNA

SEQ ID NO: 8472 - RNA, 35 nt, Synthetic Construct; identical to SEQ ID NO: 787
  source 1..35: mol_type = other RNA

SEQ ID NO: 8473 - RNA, 23 nt, Synthetic Construct
  source 1..23: mol_type = other RNA
actcggcgtggcgtcggtcgtgt

SEQ ID NO: 8474 - RNA, 23 nt, Synthetic Construct
  source 1..23: mol_type = other RNA
actcggcgtggcgtcggtcgtgt

SEQ ID NO: 8475 - RNA, 23 nt, Synthetic Construct
  source 1..23: mol_type = other RNA
tctttggttatctagctgtatgt

SEQ ID NO: 8476 - RNA, 23 nt, Synthetic Construct
  source 1..23: mol_type = other RNA
tctttggttatctagctgtatgt

SEQ ID NO: 8477 - RNA, 16 nt, Synthetic Construct
  source 1..16: mol_type = other RNA
cgcgacctcagatcag

SEQ ID NO: 8478 - RNA, 16 nt, Synthetic Construct
  source 1..16: mol_type = other RNA
cgcgacctcagatcag

SEQ ID NO: 8479 - RNA, 30 nt, Synthetic Construct; identical to SEQ ID NO: 1958
  source 1..30: mol_type = other RNA

SEQ ID NO: 8480 - RNA, 22 nt, Synthetic Construct
  source 1..22: mol_type = other RNA
tcgtaccgtgagtgataatgcg

SEQ ID NO: 8481 - RNA, 22 nt, Synthetic Construct
  source 1..22: mol_type = other RNA
ctccctcgggagggcgcgcggg

SEQ ID NO: 8482 - RNA, 22 nt, Synthetic Construct
  source 1..22: mol_type = other RNA
ctccctcgggagggcgcgcggg

SEQ ID NO: 8483 - RNA, 22 nt, Synthetic Construct
  source 1..22: mol_type = other RNA
tgtggtagtagtttgtgctgtt

SEQ ID NO: 8484 - RNA, 31 nt, Synthetic Construct; identical to SEQ ID NO: 6001
  source 1..31: mol_type = other RNA

SEQ ID NO: 8485 - RNA, 31 nt, Synthetic Construct; identical to SEQ ID NO: 6001
  source 1..31: mol_type = other RNA

SEQ ID NO: 8486 - RNA, 21 nt, Synthetic Construct
  source 1..21: mol_type = other RNA
ggaatcgctagtaatcgcgga

SEQ ID NO: 8487 - RNA, 21 nt, Synthetic Construct
  source 1..21: mol_type = other RNA
ggaatcgctagtaatcgcgga

SEQ ID NO: 8488 - RNA, 28 nt, Synthetic Construct
  source 1..28: mol_type = other RNA
ccccccgctgctaaatttgactggcttt

SEQ ID NO: 8489 - RNA, 34 nt, Synthetic Construct; identical to SEQ ID NO: 2317
  source 1..34: mol_type = other RNA

SEQ ID NO: 8490 - RNA, 34 nt, Synthetic Construct; identical to SEQ ID NO: 2317
  source 1..34: mol_type = other RNA

SEQ ID NO: 8491 - RNA, 15 nt, Synthetic Construct
  source 1..15: mol_type = other RNA
gggtgaaagcggggg

SEQ ID NO: 8492 - RNA, 15 nt, Synthetic Construct
  source 1..15: mol_type = other RNA
gggtgaaagcggggg

SEQ ID NO: 8493 - RNA, 30 nt, Synthetic Construct; identical to SEQ ID NO: 1194
  source 1..30: mol_type = other RNA

SEQ ID NO: 8494 - RNA, 30 nt, Synthetic Construct; identical to SEQ ID NO: 1194
  source 1..30: mol_type = other RNA

SEQ ID NO: 8495 - RNA, 22 nt, Synthetic Construct
  source 1..22: mol_type = other RNA
tgaggtagtagtttgtgccgtt

SEQ ID NO: 8496 - RNA, 26 nt, Synthetic Construct
  source 1..26: mol_type = other RNA
tccctggtggtctagtggttaggatt

SEQ ID NO: 8497 - RNA, 26 nt, Synthetic Construct
  source 1..26: mol_type = other RNA
tccctggtggtctagtggttaggatt

SEQ ID NO: 8498 - RNA, 20 nt, Synthetic Construct
  source 1..20: mol_type = other RNA
tgaggtagtaggttgtgtgt

SEQ ID NO: 8499 - RNA, 20 nt, Synthetic Construct
  source 1..20: mol_type = other RNA
tgaggtagtaggttgtgtgt

SEQ ID NO: 8500 - RNA, 23 nt, Synthetic Construct
  source 1..23: mol_type = other RNA
tcctgcactgagctgccccgagt

SEQ ID NO: 8501 - RNA, 23 nt, Synthetic Construct
  source 1..23: mol_type = other RNA
tcctgcactgagctgccccgagt

SEQ ID NO: 8502 - RNA, 19 nt, Synthetic Construct
  source 1..19: mol_type = other RNA
cggaagaaggggtgcctgg

SEQ ID NO: 8503 - RNA, 19 nt, Synthetic Construct
  source 1..19: mol_type = other RNA
cggaagaaggggtgcctgg

SEQ ID NO: 8504 - RNA, 21 nt, Synthetic Construct
  source 1..21: mol_type = other RNA
ccctgtactgagctgccccga

SEQ ID NO: 8505 - RNA, 22 nt, Synthetic Construct
  source 1..22: mol_type = other RNA
tagcagcacgcaaatattggcg

SEQ ID NO: 8506 - RNA, 22 nt, Synthetic Construct
  source 1..22: mol_type = other RNA
tagcagcacgcaaatattggcg

SEQ ID NO: 8507 - RNA, 22 nt, Synthetic Construct
  source 1..22: mol_type = other RNA
tcctgtacagagctgccccgag

SEQ ID NO: 8508 - RNA, 22 nt, Synthetic Construct
  source 1..22: mol_type = other RNA
tcctgtacagagctgccccgag

SEQ ID NO: 8509 - RNA, 23 nt, Synthetic Construct
  source 1..23: mol_type = other RNA
tggcagtgtcttagctggttgtt

SEQ ID NO: 8510 - RNA, 23 nt, Synthetic Construct
  source 1..23: mol_type = other RNA
tggcagtgtcttagctggttgtt

SEQ ID NO: 8511 - RNA, 21 nt, Synthetic Construct
  source 1..21: mol_type = other RNA
tgaggaagtaggttgtgtggt

SEQ ID NO: 8512 - RNA, 22 nt, Synthetic Construct
  source 1..22: mol_type = other RNA
attgcacttgtcccggcctgtt

SEQ ID NO: 8513 - RNA, 22 nt, Synthetic Construct
  source 1..22: mol_type = other RNA
attgcacttgtcccggcctgtt

SEQ ID NO: 8514 - RNA, 21 nt, Synthetic Construct
  source 1..21: mol_type = other RNA
cggtcccaagggtatggctgt

SEQ ID NO: 8515 - RNA, 16 nt, Synthetic Construct
  source 1..16: mol_type = other RNA
aggtcatcattatctg

SEQ ID NO: 8516 - RNA, 16 nt, Synthetic Construct
  source 1..16: mol_type = other RNA
tgcaagtcgaacggta

SEQ ID NO: 8517 - RNA, 16 nt, Synthetic Construct
  source 1..16: mol_type = other RNA
tgcaagtcgaacggta

SEQ ID NO: 8518 - RNA, 23 nt, Synthetic Construct
  source 1..23: mol_type = other RNA
gggtaatacgacgtacttagtgt

SEQ ID NO: 8519 - RNA, 22 nt, Synthetic Construct
  source 1..22: mol_type = other RNA
ngaggtagtaggttgtgtggtt

SEQ ID NO: 8520 - RNA, 22 nt, Synthetic Construct
  source 1..22: mol_type = other RNA
ngaggtagtaggttgtgtggtt

SEQ ID NO: 8521 - RNA, 27 nt, Synthetic Construct
  source 1..27: mol_type = other RNA
atagtctttgttcgattccgttgagta

SEQ ID NO: 8522 - RNA, 27 nt, Synthetic Construct
  source 1..27: mol_type = other RNA
atagtctttgttcgattccgttgagta

SEQ ID NO: 8523 - RNA, 24 nt, Synthetic Construct
  source 1..24: mol_type = other RNA
gaaagattaaggcaagaggttagc

SEQ ID NO: 8524 - RNA, 24 nt, Synthetic Construct
  source 1..24: mol_type = other RNA
gaaagattaaggcaagaggttagc

SEQ ID NO: 8525 - RNA, 23 nt, Synthetic Construct
  source 1..23: mol_type = other RNA
tggtaatacgacgtactaagtgt

SEQ ID NO: 8526 - RNA, 25 nt, Synthetic Construct
  source 1..25: mol_type = other RNA
ctgaggatatgagatcgagacgaca

SEQ ID NO: 8527 - RNA, 25 nt, Synthetic Construct
  source 1..25: mol_type = other RNA
ttgaggatgtgagatcgagacgaca

SEQ ID NO: 8528 - RNA, 22 nt, Synthetic Construct
  source 1..22: mol_type = other RNA
tcctgtactgagccgccccgag

SEQ ID NO: 8529 - RNA, 23 nt, Synthetic Construct
  source 1..23: mol_type = other RNA
tgaggtagtaggttgcgtggttt

SEQ ID NO: 8530 - RNA, 23 nt, Synthetic Construct
  source 1..23: mol_type = other RNA
tgaggtagtaggttgcgtggttt

SEQ ID NO: 8531 - RNA, 23 nt, Synthetic Construct
  source 1..23: mol_type = other RNA
tggtaacacgacgtacttagtgt

SEQ ID NO: 8532 - RNA, 16 nt, Synthetic Construct
  source 1..16: mol_type = other RNA
cccagaaacccggtcg

SEQ ID NO: 8533 - RNA, 22 nt, Synthetic Construct
  source 1..22: mol_type = other RNA
tcctgtgctgagctgccccgag

SEQ ID NO: 8534 - RNA, 22 nt, Synthetic Construct
  source 1..22: mol_type = other RNA
tgaggtagtaggttgtgaggtt

SEQ ID NO: 8535 - RNA, 22 nt, Synthetic Construct
  source 1..22: mol_type = other RNA
tgaggtagtaggttgtgaggtt

SEQ ID NO: 8536 - RNA, 21 nt, Synthetic Construct
  source 1..21: mol_type = other RNA
tgaggtagtagtctgtgctgt

SEQ ID NO: 8537 - RNA, 26 nt, Synthetic Construct
  source 1..26: mol_type = other RNA
gagcagctaataccgcatacgacctg

SEQ ID NO: 8538 - RNA, 26 nt, Synthetic Construct
  source 1..26: mol_type = other RNA
gagcagctaataccgcatacgacctg

SEQ ID NO: 8539 - RNA, 23 nt, Synthetic Construct
  source 1..23: mol_type = other RNA
ttggtccccttcaaccagctgtt

SEQ ID NO: 8540 - RNA, 21 nt, Synthetic Construct
  source 1..21: mol_type = other RNA
tgaggtagtagattgtatagc

SEQ ID NO: 8541 - RNA, 16 nt, Synthetic Construct
  source 1..16: mol_type = other RNA
tgcgtagatatgcgga

SEQ ID NO: 8542 - RNA, 23 nt, Synthetic Construct
  source 1..23: mol_type = other RNA
tcctgtactgagctgccctgagt

SEQ ID NO: 8543 - RNA, 23 nt, Synthetic Construct
  source 1..23: mol_type = other RNA
tcctgtactgagctgccctgagt

SEQ ID NO: 8544 - RNA, 34 nt, Synthetic Construct; identical to SEQ ID NO: 2317
  source 1..34: mol_type = other RNA

SEQ ID NO: 8545 - RNA, 16 nt, Synthetic Construct
  source 1..16: mol_type = other RNA
gcggtggatgatgtgg

SEQ ID NO: 8546 - RNA, 16 nt, Synthetic Construct
  source 1..16: mol_type = other RNA
gcggtggatgatgtgg

SEQ ID NO: 8547 - RNA, 32 nt, Synthetic Construct
  source 1..32: mol_type = other RNA
tcccctgtggtctagtggttaggattcggcgc

SEQ ID NO: 8548 - RNA, 22 nt, Synthetic Construct
  source 1..22: mol_type = other RNA
tagcatatcgagcctgagaaca

SEQ ID NO: 8549 - RNA, 22 nt, Synthetic Construct
  source 1..22: mol_type = other RNA
tagcatatcgagcctgagaaca

SEQ ID NO: 8550 - RNA, 24 nt, Synthetic Construct
  source 1..24: mol_type = other RNA
gatgaggcgtgataacgagtctgc

SEQ ID NO: 8551 - RNA, 24 nt, Synthetic Construct
  source 1..24: mol_type = other RNA
gatgaggcgtgataacgagtctgc

SEQ ID NO: 8552 - RNA, 34 nt, Synthetic Construct; identical to SEQ ID NO: 1526
  source 1..34: mol_type = other RNA

SEQ ID NO: 8553 - RNA, 42 nt, Synthetic Construct; identical to SEQ ID NO: 8009
  source 1..42: mol_type = other RNA

SEQ ID NO: 8554 - RNA, 42 nt, Synthetic Construct; identical to SEQ ID NO: 8009
  source 1..42: mol_type = other RNA

SEQ ID NO: 8555 - RNA, 29 nt, Synthetic Construct
  source 1..29: mol_type = other RNA
cccgtgtgaaagtaggtcatcgtcaggct

SEQ ID NO: 8556 - RNA, 29 nt, Synthetic Construct
  source 1..29: mol_type = other RNA
cccgtgtgaaagtaggtcatcgtcaggct

SEQ ID NO: 8557 - RNA, 23 nt, Synthetic Construct
  source 1..23: mol_type = other RNA
tgaggtagtaggtcgtgtggttt

SEQ ID NO: 8558 - RNA, 20 nt, Synthetic Construct
  source 1..20: mol_type = other RNA
ggaggtagtaggttgtgtgg

SEQ ID NO: 8559 - RNA, 20 nt, Synthetic Construct
  source 1..20: mol_type = other RNA
ggaggtagtaggttgtgtgg

SEQ ID NO: 8560 - RNA, 27 nt, Synthetic Construct
  source 1..27: mol_type = other RNA
tcctgagtagctcagcggcagagcggg

SEQ ID NO: 8561 - RNA, 27 nt, Synthetic Construct
  source 1..27: mol_type = other RNA
tcctgagtagctcagcggcagagcggg

SEQ ID NO: 8562 - RNA, 22 nt, Synthetic Construct
  source 1..22: mol_type = other RNA
tgaggtagaaggttgtatagtt

SEQ ID NO: 8563 - RNA, 21 nt, Synthetic Construct
  source 1..21: mol_type = other RNA
tgaggtagtaggttgtatagc

SEQ ID NO: 8564 - RNA, 21 nt, Synthetic Construct
  source 1..21: mol_type = other RNA
tgaggtagtaggttgtatagc

SEQ ID NO: 8565 - RNA, 27 nt, Synthetic Construct
  source 1..27: mol_type = other RNA
gcgggcgtagctcaggggtagagcgca

SEQ ID NO: 8566 - RNA, 27 nt, Synthetic Construct
  source 1..27: mol_type = other RNA
gcgggcgtagctcaggggtagagcgca

SEQ ID NO: 8567 - RNA, 24 nt, Synthetic Construct
  source 1..24: mol_type = other RNA
cggagaaggttagctcagccaact

SEQ ID NO: 8568 - RNA, 24 nt, Synthetic Construct
  source 1..24: mol_type = other RNA
cggagaaggttagctcagccaact

SEQ ID NO: 8569 - RNA, 22 nt, Synthetic Construct
  source 1..22: mol_type = other RNA
tagcaccatttgaaatcggtta

SEQ ID NO: 8570 - RNA, 39 nt, Synthetic Construct; identical to SEQ ID NO: 2980
  source 1..39: mol_type = other RNA

SEQ ID NO: 8571 - RNA, 39 nt, Synthetic Construct; identical to SEQ ID NO: 2980
  source 1..39: mol_type = other RNA

SEQ ID NO: 8572 - RNA, 23 nt, Synthetic Construct
  source 1..23: mol_type = other RNA
tgaggtagtaggttgtgcggttt

SEQ ID NO: 8573 - RNA, 21 nt, Synthetic Construct
  source 1..21: mol_type = other RNA
tggggtagtagattgtatagt

SEQ ID NO: 8574 - RNA, 30 nt, Synthetic Construct; identical to SEQ ID NO: 2308
  source 1..30: mol_type = other RNA

SEQ ID NO: 8575 - RNA, 30 nt, Synthetic Construct; identical to SEQ ID NO: 2308
  source 1..30: mol_type = other RNA

SEQ ID NO: 8576 - RNA, 23 nt, Synthetic Construct
  source 1..23: mol_type = other RNA
nggtaatacgacgtacttagtgt

SEQ ID NO: 8577 - RNA, 23 nt, Synthetic Construct
  source 1..23: mol_type = other RNA
tggtaatacgacgtacttagagt

SEQ ID NO: 8578 - RNA, 23 nt, Synthetic Construct
  source 1..23: mol_type = other RNA
tggtaatacgacgtacttagagt

SEQ ID NO: 8579 - RNA, 23 nt, Synthetic Construct
  source 1..23: mol_type = other RNA
tgaggggaagagagcgagacttt

SEQ ID NO: 8580 - RNA, 20 nt, Synthetic Construct
  source 1..20: mol_type = other RNA
tcacagtgaaccggtctctt

SEQ ID NO: 8581 - RNA, 25 nt, Synthetic Construct
  source 1..25: mol_type = other RNA
ttgaggatacgagatcgagacgaca

SEQ ID NO: 8582 - RNA, 25 nt, Synthetic Construct
  source 1..25: mol_type = other RNA
ttgaggatacgagatcgagacgaca

SEQ ID NO: 8583 - RNA, 17 nt, Synthetic Construct
  source 1..17: mol_type = other RNA
gtcgacgtatagggtgt

SEQ ID NO: 8584 - RNA, 25 nt, Synthetic Construct
  source 1..25: mol_type = other RNA
tgcgagagtaggacgttgccaggtt

SEQ ID NO: 8585 - RNA, 25 nt, Synthetic Construct
  source 1..25: mol_type = other RNA
tgcgagagtaggacgttgccaggtt

SEQ ID NO: 8586 - RNA, 22 nt, Synthetic Construct
  source 1..22: mol_type = other RNA
tcctgtactgagttgccccgag

SEQ ID NO: 8587 - RNA, 22 nt, Synthetic Construct
  source 1..22: mol_type = other RNA
tcctgtactgagttgccccgag

SEQ ID NO: 8588 - RNA, 23 nt, Synthetic Construct
  source 1..23: mol_type = other RNA
tggtaatacgacgtgcttagtgt

SEQ ID NO: 8589 - RNA, 23 nt, Synthetic Construct
  source 1..23: mol_type = other RNA
tggtaatacgacgtgcttagtgt

SEQ ID NO: 8590 - RNA, 15 nt, Synthetic Construct
  source 1..15: mol_type = other RNA
gtcgacgtatagggt

SEQ ID NO: 8591 - RNA, 15 nt, Synthetic Construct
  source 1..15: mol_type = other RNA
gtcgacgtatagggt

SEQ ID NO: 8592 - RNA, 18 nt, Synthetic Construct
  source 1..18: mol_type = other RNA
cagcactctgcaaagacg

SEQ ID NO: 8593 - RNA, 18 nt, Synthetic Construct
  source 1..18: mol_type = other RNA
cagcactctgcaaagacg

SEQ ID NO: 8594 - RNA, 20 nt, Synthetic Construct
  source 1..20: mol_type = other RNA
ccttggggttgtaggaccac

SEQ ID NO: 8595 - RNA, 20 nt, Synthetic Construct
  source 1..20: mol_type = other RNA
ccttggggttgtaggaccac

SEQ ID NO: 8596 - RNA, 20 nt, Synthetic Construct
  source 1..20: mol_type = other RNA
taaggtagtaggttgtatag

SEQ ID NO: 8597 - RNA, 20 nt, Synthetic Construct
  source 1..20: mol_type = other RNA
taaggtagtaggttgtatag

SEQ ID NO: 8598 - RNA, 19 nt, Synthetic Construct
  source 1..19: mol_type = other RNA
tcagtagctcgaggaaaag

SEQ ID NO: 8599 - RNA, 21 nt, Synthetic Construct
  source 1..21: mol_type = other RNA
cgcatcccctagggcattggt

SEQ ID NO: 8600 - RNA, 21 nt, Synthetic Construct
  source 1..21: mol_type = other RNA
cgcatcccctagggcattggt

SEQ ID NO: 8601 - RNA, 22 nt, Synthetic Construct
  source 1..22: mol_type = other RNA
gtagtgtttcctactttatgga

SEQ ID NO: 8602 - RNA, 22 nt, Synthetic Construct
  source 1..22: mol_type = other RNA
gtagtgtttcctactttatgga

SEQ ID NO: 8603 - RNA, 35 nt, Synthetic Construct; identical to SEQ ID NO: 757
  source 1..35: mol_type = other RNA

SEQ ID NO: 8604 - RNA, 35 nt, Synthetic Construct; identical to SEQ ID NO: 757
  source 1..35: mol_type = other RNA

SEQ ID NO: 8605 - RNA, 21 nt, Synthetic Construct
  source 1..21: mol_type = other RNA
cattattacttttggtacgcg

SEQ ID NO: 8606 - RNA, 21 nt, Synthetic Construct
  source 1..21: mol_type = other RNA
cattattacttttggtacgcg

SEQ ID NO: 8607 - RNA, 31 nt, Synthetic Construct; identical to SEQ ID NO: 2278
  source 1..31: mol_type = other RNA

SEQ ID NO: 8608 - RNA, 36 nt, Synthetic Construct; identical to SEQ ID NO: 2248
  source 1..36: mol_type = other RNA

SEQ ID NO: 8609 - RNA, 36 nt, Synthetic Construct; identical to SEQ ID NO: 2248
  source 1..36: mol_type = other RNA

SEQ ID NO: 8610 - RNA, 22 nt, Synthetic Construct
  source 1..22: mol_type = other RNA
agtagtgtttcctactttatgg

SEQ ID NO: 8611 - RNA, 22 nt, Synthetic Construct
  source 1..22: mol_type = other RNA
tatcggaacgtgcccagtcgtg

SEQ ID NO: 8612 - RNA, 22 nt, Synthetic Construct
  source 1..22: mol_type = other RNA
tatcggaacgtgcccagtcgtg

SEQ ID NO: 8613 - RNA, 22 nt, Synthetic Construct
  source 1..22: mol_type = other RNA
taaggtagtaggttgtgtggtt

SEQ ID NO: 8614 - RNA, 15 nt, Synthetic Construct
  source 1..15: mol_type = other RNA
cccagaaacccggtc

SEQ ID NO: 8615 - RNA, 19 nt, Synthetic Construct
  source 1..19: mol_type = other RNA
cctcgtcatctaattagtg

SEQ ID NO: 8616 - RNA, 19 nt, Synthetic Construct
  source 1..19: mol_type = other RNA
cctcgtcatctaattagtg

SEQ ID NO: 8617 - RNA, 23 nt, Synthetic Construct
  source 1..23: mol_type = other RNA
caaagtgcttacagtgcaggtag

SEQ ID NO: 8618 - RNA, 20 nt, Synthetic Construct
  source 1..20: mol_type = other RNA
cggcggggacggcgattggt

SEQ ID NO: 8619 - RNA, 20 nt, Synthetic Construct
  source 1..20: mol_type = other RNA
cggcggggacggcgattggt

SEQ ID NO: 8620 - RNA, 33 nt, Synthetic Construct; identical to SEQ ID NO: 2638
  source 1..33: mol_type = other RNA

SEQ ID NO: 8621 - RNA, 33 nt, Synthetic Construct; identical to SEQ ID NO: 2638
  source 1..33: mol_type = other RNA

SEQ ID NO: 8622 - RNA, 22 nt, Synthetic Construct
  source 1..22: mol_type = other RNA
ggcagcattgtacagggctatg

SEQ ID NO: 8623 - RNA, 21 nt, Synthetic Construct
  source 1..21: mol_type = other RNA
tgaggggcagagagcgggact

SEQ ID NO: 8624 - RNA, 21 nt, Synthetic Construct
  source 1..21: mol_type = other RNA
tgaggggcagagagcgggact

SEQ ID NO: 8625 - RNA, 27 nt, Synthetic Construct
  source 1..27: mol_type = other RNA
ccccccactgctaaatttgactggcct

SEQ ID NO: 8626 - RNA, 21 nt, Synthetic Construct
  source 1..21: mol_type = other RNA
ctagactgaagctccttgaga

SEQ ID NO: 8627 - RNA, 17 nt, Synthetic Construct
  source 1..17: mol_type = other RNA
gccatgccgcgtgcggg

SEQ ID NO: 8628 - RNA, 22 nt, Synthetic Construct
  source 1..22: mol_type = other RNA
aggttccggataagtaagagcc

SEQ ID NO: 8629 - RNA, 22 nt, Synthetic Construct
  source 1..22: mol_type = other RNA
aggttccggataagtaagagcc

SEQ ID NO: 8630 - RNA, 16 nt, Synthetic Construct
  source 1..16: mol_type = other RNA
gtctacggccacacca

SEQ ID NO: 8631 - RNA, 22 nt, Synthetic Construct
  source 1..22: mol_type = other RNA
cggaatgtaaagaagtatgtat

SEQ ID NO: 8632 - RNA, 23 nt, Synthetic Construct
  source 1..23: mol_type = other RNA
caaagtgctcatagtgcaggtag

SEQ ID NO: 8633 - RNA, 30 nt, Synthetic Construct; identical to SEQ ID NO: 768
  source 1..30: mol_type = other RNA

SEQ ID NO: 8634 - RNA, 30 nt, Synthetic Construct; identical to SEQ ID NO: 768
  source 1..30: mol_type = other RNA

SEQ ID NO: 8635 - RNA, 21 nt, Synthetic Construct
  source 1..21: mol_type = other RNA
ggaggagttcgaaggtacgct

SEQ ID NO: 8636 - RNA, 21 nt, Synthetic Construct
  source 1..21: mol_type = other RNA
ggaggagttcgaaggtacgct

SEQ ID NO: 8637 - RNA, 30 nt, Synthetic Construct; identical to SEQ ID NO: 1958
  source 1..30: mol_type = other RNA

SEQ ID NO: 8638 - RNA, 30 nt, Synthetic Construct; identical to SEQ ID NO: 1958
  source 1..30: mol_type = other RNA

SEQ ID NO: 8639 - RNA, 16 nt, Synthetic Construct
  source 1..16: mol_type = other RNA
ggcgggggtcgctggt

SEQ ID NO: 8640 - RNA, 16 nt, Synthetic Construct
  source 1..16: mol_type = other RNA
ggcgggggtcgctggt

SEQ ID NO: 8641 - RNA, 15 nt, Synthetic Construct
  source 1..15: mol_type = other RNA
gagctgtggataggg

SEQ ID NO: 8642 - RNA, 15 nt, Synthetic Construct
  source 1..15: mol_type = other RNA
gagctgtggataggg

SEQ ID NO: 8643 - RNA, 32 nt, Synthetic Construct; identical to SEQ ID NO: 1128
  source 1..32: mol_type = other RNA

SEQ ID NO: 8644 - RNA, 23 nt, Synthetic Construct
  source 1..23: mol_type = other RNA
aacattcaacgctgtcggtgaga

SEQ ID NO: 8645 - RNA, 22 nt, Synthetic Construct
  source 1..22: mol_type = other RNA
ccggtcccaagggtatggctgt

SEQ ID NO: 8646 - RNA, 22 nt, Synthetic Construct
  source 1..22: mol_type = other RNA
ccggtcccaagggtatggctgt

SEQ ID NO: 8647 - RNA, 31 nt, Synthetic Construct; identical to SEQ ID NO: 2310
  source 1..31: mol_type = other RNA

SEQ ID NO: 8648 - RNA, 31 nt, Synthetic Construct; identical to SEQ ID NO: 2310
  source 1..31: mol_type = other RNA

SEQ ID NO: 8649 - RNA, 21 nt, Synthetic Construct
  source 1..21: mol_type = other RNA
tatgtctgctgaccatcacct

SEQ ID NO: 8650 - RNA, 21 nt, Synthetic Construct
  source 1..21: mol_type = other RNA
tgaggtagtagtttgcgctgt

SEQ ID NO: 8651 - RNA, 21 nt, Synthetic Construct
  source 1..21: mol_type = other RNA
tgaggtagtagtttgcgctgt

SEQ ID NO: 8652 - RNA, 21 nt, Synthetic Construct
  source 1..21: mol_type = other RNA
tgaggtagtagtctgtgctgt

SEQ ID NO: 8653 - RNA, 21 nt, Synthetic Construct
  source 1..21: mol_type = other RNA
tgaggtagtagtctgtgctgt

SEQ ID NO: 8654 - RNA, 23 nt, Synthetic Construct
  source 1..23: mol_type = other RNA
tggtaatacgacgtacctagtgt

SEQ ID NO: 8655 - RNA, 22 nt, Synthetic Construct
  source 1..22: mol_type = other RNA
cggaatgtaaagaagtatgtat

SEQ ID NO: 8656 - RNA, 22 nt, Synthetic Construct
  source 1..22: mol_type = other RNA
cggaatgtaaagaagtatgtat

SEQ ID NO: 8657 - RNA, 22 nt, Synthetic Construct
  source 1..22: mol_type = other RNA
tgaggaagtaggttgtgtggtt

SEQ ID NO: 8658 - RNA, 25 nt, Synthetic Construct
  source 1..25: mol_type = other RNA
ttgaggatgtgagatcgagacgaca

SEQ ID NO: 8659 - RNA, 21 nt, Synthetic Construct
  source 1..21: mol_type = other RNA
cgtaccgtgagtaataatgca

SEQ ID NO: 8660 - RNA, 22 nt, Synthetic Construct
  source 1..22: mol_type = other RNA
ttcaagtaattcaggataggta

SEQ ID NO: 8661 - RNA, 21 nt, Synthetic Construct
  source 1..21: mol_type = other RNA
ctttgttcgattccgttgagt

SEQ ID NO: 8662 - RNA, 22 nt, Synthetic Construct
  source 1..22: mol_type = other RNA
tgaggtagaagtttgtgctgtt

SEQ ID NO: 8663 - RNA, 22 nt, Synthetic Construct
  source 1..22: mol_type = other RNA
tgaggtagaagtttgtgctgtt

SEQ ID NO: 8664 - RNA, 22 nt, Synthetic Construct
  source 1..22: mol_type = other RNA
tattgcacttgtcctggcctgt

SEQ ID NO: 8665 - RNA, 22 nt, Synthetic Construct
  source 1..22: mol_type = other RNA
tgtgactggttgaccagagggt

SEQ ID NO: 8666 - RNA, 15 nt, Synthetic Construct
  source 1..15: mol_type = other RNA
ggtcatcgtcaggct

SEQ ID NO: 8667 - RNA, 15 nt, Synthetic Construct
  source 1..15: mol_type = other RNA
ggtcatcgtcaggct

SEQ ID NO: 8668 - RNA, 22 nt, Synthetic Construct
  source 1..22: mol_type = other RNA
tgaggtagtaggttgtgtgatt

SEQ ID NO: 8669 - RNA, 22 nt, Synthetic Construct
  source 1..22: mol_type = other RNA
tgaggtagtaggttgtgtgatt

SEQ ID NO: 8670 - RNA, 25 nt, Synthetic Construct
  source 1..25: mol_type = other RNA
aaaccgttaccattactgagtttag

SEQ ID NO: 8671 - RNA, 23 nt, Synthetic Construct
  source 1..23: mol_type = other RNA
tccagtactgagctgccccgaga

SEQ ID NO: 8672 - RNA, 20 nt, Synthetic Construct
  source 1..20: mol_type = other RNA
tgaggtagtaggttgcgtgg

SEQ ID NO: 8673 - RNA, 20 nt, Synthetic Construct
  source 1..20: mol_type = other RNA
tgaggtagtaggttgcgtgg

SEQ ID NO: 8674 - RNA, 17 nt, Synthetic Construct
  source 1..17: mol_type = other RNA
cgactcttagcggtgga

SEQ ID NO: 8675 - RNA, 17 nt, Synthetic Construct
  source 1..17: mol_type = other RNA
cgactcttagcggtgga

SEQ ID NO: 8676 - RNA, 23 nt, Synthetic Construct
  source 1..23: mol_type = other RNA
aggtaatacgacgtacttagtgt

SEQ ID NO: 8677 - RNA, 23 nt, Synthetic Construct
  source 1..23: mol_type = other RNA
aggtaatacgacgtacttagtgt

SEQ ID NO: 8678 - RNA, 21 nt, Synthetic Construct
  source 1..21: mol_type = other RNA
tcccgtactgagctgccccga

SEQ ID NO: 8679 - RNA, 22 nt, Synthetic Construct
  source 1..22: mol_type = other RNA
tcctgtactgagctgccccggg

SEQ ID NO: 8680 - RNA, 15 nt, Synthetic Construct
  source 1..15: mol_type = other RNA
gcgtagatatgcgga

SEQ ID NO: 8681 - RNA, 23 nt, Synthetic Construct
  source 1..23: mol_type = other RNA
tggtaacacgacgtacttagtgt

SEQ ID NO: 8682 - RNA, 23 nt, Synthetic Construct
  source 1..23: mol_type = other RNA
tggtaacacgacgtacttagtgt

SEQ ID NO: 8683 - RNA, 21 nt, Synthetic Construct
  source 1..21: mol_type = other RNA
tccagtactgagctgccccga

SEQ ID NO: 8684 - RNA, 22 nt, Synthetic Construct
  source 1..22: mol_type = other RNA
tgaggtagtagattgtatagta

SEQ ID NO: 8685 - RNA, 19 nt, Synthetic Construct
  source 1..19: mol_type = other RNA
ccttggggttgtaggacca

SEQ ID NO: 8686 - RNA, 19 nt, Synthetic Construct
  source 1..19: mol_type = other RNA
ccttggggttgtaggacca

SEQ ID NO: 8687 - RNA, 22 nt, Synthetic Construct
  source 1..22: mol_type = other RNA
ngaggtagtagtttgtgctgtt

SEQ ID NO: 8688 - RNA, 24 nt, Synthetic Construct
  source 1..24: mol_type = other RNA
tgtcagtttgtcaaataccccatt

SEQ ID NO: 8689 - RNA, 24 nt, Synthetic Construct
  source 1..24: mol_type = other RNA
tgtcagtttgtcaaataccccatt

SEQ ID NO: 8690 - RNA, 20 nt, Synthetic Construct
  source 1..20: mol_type = other RNA
tgaggaagtaggttgtatag

SEQ ID NO: 8691 - RNA, 28 nt, Synthetic Construct
  source 1..28: mol_type = other RNA
ccgtgtgaaagtaggtcatcgtcaggct

SEQ ID NO: 8692 - RNA, 36 nt, Synthetic Construct; identical to SEQ ID NO: 2444
  source 1..36: mol_type = other RNA

SEQ ID NO: 8693 - RNA, 36 nt, Synthetic Construct; identical to SEQ ID NO: 2444
  source 1..36: mol_type = other RNA

SEQ ID NO: 8694 - RNA, 22 nt, Synthetic Construct
  source 1..22: mol_type = other RNA
tattgcacttgtcccggcccgt

SEQ ID NO: 8695 - RNA, 23 nt, Synthetic Construct
  source 1..23: mol_type = other RNA
tggtaatacgacgtacttaatgt

SEQ ID NO: 8696 - RNA, 32 nt, Synthetic Construct; identical to SEQ ID NO: 2052
  source 1..32: mol_type = other RNA

SEQ ID NO: 8697 - RNA, 32 nt, Synthetic Construct; identical to SEQ ID NO: 2052
  source 1..32: mol_type = other RNA

SEQ ID NO: 8698 - RNA, 23 nt, Synthetic Construct
  source 1..23: mol_type = other RNA
agcagcattgtacagggctataa

SEQ ID NO: 8699 - RNA, 22 nt, Synthetic Construct
  source 1..22: mol_type = other RNA
ccctgtactgagctgccccgag

SEQ ID NO: 8700 - RNA, 22 nt, Synthetic Construct
  source 1..22: mol_type = other RNA
ccctgtactgagctgccccgag

SEQ ID NO: 8701 - RNA, 16 nt, Synthetic Construct
  source 1..16: mol_type = other RNA
gcaagaggtcagcggt

SEQ ID NO: 8702 - RNA, 16 nt, Synthetic Construct
  source 1..16: mol_type = other RNA
gcaagaggtcagcggt

SEQ ID NO: 8703 - RNA, 21 nt, Synthetic Construct
  source 1..21: mol_type = other RNA
gctattgacgaccgtaccgca

SEQ ID NO: 8704 - RNA, 21 nt, Synthetic Construct
  source 1..21: mol_type = other RNA
gctattgacgaccgtaccgca

SEQ ID NO: 8705 - RNA, 22 nt, Synthetic Construct
  source 1..22: mol_type = other RNA
ttaatgctaatcgtgatagggt

SEQ ID NO: 8706 - RNA, 31 nt, Synthetic Construct; identical to SEQ ID NO: 2215
  source 1..31: mol_type = other RNA

SEQ ID NO: 8707 - RNA, 22 nt, Synthetic Construct
  source 1..22: mol_type = other RNA
tcgtgccgtgagtaataatgcg

SEQ ID NO: 8708 - RNA, 22 nt, Synthetic Construct
  source 1..22: mol_type = other RNA
tcgtgccgtgagtaataatgcg

SEQ ID NO: 8709 - RNA, 22 nt, Synthetic Construct
  source 1..22: mol_type = other RNA
tgaggtagtagtttgtgctatt

SEQ ID NO: 8710 - RNA, 22 nt, Synthetic Construct
  source 1..22: mol_type = other RNA
tgaggtagtagtttgtgctatt

SEQ ID NO: 8711 - RNA, 25 nt, Synthetic Construct
  source 1..25: mol_type = other RNA
tcgaggatatgagatcgagacgaca

SEQ ID NO: 8712 - RNA, 23 nt, Synthetic Construct
  source 1..23: mol_type = other RNA
tggaaatacgacgtacttagtgt

SEQ ID NO: 8713 - RNA, 22 nt, Synthetic Construct
  source 1..22: mol_type = other RNA
tgaggtagtaggctgtatagtt

SEQ ID NO: 8714 - RNA, 32 nt, Synthetic Construct; identical to SEQ ID NO: 3541
  source 1..32: mol_type = other RNA

SEQ ID NO: 8715 - RNA, 32 nt, Synthetic Construct; identical to SEQ ID NO: 3541
  source 1..32: mol_type = other RNA

SEQ ID NO: 8716 - RNA, 20 nt, Synthetic Construct
  source 1..20: mol_type = other RNA
tcggaagaaggggtgcctgg

SEQ ID NO: 8717 - RNA, 20 nt, Synthetic Construct
  source 1..20: mol_type = other RNA
tcggaagaaggggtgcctgg

SEQ ID NO: 8718 - RNA, 30 nt, Synthetic Construct; identical to SEQ ID NO: 2578
  source 1..30: mol_type = other RNA

SEQ ID NO: 8719 - RNA, 25 nt, Synthetic Construct
  source 1..25: mol_type = other RNA
ttgaggatatgggatcgagacgaca

SEQ ID NO: 8720 - RNA, 22 nt, Synthetic Construct
  source 1..22: mol_type = other RNA
tattgcacttgtcccggcccgt

SEQ ID NO: 8721 - RNA, 22 nt, Synthetic Construct
  source 1..22: mol_type = other RNA
tgaggtagtagtttgtgctgta

SEQ ID NO: 8722 - RNA, 22 nt, Synthetic Construct
  source 1..22: mol_type = other RNA
tgaggtagtagtttgtgctgta

SEQ ID NO: 8723 - RNA, 21 nt, Synthetic Construct
  source 1..21: mol_type = other RNA
cgaggtagtagtttgtgctgt

SEQ ID NO: 8724 - RNA, 27 nt, Synthetic Construct
  source 1..27: mol_type = other RNA
ncccccactgctaaatttgactggctt

SEQ ID NO: 8725 - RNA, 27 nt, Synthetic Construct
  source 1..27: mol_type = other RNA
ncccccactgctaaatttgactggctt

SEQ ID NO: 8726 - RNA, 19 nt, Synthetic Construct
  source 1..19: mol_type = other RNA
atagggaacgtgagctggg

SEQ ID NO: 8727 - RNA, 19 nt, Synthetic Construct
  source 1..19: mol_type = other RNA
atagggaacgtgagctggg

SEQ ID NO: 8728 - RNA, 23 nt, Synthetic Construct
  source 1..23: mol_type = other RNA
tgaggtagtgggttgtgtggttt

SEQ ID NO: 8729 - RNA, 22 nt, Synthetic Construct
  source 1..22: mol_type = other RNA
tcctgtactgagctaccccgag

SEQ ID NO: 8730 - RNA, 22 nt, Synthetic Construct
  source 1..22: mol_type = other RNA
tcgtaccgtgagtgataatgcg

SEQ ID NO: 8731 - RNA, 22 nt, Synthetic Construct
  source 1..22: mol_type = other RNA
tcgtaccgtgagtgataatgcg

SEQ ID NO: 8732 - RNA, 20 nt, Synthetic Construct
  source 1..20: mol_type = other RNA
tagcgaaattccttgtcggg

SEQ ID NO: 8733 - RNA, 31 nt, Synthetic Construct; identical to SEQ ID NO: 2293
  source 1..31: mol_type = other RNA

SEQ ID NO: 8734 - RNA, 21 nt, Synthetic Construct
  source 1..21: mol_type = other RNA
tcctgtctgaatatgggggga

SEQ ID NO: 8735 - RNA, 25 nt, Synthetic Construct
  source 1..25: mol_type = other RNA
ttgaggatatgagatcgagacggca

SEQ ID NO: 8736 - RNA, 39 nt, Synthetic Construct; identical to SEQ ID NO: 4400
  source 1..39: mol_type = other RNA

SEQ ID NO: 8737 - RNA, 39 nt, Synthetic Construct; identical to SEQ ID NO: 4400
  source 1..39: mol_type = other RNA

SEQ ID NO: 8738 - RNA, 22 nt, Synthetic Construct
  source 1..22: mol_type = other RNA
cggaggagttcgaaggtacgct

SEQ ID NO: 8739 - RNA, 21 nt, Synthetic Construct
  source 1..21: mol_type = other RNA
tcctgtactgagctgccctga

SEQ ID NO: 8740 - RNA, 22 nt, Synthetic Construct
  source 1..22: mol_type = other RNA
tgtcagtttgtcaaataccccg

SEQ ID NO: 8741 - RNA, 20 nt, Synthetic Construct
  source 1..20: mol_type = other RNA
tggaatgtaaagaagtatgt

SEQ ID NO: 8742 - RNA, 20 nt, Synthetic Construct
  source 1..20: mol_type = other RNA
tggaatgtaaagaagtatgt

SEQ ID NO: 8743 - RNA, 23 nt, Synthetic Construct
  source 1..23: mol_type = other RNA
tgaggggcagagggcgagacttt

SEQ ID NO: 8744 - RNA, 23 nt, Synthetic Construct
  source 1..23: mol_type = other RNA
tgaggggcagagggcgagacttt

SEQ ID NO: 8745 - RNA, 24 nt, Synthetic Construct
  source 1..24: mol_type = other RNA
gaggtgtagaataggtgggagctt

SEQ ID NO: 8746 - RNA, 24 nt, Synthetic Construct
  source 1..24: mol_type = other RNA
gaggtgtagaataggtgggagctt

SEQ ID NO: 8747 - RNA, 20 nt, Synthetic Construct
  source 1..20: mol_type = other RNA
tagaattctcgcctgccacg

SEQ ID NO: 8748 - RNA, 20 nt, Synthetic Construct
  source 1..20: mol_type = other RNA
tagaattctcgcctgccacg

SEQ ID NO: 8749 - RNA, 21 nt, Synthetic Construct
  source 1..21: mol_type = other RNA
tgaagtagtaggttgtatagt

SEQ ID NO: 8750 - RNA, 22 nt, Synthetic Construct
  source 1..22: mol_type = other RNA
acagtagcctgcacattggtta

SEQ ID NO: 8751 - RNA, 22 nt, Synthetic Construct
  source 1..22: mol_type = other RNA
tggaatgtaaagaagtatgtgt

SEQ ID NO: 8752 - RNA, 22 nt, Synthetic Construct
  source 1..22: mol_type = other RNA
tggaatgtaaagaagtatgtgt

SEQ ID NO: 8753 - RNA, 22 nt, Synthetic Construct
  source 1..22: mol_type = other RNA
ttcaagtaatccaggataggca

SEQ ID NO: 8754 - RNA, 44 nt, Synthetic Construct; identical to SEQ ID NO: 722
  source 1..44: mol_type = other RNA

SEQ ID NO: 8755 - RNA, 44 nt, Synthetic Construct; identical to SEQ ID NO: 722
  source 1..44: mol_type = other RNA

SEQ ID NO: 8756 - RNA, 15 nt, Synthetic Construct
  source 1..15: mol_type = other RNA
cctcgcgcgattgga

SEQ ID NO: 8757 - RNA, 27 nt, Synthetic Construct
  source 1..27: mol_type = other RNA
gacttaccaaacctatgcaaactccga

SEQ ID NO: 8758 - RNA, 27 nt, Synthetic Construct
  source 1..27: mol_type = other RNA
cgactcttagcggtggatcactcggct

SEQ ID NO: 8759 - RNA, 27 nt, Synthetic Construct
  source 1..27: mol_type = other RNA
cgactcttagcggtggatcactcggct

SEQ ID NO: 8760 - RNA, 22 nt, Synthetic Construct
  source 1..22: mol_type = other RNA
taaggtagtagattgtatagtt

SEQ ID NO: 8761 - RNA, 22 nt, Synthetic Construct
  source 1..22: mol_type = other RNA
taaggtagtagattgtatagtt

SEQ ID NO: 8762 - RNA, 27 nt, Synthetic Construct
  source 1..27: mol_type = other RNA
gcattggtggttcagtggtagaattct

SEQ ID NO: 8763 - RNA, 26 nt, Synthetic Construct
  source 1..26: mol_type = other RNA
aaaccgttaccattactgagtttagt

SEQ ID NO: 8764 - RNA, 26 nt, Synthetic Construct
  source 1..26: mol_type = other RNA
aaaccgttaccattactgagtttagt

SEQ ID NO: 8765 - RNA, 23 nt, Synthetic Construct
  source 1..23: mol_type = other RNA
tcctgtgctgagctgccccgaga

SEQ ID NO: 8766 - RNA, 27 nt, Synthetic Construct
  source 1..27: mol_type = other RNA
ccccccaccgctaaatttgactggctt

SEQ ID NO: 8767 - RNA, 23 nt, Synthetic Construct
  source 1..23: mol_type = other RNA
atcacattgccagggatttccaa

SEQ ID NO: 8768 - RNA, 23 nt, Synthetic Construct
  source 1..23: mol_type = other RNA
atcacattgccagggatttccaa

SEQ ID NO: 8769 - RNA, 16 nt, Synthetic Construct
  source 1..16: mol_type = other RNA
tccgaaccgactagtg

SEQ ID NO: 8770 - RNA, 16 nt, Synthetic Construct
  source 1..16: mol_type = other RNA
tccgaaccgactagtg

SEQ ID NO: 8771 - RNA, 23 nt, Synthetic Construct
  source 1..23: mol_type = other RNA
tagcagcacataatggtttgtgg

SEQ ID NO: 8772 - RNA, 18 nt, Synthetic Construct
  source 1..18: mol_type = other RNA
cacagtgtgaatcggcgc

SEQ ID NO: 8773 - RNA, 18 nt, Synthetic Construct
  source 1..18: mol_type = other RNA
cacagtgtgaatcggcgc

SEQ ID NO: 8774 - RNA, 22 nt, Synthetic Construct
  source 1..22: mol_type = other RNA
tggggtagtaggttgtatagtt

SEQ ID NO: 8775 - RNA, 21 nt, Synthetic Construct
  source 1..21: mol_type = other RNA
ttcaagtaattcaggataggt

SEQ ID NO: 8776 - RNA, 22 nt, Synthetic Construct
  source 1..22: mol_type = other RNA
tggaatgtaaagaagtatgtat

SEQ ID NO: 8777 - RNA, 22 nt, Synthetic Construct
  source 1..22: mol_type = other RNA
tggaatgtaaagaagtatgtat

SEQ ID NO: 8778 - RNA, 35 nt, Synthetic Construct; identical to SEQ ID NO: 2269
  source 1..35: mol_type = other RNA

SEQ ID NO: 8779 - RNA, 35 nt, Synthetic Construct; identical to SEQ ID NO: 2269
  source 1..35: mol_type = other RNA

SEQ ID NO: 8780 - RNA, 16 nt, Synthetic Construct
  source 1..16: mol_type = other RNA
gggtgaaagcggggga

SEQ ID NO: 8781 - RNA, 16 nt, Synthetic Construct
  source 1..16: mol_type = other RNA
gggtgaaagcggggga

SEQ ID NO: 8782 - RNA, 21 nt, Synthetic Construct
  source 1..21: mol_type = other RNA
ctagactgaagctccttgaga

SEQ ID NO: 8783 - RNA, 22 nt, Synthetic Construct
  source 1..22: mol_type = other RNA
tggaatgtaaagaagtatgtat

SEQ ID NO: 8784 - RNA, 22 nt, Synthetic Construct
  source 1..22: mol_type = other RNA
tggaatgtaaagaagtatgtat

SEQ ID NO: 8785 - RNA, 20 nt, Synthetic Construct
  source 1..20: mol_type = other RNA
caacggaatcccaaaagcag

SEQ ID NO: 8786 - RNA, 20 nt, Synthetic Construct
  source 1..20: mol_type = other RNA
caacggaatcccaaaagcag

SEQ ID NO: 8787 - RNA, 28 nt, Synthetic Construct
  source 1..28: mol_type = other RNA
ggcagggttcgtgactggggtgaagtcg

SEQ ID NO: 8788 - RNA, 28 nt, Synthetic Construct
  source 1..28: mol_type = other RNA
ggcagggttcgtgactggggtgaagtcg

SEQ ID NO: 8789 - RNA, 29 nt, Synthetic Construct
  source 1..29: mol_type = other RNA
gcccggctagctcagtcggtagagcatgg

SEQ ID NO: 8790 - RNA, 29 nt, Synthetic Construct
  source 1..29: mol_type = other RNA
gcccggctagctcagtcggtagagcatgg

SEQ ID NO: 8791 - RNA, 33 nt, Synthetic Construct; identical to SEQ ID NO: 2395
  source 1..33: mol_type = other RNA

SEQ ID NO: 8792 - RNA, 33 nt, Synthetic Construct; identical to SEQ ID NO: 2395
  source 1..33: mol_type = other RNA

SEQ ID NO: 8793 - RNA, 28 nt, Synthetic Construct
  source 1..28: mol_type = other RNA
ggatttccccttggggttgtaggaccac

SEQ ID NO: 8794 - RNA, 28 nt, Synthetic Construct
  source 1..28: mol_type = other RNA
ggatttccccttggggttgtaggaccac

SEQ ID NO: 8795 - RNA, 33 nt, Synthetic Construct; identical to SEQ ID NO: 2638
  source 1..33: mol_type = other RNA

SEQ ID NO: 8796 - RNA, 22 nt, Synthetic Construct
  source 1..22: mol_type = other RNA
tgaggtagtaggttgagtggtt

SEQ ID NO: 8797 - RNA, 22 nt, Synthetic Construct
  source 1..22: mol_type = other RNA
tgaggtagtaggttgagtggtt

SEQ ID NO: 8798 - RNA, 21 nt, Synthetic Construct
  source 1..21: mol_type = other RNA
aagctgccagttgaagaactg

SEQ ID NO: 8799 - RNA, 21 nt, Synthetic Construct
  source 1..21: mol_type = other RNA
aagctgccagttgaagaactg

SEQ ID NO: 8800 - RNA, 22 nt, Synthetic Construct
  source 1..22: mol_type = other RNA
tattgcacttgttccggcctgt

SEQ ID NO: 8801 - RNA, 22 nt, Synthetic Construct
  source 1..22: mol_type = other RNA
tattgcacttgttccggcctgt

SEQ ID NO: 8802 - RNA, 23 nt, Synthetic Construct
  source 1..23: mol_type = other RNA
tgaggtagtaggttgcgtggttt

SEQ ID NO: 8803 - RNA, 21 nt, Synthetic Construct
  source 1..21: mol_type = other RNA
ggaatcgctagtaatcgcgga

SEQ ID NO: 8804 - RNA, 21 nt, Synthetic Construct
  source 1..21: mol_type = other RNA
ggaatcgctagtaatcgcgga

SEQ ID NO: 8805 - RNA, 24 nt, Synthetic Construct
  source 1..24: mol_type = other RNA
gtctttgttcgattccgttgagta

SEQ ID NO: 8806 - RNA, 24 nt, Synthetic Construct
  source 1..24: mol_type = other RNA
gtctttgttcgattccgttgagta

SEQ ID NO: 8807 - RNA, 22 nt, Synthetic Construct
  source 1..22: mol_type = other RNA
tgaggtggtagtttgtgctgtt

SEQ ID NO: 8808 - RNA, 21 nt, Synthetic Construct
  source 1..21: mol_type = other RNA
tgaggtagtggattgtatagt

SEQ ID NO: 8809 - RNA, 22 nt, Synthetic Construct
  source 1..22: mol_type = other RNA
cccataaagtagaaagcactac

SEQ ID NO: 8810 - RNA, 22 nt, Synthetic Construct
  source 1..22: mol_type = other RNA
cccataaagtagaaagcactac

SEQ ID NO: 8811 - RNA, 21 nt, Synthetic Construct
  source 1..21: mol_type = other RNA
tgaggtagtagattgtgtggt

SEQ ID NO: 8812 - RNA, 21 nt, Synthetic Construct
  source 1..21: mol_type = other RNA
tgaggtagtagattgtgtggt

SEQ ID NO: 8813 - RNA, 21 nt, Synthetic Construct
  source 1..21: mol_type = other RNA
caaagtgctgttcgtgcaggt

SEQ ID NO: 8814 - RNA, 21 nt, Synthetic Construct
  source 1..21: mol_type = other RNA
caaagtgctgttcgtgcaggt

SEQ ID NO: 8815 - RNA, 25 nt, Synthetic Construct
  source 1..25: mol_type = other RNA
ttgagggtatgagatcgagacgaca

SEQ ID NO: 8816 - RNA, 22 nt, Synthetic Construct
  source 1..22: mol_type = other RNA
taaggtagtaggttgtgtggtt

SEQ ID NO: 8817 - RNA, 22 nt, Synthetic Construct
  source 1..22: mol_type = other RNA
taaggtagtaggttgtgtggtt

SEQ ID NO: 8818 - RNA, 22 nt, Synthetic Construct
  source 1..22: mol_type = other RNA
tgaggaagtagattgtatagtt

SEQ ID NO: 8819 - RNA, 17 nt, Synthetic Construct
  source 1..17: mol_type = other RNA
tcccagaaacccggtcg

SEQ ID NO: 8820 - RNA, 23 nt, Synthetic Construct
  source 1..23: mol_type = other RNA
tcctgtactgagctgccctgaga

SEQ ID NO: 8821 - RNA, 16 nt, Synthetic Construct
  source 1..16: mol_type = other RNA
cccctggacctgtact

SEQ ID NO: 8822 - RNA, 22 nt, Synthetic Construct
  source 1..22: mol_type = other RNA
tggggtagtaggttgtgtggtt

SEQ ID NO: 8823 - RNA, 29 nt, Synthetic Construct
  source 1..29: mol_type = other RNA
ccccccccactgctaaatttgactggctt

SEQ ID NO: 8824 - RNA, 29 nt, Synthetic Construct
  source 1..29: mol_type = other RNA
ccccccccactgctaaatttgactggctt

SEQ ID NO: 8825 - RNA, 18 nt, Synthetic Construct
  source 1..18: mol_type = other RNA
gtaggtcatcgtcaggct

SEQ ID NO: 8826 - RNA, 18 nt, Synthetic Construct
  source 1..18: mol_type = other RNA
gtaggtcatcgtcaggct

SEQ ID NO: 8827 - RNA, 20 nt, Synthetic Construct
  source 1..20: mol_type = other RNA
gagtaggacgttgccaggtt

SEQ ID NO: 8828 - RNA, 20 nt, Synthetic Construct
  source 1..20: mol_type = other RNA
gagtaggacgttgccaggtt

SEQ ID NO: 8829 - RNA, 19 nt, Synthetic Construct
  source 1..19: mol_type = other RNA
gtactgacgctcatgcacg

SEQ ID NO: 8830 - RNA, 19 nt, Synthetic Construct
  source 1..19: mol_type = other RNA
gtactgacgctcatgcacg

SEQ ID NO: 8831 - RNA, 24 nt, Synthetic Construct
  source 1..24: mol_type = other RNA
tgagaactgaattccatgggttgt

SEQ ID NO: 8832 - RNA, 24 nt, Synthetic Construct
  source 1..24: mol_type = other RNA
tgagaactgaattccatgggttgt

SEQ ID NO: 8833 - RNA, 25 nt, Synthetic Construct
  source 1..25: mol_type = other RNA
ttgaggatatgagatcgagacgaca

SEQ ID NO: 8834 - RNA, 25 nt, Synthetic Construct
  source 1..25: mol_type = other RNA
ttgaggatatgagatcgagacgaca

SEQ ID NO: 8835 - RNA, 15 nt, Synthetic Construct
  source 1..15: mol_type = other RNA
tgcaagtcgaacggt

SEQ ID NO: 8836 - RNA, 15 nt, Synthetic Construct
  source 1..15: mol_type = other RNA
tgcaagtcgaacggt

SEQ ID NO: 8837 - RNA, 17 nt, Synthetic Construct
  source 1..17: mol_type = other RNA
tcccctggacctgtact

SEQ ID NO: 8838 - RNA, 36 nt, Synthetic Construct
  source 1..36: mol_type = other RNA
gggtggattccagagtggccaaatggggcggactgt

SEQ ID NO: 8839 - RNA, 36 nt, Synthetic Construct; identical to SEQ ID NO: 8838
  source 1..36: mol_type = other RNA

SEQ ID NO: 8840 - RNA, 22 nt, Synthetic Construct
  source 1..22: mol_type = other RNA
tagcagcacgtaaatatcggcg

SEQ ID NO: 8841 - RNA, 22 nt, Synthetic Construct
  source 1..22: mol_type = other RNA
tagcagcacgtaaatatcggcg

SEQ ID NO: 8842 - RNA, 27 nt, Synthetic Construct
  source 1..27: mol_type = other RNA
gctttacattggactttgaacagatct

SEQ ID NO: 8843 - RNA, 17 nt, Synthetic Construct
  source 1..17: mol_type = other RNA
catgcaagtcgaacggt

SEQ ID NO: 8844 - RNA, 17 nt, Synthetic Construct
  source 1..17: mol_type = other RNA
catgcaagtcgaacggt

SEQ ID NO: 8845 - RNA, 15 nt, Synthetic Construct
  source 1..15: mol_type = other RNA
accggaggaaggtgg

SEQ ID NO: 8846 - RNA, 18 nt, Synthetic Construct
  source 1..18: mol_type = other RNA
gtctgcctcagcgtcggt

SEQ ID NO: 8847 - RNA, 18 nt, Synthetic Construct
  source 1..18: mol_type = other RNA
gtctgcctcagcgtcggt

SEQ ID NO: 8848 - RNA, 27 nt, Synthetic Construct
  source 1..27: mol_type = other RNA
gcgggcgtagctcaggggtagagcgca

SEQ ID NO: 8849 - RNA, 27 nt, Synthetic Construct
  source 1..27: mol_type = other RNA
gcgggcgtagctcaggggtagagcgca

SEQ ID NO: 8850 - RNA, 23 nt, Synthetic Construct
  source 1..23: mol_type = other RNA
tggtaatacgacgcacttagtgt

SEQ ID NO: 8851 - RNA, 21 nt, Synthetic Construct
  source 1..21: mol_type = other RNA
aacggaatcccaaaagcagct

SEQ ID NO: 8852 - RNA, 21 nt, Synthetic Construct
  source 1..21: mol_type = other RNA
aacggaatcccaaaagcagct

SEQ ID NO: 8853 - RNA, 32 nt, Synthetic Construct; identical to SEQ ID NO: 2086
  source 1..32: mol_type = other RNA

SEQ ID NO: 8854 - RNA, 22 nt, Synthetic Construct
  source 1..22: mol_type = other RNA
tcgtaccgtgagtaatagtgcg

SEQ ID NO: 8855 - RNA, 21 nt, Synthetic Construct
  source 1..21: mol_type = other RNA
gcagtagtctgcacattggtt

SEQ ID NO: 8856 - RNA, 25 nt, Synthetic Construct
  source 1..25: mol_type = other RNA
ggtaaaatggctgagtgaagcattg

SEQ ID NO: 8857 - RNA, 23 nt, Synthetic Construct
  source 1..23: mol_type = other RNA
atgacacgatcactcccgttgag

SEQ ID NO: 8858 - RNA, 23 nt, Synthetic Construct
  source 1..23: mol_type = other RNA
gggtaatacgacgtacttagtgt

SEQ ID NO: 8859 - RNA, 26 nt, Synthetic Construct
  source 1..26: mol_type = other RNA
tccctggtggtctagtggttaggatt

SEQ ID NO: 8860 - RNA, 16 nt, Synthetic Construct
  source 1..16: mol_type = other RNA
gtctgcggccatacca

SEQ ID NO: 8861 - RNA, 22 nt, Synthetic Construct
  source 1..22: mol_type = other RNA
ttcaagtaacccaggataggct

SEQ ID NO: 8862 - RNA, 25 nt, Synthetic Construct
  source 1..25: mol_type = other RNA
ttgaggatatgagatcgggacgaca

SEQ ID NO: 8863 - RNA, 18 nt, Synthetic Construct
  source 1..18: mol_type = other RNA
aaaccgttaccattactg

SEQ ID NO: 8864 - RNA, 18 nt, Synthetic Construct
  source 1..18: mol_type = other RNA
aaaccgttaccattactg

SEQ ID NO: 8865 - RNA, 32 nt, Synthetic Construct; identical to SEQ ID NO: 2467
  source 1..32: mol_type = other RNA

SEQ ID NO: 8866 - RNA, 21 nt, Synthetic Construct
  source 1..21: mol_type = other RNA
tgaggtagtggattgtatagt

SEQ ID NO: 8867 - RNA, 21 nt, Synthetic Construct
  source 1..21: mol_type = other RNA
tgaggtagtggattgtatagt

SEQ ID NO: 8868 - RNA, 22 nt, Synthetic Construct
  source 1..22: mol_type = other RNA
tccaagtaatccaggataggct

SEQ ID NO: 8869 - RNA, 21 nt, Synthetic Construct
  source 1..21: mol_type = other RNA
aaaccgttaccattactgagt

SEQ ID NO: 8870 - RNA, 21 nt, Synthetic Construct
  source 1..21: mol_type = other RNA
aaaccgttaccattactgagt

SEQ ID NO: 8871 - RNA, 22 nt, Synthetic Construct
  source 1..22: mol_type = other RNA
tgttgcacttgtcccggcctgt

SEQ ID NO: 8872 - RNA, 22 nt, Synthetic Construct
  source 1..22: mol_type = other RNA
taccctgtagaaccgaatttgt

SEQ ID NO: 8873 - RNA, 31 nt, Synthetic Construct; identical to SEQ ID NO: 2507
  source 1..31: mol_type = other RNA

SEQ ID NO: 8874 - RNA, 31 nt, Synthetic Construct; identical to SEQ ID NO: 2507
  source 1..31: mol_type = other RNA

SEQ ID NO: 8875 - RNA, 22 nt, Synthetic Construct
  source 1..22: mol_type = other RNA
tggaatgtaaagaagtacgtat

SEQ ID NO: 8876 - RNA, 22 nt, Synthetic Construct
  source 1..22: mol_type = other RNA
tggaatgtaaagaagtacgtat

SEQ ID NO: 8877 - RNA, 26 nt, Synthetic Construct
  source 1..26: mol_type = other RNA
gcataagcgtgcttgactgcgagact

SEQ ID NO: 8878 - RNA, 26 nt, Synthetic Construct
  source 1..26: mol_type = other RNA
gcataagcgtgcttgactgcgagact

SEQ ID NO: 8879 - RNA, 15 nt, Synthetic Construct
  source 1..15: mol_type = other RNA
ggtgaaagcggggga

SEQ ID NO: 8880 - RNA, 15 nt, Synthetic Construct
  source 1..15: mol_type = other RNA
ggtgaaagcggggga

SEQ ID NO: 8881 - RNA, 17 nt, Synthetic Construct
  source 1..17: mol_type = other RNA
cgatctgtagctggtct

SEQ ID NO: 8882 - RNA, 17 nt, Synthetic Construct
  source 1..17: mol_type = other RNA
cgatctgtagctggtct

SEQ ID NO: 8883 - RNA, 21 nt, Synthetic Construct
  source 1..21: mol_type = other RNA
gtgggcgtttgaagtgaagtg

SEQ ID NO: 8884 - RNA, 21 nt, Synthetic Construct
  source 1..21: mol_type = other RNA
gtgggcgtttgaagtgaagtg

SEQ ID NO: 8885 - RNA, 22 nt, Synthetic Construct
  source 1..22: mol_type = other RNA
tgaggtagtaggtcgtatagtt

SEQ ID NO: 8886 - RNA, 22 nt, Synthetic Construct
  source 1..22: mol_type = other RNA
tcctgtactgagctgccctgag

SEQ ID NO: 8887 - RNA, 22 nt, Synthetic Construct
  source 1..22: mol_type = other RNA
tgagatagtaggttgtatagtt

SEQ ID NO: 8888 - RNA, 15 nt, Synthetic Construct
  source 1..15: mol_type = other RNA
tcagtagctcgagga

SEQ ID NO: 8889 - RNA, 20 nt, Synthetic Construct
  source 1..20: mol_type = other RNA
tgaagtagtaggttgtgtgg

SEQ ID NO: 8890 - RNA, 20 nt, Synthetic Construct
  source 1..20: mol_type = other RNA
tgaagtagtaggttgtgtgg

SEQ ID NO: 8891 - RNA, 22 nt, Synthetic Construct
  source 1..22: mol_type = other RNA
tgaggtagtagattgtgctgtt

SEQ ID NO: 8892 - RNA, 39 nt, Synthetic Construct; identical to SEQ ID NO: 759
  source 1..39: mol_type = other RNA

SEQ ID NO: 8893 - RNA, 39 nt, Synthetic Construct; identical to SEQ ID NO: 759
  source 1..39: mol_type = other RNA

SEQ ID NO: 8894 - RNA, 19 nt, Synthetic Construct
  source 1..19: mol_type = other RNA
cccttgtcattagttgcta

SEQ ID NO: 8895 - RNA, 19 nt, Synthetic Construct
  source 1..19: mol_type = other RNA
cccttgtcattagttgcta

SEQ ID NO: 8896 - RNA, 23 nt, Synthetic Construct
  source 1..23: mol_type = other RNA
cgaagtgctgttcgtgcaggtag

SEQ ID NO: 8897 - RNA, 30 nt, Synthetic Construct; identical to SEQ ID NO: 2407
  source 1..30: mol_type = other RNA

SEQ ID NO: 8898 - RNA, 24 nt, Synthetic Construct
  source 1..24: mol_type = other RNA
cgactcttagcggtggatcactcg

SEQ ID NO: 8899 - RNA, 24 nt, Synthetic Construct
  source 1..24: mol_type = other RNA
cgactcttagcggtggatcactcg

SEQ ID NO: 8900 - RNA, 16 nt, Synthetic Construct
  source 1..16: mol_type = other RNA
ccggaggaaggtgggg

SEQ ID NO: 8901 - RNA, 23 nt, Synthetic Construct
  source 1..23: mol_type = other RNA
tcctgtactgagctgccctgaga

SEQ ID NO: 8902 - RNA, 23 nt, Synthetic Construct
  source 1..23: mol_type = other RNA
tcctgtactgagctgccctgaga

SEQ ID NO: 8903 - RNA, 23 nt, Synthetic Construct
  source 1..23: mol_type = other RNA
tgtgcaaatctatgcaaaactga

SEQ ID NO: 8904 - RNA, 23 nt, Synthetic Construct
  source 1..23: mol_type = other RNA
tgtgcaaatctatgcaaaactga

SEQ ID NO: 8905 - RNA, 20 nt, Synthetic Construct
  source 1..20: mol_type = other RNA
agctacattgtctgctgggt

SEQ ID NO: 8906 - RNA, 20 nt, Synthetic Construct
  source 1..20: mol_type = other RNA
agctacattgtctgctgggt

SEQ ID NO: 8907 - RNA, 24 nt, Synthetic Construct
  source 1..24: mol_type = other RNA
agcagcattgtacagggctatgag

SEQ ID NO: 8908 - RNA, 21 nt, Synthetic Construct
  source 1..21: mol_type = other RNA
tcctgtactgagctgcctcga

SEQ ID NO: 8909 - RNA, 21 nt, Synthetic Construct
  source 1..21: mol_type = other RNA
tcctgtactgagctgcctcga

SEQ ID NO: 8910 - RNA, 22 nt, Synthetic Construct
  source 1..22: mol_type = other RNA
tgaggtagtagtttgtgctgtt

SEQ ID NO: 8911 - RNA, 25 nt, Synthetic Construct
  source 1..25: mol_type = other RNA
gcgccgctggtgtagtggtatcatg

SEQ ID NO: 8912 - RNA, 25 nt, Synthetic Construct
  source 1..25: mol_type = other RNA
gcgccgctggtgtagtggtatcatg

SEQ ID NO: 8913 - RNA, 20 nt, Synthetic Construct
  source 1..20: mol_type = other RNA
tcagtagctcgaggaaaaga

SEQ ID NO: 8914 - RNA, 20 nt, Synthetic Construct
  source 1..20: mol_type = other RNA
tcagtagctcgaggaaaaga

SEQ ID NO: 8915 - RNA, 16 nt, Synthetic Construct
  source 1..16: mol_type = other RNA
gctattgacgaccgta

SEQ ID NO: 8916 - RNA, 16 nt, Synthetic Construct
  source 1..16: mol_type = other RNA
gctattgacgaccgta

SEQ ID NO: 8917 - RNA, 24 nt, Synthetic Construct
  source 1..24: mol_type = other RNA
agctcggtctgaggcccctcagtt

SEQ ID NO: 8918 - RNA, 24 nt, Synthetic Construct
  source 1..24: mol_type = other RNA
agctcggtctgaggcccctcagtt

SEQ ID NO: 8919 - RNA, 21 nt, Synthetic Construct
  source 1..21: mol_type = other RNA
tgaggtagtaggttgtatagc

SEQ ID NO: 8920 - RNA, 25 nt, Synthetic Construct
  source 1..25: mol_type = other RNA
gcgccgctggtgtagtggtatcatg

SEQ ID NO: 8921 - RNA, 25 nt, Synthetic Construct
  source 1..25: mol_type = other RNA
gcgccgctggtgtagtggtatcatg

SEQ ID NO: 8922 - RNA, 21 nt, Synthetic Construct
  source 1..21: mol_type = other RNA
caatggccgggacagagggct

SEQ ID NO: 8923 - RNA, 22 nt, Synthetic Construct
  source 1..22: mol_type = other RNA
ttcaagtaatccaggataggcc

SEQ ID NO: 8924 - RNA, 22 nt, Synthetic Construct
  source 1..22: mol_type = other RNA
ttcaagtaatccaggataggcc

SEQ ID NO: 8925 - RNA, 22 nt, Synthetic Construct
  source 1..22: mol_type = other RNA
ttaatgctaatcgtgatagggt

SEQ ID NO: 8926 - RNA, 22 nt, Synthetic Construct
  source 1..22: mol_type = other RNA
tgaggtagtagattgcatagtt

SEQ ID NO: 8927 - RNA, 20 nt, Synthetic Construct
  source 1..20: mol_type = other RNA
cccataaagtagaaagcact

SEQ ID NO: 8928 - RNA, 20 nt, Synthetic Construct
  source 1..20: mol_type = other RNA
cccataaagtagaaagcact

SEQ ID NO: 8929 - RNA, 41 nt, Synthetic Construct
  source 1..41: mol_type = other RNA
agtaatgcatgtagcttagcagtactaatcatccgttcggc

SEQ ID NO: 8930 - RNA, 41 nt, Synthetic Construct; identical to SEQ ID NO: 8929
  source 1..41: mol_type = other RNA

SEQ ID NO: 8931 - RNA, 23 nt, Synthetic Construct
  source 1..23: mol_type = other RNA
ggaggggcagagagcgagacttt

SEQ ID NO: 8932 - RNA, 23 nt, Synthetic Construct
  source 1..23: mol_type = other RNA
tgaggaagtaggttgtgtggttt

SEQ ID NO: 8933 - RNA, 41 nt, Synthetic Construct; identical to SEQ ID NO: 8929
  source 1..41: mol_type = other RNA

SEQ ID NO: 8934 - RNA, 41 nt, Synthetic Construct; identical to SEQ ID NO: 8929
  source 1..41: mol_type = other RNA

SEQ ID NO: 8935 - RNA, 23 nt, Synthetic Construct
  source 1..23: mol_type = other RNA
tccagtactgagctgccccgagt

SEQ ID NO: 8936 - RNA, 23 nt, Synthetic Construct
  source 1..23: mol_type = other RNA
tgaggtagtgggttgtgtggttt

SEQ ID NO: 8937 - RNA, 24 nt, Synthetic Construct
  source 1..24: mol_type = other RNA
tgagaactgaattccatgggttgt

SEQ ID NO: 8938 - RNA, 24 nt, Synthetic Construct
  source 1..24: mol_type = other RNA
tgagaactgaattccatgggttgt

SEQ ID NO: 8939 - RNA, 18 nt, Synthetic Construct
  source 1..18: mol_type = other RNA
ggtagcgtggccgagcgg

SEQ ID NO: 8940 - RNA, 18 nt, Synthetic Construct
  source 1..18: mol_type = other RNA
ggtagcgtggccgagcgg

SEQ ID NO: 8941 - RNA, 21 nt, Synthetic Construct
  source 1..21: mol_type = other RNA
tcctgtacagagctgccccga

SEQ ID NO: 8942 - RNA, 23 nt, Synthetic Construct
  source 1..23: mol_type = other RNA
atcacattgccagggatttccaa

SEQ ID NO: 8943 - RNA, 22 nt, Synthetic Construct
  source 1..22: mol_type = other RNA
tgaggtagtaggtcgtgtggtt

SEQ ID NO: 8944 - RNA, 23 nt, Synthetic Construct
  source 1..23: mol_type = other RNA
tggtaatacgacgtacttagcgt

SEQ ID NO: 8945 - RNA, 27 nt, Synthetic Construct
  source 1..27: mol_type = other RNA
ncccccactgctaaatttgactggctt

SEQ ID NO: 8946 - RNA, 18 nt, Synthetic Construct
  source 1..18: mol_type = other RNA
atcgctagtaatcgcgga

SEQ ID NO: 8947 - RNA, 18 nt, Synthetic Construct
  source 1..18: mol_type = other RNA
atcgctagtaatcgcgga

SEQ ID NO: 8948 - RNA, 16 nt, Synthetic Construct
  source 1..16: mol_type = other RNA
ctgcctcagcgtcggt

SEQ ID NO: 8949 - RNA, 16 nt, Synthetic Construct
  source 1..16: mol_type = other RNA
ctgcctcagcgtcggt

SEQ ID NO: 8950 - RNA, 25 nt, Synthetic Construct
  source 1..25: mol_type = other RNA
gttgaattgtggtctgtggacgtgg

SEQ ID NO: 8951 - RNA, 25 nt, Synthetic Construct
  source 1..25: mol_type = other RNA
gttgaattgtggtctgtggacgtgg

SEQ ID NO: 8952 - RNA, 16 nt, Synthetic Construct
  source 1..16: mol_type = other RNA
gtcgacgtatagggtg

SEQ ID NO: 8953 - RNA, 20 nt, Synthetic Construct
  source 1..20: mol_type = other RNA
tcagtagctcgaggaaaaga

SEQ ID NO: 8954 - RNA, 20 nt, Synthetic Construct
  source 1..20: mol_type = other RNA
tcagtagctcgaggaaaaga

SEQ ID NO: 8955 - RNA, 23 nt, Synthetic Construct
  source 1..23: mol_type = other RNA
agctacattgtctgctgggttcc

SEQ ID NO: 8956 - RNA, 23 nt, Synthetic Construct
  source 1..23: mol_type = other RNA
agctacattgtctgctgggttcc

SEQ ID NO: 8957 - RNA, 22 nt, Synthetic Construct
  source 1..22: mol_type = other RNA
tgaggtagtaggttatatagtt

SEQ ID NO: 8958 - RNA, 26 nt, Synthetic Construct
  source 1..26: mol_type = other RNA
gatgcgtggtaggagagcgttctgta

SEQ ID NO: 8959 - RNA, 22 nt, Synthetic Construct
  source 1..22: mol_type = other RNA
ngaggtagtagtttgtgctgtt

SEQ ID NO: 8960 - RNA, 21 nt, Synthetic Construct
  source 1..21: mol_type = other RNA
tgaggtagtaggttgtatggt

SEQ ID NO: 8961 - RNA, 21 nt, Synthetic Construct
  source 1..21: mol_type = other RNA
tgaggtagtaggttgtatggt

SEQ ID NO: 8962 - RNA, 15 nt, Synthetic Construct
  source 1..15: mol_type = other RNA
ggtcatcgtcaggct

SEQ ID NO: 8963 - RNA, 22 nt, Synthetic Construct
  source 1..22: mol_type = other RNA
tattgtacttgtcccggcctgt

SEQ ID NO: 8964 - RNA, 40 nt, Synthetic Construct; identical to SEQ ID NO: 2684
  source 1..40: mol_type = other RNA

SEQ ID NO: 8965 - RNA, 40 nt, Synthetic Construct; identical to SEQ ID NO: 2684
  source 1..40: mol_type = other RNA

SEQ ID NO: 8966 - RNA, 23 nt, Synthetic Construct
  source 1..23: mol_type = other RNA
cctcgcgcgattggagcggccga

SEQ ID NO: 8967 - RNA, 23 nt, Synthetic Construct
  source 1..23: mol_type = other RNA
tgaggcagtaggttgtgtggttt

SEQ ID NO: 8968 - RNA, 23 nt, Synthetic Construct
  source 1..23: mol_type = other RNA
tgaggcagtaggttgtgtggttt

SEQ ID NO: 8969 - RNA, 21 nt, Synthetic Construct
  source 1..21: mol_type = other RNA
tggagtgtgacaatggtgctt

SEQ ID NO: 8970 - RNA, 21 nt, Synthetic Construct
  source 1..21: mol_type = other RNA
tggagtgtgacaatggtgctt

SEQ ID NO: 8971 - RNA, 19 nt, Synthetic Construct
  source 1..19: mol_type = other RNA
cagcactctgcaaagacga

SEQ ID NO: 8972 - RNA, 23 nt, Synthetic Construct
  source 1..23: mol_type = other RNA
tctcccaacccttgtaccagtga

SEQ ID NO: 8973 - RNA, 23 nt, Synthetic Construct
  source 1..23: mol_type = other RNA
tctcccaacccttgtaccagtga

SEQ ID NO: 8974 - RNA, 31 nt, Synthetic Construct; identical to SEQ ID NO: 2442
  source 1..31: mol_type = other RNA

SEQ ID NO: 8975 - RNA, 24 nt, Synthetic Construct
  source 1..24: mol_type = other RNA
gggttgtaaaccgcttttgtcagg

SEQ ID NO: 8976 - RNA, 24 nt, Synthetic Construct
  source 1..24: mol_type = other RNA
gggttgtaaaccgcttttgtcagg

SEQ ID NO: 8977 - RNA, 35 nt, Synthetic Construct; identical to SEQ ID NO: 2514
  source 1..35: mol_type = other RNA

SEQ ID NO: 8978 - RNA, 35 nt, Synthetic Construct; identical to SEQ ID NO: 2514
  source 1..35: mol_type = other RNA

SEQ ID NO: 8979 - RNA, 31 nt, Synthetic Construct; identical to SEQ ID NO: 960
  source 1..31: mol_type = other RNA

SEQ ID NO: 8980 - RNA, 31 nt, Synthetic Construct; identical to SEQ ID NO: 960
  source 1..31: mol_type = other RNA

SEQ ID NO: 8981 - RNA, 20 nt, Synthetic Construct
  source 1..20: mol_type = other RNA
tgaggtagtgggttgtgtgg

SEQ ID NO: 8982 - RNA, 20 nt, Synthetic Construct
  source 1..20: mol_type = other RNA
tgaggtagtgggttgtgtgg

SEQ ID NO: 8983 - RNA, 22 nt, Synthetic Construct
  source 1..22: mol_type = other RNA
taaggtagtaggttgtatagtt

SEQ ID NO: 8984 - RNA, 23 nt, Synthetic Construct
  source 1..23: mol_type = other RNA
ttatcagaatctccaggggtact

SEQ ID NO: 8985 - RNA, 23 nt, Synthetic Construct
  source 1..23: mol_type = other RNA
ttatcagaatctccaggggtact

SEQ ID NO: 8986 - RNA, 37 nt, Synthetic Construct
  source 1..37: mol_type = other RNA
ggcgatcaagcggtataccgaagctctaggtgcggca

SEQ ID NO: 8987 - RNA, 37 nt, Synthetic Construct; identical to SEQ ID NO: 8986
  source 1..37: mol_type = other RNA

SEQ ID NO: 8988 - RNA, 23 nt, Synthetic Construct
  source 1..23: mol_type = other RNA
naaagtgctgttcgtgcaggtag

SEQ ID NO: 8989 - RNA, 18 nt, Synthetic Construct
  source 1..18: mol_type = other RNA
accggaggaaggtgggga

SEQ ID NO: 8990 - RNA, 18 nt, Synthetic Construct
  source 1..18: mol_type = other RNA
accggaggaaggtgggga

SEQ ID NO: 8991 - RNA, 31 nt, Synthetic Construct; identical to SEQ ID NO: 2295
  source 1..31: mol_type = other RNA

SEQ ID NO: 8992 - RNA, 32 nt, Synthetic Construct; identical to SEQ ID NO: 2086
  source 1..32: mol_type = other RNA

SEQ ID NO: 8993 - RNA, 32 nt, Synthetic Construct; identical to SEQ ID NO: 2086
  source 1..32: mol_type = other RNA

SEQ ID NO: 8994 - RNA, 22 nt, Synthetic Construct
  source 1..22: mol_type = other RNA
cctcgcgcgattggagcggccg

SEQ ID NO: 8995 - RNA, 22 nt, Synthetic Construct
  source 1..22: mol_type = other RNA
cctcgcgcgattggagcggccg

SEQ ID NO: 8996 - RNA, 23 nt, Synthetic Construct
  source 1..23: mol_type = other RNA
ggcagggttcgtgactggggtga

SEQ ID NO: 8997 - RNA, 23 nt, Synthetic Construct
  source 1..23: mol_type = other RNA
tggtagtacgacgtacttagtgt

SEQ ID NO: 8998 - RNA, 34 nt, Synthetic Construct; identical to SEQ ID NO: 2529
  source 1..34: mol_type = other RNA

SEQ ID NO: 8999 - RNA, 34 nt, Synthetic Construct; identical to SEQ ID NO: 2529
  source 1..34: mol_type = other RNA

SEQ ID NO: 9000 - RNA, 19 nt, Synthetic Construct
  source 1..19: mol_type = other RNA
tgcggggctagggctaaca

SEQ ID NO: 9001 - RNA, 19 nt, Synthetic Construct
  source 1..19: mol_type = other RNA
tgcggggctagggctaaca

SEQ ID NO: 9002 - RNA, 23 nt, Synthetic Construct
  source 1..23: mol_type = other RNA
caaagtgccgttcgtgcaggtag

SEQ ID NO: 9003 - RNA, 19 nt, Synthetic Construct
  source 1..19: mol_type = other RNA
cttggggttgtaggaccac

SEQ ID NO: 9004 - RNA, 19 nt, Synthetic Construct
  source 1..19: mol_type = other RNA
cttggggttgtaggaccac

SEQ ID NO: 9005 - RNA, 16 nt, Synthetic Construct
  source 1..16: mol_type = other RNA
gtctgcggccatacca

SEQ ID NO: 9006 - RNA, 16 nt, Synthetic Construct
  source 1..16: mol_type = other RNA
gtctgcggccatacca

SEQ ID NO: 9007 - RNA, 27 nt, Synthetic Construct
  source 1..27: mol_type = other RNA
ccccccactgctagatttgactggctt

SEQ ID NO: 9008 - RNA, 27 nt, Synthetic Construct
  source 1..27: mol_type = other RNA
ccccccactgctagatttgactggctt

SEQ ID NO: 9009 - RNA, 22 nt, Synthetic Construct
  source 1..22: mol_type = other RNA
tcctgtactgtgctgccccgag

SEQ ID NO: 9010 - RNA, 22 nt, Synthetic Construct
  source 1..22: mol_type = other RNA
ngaggtagtagtttgtgctgtt

SEQ ID NO: 9011 - RNA, 22 nt, Synthetic Construct
  source 1..22: mol_type = other RNA
ngaggtagtagtttgtgctgtt

SEQ ID NO: 9012 - RNA, 22 nt, Synthetic Construct
  source 1..22: mol_type = other RNA
tcctgtactgtgctgccccgag

SEQ ID NO: 9013 - RNA, 22 nt, Synthetic Construct
  source 1..22: mol_type = other RNA
tgaggtggtaggttgtatagtt

SEQ ID NO: 9014 - RNA, 21 nt, Synthetic Construct
  source 1..21: mol_type = other RNA
tgaggtagtaggttgtataga

SEQ ID NO: 9015 - RNA, 21 nt, Synthetic Construct
  source 1..21: mol_type = other RNA
tgaggtagtaggttgtataga

SEQ ID NO: 9016 - RNA, 23 nt, Synthetic Construct
  source 1..23: mol_type = other RNA
tcctgtactgagctgctccgaga

SEQ ID NO: 9017 - RNA, 15 nt, Synthetic Construct
  source 1..15: mol_type = other RNA
gtagctcgttgggct

SEQ ID NO: 9018 - RNA, 23 nt, Synthetic Construct
  source 1..23: mol_type = other RNA
tcctgtactgagctgccccgagg

SEQ ID NO: 9019 - RNA, 23 nt, Synthetic Construct
  source 1..23: mol_type = other RNA
tcctgtactgagctgccccgagg

SEQ ID NO: 9020 - RNA, 34 nt, Synthetic Construct; identical to SEQ ID NO: 6757
  source 1..34: mol_type = other RNA

SEQ ID NO: 9021 - RNA, 34 nt, Synthetic Construct; identical to SEQ ID NO: 6757
  source 1..34: mol_type = other RNA

SEQ ID NO: 9022 - RNA, 27 nt, Synthetic Construct
  source 1..27: mol_type = other RNA
cgtgtgaaagtaggtcatcgtcaggct

SEQ ID NO: 9023 - RNA, 27 nt, Synthetic Construct
  source 1..27: mol_type = other RNA
cgtgtgaaagtaggtcatcgtcaggct

SEQ ID NO: 9024 - RNA, 23 nt, Synthetic Construct
  source 1..23: mol_type = other RNA
caaagtgctgtccgtgcaggtag

SEQ ID NO: 9025 - RNA, 27 nt, Synthetic Construct
  source 1..27: mol_type = other RNA
atagtctttgttcgattccgttgagta

SEQ ID NO: 9026 - RNA, 27 nt, Synthetic Construct
  source 1..27: mol_type = other RNA
atagtctttgttcgattccgttgagta

SEQ ID NO: 9027 - RNA, 24 nt, Synthetic Construct
  source 1..24: mol_type = other RNA
tcttggagtaggtcattgggtggt

SEQ ID NO: 9028 - RNA, 17 nt, Synthetic Construct
  source 1..17: mol_type = other RNA
gaagttgaccgcctggg

SEQ ID NO: 9029 - RNA, 23 nt, Synthetic Construct
  source 1..23: mol_type = other RNA
tggtaatacgatgtacttagtgt

SEQ ID NO: 9030 - RNA, 25 nt, Synthetic Construct
  source 1..25: mol_type = other RNA
cctcgcgcgattggagcggccgata

SEQ ID NO: 9031 - RNA, 25 nt, Synthetic Construct
  source 1..25: mol_type = other RNA
cctcgcgcgattggagcggccgata

SEQ ID NO: 9032 - RNA, 23 nt, Synthetic Construct
  source 1..23: mol_type = other RNA
tcctgtactgagccgccccgaga

SEQ ID NO: 9033 - RNA, 23 nt, Synthetic Construct
  source 1..23: mol_type = other RNA
ccctgtactgagctgccccgagt

SEQ ID NO: 9034 - RNA, 19 nt, Synthetic Construct
  source 1..19: mol_type = other RNA
agtcgacgtatagggtgtg

SEQ ID NO: 9035 - RNA, 19 nt, Synthetic Construct
  source 1..19: mol_type = other RNA
agtcgacgtatagggtgtg

SEQ ID NO: 9036 - RNA, 20 nt, Synthetic Construct
  source 1..20: mol_type = other RNA
cataaagtagaaagcactac

SEQ ID NO: 9037 - RNA, 20 nt, Synthetic Construct
  source 1..20: mol_type = other RNA
cataaagtagaaagcactac

SEQ ID NO: 9038 - RNA, 22 nt, Synthetic Construct
  source 1..22: mol_type = other RNA
tgaggtagtagtttgtggtgtt

SEQ ID NO: 9039 - RNA, 21 nt, Synthetic Construct
  source 1..21: mol_type = other RNA
tgaagtagtaggttgtgtggt

SEQ ID NO: 9040 - RNA, 21 nt, Synthetic Construct
  source 1..21: mol_type = other RNA
tgaagtagtaggttgtgtggt

SEQ ID NO: 9041 - RNA, 22 nt, Synthetic Construct
  source 1..22: mol_type = other RNA
tcccgtactgagctgccccgag

SEQ ID NO: 9042 - RNA, 22 nt, Synthetic Construct
  source 1..22: mol_type = other RNA
atataatacaacctgctaagtg

SEQ ID NO: 9043 - RNA, 22 nt, Synthetic Construct
  source 1..22: mol_type = other RNA
taaggtagtaggttgtgtggtt

SEQ ID NO: 9044 - RNA, 23 nt, Synthetic Construct
  source 1..23: mol_type = other RNA
aacattcaacgctgtcggtgaga

SEQ ID NO: 9045 - RNA, 30 nt, Synthetic Construct; identical to SEQ ID NO: 6467
  source 1..30: mol_type = other RNA

SEQ ID NO: 9046 - RNA, 30 nt, Synthetic Construct; identical to SEQ ID NO: 6467
  source 1..30: mol_type = other RNA

SEQ ID NO: 9047 - RNA, 22 nt, Synthetic Construct
  source 1..22: mol_type = other RNA
tggaatgtgaagaagtatgtat

SEQ ID NO: 9048 - RNA, 22 nt, Synthetic Construct
  source 1..22: mol_type = other RNA
tggaatgtgaagaagtatgtat

SEQ ID NO: 9049 - RNA, 17 nt, Synthetic Construct
  source 1..17: mol_type = other RNA
cagtcaggatgttggct

SEQ ID NO: 9050 - RNA, 17 nt, Synthetic Construct
  source 1..17: mol_type = other RNA
cagtcaggatgttggct

SEQ ID NO: 9051 - RNA, 15 nt, Synthetic Construct
  source 1..15: mol_type = other RNA
ggtcatcgtcaggct

SEQ ID NO: 9052 - RNA, 18 nt, Synthetic Construct
  source 1..18: mol_type = other RNA
ggctttgaagtaaggtcg

SEQ ID NO: 9053 - RNA, 18 nt, Synthetic Construct
  source 1..18: mol_type = other RNA
ggctttgaagtaaggtcg

SEQ ID NO: 9054 - RNA, 21 nt, Synthetic Construct
  source 1..21: mol_type = other RNA
tccttcattccaccggagtct

SEQ ID NO: 9055 - RNA, 21 nt, Synthetic Construct
  source 1..21: mol_type = other RNA
tccttcattccaccggagtct

SEQ ID NO: 9056 - RNA, 21 nt, Synthetic Construct
  source 1..21: mol_type = other RNA
cgtaccgtgagtaataatgcg

SEQ ID NO: 9057 - RNA, 21 nt, Synthetic Construct
  source 1..21: mol_type = other RNA
cgtaccgtgagtaataatgcg

SEQ ID NO: 9058 - RNA, 22 nt, Synthetic Construct
  source 1..22: mol_type = other RNA
caacggaatcccaaaagcagca

SEQ ID NO: 9059 - RNA, 19 nt, Synthetic Construct
  source 1..19: mol_type = other RNA
agtcgacgtatagggtgtg

SEQ ID NO: 9060 - RNA, 23 nt, Synthetic Construct
  source 1..23: mol_type = other RNA
tgaggggcagagagtgagacttt

SEQ ID NO: 9061 - RNA, 22 nt, Synthetic Construct
  source 1..22: mol_type = other RNA
tgaggtagtaatttgtgctgtt

SEQ ID NO: 9062 - RNA, 34 nt, Synthetic Construct; identical to SEQ ID NO: 2553
  source 1..34: mol_type = other RNA

SEQ ID NO: 9063 - RNA, 34 nt, Synthetic Construct; identical to SEQ ID NO: 2553
  source 1..34: mol_type = other RNA

SEQ ID NO: 9064 - RNA, 23 nt, Synthetic Construct
  source 1..23: mol_type = other RNA
tgaggtagtaggtcgtgtggttt

SEQ ID NO: 9065 - RNA, 23 nt, Synthetic Construct
  source 1..23: mol_type = other RNA
tgaggtagtaggtcgtgtggttt

SEQ ID NO: 9066 - RNA, 24 nt, Synthetic Construct
  source 1..24: mol_type = other RNA
ttccccttggggttgtaggaccac

SEQ ID NO: 9067 - RNA, 24 nt, Synthetic Construct
  source 1..24: mol_type = other RNA
ttccccttggggttgtaggaccac

SEQ ID NO: 9068 - RNA, 22 nt, Synthetic Construct
  source 1..22: mol_type = other RNA
cggaggagttcgaaggtacgct

SEQ ID NO: 9069 - RNA, 22 nt, Synthetic Construct
  source 1..22: mol_type = other RNA
cggaggagttcgaaggtacgct

SEQ ID NO: 9070 - RNA, 16 nt, Synthetic Construct
  source 1..16: mol_type = other RNA
gcaagaggtcagcggt

SEQ ID NO: 9071 - RNA, 16 nt, Synthetic Construct
  source 1..16: mol_type = other RNA
gcaagaggtcagcggt

SEQ ID NO: 9072 - RNA, 16 nt, Synthetic Construct
  source 1..16: mol_type = other RNA
gatctgtagctggtct

SEQ ID NO: 9073 - RNA, 16 nt, Synthetic Construct
  source 1..16: mol_type = other RNA
gatctgtagctggtct

SEQ ID NO: 9074 - RNA, 26 nt, Synthetic Construct
  source 1..26: mol_type = other RNA
cgactcttagcggtggatcactcggc

SEQ ID NO: 9075 - RNA, 26 nt, Synthetic Construct
  source 1..26: mol_type = other RNA
cgactcttagcggtggatcactcggc

SEQ ID NO: 9076 - RNA, 23 nt, Synthetic Construct
  source 1..23: mol_type = other RNA
aatgacacgatcactcccgttga

SEQ ID NO: 9077 - RNA, 23 nt, Synthetic Construct
  source 1..23: mol_type = other RNA
tgaggggcagagagcgggacttt

SEQ ID NO: 9078 - RNA, 23 nt, Synthetic Construct
  source 1..23: mol_type = other RNA
tgaggggcagagagcgggacttt

SEQ ID NO: 9079 - RNA, 25 nt, Synthetic Construct
  source 1..25: mol_type = other RNA
tcggatccgtctgagcttggctttt

SEQ ID NO: 9080 - RNA, 25 nt, Synthetic Construct
  source 1..25: mol_type = other RNA
tcggatccgtctgagcttggctttt

SEQ ID NO: 9081 - RNA, 22 nt, Synthetic Construct
  source 1..22: mol_type = other RNA
tcagtagctcgaggaaaagaca

SEQ ID NO: 9082 - RNA, 22 nt, Synthetic Construct
  source 1..22: mol_type = other RNA
tcagtagctcgaggaaaagaca

SEQ ID NO: 9083 - RNA, 20 nt, Synthetic Construct
  source 1..20: mol_type = other RNA
tacagtatagatgatgtact

SEQ ID NO: 9084 - RNA, 23 nt, Synthetic Construct
  source 1..23: mol_type = other RNA
agcagcattgtacagggctatgt

SEQ ID NO: 9085 - RNA, 22 nt, Synthetic Construct
  source 1..22: mol_type = other RNA
gctcttgactgaagtcccagta

SEQ ID NO: 9086 - RNA, 22 nt, Synthetic Construct
  source 1..22: mol_type = other RNA
gctcttgactgaagtcccagta

SEQ ID NO: 9087 - RNA, 22 nt, Synthetic Construct
  source 1..22: mol_type = other RNA
tctttgttcgattccgttgagt

SEQ ID NO: 9088 - RNA, 30 nt, Synthetic Construct; identical to SEQ ID NO: 2840
  source 1..30: mol_type = other RNA

SEQ ID NO: 9089 - RNA, 30 nt, Synthetic Construct; identical to SEQ ID NO: 2840
  source 1..30: mol_type = other RNA

SEQ ID NO: 9090 - RNA, 22 nt, Synthetic Construct
  source 1..22: mol_type = other RNA
taactccttaagcgaatctcgc

SEQ ID NO: 9091 - RNA, 22 nt, Synthetic Construct
  source 1..22: mol_type = other RNA
taactccttaagcgaatctcgc

SEQ ID NO: 9092 - RNA, 23 nt, Synthetic Construct
  source 1..23: mol_type = other RNA
tggtaaaacgacgtacttagtgt

SEQ ID NO: 9093 - RNA, 23 nt, Synthetic Construct
  source 1..23: mol_type = other RNA
tggtaaaacgacgtacttagtgt

SEQ ID NO: 9094 - RNA, 35 nt, Synthetic Construct; identical to SEQ ID NO: 3369
  source 1..35: mol_type = other RNA

SEQ ID NO: 9095 - RNA, 35 nt, Synthetic Construct; identical to SEQ ID NO: 3369
  source 1..35: mol_type = other RNA

SEQ ID NO: 9096 - RNA, 22 nt, Synthetic Construct
  source 1..22: mol_type = other RNA
tgcggggctagggctaacagct

SEQ ID NO: 9097 - RNA, 22 nt, Synthetic Construct
  source 1..22: mol_type = other RNA
tgcggggctagggctaacagct

SEQ ID NO: 9098 - RNA, 22 nt, Synthetic Construct
  source 1..22: mol_type = other RNA
gtcagtttgtcaaataccccat

SEQ ID NO: 9099 - RNA, 22 nt, Synthetic Construct
  source 1..22: mol_type = other RNA
gtcagtttgtcaaataccccat

SEQ ID NO: 9100 - RNA, 22 nt, Synthetic Construct
  source 1..22: mol_type = other RNA
tgaggtagtagtttgtgttgtt

SEQ ID NO: 9101 - RNA, 21 nt, Synthetic Construct
  source 1..21: mol_type = other RNA
tcctgtaccgagctgccccga

SEQ ID NO: 9102 - RNA, 23 nt, Synthetic Construct
  source 1..23: mol_type = other RNA
tgaggggtagagagcgagacttt

SEQ ID NO: 9103 - RNA, 23 nt, Synthetic Construct
  source 1..23: mol_type = other RNA
caaagtgctgttcgtgcaggtaa

SEQ ID NO: 9104 - RNA, 24 nt, Synthetic Construct
  source 1..24: mol_type = other RNA
gtctttgttcgattccgttgagta

SEQ ID NO: 9105 - RNA, 36 nt, Synthetic Construct; identical to SEQ ID NO: 777
  source 1..36: mol_type = other RNA

SEQ ID NO: 9106 - RNA, 23 nt, Synthetic Construct
  source 1..23: mol_type = other RNA
tgaggtaggaggttgtatagtta

SEQ ID NO: 9107 - RNA, 24 nt, Synthetic Construct
  source 1..24: mol_type = other RNA
cgactcttagcggtggatcactcg

SEQ ID NO: 9108 - RNA, 24 nt, Synthetic Construct
  source 1..24: mol_type = other RNA
cgactcttagcggtggatcactcg

SEQ ID NO: 9109 - RNA, 22 nt, Synthetic Construct
  source 1..22: mol_type = other RNA
tattgtacttgtcccggcctgt

SEQ ID NO: 9110 - RNA, 22 nt, Synthetic Construct
  source 1..22: mol_type = other RNA
tattgtacttgtcccggcctgt

SEQ ID NO: 9111 - RNA, 22 nt, Synthetic Construct
  source 1..22: mol_type = other RNA
tgaggaagtaggttgtgtggtt

SEQ ID NO: 9112 - RNA, 25 nt, Synthetic Construct
  source 1..25: mol_type = other RNA
aatgacacgatcactcccgttgagt

SEQ ID NO: 9113 - RNA, 25 nt, Synthetic Construct
  source 1..25: mol_type = other RNA
aatgacacgatcactcccgttgagt

SEQ ID NO: 9114 - RNA, 32 nt, Synthetic Construct; identical to SEQ ID NO: 2318
  source 1..32: mol_type = other RNA

SEQ ID NO: 9115 - RNA, 43 nt, Synthetic Construct; identical to SEQ ID NO: 1204
  source 1..43: mol_type = other RNA

SEQ ID NO: 9116 - RNA, 43 nt, Synthetic Construct; identical to SEQ ID NO: 1204
  source 1..43: mol_type = other RNA

SEQ ID NO: 9117 - RNA, 25 nt, Synthetic Construct
  source 1..25: mol_type = other RNA
gtgaggatatgagatcgagacgaca

SEQ ID NO: 9118 - RNA, 16 nt, Synthetic Construct
  source 1..16: mol_type = other RNA
atctacggccatacca

SEQ ID NO: 9119 - RNA, 22 nt, Synthetic Construct
  source 1..22: mol_type = other RNA
tgaggcagtaggttgtatagtt

SEQ ID NO: 9120 - RNA, 23 nt, Synthetic Construct
  source 1..23: mol_type = other RNA
tcctgtactgagctgtcccgaga

SEQ ID NO: 9121 - RNA, 23 nt, Synthetic Construct
  source 1..23: mol_type = other RNA
tcctgtactgagctgtcccgaga

SEQ ID NO: 9122 - RNA, 23 nt, Synthetic Construct
  source 1..23: mol_type = other RNA
tcctgcactgagctgccccgagt

SEQ ID NO: 9123 - RNA, 23 nt, Synthetic Construct
  source 1..23: mol_type = other RNA
tcctgcactgagctgccccgagt

SEQ ID NO: 9124 - RNA, 25 nt, Synthetic Construct
  source 1..25: mol_type = other RNA
gcgccgctggtgtagtggtatcatg

SEQ ID NO: 9125 - RNA, 20 nt, Synthetic Construct
  source 1..20: mol_type = other RNA
cccataaagtagaaagcact

SEQ ID NO: 9126 - RNA, 23 nt, Synthetic Construct
  source 1..23: mol_type = other RNA
gcgtggtaggagagcgttctgta

SEQ ID NO: 9127 - RNA, 23 nt, Synthetic Construct
  source 1..23: mol_type = other RNA
gcgtggtaggagagcgttctgta

SEQ ID NO: 9128 - RNA, 25 nt, Synthetic Construct
  source 1..25: mol_type = other RNA
ttgaggatatgagatcgggacgaca

SEQ ID NO: 9129 - RNA, 25 nt, Synthetic Construct
  source 1..25: mol_type = other RNA
ttgaggatatgagatcgggacgaca

SEQ ID NO: 9130 - RNA, 30 nt, Synthetic Construct; identical to SEQ ID NO: 3933
  source 1..30: mol_type = other RNA

SEQ ID NO: 9131 - RNA, 30 nt, Synthetic Construct; identical to SEQ ID NO: 3933
  source 1..30: mol_type = other RNA

SEQ ID NO: 9132 - RNA, 23 nt, Synthetic Construct
  source 1..23: mol_type = other RNA
tgaggggaagagagcgagacttt

SEQ ID NO: 9133 - RNA, 23 nt, Synthetic Construct
  source 1..23: mol_type = other RNA
tgaggggaagagagcgagacttt

SEQ ID NO: 9134 - RNA, 17 nt, Synthetic Construct
  source 1..17: mol_type = other RNA
gtgttcggaagattttc

SEQ ID NO: 9135 - RNA, 17 nt, Synthetic Construct
  source 1..17: mol_type = other RNA
gtgttcggaagattttc

SEQ ID NO: 9136 - RNA, 25 nt, Synthetic Construct
  source 1..25: mol_type = other RNA
tcgaggatatgagatcgagacgaca

SEQ ID NO: 9137 - RNA, 25 nt, Synthetic Construct
  source 1..25: mol_type = other RNA
tcgaggatatgagatcgagacgaca

SEQ ID NO: 9138 - RNA, 22 nt, Synthetic Construct
  source 1..22: mol_type = other RNA
caacggaatcccaaaagcagca

SEQ ID NO: 9139 - RNA, 23 nt, Synthetic Construct
  source 1..23: mol_type = other RNA
naaagtgctgttcgtgcaggtag

SEQ ID NO: 9140 - RNA, 23 nt, Synthetic Construct
  source 1..23: mol_type = other RNA
ttccccttggggttgtaggacca

SEQ ID NO: 9141 - RNA, 23 nt, Synthetic Construct
  source 1..23: mol_type = other RNA
ttccccttggggttgtaggacca

SEQ ID NO: 9142 - RNA, 20 nt, Synthetic Construct
  source 1..20: mol_type = other RNA
caaagaattctccttttggg

SEQ ID NO: 9143 - RNA, 20 nt, Synthetic Construct
  source 1..20: mol_type = other RNA
caaagaattctccttttggg

SEQ ID NO: 9144 - RNA, 18 nt, Synthetic Construct
  source 1..18: mol_type = other RNA
atcccactcctgacacca

SEQ ID NO: 9145 - RNA, 18 nt, Synthetic Construct
  source 1..18: mol_type = other RNA
atcccactcctgacacca

SEQ ID NO: 9146 - RNA, 23 nt, Synthetic Construct
  source 1..23: mol_type = other RNA
tccccttggggttgtaggaccac

SEQ ID NO: 9147 - RNA, 23 nt, Synthetic Construct
  source 1..23: mol_type = other RNA
tccccttggggttgtaggaccac

SEQ ID NO: 9148 - RNA, 23 nt, Synthetic Construct
  source 1..23: mol_type = other RNA
tcccgtactgagctgccccgagt

SEQ ID NO: 9149 - RNA, 39 nt, Synthetic Construct; identical to SEQ ID NO: 804
  source 1..39: mol_type = other RNA

SEQ ID NO: 9150 - RNA, 39 nt, Synthetic Construct; identical to SEQ ID NO: 804
  source 1..39: mol_type = other RNA

SEQ ID NO: 9151 - RNA, 23 nt, Synthetic Construct
  source 1..23: mol_type = other RNA
tccctggtggtctagtggttagg

SEQ ID NO: 9152 - RNA, 22 nt, Synthetic Construct
  source 1..22: mol_type = other RNA
tgaggtagtggtttgtgctgtt

SEQ ID NO: 9153 - RNA, 22 nt, Synthetic Construct
  source 1..22: mol_type = other RNA
tgaggtagtggtttgtgctgtt

SEQ ID NO: 9154 - RNA, 22 nt, Synthetic Construct
  source 1..22: mol_type = other RNA
tgaggtagtagttcgtgctgtt

SEQ ID NO: 9155 - RNA, 25 nt, Synthetic Construct
  source 1..25: mol_type = other RNA
gtcaggatggccgagcggtctaagg

SEQ ID NO: 9156 - RNA, 22 nt, Synthetic Construct
  source 1..22: mol_type = other RNA
aggaatgtaaagaagtatgtat

SEQ ID NO: 9157 - RNA, 22 nt, Synthetic Construct
  source 1..22: mol_type = other RNA
aggaatgtaaagaagtatgtat

SEQ ID NO: 9158 - RNA, 22 nt, Synthetic Construct
  source 1..22: mol_type = other RNA
tgaggtagtagtttgtgctatt

SEQ ID NO: 9159 - RNA, 34 nt, Synthetic Construct; identical to SEQ ID NO: 2298
  source 1..34: mol_type = other RNA

SEQ ID NO: 9160 - RNA, 34 nt, Synthetic Construct; identical to SEQ ID NO: 2298
  source 1..34: mol_type = other RNA

SEQ ID NO: 9161 - RNA, 22 nt, Synthetic Construct
  source 1..22: mol_type = other RNA
ncgtaccgtgagtaataatgcg

SEQ ID NO: 9162 - RNA, 22 nt, Synthetic Construct
  source 1..22: mol_type = other RNA
ngaggtagtagtttgtgctgtt

SEQ ID NO: 9163 - RNA, 22 nt, Synthetic Construct
  source 1..22: mol_type = other RNA
ngaggtagtagtttgtgctgtt

SEQ ID NO: 9164 - RNA, 23 nt, Synthetic Construct
  source 1..23: mol_type = other RNA
cagagttctacagtccgacgatc

SEQ ID NO: 9165 - RNA, 23 nt, Synthetic Construct
  source 1..23: mol_type = other RNA
cagagttctacagtccgacgatc

SEQ ID NO: 9166 - RNA, 20 nt, Synthetic Construct
  source 1..20: mol_type = other RNA
cgaggtagtaggttgtgtgg

SEQ ID NO: 9167 - RNA, 22 nt, Synthetic Construct
  source 1..22: mol_type = other RNA
tgaggtagtaggttatgtggtt

SEQ ID NO: 9168 - RNA, 22 nt, Synthetic Construct
  source 1..22: mol_type = other RNA
aagcagcacgtaaatattggag

SEQ ID NO: 9169 - RNA, 16 nt, Synthetic Construct
  source 1..16: mol_type = other RNA
gtccccttcgtctaga

SEQ ID NO: 9170 - RNA, 16 nt, Synthetic Construct
  source 1..16: mol_type = other RNA
gtccccttcgtctaga

SEQ ID NO: 9171 - RNA, 21 nt, Synthetic Construct
  source 1..21: mol_type = other RNA
tcctgtactgagctgccccaa

SEQ ID NO: 9172 - RNA, 21 nt, Synthetic Construct
  source 1..21: mol_type = other RNA
tcctgtactgagctgccccaa

SEQ ID NO: 9173 - RNA, 25 nt, Synthetic Construct
  source 1..25: mol_type = other RNA
ttgaggatatgggatcgagacgaca

SEQ ID NO: 9174 - RNA, 23 nt, Synthetic Construct
  source 1..23: mol_type = other RNA
tagtaatacgacgtacttagtgt

SEQ ID NO: 9175 - RNA, 22 nt, Synthetic Construct
  source 1..22: mol_type = other RNA
ctgggtcggtcgggctggggcg

SEQ ID NO: 9176 - RNA, 22 nt, Synthetic Construct
  source 1..22: mol_type = other RNA
ctgggtcggtcgggctggggcg

SEQ ID NO: 9177 - RNA, 18 nt, Synthetic Construct
  source 1..18: mol_type = other RNA
cctcgcgcgattggagcg

SEQ ID NO: 9178 - RNA, 18 nt, Synthetic Construct
  source 1..18: mol_type = other RNA
cctcgcgcgattggagcg

SEQ ID NO: 9179 - RNA, 22 nt, Synthetic Construct
  source 1..22: mol_type = other RNA
tgaggtagtagtttgtgctggt

SEQ ID NO: 9180 - RNA, 15 nt, Synthetic Construct
  source 1..15: mol_type = other RNA
gtcaggatgttggct

SEQ ID NO: 9181 - RNA, 15 nt, Synthetic Construct
  source 1..15: mol_type = other RNA
gtcaggatgttggct

SEQ ID NO: 9182 - RNA, 24 nt, Synthetic Construct
  source 1..24: mol_type = other RNA
tgagaactgaattccatgggtttt

SEQ ID NO: 9183 - RNA, 24 nt, Synthetic Construct
  source 1..24: mol_type = other RNA
tgagaactgaattccatgggtttt

SEQ ID NO: 9184 - RNA, 22 nt, Synthetic Construct
  source 1..22: mol_type = other RNA
tattgcacttgtcccagcctgt

SEQ ID NO: 9185 - RNA, 21 nt, Synthetic Construct
  source 1..21: mol_type = other RNA
tggaatgtaaagaagtatgta

SEQ ID NO: 9186 - RNA, 21 nt, Synthetic Construct
  source 1..21: mol_type = other RNA
tggaatgtaaagaagtatgta

SEQ ID NO: 9187 - RNA, 22 nt, Synthetic Construct
  source 1..22: mol_type = other RNA
tagcagcacgtaaatataggcg

SEQ ID NO: 9188 - RNA, 22 nt, Synthetic Construct
  source 1..22: mol_type = other RNA
tagcagcacgtaaatataggcg

SEQ ID NO: 9189 - RNA, 36 nt, Synthetic Construct; identical to SEQ ID NO: 2546
  source 1..36: mol_type = other RNA

SEQ ID NO: 9190 - RNA, 36 nt, Synthetic Construct; identical to SEQ ID NO: 2546
  source 1..36: mol_type = other RNA

SEQ ID NO: 9191 - RNA, 24 nt, Synthetic Construct
  source 1..24: mol_type = other RNA
tgcaaacatccccgactggaagct

SEQ ID NO: 9192 - RNA, 16 nt, Synthetic Construct
  source 1..16: mol_type = other RNA
gtgacgcgcatgaatg

SEQ ID NO: 9193 - RNA, 16 nt, Synthetic Construct
  source 1..16: mol_type = other RNA
gtgacgcgcatgaatg

SEQ ID NO: 9194 - RNA, 27 nt, Synthetic Construct
  source 1..27: mol_type = other RNA
ccccccactgctaaatttggctggctt

SEQ ID NO: 9195 - RNA, 22 nt, Synthetic Construct
  source 1..22: mol_type = other RNA
tgaggtagtgggttgtatagtt

SEQ ID NO: 9196 - RNA, 21 nt, Synthetic Construct
  source 1..21: mol_type = other RNA
ttctgtactgagctgccccga

SEQ ID NO: 9197 - RNA, 23 nt, Synthetic Construct
  source 1..23: mol_type = other RNA
tgaggtagtagtttgtgctgttc

SEQ ID NO: 9198 - RNA, 22 nt, Synthetic Construct
  source 1..22: mol_type = other RNA
tgaggtagtagtttgtgctggt

SEQ ID NO: 9199 - RNA, 29 nt, Synthetic Construct
  source 1..29: mol_type = other RNA
gatgcgaaagcaggtcaaagtgatccggc

SEQ ID NO: 9200 - RNA, 29 nt, Synthetic Construct
  source 1..29: mol_type = other RNA
gatgcgaaagcaggtcaaagtgatccggc

SEQ ID NO: 9201 - RNA, 21 nt, Synthetic Construct
  source 1..21: mol_type = other RNA
tcctgtactgagctgcctcga

SEQ ID NO: 9202 - RNA, 22 nt, Synthetic Construct
  source 1..22: mol_type = other RNA
tcctgtactgagctgcctcgag

SEQ ID NO: 9203 - RNA, 22 nt, Synthetic Construct
  source 1..22: mol_type = other RNA
tcctgtactgagctgcctcgag

SEQ ID NO: 9204 - RNA, 23 nt, Synthetic Construct
  source 1..23: mol_type = other RNA
tgaggtagtaggttgtgtagttt

SEQ ID NO: 9205 - RNA, 35 nt, Synthetic Construct; identical to SEQ ID NO: 3369
  source 1..35: mol_type = other RNA

SEQ ID NO: 9206 - RNA, 35 nt, Synthetic Construct; identical to SEQ ID NO: 3369
  source 1..35: mol_type = other RNA

SEQ ID NO: 9207 - RNA, 22 nt, Synthetic Construct
  source 1..22: mol_type = other RNA
tgaggtagcagattgtatagtt

SEQ ID NO: 9208 - RNA, 22 nt, Synthetic Construct
  source 1..22: mol_type = other RNA
aattgcacggtatccatctgta

SEQ ID NO: 9209 - RNA, 22 nt, Synthetic Construct
  source 1..22: mol_type = other RNA
aattgcacggtatccatctgta

SEQ ID NO: 9210 - RNA, 24 nt, Synthetic Construct
  source 1..24: mol_type = other RNA
tgtaaacaaccccgactggaagct

SEQ ID NO: 9211 - RNA, 39 nt, Synthetic Construct; identical to SEQ ID NO: 2398
  source 1..39: mol_type = other RNA

SEQ ID NO: 9212 - RNA, 31 nt, Synthetic Construct
  source 1..31: mol_type = other RNA
tccctgtggtctagtggttaggattcggcgc

SEQ ID NO: 9213 - RNA, 19 nt, Synthetic Construct
  source 1..19: mol_type = other RNA
cttggggttgtaggaccac

SEQ ID NO: 9214 - RNA, 19 nt, Synthetic Construct
  source 1..19: mol_type = other RNA
cttggggttgtaggaccac

SEQ ID NO: 9215 - RNA, 31 nt, Synthetic Construct; identical to SEQ ID NO: 2427
  source 1..31: mol_type = other RNA

SEQ ID NO: 9216 - RNA, 23 nt, Synthetic Construct
  source 1..23: mol_type = other RNA
cgactcttagcggtggatcactc

SEQ ID NO: 9217 - RNA, 23 nt, Synthetic Construct
  source 1..23: mol_type = other RNA
cgactcttagcggtggatcactc

SEQ ID NO: 9218 - RNA, 27 nt, Synthetic Construct
  source 1..27: mol_type = other RNA
ccccccactgctaaattcgactggctt

SEQ ID NO: 9219 - RNA, 23 nt, Synthetic Construct
  source 1..23: mol_type = other RNA
tggtaatacgacgtacttagtgc

SEQ ID NO: 9220 - RNA, 22 nt, Synthetic Construct
  source 1..22: mol_type = other RNA
tcctatactgagctgccccgag

SEQ ID NO: 9221 - RNA, 22 nt, Synthetic Construct
  source 1..22: mol_type = other RNA
ctttgttcgattccgttgagta

SEQ ID NO: 9222 - RNA, 22 nt, Synthetic Construct
  source 1..22: mol_type = other RNA
ctttgttcgattccgttgagta

SEQ ID NO: 9223 - RNA, 22 nt, Synthetic Construct
  source 1..22: mol_type = other RNA
tgaggtagaaggttgtatagtt

SEQ ID NO: 9224 - RNA, 18 nt, Synthetic Construct
  source 1..18: mol_type = other RNA
tctaatgagactgccggt

SEQ ID NO: 9225 - RNA, 18 nt, Synthetic Construct
  source 1..18: mol_type = other RNA
tctaatgagactgccggt

SEQ ID NO: 9226 - RNA, 23 nt, Synthetic Construct
  source 1..23: mol_type = other RNA
tgaggtagcaggttgtgtggttt

SEQ ID NO: 9227 - RNA, 15 nt, Synthetic Construct
  source 1..15: mol_type = other RNA
acggtcctaaggtag

SEQ ID NO: 9228 - RNA, 15 nt, Synthetic Construct
  source 1..15: mol_type = other RNA
acggtcctaaggtag

SEQ ID NO: 9229 - RNA, 39 nt, Synthetic Construct; identical to SEQ ID NO: 759
  source 1..39: mol_type = other RNA

SEQ ID NO: 9230 - RNA, 39 nt, Synthetic Construct; identical to SEQ ID NO: 759
  source 1..39: mol_type = other RNA

SEQ ID NO: 9231 - RNA, 17 nt, Synthetic Construct
  source 1..17: mol_type = other RNA
cctcgcgcgattggagc

SEQ ID NO: 9232 - RNA, 17 nt, Synthetic Construct
  source 1..17: mol_type = other RNA
cctcgcgcgattggagc

SEQ ID NO: 9233 - RNA, 19 nt, Synthetic Construct
  source 1..19: mol_type = other RNA
ggctggtccgaaggtagtg

SEQ ID NO: 9234 - RNA, 19 nt, Synthetic Construct
  source 1..19: mol_type = other RNA
ggctggtccgaaggtagtg

SEQ ID NO: 9235 - RNA, 20 nt, Synthetic Construct
  source 1..20: mol_type = other RNA
tgaggtagtaagttgtattg

SEQ ID NO: 9236 - RNA, 20 nt, Synthetic Construct
  source 1..20: mol_type = other RNA
tgaggtagtaagttgtattg

SEQ ID NO: 9237 - RNA, 24 nt, Synthetic Construct
  source 1..24: mol_type = other RNA
tttggcaatggtagaactcacact

SEQ ID NO: 9238 - RNA, 24 nt, Synthetic Construct
  source 1..24: mol_type = other RNA
tttggcaatggtagaactcacact

SEQ ID NO: 9239 - RNA, 21 nt, Synthetic Construct
  source 1..21: mol_type = other RNA
agagtaggacgttgccaggtt

SEQ ID NO: 9240 - RNA, 21 nt, Synthetic Construct
  source 1..21: mol_type = other RNA
agagtaggacgttgccaggtt

SEQ ID NO: 9241 - RNA, 19 nt, Synthetic Construct
  source 1..19: mol_type = other RNA
tagcagcacgtaaatattg

SEQ ID NO: 9242 - RNA, 19 nt, Synthetic Construct
  source 1..19: mol_type = other RNA
tagcagcacgtaaatattg

SEQ ID NO: 9243 - RNA, 22 nt, Synthetic Construct
  source 1..22: mol_type = other RNA
tgaggtagtaggttgtatagct

SEQ ID NO: 9244 - RNA, 18 nt, Synthetic Construct
  source 1..18: mol_type = other RNA
gcgccgatgatagtgcgg

SEQ ID NO: 9245 - RNA, 22 nt, Synthetic Construct
  source 1..22: mol_type = other RNA
tgggtttacgttgggagaactt

SEQ ID NO: 9246 - RNA, 22 nt, Synthetic Construct
  source 1..22: mol_type = other RNA
tgggtttacgttgggagaactt

SEQ ID NO: 9247 - RNA, 24 nt, Synthetic Construct
  source 1..24: mol_type = other RNA
tgaggtagtaggttgtgtggtttc

SEQ ID NO: 9248 - RNA, 20 nt, Synthetic Construct
  source 1..20: mol_type = other RNA
cccgtgttcggaagattttc

SEQ ID NO: 9249 - RNA, 20 nt, Synthetic Construct
  source 1..20: mol_type = other RNA
cccgtgttcggaagattttc

SEQ ID NO: 9250 - RNA, 17 nt, Synthetic Construct
  source 1..17: mol_type = other RNA
accggaggaaggtgggg

SEQ ID NO: 9251 - RNA, 17 nt, Synthetic Construct
  source 1..17: mol_type = other RNA
accggaggaaggtgggg

SEQ ID NO: 9252 - RNA, 29 nt, Synthetic Construct
  source 1..29: mol_type = other RNA
ttacaggggttcgaatcccctaggggacg

SEQ ID NO: 9253 - RNA, 29 nt, Synthetic Construct
  source 1..29: mol_type = other RNA
ttacaggggttcgaatcccctaggggacg

SEQ ID NO: 9254 - RNA, 21 nt, Synthetic Construct
  source 1..21: mol_type = other RNA
atcacattgccagggatttcc

SEQ ID NO: 9255 - RNA, 21 nt, Synthetic Construct
  source 1..21: mol_type = other RNA
atcacattgccagggatttcc

SEQ ID NO: 9256 - RNA, 22 nt, Synthetic Construct
  source 1..22: mol_type = other RNA
catagcacttgtctcggtctga

SEQ ID NO: 9257 - RNA, 16 nt, Synthetic Construct
  source 1..16: mol_type = other RNA
cagtcaggatgttggc

SEQ ID NO: 9258 - RNA, 21 nt, Synthetic Construct
  source 1..21: mol_type = other RNA
cccttggggttgtaggaccac

SEQ ID NO: 9259 - RNA, 21 nt, Synthetic Construct
  source 1..21: mol_type = other RNA
cccttggggttgtaggaccac

SEQ ID NO: 9260 - RNA, 19 nt, Synthetic Construct
  source 1..19: mol_type = other RNA
cacatgcaagtcgaacggt

SEQ ID NO: 9261 - RNA, 19 nt, Synthetic Construct
  source 1..19: mol_type = other RNA
cacatgcaagtcgaacggt

SEQ ID NO: 9262 - RNA, 23 nt, Synthetic Construct
  source 1..23: mol_type = other RNA
caacggaatcccaagagcagctg

SEQ ID NO: 9263 - RNA, 22 nt, Synthetic Construct
  source 1..22: mol_type = other RNA
cgactcttagcggtggatcact

SEQ ID NO: 9264 - RNA, 18 nt, Synthetic Construct
  source 1..18: mol_type = other RNA
atagggaacgtgagctgg

SEQ ID NO: 9265 - RNA, 18 nt, Synthetic Construct
  source 1..18: mol_type = other RNA
atagggaacgtgagctgg

SEQ ID NO: 9266 - RNA, 22 nt, Synthetic Construct
  source 1..22: mol_type = other RNA
gagagtaggacgttgccaggtt

SEQ ID NO: 9267 - RNA, 22 nt, Synthetic Construct
  source 1..22: mol_type = other RNA
gagagtaggacgttgccaggtt

SEQ ID NO: 9268 - RNA, 37 nt, Synthetic Construct; identical to SEQ ID NO: 4277
  source 1..37: mol_type = other RNA

SEQ ID NO: 9269 - RNA, 37 nt, Synthetic Construct; identical to SEQ ID NO: 4277
  source 1..37: mol_type = other RNA

SEQ ID NO: 9270 - RNA, 16 nt, Synthetic Construct
  source 1..16: mol_type = other RNA
aggtcatcattatctg

SEQ ID NO: 9271 - RNA, 16 nt, Synthetic Construct
  source 1..16: mol_type = other RNA
aggtcatcattatctg

SEQ ID NO: 9272 - RNA, 22 nt, Synthetic Construct
  source 1..22: mol_type = other RNA
tgaggtagtagtttgtgctgtc

SEQ ID NO: 9273 - RNA, 22 nt, Synthetic Construct
  source 1..22: mol_type = other RNA
tgaggtagtagtttgtgctgtc

SEQ ID NO: 9274 - RNA, 22 nt, Synthetic Construct
  source 1..22: mol_type = other RNA
tcggatccgtctgagcttggct

SEQ ID NO: 9275 - RNA, 22 nt, Synthetic Construct
  source 1..22: mol_type = other RNA
tcggatccgtctgagcttggct

SEQ ID NO: 9276 - RNA, 17 nt, Synthetic Construct
  source 1..17: mol_type = other RNA
gtcgacgtatagggtgt

SEQ ID NO: 9277 - RNA, 25 nt, Synthetic Construct
  source 1..25: mol_type = other RNA
ctgaggatatgagatcgagacgaca

SEQ ID NO: 9278 - RNA, 25 nt, Synthetic Construct
  source 1..25: mol_type = other RNA
ctgaggatatgagatcgagacgaca

SEQ ID NO: 9279 - RNA, 31 nt, Synthetic Construct; identical to SEQ ID NO: 2215
  source 1..31: mol_type = other RNA

SEQ ID NO: 9280 - RNA, 31 nt, Synthetic Construct; identical to SEQ ID NO: 2215
  source 1..31: mol_type = other RNA

SEQ ID NO: 9281 - RNA, 22 nt, Synthetic Construct
  source 1..22: mol_type = other RNA
tattgcacttgtcccggtctgt

SEQ ID NO: 9282 - RNA, 22 nt, Synthetic Construct
  source 1..22: mol_type = other RNA
tattgcacttgtcccggtctgt

SEQ ID NO: 9283 - RNA, 27 nt, Synthetic Construct
  source 1..27: mol_type = other RNA
atagtctttgttcgattccgttgagta

SEQ ID NO: 9284 - RNA, 24 nt, Synthetic Construct
  source 1..24: mol_type = other RNA
cgcgacctcagatcagacgtggcg

SEQ ID NO: 9285 - RNA, 24 nt, Synthetic Construct
  source 1..24: mol_type = other RNA
cgcgacctcagatcagacgtggcg

SEQ ID NO: 9286 - RNA, 21 nt, Synthetic Construct
  source 1..21: mol_type = other RNA
agaggggcagagagcgagact

SEQ ID NO: 9287 - RNA, 21 nt, Synthetic Construct
  source 1..21: mol_type = other RNA
agaggggcagagagcgagact

SEQ ID NO: 9288 - RNA, 21 nt, Synthetic Construct
  source 1..21: mol_type = other RNA
cagcattgtacagggctatga

SEQ ID NO: 9289 - RNA, 21 nt, Synthetic Construct
  source 1..21: mol_type = other RNA
cagcattgtacagggctatga

SEQ ID NO: 9290 - RNA, 21 nt, Synthetic Construct
  source 1..21: mol_type = other RNA
tgaggggcggagagcgagact

SEQ ID NO: 9291 - RNA, 21 nt, Synthetic Construct
  source 1..21: mol_type = other RNA
tgaggggcggagagcgagact

SEQ ID NO: 9292 - RNA, 19 nt, Synthetic Construct
  source 1..19: mol_type = other RNA
ttcaagtaatccaggatag

SEQ ID NO: 9293 - RNA, 25 nt, Synthetic Construct
  source 1..25: mol_type = other RNA
gggttgtaaaccgcttttgtcaggg

SEQ ID NO: 9294 - RNA, 25 nt, Synthetic Construct
  source 1..25: mol_type = other RNA
gggttgtaaaccgcttttgtcaggg

SEQ ID NO: 9295 - RNA, 35 nt, Synthetic Construct; identical to SEQ ID NO: 2505
  source 1..35: mol_type = other RNA

SEQ ID NO: 9296 - RNA, 35 nt, Synthetic Construct; identical to SEQ ID NO: 2505
  source 1..35: mol_type = other RNA

SEQ ID NO: 9297 - RNA, 23 nt, Synthetic Construct
  source 1..23: mol_type = other RNA
tcctgcactgagctgccccgaga

SEQ ID NO: 9298 - RNA, 22 nt, Synthetic Construct
  source 1..22: mol_type = other RNA
tggaatgcaaagaagtatgtat

SEQ ID NO: 9299 - RNA, 22 nt, Synthetic Construct
  source 1..22: mol_type = other RNA
tggaatgcaaagaagtatgtat

SEQ ID NO: 9300 - RNA, 22 nt, Synthetic Construct
  source 1..22: mol_type = other RNA
tcgtaccgtgagtagtaatgcg

SEQ ID NO: 9301 - RNA, 22 nt, Synthetic Construct
  source 1..22: mol_type = other RNA
tcgtaccgtgagtagtaatgcg

SEQ ID NO: 9302 - RNA, 27 nt, Synthetic Construct
  source 1..27: mol_type = other RNA
ncccccactgctaaatttgactggctt

SEQ ID NO: 9303 - RNA, 23 nt, Synthetic Construct
  source 1..23: mol_type = other RNA
tgaggtagtaggttgtgtggttc

SEQ ID NO: 9304 - RNA, 23 nt, Synthetic Construct
  source 1..23: mol_type = other RNA
tgaggtagtaggttgtgtggttc

SEQ ID NO: 9305 - RNA, 15 nt, Synthetic Construct
  source 1..15: mol_type = other RNA
acccttgtcattagt

SEQ ID NO: 9306 - RNA, 23 nt, Synthetic Construct
  source 1..23: mol_type = other RNA
tcctgtactgagctgccccggga

SEQ ID NO: 9307 - RNA, 23 nt, Synthetic Construct
  source 1..23: mol_type = other RNA
agcagcgttgtacagggctatga

SEQ ID NO: 9308 - RNA, 20 nt, Synthetic Construct
  source 1..20: mol_type = other RNA
caatggccgggacagagggc

SEQ ID NO: 9309 - RNA, 20 nt, Synthetic Construct
  source 1..20: mol_type = other RNA
caatggccgggacagagggc

SEQ ID NO: 9310 - RNA, 23 nt, Synthetic Construct
  source 1..23: mol_type = other RNA
tggtaatacgacgtactcagtgt

SEQ ID NO: 9311 - RNA, 22 nt, Synthetic Construct
  source 1..22: mol_type = other RNA
tgaggtagtggtttgtgctgtt

SEQ ID NO: 9312 - RNA, 21 nt, Synthetic Construct
  source 1..21: mol_type = other RNA
tggggtagtaggttgtgtggt

SEQ ID NO: 9313 - RNA, 21 nt, Synthetic Construct
  source 1..21: mol_type = other RNA
tggggtagtaggttgtgtggt

SEQ ID NO: 9314 - RNA, 20 nt, Synthetic Construct
  source 1..20: mol_type = other RNA
acagtagtctgcacattggt

SEQ ID NO: 9315 - RNA, 20 nt, Synthetic Construct
  source 1..20: mol_type = other RNA
acagtagtctgcacattggt

SEQ ID NO: 9316 - RNA, 23 nt, Synthetic Construct
  source 1..23: mol_type = other RNA
tggcaatacgacgtacttagtgt

SEQ ID NO: 9317 - RNA, 23 nt, Synthetic Construct
  source 1..23: mol_type = other RNA
tggcaatacgacgtacttagtgt

SEQ ID NO: 9318 - RNA, 23 nt, Synthetic Construct
  source 1..23: mol_type = other RNA
tggtaatacgatgtacttagtgt

SEQ ID NO: 9319 - RNA, 22 nt, Synthetic Construct
  source 1..22: mol_type = other RNA
atggatttttggagcagggaga

SEQ ID NO: 9320 - RNA, 23 nt, Synthetic Construct
  source 1..23: mol_type = other RNA
tgtagtgtttcctactttatgga

SEQ ID NO: 9321 - RNA, 35 nt, Synthetic Construct; identical to SEQ ID NO: 737
  source 1..35: mol_type = other RNA

SEQ ID NO: 9322 - RNA, 35 nt, Synthetic Construct; identical to SEQ ID NO: 737
  source 1..35: mol_type = other RNA

SEQ ID NO: 9323 - RNA, 23 nt, Synthetic Construct
  source 1..23: mol_type = other RNA
tgggctaagggagatgattgggt

SEQ ID NO: 9324 - RNA, 23 nt, Synthetic Construct
  source 1..23: mol_type = other RNA
ggctcggtctgaggcccctcagt

SEQ ID NO: 9325 - RNA, 22 nt, Synthetic Construct
  source 1..22: mol_type = other RNA
tgaggtagtagtttgtgctggt

SEQ ID NO: 9326 - RNA, 25 nt, Synthetic Construct
  source 1..25: mol_type = other RNA
ttgaggatatgagatcgagacgacg

SEQ ID NO: 9327 - RNA, 27 nt, Synthetic Construct
  source 1..27: mol_type = other RNA
cagagttctacagtccgacgatcgatc

SEQ ID NO: 9328 - RNA, 27 nt, Synthetic Construct
  source 1..27: mol_type = other RNA
cagagttctacagtccgacgatcgatc

SEQ ID NO: 9329 - RNA, 20 nt, Synthetic Construct
  source 1..20: mol_type = other RNA
aatgacacgatcactcccgt

SEQ ID NO: 9330 - RNA, 20 nt, Synthetic Construct
  source 1..20: mol_type = other RNA
aatgacacgatcactcccgt

SEQ ID NO: 9331 - RNA, 23 nt, Synthetic Construct
  source 1..23: mol_type = other RNA
tgaggtagtaggttgtgtggtct

SEQ ID NO: 9332 - RNA, 23 nt, Synthetic Construct
  source 1..23: mol_type = other RNA
tgaggtagtaggttgtgtggtct

SEQ ID NO: 9333 - RNA, 25 nt, Synthetic Construct
  source 1..25: mol_type = other RNA
gggttgtaaaccgcttttgtcaggg

SEQ ID NO: 9334 - RNA, 21 nt, Synthetic Construct
  source 1..21: mol_type = other RNA
atcggaacgtgcccagtcgtg

SEQ ID NO: 9335 - RNA, 35 nt, Synthetic Construct; identical to SEQ ID NO: 3369
  source 1..35: mol_type = other RNA

SEQ ID NO: 9336 - RNA, 21 nt, Synthetic Construct
  source 1..21: mol_type = other RNA
tgaggtagtaggttgtgtagt

SEQ ID NO: 9337 - RNA, 21 nt, Synthetic Construct
  source 1..21: mol_type = other RNA
tgaggtagtaggttgtgtagt

SEQ ID NO: 9338 - RNA, 21 nt, Synthetic Construct
  source 1..21: mol_type = other RNA
tggggggcagagagcgagact

SEQ ID NO: 9339 - RNA, 18 nt, Synthetic Construct
  source 1..18: mol_type = other RNA
gtccccttcgtctagagg

SEQ ID NO: 9340 - RNA, 18 nt, Synthetic Construct
  source 1..18: mol_type = other RNA
gtccccttcgtctagagg

SEQ ID NO: 9341 - RNA, 28 nt, Synthetic Construct
  source 1..28: mol_type = other RNA
gcatgggtggttcagtggtagaattctc

SEQ ID NO: 9342 - RNA, 28 nt, Synthetic Construct
  source 1..28: mol_type = other RNA
gcatgggtggttcagtggtagaattctc

SEQ ID NO: 9343 - RNA, 20 nt, Synthetic Construct
  source 1..20: mol_type = other RNA
aatgacacgatcactcccgt

SEQ ID NO: 9344 - RNA, 20 nt, Synthetic Construct
  source 1..20: mol_type = other RNA
aatgacacgatcactcccgt

SEQ ID NO: 9345 - RNA, 22 nt, Synthetic Construct
  source 1..22: mol_type = other RNA
tgaggcagtaggttgtatagtt

SEQ ID NO: 9346 - RNA, 22 nt, Synthetic Construct
  source 1..22: mol_type = other RNA
tgaggcagtaggttgtatagtt

SEQ ID NO: 9347 - RNA, 22 nt, Synthetic Construct
  source 1..22: mol_type = other RNA
tgaggtagaaggttgtatagtt

SEQ ID NO: 9348 - RNA, 22 nt, Synthetic Construct
  source 1..22: mol_type = other RNA
ctgggtcggtcgggctggggcg

SEQ ID NO: 9349 - RNA, 22 nt, Synthetic Construct
  source 1..22: mol_type = other RNA
ctgggtcggtcgggctggggcg

SEQ ID NO: 9350 - RNA, 23 nt, Synthetic Construct
  source 1..23: mol_type = other RNA
caaagtgctgctcgtgcaggtag

SEQ ID NO: 9351 - RNA, 23 nt, Synthetic Construct
  source 1..23: mol_type = other RNA
tagcagcacgtaaatattggcgt

SEQ ID NO: 9352 - RNA, 22 nt, Synthetic Construct
  source 1..22: mol_type = other RNA
tcctgtactaagctgccccgag

SEQ ID NO: 9353 - RNA, 35 nt, Synthetic Construct; identical to SEQ ID NO: 2505
  source 1..35: mol_type = other RNA

SEQ ID NO: 9354 - RNA, 25 nt, Synthetic Construct
  source 1..25: mol_type = other RNA
ttgaggatatgggatcgagacgaca

SEQ ID NO: 9355 - RNA, 32 nt, Synthetic Construct; identical to SEQ ID NO: 4734
  source 1..32: mol_type = other RNA

SEQ ID NO: 9356 - RNA, 22 nt, Synthetic Construct
  source 1..22: mol_type = other RNA
tgaggtagtaggttgcatagtt

SEQ ID NO: 9357 - RNA, 20 nt, Synthetic Construct
  source 1..20: mol_type = other RNA
agttctacagtccgacgatc

SEQ ID NO: 9358 - RNA, 20 nt, Synthetic Construct
  source 1..20: mol_type = other RNA
agttctacagtccgacgatc

SEQ ID NO: 9359 - RNA, 28 nt, Synthetic Construct
  source 1..28: mol_type = other RNA
ccccccactgctaaatttggctggcttt

SEQ ID NO: 9360 - RNA, 22 nt, Synthetic Construct
  source 1..22: mol_type = other RNA
tcctgtactgagctgccctgag

SEQ ID NO: 9361 - RNA, 22 nt, Synthetic Construct
  source 1..22: mol_type = other RNA
tcctgtactgagctgccctgag

SEQ ID NO: 9362 - RNA, 17 nt, Synthetic Construct
  source 1..17: mol_type = other RNA
gtccggatcgtagtctg

SEQ ID NO: 9363 - RNA, 20 nt, Synthetic Construct
  source 1..20: mol_type = other RNA
aattgcacggtatccatctg

SEQ ID NO: 9364 - RNA, 20 nt, Synthetic Construct
  source 1..20: mol_type = other RNA
aattgcacggtatccatctg

SEQ ID NO: 9365 - RNA, 27 nt, Synthetic Construct
  source 1..27: mol_type = other RNA
ggggagctaatcccagaaacccggtcg

SEQ ID NO: 9366 - RNA, 27 nt, Synthetic Construct
  source 1..27: mol_type = other RNA
ggggagctaatcccagaaacccggtcg

SEQ ID NO: 9367 - RNA, 16 nt, Synthetic Construct
  source 1..16: mol_type = other RNA
cacaccgcccgtcgct

SEQ ID NO: 9368 - RNA, 16 nt, Synthetic Construct
  source 1..16: mol_type = other RNA
cacaccgcccgtcgct

SEQ ID NO: 9369 - RNA, 16 nt, Synthetic Construct
  source 1..16: mol_type = other RNA
gtccggatcgtagtct

SEQ ID NO: 9370 - RNA, 16 nt, Synthetic Construct
  source 1..16: mol_type = other RNA
gtccggatcgtagtct

SEQ ID NO: 9371 - RNA, 22 nt, Synthetic Construct
  source 1..22: mol_type = other RNA
agctcggtctgaggcccctcag

SEQ ID NO: 9372 - RNA, 22 nt, Synthetic Construct
  source 1..22: mol_type = other RNA
agctcggtctgaggcccctcag

SEQ ID NO: 9373 - RNA, 30 nt, Synthetic Construct; identical to SEQ ID NO: 2407
  source 1..30: mol_type = other RNA

SEQ ID NO: 9374 - RNA, 30 nt, Synthetic Construct; identical to SEQ ID NO: 2407
  source 1..30: mol_type = other RNA

SEQ ID NO: 9375 - RNA, 19 nt, Synthetic Construct
  source 1..19: mol_type = other RNA
tattgcacttgtcccggcc

SEQ ID NO: 9376 - RNA, 19 nt, Synthetic Construct
  source 1..19: mol_type = other RNA
tattgcacttgtcccggcc

SEQ ID NO: 9377 - RNA, 27 nt, Synthetic Construct
  source 1..27: mol_type = other RNA
ccccccactgctaaacttgactggctt

SEQ ID NO: 9378 - RNA, 22 nt, Synthetic Construct
  source 1..22: mol_type = other RNA
tgaggtaatagtttgtgctgtt

SEQ ID NO: 9379 - RNA, 22 nt, Synthetic Construct
  source 1..22: mol_type = other RNA
tgaggtaatagtttgtgctgtt

SEQ ID NO: 9380 - RNA, 21 nt, Synthetic Construct
  source 1..21: mol_type = other RNA
cagtgcaatgttaaaagggca

SEQ ID NO: 9381 - RNA, 21 nt, Synthetic Construct
  source 1..21: mol_type = other RNA
cagtgcaatgttaaaagggca

SEQ ID NO: 9382 - RNA, 22 nt, Synthetic Construct
  source 1..22: mol_type = other RNA
tgaggtagtagtttgtgctgtg

SEQ ID NO: 9383 - RNA, 22 nt, Synthetic Construct
  source 1..22: mol_type = other RNA
tgaggtagtaggttatatagtt

SEQ ID NO: 9384 - RNA, 22 nt, Synthetic Construct
  source 1..22: mol_type = other RNA
tgaggtagtaggttatatagtt

SEQ ID NO: 9385 - RNA, 22 nt, Synthetic Construct
  source 1..22: mol_type = other RNA
tgaggtagtaggatgtgtggtt

SEQ ID NO: 9386 - RNA, 22 nt, Synthetic Construct
  source 1..22: mol_type = other RNA
tgaggtagtaggatgtgtggtt

SEQ ID NO: 9387 - RNA, 15 nt, Synthetic Construct
  source 1..15: mol_type = other RNA
ccagaaacccggtcg

SEQ ID NO: 9388 - RNA, 16 nt, Synthetic Construct
  source 1..16: mol_type = other RNA
gatttgggagtgctcg

SEQ ID NO: 9389 - RNA, 16 nt, Synthetic Construct
  source 1..16: mol_type = other RNA
gatttgggagtgctcg

SEQ ID NO: 9390 - RNA, 21 nt, Synthetic Construct
  source 1..21: mol_type = other RNA
actcggcgtggcgtcggtcgt

SEQ ID NO: 9391 - RNA, 24 nt, Synthetic Construct
  source 1..24: mol_type = other RNA
tgtagacatccccgactggaagct

SEQ ID NO: 9392 - RNA, 24 nt, Synthetic Construct
  source 1..24: mol_type = other RNA
tgtagacatccccgactggaagct

SEQ ID NO: 9393 - RNA, 15 nt, Synthetic Construct
  source 1..15: mol_type = other RNA
gtacgtgagctgggt

SEQ ID NO: 9394 - RNA, 15 nt, Synthetic Construct
  source 1..15: mol_type = other RNA
gtacgtgagctgggt

SEQ ID NO: 9395 - RNA, 22 nt, Synthetic Construct
  source 1..22: mol_type = other RNA
tgaggtagtaggttgtataatt

SEQ ID NO: 9396 - RNA, 22 nt, Synthetic Construct
  source 1..22: mol_type = other RNA
tgaggtagtaggttgtataatt

SEQ ID NO: 9397 - RNA, 21 nt, Synthetic Construct
  source 1..21: mol_type = other RNA
tgaggtagtagtttgtgctga

SEQ ID NO: 9398 - RNA, 22 nt, Synthetic Construct
  source 1..22: mol_type = other RNA
ctagcaccatctgaaatcggtt

SEQ ID NO: 9399 - RNA, 21 nt, Synthetic Construct
  source 1..21: mol_type = other RNA
tgaggtagtagattgcatagt

SEQ ID NO: 9400 - RNA, 21 nt, Synthetic Construct
  source 1..21: mol_type = other RNA
tgaggtagtagattgcatagt

SEQ ID NO: 9401 - RNA, 21 nt, Synthetic Construct
  source 1..21: mol_type = other RNA
cataaagtagaaagcactact

SEQ ID NO: 9402 - RNA, 21 nt, Synthetic Construct
  source 1..21: mol_type = other RNA
cataaagtagaaagcactact

SEQ ID NO: 9403 - RNA, 23 nt, Synthetic Construct
  source 1..23: mol_type = other RNA
tgagaggcagagagcgagacttt

SEQ ID NO: 9404 - RNA, 23 nt, Synthetic Construct
  source 1..23: mol_type = other RNA
tgagaggcagagagcgagacttt

SEQ ID NO: 9405 - RNA, 20 nt, Synthetic Construct
  source 1..20: mol_type = other RNA
tgaggaagtaggttgtgtgg

SEQ ID NO: 9406 - RNA, 20 nt, Synthetic Construct
  source 1..20: mol_type = other RNA
tgaggaagtaggttgtgtgg

SEQ ID NO: 9407 - RNA, 33 nt, Synthetic Construct; identical to SEQ ID NO: 2479
  source 1..33: mol_type = other RNA

SEQ ID NO: 9408 - RNA, 33 nt, Synthetic Construct; identical to SEQ ID NO: 2479
  source 1..33: mol_type = other RNA

SEQ ID NO: 9409 - RNA, 23 nt, Synthetic Construct
  source 1..23: mol_type = other RNA
caaagtgctgctcgtgcaggtag

SEQ ID NO: 9410 - RNA, 23 nt, Synthetic Construct
  source 1..23: mol_type = other RNA
caaagtgctgctcgtgcaggtag

SEQ ID NO: 9411 - RNA, 22 nt, Synthetic Construct
  source 1..22: mol_type = other RNA
ttcgagtaatccaggataggct

SEQ ID NO: 9412 - RNA, 22 nt, Synthetic Construct
  source 1..22: mol_type = other RNA
tgaggtagtagtatgtgctgtt

SEQ ID NO: 9413 - RNA, 22 nt, Synthetic Construct
  source 1..22: mol_type = other RNA
tgaggtagtagtatgtgctgtt

SEQ ID NO: 9414 - RNA, 17 nt, Synthetic Construct
  source 1..17: mol_type = other RNA
cgcgacctcagatcaga

SEQ ID NO: 9415 - RNA, 17 nt, Synthetic Construct
  source 1..17: mol_type = other RNA
cgcgacctcagatcaga

SEQ ID NO: 9416 - RNA, 21 nt, Synthetic Construct
  source 1..21: mol_type = other RNA
atcacattgccagggatttcc

SEQ ID NO: 9417 - RNA, 34 nt, Synthetic Construct; identical to SEQ ID NO: 2186
  source 1..34: mol_type = other RNA

SEQ ID NO: 9418 - RNA, 34 nt, Synthetic Construct; identical to SEQ ID NO: 2186
  source 1..34: mol_type = other RNA

SEQ ID NO: 9419 - RNA, 32 nt, Synthetic Construct; identical to SEQ ID NO: 2296
  source 1..32: mol_type = other RNA

SEQ ID NO: 9420 - RNA, 32 nt, Synthetic Construct; identical to SEQ ID NO: 2296
  source 1..32: mol_type = other RNA

SEQ ID NO: 9421 - RNA, 25 nt, Synthetic Construct
  source 1..25: mol_type = other RNA
ttggggatatgagatcgagacgaca

SEQ ID NO: 9422 - RNA, 36 nt, Synthetic Construct; identical to SEQ ID NO: 3596
  source 1..36: mol_type = other RNA

SEQ ID NO: 9423 - RNA, 36 nt, Synthetic Construct; identical to SEQ ID NO: 3596
  source 1..36: mol_type = other RNA

SEQ ID NO: 9424 - RNA, 22 nt, Synthetic Construct
  source 1..22: mol_type = other RNA
tgagaactgaattccatgggtc

SEQ ID NO: 9425 - RNA, 22 nt, Synthetic Construct
  source 1..22: mol_type = other RNA
tgagaactgaattccatgggtc

SEQ ID NO: 9426 - RNA, 18 nt, Synthetic Construct
  source 1..18: mol_type = other RNA
gtccggatcgtagtctgc

SEQ ID NO: 9427 - RNA, 18 nt, Synthetic Construct
  source 1..18: mol_type = other RNA
gtccggatcgtagtctgc

SEQ ID NO: 9428 - RNA, 22 nt, Synthetic Construct
  source 1..22: mol_type = other RNA
tattgcacttgtcccggcccgt

SEQ ID NO: 9429 - RNA, 22 nt, Synthetic Construct
  source 1..22: mol_type = other RNA
tattgcacttgtcccggcccgt

SEQ ID NO: 9430 - RNA, 21 nt, Synthetic Construct
  source 1..21: mol_type = other RNA
cgaggtagtaggttgtatagt

SEQ ID NO: 9431 - RNA, 21 nt, Synthetic Construct
  source 1..21: mol_type = other RNA
tggagtgtgacaatggcgttt

SEQ ID NO: 9432 - RNA, 21 nt, Synthetic Construct
  source 1..21: mol_type = other RNA
tggagtgtgacaatggcgttt

SEQ ID NO: 9433 - RNA, 21 nt, Synthetic Construct
  source 1..21: mol_type = other RNA
tgaggtagtaggttgagtggt

SEQ ID NO: 9434 - RNA, 21 nt, Synthetic Construct
  source 1..21: mol_type = other RNA
tgaggtagtaggttgagtggt

SEQ ID NO: 9435 - RNA, 21 nt, Synthetic Construct
  source 1..21: mol_type = other RNA
cccataaagtagaaagcacta

SEQ ID NO: 9436 - RNA, 27 nt, Synthetic Construct
  source 1..27: mol_type = other RNA
ccccccactgctaaatttgactggcct

SEQ ID NO: 9437 - RNA, 16 nt, Synthetic Construct
  source 1..16: mol_type = other RNA
gagctgtggatagggg

SEQ ID NO: 9438 - RNA, 16 nt, Synthetic Construct
  source 1..16: mol_type = other RNA
gagctgtggatagggg

SEQ ID NO: 9439 - RNA, 36 nt, Synthetic Construct; identical to SEQ ID NO: 777
  source 1..36: mol_type = other RNA

SEQ ID NO: 9440 - RNA, 36 nt, Synthetic Construct; identical to SEQ ID NO: 777
  source 1..36: mol_type = other RNA

SEQ ID NO: 9441 - RNA, 22 nt, Synthetic Construct
  source 1..22: mol_type = other RNA
tgaggtagtagtttgcgctgtt

SEQ ID NO: 9442 - RNA, 17 nt, Synthetic Construct
  source 1..17: mol_type = other RNA
cgatctgtagctggtct

SEQ ID NO: 9443 - RNA, 22 nt, Synthetic Construct
  source 1..22: mol_type = other RNA
aatgacacgatcactcccgttg

SEQ ID NO: 9444 - RNA, 22 nt, Synthetic Construct
  source 1..22: mol_type = other RNA
aatgacacgatcactcccgttg

SEQ ID NO: 9445 - RNA, 15 nt, Synthetic Construct
  source 1..15: mol_type = other RNA
aggtgggaggctttg

SEQ ID NO: 9446 - RNA, 21 nt, Synthetic Construct
  source 1..21: mol_type = other RNA
tccagtactgagctgccccga

SEQ ID NO: 9447 - RNA, 18 nt, Synthetic Construct
  source 1..18: mol_type = other RNA
gcgccgatgatagtgcgg

SEQ ID NO: 9448 - RNA, 18 nt, Synthetic Construct
  source 1..18: mol_type = other RNA
gcgccgatgatagtgcgg

SEQ ID NO: 9449 - RNA, 22 nt, Synthetic Construct
  source 1..22: mol_type = other RNA
tgaggtagtagattgtatagct

SEQ ID NO: 9450 - RNA, 22 nt, Synthetic Construct
  source 1..22: mol_type = other RNA
tattgcacttgtcccggcccgt

SEQ ID NO: 9451 - RNA, 22 nt, Synthetic Construct
  source 1..22: mol_type = other RNA
tattgcacttgtcccggcccgt

SEQ ID NO: 9452 - RNA, 34 nt, Synthetic Construct; identical to SEQ ID NO: 2291
  source 1..34: mol_type = other RNA

SEQ ID NO: 9453 - RNA, 34 nt, Synthetic Construct; identical to SEQ ID NO: 2291
  source 1..34: mol_type = other RNA

SEQ ID NO: 9454 - RNA, 20 nt, Synthetic Construct
  source 1..20: mol_type = other RNA
cccagtaaacggcggccgta

SEQ ID NO: 9455 - RNA, 20 nt, Synthetic Construct
  source 1..20: mol_type = other RNA
cccagtaaacggcggccgta

SEQ ID NO: 9456 - RNA, 27 nt, Synthetic Construct
  source 1..27: mol_type = other RNA
ccccccactgctaaatttaactggctt

SEQ ID NO: 9457 - RNA, 22 nt, Synthetic Construct
  source 1..22: mol_type = other RNA
tgtgcaaatctatgcaaaactg

SEQ ID NO: 9458 - RNA, 22 nt, Synthetic Construct
  source 1..22: mol_type = other RNA
tgtgcaaatctatgcaaaactg

SEQ ID NO: 9459 - RNA, 22 nt, Synthetic Construct
  source 1..22: mol_type = other RNA
tgttggttcaagcgtgtagtcg

SEQ ID NO: 9460 - RNA, 22 nt, Synthetic Construct
  source 1..22: mol_type = other RNA
tgttggttcaagcgtgtagtcg

SEQ ID NO: 9461 - RNA, 21 nt, Synthetic Construct
  source 1..21: mol_type = other RNA
tcctatactgagctgccccga

SEQ ID NO: 9462 - RNA, 18 nt, Synthetic Construct
  source 1..18: mol_type = other RNA
tcagtagctcgaggaaaa

SEQ ID NO: 9463 - RNA, 18 nt, Synthetic Construct
  source 1..18: mol_type = other RNA
tcagtagctcgaggaaaa

SEQ ID NO: 9464 - RNA, 17 nt, Synthetic Construct
  source 1..17: mol_type = other RNA
cctcgcgcgattggagc

SEQ ID NO: 9465 - RNA, 17 nt, Synthetic Construct
  source 1..17: mol_type = other RNA
cctcgcgcgattggagc

SEQ ID NO: 9466 - RNA, 32 nt, Synthetic Construct; identical to SEQ ID NO: 4710
  source 1..32: mol_type = other RNA

SEQ ID NO: 9467 - RNA, 32 nt, Synthetic Construct; identical to SEQ ID NO: 4710
  source 1..32: mol_type = other RNA

SEQ ID NO: 9468 - RNA, 21 nt, Synthetic Construct
  source 1..21: mol_type = other RNA
actggacttggagtcagaagg

SEQ ID NO: 9469 - RNA, 21 nt, Synthetic Construct
  source 1..21: mol_type = other RNA
actggacttggagtcagaagg

SEQ ID NO: 9470 - RNA, 21 nt, Synthetic Construct
  source 1..21: mol_type = other RNA
aatggcgccactagggttgtg

SEQ ID NO: 9471 - RNA, 21 nt, Synthetic Construct
  source 1..21: mol_type = other RNA
aatggcgccactagggttgtg

SEQ ID NO: 9472 - RNA, 17 nt, Synthetic Construct
  source 1..17: mol_type = other RNA
tggccgtcgtcagctcg

SEQ ID NO: 9473 - RNA, 22 nt, Synthetic Construct
  source 1..22: mol_type = other RNA
aggggcagagagcgagactttt

SEQ ID NO: 9474 - RNA, 22 nt, Synthetic Construct
  source 1..22: mol_type = other RNA
aggggcagagagcgagactttt

SEQ ID NO: 9475 - RNA, 25 nt, Synthetic Construct
  source 1..25: mol_type = other RNA
ttgaggatgtgagatcgagacgaca

SEQ ID NO: 9476 - RNA, 17 nt, Synthetic Construct
  source 1..17: mol_type = other RNA
cccctggacctgtactg

SEQ ID NO: 9477 - RNA, 17 nt, Synthetic Construct
  source 1..17: mol_type = other RNA
cccctggacctgtactg

SEQ ID NO: 9478 - RNA, 23 nt, Synthetic Construct
  source 1..23: mol_type = other RNA
cgaagtgctgttcgtgcaggtag

SEQ ID NO: 9479 - RNA, 16 nt, Synthetic Construct
  source 1..16: mol_type = other RNA
tcagtagctcgaggaa

SEQ ID NO: 9480 - RNA, 16 nt, Synthetic Construct
  source 1..16: mol_type = other RNA
tcagtagctcgaggaa

SEQ ID NO: 9481 - RNA, 19 nt, Synthetic Construct
  source 1..19: mol_type = other RNA
agctacattgtctgctggg

SEQ ID NO: 9482 - RNA, 19 nt, Synthetic Construct
  source 1..19: mol_type = other RNA
agctacattgtctgctggg

SEQ ID NO: 9483 - RNA, 21 nt, Synthetic Construct
  source 1..21: mol_type = other RNA
cgtaccgtgagtaataacgcg

SEQ ID NO: 9484 - RNA, 22 nt, Synthetic Construct
  source 1..22: mol_type = other RNA
tcctgtactgggctgccccgag

SEQ ID NO: 9485 - RNA, 22 nt, Synthetic Construct
  source 1..22: mol_type = other RNA
atcacattgccagggatttcca

SEQ ID NO: 9486 - RNA, 20 nt, Synthetic Construct
  source 1..20: mol_type = other RNA
gaatcgctagtaatcgcgga

SEQ ID NO: 9487 - RNA, 20 nt, Synthetic Construct
  source 1..20: mol_type = other RNA
gaatcgctagtaatcgcgga

SEQ ID NO: 9488 - RNA, 15 nt, Synthetic Construct
  source 1..15: mol_type = other RNA
ggagagatggctgag

SEQ ID NO: 9489 - RNA, 15 nt, Synthetic Construct
  source 1..15: mol_type = other RNA
ggagagatggctgag

SEQ ID NO: 9490 - RNA, 22 nt, Synthetic Construct
  source 1..22: mol_type = other RNA
tgaggtagtaggttgtggggtt

SEQ ID NO: 9491 - RNA, 22 nt, Synthetic Construct
  source 1..22: mol_type = other RNA
tgaggtagtaggttgtggggtt

SEQ ID NO: 9492 - RNA, 22 nt, Synthetic Construct
  source 1..22: mol_type = other RNA
tgaggtagtagatcgtatagtt

SEQ ID NO: 9493 - RNA, 22 nt, Synthetic Construct
  source 1..22: mol_type = other RNA
tcctgtacagagctgccccgag

SEQ ID NO: 9494 - RNA, 16 nt, Synthetic Construct
  source 1..16: mol_type = other RNA
tcagtagctcgaggaa

SEQ ID NO: 9495 - RNA, 31 nt, Synthetic Construct; identical to SEQ ID NO: 2507
  source 1..31: mol_type = other RNA

SEQ ID NO: 9496 - RNA, 22 nt, Synthetic Construct
  source 1..22: mol_type = other RNA
tcttgtactgagctgccccgag

SEQ ID NO: 9497 - RNA, 34 nt, Synthetic Construct; identical to SEQ ID NO: 2183
  source 1..34: mol_type = other RNA

SEQ ID NO: 9498 - RNA, 21 nt, Synthetic Construct
  source 1..21: mol_type = other RNA
tgaggtagtagtttgcgctgt

SEQ ID NO: 9499 - RNA, 22 nt, Synthetic Construct
  source 1..22: mol_type = other RNA
tgaggtagtagattgtatagta

SEQ ID NO: 9500 - RNA, 22 nt, Synthetic Construct
  source 1..22: mol_type = other RNA
tgaggtagtagattgtatagta

SEQ ID NO: 9501 - RNA, 20 nt, Synthetic Construct
  source 1..20: mol_type = other RNA
ggaggtagtaggttgtgtgg

SEQ ID NO: 9502 - RNA, 20 nt, Synthetic Construct
  source 1..20: mol_type = other RNA
ggaggtagtaggttgtgtgg

SEQ ID NO: 9503 - RNA, 18 nt, Synthetic Construct
  source 1..18: mol_type = other RNA
gcgaaattccttgtcggg

SEQ ID NO: 9504 - RNA, 18 nt, Synthetic Construct
  source 1..18: mol_type = other RNA
gcgaaattccttgtcggg

SEQ ID NO: 9505 - RNA, 31 nt, Synthetic Construct; identical to SEQ ID NO: 2310
  source 1..31: mol_type = other RNA

SEQ ID NO: 9506 - RNA, 26 nt, Synthetic Construct
  source 1..26: mol_type = other RNA
gacttaccaaacctatgcaaactccg

SEQ ID NO: 9507 - RNA, 26 nt, Synthetic Construct
  source 1..26: mol_type = other RNA
gacttaccaaacctatgcaaactccg

SEQ ID NO: 9508 - RNA, 23 nt, Synthetic Construct
  source 1..23: mol_type = other RNA
aggtaatacgacgtacttagtgt

SEQ ID NO: 9509 - RNA, 23 nt, Synthetic Construct
  source 1..23: mol_type = other RNA
aggtaatacgacgtacttagtgt

SEQ ID NO: 9510 - RNA, 24 nt, Synthetic Construct
  source 1..24: mol_type = other RNA
tgtaaacgtccccgactggaagct

SEQ ID NO: 9511 - RNA, 24 nt, Synthetic Construct
  source 1..24: mol_type = other RNA
tgtaaacgtccccgactggaagct

SEQ ID NO: 9512 - RNA, 23 nt, Synthetic Construct
  source 1..23: mol_type = other RNA
tggtaatacgacatacttagtgt

SEQ ID NO: 9513 - RNA, 23 nt, Synthetic Construct
  source 1..23: mol_type = other RNA
tggtaatacgacatacttagtgt

SEQ ID NO: 9514 - RNA, 22 nt, Synthetic Construct
  source 1..22: mol_type = other RNA
tgtggtagtaggttgtgtggtt

SEQ ID NO: 9515 - RNA, 21 nt, Synthetic Construct
  source 1..21: mol_type = other RNA
tgaggtagtaggatgtgtggt

SEQ ID NO: 9516 - RNA, 21 nt, Synthetic Construct
  source 1..21: mol_type = other RNA
tgaggtagtaggatgtgtggt

SEQ ID NO: 9517 - RNA, 31 nt, Synthetic Construct; identical to SEQ ID NO: 2278
  source 1..31: mol_type = other RNA

SEQ ID NO: 9518 - RNA, 31 nt, Synthetic Construct; identical to SEQ ID NO: 2278
  source 1..31: mol_type = other RNA

SEQ ID NO: 9519 - RNA, 20 nt, Synthetic Construct
  source 1..20: mol_type = other RNA
aaaccgttaccattactgag

SEQ ID NO: 9520 - RNA, 20 nt, Synthetic Construct
  source 1..20: mol_type = other RNA
aaaccgttaccattactgag

SEQ ID NO: 9521 - RNA, 17 nt, Synthetic Construct
  source 1..17: mol_type = other RNA
tggccgggacagagggc

SEQ ID NO: 9522 - RNA, 17 nt, Synthetic Construct
  source 1..17: mol_type = other RNA
tggccgggacagagggc

SEQ ID NO: 9523 - RNA, 20 nt, Synthetic Construct
  source 1..20: mol_type = other RNA
caggacagtgaaacgagtca

SEQ ID NO: 9524 - RNA, 20 nt, Synthetic Construct
  source 1..20: mol_type = other RNA
caggacagtgaaacgagtca

SEQ ID NO: 9525 - RNA, 21 nt, Synthetic Construct
  source 1..21: mol_type = other RNA
tgagatagtaggttgtgtggt

SEQ ID NO: 9526 - RNA, 21 nt, Synthetic Construct
  source 1..21: mol_type = other RNA
tgagatagtaggttgtgtggt

SEQ ID NO: 9527 - RNA, 25 nt, Synthetic Construct
  source 1..25: mol_type = other RNA
ttgagggtatgagatcgagacgaca

SEQ ID NO: 9528 - RNA, 16 nt, Synthetic Construct
  source 1..16: mol_type = other RNA
atagggaacgtgagct

SEQ ID NO: 9529 - RNA, 16 nt, Synthetic Construct
  source 1..16: mol_type = other RNA
atagggaacgtgagct

SEQ ID NO: 9530 - RNA, 21 nt, Synthetic Construct
  source 1..21: mol_type = other RNA
tgaggtagtaggttatgtggt

SEQ ID NO: 9531 - RNA, 21 nt, Synthetic Construct
  source 1..21: mol_type = other RNA
tgaggtagtaggttatgtggt

SEQ ID NO: 9532 - RNA, 22 nt, Synthetic Construct
  source 1..22: mol_type = other RNA
ttcaagtaatccaggataggcc

SEQ ID NO: 9533 - RNA, 22 nt, Synthetic Construct
  source 1..22: mol_type = other RNA
ttcaagtaatccaggataggcc

SEQ ID NO: 9534 - RNA, 20 nt, Synthetic Construct
  source 1..20: mol_type = other RNA
ctctaatgagactgccggtg

SEQ ID NO: 9535 - RNA, 20 nt, Synthetic Construct
  source 1..20: mol_type = other RNA
ctctaatgagactgccggtg

SEQ ID NO: 9536 - RNA, 20 nt, Synthetic Construct
  source 1..20: mol_type = other RNA
actgatcgagtcgtcctgcg

SEQ ID NO: 9537 - RNA, 20 nt, Synthetic Construct
  source 1..20: mol_type = other RNA
actgatcgagtcgtcctgcg

SEQ ID NO: 9538 - RNA, 23 nt, Synthetic Construct
  source 1..23: mol_type = other RNA
cggtaatacgacgtacttagtgt

SEQ ID NO: 9539 - RNA, 21 nt, Synthetic Construct
  source 1..21: mol_type = other RNA
ttcaagtaatccaggataggc

SEQ ID NO: 9540 - RNA, 24 nt, Synthetic Construct
  source 1..24: mol_type = other RNA
caacggaatcccaaaagcagctgc

SEQ ID NO: 9541 - RNA, 23 nt, Synthetic Construct
  source 1..23: mol_type = other RNA
tgaggggcagagagcgagacttc

SEQ ID NO: 9542 - RNA, 22 nt, Synthetic Construct
  source 1..22: mol_type = other RNA
cactgcacttgtctcggtctga

SEQ ID NO: 9543 - RNA, 22 nt, Synthetic Construct
  source 1..22: mol_type = other RNA
cactgcacttgtctcggtctga

SEQ ID NO: 9544 - RNA, 22 nt, Synthetic Construct
  source 1..22: mol_type = other RNA
tgaggtagtagcttgtgctgtt

SEQ ID NO: 9545 - RNA, 22 nt, Synthetic Construct
  source 1..22: mol_type = other RNA
tgaggtagtagcttgtgctgtt

SEQ ID NO: 9546 - RNA, 17 nt, Synthetic Construct
  source 1..17: mol_type = other RNA
cgaaattccttgtcggg

SEQ ID NO: 9547 - RNA, 27 nt, Synthetic Construct
  source 1..27: mol_type = other RNA
cggtataccgaagctctaggtgcggca

SEQ ID NO: 9548 - RNA, 27 nt, Synthetic Construct
  source 1..27: mol_type = other RNA
cggtataccgaagctctaggtgcggca

SEQ ID NO: 9549 - RNA, 23 nt, Synthetic Construct
  source 1..23: mol_type = other RNA
aggtaatacgacgtacttagtgt

SEQ ID NO: 9550 - RNA, 23 nt, Synthetic Construct
  source 1..23: mol_type = other RNA
tggtaatatgacgtacttagtgt

SEQ ID NO: 9551 - RNA, 20 nt, Synthetic Construct
  source 1..20: mol_type = other RNA
tgaggtagtaagttgtattg

SEQ ID NO: 9552 - RNA, 20 nt, Synthetic Construct
  source 1..20: mol_type = other RNA
tgaggtagtaagttgtattg

SEQ ID NO: 9553 - RNA, 22 nt, Synthetic Construct
  source 1..22: mol_type = other RNA
tgaggtagtaggttgtgtggat

SEQ ID NO: 9554 - RNA, 22 nt, Synthetic Construct
  source 1..22: mol_type = other RNA
tgaggtagtaggttgtgtggat

SEQ ID NO: 9555 - RNA, 43 nt, Synthetic Construct; identical to SEQ ID NO: 727
  source 1..43: mol_type = other RNA

SEQ ID NO: 9556 - RNA, 43 nt, Synthetic Construct; identical to SEQ ID NO: 727
  source 1..43: mol_type = other RNA

SEQ ID NO: 9557 - RNA, 21 nt, Synthetic Construct
  source 1..21: mol_type = other RNA
tcctgtactgagctgccctga

SEQ ID NO: 9558 - RNA, 21 nt, Synthetic Construct
  source 1..21: mol_type = other RNA
tcctgtactgagctgccctga

SEQ ID NO: 9559 - RNA, 22 nt, Synthetic Construct
  source 1..22: mol_type = other RNA
tgaggtagtagtttgtgctatt

SEQ ID NO: 9560 - RNA, 30 nt, Synthetic Construct; identical to SEQ ID NO: 2274
  source 1..30: mol_type = other RNA

SEQ ID NO: 9561 - RNA, 21 nt, Synthetic Construct
  source 1..21: mol_type = other RNA
tgaggtagtagcttgtgctgt

SEQ ID NO: 9562 - RNA, 23 nt, Synthetic Construct
  source 1..23: mol_type = other RNA
agcagcattgtacagggctacga

SEQ ID NO: 9563 - RNA, 22 nt, Synthetic Construct
  source 1..22: mol_type = other RNA
tgaggtagtaggttgtatagta

SEQ ID NO: 9564 - RNA, 22 nt, Synthetic Construct
  source 1..22: mol_type = other RNA
tggggtagtaggttgtatagtt

SEQ ID NO: 9565 - RNA, 22 nt, Synthetic Construct
  source 1..22: mol_type = other RNA
tggggtagtaggttgtatagtt

SEQ ID NO: 9566 - RNA, 24 nt, Synthetic Construct
  source 1..24: mol_type = other RNA
aaaccgttaccattactgagttta

SEQ ID NO: 9567 - RNA, 24 nt, Synthetic Construct
  source 1..24: mol_type = other RNA
aaaccgttaccattactgagttta

SEQ ID NO: 9568 - RNA, 33 nt, Synthetic Construct
  source 1..33: mol_type = other RNA
cgctgagattcagcccgtgttcggaagattttc

SEQ ID NO: 9569 - RNA, 33 nt, Synthetic Construct; identical to SEQ ID NO: 9568
  source 1..33: mol_type = other RNA

SEQ ID NO: 9570 - RNA, 22 nt, Synthetic Construct
  source 1..22: mol_type = other RNA
tgaggtagtaggttgtgctgtt

SEQ ID NO: 9571 - RNA, 31 nt, Synthetic Construct; identical to SEQ ID NO: 2310
  source 1..31: mol_type = other RNA

SEQ ID NO: 9572 - RNA, 22 nt, Synthetic Construct
  source 1..22: mol_type = other RNA
tcctgtactgagctgcctcgag

SEQ ID NO: 9573 - RNA, 19 nt, Synthetic Construct
  source 1..19: mol_type = other RNA
gctattgacgaccgtaccg

SEQ ID NO: 9574 - RNA, 23 nt, Synthetic Construct
  source 1..23: mol_type = other RNA
aacattcattgctgtcggtgggt

SEQ ID NO: 9575 - RNA, 24 nt, Synthetic Construct
  source 1..24: mol_type = other RNA
tgagaactgaattccatgggttga

SEQ ID NO: 9576 - RNA, 24 nt, Synthetic Construct
  source 1..24: mol_type = other RNA
tgagaactgaattccatgggttga

SEQ ID NO: 9577 - RNA, 22 nt, Synthetic Construct
  source 1..22: mol_type = other RNA
gcactctaatgagactgccggt

SEQ ID NO: 9578 - RNA, 21 nt, Synthetic Construct
  source 1..21: mol_type = other RNA
tcctatactgagctgccccga

SEQ ID NO: 9579 - RNA, 21 nt, Synthetic Construct
  source 1..21: mol_type = other RNA
tcctatactgagctgccccga

SEQ ID NO: 9580 - RNA, 18 nt, Synthetic Construct
  source 1..18: mol_type = other RNA
acagtcaggatgttggct

SEQ ID NO: 9581 - RNA, 18 nt, Synthetic Construct
  source 1..18: mol_type = other RNA
acagtcaggatgttggct

SEQ ID NO: 9582 - RNA, 16 nt, Synthetic Construct
  source 1..16: mol_type = other RNA
ccgcttttgtcaggga

SEQ ID NO: 9583 - RNA, 16 nt, Synthetic Construct
  source 1..16: mol_type = other RNA
ccgcttttgtcaggga

SEQ ID NO: 9584 - RNA, 22 nt, Synthetic Construct
  source 1..22: mol_type = other RNA
tgtcagtttgtcaaatacccct

SEQ ID NO: 9585 - RNA, 22 nt, Synthetic Construct
  source 1..22: mol_type = other RNA
tgtcagtttgtcaaatacccct

SEQ ID NO: 9586 - RNA, 23 nt, Synthetic Construct
  source 1..23: mol_type = other RNA
tggtaatatgacgtacttagtgt

SEQ ID NO: 9587 - RNA, 23 nt, Synthetic Construct
  source 1..23: mol_type = other RNA
tggtaatatgacgtacttagtgt

SEQ ID NO: 9588 - RNA, 23 nt, Synthetic Construct
  source 1..23: mol_type = other RNA
tcctgcactgagctgccccgagt

SEQ ID NO: 9589 - RNA, 22 nt, Synthetic Construct
  source 1..22: mol_type = other RNA
tgaggtaatagtttgtgctgtt

SEQ ID NO: 9590 - RNA, 24 nt, Synthetic Construct
  source 1..24: mol_type = other RNA
atgacacgatcactcccgttgagt

SEQ ID NO: 9591 - RNA, 24 nt, Synthetic Construct
  source 1..24: mol_type = other RNA
atgacacgatcactcccgttgagt

SEQ ID NO: 9592 - RNA, 23 nt, Synthetic Construct
  source 1..23: mol_type = other RNA
tgaggggcagagagcgaggcttt

SEQ ID NO: 9593 - RNA, 24 nt, Synthetic Construct
  source 1..24: mol_type = other RNA
tgtaaacatccccgactggaagct

SEQ ID NO: 9594 - RNA, 24 nt, Synthetic Construct
  source 1..24: mol_type = other RNA
tgtaaacatccccgactggaagct

SEQ ID NO: 9595 - RNA, 21 nt, Synthetic Construct
  source 1..21: mol_type = other RNA
tgaggtagtagtttgcgctgt

SEQ ID NO: 9596 - RNA, 32 nt, Synthetic Construct; identical to SEQ ID NO: 3713
  source 1..32: mol_type = other RNA

SEQ ID NO: 9597 - RNA, 32 nt, Synthetic Construct; identical to SEQ ID NO: 3713
  source 1..32: mol_type = other RNA

SEQ ID NO: 9598 - RNA, 23 nt, Synthetic Construct
  source 1..23: mol_type = other RNA
tcctgtactgagctgcctcgaga

SEQ ID NO: 9599 - RNA, 23 nt, Synthetic Construct
  source 1..23: mol_type = other RNA
tcctgtactgagctgcctcgaga

SEQ ID NO: 9600 - RNA, 28 nt, Synthetic Construct
  source 1..28: mol_type = other RNA
cccccccactgctaaatttgactggcta

SEQ ID NO: 9601 - RNA, 33 nt, Synthetic Construct; identical to SEQ ID NO: 3082
  source 1..33: mol_type = other RNA

SEQ ID NO: 9602 - RNA, 33 nt, Synthetic Construct; identical to SEQ ID NO: 3082
  source 1..33: mol_type = other RNA

SEQ ID NO: 9603 - RNA, 30 nt, Synthetic Construct; identical to SEQ ID NO: 3933
  source 1..30: mol_type = other RNA

SEQ ID NO: 9604 - RNA, 21 nt, Synthetic Construct
  source 1..21: mol_type = other RNA
tgaggtagtagtttgtgctgc

SEQ ID NO: 9605 - RNA, 23 nt, Synthetic Construct
  source 1..23: mol_type = other RNA
tggtaatacggcgtacttagtgt

SEQ ID NO: 9606 - RNA, 34 nt, Synthetic Construct; identical to SEQ ID NO: 385
  source 1..34: mol_type = other RNA

SEQ ID NO: 9607 - RNA, 34 nt, Synthetic Construct; identical to SEQ ID NO: 385
  source 1..34: mol_type = other RNA

SEQ ID NO: 9608 - RNA, 20 nt, Synthetic Construct
  source 1..20: mol_type = other RNA
cacatgcaagtcgaacggta

SEQ ID NO: 9609 - RNA, 22 nt, Synthetic Construct
  source 1..22: mol_type = other RNA
tgaggtggtagtttgtgctgtt

SEQ ID NO: 9610 - RNA, 22 nt, Synthetic Construct
  source 1..22: mol_type = other RNA
tgaggtggtagtttgtgctgtt

SEQ ID NO: 9611 - RNA, 21 nt, Synthetic Construct
  source 1..21: mol_type = other RNA
taacactgtctggtaacgatg

SEQ ID NO: 9612 - RNA, 21 nt, Synthetic Construct
  source 1..21: mol_type = other RNA
taacactgtctggtaacgatg

SEQ ID NO: 9613 - RNA, 19 nt, Synthetic Construct
  source 1..19: mol_type = other RNA
cctgtctgaatatgggggg

SEQ ID NO: 9614 - RNA, 19 nt, Synthetic Construct
  source 1..19: mol_type = other RNA
cctgtctgaatatgggggg

SEQ ID NO: 9615 - RNA, 23 nt, Synthetic Construct
  source 1..23: mol_type = other RNA
tctttgttcgattccgttgagta

SEQ ID NO: 9616 - RNA, 26 nt, Synthetic Construct
  source 1..26: mol_type = other RNA
gatgcgtggtaggagagcgttctgta

SEQ ID NO: 9617 - RNA, 26 nt, Synthetic Construct
  source 1..26: mol_type = other RNA
gatgcgtggtaggagagcgttctgta

SEQ ID NO: 9618 - RNA, 23 nt, Synthetic Construct
  source 1..23: mol_type = other RNA
tcctgtactgagctgccctgagt

SEQ ID NO: 9619 - RNA, 23 nt, Synthetic Construct
  source 1..23: mol_type = other RNA
tcctgtactgagctgccctgagt

SEQ ID NO: 9620 - RNA, 20 nt, Synthetic Construct
  source 1..20: mol_type = other RNA
agctacattgtctgctgggt

SEQ ID NO: 9621 - RNA, 20 nt, Synthetic Construct
  source 1..20: mol_type = other RNA
agctacattgtctgctgggt

SEQ ID NO: 9622 - RNA, 24 nt, Synthetic Construct
  source 1..24: mol_type = other RNA
tatatcggaacgtgcccagtcgtg

SEQ ID NO: 9623 - RNA, 23 nt, Synthetic Construct
  source 1..23: mol_type = other RNA
tctcacacagaaatcgcacccgt

SEQ ID NO: 9624 - RNA, 23 nt, Synthetic Construct
  source 1..23: mol_type = other RNA
caaagtgctgtccgtgcaggtag

SEQ ID NO: 9625 - RNA, 23 nt, Synthetic Construct
  source 1..23: mol_type = other RNA
tcctgtactgagctgccccgagg

SEQ ID NO: 9626 - RNA, 25 nt, Synthetic Construct
  source 1..25: mol_type = other RNA
ttgaggatgtgagatcgagacgaca

SEQ ID NO: 9627 - RNA, 25 nt, Synthetic Construct
  source 1..25: mol_type = other RNA
ttgaggatgtgagatcgagacgaca

SEQ ID NO: 9628 - RNA, 21 nt, Synthetic Construct
  source 1..21: mol_type = other RNA
tggggtagtaggttgtatagt

SEQ ID NO: 9629 - RNA, 21 nt, Synthetic Construct
  source 1..21: mol_type = other RNA
tggggtagtaggttgtatagt

SEQ ID NO: 9630 - RNA, 36 nt, Synthetic Construct; identical to SEQ ID NO: 2456
  source 1..36: mol_type = other RNA

SEQ ID NO: 9631 - RNA, 36 nt, Synthetic Construct; identical to SEQ ID NO: 2456
  source 1..36: mol_type = other RNA

SEQ ID NO: 9632 - RNA, 22 nt, Synthetic Construct
  source 1..22: mol_type = other RNA
tgaggtagtaggttgtacagtt

SEQ ID NO: 9633 - RNA, 21 nt, Synthetic Construct
  source 1..21: mol_type = other RNA
tgaggggcggagagcgagact

SEQ ID NO: 9634 - RNA, 23 nt, Synthetic Construct
  source 1..23: mol_type = other RNA
tcgaccggacctcgaccggctcg

SEQ ID NO: 9635 - RNA, 23 nt, Synthetic Construct
  source 1..23: mol_type = other RNA
tcgaccggacctcgaccggctcg

SEQ ID NO: 9636 - RNA, 27 nt, Synthetic Construct
  source 1..27: mol_type = other RNA
ccccccactgctaaatttgattggctt

SEQ ID NO: 9637 - RNA, 16 nt, Synthetic Construct
  source 1..16: mol_type = other RNA
gtctacggccatgcca

SEQ ID NO: 9638 - RNA, 39 nt, Synthetic Construct; identical to SEQ ID NO: 2398
  source 1..39: mol_type = other RNA

SEQ ID NO: 9639 - RNA, 16 nt, Synthetic Construct
  source 1..16: mol_type = other RNA
taacaggtctgtgatg

SEQ ID NO: 9640 - RNA, 16 nt, Synthetic Construct
  source 1..16: mol_type = other RNA
taacaggtctgtgatg

SEQ ID NO: 9641 - RNA, 22 nt, Synthetic Construct
  source 1..22: mol_type = other RNA
tgaagtagtaggttgtatagtt

SEQ ID NO: 9642 - RNA, 22 nt, Synthetic Construct
  source 1..22: mol_type = other RNA
tcagtgcactacagagctttgt

SEQ ID NO: 9643 - RNA, 22 nt, Synthetic Construct
  source 1..22: mol_type = other RNA
tcagtgcactacagagctttgt

SEQ ID NO: 9644 - RNA, 18 nt, Synthetic Construct
  source 1..18: mol_type = other RNA
tcccaagggtatggctgt

SEQ ID NO: 9645 - RNA, 18 nt, Synthetic Construct
  source 1..18: mol_type = other RNA
tcccaagggtatggctgt

SEQ ID NO: 9646 - RNA, 19 nt, Synthetic Construct
  source 1..19: mol_type = other RNA
agcgaaattccttgtcggg

SEQ ID NO: 9647 - RNA, 19 nt, Synthetic Construct
  source 1..19: mol_type = other RNA
agcgaaattccttgtcggg

SEQ ID NO: 9648 - RNA, 15 nt, Synthetic Construct
  source 1..15: mol_type = other RNA
cccagaaacccggtc

SEQ ID NO: 9649 - RNA, 15 nt, Synthetic Construct
  source 1..15: mol_type = other RNA
cccagaaacccggtc

SEQ ID NO: 9650 - RNA, 22 nt, Synthetic Construct
  source 1..22: mol_type = other RNA
tcctgtaccgagctgccccgag

SEQ ID NO: 9651 - RNA, 20 nt, Synthetic Construct
  source 1..20: mol_type = other RNA
tggtagactatggaacgtag

SEQ ID NO: 9652 - RNA, 20 nt, Synthetic Construct
  source 1..20: mol_type = other RNA
tgagatagtaggttgtgtgg

SEQ ID NO: 9653 - RNA, 29 nt, Synthetic Construct
  source 1..29: mol_type = other RNA
gcgccgctggtgtagtggtatcatgcaag

SEQ ID NO: 9654 - RNA, 29 nt, Synthetic Construct
  source 1..29: mol_type = other RNA
gcgccgctggtgtagtggtatcatgcaag

SEQ ID NO: 9655 - RNA, 22 nt, Synthetic Construct
  source 1..22: mol_type = other RNA
tcctgtacagagctgccccgag

SEQ ID NO: 9656 - RNA, 15 nt, Synthetic Construct
  source 1..15: mol_type = other RNA
ggtgaaagcggggga

SEQ ID NO: 9657 - RNA, 22 nt, Synthetic Construct
  source 1..22: mol_type = other RNA
tgaggtagtgggttgtatagtt

SEQ ID NO: 9658 - RNA, 22 nt, Synthetic Construct
  source 1..22: mol_type = other RNA
tgaggtagtgggttgtatagtt

SEQ ID NO: 9659 - RNA, 16 nt, Synthetic Construct
  source 1..16: mol_type = other RNA
gtctacagccatacca

SEQ ID NO: 9660 - RNA, 16 nt, Synthetic Construct
  source 1..16: mol_type = other RNA
gtctacagccatacca

SEQ ID NO: 9661 - RNA, 21 nt, Synthetic Construct
  source 1..21: mol_type = other RNA
tgaggtagtaggtcgtgtggt

SEQ ID NO: 9662 - RNA, 21 nt, Synthetic Construct
  source 1..21: mol_type = other RNA
tgaggtagtaggtcgtgtggt

SEQ ID NO: 9663 - RNA, 22 nt, Synthetic Construct
  source 1..22: mol_type = other RNA
tgaggtagtagattgtgtagtt

SEQ ID NO: 9664 - RNA, 15 nt, Synthetic Construct
  source 1..15: mol_type = other RNA
gctagtaatcgcgga

SEQ ID NO: 9665 - RNA, 24 nt, Synthetic Construct
  source 1..24: mol_type = other RNA
tgtaagcatccccgactggaagct

SEQ ID NO: 9666 - RNA, 23 nt, Synthetic Construct
  source 1..23: mol_type = other RNA
aacggaatcccaaaagcagctgt

SEQ ID NO: 9667 - RNA, 23 nt, Synthetic Construct
  source 1..23: mol_type = other RNA
aacggaatcccaaaagcagctgt

SEQ ID NO: 9668 - RNA, 15 nt, Synthetic Construct
  source 1..15: mol_type = other RNA
gtcgacgtatagggt

SEQ ID NO: 9669 - RNA, 22 nt, Synthetic Construct
  source 1..22: mol_type = other RNA
tgaggtagtagattgtatggtt

SEQ ID NO: 9670 - RNA, 22 nt, Synthetic Construct
  source 1..22: mol_type = other RNA
tgaggaagtaggttgtatagtt

SEQ ID NO: 9671 - RNA, 22 nt, Synthetic Construct
  source 1..22: mol_type = other RNA
tgaggaagtaggttgtatagtt

SEQ ID NO: 9672 - RNA, 18 nt, Synthetic Construct
  source 1..18: mol_type = other RNA
tcctgtactgagctgccc

SEQ ID NO: 9673 - RNA, 18 nt, Synthetic Construct
  source 1..18: mol_type = other RNA
tcctgtactgagctgccc

SEQ ID NO: 9674 - RNA, 18 nt, Synthetic Construct
  source 1..18: mol_type = other RNA
accggaggaaggtgggga

SEQ ID NO: 9675 - RNA, 17 nt, Synthetic Construct
  source 1..17: mol_type = other RNA
gcagatcttggtggtag

SEQ ID NO: 9676 - RNA, 17 nt, Synthetic Construct
  source 1..17: mol_type = other RNA
gcagatcttggtggtag

SEQ ID NO: 9677 - RNA, 19 nt, Synthetic Construct
  source 1..19: mol_type = other RNA
tagcagcacatcatggttt

SEQ ID NO: 9678 - RNA, 19 nt, Synthetic Construct
  source 1..19: mol_type = other RNA
tagcagcacatcatggttt

SEQ ID NO: 9679 - RNA, 35 nt, Synthetic Construct; identical to SEQ ID NO: 2069
  source 1..35: mol_type = other RNA

SEQ ID NO: 9680 - RNA, 15 nt, Synthetic Construct
  source 1..15: mol_type = other RNA
tgcaagtcgaacggt

SEQ ID NO: 9681 - RNA, 23 nt, Synthetic Construct
  source 1..23: mol_type = other RNA
tgaggtagtaggttgtgcggttt

SEQ ID NO: 9682 - RNA, 23 nt, Synthetic Construct
  source 1..23: mol_type = other RNA
tgaggtagtaggttgtgcggttt

SEQ ID NO: 9683 - RNA, 23 nt, Synthetic Construct
  source 1..23: mol_type = other RNA
tgaggtaggaggttgtatagtta

SEQ ID NO: 9684 - RNA, 22 nt, Synthetic Construct
  source 1..22: mol_type = other RNA
tgaggtagtaaattgtatagtt

SEQ ID NO: 9685 - RNA, 32 nt, Synthetic Construct; identical to SEQ ID NO: 2435
  source 1..32: mol_type = other RNA

SEQ ID NO: 9686 - RNA, 23 nt, Synthetic Construct
  source 1..23: mol_type = other RNA
tcctgtactgagctgccctgagt

SEQ ID NO: 9687 - RNA, 22 nt, Synthetic Construct
  source 1..22: mol_type = other RNA
tcctgtactgagcagccccgag

SEQ ID NO: 9688 - RNA, 22 nt, Synthetic Construct
  source 1..22: mol_type = other RNA
tcctgtactgagcagccccgag

SEQ ID NO: 9689 - RNA, 21 nt, Synthetic Construct
  source 1..21: mol_type = other RNA
cagtgcaatgttaaaagggca

SEQ ID NO: 9690 - RNA, 21 nt, Synthetic Construct
  source 1..21: mol_type = other RNA
cagtgcaatgttaaaagggca

SEQ ID NO: 9691 - RNA, 22 nt, Synthetic Construct
  source 1..22: mol_type = other RNA
tgaggtagtagtttgtgcggtt

SEQ ID NO: 9692 - RNA, 20 nt, Synthetic Construct
  source 1..20: mol_type = other RNA
tggggtagtaggttgtgtgg

SEQ ID NO: 9693 - RNA, 20 nt, Synthetic Construct
  source 1..20: mol_type = other RNA
tggggtagtaggttgtgtgg

SEQ ID NO: 9694 - RNA, 21 nt, Synthetic Construct
  source 1..21: mol_type = other RNA
tgaggtagtagattgtatggt

SEQ ID NO: 9695 - RNA, 21 nt, Synthetic Construct
  source 1..21: mol_type = other RNA
tgaggtagtagattgtatggt

SEQ ID NO: 9696 - RNA, 23 nt, Synthetic Construct
  source 1..23: mol_type = other RNA
taaagtgcttatagtgcaggtag

SEQ ID NO: 9697 - RNA, 22 nt, Synthetic Construct
  source 1..22: mol_type = other RNA
tgtggtagtagtttgtgctgtt

SEQ ID NO: 9698 - RNA, 32 nt, Synthetic Construct; identical to SEQ ID NO: 2435
  source 1..32: mol_type = other RNA

SEQ ID NO: 9699 - RNA, 32 nt, Synthetic Construct; identical to SEQ ID NO: 2435
  source 1..32: mol_type = other RNA

SEQ ID NO: 9700 - RNA, 23 nt, Synthetic Construct
  source 1..23: mol_type = other RNA
taaggggcagagagcgagacttt

SEQ ID NO: 9701 - RNA, 23 nt, Synthetic Construct
  source 1..23: mol_type = other RNA
taaggggcagagagcgagacttt

SEQ ID NO: 9702 - RNA, 24 nt, Synthetic Construct
  source 1..24: mol_type = other RNA
gttgaattgtggtctgtggacgtg

SEQ ID NO: 9703 - RNA, 24 nt, Synthetic Construct
  source 1..24: mol_type = other RNA
gttgaattgtggtctgtggacgtg

SEQ ID NO: 9704 - RNA, 21 nt, Synthetic Construct
  source 1..21: mol_type = other RNA
atgtcccacccccactcctgt

SEQ ID NO: 9705 - RNA, 21 nt, Synthetic Construct
  source 1..21: mol_type = other RNA
atgtcccacccccactcctgt

SEQ ID NO: 9706 - RNA, 36 nt, Synthetic Construct; identical to SEQ ID NO: 777
  source 1..36: mol_type = other RNA

SEQ ID NO: 9707 - RNA, 23 nt, Synthetic Construct
  source 1..23: mol_type = other RNA
tggtaatacgacgcacttagtgt

SEQ ID NO: 9708 - RNA, 32 nt, Synthetic Construct; identical to SEQ ID NO: 753
  source 1..32: mol_type = other RNA

SEQ ID NO: 9709 - RNA, 32 nt, Synthetic Construct; identical to SEQ ID NO: 753
  source 1..32: mol_type = other RNA

SEQ ID NO: 9710 - RNA, 37 nt, Synthetic Construct; identical to SEQ ID NO: 7503
  source 1..37: mol_type = other RNA

SEQ ID NO: 9711 - RNA, 37 nt, Synthetic Construct; identical to SEQ ID NO: 7503
  source 1..37: mol_type = other RNA

SEQ ID NO: 9712 - RNA, 20 nt, Synthetic Construct
  source 1..20: mol_type = other RNA
gtacagtactgtgataactg

SEQ ID NO: 9713 - RNA, 20 nt, Synthetic Construct
  source 1..20: mol_type = other RNA
gtacagtactgtgataactg

SEQ ID NO: 9714 - RNA, 23 nt, Synthetic Construct
  source 1..23: mol_type = other RNA
ggcagggttcgtgactggggtga

SEQ ID NO: 9715 - RNA, 23 nt, Synthetic Construct
  source 1..23: mol_type = other RNA
ggcagggttcgtgactggggtga

SEQ ID NO: 9716 - RNA, 22 nt, Synthetic Construct
  source 1..22: mol_type = other RNA
accacagggtagaaccacggaa

SEQ ID NO: 9717 - RNA, 22 nt, Synthetic Construct
  source 1..22: mol_type = other RNA
accacagggtagaaccacggaa

SEQ ID NO: 9718 - RNA, 16 nt, Synthetic Construct
  source 1..16: mol_type = other RNA
aggtcatcgtcaggct

SEQ ID NO: 9719 - RNA, 16 nt, Synthetic Construct
  source 1..16: mol_type = other RNA
aggtcatcgtcaggct

SEQ ID NO: 9720 - RNA, 32 nt, Synthetic Construct; identical to SEQ ID NO: 2318
  source 1..32: mol_type = other RNA

SEQ ID NO: 9721 - RNA, 29 nt, Synthetic Construct
  source 1..29: mol_type = other RNA
tgaaggtgggttgtgaagcctgctggagg

SEQ ID NO: 9722 - RNA, 29 nt, Synthetic Construct
  source 1..29: mol_type = other RNA
tgaaggtgggttgtgaagcctgctggagg

SEQ ID NO: 9723 - RNA, 19 nt, Synthetic Construct
  source 1..19: mol_type = other RNA
atagggaacgtgagctggg

SEQ ID NO: 9724 - RNA, 19 nt, Synthetic Construct
  source 1..19: mol_type = other RNA
atagggaacgtgagctggg

SEQ ID NO: 9725 - RNA, 19 nt, Synthetic Construct
  source 1..19: mol_type = other RNA
ggctggtccgaaggtagtg

SEQ ID NO: 9726 - RNA, 19 nt, Synthetic Construct
  source 1..19: mol_type = other RNA
ggctggtccgaaggtagtg

SEQ ID NO: 9727 - RNA, 21 nt, Synthetic Construct
  source 1..21: mol_type = other RNA
ctaatcccagaaacccggtcg

SEQ ID NO: 9728 - RNA, 21 nt, Synthetic Construct
  source 1..21: mol_type = other RNA
ctaatcccagaaacccggtcg

SEQ ID NO: 9729 - RNA, 23 nt, Synthetic Construct
  source 1..23: mol_type = other RNA
caaagtgctgtttgtgcaggtag

SEQ ID NO: 9730 - RNA, 29 nt, Synthetic Construct
  source 1..29: mol_type = other RNA
ccccccccactgctaaatttgactggctt

SEQ ID NO: 9731 - RNA, 29 nt, Synthetic Construct
  source 1..29: mol_type = other RNA
ccccccccactgctaaatttgactggctt

SEQ ID NO: 9732 - RNA, 15 nt, Synthetic Construct
  source 1..15: mol_type = other RNA
acggtcctaaggtag

SEQ ID NO: 9733 - RNA, 22 nt, Synthetic Construct
  source 1..22: mol_type = other RNA
tgtcagtttgtcaaatacccca

SEQ ID NO: 9734 - RNA, 22 nt, Synthetic Construct
  source 1..22: mol_type = other RNA
tgtcagtttgtcaaatacccca

SEQ ID NO: 9735 - RNA, 23 nt, Synthetic Construct
  source 1..23: mol_type = other RNA
tcccgtactgagctgccccgaga

SEQ ID NO: 9736 - RNA, 22 nt, Synthetic Construct
  source 1..22: mol_type = other RNA
tgaggtggtaggttgtatagtt

SEQ ID NO: 9737 - RNA, 22 nt, Synthetic Construct
  source 1..22: mol_type = other RNA
tgaggtggtaggttgtatagtt

SEQ ID NO: 9738 - RNA, 20 nt, Synthetic Construct
  source 1..20: mol_type = other RNA
atcacattgccagggatttc

SEQ ID NO: 9739 - RNA, 23 nt, Synthetic Construct
  source 1..23: mol_type = other RNA
taccctgtagatccgaatttgtg

SEQ ID NO: 9740 - RNA, 23 nt, Synthetic Construct
  source 1..23: mol_type = other RNA
tcactgatcgagtcgtcctgcgc

SEQ ID NO: 9741 - RNA, 22 nt, Synthetic Construct
  source 1..22: mol_type = other RNA
tcgtaccgtgagtaatgatgcg

SEQ ID NO: 9742 - RNA, 23 nt, Synthetic Construct
  source 1..23: mol_type = other RNA
tctttgttcgattccgttgagta

SEQ ID NO: 9743 - RNA, 23 nt, Synthetic Construct
  source 1..23: mol_type = other RNA
tctttgttcgattccgttgagta

SEQ ID NO: 9744 - RNA, 25 nt, Synthetic Construct
  source 1..25: mol_type = other RNA
ttgaggatatgggatcgagacgaca

SEQ ID NO: 9745 - RNA, 25 nt, Synthetic Construct
  source 1..25: mol_type = other RNA
ttgaggatatgggatcgagacgaca

SEQ ID NO: 9746 - RNA, 23 nt, Synthetic Construct
  source 1..23: mol_type = other RNA
tggtaaaacgacgtacttagtgt

SEQ ID NO: 9747 - RNA, 20 nt, Synthetic Construct
  source 1..20: mol_type = other RNA
gtcagtttgtcaaatacccc

SEQ ID NO: 9748 - RNA, 20 nt, Synthetic Construct
  source 1..20: mol_type = other RNA
gtcagtttgtcaaatacccc

SEQ ID NO: 9749 - RNA, 27 nt, Synthetic Construct
  source 1..27: mol_type = other RNA
gcatgggtggttcagtggtagaattct

SEQ ID NO: 9750 - RNA, 27 nt, Synthetic Construct
  source 1..27: mol_type = other RNA
gcatgggtggttcagtggtagaattct

SEQ ID NO: 9751 - RNA, 22 nt, Synthetic Construct
  source 1..22: mol_type = other RNA
tgtcaactggttgttgggaggg

SEQ ID NO: 9752 - RNA, 22 nt, Synthetic Construct
  source 1..22: mol_type = other RNA
tggaatgtaaagaagtatgtaa

SEQ ID NO: 9753 - RNA, 22 nt, Synthetic Construct
  source 1..22: mol_type = other RNA
tggaatgtaaagaagtatgtaa

SEQ ID NO: 9754 - RNA, 19 nt, Synthetic Construct
  source 1..19: mol_type = other RNA
cgcgacctcagatcagacg

SEQ ID NO: 9755 - RNA, 19 nt, Synthetic Construct
  source 1..19: mol_type = other RNA
cgcgacctcagatcagacg

SEQ ID NO: 9756 - RNA, 23 nt, Synthetic Construct
  source 1..23: mol_type = other RNA
cagagtgctgttcgtgcaggtag

SEQ ID NO: 9757 - RNA, 15 nt, Synthetic Construct
  source 1..15: mol_type = other RNA
cgccatttaaagagg

SEQ ID NO: 9758 - RNA, 15 nt, Synthetic Construct
  source 1..15: mol_type = other RNA
cgccatttaaagagg

SEQ ID NO: 9759 - RNA, 23 nt, Synthetic Construct
  source 1..23: mol_type = other RNA
tgaggggcagagagcgagacctt

SEQ ID NO: 9760 - RNA, 23 nt, Synthetic Construct
  source 1..23: mol_type = other RNA
tgaggggcagagagcgagacctt

SEQ ID NO: 9761 - RNA, 24 nt, Synthetic Construct
  source 1..24: mol_type = other RNA
tgtaaacacccccgactggaagct

SEQ ID NO: 9762 - RNA, 23 nt, Synthetic Construct
  source 1..23: mol_type = other RNA
cagagttctacagtccgacgatc

SEQ ID NO: 9763 - RNA, 23 nt, Synthetic Construct
  source 1..23: mol_type = other RNA
cagagttctacagtccgacgatc

SEQ ID NO: 9764 - RNA, 16 nt, Synthetic Construct
  source 1..16: mol_type = other RNA
gtcgacgtatagggtg

SEQ ID NO: 9765 - RNA, 36 nt, Synthetic Construct; identical to SEQ ID NO: 2506
  source 1..36: mol_type = other RNA

SEQ ID NO: 9766 - RNA, 27 nt, Synthetic Construct
  source 1..27: mol_type = other RNA
ccccctactgctaaatttgactggctt

SEQ ID NO: 9767 - RNA, 23 nt, Synthetic Construct
  source 1..23: mol_type = other RNA
tcctgtacagagctgccccgaga

SEQ ID NO: 9768 - RNA, 23 nt, Synthetic Construct
  source 1..23: mol_type = other RNA
tcctgtacagagctgccccgaga

SEQ ID NO: 9769 - RNA, 20 nt, Synthetic Construct
  source 1..20: mol_type = other RNA
ctctaatgagactgccggtg

SEQ ID NO: 9770 - RNA, 20 nt, Synthetic Construct
  source 1..20: mol_type = other RNA
ctctaatgagactgccggtg

SEQ ID NO: 9771 - RNA, 29 nt, Synthetic Construct
  source 1..29: mol_type = other RNA
ccccccccactgctaaatttgactggctt

SEQ ID NO: 9772 - RNA, 33 nt, Synthetic Construct; identical to SEQ ID NO: 4947
  source 1..33: mol_type = other RNA

SEQ ID NO: 9773 - RNA, 15 nt, Synthetic Construct
  source 1..15: mol_type = other RNA
tcctgacggccatag

SEQ ID NO: 9774 - RNA, 15 nt, Synthetic Construct
  source 1..15: mol_type = other RNA
tcctgacggccatag

SEQ ID NO: 9775 - RNA, 22 nt, Synthetic Construct
  source 1..22: mol_type = other RNA
tgaggtagtagtttatgctgtt

SEQ ID NO: 9776 - RNA, 24 nt, Synthetic Construct
  source 1..24: mol_type = other RNA
ggttgtaaaccgcttttgtcaggg

SEQ ID NO: 9777 - RNA, 24 nt, Synthetic Construct
  source 1..24: mol_type = other RNA
ggttgtaaaccgcttttgtcaggg

SEQ ID NO: 9778 - RNA, 23 nt, Synthetic Construct
  source 1..23: mol_type = other RNA
ccctgtactgagctgccccgaga

SEQ ID NO: 9779 - RNA, 22 nt, Synthetic Construct
  source 1..22: mol_type = other RNA
ggcagggttcgtgactggggtg

SEQ ID NO: 9780 - RNA, 31 nt, Synthetic Construct; identical to SEQ ID NO: 2263
  source 1..31: mol_type = other RNA

SEQ ID NO: 9781 - RNA, 35 nt, Synthetic Construct; identical to SEQ ID NO: 787
  source 1..35: mol_type = other RNA

SEQ ID NO: 9782 - RNA, 35 nt, Synthetic Construct; identical to SEQ ID NO: 787
  source 1..35: mol_type = other RNA

SEQ ID NO: 9783 - RNA, 22 nt, Synthetic Construct
  source 1..22: mol_type = other RNA
tgaggtagcagtttgtgctgtt

SEQ ID NO: 9784 - RNA, 22 nt, Synthetic Construct
  source 1..22: mol_type = other RNA
tgaggtagcagtttgtgctgtt

SEQ ID NO: 9785 - RNA, 21 nt, Synthetic Construct
  source 1..21: mol_type = other RNA
cattattacttttggtacgcg

SEQ ID NO: 9786 - RNA, 15 nt, Synthetic Construct
  source 1..15: mol_type = other RNA
tgcctcagcgtcggt

SEQ ID NO: 9787 - RNA, 15 nt, Synthetic Construct
  source 1..15: mol_type = other RNA
tgcctcagcgtcggt

SEQ ID NO: 9788 - RNA, 21 nt, Synthetic Construct
  source 1..21: mol_type = other RNA
tactccttaagcgaatctcgc

SEQ ID NO: 9789 - RNA, 21 nt, Synthetic Construct
  source 1..21: mol_type = other RNA
tactccttaagcgaatctcgc

SEQ ID NO: 9790 - RNA, 23 nt, Synthetic Construct
  source 1..23: mol_type = other RNA
caaagtgctgttcgtgcgggtag

SEQ ID NO: 9791 - RNA, 23 nt, Synthetic Construct
  source 1..23: mol_type = other RNA
caaagtgctgttcgtgcgggtag

SEQ ID NO: 9792 - RNA, 21 nt, Synthetic Construct
  source 1..21: mol_type = other RNA
tgaggtagtgggttgtatagt

SEQ ID NO: 9793 - RNA, 21 nt, Synthetic Construct
  source 1..21: mol_type = other RNA
tgaggtagtgggttgtatagt

SEQ ID NO: 9794 - RNA, 16 nt, Synthetic Construct
  source 1..16: mol_type = other RNA
ccaaggggtcgtgggt

SEQ ID NO: 9795 - RNA, 16 nt, Synthetic Construct
  source 1..16: mol_type = other RNA
ccaaggggtcgtgggt

SEQ ID NO: 9796 - RNA, 25 nt, Synthetic Construct
  source 1..25: mol_type = other RNA
atgaggatatgagatcgagacgaca

SEQ ID NO: 9797 - RNA, 25 nt, Synthetic Construct
  source 1..25: mol_type = other RNA
atgaggatatgagatcgagacgaca

SEQ ID NO: 9798 - RNA, 23 nt, Synthetic Construct
  source 1..23: mol_type = other RNA
tcggatccgtctgagcttggctt

SEQ ID NO: 9799 - RNA, 23 nt, Synthetic Construct
  source 1..23: mol_type = other RNA
tcggatccgtctgagcttggctt

SEQ ID NO: 9800 - RNA, 15 nt, Synthetic Construct
  source 1..15: mol_type = other RNA
catgccgcgtgcggg

SEQ ID NO: 9801 - RNA, 21 nt, Synthetic Construct
  source 1..21: mol_type = other RNA
aagaaagattgcaagaactgc

SEQ ID NO: 9802 - RNA, 21 nt, Synthetic Construct
  source 1..21: mol_type = other RNA
aagaaagattgcaagaactgc

SEQ ID NO: 9803 - RNA, 23 nt, Synthetic Construct
  source 1..23: mol_type = other RNA
ggcggttatgcaagacagaggtg

SEQ ID NO: 9804 - RNA, 23 nt, Synthetic Construct
  source 1..23: mol_type = other RNA
ggcggttatgcaagacagaggtg

SEQ ID NO: 9805 - RNA, 21 nt, Synthetic Construct
  source 1..21: mol_type = other RNA
tcgtaccgtgagtaataatga

SEQ ID NO: 9806 - RNA, 18 nt, Synthetic Construct
  source 1..18: mol_type = other RNA
gctattgacgaccgtacc

SEQ ID NO: 9807 - RNA, 17 nt, Synthetic Construct
  source 1..17: mol_type = other RNA
gtcgacgtatagggtgt

SEQ ID NO: 9808 - RNA, 17 nt, Synthetic Construct
  source 1..17: mol_type = other RNA
aagttgaccgcctgggg

SEQ ID NO: 9809 - RNA, 17 nt, Synthetic Construct
  source 1..17: mol_type = other RNA
aagttgaccgcctgggg

SEQ ID NO: 9810 - RNA, 23 nt, Synthetic Construct
  source 1..23: mol_type = other RNA
aacggaatcccaaaagcagctgt

SEQ ID NO: 9811 - RNA, 15 nt, Synthetic Construct
  source 1..15: mol_type = other RNA
ggtcatcgtcaggct

SEQ ID NO: 9812 - RNA, 15 nt, Synthetic Construct
  source 1..15: mol_type = other RNA
ggtcatcgtcaggct

SEQ ID NO: 9813 - RNA, 21 nt, Synthetic Construct
  source 1..21: mol_type = other RNA
gtacagtactgtgataactga

SEQ ID NO: 9814 - RNA, 21 nt, Synthetic Construct
  source 1..21: mol_type = other RNA
gtacagtactgtgataactga

SEQ ID NO: 9815 - RNA, 22 nt, Synthetic Construct
  source 1..22: mol_type = other RNA
gtaaacggcgggagtaactatg

SEQ ID NO: 9816 - RNA, 21 nt, Synthetic Construct
  source 1..21: mol_type = other RNA
actcggcgtggcgtcggtcgt

SEQ ID NO: 9817 - RNA, 21 nt, Synthetic Construct
  source 1..21: mol_type = other RNA
actcggcgtggcgtcggtcgt

SEQ ID NO: 9818 - RNA, 22 nt, Synthetic Construct
  source 1..22: mol_type = other RNA
tgaggtagaaggttgtgtggtt

SEQ ID NO: 9819 - RNA, 22 nt, Synthetic Construct
  source 1..22: mol_type = other RNA
tgaggtagaaggttgtgtggtt

SEQ ID NO: 9820 - RNA, 17 nt, Synthetic Construct
  source 1..17: mol_type = other RNA
tcgctagtaatcgcgga

SEQ ID NO: 9821 - RNA, 16 nt, Synthetic Construct
  source 1..16: mol_type = other RNA
ggtgggggtcgttggt

SEQ ID NO: 9822 - RNA, 16 nt, Synthetic Construct
  source 1..16: mol_type = other RNA
ggtgggggtcgttggt

SEQ ID NO: 9823 - RNA, 15 nt, Synthetic Construct
  source 1..15: mol_type = other RNA
acccttgtcattagt

SEQ ID NO: 9824 - RNA, 15 nt, Synthetic Construct
  source 1..15: mol_type = other RNA
acccttgtcattagt

SEQ ID NO: 9825 - RNA, 23 nt, Synthetic Construct
  source 1..23: mol_type = other RNA
ttccccttggggttgtaggacca

SEQ ID NO: 9826 - RNA, 25 nt, Synthetic Construct
  source 1..25: mol_type = other RNA
ttgaggatatgagatcgagacaaca

SEQ ID NO: 9827 - RNA, 22 nt, Synthetic Construct
  source 1..22: mol_type = other RNA
gagagcctggacacaggtgctg

SEQ ID NO: 9828 - RNA, 22 nt, Synthetic Construct
  source 1..22: mol_type = other RNA
gagagcctggacacaggtgctg

SEQ ID NO: 9829 - RNA, 37 nt, Synthetic Construct; identical to SEQ ID NO: 5125
  source 1..37: mol_type = other RNA

SEQ ID NO: 9830 - RNA, 37 nt, Synthetic Construct; identical to SEQ ID NO: 5125
  source 1..37: mol_type = other RNA

SEQ ID NO: 9831 - RNA, 22 nt, Synthetic Construct
  source 1..22: mol_type = other RNA
caaagtgctgttcgtgcaggta

SEQ ID NO: 9832 - RNA, 22 nt, Synthetic Construct
  source 1..22: mol_type = other RNA
caaagtgctgttcgtgcaggta

SEQ ID NO: 9833 - RNA, 22 nt, Synthetic Construct
  source 1..22: mol_type = other RNA
gaagaggacttggaactcgatc

SEQ ID NO: 9834 - RNA, 22 nt, Synthetic Construct
  source 1..22: mol_type = other RNA
gaagaggacttggaactcgatc

SEQ ID NO: 9835 - RNA, 23 nt, Synthetic Construct
  source 1..23: mol_type = other RNA
tgaggtagtaggttgtgtggtct

SEQ ID NO: 9836 - RNA, 21 nt, Synthetic Construct
  source 1..21: mol_type = other RNA
tgaggtagtagtctgtgctgt

SEQ ID NO: 9837 - RNA, 21 nt, Synthetic Construct
  source 1..21: mol_type = other RNA
tgaggtagtagtctgtgctgt

SEQ ID NO: 9838 - RNA, 22 nt, Synthetic Construct
  source 1..22: mol_type = other RNA
tgaggtagtagcttgtgctgtt

SEQ ID NO: 9839 - RNA, 24 nt, Synthetic Construct
  source 1..24: mol_type = other RNA
agctcggtctgaggcccctcagtt

SEQ ID NO: 9840 - RNA, 24 nt, Synthetic Construct
  source 1..24: mol_type = other RNA
agctcggtctgaggcccctcagtt

SEQ ID NO: 9841 - RNA, 21 nt, Synthetic Construct
  source 1..21: mol_type = other RNA
tcctgtactgagctaccccga

SEQ ID NO: 9842 - RNA, 22 nt, Synthetic Construct
  source 1..22: mol_type = other RNA
tgaggtagtagttcgtgctgtt

SEQ ID NO: 9843 - RNA, 22 nt, Synthetic Construct
  source 1..22: mol_type = other RNA
tgaggtagtagttcgtgctgtt

SEQ ID NO: 9844 - RNA, 22 nt, Synthetic Construct
  source 1..22: mol_type = other RNA
cgaggtagtaggttgtatagtt

SEQ ID NO: 9845 - RNA, 22 nt, Synthetic Construct
  source 1..22: mol_type = other RNA
tcggatccgtctgagcttggct

SEQ ID NO: 9846 - RNA, 22 nt, Synthetic Construct
  source 1..22: mol_type = other RNA
tcggatccgtctgagcttggct

SEQ ID NO: 9847 - RNA, 15 nt, Synthetic Construct
  source 1..15: mol_type = other RNA
gcaagtcgaacggta

SEQ ID NO: 9848 - RNA, 22 nt, Synthetic Construct
  source 1..22: mol_type = other RNA
tgaggtagtaggttgtttagtt

SEQ ID NO: 9849 - RNA, 28 nt, Synthetic Construct
  source 1..28: mol_type = other RNA
ccgtgtgaaagtaggtcatcgtcaggct

SEQ ID NO: 9850 - RNA, 31 nt, Synthetic Construct; identical to SEQ ID NO: 2333
  source 1..31: mol_type = other RNA

SEQ ID NO: 9851 - RNA, 15 nt, Synthetic Construct
  source 1..15: mol_type = other RNA
atccctccgactccg

SEQ ID NO: 9852 - RNA, 15 nt, Synthetic Construct
  source 1..15: mol_type = other RNA
atccctccgactccg

SEQ ID NO: 9853 - RNA, 24 nt, Synthetic Construct
  source 1..24: mol_type = other RNA
tcttggagtaggtcattgggtggt

SEQ ID NO: 9854 - RNA, 22 nt, Synthetic Construct
  source 1..22: mol_type = other RNA
actggacttggagtcagaaggc

SEQ ID NO: 9855 - RNA, 27 nt, Synthetic Construct
  source 1..27: mol_type = other RNA
ccccccactgctgaatttgactggctt

SEQ ID NO: 9856 - RNA, 27 nt, Synthetic Construct
  source 1..27: mol_type = other RNA
ccccccactgctgaatttgactggctt

SEQ ID NO: 9857 - RNA, 23 nt, Synthetic Construct
  source 1..23: mol_type = other RNA
aggtaatacgacgtacttagtgt

SEQ ID NO: 9858 - RNA, 23 nt, Synthetic Construct
  source 1..23: mol_type = other RNA
aggtaatacgacgtacttagtgt

SEQ ID NO: 9859 - RNA, 18 nt, Synthetic Construct
  source 1..18: mol_type = other RNA
agcaggacggtggccatg

SEQ ID NO: 9860 - RNA, 18 nt, Synthetic Construct
  source 1..18: mol_type = other RNA
agcaggacggtggccatg

SEQ ID NO: 9861 - RNA, 20 nt, Synthetic Construct
  source 1..20: mol_type = other RNA
aatgacacgatcactcccgt

SEQ ID NO: 9862 - RNA, 20 nt, Synthetic Construct
  source 1..20: mol_type = other RNA
aatgacacgatcactcccgt

SEQ ID NO: 9863 - RNA, 22 nt, Synthetic Construct
  source 1..22: mol_type = other RNA
tgaggtagtagattgtgtagtt

SEQ ID NO: 9864 - RNA, 22 nt, Synthetic Construct
  source 1..22: mol_type = other RNA
tcctgcactgagctgccccgag

SEQ ID NO: 9865 - RNA, 23 nt, Synthetic Construct
  source 1..23: mol_type = other RNA
taaggggcagagagcgagacttt

SEQ ID NO: 9866 - RNA, 23 nt, Synthetic Construct
  source 1..23: mol_type = other RNA
taaggggcagagagcgagacttt

SEQ ID NO: 9867 - RNA, 23 nt, Synthetic Construct
  source 1..23: mol_type = other RNA
tggtaatacgacgtacctagtgt

SEQ ID NO: 9868 - RNA, 26 nt, Synthetic Construct
  source 1..26: mol_type = other RNA
aatgacacgatcactcccgttgagtt

SEQ ID NO: 9869 - RNA, 26 nt, Synthetic Construct
  source 1..26: mol_type = other RNA
aatgacacgatcactcccgttgagtt

SEQ ID NO: 9870 - RNA, 22 nt, Synthetic Construct
  source 1..22: mol_type = other RNA
cactgcacttgtctcggtctga

SEQ ID NO: 9871 - RNA, 35 nt, Synthetic Construct
  source 1..35: mol_type = other RNA
gcccggatagctcagtcggtagagcatcagacttt

SEQ ID NO: 9872 - RNA, 35 nt, Synthetic Construct; identical to SEQ ID NO: 9871
  source 1..35: mol_type = other RNA

SEQ ID NO: 9873 - RNA, 17 nt, Synthetic Construct
  source 1..17: mol_type = other RNA
gcgtagatatgcggagg

SEQ ID NO: 9874 - RNA, 23 nt, Synthetic Construct
  source 1..23: mol_type = other RNA
tgaggtagtaggctgtgtggttt

SEQ ID NO: 9875 - RNA, 21 nt, Synthetic Construct
  source 1..21: mol_type = other RNA
tgaggtagtaggatgtgtggt

SEQ ID NO: 9876 - RNA, 21 nt, Synthetic Construct
  source 1..21: mol_type = other RNA
tgaggtagtaggatgtgtggt

SEQ ID NO: 9877 - RNA, 21 nt, Synthetic Construct
  source 1..21: mol_type = other RNA
gactatagaactttccccctc

SEQ ID NO: 9878 - RNA, 21 nt, Synthetic Construct
  source 1..21: mol_type = other RNA
gactatagaactttccccctc

SEQ ID NO: 9879 - RNA, 22 nt, Synthetic Construct
  source 1..22: mol_type = other RNA
cggaatcgctagtaatcgcgga

SEQ ID NO: 9880 - RNA, 16 nt, Synthetic Construct
  source 1..16: mol_type = other RNA
tgcaagtcgaacggta

SEQ ID NO: 9881 - RNA, 23 nt, Synthetic Construct
  source 1..23: mol_type = other RNA
taactccttaagcgaatctcggc

SEQ ID NO: 9882 - RNA, 20 nt, Synthetic Construct
  source 1..20: mol_type = other RNA
agcagcattgtacagggcta

SEQ ID NO: 9883 - RNA, 18 nt, Synthetic Construct
  source 1..18: mol_type = other RNA
catgcaagtcgaacggta

SEQ ID NO: 9884 - RNA, 19 nt, Synthetic Construct
  source 1..19: mol_type = other RNA
tggccgtcgtcagctcgtg

SEQ ID NO: 9885 - RNA, 19 nt, Synthetic Construct
  source 1..19: mol_type = other RNA
tggccgtcgtcagctcgtg

SEQ ID NO: 9886 - RNA, 32 nt, Synthetic Construct; identical to SEQ ID NO: 2467
  source 1..32: mol_type = other RNA

SEQ ID NO: 9887 - RNA, 32 nt, Synthetic Construct; identical to SEQ ID NO: 2467
  source 1..32: mol_type = other RNA

SEQ ID NO: 9888 - RNA, 22 nt, Synthetic Construct
  source 1..22: mol_type = other RNA
tcccgtactgagctgccccgag

SEQ ID NO: 9889 - RNA, 20 nt, Synthetic Construct
  source 1..20: mol_type = other RNA
ggtcccaagggtatggctgt

SEQ ID NO: 9890 - RNA, 20 nt, Synthetic Construct
  source 1..20: mol_type = other RNA
ggtcccaagggtatggctgt

SEQ ID NO: 9891 - RNA, 24 nt, Synthetic Construct
  source 1..24: mol_type = other RNA
gtcagtttgtcaaataccccaatt

SEQ ID NO: 9892 - RNA, 24 nt, Synthetic Construct
  source 1..24: mol_type = other RNA
gtcagtttgtcaaataccccaatt

SEQ ID NO: 9893 - RNA, 22 nt, Synthetic Construct
  source 1..22: mol_type = other RNA
tcctgtactgtgctgccccgag

SEQ ID NO: 9894 - RNA, 22 nt, Synthetic Construct
  source 1..22: mol_type = other RNA
tcctgtactgtgctgccccgag

SEQ ID NO: 9895 - RNA, 22 nt, Synthetic Construct
  source 1..22: mol_type = other RNA
tgaggtagtagtttgtgcagtt

SEQ ID NO: 9896 - RNA, 22 nt, Synthetic Construct
  source 1..22: mol_type = other RNA
tgaggtagtagtttgtgcagtt

SEQ ID NO: 9897 - RNA, 22 nt, Synthetic Construct
  source 1..22: mol_type = other RNA
agagttctacagtccgacgatc

SEQ ID NO: 9898 - RNA, 22 nt, Synthetic Construct
  source 1..22: mol_type = other RNA
agagttctacagtccgacgatc

SEQ ID NO: 9899 - RNA, 34 nt, Synthetic Construct; identical to SEQ ID NO: 2298
  source 1..34: mol_type = other RNA

SEQ ID NO: 9900 - RNA, 34 nt, Synthetic Construct; identical to SEQ ID NO: 2298
  source 1..34: mol_type = other RNA

SEQ ID NO: 9901 - RNA, 35 nt, Synthetic Construct; identical to SEQ ID NO: 1501
  source 1..35: mol_type = other RNA

SEQ ID NO: 9902 - RNA, 23 nt, Synthetic Construct
  source 1..23: mol_type = other RNA
tgtcagtttgtcaaataccccaa

SEQ ID NO: 9903 - RNA, 23 nt, Synthetic Construct
  source 1..23: mol_type = other RNA
tgtcagtttgtcaaataccccaa

SEQ ID NO: 9904 - RNA, 20 nt, Synthetic Construct
  source 1..20: mol_type = other RNA
tgaggtagtaggttgtgtgg

SEQ ID NO: 9905 - RNA, 20 nt, Synthetic Construct
  source 1..20: mol_type = other RNA
tgaggtagtaggttgtgtgg

SEQ ID NO: 9906 - RNA, 26 nt, Synthetic Construct
  source 1..26: mol_type = other RNA
tgtcggctcatctcatcctggggctg

SEQ ID NO: 9907 - RNA, 17 nt, Synthetic Construct
  source 1..17: mol_type = other RNA
ctaatgagactgccggt

SEQ ID NO: 9908 - RNA, 17 nt, Synthetic Construct
  source 1..17: mol_type = other RNA
ctaatgagactgccggt

SEQ ID NO: 9909 - RNA, 22 nt, Synthetic Construct
  source 1..22: mol_type = other RNA
cccataaagtagaaagcactac

SEQ ID NO: 9910 - RNA, 22 nt, Synthetic Construct
  source 1..22: mol_type = other RNA
cccataaagtagaaagcactac

SEQ ID NO: 9911 - RNA, 18 nt, Synthetic Construct
  source 1..18: mol_type = other RNA
ggtagcgtggccgagcgg

SEQ ID NO: 9912 - RNA, 18 nt, Synthetic Construct
  source 1..18: mol_type = other RNA
ggtagcgtggccgagcgg

SEQ ID NO: 9913 - RNA, 22 nt, Synthetic Construct
  source 1..22: mol_type = other RNA
tgtggtagtagtttgtgctgtt

SEQ ID NO: 9914 - RNA, 22 nt, Synthetic Construct
  source 1..22: mol_type = other RNA
tgtggtagtagtttgtgctgtt

SEQ ID NO: 9915 - RNA, 23 nt, Synthetic Construct
  source 1..23: mol_type = other RNA
tgaggtagtaggttgtgtggctt

SEQ ID NO: 9916 - RNA, 23 nt, Synthetic Construct
  source 1..23: mol_type = other RNA
tgaggtagtaggttgtgtggctt

SEQ ID NO: 9917 - RNA, 28 nt, Synthetic Construct
  source 1..28: mol_type = other RNA
gctttgatccggagatttccgaatgggg

SEQ ID NO: 9918 - RNA, 28 nt, Synthetic Construct
  source 1..28: mol_type = other RNA
gctttgatccggagatttccgaatgggg

SEQ ID NO: 9919 - RNA, 16 nt, Synthetic Construct
  source 1..16: mol_type = other RNA
gtctacggccatgcca

SEQ ID NO: 9920 - RNA, 16 nt, Synthetic Construct
  source 1..16: mol_type = other RNA
gtctacggccatgcca

SEQ ID NO: 9921 - RNA, 32 nt, Synthetic Construct; identical to SEQ ID NO: 1128
  source 1..32: mol_type = other RNA

SEQ ID NO: 9922 - RNA, 32 nt, Synthetic Construct; identical to SEQ ID NO: 1128
  source 1..32: mol_type = other RNA

SEQ ID NO: 9923 - RNA, 25 nt, Synthetic Construct
  source 1..25: mol_type = other RNA
ttgaggatatgaggtcgagacgaca

SEQ ID NO: 9924 - RNA, 21 nt, Synthetic Construct
  source 1..21: mol_type = other RNA
taaggtagtaggttgtatagt

SEQ ID NO: 9925 - RNA, 35 nt, Synthetic Construct; identical to SEQ ID NO: 757
  source 1..35: mol_type = other RNA

SEQ ID NO: 9926 - RNA, 18 nt, Synthetic Construct
  source 1..18: mol_type = other RNA
acagtcaggatgttggct

SEQ ID NO: 9927 - RNA, 26 nt, Synthetic Construct
  source 1..26: mol_type = other RNA
aatgacacgatcactcccgttgagtt

SEQ ID NO: 9928 - RNA, 26 nt, Synthetic Construct
  source 1..26: mol_type = other RNA
aatgacacgatcactcccgttgagtt

SEQ ID NO: 9929 - RNA, 38 nt, Synthetic Construct; identical to SEQ ID NO: 2492
  source 1..38: mol_type = other RNA

SEQ ID NO: 9930 - RNA, 38 nt, Synthetic Construct; identical to SEQ ID NO: 2492
  source 1..38: mol_type = other RNA

SEQ ID NO: 9931 - RNA, 26 nt, Synthetic Construct
  source 1..26: mol_type = other RNA
gcgggcgtagctcaggggtagagcgc

SEQ ID NO: 9932 - RNA, 26 nt, Synthetic Construct
  source 1..26: mol_type = other RNA
gcgggcgtagctcaggggtagagcgc

SEQ ID NO: 9933 - RNA, 28 nt, Synthetic Construct
  source 1..28: mol_type = other RNA
gctttacattggactttgaacagatctg

SEQ ID NO: 9934 - RNA, 28 nt, Synthetic Construct
  source 1..28: mol_type = other RNA
gctttacattggactttgaacagatctg

SEQ ID NO: 9935 - RNA, 30 nt, Synthetic Construct; identical to SEQ ID NO: 2353
  source 1..30: mol_type = other RNA

SEQ ID NO: 9936 - RNA, 24 nt, Synthetic Construct
  source 1..24: mol_type = other RNA
tgtaaacatccccgactggaagcc

SEQ ID NO: 9937 - RNA, 24 nt, Synthetic Construct
  source 1..24: mol_type = other RNA
tgtgaacatccccgactggaagct

SEQ ID NO: 9938 - RNA, 20 nt, Synthetic Construct
  source 1..20: mol_type = other RNA
gccatcatttaaagaaagcg

SEQ ID NO: 9939 - RNA, 20 nt, Synthetic Construct
  source 1..20: mol_type = other RNA
gccatcatttaaagaaagcg

SEQ ID NO: 9940 - RNA, 35 nt, Synthetic Construct; identical to SEQ ID NO: 2399
  source 1..35: mol_type = other RNA

SEQ ID NO: 9941 - RNA, 35 nt, Synthetic Construct; identical to SEQ ID NO: 2399
  source 1..35: mol_type = other RNA

SEQ ID NO: 9942 - RNA, 22 nt, Synthetic Construct
  source 1..22: mol_type = other RNA
aagcagcacgtaaatattggag

SEQ ID NO: 9943 - RNA, 22 nt, Synthetic Construct
  source 1..22: mol_type = other RNA
aagcagcacgtaaatattggag

SEQ ID NO: 9944 - RNA, 23 nt, Synthetic Construct
  source 1..23: mol_type = other RNA
tggtaatacgacgtactttgtgt

SEQ ID NO: 9945 - RNA, 23 nt, Synthetic Construct
  source 1..23: mol_type = other RNA
tggtaatacgacgtactttgtgt

SEQ ID NO: 9946 - RNA, 22 nt, Synthetic Construct
  source 1..22: mol_type = other RNA
tgaggtagtagactgtatagtt

SEQ ID NO: 9947 - RNA, 22 nt, Synthetic Construct
  source 1..22: mol_type = other RNA
tgagaactgaattccatgggtc

SEQ ID NO: 9948 - RNA, 23 nt, Synthetic Construct
  source 1..23: mol_type = other RNA
gactcttagcggtggatcactcg

SEQ ID NO: 9949 - RNA, 23 nt, Synthetic Construct
  source 1..23: mol_type = other RNA
gactcttagcggtggatcactcg

SEQ ID NO: 9950 - RNA, 22 nt, Synthetic Construct
  source 1..22: mol_type = other RNA
tgaggtagtagtttgtgctgat

SEQ ID NO: 9951 - RNA, 22 nt, Synthetic Construct
  source 1..22: mol_type = other RNA
tgaggtagtagtttgtgctgat

SEQ ID NO: 9952 - RNA, 27 nt, Synthetic Construct
  source 1..27: mol_type = other RNA
gttggttcaagcgtgtagtcgtgctct

SEQ ID NO: 9953 - RNA, 27 nt, Synthetic Construct
  source 1..27: mol_type = other RNA
gttggttcaagcgtgtagtcgtgctct

SEQ ID NO: 9954 - RNA, 16 nt, Synthetic Construct
  source 1..16: mol_type = other RNA
ctactctcagcaacgg

SEQ ID NO: 9955 - RNA, 16 nt, Synthetic Construct
  source 1..16: mol_type = other RNA
ctactctcagcaacgg

SEQ ID NO: 9956 - RNA, 16 nt, Synthetic Construct
  source 1..16: mol_type = other RNA
gtctacggccataccg

SEQ ID NO: 9957 - RNA, 37 nt, Synthetic Construct; identical to SEQ ID NO: 2365
  source 1..37: mol_type = other RNA

SEQ ID NO: 9958 - RNA, 24 nt, Synthetic Construct
  source 1..24: mol_type = other RNA
tgtaaacatccccgactgggagct

SEQ ID NO: 9959 - RNA, 24 nt, Synthetic Construct
  source 1..24: mol_type = other RNA
tgtaaacatccccgactgggagct

SEQ ID NO: 9960 - RNA, 23 nt, Synthetic Construct
  source 1..23: mol_type = other RNA
agcaacattgtctgctgggtttc

SEQ ID NO: 9961 - RNA, 23 nt, Synthetic Construct
  source 1..23: mol_type = other RNA
agcaacattgtctgctgggtttc

SEQ ID NO: 9962 - RNA, 22 nt, Synthetic Construct
  source 1..22: mol_type = other RNA
acagtagcctgcacattggtta

SEQ ID NO: 9963 - RNA, 23 nt, Synthetic Construct
  source 1..23: mol_type = other RNA
tcctgaactgagctgccccgagt

SEQ ID NO: 9964 - RNA, 23 nt, Synthetic Construct
  source 1..23: mol_type = other RNA
tcctgaactgagctgccccgagt

SEQ ID NO: 9965 - RNA, 20 nt, Synthetic Construct
  source 1..20: mol_type = other RNA
tgaggtagtaggctgtgtgg

SEQ ID NO: 9966 - RNA, 20 nt, Synthetic Construct
  source 1..20: mol_type = other RNA
tgaggtagtaggctgtgtgg

SEQ ID NO: 9967 - RNA, 24 nt, Synthetic Construct
  source 1..24: mol_type = other RNA
cgtaaacatccccgactggaagct

SEQ ID NO: 9968 - RNA, 26 nt, Synthetic Construct
  source 1..26: mol_type = other RNA
aatgacacgatcactcccgttgagtt

SEQ ID NO: 9969 - RNA, 25 nt, Synthetic Construct
  source 1..25: mol_type = other RNA
ttgaggatacgagatcgagacgaca

SEQ ID NO: 9970 - RNA, 21 nt, Synthetic Construct
  source 1..21: mol_type = other RNA
tagcagcacgtaaatattggc

SEQ ID NO: 9971 - RNA, 21 nt, Synthetic Construct
  source 1..21: mol_type = other RNA
tagcagcacgtaaatattggc

SEQ ID NO: 9972 - RNA, 22 nt, Synthetic Construct
  source 1..22: mol_type = other RNA
tgaggtagtagtctgtgctgtt

SEQ ID NO: 9973 - RNA, 23 nt, Synthetic Construct
  source 1..23: mol_type = other RNA
taaagtgcttatagtgcaggtag

SEQ ID NO: 9974 - RNA, 23 nt, Synthetic Construct
  source 1..23: mol_type = other RNA
taaagtgcttatagtgcaggtag

SEQ ID NO: 9975 - RNA, 20 nt, Synthetic Construct
  source 1..20: mol_type = other RNA
tgaggtagaaggttgtgtgg

SEQ ID NO: 9976 - RNA, 19 nt, Synthetic Construct
  source 1..19: mol_type = other RNA
accaaggggtcgtgggttc

SEQ ID NO: 9977 - RNA, 19 nt, Synthetic Construct
  source 1..19: mol_type = other RNA
accaaggggtcgtgggttc

SEQ ID NO: 9978 - RNA, 32 nt, Synthetic Construct; identical to SEQ ID NO: 4734
  source 1..32: mol_type = other RNA

SEQ ID NO: 9979 - RNA, 32 nt, Synthetic Construct; identical to SEQ ID NO: 4734
  source 1..32: mol_type = other RNA

SEQ ID NO: 9980 - RNA, 15 nt, Synthetic Construct
  source 1..15: mol_type = other RNA
catgccgcgtgcggg

SEQ ID NO: 9981 - RNA, 15 nt, Synthetic Construct
  source 1..15: mol_type = other RNA
catgccgcgtgcggg

SEQ ID NO: 9982 - RNA, 30 nt, Synthetic Construct; identical to SEQ ID NO: 1958
  source 1..30: mol_type = other RNA

SEQ ID NO: 9983 - RNA, 30 nt, Synthetic Construct; identical to SEQ ID NO: 1958
  source 1..30: mol_type = other RNA

SEQ ID NO: 9984 - RNA, 22 nt, Synthetic Construct
  source 1..22: mol_type = other RNA
tcgtaccatgagtaataatgcg

SEQ ID NO: 9985 - RNA, 22 nt, Synthetic Construct
  source 1..22: mol_type = other RNA
tcgtaccatgagtaataatgcg

SEQ ID NO: 9986 - RNA, 23 nt, Synthetic Construct
  source 1..23: mol_type = other RNA
ttccccttggggttgtaggacca

SEQ ID NO: 9987 - RNA, 23 nt, Synthetic Construct
  source 1..23: mol_type = other RNA
ttccccttggggttgtaggacca

SEQ ID NO: 9988 - RNA, 22 nt, Synthetic Construct
  source 1..22: mol_type = other RNA
tcactgatcgagtcgtcctgcg

SEQ ID NO: 9989 - RNA, 22 nt, Synthetic Construct
  source 1..22: mol_type = other RNA
tcactgatcgagtcgtcctgcg

SEQ ID NO: 9990 - RNA, 22 nt, Synthetic Construct
  source 1..22: mol_type = other RNA
tcgtaccgtgagtaataacgcg

SEQ ID NO: 9991 - RNA, 24 nt, Synthetic Construct
  source 1..24: mol_type = other RNA
gaaagattaaggcaagaggttagc

SEQ ID NO: 9992 - RNA, 24 nt, Synthetic Construct
  source 1..24: mol_type = other RNA
gaaagattaaggcaagaggttagc

SEQ ID NO: 9993 - RNA, 20 nt, Synthetic Construct
  source 1..20: mol_type = other RNA
tgacctatgaattgacagcc

SEQ ID NO: 9994 - RNA, 20 nt, Synthetic Construct
  source 1..20: mol_type = other RNA
tgacctatgaattgacagcc

SEQ ID NO: 9995 - RNA, 34 nt, Synthetic Construct; identical to SEQ ID NO: 2364
  source 1..34: mol_type = other RNA

SEQ ID NO: 9996 - RNA, 34 nt, Synthetic Construct; identical to SEQ ID NO: 2364
  source 1..34: mol_type = other RNA

SEQ ID NO: 9997 - RNA, 35 nt, Synthetic Construct; identical to SEQ ID NO: 2269
  source 1..35: mol_type = other RNA

SEQ ID NO: 9998 - RNA, 15 nt, Synthetic Construct
  source 1..15: mol_type = other RNA
tggccgtcgtcagct

SEQ ID NO: 9999 - RNA, 15 nt, Synthetic Construct
  source 1..15: mol_type = other RNA
tggccgtcgtcagct

SEQ ID NO: 10000 - RNA, 25 nt, Synthetic Construct
  source 1..25: mol_type = other RNA
atgaggatatgagatcgagacgaca

SEQ ID NO: 10001 - RNA, 25 nt, Synthetic Construct
  source 1..25: mol_type = other RNA
atgaggatatgagatcgagacgaca

SEQ ID NO: 10002 - RNA, 21 nt, Synthetic Construct
  source 1..21: mol_type = other RNA
tcctgtctgaatatgggggga

SEQ ID NO: 10003 - RNA, 21 nt, Synthetic Construct
  source 1..21: mol_type = other RNA
tcctgtctgaatatgggggga

SEQ ID NO: 10004 - RNA, 22 nt, Synthetic Construct
  source 1..22: mol_type = other RNA
aattgcacggtatccatctgta

SEQ ID NO: 10005 - RNA, 22 nt, Synthetic Construct
  source 1..22: mol_type = other RNA
aattgcacggtatccatctgta

SEQ ID NO: 10006 - RNA, 24 nt, Synthetic Construct
  source 1..24: mol_type = other RNA
ctagactgaagctccttgaggttt

SEQ ID NO: 10007 - RNA, 24 nt, Synthetic Construct
  source 1..24: mol_type = other RNA
ctagactgaagctccttgaggttt

SEQ ID NO: 10008 - RNA, 23 nt, Synthetic Construct
  source 1..23: mol_type = other RNA
accattcgtagacgacctgcttc

SEQ ID NO: 10009 - RNA, 24 nt, Synthetic Construct
  source 1..24: mol_type = other RNA
cggagaaggttagctcagccaact

SEQ ID NO: 10010 - RNA, 21 nt, Synthetic Construct
  source 1..21: mol_type = other RNA
tgaagtagtaggttgtatagt

SEQ ID NO: 10011 - RNA, 21 nt, Synthetic Construct
  source 1..21: mol_type = other RNA
tgaagtagtaggttgtatagt

SEQ ID NO: 10012 - RNA, 21 nt, Synthetic Construct
  source 1..21: mol_type = other RNA
agcagcattgtacagggctat

SEQ ID NO: 10013 - RNA, 21 nt, Synthetic Construct
  source 1..21: mol_type = other RNA
agcagcattgtacagggctat

SEQ ID NO: 10014 - RNA, 21 nt, Synthetic Construct
  source 1..21: mol_type = other RNA
ggaggggcagagagcgagact

SEQ ID NO: 10015 - RNA, 21 nt, Synthetic Construct
  source 1..21: mol_type = other RNA
ggaggggcagagagcgagact

SEQ ID NO: 10016 - RNA, 22 nt, Synthetic Construct
  source 1..22: mol_type = other RNA
tatcggaacgtgcccagtcgtg

SEQ ID NO: 10017 - RNA, 22 nt, Synthetic Construct
  source 1..22: mol_type = other RNA
tcgcaccgtgagtaataatgcg

SEQ ID NO: 10018 - RNA, 33 nt, Synthetic Construct; identical to SEQ ID NO: 2638
  source 1..33: mol_type = other RNA

SEQ ID NO: 10019 - RNA, 22 nt, Synthetic Construct
  source 1..22: mol_type = other RNA
ggaggagttcgaaggtacgcta

SEQ ID NO: 10020 - RNA, 22 nt, Synthetic Construct
  source 1..22: mol_type = other RNA
ggaggagttcgaaggtacgcta

SEQ ID NO: 10021 - RNA, 22 nt, Synthetic Construct
  source 1..22: mol_type = other RNA
tgtgcaaatctatgcaaaactg

SEQ ID NO: 10022 - RNA, 22 nt, Synthetic Construct
  source 1..22: mol_type = other RNA
tgtgcaaatctatgcaaaactg

SEQ ID NO: 10023 - RNA, 19 nt, Synthetic Construct
  source 1..19: mol_type = other RNA
gggataactggcttgtggc

SEQ ID NO: 10024 - RNA, 19 nt, Synthetic Construct
  source 1..19: mol_type = other RNA
gggataactggcttgtggc

SEQ ID NO: 10025 - RNA, 30 nt, Synthetic Construct; identical to SEQ ID NO: 1122
  source 1..30: mol_type = other RNA

SEQ ID NO: 10026 - RNA, 23 nt, Synthetic Construct
  source 1..23: mol_type = other RNA
tgataatacgacgtacttagtgt

SEQ ID NO: 10027 - RNA, 20 nt, Synthetic Construct
  source 1..20: mol_type = other RNA
caggacagtgaaacgagtca

SEQ ID NO: 10028 - RNA, 20 nt, Synthetic Construct
  source 1..20: mol_type = other RNA
caggacagtgaaacgagtca

SEQ ID NO: 10029 - RNA, 23 nt, Synthetic Construct
  source 1..23: mol_type = other RNA
agctacattgtctgctgggttcc

SEQ ID NO: 10030 - RNA, 22 nt, Synthetic Construct
  source 1..22: mol_type = other RNA
cattgcacttgtctcggtccga

SEQ ID NO: 10031 - RNA, 23 nt, Synthetic Construct
  source 1..23: mol_type = other RNA
tggtaatacgacgtactttgtgt

SEQ ID NO: 10032 - RNA, 23 nt, Synthetic Construct
  source 1..23: mol_type = other RNA
tggtaatacgacgtactttgtgt

SEQ ID NO: 10033 - RNA, 23 nt, Synthetic Construct
  source 1..23: mol_type = other RNA
gtgcagatcttggtggtagtagc

SEQ ID NO: 10034 - RNA, 23 nt, Synthetic Construct
  source 1..23: mol_type = other RNA
gtgcagatcttggtggtagtagc

SEQ ID NO: 10035 - RNA, 21 nt, Synthetic Construct
  source 1..21: mol_type = other RNA
tgaggtagtagtttgtacagt

SEQ ID NO: 10036 - RNA, 21 nt, Synthetic Construct
  source 1..21: mol_type = other RNA
tgaggtagtagtttgtacagt

SEQ ID NO: 10037 - RNA, 23 nt, Synthetic Construct
  source 1..23: mol_type = other RNA
tcctgtactgagctgccccgagc

SEQ ID NO: 10038 - RNA, 23 nt, Synthetic Construct
  source 1..23: mol_type = other RNA
tcctgtactgagctgccccgagc

SEQ ID NO: 10039 - RNA, 18 nt, Synthetic Construct
  source 1..18: mol_type = other RNA
cgcgacctcagatcagac

SEQ ID NO: 10040 - RNA, 18 nt, Synthetic Construct
  source 1..18: mol_type = other RNA
cgcgacctcagatcagac

SEQ ID NO: 10041 - RNA, 21 nt, Synthetic Construct
  source 1..21: mol_type = other RNA
tggagtgtgacaatggcgttt

SEQ ID NO: 10042 - RNA, 21 nt, Synthetic Construct
  source 1..21: mol_type = other RNA
tggagtgtgacaatggcgttt

SEQ ID NO: 10043 - RNA, 27 nt, Synthetic Construct
  source 1..27: mol_type = other RNA
ggggagctaatcccagaaacccggtcg

SEQ ID NO: 10044 - RNA, 22 nt, Synthetic Construct
  source 1..22: mol_type = other RNA
tgaggtagcaggttgtatagtt

SEQ ID NO: 10045 - RNA, 22 nt, Synthetic Construct
  source 1..22: mol_type = other RNA
tactgcacttgtcccggcctgt

SEQ ID NO: 10046 - RNA, 22 nt, Synthetic Construct
  source 1..22: mol_type = other RNA
tactgcacttgtcccggcctgt

SEQ ID NO: 10047 - RNA, 23 nt, Synthetic Construct
  source 1..23: mol_type = other RNA
cagagtgctgttcgtgcaggtag

SEQ ID NO: 10048 - RNA, 18 nt, Synthetic Construct
  source 1..18: mol_type = other RNA
gtctgcctcagcgtcggt

SEQ ID NO: 10049 - RNA, 18 nt, Synthetic Construct
  source 1..18: mol_type = other RNA
gtctgcctcagcgtcggt

SEQ ID NO: 10050 - RNA, 22 nt, Synthetic Construct
  source 1..22: mol_type = other RNA
cgaggtagtagtttgtgctgtt

SEQ ID NO: 10051 - RNA, 23 nt, Synthetic Construct
  source 1..23: mol_type = other RNA
cgaggtagtaggttgtgtggttt

SEQ ID NO: 10052 - RNA, 22 nt, Synthetic Construct
  source 1..22: mol_type = other RNA
tgaggtagtaggtcgtatagtt

SEQ ID NO: 10053 - RNA, 15 nt, Synthetic Construct
  source 1..15: mol_type = other RNA
accggaggaaggtgg

SEQ ID NO: 10054 - RNA, 15 nt, Synthetic Construct
  source 1..15: mol_type = other RNA
accggaggaaggtgg

SEQ ID NO: 10055 - RNA, 16 nt, Synthetic Construct
  source 1..16: mol_type = other RNA
agtcaggatgttggct

SEQ ID NO: 10056 - RNA, 16 nt, Synthetic Construct
  source 1..16: mol_type = other RNA
agtcaggatgttggct

SEQ ID NO: 10057 - RNA, 28 nt, Synthetic Construct
  source 1..28: mol_type = other RNA
gctttgatccggagatttccgaatgggg

SEQ ID NO: 10058 - RNA, 22 nt, Synthetic Construct
  source 1..22: mol_type = other RNA
tgaggaagtagtttgtgctgtt

SEQ ID NO: 10059 - RNA, 22 nt, Synthetic Construct
  source 1..22: mol_type = other RNA
tgaggaagtagtttgtgctgtt

SEQ ID NO: 10060 - RNA, 16 nt, Synthetic Construct
  source 1..16: mol_type = other RNA
gtccacggccatacca

SEQ ID NO: 10061 - RNA, 16 nt, Synthetic Construct
  source 1..16: mol_type = other RNA
gtccacggccatacca

SEQ ID NO: 10062 - RNA, 22 nt, Synthetic Construct
  source 1..22: mol_type = other RNA
tattgcacttgccccggcctgt

SEQ ID NO: 10063 - RNA, 22 nt, Synthetic Construct
  source 1..22: mol_type = other RNA
tattgcacttgccccggcctgt

SEQ ID NO: 10064 - RNA, 22 nt, Synthetic Construct
  source 1..22: mol_type = other RNA
tgaggtagcaggttgtgtggtt

SEQ ID NO: 10065 - RNA, 22 nt, Synthetic Construct
  source 1..22: mol_type = other RNA
tgaggtagcaggttgtgtggtt

SEQ ID NO: 10066 - RNA, 17 nt, Synthetic Construct
  source 1..17: mol_type = other RNA
gaagttgaccgcctggg

SEQ ID NO: 10067 - RNA, 17 nt, Synthetic Construct
  source 1..17: mol_type = other RNA
gaagttgaccgcctggg

SEQ ID NO: 10068 - RNA, 16 nt, Synthetic Construct
  source 1..16: mol_type = other RNA
gctattgacgaccgta

SEQ ID NO: 10069 - RNA, 22 nt, Synthetic Construct
  source 1..22: mol_type = other RNA
tattgcacctgtcccggcctgt

SEQ ID NO: 10070 - RNA, 22 nt, Synthetic Construct
  source 1..22: mol_type = other RNA
tattgcacctgtcccggcctgt

SEQ ID NO: 10071 - RNA, 36 nt, Synthetic Construct; identical to SEQ ID NO: 2344
  source 1..36: mol_type = other RNA

SEQ ID NO: 10072 - RNA, 22 nt, Synthetic Construct
  source 1..22: mol_type = other RNA
tgaggtagtagattatatagtt

SEQ ID NO: 10073 - RNA, 24 nt, Synthetic Construct
  source 1..24: mol_type = other RNA
gtctttgttcgattccgttgagta

SEQ ID NO: 10074 - RNA, 24 nt, Synthetic Construct
  source 1..24: mol_type = other RNA
gtctttgttcgattccgttgagta

SEQ ID NO: 10075 - RNA, 20 nt, Synthetic Construct
  source 1..20: mol_type = other RNA
tattgcacattactaagttg

SEQ ID NO: 10076 - RNA, 20 nt, Synthetic Construct
  source 1..20: mol_type = other RNA
tattgcacattactaagttg

SEQ ID NO: 10077 - RNA, 22 nt, Synthetic Construct
  source 1..22: mol_type = other RNA
tcctgtactgagccgccccgag

SEQ ID NO: 10078 - RNA, 22 nt, Synthetic Construct
  source 1..22: mol_type = other RNA
tagcaccatctgaaatcggtta

SEQ ID NO: 10079 - RNA, 34 nt, Synthetic Construct
  source 1..34: mol_type = other RNA
gccgtgatcgtatagtggttagtactctgcgttg

SEQ ID NO: 10080 - RNA, 34 nt, Synthetic Construct; identical to SEQ ID NO: 10079
  source 1..34: mol_type = other RNA

SEQ ID NO: 10081 - RNA, 21 nt, Synthetic Construct
  source 1..21: mol_type = other RNA
tagcagcacgtaaatattggc

SEQ ID NO: 10082 - RNA, 22 nt, Synthetic Construct
  source 1..22: mol_type = other RNA
tgaggtagtggattgtatagtt

SEQ ID NO: 10083 - RNA, 22 nt, Synthetic Construct
  source 1..22: mol_type = other RNA
tgaggtagaaggttgtgtggtt

SEQ ID NO: 10084 - RNA, 31 nt, Synthetic Construct; identical to SEQ ID NO: 2412
  source 1..31: mol_type = other RNA

SEQ ID NO: 10085 - RNA, 22 nt, Synthetic Construct
  source 1..22: mol_type = other RNA
gctcacggaaagagaatgaagc

SEQ ID NO: 10086 - RNA, 22 nt, Synthetic Construct
  source 1..22: mol_type = other RNA
gctcacggaaagagaatgaagc

SEQ ID NO: 10087 - RNA, 23 nt, Synthetic Construct
  source 1..23: mol_type = other RNA
tggtaatgcgacgtacttagtgt

SEQ ID NO: 10088 - RNA, 23 nt, Synthetic Construct
  source 1..23: mol_type = other RNA
tggtaatgcgacgtacttagtgt

SEQ ID NO: 10089 - RNA, 38 nt, Synthetic Construct; identical to SEQ ID NO: 7148
  source 1..38: mol_type = other RNA

SEQ ID NO: 10090 - RNA, 26 nt, Synthetic Construct
  source 1..26: mol_type = other RNA
gcgggcgtagctcaggggtagagcgc

SEQ ID NO: 10091 - RNA, 26 nt, Synthetic Construct
  source 1..26: mol_type = other RNA
gcgggcgtagctcaggggtagagcgc

SEQ ID NO: 10092 - RNA, 31 nt, Synthetic Construct; identical to SEQ ID NO: 5506
  source 1..31: mol_type = other RNA

SEQ ID NO: 10093 - RNA, 23 nt, Synthetic Construct
  source 1..23: mol_type = other RNA
agctcggtctgaggcccctcaga

SEQ ID NO: 10094 - RNA, 23 nt, Synthetic Construct
  source 1..23: mol_type = other RNA
agctcggtctgaggcccctcaga

SEQ ID NO: 10095 - RNA, 23 nt, Synthetic Construct
  source 1..23: mol_type = other RNA
gactatagaactttccccctcat

SEQ ID NO: 10096 - RNA, 23 nt, Synthetic Construct
  source 1..23: mol_type = other RNA
gactatagaactttccccctcat

SEQ ID NO: 10097 - RNA, 22 nt, Synthetic Construct
  source 1..22: mol_type = other RNA
tgaggtagcagtttgtgctgtt

SEQ ID NO: 10098 - RNA, 22 nt, Synthetic Construct
  source 1..22: mol_type = other RNA
tgaggtagcagtttgtgctgtt

SEQ ID NO: 10099 - RNA, 24 nt, Synthetic Construct
  source 1..24: mol_type = other RNA
tcggctcatctcatcctggggctg

SEQ ID NO: 10100 - RNA, 24 nt, Synthetic Construct
  source 1..24: mol_type = other RNA
tcggctcatctcatcctggggctg

SEQ ID NO: 10101 - RNA, 23 nt, Synthetic Construct
  source 1..23: mol_type = other RNA
cgagagtaggacgttgccaggtt

SEQ ID NO: 10102 - RNA, 23 nt, Synthetic Construct
  source 1..23: mol_type = other RNA
cgagagtaggacgttgccaggtt

SEQ ID NO: 10103 - RNA, 29 nt, Synthetic Construct
  source 1..29: mol_type = other RNA
cccccccactgctaaatttgactggcttt

SEQ ID NO: 10104 - RNA, 15 nt, Synthetic Construct
  source 1..15: mol_type = other RNA
gctatgggatttgtt

SEQ ID NO: 10105 - RNA, 15 nt, Synthetic Construct
  source 1..15: mol_type = other RNA
gctatgggatttgtt

SEQ ID NO: 10106 - RNA, 21 nt, Synthetic Construct
  source 1..21: mol_type = other RNA
tgaggggcagagagcgagacc

SEQ ID NO: 10107 - RNA, 21 nt, Synthetic Construct
  source 1..21: mol_type = other RNA
tgaggggcagagagcgagacc

SEQ ID NO: 10108 - RNA, 22 nt, Synthetic Construct
  source 1..22: mol_type = other RNA
tcgtactgtgagtaataatgcg

SEQ ID NO: 10109 - RNA, 22 nt, Synthetic Construct
  source 1..22: mol_type = other RNA
ngaggtagtagattgtatagtt

SEQ ID NO: 10110 - RNA, 16 nt, Synthetic Construct
  source 1..16: mol_type = other RNA
atctacggccatacca

SEQ ID NO: 10111 - RNA, 16 nt, Synthetic Construct
  source 1..16: mol_type = other RNA
atctacggccatacca

SEQ ID NO: 10112 - RNA, 23 nt, Synthetic Construct
  source 1..23: mol_type = other RNA
tgaggggcagagagagagacttt

SEQ ID NO: 10113 - RNA, 15 nt, Synthetic Construct
  source 1..15: mol_type = other RNA
gtcgtcctgcgcgga

SEQ ID NO: 10114 - RNA, 15 nt, Synthetic Construct
  source 1..15: mol_type = other RNA
gtcgtcctgcgcgga

SEQ ID NO: 10115 - RNA, 20 nt, Synthetic Construct
  source 1..20: mol_type = other RNA
tgaggtagtaggttgtgtgg

SEQ ID NO: 10116 - RNA, 21 nt, Synthetic Construct
  source 1..21: mol_type = other RNA
tgacctatgaattgacagcca

SEQ ID NO: 10117 - RNA, 21 nt, Synthetic Construct
  source 1..21: mol_type = other RNA
tgacctatgaattgacagcca

SEQ ID NO: 10118 - RNA, 21 nt, Synthetic Construct
  source 1..21: mol_type = other RNA
tcccagtaaacggcggccgta

SEQ ID NO: 10119 - RNA, 22 nt, Synthetic Construct
  source 1..22: mol_type = other RNA
tgaggtagtagtttgtgctgct

SEQ ID NO: 10120 - RNA, 22 nt, Synthetic Construct
  source 1..22: mol_type = other RNA
tgaggtagtagtttgtgctgct

SEQ ID NO: 10121 - RNA, 23 nt, Synthetic Construct
  source 1..23: mol_type = other RNA
tggtaattcgacgtacttagtgt

SEQ ID NO: 10122 - RNA, 23 nt, Synthetic Construct
  source 1..23: mol_type = other RNA
tggtaattcgacgtacttagtgt

SEQ ID NO: 10123 - RNA, 16 nt, Synthetic Construct
  source 1..16: mol_type = other RNA
cccctggacctgtact

SEQ ID NO: 10124 - RNA, 36 nt, Synthetic Construct; identical to SEQ ID NO: 2469
  source 1..36: mol_type = other RNA

SEQ ID NO: 10125 - RNA, 36 nt, Synthetic Construct; identical to SEQ ID NO: 2469
  source 1..36: mol_type = other RNA

SEQ ID NO: 10126 - RNA, 24 nt, Synthetic Construct
  source 1..24: mol_type = other RNA
tgtaaacatccccgaccggaagct

SEQ ID NO: 10127 - RNA, 24 nt, Synthetic Construct
  source 1..24: mol_type = other RNA
tgtaaacatccccgaccggaagct

SEQ ID NO: 10128 - RNA, 23 nt, Synthetic Construct
  source 1..23: mol_type = other RNA
caaagtgctgttcgtgcaggtaa

SEQ ID NO: 10129 - RNA, 21 nt, Synthetic Construct
  source 1..21: mol_type = other RNA
tggggtagtagtttgtgctgt

SEQ ID NO: 10130 - RNA, 19 nt, Synthetic Construct
  source 1..19: mol_type = other RNA
cctgtctgaatatgggggg

SEQ ID NO: 10131 - RNA, 23 nt, Synthetic Construct
  source 1..23: mol_type = other RNA
ttatggtttgcctgggactgaaa

SEQ ID NO: 10132 - RNA, 23 nt, Synthetic Construct
  source 1..23: mol_type = other RNA
ttatggtttgcctgggactgaaa

SEQ ID NO: 10133 - RNA, 20 nt, Synthetic Construct
  source 1..20: mol_type = other RNA
tattgcactcgtcccggcct

SEQ ID NO: 10134 - RNA, 20 nt, Synthetic Construct
  source 1..20: mol_type = other RNA
tattgcactcgtcccggcct

SEQ ID NO: 10135 - RNA, 36 nt, Synthetic Construct; identical to SEQ ID NO: 2366
  source 1..36: mol_type = other RNA

SEQ ID NO: 10136 - RNA, 21 nt, Synthetic Construct
  source 1..21: mol_type = other RNA
tggagtgtgacagtggtgttt

SEQ ID NO: 10137 - RNA, 21 nt, Synthetic Construct
  source 1..21: mol_type = other RNA
tggagtgtgacagtggtgttt

SEQ ID NO: 10138 - RNA, 31 nt, Synthetic Construct
  source 1..31: mol_type = other RNA
gtctacggccataccaccctgaacgcgcccg

SEQ ID NO: 10139 - RNA, 31 nt, Synthetic Construct; identical to SEQ ID NO: 10138
  source 1..31: mol_type = other RNA

SEQ ID NO: 10140 - RNA, 21 nt, Synthetic Construct
  source 1..21: mol_type = other RNA
tgaggtagcagattgtatagt

SEQ ID NO: 10141 - RNA, 27 nt, Synthetic Construct
  source 1..27: mol_type = other RNA
ccccccaccgctaaatttgactggctt

SEQ ID NO: 10142 - RNA, 19 nt, Synthetic Construct
  source 1..19: mol_type = other RNA
ccagtaaacggcggccgta

SEQ ID NO: 10143 - RNA, 19 nt, Synthetic Construct
  source 1..19: mol_type = other RNA
ccagtaaacggcggccgta

SEQ ID NO: 10144 - RNA, 22 nt, Synthetic Construct
  source 1..22: mol_type = other RNA
tgaggtagtagtttgtggtgtt

SEQ ID NO: 10145 - RNA, 22 nt, Synthetic Construct
  source 1..22: mol_type = other RNA
tgaggtagtagtttgtggtgtt

SEQ ID NO: 10146 - RNA, 28 nt, Synthetic Construct
  source 1..28: mol_type = other RNA
ccccccactgctaaatttgactggcctt

SEQ ID NO: 10147 - RNA, 22 nt, Synthetic Construct
  source 1..22: mol_type = other RNA
tggaatgtaaagaagtacgtat

SEQ ID NO: 10148 - RNA, 36 nt, Synthetic Construct; identical to SEQ ID NO: 2660
  source 1..36: mol_type = other RNA

SEQ ID NO: 10149 - RNA, 36 nt, Synthetic Construct; identical to SEQ ID NO: 2660
  source 1..36: mol_type = other RNA

SEQ ID NO: 10150 - RNA, 21 nt, Synthetic Construct
  source 1..21: mol_type = other RNA
gcccgtgttcggaagattttc

SEQ ID NO: 10151 - RNA, 21 nt, Synthetic Construct
  source 1..21: mol_type = other RNA
gcccgtgttcggaagattttc

SEQ ID NO: 10152 - RNA, 23 nt, Synthetic Construct
  source 1..23: mol_type = other RNA
tggaatgtaaagaagtatgtacc

SEQ ID NO: 10153 - RNA, 25 nt, Synthetic Construct
  source 1..25: mol_type = other RNA
tgcgagagtaggacgttgccaggtt

SEQ ID NO: 10154 - RNA, 25 nt, Synthetic Construct
  source 1..25: mol_type = other RNA
tgcgagagtaggacgttgccaggtt

SEQ ID NO: 10155 - RNA, 16 nt, Synthetic Construct
  source 1..16: mol_type = other RNA
atctacggccatacca

SEQ ID NO: 10156 - RNA, 16 nt, Synthetic Construct
  source 1..16: mol_type = other RNA
atctacggccatacca

SEQ ID NO: 10157 - RNA, 18 nt, Synthetic Construct
  source 1..18: mol_type = other RNA
ggctttgaagtaaggtcg

SEQ ID NO: 10158 - RNA, 19 nt, Synthetic Construct
  source 1..19: mol_type = other RNA
gggtgcaagcgttaatcgg

SEQ ID NO: 10159 - RNA, 19 nt, Synthetic Construct
  source 1..19: mol_type = other RNA
gggtgcaagcgttaatcgg

SEQ ID NO: 10160 - RNA, 21 nt, Synthetic Construct
  source 1..21: mol_type = other RNA
agcgtgcttgactgcgagact

SEQ ID NO: 10161 - RNA, 21 nt, Synthetic Construct
  source 1..21: mol_type = other RNA
agcgtgcttgactgcgagact

SEQ ID NO: 10162 - RNA, 22 nt, Synthetic Construct
  source 1..22: mol_type = other RNA
tgaggtagtaggttgtataatt

SEQ ID NO: 10163 - RNA, 18 nt, Synthetic Construct
  source 1..18: mol_type = other RNA
tcccctggacctgtactg

SEQ ID NO: 10164 - RNA, 18 nt, Synthetic Construct
  source 1..18: mol_type = other RNA
tcccctggacctgtactg

SEQ ID NO: 10165 - RNA, 23 nt, Synthetic Construct
  source 1..23: mol_type = other RNA
attctaatttctccacgtctttg

SEQ ID NO: 10166 - RNA, 23 nt, Synthetic Construct
  source 1..23: mol_type = other RNA
attctaatttctccacgtctttg

SEQ ID NO: 10167 - RNA, 33 nt, Synthetic Construct; identical to SEQ ID NO: 2209
  source 1..33: mol_type = other RNA

SEQ ID NO: 10168 - RNA, 33 nt, Synthetic Construct; identical to SEQ ID NO: 2209
  source 1..33: mol_type = other RNA

SEQ ID NO: 10169 - RNA, 21 nt, Synthetic Construct
  source 1..21: mol_type = other RNA
acagtagcctgcacattggtt

SEQ ID NO: 10170 - RNA, 34 nt, Synthetic Construct; identical to SEQ ID NO: 2529
  source 1..34: mol_type = other RNA

SEQ ID NO: 10171 - RNA, 22 nt, Synthetic Construct
  source 1..22: mol_type = other RNA
cgactggtaactgggatgaagt

SEQ ID NO: 10172 - RNA, 22 nt, Synthetic Construct
  source 1..22: mol_type = other RNA
cgactggtaactgggatgaagt

SEQ ID NO: 10173 - RNA, 31 nt, Synthetic Construct; identical to SEQ ID NO: 2333
  source 1..31: mol_type = other RNA

SEQ ID NO: 10174 - RNA, 31 nt, Synthetic Construct; identical to SEQ ID NO: 2333
  source 1..31: mol_type = other RNA

SEQ ID NO: 10175 - RNA, 18 nt, Synthetic Construct
  source 1..18: mol_type = other RNA
acagtcaggatgttggct

SEQ ID NO: 10176 - RNA, 18 nt, Synthetic Construct
  source 1..18: mol_type = other RNA
acagtcaggatgttggct

SEQ ID NO: 10177 - RNA, 43 nt, Synthetic Construct; identical to SEQ ID NO: 2315
  source 1..43: mol_type = other RNA

SEQ ID NO: 10178 - RNA, 43 nt, Synthetic Construct; identical to SEQ ID NO: 2315
  source 1..43: mol_type = other RNA

SEQ ID NO: 10179 - RNA, 23 nt, Synthetic Construct
  source 1..23: mol_type = other RNA
tgaggagcagagagcgagacttt

SEQ ID NO: 10180 - RNA, 23 nt, Synthetic Construct
  source 1..23: mol_type = other RNA
tgaggagcagagagcgagacttt

SEQ ID NO: 10181 - RNA, 23 nt, Synthetic Construct
  source 1..23: mol_type = other RNA
tggggtagtaggttgtgtggttt

SEQ ID NO: 10182 - RNA, 43 nt, Synthetic Construct; identical to SEQ ID NO: 6202
  source 1..43: mol_type = other RNA

SEQ ID NO: 10183 - RNA, 43 nt, Synthetic Construct; identical to SEQ ID NO: 6202
  source 1..43: mol_type = other RNA

SEQ ID NO: 10184 - RNA, 21 nt, Synthetic Construct
  source 1..21: mol_type = other RNA
tcgtaccgtgagtaataatga

SEQ ID NO: 10185 - RNA, 16 nt, Synthetic Construct
  source 1..16: mol_type = other RNA
ccggaggaaggtgggg

SEQ ID NO: 10186 - RNA, 22 nt, Synthetic Construct
  source 1..22: mol_type = other RNA
ngaggtagtaggttgtatagtt

SEQ ID NO: 10187 - RNA, 22 nt, Synthetic Construct
  source 1..22: mol_type = other RNA
ngaggtagtaggttgtatagtt

SEQ ID NO: 10188 - RNA, 22 nt, Synthetic Construct
  source 1..22: mol_type = other RNA
tgaggtagtaggttgtatagta

SEQ ID NO: 10189 - RNA, 19 nt, Synthetic Construct
  source 1..19: mol_type = other RNA
atcacattgccagggattt

SEQ ID NO: 10190 - RNA, 20 nt, Synthetic Construct
  source 1..20: mol_type = other RNA
gagtaggacgttgccaggtt

SEQ ID NO: 10191 - RNA, 20 nt, Synthetic Construct
  source 1..20: mol_type = other RNA
gagtaggacgttgccaggtt

SEQ ID NO: 10192 - RNA, 23 nt, Synthetic Construct
  source 1..23: mol_type = other RNA
gtgcagatcttggtggtagtagc

SEQ ID NO: 10193 - RNA, 23 nt, Synthetic Construct
  source 1..23: mol_type = other RNA
gtgcagatcttggtggtagtagc

SEQ ID NO: 10194 - RNA, 27 nt, Synthetic Construct
  source 1..27: mol_type = other RNA
ccccccactgctaaatttgactggcct

SEQ ID NO: 10195 - RNA, 23 nt, Synthetic Construct
  source 1..23: mol_type = other RNA
tgaggcagtaggttgtgtggttt

SEQ ID NO: 10196 - RNA, 23 nt, Synthetic Construct
  source 1..23: mol_type = other RNA
tgaggcagtaggttgtgtggttt

SEQ ID NO: 10197 - RNA, 22 nt, Synthetic Construct
  source 1..22: mol_type = other RNA
tcctgtactgagctgcctcgag

SEQ ID NO: 10198 - RNA, 22 nt, Synthetic Construct
  source 1..22: mol_type = other RNA
tcctgtactgagctgcctcgag

SEQ ID NO: 10199 - RNA, 23 nt, Synthetic Construct
  source 1..23: mol_type = other RNA
tggggtagtaggttgtgtggttt

SEQ ID NO: 10200 - RNA, 17 nt, Synthetic Construct
  source 1..17: mol_type = other RNA
agtccggatcgtagtct

SEQ ID NO: 10201 - RNA, 17 nt, Synthetic Construct
  source 1..17: mol_type = other RNA
agtccggatcgtagtct

SEQ ID NO: 10202 - RNA, 16 nt, Synthetic Construct
  source 1..16: mol_type = other RNA
ggtagctcgttgggct

SEQ ID NO: 10203 - RNA, 16 nt, Synthetic Construct
  source 1..16: mol_type = other RNA
ggtagctcgttgggct

SEQ ID NO: 10204 - RNA, 23 nt, Synthetic Construct
  source 1..23: mol_type = other RNA
cgaggtagtaggttgtgtggttt

SEQ ID NO: 10205 - RNA, 23 nt, Synthetic Construct
  source 1..23: mol_type = other RNA
cgaggtagtaggttgtgtggttt

SEQ ID NO: 10206 - RNA, 21 nt, Synthetic Construct
  source 1..21: mol_type = other RNA
tgaggtagaaggttgtatagt

SEQ ID NO: 10207 - RNA, 19 nt, Synthetic Construct
  source 1..19: mol_type = other RNA
cacatgcaagtcgaacggt

SEQ ID NO: 10208 - RNA, 19 nt, Synthetic Construct
  source 1..19: mol_type = other RNA
cacatgcaagtcgaacggt

SEQ ID NO: 10209 - RNA, 23 nt, Synthetic Construct
  source 1..23: mol_type = other RNA
caaagtgctgttcgtgcgggtag

SEQ ID NO: 10210 - RNA, 25 nt, Synthetic Construct
  source 1..25: mol_type = other RNA
ttgaggatatgagatcgagacggca

SEQ ID NO: 10211 - RNA, 39 nt, Synthetic Construct
  source 1..39: mol_type = other RNA
tatatcggaacgtgcccagtcgtgggggataactgctcg

SEQ ID NO: 10212 - RNA, 39 nt, Synthetic Construct; identical to SEQ ID NO: 10211
  source 1..39: mol_type = other RNA

SEQ ID NO: 10213 - RNA, 22 nt, Synthetic Construct
  source 1..22: mol_type = other RNA
cataaagtagaaagcactacta

SEQ ID NO: 10214 - RNA, 19 nt, Synthetic Construct
  source 1..19: mol_type = other RNA
tgtaaacatcctcgactgg

SEQ ID NO: 10215 - RNA, 23 nt, Synthetic Construct
  source 1..23: mol_type = other RNA
gtgcagatcttggtggtagtagc

SEQ ID NO: 10216 - RNA, 23 nt, Synthetic Construct
  source 1..23: mol_type = other RNA
gtgcagatcttggtggtagtagc

SEQ ID NO: 10217 - RNA, 17 nt, Synthetic Construct
  source 1..17: mol_type = other RNA
gcgtagatatgcggagg

SEQ ID NO: 10218 - RNA, 17 nt, Synthetic Construct
  source 1..17: mol_type = other RNA
gcgtagatatgcggagg

SEQ ID NO: 10219 - RNA, 23 nt, Synthetic Construct
  source 1..23: mol_type = other RNA
tgaggggaagagagcgagacttt

SEQ ID NO: 10220 - RNA, 23 nt, Synthetic Construct
  source 1..23: mol_type = other RNA
tgaggggaagagagcgagacttt

SEQ ID NO: 10221 - RNA, 22 nt, Synthetic Construct
  source 1..22: mol_type = other RNA
tgaggtagtaggttgtacagtt

SEQ ID NO: 10222 - RNA, 15 nt, Synthetic Construct
  source 1..15: mol_type = other RNA
tagagtagggcggga

SEQ ID NO: 10223 - RNA, 15 nt, Synthetic Construct
  source 1..15: mol_type = other RNA
tagagtagggcggga

SEQ ID NO: 10224 - RNA, 27 nt, Synthetic Construct
  source 1..27: mol_type = other RNA
ccccccactgctaaatttgacgggctt

SEQ ID NO: 10225 - RNA, 21 nt, Synthetic Construct
  source 1..21: mol_type = other RNA
ccccttggggttgtaggacca

SEQ ID NO: 10226 - RNA, 21 nt, Synthetic Construct
  source 1..21: mol_type = other RNA
ccccttggggttgtaggacca

SEQ ID NO: 10227 - RNA, 22 nt, Synthetic Construct
  source 1..22: mol_type = other RNA
tgaggtagtagattgtacagtt

SEQ ID NO: 10228 - RNA, 20 nt, Synthetic Construct
  source 1..20: mol_type = other RNA
ccgcagagtacagcttggga

SEQ ID NO: 10229 - RNA, 20 nt, Synthetic Construct
  source 1..20: mol_type = other RNA
ccgcagagtacagcttggga

SEQ ID NO: 10230 - RNA, 23 nt, Synthetic Construct
  source 1..23: mol_type = other RNA
tgaggggcagagggcgagacttt

SEQ ID NO: 10231 - RNA, 29 nt, Synthetic Construct
  source 1..29: mol_type = other RNA
tgaaggtgggttgtgaagcctgctggagg

SEQ ID NO: 10232 - RNA, 33 nt, Synthetic Construct
  source 1..33: mol_type = other RNA
ggagtggtagttcagttggttagaataccggcc

SEQ ID NO: 10233 - RNA, 33 nt, Synthetic Construct; identical to SEQ ID NO: 10232
  source 1..33: mol_type = other RNA

SEQ ID NO: 10234 - RNA, 19 nt, Synthetic Construct
  source 1..19: mol_type = other RNA
tagcttatcagactgatgt

SEQ ID NO: 10235 - RNA, 21 nt, Synthetic Construct
  source 1..21: mol_type = other RNA
tgaggtagtaggttgcatagt

SEQ ID NO: 10236 - RNA, 21 nt, Synthetic Construct
  source 1..21: mol_type = other RNA
tgaggtagtaggttgcatagt

SEQ ID NO: 10237 - RNA, 16 nt, Synthetic Construct
  source 1..16: mol_type = other RNA
tggccgtcgtcagctc

SEQ ID NO: 10238 - RNA, 16 nt, Synthetic Construct
  source 1..16: mol_type = other RNA
tggccgtcgtcagctc

SEQ ID NO: 10239 - RNA, 22 nt, Synthetic Construct
  source 1..22: mol_type = other RNA
tgaggtagtagttagtgctgtt

SEQ ID NO: 10240 - RNA, 23 nt, Synthetic Construct
  source 1..23: mol_type = other RNA
aatgacacgatcactcccgttgt

SEQ ID NO: 10241 - RNA, 22 nt, Synthetic Construct
  source 1..22: mol_type = other RNA
tgaggtagtagtttgtactgtt

SEQ ID NO: 10242 - RNA, 21 nt, Synthetic Construct
  source 1..21: mol_type = other RNA
aacggaatcccaaaagcagct

SEQ ID NO: 10243 - RNA, 21 nt, Synthetic Construct
  source 1..21: mol_type = other RNA
aacggaatcccaaaagcagct

SEQ ID NO: 10244 - RNA, 21 nt, Synthetic Construct
  source 1..21: mol_type = other RNA
ctagactgaagctccttgggg

SEQ ID NO: 10245 - RNA, 29 nt, Synthetic Construct
  source 1..29: mol_type = other RNA
cccgtgtgaaagtaggtcatcgtcaggct

SEQ ID NO: 10246 - RNA, 22 nt, Synthetic Construct
  source 1..22: mol_type = other RNA
tgaggtagcagtttgtgctgtt

SEQ ID NO: 10247 - RNA, 23 nt, Synthetic Construct
  source 1..23: mol_type = other RNA
caaagtgctgtttgtgcaggtag

SEQ ID NO: 10248 - RNA, 23 nt, Synthetic Construct
  source 1..23: mol_type = other RNA
caaagtgctgtttgtgcaggtag

SEQ ID NO: 10249 - RNA, 27 nt, Synthetic Construct
  source 1..27: mol_type = other RNA
ccccctactgctaaatttgactggctt

SEQ ID NO: 10250 - RNA, 32 nt, Synthetic Construct; identical to SEQ ID NO: 4279
  source 1..32: mol_type = other RNA

SEQ ID NO: 10251 - RNA, 32 nt, Synthetic Construct; identical to SEQ ID NO: 4279
  source 1..32: mol_type = other RNA

SEQ ID NO: 10252 - RNA, 33 nt, Synthetic Construct; identical to SEQ ID NO: 2126
  source 1..33: mol_type = other RNA

SEQ ID NO: 10253 - RNA, 15 nt, Synthetic Construct
  source 1..15: mol_type = other RNA
ggccgtcgtcagctc

SEQ ID NO: 10254 - RNA, 15 nt, Synthetic Construct
  source 1..15: mol_type = other RNA
ggccgtcgtcagctc

SEQ ID NO: 10255 - RNA, 25 nt, Synthetic Construct
  source 1..25: mol_type = other RNA
ttgaggatatgagatcgggacgaca

SEQ ID NO: 10256 - RNA, 23 nt, Synthetic Construct
  source 1..23: mol_type = other RNA
gtaaacatccttgactggaagct

SEQ ID NO: 10257 - RNA, 23 nt, Synthetic Construct
  source 1..23: mol_type = other RNA
gtaaacatccttgactggaagct

SEQ ID NO: 10258 - RNA, 21 nt, Synthetic Construct
  source 1..21: mol_type = other RNA
ttatggtttgcctgggactga

SEQ ID NO: 10259 - RNA, 21 nt, Synthetic Construct
  source 1..21: mol_type = other RNA
ttatggtttgcctgggactga

SEQ ID NO: 10260 - RNA, 37 nt, Synthetic Construct; identical to SEQ ID NO: 4277
  source 1..37: mol_type = other RNA

SEQ ID NO: 10261 - RNA, 23 nt, Synthetic Construct
  source 1..23: mol_type = other RNA
tgaggtggtaggttgtgtggttt

SEQ ID NO: 10262 - RNA, 20 nt, Synthetic Construct
  source 1..20: mol_type = other RNA
tgaggtagtaggttgcgtgg

SEQ ID NO: 10263 - RNA, 20 nt, Synthetic Construct
  source 1..20: mol_type = other RNA
tgaggtagtaggttgcgtgg

SEQ ID NO: 10264 - RNA, 23 nt, Synthetic Construct
  source 1..23: mol_type = other RNA
tgaggggcggagagcgagacttt

SEQ ID NO: 10265 - RNA, 23 nt, Synthetic Construct
  source 1..23: mol_type = other RNA
tgaggggcggagagcgagacttt

SEQ ID NO: 10266 - RNA, 37 nt, Synthetic Construct; identical to SEQ ID NO: 5125
  source 1..37: mol_type = other RNA

SEQ ID NO: 10267 - RNA, 19 nt, Synthetic Construct
  source 1..19: mol_type = other RNA
gcgccgatgatagtgcgga

SEQ ID NO: 10268 - RNA, 19 nt, Synthetic Construct
  source 1..19: mol_type = other RNA
gcgccgatgatagtgcgga

SEQ ID NO: 10269 - RNA, 20 nt, Synthetic Construct
  source 1..20: mol_type = other RNA
tgaggtagtaggttgtgcgg

SEQ ID NO: 10270 - RNA, 20 nt, Synthetic Construct
  source 1..20: mol_type = other RNA
tgaggtagtaggttgtgcgg

SEQ ID NO: 10271 - RNA, 23 nt, Synthetic Construct
  source 1..23: mol_type = other RNA
ggcagcattgtacagggctatga

SEQ ID NO: 10272 - RNA, 23 nt, Synthetic Construct
  source 1..23: mol_type = other RNA
ggcagcattgtacagggctatga

SEQ ID NO: 10273 - RNA, 31 nt, Synthetic Construct; identical to SEQ ID NO: 2295
  source 1..31: mol_type = other RNA

SEQ ID NO: 10274 - RNA, 31 nt, Synthetic Construct; identical to SEQ ID NO: 2295
  source 1..31: mol_type = other RNA

SEQ ID NO: 10275 - RNA, 20 nt, Synthetic Construct
  source 1..20: mol_type = other RNA
tgaagtagtaggttgtgtgg

SEQ ID NO: 10276 - RNA, 15 nt, Synthetic Construct
  source 1..15: mol_type = other RNA
gtctcgccgacggca

SEQ ID NO: 10277 - RNA, 22 nt, Synthetic Construct
  source 1..22: mol_type = other RNA
tgaggaagtagattgtatagtt

SEQ ID NO: 10278 - RNA, 22 nt, Synthetic Construct
  source 1..22: mol_type = other RNA
tgaggaagtagattgtatagtt

SEQ ID NO: 10279 - RNA, 22 nt, Synthetic Construct
  source 1..22: mol_type = other RNA
ngaggtagtagattgtatagtt

SEQ ID NO: 10280 - RNA, 22 nt, Synthetic Construct
  source 1..22: mol_type = other RNA
ngaggtagtagattgtatagtt

SEQ ID NO: 10281 - RNA, 22 nt, Synthetic Construct
  source 1..22: mol_type = other RNA
tagcagcacgtagatattggcg

SEQ ID NO: 10282 - RNA, 22 nt, Synthetic Construct
  source 1..22: mol_type = other RNA
tagcagcacgtagatattggcg

SEQ ID NO: 10283 - RNA, 21 nt, Synthetic Construct
  source 1..21: mol_type = other RNA
cattattacttttggtacgcg

SEQ ID NO: 10284 - RNA, 21 nt, Synthetic Construct
  source 1..21: mol_type = other RNA
cattattacttttggtacgcg

SEQ ID NO: 10285 - RNA, 23 nt, Synthetic Construct
  source 1..23: mol_type = other RNA
tggtaatacgacgtacttagtga

SEQ ID NO: 10286 - RNA, 15 nt, Synthetic Construct
  source 1..15: mol_type = other RNA
gggtgaaagcggggg

SEQ ID NO: 10287 - RNA, 22 nt, Synthetic Construct
  source 1..22: mol_type = other RNA
tagcagcacataaatattggcg

SEQ ID NO: 10288 - RNA, 22 nt, Synthetic Construct
  source 1..22: mol_type = other RNA
tagcagcacataaatattggcg

SEQ ID NO: 10289 - RNA, 17 nt, Synthetic Construct
  source 1..17: mol_type = other RNA
cacggcccagactccta

SEQ ID NO: 10290 - RNA, 17 nt, Synthetic Construct
  source 1..17: mol_type = other RNA
cacggcccagactccta

SEQ ID NO: 10291 - RNA, 35 nt, Synthetic Construct; identical to SEQ ID NO: 2269
  source 1..35: mol_type = other RNA

SEQ ID NO: 10292 - RNA, 23 nt, Synthetic Construct
  source 1..23: mol_type = other RNA
gtctttgttcgattccgttgagt

SEQ ID NO: 10293 - RNA, 18 nt, Synthetic Construct
  source 1..18: mol_type = other RNA
cgccgatgatagtgcgga

SEQ ID NO: 10294 - RNA, 21 nt, Synthetic Construct
  source 1..21: mol_type = other RNA
gttggttcaagcgtgtagtcg

SEQ ID NO: 10295 - RNA, 22 nt, Synthetic Construct
  source 1..22: mol_type = other RNA
tattgcacttgtcccggcctgc

SEQ ID NO: 10296 - RNA, 23 nt, Synthetic Construct
  source 1..23: mol_type = other RNA
tgaggtagtaggttgcgtggttt

SEQ ID NO: 10297 - RNA, 22 nt, Synthetic Construct
  source 1..22: mol_type = other RNA
acagtagcctgcacattggtta

SEQ ID NO: 10298 - RNA, 23 nt, Synthetic Construct
  source 1..23: mol_type = other RNA
tacagtagtctgcacattggttt

SEQ ID NO: 10299 - RNA, 23 nt, Synthetic Construct
  source 1..23: mol_type = other RNA
tacagtagtctgcacattggttt

SEQ ID NO: 10300 - RNA, 24 nt, Synthetic Construct
  source 1..24: mol_type = other RNA
tcactgatcgagtcgtcctgcgcg

SEQ ID NO: 10301 - RNA, 24 nt, Synthetic Construct
  source 1..24: mol_type = other RNA
tcactgatcgagtcgtcctgcgcg

SEQ ID NO: 10302 - RNA, 21 nt, Synthetic Construct
  source 1..21: mol_type = other RNA
ttcaagtaattcaggataggt

SEQ ID NO: 10303 - RNA, 21 nt, Synthetic Construct
  source 1..21: mol_type = other RNA
ttcaagtaattcaggataggt

SEQ ID NO: 10304 - RNA, 19 nt, Synthetic Construct
  source 1..19: mol_type = other RNA
aggacagtgaaacgagtca

SEQ ID NO: 10305 - RNA, 22 nt, Synthetic Construct
  source 1..22: mol_type = other RNA
ttctgtactgagctgccccgag

SEQ ID NO: 10306 - RNA, 22 nt, Synthetic Construct
  source 1..22: mol_type = other RNA
ttctgtactgagctgccccgag

SEQ ID NO: 10307 - RNA, 15 nt, Synthetic Construct
  source 1..15: mol_type = other RNA
tcgagtcgtcctgcg

SEQ ID NO: 10308 - RNA, 15 nt, Synthetic Construct
  source 1..15: mol_type = other RNA
tcgagtcgtcctgcg

SEQ ID NO: 10309 - RNA, 22 nt, Synthetic Construct
  source 1..22: mol_type = other RNA
tattgcacttgtcccagcctgt

SEQ ID NO: 10310 - RNA, 20 nt, Synthetic Construct
  source 1..20: mol_type = other RNA
gctattgacgaccgtaccgc

SEQ ID NO: 10311 - RNA, 20 nt, Synthetic Construct
  source 1..20: mol_type = other RNA
gctattgacgaccgtaccgc

SEQ ID NO: 10312 - RNA, 31 nt, Synthetic Construct; identical to SEQ ID NO: 9212
  source 1..31: mol_type = other RNA

SEQ ID NO: 10313 - RNA, 31 nt, Synthetic Construct; identical to SEQ ID NO: 9212
  source 1..31: mol_type = other RNA

SEQ ID NO: 10314 - RNA, 15 nt, Synthetic Construct
  source 1..15: mol_type = other RNA
gctatgggatttgtt

SEQ ID NO: 10315 - RNA, 15 nt, Synthetic Construct
  source 1..15: mol_type = other RNA
gctatgggatttgtt

SEQ ID NO: 10316 - RNA, 21 nt, Synthetic Construct
  source 1..21: mol_type = other RNA
tccctgagaccctaacttgtg

SEQ ID NO: 10317 - RNA, 20 nt, Synthetic Construct
  source 1..20: mol_type = other RNA
tgaggtagtaggttgtgtga

SEQ ID NO: 10318 - RNA, 27 nt, Synthetic Construct
  source 1..27: mol_type = other RNA
ccccccactgctaaatttgaccggctt

SEQ ID NO: 10319 - RNA, 24 nt, Synthetic Construct
  source 1..24: mol_type = other RNA
tgggtaatacgacgtacttagtgt

SEQ ID NO: 10320 - RNA, 19 nt, Synthetic Construct
  source 1..19: mol_type = other RNA
agtcgacgtatagggtgtg

SEQ ID NO: 10321 - RNA, 19 nt, Synthetic Construct
  source 1..19: mol_type = other RNA
agtcgacgtatagggtgtg

SEQ ID NO: 10322 - RNA, 23 nt, Synthetic Construct
  source 1..23: mol_type = other RNA
agggctgggtcggtcgggctggg

SEQ ID NO: 10323 - RNA, 23 nt, Synthetic Construct
  source 1..23: mol_type = other RNA
agggctgggtcggtcgggctggg

SEQ ID NO: 10324 - RNA, 21 nt, Synthetic Construct
  source 1..21: mol_type = other RNA
cataaagtagaaagcactact

SEQ ID NO: 10325 - RNA, 21 nt, Synthetic Construct
  source 1..21: mol_type = other RNA
cataaagtagaaagcactact

SEQ ID NO: 10326 - RNA, 21 nt, Synthetic Construct
  source 1..21: mol_type = other RNA
tcctgtacagagctgccccga

SEQ ID NO: 10327 - RNA, 16 nt, Synthetic Construct
  source 1..16: mol_type = other RNA
acggcgggagtaacta

SEQ ID NO: 10328 - RNA, 16 nt, Synthetic Construct
  source 1..16: mol_type = other RNA
acggcgggagtaacta

SEQ ID NO: 10329 - RNA, 26 nt, Synthetic Construct
  source 1..26: mol_type = other RNA
gactcttagcggtggatcactcggct

SEQ ID NO: 10330 - RNA, 26 nt, Synthetic Construct
  source 1..26: mol_type = other RNA
gactcttagcggtggatcactcggct

SEQ ID NO: 10331 - RNA, 15 nt, Synthetic Construct
  source 1..15: mol_type = other RNA
tcgagtcgtcctgcg

SEQ ID NO: 10332 - RNA, 22 nt, Synthetic Construct
  source 1..22: mol_type = other RNA
tgaggtagtagttcgtgctgtt

SEQ ID NO: 10333 - RNA, 36 nt, Synthetic Construct
  source 1..36: mol_type = other RNA
ggtggctgtagctcagttggtagagtccaggattgt

SEQ ID NO: 10334 - RNA, 36 nt, Synthetic Construct; identical to SEQ ID NO: 10333
  source 1..36: mol_type = other RNA

SEQ ID NO: 10335 - RNA, 23 nt, Synthetic Construct
  source 1..23: mol_type = other RNA
cgaggggcagagagcgagacttt

SEQ ID NO: 10336 - RNA, 22 nt, Synthetic Construct
  source 1..22: mol_type = other RNA
tgaggtagtagtttgtgctgtg

SEQ ID NO: 10337 - RNA, 22 nt, Synthetic Construct
  source 1..22: mol_type = other RNA
tgaggtagtagtttgtgctgtg

SEQ ID NO: 10338 - RNA, 19 nt, Synthetic Construct
  source 1..19: mol_type = other RNA
atcacattgccagggattt

SEQ ID NO: 10339 - RNA, 19 nt, Synthetic Construct
  source 1..19: mol_type = other RNA
atcacattgccagggattt

SEQ ID NO: 10340 - RNA, 20 nt, Synthetic Construct
  source 1..20: mol_type = other RNA
cgaggtagtaggttgtgtgg

SEQ ID NO: 10341 - RNA, 20 nt, Synthetic Construct
  source 1..20: mol_type = other RNA
cgaggtagtaggttgtgtgg

SEQ ID NO: 10342 - RNA, 22 nt, Synthetic Construct
  source 1..22: mol_type = other RNA
tgaggtagtggattgtatagtt

SEQ ID NO: 10343 - RNA, 18 nt, Synthetic Construct
  source 1..18: mol_type = other RNA
gtcgacgtatagggtgtg

SEQ ID NO: 10344 - RNA, 25 nt, Synthetic Construct
  source 1..25: mol_type = other RNA
ttgaggatatgaggtcgagacgaca

SEQ ID NO: 10345 - RNA, 23 nt, Synthetic Construct
  source 1..23: mol_type = other RNA
tggtaatacaacgtacttagtgt

SEQ ID NO: 10346 - RNA, 23 nt, Synthetic Construct
  source 1..23: mol_type = other RNA
tggtaatacaacgtacttagtgt

SEQ ID NO: 10347 - RNA, 26 nt, Synthetic Construct
  source 1..26: mol_type = other RNA
ggcgcttgagagaactctggagaagg

SEQ ID NO: 10348 - RNA, 26 nt, Synthetic Construct
  source 1..26: mol_type = other RNA
ggcgcttgagagaactctggagaagg

SEQ ID NO: 10349 - RNA, 21 nt, Synthetic Construct
  source 1..21: mol_type = other RNA
aacggaatcccaaaagcagct

SEQ ID NO: 10350 - RNA, 21 nt, Synthetic Construct
  source 1..21: mol_type = other RNA
aacggaatcccaaaagcagct

SEQ ID NO: 10351 - RNA, 21 nt, Synthetic Construct
  source 1..21: mol_type = other RNA
taaggtagtaggttgtgtggt

SEQ ID NO: 10352 - RNA, 21 nt, Synthetic Construct
  source 1..21: mol_type = other RNA
taaggtagtaggttgtgtggt

SEQ ID NO: 10353 - RNA, 21 nt, Synthetic Construct
  source 1..21: mol_type = other RNA
gagttctacagtccgacgatc

SEQ ID NO: 10354 - RNA, 21 nt, Synthetic Construct
  source 1..21: mol_type = other RNA
gagttctacagtccgacgatc

SEQ ID NO: 10355 - RNA, 22 nt, Synthetic Construct
  source 1..22: mol_type = other RNA
aggaatgtaaagaagtatgtat

SEQ ID NO: 10356 - RNA, 20 nt, Synthetic Construct
  source 1..20: mol_type = other RNA
tgaggtagaaggttgtatag

SEQ ID NO: 10357 - RNA, 21 nt, Synthetic Construct
  source 1..21: mol_type = other RNA
agccatcatttaaagaaagcg

SEQ ID NO: 10358 - RNA, 21 nt, Synthetic Construct
  source 1..21: mol_type = other RNA
agccatcatttaaagaaagcg

SEQ ID NO: 10359 - RNA, 16 nt, Synthetic Construct
  source 1..16: mol_type = other RNA
gggtgaaagcggggga

SEQ ID NO: 10360 - RNA, 23 nt, Synthetic Construct
  source 1..23: mol_type = other RNA
tggggtagtaggttgtgtggttt

SEQ ID NO: 10361 - RNA, 23 nt, Synthetic Construct
  source 1..23: mol_type = other RNA
tggggtagtaggttgtgtggttt

SEQ ID NO: 10362 - RNA, 21 nt, Synthetic Construct
  source 1..21: mol_type = other RNA
cactgatcgagtcgtcctgcg

SEQ ID NO: 10363 - RNA, 21 nt, Synthetic Construct
  source 1..21: mol_type = other RNA
cactgatcgagtcgtcctgcg

SEQ ID NO: 10364 - RNA, 22 nt, Synthetic Construct
  source 1..22: mol_type = other RNA
tggaatgtaaagaagtatgtgt

SEQ ID NO: 10365 - RNA, 23 nt, Synthetic Construct
  source 1..23: mol_type = other RNA
gttctacagtccgacgatcgatc

SEQ ID NO: 10366 - RNA, 23 nt, Synthetic Construct
  source 1..23: mol_type = other RNA
gttctacagtccgacgatcgatc

SEQ ID NO: 10367 - RNA, 23 nt, Synthetic Construct
  source 1..23: mol_type = other RNA
tgtcagtttgtcaaataccccat

SEQ ID NO: 10368 - RNA, 21 nt, Synthetic Construct
  source 1..21: mol_type = other RNA
tgaggtagcagattgtatagt

SEQ ID NO: 10369 - RNA, 21 nt, Synthetic Construct
  source 1..21: mol_type = other RNA
tgaggtagcagattgtatagt

SEQ ID NO: 10370 - RNA, 16 nt, Synthetic Construct
  source 1..16: mol_type = other RNA
cccaaaggtcgtcggt

SEQ ID NO: 10371 - RNA, 22 nt, Synthetic Construct
  source 1..22: mol_type = other RNA
tgagatagtagtttgtgctgtt

SEQ ID NO: 10372 - RNA, 18 nt, Synthetic Construct
  source 1..18: mol_type = other RNA
ggttcgattccggagagg

SEQ ID NO: 10373 - RNA, 18 nt, Synthetic Construct
  source 1..18: mol_type = other RNA
ggttcgattccggagagg

SEQ ID NO: 10374 - RNA, 22 nt, Synthetic Construct
  source 1..22: mol_type = other RNA
tgaggtagtaggttgtgtagtt

SEQ ID NO: 10375 - RNA, 22 nt, Synthetic Construct
  source 1..22: mol_type = other RNA
tactgcacttgtcccggcctgt

SEQ ID NO: 10376 - RNA, 23 nt, Synthetic Construct
  source 1..23: mol_type = other RNA
tcggaatcgctagtaatcgcgga

SEQ ID NO: 10377 - RNA, 23 nt, Synthetic Construct
  source 1..23: mol_type = other RNA
tcggaatcgctagtaatcgcgga

SEQ ID NO: 10378 - RNA, 15 nt, Synthetic Construct
  source 1..15: mol_type = other RNA
cctcgcgcgattgga

SEQ ID NO: 10379 - RNA, 21 nt, Synthetic Construct
  source 1..21: mol_type = other RNA
tgaggaagtagattgtatagt

SEQ ID NO: 10380 - RNA, 21 nt, Synthetic Construct
  source 1..21: mol_type = other RNA
tgaggaagtagattgtatagt

SEQ ID NO: 10381 - RNA, 22 nt, Synthetic Construct
  source 1..22: mol_type = other RNA
cattgcacttgtctcggtctgg

SEQ ID NO: 10382 - RNA, 22 nt, Synthetic Construct
  source 1..22: mol_type = other RNA
cattgcacttgtctcggtctgg

SEQ ID NO: 10383 - RNA, 22 nt, Synthetic Construct
  source 1..22: mol_type = other RNA
tgaggtagtgggttgtatagtt

SEQ ID NO: 10384 - RNA, 26 nt, Synthetic Construct
  source 1..26: mol_type = other RNA
atgcgagagtaggacgttgccaggtt

SEQ ID NO: 10385 - RNA, 26 nt, Synthetic Construct
  source 1..26: mol_type = other RNA
atgcgagagtaggacgttgccaggtt

SEQ ID NO: 10386 - RNA, 23 nt, Synthetic Construct
  source 1..23: mol_type = other RNA
tgaggtagtaggctgtgtggttt

SEQ ID NO: 10387 - RNA, 23 nt, Synthetic Construct
  source 1..23: mol_type = other RNA
tgaggtagtaggctgtgtggttt

SEQ ID NO: 10388 - RNA, 33 nt, Synthetic Construct; identical to SEQ ID NO: 2556
  source 1..33: mol_type = other RNA

SEQ ID NO: 10389 - RNA, 21 nt, Synthetic Construct
  source 1..21: mol_type = other RNA
gctttgatccggagatttccg

SEQ ID NO: 10390 - RNA, 17 nt, Synthetic Construct
  source 1..17: mol_type = other RNA
cctcgcgcgattggagc

SEQ ID NO: 10391 - RNA, 18 nt, Synthetic Construct
  source 1..18: mol_type = other RNA
ggccgtcgtcagctcgtg

SEQ ID NO: 10392 - RNA, 16 nt, Synthetic Construct
  source 1..16: mol_type = other RNA
gcctacggccatacca

SEQ ID NO: 10393 - RNA, 16 nt, Synthetic Construct
  source 1..16: mol_type = other RNA
gcctacggccatacca

SEQ ID NO: 10394 - RNA, 22 nt, Synthetic Construct
  source 1..22: mol_type = other RNA
tccagtactgagctgccccgag

SEQ ID NO: 10395 - RNA, 22 nt, Synthetic Construct
  source 1..22: mol_type = other RNA
tccagtactgagctgccccgag

SEQ ID NO: 10396 - RNA, 19 nt, Synthetic Construct
  source 1..19: mol_type = other RNA
ccgtgttcggaagattttc

SEQ ID NO: 10397 - RNA, 39 nt, Synthetic Construct; identical to SEQ ID NO: 4939
  source 1..39: mol_type = other RNA

SEQ ID NO: 10398 - RNA, 39 nt, Synthetic Construct; identical to SEQ ID NO: 4939
  source 1..39: mol_type = other RNA

SEQ ID NO: 10399 - RNA, 15 nt, Synthetic Construct
  source 1..15: mol_type = other RNA
acctgcatcgagggt

SEQ ID NO: 10400 - RNA, 17 nt, Synthetic Construct
  source 1..17: mol_type = other RNA
tcgctagtaatcgcgga

SEQ ID NO: 10401 - RNA, 17 nt, Synthetic Construct
  source 1..17: mol_type = other RNA
tcgctagtaatcgcgga

SEQ ID NO: 10402 - RNA, 15 nt, Synthetic Construct
  source 1..15: mol_type = other RNA
tcctgacggccatag

SEQ ID NO: 10403 - RNA, 18 nt, Synthetic Construct
  source 1..18: mol_type = other RNA
tcgacgctagcggatcct

SEQ ID NO: 10404 - RNA, 18 nt, Synthetic Construct
  source 1..18: mol_type = other RNA
tcgacgctagcggatcct

SEQ ID NO: 10405 - RNA, 22 nt, Synthetic Construct
  source 1..22: mol_type = other RNA
tgagaactgaattccatgggtc

SEQ ID NO: 10406 - RNA, 21 nt, Synthetic Construct
  source 1..21: mol_type = other RNA
gtagtgtttcctactttatgg

SEQ ID NO: 10407 - RNA, 24 nt, Synthetic Construct
  source 1..24: mol_type = other RNA
acagtagtctgcacattggttatt

SEQ ID NO: 10408 - RNA, 19 nt, Synthetic Construct
  source 1..19: mol_type = other RNA
gcgccgatgatagtgcgga

SEQ ID NO: 10409 - RNA, 21 nt, Synthetic Construct
  source 1..21: mol_type = other RNA
caaagtgcttacagtgcaggt

SEQ ID NO: 10410 - RNA, 21 nt, Synthetic Construct
  source 1..21: mol_type = other RNA
caaagtgcttacagtgcaggt

SEQ ID NO: 10411 - RNA, 33 nt, Synthetic Construct; identical to SEQ ID NO: 7469
  source 1..33: mol_type = other RNA

SEQ ID NO: 10412 - RNA, 33 nt, Synthetic Construct; identical to SEQ ID NO: 7469
  source 1..33: mol_type = other RNA

SEQ ID NO: 10413 - RNA, 23 nt, Synthetic Construct
  source 1..23: mol_type = other RNA
actcggcgtggcgtcggtcgtgt

SEQ ID NO: 10414 - RNA, 23 nt, Synthetic Construct
  source 1..23: mol_type = other RNA
actcggcgtggcgtcggtcgtgt

SEQ ID NO: 10415 - RNA, 21 nt, Synthetic Construct
  source 1..21: mol_type = other RNA
tggggtagtagtttgtgctgt

SEQ ID NO: 10416 - RNA, 21 nt, Synthetic Construct
  source 1..21: mol_type = other RNA
tggggtagtagtttgtgctgt

SEQ ID NO: 10417 - RNA, 23 nt, Synthetic Construct
  source 1..23: mol_type = other RNA
tggggggcagagagcgagacttt

SEQ ID NO: 10418 - RNA, 23 nt, Synthetic Construct
  source 1..23: mol_type = other RNA
tggggggcagagagcgagacttt

SEQ ID NO: 10419 - RNA, 22 nt, Synthetic Construct
  source 1..22: mol_type = other RNA
tctttggttatctagctgtatg

SEQ ID NO: 10420 - RNA, 22 nt, Synthetic Construct
  source 1..22: mol_type = other RNA
tctttggttatctagctgtatg

SEQ ID NO: 10421 - RNA, 18 nt, Synthetic Construct
  source 1..18: mol_type = other RNA
agcagcattgtacagggc

SEQ ID NO: 10422 - RNA, 22 nt, Synthetic Construct
  source 1..22: mol_type = other RNA
tgaggtagtagatcgtatagtt

SEQ ID NO: 10423 - RNA, 22 nt, Synthetic Construct
  source 1..22: mol_type = other RNA
tgaggtagtagatcgtatagtt

SEQ ID NO: 10424 - RNA, 26 nt, Synthetic Construct
  source 1..26: mol_type = other RNA
aaaccgttaccattactgagtttagt

SEQ ID NO: 10425 - RNA, 26 nt, Synthetic Construct
  source 1..26: mol_type = other RNA
aaaccgttaccattactgagtttagt

SEQ ID NO: 10426 - RNA, 23 nt, Synthetic Construct
  source 1..23: mol_type = other RNA
tgaggggcagagagcgagactta

SEQ ID NO: 10427 - RNA, 23 nt, Synthetic Construct
  source 1..23: mol_type = other RNA
tgaggggcagagagcgagactta

SEQ ID NO: 10428 - RNA, 43 nt, Synthetic Construct; identical to SEQ ID NO: 2315
  source 1..43: mol_type = other RNA

SEQ ID NO: 10429 - RNA, 23 nt, Synthetic Construct
  source 1..23: mol_type = other RNA
taaagtgcttatagtgcaggtag

SEQ ID NO: 10430 - RNA, 23 nt, Synthetic Construct
  source 1..23: mol_type = other RNA
taaagtgcttatagtgcaggtag

SEQ ID NO: 10431 - RNA, 21 nt, Synthetic Construct
  source 1..21: mol_type = other RNA
agcagcattgtacagggctat

SEQ ID NO: 10432 - RNA, 21 nt, Synthetic Construct
  source 1..21: mol_type = other RNA
tcagtgcatcacagaactttg

SEQ ID NO: 10433 - RNA, 21 nt, Synthetic Construct
  source 1..21: mol_type = other RNA
tcagtgcatcacagaactttg

SEQ ID NO: 10434 - RNA, 25 nt, Synthetic Construct
  source 1..25: mol_type = other RNA
ttgaggatatgagatcgaggcgaca

SEQ ID NO: 10435 - RNA, 23 nt, Synthetic Construct
  source 1..23: mol_type = other RNA
agctcggtctgaggcccctcagt

SEQ ID NO: 10436 - RNA, 23 nt, Synthetic Construct
  source 1..23: mol_type = other RNA
agctcggtctgaggcccctcagt

SEQ ID NO: 10437 - RNA, 19 nt, Synthetic Construct
  source 1..19: mol_type = other RNA
tattgcacttgtcccggcc

SEQ ID NO: 10438 - RNA, 19 nt, Synthetic Construct
  source 1..19: mol_type = other RNA
tattgcacttgtcccggcc

SEQ ID NO: 10439 - RNA, 22 nt, Synthetic Construct
  source 1..22: mol_type = other RNA
tgaggtagtaggttgtatagtc

SEQ ID NO: 10440 - RNA, 22 nt, Synthetic Construct
  source 1..22: mol_type = other RNA
tgaggtagtaggttgtatagtc

SEQ ID NO: 10441 - RNA, 22 nt, Synthetic Construct
  source 1..22: mol_type = other RNA
tgaggtagcaggttgtatagtt

SEQ ID NO: 10442 - RNA, 22 nt, Synthetic Construct
  source 1..22: mol_type = other RNA
tgaggtagcaggttgtatagtt

SEQ ID NO: 10443 - RNA, 23 nt, Synthetic Construct
  source 1..23: mol_type = other RNA
attctaatttctccacgtctttg

SEQ ID NO: 10444 - RNA, 23 nt, Synthetic Construct
  source 1..23: mol_type = other RNA
attctaatttctccacgtctttg

SEQ ID NO: 10445 - RNA, 24 nt, Synthetic Construct
  source 1..24: mol_type = other RNA
tataccgaagctctaggtgcggca

SEQ ID NO: 10446 - RNA, 24 nt, Synthetic Construct
  source 1..24: mol_type = other RNA
tataccgaagctctaggtgcggca

SEQ ID NO: 10447 - RNA, 22 nt, Synthetic Construct
  source 1..22: mol_type = other RNA
tgaggtagtaggttgtatagct

SEQ ID NO: 10448 - RNA, 22 nt, Synthetic Construct
  source 1..22: mol_type = other RNA
tgaggtagtaggttgtatagct

SEQ ID NO: 10449 - RNA, 22 nt, Synthetic Construct
  source 1..22: mol_type = other RNA
ccggtcccaagggtatggctgt

SEQ ID NO: 10450 - RNA, 16 nt, Synthetic Construct
  source 1..16: mol_type = other RNA
acggcccagactccta

SEQ ID NO: 10451 - RNA, 16 nt, Synthetic Construct
  source 1..16: mol_type = other RNA
acggcccagactccta

SEQ ID NO: 10452 - RNA, 27 nt, Synthetic Construct
  source 1..27: mol_type = other RNA
ccccccactgctaaatttggctggctt

SEQ ID NO: 10453 - RNA, 19 nt, Synthetic Construct
  source 1..19: mol_type = other RNA
ctgatcgagtcgtcctgcg

SEQ ID NO: 10454 - RNA, 19 nt, Synthetic Construct
  source 1..19: mol_type = other RNA
ctgatcgagtcgtcctgcg

SEQ ID NO: 10455 - RNA, 22 nt, Synthetic Construct
  source 1..22: mol_type = other RNA
ggcagcattgtacagggctatg

SEQ ID NO: 10456 - RNA, 22 nt, Synthetic Construct
  source 1..22: mol_type = other RNA
ggcagcattgtacagggctatg

SEQ ID NO: 10457 - RNA, 23 nt, Synthetic Construct
  source 1..23: mol_type = other RNA
tacagtactgtgataactgaaga

SEQ ID NO: 10458 - RNA, 23 nt, Synthetic Construct
  source 1..23: mol_type = other RNA
tacagtactgtgataactgaaga

SEQ ID NO: 10459 - RNA, 30 nt, Synthetic Construct; identical to SEQ ID NO: 2274
  source 1..30: mol_type = other RNA

SEQ ID NO: 10460 - RNA, 20 nt, Synthetic Construct
  source 1..20: mol_type = other RNA
cccagtaaacggcggccgta

SEQ ID NO: 10461 - RNA, 33 nt, Synthetic Construct
  source 1..33: mol_type = other RNA
tcccctgtggtctagtggttaggattcggcgct

SEQ ID NO: 10462 - RNA, 31 nt, Synthetic Construct; identical to SEQ ID NO: 1627
  source 1..31: mol_type = other RNA

SEQ ID NO: 10463 - RNA, 31 nt, Synthetic Construct; identical to SEQ ID NO: 1627
  source 1..31: mol_type = other RNA

SEQ ID NO: 10464 - RNA, 22 nt, Synthetic Construct
  source 1..22: mol_type = other RNA
tcctgtactgaactgccccgag

SEQ ID NO: 10465 - RNA, 15 nt, Synthetic Construct
  source 1..15: mol_type = other RNA
gtctcgccgacggca

SEQ ID NO: 10466 - RNA, 15 nt, Synthetic Construct
  source 1..15: mol_type = other RNA
gtctcgccgacggca

SEQ ID NO: 10467 - RNA, 15 nt, Synthetic Construct
  source 1..15: mol_type = other RNA
gtccggatcgtagtc

SEQ ID NO: 10468 - RNA, 15 nt, Synthetic Construct
  source 1..15: mol_type = other RNA
gtccggatcgtagtc

SEQ ID NO: 10469 - RNA, 25 nt, Synthetic Construct
  source 1..25: mol_type = other RNA
ctgaggatatgagatcgagacgaca

SEQ ID NO: 10470 - RNA, 22 nt, Synthetic Construct
  source 1..22: mol_type = other RNA
tgaggtagtagtttgtgctgat

SEQ ID NO: 10471 - RNA, 15 nt, Synthetic Construct
  source 1..15: mol_type = other RNA
cagtgaaacgagtca

SEQ ID NO: 10472 - RNA, 22 nt, Synthetic Construct
  source 1..22: mol_type = other RNA
tgaggtagtagattgtatagtc

SEQ ID NO: 10473 - RNA, 22 nt, Synthetic Construct
  source 1..22: mol_type = other RNA
tgaggtagtagattgtatagtc

SEQ ID NO: 10474 - RNA, 28 nt, Synthetic Construct
  source 1..28: mol_type = other RNA
tgttggttcaagcgtgtagtcgtgctct

SEQ ID NO: 10475 - RNA, 28 nt, Synthetic Construct
  source 1..28: mol_type = other RNA
tgttggttcaagcgtgtagtcgtgctct

SEQ ID NO: 10476 - RNA, 16 nt, Synthetic Construct
  source 1..16: mol_type = other RNA
atgcaagtcgaacggt

SEQ ID NO: 10477 - RNA, 16 nt, Synthetic Construct
  source 1..16: mol_type = other RNA
atgcaagtcgaacggt

SEQ ID NO: 10478 - RNA, 27 nt, Synthetic Construct
  source 1..27: mol_type = other RNA
ccccccactgctaagtttgactggctt

SEQ ID NO: 10479 - RNA, 36 nt, Synthetic Construct; identical to SEQ ID NO: 2344
  source 1..36: mol_type = other RNA

SEQ ID NO: 10480 - RNA, 22 nt, Synthetic Construct
  source 1..22: mol_type = other RNA
tgaggcagtaggttgtgtggtt

SEQ ID NO: 10481 - RNA, 20 nt, Synthetic Construct
  source 1..20: mol_type = other RNA
tcagtagctcgaggaaaaga

SEQ ID NO: 10482 - RNA, 23 nt, Synthetic Construct
  source 1..23: mol_type = other RNA
tctttggttatctagctgtatgt

SEQ ID NO: 10483 - RNA, 23 nt, Synthetic Construct
  source 1..23: mol_type = other RNA
tctttggttatctagctgtatgt

SEQ ID NO: 10484 - RNA, 17 nt, Synthetic Construct
  source 1..17: mol_type = other RNA
gtccggatcgtagtctg

SEQ ID NO: 10485 - RNA, 27 nt, Synthetic Construct
  source 1..27: mol_type = other RNA
ccccccaccgctaaatttgactggctt

SEQ ID NO: 10486 - RNA, 30 nt, Synthetic Construct; identical to SEQ ID NO: 2840
  source 1..30: mol_type = other RNA

SEQ ID NO: 10487 - RNA, 34 nt, Synthetic Construct; identical to SEQ ID NO: 2019
  source 1..34: mol_type = other RNA

SEQ ID NO: 10488 - RNA, 34 nt, Synthetic Construct; identical to SEQ ID NO: 2019
  source 1..34: mol_type = other RNA

SEQ ID NO: 10489 - RNA, 22 nt, Synthetic Construct
  source 1..22: mol_type = other RNA
cattgcacttgtcccggcctgt

SEQ ID NO: 10490 - RNA, 22 nt, Synthetic Construct
  source 1..22: mol_type = other RNA
cattgcacttgtcccggcctgt

SEQ ID NO: 10491 - RNA, 23 nt, Synthetic Construct
  source 1..23: mol_type = other RNA
aaaccgttaccattactgagttt

SEQ ID NO: 10492 - RNA, 23 nt, Synthetic Construct
  source 1..23: mol_type = other RNA
aaaccgttaccattactgagttt

SEQ ID NO: 10493 - RNA, 27 nt, Synthetic Construct
  source 1..27: mol_type = other RNA
agagcagctaataccgcatacgacctg

SEQ ID NO: 10494 - RNA, 27 nt, Synthetic Construct
  source 1..27: mol_type = other RNA
agagcagctaataccgcatacgacctg

SEQ ID NO: 10495 - RNA, 22 nt, Synthetic Construct
  source 1..22: mol_type = other RNA
tgagatagtaggttgtatagtt

SEQ ID NO: 10496 - RNA, 22 nt, Synthetic Construct
  source 1..22: mol_type = other RNA
tgagatagtaggttgtatagtt

SEQ ID NO: 10497 - RNA, 23 nt, Synthetic Construct
  source 1..23: mol_type = other RNA
tggggggcagagagcgagacttt

SEQ ID NO: 10498 - RNA, 15 nt, Synthetic Construct
  source 1..15: mol_type = other RNA
ccgcttttgtcaggg

SEQ ID NO: 10499 - RNA, 15 nt, Synthetic Construct
  source 1..15: mol_type = other RNA
ccgcttttgtcaggg

SEQ ID NO: 10500 - RNA, 23 nt, Synthetic Construct
  source 1..23: mol_type = other RNA
tggtaatacgacgtacttagcgt

SEQ ID NO: 10501 - RNA, 23 nt, Synthetic Construct
  source 1..23: mol_type = other RNA
tggtaatacgacgtacttagcgt

SEQ ID NO: 10502 - RNA, 42 nt, Synthetic Construct; identical to SEQ ID NO: 6990
  source 1..42: mol_type = other RNA

SEQ ID NO: 10503 - RNA, 42 nt, Synthetic Construct; identical to SEQ ID NO: 6990
  source 1..42: mol_type = other RNA

SEQ ID NO: 10504 - RNA, 16 nt, Synthetic Construct
  source 1..16: mol_type = other RNA
gtctacgaccatacca

SEQ ID NO: 10505 - RNA, 16 nt, Synthetic Construct
  source 1..16: mol_type = other RNA
gtctacgaccatacca

SEQ ID NO: 10506 - RNA, 21 nt, Synthetic Construct
  source 1..21: mol_type = other RNA
cgcatcccctagggcattggt

SEQ ID NO: 10507 - RNA, 21 nt, Synthetic Construct
  source 1..21: mol_type = other RNA
cgcatcccctagggcattggt

SEQ ID NO: 10508 - RNA, 31 nt, Synthetic Construct; identical to SEQ ID NO: 5506
  source 1..31: mol_type = other RNA

SEQ ID NO: 10509 - RNA, 31 nt, Synthetic Construct; identical to SEQ ID NO: 5506
  source 1..31: mol_type = other RNA

SEQ ID NO: 10510 - RNA, 21 nt, Synthetic Construct
  source 1..21: mol_type = other RNA
tgagaactgaattccatgggt

SEQ ID NO: 10511 - RNA, 21 nt, Synthetic Construct
  source 1..21: mol_type = other RNA
tgagaactgaattccatgggt

SEQ ID NO: 10512 - RNA, 20 nt, Synthetic Construct
  source 1..20: mol_type = other RNA
tgagatagtaggttgtgtgg

SEQ ID NO: 10513 - RNA, 23 nt, Synthetic Construct
  source 1..23: mol_type = other RNA
cgaatgttgctcggtgaacccct

SEQ ID NO: 10514 - RNA, 23 nt, Synthetic Construct
  source 1..23: mol_type = other RNA
cgaatgttgctcggtgaacccct

SEQ ID NO: 10515 - RNA, 25 nt, Synthetic Construct
  source 1..25: mol_type = other RNA
ttgaggatatgagatcgagacaaca

SEQ ID NO: 10516 - RNA, 22 nt, Synthetic Construct
  source 1..22: mol_type = other RNA
aggttccggataagtaagagcc

SEQ ID NO: 10517 - RNA, 22 nt, Synthetic Construct
  source 1..22: mol_type = other RNA
aggttccggataagtaagagcc

SEQ ID NO: 10518 - RNA, 16 nt, Synthetic Construct
  source 1..16: mol_type = other RNA
gtccccttcgtctaga

SEQ ID NO: 10519 - RNA, 22 nt, Synthetic Construct
  source 1..22: mol_type = other RNA
tgaggtagtaggttgtgaggtt

SEQ ID NO: 10520 - RNA, 22 nt, Synthetic Construct
  source 1..22: mol_type = other RNA
tgaggtagtaggttgtgaggtt

SEQ ID NO: 10521 - RNA, 22 nt, Synthetic Construct
  source 1..22: mol_type = other RNA
ngaggtagtaggttgtatagtt

SEQ ID NO: 10522 - RNA, 21 nt, Synthetic Construct
  source 1..21: mol_type = other RNA
tgaggtagtagattgtataga

SEQ ID NO: 10523 - RNA, 21 nt, Synthetic Construct
  source 1..21: mol_type = other RNA
tgaggtagtagattgtataga

SEQ ID NO: 10524 - RNA, 20 nt, Synthetic Construct
  source 1..20: mol_type = other RNA
ctctaatgagactgccggtg

SEQ ID NO: 10525 - RNA, 20 nt, Synthetic Construct
  source 1..20: mol_type = other RNA
ctctaatgagactgccggtg

SEQ ID NO: 10526 - RNA, 23 nt, Synthetic Construct
  source 1..23: mol_type = other RNA
atgacacgatcactcccgttgag

SEQ ID NO: 10527 - RNA, 23 nt, Synthetic Construct
  source 1..23: mol_type = other RNA
atgacacgatcactcccgttgag

SEQ ID NO: 10528 - RNA, 22 nt, Synthetic Construct
  source 1..22: mol_type = other RNA
tcgtaccgtgagtaataacgcg

SEQ ID NO: 10529 - RNA, 32 nt, Synthetic Construct; identical to SEQ ID NO: 4509
  source 1..32: mol_type = other RNA

SEQ ID NO: 10530 - RNA, 32 nt, Synthetic Construct; identical to SEQ ID NO: 4509
  source 1..32: mol_type = other RNA

SEQ ID NO: 10531 - RNA, 31 nt, Synthetic Construct; identical to SEQ ID NO: 1627
  source 1..31: mol_type = other RNA

SEQ ID NO: 10532 - RNA, 31 nt, Synthetic Construct; identical to SEQ ID NO: 1627
  source 1..31: mol_type = other RNA

SEQ ID NO: 10533 - RNA, 20 nt, Synthetic Construct
  source 1..20: mol_type = other RNA
acccttgtcattagttgcta

SEQ ID NO: 10534 - RNA, 20 nt, Synthetic Construct
  source 1..20: mol_type = other RNA
acccttgtcattagttgcta

SEQ ID NO: 10535 - RNA, 22 nt, Synthetic Construct
  source 1..22: mol_type = other RNA
cattgcacttgtcccggcctgt

SEQ ID NO: 10536 - RNA, 22 nt, Synthetic Construct
  source 1..22: mol_type = other RNA
tgaggtaggaggttgtatagtt

SEQ ID NO: 10537 - RNA, 22 nt, Synthetic Construct
  source 1..22: mol_type = other RNA
ttcgagtaatccaggataggct

SEQ ID NO: 10538 - RNA, 28 nt, Synthetic Construct
  source 1..28: mol_type = other RNA
ccccccactgctaaatttgaccggcttt

SEQ ID NO: 10539 - RNA, 30 nt, Synthetic Construct
  source 1..30: mol_type = other RNA
agcagagtggcgcagcggaagcgtgctggg

SEQ ID NO: 10540 - RNA, 30 nt, Synthetic Construct; identical to SEQ ID NO: 10539
  source 1..30: mol_type = other RNA

SEQ ID NO: 10541 - RNA, 23 nt, Synthetic Construct
  source 1..23: mol_type = other RNA
tacagtagtctgcacattggttt

SEQ ID NO: 10542 - RNA, 23 nt, Synthetic Construct
  source 1..23: mol_type = other RNA
tacagtagtctgcacattggttt

SEQ ID NO: 10543 - RNA, 22 nt, Synthetic Construct
  source 1..22: mol_type = other RNA
tggaatgtagagaagtatgtat

SEQ ID NO: 10544 - RNA, 22 nt, Synthetic Construct
  source 1..22: mol_type = other RNA
tatgtcccacccccactcctgt

SEQ ID NO: 10545 - RNA, 22 nt, Synthetic Construct
  source 1..22: mol_type = other RNA
tatgtcccacccccactcctgt

SEQ ID NO: 10546 - RNA, 16 nt, Synthetic Construct
  source 1..16: mol_type = other RNA
accgcttttgtcaggg

SEQ ID NO: 10547 - RNA, 16 nt, Synthetic Construct
  source 1..16: mol_type = other RNA
accgcttttgtcaggg

SEQ ID NO: 10548 - RNA, 21 nt, Synthetic Construct
  source 1..21: mol_type = other RNA
tgaggtagtagtttgtgccgt

SEQ ID NO: 10549 - RNA, 20 nt, Synthetic Construct
  source 1..20: mol_type = other RNA
gctattgacgaccgtaccgc

SEQ ID NO: 10550 - RNA, 20 nt, Synthetic Construct
  source 1..20: mol_type = other RNA
caaagtgctgttcgtgcagg

SEQ ID NO: 10551 - RNA, 20 nt, Synthetic Construct
  source 1..20: mol_type = other RNA
caaagtgctgttcgtgcagg

SEQ ID NO: 10552 - RNA, 23 nt, Synthetic Construct
  source 1..23: mol_type = other RNA
tgagaggcagagagcgagacttt

SEQ ID NO: 10553 - RNA, 24 nt, Synthetic Construct
  source 1..24: mol_type = other RNA
aaaagctgggttgagagggcgaaa

SEQ ID NO: 10554 - RNA, 24 nt, Synthetic Construct
  source 1..24: mol_type = other RNA
aaaagctgggttgagagggcgaaa

SEQ ID NO: 10555 - RNA, 21 nt, Synthetic Construct
  source 1..21: mol_type = other RNA
gcccgtgttcggaagattttc

SEQ ID NO: 10556 - RNA, 21 nt, Synthetic Construct
  source 1..21: mol_type = other RNA
gcccgtgttcggaagattttc

SEQ ID NO: 10557 - RNA, 19 nt, Synthetic Construct
  source 1..19: mol_type = other RNA
tgtcaactggttgttggga

SEQ ID NO: 10558 - RNA, 19 nt, Synthetic Construct
  source 1..19: mol_type = other RNA
tgtcaactggttgttggga

SEQ ID NO: 10559 - RNA, 23 nt, Synthetic Construct
  source 1..23: mol_type = other RNA
tgtagtgtttcctactttatggt

SEQ ID NO: 10560 - RNA, 23 nt, Synthetic Construct
  source 1..23: mol_type = other RNA
tgtagtgtttcctactttatggt

SEQ ID NO: 10561 - RNA, 15 nt, Synthetic Construct
  source 1..15: mol_type = other RNA
gtccggcccgaggca

SEQ ID NO: 10562 - RNA, 15 nt, Synthetic Construct
  source 1..15: mol_type = other RNA
gtccggcccgaggca

SEQ ID NO: 10563 - RNA, 18 nt, Synthetic Construct
  source 1..18: mol_type = other RNA
atggccgggacagagggc

SEQ ID NO: 10564 - RNA, 18 nt, Synthetic Construct
  source 1..18: mol_type = other RNA
atggccgggacagagggc

SEQ ID NO: 10565 - RNA, 21 nt, Synthetic Construct
  source 1..21: mol_type = other RNA
tgaggtagtaggtcgtatagt

SEQ ID NO: 10566 - RNA, 22 nt, Synthetic Construct
  source 1..22: mol_type = other RNA
ngaggtagtaggttgtatagtt

SEQ ID NO: 10567 - RNA, 23 nt, Synthetic Construct
  source 1..23: mol_type = other RNA
tggtaatacgacgtacatagtgt

SEQ ID NO: 10568 - RNA, 21 nt, Synthetic Construct
  source 1..21: mol_type = other RNA
tgaggtagtagattgtataga

SEQ ID NO: 10569 - RNA, 22 nt, Synthetic Construct
  source 1..22: mol_type = other RNA
ccctgtactgagctgccccgag

SEQ ID NO: 10570 - RNA, 25 nt, Synthetic Construct
  source 1..25: mol_type = other RNA
ttggggatatgagatcgagacgaca

SEQ ID NO: 10571 - RNA, 16 nt, Synthetic Construct
  source 1..16: mol_type = other RNA
tgcacgaaagcgtggg

SEQ ID NO: 10572 - RNA, 25 nt, Synthetic Construct
  source 1..25: mol_type = other RNA
ttgaggatatgagatcgagacgaca

SEQ ID NO: 10573 - RNA, 25 nt, Synthetic Construct
  source 1..25: mol_type = other RNA
ttgaggatatgagatcgagacgaca

SEQ ID NO: 10574 - RNA, 18 nt, Synthetic Construct
  source 1..18: mol_type = other RNA
ccagtaaacggcggccgt

SEQ ID NO: 10575 - RNA, 18 nt, Synthetic Construct
  source 1..18: mol_type = other RNA
ccagtaaacggcggccgt

SEQ ID NO: 10576 - RNA, 16 nt, Synthetic Construct
  source 1..16: mol_type = other RNA
ttggcctcaagtcagg

SEQ ID NO: 10577 - RNA, 16 nt, Synthetic Construct
  source 1..16: mol_type = other RNA
ttggcctcaagtcagg

SEQ ID NO: 10578 - RNA, 19 nt, Synthetic Construct
  source 1..19: mol_type = other RNA
gtccggatcgtagtctgca

SEQ ID NO: 10579 - RNA, 19 nt, Synthetic Construct
  source 1..19: mol_type = other RNA
gtccggatcgtagtctgca

SEQ ID NO: 10580 - RNA, 23 nt, Synthetic Construct
  source 1..23: mol_type = other RNA
agcagcattgtacagggctatgc

SEQ ID NO: 10581 - RNA, 21 nt, Synthetic Construct
  source 1..21: mol_type = other RNA
tgaggtagtgggttgtgtggt

SEQ ID NO: 10582 - RNA, 21 nt, Synthetic Construct
  source 1..21: mol_type = other RNA
tgaggtagtgggttgtgtggt

SEQ ID NO: 10583 - RNA, 22 nt, Synthetic Construct
  source 1..22: mol_type = other RNA
catcgcacttgtctcggtctga

SEQ ID NO: 10584 - RNA, 15 nt, Synthetic Construct
  source 1..15: mol_type = other RNA
agttgaccgcctggg

SEQ ID NO: 10585 - RNA, 15 nt, Synthetic Construct
  source 1..15: mol_type = other RNA
agttgaccgcctggg

SEQ ID NO: 10586 - RNA, 21 nt, Synthetic Construct
  source 1..21: mol_type = other RNA
tgaggtagtagtttgtgccgt

SEQ ID NO: 10587 - RNA, 21 nt, Synthetic Construct
  source 1..21: mol_type = other RNA
tgaggtagtagtttgtgccgt

SEQ ID NO: 10588 - RNA, 21 nt, Synthetic Construct
  source 1..21: mol_type = other RNA
tgaggtagtaggttgtatagc

SEQ ID NO: 10589 - RNA, 20 nt, Synthetic Construct
  source 1..20: mol_type = other RNA
ctctaatgagactgccggtg

SEQ ID NO: 10590 - RNA, 22 nt, Synthetic Construct
  source 1..22: mol_type = other RNA
gtcagtttgtcaaataccccaa

SEQ ID NO: 10591 - RNA, 22 nt, Synthetic Construct
  source 1..22: mol_type = other RNA
tgaggtagtaggttgtatagtg

SEQ ID NO: 10592 - RNA, 22 nt, Synthetic Construct
  source 1..22: mol_type = other RNA
tggaatgtaaagaagtacgtat

SEQ ID NO: 10593 - RNA, 22 nt, Synthetic Construct
  source 1..22: mol_type = other RNA
tggggtagtagattgtatagtt

SEQ ID NO: 10594 - RNA, 17 nt, Synthetic Construct
  source 1..17: mol_type = other RNA
gccatgccgcgtgcggg

SEQ ID NO: 10595 - RNA, 17 nt, Synthetic Construct
  source 1..17: mol_type = other RNA
gccatgccgcgtgcggg

SEQ ID NO: 10596 - RNA, 18 nt, Synthetic Construct
  source 1..18: mol_type = other RNA
ggtgcaagcgttaatcgg

SEQ ID NO: 10597 - RNA, 18 nt, Synthetic Construct
  source 1..18: mol_type = other RNA
ggtgcaagcgttaatcgg

SEQ ID NO: 10598 - RNA, 21 nt, Synthetic Construct
  source 1..21: mol_type = other RNA
tgaggtaataggttgtgtggt

SEQ ID NO: 10599 - RNA, 21 nt, Synthetic Construct
  source 1..21: mol_type = other RNA
tgaggtaataggttgtgtggt

SEQ ID NO: 10600 - RNA, 19 nt, Synthetic Construct
  source 1..19: mol_type = other RNA
tccccggcatctccaccat

SEQ ID NO: 10601 - RNA, 19 nt, Synthetic Construct
  source 1..19: mol_type = other RNA
tccccggcatctccaccat

SEQ ID NO: 10602 - RNA, 32 nt, Synthetic Construct; identical to SEQ ID NO: 3713
  source 1..32: mol_type = other RNA

SEQ ID NO: 10603 - RNA, 22 nt, Synthetic Construct
  source 1..22: mol_type = other RNA
caaagtgcttacagtgcaggta

SEQ ID NO: 10604 - RNA, 22 nt, Synthetic Construct
  source 1..22: mol_type = other RNA
caaagtgcttacagtgcaggta

SEQ ID NO: 10605 - RNA, 22 nt, Synthetic Construct
  source 1..22: mol_type = other RNA
tattgcacttgtcccggcctgc

SEQ ID NO: 10606 - RNA, 22 nt, Synthetic Construct
  source 1..22: mol_type = other RNA
tattgcacttgtcccggcctgc

SEQ ID NO: 10607 - RNA, 18 nt, Synthetic Construct
  source 1..18: mol_type = other RNA
caacggaatcccaaaagc

SEQ ID NO: 10608 - RNA, 18 nt, Synthetic Construct
  source 1..18: mol_type = other RNA
caacggaatcccaaaagc

SEQ ID NO: 10609 - RNA, 33 nt, Synthetic Construct; identical to SEQ ID NO: 2395
  source 1..33: mol_type = other RNA

SEQ ID NO: 10610 - RNA, 21 nt, Synthetic Construct
  source 1..21: mol_type = other RNA
tgaggaagtagattgtatagt

SEQ ID NO: 10611 - RNA, 20 nt, Synthetic Construct
  source 1..20: mol_type = other RNA
cgcgacctcagatcagacgt

SEQ ID NO: 10612 - RNA, 20 nt, Synthetic Construct
  source 1..20: mol_type = other RNA
cgcgacctcagatcagacgt

SEQ ID NO: 10613 - RNA, 23 nt, Synthetic Construct
  source 1..23: mol_type = other RNA
taaggtgcatctagtgcagatag

SEQ ID NO: 10614 - RNA, 23 nt, Synthetic Construct
  source 1..23: mol_type = other RNA
tggtaataagacgtacttagtgt

SEQ ID NO: 10615 - RNA, 23 nt, Synthetic Construct
  source 1..23: mol_type = other RNA
tggtaataagacgtacttagtgt

SEQ ID NO: 10616 - RNA, 16 nt, Synthetic Construct
  source 1..16: mol_type = other RNA
ttggcctcaagtcagg

SEQ ID NO: 10617 - RNA, 16 nt, Synthetic Construct
  source 1..16: mol_type = other RNA
ttggcctcaagtcagg

SEQ ID NO: 10618 - RNA, 20 nt, Synthetic Construct
  source 1..20: mol_type = other RNA
tcggaagaaggggtgcctgg

SEQ ID NO: 10619 - RNA, 20 nt, Synthetic Construct
  source 1..20: mol_type = other RNA
tcggaagaaggggtgcctgg

SEQ ID NO: 10620 - RNA, 23 nt, Synthetic Construct
  source 1..23: mol_type = other RNA
tggtaatatgacgtacttagtgt

SEQ ID NO: 10621 - RNA, 22 nt, Synthetic Construct
  source 1..22: mol_type = other RNA
tggaatgtaaagaagcatgtat

SEQ ID NO: 10622 - RNA, 22 nt, Synthetic Construct
  source 1..22: mol_type = other RNA
tggaatgtaaagaagcatgtat

SEQ ID NO: 10623 - RNA, 35 nt, Synthetic Construct; identical to SEQ ID NO: 1160
  source 1..35: mol_type = other RNA

SEQ ID NO: 10624 - RNA, 35 nt, Synthetic Construct; identical to SEQ ID NO: 1160
  source 1..35: mol_type = other RNA

SEQ ID NO: 10625 - RNA, 28 nt, Synthetic Construct
  source 1..28: mol_type = other RNA
cgactcttagcggtggatcactcggctc

SEQ ID NO: 10626 - RNA, 28 nt, Synthetic Construct
  source 1..28: mol_type = other RNA
cgactcttagcggtggatcactcggctc

SEQ ID NO: 10627 - RNA, 25 nt, Synthetic Construct
  source 1..25: mol_type = other RNA
cctcgcgcgattggagcggccgata

SEQ ID NO: 10628 - RNA, 22 nt, Synthetic Construct
  source 1..22: mol_type = other RNA
tgttggttcaagcgtgtagtcg

SEQ ID NO: 10629 - RNA, 22 nt, Synthetic Construct
  source 1..22: mol_type = other RNA
tgttggttcaagcgtgtagtcg

SEQ ID NO: 10630 - RNA, 41 nt, Synthetic Construct
  source 1..41: mol_type = other RNA
agtaaggtcagctaaataagctatcgggcccataccccgaa

SEQ ID NO: 10631 - RNA, 41 nt, Synthetic Construct; identical to SEQ ID NO: 10630
  source 1..41: mol_type = other RNA

SEQ ID NO: 10632 - RNA, 24 nt, Synthetic Construct
  source 1..24: mol_type = other RNA
tgtgaacatccccgactggaagct

SEQ ID NO: 10633 - RNA, 23 nt, Synthetic Construct
  source 1..23: mol_type = other RNA
tggtaatacgacgtacatagtgt

SEQ ID NO: 10634 - RNA, 28 nt, Synthetic Construct
  source 1..28: mol_type = other RNA
ccccccgctgctaaatttgactggcttt

SEQ ID NO: 10635 - RNA, 23 nt, Synthetic Construct
  source 1..23: mol_type = other RNA
tgaggtagtagtttgtgctgttg

SEQ ID NO: 10636 - RNA, 22 nt, Synthetic Construct
  source 1..22: mol_type = other RNA
tgtggtagtagtttgtgctgtt

SEQ ID NO: 10637 - RNA, 22 nt, Synthetic Construct
  source 1..22: mol_type = other RNA
tgtggtagtagtttgtgctgtt

SEQ ID NO: 10638 - RNA, 24 nt, Synthetic Construct
  source 1..24: mol_type = other RNA
tcagcccgtgttcggaagattttc

SEQ ID NO: 10639 - RNA, 24 nt, Synthetic Construct
  source 1..24: mol_type = other RNA
tcagcccgtgttcggaagattttc

SEQ ID NO: 10640 - RNA, 22 nt, Synthetic Construct
  source 1..22: mol_type = other RNA
tcctgaactgagctgccccgag

SEQ ID NO: 10641 - RNA, 16 nt, Synthetic Construct
  source 1..16: mol_type = other RNA
gtctacggctatacca

SEQ ID NO: 10642 - RNA, 16 nt, Synthetic Construct
  source 1..16: mol_type = other RNA
gtctacggctatacca

SEQ ID NO: 10643 - RNA, 21 nt, Synthetic Construct
  source 1..21: mol_type = other RNA
cgaggtagtaggttgtgtggt

SEQ ID NO: 10644 - RNA, 21 nt, Synthetic Construct
  source 1..21: mol_type = other RNA
cgaggtagtaggttgtgtggt

SEQ ID NO: 10645 - RNA, 22 nt, Synthetic Construct
  source 1..22: mol_type = other RNA
tgaggtagaagattgtatagtt

SEQ ID NO: 10646 - RNA, 22 nt, Synthetic Construct
  source 1..22: mol_type = other RNA
tgaggtagaagattgtatagtt

SEQ ID NO: 10647 - RNA, 22 nt, Synthetic Construct
  source 1..22: mol_type = other RNA
tcagtgcatgacagaacttggt

SEQ ID NO: 10648 - RNA, 15 nt, Synthetic Construct
  source 1..15: mol_type = other RNA
accgcttttgtcagg

SEQ ID NO: 10649 - RNA, 15 nt, Synthetic Construct
  source 1..15: mol_type = other RNA
accgcttttgtcagg

SEQ ID NO: 10650 - RNA, 21 nt, Synthetic Construct
  source 1..21: mol_type = other RNA
tgaggtagtagatcgtatagt

SEQ ID NO: 10651 - RNA, 21 nt, Synthetic Construct
  source 1..21: mol_type = other RNA
caatggccgggacagagggct

SEQ ID NO: 10652 - RNA, 21 nt, Synthetic Construct
  source 1..21: mol_type = other RNA
caatggccgggacagagggct

SEQ ID NO: 10653 - RNA, 22 nt, Synthetic Construct
  source 1..22: mol_type = other RNA
tggaatgtagagaagtatgtat

SEQ ID NO: 10654 - RNA, 22 nt, Synthetic Construct
  source 1..22: mol_type = other RNA
tggaatgtagagaagtatgtat

SEQ ID NO: 10655 - RNA, 21 nt, Synthetic Construct
  source 1..21: mol_type = other RNA
tggagtgtgacaatggcgttt

SEQ ID NO: 10656 - RNA, 22 nt, Synthetic Construct
  source 1..22: mol_type = other RNA
tgaggtggtaggttgtatagtt

SEQ ID NO: 10657 - RNA, 20 nt, Synthetic Construct
  source 1..20: mol_type = other RNA
tcctgtaccgatcaatagtg

SEQ ID NO: 10658 - RNA, 20 nt, Synthetic Construct
  source 1..20: mol_type = other RNA
tcctgtaccgatcaatagtg

SEQ ID NO: 10659 - RNA, 23 nt, Synthetic Construct
  source 1..23: mol_type = other RNA
tgaggggcagagagcgagacctt

SEQ ID NO: 10660 - RNA, 23 nt, Synthetic Construct
  source 1..23: mol_type = other RNA
tcctgtactgagctgccccgagg

SEQ ID NO: 10661 - RNA, 23 nt, Synthetic Construct
  source 1..23: mol_type = other RNA
tcctgtactgagctgccccgagg

SEQ ID NO: 10662 - RNA, 17 nt, Synthetic Construct
  source 1..17: mol_type = other RNA
ggcccttatgggtaggg

SEQ ID NO: 10663 - RNA, 17 nt, Synthetic Construct
  source 1..17: mol_type = other RNA
ggcccttatgggtaggg

SEQ ID NO: 10664 - RNA, 22 nt, Synthetic Construct
  source 1..22: mol_type = other RNA
tcgaaccgtgagtaataatgcg

SEQ ID NO: 10665 - RNA, 17 nt, Synthetic Construct
  source 1..17: mol_type = other RNA
ttggagggcaagtctgg

SEQ ID NO: 10666 - RNA, 17 nt, Synthetic Construct
  source 1..17: mol_type = other RNA
ttggagggcaagtctgg

SEQ ID NO: 10667 - RNA, 22 nt, Synthetic Construct
  source 1..22: mol_type = other RNA
tcagcgccgatgatagtgcgga

SEQ ID NO: 10668 - RNA, 22 nt, Synthetic Construct
  source 1..22: mol_type = other RNA
tcagcgccgatgatagtgcgga

SEQ ID NO: 10669 - RNA, 36 nt, Synthetic Construct; identical to SEQ ID NO: 2248
  source 1..36: mol_type = other RNA

SEQ ID NO: 10670 - RNA, 36 nt, Synthetic Construct; identical to SEQ ID NO: 2366
  source 1..36: mol_type = other RNA

SEQ ID NO: 10671 - RNA, 36 nt, Synthetic Construct; identical to SEQ ID NO: 2366
  source 1..36: mol_type = other RNA

SEQ ID NO: 10672 - RNA, 22 nt, Synthetic Construct
  source 1..22: mol_type = other RNA
gtcagtttgtcaaataccccat

SEQ ID NO: 10673 - RNA, 23 nt, Synthetic Construct
  source 1..23: mol_type = other RNA
tgaggggcagagagcgggacttt

SEQ ID NO: 10674 - RNA, 21 nt, Synthetic Construct
  source 1..21: mol_type = other RNA
tgtcagtttgtcaaataccca

SEQ ID NO: 10675 - RNA, 20 nt, Synthetic Construct
  source 1..20: mol_type = other RNA
ctctaatgagactgccggtg

SEQ ID NO: 10676 - RNA, 21 nt, Synthetic Construct
  source 1..21: mol_type = other RNA
tgaggtagtagattgtatggt

SEQ ID NO: 10677 - RNA, 23 nt, Synthetic Construct
  source 1..23: mol_type = other RNA
gggtaatacgacgtacttagtgt

SEQ ID NO: 10678 - RNA, 21 nt, Synthetic Construct
  source 1..21: mol_type = other RNA
tgaggtggtaggttgtgtggt

SEQ ID NO: 10679 - RNA, 21 nt, Synthetic Construct
  source 1..21: mol_type = other RNA
tgaggtggtaggttgtgtggt

SEQ ID NO: 10680 - RNA, 23 nt, Synthetic Construct
  source 1..23: mol_type = other RNA
tcctgaactgagctgccccgagt

SEQ ID NO: 10681 - RNA, 23 nt, Synthetic Construct
  source 1..23: mol_type = other RNA
tcctgaactgagctgccccgagt

SEQ ID NO: 10682 - RNA, 18 nt, Synthetic Construct
  source 1..18: mol_type = other RNA
cctgaagaataagcaccg

SEQ ID NO: 10683 - RNA, 18 nt, Synthetic Construct
  source 1..18: mol_type = other RNA
cctgaagaataagcaccg

SEQ ID NO: 10684 - RNA, 22 nt, Synthetic Construct
  source 1..22: mol_type = other RNA
tcctgtactgagctgctccgag

SEQ ID NO: 10685 - RNA, 22 nt, Synthetic Construct
  source 1..22: mol_type = other RNA
tcctgtactgagctgctccgag

SEQ ID NO: 10686 - RNA, 18 nt, Synthetic Construct
  source 1..18: mol_type = other RNA
agggaacgtgagctgggt

SEQ ID NO: 10687 - RNA, 22 nt, Synthetic Construct
  source 1..22: mol_type = other RNA
catcgggaatgtcgtgtccgcc

SEQ ID NO: 10688 - RNA, 22 nt, Synthetic Construct
  source 1..22: mol_type = other RNA
catcgggaatgtcgtgtccgcc

SEQ ID NO: 10689 - RNA, 21 nt, Synthetic Construct
  source 1..21: mol_type = other RNA
cccaatacacggtcgacctct

SEQ ID NO: 10690 - RNA, 21 nt, Synthetic Construct
  source 1..21: mol_type = other RNA
cccaatacacggtcgacctct

SEQ ID NO: 10691 - RNA, 24 nt, Synthetic Construct
  source 1..24: mol_type = other RNA
tttccccttggggttgtaggacca

SEQ ID NO: 10692 - RNA, 24 nt, Synthetic Construct
  source 1..24: mol_type = other RNA
tttccccttggggttgtaggacca

SEQ ID NO: 10693 - RNA, 21 nt, Synthetic Construct
  source 1..21: mol_type = other RNA
caaagtgctgttcgtgcaggt

SEQ ID NO: 10694 - RNA, 35 nt, Synthetic Construct
  source 1..35: mol_type = other RNA
tcggaacgtgcccagtcgtgggggataactgctcg

SEQ ID NO: 10695 - RNA, 35 nt, Synthetic Construct; identical to SEQ ID NO: 10694
  source 1..35: mol_type = other RNA

SEQ ID NO: 10696 - RNA, 22 nt, Synthetic Construct
  source 1..22: mol_type = other RNA
tgaggtagtagattgtataatt

SEQ ID NO: 10697 - RNA, 22 nt, Synthetic Construct
  source 1..22: mol_type = other RNA
tgaggtagtagattgtataatt

SEQ ID NO: 10698 - RNA, 22 nt, Synthetic Construct
  source 1..22: mol_type = other RNA
tggaatgtgaagaagtatgtat

SEQ ID NO: 10699 - RNA, 26 nt, Synthetic Construct
  source 1..26: mol_type = other RNA
gcataagcgtgcttgactgcgagact

SEQ ID NO: 10700 - RNA, 26 nt, Synthetic Construct
  source 1..26: mol_type = other RNA
gcataagcgtgcttgactgcgagact

SEQ ID NO: 10701 - RNA, 23 nt, Synthetic Construct
  source 1..23: mol_type = other RNA
tggtgatacgacgtacttagtgt

SEQ ID NO: 10702 - RNA, 22 nt, Synthetic Construct
  source 1..22: mol_type = other RNA
ttataatacaacctgataagtg

SEQ ID NO: 10703 - RNA, 20 nt, Synthetic Construct
  source 1..20: mol_type = other RNA
tcctgtctgaatatgggggg

SEQ ID NO: 10704 - RNA, 22 nt, Synthetic Construct
  source 1..22: mol_type = other RNA
ccccttggggttgtaggaccac

SEQ ID NO: 10705 - RNA, 22 nt, Synthetic Construct
  source 1..22: mol_type = other RNA
ccccttggggttgtaggaccac

SEQ ID NO: 10706 - RNA, 22 nt, Synthetic Construct
  source 1..22: mol_type = other RNA
tggaatgtaaagaagtatgtac

SEQ ID NO: 10707 - RNA, 22 nt, Synthetic Construct
  source 1..22: mol_type = other RNA
tggaatgtaaagaagtatgtac

SEQ ID NO: 10708 - RNA, 22 nt, Synthetic Construct
  source 1..22: mol_type = other RNA
tgaagtagtaggttgtatagtt

SEQ ID NO: 10709 - RNA, 22 nt, Synthetic Construct
  source 1..22: mol_type = other RNA
tgaagtagtaggttgtatagtt

SEQ ID NO: 10710 - RNA, 22 nt, Synthetic Construct
  source 1..22: mol_type = other RNA
tcctgtactaagctgccccgag

SEQ ID NO: 10711 - RNA, 22 nt, Synthetic Construct
  source 1..22: mol_type = other RNA
tgggatgtaaagaagtatgtat

SEQ ID NO: 10712 - RNA, 15 nt, Synthetic Construct
  source 1..15: mol_type = other RNA
gcgtagatatgcgga

SEQ ID NO: 10713 - RNA, 15 nt, Synthetic Construct
  source 1..15: mol_type = other RNA
gcgtagatatgcgga

SEQ ID NO: 10714 - RNA, 22 nt, Synthetic Construct
  source 1..22: mol_type = other RNA
tgtggtagtagattgtatagtt

SEQ ID NO: 10715 - RNA, 27 nt, Synthetic Construct
  source 1..27: mol_type = other RNA
ccccccactgctaaatttggctggctt

SEQ ID NO: 10716 - RNA, 27 nt, Synthetic Construct
  source 1..27: mol_type = other RNA
ccccccactgctaaatttggctggctt

SEQ ID NO: 10717 - RNA, 23 nt, Synthetic Construct
  source 1..23: mol_type = other RNA
taacagtctacagccatggtcgt

SEQ ID NO: 10718 - RNA, 24 nt, Synthetic Construct
  source 1..24: mol_type = other RNA
tgtaaacatccctgactggaagct

SEQ ID NO: 10719 - RNA, 43 nt, Synthetic Construct; identical to SEQ ID NO: 1204
  source 1..43: mol_type = other RNA

SEQ ID NO: 10720 - RNA, 43 nt, Synthetic Construct; identical to SEQ ID NO: 1204
  source 1..43: mol_type = other RNA

SEQ ID NO: 10721 - RNA, 30 nt, Synthetic Construct; identical to SEQ ID NO: 751
  source 1..30: mol_type = other RNA

SEQ ID NO: 10722 - RNA, 30 nt, Synthetic Construct; identical to SEQ ID NO: 751
  source 1..30: mol_type = other RNA

SEQ ID NO: 10723 - RNA, 17 nt, Synthetic Construct
  source 1..17: mol_type = other RNA
tgccagcagccgcggta

SEQ ID NO: 10724 - RNA, 17 nt, Synthetic Construct
  source 1..17: mol_type = other RNA
tgccagcagccgcggta

SEQ ID NO: 10725 - RNA, 23 nt, Synthetic Construct
  source 1..23: mol_type = other RNA
gtcagtttgtcaaataccccatt

SEQ ID NO: 10726 - RNA, 23 nt, Synthetic Construct
  source 1..23: mol_type = other RNA
gtcagtttgtcaaataccccatt

SEQ ID NO: 10727 - RNA, 21 nt, Synthetic Construct
  source 1..21: mol_type = other RNA
gcagtagtctgcacattggtt

SEQ ID NO: 10728 - RNA, 21 nt, Synthetic Construct
  source 1..21: mol_type = other RNA
tgaggggcagagagcgagacc

SEQ ID NO: 10729 - RNA, 16 nt, Synthetic Construct
  source 1..16: mol_type = other RNA
ggtgggggtcgttggt

SEQ ID NO: 10730 - RNA, 24 nt, Synthetic Construct
  source 1..24: mol_type = other RNA
gctcactgatcgagtcgtcctgcg

SEQ ID NO: 10731 - RNA, 24 nt, Synthetic Construct
  source 1..24: mol_type = other RNA
gctcactgatcgagtcgtcctgcg

SEQ ID NO: 10732 - RNA, 21 nt, Synthetic Construct
  source 1..21: mol_type = other RNA
agccatcatttaaagaaagcg

SEQ ID NO: 10733 - RNA, 25 nt, Synthetic Construct
  source 1..25: mol_type = other RNA
ttggggatatgagatcgagacgaca

SEQ ID NO: 10734 - RNA, 35 nt, Synthetic Construct; identical to SEQ ID NO: 2402
  source 1..35: mol_type = other RNA

SEQ ID NO: 10735 - RNA, 22 nt, Synthetic Construct
  source 1..22: mol_type = other RNA
tcctgtactgagctgacccgag

SEQ ID NO: 10736 - RNA, 22 nt, Synthetic Construct
  source 1..22: mol_type = other RNA
tcctgtactgagctgacccgag

SEQ ID NO: 10737 - RNA, 21 nt, Synthetic Construct
  source 1..21: mol_type = other RNA
ccacctcccctgcaaacgtcc

SEQ ID NO: 10738 - RNA, 21 nt, Synthetic Construct
  source 1..21: mol_type = other RNA
ccacctcccctgcaaacgtcc

SEQ ID NO: 10739 - RNA, 22 nt, Synthetic Construct
  source 1..22: mol_type = other RNA
tgaggtagtagattgtatagct

SEQ ID NO: 10740 - RNA, 22 nt, Synthetic Construct
  source 1..22: mol_type = other RNA
agggctgggtcggtcgggctgg

SEQ ID NO: 10741 - RNA, 22 nt, Synthetic Construct
  source 1..22: mol_type = other RNA
agggctgggtcggtcgggctgg

SEQ ID NO: 10742 - RNA, 27 nt, Synthetic Construct
  source 1..27: mol_type = other RNA
ccccccactgcaaaatttgactggctt

SEQ ID NO: 10743 - RNA, 22 nt, Synthetic Construct
  source 1..22: mol_type = other RNA
tattgcacttgttccggcctgt

SEQ ID NO: 10744 - RNA, 20 nt, Synthetic Construct
  source 1..20: mol_type = other RNA
cgtaccgtgagtaataatgc

SEQ ID NO: 10745 - RNA, 21 nt, Synthetic Construct
  source 1..21: mol_type = other RNA
tccctgagaccctaacttgtg

SEQ ID NO: 10746 - RNA, 21 nt, Synthetic Construct
  source 1..21: mol_type = other RNA
tccctgagaccctaacttgtg

SEQ ID NO: 10747 - RNA, 18 nt, Synthetic Construct
  source 1..18: mol_type = other RNA
gtccccttcgtctagagg

SEQ ID NO: 10748 - RNA, 23 nt, Synthetic Construct
  source 1..23: mol_type = other RNA
tctttggttatctagctgtatga

SEQ ID NO: 10749 - RNA, 23 nt, Synthetic Construct
  source 1..23: mol_type = other RNA
tctttggttatctagctgtatga

SEQ ID NO: 10750 - RNA, 23 nt, Synthetic Construct
  source 1..23: mol_type = other RNA
cgaagtgctgttcgtgcaggtag

SEQ ID NO: 10751 - RNA, 23 nt, Synthetic Construct
  source 1..23: mol_type = other RNA
cgaagtgctgttcgtgcaggtag

SEQ ID NO: 10752 - RNA, 23 nt, Synthetic Construct
  source 1..23: mol_type = other RNA
tggtaatacgacgtactcagtgt

SEQ ID NO: 10753 - RNA, 23 nt, Synthetic Construct
  source 1..23: mol_type = other RNA
tggtaatacgacgtactcagtgt

SEQ ID NO: 10754 - RNA, 17 nt, Synthetic Construct
  source 1..17: mol_type = other RNA
catgcaagtcgaacggt

SEQ ID NO: 10755 - RNA, 17 nt, Synthetic Construct
  source 1..17: mol_type = other RNA
catgcaagtcgaacggt

SEQ ID NO: 10756 - RNA, 23 nt, Synthetic Construct
  source 1..23: mol_type = other RNA
tggtaatacgacgtacttagtgc

SEQ ID NO: 10757 - RNA, 23 nt, Synthetic Construct
  source 1..23: mol_type = other RNA
tggtaatacgacgtacttagtgc

SEQ ID NO: 10758 - RNA, 20 nt, Synthetic Construct
  source 1..20: mol_type = other RNA
caaagaattctccttttggg

SEQ ID NO: 10759 - RNA, 33 nt, Synthetic Construct; identical to SEQ ID NO: 2638
  source 1..33: mol_type = other RNA

SEQ ID NO: 10760 - RNA, 33 nt, Synthetic Construct; identical to SEQ ID NO: 2638
  source 1..33: mol_type = other RNA

SEQ ID NO: 10761 - RNA, 24 nt, Synthetic Construct
  source 1..24: mol_type = other RNA
ggttgtaaaccgcttttgtcaggg

SEQ ID NO: 10762 - RNA, 31 nt, Synthetic Construct; identical to SEQ ID NO: 2423
  source 1..31: mol_type = other RNA

SEQ ID NO: 10763 - RNA, 31 nt, Synthetic Construct; identical to SEQ ID NO: 2423
  source 1..31: mol_type = other RNA

SEQ ID NO: 10764 - RNA, 22 nt, Synthetic Construct
  source 1..22: mol_type = other RNA
ctgggtcggtcgggctggggcg

SEQ ID NO: 10765 - RNA, 22 nt, Synthetic Construct
  source 1..22: mol_type = other RNA
ctgggtcggtcgggctggggcg

SEQ ID NO: 10766 - RNA, 18 nt, Synthetic Construct
  source 1..18: mol_type = other RNA
accaaggggtcgtgggtt

SEQ ID NO: 10767 - RNA, 18 nt, Synthetic Construct
  source 1..18: mol_type = other RNA
accaaggggtcgtgggtt

SEQ ID NO: 10768 - RNA, 22 nt, Synthetic Construct
  source 1..22: mol_type = other RNA
tcgtaccgtgagtaataatgca

SEQ ID NO: 10769 - RNA, 22 nt, Synthetic Construct
  source 1..22: mol_type = other RNA
tcgtaccgtgagtaataatgca

SEQ ID NO: 10770 - RNA, 36 nt, Synthetic Construct; identical to SEQ ID NO: 744
  source 1..36: mol_type = other RNA

SEQ ID NO: 10771 - RNA, 22 nt, Synthetic Construct
  source 1..22: mol_type = other RNA
taaggtagtaggttgtatagtt

SEQ ID NO: 10772 - RNA, 16 nt, Synthetic Construct
  source 1..16: mol_type = other RNA
tgcacgaaagcgtggg

SEQ ID NO: 10773 - RNA, 16 nt, Synthetic Construct
  source 1..16: mol_type = other RNA
tgcacgaaagcgtggg

SEQ ID NO: 10774 - RNA, 22 nt, Synthetic Construct
  source 1..22: mol_type = other RNA
tgaggtagtagtttgtgctgct

SEQ ID NO: 10775 - RNA, 20 nt, Synthetic Construct
  source 1..20: mol_type = other RNA
acagtagtctgcacattggt

SEQ ID NO: 10776 - RNA, 20 nt, Synthetic Construct
  source 1..20: mol_type = other RNA
acagtagtctgcacattggt

SEQ ID NO: 10777 - RNA, 23 nt, Synthetic Construct
  source 1..23: mol_type = other RNA
caaagtgttgttcgtgcaggtag

SEQ ID NO: 10778 - RNA, 17 nt, Synthetic Construct
  source 1..17: mol_type = other RNA
caggacggtggccatgg

SEQ ID NO: 10779 - RNA, 17 nt, Synthetic Construct
  source 1..17: mol_type = other RNA
caggacggtggccatgg

SEQ ID NO: 10780 - RNA, 25 nt, Synthetic Construct
  source 1..25: mol_type = other RNA
ttgaggatatgagatcgagacggca

SEQ ID NO: 10781 - RNA, 25 nt, Synthetic Construct
  source 1..25: mol_type = other RNA
ttgaggatatgagatcgagacggca

SEQ ID NO: 10782 - RNA, 23 nt, Synthetic Construct
  source 1..23: mol_type = other RNA
tcggaatcgctagtaatcgcgga

SEQ ID NO: 10783 - RNA, 22 nt, Synthetic Construct
  source 1..22: mol_type = other RNA
tgaagtagtagtttgtgctgtt

SEQ ID NO: 10784 - RNA, 22 nt, Synthetic Construct
  source 1..22: mol_type = other RNA
tgaagtagtagtttgtgctgtt

SEQ ID NO: 10785 - RNA, 22 nt, Synthetic Construct
  source 1..22: mol_type = other RNA
tgaggtagtggtttgtgctgtt

SEQ ID NO: 10786 - RNA, 22 nt, Synthetic Construct
  source 1..22: mol_type = other RNA
tgaggtagtggtttgtgctgtt

SEQ ID NO: 10787 - RNA, 21 nt, Synthetic Construct
  source 1..21: mol_type = other RNA
tgaggtagtagattgtatggt

SEQ ID NO: 10788 - RNA, 21 nt, Synthetic Construct
  source 1..21: mol_type = other RNA
tgaggtagtagattgtatggt

SEQ ID NO: 10789 - RNA, 16 nt, Synthetic Construct
  source 1..16: mol_type = other RNA
ggcgggggtcgctggt

SEQ ID NO: 10790 - RNA, 16 nt, Synthetic Construct
  source 1..16: mol_type = other RNA
ggcgggggtcgctggt

SEQ ID NO: 10791 - RNA, 23 nt, Synthetic Construct
  source 1..23: mol_type = other RNA
tgaggtaggaggttgtatagtta

SEQ ID NO: 10792 - RNA, 23 nt, Synthetic Construct
  source 1..23: mol_type = other RNA
tccagtactgagctgccccgaga

SEQ ID NO: 10793 - RNA, 17 nt, Synthetic Construct
  source 1..17: mol_type = other RNA
tcccagaaacccggtcg

SEQ ID NO: 10794 - RNA, 17 nt, Synthetic Construct
  source 1..17: mol_type = other RNA
tcccagaaacccggtcg

SEQ ID NO: 10795 - RNA, 22 nt, Synthetic Construct
  source 1..22: mol_type = other RNA
gctcttgactgaagtcccagta

SEQ ID NO: 10796 - RNA, 25 nt, Synthetic Construct
  source 1..25: mol_type = other RNA
tgtaaacatccccgactggaagctt

SEQ ID NO: 10797 - RNA, 25 nt, Synthetic Construct
  source 1..25: mol_type = other RNA
tgtaaacatccccgactggaagctt

SEQ ID NO: 10798 - RNA, 17 nt, Synthetic Construct
  source 1..17: mol_type = other RNA
gggataactggcttgtg

SEQ ID NO: 10799 - RNA, 17 nt, Synthetic Construct
  source 1..17: mol_type = other RNA
gggataactggcttgtg

SEQ ID NO: 10800 - RNA, 22 nt, Synthetic Construct
  source 1..22: mol_type = other RNA
ttcaagtagtccaggataggct

SEQ ID NO: 10801 - RNA, 22 nt, Synthetic Construct
  source 1..22: mol_type = other RNA
tgaggcagtaggttgtatagtt

SEQ ID NO: 10802 - RNA, 35 nt, Synthetic Construct; identical to SEQ ID NO: 2518
  source 1..35: mol_type = other RNA

SEQ ID NO: 10803 - RNA, 34 nt, Synthetic Construct; identical to SEQ ID NO: 2186
  source 1..34: mol_type = other RNA

SEQ ID NO: 10804 - RNA, 34 nt, Synthetic Construct; identical to SEQ ID NO: 2186
  source 1..34: mol_type = other RNA

SEQ ID NO: 10805 - RNA, 25 nt, Synthetic Construct
  source 1..25: mol_type = other RNA
ctgaggatatgagatcgagacgaca

SEQ ID NO: 10806 - RNA, 35 nt, Synthetic Construct; identical to SEQ ID NO: 1497
  source 1..35: mol_type = other RNA

SEQ ID NO: 10807 - RNA, 22 nt, Synthetic Construct
  source 1..22: mol_type = other RNA
tgaggtagtagtttgtgcggtt

SEQ ID NO: 10808 - RNA, 15 nt, Synthetic Construct
  source 1..15: mol_type = other RNA
aaattccttgtcggg

SEQ ID NO: 10809 - RNA, 15 nt, Synthetic Construct
  source 1..15: mol_type = other RNA
aaattccttgtcggg

SEQ ID NO: 10810 - RNA, 22 nt, Synthetic Construct
  source 1..22: mol_type = other RNA
tgaggtagtaggttgtggggtt

SEQ ID NO: 10811 - RNA, 21 nt, Synthetic Construct
  source 1..21: mol_type = other RNA
ctagactgaagctccttgggg

SEQ ID NO: 10812 - RNA, 21 nt, Synthetic Construct
  source 1..21: mol_type = other RNA
ctagactgaagctccttgggg

SEQ ID NO: 10813 - RNA, 27 nt, Synthetic Construct
  source 1..27: mol_type = other RNA
ccgtgtgaaagtaggtcatcgtcaggc

SEQ ID NO: 10814 - RNA, 27 nt, Synthetic Construct
  source 1..27: mol_type = other RNA
ccgtgtgaaagtaggtcatcgtcaggc

SEQ ID NO: 10815 - RNA, 23 nt, Synthetic Construct
  source 1..23: mol_type = other RNA
agcagcgttgtacagggctatga

SEQ ID NO: 10816 - RNA, 22 nt, Synthetic Construct
  source 1..22: mol_type = other RNA
tcgtaccgtgagtaataatgtg

SEQ ID NO: 10817 - RNA, 22 nt, Synthetic Construct
  source 1..22: mol_type = other RNA
gcactctaatgagactgccggt

SEQ ID NO: 10818 - RNA, 22 nt, Synthetic Construct
  source 1..22: mol_type = other RNA
gcactctaatgagactgccggt

SEQ ID NO: 10819 - RNA, 21 nt, Synthetic Construct
  source 1..21: mol_type = other RNA
ttcggaagaaggggtgcctgg

SEQ ID NO: 10820 - RNA, 21 nt, Synthetic Construct
  source 1..21: mol_type = other RNA
ttcggaagaaggggtgcctgg

SEQ ID NO: 10821 - RNA, 23 nt, Synthetic Construct
  source 1..23: mol_type = other RNA
cgaggtagtaggttgtgtggttt

SEQ ID NO: 10822 - RNA, 17 nt, Synthetic Construct
  source 1..17: mol_type = other RNA
tgccagcagccgcggta

SEQ ID NO: 10823 - RNA, 17 nt, Synthetic Construct
  source 1..17: mol_type = other RNA
tgccagcagccgcggta

SEQ ID NO: 10824 - RNA, 22 nt, Synthetic Construct
  source 1..22: mol_type = other RNA
tgaggtggtagattgtatagtt

SEQ ID NO: 10825 - RNA, 24 nt, Synthetic Construct
  source 1..24: mol_type = other RNA
tgtaaacatcctcgactggaagct

SEQ ID NO: 10826 - RNA, 23 nt, Synthetic Construct
  source 1..23: mol_type = other RNA
tggtaatacgacgtactaagtgt

SEQ ID NO: 10827 - RNA, 23 nt, Synthetic Construct
  source 1..23: mol_type = other RNA
tggtaatacgacgtactaagtgt

SEQ ID NO: 10828 - RNA, 21 nt, Synthetic Construct
  source 1..21: mol_type = other RNA
cacgtcatacaatggccggga

SEQ ID NO: 10829 - RNA, 21 nt, Synthetic Construct
  source 1..21: mol_type = other RNA
cacgtcatacaatggccggga

SEQ ID NO: 10830 - RNA, 23 nt, Synthetic Construct
  source 1..23: mol_type = other RNA
caaggtgctgttcgtgcaggtag

SEQ ID NO: 10831 - RNA, 22 nt, Synthetic Construct
  source 1..22: mol_type = other RNA
tgaggtagtagtttgtgctatt

SEQ ID NO: 10832 - RNA, 32 nt, Synthetic Construct; identical to SEQ ID NO: 1675
  source 1..32: mol_type = other RNA

SEQ ID NO: 10833 - RNA, 32 nt, Synthetic Construct; identical to SEQ ID NO: 1675
  source 1..32: mol_type = other RNA

SEQ ID NO: 10834 - RNA, 18 nt, Synthetic Construct
  source 1..18: mol_type = other RNA
tgcgtagatatgcggagg

SEQ ID NO: 10835 - RNA, 18 nt, Synthetic Construct
  source 1..18: mol_type = other RNA
tgcgtagatatgcggagg

SEQ ID NO: 10836 - RNA, 22 nt, Synthetic Construct
  source 1..22: mol_type = other RNA
tgaggtagtaggttgtatagat

SEQ ID NO: 10837 - RNA, 26 nt, Synthetic Construct
  source 1..26: mol_type = other RNA
tcctgtactgagctgccccgagtttt

SEQ ID NO: 10838 - RNA, 21 nt, Synthetic Construct
  source 1..21: mol_type = other RNA
tcctgtactgagctgcctcga

SEQ ID NO: 10839 - RNA, 22 nt, Synthetic Construct
  source 1..22: mol_type = other RNA
tgaggtagtaggctgtatagtt

SEQ ID NO: 10840 - RNA, 22 nt, Synthetic Construct
  source 1..22: mol_type = other RNA
tgaggtagtaggctgtatagtt

SEQ ID NO: 10841 - RNA, 22 nt, Synthetic Construct
  source 1..22: mol_type = other RNA
aaaccgttaccattactgagtt

SEQ ID NO: 10842 - RNA, 22 nt, Synthetic Construct
  source 1..22: mol_type = other RNA
aaaccgttaccattactgagtt

SEQ ID NO: 10843 - RNA, 19 nt, Synthetic Construct
  source 1..19: mol_type = other RNA
ccagtaaacggcggccgta

SEQ ID NO: 10844 - RNA, 21 nt, Synthetic Construct
  source 1..21: mol_type = other RNA
ggaatcgctagtaatcgcgga

SEQ ID NO: 10845 - RNA, 23 nt, Synthetic Construct
  source 1..23: mol_type = other RNA
tccctgtcctccaggagctcacg

SEQ ID NO: 10846 - RNA, 23 nt, Synthetic Construct
  source 1..23: mol_type = other RNA
tccctgtcctccaggagctcacg

SEQ ID NO: 10847 - RNA, 25 nt, Synthetic Construct
  source 1..25: mol_type = other RNA
ttgaggatatgaggtcgagacgaca

SEQ ID NO: 10848 - RNA, 31 nt, Synthetic Construct; identical to SEQ ID NO: 9212
  source 1..31: mol_type = other RNA

SEQ ID NO: 10849 - RNA, 31 nt, Synthetic Construct; identical to SEQ ID NO: 9212
  source 1..31: mol_type = other RNA

SEQ ID NO: 10850 - RNA, 25 nt, Synthetic Construct
  source 1..25: mol_type = other RNA
agctcactgatcgagtcgtcctgcg

SEQ ID NO: 10851 - RNA, 25 nt, Synthetic Construct
  source 1..25: mol_type = other RNA
agctcactgatcgagtcgtcctgcg

SEQ ID NO: 10852 - RNA, 23 nt, Synthetic Construct
  source 1..23: mol_type = other RNA
caaagtgctgttcgtgcaggtgg

SEQ ID NO: 10853 - RNA, 23 nt, Synthetic Construct
  source 1..23: mol_type = other RNA
caaagtgctgttcgtgcaggtgg

SEQ ID NO: 10854 - RNA, 17 nt, Synthetic Construct
  source 1..17: mol_type = other RNA
accggaggaaggtgggg

SEQ ID NO: 10855 - RNA, 32 nt, Synthetic Construct; identical to SEQ ID NO: 4509
  source 1..32: mol_type = other RNA

SEQ ID NO: 10856 - RNA, 32 nt, Synthetic Construct; identical to SEQ ID NO: 4509
  source 1..32: mol_type = other RNA

SEQ ID NO: 10857 - RNA, 24 nt, Synthetic Construct
  source 1..24: mol_type = other RNA
ctcactgatcgagtcgtcctgcgc

SEQ ID NO: 10858 - RNA, 24 nt, Synthetic Construct
  source 1..24: mol_type = other RNA
ctcactgatcgagtcgtcctgcgc

SEQ ID NO: 10859 - RNA, 22 nt, Synthetic Construct
  source 1..22: mol_type = other RNA
tgaggtagtaggctgtatagtt

SEQ ID NO: 10860 - RNA, 24 nt, Synthetic Construct
  source 1..24: mol_type = other RNA
agcaacattgtctgctgggtttct

SEQ ID NO: 10861 - RNA, 24 nt, Synthetic Construct
  source 1..24: mol_type = other RNA
aaaccgttaccattactgagttta

SEQ ID NO: 10862 - RNA, 24 nt, Synthetic Construct
  source 1..24: mol_type = other RNA
aaaccgttaccattactgagttta

SEQ ID NO: 10863 - RNA, 21 nt, Synthetic Construct
  source 1..21: mol_type = other RNA
attagtgacgcgcatgaatgg

SEQ ID NO: 10864 - RNA, 21 nt, Synthetic Construct
  source 1..21: mol_type = other RNA
attagtgacgcgcatgaatgg

SEQ ID NO: 10865 - RNA, 22 nt, Synthetic Construct
  source 1..22: mol_type = other RNA
tcctgcactgagctgccccgag

SEQ ID NO: 10866 - RNA, 21 nt, Synthetic Construct
  source 1..21: mol_type = other RNA
tccctgagaccctaacttgtg

SEQ ID NO: 10867 - RNA, 21 nt, Synthetic Construct
  source 1..21: mol_type = other RNA
tccctgagaccctaacttgtg

SEQ ID NO: 10868 - RNA, 22 nt, Synthetic Construct
  source 1..22: mol_type = other RNA
tctttgttcgattccgttgagt

SEQ ID NO: 10869 - RNA, 22 nt, Synthetic Construct
  source 1..22: mol_type = other RNA
tctttgttcgattccgttgagt

SEQ ID NO: 10870 - RNA, 19 nt, Synthetic Construct
  source 1..19: mol_type = other RNA
gttctacagtccgacgatc

SEQ ID NO: 10871 - RNA, 19 nt, Synthetic Construct
  source 1..19: mol_type = other RNA
gttctacagtccgacgatc

SEQ ID NO: 10872 - RNA, 34 nt, Synthetic Construct; identical to SEQ ID NO: 2019
  source 1..34: mol_type = other RNA

SEQ ID NO: 10873 - RNA, 23 nt, Synthetic Construct
  source 1..23: mol_type = other RNA
tgataatacgacgtacttagtgt

SEQ ID NO: 10874 - RNA, 23 nt, Synthetic Construct
  source 1..23: mol_type = other RNA
tgataatacgacgtacttagtgt

SEQ ID NO: 10875 - RNA, 21 nt, Synthetic Construct
  source 1..21: mol_type = other RNA
ttataatacaacctgataagt

SEQ ID NO: 10876 - RNA, 21 nt, Synthetic Construct
  source 1..21: mol_type = other RNA
ttataatacaacctgataagt

SEQ ID NO: 10877 - RNA, 26 nt, Synthetic Construct
  source 1..26: mol_type = other RNA
tccctggtggtctagtggttaggatt

SEQ ID NO: 10878 - RNA, 26 nt, Synthetic Construct
  source 1..26: mol_type = other RNA
tccctggtggtctagtggttaggatt

SEQ ID NO: 10879 - RNA, 15 nt, Synthetic Construct
  source 1..15: mol_type = other RNA
ggccgtcgtcagctc

SEQ ID NO: 10880 - RNA, 15 nt, Synthetic Construct
  source 1..15: mol_type = other RNA
ggccgtcgtcagctc

SEQ ID NO: 10881 - RNA, 22 nt, Synthetic Construct
  source 1..22: mol_type = other RNA
tgaggtagcagattgtatagtt

SEQ ID NO: 10882 - RNA, 35 nt, Synthetic Construct; identical to SEQ ID NO: 2548
  source 1..35: mol_type = other RNA

SEQ ID NO: 10883 - RNA, 35 nt, Synthetic Construct; identical to SEQ ID NO: 2548
  source 1..35: mol_type = other RNA

SEQ ID NO: 10884 - RNA, 22 nt, Synthetic Construct
  source 1..22: mol_type = other RNA
tgaagtagtagtttgtgctgtt

SEQ ID NO: 10885 - RNA, 20 nt, Synthetic Construct
  source 1..20: mol_type = other RNA
tagcagcacataatggtttg

SEQ ID NO: 10886 - RNA, 20 nt, Synthetic Construct
  source 1..20: mol_type = other RNA
tagcagcacataatggtttg

SEQ ID NO: 10887 - RNA, 22 nt, Synthetic Construct
  source 1..22: mol_type = other RNA
ttgtaccgtgagtaataatgcg

SEQ ID NO: 10888 - RNA, 22 nt, Synthetic Construct
  source 1..22: mol_type = other RNA
ttgtaccgtgagtaataatgcg

SEQ ID NO: 10889 - RNA, 15 nt, Synthetic Construct
  source 1..15: mol_type = other RNA
accggaggaaggtgg

SEQ ID NO: 10890 - RNA, 15 nt, Synthetic Construct
  source 1..15: mol_type = other RNA
accggaggaaggtgg

SEQ ID NO: 10891 - RNA, 16 nt, Synthetic Construct
  source 1..16: mol_type = other RNA
cccctggacctgtact

SEQ ID NO: 10892 - RNA, 16 nt, Synthetic Construct
  source 1..16: mol_type = other RNA
cccctggacctgtact

SEQ ID NO: 10893 - RNA, 17 nt, Synthetic Construct
  source 1..17: mol_type = other RNA
cgaaattccttgtcggg

SEQ ID NO: 10894 - RNA, 17 nt, Synthetic Construct
  source 1..17: mol_type = other RNA
cgaaattccttgtcggg

SEQ ID NO: 10895 - RNA, 21 nt, Synthetic Construct
  source 1..21: mol_type = other RNA
cgcgacctcagatcagacgtg

SEQ ID NO: 10896 - RNA, 21 nt, Synthetic Construct
  source 1..21: mol_type = other RNA
cgcgacctcagatcagacgtg

SEQ ID NO: 10897 - RNA, 24 nt, Synthetic Construct
  source 1..24: mol_type = other RNA
cgggcctggttagtacttggatgg

SEQ ID NO: 10898 - RNA, 15 nt, Synthetic Construct
  source 1..15: mol_type = other RNA
cggcccagactccta

SEQ ID NO: 10899 - RNA, 15 nt, Synthetic Construct
  source 1..15: mol_type = other RNA
cggcccagactccta

SEQ ID NO: 10900 - RNA, 34 nt, Synthetic Construct; identical to SEQ ID NO: 2364
  source 1..34: mol_type = other RNA

SEQ ID NO: 10901 - RNA, 22 nt, Synthetic Construct
  source 1..22: mol_type = other RNA
tggaatgtaaggaagtatgtat

SEQ ID NO: 10902 - RNA, 17 nt, Synthetic Construct
  source 1..17: mol_type = other RNA
acagtgtgaatcggcgc

SEQ ID NO: 10903 - RNA, 17 nt, Synthetic Construct
  source 1..17: mol_type = other RNA
acagtgtgaatcggcgc

SEQ ID NO: 10904 - RNA, 22 nt, Synthetic Construct
  source 1..22: mol_type = other RNA
tgaggtagcaggttgtatagtt

SEQ ID NO: 10905 - RNA, 22 nt, Synthetic Construct
  source 1..22: mol_type = other RNA
tgaggtagcaggttgtatagtt

SEQ ID NO: 10906 - RNA, 19 nt, Synthetic Construct
  source 1..19: mol_type = other RNA
gcgccgatgatagtgcgga

SEQ ID NO: 10907 - RNA, 19 nt, Synthetic Construct
  source 1..19: mol_type = other RNA
gcgccgatgatagtgcgga

SEQ ID NO: 10908 - RNA, 16 nt, Synthetic Construct
  source 1..16: mol_type = other RNA
ctgacgctcatgcacg

SEQ ID NO: 10909 - RNA, 16 nt, Synthetic Construct
  source 1..16: mol_type = other RNA
ctgacgctcatgcacg

SEQ ID NO: 10910 - RNA, 19 nt, Synthetic Construct
  source 1..19: mol_type = other RNA
tgaggtagtaggttgtgtg

SEQ ID NO: 10911 - RNA, 17 nt, Synthetic Construct
  source 1..17: mol_type = other RNA
gtccggatcgtagtctg

SEQ ID NO: 10912 - RNA, 17 nt, Synthetic Construct
  source 1..17: mol_type = other RNA
gtccggatcgtagtctg

SEQ ID NO: 10913 - RNA, 19 nt, Synthetic Construct
  source 1..19: mol_type = other RNA
gcgaaattccttgtcgggt

SEQ ID NO: 10914 - RNA, 19 nt, Synthetic Construct
  source 1..19: mol_type = other RNA
gcgaaattccttgtcgggt

SEQ ID NO: 10915 - RNA, 22 nt, Synthetic Construct
  source 1..22: mol_type = other RNA
tgaggtagtaggttgtatagta

SEQ ID NO: 10916 - RNA, 22 nt, Synthetic Construct
  source 1..22: mol_type = other RNA
tgaggtagtaggttgtatagta

SEQ ID NO: 10917 - RNA, 23 nt, Synthetic Construct
  source 1..23: mol_type = other RNA
atgacacgatcactcccgttgag

SEQ ID NO: 10918 - RNA, 23 nt, Synthetic Construct
  source 1..23: mol_type = other RNA
atgacacgatcactcccgttgag

SEQ ID NO: 10919 - RNA, 21 nt, Synthetic Construct
  source 1..21: mol_type = other RNA
tgtaaacatcctcgactggaa

SEQ ID NO: 10920 - RNA, 31 nt, Synthetic Construct; identical to SEQ ID NO: 758
  source 1..31: mol_type = other RNA

SEQ ID NO: 10921 - RNA, 31 nt, Synthetic Construct; identical to SEQ ID NO: 758
  source 1..31: mol_type = other RNA

SEQ ID NO: 10922 - RNA, 36 nt, Synthetic Construct; identical to SEQ ID NO: 3596
  source 1..36: mol_type = other RNA

SEQ ID NO: 10923 - RNA, 36 nt, Synthetic Construct; identical to SEQ ID NO: 3596
  source 1..36: mol_type = other RNA

SEQ ID NO: 10924 - RNA, 22 nt, Synthetic Construct
  source 1..22: mol_type = other RNA
cattgcacttgtctcggcctga

SEQ ID NO: 10925 - RNA, 22 nt, Synthetic Construct
  source 1..22: mol_type = other RNA
cattgcacttgtctcggtctga

SEQ ID NO: 10926 - RNA, 22 nt, Synthetic Construct
  source 1..22: mol_type = other RNA
cattgcacttgtctcggtctga

SEQ ID NO: 10927 - RNA, 15 nt, Synthetic Construct
  source 1..15: mol_type = other RNA
cgagtgacgtagtgt

SEQ ID NO: 10928 - RNA, 15 nt, Synthetic Construct
  source 1..15: mol_type = other RNA
cgagtgacgtagtgt

SEQ ID NO: 10929 - RNA, 17 nt, Synthetic Construct
  source 1..17: mol_type = other RNA
cccctggacctgtactg

SEQ ID NO: 10930 - RNA, 17 nt, Synthetic Construct
  source 1..17: mol_type = other RNA
cccctggacctgtactg

SEQ ID NO: 10931 - RNA, 22 nt, Synthetic Construct
  source 1..22: mol_type = other RNA
tggaatgtaaagaagtatgcat

SEQ ID NO: 10932 - RNA, 19 nt, Synthetic Construct
  source 1..19: mol_type = other RNA
aacagtcaggatgttggct

SEQ ID NO: 10933 - RNA, 19 nt, Synthetic Construct
  source 1..19: mol_type = other RNA
aacagtcaggatgttggct

SEQ ID NO: 10934 - RNA, 22 nt, Synthetic Construct
  source 1..22: mol_type = other RNA
tggaatgcaaagaagtatgtat

SEQ ID NO: 10935 - RNA, 21 nt, Synthetic Construct
  source 1..21: mol_type = other RNA
cggtcccaagggtatggctgt

SEQ ID NO: 10936 - RNA, 24 nt, Synthetic Construct
  source 1..24: mol_type = other RNA
agcagcattgtacagggctatgag

SEQ ID NO: 10937 - RNA, 32 nt, Synthetic Construct
  source 1..32: mol_type = other RNA
cctcccggggctacgcctgtctgagcgtcgct

SEQ ID NO: 10938 - RNA, 21 nt, Synthetic Construct
  source 1..21: mol_type = other RNA
tatgtctgctgaccatcacct

SEQ ID NO: 10939 - RNA, 22 nt, Synthetic Construct
  source 1..22: mol_type = other RNA
tgttggttcaagcgtgtagtcg

SEQ ID NO: 10940 - RNA, 21 nt, Synthetic Construct
  source 1..21: mol_type = other RNA
gctattgacgaccgtaccgca

SEQ ID NO: 10941 - RNA, 21 nt, Synthetic Construct
  source 1..21: mol_type = other RNA
gctattgacgaccgtaccgca

SEQ ID NO: 10942 - RNA, 23 nt, Synthetic Construct
  source 1..23: mol_type = other RNA
tggtgatacgacgtacttagtgt

SEQ ID NO: 10943 - RNA, 23 nt, Synthetic Construct
  source 1..23: mol_type = other RNA
tggtgatacgacgtacttagtgt

SEQ ID NO: 10944 - RNA, 15 nt, Synthetic Construct
  source 1..15: mol_type = other RNA
gtcgacgtatagggt

SEQ ID NO: 10945 - RNA, 15 nt, Synthetic Construct
  source 1..15: mol_type = other RNA
gtcgacgtatagggt

SEQ ID NO: 10946 - RNA, 18 nt, Synthetic Construct
  source 1..18: mol_type = other RNA
ccaaggggtcgtgggttc

SEQ ID NO: 10947 - RNA, 18 nt, Synthetic Construct
  source 1..18: mol_type = other RNA
ccaaggggtcgtgggttc

SEQ ID NO: 10948 - RNA, 22 nt, Synthetic Construct
  source 1..22: mol_type = other RNA
ttataatacaacctgataagtg

SEQ ID NO: 10949 - RNA, 22 nt, Synthetic Construct
  source 1..22: mol_type = other RNA
ttataatacaacctgataagtg

SEQ ID NO: 10950 - RNA, 15 nt, Synthetic Construct
  source 1..15: mol_type = other RNA
gtcgacgtatagggt

SEQ ID NO: 10951 - RNA, 23 nt, Synthetic Construct
  source 1..23: mol_type = other RNA
agcagcattgtacagggctatgc

SEQ ID NO: 10952 - RNA, 18 nt, Synthetic Construct
  source 1..18: mol_type = other RNA
cagcactctgcaaagacg

SEQ ID NO: 10953 - RNA, 22 nt, Synthetic Construct
  source 1..22: mol_type = other RNA
ttcaagtaattcaggataggta

SEQ ID NO: 10954 - RNA, 20 nt, Synthetic Construct
  source 1..20: mol_type = other RNA
tgtcagtttgtcaaataccc

SEQ ID NO: 10955 - RNA, 16 nt, Synthetic Construct
  source 1..16: mol_type = other RNA
gactacggccatacca

SEQ ID NO: 10956 - RNA, 16 nt, Synthetic Construct
  source 1..16: mol_type = other RNA
gactacggccatacca

SEQ ID NO: 10957 - RNA, 23 nt, Synthetic Construct
  source 1..23: mol_type = other RNA
tggaatgtaaagaagtatgtatt

SEQ ID NO: 10958 - RNA, 23 nt, Synthetic Construct
  source 1..23: mol_type = other RNA
tggaatgtaaagaagtatgtatt

SEQ ID NO: 10959 - RNA, 24 nt, Synthetic Construct
  source 1..24: mol_type = other RNA
tgtaaacatccccgactgggagct

SEQ ID NO: 10960 - RNA, 24 nt, Synthetic Construct
  source 1..24: mol_type = other RNA
tgtaaacatccccgactgggagct

SEQ ID NO: 10961 - RNA, 31 nt, Synthetic Construct; identical to SEQ ID NO: 1881
  source 1..31: mol_type = other RNA

SEQ ID NO: 10962 - RNA, 15 nt, Synthetic Construct
  source 1..15: mol_type = other RNA
ggtgaaagcggggga

SEQ ID NO: 10963 - RNA, 33 nt, Synthetic Construct; identical to SEQ ID NO: 2386
  source 1..33: mol_type = other RNA

SEQ ID NO: 10964 - RNA, 20 nt, Synthetic Construct
  source 1..20: mol_type = other RNA
tgacctatgaattgacagcc

SEQ ID NO: 10965 - RNA, 20 nt, Synthetic Construct
  source 1..20: mol_type = other RNA
tgacctatgaattgacagcc

SEQ ID NO: 10966 - RNA, 22 nt, Synthetic Construct
  source 1..22: mol_type = other RNA
ggaggagttcgaaggtacgcta

SEQ ID NO: 10967 - RNA, 17 nt, Synthetic Construct
  source 1..17: mol_type = other RNA
agggaacgtgagctggg

SEQ ID NO: 10968 - RNA, 17 nt, Synthetic Construct
  source 1..17: mol_type = other RNA
agggaacgtgagctggg

SEQ ID NO: 10969 - RNA, 27 nt, Synthetic Construct
  source 1..27: mol_type = other RNA
gctttacattggactttgaacagatct

SEQ ID NO: 10970 - RNA, 27 nt, Synthetic Construct
  source 1..27: mol_type = other RNA
gctttacattggactttgaacagatct

SEQ ID NO: 10971 - RNA, 27 nt, Synthetic Construct
  source 1..27: mol_type = other RNA
ccccccactgctaaacttgactggctt

SEQ ID NO: 10972 - RNA, 22 nt, Synthetic Construct
  source 1..22: mol_type = other RNA
tgaggtagtaggttgtatagct

SEQ ID NO: 10973 - RNA, 22 nt, Synthetic Construct
  source 1..22: mol_type = other RNA
tggaatgtaaggaagtatgtat

SEQ ID NO: 10974 - RNA, 22 nt, Synthetic Construct
  source 1..22: mol_type = other RNA
tggaatgtaaggaagtatgtat

SEQ ID NO: 10975 - RNA, 22 nt, Synthetic Construct
  source 1..22: mol_type = other RNA
tcgtaccgtgagtaataacgcg

SEQ ID NO: 10976 - RNA, 22 nt, Synthetic Construct
  source 1..22: mol_type = other RNA
tcgtaccgtgagtaataacgcg

SEQ ID NO: 10977 - RNA, 17 nt, Synthetic Construct
  source 1..17: mol_type = other RNA
taggtcatcgtcaggct

SEQ ID NO: 10978 - RNA, 17 nt, Synthetic Construct
  source 1..17: mol_type = other RNA
taggtcatcgtcaggct

SEQ ID NO: 10979 - RNA, 22 nt, Synthetic Construct
  source 1..22: mol_type = other RNA
tggaatgtaaagaggtatgtat

SEQ ID NO: 10980 - RNA, 22 nt, Synthetic Construct
  source 1..22: mol_type = other RNA
tggaatgtaaagaggtatgtat

SEQ ID NO: 10981 - RNA, 22 nt, Synthetic Construct
  source 1..22: mol_type = other RNA
tgaagtagtagtttgtgctgtt

SEQ ID NO: 10982 - RNA, 36 nt, Synthetic Construct
  source 1..36: mol_type = other RNA
tccctggtggtctagtggttaggattcggcgctctc

SEQ ID NO: 10983 - RNA, 36 nt, Synthetic Construct; identical to SEQ ID NO: 10982
  source 1..36: mol_type = other RNA

SEQ ID NO: 10984 - RNA, 21 nt, Synthetic Construct
  source 1..21: mol_type = other RNA
tctcccaacccttgtaccagt

SEQ ID NO: 10985 - RNA, 21 nt, Synthetic Construct
  source 1..21: mol_type = other RNA
tctcccaacccttgtaccagt

SEQ ID NO: 10986 - RNA, 22 nt, Synthetic Construct
  source 1..22: mol_type = other RNA
taggtagtttcctgttgttggg

SEQ ID NO: 10987 - RNA, 16 nt, Synthetic Construct
  source 1..16: mol_type = other RNA
gtaaacggcgggagta

SEQ ID NO: 10988 - RNA, 16 nt, Synthetic Construct
  source 1..16: mol_type = other RNA
gtaaacggcgggagta

SEQ ID NO: 10989 - RNA, 21 nt, Synthetic Construct
  source 1..21: mol_type = other RNA
tcctgaactgagctgccccga

SEQ ID NO: 10990 - RNA, 21 nt, Synthetic Construct
  source 1..21: mol_type = other RNA
tcctgaactgagctgccccga

SEQ ID NO: 10991 - RNA, 31 nt, Synthetic Construct; identical to SEQ ID NO: 2333
  source 1..31: mol_type = other RNA

SEQ ID NO: 10992 - RNA, 21 nt, Synthetic Construct
  source 1..21: mol_type = other RNA
tgaggtagtagattgtataga

SEQ ID NO: 10993 - RNA, 23 nt, Synthetic Construct
  source 1..23: mol_type = other RNA
agcagcattgtacagggctacga

SEQ ID NO: 10994 - RNA, 22 nt, Synthetic Construct
  source 1..22: mol_type = other RNA
caacggaatcccaaaagcagct

SEQ ID NO: 10995 - RNA, 22 nt, Synthetic Construct
  source 1..22: mol_type = other RNA
tgaggcagtagtttgtgctgtt

SEQ ID NO: 10996 - RNA, 24 nt, Synthetic Construct
  source 1..24: mol_type = other RNA
cggagaaggttagctcagccaact

SEQ ID NO: 10997 - RNA, 23 nt, Synthetic Construct
  source 1..23: mol_type = other RNA
tgaggtagtaggttgtatggttt

SEQ ID NO: 10998 - RNA, 33 nt, Synthetic Construct; identical to SEQ ID NO: 2395
  source 1..33: mol_type = other RNA

SEQ ID NO: 10999 - RNA, 33 nt, Synthetic Construct; identical to SEQ ID NO: 2395
  source 1..33: mol_type = other RNA

SEQ ID NO: 11000 - RNA, 31 nt, Synthetic Construct; identical to SEQ ID NO: 2293
  source 1..31: mol_type = other RNA

SEQ ID NO: 11001 - RNA, 31 nt, Synthetic Construct; identical to SEQ ID NO: 2293
  source 1..31: mol_type = other RNA

SEQ ID NO: 11002 - RNA, 20 nt, Synthetic Construct
  source 1..20: mol_type = other RNA
tgaggtagaaggttgtatag

SEQ ID NO: 11003 - RNA, 20 nt, Synthetic Construct
  source 1..20: mol_type = other RNA
tgaggtagaaggttgtatag

SEQ ID NO: 11004 - RNA, 21 nt, Synthetic Construct
  source 1..21: mol_type = other RNA
gctattgacgaccgtaccgca

SEQ ID NO: 11005 - RNA, 21 nt, Synthetic Construct
  source 1..21: mol_type = other RNA
tgaggggcagagagcgagact

SEQ ID NO: 11006 - RNA, 21 nt, Synthetic Construct
  source 1..21: mol_type = other RNA
tgaggggcagagagcgagact

SEQ ID NO: 11007 - RNA, 22 nt, Synthetic Construct
  source 1..22: mol_type = other RNA
tcgtaccgtgggtaataatgcg

SEQ ID NO: 11008 - RNA, 17 nt, Synthetic Construct
  source 1..17: mol_type = other RNA
atgcaagtcgaacggta

SEQ ID NO: 11009 - RNA, 17 nt, Synthetic Construct
  source 1..17: mol_type = other RNA
atgcaagtcgaacggta

SEQ ID NO: 11010 - RNA, 23 nt, Synthetic Construct
  source 1..23: mol_type = other RNA
taacactgtctggtaacgatgtt

SEQ ID NO: 11011 - RNA, 23 nt, Synthetic Construct
  source 1..23: mol_type = other RNA
taacactgtctggtaacgatgtt

SEQ ID NO: 11012 - RNA, 22 nt, Synthetic Construct
  source 1..22: mol_type = other RNA
tgtcagtttgccaaatacccca

SEQ ID NO: 11013 - RNA, 21 nt, Synthetic Construct
  source 1..21: mol_type = other RNA
tggagtgtggcaatggtgttt

SEQ ID NO: 11014 - RNA, 21 nt, Synthetic Construct
  source 1..21: mol_type = other RNA
tggagtgtggcaatggtgttt

SEQ ID NO: 11015 - RNA, 37 nt, Synthetic Construct; identical to SEQ ID NO: 2482
  source 1..37: mol_type = other RNA

SEQ ID NO: 11016 - RNA, 37 nt, Synthetic Construct; identical to SEQ ID NO: 2482
  source 1..37: mol_type = other RNA

SEQ ID NO: 11017 - RNA, 23 nt, Synthetic Construct
  source 1..23: mol_type = other RNA
tgaggggcagagagcgagacttc

SEQ ID NO: 11018 - RNA, 26 nt, Synthetic Construct
  source 1..26: mol_type = other RNA
gacttaccaaacctatgcaaactccg

SEQ ID NO: 11019 - RNA, 20 nt, Synthetic Construct
  source 1..20: mol_type = other RNA
tgaggtggtaggttgtgtgg

SEQ ID NO: 11020 - RNA, 20 nt, Synthetic Construct
  source 1..20: mol_type = other RNA
tgaggtggtaggttgtgtgg

SEQ ID NO: 11021 - RNA, 17 nt, Synthetic Construct
  source 1..17: mol_type = other RNA
cagtcaggatgttggct

SEQ ID NO: 11022 - RNA, 26 nt, Synthetic Construct
  source 1..26: mol_type = other RNA
atttccccttggggttgtaggaccac

SEQ ID NO: 11023 - RNA, 26 nt, Synthetic Construct
  source 1..26: mol_type = other RNA
atttccccttggggttgtaggaccac

SEQ ID NO: 11024 - RNA, 22 nt, Synthetic Construct
  source 1..22: mol_type = other RNA
tccaagtaatccaggataggct

SEQ ID NO: 11025 - RNA, 22 nt, Synthetic Construct
  source 1..22: mol_type = other RNA
tccaagtaatccaggataggct

SEQ ID NO: 11026 - RNA, 22 nt, Synthetic Construct
  source 1..22: mol_type = other RNA
tgaggtagtaggttgaatagtt

SEQ ID NO: 11027 - RNA, 22 nt, Synthetic Construct
  source 1..22: mol_type = other RNA
tgaggtagtaggttgaatagtt

SEQ ID NO: 11028 - RNA, 23 nt, Synthetic Construct
  source 1..23: mol_type = other RNA
ggtagcgaaattccttgtcgggt

SEQ ID NO: 11029 - RNA, 23 nt, Synthetic Construct
  source 1..23: mol_type = other RNA
ggtagcgaaattccttgtcgggt

SEQ ID NO: 11030 - RNA, 21 nt, Synthetic Construct
  source 1..21: mol_type = other RNA
acagtagtctgcacattggtt

SEQ ID NO: 11031 - RNA, 21 nt, Synthetic Construct
  source 1..21: mol_type = other RNA
acagtagtctgcacattggtt

SEQ ID NO: 11032 - RNA, 22 nt, Synthetic Construct
  source 1..22: mol_type = other RNA
tggaatgtaaagaggtatgtat

SEQ ID NO: 11033 - RNA, 23 nt, Synthetic Construct
  source 1..23: mol_type = other RNA
tccagtactgagctgccccgaga

SEQ ID NO: 11034 - RNA, 23 nt, Synthetic Construct
  source 1..23: mol_type = other RNA
tccagtactgagctgccccgaga

SEQ ID NO: 11035 - RNA, 36 nt, Synthetic Construct
  source 1..36: mol_type = other RNA
ccggagagcttagatgaggcgtgataacgagtctgc

SEQ ID NO: 11036 - RNA, 36 nt, Synthetic Construct; identical to SEQ ID NO: 11035
  source 1..36: mol_type = other RNA

SEQ ID NO: 11037 - RNA, 22 nt, Synthetic Construct
  source 1..22: mol_type = other RNA
taaggtagtagtttgtgctgtt

SEQ ID NO: 11038 - RNA, 22 nt, Synthetic Construct
  source 1..22: mol_type = other RNA
gcgttgcaaccagtgccggggg

SEQ ID NO: 11039 - RNA, 22 nt, Synthetic Construct
  source 1..22: mol_type = other RNA
gcgttgcaaccagtgccggggg

SEQ ID NO: 11040 - RNA, 23 nt, Synthetic Construct
  source 1..23: mol_type = other RNA
tcctgtacagagctgccccgaga

SEQ ID NO: 11041 - RNA, 23 nt, Synthetic Construct
  source 1..23: mol_type = other RNA
tggtaatacgacgtacttagtat

SEQ ID NO: 11042 - RNA, 23 nt, Synthetic Construct
  source 1..23: mol_type = other RNA
gactatagaactttccccctcat

SEQ ID NO: 11043 - RNA, 23 nt, Synthetic Construct
  source 1..23: mol_type = other RNA
gactatagaactttccccctcat

SEQ ID NO: 11044 - RNA, 22 nt, Synthetic Construct
  source 1..22: mol_type = other RNA
tggaatgtagagaagtatgtat

SEQ ID NO: 11045 - RNA, 18 nt, Synthetic Construct
  source 1..18: mol_type = other RNA
cacagtgtgaatcggcgc

SEQ ID NO: 11046 - RNA, 18 nt, Synthetic Construct
  source 1..18: mol_type = other RNA
cacagtgtgaatcggcgc

SEQ ID NO: 11047 - RNA, 22 nt, Synthetic Construct
  source 1..22: mol_type = other RNA
tcctgtactgaactgccccgag

SEQ ID NO: 11048 - RNA, 23 nt, Synthetic Construct
  source 1..23: mol_type = other RNA
cctccctcgggagggcgcgcggg

SEQ ID NO: 11049 - RNA, 23 nt, Synthetic Construct
  source 1..23: mol_type = other RNA
cctccctcgggagggcgcgcggg

SEQ ID NO: 11050 - RNA, 23 nt, Synthetic Construct
  source 1..23: mol_type = other RNA
tgaggaagtaggttgtgtggttt

SEQ ID NO: 11051 - RNA, 21 nt, Synthetic Construct
  source 1..21: mol_type = other RNA
cgtaccgtgagtaataatgcg

SEQ ID NO: 11052 - RNA, 23 nt, Synthetic Construct
  source 1..23: mol_type = other RNA
agggctgggtcggtcgggctggg

SEQ ID NO: 11053 - RNA, 23 nt, Synthetic Construct
  source 1..23: mol_type = other RNA
agggctgggtcggtcgggctggg

SEQ ID NO: 11054 - RNA, 20 nt, Synthetic Construct
  source 1..20: mol_type = other RNA
tgaggtagtaggttgtataa

SEQ ID NO: 11055 - RNA, 23 nt, Synthetic Construct
  source 1..23: mol_type = other RNA
tggtaatacgacgtacttagtgt

SEQ ID NO: 11056 - RNA, 23 nt, Synthetic Construct
  source 1..23: mol_type = other RNA
tggtaatacgacgtacttagtgt

SEQ ID NO: 11057 - RNA, 16 nt, Synthetic Construct
  source 1..16: mol_type = other RNA
gatttgggagtgctcg

SEQ ID NO: 11058 - RNA, 16 nt, Synthetic Construct
  source 1..16: mol_type = other RNA
gatttgggagtgctcg

SEQ ID NO: 11059 - RNA, 16 nt, Synthetic Construct
  source 1..16: mol_type = other RNA
tgacgcgcatgaatgg

SEQ ID NO: 11060 - RNA, 16 nt, Synthetic Construct
  source 1..16: mol_type = other RNA
tgacgcgcatgaatgg

SEQ ID NO: 11061 - RNA, 22 nt, Synthetic Construct
  source 1..22: mol_type = other RNA
tattgcacttgtcccggcctgc

SEQ ID NO: 11062 - RNA, 22 nt, Synthetic Construct
  source 1..22: mol_type = other RNA
tattgcacttgtcccggcctgc

SEQ ID NO: 11063 - RNA, 19 nt, Synthetic Construct
  source 1..19: mol_type = other RNA
catggccgttcttagttgg

SEQ ID NO: 11064 - RNA, 16 nt, Synthetic Construct
  source 1..16: mol_type = other RNA
gggtgaaagcggggga

SEQ ID NO: 11065 - RNA, 16 nt, Synthetic Construct
  source 1..16: mol_type = other RNA
gggtgaaagcggggga

SEQ ID NO: 11066 - RNA, 35 nt, Synthetic Construct; identical to SEQ ID NO: 2269
  source 1..35: mol_type = other RNA

SEQ ID NO: 11067 - RNA, 35 nt, Synthetic Construct; identical to SEQ ID NO: 2269
  source 1..35: mol_type = other RNA

SEQ ID NO: 11068 - RNA, 35 nt, Synthetic Construct; identical to SEQ ID NO: 2354
  source 1..35: mol_type = other RNA

SEQ ID NO: 11069 - RNA, 35 nt, Synthetic Construct; identical to SEQ ID NO: 2354
  source 1..35: mol_type = other RNA

SEQ ID NO: 11070 - RNA, 20 nt, Synthetic Construct
  source 1..20: mol_type = other RNA
cgcgacctcagatcagacgt

SEQ ID NO: 11071 - RNA, 20 nt, Synthetic Construct
  source 1..20: mol_type = other RNA
cgcgacctcagatcagacgt

SEQ ID NO: 11072 - RNA, 20 nt, Synthetic Construct
  source 1..20: mol_type = other RNA
tgaggtagtaggttgtgagg

SEQ ID NO: 11073 - RNA, 39 nt, Synthetic Construct; identical to SEQ ID NO: 759
  source 1..39: mol_type = other RNA

SEQ ID NO: 11074 - RNA, 17 nt, Synthetic Construct
  source 1..17: mol_type = other RNA
ccaaggggtcgtgggtt

SEQ ID NO: 11075 - RNA, 22 nt, Synthetic Construct
  source 1..22: mol_type = other RNA
tattgcacttgccccggcctgt

SEQ ID NO: 11076 - RNA, 19 nt, Synthetic Construct
  source 1..19: mol_type = other RNA
aaaccgttaccattactga

SEQ ID NO: 11077 - RNA, 19 nt, Synthetic Construct
  source 1..19: mol_type = other RNA
aaaccgttaccattactga

SEQ ID NO: 11078 - RNA, 22 nt, Synthetic Construct
  source 1..22: mol_type = other RNA
tggggtagtagtttgtgctgtt

SEQ ID NO: 11079 - RNA, 16 nt, Synthetic Construct
  source 1..16: mol_type = other RNA
tgcgtagatatgcgga

SEQ ID NO: 11080 - RNA, 16 nt, Synthetic Construct
  source 1..16: mol_type = other RNA
tgcgtagatatgcgga

SEQ ID NO: 11081 - RNA, 22 nt, Synthetic Construct
  source 1..22: mol_type = other RNA
tcctgtactgggctgccccgag

SEQ ID NO: 11082 - RNA, 36 nt, Synthetic Construct; identical to SEQ ID NO: 2344
  source 1..36: mol_type = other RNA

SEQ ID NO: 11083 - RNA, 36 nt, Synthetic Construct; identical to SEQ ID NO: 2344
  source 1..36: mol_type = other RNA

SEQ ID NO: 11084 - RNA, 21 nt, Synthetic Construct
  source 1..21: mol_type = other RNA
tacctggttgatcctgccagt

SEQ ID NO: 11085 - RNA, 21 nt, Synthetic Construct
  source 1..21: mol_type = other RNA
tacctggttgatcctgccagt

SEQ ID NO: 11086 - RNA, 34 nt, Synthetic Construct; identical to SEQ ID NO: 2367
  source 1..34: mol_type = other RNA

SEQ ID NO: 11087 - RNA, 22 nt, Synthetic Construct
  source 1..22: mol_type = other RNA
ggcagcattgtacagggctatg

SEQ ID NO: 11088 - RNA, 16 nt, Synthetic Construct
  source 1..16: mol_type = other RNA
ccaaggggtcgtgggt

SEQ ID NO: 11089 - RNA, 21 nt, Synthetic Construct
  source 1..21: mol_type = other RNA
actcggcgtggcgtcggtcgt

SEQ ID NO: 11090 - RNA, 22 nt, Synthetic Construct
  source 1..22: mol_type = other RNA
tattgcatttgtcccggcctgt

SEQ ID NO: 11091 - RNA, 26 nt, Synthetic Construct
  source 1..26: mol_type = other RNA
tccctggtggtctagtggttaggatt

SEQ ID NO: 11092 - RNA, 16 nt, Synthetic Construct
  source 1..16: mol_type = other RNA
cgtgagctgggtttag

SEQ ID NO: 11093 - RNA, 16 nt, Synthetic Construct
  source 1..16: mol_type = other RNA
cgtgagctgggtttag

SEQ ID NO: 11094 - RNA, 22 nt, Synthetic Construct
  source 1..22: mol_type = other RNA
tgaggtagtaggttgtgtggta

SEQ ID NO: 11095 - RNA, 22 nt, Synthetic Construct
  source 1..22: mol_type = other RNA
tgaggtagtaggttgtgtggta

SEQ ID NO: 11096 - RNA, 30 nt, Synthetic Construct; identical to SEQ ID NO: 2353
  source 1..30: mol_type = other RNA

SEQ ID NO: 11097 - RNA, 22 nt, Synthetic Construct
  source 1..22: mol_type = other RNA
cattgcacttgtctcggtccga

SEQ ID NO: 11098 - RNA, 23 nt, Synthetic Construct
  source 1..23: mol_type = other RNA
tcctgaactgagctgccccgaga

SEQ ID NO: 11099 - RNA, 23 nt, Synthetic Construct
  source 1..23: mol_type = other RNA
tcctgaactgagctgccccgaga

SEQ ID NO: 11100 - RNA, 37 nt, Synthetic Construct
  source 1..37: mol_type = other RNA
tagtggttaggattcggcgctctcaccgccgcggccc

SEQ ID NO: 11101 - RNA, 37 nt, Synthetic Construct; identical to SEQ ID NO: 11100
  source 1..37: mol_type = other RNA

SEQ ID NO: 11102 - RNA, 39 nt, Synthetic Construct; identical to SEQ ID NO: 759
  source 1..39: mol_type = other RNA

SEQ ID NO: 11103 - RNA, 19 nt, Synthetic Construct
  source 1..19: mol_type = other RNA
gtggtacgatcatacctgg

SEQ ID NO: 11104 - RNA, 19 nt, Synthetic Construct
  source 1..19: mol_type = other RNA
gtggtacgatcatacctgg

SEQ ID NO: 11105 - RNA, 22 nt, Synthetic Construct
  source 1..22: mol_type = other RNA
tgaggcagtagtttgtgctgtt

SEQ ID NO: 11106 - RNA, 22 nt, Synthetic Construct
  source 1..22: mol_type = other RNA
tgaggcagtagtttgtgctgtt

SEQ ID NO: 11107 - RNA, 19 nt, Synthetic Construct
  source 1..19: mol_type = other RNA
acatgcaagtcgaacggta

SEQ ID NO: 11108 - RNA, 37 nt, Synthetic Construct; identical to SEQ ID NO: 2447
  source 1..37: mol_type = other RNA

SEQ ID NO: 11109 - RNA, 37 nt, Synthetic Construct; identical to SEQ ID NO: 2447
  source 1..37: mol_type = other RNA

SEQ ID NO: 11110 - RNA, 23 nt, Synthetic Construct
  source 1..23: mol_type = other RNA
tacagtagtctgcacattggttt

SEQ ID NO: 11111 - RNA, 23 nt, Synthetic Construct
  source 1..23: mol_type = other RNA
tggtaatacgacgtacttagagt

SEQ ID NO: 11112 - RNA, 23 nt, Synthetic Construct
  source 1..23: mol_type = other RNA
tggtaatacgacgtacttagagt

SEQ ID NO: 11113 - RNA, 15 nt, Synthetic Construct
  source 1..15: mol_type = other RNA
atccctccgactccg

SEQ ID NO: 11114 - RNA, 35 nt, Synthetic Construct; identical to SEQ ID NO: 1490
  source 1..35: mol_type = other RNA

SEQ ID NO: 11115 - RNA, 18 nt, Synthetic Construct
  source 1..18: mol_type = other RNA
cgtgttcggaagattttc

SEQ ID NO: 11116 - RNA, 18 nt, Synthetic Construct
  source 1..18: mol_type = other RNA
cgtgttcggaagattttc

SEQ ID NO: 11117 - RNA, 22 nt, Synthetic Construct
  source 1..22: mol_type = other RNA
cctcgcgcgattggagcggccg

SEQ ID NO: 11118 - RNA, 23 nt, Synthetic Construct
  source 1..23: mol_type = other RNA
tcctgtaccgagctgccccgaga

SEQ ID NO: 11119 - RNA, 23 nt, Synthetic Construct
  source 1..23: mol_type = other RNA
agcagcattgtacagggctacga

SEQ ID NO: 11120 - RNA, 22 nt, Synthetic Construct
  source 1..22: mol_type = other RNA
tgaggtagtaggttatatagtt

SEQ ID NO: 11121 - RNA, 22 nt, Synthetic Construct
  source 1..22: mol_type = other RNA
cgaggtagtagattgtatagtt

SEQ ID NO: 11122 - RNA, 23 nt, Synthetic Construct
  source 1..23: mol_type = other RNA
tgaggaagtaggttgtgtggttt

SEQ ID NO: 11123 - RNA, 23 nt, Synthetic Construct
  source 1..23: mol_type = other RNA
tgaggaagtaggttgtgtggttt

SEQ ID NO: 11124 - RNA, 27 nt, Synthetic Construct
  source 1..27: mol_type = other RNA
gcccaggtggcggaattggtagacgca

SEQ ID NO: 11125 - RNA, 27 nt, Synthetic Construct
  source 1..27: mol_type = other RNA
gcccaggtggcggaattggtagacgca

SEQ ID NO: 11126 - RNA, 20 nt, Synthetic Construct
  source 1..20: mol_type = other RNA
tgagatagtaggttgtgtgg

SEQ ID NO: 11127 - RNA, 20 nt, Synthetic Construct
  source 1..20: mol_type = other RNA
tgagatagtaggttgtgtgg

SEQ ID NO: 11128 - RNA, 24 nt, Synthetic Construct
  source 1..24: mol_type = other RNA
tgtaaacatccccgactggaagct

SEQ ID NO: 11129 - RNA, 24 nt, Synthetic Construct
  source 1..24: mol_type = other RNA
tgtaaacatccccgactggaagct

SEQ ID NO: 11130 - RNA, 22 nt, Synthetic Construct
  source 1..22: mol_type = other RNA
tattgcacttgtcccagcctgt

SEQ ID NO: 11131 - RNA, 22 nt, Synthetic Construct
  source 1..22: mol_type = other RNA
tattgcacttgtcccagcctgt

SEQ ID NO: 11132 - RNA, 22 nt, Synthetic Construct
  source 1..22: mol_type = other RNA
taacactgtctggtaacgatgt

SEQ ID NO: 11133 - RNA, 22 nt, Synthetic Construct
  source 1..22: mol_type = other RNA
taacactgtctggtaacgatgt

SEQ ID NO: 11134 - RNA, 22 nt, Synthetic Construct
  source 1..22: mol_type = other RNA
tacgtcatcgttgtcatcgtca

SEQ ID NO: 11135 - RNA, 22 nt, Synthetic Construct
  source 1..22: mol_type = other RNA
tacgtcatcgttgtcatcgtca

SEQ ID NO: 11136 - RNA, 21 nt, Synthetic Construct
  source 1..21: mol_type = other RNA
tgtgactggttgaccagaggg

SEQ ID NO: 11137 - RNA, 20 nt, Synthetic Construct
  source 1..20: mol_type = other RNA
ccacctcccctgcaaacgtc

SEQ ID NO: 11138 - RNA, 20 nt, Synthetic Construct
  source 1..20: mol_type = other RNA
ccacctcccctgcaaacgtc

SEQ ID NO: 11139 - RNA, 23 nt, Synthetic Construct
  source 1..23: mol_type = other RNA
caaagtgctgttcgtgcaggcag

SEQ ID NO: 11140 - RNA, 22 nt, Synthetic Construct
  source 1..22: mol_type = other RNA
tggcagcacgtaaatattggcg

SEQ ID NO: 11141 - RNA, 22 nt, Synthetic Construct
  source 1..22: mol_type = other RNA
tggcagcacgtaaatattggcg

SEQ ID NO: 11142 - RNA, 15 nt, Synthetic Construct
  source 1..15: mol_type = other RNA
gctttgatccggaga

SEQ ID NO: 11143 - RNA, 23 nt, Synthetic Construct
  source 1..23: mol_type = other RNA
atatcggaacgtgcccagtcgtg

SEQ ID NO: 11144 - RNA, 22 nt, Synthetic Construct
  source 1..22: mol_type = other RNA
tgaggtagtagattgtatggtt

SEQ ID NO: 11145 - RNA, 24 nt, Synthetic Construct
  source 1..24: mol_type = other RNA
tgtaaacatccccgactggaggct

SEQ ID NO: 11146 - RNA, 24 nt, Synthetic Construct
  source 1..24: mol_type = other RNA
tgtaaacatccccgactggaggct

SEQ ID NO: 11147 - RNA, 19 nt, Synthetic Construct
  source 1..19: mol_type = other RNA
tgaggtagtaggttgtata

SEQ ID NO: 11148 - RNA, 22 nt, Synthetic Construct
  source 1..22: mol_type = other RNA
tgaggtagtagtttatgctgtt

SEQ ID NO: 11149 - RNA, 15 nt, Synthetic Construct
  source 1..15: mol_type = other RNA
gagagcctggacaca

SEQ ID NO: 11150 - RNA, 15 nt, Synthetic Construct
  source 1..15: mol_type = other RNA
gagagcctggacaca

SEQ ID NO: 11151 - RNA, 16 nt, Synthetic Construct
  source 1..16: mol_type = other RNA
tgcgtagatatgcgga

SEQ ID NO: 11152 - RNA, 24 nt, Synthetic Construct
  source 1..24: mol_type = other RNA
actcggcgtggcgtcggtcgtggt

SEQ ID NO: 11153 - RNA, 24 nt, Synthetic Construct
  source 1..24: mol_type = other RNA
actcggcgtggcgtcggtcgtggt

SEQ ID NO: 11154 - RNA, 25 nt, Synthetic Construct
  source 1..25: mol_type = other RNA
ttgaggatatgagatcgagacggca

SEQ ID NO: 11155 - RNA, 25 nt, Synthetic Construct
  source 1..25: mol_type = other RNA
tcgaggatatgagatcgagacgaca

SEQ ID NO: 11156 - RNA, 25 nt, Synthetic Construct
  source 1..25: mol_type = other RNA
tcgaggatatgagatcgagacgaca

SEQ ID NO: 11157 - RNA, 36 nt, Synthetic Construct; identical to SEQ ID NO: 2248
  source 1..36: mol_type = other RNA

SEQ ID NO: 11158 - RNA, 36 nt, Synthetic Construct; identical to SEQ ID NO: 2248
  source 1..36: mol_type = other RNA

SEQ ID NO: 11159 - RNA, 23 nt, Synthetic Construct
  source 1..23: mol_type = other RNA
tccagtactgagctgccccgagt

SEQ ID NO: 11160 - RNA, 23 nt, Synthetic Construct
  source 1..23: mol_type = other RNA
tccagtactgagctgccccgagt

SEQ ID NO: 11161 - RNA, 20 nt, Synthetic Construct
  source 1..20: mol_type = other RNA
tgaggtagaaggttgtatag

SEQ ID NO: 11162 - RNA, 20 nt, Synthetic Construct
  source 1..20: mol_type = other RNA
tgaggtagaaggttgtatag

SEQ ID NO: 11163 - RNA, 16 nt, Synthetic Construct
  source 1..16: mol_type = other RNA
ccggaggaaggtgggg

SEQ ID NO: 11164 - RNA, 16 nt, Synthetic Construct
  source 1..16: mol_type = other RNA
ccggaggaaggtgggg

SEQ ID NO: 11165 - RNA, 22 nt, Synthetic Construct
  source 1..22: mol_type = other RNA
tgagatagtaggttgtatagtt

SEQ ID NO: 11166 - RNA, 23 nt, Synthetic Construct
  source 1..23: mol_type = other RNA
aatgacacgatcactcccgttga

SEQ ID NO: 11167 - RNA, 24 nt, Synthetic Construct
  source 1..24: mol_type = other RNA
tgtcagtttgtcaaataccccaat

SEQ ID NO: 11168 - RNA, 24 nt, Synthetic Construct
  source 1..24: mol_type = other RNA
tgtcagtttgtcaaataccccaat

SEQ ID NO: 11169 - RNA, 16 nt, Synthetic Construct
  source 1..16: mol_type = other RNA
gccagcagccgcggta

SEQ ID NO: 11170 - RNA, 23 nt, Synthetic Construct
  source 1..23: mol_type = other RNA
atgtcccacccccactcctgttt

SEQ ID NO: 11171 - RNA, 23 nt, Synthetic Construct
  source 1..23: mol_type = other RNA
atgtcccacccccactcctgttt

SEQ ID NO: 11172 - RNA, 22 nt, Synthetic Construct
  source 1..22: mol_type = other RNA
tgaggtagtagatcgtatagtt

SEQ ID NO: 11173 - RNA, 25 nt, Synthetic Construct
  source 1..25: mol_type = other RNA
cctcgcgcgattggagcggccgata

SEQ ID NO: 11174 - RNA, 15 nt, Synthetic Construct
  source 1..15: mol_type = other RNA
cgactcttagcggtg

SEQ ID NO: 11175 - RNA, 15 nt, Synthetic Construct
  source 1..15: mol_type = other RNA
cgactcttagcggtg

SEQ ID NO: 11176 - RNA, 21 nt, Synthetic Construct
  source 1..21: mol_type = other RNA
atcggaacgtgcccagtcgtg

SEQ ID NO: 11177 - RNA, 22 nt, Synthetic Construct
  source 1..22: mol_type = other RNA
gagagcctggacacaggtgctg

SEQ ID NO: 11178 - RNA, 16 nt, Synthetic Construct
  source 1..16: mol_type = other RNA
tccggatcgtagtctg

SEQ ID NO: 11179 - RNA, 16 nt, Synthetic Construct
  source 1..16: mol_type = other RNA
tccggatcgtagtctg

SEQ ID NO: 11180 - RNA, 22 nt, Synthetic Construct
  source 1..22: mol_type = other RNA
taccagcacgtaaatattggcg

SEQ ID NO: 11181 - RNA, 21 nt, Synthetic Construct
  source 1..21: mol_type = other RNA
ctaggctgaagctccttgagg

SEQ ID NO: 11182 - RNA, 36 nt, Synthetic Construct; identical to SEQ ID NO: 2469
  source 1..36: mol_type = other RNA

SEQ ID NO: 11183 - RNA, 32 nt, Synthetic Construct; identical to SEQ ID NO: 2582
  source 1..32: mol_type = other RNA

SEQ ID NO: 11184 - RNA, 31 nt, Synthetic Construct; identical to SEQ ID NO: 758
  source 1..31: mol_type = other RNA

SEQ ID NO: 11185 - RNA, 31 nt, Synthetic Construct; identical to SEQ ID NO: 758
  source 1..31: mol_type = other RNA

SEQ ID NO: 11186 - RNA, 19 nt, Synthetic Construct
  source 1..19: mol_type = other RNA
gttctacagtccgacgatc

SEQ ID NO: 11187 - RNA, 19 nt, Synthetic Construct
  source 1..19: mol_type = other RNA
gttctacagtccgacgatc

SEQ ID NO: 11188 - RNA, 20 nt, Synthetic Construct
  source 1..20: mol_type = other RNA
ccttggggttgtaggaccac

SEQ ID NO: 11189 - RNA, 20 nt, Synthetic Construct
  source 1..20: mol_type = other RNA
ccttggggttgtaggaccac

SEQ ID NO: 11190 - RNA, 23 nt, Synthetic Construct
  source 1..23: mol_type = other RNA
cccagtgttcagactacctgttc

SEQ ID NO: 11191 - RNA, 22 nt, Synthetic Construct
  source 1..22: mol_type = other RNA
aaactccttaagcgaatctcgc

SEQ ID NO: 11192 - RNA, 22 nt, Synthetic Construct
  source 1..22: mol_type = other RNA
aaactccttaagcgaatctcgc

SEQ ID NO: 11193 - RNA, 21 nt, Synthetic Construct
  source 1..21: mol_type = other RNA
tccagtactgagctgccccga

SEQ ID NO: 11194 - RNA, 21 nt, Synthetic Construct
  source 1..21: mol_type = other RNA
tccagtactgagctgccccga

SEQ ID NO: 11195 - RNA, 23 nt, Synthetic Construct
  source 1..23: mol_type = other RNA
tgaggtagtaggttgtgtggctt

SEQ ID NO: 11196 - RNA, 23 nt, Synthetic Construct
  source 1..23: mol_type = other RNA
tgaggtagtaggttgtgtggctt

SEQ ID NO: 11197 - RNA, 23 nt, Synthetic Construct
  source 1..23: mol_type = other RNA
gggtaatacgacgtacttagtgt

SEQ ID NO: 11198 - RNA, 23 nt, Synthetic Construct
  source 1..23: mol_type = other RNA
gggtaatacgacgtacttagtgt

SEQ ID NO: 11199 - RNA, 22 nt, Synthetic Construct
  source 1..22: mol_type = other RNA
nagcagcacgtaaatattggcg

SEQ ID NO: 11200 - RNA, 22 nt, Synthetic Construct
  source 1..22: mol_type = other RNA
tagcagcacgtaaatattggtg

SEQ ID NO: 11201 - RNA, 22 nt, Synthetic Construct
  source 1..22: mol_type = other RNA
tagcagcacgtaaatattggtg

SEQ ID NO: 11202 - RNA, 32 nt, Synthetic Construct; identical to SEQ ID NO: 3092
  source 1..32: mol_type = other RNA

SEQ ID NO: 11203 - RNA, 22 nt, Synthetic Construct
  source 1..22: mol_type = other RNA
tctctcggctcctcgcggctct

SEQ ID NO: 11204 - RNA, 22 nt, Synthetic Construct
  source 1..22: mol_type = other RNA
tctctcggctcctcgcggctct

SEQ ID NO: 11205 - RNA, 25 nt, Synthetic Construct
  source 1..25: mol_type = other RNA
ccccactgctaaatttgactggctt

SEQ ID NO: 11206 - RNA, 23 nt, Synthetic Construct
  source 1..23: mol_type = other RNA
tggtaatacgacgtacatagtgt

SEQ ID NO: 11207 - RNA, 23 nt, Synthetic Construct
  source 1..23: mol_type = other RNA
tggtaatacgacgtacatagtgt

SEQ ID NO: 11208 - RNA, 22 nt, Synthetic Construct
  source 1..22: mol_type = other RNA
tcttgtactgagctgccccgag

SEQ ID NO: 11209 - RNA, 22 nt, Synthetic Construct
  source 1..22: mol_type = other RNA
tcttgtactgagctgccccgag

SEQ ID NO: 11210 - RNA, 36 nt, Synthetic Construct; identical to SEQ ID NO: 2660
  source 1..36: mol_type = other RNA

SEQ ID NO: 11211 - RNA, 36 nt, Synthetic Construct; identical to SEQ ID NO: 2660
  source 1..36: mol_type = other RNA

SEQ ID NO: 11212 - RNA, 22 nt, Synthetic Construct
  source 1..22: mol_type = other RNA
tcgtaccatgagtaataatgcg

SEQ ID NO: 11213 - RNA, 27 nt, Synthetic Construct
  source 1..27: mol_type = other RNA
ccgtgtgaaagtaggtcatcgtcaggc

SEQ ID NO: 11214 - RNA, 21 nt, Synthetic Construct
  source 1..21: mol_type = other RNA
tcccagtaaacggcggccgta

SEQ ID NO: 11215 - RNA, 21 nt, Synthetic Construct
  source 1..21: mol_type = other RNA
tcccagtaaacggcggccgta

SEQ ID NO: 11216 - RNA, 22 nt, Synthetic Construct
  source 1..22: mol_type = other RNA
tggaatgtaaggaagtgtgtgt

SEQ ID NO: 11217 - RNA, 22 nt, Synthetic Construct
  source 1..22: mol_type = other RNA
tcttgtactgagctgccccgag

SEQ ID NO: 11218 - RNA, 16 nt, Synthetic Construct
  source 1..16: mol_type = other RNA
ctcagtagctcgagga

SEQ ID NO: 11219 - RNA, 16 nt, Synthetic Construct
  source 1..16: mol_type = other RNA
ctcagtagctcgagga

SEQ ID NO: 11220 - RNA, 23 nt, Synthetic Construct
  source 1..23: mol_type = other RNA
ggctacattgtctgctgggtttc

SEQ ID NO: 11221 - RNA, 23 nt, Synthetic Construct
  source 1..23: mol_type = other RNA
ggctacattgtctgctgggtttc

SEQ ID NO: 11222 - RNA, 21 nt, Synthetic Construct
  source 1..21: mol_type = other RNA
tggagagtgacaatggtgttt

SEQ ID NO: 11223 - RNA, 21 nt, Synthetic Construct
  source 1..21: mol_type = other RNA
tggagagtgacaatggtgttt

SEQ ID NO: 11224 - RNA, 22 nt, Synthetic Construct
  source 1..22: mol_type = other RNA
tcgtaccgtgagtaacaatgcg

SEQ ID NO: 11225 - RNA, 22 nt, Synthetic Construct
  source 1..22: mol_type = other RNA
tcgtaccgtgagtaacaatgcg

SEQ ID NO: 11226 - RNA, 16 nt, Synthetic Construct
  source 1..16: mol_type = other RNA
gcaagaggtcagcggt

SEQ ID NO: 11227 - RNA, 34 nt, Synthetic Construct; identical to SEQ ID NO: 2367
  source 1..34: mol_type = other RNA

SEQ ID NO: 11228 - RNA, 34 nt, Synthetic Construct; identical to SEQ ID NO: 2367
  source 1..34: mol_type = other RNA

SEQ ID NO: 11229 - RNA, 24 nt, Synthetic Construct
  source 1..24: mol_type = other RNA
acctggcatacaatgtagatttct

SEQ ID NO: 11230 - RNA, 16 nt, Synthetic Construct
  source 1..16: mol_type = other RNA
aggtcatcgtcaggct

SEQ ID NO: 11231 - RNA, 20 nt, Synthetic Construct
  source 1..20: mol_type = other RNA
cccttggggttgtaggacca

SEQ ID NO: 11232 - RNA, 20 nt, Synthetic Construct
  source 1..20: mol_type = other RNA
cccttggggttgtaggacca

SEQ ID NO: 11233 - RNA, 22 nt, Synthetic Construct
  source 1..22: mol_type = other RNA
tgaggtagcagattgtatagtt

SEQ ID NO: 11234 - RNA, 22 nt, Synthetic Construct
  source 1..22: mol_type = other RNA
tgaggtagcagattgtatagtt

SEQ ID NO: 11235 - RNA, 20 nt, Synthetic Construct
  source 1..20: mol_type = other RNA
attgcacttgtcccggcctg

SEQ ID NO: 11236 - RNA, 20 nt, Synthetic Construct
  source 1..20: mol_type = other RNA
attgcacttgtcccggcctg

SEQ ID NO: 11237 - RNA, 20 nt, Synthetic Construct
  source 1..20: mol_type = other RNA
tgaggtagtaggtcgtgtgg

SEQ ID NO: 11238 - RNA, 17 nt, Synthetic Construct
  source 1..17: mol_type = other RNA
ccaaggggtcgtgggtt

SEQ ID NO: 11239 - RNA, 17 nt, Synthetic Construct
  source 1..17: mol_type = other RNA
ccaaggggtcgtgggtt

SEQ ID NO: 11240 - RNA, 23 nt, Synthetic Construct
  source 1..23: mol_type = other RNA
tgaggtagtagtttgtgctgttc

SEQ ID NO: 11241 - RNA, 23 nt, Synthetic Construct
  source 1..23: mol_type = other RNA
agcagcattgtacagggctatgt

SEQ ID NO: 11242 - RNA, 18 nt, Synthetic Construct
  source 1..18: mol_type = other RNA
cataaagtagaaagcact

SEQ ID NO: 11243 - RNA, 18 nt, Synthetic Construct
  source 1..18: mol_type = other RNA
cataaagtagaaagcact

SEQ ID NO: 11244 - RNA, 30 nt, Synthetic Construct; identical to SEQ ID NO: 3933
  source 1..30: mol_type = other RNA

SEQ ID NO: 11245 - RNA, 30 nt, Synthetic Construct; identical to SEQ ID NO: 3933
  source 1..30: mol_type = other RNA

SEQ ID NO: 11246 - RNA, 26 nt, Synthetic Construct
  source 1..26: mol_type = other RNA
ccccccactgctaatttgactggctt

SEQ ID NO: 11247 - RNA, 26 nt, Synthetic Construct
  source 1..26: mol_type = other RNA
ccccccactgctaatttgactggctt

SEQ ID NO: 11248 - RNA, 20 nt, Synthetic Construct
  source 1..20: mol_type = other RNA
aatgcacccgggcaaggatt

SEQ ID NO: 11249 - RNA, 20 nt, Synthetic Construct
  source 1..20: mol_type = other RNA
aatgcacccgggcaaggatt

SEQ ID NO: 11250 - RNA, 22 nt, Synthetic Construct
  source 1..22: mol_type = other RNA
ctgggtcggtcgggctggggcg

SEQ ID NO: 11251 - RNA, 22 nt, Synthetic Construct
  source 1..22: mol_type = other RNA
ctgggtcggtcgggctggggcg

SEQ ID NO: 11252 - RNA, 21 nt, Synthetic Construct
  source 1..21: mol_type = other RNA
tgaggtagtaggttgtgtgga

SEQ ID NO: 11253 - RNA, 21 nt, Synthetic Construct
  source 1..21: mol_type = other RNA
tgaggtagtaggttgtgtgga

SEQ ID NO: 11254 - RNA, 33 nt, Synthetic Construct; identical to SEQ ID NO: 2266
  source 1..33: mol_type = other RNA

SEQ ID NO: 11255 - RNA, 33 nt, Synthetic Construct; identical to SEQ ID NO: 2266
  source 1..33: mol_type = other RNA

SEQ ID NO: 11256 - RNA, 19 nt, Synthetic Construct
  source 1..19: mol_type = other RNA
ggctggtccgaaggtagtg

SEQ ID NO: 11257 - RNA, 22 nt, Synthetic Construct
  source 1..22: mol_type = other RNA
tgaggtagtagtttgtgctgtg

SEQ ID NO: 11258 - RNA, 22 nt, Synthetic Construct
  source 1..22: mol_type = other RNA
tgaggtagtagtttgtgctgtg

SEQ ID NO: 11259 - RNA, 22 nt, Synthetic Construct
  source 1..22: mol_type = other RNA
tgtaaacatccccgactggaaa

SEQ ID NO: 11260 - RNA, 30 nt, Synthetic Construct; identical to SEQ ID NO: 1079
  source 1..30: mol_type = other RNA

SEQ ID NO: 11261 - RNA, 30 nt, Synthetic Construct; identical to SEQ ID NO: 1079
  source 1..30: mol_type = other RNA

SEQ ID NO: 11262 - RNA, 24 nt, Synthetic Construct
  source 1..24: mol_type = other RNA
gaaagattaaggcaagaggttagc

SEQ ID NO: 11263 - RNA, 24 nt, Synthetic Construct
  source 1..24: mol_type = other RNA
gaaagattaaggcaagaggttagc

SEQ ID NO: 11264 - RNA, 22 nt, Synthetic Construct
  source 1..22: mol_type = other RNA
tattgcacttgtcccgacctgt

SEQ ID NO: 11265 - RNA, 20 nt, Synthetic Construct
  source 1..20: mol_type = other RNA
caaagtgctgttcgtgcagg

SEQ ID NO: 11266 - RNA, 20 nt, Synthetic Construct
  source 1..20: mol_type = other RNA
caaagtgctgttcgtgcagg

SEQ ID NO: 11267 - RNA, 22 nt, Synthetic Construct
  source 1..22: mol_type = other RNA
tacccattgcatatcggagttg

SEQ ID NO: 11268 - RNA, 22 nt, Synthetic Construct
  source 1..22: mol_type = other RNA
tacccattgcatatcggagttg

SEQ ID NO: 11269 - RNA, 34 nt, Synthetic Construct
  source 1..34: mol_type = other RNA
ccgctgagattcagcccgtgttcggaagattttc

SEQ ID NO: 11270 - RNA, 34 nt, Synthetic Construct; identical to SEQ ID NO: 11269
  source 1..34: mol_type = other RNA

SEQ ID NO: 11271 - RNA, 27 nt, Synthetic Construct
  source 1..27: mol_type = other RNA
ccccccgctgctaaatttgactggctt

SEQ ID NO: 11272 - RNA, 23 nt, Synthetic Construct
  source 1..23: mol_type = other RNA
gcgtggtaggagagcgttctgta

SEQ ID NO: 11273 - RNA, 23 nt, Synthetic Construct
  source 1..23: mol_type = other RNA
gcgtggtaggagagcgttctgta

SEQ ID NO: 11274 - RNA, 15 nt, Synthetic Construct
  source 1..15: mol_type = other RNA
gagagcctggacaca

SEQ ID NO: 11275 - RNA, 22 nt, Synthetic Construct
  source 1..22: mol_type = other RNA
tgaggtagtggtttgtgctgtt

SEQ ID NO: 11276 - RNA, 18 nt, Synthetic Construct
  source 1..18: mol_type = other RNA
aagcggtggatgatgtgg

SEQ ID NO: 11277 - RNA, 22 nt, Synthetic Construct
  source 1..22: mol_type = other RNA
tggaatgtaaaggagtatgtat

SEQ ID NO: 11278 - RNA, 15 nt, Synthetic Construct
  source 1..15: mol_type = other RNA
tccggatcgtagtct

SEQ ID NO: 11279 - RNA, 15 nt, Synthetic Construct
  source 1..15: mol_type = other RNA
tccggatcgtagtct

SEQ ID NO: 11280 - RNA, 22 nt, Synthetic Construct
  source 1..22: mol_type = other RNA
ggcagggttcgtgactggggtg

SEQ ID NO: 11281 - RNA, 22 nt, Synthetic Construct
  source 1..22: mol_type = other RNA
gtcagtttgtcaaataccccaa

SEQ ID NO: 11282 - RNA, 30 nt, Synthetic Construct; identical to SEQ ID NO: 2353
  source 1..30: mol_type = other RNA

SEQ ID NO: 11283 - RNA, 30 nt, Synthetic Construct; identical to SEQ ID NO: 2353
  source 1..30: mol_type = other RNA

SEQ ID NO: 11284 - RNA, 16 nt, Synthetic Construct
  source 1..16: mol_type = other RNA
gcgtagatatgcggag

SEQ ID NO: 11285 - RNA, 16 nt, Synthetic Construct
  source 1..16: mol_type = other RNA
gcgtagatatgcggag

SEQ ID NO: 11286 - RNA, 22 nt, Synthetic Construct
  source 1..22: mol_type = other RNA
tgaggcagtagattgtatagtt

SEQ ID NO: 11287 - RNA, 23 nt, Synthetic Construct
  source 1..23: mol_type = other RNA
ttggtccccttcaaccagctgtt

SEQ ID NO: 11288 - RNA, 23 nt, Synthetic Construct
  source 1..23: mol_type = other RNA
ttggtccccttcaaccagctgtt

SEQ ID NO: 11289 - RNA, 22 nt, Synthetic Construct
  source 1..22: mol_type = other RNA
gaactccttaagcgaatctcgc

SEQ ID NO: 11290 - RNA, 21 nt, Synthetic Construct
  source 1..21: mol_type = other RNA
tcctgtactgagctgcccgag

SEQ ID NO: 11291 - RNA, 19 nt, Synthetic Construct
  source 1..19: mol_type = other RNA
tggccgtcgtcagctcgtg

SEQ ID NO: 11292 - RNA, 31 nt, Synthetic Construct; identical to SEQ ID NO: 5943
  source 1..31: mol_type = other RNA

SEQ ID NO: 11293 - RNA, 31 nt, Synthetic Construct; identical to SEQ ID NO: 5943
  source 1..31: mol_type = other RNA

SEQ ID NO: 11294 - RNA, 22 nt, Synthetic Construct
  source 1..22: mol_type = other RNA
tcgcaccgtgagtaataatgcg

SEQ ID NO: 11295 - RNA, 22 nt, Synthetic Construct
  source 1..22: mol_type = other RNA
tcgcaccgtgagtaataatgcg

SEQ ID NO: 11296 - RNA, 20 nt, Synthetic Construct
  source 1..20: mol_type = other RNA
tgaggtagtaggttgtgtgg

SEQ ID NO: 11297 - RNA, 27 nt, Synthetic Construct
  source 1..27: mol_type = other RNA
ccccccactgctaaacttgactggctt

SEQ ID NO: 11298 - RNA, 27 nt, Synthetic Construct
  source 1..27: mol_type = other RNA
ccccccactgctaaacttgactggctt

SEQ ID NO: 11299 - RNA, 22 nt, Synthetic Construct
  source 1..22: mol_type = other RNA
ngaggtagtaggttgtatagtt

SEQ ID NO: 11300 - RNA, 22 nt, Synthetic Construct
  source 1..22: mol_type = other RNA
ngaggtagtaggttgtatagtt

SEQ ID NO: 11301 - RNA, 36 nt, Synthetic Construct; identical to SEQ ID NO: 2478
  source 1..36: mol_type = other RNA

SEQ ID NO: 11302 - RNA, 30 nt, Synthetic Construct
  source 1..30: mol_type = other RNA
cccccccactgctaaatttgactggctttt

SEQ ID NO: 11303 - RNA, 34 nt, Synthetic Construct; identical to SEQ ID NO: 490
  source 1..34: mol_type = other RNA

SEQ ID NO: 11304 - RNA, 34 nt, Synthetic Construct; identical to SEQ ID NO: 490
  source 1..34: mol_type = other RNA

SEQ ID NO: 11305 - RNA, 20 nt, Synthetic Construct
  source 1..20: mol_type = other RNA
tgtaaacatcctcgactgga

SEQ ID NO: 11306 - RNA, 17 nt, Synthetic Construct
  source 1..17: mol_type = other RNA
ctaatgagactgccggt

SEQ ID NO: 11307 - RNA, 17 nt, Synthetic Construct
  source 1..17: mol_type = other RNA
ctaatgagactgccggt

SEQ ID NO: 11308 - RNA, 23 nt, Synthetic Construct
  source 1..23: mol_type = other RNA
tcccacatggtctagcggttagg

SEQ ID NO: 11309 - RNA, 23 nt, Synthetic Construct
  source 1..23: mol_type = other RNA
tcccacatggtctagcggttagg

SEQ ID NO: 11310 - RNA, 23 nt, Synthetic Construct
  source 1..23: mol_type = other RNA
cctcgcgcgattggagcggccga

SEQ ID NO: 11311 - RNA, 23 nt, Synthetic Construct
  source 1..23: mol_type = other RNA
cctcgcgcgattggagcggccga

SEQ ID NO: 11312 - RNA, 23 nt, Synthetic Construct
  source 1..23: mol_type = other RNA
tgaggggcagagagcaagacttt

SEQ ID NO: 11313 - RNA, 23 nt, Synthetic Construct
  source 1..23: mol_type = other RNA
tgaggggcagagagcaagacttt

SEQ ID NO: 11314 - RNA, 22 nt, Synthetic Construct
  source 1..22: mol_type = other RNA
tgaggtagtagtttgcgctgtt

SEQ ID NO: 11315 - RNA, 22 nt, Synthetic Construct
  source 1..22: mol_type = other RNA
tgaggtagtagtttgcgctgtt

SEQ ID NO: 11316 - RNA, 20 nt, Synthetic Construct
  source 1..20: mol_type = other RNA
agttctacagtccgacgatc

SEQ ID NO: 11317 - RNA, 20 nt, Synthetic Construct
  source 1..20: mol_type = other RNA
agttctacagtccgacgatc

SEQ ID NO: 11318 - RNA, 21 nt, Synthetic Construct
  source 1..21: mol_type = other RNA
tgaggtagtagattgtatggt

SEQ ID NO: 11319 - RNA, 22 nt, Synthetic Construct
  source 1..22: mol_type = other RNA
tggagagaaaggcagttcctga

SEQ ID NO: 11320 - RNA, 29 nt, Synthetic Construct
  source 1..29: mol_type = other RNA
ccccccccactgctaaatttgactggctt

SEQ ID NO: 11321 - RNA, 22 nt, Synthetic Construct
  source 1..22: mol_type = other RNA
tcgtaccgtgagtaacaatgcg

SEQ ID NO: 11322 - RNA, 19 nt, Synthetic Construct
  source 1..19: mol_type = other RNA
cctgtaccgatcaatagtg

SEQ ID NO: 11323 - RNA, 19 nt, Synthetic Construct
  source 1..19: mol_type = other RNA
cctgtaccgatcaatagtg

SEQ ID NO: 11324 - RNA, 19 nt, Synthetic Construct
  source 1..19: mol_type = other RNA
cccttgtcattagttgcta

SEQ ID NO: 11325 - RNA, 23 nt, Synthetic Construct
  source 1..23: mol_type = other RNA
tgaggggcagggagcgagacttt

SEQ ID NO: 11326 - RNA, 16 nt, Synthetic Construct
  source 1..16: mol_type = other RNA
caggacggtggccatg

SEQ ID NO: 11327 - RNA, 16 nt, Synthetic Construct
  source 1..16: mol_type = other RNA
caggacggtggccatg

SEQ ID NO: 11328 - RNA, 25 nt, Synthetic Construct
  source 1..25: mol_type = other RNA
ttgaggatatgagatcgagacgacg

SEQ ID NO: 11329 - RNA, 25 nt, Synthetic Construct
  source 1..25: mol_type = other RNA
ttgaggatatgagatcgagacgacg

SEQ ID NO: 11330 - RNA, 17 nt, Synthetic Construct
  source 1..17: mol_type = other RNA
tggccgttcttagttgg

SEQ ID NO: 11331 - RNA, 36 nt, Synthetic Construct; identical to SEQ ID NO: 2478
  source 1..36: mol_type = other RNA

SEQ ID NO: 11332 - RNA, 36 nt, Synthetic Construct; identical to SEQ ID NO: 2478
  source 1..36: mol_type = other RNA

SEQ ID NO: 11333 - RNA, 22 nt, Synthetic Construct
  source 1..22: mol_type = other RNA
tgaggtagtaagttgtgtggtt

SEQ ID NO: 11334 - RNA, 22 nt, Synthetic Construct
  source 1..22: mol_type = other RNA
tgaggtagtaagttgtgtggtt

SEQ ID NO: 11335 - RNA, 37 nt, Synthetic Construct; identical to SEQ ID NO: 715
  source 1..37: mol_type = other RNA

SEQ ID NO: 11336 - RNA, 37 nt, Synthetic Construct; identical to SEQ ID NO: 715
  source 1..37: mol_type = other RNA

SEQ ID NO: 11337 - RNA, 22 nt, Synthetic Construct
  source 1..22: mol_type = other RNA
tgaggtagaaggttgtatagtt

SEQ ID NO: 11338 - RNA, 39 nt, Synthetic Construct; identical to SEQ ID NO: 4939
  source 1..39: mol_type = other RNA

SEQ ID NO: 11339 - RNA, 39 nt, Synthetic Construct; identical to SEQ ID NO: 4939
  source 1..39: mol_type = other RNA

SEQ ID NO: 11340 - RNA, 22 nt, Synthetic Construct
  source 1..22: mol_type = other RNA
tcctgtattgagctgccccgag

SEQ ID NO: 11341 - RNA, 22 nt, Synthetic Construct
  source 1..22: mol_type = other RNA
tgaggtagtaggttgtacagtt

SEQ ID NO: 11342 - RNA, 22 nt, Synthetic Construct
  source 1..22: mol_type = other RNA
tgaggtagtaggttgtacagtt

SEQ ID NO: 11343 - RNA, 22 nt, Synthetic Construct
  source 1..22: mol_type = other RNA
tcctgtactgagctgccccgtg

SEQ ID NO: 11344 - RNA, 22 nt, Synthetic Construct
  source 1..22: mol_type = other RNA
tatcggaacgtgcccagtcgtg

SEQ ID NO: 11345 - RNA, 22 nt, Synthetic Construct
  source 1..22: mol_type = other RNA
tatcggaacgtgcccagtcgtg

SEQ ID NO: 11346 - RNA, 25 nt, Synthetic Construct
  source 1..25: mol_type = other RNA
ggtaaaattgctgagtgaagcattg

SEQ ID NO: 11347 - RNA, 25 nt, Synthetic Construct
  source 1..25: mol_type = other RNA
ggtaaaattgctgagtgaagcattg

SEQ ID NO: 11348 - RNA, 26 nt, Synthetic Construct
  source 1..26: mol_type = other RNA
aatgacacgatcactcccgttgagtt

SEQ ID NO: 11349 - RNA, 26 nt, Synthetic Construct
  source 1..26: mol_type = other RNA
aatgacacgatcactcccgttgagtt

SEQ ID NO: 11350 - RNA, 22 nt, Synthetic Construct
  source 1..22: mol_type = other RNA
ctttgttcgattccgttgagta

SEQ ID NO: 11351 - RNA, 22 nt, Synthetic Construct
  source 1..22: mol_type = other RNA
ctttgttcgattccgttgagta

SEQ ID NO: 11352 - RNA, 34 nt, Synthetic Construct; identical to SEQ ID NO: 2553
  source 1..34: mol_type = other RNA

SEQ ID NO: 11353 - RNA, 23 nt, Synthetic Construct
  source 1..23: mol_type = other RNA
caaagtgctgttcgtgcaggtaa

SEQ ID NO: 11354 - RNA, 17 nt, Synthetic Construct
  source 1..17: mol_type = other RNA
gtcgacgtatagggtgt

SEQ ID NO: 11355 - RNA, 17 nt, Synthetic Construct
  source 1..17: mol_type = other RNA
gtcgacgtatagggtgt

SEQ ID NO: 11356 - RNA, 32 nt, Synthetic Construct; identical to SEQ ID NO: 2850
  source 1..32: mol_type = other RNA

SEQ ID NO: 11357 - RNA, 17 nt, Synthetic Construct
  source 1..17: mol_type = other RNA
agcggtggatgatgtgg

SEQ ID NO: 11358 - RNA, 17 nt, Synthetic Construct
  source 1..17: mol_type = other RNA
agcggtggatgatgtgg

SEQ ID NO: 11359 - RNA, 27 nt, Synthetic Construct
  source 1..27: mol_type = other RNA
ccccccactgctaaatttggctggcta

SEQ ID NO: 11360 - RNA, 26 nt, Synthetic Construct
  source 1..26: mol_type = other RNA
gagcagctaataccgcatacgacctg

SEQ ID NO: 11361 - RNA, 26 nt, Synthetic Construct
  source 1..26: mol_type = other RNA
gagcagctaataccgcatacgacctg

SEQ ID NO: 11362 - RNA, 20 nt, Synthetic Construct
  source 1..20: mol_type = other RNA
cacatgcaagtcgaacggta

SEQ ID NO: 11363 - RNA, 20 nt, Synthetic Construct
  source 1..20: mol_type = other RNA
cacatgcaagtcgaacggta

SEQ ID NO: 11364 - RNA, 33 nt, Synthetic Construct; identical to SEQ ID NO: 2126
  source 1..33: mol_type = other RNA

SEQ ID NO: 11365 - RNA, 22 nt, Synthetic Construct
  source 1..22: mol_type = other RNA
tagcagcacgtaaatactggcg

SEQ ID NO: 11366 - RNA, 22 nt, Synthetic Construct
  source 1..22: mol_type = other RNA
tagcagcacgtaaatactggcg

SEQ ID NO: 11367 - RNA, 25 nt, Synthetic Construct
  source 1..25: mol_type = other RNA
ttgaggatatgagatagagacgaca

SEQ ID NO: 11368 - RNA, 25 nt, Synthetic Construct
  source 1..25: mol_type = other RNA
ttgaggatatgagatagagacgaca

SEQ ID NO: 11369 - RNA, 20 nt, Synthetic Construct
  source 1..20: mol_type = other RNA
actgatcgagtcgtcctgcg

SEQ ID NO: 11370 - RNA, 22 nt, Synthetic Construct
  source 1..22: mol_type = other RNA
tggaatgtgaagaagtatgtat

SEQ ID NO: 11371 - RNA, 23 nt, Synthetic Construct
  source 1..23: mol_type = other RNA
aacggaatcccaaaagcagctgt

SEQ ID NO: 11372 - RNA, 22 nt, Synthetic Construct
  source 1..22: mol_type = other RNA
tgaggtagtagtttgtgcagtt

SEQ ID NO: 11373 - RNA, 18 nt, Synthetic Construct
  source 1..18: mol_type = other RNA
agcaggacggtggccatg

SEQ ID NO: 11374 - RNA, 23 nt, Synthetic Construct
  source 1..23: mol_type = other RNA
caaagtgttgttcgtgcaggtag

SEQ ID NO: 11375 - RNA, 25 nt, Synthetic Construct
  source 1..25: mol_type = other RNA
ttgagggtatgagatcgagacgaca

SEQ ID NO: 11376 - RNA, 25 nt, Synthetic Construct
  source 1..25: mol_type = other RNA
ttgagggtatgagatcgagacgaca

SEQ ID NO: 11377 - RNA, 15 nt, Synthetic Construct
  source 1..15: mol_type = other RNA
cgatatggcatgaga

SEQ ID NO: 11378 - RNA, 15 nt, Synthetic Construct
  source 1..15: mol_type = other RNA
cgatatggcatgaga

SEQ ID NO: 11379 - RNA, 20 nt, Synthetic Construct
  source 1..20: mol_type = other RNA
caatggccgggacagagggc

SEQ ID NO: 11380 - RNA, 27 nt, Synthetic Construct
  source 1..27: mol_type = other RNA
ccccccactgctaaatctgactggctt

SEQ ID NO: 11381 - RNA, 22 nt, Synthetic Construct
  source 1..22: mol_type = other RNA
tgaggtagtaggttgtatagtc

SEQ ID NO: 11382 - RNA, 16 nt, Synthetic Construct
  source 1..16: mol_type = other RNA
gggtctgtagctcagt

SEQ ID NO: 11383 - RNA, 16 nt, Synthetic Construct
  source 1..16: mol_type = other RNA
gtctacggccatacaa

SEQ ID NO: 11384 - RNA, 16 nt, Synthetic Construct
  source 1..16: mol_type = other RNA
gtctacggccatacaa

SEQ ID NO: 11385 - RNA, 22 nt, Synthetic Construct
  source 1..22: mol_type = other RNA
tcaggtagtagattgtatagtt

SEQ ID NO: 11386 - RNA, 20 nt, Synthetic Construct
  source 1..20: mol_type = other RNA
tgaggtggtaggttgtgtgg

SEQ ID NO: 11387 - RNA, 34 nt, Synthetic Construct; identical to SEQ ID NO: 749
  source 1..34: mol_type = other RNA

SEQ ID NO: 11388 - RNA, 34 nt, Synthetic Construct; identical to SEQ ID NO: 749
  source 1..34: mol_type = other RNA

SEQ ID NO: 11389 - RNA, 16 nt, Synthetic Construct
  source 1..16: mol_type = other RNA
gtctacggccataccg

SEQ ID NO: 11390 - RNA, 16 nt, Synthetic Construct
  source 1..16: mol_type = other RNA
gtctacggccataccg

SEQ ID NO: 11391 - RNA, 25 nt, Synthetic Construct
  source 1..25: mol_type = other RNA
gtcaggatggccgagcggtctaagg

SEQ ID NO: 11392 - RNA, 21 nt, Synthetic Construct
  source 1..21: mol_type = other RNA
ggctggtccgaaggtagtgag

SEQ ID NO: 11393 - RNA, 41 nt, Synthetic Construct; identical to SEQ ID NO: 10630
  source 1..41: mol_type = other RNA

SEQ ID NO: 11394 - RNA, 41 nt, Synthetic Construct; identical to SEQ ID NO: 10630
  source 1..41: mol_type = other RNA

SEQ ID NO: 11395 - RNA, 18 nt, Synthetic Construct
  source 1..18: mol_type = other RNA
atcgctagtaatcgcgga

SEQ ID NO: 11396 - RNA, 19 nt, Synthetic Construct
  source 1..19: mol_type = other RNA
gcgaaattccttgtcgggt

SEQ ID NO: 11397 - RNA, 19 nt, Synthetic Construct
  source 1..19: mol_type = other RNA
gcgaaattccttgtcgggt

SEQ ID NO: 11398 - RNA, 26 nt, Synthetic Construct
  source 1..26: mol_type = other RNA
ggtggctgtagctcagttggtagagt

SEQ ID NO: 11399 - RNA, 26 nt, Synthetic Construct
  source 1..26: mol_type = other RNA
ggtggctgtagctcagttggtagagt

SEQ ID NO: 11400 - RNA, 22 nt, Synthetic Construct
  source 1..22: mol_type = other RNA
tgaggtagtagactgtatagtt

SEQ ID NO: 11401 - RNA, 22 nt, Synthetic Construct
  source 1..22: mol_type = other RNA
tgaggtagtagactgtatagtt

SEQ ID NO: 11402 - RNA, 23 nt, Synthetic Construct
  source 1..23: mol_type = other RNA
tgaggtagtaggttgtgtagttt

SEQ ID NO: 11403 - RNA, 21 nt, Synthetic Construct
  source 1..21: mol_type = other RNA
gctttgatccggagatttccg

SEQ ID NO: 11404 - RNA, 21 nt, Synthetic Construct
  source 1..21: mol_type = other RNA
gctttgatccggagatttccg

SEQ ID NO: 11405 - RNA, 22 nt, Synthetic Construct
  source 1..22: mol_type = other RNA
attatggtttgcctgggactga

SEQ ID NO: 11406 - RNA, 22 nt, Synthetic Construct
  source 1..22: mol_type = other RNA
attatggtttgcctgggactga

SEQ ID NO: 11407 - RNA, 22 nt, Synthetic Construct
  source 1..22: mol_type = other RNA
tctctcggctcctcgcggctct

SEQ ID NO: 11408 - RNA, 22 nt, Synthetic Construct
  source 1..22: mol_type = other RNA
tctctcggctcctcgcggctct

SEQ ID NO: 11409 - RNA, 22 nt, Synthetic Construct
  source 1..22: mol_type = other RNA
ncctgtactgagctgccccgag

SEQ ID NO: 11410 - RNA, 22 nt, Synthetic Construct
  source 1..22: mol_type = other RNA
ncctgtactgagctgccccgag

SEQ ID NO: 11411 - RNA, 21 nt, Synthetic Construct
  source 1..21: mol_type = other RNA
cccaatacacggtcgacctct

SEQ ID NO: 11412 - RNA, 21 nt, Synthetic Construct
  source 1..21: mol_type = other RNA
cccaatacacggtcgacctct

SEQ ID NO: 11413 - RNA, 22 nt, Synthetic Construct
  source 1..22: mol_type = other RNA
tggaatgcaaagaagtatgtat

SEQ ID NO: 11414 - RNA, 23 nt, Synthetic Construct
  source 1..23: mol_type = other RNA
cagagttctacagtccgacgatc

SEQ ID NO: 11415 - RNA, 23 nt, Synthetic Construct
  source 1..23: mol_type = other RNA
cagagttctacagtccgacgatc

SEQ ID NO: 11416 - RNA, 17 nt, Synthetic Construct
  source 1..17: mol_type = other RNA
agtccggatcgtagtct

SEQ ID NO: 11417 - RNA, 17 nt, Synthetic Construct
  source 1..17: mol_type = other RNA
agtccggatcgtagtct

SEQ ID NO: 11418 - RNA, 16 nt, Synthetic Construct
  source 1..16: mol_type = other RNA
caggacggtggccatg

SEQ ID NO: 11419 - RNA, 16 nt, Synthetic Construct
  source 1..16: mol_type = other RNA
caggacggtggccatg

SEQ ID NO: 11420 - RNA, 18 nt, Synthetic Construct
  source 1..18: mol_type = other RNA
gtccggatcgtagtctgc

SEQ ID NO: 11421 - RNA, 18 nt, Synthetic Construct
  source 1..18: mol_type = other RNA
gtccggatcgtagtctgc

SEQ ID NO: 11422 - RNA, 23 nt, Synthetic Construct
  source 1..23: mol_type = other RNA
agctacattgtctgctgggtttt

SEQ ID NO: 11423 - RNA, 23 nt, Synthetic Construct
  source 1..23: mol_type = other RNA
agctacattgtctgctgggtttt

SEQ ID NO: 11424 - RNA, 18 nt, Synthetic Construct
  source 1..18: mol_type = other RNA
accctgctcgctgcgcca

SEQ ID NO: 11425 - RNA, 18 nt, Synthetic Construct
  source 1..18: mol_type = other RNA
accctgctcgctgcgcca

SEQ ID NO: 11426 - RNA, 29 nt, Synthetic Construct
  source 1..29: mol_type = other RNA
cgggatggggacagtgtatggtgggcagt

SEQ ID NO: 11427 - RNA, 29 nt, Synthetic Construct
  source 1..29: mol_type = other RNA
cgggatggggacagtgtatggtgggcagt

SEQ ID NO: 11428 - RNA, 23 nt, Synthetic Construct
  source 1..23: mol_type = other RNA
tggtaatacgacgtactaagtgt

SEQ ID NO: 11429 - RNA, 23 nt, Synthetic Construct
  source 1..23: mol_type = other RNA
tggtaatacgacgtactaagtgt

SEQ ID NO: 11430 - RNA, 22 nt, Synthetic Construct
  source 1..22: mol_type = other RNA
gtagtgtttcctactttatgga

SEQ ID NO: 11431 - RNA, 22 nt, Synthetic Construct
  source 1..22: mol_type = other RNA
tgaggtagtaggttgaatagtt

SEQ ID NO: 11432 - RNA, 19 nt, Synthetic Construct
  source 1..19: mol_type = other RNA
gtccggatcgtagtctgca

SEQ ID NO: 11433 - RNA, 19 nt, Synthetic Construct
  source 1..19: mol_type = other RNA
gtccggatcgtagtctgca

SEQ ID NO: 11434 - RNA, 25 nt, Synthetic Construct
  source 1..25: mol_type = other RNA
ttgaggatacgagatcgagacgaca

SEQ ID NO: 11435 - RNA, 25 nt, Synthetic Construct
  source 1..25: mol_type = other RNA
ttgaggatacgagatcgagacgaca

SEQ ID NO: 11436 - RNA, 20 nt, Synthetic Construct
  source 1..20: mol_type = other RNA
acagtagtctgcacattggt

SEQ ID NO: 11437 - RNA, 20 nt, Synthetic Construct
  source 1..20: mol_type = other RNA
acagtagtctgcacattggt

SEQ ID NO: 11438 - RNA, 26 nt, Synthetic Construct
  source 1..26: mol_type = other RNA
atttccccttggggttgtaggaccac

SEQ ID NO: 11439 - RNA, 26 nt, Synthetic Construct
  source 1..26: mol_type = other RNA
atttccccttggggttgtaggaccac

SEQ ID NO: 11440 - RNA, 22 nt, Synthetic Construct
  source 1..22: mol_type = other RNA
tgaggtagtagtctgtgctgtt

SEQ ID NO: 11441 - RNA, 35 nt, Synthetic Construct; identical to SEQ ID NO: 2615
  source 1..35: mol_type = other RNA

SEQ ID NO: 11442 - RNA, 16 nt, Synthetic Construct
  source 1..16: mol_type = other RNA
agttgaccgcctgggg

SEQ ID NO: 11443 - RNA, 19 nt, Synthetic Construct
  source 1..19: mol_type = other RNA
gtactgacgctcatgcacg

SEQ ID NO: 11444 - RNA, 19 nt, Synthetic Construct
  source 1..19: mol_type = other RNA
gtactgacgctcatgcacg

SEQ ID NO: 11445 - RNA, 25 nt, Synthetic Construct
  source 1..25: mol_type = other RNA
ttgaggatacgagatcgagacgaca

SEQ ID NO: 11446 - RNA, 22 nt, Synthetic Construct
  source 1..22: mol_type = other RNA
aattgcacggtatccatctgta

SEQ ID NO: 11447 - RNA, 22 nt, Synthetic Construct
  source 1..22: mol_type = other RNA
aattgcacggtatccatctgta

SEQ ID NO: 11448 - RNA, 22 nt, Synthetic Construct
  source 1..22: mol_type = other RNA
tgaggtggtagtttgtgctgtt

SEQ ID NO: 11449 - RNA, 22 nt, Synthetic Construct
  source 1..22: mol_type = other RNA
tgaggtggtagtttgtgctgtt

SEQ ID NO: 11450 - RNA, 22 nt, Synthetic Construct
  source 1..22: mol_type = other RNA
tggaatgtaaagaagtatgtgt

SEQ ID NO: 11451 - RNA, 22 nt, Synthetic Construct
  source 1..22: mol_type = other RNA
ttggtccccttcaaccagctgt

SEQ ID NO: 11452 - RNA, 22 nt, Synthetic Construct
  source 1..22: mol_type = other RNA
ttggtccccttcaaccagctgt

SEQ ID NO: 11453 - RNA, 23 nt, Synthetic Construct
  source 1..23: mol_type = other RNA
agcagcattgtacagggctatgt

SEQ ID NO: 11454 - RNA, 23 nt, Synthetic Construct
  source 1..23: mol_type = other RNA
agcagcattgtacagggctatgt

SEQ ID NO: 11455 - RNA, 22 nt, Synthetic Construct
  source 1..22: mol_type = other RNA
tgaggtagtagtttgtgatgtt

SEQ ID NO: 11456 - RNA, 22 nt, Synthetic Construct
  source 1..22: mol_type = other RNA
tgaggtagtagtttgtgatgtt

SEQ ID NO: 11457 - RNA, 21 nt, Synthetic Construct
  source 1..21: mol_type = other RNA
tcctgtactgagctgcccgag

SEQ ID NO: 11458 - RNA, 22 nt, Synthetic Construct
  source 1..22: mol_type = other RNA
tgaggtagaaggttgtgtggtt

SEQ ID NO: 11459 - RNA, 17 nt, Synthetic Construct
  source 1..17: mol_type = other RNA
atcgtgacgatagtgca

SEQ ID NO: 11460 - RNA, 17 nt, Synthetic Construct
  source 1..17: mol_type = other RNA
atcgtgacgatagtgca

SEQ ID NO: 11461 - RNA, 25 nt, Synthetic Construct
  source 1..25: mol_type = other RNA
atttccccttggggttgtaggacca

SEQ ID NO: 11462 - RNA, 25 nt, Synthetic Construct
  source 1..25: mol_type = other RNA
atttccccttggggttgtaggacca

SEQ ID NO: 11463 - RNA, 23 nt, Synthetic Construct
  source 1..23: mol_type = other RNA
tagtaatacgacgtacttagtgt

SEQ ID NO: 11464 - RNA, 23 nt, Synthetic Construct
  source 1..23: mol_type = other RNA
tagtaatacgacgtacttagtgt

SEQ ID NO: 11465 - RNA, 37 nt, Synthetic Construct; identical to SEQ ID NO: 2211
  source 1..37: mol_type = other RNA

SEQ ID NO: 11466 - RNA, 37 nt, Synthetic Construct; identical to SEQ ID NO: 2211
  source 1..37: mol_type = other RNA

SEQ ID NO: 11467 - RNA, 37 nt, Synthetic Construct; identical to SEQ ID NO: 7503
  source 1..37: mol_type = other RNA

SEQ ID NO: 11468 - RNA, 37 nt, Synthetic Construct; identical to SEQ ID NO: 7503
  source 1..37: mol_type = other RNA

SEQ ID NO: 11469 - RNA, 42 nt, Synthetic Construct; identical to SEQ ID NO: 8009
  source 1..42: mol_type = other RNA

SEQ ID NO: 11470 - RNA, 42 nt, Synthetic Construct; identical to SEQ ID NO: 8009
  source 1..42: mol_type = other RNA

SEQ ID NO: 11471 - RNA, 20 nt, Synthetic Construct
  source 1..20: mol_type = other RNA
agttctacagtccgacgatc

SEQ ID NO: 11472 - RNA, 20 nt, Synthetic Construct
  source 1..20: mol_type = other RNA
agttctacagtccgacgatc

SEQ ID NO: 11473 - RNA, 31 nt, Synthetic Construct; identical to SEQ ID NO: 960
  source 1..31: mol_type = other RNA

SEQ ID NO: 11474 - RNA, 31 nt, Synthetic Construct; identical to SEQ ID NO: 960
  source 1..31: mol_type = other RNA

SEQ ID NO: 11475 - RNA, 35 nt, Synthetic Construct; identical to SEQ ID NO: 2397
  source 1..35: mol_type = other RNA

SEQ ID NO: 11476 - RNA, 35 nt, Synthetic Construct; identical to SEQ ID NO: 2397
  source 1..35: mol_type = other RNA

SEQ ID NO: 11477 - RNA, 23 nt, Synthetic Construct
  source 1..23: mol_type = other RNA
cagcccgtgttcggaagattttc

SEQ ID NO: 11478 - RNA, 23 nt, Synthetic Construct
  source 1..23: mol_type = other RNA
cagcccgtgttcggaagattttc

SEQ ID NO: 11479 - RNA, 24 nt, Synthetic Construct
  source 1..24: mol_type = other RNA
tgaggtagtaggttgtgtggtttc

SEQ ID NO: 11480 - RNA, 20 nt, Synthetic Construct
  source 1..20: mol_type = other RNA
ctgacctatgaattgacagc

SEQ ID NO: 11481 - RNA, 20 nt, Synthetic Construct
  source 1..20: mol_type = other RNA
ctgacctatgaattgacagc

SEQ ID NO: 11482 - RNA, 22 nt, Synthetic Construct
  source 1..22: mol_type = other RNA
tggggtagtaggttgtatagtt

SEQ ID NO: 11483 - RNA, 20 nt, Synthetic Construct
  source 1..20: mol_type = other RNA
tagaattctcgcctgccacg

SEQ ID NO: 11484 - RNA, 23 nt, Synthetic Construct
  source 1..23: mol_type = other RNA
tggtaatacgacgtactttgtgt

SEQ ID NO: 11485 - RNA, 23 nt, Synthetic Construct
  source 1..23: mol_type = other RNA
caaagtgctgttcgtgcaggcag

SEQ ID NO: 11486 - RNA, 19 nt, Synthetic Construct
  source 1..19: mol_type = other RNA
tgtcaactggttgttggga

SEQ ID NO: 11487 - RNA, 15 nt, Synthetic Construct
  source 1..15: mol_type = other RNA
gctagtaatcgcgga

SEQ ID NO: 11488 - RNA, 15 nt, Synthetic Construct
  source 1..15: mol_type = other RNA
gctagtaatcgcgga

SEQ ID NO: 11489 - RNA, 27 nt, Synthetic Construct
  source 1..27: mol_type = other RNA
ccccccactgctaaatttggctggcta

SEQ ID NO: 11490 - RNA, 23 nt, Synthetic Construct
  source 1..23: mol_type = other RNA
tggtaataagacgtacttagtgt

SEQ ID NO: 11491 - RNA, 23 nt, Synthetic Construct
  source 1..23: mol_type = other RNA
tggtaataagacgtacttagtgt

SEQ ID NO: 11492 - RNA, 25 nt, Synthetic Construct
  source 1..25: mol_type = other RNA
ttgaggatatgagatcgggacgaca

SEQ ID NO: 11493 - RNA, 17 nt, Synthetic Construct
  source 1..17: mol_type = other RNA
ccagtaaacggcggccg

SEQ ID NO: 11494 - RNA, 17 nt, Synthetic Construct
  source 1..17: mol_type = other RNA
ccagtaaacggcggccg

SEQ ID NO: 11495 - RNA, 20 nt, Synthetic Construct
  source 1..20: mol_type = other RNA
gggttcgattccggagaggg

SEQ ID NO: 11496 - RNA, 20 nt, Synthetic Construct
  source 1..20: mol_type = other RNA
gggttcgattccggagaggg

SEQ ID NO: 11497 - RNA, 23 nt, Synthetic Construct
  source 1..23: mol_type = other RNA
agcagcatcgtacagggctatga

SEQ ID NO: 11498 - RNA, 23 nt, Synthetic Construct
  source 1..23: mol_type = other RNA
ccctgtactgagctgccccgaga

SEQ ID NO: 11499 - RNA, 23 nt, Synthetic Construct
  source 1..23: mol_type = other RNA
ccctgtactgagctgccccgaga

SEQ ID NO: 11500 - RNA, 20 nt, Synthetic Construct
  source 1..20: mol_type = other RNA
acccttgtcattagttgcta

SEQ ID NO: 11501 - RNA, 20 nt, Synthetic Construct
  source 1..20: mol_type = other RNA
acccttgtcattagttgcta

SEQ ID NO: 11502 - RNA, 21 nt, Synthetic Construct
  source 1..21: mol_type = other RNA
gttggttcaagcgtgtagtcg

SEQ ID NO: 11503 - RNA, 21 nt, Synthetic Construct
  source 1..21: mol_type = other RNA
gttggttcaagcgtgtagtcg

SEQ ID NO: 11504 - RNA, 22 nt, Synthetic Construct
  source 1..22: mol_type = other RNA
atggatttttggagcagggaga

SEQ ID NO: 11505 - RNA, 22 nt, Synthetic Construct
  source 1..22: mol_type = other RNA
atggatttttggagcagggaga

SEQ ID NO: 11506 - RNA, 18 nt, Synthetic Construct
  source 1..18: mol_type = other RNA
agcaggacggtggccatg

SEQ ID NO: 11507 - RNA, 18 nt, Synthetic Construct
  source 1..18: mol_type = other RNA
agcaggacggtggccatg

SEQ ID NO: 11508 - RNA, 16 nt, Synthetic Construct
  source 1..16: mol_type = other RNA
gtctacggctatacca

SEQ ID NO: 11509 - RNA, 16 nt, Synthetic Construct
  source 1..16: mol_type = other RNA
ggtagctcgttgggct

SEQ ID NO: 11510 - RNA, 23 nt, Synthetic Construct
  source 1..23: mol_type = other RNA
tagcagcacgtaaatattggcgt

SEQ ID NO: 11511 - RNA, 23 nt, Synthetic Construct
  source 1..23: mol_type = other RNA
tagcagcacgtaaatattggcgt

SEQ ID NO: 11512 - RNA, 21 nt, Synthetic Construct
  source 1..21: mol_type = other RNA
tgaggtagtaggttgtgtagt

SEQ ID NO: 11513 - RNA, 22 nt, Synthetic Construct
  source 1..22: mol_type = other RNA
tggaatgtaaagaggtatgtat

SEQ ID NO: 11514 - RNA, 22 nt, Synthetic Construct
  source 1..22: mol_type = other RNA
tggagtgtaaagaagtatgtat

SEQ ID NO: 11515 - RNA, 22 nt, Synthetic Construct
  source 1..22: mol_type = other RNA
tggagtgtaaagaagtatgtat

SEQ ID NO: 11516 - RNA, 25 nt, Synthetic Construct
  source 1..25: mol_type = other RNA
agctacattgtctgctgggtttctt

SEQ ID NO: 11517 - RNA, 25 nt, Synthetic Construct
  source 1..25: mol_type = other RNA
agctacattgtctgctgggtttctt

SEQ ID NO: 11518 - RNA, 23 nt, Synthetic Construct
  source 1..23: mol_type = other RNA
gcgactggtaactgggatgaagt

SEQ ID NO: 11519 - RNA, 23 nt, Synthetic Construct
  source 1..23: mol_type = other RNA
gcgactggtaactgggatgaagt

SEQ ID NO: 11520 - RNA, 22 nt, Synthetic Construct
  source 1..22: mol_type = other RNA
aaaccgttaccattactgagtt

SEQ ID NO: 11521 - RNA, 22 nt, Synthetic Construct
  source 1..22: mol_type = other RNA
aaaccgttaccattactgagtt

SEQ ID NO: 11522 - RNA, 22 nt, Synthetic Construct
  source 1..22: mol_type = other RNA
gtagtgtttcctactttatgga

SEQ ID NO: 11523 - RNA, 22 nt, Synthetic Construct
  source 1..22: mol_type = other RNA
gtagtgtttcctactttatgga

SEQ ID NO: 11524 - RNA, 23 nt, Synthetic Construct
  source 1..23: mol_type = other RNA
agcaacattgtctgctgggtttc

SEQ ID NO: 11525 - RNA, 23 nt, Synthetic Construct
  source 1..23: mol_type = other RNA
agcaacattgtctgctgggtttc

SEQ ID NO: 11526 - RNA, 21 nt, Synthetic Construct
  source 1..21: mol_type = other RNA
agctacatctggctactgggt

SEQ ID NO: 11527 - RNA, 21 nt, Synthetic Construct
  source 1..21: mol_type = other RNA
agctacatctggctactgggt

SEQ ID NO: 11528 - RNA, 22 nt, Synthetic Construct
  source 1..22: mol_type = other RNA
ngaggtagtagattgtatagtt

SEQ ID NO: 11529 - RNA, 22 nt, Synthetic Construct
  source 1..22: mol_type = other RNA
ggatatcatcatatactgtaag

SEQ ID NO: 11530 - RNA, 22 nt, Synthetic Construct
  source 1..22: mol_type = other RNA
ggatatcatcatatactgtaag

SEQ ID NO: 11531 - RNA, 22 nt, Synthetic Construct
  source 1..22: mol_type = other RNA
ccggtcccaagggtatggctgt

SEQ ID NO: 11532 - RNA, 22 nt, Synthetic Construct
  source 1..22: mol_type = other RNA
ccggtcccaagggtatggctgt

SEQ ID NO: 11533 - RNA, 15 nt, Synthetic Construct
  source 1..15: mol_type = other RNA
cgagtgacgtagtgt

SEQ ID NO: 11534 - RNA, 15 nt, Synthetic Construct
  source 1..15: mol_type = other RNA
cgagtgacgtagtgt

SEQ ID NO: 11535 - RNA, 18 nt, Synthetic Construct
  source 1..18: mol_type = other RNA
atcgctagtaatcgcgga

SEQ ID NO: 11536 - RNA, 15 nt, Synthetic Construct
  source 1..15: mol_type = other RNA
acctgcatcgagggt

SEQ ID NO: 11537 - RNA, 15 nt, Synthetic Construct
  source 1..15: mol_type = other RNA
acctgcatcgagggt

SEQ ID NO: 11538 - RNA, 21 nt, Synthetic Construct
  source 1..21: mol_type = other RNA
tgaggtagtaggttgtgtggc

SEQ ID NO: 11539 - RNA, 35 nt, Synthetic Construct; identical to SEQ ID NO: 2397
  source 1..35: mol_type = other RNA

SEQ ID NO: 11540 - RNA, 15 nt, Synthetic Construct
  source 1..15: mol_type = other RNA
gagtagggcgggaca

SEQ ID NO: 11541 - RNA, 37 nt, Synthetic Construct; identical to SEQ ID NO: 2211
  source 1..37: mol_type = other RNA

SEQ ID NO: 11542 - RNA, 22 nt, Synthetic Construct
  source 1..22: mol_type = other RNA
tcgtaccgtgagtaatgatgcg

SEQ ID NO: 11543 - RNA, 22 nt, Synthetic Construct
  source 1..22: mol_type = other RNA
tcgtaccgtgagtaatgatgcg

SEQ ID NO: 11544 - RNA, 23 nt, Synthetic Construct
  source 1..23: mol_type = other RNA
tcctgtacagagctgccccgaga

SEQ ID NO: 11545 - RNA, 23 nt, Synthetic Construct
  source 1..23: mol_type = other RNA
tcctgtacagagctgccccgaga

SEQ ID NO: 11546 - RNA, 22 nt, Synthetic Construct
  source 1..22: mol_type = other RNA
cattgcacttgtctcggtctga

SEQ ID NO: 11547 - RNA, 22 nt, Synthetic Construct
  source 1..22: mol_type = other RNA
cattgcacttgtctcggtctga

SEQ ID NO: 11548 - RNA, 16 nt, Synthetic Construct
  source 1..16: mol_type = other RNA
cacaccgcccgtcgct

SEQ ID NO: 11549 - RNA, 16 nt, Synthetic Construct
  source 1..16: mol_type = other RNA
cacaccgcccgtcgct

SEQ ID NO: 11550 - RNA, 22 nt, Synthetic Construct
  source 1..22: mol_type = other RNA
tatatatatatatgtacgtatg

SEQ ID NO: 11551 - RNA, 22 nt, Synthetic Construct
  source 1..22: mol_type = other RNA
tatatatatatatgtacgtatg

SEQ ID NO: 11552 - RNA, 20 nt, Synthetic Construct
  source 1..20: mol_type = other RNA
taaggtagtaggttgtgtgg

SEQ ID NO: 11553 - RNA, 18 nt, Synthetic Construct
  source 1..18: mol_type = other RNA
cttggggttgtaggacca

SEQ ID NO: 11554 - RNA, 18 nt, Synthetic Construct
  source 1..18: mol_type = other RNA
cttggggttgtaggacca

SEQ ID NO: 11555 - RNA, 18 nt, Synthetic Construct
  source 1..18: mol_type = other RNA
tcccaagggtatggctgt

SEQ ID NO: 11556 - RNA, 18 nt, Synthetic Construct
  source 1..18: mol_type = other RNA
tcccaagggtatggctgt

SEQ ID NO: 11557 - RNA, 18 nt, Synthetic Construct
  source 1..18: mol_type = other RNA
cgccgatgatagtgcgga

SEQ ID NO: 11558 - RNA, 18 nt, Synthetic Construct
  source 1..18: mol_type = other RNA
cgccgatgatagtgcgga

SEQ ID NO: 11559 - RNA, 25 nt, Synthetic Construct
  source 1..25: mol_type = other RNA
ttgaggatatgagatcgagacgacg

SEQ ID NO: 11560 - RNA, 21 nt, Synthetic Construct
  source 1..21: mol_type = other RNA
tcacagtgaaccggtctcttt

SEQ ID NO: 11561 - RNA, 23 nt, Synthetic Construct
  source 1..23: mol_type = other RNA
tagcaccatttgaaatcagtgtt

SEQ ID NO: 11562 - RNA, 23 nt, Synthetic Construct
  source 1..23: mol_type = other RNA
tagcaccatttgaaatcagtgtt

SEQ ID NO: 11563 - RNA, 18 nt, Synthetic Construct
  source 1..18: mol_type = other RNA
gcagcgatggccgagtgg

SEQ ID NO: 11564 - RNA, 18 nt, Synthetic Construct
  source 1..18: mol_type = other RNA
gcagcgatggccgagtgg

SEQ ID NO: 11565 - RNA, 41 nt, Synthetic Construct; identical to SEQ ID NO: 2441
  source 1..41: mol_type = other RNA

SEQ ID NO: 11566 - RNA, 41 nt, Synthetic Construct; identical to SEQ ID NO: 2441
  source 1..41: mol_type = other RNA

SEQ ID NO: 11567 - RNA, 22 nt, Synthetic Construct
  source 1..22: mol_type = other RNA
tgaggtagtagtttgagctgtt

SEQ ID NO: 11568 - RNA, 22 nt, Synthetic Construct
  source 1..22: mol_type = other RNA
tgaggtagtaggttgtatggta

SEQ ID NO: 11569 - RNA, 22 nt, Synthetic Construct
  source 1..22: mol_type = other RNA
tgaggtagtaggttatgtggtt

SEQ ID NO: 11570 - RNA, 22 nt, Synthetic Construct
  source 1..22: mol_type = other RNA
tgaggtagtaggttatgtggtt

SEQ ID NO: 11571 - RNA, 32 nt, Synthetic Construct; identical to SEQ ID NO: 2798
  source 1..32: mol_type = other RNA

SEQ ID NO: 11572 - RNA, 26 nt, Synthetic Construct
  source 1..26: mol_type = other RNA
gatgcgtggtaggagagcgttctgta

SEQ ID NO: 11573 - RNA, 23 nt, Synthetic Construct
  source 1..23: mol_type = other RNA
tgaggggcggagagcgagacttt

SEQ ID NO: 11574 - RNA, 31 nt, Synthetic Construct; identical to SEQ ID NO: 2310
  source 1..31: mol_type = other RNA

SEQ ID NO: 11575 - RNA, 31 nt, Synthetic Construct; identical to SEQ ID NO: 2310
  source 1..31: mol_type = other RNA

SEQ ID NO: 11576 - RNA, 29 nt, Synthetic Construct
  source 1..29: mol_type = other RNA
cgcgacctcagatcagacgtggcgacccg

SEQ ID NO: 11577 - RNA, 29 nt, Synthetic Construct
  source 1..29: mol_type = other RNA
cgcgacctcagatcagacgtggcgacccg

SEQ ID NO: 11578 - RNA, 23 nt, Synthetic Construct
  source 1..23: mol_type = other RNA
tcctgtactgggctgccccgagt

SEQ ID NO: 11579 - RNA, 23 nt, Synthetic Construct
  source 1..23: mol_type = other RNA
tcctgtactgggctgccccgagt

SEQ ID NO: 11580 - RNA, 15 nt, Synthetic Construct
  source 1..15: mol_type = other RNA
gttcggaagattttc

SEQ ID NO: 11581 - RNA, 15 nt, Synthetic Construct
  source 1..15: mol_type = other RNA
gttcggaagattttc

SEQ ID NO: 11582 - RNA, 22 nt, Synthetic Construct
  source 1..22: mol_type = other RNA
caacggaatcccaaaagcagct

SEQ ID NO: 11583 - RNA, 22 nt, Synthetic Construct
  source 1..22: mol_type = other RNA
caacggaatcccaaaagcagct

SEQ ID NO: 11584 - RNA, 21 nt, Synthetic Construct
  source 1..21: mol_type = other RNA
ggaggagttcgaaggtacgct

SEQ ID NO: 11585 - RNA, 40 nt, Synthetic Construct
  source 1..40: mol_type = other RNA
agtaatgcatgtagcttagcagtactaatcatccgttcgg

SEQ ID NO: 11586 - RNA, 40 nt, Synthetic Construct; identical to SEQ ID NO: 11585
  source 1..40: mol_type = other RNA

SEQ ID NO: 11587 - RNA, 23 nt, Synthetic Construct
  source 1..23: mol_type = other RNA
tcctgtactgagctgccctgagt

SEQ ID NO: 11588 - RNA, 22 nt, Synthetic Construct
  source 1..22: mol_type = other RNA
tggggtagtaggttgtgtggtt

SEQ ID NO: 11589 - RNA, 22 nt, Synthetic Construct
  source 1..22: mol_type = other RNA
tggggtagtaggttgtgtggtt

SEQ ID NO: 11590 - RNA, 22 nt, Synthetic Construct
  source 1..22: mol_type = other RNA
tgaggtagtaggttgtgtagtt

SEQ ID NO: 11591 - RNA, 22 nt, Synthetic Construct
  source 1..22: mol_type = other RNA
tgaggtagtaggttgtgtagtt

SEQ ID NO: 11592 - RNA, 21 nt, Synthetic Construct
  source 1..21: mol_type = other RNA
taaggtagtaggttgtatagt

SEQ ID NO: 11593 - RNA, 22 nt, Synthetic Construct
  source 1..22: mol_type = other RNA
tggaacgtaaagaagtatgtat

SEQ ID NO: 11594 - RNA, 22 nt, Synthetic Construct
  source 1..22: mol_type = other RNA
tgaggtagtaggctgtatagtt

SEQ ID NO: 11595 - RNA, 15 nt, Synthetic Construct
  source 1..15: mol_type = other RNA
ccgcttttgtcaggg

SEQ ID NO: 11596 - RNA, 19 nt, Synthetic Construct
  source 1..19: mol_type = other RNA
tgtcagtttgtcaaatacc

SEQ ID NO: 11597 - RNA, 19 nt, Synthetic Construct
  source 1..19: mol_type = other RNA
tgtcagtttgtcaaatacc

SEQ ID NO: 11598 - RNA, 15 nt, Synthetic Construct
  source 1..15: mol_type = other RNA
ggagagatggctgag

SEQ ID NO: 11599 - RNA, 15 nt, Synthetic Construct
  source 1..15: mol_type = other RNA
ggagagatggctgag

SEQ ID NO: 11600 - RNA, 36 nt, Synthetic Construct; identical to SEQ ID NO: 2506
  source 1..36: mol_type = other RNA

SEQ ID NO: 11601 - RNA, 36 nt, Synthetic Construct; identical to SEQ ID NO: 2506
  source 1..36: mol_type = other RNA

SEQ ID NO: 11602 - RNA, 27 nt, Synthetic Construct
  source 1..27: mol_type = other RNA
ccccccactgctaaatttggctggcta

SEQ ID NO: 11603 - RNA, 27 nt, Synthetic Construct
  source 1..27: mol_type = other RNA
ccccccactgctaaatttggctggcta

SEQ ID NO: 11604 - RNA, 28 nt, Synthetic Construct
  source 1..28: mol_type = other RNA
ccccccactgctaaatttggctggcttt

SEQ ID NO: 11605 - RNA, 22 nt, Synthetic Construct
  source 1..22: mol_type = other RNA
tgaggcagtaggttgtatagtt

SEQ ID NO: 11606 - RNA, 22 nt, Synthetic Construct
  source 1..22: mol_type = other RNA
tgaggcagtaggttgtatagtt

SEQ ID NO: 11607 - RNA, 15 nt, Synthetic Construct
  source 1..15: mol_type = other RNA
gtcaggatgttggct

SEQ ID NO: 11608 - RNA, 15 nt, Synthetic Construct
  source 1..15: mol_type = other RNA
gtcaggatgttggct

SEQ ID NO: 11609 - RNA, 33 nt, Synthetic Construct; identical to SEQ ID NO: 2479
  source 1..33: mol_type = other RNA

SEQ ID NO: 11610 - RNA, 35 nt, Synthetic Construct; identical to SEQ ID NO: 2762
  source 1..35: mol_type = other RNA

SEQ ID NO: 11611 - RNA, 22 nt, Synthetic Construct
  source 1..22: mol_type = other RNA
agagttctacagtccgacgatc

SEQ ID NO: 11612 - RNA, 22 nt, Synthetic Construct
  source 1..22: mol_type = other RNA
agagttctacagtccgacgatc

SEQ ID NO: 11613 - RNA, 23 nt, Synthetic Construct
  source 1..23: mol_type = other RNA
tgaggtagtaggttgtgtggctt

SEQ ID NO: 11614 - RNA, 34 nt, Synthetic Construct; identical to SEQ ID NO: 2298
  source 1..34: mol_type = other RNA

SEQ ID NO: 11615 - RNA, 21 nt, Synthetic Construct
  source 1..21: mol_type = other RNA
tcgtaccgtgagtaataatga

SEQ ID NO: 11616 - RNA, 33 nt, Synthetic Construct; identical to SEQ ID NO: 2253
  source 1..33: mol_type = other RNA

SEQ ID NO: 11617 - RNA, 23 nt, Synthetic Construct
  source 1..23: mol_type = other RNA
tggtaatacgtcgtacttagtgt

SEQ ID NO: 11618 - RNA, 27 nt, Synthetic Construct
  source 1..27: mol_type = other RNA
ccccccgctgctaaatttgactggctt

SEQ ID NO: 11619 - RNA, 21 nt, Synthetic Construct
  source 1..21: mol_type = other RNA
cattattacttttggtacgcg

SEQ ID NO: 11620 - RNA, 23 nt, Synthetic Construct
  source 1..23: mol_type = other RNA
caaagtgctgtccgtgcaggtag

SEQ ID NO: 11621 - RNA, 23 nt, Synthetic Construct
  source 1..23: mol_type = other RNA
caaagtgctgtccgtgcaggtag

SEQ ID NO: 11622 - RNA, 27 nt, Synthetic Construct
  source 1..27: mol_type = other RNA
ccccccactgctaaatttgattggctt

SEQ ID NO: 11623 - RNA, 27 nt, Synthetic Construct
  source 1..27: mol_type = other RNA
ccccccactgctaaatttgattggctt

SEQ ID NO: 11624 - RNA, 22 nt, Synthetic Construct
  source 1..22: mol_type = other RNA
tggggtagtagtttgtgctgtt

SEQ ID NO: 11625 - RNA, 22 nt, Synthetic Construct
  source 1..22: mol_type = other RNA
tggggtagtagtttgtgctgtt

SEQ ID NO: 11626 - RNA, 20 nt, Synthetic Construct
  source 1..20: mol_type = other RNA
caggacagtgaaacgagtca

SEQ ID NO: 11627 - RNA, 21 nt, Synthetic Construct
  source 1..21: mol_type = other RNA
tgacctatgaattgacagcca

SEQ ID NO: 11628 - RNA, 21 nt, Synthetic Construct
  source 1..21: mol_type = other RNA
tgacctatgaattgacagcca

SEQ ID NO: 11629 - RNA, 18 nt, Synthetic Construct
  source 1..18: mol_type = other RNA
ggtgcaagcgttaatcgg

SEQ ID NO: 11630 - RNA, 18 nt, Synthetic Construct
  source 1..18: mol_type = other RNA
ggtgcaagcgttaatcgg

SEQ ID NO: 11631 - RNA, 23 nt, Synthetic Construct
  source 1..23: mol_type = other RNA
tcctgtactgagctgcctcgaga

SEQ ID NO: 11632 - RNA, 22 nt, Synthetic Construct
  source 1..22: mol_type = other RNA
tgtcagtttgccaaatacccca

SEQ ID NO: 11633 - RNA, 16 nt, Synthetic Construct
  source 1..16: mol_type = other RNA
gcgtagatatgcggag

SEQ ID NO: 11634 - RNA, 23 nt, Synthetic Construct
  source 1..23: mol_type = other RNA
ctcactgatcgagtcgtcctgcg

SEQ ID NO: 11635 - RNA, 23 nt, Synthetic Construct
  source 1..23: mol_type = other RNA
ctcactgatcgagtcgtcctgcg

SEQ ID NO: 11636 - RNA, 37 nt, Synthetic Construct; identical to SEQ ID NO: 2365
  source 1..37: mol_type = other RNA

SEQ ID NO: 11637 - RNA, 37 nt, Synthetic Construct; identical to SEQ ID NO: 2365
  source 1..37: mol_type = other RNA

SEQ ID NO: 11638 - RNA, 21 nt, Synthetic Construct
  source 1..21: mol_type = other RNA
cgcatcccctagggcattggt

SEQ ID NO: 11639 - RNA, 22 nt, Synthetic Construct
  source 1..22: mol_type = other RNA
tgaggtagtaggttgcatagtt

SEQ ID NO: 11640 - RNA, 25 nt, Synthetic Construct
  source 1..25: mol_type = other RNA
atgaggatatgagatcgagacgaca

SEQ ID NO: 11641 - RNA, 21 nt, Synthetic Construct
  source 1..21: mol_type = other RNA
tgaggaagtagattgtatagt

SEQ ID NO: 11642 - RNA, 33 nt, Synthetic Construct; identical to SEQ ID NO: 1982
  source 1..33: mol_type = other RNA

SEQ ID NO: 11643 - RNA, 23 nt, Synthetic Construct
  source 1..23: mol_type = other RNA
aacggaatcccaaaagcagctgt

SEQ ID NO: 11644 - RNA, 23 nt, Synthetic Construct
  source 1..23: mol_type = other RNA
aacggaatcccaaaagcagctgt

SEQ ID NO: 11645 - RNA, 18 nt, Synthetic Construct
  source 1..18: mol_type = other RNA
cagcactctgcaaagacg

SEQ ID NO: 11646 - RNA, 18 nt, Synthetic Construct
  source 1..18: mol_type = other RNA
cagcactctgcaaagacg

SEQ ID NO: 11647 - RNA, 22 nt, Synthetic Construct
  source 1..22: mol_type = other RNA
tgaggtagcagtttgtgctgtt

SEQ ID NO: 11648 - RNA, 22 nt, Synthetic Construct
  source 1..22: mol_type = other RNA
tgaggtagcagtttgtgctgtt

SEQ ID NO: 11649 - RNA, 22 nt, Synthetic Construct
  source 1..22: mol_type = other RNA
tcctgtattgagctgccccgag

SEQ ID NO: 11650 - RNA, 25 nt, Synthetic Construct
  source 1..25: mol_type = other RNA
gtgaggatatgagatcgagacgaca

SEQ ID NO: 11651 - RNA, 25 nt, Synthetic Construct
  source 1..25: mol_type = other RNA
gtgaggatatgagatcgagacgaca

SEQ ID NO: 11652 - RNA, 15 nt, Synthetic Construct
  source 1..15: mol_type = other RNA
ggtgaaagcggggga

SEQ ID NO: 11653 - RNA, 15 nt, Synthetic Construct
  source 1..15: mol_type = other RNA
ggtgaaagcggggga

SEQ ID NO: 11654 - RNA, 15 nt, Synthetic Construct
  source 1..15: mol_type = other RNA
gcggaaggatcattg

SEQ ID NO: 11655 - RNA, 15 nt, Synthetic Construct
  source 1..15: mol_type = other RNA
gcggaaggatcattg

SEQ ID NO: 11656 - RNA, 23 nt, Synthetic Construct
  source 1..23: mol_type = other RNA
tagtaatacgacgtacttagtgt

SEQ ID NO: 11657 - RNA, 23 nt, Synthetic Construct
  source 1..23: mol_type = other RNA
tagtaatacgacgtacttagtgt

SEQ ID NO: 11658 - RNA, 22 nt, Synthetic Construct
  source 1..22: mol_type = other RNA
ngaggtagtaggttgtgtggtt

SEQ ID NO: 11659 - RNA, 22 nt, Synthetic Construct
  source 1..22: mol_type = other RNA
ngaggtagtaggttgtgtggtt

SEQ ID NO: 11660 - RNA, 23 nt, Synthetic Construct
  source 1..23: mol_type = other RNA
ggcagggttcgtgactggggtga

SEQ ID NO: 11661 - RNA, 21 nt, Synthetic Construct
  source 1..21: mol_type = other RNA
tgaggggcagagagcgagaca

SEQ ID NO: 11662 - RNA, 21 nt, Synthetic Construct
  source 1..21: mol_type = other RNA
tgaggggcagagagcgagaca

SEQ ID NO: 11663 - RNA, 29 nt, Synthetic Construct
  source 1..29: mol_type = other RNA
ccccccccactgctaaatttgactggctt

SEQ ID NO: 11664 - RNA, 29 nt, Synthetic Construct
  source 1..29: mol_type = other RNA
ccccccccactgctaaatttgactggctt

SEQ ID NO: 11665 - RNA, 21 nt, Synthetic Construct
  source 1..21: mol_type = other RNA
ctagactggagctccttgagg

SEQ ID NO: 11666 - RNA, 21 nt, Synthetic Construct
  source 1..21: mol_type = other RNA
tccctgtcctccaggagctct

SEQ ID NO: 11667 - RNA, 21 nt, Synthetic Construct
  source 1..21: mol_type = other RNA
tccctgtcctccaggagctct

SEQ ID NO: 11668 - RNA, 22 nt, Synthetic Construct
  source 1..22: mol_type = other RNA
tggaacgtaaagaagtatgtat

SEQ ID NO: 11669 - RNA, 16 nt, Synthetic Construct
  source 1..16: mol_type = other RNA
gtcgacgtatagggtg

SEQ ID NO: 11670 - RNA, 16 nt, Synthetic Construct
  source 1..16: mol_type = other RNA
gtcgacgtatagggtg

SEQ ID NO: 11671 - RNA, 21 nt, Synthetic Construct
  source 1..21: mol_type = other RNA
tgaggtggtagattgtatagt

SEQ ID NO: 11672 - RNA, 25 nt, Synthetic Construct
  source 1..25: mol_type = other RNA
ttggggatatgagatcgagacgaca

SEQ ID NO: 11673 - RNA, 25 nt, Synthetic Construct
  source 1..25: mol_type = other RNA
ttggggatatgagatcgagacgaca

SEQ ID NO: 11674 - RNA, 27 nt, Synthetic Construct
  source 1..27: mol_type = other RNA
ccccccactgctaaatttggctggcta

SEQ ID NO: 11675 - RNA, 17 nt, Synthetic Construct
  source 1..17: mol_type = other RNA
ccagtaaacggcggccg

SEQ ID NO: 11676 - RNA, 17 nt, Synthetic Construct
  source 1..17: mol_type = other RNA
ccagtaaacggcggccg

SEQ ID NO: 11677 - RNA, 22 nt, Synthetic Construct
  source 1..22: mol_type = other RNA
tgaggtagtagattgcatagtt

SEQ ID NO: 11678 - RNA, 16 nt, Synthetic Construct
  source 1..16: mol_type = other RNA
cgtgagctgggtttag

SEQ ID NO: 11679 - RNA, 16 nt, Synthetic Construct
  source 1..16: mol_type = other RNA
cgtgagctgggtttag

SEQ ID NO: 11680 - RNA, 23 nt, Synthetic Construct
  source 1..23: mol_type = other RNA
tagcagcacgtaaatattggcgt

SEQ ID NO: 11681 - RNA, 25 nt, Synthetic Construct
  source 1..25: mol_type = other RNA
ttgaggatatgaggtcgagacgaca

SEQ ID NO: 11682 - RNA, 25 nt, Synthetic Construct
  source 1..25: mol_type = other RNA
ttgaggatatgaggtcgagacgaca

SEQ ID NO: 11683 - RNA, 22 nt, Synthetic Construct
  source 1..22: mol_type = other RNA
tagcttatcagactgatgttgg

SEQ ID NO: 11684 - RNA, 22 nt, Synthetic Construct
  source 1..22: mol_type = other RNA
tagcttatcagactgatgttgg

SEQ ID NO: 11685 - RNA, 20 nt, Synthetic Construct
  source 1..20: mol_type = other RNA
taaggtagtaggttgtgtgg

SEQ ID NO: 11686 - RNA, 20 nt, Synthetic Construct
  source 1..20: mol_type = other RNA
taaggtagtaggttgtgtgg

SEQ ID NO: 11687 - RNA, 15 nt, Synthetic Construct
  source 1..15: mol_type = other RNA
tgcaagtcgaacggt

SEQ ID NO: 11688 - RNA, 15 nt, Synthetic Construct
  source 1..15: mol_type = other RNA
tgcaagtcgaacggt

SEQ ID NO: 11689 - RNA, 17 nt, Synthetic Construct
  source 1..17: mol_type = other RNA
atagggaacgtgagctg

SEQ ID NO: 11690 - RNA, 17 nt, Synthetic Construct
  source 1..17: mol_type = other RNA
atagggaacgtgagctg

SEQ ID NO: 11691 - RNA, 17 nt, Synthetic Construct
  source 1..17: mol_type = other RNA
cacggcccagactccta

SEQ ID NO: 11692 - RNA, 17 nt, Synthetic Construct
  source 1..17: mol_type = other RNA
cacggcccagactccta

SEQ ID NO: 11693 - RNA, 23 nt, Synthetic Construct
  source 1..23: mol_type = other RNA
tgtgcaaatctatgcaaaactga

SEQ ID NO: 11694 - RNA, 23 nt, Synthetic Construct
  source 1..23: mol_type = other RNA
tgtgcaaatctatgcaaaactga

SEQ ID NO: 11695 - RNA, 22 nt, Synthetic Construct
  source 1..22: mol_type = other RNA
tgaggtagtaagttgtatagtt

SEQ ID NO: 11696 - RNA, 27 nt, Synthetic Construct
  source 1..27: mol_type = other RNA
ccccccactgttaaatttgactggctt

SEQ ID NO: 11697 - RNA, 37 nt, Synthetic Construct; identical to SEQ ID NO: 2607
  source 1..37: mol_type = other RNA

SEQ ID NO: 11698 - RNA, 23 nt, Synthetic Construct
  source 1..23: mol_type = other RNA
tgtcagtttgtcaaataccccat

SEQ ID NO: 11699 - RNA, 23 nt, Synthetic Construct
  source 1..23: mol_type = other RNA
tgtcagtttgtcaaataccccat

SEQ ID NO: 11700 - RNA, 23 nt, Synthetic Construct
  source 1..23: mol_type = other RNA
ggcagcattgtacagggctatga

SEQ ID NO: 11701 - RNA, 29 nt, Synthetic Construct
  source 1..29: mol_type = other RNA
gcatgggtggttcagtggtagaattctcg

SEQ ID NO: 11702 - RNA, 29 nt, Synthetic Construct
  source 1..29: mol_type = other RNA
gcatgggtggttcagtggtagaattctcg

SEQ ID NO: 11703 - RNA, 16 nt, Synthetic Construct
  source 1..16: mol_type = other RNA
cccagaaacccggtcg

SEQ ID NO: 11704 - RNA, 16 nt, Synthetic Construct
  source 1..16: mol_type = other RNA
cccagaaacccggtcg

SEQ ID NO: 11705 - RNA, 20 nt, Synthetic Construct
  source 1..20: mol_type = other RNA
aatgacacgatcactcccgt

SEQ ID NO: 11706 - RNA, 20 nt, Synthetic Construct
  source 1..20: mol_type = other RNA
aatgacacgatcactcccgt

SEQ ID NO: 11707 - RNA, 23 nt, Synthetic Construct
  source 1..23: mol_type = other RNA
cactagattgtgagctcctggaa

SEQ ID NO: 11708 - RNA, 23 nt, Synthetic Construct
  source 1..23: mol_type = other RNA
cactagattgtgagctcctggaa

SEQ ID NO: 11709 - RNA, 23 nt, Synthetic Construct
  source 1..23: mol_type = other RNA
gtcagtttgtcaaataccccatt

SEQ ID NO: 11710 - RNA, 23 nt, Synthetic Construct
  source 1..23: mol_type = other RNA
gtcagtttgtcaaataccccatt

SEQ ID NO: 11711 - RNA, 25 nt, Synthetic Construct
  source 1..25: mol_type = other RNA
tgtcagtttgtcaaataccccattt

SEQ ID NO: 11712 - RNA, 25 nt, Synthetic Construct
  source 1..25: mol_type = other RNA
tgtcagtttgtcaaataccccattt

SEQ ID NO: 11713 - RNA, 23 nt, Synthetic Construct
  source 1..23: mol_type = other RNA
tggaatgtaaagaagtatgtacc

SEQ ID NO: 11714 - RNA, 23 nt, Synthetic Construct
  source 1..23: mol_type = other RNA
tggaatgtaaagaagtatgtacc

SEQ ID NO: 11715 - RNA, 19 nt, Synthetic Construct
  source 1..19: mol_type = other RNA
cccttgtcattagttgcta

SEQ ID NO: 11716 - RNA, 21 nt, Synthetic Construct
  source 1..21: mol_type = other RNA
gctattgacgaccgtaccgca

SEQ ID NO: 11717 - RNA, 21 nt, Synthetic Construct
  source 1..21: mol_type = other RNA
gctattgacgaccgtaccgca

SEQ ID NO: 11718 - RNA, 22 nt, Synthetic Construct
  source 1..22: mol_type = other RNA
tgaggtagtagactgtatagtt

SEQ ID NO: 11719 - RNA, 29 nt, Synthetic Construct
  source 1..29: mol_type = other RNA
gcccggctagctcagtcggtagagcatgg

SEQ ID NO: 11720 - RNA, 29 nt, Synthetic Construct
  source 1..29: mol_type = other RNA
gcccggctagctcagtcggtagagcatgg

SEQ ID NO: 11721 - RNA, 22 nt, Synthetic Construct
  source 1..22: mol_type = other RNA
tgaggtagtaggatgtgtggtt

SEQ ID NO: 11722 - RNA, 22 nt, Synthetic Construct
  source 1..22: mol_type = other RNA
tgaggcagtaggttgtatagtt

SEQ ID NO: 11723 - RNA, 34 nt, Synthetic Construct; identical to SEQ ID NO: 2317
  source 1..34: mol_type = other RNA

SEQ ID NO: 11724 - RNA, 34 nt, Synthetic Construct; identical to SEQ ID NO: 2317
  source 1..34: mol_type = other RNA

SEQ ID NO: 11725 - RNA, 21 nt, Synthetic Construct
  source 1..21: mol_type = other RNA
actcggcgtggcgtcggtcgt

SEQ ID NO: 11726 - RNA, 21 nt, Synthetic Construct
  source 1..21: mol_type = other RNA
actcggcgtggcgtcggtcgt

SEQ ID NO: 11727 - RNA, 24 nt, Synthetic Construct
  source 1..24: mol_type = other RNA
agctcggtctgaggcccctcagtt

SEQ ID NO: 11728 - RNA, 24 nt, Synthetic Construct
  source 1..24: mol_type = other RNA
agctcggtctgaggcccctcagtt

SEQ ID NO: 11729 - RNA, 23 nt, Synthetic Construct
  source 1..23: mol_type = other RNA
attctaatttctccacgtctttg

SEQ ID NO: 11730 - RNA, 33 nt, Synthetic Construct; identical to SEQ ID NO: 2386
  source 1..33: mol_type = other RNA

SEQ ID NO: 11731 - RNA, 33 nt, Synthetic Construct; identical to SEQ ID NO: 2386
  source 1..33: mol_type = other RNA

SEQ ID NO: 11732 - RNA, 22 nt, Synthetic Construct
  source 1..22: mol_type = other RNA
tcctgtactgagctgccctgag

SEQ ID NO: 11733 - RNA, 22 nt, Synthetic Construct
  source 1..22: mol_type = other RNA
tcctgtactgagctgccctgag

SEQ ID NO: 11734 - RNA, 20 nt, Synthetic Construct
  source 1..20: mol_type = other RNA
tgaggtagtaggttgtgcgg

SEQ ID NO: 11735 - RNA, 21 nt, Synthetic Construct
  source 1..21: mol_type = other RNA
ctttgttcgattccgttgagt

SEQ ID NO: 11736 - RNA, 21 nt, Synthetic Construct
  source 1..21: mol_type = other RNA
ctttgttcgattccgttgagt

SEQ ID NO: 11737 - RNA, 15 nt, Synthetic Construct
  source 1..15: mol_type = other RNA
acggtcctaaggtag

SEQ ID NO: 11738 - RNA, 15 nt, Synthetic Construct
  source 1..15: mol_type = other RNA
acggtcctaaggtag

SEQ ID NO: 11739 - RNA, 21 nt, Synthetic Construct
  source 1..21: mol_type = other RNA
tccagtactgagctgccccga

SEQ ID NO: 11740 - RNA, 21 nt, Synthetic Construct
  source 1..21: mol_type = other RNA
tccagtactgagctgccccga

SEQ ID NO: 11741 - RNA, 23 nt, Synthetic Construct
  source 1..23: mol_type = other RNA
tccctggtggtctagtggttagg

SEQ ID NO: 11742 - RNA, 27 nt, Synthetic Construct
  source 1..27: mol_type = other RNA
gacttaccaaacctatgcaaactccga

SEQ ID NO: 11743 - RNA, 27 nt, Synthetic Construct
  source 1..27: mol_type = other RNA
gacttaccaaacctatgcaaactccga

SEQ ID NO: 11744 - RNA, 22 nt, Synthetic Construct
  source 1..22: mol_type = other RNA
aaccagcacgtaaatattggcg

SEQ ID NO: 11745 - RNA, 26 nt, Synthetic Construct
  source 1..26: mol_type = other RNA
gcataagcgtgcttgactgcgagact

SEQ ID NO: 11746 - RNA, 22 nt, Synthetic Construct
  source 1..22: mol_type = other RNA
attatggtttgcctgggactga

SEQ ID NO: 11747 - RNA, 22 nt, Synthetic Construct
  source 1..22: mol_type = other RNA
attatggtttgcctgggactga

SEQ ID NO: 11748 - RNA, 22 nt, Synthetic Construct
  source 1..22: mol_type = other RNA
cgaggtagtagattgtatagtt

SEQ ID NO: 11749 - RNA, 17 nt, Synthetic Construct
  source 1..17: mol_type = other RNA
cagagacgagtcgacca

SEQ ID NO: 11750 - RNA, 22 nt, Synthetic Construct
  source 1..22: mol_type = other RNA
tatcgcacttgtcccggcctgt

SEQ ID NO: 11751 - RNA, 22 nt, Synthetic Construct
  source 1..22: mol_type = other RNA
tatcgcacttgtcccggcctgt

SEQ ID NO: 11752 - RNA, 19 nt, Synthetic Construct
  source 1..19: mol_type = other RNA
tctaatgagactgccggtg

SEQ ID NO: 11753 - RNA, 19 nt, Synthetic Construct
  source 1..19: mol_type = other RNA
tctaatgagactgccggtg

SEQ ID NO: 11754 - RNA, 27 nt, Synthetic Construct
  source 1..27: mol_type = other RNA
ccccccactgctaaacttgactggctt

SEQ ID NO: 11755 - RNA, 27 nt, Synthetic Construct
  source 1..27: mol_type = other RNA
ccccccactgctaaatttggctggctt

SEQ ID NO: 11756 - RNA, 27 nt, Synthetic Construct
  source 1..27: mol_type = other RNA
ccccccactgctaaatttgactggctc

SEQ ID NO: 11757 - RNA, 22 nt, Synthetic Construct
  source 1..22: mol_type = other RNA
tggggtagtagattgtatagtt

SEQ ID NO: 11758 - RNA, 22 nt, Synthetic Construct
  source 1..22: mol_type = other RNA
tcctgtgctgagctgccccgag

SEQ ID NO: 11759 - RNA, 22 nt, Synthetic Construct
  source 1..22: mol_type = other RNA
tcctgtgctgagctgccccgag

SEQ ID NO: 11760 - RNA, 22 nt, Synthetic Construct
  source 1..22: mol_type = other RNA
agagttctacagtccgacgatc

SEQ ID NO: 11761 - RNA, 22 nt, Synthetic Construct
  source 1..22: mol_type = other RNA
agagttctacagtccgacgatc

SEQ ID NO: 11762 - RNA, 23 nt, Synthetic Construct
  source 1..23: mol_type = other RNA
tggtaattcgacgtacttagtgt

SEQ ID NO: 11763 - RNA, 23 nt, Synthetic Construct
  source 1..23: mol_type = other RNA
tggtaattcgacgtacttagtgt

SEQ ID NO: 11764 - RNA, 21 nt, Synthetic Construct
  source 1..21: mol_type = other RNA
tcctgcactgagctgccccga

SEQ ID NO: 11765 - RNA, 21 nt, Synthetic Construct
  source 1..21: mol_type = other RNA
tcctgcactgagctgccccga

SEQ ID NO: 11766 - RNA, 33 nt, Synthetic Construct; identical to SEQ ID NO: 1982
  source 1..33: mol_type = other RNA

SEQ ID NO: 11767 - RNA, 33 nt, Synthetic Construct; identical to SEQ ID NO: 1982
  source 1..33: mol_type = other RNA

SEQ ID NO: 11768 - RNA, 22 nt, Synthetic Construct
  source 1..22: mol_type = other RNA
tgaggtagtagtttgtgccgtt

SEQ ID NO: 11769 - RNA, 22 nt, Synthetic Construct
  source 1..22: mol_type = other RNA
tgaggtagtagtttgtgccgtt

SEQ ID NO: 11770 - RNA, 27 nt, Synthetic Construct
  source 1..27: mol_type = other RNA
ttcaacttaacttgaccgctctgacca

SEQ ID NO: 11771 - RNA, 27 nt, Synthetic Construct
  source 1..27: mol_type = other RNA
ttcaacttaacttgaccgctctgacca

SEQ ID NO: 11772 - RNA, 21 nt, Synthetic Construct
  source 1..21: mol_type = other RNA
tgaggggcagggagcgagact

SEQ ID NO: 11773 - RNA, 21 nt, Synthetic Construct
  source 1..21: mol_type = other RNA
tgaggggcagggagcgagact

SEQ ID NO: 11774 - RNA, 21 nt, Synthetic Construct
  source 1..21: mol_type = other RNA
gttggttcaagcgtgtagtcg

SEQ ID NO: 11775 - RNA, 21 nt, Synthetic Construct
  source 1..21: mol_type = other RNA
gttggttcaagcgtgtagtcg

SEQ ID NO: 11776 - RNA, 22 nt, Synthetic Construct
  source 1..22: mol_type = other RNA
tgaggtagtaggttgtattgtt

SEQ ID NO: 11777 - RNA, 16 nt, Synthetic Construct
  source 1..16: mol_type = other RNA
agcaagtcgaacggta

SEQ ID NO: 11778 - RNA, 16 nt, Synthetic Construct
  source 1..16: mol_type = other RNA
agcaagtcgaacggta

SEQ ID NO: 11779 - RNA, 21 nt, Synthetic Construct
  source 1..21: mol_type = other RNA
ttcggaagaaggggtgcctgg

SEQ ID NO: 11780 - RNA, 21 nt, Synthetic Construct
  source 1..21: mol_type = other RNA
ttcggaagaaggggtgcctgg

SEQ ID NO: 11781 - RNA, 22 nt, Synthetic Construct
  source 1..22: mol_type = other RNA
tgaggtagtaagttgtatagtt

SEQ ID NO: 11782 - RNA, 25 nt, Synthetic Construct
  source 1..25: mol_type = other RNA
ttgaggatatgagatcgggacgaca

SEQ ID NO: 11783 - RNA, 25 nt, Synthetic Construct
  source 1..25: mol_type = other RNA
ttgaggatatgagatcgggacgaca

SEQ ID NO: 11784 - RNA, 18 nt, Synthetic Construct
  source 1..18: mol_type = other RNA
atggccgttcttagttgg

SEQ ID NO: 11785 - RNA, 22 nt, Synthetic Construct
  source 1..22: mol_type = other RNA
tagcttatcagactgatgttgg

SEQ ID NO: 11786 - RNA, 22 nt, Synthetic Construct
  source 1..22: mol_type = other RNA
tagcttatcagactgatgttgg

SEQ ID NO: 11787 - RNA, 23 nt, Synthetic Construct
  source 1..23: mol_type = other RNA
ccctgtactgagctgccccgaga

SEQ ID NO: 11788 - RNA, 23 nt, Synthetic Construct
  source 1..23: mol_type = other RNA
ccctgtactgagctgccccgaga

SEQ ID NO: 11789 - RNA, 20 nt, Synthetic Construct
  source 1..20: mol_type = other RNA
gaatcgctagtaatcgcgga

SEQ ID NO: 11790 - RNA, 20 nt, Synthetic Construct
  source 1..20: mol_type = other RNA
gaatcgctagtaatcgcgga

SEQ ID NO: 11791 - RNA, 20 nt, Synthetic Construct
  source 1..20: mol_type = other RNA
gaatcgctagtaatcgcgga

SEQ ID NO: 11792 - RNA, 23 nt, Synthetic Construct
  source 1..23: mol_type = other RNA
caaagtgctcatagtgcaggtag

SEQ ID NO: 11793 - RNA, 22 nt, Synthetic Construct
  source 1..22: mol_type = other RNA
tcctatactgagctgccccgag

SEQ ID NO: 11794 - RNA, 22 nt, Synthetic Construct
  source 1..22: mol_type = other RNA
tcctatactgagctgccccgag

SEQ ID NO: 11795 - RNA, 21 nt, Synthetic Construct
  source 1..21: mol_type = other RNA
tagcagcacgtaatattggcg

SEQ ID NO: 11796 - RNA, 21 nt, Synthetic Construct
  source 1..21: mol_type = other RNA
tagcagcacgtaatattggcg

SEQ ID NO: 11797 - RNA, 27 nt, Synthetic Construct
  source 1..27: mol_type = other RNA
ccccccactgctagatttgactggctt

SEQ ID NO: 11798 - RNA, 19 nt, Synthetic Construct
  source 1..19: mol_type = other RNA
tacagtatagatgatgtac

SEQ ID NO: 11799 - RNA, 19 nt, Synthetic Construct
  source 1..19: mol_type = other RNA
tacagtatagatgatgtac

SEQ ID NO: 11800 - RNA, 35 nt, Synthetic Construct; identical to SEQ ID NO: 10694
  source 1..35: mol_type = other RNA

SEQ ID NO: 11801 - RNA, 22 nt, Synthetic Construct
  source 1..22: mol_type = other RNA
tgtggtagtaggttgtatagtt

SEQ ID NO: 11802 - RNA, 21 nt, Synthetic Construct
  source 1..21: mol_type = other RNA
gtagtgtttcctactttatgg

SEQ ID NO: 11803 - RNA, 21 nt, Synthetic Construct
  source 1..21: mol_type = other RNA
gtagtgtttcctactttatgg

SEQ ID NO: 11804 - RNA, 22 nt, Synthetic Construct
  source 1..22: mol_type = other RNA
tccccttggggttgtaggacca

SEQ ID NO: 11805 - RNA, 22 nt, Synthetic Construct
  source 1..22: mol_type = other RNA
tccccttggggttgtaggacca

SEQ ID NO: 11806 - RNA, 23 nt, Synthetic Construct
  source 1..23: mol_type = other RNA
nggtaatacgacgtacttagtgt

SEQ ID NO: 11807 - RNA, 22 nt, Synthetic Construct
  source 1..22: mol_type = other RNA
tattgcacttgtcccggcctat

SEQ ID NO: 11808 - RNA, 22 nt, Synthetic Construct
  source 1..22: mol_type = other RNA
tcctgtactgagctaccccgag

SEQ ID NO: 11809 - RNA, 25 nt, Synthetic Construct
  source 1..25: mol_type = other RNA
gctcagtggaaaggatgtgaatcta

SEQ ID NO: 11810 - RNA, 25 nt, Synthetic Construct
  source 1..25: mol_type = other RNA
gctcagtggaaaggatgtgaatcta

SEQ ID NO: 11811 - RNA, 22 nt, Synthetic Construct
  source 1..22: mol_type = other RNA
tagcagcacgtaaacattggcg

SEQ ID NO: 11812 - RNA, 22 nt, Synthetic Construct
  source 1..22: mol_type = other RNA
tagcagcacgtaaacattggcg

SEQ ID NO: 11813 - RNA, 25 nt, Synthetic Construct
  source 1..25: mol_type = other RNA
atgaggatatgagatcgagacgaca

SEQ ID NO: 11814 - RNA, 25 nt, Synthetic Construct
  source 1..25: mol_type = other RNA
atgaggatatgagatcgagacgaca

SEQ ID NO: 11815 - RNA, 23 nt, Synthetic Construct
  source 1..23: mol_type = other RNA
tcctgtactgagccgccccgaga

SEQ ID NO: 11816 - RNA, 23 nt, Synthetic Construct
  source 1..23: mol_type = other RNA
tcctgtactgagccgccccgaga

SEQ ID NO: 11817 - RNA, 38 nt, Synthetic Construct
  source 1..38: mol_type = other RNA
atatcggaacgtgcccagtcgtgggggataactgctcg

SEQ ID NO: 11818 - RNA, 38 nt, Synthetic Construct; identical to SEQ ID NO: 11817
  source 1..38: mol_type = other RNA

SEQ ID NO: 11819 - RNA, 22 nt, Synthetic Construct
  source 1..22: mol_type = other RNA
tgaggtagtaggttatgtggtt

SEQ ID NO: 11820 - RNA, 22 nt, Synthetic Construct
  source 1..22: mol_type = other RNA
tgaggtagtaggttatgtggtt

SEQ ID NO: 11821 - RNA, 22 nt, Synthetic Construct
  source 1..22: mol_type = other RNA
tgaggtagtggtttgtgctgtt

SEQ ID NO: 11822 - RNA, 22 nt, Synthetic Construct
  source 1..22: mol_type = other RNA
tgaggtagtggtttgtgctgtt

SEQ ID NO: 11823 - RNA, 39 nt, Synthetic Construct; identical to SEQ ID NO: 2398
  source 1..39: mol_type = other RNA

SEQ ID NO: 11824 - RNA, 39 nt, Synthetic Construct; identical to SEQ ID NO: 2398
  source 1..39: mol_type = other RNA

SEQ ID NO: 11825 - RNA, 19 nt, Synthetic Construct
  source 1..19: mol_type = other RNA
aggacagtgaaacgagtca

SEQ ID NO: 11826 - RNA, 19 nt, Synthetic Construct
  source 1..19: mol_type = other RNA
aggacagtgaaacgagtca

SEQ ID NO: 11827 - RNA, 31 nt, Synthetic Construct; identical to SEQ ID NO: 7160
  source 1..31: mol_type = other RNA

SEQ ID NO: 11828 - RNA, 31 nt, Synthetic Construct; identical to SEQ ID NO: 7160
  source 1..31: mol_type = other RNA

SEQ ID NO: 11829 - RNA, 21 nt, Synthetic Construct
  source 1..21: mol_type = other RNA
cattattacttttggtacgcg

SEQ ID NO: 11830 - RNA, 28 nt, Synthetic Construct
  source 1..28: mol_type = other RNA
cccccccactgctaaatttgactggctt

SEQ ID NO: 11831 - RNA, 18 nt, Synthetic Construct
  source 1..18: mol_type = other RNA
aatcagcggggaaagaag

SEQ ID NO: 11832 - RNA, 18 nt, Synthetic Construct
  source 1..18: mol_type = other RNA
aatcagcggggaaagaag

SEQ ID NO: 11833 - RNA, 23 nt, Synthetic Construct
  source 1..23: mol_type = other RNA
agcagcatcgtacagggctatga

SEQ ID NO: 11834 - RNA, 22 nt, Synthetic Construct
  source 1..22: mol_type = other RNA
tgaggtagtaggttgtttagtt

SEQ ID NO: 11835 - RNA, 22 nt, Synthetic Construct
  source 1..22: mol_type = other RNA
ttcaagtaatccagggtaggct

SEQ ID NO: 11836 - RNA, 23 nt, Synthetic Construct
  source 1..23: mol_type = other RNA
tgaggggcagagagcgagactct

SEQ ID NO: 11837 - RNA, 24 nt, Synthetic Construct
  source 1..24: mol_type = other RNA
gcagctaataccgcatacgacctg

SEQ ID NO: 11838 - RNA, 35 nt, Synthetic Construct; identical to SEQ ID NO: 2269
  source 1..35: mol_type = other RNA

SEQ ID NO: 11839 - RNA, 23 nt, Synthetic Construct
  source 1..23: mol_type = other RNA
tgaggtagtagattgtatagttc

SEQ ID NO: 11840 - RNA, 30 nt, Synthetic Construct; identical to SEQ ID NO: 2578
  source 1..30: mol_type = other RNA

SEQ ID NO: 11841 - RNA, 30 nt, Synthetic Construct; identical to SEQ ID NO: 2578
  source 1..30: mol_type = other RNA

SEQ ID NO: 11842 - RNA, 37 nt, Synthetic Construct; identical to SEQ ID NO: 2447
  source 1..37: mol_type = other RNA

SEQ ID NO: 11843 - RNA, 27 nt, Synthetic Construct
  source 1..27: mol_type = other RNA
atagtctttgttcgattccgttgagta

SEQ ID NO: 11844 - RNA, 27 nt, Synthetic Construct
  source 1..27: mol_type = other RNA
atagtctttgttcgattccgttgagta

SEQ ID NO: 11845 - RNA, 29 nt, Synthetic Construct
  source 1..29: mol_type = other RNA
gtgcatgcactctggggttgtgggacagc

SEQ ID NO: 11846 - RNA, 29 nt, Synthetic Construct
  source 1..29: mol_type = other RNA
gtgcatgcactctggggttgtgggacagc

SEQ ID NO: 11847 - RNA, 16 nt, Synthetic Construct
  source 1..16: mol_type = other RNA
gccagcagccgcggta

SEQ ID NO: 11848 - RNA, 22 nt, Synthetic Construct
  source 1..22: mol_type = other RNA
tagcagcacgtaaatgttggcg

SEQ ID NO: 11849 - RNA, 22 nt, Synthetic Construct
  source 1..22: mol_type = other RNA
tagcagcacgtaaatgttggcg

SEQ ID NO: 11850 - RNA, 19 nt, Synthetic Construct
  source 1..19: mol_type = other RNA
ccttggggttgtaggacca

SEQ ID NO: 11851 - RNA, 19 nt, Synthetic Construct
  source 1..19: mol_type = other RNA
ccttggggttgtaggacca

SEQ ID NO: 11852 - RNA, 25 nt, Synthetic Construct
  source 1..25: mol_type = other RNA
aaaccgttaccattactgagtttag

SEQ ID NO: 11853 - RNA, 25 nt, Synthetic Construct
  source 1..25: mol_type = other RNA
aaaccgttaccattactgagtttag

SEQ ID NO: 11854 - RNA, 20 nt, Synthetic Construct
  source 1..20: mol_type = other RNA
tcctgtctgaatatgggggg

SEQ ID NO: 11855 - RNA, 20 nt, Synthetic Construct
  source 1..20: mol_type = other RNA
tcctgtctgaatatgggggg

SEQ ID NO: 11856 - RNA, 23 nt, Synthetic Construct
  source 1..23: mol_type = other RNA
aggggtgctatctgtgattgagg

SEQ ID NO: 11857 - RNA, 24 nt, Synthetic Construct
  source 1..24: mol_type = other RNA
cggagaaggttagctcagccaact

SEQ ID NO: 11858 - RNA, 24 nt, Synthetic Construct
  source 1..24: mol_type = other RNA
cggagaaggttagctcagccaact

SEQ ID NO: 11859 - RNA, 30 nt, Synthetic Construct; identical to SEQ ID NO: 768
  source 1..30: mol_type = other RNA

SEQ ID NO: 11860 - RNA, 30 nt, Synthetic Construct; identical to SEQ ID NO: 768
  source 1..30: mol_type = other RNA

SEQ ID NO: 11861 - RNA, 23 nt, Synthetic Construct
  source 1..23: mol_type = other RNA
aatgacacgatcactcccgttga

SEQ ID NO: 11862 - RNA, 23 nt, Synthetic Construct
  source 1..23: mol_type = other RNA
aatgacacgatcactcccgttga

SEQ ID NO: 11863 - RNA, 24 nt, Synthetic Construct
  source 1..24: mol_type = other RNA
tactagactgaagctccttgaggt

SEQ ID NO: 11864 - RNA, 22 nt, Synthetic Construct
  source 1..22: mol_type = other RNA
tgaggaagtaggttgtatagtt

SEQ ID NO: 11865 - RNA, 22 nt, Synthetic Construct
  source 1..22: mol_type = other RNA
tgaggaagtaggttgtatagtt

SEQ ID NO: 11866 - RNA, 27 nt, Synthetic Construct
  source 1..27: mol_type = other RNA
ccccccactgctaaatttgattggctt

SEQ ID NO: 11867 - RNA, 22 nt, Synthetic Construct
  source 1..22: mol_type = other RNA
cggaggagttcgaaggtacgct

SEQ ID NO: 11868 - RNA, 20 nt, Synthetic Construct
  source 1..20: mol_type = other RNA
tgaggtagtaagttgtattg

SEQ ID NO: 11869 - RNA, 20 nt, Synthetic Construct
  source 1..20: mol_type = other RNA
tgaggtagtaagttgtattg

SEQ ID NO: 11870 - RNA, 26 nt, Synthetic Construct
  source 1..26: mol_type = other RNA
ccccccactgctaatttgactggctt

SEQ ID NO: 11871 - RNA, 23 nt, Synthetic Construct
  source 1..23: mol_type = other RNA
gtctttgttcgattccgttgagt

SEQ ID NO: 11872 - RNA, 23 nt, Synthetic Construct
  source 1..23: mol_type = other RNA
gtctttgttcgattccgttgagt

SEQ ID NO: 11873 - RNA, 22 nt, Synthetic Construct
  source 1..22: mol_type = other RNA
tggaatgtaaagaagtacgtat

SEQ ID NO: 11874 - RNA, 34 nt, Synthetic Construct; identical to SEQ ID NO: 2183
  source 1..34: mol_type = other RNA

SEQ ID NO: 11875 - RNA, 23 nt, Synthetic Construct
  source 1..23: mol_type = other RNA
tgaggtagtaggttgtgtagttt

SEQ ID NO: 11876 - RNA, 23 nt, Synthetic Construct
  source 1..23: mol_type = other RNA
tgaggtagtaggttgtgtagttt

SEQ ID NO: 11877 - RNA, 15 nt, Synthetic Construct
  source 1..15: mol_type = other RNA
ggagagatggctgag

SEQ ID NO: 11878 - RNA, 15 nt, Synthetic Construct
  source 1..15: mol_type = other RNA
ggagagatggctgag

SEQ ID NO: 11879 - RNA, 18 nt, Synthetic Construct
  source 1..18: mol_type = other RNA
tcagtagctcgaggaaaa

SEQ ID NO: 11880 - RNA, 21 nt, Synthetic Construct
  source 1..21: mol_type = other RNA
tcctgaactgagctgccccga

SEQ ID NO: 11881 - RNA, 21 nt, Synthetic Construct
  source 1..21: mol_type = other RNA
tgaggtggtaggttgtatagt

SEQ ID NO: 11882 - RNA, 16 nt, Synthetic Construct
  source 1..16: mol_type = other RNA
gagctgtggatagggg

SEQ ID NO: 11883 - RNA, 16 nt, Synthetic Construct
  source 1..16: mol_type = other RNA
gagctgtggatagggg

SEQ ID NO: 11884 - RNA, 22 nt, Synthetic Construct
  source 1..22: mol_type = other RNA
tggaatgtaaggaagtatgtat

SEQ ID NO: 11885 - RNA, 20 nt, Synthetic Construct
  source 1..20: mol_type = other RNA
tagaattctcgcctgccacg

SEQ ID NO: 11886 - RNA, 22 nt, Synthetic Construct
  source 1..22: mol_type = other RNA
cattgcacctgtctcggtctga

SEQ ID NO: 11887 - RNA, 35 nt, Synthetic Construct; identical to SEQ ID NO: 2354
  source 1..35: mol_type = other RNA

SEQ ID NO: 11888 - RNA, 20 nt, Synthetic Construct
  source 1..20: mol_type = other RNA
gtcagtttgtcaaatacccc

SEQ ID NO: 11889 - RNA, 20 nt, Synthetic Construct
  source 1..20: mol_type = other RNA
actggacttggagtcagaag

SEQ ID NO: 11890 - RNA, 21 nt, Synthetic Construct
  source 1..21: mol_type = other RNA
ctagactgaagccccttgagg

SEQ ID NO: 11891 - RNA, 23 nt, Synthetic Construct
  source 1..23: mol_type = other RNA
tcactgatcgagtcgtcctgcgc

SEQ ID NO: 11892 - RNA, 23 nt, Synthetic Construct
  source 1..23: mol_type = other RNA
tcactgatcgagtcgtcctgcgc

SEQ ID NO: 11893 - RNA, 18 nt, Synthetic Construct
  source 1..18: mol_type = other RNA
cgccgatgatagtgcgga

SEQ ID NO: 11894 - RNA, 22 nt, Synthetic Construct
  source 1..22: mol_type = other RNA
gtgccgaagctgtgggattgat

SEQ ID NO: 11895 - RNA, 22 nt, Synthetic Construct
  source 1..22: mol_type = other RNA
gtgccgaagctgtgggattgat

SEQ ID NO: 11896 - RNA, 22 nt, Synthetic Construct
  source 1..22: mol_type = other RNA
tgaggtagtaggttatatagtt

SEQ ID NO: 11897 - RNA, 22 nt, Synthetic Construct
  source 1..22: mol_type = other RNA
tcctatactgagctgccccgag

SEQ ID NO: 11898 - RNA, 22 nt, Synthetic Construct
  source 1..22: mol_type = other RNA
tcctatactgagctgccccgag

SEQ ID NO: 11899 - RNA, 22 nt, Synthetic Construct
  source 1..22: mol_type = other RNA
caaagtgcttacagtgcaggta

SEQ ID NO: 11900 - RNA, 16 nt, Synthetic Construct
  source 1..16: mol_type = other RNA
gtctacggccatacaa

SEQ ID NO: 11901 - RNA, 22 nt, Synthetic Construct
  source 1..22: mol_type = other RNA
tggaatgtaaagaagtatgcat

SEQ ID NO: 11902 - RNA, 22 nt, Synthetic Construct
  source 1..22: mol_type = other RNA
ccctgtactgagctgccccgag

SEQ ID NO: 11903 - RNA, 22 nt, Synthetic Construct
  source 1..22: mol_type = other RNA
gtgcatggccgttcttagttgg

SEQ ID NO: 11904 - RNA, 21 nt, Synthetic Construct
  source 1..21: mol_type = other RNA
tgaggtagaaggttgtatagt

SEQ ID NO: 11905 - RNA, 21 nt, Synthetic Construct
  source 1..21: mol_type = other RNA
tgaggtagtaggttgtgaggt

SEQ ID NO: 11906 - RNA, 21 nt, Synthetic Construct
  source 1..21: mol_type = other RNA
tgaggtagtaggttgtgaggt

SEQ ID NO: 11907 - RNA, 21 nt, Synthetic Construct
  source 1..21: mol_type = other RNA
tgaggtagtagattgtatggt

SEQ ID NO: 11908 - RNA, 22 nt, Synthetic Construct
  source 1..22: mol_type = other RNA
actctttccctgttgcactact

SEQ ID NO: 11909 - RNA, 22 nt, Synthetic Construct
  source 1..22: mol_type = other RNA
actctttccctgttgcactact

SEQ ID NO: 11910 - RNA, 17 nt, Synthetic Construct
  source 1..17: mol_type = other RNA
ccgtgtgaaagtaggtc

SEQ ID NO: 11911 - RNA, 17 nt, Synthetic Construct
  source 1..17: mol_type = other RNA
ccgtgtgaaagtaggtc

SEQ ID NO: 11912 - RNA, 34 nt, Synthetic Construct; identical to SEQ ID NO: 2375
  source 1..34: mol_type = other RNA

SEQ ID NO: 11913 - RNA, 34 nt, Synthetic Construct; identical to SEQ ID NO: 2375
  source 1..34: mol_type = other RNA

SEQ ID NO: 11914 - RNA, 21 nt, Synthetic Construct
  source 1..21: mol_type = other RNA
acagtagcctgcacattggtt

SEQ ID NO: 11915 - RNA, 21 nt, Synthetic Construct
  source 1..21: mol_type = other RNA
acagtagcctgcacattggtt

SEQ ID NO: 11916 - RNA, 23 nt, Synthetic Construct
  source 1..23: mol_type = other RNA
tgacctatgaattgacagccagt

SEQ ID NO: 11917 - RNA, 23 nt, Synthetic Construct
  source 1..23: mol_type = other RNA
tggtagtacgacgtacttagtgt

SEQ ID NO: 11918 - RNA, 23 nt, Synthetic Construct
  source 1..23: mol_type = other RNA
tggtagtacgacgtacttagtgt

SEQ ID NO: 11919 - RNA, 22 nt, Synthetic Construct
  source 1..22: mol_type = other RNA
tgaggtagtggattgtatagtt

SEQ ID NO: 11920 - RNA, 22 nt, Synthetic Construct
  source 1..22: mol_type = other RNA
tgaggtagtggattgtatagtt

SEQ ID NO: 11921 - RNA, 27 nt, Synthetic Construct
  source 1..27: mol_type = other RNA
gcatgggtggttcagtggtagaattct

SEQ ID NO: 11922 - RNA, 27 nt, Synthetic Construct
  source 1..27: mol_type = other RNA
gcatgggtggttcagtggtagaattct

SEQ ID NO: 11923 - RNA, 23 nt, Synthetic Construct
  source 1..23: mol_type = other RNA
tggtaatacgacgtacttagtat

SEQ ID NO: 11924 - RNA, 15 nt, Synthetic Construct
  source 1..15: mol_type = other RNA
acggtcctaaggtag

SEQ ID NO: 11925 - RNA, 17 nt, Synthetic Construct
  source 1..17: mol_type = other RNA
gcggctgtagctcagtt

SEQ ID NO: 11926 - RNA, 22 nt, Synthetic Construct
  source 1..22: mol_type = other RNA
ctccctcgggagggcgcgcggg

SEQ ID NO: 11927 - RNA, 22 nt, Synthetic Construct
  source 1..22: mol_type = other RNA
ctccctcgggagggcgcgcggg

SEQ ID NO: 11928 - RNA, 17 nt, Synthetic Construct
  source 1..17: mol_type = other RNA
atagggaacgtgagctg

SEQ ID NO: 11929 - RNA, 17 nt, Synthetic Construct
  source 1..17: mol_type = other RNA
atagggaacgtgagctg

SEQ ID NO: 11930 - RNA, 21 nt, Synthetic Construct
  source 1..21: mol_type = other RNA
gtcagtttgtcaaatacccca

SEQ ID NO: 11931 - RNA, 21 nt, Synthetic Construct
  source 1..21: mol_type = other RNA
gtcagtttgtcaaatacccca

SEQ ID NO: 11932 - RNA, 21 nt, Synthetic Construct
  source 1..21: mol_type = other RNA
ggctggtccgaaggtagtgag

SEQ ID NO: 11933 - RNA, 21 nt, Synthetic Construct
  source 1..21: mol_type = other RNA
ggctggtccgaaggtagtgag

SEQ ID NO: 11934 - RNA, 15 nt, Synthetic Construct
  source 1..15: mol_type = other RNA
ccagaaacccggtcg

SEQ ID NO: 11935 - RNA, 15 nt, Synthetic Construct
  source 1..15: mol_type = other RNA
ccagaaacccggtcg

SEQ ID NO: 11936 - RNA, 15 nt, Synthetic Construct
  source 1..15: mol_type = other RNA
gcaagtcgagcggta

SEQ ID NO: 11937 - RNA, 15 nt, Synthetic Construct
  source 1..15: mol_type = other RNA
gcaagtcgagcggta

SEQ ID NO: 11938 - RNA, 23 nt, Synthetic Construct
  source 1..23: mol_type = other RNA
tgaggtagtaggttgtatggtta

SEQ ID NO: 11939 - RNA, 23 nt, Synthetic Construct
  source 1..23: mol_type = other RNA
tgaggtagtaggttgtatggtta

SEQ ID NO: 11940 - RNA, 44 nt, Synthetic Construct; identical to SEQ ID NO: 6685
  source 1..44: mol_type = other RNA

SEQ ID NO: 11941 - RNA, 44 nt, Synthetic Construct; identical to SEQ ID NO: 6685
  source 1..44: mol_type = other RNA

SEQ ID NO: 11942 - RNA, 22 nt, Synthetic Construct
  source 1..22: mol_type = other RNA
ctcggcgtggcgtcggtcgtgt

SEQ ID NO: 11943 - RNA, 22 nt, Synthetic Construct
  source 1..22: mol_type = other RNA
ctcggcgtggcgtcggtcgtgt

SEQ ID NO: 11944 - RNA, 23 nt, Synthetic Construct
  source 1..23: mol_type = other RNA
tggtaatacgacgtacatagtgt

SEQ ID NO: 11945 - RNA, 23 nt, Synthetic Construct
  source 1..23: mol_type = other RNA
tggtaatacgacgtacatagtgt

SEQ ID NO: 11946 - RNA, 43 nt, Synthetic Construct; identical to SEQ ID NO: 727
  source 1..43: mol_type = other RNA

SEQ ID NO: 11947 - RNA, 22 nt, Synthetic Construct
  source 1..22: mol_type = other RNA
tcctgtactgagttgccccgag

SEQ ID NO: 11948 - RNA, 23 nt, Synthetic Construct
  source 1..23: mol_type = other RNA
tggtaatacgatgtacttagtgt

SEQ ID NO: 11949 - RNA, 23 nt, Synthetic Construct
  source 1..23: mol_type = other RNA
tggtaatacgatgtacttagtgt

SEQ ID NO: 11950 - RNA, 31 nt, Synthetic Construct; identical to SEQ ID NO: 960
  source 1..31: mol_type = other RNA

SEQ ID NO: 11951 - RNA, 31 nt, Synthetic Construct; identical to SEQ ID NO: 960
  source 1..31: mol_type = other RNA

SEQ ID NO: 11952 - RNA, 21 nt, Synthetic Construct
  source 1..21: mol_type = other RNA
tgaggtagcaggttgtgtggt

SEQ ID NO: 11953 - RNA, 21 nt, Synthetic Construct
  source 1..21: mol_type = other RNA
tgaggtagcaggttgtgtggt

SEQ ID NO: 11954 - RNA, 20 nt, Synthetic Construct
  source 1..20: mol_type = other RNA
cccagtaaacggcggccgta

SEQ ID NO: 11955 - RNA, 20 nt, Synthetic Construct
  source 1..20: mol_type = other RNA
cccagtaaacggcggccgta

SEQ ID NO: 11956 - RNA, 26 nt, Synthetic Construct
  source 1..26: mol_type = other RNA
gatgcgtggtaggagagcgttctgta

SEQ ID NO: 11957 - RNA, 26 nt, Synthetic Construct
  source 1..26: mol_type = other RNA
gatgcgtggtaggagagcgttctgta

SEQ ID NO: 11958 - RNA, 26 nt, Synthetic Construct
  source 1..26: mol_type = other RNA
ttctcactactgcacttgactagtct

SEQ ID NO: 11959 - RNA, 22 nt, Synthetic Construct
  source 1..22: mol_type = other RNA
tcgaaccgtgagtaataatgcg

SEQ ID NO: 11960 - RNA, 22 nt, Synthetic Construct
  source 1..22: mol_type = other RNA
tgggatgtaaagaagtatgtat

SEQ ID NO: 11961 - RNA, 22 nt, Synthetic Construct
  source 1..22: mol_type = other RNA
cattgcactcgtctcggtctga

SEQ ID NO: 11962 - RNA, 21 nt, Synthetic Construct
  source 1..21: mol_type = other RNA
tgaggtagtagactgtatagt

SEQ ID NO: 11963 - RNA, 21 nt, Synthetic Construct
  source 1..21: mol_type = other RNA
tgaggtagtagactgtatagt

SEQ ID NO: 11964 - RNA, 22 nt, Synthetic Construct
  source 1..22: mol_type = other RNA
tggaatgtaaagaagtacgtat

SEQ ID NO: 11965 - RNA, 22 nt, Synthetic Construct
  source 1..22: mol_type = other RNA
tggaatgtaaagaagtacgtat

SEQ ID NO: 11966 - RNA, 27 nt, Synthetic Construct
  source 1..27: mol_type = other RNA
ccccccactgccaaatttgactggctt

SEQ ID NO: 11967 - RNA, 22 nt, Synthetic Construct
  source 1..22: mol_type = other RNA
tcttgtactgagctgccccgag

SEQ ID NO: 11968 - RNA, 22 nt, Synthetic Construct
  source 1..22: mol_type = other RNA
tcttgtactgagctgccccgag

SEQ ID NO: 11969 - RNA, 23 nt, Synthetic Construct
  source 1..23: mol_type = other RNA
gcgactggtaactgggatgaagt

SEQ ID NO: 11970 - RNA, 23 nt, Synthetic Construct
  source 1..23: mol_type = other RNA
gcgactggtaactgggatgaagt

SEQ ID NO: 11971 - RNA, 17 nt, Synthetic Construct
  source 1..17: mol_type = other RNA
acagtcaggatgttggc

SEQ ID NO: 11972 - RNA, 17 nt, Synthetic Construct
  source 1..17: mol_type = other RNA
acagtcaggatgttggc

SEQ ID NO: 11973 - RNA, 25 nt, Synthetic Construct
  source 1..25: mol_type = other RNA
tagtgcaatattgcttatagggttt

SEQ ID NO: 11974 - RNA, 25 nt, Synthetic Construct
  source 1..25: mol_type = other RNA
tagtgcaatattgcttatagggttt

SEQ ID NO: 11975 - RNA, 19 nt, Synthetic Construct
  source 1..19: mol_type = other RNA
agcagcattgtacagggct

SEQ ID NO: 11976 - RNA, 19 nt, Synthetic Construct
  source 1..19: mol_type = other RNA
agcagcattgtacagggct

SEQ ID NO: 11977 - RNA, 36 nt, Synthetic Construct; identical to SEQ ID NO: 2444
  source 1..36: mol_type = other RNA

SEQ ID NO: 11978 - RNA, 36 nt, Synthetic Construct; identical to SEQ ID NO: 2444
  source 1..36: mol_type = other RNA

SEQ ID NO: 11979 - RNA, 21 nt, Synthetic Construct
  source 1..21: mol_type = other RNA
cctctgggcccttcctccagt

SEQ ID NO: 11980 - RNA, 21 nt, Synthetic Construct
  source 1..21: mol_type = other RNA
cctctgggcccttcctccagt

SEQ ID NO: 11981 - RNA, 18 nt, Synthetic Construct
  source 1..18: mol_type = other RNA
cctgtaccgatcaatagt

SEQ ID NO: 11982 - RNA, 32 nt, Synthetic Construct; identical to SEQ ID NO: 3541
  source 1..32: mol_type = other RNA

SEQ ID NO: 11983 - RNA, 32 nt, Synthetic Construct; identical to SEQ ID NO: 3541
  source 1..32: mol_type = other RNA

SEQ ID NO: 11984 - RNA, 19 nt, Synthetic Construct
  source 1..19: mol_type = other RNA
atcccactcctgacaccat

SEQ ID NO: 11985 - RNA, 19 nt, Synthetic Construct
  source 1..19: mol_type = other RNA
atcccactcctgacaccat

SEQ ID NO: 11986 - RNA, 26 nt, Synthetic Construct
  source 1..26: mol_type = other RNA
gacttaccaaacctatgcaaactccg

SEQ ID NO: 11987 - RNA, 26 nt, Synthetic Construct
  source 1..26: mol_type = other RNA
gacttaccaaacctatgcaaactccg

SEQ ID NO: 11988 - RNA, 22 nt, Synthetic Construct
  source 1..22: mol_type = other RNA
ccccttggggttgtaggaccac

SEQ ID NO: 11989 - RNA, 22 nt, Synthetic Construct
  source 1..22: mol_type = other RNA
ccccttggggttgtaggaccac

SEQ ID NO: 11990 - RNA, 22 nt, Synthetic Construct
  source 1..22: mol_type = other RNA
ggcagggttcgtgactggggtg

SEQ ID NO: 11991 - RNA, 22 nt, Synthetic Construct
  source 1..22: mol_type = other RNA
ggcagggttcgtgactggggtg

SEQ ID NO: 11992 - RNA, 33 nt, Synthetic Construct; identical to SEQ ID NO: 2209
  source 1..33: mol_type = other RNA

SEQ ID NO: 11993 - RNA, 33 nt, Synthetic Construct; identical to SEQ ID NO: 2209
  source 1..33: mol_type = other RNA

SEQ ID NO: 11994 - RNA, 22 nt, Synthetic Construct
  source 1..22: mol_type = other RNA
tattgcacttgtcccggcctgc

SEQ ID NO: 11995 - RNA, 22 nt, Synthetic Construct
  source 1..22: mol_type = other RNA
atataatacaacctgctaagtg

SEQ ID NO: 11996 - RNA, 22 nt, Synthetic Construct
  source 1..22: mol_type = other RNA
tccttcattccaccggagtctg

SEQ ID NO: 11997 - RNA, 22 nt, Synthetic Construct
  source 1..22: mol_type = other RNA
tccttcattccaccggagtctg

SEQ ID NO: 11998 - RNA, 26 nt, Synthetic Construct
  source 1..26: mol_type = other RNA
ggcgcttgagagaactctggagaagg

SEQ ID NO: 11999 - RNA, 26 nt, Synthetic Construct
  source 1..26: mol_type = other RNA
ggcgcttgagagaactctggagaagg

SEQ ID NO: 12000 - RNA, 21 nt, Synthetic Construct
  source 1..21: mol_type = other RNA
tggggtagtaggttgtgtggt

SEQ ID NO: 12001 - RNA, 21 nt, Synthetic Construct
  source 1..21: mol_type = other RNA
tggggtagtaggttgtgtggt

SEQ ID NO: 12002 - RNA, 22 nt, Synthetic Construct
  source 1..22: mol_type = other RNA
tgtcaactggttgttgggaggg

SEQ ID NO: 12003 - RNA, 22 nt, Synthetic Construct
  source 1..22: mol_type = other RNA
tgtcaactggttgttgggaggg

SEQ ID NO: 12004 - RNA, 36 nt, Synthetic Construct; identical to SEQ ID NO: 2366
  source 1..36: mol_type = other RNA

SEQ ID NO: 12005 - RNA, 15 nt, Synthetic Construct
  source 1..15: mol_type = other RNA
cagtgaaacgagtca

SEQ ID NO: 12006 - RNA, 15 nt, Synthetic Construct
  source 1..15: mol_type = other RNA
cagtgaaacgagtca

SEQ ID NO: 12007 - RNA, 18 nt, Synthetic Construct
  source 1..18: mol_type = other RNA
gcgaaattccttgtcggg

SEQ ID NO: 12008 - RNA, 22 nt, Synthetic Construct
  source 1..22: mol_type = other RNA
ccactgccccaggtgctgctgg

SEQ ID NO: 12009 - RNA, 22 nt, Synthetic Construct
  source 1..22: mol_type = other RNA
ccactgccccaggtgctgctgg

SEQ ID NO: 12010 - RNA, 34 nt, Synthetic Construct; identical to SEQ ID NO: 11269
  source 1..34: mol_type = other RNA

SEQ ID NO: 12011 - RNA, 34 nt, Synthetic Construct; identical to SEQ ID NO: 11269
  source 1..34: mol_type = other RNA

SEQ ID NO: 12012 - RNA, 22 nt, Synthetic Construct
  source 1..22: mol_type = other RNA
tcctgtactgagcagccccgag

SEQ ID NO: 12013 - RNA, 22 nt, Synthetic Construct
  source 1..22: mol_type = other RNA
tcctgtactgagcagccccgag

SEQ ID NO: 12014 - RNA, 33 nt, Synthetic Construct; identical to SEQ ID NO: 2638
  source 1..33: mol_type = other RNA

SEQ ID NO: 12015 - RNA, 22 nt, Synthetic Construct
  source 1..22: mol_type = other RNA
ggtagcgaaattccttgtcggg

SEQ ID NO: 12016 - RNA, 22 nt, Synthetic Construct
  source 1..22: mol_type = other RNA
ggtagcgaaattccttgtcggg

SEQ ID NO: 12017 - RNA, 21 nt, Synthetic Construct
  source 1..21: mol_type = other RNA
tcctgtactgagctaccccga

SEQ ID NO: 12018 - RNA, 21 nt, Synthetic Construct
  source 1..21: mol_type = other RNA
tcctgtactgagctaccccga

SEQ ID NO: 12019 - RNA, 27 nt, Synthetic Construct
  source 1..27: mol_type = other RNA
ccccccactgctaaattcgactggctt

SEQ ID NO: 12020 - RNA, 27 nt, Synthetic Construct
  source 1..27: mol_type = other RNA
ccccccactgctaaattcgactggctt

SEQ ID NO: 12021 - RNA, 23 nt, Synthetic Construct
  source 1..23: mol_type = other RNA
tgtgcaaatctatgcaaaactga

SEQ ID NO: 12022 - RNA, 22 nt, Synthetic Construct
  source 1..22: mol_type = other RNA
tgaggtagtaggttgtgaggtt

SEQ ID NO: 12023 - RNA, 18 nt, Synthetic Construct
  source 1..18: mol_type = other RNA
cctcgcgcgattggagcg

SEQ ID NO: 12024 - RNA, 18 nt, Synthetic Construct
  source 1..18: mol_type = other RNA
cctcgcgcgattggagcg

SEQ ID NO: 12025 - RNA, 23 nt, Synthetic Construct
  source 1..23: mol_type = other RNA
tgaagggcagagagcgagacttt

SEQ ID NO: 12026 - RNA, 23 nt, Synthetic Construct
  source 1..23: mol_type = other RNA
tgaagggcagagagcgagacttt

SEQ ID NO: 12027 - RNA, 18 nt, Synthetic Construct
  source 1..18: mol_type = other RNA
ctaatgagactgccggtg

SEQ ID NO: 12028 - RNA, 18 nt, Synthetic Construct
  source 1..18: mol_type = other RNA
ctaatgagactgccggtg

SEQ ID NO: 12029 - RNA, 21 nt, Synthetic Construct
  source 1..21: mol_type = other RNA
tcctgtaccgagctgccccga

SEQ ID NO: 12030 - RNA, 21 nt, Synthetic Construct
  source 1..21: mol_type = other RNA
tcctgtaccgagctgccccga

SEQ ID NO: 12031 - RNA, 22 nt, Synthetic Construct
  source 1..22: mol_type = other RNA
tgaggtagtagattgtatggtt

SEQ ID NO: 12032 - RNA, 22 nt, Synthetic Construct
  source 1..22: mol_type = other RNA
tgaggtagtagattgtatggtt

SEQ ID NO: 12033 - RNA, 21 nt, Synthetic Construct
  source 1..21: mol_type = other RNA
tgaggtagaagattgtatagt

SEQ ID NO: 12034 - RNA, 22 nt, Synthetic Construct
  source 1..22: mol_type = other RNA
tcctgtactgagctgtcccgag

SEQ ID NO: 12035 - RNA, 18 nt, Synthetic Construct
  source 1..18: mol_type = other RNA
tccgacatgcgagggttc

SEQ ID NO: 12036 - RNA, 18 nt, Synthetic Construct
  source 1..18: mol_type = other RNA
tccgacatgcgagggttc

SEQ ID NO: 12037 - RNA, 21 nt, Synthetic Construct
  source 1..21: mol_type = other RNA
aacggaatcccaaaagcagct

SEQ ID NO: 12038 - RNA, 22 nt, Synthetic Construct
  source 1..22: mol_type = other RNA
tagctgcacgtaaatattggcg

SEQ ID NO: 12039 - RNA, 22 nt, Synthetic Construct
  source 1..22: mol_type = other RNA
tagctgcacgtaaatattggcg

SEQ ID NO: 12040 - RNA, 24 nt, Synthetic Construct
  source 1..24: mol_type = other RNA
taccacagggtagaaccacggatt

SEQ ID NO: 12041 - RNA, 24 nt, Synthetic Construct
  source 1..24: mol_type = other RNA
taccacagggtagaaccacggatt

SEQ ID NO: 12042 - RNA, 16 nt, Synthetic Construct
  source 1..16: mol_type = other RNA
gcaagaggtcagcggt

SEQ ID NO: 12043 - RNA, 16 nt, Synthetic Construct
  source 1..16: mol_type = other RNA
gcaagaggtcagcggt

SEQ ID NO: 12044 - RNA, 22 nt, Synthetic Construct
  source 1..22: mol_type = other RNA
tctttggttatctagctgtatg

SEQ ID NO: 12045 - RNA, 22 nt, Synthetic Construct
  source 1..22: mol_type = other RNA
tctttggttatctagctgtatg

SEQ ID NO: 12046 - RNA, 31 nt, Synthetic Construct; identical to SEQ ID NO: 2215
  source 1..31: mol_type = other RNA

SEQ ID NO: 12047 - RNA, 22 nt, Synthetic Construct
  source 1..22: mol_type = other RNA
tcgtaccgtgagtgataatgcg

SEQ ID NO: 12048 - RNA, 19 nt, Synthetic Construct
  source 1..19: mol_type = other RNA
gggataactggcttgtggc

SEQ ID NO: 12049 - RNA, 19 nt, Synthetic Construct
  source 1..19: mol_type = other RNA
gggataactggcttgtggc

SEQ ID NO: 12050 - RNA, 24 nt, Synthetic Construct
  source 1..24: mol_type = other RNA
acctggcatacaatgtagatttct

SEQ ID NO: 12051 - RNA, 23 nt, Synthetic Construct
  source 1..23: mol_type = other RNA
tgaggggcagagagcaagacttt

SEQ ID NO: 12052 - RNA, 23 nt, Synthetic Construct
  source 1..23: mol_type = other RNA
attctaatttctccacgtctttg

SEQ ID NO: 12053 - RNA, 23 nt, Synthetic Construct
  source 1..23: mol_type = other RNA
aaaccgttaccattactgagttt

SEQ ID NO: 12054 - RNA, 23 nt, Synthetic Construct
  source 1..23: mol_type = other RNA
aaaccgttaccattactgagttt

SEQ ID NO: 12055 - RNA, 23 nt, Synthetic Construct
  source 1..23: mol_type = other RNA
tggtaattcgacgtacttagtgt

SEQ ID NO: 12056 - RNA, 23 nt, Synthetic Construct
  source 1..23: mol_type = other RNA
tggtaattcgacgtacttagtgt

SEQ ID NO: 12057 - RNA, 17 nt, Synthetic Construct
  source 1..17: mol_type = other RNA
gcggctgtagctcagtt

SEQ ID NO: 12058 - RNA, 17 nt, Synthetic Construct
  source 1..17: mol_type = other RNA
gcggctgtagctcagtt

SEQ ID NO: 12059 - RNA, 22 nt, Synthetic Construct
  source 1..22: mol_type = other RNA
tgaggtagtagtttgtgcagtt

SEQ ID NO: 12060 - RNA, 22 nt, Synthetic Construct
  source 1..22: mol_type = other RNA
ngaggtagtagtttgtgctgtt

SEQ ID NO: 12061 - RNA, 21 nt, Synthetic Construct
  source 1..21: mol_type = other RNA
tgaggtagtagattgtatggt

SEQ ID NO: 12062 - RNA, 25 nt, Synthetic Construct
  source 1..25: mol_type = other RNA
gagaaagctcacaagaactgctaac

SEQ ID NO: 12063 - RNA, 25 nt, Synthetic Construct
  source 1..25: mol_type = other RNA
gagaaagctcacaagaactgctaac

SEQ ID NO: 12064 - RNA, 23 nt, Synthetic Construct
  source 1..23: mol_type = other RNA
caaagtgctgttcgtgcgggtag

SEQ ID NO: 12065 - RNA, 23 nt, Synthetic Construct
  source 1..23: mol_type = other RNA
ttaatgctaatcgtgataggggt

SEQ ID NO: 12066 - RNA, 19 nt, Synthetic Construct
  source 1..19: mol_type = other RNA
tagcttatcagactgatgt

SEQ ID NO: 12067 - RNA, 19 nt, Synthetic Construct
  source 1..19: mol_type = other RNA
tagcttatcagactgatgt

SEQ ID NO: 12068 - RNA, 17 nt, Synthetic Construct
  source 1..17: mol_type = other RNA
tcagtagctcgaggaaa

SEQ ID NO: 12069 - RNA, 28 nt, Synthetic Construct
  source 1..28: mol_type = other RNA
ccccccactgctaaatttgaccggcttt

SEQ ID NO: 12070 - RNA, 23 nt, Synthetic Construct
  source 1..23: mol_type = other RNA
atgacacgatcactcccgttgag

SEQ ID NO: 12071 - RNA, 23 nt, Synthetic Construct
  source 1..23: mol_type = other RNA
cgctcacggaaagagaatgaagc

SEQ ID NO: 12072 - RNA, 23 nt, Synthetic Construct
  source 1..23: mol_type = other RNA
cgctcacggaaagagaatgaagc

SEQ ID NO: 12073 - RNA, 41 nt, Synthetic Construct; identical to SEQ ID NO: 2441
  source 1..41: mol_type = other RNA

SEQ ID NO: 12074 - RNA, 21 nt, Synthetic Construct
  source 1..21: mol_type = other RNA
caacggaatcccaaaagcagc

SEQ ID NO: 12075 - RNA, 22 nt, Synthetic Construct
  source 1..22: mol_type = other RNA
tcgtaccgtgagtaataacgcg

SEQ ID NO: 12076 - RNA, 23 nt, Synthetic Construct
  source 1..23: mol_type = other RNA
caaagtgctattcgtgcaggtag

SEQ ID NO: 12077 - RNA, 20 nt, Synthetic Construct
  source 1..20: mol_type = other RNA
cggggcagctcagtacagga

SEQ ID NO: 12078 - RNA, 20 nt, Synthetic Construct
  source 1..20: mol_type = other RNA
cggggcagctcagtacagga

SEQ ID NO: 12079 - RNA, 21 nt, Synthetic Construct
  source 1..21: mol_type = other RNA
ttctgtactgagctgccccga

SEQ ID NO: 12080 - RNA, 23 nt, Synthetic Construct
  source 1..23: mol_type = other RNA
tcctatactgagctgccccgaga

SEQ ID NO: 12081 - RNA, 23 nt, Synthetic Construct
  source 1..23: mol_type = other RNA
tcctatactgagctgccccgaga

SEQ ID NO: 12082 - RNA, 22 nt, Synthetic Construct
  source 1..22: mol_type = other RNA
tggaatgtaaagaagcatgtat

SEQ ID NO: 12083 - RNA, 22 nt, Synthetic Construct
  source 1..22: mol_type = other RNA
tggaatgtaaagaagcatgtat

SEQ ID NO: 12084 - RNA, 39 nt, Synthetic Construct; identical to SEQ ID NO: 2980
  source 1..39: mol_type = other RNA

SEQ ID NO: 12085 - RNA, 39 nt, Synthetic Construct; identical to SEQ ID NO: 2980
  source 1..39: mol_type = other RNA

SEQ ID NO: 12086 - RNA, 20 nt, Synthetic Construct
  source 1..20: mol_type = other RNA
tgaggtagtaagttgtattg

SEQ ID NO: 12087 - RNA, 24 nt, Synthetic Construct
  source 1..24: mol_type = other RNA
gtcagtttgtcaaataccccaatt

SEQ ID NO: 12088 - RNA, 24 nt, Synthetic Construct
  source 1..24: mol_type = other RNA
gtcagtttgtcaaataccccaatt

SEQ ID NO: 12089 - RNA, 37 nt, Synthetic Construct; identical to SEQ ID NO: 743
  source 1..37: mol_type = other RNA

SEQ ID NO: 12090 - RNA, 37 nt, Synthetic Construct; identical to SEQ ID NO: 743
  source 1..37: mol_type = other RNA

SEQ ID NO: 12091 - RNA, 16 nt, Synthetic Construct
  source 1..16: mol_type = other RNA
gtctatggccatacca

SEQ ID NO: 12092 - RNA, 16 nt, Synthetic Construct
  source 1..16: mol_type = other RNA
gtctatggccatacca

SEQ ID NO: 12093 - RNA, 22 nt, Synthetic Construct
  source 1..22: mol_type = other RNA
tgaggtagtaatttgtgctgtt

SEQ ID NO: 12094 - RNA, 22 nt, Synthetic Construct
  source 1..22: mol_type = other RNA
tgaggtagtaatttgtgctgtt

SEQ ID NO: 12095 - RNA, 16 nt, Synthetic Construct
  source 1..16: mol_type = other RNA
agtcaggatgttggct

SEQ ID NO: 12096 - RNA, 22 nt, Synthetic Construct
  source 1..22: mol_type = other RNA
tagcggcacgtaaatattggcg

SEQ ID NO: 12097 - RNA, 22 nt, Synthetic Construct
  source 1..22: mol_type = other RNA
tagcggcacgtaaatattggcg

SEQ ID NO: 12098 - RNA, 20 nt, Synthetic Construct
  source 1..20: mol_type = other RNA
tagcagcacataatggtttg

SEQ ID NO: 12099 - RNA, 20 nt, Synthetic Construct
  source 1..20: mol_type = other RNA
tagcagcacataatggtttg

SEQ ID NO: 12100 - RNA, 22 nt, Synthetic Construct
  source 1..22: mol_type = other RNA
tgaggtagtagattgtatagct

SEQ ID NO: 12101 - RNA, 22 nt, Synthetic Construct
  source 1..22: mol_type = other RNA
tgaggtagtagattgtatagct

SEQ ID NO: 12102 - RNA, 22 nt, Synthetic Construct
  source 1..22: mol_type = other RNA
cgactcttagcggtggatcact

SEQ ID NO: 12103 - RNA, 22 nt, Synthetic Construct
  source 1..22: mol_type = other RNA
cgactcttagcggtggatcact

SEQ ID NO: 12104 - RNA, 22 nt, Synthetic Construct
  source 1..22: mol_type = other RNA
caaagtgctgttcgtgcaggta

SEQ ID NO: 12105 - RNA, 21 nt, Synthetic Construct
  source 1..21: mol_type = other RNA
ttaatgctaatcgtgataggg

SEQ ID NO: 12106 - RNA, 21 nt, Synthetic Construct
  source 1..21: mol_type = other RNA
ttaatgctaatcgtgataggg

SEQ ID NO: 12107 - RNA, 17 nt, Synthetic Construct
  source 1..17: mol_type = other RNA
accaaggggtcgtgggt

SEQ ID NO: 12108 - RNA, 17 nt, Synthetic Construct
  source 1..17: mol_type = other RNA
accaaggggtcgtgggt

SEQ ID NO: 12109 - RNA, 34 nt, Synthetic Construct; identical to SEQ ID NO: 2375
  source 1..34: mol_type = other RNA

SEQ ID NO: 12110 - RNA, 20 nt, Synthetic Construct
  source 1..20: mol_type = other RNA
caggacagtgaaacgagtca

SEQ ID NO: 12111 - RNA, 20 nt, Synthetic Construct
  source 1..20: mol_type = other RNA
caggacagtgaaacgagtca

SEQ ID NO: 12112 - RNA, 35 nt, Synthetic Construct; identical to SEQ ID NO: 1095
  source 1..35: mol_type = other RNA

SEQ ID NO: 12113 - RNA, 35 nt, Synthetic Construct; identical to SEQ ID NO: 1095
  source 1..35: mol_type = other RNA

SEQ ID NO: 12114 - RNA, 24 nt, Synthetic Construct
  source 1..24: mol_type = other RNA
ggctacattgtctgctgggtttct

SEQ ID NO: 12115 - RNA, 24 nt, Synthetic Construct
  source 1..24: mol_type = other RNA
ggctacattgtctgctgggtttct

SEQ ID NO: 12116 - RNA, 16 nt, Synthetic Construct
  source 1..16: mol_type = other RNA
ggtgggggtcgttggt

SEQ ID NO: 12117 - RNA, 16 nt, Synthetic Construct
  source 1..16: mol_type = other RNA
ggtgggggtcgttggt

SEQ ID NO: 12118 - RNA, 16 nt, Synthetic Construct
  source 1..16: mol_type = other RNA
gggtctgtagctcagt

SEQ ID NO: 12119 - RNA, 16 nt, Synthetic Construct
  source 1..16: mol_type = other RNA
gggtctgtagctcagt

SEQ ID NO: 12120 - RNA, 23 nt, Synthetic Construct
  source 1..23: mol_type = other RNA
tgcggggctagggctaacagcat

SEQ ID NO: 12121 - RNA, 23 nt, Synthetic Construct
  source 1..23: mol_type = other RNA
tgcggggctagggctaacagcat

SEQ ID NO: 12122 - RNA, 16 nt, Synthetic Construct
  source 1..16: mol_type = other RNA
gcggtggatgatgtgg

SEQ ID NO: 12123 - RNA, 16 nt, Synthetic Construct
  source 1..16: mol_type = other RNA
gcggtggatgatgtgg

SEQ ID NO: 12124 - RNA, 23 nt, Synthetic Construct
  source 1..23: mol_type = other RNA
tggtaattcgacgtacttagtgt

SEQ ID NO: 12125 - RNA, 21 nt, Synthetic Construct
  source 1..21: mol_type = other RNA
aatgacacgatcactcccgtt

SEQ ID NO: 12126 - RNA, 21 nt, Synthetic Construct
  source 1..21: mol_type = other RNA
aatgacacgatcactcccgtt

SEQ ID NO: 12127 - RNA, 22 nt, Synthetic Construct
  source 1..22: mol_type = other RNA
tagcagcgcgtaaatattggcg

SEQ ID NO: 12128 - RNA, 22 nt, Synthetic Construct
  source 1..22: mol_type = other RNA
tagcagcgcgtaaatattggcg

SEQ ID NO: 12129 - RNA, 22 nt, Synthetic Construct
  source 1..22: mol_type = other RNA
tggagtgtaaagaagtatgtat

SEQ ID NO: 12130 - RNA, 22 nt, Synthetic Construct
  source 1..22: mol_type = other RNA
atgtcccacccccactcctgtt

SEQ ID NO: 12131 - RNA, 22 nt, Synthetic Construct
  source 1..22: mol_type = other RNA
atgtcccacccccactcctgtt

SEQ ID NO: 12132 - RNA, 22 nt, Synthetic Construct
  source 1..22: mol_type = other RNA
tgaggtaatagattgtatagtt

SEQ ID NO: 12133 - RNA, 22 nt, Synthetic Construct
  source 1..22: mol_type = other RNA
tgaggtaatagattgtatagtt

SEQ ID NO: 12134 - RNA, 23 nt, Synthetic Construct
  source 1..23: mol_type = other RNA
tgaggggcagagagcgagactta

SEQ ID NO: 12135 - RNA, 23 nt, Synthetic Construct
  source 1..23: mol_type = other RNA
tagcaccatttgaaatcagtgtt

SEQ ID NO: 12136 - RNA, 23 nt, Synthetic Construct
  source 1..23: mol_type = other RNA
tagcaccatttgaaatcagtgtt

SEQ ID NO: 12137 - RNA, 23 nt, Synthetic Construct
  source 1..23: mol_type = other RNA
gactatagaactttccccctcat

SEQ ID NO: 12138 - RNA, 23 nt, Synthetic Construct
  source 1..23: mol_type = other RNA
gactatagaactttccccctcat

SEQ ID NO: 12139 - RNA, 26 nt, Synthetic Construct
  source 1..26: mol_type = other RNA
gagcagctaataccgcatacgacctg

SEQ ID NO: 12140 - RNA, 18 nt, Synthetic Construct
  source 1..18: mol_type = other RNA
gtccggatcgtagtctgc

SEQ ID NO: 12141 - RNA, 18 nt, Synthetic Construct
  source 1..18: mol_type = other RNA
gtccggatcgtagtctgc

SEQ ID NO: 12142 - RNA, 20 nt, Synthetic Construct
  source 1..20: mol_type = other RNA
caaagaattctccttttggg

SEQ ID NO: 12143 - RNA, 20 nt, Synthetic Construct
  source 1..20: mol_type = other RNA
caaagaattctccttttggg

SEQ ID NO: 12144 - RNA, 19 nt, Synthetic Construct
  source 1..19: mol_type = other RNA
aacagtcaggatgttggct

SEQ ID NO: 12145 - RNA, 19 nt, Synthetic Construct
  source 1..19: mol_type = other RNA
aacagtcaggatgttggct

SEQ ID NO: 12146 - RNA, 21 nt, Synthetic Construct
  source 1..21: mol_type = other RNA
ggagtatgcagagcaagatca

SEQ ID NO: 12147 - RNA, 22 nt, Synthetic Construct
  source 1..22: mol_type = other RNA
tgaggtagtaggtcgtatagtt

SEQ ID NO: 12148 - RNA, 22 nt, Synthetic Construct
  source 1..22: mol_type = other RNA
tgaggtagtaggtcgtatagtt

SEQ ID NO: 12149 - RNA, 23 nt, Synthetic Construct
  source 1..23: mol_type = other RNA
tcctgtactgggctgccccgaga

SEQ ID NO: 12150 - RNA, 23 nt, Synthetic Construct
  source 1..23: mol_type = other RNA
tcctgtactgggctgccccgaga

SEQ ID NO: 12151 - RNA, 25 nt, Synthetic Construct
  source 1..25: mol_type = other RNA
ttgaggatatgagatcgagacgaca

SEQ ID NO: 12152 - RNA, 21 nt, Synthetic Construct
  source 1..21: mol_type = other RNA
aattgcacggtatccatctgt

SEQ ID NO: 12153 - RNA, 21 nt, Synthetic Construct
  source 1..21: mol_type = other RNA
aattgcacggtatccatctgt

SEQ ID NO: 12154 - RNA, 22 nt, Synthetic Construct
  source 1..22: mol_type = other RNA
cgactggtaactgggatgaagt

SEQ ID NO: 12155 - RNA, 22 nt, Synthetic Construct
  source 1..22: mol_type = other RNA
cgactggtaactgggatgaagt

SEQ ID NO: 12156 - RNA, 22 nt, Synthetic Construct
  source 1..22: mol_type = other RNA
tgaggtagtaagttgtgtggtt

SEQ ID NO: 12157 - RNA, 27 nt, Synthetic Construct
  source 1..27: mol_type = other RNA
ccccccactgctaaattcgactggctt

SEQ ID NO: 12158 - RNA, 22 nt, Synthetic Construct
  source 1..22: mol_type = other RNA
tcctatactgagctgccccgag

SEQ ID NO: 12159 - RNA, 23 nt, Synthetic Construct
  source 1..23: mol_type = other RNA
tgaagggcagagagcgagacttt

SEQ ID NO: 12160 - RNA, 16 nt, Synthetic Construct
  source 1..16: mol_type = other RNA
gtctacggccacacca

SEQ ID NO: 12161 - RNA, 16 nt, Synthetic Construct
  source 1..16: mol_type = other RNA
gtctacggccacacca

SEQ ID NO: 12162 - RNA, 22 nt, Synthetic Construct
  source 1..22: mol_type = other RNA
tggaatgtaaagaagtatgtaa

SEQ ID NO: 12163 - RNA, 22 nt, Synthetic Construct
  source 1..22: mol_type = other RNA
tggaatgtaaagaagtatgtaa

SEQ ID NO: 12164 - RNA, 23 nt, Synthetic Construct
  source 1..23: mol_type = other RNA
cgactcttagcggtggatcactc

SEQ ID NO: 12165 - RNA, 23 nt, Synthetic Construct
  source 1..23: mol_type = other RNA
cgactcttagcggtggatcactc

SEQ ID NO: 12166 - RNA, 23 nt, Synthetic Construct
  source 1..23: mol_type = other RNA
ggctacattgtctgctgggtttc

SEQ ID NO: 12167 - RNA, 23 nt, Synthetic Construct
  source 1..23: mol_type = other RNA
ggctacattgtctgctgggtttc

SEQ ID NO: 12168 - RNA, 17 nt, Synthetic Construct
  source 1..17: mol_type = other RNA
cagtcaggatgttggct

SEQ ID NO: 12169 - RNA, 17 nt, Synthetic Construct
  source 1..17: mol_type = other RNA
cagtcaggatgttggct

SEQ ID NO: 12170 - RNA, 20 nt, Synthetic Construct
  source 1..20: mol_type = other RNA
gcatggccgttcttagttgg

SEQ ID NO: 12171 - RNA, 27 nt, Synthetic Construct
  source 1..27: mol_type = other RNA
tcctgagtagctcagcggcagagcggg

SEQ ID NO: 12172 - RNA, 27 nt, Synthetic Construct
  source 1..27: mol_type = other RNA
tcctgagtagctcagcggcagagcggg

SEQ ID NO: 12173 - RNA, 23 nt, Synthetic Construct
  source 1..23: mol_type = other RNA
tgaggggcagagagcgagactct

SEQ ID NO: 12174 - RNA, 23 nt, Synthetic Construct
  source 1..23: mol_type = other RNA
tgaggggcagagagcgagactct

SEQ ID NO: 12175 - RNA, 16 nt, Synthetic Construct
  source 1..16: mol_type = other RNA
gtctacggccatacaa

SEQ ID NO: 12176 - RNA, 16 nt, Synthetic Construct
  source 1..16: mol_type = other RNA
gtctacggccatacaa

SEQ ID NO: 12177 - RNA, 24 nt, Synthetic Construct
  source 1..24: mol_type = other RNA
tggaagactagtgattttgttgtt

SEQ ID NO: 12178 - RNA, 22 nt, Synthetic Construct
  source 1..22: mol_type = other RNA
ttaatgctaatcgtgatagggg

SEQ ID NO: 12179 - RNA, 21 nt, Synthetic Construct
  source 1..21: mol_type = other RNA
ccccttggggttgtaggacca

SEQ ID NO: 12180 - RNA, 21 nt, Synthetic Construct
  source 1..21: mol_type = other RNA
ccccttggggttgtaggacca

SEQ ID NO: 12181 - RNA, 22 nt, Synthetic Construct
  source 1..22: mol_type = other RNA
ttgcagcacgtaaatattggcg

SEQ ID NO: 12182 - RNA, 22 nt, Synthetic Construct
  source 1..22: mol_type = other RNA
ttgcagcacgtaaatattggcg

SEQ ID NO: 12183 - RNA, 22 nt, Synthetic Construct
  source 1..22: mol_type = other RNA
cattgcacctgtctcggtctga

SEQ ID NO: 12184 - RNA, 22 nt, Synthetic Construct
  source 1..22: mol_type = other RNA
cattgcacctgtctcggtctga

SEQ ID NO: 12185 - RNA, 22 nt, Synthetic Construct
  source 1..22: mol_type = other RNA
tggaatgtaaagaagtatgtgt

SEQ ID NO: 12186 - RNA, 18 nt, Synthetic Construct
  source 1..18: mol_type = other RNA
tcttcggtagtatagtgg

SEQ ID NO: 12187 - RNA, 18 nt, Synthetic Construct
  source 1..18: mol_type = other RNA
tcttcggtagtatagtgg

SEQ ID NO: 12188 - RNA, 22 nt, Synthetic Construct
  source 1..22: mol_type = other RNA
tgaggtagtagattgtgtggtt

SEQ ID NO: 12189 - RNA, 22 nt, Synthetic Construct
  source 1..22: mol_type = other RNA
tgaggtagtagattgtgtggtt

SEQ ID NO: 12190 - RNA, 21 nt, Synthetic Construct
  source 1..21: mol_type = other RNA
tgaggtaggaggttgtatagt

SEQ ID NO: 12191 - RNA, 23 nt, Synthetic Construct
  source 1..23: mol_type = other RNA
tcctgtactgggctgccccgaga

SEQ ID NO: 12192 - RNA, 17 nt, Synthetic Construct
  source 1..17: mol_type = other RNA
ccgtgtgaaagtaggtc

SEQ ID NO: 12193 - RNA, 17 nt, Synthetic Construct
  source 1..17: mol_type = other RNA
ccgtgtgaaagtaggtc

SEQ ID NO: 12194 - RNA, 34 nt, Synthetic Construct; identical to SEQ ID NO: 2019
  source 1..34: mol_type = other RNA

SEQ ID NO: 12195 - RNA, 21 nt, Synthetic Construct
  source 1..21: mol_type = other RNA
tgaggggcggagagcgagact

SEQ ID NO: 12196 - RNA, 26 nt, Synthetic Construct
  source 1..26: mol_type = other RNA
tgtccccgcgaggggcccggggcggg

SEQ ID NO: 12197 - RNA, 26 nt, Synthetic Construct
  source 1..26: mol_type = other RNA
tgtccccgcgaggggcccggggcggg

SEQ ID NO: 12198 - RNA, 19 nt, Synthetic Construct
  source 1..19: mol_type = other RNA
aggacagtgaaacgagtca

SEQ ID NO: 12199 - RNA, 19 nt, Synthetic Construct
  source 1..19: mol_type = other RNA
aggacagtgaaacgagtca

SEQ ID NO: 12200 - RNA, 22 nt, Synthetic Construct
  source 1..22: mol_type = other RNA
tgaggtagtagtttgtgcggtt

SEQ ID NO: 12201 - RNA, 20 nt, Synthetic Construct
  source 1..20: mol_type = other RNA
cgaggtagtaggttgtatag

SEQ ID NO: 12202 - RNA, 20 nt, Synthetic Construct
  source 1..20: mol_type = other RNA
cgaggtagtaggttgtatag

SEQ ID NO: 12203 - RNA, 22 nt, Synthetic Construct
  source 1..22: mol_type = other RNA
tggaatgtaaagaagcatgtat

SEQ ID NO: 12204 - RNA, 22 nt, Synthetic Construct
  source 1..22: mol_type = other RNA
tggaatgtaaaggagtatgtat

SEQ ID NO: 12205 - RNA, 21 nt, Synthetic Construct
  source 1..21: mol_type = other RNA
agaggggcagagagcgagact

SEQ ID NO: 12206 - RNA, 20 nt, Synthetic Construct
  source 1..20: mol_type = other RNA
ctatacgacctgctgccttt

SEQ ID NO: 12207 - RNA, 20 nt, Synthetic Construct
  source 1..20: mol_type = other RNA
ctatacgacctgctgccttt

SEQ ID NO: 12208 - RNA, 17 nt, Synthetic Construct
  source 1..17: mol_type = other RNA
caggacggtggccatgg

SEQ ID NO: 12209 - RNA, 17 nt, Synthetic Construct
  source 1..17: mol_type = other RNA
caggacggtggccatgg

SEQ ID NO: 12210 - RNA, 18 nt, Synthetic Construct
  source 1..18: mol_type = other RNA
cccaaaggtcgtcggttc

SEQ ID NO: 12211 - RNA, 18 nt, Synthetic Construct
  source 1..18: mol_type = other RNA
cccaaaggtcgtcggttc

SEQ ID NO: 12212 - RNA, 31 nt, Synthetic Construct; identical to SEQ ID NO: 2442
  source 1..31: mol_type = other RNA

SEQ ID NO: 12213 - RNA, 18 nt, Synthetic Construct
  source 1..18: mol_type = other RNA
ggtgcaagcgttaatcgg

SEQ ID NO: 12214 - RNA, 18 nt, Synthetic Construct
  source 1..18: mol_type = other RNA
ggtgcaagcgttaatcgg

SEQ ID NO: 12215 - RNA, 22 nt, Synthetic Construct
  source 1..22: mol_type = other RNA
aattgcacggtatccatctgta

SEQ ID NO: 12216 - RNA, 25 nt, Synthetic Construct
  source 1..25: mol_type = other RNA
tgtaaacatccttgactggaagctt

SEQ ID NO: 12217 - RNA, 34 nt, Synthetic Construct; identical to SEQ ID NO: 2317
  source 1..34: mol_type = other RNA

SEQ ID NO: 12218 - RNA, 22 nt, Synthetic Construct
  source 1..22: mol_type = other RNA
taccctgtagatccgaatttgt

SEQ ID NO: 12219 - RNA, 22 nt, Synthetic Construct
  source 1..22: mol_type = other RNA
tagcagcacgtaaatactggcg

SEQ ID NO: 12220 - RNA, 16 nt, Synthetic Construct
  source 1..16: mol_type = other RNA
gcggctgtagctcagt

SEQ ID NO: 12221 - RNA, 16 nt, Synthetic Construct
  source 1..16: mol_type = other RNA
gcggctgtagctcagt

SEQ ID NO: 12222 - RNA, 26 nt, Synthetic Construct
  source 1..26: mol_type = other RNA
cgactcttagcggtggatcactcggc

SEQ ID NO: 12223 - RNA, 26 nt, Synthetic Construct
  source 1..26: mol_type = other RNA
cgactcttagcggtggatcactcggc

SEQ ID NO: 12224 - RNA, 21 nt, Synthetic Construct
  source 1..21: mol_type = other RNA
tggagcgtgacaatggtgttt

SEQ ID NO: 12225 - RNA, 21 nt, Synthetic Construct
  source 1..21: mol_type = other RNA
tggagcgtgacaatggtgttt

SEQ ID NO: 12226 - RNA, 22 nt, Synthetic Construct
  source 1..22: mol_type = other RNA
tgaggtagtagtttgtgccgtt

SEQ ID NO: 12227 - RNA, 33 nt, Synthetic Construct; identical to SEQ ID NO: 1982
  source 1..33: mol_type = other RNA

SEQ ID NO: 12228 - RNA, 29 nt, Synthetic Construct
  source 1..29: mol_type = other RNA
gatgcgaaagcaggtcaaagtgatccggc

SEQ ID NO: 12229 - RNA, 29 nt, Synthetic Construct
  source 1..29: mol_type = other RNA
gatgcgaaagcaggtcaaagtgatccggc

SEQ ID NO: 12230 - RNA, 22 nt, Synthetic Construct
  source 1..22: mol_type = other RNA
tggagtgtaaagaagtatgtat

SEQ ID NO: 12231 - RNA, 22 nt, Synthetic Construct
  source 1..22: mol_type = other RNA
tgttgcacttgtcccggcctgt

SEQ ID NO: 12232 - RNA, 22 nt, Synthetic Construct
  source 1..22: mol_type = other RNA
tgttgcacttgtcccggcctgt

SEQ ID NO: 12233 - RNA, 21 nt, Synthetic Construct
  source 1..21: mol_type = other RNA
taacactgtctggtaaagatg

SEQ ID NO: 12234 - RNA, 21 nt, Synthetic Construct
  source 1..21: mol_type = other RNA
taacactgtctggtaaagatg

SEQ ID NO: 12235 - RNA, 22 nt, Synthetic Construct
  source 1..22: mol_type = other RNA
cagagttctacagtccgacgat

SEQ ID NO: 12236 - RNA, 22 nt, Synthetic Construct
  source 1..22: mol_type = other RNA
cagagttctacagtccgacgat

SEQ ID NO: 12237 - RNA, 22 nt, Synthetic Construct
  source 1..22: mol_type = other RNA
tccccttggggttgtaggacca

SEQ ID NO: 12238 - RNA, 22 nt, Synthetic Construct
  source 1..22: mol_type = other RNA
tccccttggggttgtaggacca

SEQ ID NO: 12239 - RNA, 23 nt, Synthetic Construct
  source 1..23: mol_type = other RNA
tagtaatacgacgtacttagtgt

SEQ ID NO: 12240 - RNA, 22 nt, Synthetic Construct
  source 1..22: mol_type = other RNA
tgaggtagcaggttgtatagtt

SEQ ID NO: 12241 - RNA, 16 nt, Synthetic Construct
  source 1..16: mol_type = other RNA
gatctgtagctggtct

SEQ ID NO: 12242 - RNA, 16 nt, Synthetic Construct
  source 1..16: mol_type = other RNA
gatctgtagctggtct

SEQ ID NO: 12243 - RNA, 33 nt, Synthetic Construct; identical to SEQ ID NO: 2395
  source 1..33: mol_type = other RNA

SEQ ID NO: 12244 - RNA, 28 nt, Synthetic Construct
  source 1..28: mol_type = other RNA
gtggcattgccgagtagctaagtgcgga

SEQ ID NO: 12245 - RNA, 28 nt, Synthetic Construct
  source 1..28: mol_type = other RNA
gtggcattgccgagtagctaagtgcgga

SEQ ID NO: 12246 - RNA, 16 nt, Synthetic Construct
  source 1..16: mol_type = other RNA
ggcgggagtaactatg

SEQ ID NO: 12247 - RNA, 16 nt, Synthetic Construct
  source 1..16: mol_type = other RNA
ggcgggagtaactatg

SEQ ID NO: 12248 - RNA, 34 nt, Synthetic Construct; identical to SEQ ID NO: 2265
  source 1..34: mol_type = other RNA

SEQ ID NO: 12249 - RNA, 34 nt, Synthetic Construct; identical to SEQ ID NO: 2265
  source 1..34: mol_type = other RNA

SEQ ID NO: 12250 - RNA, 38 nt, Synthetic Construct; identical to SEQ ID NO: 2492
  source 1..38: mol_type = other RNA

SEQ ID NO: 12251 - RNA, 38 nt, Synthetic Construct; identical to SEQ ID NO: 2492
  source 1..38: mol_type = other RNA

SEQ ID NO: 12252 - RNA, 23 nt, Synthetic Construct
  source 1..23: mol_type = other RNA
tggtaatacgacgtactaagtgt

SEQ ID NO: 12253 - RNA, 16 nt, Synthetic Construct
  source 1..16: mol_type = other RNA
tcgtgacgatagtgca

SEQ ID NO: 12254 - RNA, 23 nt, Synthetic Construct
  source 1..23: mol_type = other RNA
ggatatcatcatatactgtaagt

SEQ ID NO: 12255 - RNA, 23 nt, Synthetic Construct
  source 1..23: mol_type = other RNA
ggatatcatcatatactgtaagt

SEQ ID NO: 12256 - RNA, 15 nt, Synthetic Construct
  source 1..15: mol_type = other RNA
aggtgggaggctttg

SEQ ID NO: 12257 - RNA, 15 nt, Synthetic Construct
  source 1..15: mol_type = other RNA
aggtgggaggctttg

SEQ ID NO: 12258 - RNA, 31 nt, Synthetic Construct; identical to SEQ ID NO: 2215
  source 1..31: mol_type = other RNA

SEQ ID NO: 12259 - RNA, 31 nt, Synthetic Construct; identical to SEQ ID NO: 2215
  source 1..31: mol_type = other RNA

SEQ ID NO: 12260 - RNA, 18 nt, Synthetic Construct
  source 1..18: mol_type = other RNA
atcccactcctgacacca

SEQ ID NO: 12261 - RNA, 21 nt, Synthetic Construct
  source 1..21: mol_type = other RNA
tcaggctcagtcccctcccga

SEQ ID NO: 12262 - RNA, 21 nt, Synthetic Construct
  source 1..21: mol_type = other RNA
tcaggctcagtcccctcccga

SEQ ID NO: 12263 - RNA, 15 nt, Synthetic Construct
  source 1..15: mol_type = other RNA
tggccgtcgtcagct

SEQ ID NO: 12264 - RNA, 21 nt, Synthetic Construct
  source 1..21: mol_type = other RNA
tgaggtagtgggttgtgtggt

SEQ ID NO: 12265 - RNA, 21 nt, Synthetic Construct
  source 1..21: mol_type = other RNA
tgaggtagtgggttgtgtggt

SEQ ID NO: 12266 - RNA, 23 nt, Synthetic Construct
  source 1..23: mol_type = other RNA
tggggggcagagagcgagacttt

SEQ ID NO: 12267 - RNA, 23 nt, Synthetic Construct
  source 1..23: mol_type = other RNA
tggggggcagagagcgagacttt

SEQ ID NO: 12268 - RNA, 34 nt, Synthetic Construct; identical to SEQ ID NO: 5595
  source 1..34: mol_type = other RNA

SEQ ID NO: 12269 - RNA, 34 nt, Synthetic Construct; identical to SEQ ID NO: 5595
  source 1..34: mol_type = other RNA

SEQ ID NO: 12270 - RNA, 35 nt, Synthetic Construct; identical to SEQ ID NO: 2402
  source 1..35: mol_type = other RNA

SEQ ID NO: 12271 - RNA, 35 nt, Synthetic Construct; identical to SEQ ID NO: 2402
  source 1..35: mol_type = other RNA

SEQ ID NO: 12272 - RNA, 25 nt, Synthetic Construct
  source 1..25: mol_type = other RNA
tgtcagtttgtcaaataccccattt

SEQ ID NO: 12273 - RNA, 25 nt, Synthetic Construct
  source 1..25: mol_type = other RNA
tgtcagtttgtcaaataccccattt

SEQ ID NO: 12274 - RNA, 35 nt, Synthetic Construct; identical to SEQ ID NO: 2514
  source 1..35: mol_type = other RNA

SEQ ID NO: 12275 - RNA, 35 nt, Synthetic Construct; identical to SEQ ID NO: 2514
  source 1..35: mol_type = other RNA

SEQ ID NO: 12276 - RNA, 27 nt, Synthetic Construct
  source 1..27: mol_type = other RNA
ccccccactgctaaatttgacgggctt

SEQ ID NO: 12277 - RNA, 32 nt, Synthetic Construct; identical to SEQ ID NO: 2296
  source 1..32: mol_type = other RNA

SEQ ID NO: 12278 - RNA, 22 nt, Synthetic Construct
  source 1..22: mol_type = other RNA
tacccattgcatatcggagttg

SEQ ID NO: 12279 - RNA, 25 nt, Synthetic Construct
  source 1..25: mol_type = other RNA
tgtcagtttgtcaaataccccattt

SEQ ID NO: 12280 - RNA, 22 nt, Synthetic Construct
  source 1..22: mol_type = other RNA
gtgccgaagctgtgggattgat

SEQ ID NO: 12281 - RNA, 22 nt, Synthetic Construct
  source 1..22: mol_type = other RNA
gtgccgaagctgtgggattgat

SEQ ID NO: 12282 - RNA, 25 nt, Synthetic Construct
  source 1..25: mol_type = other RNA
gagaaagctcacaagaactgctaac

SEQ ID NO: 12283 - RNA, 22 nt, Synthetic Construct
  source 1..22: mol_type = other RNA
gctcacggaaagagaatgaagc

SEQ ID NO: 12284 - RNA, 22 nt, Synthetic Construct
  source 1..22: mol_type = other RNA
gctcacggaaagagaatgaagc

SEQ ID NO: 12285 - RNA, 20 nt, Synthetic Construct
  source 1..20: mol_type = other RNA
tgaggtagtaggttgtatgg

SEQ ID NO: 12286 - RNA, 21 nt, Synthetic Construct
  source 1..21: mol_type = other RNA
tatgtctgctgaccatcacct

SEQ ID NO: 12287 - RNA, 21 nt, Synthetic Construct
  source 1..21: mol_type = other RNA
tatgtctgctgaccatcacct

SEQ ID NO: 12288 - RNA, 22 nt, Synthetic Construct
  source 1..22: mol_type = other RNA
tggaatgtaaagaagtatgtac

SEQ ID NO: 12289 - RNA, 22 nt, Synthetic Construct
  source 1..22: mol_type = other RNA
tggaatgtaaagaagtatgtac

SEQ ID NO: 12290 - RNA, 20 nt, Synthetic Construct
  source 1..20: mol_type = other RNA
tgaggaagtaggttgtgtgg

SEQ ID NO: 12291 - RNA, 20 nt, Synthetic Construct
  source 1..20: mol_type = other RNA
tgaggaagtaggttgtgtgg

SEQ ID NO: 12292 - RNA, 27 nt, Synthetic Construct
  source 1..27: mol_type = other RNA
ccccccactgctaagtttgactggctt

SEQ ID NO: 12293 - RNA, 24 nt, Synthetic Construct
  source 1..24: mol_type = other RNA
tgtcagtttgtcaaataccccaag

SEQ ID NO: 12294 - RNA, 24 nt, Synthetic Construct
  source 1..24: mol_type = other RNA
tgtcagtttgtcaaataccccaag

SEQ ID NO: 12295 - RNA, 22 nt, Synthetic Construct
  source 1..22: mol_type = other RNA
tattgcacttgtcccggcctat

SEQ ID NO: 12296 - RNA, 22 nt, Synthetic Construct
  source 1..22: mol_type = other RNA
tattgcacttgtcccggcctat

SEQ ID NO: 12297 - RNA, 18 nt, Synthetic Construct
  source 1..18: mol_type = other RNA
accggaggaaggtgggga

SEQ ID NO: 12298 - RNA, 18 nt, Synthetic Construct
  source 1..18: mol_type = other RNA
accggaggaaggtgggga

SEQ ID NO: 12299 - RNA, 35 nt, Synthetic Construct; identical to SEQ ID NO: 2505
  source 1..35: mol_type = other RNA

SEQ ID NO: 12300 - RNA, 35 nt, Synthetic Construct; identical to SEQ ID NO: 2505
  source 1..35: mol_type = other RNA

SEQ ID NO: 12301 - RNA, 21 nt, Synthetic Construct
  source 1..21: mol_type = other RNA
tgtgactggttgaccagaggg

SEQ ID NO: 12302 - RNA, 23 nt, Synthetic Construct
  source 1..23: mol_type = other RNA
actggacttggagtcagaaggca

SEQ ID NO: 12303 - RNA, 32 nt, Synthetic Construct; identical to SEQ ID NO: 2086
  source 1..32: mol_type = other RNA

SEQ ID NO: 12304 - RNA, 22 nt, Synthetic Construct
  source 1..22: mol_type = other RNA
tggaatgtgaagaagtatgtat

SEQ ID NO: 12305 - RNA, 22 nt, Synthetic Construct
  source 1..22: mol_type = other RNA
gagagcctggacacaggtgctg

SEQ ID NO: 12306 - RNA, 21 nt, Synthetic Construct
  source 1..21: mol_type = other RNA
atcggaacgtgcccagtcgtg

SEQ ID NO: 12307 - RNA, 21 nt, Synthetic Construct
  source 1..21: mol_type = other RNA
atcggaacgtgcccagtcgtg

SEQ ID NO: 12308 - RNA, 22 nt, Synthetic Construct
  source 1..22: mol_type = other RNA
tgggatgtaaagaagtatgtat

SEQ ID NO: 12309 - RNA, 22 nt, Synthetic Construct
  source 1..22: mol_type = other RNA
tgggatgtaaagaagtatgtat

SEQ ID NO: 12310 - RNA, 15 nt, Synthetic Construct
  source 1..15: mol_type = other RNA
gctttgatccggaga

SEQ ID NO: 12311 - RNA, 15 nt, Synthetic Construct
  source 1..15: mol_type = other RNA
gctttgatccggaga

SEQ ID NO: 12312 - RNA, 23 nt, Synthetic Construct
  source 1..23: mol_type = other RNA
atatcggaacgtgcccagtcgtg

SEQ ID NO: 12313 - RNA, 23 nt, Synthetic Construct
  source 1..23: mol_type = other RNA
atatcggaacgtgcccagtcgtg

SEQ ID NO: 12314 - RNA, 19 nt, Synthetic Construct
  source 1..19: mol_type = other RNA
aacagtcaggatgttggct

SEQ ID NO: 12315 - RNA, 22 nt, Synthetic Construct
  source 1..22: mol_type = other RNA
tggaatgcaaagaagtatgtat

SEQ ID NO: 12316 - RNA, 22 nt, Synthetic Construct
  source 1..22: mol_type = other RNA
tggaatgcaaagaagtatgtat

SEQ ID NO: 12317 - RNA, 15 nt, Synthetic Construct
  source 1..15: mol_type = other RNA
gctagtaatcgcgga

SEQ ID NO: 12318 - RNA, 25 nt, Synthetic Construct
  source 1..25: mol_type = other RNA
gggttgtaaaccgcttttgtcaggg

SEQ ID NO: 12319 - RNA, 18 nt, Synthetic Construct
  source 1..18: mol_type = other RNA
tgaggtagtagattgtat

SEQ ID NO: 12320 - RNA, 26 nt, Synthetic Construct
  source 1..26: mol_type = other RNA
gaggaacactagtggcgtaggcgaga

SEQ ID NO: 12321 - RNA, 26 nt, Synthetic Construct
  source 1..26: mol_type = other RNA
gaggaacactagtggcgtaggcgaga

SEQ ID NO: 12322 - RNA, 15 nt, Synthetic Construct
  source 1..15: mol_type = other RNA
cagtgaaacgagtca

SEQ ID NO: 12323 - RNA, 15 nt, Synthetic Construct
  source 1..15: mol_type = other RNA
cagtgaaacgagtca

SEQ ID NO: 12324 - RNA, 21 nt, Synthetic Construct
  source 1..21: mol_type = other RNA
gactatagaactttccccctc

SEQ ID NO: 12325 - RNA, 21 nt, Synthetic Construct
  source 1..21: mol_type = other RNA
gactatagaactttccccctc

SEQ ID NO: 12326 - RNA, 22 nt, Synthetic Construct
  source 1..22: mol_type = other RNA
atcacattgccagggatttcca

SEQ ID NO: 12327 - RNA, 22 nt, Synthetic Construct
  source 1..22: mol_type = other RNA
atcacattgccagggatttcca

SEQ ID NO: 12328 - RNA, 20 nt, Synthetic Construct
  source 1..20: mol_type = other RNA
tgaggtagtaggttgcgtgg

SEQ ID NO: 12329 - RNA, 43 nt, Synthetic Construct; identical to SEQ ID NO: 2315
  source 1..43: mol_type = other RNA

SEQ ID NO: 12330 - RNA, 43 nt, Synthetic Construct; identical to SEQ ID NO: 2315
  source 1..43: mol_type = other RNA

SEQ ID NO: 12331 - RNA, 21 nt, Synthetic Construct
  source 1..21: mol_type = other RNA
atcacattgccagggatttcc

SEQ ID NO: 12332 - RNA, 21 nt, Synthetic Construct
  source 1..21: mol_type = other RNA
atcacattgccagggatttcc

SEQ ID NO: 12333 - RNA, 23 nt, Synthetic Construct
  source 1..23: mol_type = other RNA
tggtaatacaacgtacttagtgt

SEQ ID NO: 12334 - RNA, 35 nt, Synthetic Construct; identical to SEQ ID NO: 2399
  source 1..35: mol_type = other RNA

SEQ ID NO: 12335 - RNA, 22 nt, Synthetic Construct
  source 1..22: mol_type = other RNA
tggaatgtaaagaggtatgtat

SEQ ID NO: 12336 - RNA, 27 nt, Synthetic Construct
  source 1..27: mol_type = other RNA
gttggttcaagcgtgtagtcgtgctct

SEQ ID NO: 12337 - RNA, 22 nt, Synthetic Construct
  source 1..22: mol_type = other RNA
tcgtactgtgagtaataatgcg

SEQ ID NO: 12338 - RNA, 22 nt, Synthetic Construct
  source 1..22: mol_type = other RNA
tcgtactgtgagtaataatgcg

SEQ ID NO: 12339 - RNA, 19 nt, Synthetic Construct
  source 1..19: mol_type = other RNA
gggataactggcttgtggc

SEQ ID NO: 12340 - RNA, 19 nt, Synthetic Construct
  source 1..19: mol_type = other RNA
gggataactggcttgtggc

SEQ ID NO: 12341 - RNA, 23 nt, Synthetic Construct
  source 1..23: mol_type = other RNA
atgacacgatcactcccgttgag

SEQ ID NO: 12342 - RNA, 23 nt, Synthetic Construct
  source 1..23: mol_type = other RNA
atgacacgatcactcccgttgag

SEQ ID NO: 12343 - RNA, 21 nt, Synthetic Construct
  source 1..21: mol_type = other RNA
gcagatcttggtggtagtagc

SEQ ID NO: 12344 - RNA, 21 nt, Synthetic Construct
  source 1..21: mol_type = other RNA
gcagatcttggtggtagtagc

SEQ ID NO: 12345 - RNA, 33 nt, Synthetic Construct; identical to SEQ ID NO: 2556
  source 1..33: mol_type = other RNA

SEQ ID NO: 12346 - RNA, 33 nt, Synthetic Construct; identical to SEQ ID NO: 2556
  source 1..33: mol_type = other RNA

SEQ ID NO: 12347 - RNA, 16 nt, Synthetic Construct
  source 1..16: mol_type = other RNA
ccgcttttgtcaggga

SEQ ID NO: 12348 - RNA, 27 nt, Synthetic Construct
  source 1..27: mol_type = other RNA
catgcgagagtaggacgttgccaggtt

SEQ ID NO: 12349 - RNA, 27 nt, Synthetic Construct
  source 1..27: mol_type = other RNA
catgcgagagtaggacgttgccaggtt

SEQ ID NO: 12350 - RNA, 22 nt, Synthetic Construct
  source 1..22: mol_type = other RNA
tgaggtagtaggttgtatagat

SEQ ID NO: 12351 - RNA, 22 nt, Synthetic Construct
  source 1..22: mol_type = other RNA
tgaggtagtaggttgtatagat

SEQ ID NO: 12352 - RNA, 23 nt, Synthetic Construct
  source 1..23: mol_type = other RNA
caaagcgctgttcgtgcaggtag

SEQ ID NO: 12353 - RNA, 22 nt, Synthetic Construct
  source 1..22: mol_type = other RNA
accactgaccgttgactgtacc

SEQ ID NO: 12354 - RNA, 22 nt, Synthetic Construct
  source 1..22: mol_type = other RNA
accactgaccgttgactgtacc

SEQ ID NO: 12355 - RNA, 19 nt, Synthetic Construct
  source 1..19: mol_type = other RNA
tgcggggctagggctaaca

SEQ ID NO: 12356 - RNA, 19 nt, Synthetic Construct
  source 1..19: mol_type = other RNA
tgcggggctagggctaaca

SEQ ID NO: 12357 - RNA, 22 nt, Synthetic Construct
  source 1..22: mol_type = other RNA
tcctgcactgagctgccccgag

SEQ ID NO: 12358 - RNA, 22 nt, Synthetic Construct
  source 1..22: mol_type = other RNA
tcctgcactgagctgccccgag

SEQ ID NO: 12359 - RNA, 22 nt, Synthetic Construct
  source 1..22: mol_type = other RNA
tggggtagtaggttgtatagtt

SEQ ID NO: 12360 - RNA, 21 nt, Synthetic Construct
  source 1..21: mol_type = other RNA
tgagaactgaattccatgggt

SEQ ID NO: 12361 - RNA, 21 nt, Synthetic Construct
  source 1..21: mol_type = other RNA
tgagaactgaattccatgggt

SEQ ID NO: 12362 - RNA, 15 nt, Synthetic Construct
  source 1..15: mol_type = other RNA
ccagaaacccggtcg

SEQ ID NO: 12363 - RNA, 15 nt, Synthetic Construct
  source 1..15: mol_type = other RNA
ccagaaacccggtcg

SEQ ID NO: 12364 - RNA, 22 nt, Synthetic Construct
  source 1..22: mol_type = other RNA
tggggtagtaggttgtatagtt

SEQ ID NO: 12365 - RNA, 22 nt, Synthetic Construct
  source 1..22: mol_type = other RNA
tggggtagtaggttgtatagtt

SEQ ID NO: 12366 - RNA, 22 nt, Synthetic Construct
  source 1..22: mol_type = other RNA
tgaagtagtaggttgtgtggtt

SEQ ID NO: 12367 - RNA, 22 nt, Synthetic Construct
  source 1..22: mol_type = other RNA
tgaagtagtaggttgtgtggtt

SEQ ID NO: 12368 - RNA, 32 nt, Synthetic Construct; identical to SEQ ID NO: 2467
  source 1..32: mol_type = other RNA

SEQ ID NO: 12369 - RNA, 17 nt, Synthetic Construct
  source 1..17: mol_type = other RNA
ctaatgagactgccggt

SEQ ID NO: 12370 - RNA, 23 nt, Synthetic Construct
  source 1..23: mol_type = other RNA
tggtaatacgacgtacttaatgt

SEQ ID NO: 12371 - RNA, 23 nt, Synthetic Construct
  source 1..23: mol_type = other RNA
tggtaatacgacgtacttagagt

SEQ ID NO: 12372 - RNA, 21 nt, Synthetic Construct
  source 1..21: mol_type = other RNA
tgaggtagtaggttgtacagt

SEQ ID NO: 12373 - RNA, 20 nt, Synthetic Construct
  source 1..20: mol_type = other RNA
tgaggtagtaggctgtgtgg

SEQ ID NO: 12374 - RNA, 20 nt, Synthetic Construct
  source 1..20: mol_type = other RNA
tgaggtagtaggctgtgtgg

SEQ ID NO: 12375 - RNA, 21 nt, Synthetic Construct
  source 1..21: mol_type = other RNA
tgaggtagtagattgcatagt

SEQ ID NO: 12376 - RNA, 23 nt, Synthetic Construct
  source 1..23: mol_type = other RNA
ccctgtactgagctgccccgagt

SEQ ID NO: 12377 - RNA, 23 nt, Synthetic Construct
  source 1..23: mol_type = other RNA
ccctgtactgagctgccccgagt

SEQ ID NO: 12378 - RNA, 22 nt, Synthetic Construct
  source 1..22: mol_type = other RNA
tggaatgtaaggaagtatgtat

SEQ ID NO: 12379 - RNA, 32 nt, Synthetic Construct; identical to SEQ ID NO: 4279
  source 1..32: mol_type = other RNA

SEQ ID NO: 12380 - RNA, 32 nt, Synthetic Construct; identical to SEQ ID NO: 4279
  source 1..32: mol_type = other RNA

SEQ ID NO: 12381 - RNA, 23 nt, Synthetic Construct
  source 1..23: mol_type = other RNA
caaagaattctccttttgggctt

SEQ ID NO: 12382 - RNA, 21 nt, Synthetic Construct
  source 1..21: mol_type = other RNA
tgtagtgtttcctactttatg

SEQ ID NO: 12383 - RNA, 21 nt, Synthetic Construct
  source 1..21: mol_type = other RNA
tgtagtgtttcctactttatg

SEQ ID NO: 12384 - RNA, 22 nt, Synthetic Construct
  source 1..22: mol_type = other RNA
tgaggtagtaggttgtggggtt

SEQ ID NO: 12385 - RNA, 22 nt, Synthetic Construct
  source 1..22: mol_type = other RNA
tgaggtagtaggttgtggggtt

SEQ ID NO: 12386 - RNA, 37 nt, Synthetic Construct; identical to SEQ ID NO: 2447
  source 1..37: mol_type = other RNA

SEQ ID NO: 12387 - RNA, 24 nt, Synthetic Construct
  source 1..24: mol_type = other RNA
tcggatccgtctgagcttggcttt

SEQ ID NO: 12388 - RNA, 24 nt, Synthetic Construct
  source 1..24: mol_type = other RNA
tcggatccgtctgagcttggcttt

SEQ ID NO: 12389 - RNA, 27 nt, Synthetic Construct
  source 1..27: mol_type = other RNA
catgcgagagtaggacgttgccaggtt

SEQ ID NO: 12390 - RNA, 27 nt, Synthetic Construct
  source 1..27: mol_type = other RNA
catgcgagagtaggacgttgccaggtt

SEQ ID NO: 12391 - RNA, 22 nt, Synthetic Construct
  source 1..22: mol_type = other RNA
tcgtaccgtgagtaataatgtg

SEQ ID NO: 12392 - RNA, 22 nt, Synthetic Construct
  source 1..22: mol_type = other RNA
tcgtaccgtgagtaataatgtg

SEQ ID NO: 12393 - RNA, 33 nt, Synthetic Construct; identical to SEQ ID NO: 7469
  source 1..33: mol_type = other RNA

SEQ ID NO: 12394 - RNA, 20 nt, Synthetic Construct
  source 1..20: mol_type = other RNA
cattgcacttgtctcggtct

SEQ ID NO: 12395 - RNA, 20 nt, Synthetic Construct
  source 1..20: mol_type = other RNA
cattgcacttgtctcggtct

SEQ ID NO: 12396 - RNA, 22 nt, Synthetic Construct
  source 1..22: mol_type = other RNA
tgaggtagcagattgtatagtt

SEQ ID NO: 12397 - RNA, 22 nt, Synthetic Construct
  source 1..22: mol_type = other RNA
ngaggtagtagtttgtgctgtt

SEQ ID NO: 12398 - RNA, 18 nt, Synthetic Construct
  source 1..18: mol_type = other RNA
cgcgacctcagatcagac

SEQ ID NO: 12399 - RNA, 18 nt, Synthetic Construct
  source 1..18: mol_type = other RNA
cgcgacctcagatcagac

SEQ ID NO: 12400 - RNA, 19 nt, Synthetic Construct
  source 1..19: mol_type = other RNA
gctattgacgaccgtaccg

SEQ ID NO: 12401 - RNA, 19 nt, Synthetic Construct
  source 1..19: mol_type = other RNA
gctattgacgaccgtaccg

SEQ ID NO: 12402 - RNA, 22 nt, Synthetic Construct
  source 1..22: mol_type = other RNA
tgaggtagtagcttgtgctgtt

SEQ ID NO: 12403 - RNA, 22 nt, Synthetic Construct
  source 1..22: mol_type = other RNA
tgaggtagtagcttgtgctgtt

SEQ ID NO: 12404 - RNA, 21 nt, Synthetic Construct
  source 1..21: mol_type = other RNA
tgaggtagtagtttgtgctgc

SEQ ID NO: 12405 - RNA, 22 nt, Synthetic Construct
  source 1..22: mol_type = other RNA
tgtgactggttgaccagagggt

SEQ ID NO: 12406 - RNA, 23 nt, Synthetic Construct
  source 1..23: mol_type = other RNA
tggtaatacgacgtacttagtat

SEQ ID NO: 12407 - RNA, 23 nt, Synthetic Construct
  source 1..23: mol_type = other RNA
tggtaatacgacgtacttagtat

SEQ ID NO: 12408 - RNA, 19 nt, Synthetic Construct
  source 1..19: mol_type = other RNA
acatgcaagtcgaacggta

SEQ ID NO: 12409 - RNA, 19 nt, Synthetic Construct
  source 1..19: mol_type = other RNA
acatgcaagtcgaacggta

SEQ ID NO: 12410 - RNA, 22 nt, Synthetic Construct
  source 1..22: mol_type = other RNA
tgaggtagtaggttgtttagtt

SEQ ID NO: 12411 - RNA, 16 nt, Synthetic Construct
  source 1..16: mol_type = other RNA
cccctggacctgtact

SEQ ID NO: 12412 - RNA, 22 nt, Synthetic Construct
  source 1..22: mol_type = other RNA
agggggaaagttctatagtcct

SEQ ID NO: 12413 - RNA, 22 nt, Synthetic Construct
  source 1..22: mol_type = other RNA
agggggaaagttctatagtcct

SEQ ID NO: 12414 - RNA, 23 nt, Synthetic Construct
  source 1..23: mol_type = other RNA
gactcttagcggtggatcactcg

SEQ ID NO: 12415 - RNA, 23 nt, Synthetic Construct
  source 1..23: mol_type = other RNA
gactcttagcggtggatcactcg

SEQ ID NO: 12416 - RNA, 18 nt, Synthetic Construct
  source 1..18: mol_type = other RNA
atcgctagtaatcgcgga

SEQ ID NO: 12417 - RNA, 18 nt, Synthetic Construct
  source 1..18: mol_type = other RNA
atcgctagtaatcgcgga

SEQ ID NO: 12418 - RNA, 18 nt, Synthetic Construct
  source 1..18: mol_type = other RNA
agcaggacggtggccatg

SEQ ID NO: 12419 - RNA, 21 nt, Synthetic Construct
  source 1..21: mol_type = other RNA
tgtcagtttgtcaaatacccc

SEQ ID NO: 12420 - RNA, 21 nt, Synthetic Construct
  source 1..21: mol_type = other RNA
tgtcagtttgtcaaatacccc

SEQ ID NO: 12421 - RNA, 19 nt, Synthetic Construct
  source 1..19: mol_type = other RNA
tcctgtaccgatcaatagt

SEQ ID NO: 12422 - RNA, 19 nt, Synthetic Construct
  source 1..19: mol_type = other RNA
tcctgtaccgatcaatagt

SEQ ID NO: 12423 - RNA, 16 nt, Synthetic Construct
  source 1..16: mol_type = other RNA
agttgaccgcctgggg

SEQ ID NO: 12424 - RNA, 16 nt, Synthetic Construct
  source 1..16: mol_type = other RNA
agttgaccgcctgggg

SEQ ID NO: 12425 - RNA, 22 nt, Synthetic Construct
  source 1..22: mol_type = other RNA
tgaggtagtaggttgtatggtt

SEQ ID NO: 12426 - RNA, 22 nt, Synthetic Construct
  source 1..22: mol_type = other RNA
tgaggtagtaggttgtatggtt

SEQ ID NO: 12427 - RNA, 18 nt, Synthetic Construct
  source 1..18: mol_type = other RNA
gaagttgaccgcctgggg

SEQ ID NO: 12428 - RNA, 18 nt, Synthetic Construct
  source 1..18: mol_type = other RNA
gaagttgaccgcctgggg

SEQ ID NO: 12429 - RNA, 21 nt, Synthetic Construct
  source 1..21: mol_type = other RNA
cccttggggttgtaggaccac

SEQ ID NO: 12430 - RNA, 21 nt, Synthetic Construct
  source 1..21: mol_type = other RNA
cccttggggttgtaggaccac

SEQ ID NO: 12431 - RNA, 21 nt, Synthetic Construct
  source 1..21: mol_type = other RNA
agcgtgcttgactgcgagact

SEQ ID NO: 12432 - RNA, 30 nt, Synthetic Construct; identical to SEQ ID NO: 5879
  source 1..30: mol_type = other RNA

SEQ ID NO: 12433 - RNA, 30 nt, Synthetic Construct; identical to SEQ ID NO: 5879
  source 1..30: mol_type = other RNA

SEQ ID NO: 12434 - RNA, 16 nt, Synthetic Construct
  source 1..16: mol_type = other RNA
gtctgcggccatacca

SEQ ID NO: 12435 - RNA, 16 nt, Synthetic Construct
  source 1..16: mol_type = other RNA
gtctgcggccatacca

SEQ ID NO: 12436 - RNA, 32 nt, Synthetic Construct; identical to SEQ ID NO: 4710
  source 1..32: mol_type = other RNA

SEQ ID NO: 12437 - RNA, 21 nt, Synthetic Construct
  source 1..21: mol_type = other RNA
aatggcgccactagggttgtg

SEQ ID NO: 12438 - RNA, 21 nt, Synthetic Construct
  source 1..21: mol_type = other RNA
aatggcgccactagggttgtg

SEQ ID NO: 12439 - RNA, 22 nt, Synthetic Construct
  source 1..22: mol_type = other RNA
ttcaagtaatccagggtaggct

SEQ ID NO: 12440 - RNA, 24 nt, Synthetic Construct
  source 1..24: mol_type = other RNA
tgtaaacatccttgactggaagct

SEQ ID NO: 12441 - RNA, 15 nt, Synthetic Construct
  source 1..15: mol_type = other RNA
cctcgcgcgattgga

SEQ ID NO: 12442 - RNA, 15 nt, Synthetic Construct
  source 1..15: mol_type = other RNA
cctcgcgcgattgga

SEQ ID NO: 12443 - RNA, 36 nt, Synthetic Construct; identical to SEQ ID NO: 2444
  source 1..36: mol_type = other RNA

SEQ ID NO: 12444 - RNA, 24 nt, Synthetic Construct
  source 1..24: mol_type = other RNA
acagtagtctgcacattggttatt

SEQ ID NO: 12445 - RNA, 23 nt, Synthetic Construct
  source 1..23: mol_type = other RNA
taaagtgcttatagtgcaggtag

SEQ ID NO: 12446 - RNA, 34 nt, Synthetic Construct; identical to SEQ ID NO: 2291
  source 1..34: mol_type = other RNA

SEQ ID NO: 12447 - RNA, 23 nt, Synthetic Construct
  source 1..23: mol_type = other RNA
tgaggggcagagagcgaggcttt

SEQ ID NO: 12448 - RNA, 23 nt, Synthetic Construct
  source 1..23: mol_type = other RNA
tgaggggcagagagcgaggcttt

SEQ ID NO: 12449 - RNA, 23 nt, Synthetic Construct
  source 1..23: mol_type = other RNA
tcctgtactgagccgccccgaga

SEQ ID NO: 12450 - RNA, 23 nt, Synthetic Construct
  source 1..23: mol_type = other RNA
tcctgtactgagccgccccgaga

SEQ ID NO: 12451 - RNA, 25 nt, Synthetic Construct
  source 1..25: mol_type = other RNA
aatgacacgatcactcccgttgagt

SEQ ID NO: 12452 - RNA, 25 nt, Synthetic Construct
  source 1..25: mol_type = other RNA
aatgacacgatcactcccgttgagt

SEQ ID NO: 12453 - RNA, 18 nt, Synthetic Construct
  source 1..18: mol_type = other RNA
cataaagtagaaagcact

SEQ ID NO: 12454 - RNA, 18 nt, Synthetic Construct
  source 1..18: mol_type = other RNA
cataaagtagaaagcact

SEQ ID NO: 12455 - RNA, 22 nt, Synthetic Construct
  source 1..22: mol_type = other RNA
caaagaattctccttttgggct

SEQ ID NO: 12456 - RNA, 22 nt, Synthetic Construct
  source 1..22: mol_type = other RNA
gactatagaactttccccctca

SEQ ID NO: 12457 - RNA, 22 nt, Synthetic Construct
  source 1..22: mol_type = other RNA
gactatagaactttccccctca

SEQ ID NO: 12458 - RNA, 22 nt, Synthetic Construct
  source 1..22: mol_type = other RNA
tgaggtagtagtttgtggtgtt

SEQ ID NO: 12459 - RNA, 22 nt, Synthetic Construct
  source 1..22: mol_type = other RNA
tgaggtagtagtttgtggtgtt

SEQ ID NO: 12460 - RNA, 22 nt, Synthetic Construct
  source 1..22: mol_type = other RNA
cgcatcccctagggcattggtg

SEQ ID NO: 12461 - RNA, 22 nt, Synthetic Construct
  source 1..22: mol_type = other RNA
cgcatcccctagggcattggtg

SEQ ID NO: 12462 - RNA, 23 nt, Synthetic Construct
  source 1..23: mol_type = other RNA
tggtaatacgacgtacttagcgt

SEQ ID NO: 12463 - RNA, 23 nt, Synthetic Construct
  source 1..23: mol_type = other RNA
tggtaatacgacgtacttagcgt

SEQ ID NO: 12464 - RNA, 21 nt, Synthetic Construct
  source 1..21: mol_type = other RNA
taatactgcctggtaatgatg

SEQ ID NO: 12465 - RNA, 21 nt, Synthetic Construct
  source 1..21: mol_type = other RNA
taatactgcctggtaatgatg

SEQ ID NO: 12466 - RNA, 21 nt, Synthetic Construct
  source 1..21: mol_type = other RNA
tcctgtactgagctgcctcga

SEQ ID NO: 12467 - RNA, 21 nt, Synthetic Construct
  source 1..21: mol_type = other RNA
tcctgtactgagctgcctcga

SEQ ID NO: 12468 - RNA, 21 nt, Synthetic Construct
  source 1..21: mol_type = other RNA
tcctgaactgagctgccccga

SEQ ID NO: 12469 - RNA, 21 nt, Synthetic Construct
  source 1..21: mol_type = other RNA
tcctgaactgagctgccccga

SEQ ID NO: 12470 - RNA, 18 nt, Synthetic Construct
  source 1..18: mol_type = other RNA
ggccgtcgtcagctcgtg

SEQ ID NO: 12471 - RNA, 18 nt, Synthetic Construct
  source 1..18: mol_type = other RNA
ggccgtcgtcagctcgtg

SEQ ID NO: 12472 - RNA, 25 nt, Synthetic Construct
  source 1..25: mol_type = other RNA
aaaagctgggttgagagggcgaatt

SEQ ID NO: 12473 - RNA, 25 nt, Synthetic Construct
  source 1..25: mol_type = other RNA
aaaagctgggttgagagggcgaatt

SEQ ID NO: 12474 - RNA, 22 nt, Synthetic Construct
  source 1..22: mol_type = other RNA
tgaggtagtaggtcgtgtggtt

SEQ ID NO: 12475 - RNA, 22 nt, Synthetic Construct
  source 1..22: mol_type = other RNA
tgaggtagtaggtcgtgtggtt

SEQ ID NO: 12476 - RNA, 18 nt, Synthetic Construct
  source 1..18: mol_type = other RNA
catgcaagtcgaacggta

SEQ ID NO: 12477 - RNA, 18 nt, Synthetic Construct
  source 1..18: mol_type = other RNA
catgcaagtcgaacggta

SEQ ID NO: 12478 - RNA, 18 nt, Synthetic Construct
  source 1..18: mol_type = other RNA
cctgcggaaggatcattg

SEQ ID NO: 12479 - RNA, 18 nt, Synthetic Construct
  source 1..18: mol_type = other RNA
cctgcggaaggatcattg

SEQ ID NO: 12480 - RNA, 24 nt, Synthetic Construct
  source 1..24: mol_type = other RNA
tgaggggcagagagcgagacttta

SEQ ID NO: 12481 - RNA, 24 nt, Synthetic Construct
  source 1..24: mol_type = other RNA
tgaggggcagagagcgagacttta

SEQ ID NO: 12482 - RNA, 24 nt, Synthetic Construct
  source 1..24: mol_type = other RNA
agctcggtctgaggcccctcagta

SEQ ID NO: 12483 - RNA, 24 nt, Synthetic Construct
  source 1..24: mol_type = other RNA
agctcggtctgaggcccctcagta

SEQ ID NO: 12484 - RNA, 22 nt, Synthetic Construct
  source 1..22: mol_type = other RNA
tggaatgtagagaagtatgtat

SEQ ID NO: 12485 - RNA, 23 nt, Synthetic Construct
  source 1..23: mol_type = other RNA
tcggatccgtctgagcttggctt

SEQ ID NO: 12486 - RNA, 23 nt, Synthetic Construct
  source 1..23: mol_type = other RNA
tcggatccgtctgagcttggctt

SEQ ID NO: 12487 - RNA, 42 nt, Synthetic Construct; identical to SEQ ID NO: 733
  source 1..42: mol_type = other RNA

SEQ ID NO: 12488 - RNA, 22 nt, Synthetic Construct
  source 1..22: mol_type = other RNA
aagcagcacgtaaatattggag

SEQ ID NO: 12489 - RNA, 22 nt, Synthetic Construct
  source 1..22: mol_type = other RNA
aagcagcacgtaaatattggag

SEQ ID NO: 12490 - RNA, 22 nt, Synthetic Construct
  source 1..22: mol_type = other RNA
tgaggtagtaggttgtgtagtt

SEQ ID NO: 12491 - RNA, 23 nt, Synthetic Construct
  source 1..23: mol_type = other RNA
tcctatactgagctgccccgaga

SEQ ID NO: 12492 - RNA, 20 nt, Synthetic Construct
  source 1..20: mol_type = other RNA
tggtagactatggaacgtag

SEQ ID NO: 12493 - RNA, 23 nt, Synthetic Construct
  source 1..23: mol_type = other RNA
tggaaatacgacgtacttagtgt

SEQ ID NO: 12494 - RNA, 21 nt, Synthetic Construct
  source 1..21: mol_type = other RNA
tggggtagtaggttgtatagt

SEQ ID NO: 12495 - RNA, 23 nt, Synthetic Construct
  source 1..23: mol_type = other RNA
ttatggtttgcctgggactgagg

SEQ ID NO: 12496 - RNA, 17 nt, Synthetic Construct
  source 1..17: mol_type = other RNA
ggcccttatgggtaggg

SEQ ID NO: 12497 - RNA, 22 nt, Synthetic Construct
  source 1..22: mol_type = other RNA
tgaggtagtagattgtgtggtt

SEQ ID NO: 12498 - RNA, 23 nt, Synthetic Construct
  source 1..23: mol_type = other RNA
tggtaatacgtcgtacttagtgt

SEQ ID NO: 12499 - RNA, 23 nt, Synthetic Construct
  source 1..23: mol_type = other RNA
tggtaatacgtcgtacttagtgt

SEQ ID NO: 12500 - RNA, 16 nt, Synthetic Construct
  source 1..16: mol_type = other RNA
cgctagtaatcgcgga

SEQ ID NO: 12501 - RNA, 34 nt, Synthetic Construct; identical to SEQ ID NO: 385
  source 1..34: mol_type = other RNA

SEQ ID NO: 12502 - RNA, 34 nt, Synthetic Construct; identical to SEQ ID NO: 385
  source 1..34: mol_type = other RNA

SEQ ID NO: 12503 - RNA, 24 nt, Synthetic Construct
  source 1..24: mol_type = other RNA
tataccgaagctctaggtgcggca

SEQ ID NO: 12504 - RNA, 24 nt, Synthetic Construct
  source 1..24: mol_type = other RNA
tataccgaagctctaggtgcggca

SEQ ID NO: 12505 - RNA, 22 nt, Synthetic Construct
  source 1..22: mol_type = other RNA
cgactggtaactgggatgaagt

SEQ ID NO: 12506 - RNA, 22 nt, Synthetic Construct
  source 1..22: mol_type = other RNA
cgactggtaactgggatgaagt

SEQ ID NO: 12507 - RNA, 26 nt, Synthetic Construct
  source 1..26: mol_type = other RNA
gactcttagcggtggatcactcggct

SEQ ID NO: 12508 - RNA, 26 nt, Synthetic Construct
  source 1..26: mol_type = other RNA
gactcttagcggtggatcactcggct

SEQ ID NO: 12509 - RNA, 22 nt, Synthetic Construct
  source 1..22: mol_type = other RNA
tccctgagaccctaacttgtga

SEQ ID NO: 12510 - RNA, 16 nt, Synthetic Construct
  source 1..16: mol_type = other RNA
atgcaagtcgaacggt

SEQ ID NO: 12511 - RNA, 23 nt, Synthetic Construct
  source 1..23: mol_type = other RNA
aggtaatacgacgtacttagtgt

SEQ ID NO: 12512 - RNA, 21 nt, Synthetic Construct
  source 1..21: mol_type = other RNA
tcccgtactgagctgccccga

SEQ ID NO: 12513 - RNA, 21 nt, Synthetic Construct
  source 1..21: mol_type = other RNA
tcccgtactgagctgccccga

SEQ ID NO: 12514 - RNA, 30 nt, Synthetic Construct; identical to SEQ ID NO: 1771
  source 1..30: mol_type = other RNA

SEQ ID NO: 12515 - RNA, 30 nt, Synthetic Construct; identical to SEQ ID NO: 1771
  source 1..30: mol_type = other RNA

SEQ ID NO: 12516 - RNA, 18 nt, Synthetic Construct
  source 1..18: mol_type = other RNA
agcagcattgtacagggc

SEQ ID NO: 12517 - RNA, 18 nt, Synthetic Construct
  source 1..18: mol_type = other RNA
agcagcattgtacagggc

SEQ ID NO: 12518 - RNA, 15 nt, Synthetic Construct
  source 1..15: mol_type = other RNA
gagctgtggataggg

SEQ ID NO: 12519 - RNA, 15 nt, Synthetic Construct
  source 1..15: mol_type = other RNA
gagctgtggataggg

SEQ ID NO: 12520 - RNA, 29 nt, Synthetic Construct
  source 1..29: mol_type = other RNA
cccccccactgctaaatttgactggcttt

SEQ ID NO: 12521 - RNA, 16 nt, Synthetic Construct
  source 1..16: mol_type = other RNA
gcagacgaagtgagtg

SEQ ID NO: 12522 - RNA, 23 nt, Synthetic Construct
  source 1..23: mol_type = other RNA
tctctcggctcctcgcggctcgt

SEQ ID NO: 12523 - RNA, 23 nt, Synthetic Construct
  source 1..23: mol_type = other RNA
tctctcggctcctcgcggctcgt

SEQ ID NO: 12524 - RNA, 25 nt, Synthetic Construct
  source 1..25: mol_type = other RNA
cctcgcgcgattggagcggccgata

SEQ ID NO: 12525 - RNA, 25 nt, Synthetic Construct
  source 1..25: mol_type = other RNA
cctcgcgcgattggagcggccgata

SEQ ID NO: 12526 - RNA, 23 nt, Synthetic Construct
  source 1..23: mol_type = other RNA
caacggaatcccaagagcagctg

SEQ ID NO: 12527 - RNA, 20 nt, Synthetic Construct
  source 1..20: mol_type = other RNA
gcgtgcttgactgcgagact

SEQ ID NO: 12528 - RNA, 20 nt, Synthetic Construct
  source 1..20: mol_type = other RNA
gcgtgcttgactgcgagact

SEQ ID NO: 12529 - RNA, 21 nt, Synthetic Construct
  source 1..21: mol_type = other RNA
tgaggtagtaggtcgtatagt

SEQ ID NO: 12530 - RNA, 21 nt, Synthetic Construct
  source 1..21: mol_type = other RNA
tgaggtagtaggtcgtatagt

SEQ ID NO: 12531 - RNA, 18 nt, Synthetic Construct
  source 1..18: mol_type = other RNA
cctcgcgcgattggagcg

SEQ ID NO: 12532 - RNA, 33 nt, Synthetic Construct; identical to SEQ ID NO: 3082
  source 1..33: mol_type = other RNA

SEQ ID NO: 12533 - RNA, 22 nt, Synthetic Construct
  source 1..22: mol_type = other RNA
catcgcacttgtctcggtctga

SEQ ID NO: 12534 - RNA, 22 nt, Synthetic Construct
  source 1..22: mol_type = other RNA
catcgcacttgtctcggtctga

SEQ ID NO: 12535 - RNA, 18 nt, Synthetic Construct
  source 1..18: mol_type = other RNA
ctaatgagactgccggtg

SEQ ID NO: 12536 - RNA, 17 nt, Synthetic Construct
  source 1..17: mol_type = other RNA
atgcaagtcgaacggta

SEQ ID NO: 12537 - RNA, 30 nt, Synthetic Construct; identical to SEQ ID NO: 2407
  source 1..30: mol_type = other RNA

SEQ ID NO: 12538 - RNA, 30 nt, Synthetic Construct; identical to SEQ ID NO: 2407
  source 1..30: mol_type = other RNA

SEQ ID NO: 12539 - RNA, 23 nt, Synthetic Construct
  source 1..23: mol_type = other RNA
tgaggagcagagagcgagacttt

SEQ ID NO: 12540 - RNA, 23 nt, Synthetic Construct
  source 1..23: mol_type = other RNA
tgaggagcagagagcgagacttt

SEQ ID NO: 12541 - RNA, 27 nt, Synthetic Construct
  source 1..27: mol_type = other RNA
tcggctgttaaccgaaaggttggtggt

SEQ ID NO: 12542 - RNA, 22 nt, Synthetic Construct
  source 1..22: mol_type = other RNA
acagtagtctgcacattggttg

SEQ ID NO: 12543 - RNA, 21 nt, Synthetic Construct
  source 1..21: mol_type = other RNA
tgaggtagtaggtcgtatagt

SEQ ID NO: 12544 - RNA, 23 nt, Synthetic Construct
  source 1..23: mol_type = other RNA
tgaggagcagagagcgagacttt

SEQ ID NO: 12545 - RNA, 15 nt, Synthetic Construct
  source 1..15: mol_type = other RNA
gtcgacgtatagggt

SEQ ID NO: 12546 - RNA, 16 nt, Synthetic Construct
  source 1..16: mol_type = other RNA
ttcgattccggagagg

SEQ ID NO: 12547 - RNA, 16 nt, Synthetic Construct
  source 1..16: mol_type = other RNA
ttcgattccggagagg

SEQ ID NO: 12548 - RNA, 17 nt, Synthetic Construct
  source 1..17: mol_type = other RNA
cctcgcgcgattggagc

SEQ ID NO: 12549 - RNA, 17 nt, Synthetic Construct
  source 1..17: mol_type = other RNA
cctcgcgcgattggagc

SEQ ID NO: 12550 - RNA, 22 nt, Synthetic Construct
  source 1..22: mol_type = other RNA
tgaagtagtaggttgtgtggtt

SEQ ID NO: 12551 - RNA, 22 nt, Synthetic Construct
  source 1..22: mol_type = other RNA
tgaagtagtaggttgtgtggtt

SEQ ID NO: 12552 - RNA, 32 nt, Synthetic Construct; identical to SEQ ID NO: 3713
  source 1..32: mol_type = other RNA

SEQ ID NO: 12553 - RNA, 32 nt, Synthetic Construct; identical to SEQ ID NO: 3713
  source 1..32: mol_type = other RNA

SEQ ID NO: 12554 - RNA, 22 nt, Synthetic Construct
  source 1..22: mol_type = other RNA
ttcaggtaatccaggataggct

SEQ ID NO: 12555 - RNA, 17 nt, Synthetic Construct
  source 1..17: mol_type = other RNA
tcagtagctcgaggaaa

SEQ ID NO: 12556 - RNA, 17 nt, Synthetic Construct
  source 1..17: mol_type = other RNA
tcagtagctcgaggaaa

SEQ ID NO: 12557 - RNA, 29 nt, Synthetic Construct
  source 1..29: mol_type = other RNA
ttacaggggttcgaatcccctaggggacg

SEQ ID NO: 12558 - RNA, 29 nt, Synthetic Construct
  source 1..29: mol_type = other RNA
ttacaggggttcgaatcccctaggggacg

SEQ ID NO: 12559 - RNA, 16 nt, Synthetic Construct
  source 1..16: mol_type = other RNA
gggtgaaagcggggga

SEQ ID NO: 12560 - RNA, 21 nt, Synthetic Construct
  source 1..21: mol_type = other RNA
agagtaggacgttgccaggtt

SEQ ID NO: 12561 - RNA, 21 nt, Synthetic Construct
  source 1..21: mol_type = other RNA
agagtaggacgttgccaggtt

SEQ ID NO: 12562 - RNA, 21 nt, Synthetic Construct
  source 1..21: mol_type = other RNA
tgaggtagtaggtcgtgtggt

SEQ ID NO: 12563 - RNA, 21 nt, Synthetic Construct
  source 1..21: mol_type = other RNA
tgaggtagtaggtcgtgtggt

SEQ ID NO: 12564 - RNA, 31 nt, Synthetic Construct; identical to SEQ ID NO: 2333
  source 1..31: mol_type = other RNA

SEQ ID NO: 12565 - RNA, 31 nt, Synthetic Construct; identical to SEQ ID NO: 2333
  source 1..31: mol_type = other RNA

SEQ ID NO: 12566 - RNA, 19 nt, Synthetic Construct
  source 1..19: mol_type = other RNA
tgtcagtttgtcaaatacc

SEQ ID NO: 12567 - RNA, 19 nt, Synthetic Construct
  source 1..19: mol_type = other RNA
tgtcagtttgtcaaatacc

SEQ ID NO: 12568 - RNA, 20 nt, Synthetic Construct
  source 1..20: mol_type = other RNA
tggctcagttcagcaggaaa

SEQ ID NO: 12569 - RNA, 20 nt, Synthetic Construct
  source 1..20: mol_type = other RNA
tggctcagttcagcaggaaa

SEQ ID NO: 12570 - RNA, 30 nt, Synthetic Construct; identical to SEQ ID NO: 6405
  source 1..30: mol_type = other RNA

SEQ ID NO: 12571 - RNA, 30 nt, Synthetic Construct; identical to SEQ ID NO: 6405
  source 1..30: mol_type = other RNA

SEQ ID NO: 12572 - RNA, 22 nt, Synthetic Construct
  source 1..22: mol_type = other RNA
tgtggtagtagattgtatagtt

SEQ ID NO: 12573 - RNA, 20 nt, Synthetic Construct
  source 1..20: mol_type = other RNA
tctcccaacccttgtaccag

SEQ ID NO: 12574 - RNA, 20 nt, Synthetic Construct
  source 1..20: mol_type = other RNA
tctcccaacccttgtaccag

SEQ ID NO: 12575 - RNA, 15 nt, Synthetic Construct
  source 1..15: mol_type = other RNA
gtccggcccgaggca

SEQ ID NO: 12576 - RNA, 16 nt, Synthetic Construct
  source 1..16: mol_type = other RNA
gtctacggccatacca

SEQ ID NO: 12577 - RNA, 21 nt, Synthetic Construct
  source 1..21: mol_type = other RNA
tgaggtggtaggttgtgtggt

SEQ ID NO: 12578 - RNA, 21 nt, Synthetic Construct
  source 1..21: mol_type = other RNA
tgaggtggtaggttgtgtggt

SEQ ID NO: 12579 - RNA, 25 nt, Synthetic Construct
  source 1..25: mol_type = other RNA
gctcagtggaaaggatgtgaatcta

SEQ ID NO: 12580 - RNA, 25 nt, Synthetic Construct
  source 1..25: mol_type = other RNA
gctcagtggaaaggatgtgaatcta

SEQ ID NO: 12581 - RNA, 20 nt, Synthetic Construct
  source 1..20: mol_type = other RNA
ctgacctatgaattgacagc

SEQ ID NO: 12582 - RNA, 20 nt, Synthetic Construct
  source 1..20: mol_type = other RNA
agctacattgtctgctgggt

SEQ ID NO: 12583 - RNA, 20 nt, Synthetic Construct
  source 1..20: mol_type = other RNA
agctacattgtctgctgggt

SEQ ID NO: 12584 - RNA, 23 nt, Synthetic Construct
  source 1..23: mol_type = other RNA
attctaatttctccacgtctttg

SEQ ID NO: 12585 - RNA, 32 nt, Synthetic Construct; identical to SEQ ID NO: 8270
  source 1..32: mol_type = other RNA

SEQ ID NO: 12586 - RNA, 32 nt, Synthetic Construct; identical to SEQ ID NO: 8270
  source 1..32: mol_type = other RNA

SEQ ID NO: 12587 - RNA, 36 nt, Synthetic Construct; identical to SEQ ID NO: 2660
  source 1..36: mol_type = other RNA

SEQ ID NO: 12588 - RNA, 28 nt, Synthetic Construct
  source 1..28: mol_type = other RNA
gcatgggtggttcagtggtagaattctc

SEQ ID NO: 12589 - RNA, 28 nt, Synthetic Construct
  source 1..28: mol_type = other RNA
gcatgggtggttcagtggtagaattctc

SEQ ID NO: 12590 - RNA, 20 nt, Synthetic Construct
  source 1..20: mol_type = other RNA
gtgccgaagctgtgggattg

SEQ ID NO: 12591 - RNA, 20 nt, Synthetic Construct
  source 1..20: mol_type = other RNA
gtgccgaagctgtgggattg

SEQ ID NO: 12592 - RNA, 34 nt, Synthetic Construct; identical to SEQ ID NO: 2183
  source 1..34: mol_type = other RNA

SEQ ID NO: 12593 - RNA, 34 nt, Synthetic Construct; identical to SEQ ID NO: 2183
  source 1..34: mol_type = other RNA

SEQ ID NO: 12594 - RNA, 21 nt, Synthetic Construct
  source 1..21: mol_type = other RNA
agcagcacgtaaatattggcg

SEQ ID NO: 12595 - RNA, 21 nt, Synthetic Construct
  source 1..21: mol_type = other RNA
agcagcacgtaaatattggcg

SEQ ID NO: 12596 - RNA, 23 nt, Synthetic Construct
  source 1..23: mol_type = other RNA
tgtcagtttgccaaataccccaa

SEQ ID NO: 12597 - RNA, 23 nt, Synthetic Construct
  source 1..23: mol_type = other RNA
tgtcagtttgccaaataccccaa

SEQ ID NO: 12598 - RNA, 20 nt, Synthetic Construct
  source 1..20: mol_type = other RNA
tgtcagtttgtcaaataccc

SEQ ID NO: 12599 - RNA, 20 nt, Synthetic Construct
  source 1..20: mol_type = other RNA
tgtcagtttgtcaaataccc

SEQ ID NO: 12600 - RNA, 31 nt, Synthetic Construct; identical to SEQ ID NO: 2412
  source 1..31: mol_type = other RNA

SEQ ID NO: 12601 - RNA, 31 nt, Synthetic Construct; identical to SEQ ID NO: 2412
  source 1..31: mol_type = other RNA

SEQ ID NO: 12602 - RNA, 19 nt, Synthetic Construct
  source 1..19: mol_type = other RNA
atcccactcctgacaccat

SEQ ID NO: 12603 - RNA, 19 nt, Synthetic Construct
  source 1..19: mol_type = other RNA
atcccactcctgacaccat

SEQ ID NO: 12604 - RNA, 17 nt, Synthetic Construct
  source 1..17: mol_type = other RNA
atcgtgacgatagtgca

SEQ ID NO: 12605 - RNA, 25 nt, Synthetic Construct
  source 1..25: mol_type = other RNA
tgtaaacatccttgactggaagctt

SEQ ID NO: 12606 - RNA, 22 nt, Synthetic Construct
  source 1..22: mol_type = other RNA
tgaggtagtgggttgtgtggtt

SEQ ID NO: 12607 - RNA, 22 nt, Synthetic Construct
  source 1..22: mol_type = other RNA
tgaggtagtgggttgtgtggtt

SEQ ID NO: 12608 - RNA, 21 nt, Synthetic Construct
  source 1..21: mol_type = other RNA
tgtcttgcaggccgtcatgca

SEQ ID NO: 12609 - RNA, 21 nt, Synthetic Construct
  source 1..21: mol_type = other RNA
tgtcttgcaggccgtcatgca

SEQ ID NO: 12610 - RNA, 22 nt, Synthetic Construct
  source 1..22: mol_type = other RNA
tgaggtagtagtttgcgctgtt

SEQ ID NO: 12611 - RNA, 18 nt, Synthetic Construct
  source 1..18: mol_type = other RNA
cctgtaccgatcaatagt

SEQ ID NO: 12612 - RNA, 18 nt, Synthetic Construct
  source 1..18: mol_type = other RNA
cctgtaccgatcaatagt

SEQ ID NO: 12613 - RNA, 22 nt, Synthetic Construct
  source 1..22: mol_type = other RNA
nagcagcacgtaaatattggcg

SEQ ID NO: 12614 - RNA, 22 nt, Synthetic Construct
  source 1..22: mol_type = other RNA
nagcagcacgtaaatattggcg

SEQ ID NO: 12615 - RNA, 30 nt, Synthetic Construct; identical to SEQ ID NO: 1958
  source 1..30: mol_type = other RNA

SEQ ID NO: 12616 - RNA, 22 nt, Synthetic Construct
  source 1..22: mol_type = other RNA
tggctcagttcagcaggaacag

SEQ ID NO: 12617 - RNA, 30 nt, Synthetic Construct; identical to SEQ ID NO: 751
  source 1..30: mol_type = other RNA

SEQ ID NO: 12618 - RNA, 16 nt, Synthetic Construct
  source 1..16: mol_type = other RNA
tgcggaaggatcattg

SEQ ID NO: 12619 - RNA, 16 nt, Synthetic Construct
  source 1..16: mol_type = other RNA
tgcggaaggatcattg

SEQ ID NO: 12620 - RNA, 18 nt, Synthetic Construct
  source 1..18: mol_type = other RNA
tcccctggacctgtactg

SEQ ID NO: 12621 - RNA, 22 nt, Synthetic Construct
  source 1..22: mol_type = other RNA
tcctatactgagctgccccgag

SEQ ID NO: 12622 - RNA, 22 nt, Synthetic Construct
  source 1..22: mol_type = other RNA
tcctatactgagctgccccgag

SEQ ID NO: 12623 - RNA, 30 nt, Synthetic Construct; identical to SEQ ID NO: 2308
  source 1..30: mol_type = other RNA

SEQ ID NO: 12624 - RNA, 23 nt, Synthetic Construct
  source 1..23: mol_type = other RNA
tagcagcacgtaaatattggcgt

SEQ ID NO: 12625 - RNA, 19 nt, Synthetic Construct
  source 1..19: mol_type = other RNA
cagcactctgcaaagacga

SEQ ID NO: 12626 - RNA, 19 nt, Synthetic Construct
  source 1..19: mol_type = other RNA
cagcactctgcaaagacga

SEQ ID NO: 12627 - RNA, 22 nt, Synthetic Construct
  source 1..22: mol_type = other RNA
tgaggtagtaggttgtatagat

SEQ ID NO: 12628 - RNA, 22 nt, Synthetic Construct
  source 1..22: mol_type = other RNA
tattgcacttgtcccagcctgt

SEQ ID NO: 12629 - RNA, 22 nt, Synthetic Construct
  source 1..22: mol_type = other RNA
tattgcacttgtcccagcctgt

SEQ ID NO: 12630 - RNA, 23 nt, Synthetic Construct
  source 1..23: mol_type = other RNA
tgataatacgacgtacttagtgt

SEQ ID NO: 12631 - RNA, 23 nt, Synthetic Construct
  source 1..23: mol_type = other RNA
tgataatacgacgtacttagtgt

SEQ ID NO: 12632 - RNA, 22 nt, Synthetic Construct
  source 1..22: mol_type = other RNA
tgaggtagtagtttgtactgtt

SEQ ID NO: 12633 - RNA, 22 nt, Synthetic Construct
  source 1..22: mol_type = other RNA
tgaggtagtagtttgtactgtt

SEQ ID NO: 12634 - RNA, 22 nt, Synthetic Construct
  source 1..22: mol_type = other RNA
tggaatgtaaagaagtatgtat

SEQ ID NO: 12635 - RNA, 22 nt, Synthetic Construct
  source 1..22: mol_type = other RNA
tggaatgtaaagaagtatgtat

SEQ ID NO: 12636 - RNA, 19 nt, Synthetic Construct
  source 1..19: mol_type = other RNA
ctgatcgagtcgtcctgcg

SEQ ID NO: 12637 - RNA, 22 nt, Synthetic Construct
  source 1..22: mol_type = other RNA
tgaggtagtagattgtgtagtt

SEQ ID NO: 12638 - RNA, 22 nt, Synthetic Construct
  source 1..22: mol_type = other RNA
tgaggtagtagattgtgtagtt

SEQ ID NO: 12639 - RNA, 22 nt, Synthetic Construct
  source 1..22: mol_type = other RNA
tgaggtggtagtttgtgctgtt

SEQ ID NO: 12640 - RNA, 23 nt, Synthetic Construct
  source 1..23: mol_type = other RNA
tgaggggcagagggcgagacttt

SEQ ID NO: 12641 - RNA, 23 nt, Synthetic Construct
  source 1..23: mol_type = other RNA
tgaggggcagagggcgagacttt

SEQ ID NO: 12642 - RNA, 31 nt, Synthetic Construct; identical to SEQ ID NO: 2427
  source 1..31: mol_type = other RNA

SEQ ID NO: 12643 - RNA, 31 nt, Synthetic Construct; identical to SEQ ID NO: 2427
  source 1..31: mol_type = other RNA

SEQ ID NO: 12644 - RNA, 23 nt, Synthetic Construct
  source 1..23: mol_type = other RNA
tgaggtagtgggttgtgtggttt

SEQ ID NO: 12645 - RNA, 23 nt, Synthetic Construct
  source 1..23: mol_type = other RNA
tgaggtagtgggttgtgtggttt

SEQ ID NO: 12646 - RNA, 22 nt, Synthetic Construct
  source 1..22: mol_type = other RNA
tgaggtggtagtttgtgctgtt

SEQ ID NO: 12647 - RNA, 22 nt, Synthetic Construct
  source 1..22: mol_type = other RNA
tgaggtggtagtttgtgctgtt

SEQ ID NO: 12648 - RNA, 33 nt, Synthetic Construct; identical to SEQ ID NO: 2479
  source 1..33: mol_type = other RNA

SEQ ID NO: 12649 - RNA, 33 nt, Synthetic Construct; identical to SEQ ID NO: 2479
  source 1..33: mol_type = other RNA

SEQ ID NO: 12650 - RNA, 22 nt, Synthetic Construct
  source 1..22: mol_type = other RNA
catagcacttgtctcggtctga

SEQ ID NO: 12651 - RNA, 22 nt, Synthetic Construct
  source 1..22: mol_type = other RNA
catagcacttgtctcggtctga

SEQ ID NO: 12652 - RNA, 19 nt, Synthetic Construct
  source 1..19: mol_type = other RNA
agtcgacgtatagggtgtg

SEQ ID NO: 12653 - RNA, 21 nt, Synthetic Construct
  source 1..21: mol_type = other RNA
tcctatactgagctgccccga

SEQ ID NO: 12654 - RNA, 21 nt, Synthetic Construct
  source 1..21: mol_type = other RNA
tcctatactgagctgccccga

SEQ ID NO: 12655 - RNA, 16 nt, Synthetic Construct
  source 1..16: mol_type = other RNA
gaaattccttgtcggg

SEQ ID NO: 12656 - RNA, 15 nt, Synthetic Construct
  source 1..15: mol_type = other RNA
tgtctgagcgtcgct

SEQ ID NO: 12657 - RNA, 15 nt, Synthetic Construct
  source 1..15: mol_type = other RNA
tgtctgagcgtcgct

SEQ ID NO: 12658 - RNA, 17 nt, Synthetic Construct
  source 1..17: mol_type = other RNA
tggccgggacagagggc

SEQ ID NO: 12659 - RNA, 17 nt, Synthetic Construct
  source 1..17: mol_type = other RNA
tggccgggacagagggc

SEQ ID NO: 12660 - RNA, 21 nt, Synthetic Construct
  source 1..21: mol_type = other RNA
taactccttaagcgatctcgc

SEQ ID NO: 12661 - RNA, 21 nt, Synthetic Construct
  source 1..21: mol_type = other RNA
taactccttaagcgatctcgc

SEQ ID NO: 12662 - RNA, 36 nt, Synthetic Construct; identical to SEQ ID NO: 2456
  source 1..36: mol_type = other RNA

SEQ ID NO: 12663 - RNA, 36 nt, Synthetic Construct; identical to SEQ ID NO: 2456
  source 1..36: mol_type = other RNA

SEQ ID NO: 12664 - RNA, 15 nt, Synthetic Construct
  source 1..15: mol_type = other RNA
gctttgatccggaga

SEQ ID NO: 12665 - RNA, 22 nt, Synthetic Construct
  source 1..22: mol_type = other RNA
taaggtagtaggttgtatagtt

SEQ ID NO: 12666 - RNA, 22 nt, Synthetic Construct
  source 1..22: mol_type = other RNA
taaggtagtaggttgtatagtt

SEQ ID NO: 12667 - RNA, 20 nt, Synthetic Construct
  source 1..20: mol_type = other RNA
cggcggggacggcgattggt

SEQ ID NO: 12668 - RNA, 20 nt, Synthetic Construct
  source 1..20: mol_type = other RNA
cggcggggacggcgattggt

SEQ ID NO: 12669 - RNA, 21 nt, Synthetic Construct
  source 1..21: mol_type = other RNA
aattgcacggtatccatctgt

SEQ ID NO: 12670 - RNA, 21 nt, Synthetic Construct
  source 1..21: mol_type = other RNA
aattgcacggtatccatctgt

SEQ ID NO: 12671 - RNA, 35 nt, Synthetic Construct; identical to SEQ ID NO: 2069
  source 1..35: mol_type = other RNA

SEQ ID NO: 12672 - RNA, 35 nt, Synthetic Construct; identical to SEQ ID NO: 2069
  source 1..35: mol_type = other RNA

SEQ ID NO: 12673 - RNA, 32 nt, Synthetic Construct; identical to SEQ ID NO: 3541
  source 1..32: mol_type = other RNA

SEQ ID NO: 12674 - RNA, 21 nt, Synthetic Construct
  source 1..21: mol_type = other RNA
tgaggggcagagagcgagact

SEQ ID NO: 12675 - RNA, 16 nt, Synthetic Construct
  source 1..16: mol_type = other RNA
ccctttgtacacaccg

SEQ ID NO: 12676 - RNA, 16 nt, Synthetic Construct
  source 1..16: mol_type = other RNA
ccctttgtacacaccg

SEQ ID NO: 12677 - RNA, 24 nt, Synthetic Construct
  source 1..24: mol_type = other RNA
cgaatgttgctcggtgaacccctt

SEQ ID NO: 12678 - RNA, 24 nt, Synthetic Construct
  source 1..24: mol_type = other RNA
cgaatgttgctcggtgaacccctt

SEQ ID NO: 12679 - RNA, 18 nt, Synthetic Construct
  source 1..18: mol_type = other RNA
ggtagcgtggccgagtgg

SEQ ID NO: 12680 - RNA, 18 nt, Synthetic Construct
  source 1..18: mol_type = other RNA
ggtagcgtggccgagtgg

SEQ ID NO: 12681 - RNA, 23 nt, Synthetic Construct
  source 1..23: mol_type = other RNA
caaagagctgttcgtgcaggtag

SEQ ID NO: 12682 - RNA, 27 nt, Synthetic Construct
  source 1..27: mol_type = other RNA
ccccccactgctaagtttgactggctt

SEQ ID NO: 12683 - RNA, 27 nt, Synthetic Construct
  source 1..27: mol_type = other RNA
ccccccactgctaagtttgactggctt

SEQ ID NO: 12684 - RNA, 24 nt, Synthetic Construct
  source 1..24: mol_type = other RNA
caaagtgctgttcgtgcaggtaga

SEQ ID NO: 12685 - RNA, 16 nt, Synthetic Construct
  source 1..16: mol_type = other RNA
gactacggccatacca

SEQ ID NO: 12686 - RNA, 36 nt, Synthetic Construct; identical to SEQ ID NO: 2660
  source 1..36: mol_type = other RNA

SEQ ID NO: 12687 - RNA, 20 nt, Synthetic Construct
  source 1..20: mol_type = other RNA
ccgcagagtacagcttggga

SEQ ID NO: 12688 - RNA, 23 nt, Synthetic Construct
  source 1..23: mol_type = other RNA
caaagtgctgtttgtgcaggtag

SEQ ID NO: 12689 - RNA, 22 nt, Synthetic Construct
  source 1..22: mol_type = other RNA
tgaggtagaagattgtatagtt

SEQ ID NO: 12690 - RNA, 17 nt, Synthetic Construct
  source 1..17: mol_type = other RNA
gggtctgtagctcagtc

SEQ ID NO: 12691 - RNA, 22 nt, Synthetic Construct
  source 1..22: mol_type = other RNA
gcgttgcaaccagtgccggggg

SEQ ID NO: 12692 - RNA, 20 nt, Synthetic Construct
  source 1..20: mol_type = other RNA
tgaggtagtaggctgtgtgg

SEQ ID NO: 12693 - RNA, 27 nt, Synthetic Construct
  source 1..27: mol_type = other RNA
ccccccactgctaaatctgactggctt

SEQ ID NO: 12694 - RNA, 27 nt, Synthetic Construct
  source 1..27: mol_type = other RNA
ccccccactgctaaatctgactggctt

SEQ ID NO: 12695 - RNA, 21 nt, Synthetic Construct
  source 1..21: mol_type = other RNA
tgaggtagtagattgtatggt

SEQ ID NO: 12696 - RNA, 21 nt, Synthetic Construct
  source 1..21: mol_type = other RNA
tgaggtagtagattgtatggt

SEQ ID NO: 12697 - RNA, 21 nt, Synthetic Construct
  source 1..21: mol_type = other RNA
tgaggaagtaggttgtgtggt

SEQ ID NO: 12698 - RNA, 21 nt, Synthetic Construct
  source 1..21: mol_type = other RNA
tgaggaagtaggttgtgtggt

SEQ ID NO: 12699 - RNA, 23 nt, Synthetic Construct
  source 1..23: mol_type = other RNA
caaagaattctccttttgggctt

SEQ ID NO: 12700 - RNA, 23 nt, Synthetic Construct
  source 1..23: mol_type = other RNA
caaagaattctccttttgggctt

SEQ ID NO: 12701 - RNA, 22 nt, Synthetic Construct
  source 1..22: mol_type = other RNA
aagcagaacgtaaatattggcg

SEQ ID NO: 12702 - RNA, 22 nt, Synthetic Construct
  source 1..22: mol_type = other RNA
tcactgatcgagtcgtcctgcg

SEQ ID NO: 12703 - RNA, 21 nt, Synthetic Construct
  source 1..21: mol_type = other RNA
tgaggtagtagatcgtatagt

SEQ ID NO: 12704 - RNA, 23 nt, Synthetic Construct
  source 1..23: mol_type = other RNA
cagagtgctgttcgtgcaggtag

SEQ ID NO: 12705 - RNA, 23 nt, Synthetic Construct
  source 1..23: mol_type = other RNA
cagagtgctgttcgtgcaggtag

SEQ ID NO: 12706 - RNA, 21 nt, Synthetic Construct
  source 1..21: mol_type = other RNA
agctacattgtctgctgggtt

SEQ ID NO: 12707 - RNA, 21 nt, Synthetic Construct
  source 1..21: mol_type = other RNA
agctacattgtctgctgggtt

SEQ ID NO: 12708 - RNA, 25 nt, Synthetic Construct
  source 1..25: mol_type = other RNA
agctcactgatcgagtcgtcctgcg

SEQ ID NO: 12709 - RNA, 22 nt, Synthetic Construct
  source 1..22: mol_type = other RNA
tggaatgtaaagaagcatgtat

SEQ ID NO: 12710 - RNA, 22 nt, Synthetic Construct
  source 1..22: mol_type = other RNA
taccagcacgtaaatattggcg

SEQ ID NO: 12711 - RNA, 20 nt, Synthetic Construct
  source 1..20: mol_type = other RNA
tgaggtagtaggttatgtgg

SEQ ID NO: 12712 - RNA, 21 nt, Synthetic Construct
  source 1..21: mol_type = other RNA
acacatgcaagtcgaacggta

SEQ ID NO: 12713 - RNA, 21 nt, Synthetic Construct
  source 1..21: mol_type = other RNA
acacatgcaagtcgaacggta

SEQ ID NO: 12714 - RNA, 23 nt, Synthetic Construct
  source 1..23: mol_type = other RNA
tgaggtagtgggttgtgtggttt

SEQ ID NO: 12715 - RNA, 23 nt, Synthetic Construct
  source 1..23: mol_type = other RNA
tgaggtagtgggttgtgtggttt

SEQ ID NO: 12716 - RNA, 22 nt, Synthetic Construct
  source 1..22: mol_type = other RNA
ggtcggcccacggccctggcgg

SEQ ID NO: 12717 - RNA, 22 nt, Synthetic Construct
  source 1..22: mol_type = other RNA
ggtcggcccacggccctggcgg

SEQ ID NO: 12718 - RNA, 21 nt, Synthetic Construct
  source 1..21: mol_type = other RNA
tgaggaagtaggttgtatagt

SEQ ID NO: 12719 - RNA, 21 nt, Synthetic Construct
  source 1..21: mol_type = other RNA
tgaggaagtaggttgtatagt

SEQ ID NO: 12720 - RNA, 15 nt, Synthetic Construct
  source 1..15: mol_type = other RNA
gggtgaaagcggggg

SEQ ID NO: 12721 - RNA, 22 nt, Synthetic Construct
  source 1..22: mol_type = other RNA
atcacattgccagggatttcca

SEQ ID NO: 12722 - RNA, 22 nt, Synthetic Construct
  source 1..22: mol_type = other RNA
atcacattgccagggatttcca

SEQ ID NO: 12723 - RNA, 22 nt, Synthetic Construct
  source 1..22: mol_type = other RNA
tccaagtaatccaggataggct

SEQ ID NO: 12724 - RNA, 31 nt, Synthetic Construct; identical to SEQ ID NO: 2278
  source 1..31: mol_type = other RNA

SEQ ID NO: 12725 - RNA, 22 nt, Synthetic Construct
  source 1..22: mol_type = other RNA
tgaggtagtaggttgtataatt

SEQ ID NO: 12726 - RNA, 22 nt, Synthetic Construct
  source 1..22: mol_type = other RNA
tgaggtagtaggttgtataatt

SEQ ID NO: 12727 - RNA, 35 nt, Synthetic Construct; identical to SEQ ID NO: 2452
  source 1..35: mol_type = other RNA

SEQ ID NO: 12728 - RNA, 35 nt, Synthetic Construct; identical to SEQ ID NO: 2452
  source 1..35: mol_type = other RNA

SEQ ID NO: 12729 - RNA, 17 nt, Synthetic Construct
  source 1..17: mol_type = other RNA
agtccggatcgtagtct

SEQ ID NO: 12730 - RNA, 17 nt, Synthetic Construct
  source 1..17: mol_type = other RNA
agtccggatcgtagtct

SEQ ID NO: 12731 - RNA, 27 nt, Synthetic Construct
  source 1..27: mol_type = other RNA
ccccccacagctaaatttgactggcta

SEQ ID NO: 12732 - RNA, 22 nt, Synthetic Construct
  source 1..22: mol_type = other RNA
ttgcagcacgtaaatattggcg

SEQ ID NO: 12733 - RNA, 22 nt, Synthetic Construct
  source 1..22: mol_type = other RNA
ttgcagcacgtaaatattggcg

SEQ ID NO: 12734 - RNA, 25 nt, Synthetic Construct
  source 1..25: mol_type = other RNA
ggtaaaatggctgagtgaagcattg

SEQ ID NO: 12735 - RNA, 21 nt, Synthetic Construct
  source 1..21: mol_type = other RNA
ctaatcccagaaacccggtcg

SEQ ID NO: 12736 - RNA, 22 nt, Synthetic Construct
  source 1..22: mol_type = other RNA
tgaggtaataggttgtatagtt

SEQ ID NO: 12737 - RNA, 22 nt, Synthetic Construct
  source 1..22: mol_type = other RNA
tgaggtagtaggttgcatagtt

SEQ ID NO: 12738 - RNA, 22 nt, Synthetic Construct
  source 1..22: mol_type = other RNA
tgaggtagtaggttgcatagtt

SEQ ID NO: 12739 - RNA, 32 nt, Synthetic Construct; identical to SEQ ID NO: 2318
  source 1..32: mol_type = other RNA

SEQ ID NO: 12740 - RNA, 32 nt, Synthetic Construct; identical to SEQ ID NO: 2318
  source 1..32: mol_type = other RNA

SEQ ID NO: 12741 - RNA, 22 nt, Synthetic Construct
  source 1..22: mol_type = other RNA
tcgtatcgtgagtaataatgcg

SEQ ID NO: 12742 - RNA, 31 nt, Synthetic Construct; identical to SEQ ID NO: 2427
  source 1..31: mol_type = other RNA

SEQ ID NO: 12743 - RNA, 19 nt, Synthetic Construct
  source 1..19: mol_type = other RNA
aaaccgttaccattactga

SEQ ID NO: 12744 - RNA, 19 nt, Synthetic Construct
  source 1..19: mol_type = other RNA
aaaccgttaccattactga

SEQ ID NO: 12745 - RNA, 16 nt, Synthetic Construct
  source 1..16: mol_type = other RNA
ggccgtcgtcagctcg

SEQ ID NO: 12746 - RNA, 16 nt, Synthetic Construct
  source 1..16: mol_type = other RNA
ggccgtcgtcagctcg

SEQ ID NO: 12747 - RNA, 21 nt, Synthetic Construct
  source 1..21: mol_type = other RNA
tgaggtagtaggttgtacagt

SEQ ID NO: 12748 - RNA, 21 nt, Synthetic Construct
  source 1..21: mol_type = other RNA
tgaggtagtaggttgtacagt

SEQ ID NO: 12749 - RNA, 22 nt, Synthetic Construct
  source 1..22: mol_type = other RNA
tagcagcatgtaaatattggcg

SEQ ID NO: 12750 - RNA, 22 nt, Synthetic Construct
  source 1..22: mol_type = other RNA
tagcagcatgtaaatattggcg

SEQ ID NO: 12751 - RNA, 20 nt, Synthetic Construct
  source 1..20: mol_type = other RNA
tcagtagctcgaggaaaaga

SEQ ID NO: 12752 - RNA, 20 nt, Synthetic Construct
  source 1..20: mol_type = other RNA
tcagtagctcgaggaaaaga

SEQ ID NO: 12753 - RNA, 17 nt, Synthetic Construct
  source 1..17: mol_type = other RNA
gcggctgtagctcagtt

SEQ ID NO: 12754 - RNA, 17 nt, Synthetic Construct
  source 1..17: mol_type = other RNA
gcggctgtagctcagtt

SEQ ID NO: 12755 - RNA, 32 nt, Synthetic Construct; identical to SEQ ID NO: 2850
  source 1..32: mol_type = other RNA

SEQ ID NO: 12756 - RNA, 32 nt, Synthetic Construct; identical to SEQ ID NO: 2850
  source 1..32: mol_type = other RNA

SEQ ID NO: 12757 - RNA, 16 nt, Synthetic Construct
  source 1..16: mol_type = other RNA
cccaaaggtcgtcggt

SEQ ID NO: 12758 - RNA, 16 nt, Synthetic Construct
  source 1..16: mol_type = other RNA
cccaaaggtcgtcggt

SEQ ID NO: 12759 - RNA, 22 nt, Synthetic Construct
  source 1..22: mol_type = other RNA
tgaggtagtagcttgtgctgtt

SEQ ID NO: 12760 - RNA, 22 nt, Synthetic Construct
  source 1..22: mol_type = other RNA
tgaggtagtagcttgtgctgtt

SEQ ID NO: 12761 - RNA, 16 nt, Synthetic Construct
  source 1..16: mol_type = other RNA
ctgacgctcatgcacg

SEQ ID NO: 12762 - RNA, 24 nt, Synthetic Construct
  source 1..24: mol_type = other RNA
tttccccttggggttgtaggacca

SEQ ID NO: 12763 - RNA, 24 nt, Synthetic Construct
  source 1..24: mol_type = other RNA
tttccccttggggttgtaggacca

SEQ ID NO: 12764 - RNA, 22 nt, Synthetic Construct
  source 1..22: mol_type = other RNA
tgaggtagtagtttgtgttgtt

SEQ ID NO: 12765 - RNA, 18 nt, Synthetic Construct
  source 1..18: mol_type = other RNA
ggctttgaagtaaggtcg

SEQ ID NO: 12766 - RNA, 18 nt, Synthetic Construct
  source 1..18: mol_type = other RNA
ggctttgaagtaaggtcg

SEQ ID NO: 12767 - RNA, 20 nt, Synthetic Construct
  source 1..20: mol_type = other RNA
aaaagctgggttgagaggga

SEQ ID NO: 12768 - RNA, 20 nt, Synthetic Construct
  source 1..20: mol_type = other RNA
aaaagctgggttgagaggga

SEQ ID NO: 12769 - RNA, 22 nt, Synthetic Construct
  source 1..22: mol_type = other RNA
atgacacgatcactcccgttga

SEQ ID NO: 12770 - RNA, 22 nt, Synthetic Construct
  source 1..22: mol_type = other RNA
atgacacgatcactcccgttga

SEQ ID NO: 12771 - RNA, 18 nt, Synthetic Construct
  source 1..18: mol_type = other RNA
tctaatgagactgccggt

SEQ ID NO: 12772 - RNA, 23 nt, Synthetic Construct
  source 1..23: mol_type = other RNA
cgctcacggaaagagaatgaagc

SEQ ID NO: 12773 - RNA, 23 nt, Synthetic Construct
  source 1..23: mol_type = other RNA
cgctcacggaaagagaatgaagc

SEQ ID NO: 12774 - RNA, 32 nt, Synthetic Construct; identical to SEQ ID NO: 3748
  source 1..32: mol_type = other RNA

SEQ ID NO: 12775 - RNA, 32 nt, Synthetic Construct; identical to SEQ ID NO: 3748
  source 1..32: mol_type = other RNA

SEQ ID NO: 12776 - RNA, 21 nt, Synthetic Construct
  source 1..21: mol_type = other RNA
caaagaattctccttttgggc

SEQ ID NO: 12777 - RNA, 21 nt, Synthetic Construct
  source 1..21: mol_type = other RNA
caaagaattctccttttgggc

SEQ ID NO: 12778 - RNA, 21 nt, Synthetic Construct
  source 1..21: mol_type = other RNA
tgaggtagtagattgtacagt

SEQ ID NO: 12779 - RNA, 23 nt, Synthetic Construct
  source 1..23: mol_type = other RNA
tcctgtactgagctgccccgggt

SEQ ID NO: 12780 - RNA, 22 nt, Synthetic Construct
  source 1..22: mol_type = other RNA
cccataaagtagaaagcactac

SEQ ID NO: 12781 - RNA, 28 nt, Synthetic Construct
  source 1..28: mol_type = other RNA
gcggtataccgaagctctaggtgcggca

SEQ ID NO: 12782 - RNA, 28 nt, Synthetic Construct
  source 1..28: mol_type = other RNA
gcggtataccgaagctctaggtgcggca

SEQ ID NO: 12783 - RNA, 21 nt, Synthetic Construct
  source 1..21: mol_type = other RNA
caaagtgctgttcgtgcaggt

SEQ ID NO: 12784 - RNA, 24 nt, Synthetic Construct
  source 1..24: mol_type = other RNA
gtctttgttcgattccgttgagta

SEQ ID NO: 12785 - RNA, 24 nt, Synthetic Construct
  source 1..24: mol_type = other RNA
gtctttgttcgattccgttgagta

SEQ ID NO: 12786 - RNA, 21 nt, Synthetic Construct
  source 1..21: mol_type = other RNA
cccataaagtagaaagcacta

SEQ ID NO: 12787 - RNA, 21 nt, Synthetic Construct
  source 1..21: mol_type = other RNA
cccataaagtagaaagcacta

SEQ ID NO: 12788 - RNA, 27 nt, Synthetic Construct
  source 1..27: mol_type = other RNA
cgtgtgaaagtaggtcatcgtcaggct

SEQ ID NO: 12789 - RNA, 36 nt, Synthetic Construct; identical to SEQ ID NO: 752
  source 1..36: mol_type = other RNA

SEQ ID NO: 12790 - RNA, 36 nt, Synthetic Construct; identical to SEQ ID NO: 752
  source 1..36: mol_type = other RNA

SEQ ID NO: 12791 - RNA, 21 nt, Synthetic Construct
  source 1..21: mol_type = other RNA
ctagcaccatctgaaatcggt

SEQ ID NO: 12792 - RNA, 22 nt, Synthetic Construct
  source 1..22: mol_type = other RNA
ctatacgacctgctgcctttct

SEQ ID NO: 12793 - RNA, 22 nt, Synthetic Construct
  source 1..22: mol_type = other RNA
ctatacgacctgctgcctttct

SEQ ID NO: 12794 - RNA, 23 nt, Synthetic Construct
  source 1..23: mol_type = other RNA
cctcgcgcgattggagcggccga

SEQ ID NO: 12795 - RNA, 23 nt, Synthetic Construct
  source 1..23: mol_type = other RNA
cctcgcgcgattggagcggccga

SEQ ID NO: 12796 - RNA, 23 nt, Synthetic Construct
  source 1..23: mol_type = other RNA
cctcgcgcgattggagcggccga

SEQ ID NO: 12797 - RNA, 16 nt, Synthetic Construct
  source 1..16: mol_type = other RNA
gatctgtagctggtct

SEQ ID NO: 12798 - RNA, 22 nt, Synthetic Construct
  source 1..22: mol_type = other RNA
tagcagcacgtaaatataggcg

SEQ ID NO: 12799 - RNA, 22 nt, Synthetic Construct
  source 1..22: mol_type = other RNA
tgtggtagtagattgtatagtt

SEQ ID NO: 12800 - RNA, 23 nt, Synthetic Construct
  source 1..23: mol_type = other RNA
cgaatgttgctcggtgaacccct

SEQ ID NO: 12801 - RNA, 23 nt, Synthetic Construct
  source 1..23: mol_type = other RNA
cgaatgttgctcggtgaacccct

SEQ ID NO: 12802 - RNA, 18 nt, Synthetic Construct
  source 1..18: mol_type = other RNA
ccaaggggtcgtgggttc

SEQ ID NO: 12803 - RNA, 22 nt, Synthetic Construct
  source 1..22: mol_type = other RNA
ttctgtactgagctgccccgag

SEQ ID NO: 12804 - RNA, 22 nt, Synthetic Construct
  source 1..22: mol_type = other RNA
ttctgtactgagctgccccgag

SEQ ID NO: 12805 - RNA, 18 nt, Synthetic Construct
  source 1..18: mol_type = other RNA
gaagttgaccgcctgggg

SEQ ID NO: 12806 - RNA, 18 nt, Synthetic Construct
  source 1..18: mol_type = other RNA
gaagttgaccgcctgggg

SEQ ID NO: 12807 - RNA, 20 nt, Synthetic Construct
  source 1..20: mol_type = other RNA
gcgtgcttgactgcgagact

SEQ ID NO: 12808 - RNA, 23 nt, Synthetic Construct
  source 1..23: mol_type = other RNA
tccagtactgagctgccccgaga

SEQ ID NO: 12809 - RNA, 23 nt, Synthetic Construct
  source 1..23: mol_type = other RNA
tccagtactgagctgccccgaga

SEQ ID NO: 12810 - RNA, 33 nt, Synthetic Construct; identical to SEQ ID NO: 9568
  source 1..33: mol_type = other RNA

SEQ ID NO: 12811 - RNA, 33 nt, Synthetic Construct; identical to SEQ ID NO: 9568
  source 1..33: mol_type = other RNA

SEQ ID NO: 12812 - RNA, 22 nt, Synthetic Construct
  source 1..22: mol_type = other RNA
ttatggtttgcctgggactgaa

SEQ ID NO: 12813 - RNA, 22 nt, Synthetic Construct
  source 1..22: mol_type = other RNA
ttatggtttgcctgggactgaa

SEQ ID NO: 12814 - RNA, 21 nt, Synthetic Construct
  source 1..21: mol_type = other RNA
tgaggtagtaggctgtgtggt

SEQ ID NO: 12815 - RNA, 21 nt, Synthetic Construct
  source 1..21: mol_type = other RNA
tgaggtagtaggctgtgtggt

SEQ ID NO: 12816 - RNA, 23 nt, Synthetic Construct
  source 1..23: mol_type = other RNA
tctttggttatctagctgtatga

SEQ ID NO: 12817 - RNA, 23 nt, Synthetic Construct
  source 1..23: mol_type = other RNA
tctttggttatctagctgtatga

SEQ ID NO: 12818 - RNA, 30 nt, Synthetic Construct; identical to SEQ ID NO: 2274
  source 1..30: mol_type = other RNA

SEQ ID NO: 12819 - RNA, 30 nt, Synthetic Construct; identical to SEQ ID NO: 2274
  source 1..30: mol_type = other RNA

SEQ ID NO: 12820 - RNA, 22 nt, Synthetic Construct
  source 1..22: mol_type = other RNA
tatcgcacttgtcccggcctgt

SEQ ID NO: 12821 - RNA, 22 nt, Synthetic Construct
  source 1..22: mol_type = other RNA
tatcgcacttgtcccggcctgt

SEQ ID NO: 12822 - RNA, 22 nt, Synthetic Construct
  source 1..22: mol_type = other RNA
cgaggtagtagtttgtgctgtt

SEQ ID NO: 12823 - RNA, 22 nt, Synthetic Construct
  source 1..22: mol_type = other RNA
cgaggtagtagtttgtgctgtt

SEQ ID NO: 12824 - RNA, 22 nt, Synthetic Construct
  source 1..22: mol_type = other RNA
gtaaacggcgggagtaactatg

SEQ ID NO: 12825 - RNA, 27 nt, Synthetic Construct
  source 1..27: mol_type = other RNA
tcggctgttaaccgaaaggttggtggt

SEQ ID NO: 12826 - RNA, 21 nt, Synthetic Construct
  source 1..21: mol_type = other RNA
acacatgcaagtcgaacggta

SEQ ID NO: 12827 - RNA, 15 nt, Synthetic Construct
  source 1..15: mol_type = other RNA
ggtggctgtagctca

SEQ ID NO: 12828 - RNA, 21 nt, Synthetic Construct
  source 1..21: mol_type = other RNA
gactatagaactttccccctc

SEQ ID NO: 12829 - RNA, 21 nt, Synthetic Construct
  source 1..21: mol_type = other RNA
tgtagtgtttcctactttatg

SEQ ID NO: 12830 - RNA, 21 nt, Synthetic Construct
  source 1..21: mol_type = other RNA
tgtagtgtttcctactttatg

SEQ ID NO: 12831 - RNA, 40 nt, Synthetic Construct; identical to SEQ ID NO: 11585
  source 1..40: mol_type = other RNA

SEQ ID NO: 12832 - RNA, 40 nt, Synthetic Construct; identical to SEQ ID NO: 11585
  source 1..40: mol_type = other RNA

SEQ ID NO: 12833 - RNA, 21 nt, Synthetic Construct
  source 1..21: mol_type = other RNA
ggagtatgcagagcaagatca

SEQ ID NO: 12834 - RNA, 21 nt, Synthetic Construct
  source 1..21: mol_type = other RNA
ggagtatgcagagcaagatca

SEQ ID NO: 12835 - RNA, 16 nt, Synthetic Construct
  source 1..16: mol_type = other RNA
ccaaggggtcgtgggt

SEQ ID NO: 12836 - RNA, 16 nt, Synthetic Construct
  source 1..16: mol_type = other RNA
ccaaggggtcgtgggt

SEQ ID NO: 12837 - RNA, 22 nt, Synthetic Construct
  source 1..22: mol_type = other RNA
catcgggaatgtcgtgtccgcc

SEQ ID NO: 12838 - RNA, 22 nt, Synthetic Construct
  source 1..22: mol_type = other RNA
catcgggaatgtcgtgtccgcc

SEQ ID NO: 12839 - RNA, 21 nt, Synthetic Construct
  source 1..21: mol_type = other RNA
ccccttggggttgtaggacca

SEQ ID NO: 12840 - RNA, 21 nt, Synthetic Construct
  source 1..21: mol_type = other RNA
ccccttggggttgtaggacca

SEQ ID NO: 12841 - RNA, 21 nt, Synthetic Construct
  source 1..21: mol_type = other RNA
tgaggcagtagattgtatagt

SEQ ID NO: 12842 - RNA, 15 nt, Synthetic Construct
  source 1..15: mol_type = other RNA
gttgaccgcctgggg

SEQ ID NO: 12843 - RNA, 15 nt, Synthetic Construct
  source 1..15: mol_type = other RNA
gttgaccgcctgggg

SEQ ID NO: 12844 - RNA, 22 nt, Synthetic Construct
  source 1..22: mol_type = other RNA
tgaagtagtagtttgtgctgtt

SEQ ID NO: 12845 - RNA, 22 nt, Synthetic Construct
  source 1..22: mol_type = other RNA
tgaagtagtagtttgtgctgtt

SEQ ID NO: 12846 - RNA, 16 nt, Synthetic Construct
  source 1..16: mol_type = other RNA
gtctacggccatacta

SEQ ID NO: 12847 - RNA, 16 nt, Synthetic Construct
  source 1..16: mol_type = other RNA
gtctacggccatacta

SEQ ID NO: 12848 - RNA, 22 nt, Synthetic Construct
  source 1..22: mol_type = other RNA
tggaatgtaaagaagtatgcat

SEQ ID NO: 12849 - RNA, 22 nt, Synthetic Construct
  source 1..22: mol_type = other RNA
tggaatgtaaagaagtatgcat

SEQ ID NO: 12850 - RNA, 22 nt, Synthetic Construct
  source 1..22: mol_type = other RNA
tggaatgtaaagaagtatgcat

SEQ ID NO: 12851 - RNA, 22 nt, Synthetic Construct
  source 1..22: mol_type = other RNA
tgaggtagtaggttgagtggtt

SEQ ID NO: 12852 - RNA, 17 nt, Synthetic Construct
  source 1..17: mol_type = other RNA
aagttgaccgcctgggg

SEQ ID NO: 12853 - RNA, 31 nt, Synthetic Construct; identical to SEQ ID NO: 1881
  source 1..31: mol_type = other RNA

SEQ ID NO: 12854 - RNA, 31 nt, Synthetic Construct; identical to SEQ ID NO: 1881
  source 1..31: mol_type = other RNA

SEQ ID NO: 12855 - RNA, 22 nt, Synthetic Construct
  source 1..22: mol_type = other RNA
tcataccgtgagtaataatgcg

SEQ ID NO: 12856 - RNA, 20 nt, Synthetic Construct
  source 1..20: mol_type = other RNA
cccttggggttgtaggacca

SEQ ID NO: 12857 - RNA, 20 nt, Synthetic Construct
  source 1..20: mol_type = other RNA
cccttggggttgtaggacca

SEQ ID NO: 12858 - RNA, 31 nt, Synthetic Construct; identical to SEQ ID NO: 2423
  source 1..31: mol_type = other RNA

SEQ ID NO: 12859 - RNA, 16 nt, Synthetic Construct
  source 1..16: mol_type = other RNA
cgtgagctgggtttag

SEQ ID NO: 12860 - RNA, 16 nt, Synthetic Construct
  source 1..16: mol_type = other RNA
cgtgagctgggtttag

SEQ ID NO: 12861 - RNA, 15 nt, Synthetic Construct
  source 1..15: mol_type = other RNA
cgatatggcatgaga

SEQ ID NO: 12862 - RNA, 15 nt, Synthetic Construct
  source 1..15: mol_type = other RNA
cgatatggcatgaga

SEQ ID NO: 12863 - RNA, 26 nt, Synthetic Construct
  source 1..26: mol_type = other RNA
gagcagctaataccgcatacgacctg

SEQ ID NO: 12864 - RNA, 16 nt, Synthetic Construct
  source 1..16: mol_type = other RNA
ggcgggggtcgctggt

SEQ ID NO: 12865 - RNA, 20 nt, Synthetic Construct
  source 1..20: mol_type = other RNA
tccccggcacctccaccatt

SEQ ID NO: 12866 - RNA, 20 nt, Synthetic Construct
  source 1..20: mol_type = other RNA
tccccggcacctccaccatt

SEQ ID NO: 12867 - RNA, 23 nt, Synthetic Construct
  source 1..23: mol_type = other RNA
tggtaatacgacgtacctagtgt

SEQ ID NO: 12868 - RNA, 23 nt, Synthetic Construct
  source 1..23: mol_type = other RNA
tggtaatacgacgtacctagtgt

SEQ ID NO: 12869 - RNA, 35 nt, Synthetic Construct; identical to SEQ ID NO: 9871
  source 1..35: mol_type = other RNA

SEQ ID NO: 12870 - RNA, 35 nt, Synthetic Construct; identical to SEQ ID NO: 9871
  source 1..35: mol_type = other RNA

SEQ ID NO: 12871 - RNA, 22 nt, Synthetic Construct
  source 1..22: mol_type = other RNA
cgaggtagtaggttgtgtggtt

SEQ ID NO: 12872 - RNA, 22 nt, Synthetic Construct
  source 1..22: mol_type = other RNA
cgaggtagtaggttgtgtggtt

SEQ ID NO: 12873 - RNA, 15 nt, Synthetic Construct
  source 1..15: mol_type = other RNA
tagagtagggcggga

SEQ ID NO: 12874 - RNA, 19 nt, Synthetic Construct
  source 1..19: mol_type = other RNA
ccttggggttgtaggacca

SEQ ID NO: 12875 - RNA, 19 nt, Synthetic Construct
  source 1..19: mol_type = other RNA
ccttggggttgtaggacca

SEQ ID NO: 12876 - RNA, 22 nt, Synthetic Construct
  source 1..22: mol_type = other RNA
tggaatgtaaaggagtatgtat

SEQ ID NO: 12877 - RNA, 22 nt, Synthetic Construct
  source 1..22: mol_type = other RNA
tggaatgtaaaggagtatgtat

SEQ ID NO: 12878 - RNA, 23 nt, Synthetic Construct
  source 1..23: mol_type = other RNA
tggtaaaacgacgtacttagtgt

SEQ ID NO: 12879 - RNA, 25 nt, Synthetic Construct
  source 1..25: mol_type = other RNA
tcggatccgtctgagcttggctttt

SEQ ID NO: 12880 - RNA, 25 nt, Synthetic Construct
  source 1..25: mol_type = other RNA
tcggatccgtctgagcttggctttt

SEQ ID NO: 12881 - RNA, 19 nt, Synthetic Construct
  source 1..19: mol_type = other RNA
caagcggtggatgatgtgg

SEQ ID NO: 12882 - RNA, 25 nt, Synthetic Construct
  source 1..25: mol_type = other RNA
atttccccttggggttgtaggacca

SEQ ID NO: 12883 - RNA, 25 nt, Synthetic Construct
  source 1..25: mol_type = other RNA
atttccccttggggttgtaggacca

SEQ ID NO: 12884 - RNA, 23 nt, Synthetic Construct
  source 1..23: mol_type = other RNA
tacagtagtctgcacattggttt

SEQ ID NO: 12885 - RNA, 21 nt, Synthetic Construct
  source 1..21: mol_type = other RNA
cccataaagtagaaagcacta

SEQ ID NO: 12886 - RNA, 21 nt, Synthetic Construct
  source 1..21: mol_type = other RNA
cccataaagtagaaagcacta

SEQ ID NO: 12887 - RNA, 22 nt, Synthetic Construct
  source 1..22: mol_type = other RNA
tccttcattccaccggagtctg

SEQ ID NO: 12888 - RNA, 22 nt, Synthetic Construct
  source 1..22: mol_type = other RNA
tccttcattccaccggagtctg

SEQ ID NO: 12889 - RNA, 22 nt, Synthetic Construct
  source 1..22: mol_type = other RNA
tgaggtggtagattgtatagtt

SEQ ID NO: 12890 - RNA, 22 nt, Synthetic Construct
  source 1..22: mol_type = other RNA
tgaggtggtagattgtatagtt

SEQ ID NO: 12891 - RNA, 22 nt, Synthetic Construct
  source 1..22: mol_type = other RNA
gcagtagtctgcacattggtta

SEQ ID NO: 12892 - RNA, 32 nt, Synthetic Construct; identical to SEQ ID NO: 5582
  source 1..32: mol_type = other RNA

SEQ ID NO: 12893 - RNA, 32 nt, Synthetic Construct; identical to SEQ ID NO: 5582
  source 1..32: mol_type = other RNA

SEQ ID NO: 12894 - RNA, 22 nt, Synthetic Construct
  source 1..22: mol_type = other RNA
tgaggtagtgggttgtgtggtt

SEQ ID NO: 12895 - RNA, 22 nt, Synthetic Construct
  source 1..22: mol_type = other RNA
tgaggtagtgggttgtgtggtt

SEQ ID NO: 12896 - RNA, 19 nt, Synthetic Construct
  source 1..19: mol_type = other RNA
cccttgtcattagttgcta

SEQ ID NO: 12897 - RNA, 19 nt, Synthetic Construct
  source 1..19: mol_type = other RNA
cccttgtcattagttgcta

SEQ ID NO: 12898 - RNA, 32 nt, Synthetic Construct; identical to SEQ ID NO: 5582
  source 1..32: mol_type = other RNA

SEQ ID NO: 12899 - RNA, 32 nt, Synthetic Construct; identical to SEQ ID NO: 5582
  source 1..32: mol_type = other RNA

SEQ ID NO: 12900 - RNA, 22 nt, Synthetic Construct
  source 1..22: mol_type = other RNA
tattgcacttgtcctggcctgt

SEQ ID NO: 12901 - RNA, 22 nt, Synthetic Construct
  source 1..22: mol_type = other RNA
tattgcacttgtcctggcctgt

SEQ ID NO: 12902 - RNA, 17 nt, Synthetic Construct
  source 1..17: mol_type = other RNA
gcgtagatatgcggagg

SEQ ID NO: 12903 - RNA, 28 nt, Synthetic Construct
  source 1..28: mol_type = other RNA
ccccccaccgctaaatttgactggcttt

SEQ ID NO: 12904 - RNA, 22 nt, Synthetic Construct
  source 1..22: mol_type = other RNA
tgaggtagtaggttgtgcggtt

SEQ ID NO: 12905 - RNA, 22 nt, Synthetic Construct
  source 1..22: mol_type = other RNA
tgaggtagtaggttgtgcggtt

SEQ ID NO: 12906 - RNA, 23 nt, Synthetic Construct
  source 1..23: mol_type = other RNA
tcctgtactgagctgccccgggt

SEQ ID NO: 12907 - RNA, 23 nt, Synthetic Construct
  source 1..23: mol_type = other RNA
tcctgtactgagctgccccgggt

SEQ ID NO: 12908 - RNA, 24 nt, Synthetic Construct
  source 1..24: mol_type = other RNA
ggctacattgtctgctgggtttct

SEQ ID NO: 12909 - RNA, 21 nt, Synthetic Construct
  source 1..21: mol_type = other RNA
cattattacttttggtacgcg

SEQ ID NO: 12910 - RNA, 21 nt, Synthetic Construct
  source 1..21: mol_type = other RNA
cattattacttttggtacgcg

SEQ ID NO: 12911 - RNA, 31 nt, Synthetic Construct; identical to SEQ ID NO: 2310
  source 1..31: mol_type = other RNA

SEQ ID NO: 12912 - RNA, 22 nt, Synthetic Construct
  source 1..22: mol_type = other RNA
tgaggtggtagattgtatagtt

SEQ ID NO: 12913 - RNA, 22 nt, Synthetic Construct
  source 1..22: mol_type = other RNA
tgaggtggtagattgtatagtt

SEQ ID NO: 12914 - RNA, 17 nt, Synthetic Construct
  source 1..17: mol_type = other RNA
gggtctgtagctcagtc

SEQ ID NO: 12915 - RNA, 17 nt, Synthetic Construct
  source 1..17: mol_type = other RNA
gggtctgtagctcagtc

SEQ ID NO: 12916 - RNA, 32 nt, Synthetic Construct; identical to SEQ ID NO: 2467
  source 1..32: mol_type = other RNA

SEQ ID NO: 12917 - RNA, 32 nt, Synthetic Construct; identical to SEQ ID NO: 2467
  source 1..32: mol_type = other RNA

SEQ ID NO: 12918 - RNA, 36 nt, Synthetic Construct; identical to SEQ ID NO: 2478
  source 1..36: mol_type = other RNA

SEQ ID NO: 12919 - RNA, 23 nt, Synthetic Construct
  source 1..23: mol_type = other RNA
tggtaatacgacgtacttaatgt

SEQ ID NO: 12920 - RNA, 23 nt, Synthetic Construct
  source 1..23: mol_type = other RNA
tggtaatacgacgtacttaatgt

SEQ ID NO: 12921 - RNA, 23 nt, Synthetic Construct
  source 1..23: mol_type = other RNA
agcagcgttgtacagggctatga

SEQ ID NO: 12922 - RNA, 15 nt, Synthetic Construct
  source 1..15: mol_type = other RNA
gcagagcgtcggtct

SEQ ID NO: 12923 - RNA, 15 nt, Synthetic Construct
  source 1..15: mol_type = other RNA
gcagagcgtcggtct

SEQ ID NO: 12924 - RNA, 21 nt, Synthetic Construct
  source 1..21: mol_type = other RNA
taactccttagcgaatctcgc

SEQ ID NO: 12925 - RNA, 21 nt, Synthetic Construct
  source 1..21: mol_type = other RNA
taactccttagcgaatctcgc

SEQ ID NO: 12926 - RNA, 34 nt, Synthetic Construct; identical to SEQ ID NO: 2364
  source 1..34: mol_type = other RNA

SEQ ID NO: 12927 - RNA, 21 nt, Synthetic Construct
  source 1..21: mol_type = other RNA
cgaggtagtaggttgtatagt

SEQ ID NO: 12928 - RNA, 21 nt, Synthetic Construct
  source 1..21: mol_type = other RNA
cgaggtagtaggttgtatagt

SEQ ID NO: 12929 - RNA, 34 nt, Synthetic Construct; identical to SEQ ID NO: 2298
  source 1..34: mol_type = other RNA

SEQ ID NO: 12930 - RNA, 24 nt, Synthetic Construct
  source 1..24: mol_type = other RNA
tgtaaacatccccgactggaagcc

SEQ ID NO: 12931 - RNA, 24 nt, Synthetic Construct
  source 1..24: mol_type = other RNA
tgtaaacatccccgactggaagcc

SEQ ID NO: 12932 - RNA, 26 nt, Synthetic Construct
  source 1..26: mol_type = other RNA
ttaagtgacgatagcctaggagatac

SEQ ID NO: 12933 - RNA, 26 nt, Synthetic Construct
  source 1..26: mol_type = other RNA
ttaagtgacgatagcctaggagatac

SEQ ID NO: 12934 - RNA, 22 nt, Synthetic Construct
  source 1..22: mol_type = other RNA
tgggatgtaaagaagtatgtat

SEQ ID NO: 12935 - RNA, 22 nt, Synthetic Construct
  source 1..22: mol_type = other RNA
tgaggtagtaggttgaatagtt

SEQ ID NO: 12936 - RNA, 18 nt, Synthetic Construct
  source 1..18: mol_type = other RNA
ggtagcgtggccgagtgg

SEQ ID NO: 12937 - RNA, 18 nt, Synthetic Construct
  source 1..18: mol_type = other RNA
ggtagcgtggccgagtgg

SEQ ID NO: 12938 - RNA, 26 nt, Synthetic Construct
  source 1..26: mol_type = other RNA
gactcttagcggtggatcactcggct

SEQ ID NO: 12939 - RNA, 26 nt, Synthetic Construct
  source 1..26: mol_type = other RNA
gactcttagcggtggatcactcggct

SEQ ID NO: 12940 - RNA, 22 nt, Synthetic Construct
  source 1..22: mol_type = other RNA
tgaggtagtaggttgtatagtc

SEQ ID NO: 12941 - RNA, 23 nt, Synthetic Construct
  source 1..23: mol_type = other RNA
gtgaggtagtaggttgtatagtt

SEQ ID NO: 12942 - RNA, 23 nt, Synthetic Construct
  source 1..23: mol_type = other RNA
gtgaggtagtaggttgtatagtt

SEQ ID NO: 12943 - RNA, 21 nt, Synthetic Construct
  source 1..21: mol_type = other RNA
cccaatacacggtcgacctct

SEQ ID NO: 12944 - RNA, 21 nt, Synthetic Construct
  source 1..21: mol_type = other RNA
cccaatacacggtcgacctct

SEQ ID NO: 12945 - RNA, 16 nt, Synthetic Construct
  source 1..16: mol_type = other RNA
ctcagtagctcgagga

SEQ ID NO: 12946 - RNA, 21 nt, Synthetic Construct
  source 1..21: mol_type = other RNA
gtgggcgtttgaagtgaagtg

SEQ ID NO: 12947 - RNA, 21 nt, Synthetic Construct
  source 1..21: mol_type = other RNA
gtgggcgtttgaagtgaagtg

SEQ ID NO: 12948 - RNA, 35 nt, Synthetic Construct
  source 1..35: mol_type = other RNA
ggccgtgatcgtatagtggttagtactctgcgttg

SEQ ID NO: 12949 - RNA, 35 nt, Synthetic Construct; identical to SEQ ID NO: 12948
  source 1..35: mol_type = other RNA

SEQ ID NO: 12950 - RNA, 20 nt, Synthetic Construct
  source 1..20: mol_type = other RNA
ctctaatgagactgccggtg

SEQ ID NO: 12951 - RNA, 22 nt, Synthetic Construct
  source 1..22: mol_type = other RNA
tactgcacttgtcccggcctgt

SEQ ID NO: 12952 - RNA, 22 nt, Synthetic Construct
  source 1..22: mol_type = other RNA
tactgcacttgtcccggcctgt

SEQ ID NO: 12953 - RNA, 21 nt, Synthetic Construct
  source 1..21: mol_type = other RNA
ctagaccgaagctccttgagg

SEQ ID NO: 12954 - RNA, 17 nt, Synthetic Construct
  source 1..17: mol_type = other RNA
aggaattgacggaaggg

SEQ ID NO: 12955 - RNA, 17 nt, Synthetic Construct
  source 1..17: mol_type = other RNA
aggaattgacggaaggg

SEQ ID NO: 12956 - RNA, 20 nt, Synthetic Construct
  source 1..20: mol_type = other RNA
aaaagctgggttgagaggga

SEQ ID NO: 12957 - RNA, 20 nt, Synthetic Construct
  source 1..20: mol_type = other RNA
aaaagctgggttgagaggga

SEQ ID NO: 12958 - RNA, 21 nt, Synthetic Construct
  source 1..21: mol_type = other RNA
tagtagaccgtatagcgtacg

SEQ ID NO: 12959 - RNA, 22 nt, Synthetic Construct
  source 1..22: mol_type = other RNA
tggaatgtaaagaagtatgtac

SEQ ID NO: 12960 - RNA, 21 nt, Synthetic Construct
  source 1..21: mol_type = other RNA
gtcagtttgtcaaatacccca

SEQ ID NO: 12961 - RNA, 21 nt, Synthetic Construct
  source 1..21: mol_type = other RNA
gtcagtttgtcaaatacccca

SEQ ID NO: 12962 - RNA, 25 nt, Synthetic Construct
  source 1..25: mol_type = other RNA
aaaagctgggttgagagggcgaatt

SEQ ID NO: 12963 - RNA, 25 nt, Synthetic Construct
  source 1..25: mol_type = other RNA
aaaagctgggttgagagggcgaatt

SEQ ID NO: 12964 - RNA, 25 nt, Synthetic Construct
  source 1..25: mol_type = other RNA
gggttgtaaaccgcttttgtcaggg

SEQ ID NO: 12965 - RNA, 25 nt, Synthetic Construct
  source 1..25: mol_type = other RNA
gggttgtaaaccgcttttgtcaggg

SEQ ID NO: 12966 - RNA, 33 nt, Synthetic Construct; identical to SEQ ID NO: 2395
  source 1..33: mol_type = other RNA

SEQ ID NO: 12967 - RNA, 16 nt, Synthetic Construct
  source 1..16: mol_type = other RNA
gtctacggccatacaa

SEQ ID NO: 12968 - RNA, 16 nt, Synthetic Construct
  source 1..16: mol_type = other RNA
gtctacggccatacaa

SEQ ID NO: 12969 - RNA, 23 nt, Synthetic Construct
  source 1..23: mol_type = other RNA
tggtaatacggcgtacttagtgt

SEQ ID NO: 12970 - RNA, 23 nt, Synthetic Construct
  source 1..23: mol_type = other RNA
tggtaatacggcgtacttagtgt

SEQ ID NO: 12971 - RNA, 21 nt, Synthetic Construct
  source 1..21: mol_type = other RNA
tggagtgtgacaatggtgttc

SEQ ID NO: 12972 - RNA, 21 nt, Synthetic Construct
  source 1..21: mol_type = other RNA
tgaggtggtagattgtatagt

SEQ ID NO: 12973 - RNA, 21 nt, Synthetic Construct
  source 1..21: mol_type = other RNA
tgaggtggtagattgtatagt

SEQ ID NO: 12974 - RNA, 35 nt, Synthetic Construct; identical to SEQ ID NO: 2514
  source 1..35: mol_type = other RNA

SEQ ID NO: 12975 - RNA, 23 nt, Synthetic Construct
  source 1..23: mol_type = other RNA
tcctgtactgagccgccccgaga

SEQ ID NO: 12976 - RNA, 23 nt, Synthetic Construct
  source 1..23: mol_type = other RNA
tcctgtactgagccgccccgaga

SEQ ID NO: 12977 - RNA, 23 nt, Synthetic Construct
  source 1..23: mol_type = other RNA
tgaggtagtaggtcgtgtggttt

SEQ ID NO: 12978 - RNA, 23 nt, Synthetic Construct
  source 1..23: mol_type = other RNA
actcggcgtggcgtcggtcgtgg

SEQ ID NO: 12979 - RNA, 23 nt, Synthetic Construct
  source 1..23: mol_type = other RNA
actcggcgtggcgtcggtcgtgg

SEQ ID NO: 12980 - RNA, 25 nt, Synthetic Construct
  source 1..25: mol_type = other RNA
tgtaaacatccccgactggaagctt

SEQ ID NO: 12981 - RNA, 25 nt, Synthetic Construct
  source 1..25: mol_type = other RNA
tgtaaacatccccgactggaagctt

SEQ ID NO: 12982 - RNA, 22 nt, Synthetic Construct
  source 1..22: mol_type = other RNA
tgaggtagaagtttgtgctgtt

SEQ ID NO: 12983 - RNA, 22 nt, Synthetic Construct
  source 1..22: mol_type = other RNA
tgaggtagaagtttgtgctgtt

SEQ ID NO: 12984 - RNA, 21 nt, Synthetic Construct
  source 1..21: mol_type = other RNA
cacgtcatacaatggccggga

SEQ ID NO: 12985 - RNA, 23 nt, Synthetic Construct
  source 1..23: mol_type = other RNA
taaggtgcatctagtgcagatag

SEQ ID NO: 12986 - RNA, 23 nt, Synthetic Construct
  source 1..23: mol_type = other RNA
taaagtgctgttcgtgcaggtag

SEQ ID NO: 12987 - RNA, 22 nt, Synthetic Construct
  source 1..22: mol_type = other RNA
tgaggtagtaggttgtagagtt

SEQ ID NO: 12988 - RNA, 22 nt, Synthetic Construct
  source 1..22: mol_type = other RNA
tgaggtagtagattgtatagct

SEQ ID NO: 12989 - RNA, 22 nt, Synthetic Construct
  source 1..22: mol_type = other RNA
tgaggtagtagattgtatagct

SEQ ID NO: 12990 - RNA, 21 nt, Synthetic Construct
  source 1..21: mol_type = other RNA
tgtcccacccccactcctgtt

SEQ ID NO: 12991 - RNA, 21 nt, Synthetic Construct
  source 1..21: mol_type = other RNA
tgtcccacccccactcctgtt

SEQ ID NO: 12992 - RNA, 22 nt, Synthetic Construct
  source 1..22: mol_type = other RNA
tgaggtagtaggttgtgtggta

SEQ ID NO: 12993 - RNA, 22 nt, Synthetic Construct
  source 1..22: mol_type = other RNA
tgaggtagtaggttgtgtggta

SEQ ID NO: 12994 - RNA, 22 nt, Synthetic Construct
  source 1..22: mol_type = other RNA
ncctgtactgagctgccccgag

SEQ ID NO: 12995 - RNA, 20 nt, Synthetic Construct
  source 1..20: mol_type = other RNA
tccctgtcctccaggagctc

SEQ ID NO: 12996 - RNA, 22 nt, Synthetic Construct
  source 1..22: mol_type = other RNA
tgaggtagtaggatgtgtggtt

SEQ ID NO: 12997 - RNA, 21 nt, Synthetic Construct
  source 1..21: mol_type = other RNA
cgaggtagtagtttgtgctgt

SEQ ID NO: 12998 - RNA, 21 nt, Synthetic Construct
  source 1..21: mol_type = other RNA
cgaggtagtagtttgtgctgt

SEQ ID NO: 12999 - RNA, 16 nt, Synthetic Construct
  source 1..16: mol_type = other RNA
gggtctgtagctcagt

SEQ ID NO: 13000 - RNA, 16 nt, Synthetic Construct
  source 1..16: mol_type = other RNA
gggtctgtagctcagt

SEQ ID NO: 13001 - RNA, 24 nt, Synthetic Construct
  source 1..24: mol_type = other RNA
tctcacacagaaatcgcacccgtt

SEQ ID NO: 13002 - RNA, 22 nt, Synthetic Construct
  source 1..22: mol_type = other RNA
gtcatacacggctctcctctct

SEQ ID NO: 13003 - RNA, 22 nt, Synthetic Construct
  source 1..22: mol_type = other RNA
gtcatacacggctctcctctct

SEQ ID NO: 13004 - RNA, 30 nt, Synthetic Construct; identical to SEQ ID NO: 768
  source 1..30: mol_type = other RNA

SEQ ID NO: 13005 - RNA, 30 nt, Synthetic Construct; identical to SEQ ID NO: 768
  source 1..30: mol_type = other RNA

SEQ ID NO: 13006 - RNA, 23 nt, Synthetic Construct
  source 1..23: mol_type = other RNA
tagtgcaatattgcttatagggt

SEQ ID NO: 13007 - RNA, 27 nt, Synthetic Construct
  source 1..27: mol_type = other RNA
ncccccactgctaaatttgactggctt

SEQ ID NO: 13008 - RNA, 27 nt, Synthetic Construct
  source 1..27: mol_type = other RNA
ncccccactgctaaatttgactggctt

SEQ ID NO: 13009 - RNA, 18 nt, Synthetic Construct
  source 1..18: mol_type = other RNA
gctgtgatggccgagtgg

SEQ ID NO: 13010 - RNA, 18 nt, Synthetic Construct
  source 1..18: mol_type = other RNA
gctgtgatggccgagtgg

SEQ ID NO: 13011 - RNA, 22 nt, Synthetic Construct
  source 1..22: mol_type = other RNA
attgcacttgtcccggcctgtt

SEQ ID NO: 13012 - RNA, 22 nt, Synthetic Construct
  source 1..22: mol_type = other RNA
tgaggtagtaggttgtatagtc

SEQ ID NO: 13013 - RNA, 22 nt, Synthetic Construct
  source 1..22: mol_type = other RNA
tgaggtagtaggttgtatagtc

SEQ ID NO: 13014 - RNA, 16 nt, Synthetic Construct
  source 1..16: mol_type = other RNA
gtcaacggccatacca

SEQ ID NO: 13015 - RNA, 21 nt, Synthetic Construct
  source 1..21: mol_type = other RNA
tgaggtagtaggttgcgtggt

SEQ ID NO: 13016 - RNA, 21 nt, Synthetic Construct
  source 1..21: mol_type = other RNA
tgaggtagtaggttgcgtggt

SEQ ID NO: 13017 - RNA, 23 nt, Synthetic Construct
  source 1..23: mol_type = other RNA
aaaagctgggttgagagggcgtt

SEQ ID NO: 13018 - RNA, 23 nt, Synthetic Construct
  source 1..23: mol_type = other RNA
aaaagctgggttgagagggcgtt

SEQ ID NO: 13019 - RNA, 27 nt, Synthetic Construct
  source 1..27: mol_type = other RNA
ccccccacagctaaatttgactggctt

SEQ ID NO: 13020 - RNA, 22 nt, Synthetic Construct
  source 1..22: mol_type = other RNA
ccagtgcactacagaactttgt

SEQ ID NO: 13021 - RNA, 19 nt, Synthetic Construct
  source 1..19: mol_type = other RNA
agctacattgtctgctggg

SEQ ID NO: 13022 - RNA, 22 nt, Synthetic Construct
  source 1..22: mol_type = other RNA
tgaggtagtagattgtacagtt

SEQ ID NO: 13023 - RNA, 22 nt, Synthetic Construct
  source 1..22: mol_type = other RNA
tcgtaccgtgagcaataatgcg

SEQ ID NO: 13024 - RNA, 22 nt, Synthetic Construct
  source 1..22: mol_type = other RNA
tgaggtagaagtttgtgctgtt

SEQ ID NO: 13025 - RNA, 21 nt, Synthetic Construct
  source 1..21: mol_type = other RNA
caaagtgctgttcgtgcaggt

SEQ ID NO: 13026 - RNA, 21 nt, Synthetic Construct
  source 1..21: mol_type = other RNA
caaagtgctgttcgtgcaggt

SEQ ID NO: 13027 - RNA, 21 nt, Synthetic Construct
  source 1..21: mol_type = other RNA
tggggtagtagattgtatagt

SEQ ID NO: 13028 - RNA, 21 nt, Synthetic Construct
  source 1..21: mol_type = other RNA
tggggtagtagattgtatagt

SEQ ID NO: 13029 - RNA, 23 nt, Synthetic Construct
  source 1..23: mol_type = other RNA
ggaggggcagagagcgagacttt

SEQ ID NO: 13030 - RNA, 23 nt, Synthetic Construct
  source 1..23: mol_type = other RNA
ggaggggcagagagcgagacttt

SEQ ID NO: 13031 - RNA, 21 nt, Synthetic Construct
  source 1..21: mol_type = other RNA
tgaggggcagagagcgaggct

SEQ ID NO: 13032 - RNA, 21 nt, Synthetic Construct
  source 1..21: mol_type = other RNA
tgaggggcagagagcgaggct

SEQ ID NO: 13033 - RNA, 23 nt, Synthetic Construct
  source 1..23: mol_type = other RNA
attctaatttctccacgtctttg

SEQ ID NO: 13034 - RNA, 20 nt, Synthetic Construct
  source 1..20: mol_type = other RNA
cacccgtagaaccgaccttg

SEQ ID NO: 13035 - RNA, 20 nt, Synthetic Construct
  source 1..20: mol_type = other RNA
cacccgtagaaccgaccttg

SEQ ID NO: 13036 - RNA, 27 nt, Synthetic Construct
  source 1..27: mol_type = other RNA
ccccccactgctaaatttgacaggctt

SEQ ID NO: 13037 - RNA, 22 nt, Synthetic Construct
  source 1..22: mol_type = other RNA
tcagcgccgatgatagtgcgga

SEQ ID NO: 13038 - RNA, 24 nt, Synthetic Construct
  source 1..24: mol_type = other RNA
atcacattgccagggatttccaat

SEQ ID NO: 13039 - RNA, 24 nt, Synthetic Construct
  source 1..24: mol_type = other RNA
atcacattgccagggatttccaat

SEQ ID NO: 13040 - RNA, 25 nt, Synthetic Construct
  source 1..25: mol_type = other RNA
gtgaggatatgagatcgagacgaca

SEQ ID NO: 13041 - RNA, 25 nt, Synthetic Construct
  source 1..25: mol_type = other RNA
cctcgcgcgattggagcggccgata

SEQ ID NO: 13042 - RNA, 22 nt, Synthetic Construct
  source 1..22: mol_type = other RNA
cggaatcgctagtaatcgcgga

SEQ ID NO: 13043 - RNA, 22 nt, Synthetic Construct
  source 1..22: mol_type = other RNA
cggaatcgctagtaatcgcgga

SEQ ID NO: 13044 - RNA, 23 nt, Synthetic Construct
  source 1..23: mol_type = other RNA
tggtaatacgacatacttagtgt

SEQ ID NO: 13045 - RNA, 23 nt, Synthetic Construct
  source 1..23: mol_type = other RNA
caaggtgctgttcgtgcaggtag

SEQ ID NO: 13046 - RNA, 23 nt, Synthetic Construct
  source 1..23: mol_type = other RNA
caaggtgctgttcgtgcaggtag

SEQ ID NO: 13047 - RNA, 23 nt, Synthetic Construct
  source 1..23: mol_type = other RNA
tgaggtagtagtttgtgctgtta

SEQ ID NO: 13048 - RNA, 30 nt, Synthetic Construct; identical to SEQ ID NO: 1236
  source 1..30: mol_type = other RNA

SEQ ID NO: 13049 - RNA, 30 nt, Synthetic Construct; identical to SEQ ID NO: 1236
  source 1..30: mol_type = other RNA

SEQ ID NO: 13050 - RNA, 23 nt, Synthetic Construct
  source 1..23: mol_type = other RNA
tctcccaacccttgtaccagtgt

SEQ ID NO: 13051 - RNA, 23 nt, Synthetic Construct
  source 1..23: mol_type = other RNA
tctcccaacccttgtaccagtgt

SEQ ID NO: 13052 - RNA, 22 nt, Synthetic Construct
  source 1..22: mol_type = other RNA
tgaggtagtagatcgtatagtt

SEQ ID NO: 13053 - RNA, 22 nt, Synthetic Construct
  source 1..22: mol_type = other RNA
tgaggtagtagatcgtatagtt

SEQ ID NO: 13054 - RNA, 22 nt, Synthetic Construct
  source 1..22: mol_type = other RNA
tatagcacttgtcccggcctgt

SEQ ID NO: 13055 - RNA, 22 nt, Synthetic Construct
  source 1..22: mol_type = other RNA
tatagcacttgtcccggcctgt

SEQ ID NO: 13056 - RNA, 22 nt, Synthetic Construct
  source 1..22: mol_type = other RNA
tgaggtagtagggtgtatagtt

SEQ ID NO: 13057 - RNA, 17 nt, Synthetic Construct
  source 1..17: mol_type = other RNA
gggataactggcttgtg

SEQ ID NO: 13058 - RNA, 17 nt, Synthetic Construct
  source 1..17: mol_type = other RNA
gggataactggcttgtg

SEQ ID NO: 13059 - RNA, 24 nt, Synthetic Construct
  source 1..24: mol_type = other RNA
tgtaaacgtccccgactggaagct

SEQ ID NO: 13060 - RNA, 24 nt, Synthetic Construct
  source 1..24: mol_type = other RNA
tgtaaacgtccccgactggaagct

SEQ ID NO: 13061 - RNA, 21 nt, Synthetic Construct
  source 1..21: mol_type = other RNA
tcctgtactgggctgccccga

SEQ ID NO: 13062 - RNA, 21 nt, Synthetic Construct
  source 1..21: mol_type = other RNA
tcctgtactgggctgccccga

SEQ ID NO: 13063 - RNA, 23 nt, Synthetic Construct
  source 1..23: mol_type = other RNA
tcctgtaccgagctgccccgaga

SEQ ID NO: 13064 - RNA, 23 nt, Synthetic Construct
  source 1..23: mol_type = other RNA
tcctgtaccgagctgccccgaga

SEQ ID NO: 13065 - RNA, 23 nt, Synthetic Construct
  source 1..23: mol_type = other RNA
caaagtgctgttcgcgcaggtag

SEQ ID NO: 13066 - RNA, 23 nt, Synthetic Construct
  source 1..23: mol_type = other RNA
caaagtgctgttcgcgcaggtag

SEQ ID NO: 13067 - RNA, 15 nt, Synthetic Construct
  source 1..15: mol_type = other RNA
gtcaggatgttggct

SEQ ID NO: 13068 - RNA, 18 nt, Synthetic Construct
  source 1..18: mol_type = other RNA
cctgaagaataagcaccg

SEQ ID NO: 13069 - RNA, 22 nt, Synthetic Construct
  source 1..22: mol_type = other RNA
tgaagtagtaggttgtgtggtt

SEQ ID NO: 13070 - RNA, 22 nt, Synthetic Construct
  source 1..22: mol_type = other RNA
taactccttaagcgaatctcgc

SEQ ID NO: 13071 - RNA, 22 nt, Synthetic Construct
  source 1..22: mol_type = other RNA
taactccttaagcgaatctcgc

SEQ ID NO: 13072 - RNA, 18 nt, Synthetic Construct
  source 1..18: mol_type = other RNA
gttcgattccggagaggg

SEQ ID NO: 13073 - RNA, 18 nt, Synthetic Construct
  source 1..18: mol_type = other RNA
gttcgattccggagaggg

SEQ ID NO: 13074 - RNA, 22 nt, Synthetic Construct
  source 1..22: mol_type = other RNA
tcgtaccgcgagtaataatgcg

SEQ ID NO: 13075 - RNA, 22 nt, Synthetic Construct
  source 1..22: mol_type = other RNA
tcgtaccgcgagtaataatgcg

SEQ ID NO: 13076 - RNA, 31 nt, Synthetic Construct; identical to SEQ ID NO: 2507
  source 1..31: mol_type = other RNA

SEQ ID NO: 13077 - RNA, 31 nt, Synthetic Construct; identical to SEQ ID NO: 2507
  source 1..31: mol_type = other RNA

SEQ ID NO: 13078 - RNA, 34 nt, Synthetic Construct; identical to SEQ ID NO: 2553
  source 1..34: mol_type = other RNA

SEQ ID NO: 13079 - RNA, 34 nt, Synthetic Construct; identical to SEQ ID NO: 2553
  source 1..34: mol_type = other RNA

SEQ ID NO: 13080 - RNA, 21 nt, Synthetic Construct
  source 1..21: mol_type = other RNA
tgaggggcggagagcgagact

SEQ ID NO: 13081 - RNA, 21 nt, Synthetic Construct
  source 1..21: mol_type = other RNA
tgaggggcggagagcgagact

SEQ ID NO: 13082 - RNA, 22 nt, Synthetic Construct
  source 1..22: mol_type = other RNA
tgaggtagtaggttgtgtagtt

SEQ ID NO: 13083 - RNA, 22 nt, Synthetic Construct
  source 1..22: mol_type = other RNA
tgaggtagtaggttgtgtagtt

SEQ ID NO: 13084 - RNA, 21 nt, Synthetic Construct
  source 1..21: mol_type = other RNA
cggtcccaagggtatggctgt

SEQ ID NO: 13085 - RNA, 23 nt, Synthetic Construct
  source 1..23: mol_type = other RNA
ttatggtttgcctgggactgagg

SEQ ID NO: 13086 - RNA, 22 nt, Synthetic Construct
  source 1..22: mol_type = other RNA
ttcaggtaatccaggataggct

SEQ ID NO: 13087 - RNA, 23 nt, Synthetic Construct
  source 1..23: mol_type = other RNA
tacagtagtctgcacattggttt

SEQ ID NO: 13088 - RNA, 22 nt, Synthetic Construct
  source 1..22: mol_type = other RNA
tgaggtagtaggttgcatagtt

SEQ ID NO: 13089 - RNA, 22 nt, Synthetic Construct
  source 1..22: mol_type = other RNA
tgaggtagtaggttgcatagtt

SEQ ID NO: 13090 - RNA, 17 nt, Synthetic Construct
  source 1..17: mol_type = other RNA
atgcaagtcgaacggta

SEQ ID NO: 13091 - RNA, 17 nt, Synthetic Construct
  source 1..17: mol_type = other RNA
atgcaagtcgaacggta

SEQ ID NO: 13092 - RNA, 22 nt, Synthetic Construct
  source 1..22: mol_type = other RNA
caaagtgctgttcgtgcaggta

SEQ ID NO: 13093 - RNA, 21 nt, Synthetic Construct
  source 1..21: mol_type = other RNA
tgaggtagtaggttgcgtggt

SEQ ID NO: 13094 - RNA, 21 nt, Synthetic Construct
  source 1..21: mol_type = other RNA
tgaggtagtaggttgcgtggt

SEQ ID NO: 13095 - RNA, 23 nt, Synthetic Construct
  source 1..23: mol_type = other RNA
tcccgtactgagctgccccgagt

SEQ ID NO: 13096 - RNA, 23 nt, Synthetic Construct
  source 1..23: mol_type = other RNA
tcccgtactgagctgccccgagt

SEQ ID NO: 13097 - RNA, 21 nt, Synthetic Construct
  source 1..21: mol_type = other RNA
aacggaatcccaaaagcagct

SEQ ID NO: 13098 - RNA, 22 nt, Synthetic Construct
  source 1..22: mol_type = other RNA
tctctcggctcctcgcggctct

SEQ ID NO: 13099 - RNA, 19 nt, Synthetic Construct
  source 1..19: mol_type = other RNA
gttctacagtccgacgatc

SEQ ID NO: 13100 - RNA, 19 nt, Synthetic Construct
  source 1..19: mol_type = other RNA
gttctacagtccgacgatc

SEQ ID NO: 13101 - RNA, 18 nt, Synthetic Construct
  source 1..18: mol_type = other RNA
ccagtaaacggcggccgt

SEQ ID NO: 13102 - RNA, 24 nt, Synthetic Construct
  source 1..24: mol_type = other RNA
gctcactgatcgagtcgtcctgcg

SEQ ID NO: 13103 - RNA, 23 nt, Synthetic Construct
  source 1..23: mol_type = other RNA
aatgacacgatcactcccgttgt

SEQ ID NO: 13104 - RNA, 23 nt, Synthetic Construct
  source 1..23: mol_type = other RNA
aatgacacgatcactcccgttgt

SEQ ID NO: 13105 - RNA, 27 nt, Synthetic Construct
  source 1..27: mol_type = other RNA
ccccccgctgctaaatttgactggctt

SEQ ID NO: 13106 - RNA, 27 nt, Synthetic Construct
  source 1..27: mol_type = other RNA
ccccccgctgctaaatttgactggctt

SEQ ID NO: 13107 - RNA, 35 nt, Synthetic Construct; identical to SEQ ID NO: 737
  source 1..35: mol_type = other RNA

SEQ ID NO: 13108 - RNA, 35 nt, Synthetic Construct; identical to SEQ ID NO: 737
  source 1..35: mol_type = other RNA

SEQ ID NO: 13109 - RNA, 23 nt, Synthetic Construct
  source 1..23: mol_type = other RNA
tgaggtagtagattgtatagttc

SEQ ID NO: 13110 - RNA, 23 nt, Synthetic Construct
  source 1..23: mol_type = other RNA
tgaggtagtagattgtatagttc

SEQ ID NO: 13111 - RNA, 16 nt, Synthetic Construct
  source 1..16: mol_type = other RNA
cgctagtaatcgcgga

SEQ ID NO: 13112 - RNA, 16 nt, Synthetic Construct
  source 1..16: mol_type = other RNA
cgctagtaatcgcgga

SEQ ID NO: 13113 - RNA, 22 nt, Synthetic Construct
  source 1..22: mol_type = other RNA
tcaggctcagtcccctcccgat

SEQ ID NO: 13114 - RNA, 22 nt, Synthetic Construct
  source 1..22: mol_type = other RNA
tcaggctcagtcccctcccgat

SEQ ID NO: 13115 - RNA, 21 nt, Synthetic Construct
  source 1..21: mol_type = other RNA
tcctgtacagagctgccccga

SEQ ID NO: 13116 - RNA, 21 nt, Synthetic Construct
  source 1..21: mol_type = other RNA
tcctgtacagagctgccccga

SEQ ID NO: 13117 - RNA, 16 nt, Synthetic Construct
  source 1..16: mol_type = other RNA
gtctacggccatacta

SEQ ID NO: 13118 - RNA, 16 nt, Synthetic Construct
  source 1..16: mol_type = other RNA
gtctacggccatacta

SEQ ID NO: 13119 - RNA, 28 nt, Synthetic Construct
  source 1..28: mol_type = other RNA
tgttggttcaagcgtgtagtcgtgctct

SEQ ID NO: 13120 - RNA, 23 nt, Synthetic Construct
  source 1..23: mol_type = other RNA
caaagtgctgttcgtgcaggtgg

SEQ ID NO: 13121 - RNA, 20 nt, Synthetic Construct
  source 1..20: mol_type = other RNA
tgaggtaggaggttgtatag

SEQ ID NO: 13122 - RNA, 18 nt, Synthetic Construct
  source 1..18: mol_type = other RNA
gtcacggtggccgagtgg

SEQ ID NO: 13123 - RNA, 36 nt, Synthetic Construct; identical to SEQ ID NO: 744
  source 1..36: mol_type = other RNA

SEQ ID NO: 13124 - RNA, 36 nt, Synthetic Construct; identical to SEQ ID NO: 744
  source 1..36: mol_type = other RNA

SEQ ID NO: 13125 - RNA, 23 nt, Synthetic Construct
  source 1..23: mol_type = other RNA
tggtaatacgacgtacttggtgt

SEQ ID NO: 13126 - RNA, 27 nt, Synthetic Construct
  source 1..27: mol_type = other RNA
ccctccactgctaaatttgactggctt

SEQ ID NO: 13127 - RNA, 22 nt, Synthetic Construct
  source 1..22: mol_type = other RNA
tgggatgagggattgaagtgga

SEQ ID NO: 13128 - RNA, 35 nt, Synthetic Construct; identical to SEQ ID NO: 2615
  source 1..35: mol_type = other RNA

SEQ ID NO: 13129 - RNA, 23 nt, Synthetic Construct
  source 1..23: mol_type = other RNA
aggtaatacgacgtacttagtgt

SEQ ID NO: 13130 - RNA, 23 nt, Synthetic Construct
  source 1..23: mol_type = other RNA
aggtaatacgacgtacttagtgt

SEQ ID NO: 13131 - RNA, 25 nt, Synthetic Construct
  source 1..25: mol_type = other RNA
gagaaagctcacaagaactgctaac

SEQ ID NO: 13132 - RNA, 25 nt, Synthetic Construct
  source 1..25: mol_type = other RNA
gagaaagctcacaagaactgctaac

SEQ ID NO: 13133 - RNA, 20 nt, Synthetic Construct
  source 1..20: mol_type = other RNA
tggaatgtaaagaagtatgt

SEQ ID NO: 13134 - RNA, 20 nt, Synthetic Construct
  source 1..20: mol_type = other RNA
tggaatgtaaagaagtatgt

SEQ ID NO: 13135 - RNA, 19 nt, Synthetic Construct
  source 1..19: mol_type = other RNA
tcagtagctcgaggaaaag

SEQ ID NO: 13136 - RNA, 19 nt, Synthetic Construct
  source 1..19: mol_type = other RNA
tcagtagctcgaggaaaag

SEQ ID NO: 13137 - RNA, 22 nt, Synthetic Construct
  source 1..22: mol_type = other RNA
tgaggtagtagattgcatagtt

SEQ ID NO: 13138 - RNA, 22 nt, Synthetic Construct
  source 1..22: mol_type = other RNA
tgaggtagtagattgcatagtt

SEQ ID NO: 13139 - RNA, 22 nt, Synthetic Construct
  source 1..22: mol_type = other RNA
tgaggttgtagtttgtgctgtt

SEQ ID NO: 13140 - RNA, 23 nt, Synthetic Construct
  source 1..23: mol_type = other RNA
agctacattgtctgctgggttcc

SEQ ID NO: 13141 - RNA, 23 nt, Synthetic Construct
  source 1..23: mol_type = other RNA
agctacattgtctgctgggttcc

SEQ ID NO: 13142 - RNA, 30 nt, Synthetic Construct; identical to SEQ ID NO: 1236
  source 1..30: mol_type = other RNA

SEQ ID NO: 13143 - RNA, 30 nt, Synthetic Construct; identical to SEQ ID NO: 1236
  source 1..30: mol_type = other RNA

SEQ ID NO: 13144 - RNA, 24 nt, Synthetic Construct
  source 1..24: mol_type = other RNA
tctcacacagaaatcgcacccgtt

SEQ ID NO: 13145 - RNA, 15 nt, Synthetic Construct
  source 1..15: mol_type = other RNA
gcaagtcgaacggta

SEQ ID NO: 13146 - RNA, 15 nt, Synthetic Construct
  source 1..15: mol_type = other RNA
gcaagtcgaacggta

SEQ ID NO: 13147 - RNA, 21 nt, Synthetic Construct
  source 1..21: mol_type = other RNA
tgaggtagcaggttgtatagt

SEQ ID NO: 13148 - RNA, 20 nt, Synthetic Construct
  source 1..20: mol_type = other RNA
tgaggtagaaggttgtatag

SEQ ID NO: 13149 - RNA, 18 nt, Synthetic Construct
  source 1..18: mol_type = other RNA
gctgtgatggccgagtgg

SEQ ID NO: 13150 - RNA, 18 nt, Synthetic Construct
  source 1..18: mol_type = other RNA
gctgtgatggccgagtgg

SEQ ID NO: 13151 - RNA, 36 nt, Synthetic Construct; identical to SEQ ID NO: 2366
  source 1..36: mol_type = other RNA

SEQ ID NO: 13152 - RNA, 23 nt, Synthetic Construct
  source 1..23: mol_type = other RNA
ctggccctctctgcccttccgta

SEQ ID NO: 13153 - RNA, 23 nt, Synthetic Construct
  source 1..23: mol_type = other RNA
ctggccctctctgcccttccgta

SEQ ID NO: 13154 - RNA, 29 nt, Synthetic Construct
  source 1..29: mol_type = other RNA
gtgcatgcactctggggttgtgggacagc

SEQ ID NO: 13155 - RNA, 29 nt, Synthetic Construct
  source 1..29: mol_type = other RNA
gtgcatgcactctggggttgtgggacagc

SEQ ID NO: 13156 - RNA, 24 nt, Synthetic Construct
  source 1..24: mol_type = other RNA
ggctacattgtctgctgggtttct

SEQ ID NO: 13157 - RNA, 24 nt, Synthetic Construct
  source 1..24: mol_type = other RNA
ggctacattgtctgctgggtttct

SEQ ID NO: 13158 - RNA, 22 nt, Synthetic Construct
  source 1..22: mol_type = other RNA
tggaatgtaaaggagtatgtat

SEQ ID NO: 13159 - RNA, 24 nt, Synthetic Construct
  source 1..24: mol_type = other RNA
tgtaaacatccctgactggaagct

SEQ ID NO: 13160 - RNA, 24 nt, Synthetic Construct
  source 1..24: mol_type = other RNA
tgtaaacatccctgactggaagct

SEQ ID NO: 13161 - RNA, 34 nt, Synthetic Construct; identical to SEQ ID NO: 2291
  source 1..34: mol_type = other RNA

SEQ ID NO: 13162 - RNA, 34 nt, Synthetic Construct; identical to SEQ ID NO: 2291
  source 1..34: mol_type = other RNA

SEQ ID NO: 13163 - RNA, 23 nt, Synthetic Construct
  source 1..23: mol_type = other RNA
ctcgtaccgtgagtaataatgcg

SEQ ID NO: 13164 - RNA, 22 nt, Synthetic Construct
  source 1..22: mol_type = other RNA
tattgcacttgtctcggcctgt

SEQ ID NO: 13165 - RNA, 22 nt, Synthetic Construct
  source 1..22: mol_type = other RNA
tattgcacttgtctcggcctgt

SEQ ID NO: 13166 - RNA, 22 nt, Synthetic Construct
  source 1..22: mol_type = other RNA
tgaggtagtagttagtgctgtt

SEQ ID NO: 13167 - RNA, 22 nt, Synthetic Construct
  source 1..22: mol_type = other RNA
tgaggtagtagttagtgctgtt

SEQ ID NO: 13168 - RNA, 23 nt, Synthetic Construct
  source 1..23: mol_type = other RNA
tgaggtagtaggttgtgtggttt

SEQ ID NO: 13169 - RNA, 24 nt, Synthetic Construct
  source 1..24: mol_type = other RNA
tgtaaacatccttgactggaagct

SEQ ID NO: 13170 - RNA, 24 nt, Synthetic Construct
  source 1..24: mol_type = other RNA
tgtaaacatccttgactggaagct

SEQ ID NO: 13171 - RNA, 24 nt, Synthetic Construct
  source 1..24: mol_type = other RNA
gatgaggcgtgataacgagtctgc

SEQ ID NO: 13172 - RNA, 23 nt, Synthetic Construct
  source 1..23: mol_type = other RNA
cggtaatacgacgtacttagtgt

SEQ ID NO: 13173 - RNA, 23 nt, Synthetic Construct
  source 1..23: mol_type = other RNA
cggtaatacgacgtacttagtgt

SEQ ID NO: 13174 - RNA, 23 nt, Synthetic Construct
  source 1..23: mol_type = other RNA
tgaggggcagggagcgagacttt

SEQ ID NO: 13175 - RNA, 23 nt, Synthetic Construct
  source 1..23: mol_type = other RNA
tgaggggcagggagcgagacttt

SEQ ID NO: 13176 - RNA, 33 nt, Synthetic Construct; identical to SEQ ID NO: 2209
  source 1..33: mol_type = other RNA

SEQ ID NO: 13177 - RNA, 23 nt, Synthetic Construct
  source 1..23: mol_type = other RNA
ttatggtttgcctgggactgatt

SEQ ID NO: 13178 - RNA, 23 nt, Synthetic Construct
  source 1..23: mol_type = other RNA
ttatggtttgcctgggactgatt

SEQ ID NO: 13179 - RNA, 24 nt, Synthetic Construct
  source 1..24: mol_type = other RNA
acctggcatacaatgtagatttct

SEQ ID NO: 13180 - RNA, 24 nt, Synthetic Construct
  source 1..24: mol_type = other RNA
acctggcatacaatgtagatttct

SEQ ID NO: 13181 - RNA, 20 nt, Synthetic Construct
  source 1..20: mol_type = other RNA
tacagtatagatgatgtact

SEQ ID NO: 13182 - RNA, 20 nt, Synthetic Construct
  source 1..20: mol_type = other RNA
tacagtatagatgatgtact

SEQ ID NO: 13183 - RNA, 34 nt, Synthetic Construct; identical to SEQ ID NO: 2529
  source 1..34: mol_type = other RNA

SEQ ID NO: 13184 - RNA, 34 nt, Synthetic Construct; identical to SEQ ID NO: 2529
  source 1..34: mol_type = other RNA

SEQ ID NO: 13185 - RNA, 15 nt, Synthetic Construct
  source 1..15: mol_type = other RNA
tcagtagctcgagga

SEQ ID NO: 13186 - RNA, 15 nt, Synthetic Construct
  source 1..15: mol_type = other RNA
tcagtagctcgagga

SEQ ID NO: 13187 - RNA, 22 nt, Synthetic Construct
  source 1..22: mol_type = other RNA
tgaggtaataggttgtatagtt

SEQ ID NO: 13188 - RNA, 23 nt, Synthetic Construct
  source 1..23: mol_type = other RNA
tgaggtagtaggttgtgtggctt

SEQ ID NO: 13189 - RNA, 17 nt, Synthetic Construct
  source 1..17: mol_type = other RNA
cagagacgagtcgacca

SEQ ID NO: 13190 - RNA, 17 nt, Synthetic Construct
  source 1..17: mol_type = other RNA
cagagacgagtcgacca

SEQ ID NO: 13191 - RNA, 22 nt, Synthetic Construct
  source 1..22: mol_type = other RNA
cagtgcaatgttaaaagggcat

SEQ ID NO: 13192 - RNA, 22 nt, Synthetic Construct
  source 1..22: mol_type = other RNA
cagtgcaatgttaaaagggcat

SEQ ID NO: 13193 - RNA, 15 nt, Synthetic Construct
  source 1..15: mol_type = other RNA
cgatatggcatgaga

SEQ ID NO: 13194 - RNA, 22 nt, Synthetic Construct
  source 1..22: mol_type = other RNA
ccactgccccaggtgctgctgg

SEQ ID NO: 13195 - RNA, 18 nt, Synthetic Construct
  source 1..18: mol_type = other RNA
aaaccgttaccattactg

SEQ ID NO: 13196 - RNA, 18 nt, Synthetic Construct
  source 1..18: mol_type = other RNA
aaaccgttaccattactg

SEQ ID NO: 13197 - RNA, 15 nt, Synthetic Construct
  source 1..15: mol_type = other RNA
gtagctcgttgggct

SEQ ID NO: 13198 - RNA, 15 nt, Synthetic Construct
  source 1..15: mol_type = other RNA
gtagctcgttgggct

SEQ ID NO: 13199 - RNA, 27 nt, Synthetic Construct
  source 1..27: mol_type = other RNA
ccccccactgctaaattcgactggctt

SEQ ID NO: 13200 - RNA, 35 nt, Synthetic Construct; identical to SEQ ID NO: 787
  source 1..35: mol_type = other RNA

SEQ ID NO: 13201 - RNA, 35 nt, Synthetic Construct; identical to SEQ ID NO: 787
  source 1..35: mol_type = other RNA

SEQ ID NO: 13202 - RNA, 22 nt, Synthetic Construct
  source 1..22: mol_type = other RNA
tagcagcacgtaaatattagcg

SEQ ID NO: 13203 - RNA, 22 nt, Synthetic Construct
  source 1..22: mol_type = other RNA
tagcagcacgtaaatattagcg

SEQ ID NO: 13204 - RNA, 22 nt, Synthetic Construct
  source 1..22: mol_type = other RNA
tagaagcacgtaaatattggcg

SEQ ID NO: 13205 - RNA, 21 nt, Synthetic Construct
  source 1..21: mol_type = other RNA
taaggtagtaggttgtgtggt

SEQ ID NO: 13206 - RNA, 17 nt, Synthetic Construct
  source 1..17: mol_type = other RNA
tgccagcagccgcggta

SEQ ID NO: 13207 - RNA, 27 nt, Synthetic Construct
  source 1..27: mol_type = other RNA
ccccccactgctaaatttggctggctt

SEQ ID NO: 13208 - RNA, 23 nt, Synthetic Construct
  source 1..23: mol_type = other RNA
cggtaatacgacgtacttagtgt

SEQ ID NO: 13209 - RNA, 23 nt, Synthetic Construct
  source 1..23: mol_type = other RNA
cggtaatacgacgtacttagtgt

SEQ ID NO: 13210 - RNA, 21 nt, Synthetic Construct
  source 1..21: mol_type = other RNA
caaagtgctgttcgtgcaggt

SEQ ID NO: 13211 - RNA, 23 nt, Synthetic Construct
  source 1..23: mol_type = other RNA
actcggcgtggcgtcggtcgtgg

SEQ ID NO: 13212 - RNA, 23 nt, Synthetic Construct
  source 1..23: mol_type = other RNA
actcggcgtggcgtcggtcgtgg

SEQ ID NO: 13213 - RNA, 23 nt, Synthetic Construct
  source 1..23: mol_type = other RNA
tcctgtactgggctgccccgagt

SEQ ID NO: 13214 - RNA, 23 nt, Synthetic Construct
  source 1..23: mol_type = other RNA
tcctgtactgggctgccccgagt

SEQ ID NO: 13215 - RNA, 15 nt, Synthetic Construct
  source 1..15: mol_type = other RNA
cggcccagactccta

SEQ ID NO: 13216 - RNA, 15 nt, Synthetic Construct
  source 1..15: mol_type = other RNA
cggcccagactccta

SEQ ID NO: 13217 - RNA, 15 nt, Synthetic Construct
  source 1..15: mol_type = other RNA
agttgaccgcctggg

SEQ ID NO: 13218 - RNA, 15 nt, Synthetic Construct
  source 1..15: mol_type = other RNA
agttgaccgcctggg

SEQ ID NO: 13219 - RNA, 22 nt, Synthetic Construct
  source 1..22: mol_type = other RNA
tgagatagtagtttgtgctgtt

SEQ ID NO: 13220 - RNA, 24 nt, Synthetic Construct
  source 1..24: mol_type = other RNA
tgtagacatccccgactggaagct

SEQ ID NO: 13221 - RNA, 24 nt, Synthetic Construct
  source 1..24: mol_type = other RNA
tgtagacatccccgactggaagct

SEQ ID NO: 13222 - RNA, 19 nt, Synthetic Construct
  source 1..19: mol_type = other RNA
gtccggatcgtagtctgca

SEQ ID NO: 13223 - RNA, 19 nt, Synthetic Construct
  source 1..19: mol_type = other RNA
gtccggatcgtagtctgca

SEQ ID NO: 13224 - RNA, 35 nt, Synthetic Construct; identical to SEQ ID NO: 2354
  source 1..35: mol_type = other RNA

SEQ ID NO: 13225 - RNA, 22 nt, Synthetic Construct
  source 1..22: mol_type = other RNA
gactatagaactttccccctca

SEQ ID NO: 13226 - RNA, 22 nt, Synthetic Construct
  source 1..22: mol_type = other RNA
gactatagaactttccccctca

SEQ ID NO: 13227 - RNA, 18 nt, Synthetic Construct
  source 1..18: mol_type = other RNA
gttcgattccggagaggg

SEQ ID NO: 13228 - RNA, 18 nt, Synthetic Construct
  source 1..18: mol_type = other RNA
gttcgattccggagaggg

SEQ ID NO: 13229 - RNA, 36 nt, Synthetic Construct; identical to SEQ ID NO: 6739
  source 1..36: mol_type = other RNA

SEQ ID NO: 13230 - RNA, 36 nt, Synthetic Construct; identical to SEQ ID NO: 6739
  source 1..36: mol_type = other RNA

SEQ ID NO: 13231 - RNA, 27 nt, Synthetic Construct
  source 1..27: mol_type = other RNA
agagcagctaataccgcatacgacctg

SEQ ID NO: 13232 - RNA, 20 nt, Synthetic Construct
  source 1..20: mol_type = other RNA
ggtcccaagggtatggctgt

SEQ ID NO: 13233 - RNA, 20 nt, Synthetic Construct
  source 1..20: mol_type = other RNA
ggtcccaagggtatggctgt

SEQ ID NO: 13234 - RNA, 32 nt, Synthetic Construct; identical to SEQ ID NO: 3092
  source 1..32: mol_type = other RNA

SEQ ID NO: 13235 - RNA, 32 nt, Synthetic Construct; identical to SEQ ID NO: 3092
  source 1..32: mol_type = other RNA

SEQ ID NO: 13236 - RNA, 21 nt, Synthetic Construct
  source 1..21: mol_type = other RNA
tgaggtagtaggttgtgcggt

SEQ ID NO: 13237 - RNA, 21 nt, Synthetic Construct
  source 1..21: mol_type = other RNA
tgaggtagtaggttgtgcggt

SEQ ID NO: 13238 - RNA, 23 nt, Synthetic Construct
  source 1..23: mol_type = other RNA
aacggaatcccaaaagcagctgt

SEQ ID NO: 13239 - RNA, 23 nt, Synthetic Construct
  source 1..23: mol_type = other RNA
tgtcagtttgtcaaatacccctt

SEQ ID NO: 13240 - RNA, 23 nt, Synthetic Construct
  source 1..23: mol_type = other RNA
tgtcagtttgtcaaatacccctt

SEQ ID NO: 13241 - RNA, 39 nt, Synthetic Construct; identical to SEQ ID NO: 804
  source 1..39: mol_type = other RNA

SEQ ID NO: 13242 - RNA, 39 nt, Synthetic Construct; identical to SEQ ID NO: 804
  source 1..39: mol_type = other RNA

SEQ ID NO: 13243 - RNA, 24 nt, Synthetic Construct
  source 1..24: mol_type = other RNA
tgtaaacatccctgactggaagct

SEQ ID NO: 13244 - RNA, 22 nt, Synthetic Construct
  source 1..22: mol_type = other RNA
ncgtaccgtgagtaataatgcg

SEQ ID NO: 13245 - RNA, 22 nt, Synthetic Construct
  source 1..22: mol_type = other RNA
ncgtaccgtgagtaataatgcg

SEQ ID NO: 13246 - RNA, 21 nt, Synthetic Construct
  source 1..21: mol_type = other RNA
ggaggagttcgaaggtacgct

SEQ ID NO: 13247 - RNA, 21 nt, Synthetic Construct
  source 1..21: mol_type = other RNA
ggaggagttcgaaggtacgct

SEQ ID NO: 13248 - RNA, 21 nt, Synthetic Construct
  source 1..21: mol_type = other RNA
attagtgacgcgcatgaatgg

SEQ ID NO: 13249 - RNA, 21 nt, Synthetic Construct
  source 1..21: mol_type = other RNA
attagtgacgcgcatgaatgg

SEQ ID NO: 13250 - RNA, 15 nt, Synthetic Construct
  source 1..15: mol_type = other RNA
ggtgaaagcggggga

SEQ ID NO: 13251 - RNA, 21 nt, Synthetic Construct
  source 1..21: mol_type = other RNA
tgaggggcagagggcgagact

SEQ ID NO: 13252 - RNA, 22 nt, Synthetic Construct
  source 1..22: mol_type = other RNA
tgaagtagtagattgtatagtt

SEQ ID NO: 13253 - RNA, 22 nt, Synthetic Construct
  source 1..22: mol_type = other RNA
tgaggtagaagtttgtgctgtt

SEQ ID NO: 13254 - RNA, 22 nt, Synthetic Construct
  source 1..22: mol_type = other RNA
agaggtagtaggttgtgtggtt

SEQ ID NO: 13255 - RNA, 21 nt, Synthetic Construct
  source 1..21: mol_type = other RNA
gagttctacagtccgacgatc

SEQ ID NO: 13256 - RNA, 21 nt, Synthetic Construct
  source 1..21: mol_type = other RNA
gagttctacagtccgacgatc

SEQ ID NO: 13257 - RNA, 19 nt, Synthetic Construct
  source 1..19: mol_type = other RNA
ctgatcgagtcgtcctgcg

SEQ ID NO: 13258 - RNA, 22 nt, Synthetic Construct
  source 1..22: mol_type = other RNA
tgaggtagtaggttgtttagtt

SEQ ID NO: 13259 - RNA, 24 nt, Synthetic Construct
  source 1..24: mol_type = other RNA
tgtgatttctgcccagtgctctga

SEQ ID NO: 13260 - RNA, 24 nt, Synthetic Construct
  source 1..24: mol_type = other RNA
tgtgatttctgcccagtgctctga

SEQ ID NO: 13261 - RNA, 21 nt, Synthetic Construct
  source 1..21: mol_type = other RNA
tcccgtactgagctgccccga

SEQ ID NO: 13262 - RNA, 21 nt, Synthetic Construct
  source 1..21: mol_type = other RNA
tcccgtactgagctgccccga

SEQ ID NO: 13263 - RNA, 22 nt, Synthetic Construct
  source 1..22: mol_type = other RNA
tgaggtagtaggttgtgtggtc

SEQ ID NO: 13264 - RNA, 22 nt, Synthetic Construct
  source 1..22: mol_type = other RNA
tgaggtagtaggttgtgtggtc

SEQ ID NO: 13265 - RNA, 21 nt, Synthetic Construct
  source 1..21: mol_type = other RNA
acagcaggacggtggccatgg

SEQ ID NO: 13266 - RNA, 21 nt, Synthetic Construct
  source 1..21: mol_type = other RNA
acagcaggacggtggccatgg

SEQ ID NO: 13267 - RNA, 21 nt, Synthetic Construct
  source 1..21: mol_type = other RNA
tgagaaccacgtctgctctga

SEQ ID NO: 13268 - RNA, 21 nt, Synthetic Construct
  source 1..21: mol_type = other RNA
tgagaaccacgtctgctctga

SEQ ID NO: 13269 - RNA, 19 nt, Synthetic Construct
  source 1..19: mol_type = other RNA
caagcggtggatgatgtgg

SEQ ID NO: 13270 - RNA, 19 nt, Synthetic Construct
  source 1..19: mol_type = other RNA
caagcggtggatgatgtgg

SEQ ID NO: 13271 - RNA, 18 nt, Synthetic Construct
  source 1..18: mol_type = other RNA
cgtgttcggaagattttc

SEQ ID NO: 13272 - RNA, 18 nt, Synthetic Construct
  source 1..18: mol_type = other RNA
cgtgttcggaagattttc

SEQ ID NO: 13273 - RNA, 21 nt, Synthetic Construct
  source 1..21: mol_type = other RNA
cctctgggcccttcctccagt

SEQ ID NO: 13274 - RNA, 21 nt, Synthetic Construct
  source 1..21: mol_type = other RNA
cctctgggcccttcctccagt

SEQ ID NO: 13275 - RNA, 15 nt, Synthetic Construct
  source 1..15: mol_type = other RNA
ggtggctgtagctca

SEQ ID NO: 13276 - RNA, 15 nt, Synthetic Construct
  source 1..15: mol_type = other RNA
ggtggctgtagctca

SEQ ID NO: 13277 - RNA, 22 nt, Synthetic Construct
  source 1..22: mol_type = other RNA
tgaggtagtagtttatgctgtt

SEQ ID NO: 13278 - RNA, 34 nt, Synthetic Construct; identical to SEQ ID NO: 2265
  source 1..34: mol_type = other RNA

SEQ ID NO: 13279 - RNA, 22 nt, Synthetic Construct
  source 1..22: mol_type = other RNA
agtagtgtttcctactttatgg

SEQ ID NO: 13280 - RNA, 21 nt, Synthetic Construct
  source 1..21: mol_type = other RNA
gggagtgtgacaatggtgttt

SEQ ID NO: 13281 - RNA, 21 nt, Synthetic Construct
  source 1..21: mol_type = other RNA
gggagtgtgacaatggtgttt

SEQ ID NO: 13282 - RNA, 22 nt, Synthetic Construct
  source 1..22: mol_type = other RNA
tgaggtagtaggttgaatagtt

SEQ ID NO: 13283 - RNA, 30 nt, Synthetic Construct; identical to SEQ ID NO: 6405
  source 1..30: mol_type = other RNA

SEQ ID NO: 13284 - RNA, 30 nt, Synthetic Construct; identical to SEQ ID NO: 6405
  source 1..30: mol_type = other RNA

SEQ ID NO: 13285 - RNA, 22 nt, Synthetic Construct
  source 1..22: mol_type = other RNA
tgaggtagtagtatgtgctgtt

SEQ ID NO: 13286 - RNA, 23 nt, Synthetic Construct
  source 1..23: mol_type = other RNA
tcctgtactgagctgccccgggt

SEQ ID NO: 13287 - RNA, 23 nt, Synthetic Construct
  source 1..23: mol_type = other RNA
tcctgtactgagctgccccgggt

SEQ ID NO: 13288 - RNA, 22 nt, Synthetic Construct
  source 1..22: mol_type = other RNA
tgaggtagtagattgtatagct

SEQ ID NO: 13289 - RNA, 20 nt, Synthetic Construct
  source 1..20: mol_type = other RNA
gcgtgcttgactgcgagact

SEQ ID NO: 13290 - RNA, 20 nt, Synthetic Construct
  source 1..20: mol_type = other RNA
gcgtgcttgactgcgagact

SEQ ID NO: 13291 - RNA, 19 nt, Synthetic Construct
  source 1..19: mol_type = other RNA
gtggtacgatcatacctgg

SEQ ID NO: 13292 - RNA, 19 nt, Synthetic Construct
  source 1..19: mol_type = other RNA
gtggtacgatcatacctgg

SEQ ID NO: 13293 - RNA, 22 nt, Synthetic Construct
  source 1..22: mol_type = other RNA
tcctgtactgagctgctccgag

SEQ ID NO: 13294 - RNA, 22 nt, Synthetic Construct
  source 1..22: mol_type = other RNA
tcctgtactgagctgctccgag

SEQ ID NO: 13295 - RNA, 38 nt, Synthetic Construct; identical to SEQ ID NO: 2492
  source 1..38: mol_type = other RNA

SEQ ID NO: 13296 - RNA, 24 nt, Synthetic Construct
  source 1..24: mol_type = other RNA
gggttgtaaaccgcttttgtcagg

SEQ ID NO: 13297 - RNA, 24 nt, Synthetic Construct
  source 1..24: mol_type = other RNA
gggttgtaaaccgcttttgtcagg

SEQ ID NO: 13298 - RNA, 17 nt, Synthetic Construct
  source 1..17: mol_type = other RNA
cagagacgagtcgacca

SEQ ID NO: 13299 - RNA, 17 nt, Synthetic Construct
  source 1..17: mol_type = other RNA
cagagacgagtcgacca

SEQ ID NO: 13300 - RNA, 16 nt, Synthetic Construct
  source 1..16: mol_type = other RNA
cgtgagctgggtttag

SEQ ID NO: 13301 - RNA, 16 nt, Synthetic Construct
  source 1..16: mol_type = other RNA
cgtgagctgggtttag

SEQ ID NO: 13302 - RNA, 21 nt, Synthetic Construct
  source 1..21: mol_type = other RNA
tcaggctcagtcccctcccgt

SEQ ID NO: 13303 - RNA, 21 nt, Synthetic Construct
  source 1..21: mol_type = other RNA
tcaggctcagtcccctcccgt

SEQ ID NO: 13304 - RNA, 27 nt, Synthetic Construct
  source 1..27: mol_type = other RNA
ccccccaccgctaaatttgactggctt

SEQ ID NO: 13305 - RNA, 22 nt, Synthetic Construct
  source 1..22: mol_type = other RNA
cgactcttagcggtggatcact

SEQ ID NO: 13306 - RNA, 22 nt, Synthetic Construct
  source 1..22: mol_type = other RNA
cgactcttagcggtggatcact

SEQ ID NO: 13307 - RNA, 21 nt, Synthetic Construct
  source 1..21: mol_type = other RNA
tggagtgtgacagtggtgttt

SEQ ID NO: 13308 - RNA, 23 nt, Synthetic Construct
  source 1..23: mol_type = other RNA
agctcggtctgaggcccctcaga

SEQ ID NO: 13309 - RNA, 23 nt, Synthetic Construct
  source 1..23: mol_type = other RNA
agctcggtctgaggcccctcaga

SEQ ID NO: 13310 - RNA, 18 nt, Synthetic Construct
  source 1..18: mol_type = other RNA
cgccgatgatagtgcgga

SEQ ID NO: 13311 - RNA, 22 nt, Synthetic Construct
  source 1..22: mol_type = other RNA
cgactcttagcggtggatcact

SEQ ID NO: 13312 - RNA, 21 nt, Synthetic Construct
  source 1..21: mol_type = other RNA
cgaggtagtaggttgtatagt

SEQ ID NO: 13313 - RNA, 21 nt, Synthetic Construct
  source 1..21: mol_type = other RNA
cgaggtagtaggttgtatagt

SEQ ID NO: 13314 - RNA, 23 nt, Synthetic Construct
  source 1..23: mol_type = other RNA
tctcacacagaaatcgcacccgt

SEQ ID NO: 13315 - RNA, 23 nt, Synthetic Construct
  source 1..23: mol_type = other RNA
taccacagggtagaaccacggaa

SEQ ID NO: 13316 - RNA, 23 nt, Synthetic Construct
  source 1..23: mol_type = other RNA
taccacagggtagaaccacggaa

SEQ ID NO: 13317 - RNA, 30 nt, Synthetic Construct; identical to SEQ ID NO: 751
  source 1..30: mol_type = other RNA

SEQ ID NO: 13318 - RNA, 30 nt, Synthetic Construct; identical to SEQ ID NO: 751
  source 1..30: mol_type = other RNA

SEQ ID NO: 13319 - RNA, 22 nt, Synthetic Construct
  source 1..22: mol_type = other RNA
ngaggtagtagattgtatagtt

SEQ ID NO: 13320 - RNA, 23 nt, Synthetic Construct
  source 1..23: mol_type = other RNA
caaagcgctgttcgtgcaggtag

SEQ ID NO: 13321 - RNA, 15 nt, Synthetic Construct
  source 1..15: mol_type = other RNA
gtcgtcctgcgcgga

SEQ ID NO: 13322 - RNA, 19 nt, Synthetic Construct
  source 1..19: mol_type = other RNA
tcagtagctcgaggaaaag

SEQ ID NO: 13323 - RNA, 19 nt, Synthetic Construct
  source 1..19: mol_type = other RNA
tcagtagctcgaggaaaag

SEQ ID NO: 13324 - RNA, 21 nt, Synthetic Construct
  source 1..21: mol_type = other RNA
tgaagtagtaggttgtatagt

SEQ ID NO: 13325 - RNA, 21 nt, Synthetic Construct
  source 1..21: mol_type = other RNA
tgaagtagtaggttgtatagt

SEQ ID NO: 13326 - RNA, 21 nt, Synthetic Construct
  source 1..21: mol_type = other RNA
tgaggtagtagattgtgtagt

SEQ ID NO: 13327 - RNA, 24 nt, Synthetic Construct
  source 1..24: mol_type = other RNA
tgtaaacatccccgactggaagtt

SEQ ID NO: 13328 - RNA, 22 nt, Synthetic Construct
  source 1..22: mol_type = other RNA
tgtgactggttgaccagagggg

SEQ ID NO: 13329 - RNA, 22 nt, Synthetic Construct
  source 1..22: mol_type = other RNA
tgaggtagtagattatatagtt

SEQ ID NO: 13330 - RNA, 22 nt, Synthetic Construct
  source 1..22: mol_type = other RNA
aagcagcacgtaaatattcgcg

SEQ ID NO: 13331 - RNA, 17 nt, Synthetic Construct
  source 1..17: mol_type = other RNA
cagtagctcgaggaaaa

SEQ ID NO: 13332 - RNA, 17 nt, Synthetic Construct
  source 1..17: mol_type = other RNA
cagtagctcgaggaaaa

SEQ ID NO: 13333 - RNA, 22 nt, Synthetic Construct
  source 1..22: mol_type = other RNA
tgaggtagtagattgtatagtc

SEQ ID NO: 13334 - RNA, 22 nt, Synthetic Construct
  source 1..22: mol_type = other RNA
tgaggtagtagattgtatagtc

SEQ ID NO: 13335 - RNA, 23 nt, Synthetic Construct
  source 1..23: mol_type = other RNA
tcccgtactgagctgccccgaga

SEQ ID NO: 13336 - RNA, 23 nt, Synthetic Construct
  source 1..23: mol_type = other RNA
tcccgtactgagctgccccgaga

SEQ ID NO: 13337 - RNA, 21 nt, Synthetic Construct
  source 1..21: mol_type = other RNA
tggtagactatggaacgtagg

SEQ ID NO: 13338 - RNA, 22 nt, Synthetic Construct
  source 1..22: mol_type = other RNA
tgaggtagcaggttgtgtggtt

SEQ ID NO: 13339 - RNA, 22 nt, Synthetic Construct
  source 1..22: mol_type = other RNA
tgaggtagcaggttgtgtggtt

SEQ ID NO: 13340 - RNA, 22 nt, Synthetic Construct
  source 1..22: mol_type = other RNA
tcagtagctcgaggaaaagaca

SEQ ID NO: 13341 - RNA, 43 nt, Synthetic Construct; identical to SEQ ID NO: 727
  source 1..43: mol_type = other RNA

SEQ ID NO: 13342 - RNA, 17 nt, Synthetic Construct
  source 1..17: mol_type = other RNA
agggaacgtgagctggg

SEQ ID NO: 13343 - RNA, 17 nt, Synthetic Construct
  source 1..17: mol_type = other RNA
agggaacgtgagctggg

SEQ ID NO: 13344 - RNA, 23 nt, Synthetic Construct
  source 1..23: mol_type = other RNA
taaggggcagagagcgagacttt

SEQ ID NO: 13345 - RNA, 23 nt, Synthetic Construct
  source 1..23: mol_type = other RNA
cgaggggcagagagcgagacttt

SEQ ID NO: 13346 - RNA, 23 nt, Synthetic Construct
  source 1..23: mol_type = other RNA
cgaggggcagagagcgagacttt

SEQ ID NO: 13347 - RNA, 30 nt, Synthetic Construct; identical to SEQ ID NO: 1535
  source 1..30: mol_type = other RNA

SEQ ID NO: 13348 - RNA, 22 nt, Synthetic Construct
  source 1..22: mol_type = other RNA
tgaggtagtaggttgtatagtg

SEQ ID NO: 13349 - RNA, 24 nt, Synthetic Construct
  source 1..24: mol_type = other RNA
ttaatgctaatcgtgataggggtt

SEQ ID NO: 13350 - RNA, 24 nt, Synthetic Construct
  source 1..24: mol_type = other RNA
ttaatgctaatcgtgataggggtt

SEQ ID NO: 13351 - RNA, 22 nt, Synthetic Construct
  source 1..22: mol_type = other RNA
tcgtaccgtgagtgataatgcg

SEQ ID NO: 13352 - RNA, 22 nt, Synthetic Construct
  source 1..22: mol_type = other RNA
tcgtaccgtgagtgataatgcg

SEQ ID NO: 13353 - RNA, 25 nt, Synthetic Construct
  source 1..25: mol_type = other RNA
tcgaggatatgagatcgagacgaca

SEQ ID NO: 13354 - RNA, 24 nt, Synthetic Construct
  source 1..24: mol_type = other RNA
gttcgattccggagagggagcctg

SEQ ID NO: 13355 - RNA, 24 nt, Synthetic Construct
  source 1..24: mol_type = other RNA
gttcgattccggagagggagcctg

SEQ ID NO: 13356 - RNA, 22 nt, Synthetic Construct
  source 1..22: mol_type = other RNA
tcgtaccgtgagtaataacgcg

SEQ ID NO: 13357 - RNA, 22 nt, Synthetic Construct
  source 1..22: mol_type = other RNA
tggaatgtaaggaagtatgtat

SEQ ID NO: 13358 - RNA, 22 nt, Synthetic Construct
  source 1..22: mol_type = other RNA
tggaatgtaaggaagtatgtat

SEQ ID NO: 13359 - RNA, 22 nt, Synthetic Construct
  source 1..22: mol_type = other RNA
tgaggtagtaggttgtatagat

SEQ ID NO: 13360 - RNA, 23 nt, Synthetic Construct
  source 1..23: mol_type = other RNA
tggtaatacgacgtacttagtgc

SEQ ID NO: 13361 - RNA, 23 nt, Synthetic Construct
  source 1..23: mol_type = other RNA
tggtaatacgacgtacttagtgc

SEQ ID NO: 13362 - RNA, 30 nt, Synthetic Construct; identical to SEQ ID NO: 1771
  source 1..30: mol_type = other RNA

SEQ ID NO: 13363 - RNA, 30 nt, Synthetic Construct; identical to SEQ ID NO: 1771
  source 1..30: mol_type = other RNA

SEQ ID NO: 13364 - RNA, 23 nt, Synthetic Construct
  source 1..23: mol_type = other RNA
tgaggtagtagtttgtgctgtta

SEQ ID NO: 13365 - RNA, 18 nt, Synthetic Construct
  source 1..18: mol_type = other RNA
ttctacagtccgacgatc

SEQ ID NO: 13366 - RNA, 18 nt, Synthetic Construct
  source 1..18: mol_type = other RNA
ttctacagtccgacgatc

SEQ ID NO: 13367 - RNA, 17 nt, Synthetic Construct
  source 1..17: mol_type = other RNA
tcccagaaacccggtcg

SEQ ID NO: 13368 - RNA, 17 nt, Synthetic Construct
  source 1..17: mol_type = other RNA
tcccagaaacccggtcg

SEQ ID NO: 13369 - RNA, 21 nt, Synthetic Construct
  source 1..21: mol_type = other RNA
aatgacacgatcactcccgtt

SEQ ID NO: 13370 - RNA, 21 nt, Synthetic Construct
  source 1..21: mol_type = other RNA
aatgacacgatcactcccgtt

SEQ ID NO: 13371 - RNA, 23 nt, Synthetic Construct
  source 1..23: mol_type = other RNA
tgacctatgaattgacagccaga

SEQ ID NO: 13372 - RNA, 23 nt, Synthetic Construct
  source 1..23: mol_type = other RNA
tgacctatgaattgacagccaga

SEQ ID NO: 13373 - RNA, 22 nt, Synthetic Construct
  source 1..22: mol_type = other RNA
aatgacacgatcactcccgttg

SEQ ID NO: 13374 - RNA, 22 nt, Synthetic Construct
  source 1..22: mol_type = other RNA
aatgacacgatcactcccgttg

SEQ ID NO: 13375 - RNA, 23 nt, Synthetic Construct
  source 1..23: mol_type = other RNA
caaagtgcttacagtgcaggtag

SEQ ID NO: 13376 - RNA, 15 nt, Synthetic Construct
  source 1..15: mol_type = other RNA
gcgtagatatgcgga

SEQ ID NO: 13377 - RNA, 15 nt, Synthetic Construct
  source 1..15: mol_type = other RNA
gcgtagatatgcgga

SEQ ID NO: 13378 - RNA, 23 nt, Synthetic Construct
  source 1..23: mol_type = other RNA
cctcgcgcgattggagcggccga

SEQ ID NO: 13379 - RNA, 16 nt, Synthetic Construct
  source 1..16: mol_type = other RNA
gctattgacgaccgta

SEQ ID NO: 13380 - RNA, 16 nt, Synthetic Construct
  source 1..16: mol_type = other RNA
gctattgacgaccgta

SEQ ID NO: 13381 - RNA, 15 nt, Synthetic Construct
  source 1..15: mol_type = other RNA
tgtctgagcgtcgct

SEQ ID NO: 13382 - RNA, 15 nt, Synthetic Construct
  source 1..15: mol_type = other RNA
tgtctgagcgtcgct

SEQ ID NO: 13383 - RNA, 19 nt, Synthetic Construct
  source 1..19: mol_type = other RNA
cggaagaaggggtgcctgg

SEQ ID NO: 13384 - RNA, 19 nt, Synthetic Construct
  source 1..19: mol_type = other RNA
cggaagaaggggtgcctgg

SEQ ID NO: 13385 - RNA, 25 nt, Synthetic Construct
  source 1..25: mol_type = other RNA
ctgggaaccccgagtgacgtagtgt

SEQ ID NO: 13386 - RNA, 25 nt, Synthetic Construct
  source 1..25: mol_type = other RNA
ctgggaaccccgagtgacgtagtgt

SEQ ID NO: 13387 - RNA, 19 nt, Synthetic Construct
  source 1..19: mol_type = other RNA
cctgtctgaatatgggggg

SEQ ID NO: 13388 - RNA, 19 nt, Synthetic Construct
  source 1..19: mol_type = other RNA
cctgtctgaatatgggggg

SEQ ID NO: 13389 - RNA, 16 nt, Synthetic Construct
  source 1..16: mol_type = other RNA
cgactcttagcggtgg

SEQ ID NO: 13390 - RNA, 16 nt, Synthetic Construct
  source 1..16: mol_type = other RNA
cgactcttagcggtgg

SEQ ID NO: 13391 - RNA, 22 nt, Synthetic Construct
  source 1..22: mol_type = other RNA
ccggtcccaagggtatggctgt

SEQ ID NO: 13392 - RNA, 25 nt, Synthetic Construct
  source 1..25: mol_type = other RNA
tcggatccgtctgagcttggctttt

SEQ ID NO: 13393 - RNA, 25 nt, Synthetic Construct
  source 1..25: mol_type = other RNA
tcggatccgtctgagcttggctttt

SEQ ID NO: 13394 - RNA, 24 nt, Synthetic Construct
  source 1..24: mol_type = other RNA
gaatgttgctcggtgaaccccttt

SEQ ID NO: 13395 - RNA, 24 nt, Synthetic Construct
  source 1..24: mol_type = other RNA
gaatgttgctcggtgaaccccttt

SEQ ID NO: 13396 - RNA, 22 nt, Synthetic Construct
  source 1..22: mol_type = other RNA
tgaggtagtagattgtatagct

SEQ ID NO: 13397 - RNA, 22 nt, Synthetic Construct
  source 1..22: mol_type = other RNA
tgaggtagtagattgtatagct

SEQ ID NO: 13398 - RNA, 21 nt, Synthetic Construct
  source 1..21: mol_type = other RNA
aacggaatcccaaaagcagct

SEQ ID NO: 13399 - RNA, 22 nt, Synthetic Construct
  source 1..22: mol_type = other RNA
tagcagcacgtaaaaattggcg

SEQ ID NO: 13400 - RNA, 22 nt, Synthetic Construct
  source 1..22: mol_type = other RNA
tagcagcacgtaaaaattggcg

SEQ ID NO: 13401 - RNA, 22 nt, Synthetic Construct
  source 1..22: mol_type = other RNA
tgaggaagtagattgtatagtt

SEQ ID NO: 13402 - RNA, 22 nt, Synthetic Construct
  source 1..22: mol_type = other RNA
tgaggaagtagattgtatagtt

SEQ ID NO: 13403 - RNA, 21 nt, Synthetic Construct
  source 1..21: mol_type = other RNA
tgaggtagtaggttgcatagt

SEQ ID NO: 13404 - RNA, 27 nt, Synthetic Construct
  source 1..27: mol_type = other RNA
ggggagctaatcccagaaacccggtcg

SEQ ID NO: 13405 - RNA, 27 nt, Synthetic Construct
  source 1..27: mol_type = other RNA
ggggagctaatcccagaaacccggtcg

SEQ ID NO: 13406 - RNA, 22 nt, Synthetic Construct
  source 1..22: mol_type = other RNA
tgaggtagtagtttgtgctgtc

SEQ ID NO: 13407 - RNA, 22 nt, Synthetic Construct
  source 1..22: mol_type = other RNA
tgaggtagtagtttgtgctgtc

SEQ ID NO: 13408 - RNA, 20 nt, Synthetic Construct
  source 1..20: mol_type = other RNA
tgaggtagcaggttgtgtgg

SEQ ID NO: 13409 - RNA, 20 nt, Synthetic Construct
  source 1..20: mol_type = other RNA
tgaggtagcaggttgtgtgg

SEQ ID NO: 13410 - RNA, 28 nt, Synthetic Construct
  source 1..28: mol_type = other RNA
gctttacattggactttgaacagatctg

SEQ ID NO: 13411 - RNA, 19 nt, Synthetic Construct
  source 1..19: mol_type = other RNA
tagcttatcagactgatgt

SEQ ID NO: 13412 - RNA, 19 nt, Synthetic Construct
  source 1..19: mol_type = other RNA
tagcttatcagactgatgt

SEQ ID NO: 13413 - RNA, 21 nt, Synthetic Construct
  source 1..21: mol_type = other RNA
gctttgatccggagatttccg

SEQ ID NO: 13414 - RNA, 22 nt, Synthetic Construct
  source 1..22: mol_type = other RNA
tagcagcacgtaaatattggca

SEQ ID NO: 13415 - RNA, 22 nt, Synthetic Construct
  source 1..22: mol_type = other RNA
tagcagcacgtaaatattggca

SEQ ID NO: 13416 - RNA, 22 nt, Synthetic Construct
  source 1..22: mol_type = other RNA
taccgcactgtgggtacttgct

SEQ ID NO: 13417 - RNA, 22 nt, Synthetic Construct
  source 1..22: mol_type = other RNA
taccgcactgtgggtacttgct

SEQ ID NO: 13418 - RNA, 22 nt, Synthetic Construct
  source 1..22: mol_type = other RNA
cattgcacttgcctcggtctga

SEQ ID NO: 13419 - RNA, 16 nt, Synthetic Construct
  source 1..16: mol_type = other RNA
gtctacggccatgcca

SEQ ID NO: 13420 - RNA, 16 nt, Synthetic Construct
  source 1..16: mol_type = other RNA
gtctacggccatgcca

SEQ ID NO: 13421 - RNA, 27 nt, Synthetic Construct
  source 1..27: mol_type = other RNA
cttctcactactgcacttgactagtct

SEQ ID NO: 13422 - RNA, 23 nt, Synthetic Construct
  source 1..23: mol_type = other RNA
tgaggggcagagagcgagactta

SEQ ID NO: 13423 - RNA, 23 nt, Synthetic Construct
  source 1..23: mol_type = other RNA
gtaaacatccttgactggaagct

SEQ ID NO: 13424 - RNA, 22 nt, Synthetic Construct
  source 1..22: mol_type = other RNA
tgggtttacgttgggagaactt

SEQ ID NO: 13425 - RNA, 22 nt, Synthetic Construct
  source 1..22: mol_type = other RNA
tgggtttacgttgggagaactt

SEQ ID NO: 13426 - RNA, 21 nt, Synthetic Construct
  source 1..21: mol_type = other RNA
tgaggggcagagggcgagact

SEQ ID NO: 13427 - RNA, 21 nt, Synthetic Construct
  source 1..21: mol_type = other RNA
tgaggggcagagggcgagact

SEQ ID NO: 13428 - RNA, 37 nt, Synthetic Construct; identical to SEQ ID NO: 4277
  source 1..37: mol_type = other RNA

SEQ ID NO: 13429 - RNA, 37 nt, Synthetic Construct; identical to SEQ ID NO: 4277
  source 1..37: mol_type = other RNA

SEQ ID NO: 13430 - RNA, 20 nt, Synthetic Construct
  source 1..20: mol_type = other RNA
gctattgacgaccgtaccgc

SEQ ID NO: 13431 - RNA, 20 nt, Synthetic Construct
  source 1..20: mol_type = other RNA
gctattgacgaccgtaccgc

SEQ ID NO: 13432 - RNA, 25 nt, Synthetic Construct
  source 1..25: mol_type = other RNA
tcgaggatatgagatcgagacgaca

SEQ ID NO: 13433 - RNA, 25 nt, Synthetic Construct
  source 1..25: mol_type = other RNA
tcgaggatatgagatcgagacgaca

SEQ ID NO: 13434 - RNA, 29 nt, Synthetic Construct
  source 1..29: mol_type = other RNA
cccccccactgctaaatttgactggcttt

SEQ ID NO: 13435 - RNA, 32 nt, Synthetic Construct; identical to SEQ ID NO: 2052
  source 1..32: mol_type = other RNA

SEQ ID NO: 13436 - RNA, 16 nt, Synthetic Construct
  source 1..16: mol_type = other RNA
ccatgccgcgtgcggg

SEQ ID NO: 13437 - RNA, 16 nt, Synthetic Construct
  source 1..16: mol_type = other RNA
ccatgccgcgtgcggg

SEQ ID NO: 13438 - RNA, 24 nt, Synthetic Construct
  source 1..24: mol_type = other RNA
tgtaaacatccttgactggaagct

SEQ ID NO: 13439 - RNA, 22 nt, Synthetic Construct
  source 1..22: mol_type = other RNA
tggaatgtgaagaagtatgtat

SEQ ID NO: 13440 - RNA, 22 nt, Synthetic Construct
  source 1..22: mol_type = other RNA
tggaatgtgaagaagtatgtat

SEQ ID NO: 13441 - RNA, 22 nt, Synthetic Construct
  source 1..22: mol_type = other RNA
tcctgtactgtgctgccccgag

SEQ ID NO: 13442 - RNA, 22 nt, Synthetic Construct
  source 1..22: mol_type = other RNA
tcctgtactgtgctgccccgag

SEQ ID NO: 13443 - RNA, 36 nt, Synthetic Construct; identical to SEQ ID NO: 2248
  source 1..36: mol_type = other RNA

SEQ ID NO: 13444 - RNA, 16 nt, Synthetic Construct
  source 1..16: mol_type = other RNA
atagggaacgtgagct

SEQ ID NO: 13445 - RNA, 16 nt, Synthetic Construct
  source 1..16: mol_type = other RNA
atagggaacgtgagct

SEQ ID NO: 13446 - RNA, 30 nt, Synthetic Construct; identical to SEQ ID NO: 2308
  source 1..30: mol_type = other RNA

SEQ ID NO: 13447 - RNA, 30 nt, Synthetic Construct; identical to SEQ ID NO: 2308
  source 1..30: mol_type = other RNA

SEQ ID NO: 13448 - RNA, 22 nt, Synthetic Construct
  source 1..22: mol_type = other RNA
gcactctaatgagactgccggt

SEQ ID NO: 13449 - RNA, 22 nt, Synthetic Construct
  source 1..22: mol_type = other RNA
gcactctaatgagactgccggt

SEQ ID NO: 13450 - RNA, 19 nt, Synthetic Construct
  source 1..19: mol_type = other RNA
atagggaacgtgagctggg

SEQ ID NO: 13451 - RNA, 19 nt, Synthetic Construct
  source 1..19: mol_type = other RNA
atagggaacgtgagctggg

SEQ ID NO: 13452 - RNA, 22 nt, Synthetic Construct
  source 1..22: mol_type = other RNA
taaatccttaagcgaatctcgc

SEQ ID NO: 13453 - RNA, 22 nt, Synthetic Construct
  source 1..22: mol_type = other RNA
taaatccttaagcgaatctcgc

SEQ ID NO: 13454 - RNA, 17 nt, Synthetic Construct
  source 1..17: mol_type = other RNA
gaagttgaccgcctggg

SEQ ID NO: 13455 - RNA, 22 nt, Synthetic Construct
  source 1..22: mol_type = other RNA
tacagtagtctgcacattggtt

SEQ ID NO: 13456 - RNA, 22 nt, Synthetic Construct
  source 1..22: mol_type = other RNA
tacagtagtctgcacattggtt

SEQ ID NO: 13457 - RNA, 34 nt, Synthetic Construct; identical to SEQ ID NO: 2186
  source 1..34: mol_type = other RNA

SEQ ID NO: 13458 - RNA, 20 nt, Synthetic Construct
  source 1..20: mol_type = other RNA
cccagtaaacggcggccgta

SEQ ID NO: 13459 - RNA, 22 nt, Synthetic Construct
  source 1..22: mol_type = other RNA
actggacttggagtcagaaggc

SEQ ID NO: 13460 - RNA, 22 nt, Synthetic Construct
  source 1..22: mol_type = other RNA
actggacttggagtcagaaggc

SEQ ID NO: 13461 - RNA, 25 nt, Synthetic Construct
  source 1..25: mol_type = other RNA
ccccactgctaaatttgactggctt

SEQ ID NO: 13462 - RNA, 22 nt, Synthetic Construct
  source 1..22: mol_type = other RNA
tcagtagctcgaggaaaagaca

SEQ ID NO: 13463 - RNA, 22 nt, Synthetic Construct
  source 1..22: mol_type = other RNA
tcagtagctcgaggaaaagaca

SEQ ID NO: 13464 - RNA, 21 nt, Synthetic Construct
  source 1..21: mol_type = other RNA
tgacctatgaattgacagcca

SEQ ID NO: 13465 - RNA, 21 nt, Synthetic Construct
  source 1..21: mol_type = other RNA
tgacctatgaattgacagcca

SEQ ID NO: 13466 - RNA, 22 nt, Synthetic Construct
  source 1..22: mol_type = other RNA
tgaggtagcagattgtatagtt

SEQ ID NO: 13467 - RNA, 22 nt, Synthetic Construct
  source 1..22: mol_type = other RNA
tgaggtagcagattgtatagtt

SEQ ID NO: 13468 - RNA, 20 nt, Synthetic Construct
  source 1..20: mol_type = other RNA
gtcagtttgtcaaatacccc

SEQ ID NO: 13469 - RNA, 20 nt, Synthetic Construct
  source 1..20: mol_type = other RNA
gtcagtttgtcaaatacccc

SEQ ID NO: 13470 - RNA, 24 nt, Synthetic Construct
  source 1..24: mol_type = other RNA
tgaggtagtaggttgtgtggttta

SEQ ID NO: 13471 - RNA, 21 nt, Synthetic Construct
  source 1..21: mol_type = other RNA
tgaggtagtagatcgtatagt

SEQ ID NO: 13472 - RNA, 21 nt, Synthetic Construct
  source 1..21: mol_type = other RNA
tgaggtagtagatcgtatagt

SEQ ID NO: 13473 - RNA, 23 nt, Synthetic Construct
  source 1..23: mol_type = other RNA
tcggatccgtctgagcttggctt

SEQ ID NO: 13474 - RNA, 23 nt, Synthetic Construct
  source 1..23: mol_type = other RNA
tcggatccgtctgagcttggctt

SEQ ID NO: 13475 - RNA, 22 nt, Synthetic Construct
  source 1..22: mol_type = other RNA
ctggctagggaaaatgattgga

SEQ ID NO: 13476 - RNA, 22 nt, Synthetic Construct
  source 1..22: mol_type = other RNA
ctggctagggaaaatgattgga

SEQ ID NO: 13477 - RNA, 36 nt, Synthetic Construct; identical to SEQ ID NO: 2546
  source 1..36: mol_type = other RNA

SEQ ID NO: 13478 - RNA, 35 nt, Synthetic Construct; identical to SEQ ID NO: 2567
  source 1..35: mol_type = other RNA

SEQ ID NO: 13479 - RNA, 35 nt, Synthetic Construct; identical to SEQ ID NO: 2567
  source 1..35: mol_type = other RNA

SEQ ID NO: 13480 - RNA, 22 nt, Synthetic Construct
  source 1..22: mol_type = other RNA
tgaggcagtagtttgtgctgtt

SEQ ID NO: 13481 - RNA, 22 nt, Synthetic Construct
  source 1..22: mol_type = other RNA
tgaggcagtagtttgtgctgtt

SEQ ID NO: 13482 - RNA, 22 nt, Synthetic Construct
  source 1..22: mol_type = other RNA
attgcacttgtcccggcctgta

SEQ ID NO: 13483 - RNA, 22 nt, Synthetic Construct
  source 1..22: mol_type = other RNA
attgcacttgtcccggcctgta

SEQ ID NO: 13484 - RNA, 21 nt, Synthetic Construct
  source 1..21: mol_type = other RNA
agagtaggacgttgccaggtt

SEQ ID NO: 13485 - RNA, 21 nt, Synthetic Construct
  source 1..21: mol_type = other RNA
agagtaggacgttgccaggtt

SEQ ID NO: 13486 - RNA, 18 nt, Synthetic Construct
  source 1..18: mol_type = other RNA
tcctgtactgagctgccc

SEQ ID NO: 13487 - RNA, 18 nt, Synthetic Construct
  source 1..18: mol_type = other RNA
tcctgtactgagctgccc

SEQ ID NO: 13488 - RNA, 22 nt, Synthetic Construct
  source 1..22: mol_type = other RNA
cattgcgcttgtctcggtctga

SEQ ID NO: 13489 - RNA, 22 nt, Synthetic Construct
  source 1..22: mol_type = other RNA
cattgcgcttgtctcggtctga

SEQ ID NO: 13490 - RNA, 23 nt, Synthetic Construct
  source 1..23: mol_type = other RNA
gcgtggtaggagagcgttctgta

SEQ ID NO: 13491 - RNA, 23 nt, Synthetic Construct
  source 1..23: mol_type = other RNA
tctcccaacccttgtaccagtgt

SEQ ID NO: 13492 - RNA, 23 nt, Synthetic Construct
  source 1..23: mol_type = other RNA
tctcccaacccttgtaccagtgt

SEQ ID NO: 13493 - RNA, 18 nt, Synthetic Construct
  source 1..18: mol_type = other RNA
ggacgttgataggctggg

SEQ ID NO: 13494 - RNA, 18 nt, Synthetic Construct
  source 1..18: mol_type = other RNA
ggacgttgataggctggg

SEQ ID NO: 13495 - RNA, 22 nt, Synthetic Construct
  source 1..22: mol_type = other RNA
tagcagcacgtaaatattggtg

SEQ ID NO: 13496 - RNA, 22 nt, Synthetic Construct
  source 1..22: mol_type = other RNA
tagcagcacgtaaatattggtg

SEQ ID NO: 13497 - RNA, 20 nt, Synthetic Construct
  source 1..20: mol_type = other RNA
caatggccgggacagagggc

SEQ ID NO: 13498 - RNA, 22 nt, Synthetic Construct
  source 1..22: mol_type = other RNA
tgaggtagtaggttgtatagtt

SEQ ID NO: 13499 - RNA, 21 nt, Synthetic Construct
  source 1..21: mol_type = other RNA
aggttccggataagtaaagcc

SEQ ID NO: 13500 - RNA, 21 nt, Synthetic Construct
  source 1..21: mol_type = other RNA
aggttccggataagtaaagcc

SEQ ID NO: 13501 - RNA, 22 nt, Synthetic Construct
  source 1..22: mol_type = other RNA
tgaggtagtaggctgtatagtt

SEQ ID NO: 13502 - RNA, 22 nt, Synthetic Construct
  source 1..22: mol_type = other RNA
tgaggtagtaggctgtatagtt

SEQ ID NO: 13503 - RNA, 27 nt, Synthetic Construct
  source 1..27: mol_type = other RNA
ccccccactgcaaaatttgactggctt

SEQ ID NO: 13504 - RNA, 21 nt, Synthetic Construct
  source 1..21: mol_type = other RNA
taaggtagtaggttgtgtggt

SEQ ID NO: 13505 - RNA, 21 nt, Synthetic Construct
  source 1..21: mol_type = other RNA
taaggtagtaggttgtgtggt

SEQ ID NO: 13506 - RNA, 22 nt, Synthetic Construct
  source 1..22: mol_type = other RNA
tgaggtagtaggctgtgtggtt

SEQ ID NO: 13507 - RNA, 22 nt, Synthetic Construct
  source 1..22: mol_type = other RNA
tgaggtagtaggctgtgtggtt

SEQ ID NO: 13508 - RNA, 21 nt, Synthetic Construct
  source 1..21: mol_type = other RNA
tgtagtgtttcctactttatg

SEQ ID NO: 13509 - RNA, 21 nt, Synthetic Construct
  source 1..21: mol_type = other RNA
cactgatcgagtcgtcctgcg

SEQ ID NO: 13510 - RNA, 18 nt, Synthetic Construct
  source 1..18: mol_type = other RNA
ggtgcaagcgttaatcgg

SEQ ID NO: 13511 - RNA, 25 nt, Synthetic Construct
  source 1..25: mol_type = other RNA
tttccccttggggttgtaggaccac

SEQ ID NO: 13512 - RNA, 25 nt, Synthetic Construct
  source 1..25: mol_type = other RNA
tttccccttggggttgtaggaccac

SEQ ID NO: 13513 - RNA, 24 nt, Synthetic Construct
  source 1..24: mol_type = other RNA
tgtaaacacccccgactggaagct

SEQ ID NO: 13514 - RNA, 24 nt, Synthetic Construct
  source 1..24: mol_type = other RNA
tgtaaacacccccgactggaagct

SEQ ID NO: 13515 - RNA, 22 nt, Synthetic Construct
  source 1..22: mol_type = other RNA
tcctgtaccgagctgccccgag

SEQ ID NO: 13516 - RNA, 22 nt, Synthetic Construct
  source 1..22: mol_type = other RNA
tcctgtaccgagctgccccgag

SEQ ID NO: 13517 - RNA, 25 nt, Synthetic Construct
  source 1..25: mol_type = other RNA
ttgcagctgcctgggagtgacttct

SEQ ID NO: 13518 - RNA, 25 nt, Synthetic Construct
  source 1..25: mol_type = other RNA
ttgcagctgcctgggagtgacttct

SEQ ID NO: 13519 - RNA, 20 nt, Synthetic Construct
  source 1..20: mol_type = other RNA
cgaggtagtaggttgtgtgg

SEQ ID NO: 13520 - RNA, 19 nt, Synthetic Construct
  source 1..19: mol_type = other RNA
gggtgcaagcgttaatcgg

SEQ ID NO: 13521 - RNA, 28 nt, Synthetic Construct
  source 1..28: mol_type = other RNA
gctttgatccggagatttccgaatgggg

SEQ ID NO: 13522 - RNA, 28 nt, Synthetic Construct
  source 1..28: mol_type = other RNA
gctttgatccggagatttccgaatgggg

SEQ ID NO: 13523 - RNA, 19 nt, Synthetic Construct
  source 1..19: mol_type = other RNA
accaaggggtcgtgggttc

SEQ ID NO: 13524 - RNA, 27 nt, Synthetic Construct
  source 1..27: mol_type = other RNA
tcggctgttaaccgaaaggttggtggt

SEQ ID NO: 13525 - RNA, 21 nt, Synthetic Construct
  source 1..21: mol_type = other RNA
taaggtagtaggttgtatagt

SEQ ID NO: 13526 - RNA, 21 nt, Synthetic Construct
  source 1..21: mol_type = other RNA
taaggtagtaggttgtatagt

SEQ ID NO: 13527 - RNA, 22 nt, Synthetic Construct
  source 1..22: mol_type = other RNA
tgaggtagtaggttgtatggtt

SEQ ID NO: 13528 - RNA, 22 nt, Synthetic Construct
  source 1..22: mol_type = other RNA
tgaggtagtaggttgtatggtt

SEQ ID NO: 13529 - RNA, 16 nt, Synthetic Construct
  source 1..16: mol_type = other RNA
accgcttttgtcaggg

SEQ ID NO: 13530 - RNA, 23 nt, Synthetic Construct
  source 1..23: mol_type = other RNA
aggtaatacgacgtacttagtgt

SEQ ID NO: 13531 - RNA, 22 nt, Synthetic Construct
  source 1..22: mol_type = other RNA
tgaggtagtagattgtgtagtt

SEQ ID NO: 13532 - RNA, 22 nt, Synthetic Construct
  source 1..22: mol_type = other RNA
tgaggtagtagattgtgtagtt

SEQ ID NO: 13533 - RNA, 19 nt, Synthetic Construct
  source 1..19: mol_type = other RNA
agcagcattgtacagggct

SEQ ID NO: 13534 - RNA, 19 nt, Synthetic Construct
  source 1..19: mol_type = other RNA
agcagcattgtacagggct

SEQ ID NO: 13535 - RNA, 31 nt, Synthetic Construct; identical to SEQ ID NO: 4881
  source 1..31: mol_type = other RNA

SEQ ID NO: 13536 - RNA, 31 nt, Synthetic Construct; identical to SEQ ID NO: 4881
  source 1..31: mol_type = other RNA

SEQ ID NO: 13537 - RNA, 29 nt, Synthetic Construct
  source 1..29: mol_type = other RNA
gatgcgaaagcaggtcaaagtgatccggc

SEQ ID NO: 13538 - RNA, 29 nt, Synthetic Construct
  source 1..29: mol_type = other RNA
gatgcgaaagcaggtcaaagtgatccggc

SEQ ID NO: 13539 - RNA, 18 nt, Synthetic Construct
  source 1..18: mol_type = other RNA
gctgtgatggccgagtgg

SEQ ID NO: 13540 - RNA, 18 nt, Synthetic Construct
  source 1..18: mol_type = other RNA
gctgtgatggccgagtgg

SEQ ID NO: 13541 - RNA, 19 nt, Synthetic Construct
  source 1..19: mol_type = other RNA
cagagttctacagtccgac

SEQ ID NO: 13542 - RNA, 19 nt, Synthetic Construct
  source 1..19: mol_type = other RNA
cagagttctacagtccgac

SEQ ID NO: 13543 - RNA, 19 nt, Synthetic Construct
  source 1..19: mol_type = other RNA
tcctgtaccgatcaatagt

SEQ ID NO: 13544 - RNA, 22 nt, Synthetic Construct
  source 1..22: mol_type = other RNA
tgaggtagtaggttgtgtggct

SEQ ID NO: 13545 - RNA, 22 nt, Synthetic Construct
  source 1..22: mol_type = other RNA
tgaggtagtaggttgtgtggct

SEQ ID NO: 13546 - RNA, 21 nt, Synthetic Construct
  source 1..21: mol_type = other RNA
tgaggtagtaggttgtgtagt

SEQ ID NO: 13547 - RNA, 20 nt, Synthetic Construct
  source 1..20: mol_type = other RNA
taaggtagtaggttgtgtgg

SEQ ID NO: 13548 - RNA, 20 nt, Synthetic Construct
  source 1..20: mol_type = other RNA
taaggtagtaggttgtgtgg

SEQ ID NO: 13549 - RNA, 32 nt, Synthetic Construct; identical to SEQ ID NO: 2086
  source 1..32: mol_type = other RNA

SEQ ID NO: 13550 - RNA, 32 nt, Synthetic Construct; identical to SEQ ID NO: 2086
  source 1..32: mol_type = other RNA

SEQ ID NO: 13551 - RNA, 22 nt, Synthetic Construct
  source 1..22: mol_type = other RNA
tgaggtagtaggttgtgtggtc

SEQ ID NO: 13552 - RNA, 22 nt, Synthetic Construct
  source 1..22: mol_type = other RNA
tggaatgcaaagaagtatgtat

SEQ ID NO: 13553 - RNA, 22 nt, Synthetic Construct
  source 1..22: mol_type = other RNA
tgaggtggtagattgtatagtt

SEQ ID NO: 13554 - RNA, 25 nt, Synthetic Construct
  source 1..25: mol_type = other RNA
ttgagggtatgagatcgagacgaca

SEQ ID NO: 13555 - RNA, 39 nt, Synthetic Construct; identical to SEQ ID NO: 10211
  source 1..39: mol_type = other RNA

SEQ ID NO: 13556 - RNA, 23 nt, Synthetic Construct
  source 1..23: mol_type = other RNA
ggtagcgaaattccttgtcgggt

SEQ ID NO: 13557 - RNA, 21 nt, Synthetic Construct
  source 1..21: mol_type = other RNA
cgcatcccctagggcattggt

SEQ ID NO: 13558 - RNA, 23 nt, Synthetic Construct
  source 1..23: mol_type = other RNA
tggtaatacgacgcacttagtgt

SEQ ID NO: 13559 - RNA, 23 nt, Synthetic Construct
  source 1..23: mol_type = other RNA
tggtaatacgacgcacttagtgt

SEQ ID NO: 13560 - RNA, 22 nt, Synthetic Construct
  source 1..22: mol_type = other RNA
tcgtaccgtgagtaatagtgcg

SEQ ID NO: 13561 - RNA, 22 nt, Synthetic Construct
  source 1..22: mol_type = other RNA
tcgtaccgtgagtaatagtgcg

SEQ ID NO: 13562 - RNA, 23 nt, Synthetic Construct
  source 1..23: mol_type = other RNA
agcagcattgtacagggctgtga

SEQ ID NO: 13563 - RNA, 20 nt, Synthetic Construct
  source 1..20: mol_type = other RNA
cataaagtagaaagcactac

SEQ ID NO: 13564 - RNA, 20 nt, Synthetic Construct
  source 1..20: mol_type = other RNA
cataaagtagaaagcactac

SEQ ID NO: 13565 - RNA, 33 nt, Synthetic Construct; identical to SEQ ID NO: 3082
  source 1..33: mol_type = other RNA

SEQ ID NO: 13566 - RNA, 33 nt, Synthetic Construct; identical to SEQ ID NO: 3082
  source 1..33: mol_type = other RNA

SEQ ID NO: 13567 - RNA, 20 nt, Synthetic Construct
  source 1..20: mol_type = other RNA
ttatcagaatctccaggggt

SEQ ID NO: 13568 - RNA, 20 nt, Synthetic Construct
  source 1..20: mol_type = other RNA
ttatcagaatctccaggggt

SEQ ID NO: 13569 - RNA, 36 nt, Synthetic Construct; identical to SEQ ID NO: 10982
  source 1..36: mol_type = other RNA

SEQ ID NO: 13570 - RNA, 36 nt, Synthetic Construct; identical to SEQ ID NO: 10982
  source 1..36: mol_type = other RNA

SEQ ID NO: 13571 - RNA, 21 nt, Synthetic Construct
  source 1..21: mol_type = other RNA
actcggcgtggcgtcggtcgt

SEQ ID NO: 13572 - RNA, 20 nt, Synthetic Construct
  source 1..20: mol_type = other RNA
cccagtaaacggcggccgta

SEQ ID NO: 13573 - RNA, 24 nt, Synthetic Construct
  source 1..24: mol_type = other RNA
tgtaaacatcctacactctcagct

SEQ ID NO: 13574 - RNA, 24 nt, Synthetic Construct
  source 1..24: mol_type = other RNA
tgtaaacatcctacactctcagct

SEQ ID NO: 13575 - RNA, 23 nt, Synthetic Construct
  source 1..23: mol_type = other RNA
tccagtactgagctgccccgagt

SEQ ID NO: 13576 - RNA, 23 nt, Synthetic Construct
  source 1..23: mol_type = other RNA
ggctacattgtctgctgggtttc

SEQ ID NO: 13577 - RNA, 23 nt, Synthetic Construct
  source 1..23: mol_type = other RNA
tgagaggcagagagcgagacttt

SEQ ID NO: 13578 - RNA, 23 nt, Synthetic Construct
  source 1..23: mol_type = other RNA
tgagaggcagagagcgagacttt

SEQ ID NO: 13579 - RNA, 16 nt, Synthetic Construct
  source 1..16: mol_type = other RNA
gtctatggccatacca

SEQ ID NO: 13580 - RNA, 16 nt, Synthetic Construct
  source 1..16: mol_type = other RNA
gtctatggccatacca

SEQ ID NO: 13581 - RNA, 27 nt, Synthetic Construct
  source 1..27: mol_type = other RNA
ccccccactgttaaatttgactggctt

SEQ ID NO: 13582 - RNA, 27 nt, Synthetic Construct
  source 1..27: mol_type = other RNA
ttcaacttaacttgaccgctctgacca

SEQ ID NO: 13583 - RNA, 27 nt, Synthetic Construct
  source 1..27: mol_type = other RNA
ttcaacttaacttgaccgctctgacca

SEQ ID NO: 13584 - RNA, 21 nt, Synthetic Construct
  source 1..21: mol_type = other RNA
tggagtgtgacaatggtgtct

SEQ ID NO: 13585 - RNA, 21 nt, Synthetic Construct
  source 1..21: mol_type = other RNA
tggagtgtgacaatggtgtct

SEQ ID NO: 13586 - RNA, 20 nt, Synthetic Construct
  source 1..20: mol_type = other RNA
ccttggggttgtaggaccac

SEQ ID NO: 13587 - RNA, 18 nt, Synthetic Construct
  source 1..18: mol_type = other RNA
cagcactctgcaaagacg

SEQ ID NO: 13588 - RNA, 16 nt, Synthetic Construct
  source 1..16: mol_type = other RNA
tcgtgacgatagtgca

SEQ ID NO: 13589 - RNA, 16 nt, Synthetic Construct
  source 1..16: mol_type = other RNA
tcgtgacgatagtgca

SEQ ID NO: 13590 - RNA, 22 nt, Synthetic Construct
  source 1..22: mol_type = other RNA
tgaggtagtagattgtataatt

SEQ ID NO: 13591 - RNA, 20 nt, Synthetic Construct
  source 1..20: mol_type = other RNA
cgaggtagtaggttgtatag

SEQ ID NO: 13592 - RNA, 20 nt, Synthetic Construct
  source 1..20: mol_type = other RNA
cgaggtagtaggttgtatag

SEQ ID NO: 13593 - RNA, 16 nt, Synthetic Construct
  source 1..16: mol_type = other RNA
ggcgggagtaactatg

SEQ ID NO: 13594 - RNA, 16 nt, Synthetic Construct
  source 1..16: mol_type = other RNA
ggcgggagtaactatg

SEQ ID NO: 13595 - RNA, 22 nt, Synthetic Construct
  source 1..22: mol_type = other RNA
tatcagcacgtaaatattggcg

SEQ ID NO: 13596 - RNA, 22 nt, Synthetic Construct
  source 1..22: mol_type = other RNA
tatcagcacgtaaatattggcg

SEQ ID NO: 13597 - RNA, 22 nt, Synthetic Construct
  source 1..22: mol_type = other RNA
taactcctcaagcgaatctcgc

SEQ ID NO: 13598 - RNA, 19 nt, Synthetic Construct
  source 1..19: mol_type = other RNA
agtcgacgtatagggtgtg

SEQ ID NO: 13599 - RNA, 19 nt, Synthetic Construct
  source 1..19: mol_type = other RNA
agtcgacgtatagggtgtg

SEQ ID NO: 13600 - RNA, 22 nt, Synthetic Construct
  source 1..22: mol_type = other RNA
tgaggtagtagatcgtatagtt

SEQ ID NO: 13601 - RNA, 22 nt, Synthetic Construct
  source 1..22: mol_type = other RNA
tgaggtagtagatcgtatagtt

SEQ ID NO: 13602 - RNA, 23 nt, Synthetic Construct
  source 1..23: mol_type = other RNA
tcctgtactgagctgccctgaga

SEQ ID NO: 13603 - RNA, 18 nt, Synthetic Construct
  source 1..18: mol_type = other RNA
gaagttgaccgcctgggg

SEQ ID NO: 13604 - RNA, 22 nt, Synthetic Construct
  source 1..22: mol_type = other RNA
tcgtaccgtgagtaatagtgcg

SEQ ID NO: 13605 - RNA, 29 nt, Synthetic Construct
  source 1..29: mol_type = other RNA
caacgctagacgaactgcatggaaaggca

SEQ ID NO: 13606 - RNA, 29 nt, Synthetic Construct
  source 1..29: mol_type = other RNA
caacgctagacgaactgcatggaaaggca

SEQ ID NO: 13607 - RNA, 22 nt, Synthetic Construct
  source 1..22: mol_type = other RNA
ngaggtagtagattgtatagtt

SEQ ID NO: 13608 - RNA, 22 nt, Synthetic Construct
  source 1..22: mol_type = other RNA
ngaggtagtagattgtatagtt

SEQ ID NO: 13609 - RNA, 21 nt, Synthetic Construct
  source 1..21: mol_type = other RNA
ggaatcgctagtaatcgcgga

SEQ ID NO: 13610 - RNA, 21 nt, Synthetic Construct
  source 1..21: mol_type = other RNA
ggaatcgctagtaatcgcgga

SEQ ID NO: 13611 - RNA, 34 nt, Synthetic Construct; identical to SEQ ID NO: 2265
  source 1..34: mol_type = other RNA

SEQ ID NO: 13612 - RNA, 34 nt, Synthetic Construct; identical to SEQ ID NO: 2265
  source 1..34: mol_type = other RNA

SEQ ID NO: 13613 - RNA, 23 nt, Synthetic Construct
  source 1..23: mol_type = other RNA
tgaggggcagagagagagacttt

SEQ ID NO: 13614 - RNA, 23 nt, Synthetic Construct
  source 1..23: mol_type = other RNA
tgaggggcagagagagagacttt

SEQ ID NO: 13615 - RNA, 15 nt, Synthetic Construct
  source 1..15: mol_type = other RNA
gctatgggatttgtt

SEQ ID NO: 13616 - RNA, 23 nt, Synthetic Construct
  source 1..23: mol_type = other RNA
tggggggcagagagcgagacttt

SEQ ID NO: 13617 - RNA, 26 nt, Synthetic Construct
  source 1..26: mol_type = other RNA
gatttccccttggggttgtaggacca

SEQ ID NO: 13618 - RNA, 23 nt, Synthetic Construct
  source 1..23: mol_type = other RNA
tccctggtggtctagtggttagg

SEQ ID NO: 13619 - RNA, 15 nt, Synthetic Construct
  source 1..15: mol_type = other RNA
ggccgtcgtcagctc

SEQ ID NO: 13620 - RNA, 15 nt, Synthetic Construct
  source 1..15: mol_type = other RNA
ggccgtcgtcagctc

SEQ ID NO: 13621 - RNA, 16 nt, Synthetic Construct
  source 1..16: mol_type = other RNA
ggaattgacggaaggg

SEQ ID NO: 13622 - RNA, 16 nt, Synthetic Construct
  source 1..16: mol_type = other RNA
ggaattgacggaaggg

SEQ ID NO: 13623 - RNA, 21 nt, Synthetic Construct
  source 1..21: mol_type = other RNA
ttaatgctaatcgtgataggg

SEQ ID NO: 13624 - RNA, 21 nt, Synthetic Construct
  source 1..21: mol_type = other RNA
ttaatgctaatcgtgataggg

SEQ ID NO: 13625 - RNA, 22 nt, Synthetic Construct
  source 1..22: mol_type = other RNA
ccccttggggttgtaggaccac

SEQ ID NO: 13626 - RNA, 17 nt, Synthetic Construct
  source 1..17: mol_type = other RNA
taggtcatcgtcaggct

SEQ ID NO: 13627 - RNA, 17 nt, Synthetic Construct
  source 1..17: mol_type = other RNA
taggtcatcgtcaggct

SEQ ID NO: 13628 - RNA, 25 nt, Synthetic Construct
  source 1..25: mol_type = other RNA
ttgaggatgtgagatcgagacgaca

SEQ ID NO: 13629 - RNA, 25 nt, Synthetic Construct
  source 1..25: mol_type = other RNA
ttgaggatgtgagatcgagacgaca

SEQ ID NO: 13630 - RNA, 20 nt, Synthetic Construct
  source 1..20: mol_type = other RNA
gggttcgattccggagaggg

SEQ ID NO: 13631 - RNA, 20 nt, Synthetic Construct
  source 1..20: mol_type = other RNA
gggttcgattccggagaggg

SEQ ID NO: 13632 - RNA, 22 nt, Synthetic Construct
  source 1..22: mol_type = other RNA
tcaaatcccggacgagccccca

SEQ ID NO: 13633 - RNA, 22 nt, Synthetic Construct
  source 1..22: mol_type = other RNA
tcaaatcccggacgagccccca

SEQ ID NO: 13634 - RNA, 18 nt, Synthetic Construct
  source 1..18: mol_type = other RNA
gctattgacgaccgtacc

SEQ ID NO: 13635 - RNA, 27 nt, Synthetic Construct
  source 1..27: mol_type = other RNA
ccccccactgttaaatttgactggctt

SEQ ID NO: 13636 - RNA, 28 nt, Synthetic Construct
  source 1..28: mol_type = other RNA
ccccccaccgctaaatttgactggcttt

SEQ ID NO: 13637 - RNA, 16 nt, Synthetic Construct
  source 1..16: mol_type = other RNA
agtcaggatgttggct

SEQ ID NO: 13638 - RNA, 16 nt, Synthetic Construct
  source 1..16: mol_type = other RNA
agtcaggatgttggct

SEQ ID NO: 13639 - RNA, 22 nt, Synthetic Construct
  source 1..22: mol_type = other RNA
tgaggtagtagattgtatggtt

SEQ ID NO: 13640 - RNA, 22 nt, Synthetic Construct
  source 1..22: mol_type = other RNA
tgaggtagtagattgtatggtt

SEQ ID NO: 13641 - RNA, 16 nt, Synthetic Construct
  source 1..16: mol_type = other RNA
gtccggatcgtagtct

SEQ ID NO: 13642 - RNA, 22 nt, Synthetic Construct
  source 1..22: mol_type = other RNA
tggagtgtgacaatggtgcttg

SEQ ID NO: 13643 - RNA, 22 nt, Synthetic Construct
  source 1..22: mol_type = other RNA
tggagtgtgacaatggtgcttg

SEQ ID NO: 13644 - RNA, 23 nt, Synthetic Construct
  source 1..23: mol_type = other RNA
tggtagtacgacgtacttagtgt

SEQ ID NO: 13645 - RNA, 23 nt, Synthetic Construct
  source 1..23: mol_type = other RNA
tggtagtacgacgtacttagtgt

SEQ ID NO: 13646 - RNA, 22 nt, Synthetic Construct
  source 1..22: mol_type = other RNA
tgtagtgtttcctactttatgg

SEQ ID NO: 13647 - RNA, 22 nt, Synthetic Construct
  source 1..22: mol_type = other RNA
tcgtatcgtgagtaataatgcg

SEQ ID NO: 13648 - RNA, 22 nt, Synthetic Construct
  source 1..22: mol_type = other RNA
tcgtatcgtgagtaataatgcg

SEQ ID NO: 13649 - RNA, 16 nt, Synthetic Construct
  source 1..16: mol_type = other RNA
ggcgggagtaactatg

SEQ ID NO: 13650 - RNA, 16 nt, Synthetic Construct
  source 1..16: mol_type = other RNA
ggcgggagtaactatg

SEQ ID NO: 13651 - RNA, 24 nt, Synthetic Construct
  source 1..24: mol_type = other RNA
tgggtaatacgacgtacttagtgt

SEQ ID NO: 13652 - RNA, 24 nt, Synthetic Construct
  source 1..24: mol_type = other RNA
tgggtaatacgacgtacttagtgt

SEQ ID NO: 13653 - RNA, 22 nt, Synthetic Construct
  source 1..22: mol_type = other RNA
ccccccactgctaaatttgact

SEQ ID NO: 13654 - RNA, 22 nt, Synthetic Construct
  source 1..22: mol_type = other RNA
ccccccactgctaaatttgact

SEQ ID NO: 13655 - RNA, 22 nt, Synthetic Construct
  source 1..22: mol_type = other RNA
tggggtagtaggttgtgtggtt

SEQ ID NO: 13656 - RNA, 22 nt, Synthetic Construct
  source 1..22: mol_type = other RNA
tggggtagtaggttgtgtggtt

SEQ ID NO: 13657 - RNA, 27 nt, Synthetic Construct
  source 1..27: mol_type = other RNA
ccccccactgctaaatttgactggcct

SEQ ID NO: 13658 - RNA, 27 nt, Synthetic Construct
  source 1..27: mol_type = other RNA
ccccccactgctaaatttgactggcct

SEQ ID NO: 13659 - RNA, 24 nt, Synthetic Construct
  source 1..24: mol_type = other RNA
tcggctcatctcatcctggggctg

SEQ ID NO: 13660 - RNA, 19 nt, Synthetic Construct
  source 1..19: mol_type = other RNA
ccgtgttcggaagattttc

SEQ ID NO: 13661 - RNA, 19 nt, Synthetic Construct
  source 1..19: mol_type = other RNA
ccgtgttcggaagattttc

SEQ ID NO: 13662 - RNA, 22 nt, Synthetic Construct
  source 1..22: mol_type = other RNA
tggaacgtaaagaagtatgtat

SEQ ID NO: 13663 - RNA, 22 nt, Synthetic Construct
  source 1..22: mol_type = other RNA
tgaggtagtagtttgtgcagtt

SEQ ID NO: 13664 - RNA, 22 nt, Synthetic Construct
  source 1..22: mol_type = other RNA
tgaggtagaaggttgtatagtt

SEQ ID NO: 13665 - RNA, 22 nt, Synthetic Construct
  source 1..22: mol_type = other RNA
tgaggtagaaggttgtatagtt

SEQ ID NO: 13666 - RNA, 18 nt, Synthetic Construct
  source 1..18: mol_type = other RNA
gctgtgatggccgagtgg

SEQ ID NO: 13667 - RNA, 25 nt, Synthetic Construct
  source 1..25: mol_type = other RNA
gcattggtggttcagtggtagaatt

SEQ ID NO: 13668 - RNA, 25 nt, Synthetic Construct
  source 1..25: mol_type = other RNA
gcattggtggttcagtggtagaatt

SEQ ID NO: 13669 - RNA, 22 nt, Synthetic Construct
  source 1..22: mol_type = other RNA
tgaggtagtagcttgtgctgtt

SEQ ID NO: 13670 - RNA, 23 nt, Synthetic Construct
  source 1..23: mol_type = other RNA
ggcggttatgcaagacagaggtg

SEQ ID NO: 13671 - RNA, 23 nt, Synthetic Construct
  source 1..23: mol_type = other RNA
tcctgtgctgagctgccccgagt

SEQ ID NO: 13672 - RNA, 23 nt, Synthetic Construct
  source 1..23: mol_type = other RNA
tcctgtgctgagctgccccgagt

SEQ ID NO: 13673 - RNA, 24 nt, Synthetic Construct
  source 1..24: mol_type = other RNA
caaagtgctgttcgtgcaggtaga

SEQ ID NO: 13674 - RNA, 18 nt, Synthetic Construct
  source 1..18: mol_type = other RNA
cccttgtcattagttgct

SEQ ID NO: 13675 - RNA, 18 nt, Synthetic Construct
  source 1..18: mol_type = other RNA
cccttgtcattagttgct

SEQ ID NO: 13676 - RNA, 21 nt, Synthetic Construct
  source 1..21: mol_type = other RNA
atcacattgccagggatttcc

SEQ ID NO: 13677 - RNA, 22 nt, Synthetic Construct
  source 1..22: mol_type = other RNA
cactgcacttgtctcggtctga

SEQ ID NO: 13678 - RNA, 22 nt, Synthetic Construct
  source 1..22: mol_type = other RNA
cactgcacttgtctcggtctga

SEQ ID NO: 13679 - RNA, 17 nt, Synthetic Construct
  source 1..17: mol_type = other RNA
cgatctgtagctggtct

SEQ ID NO: 13680 - RNA, 17 nt, Synthetic Construct
  source 1..17: mol_type = other RNA
cgatctgtagctggtct

SEQ ID NO: 13681 - RNA, 24 nt, Synthetic Construct
  source 1..24: mol_type = other RNA
tcactgatcgagtcgtcctgcgcg

SEQ ID NO: 13682 - RNA, 36 nt, Synthetic Construct; identical to SEQ ID NO: 744
  source 1..36: mol_type = other RNA

SEQ ID NO: 13683 - RNA, 20 nt, Synthetic Construct
  source 1..20: mol_type = other RNA
tcctgtaccgatcaatagtg

SEQ ID NO: 13684 - RNA, 20 nt, Synthetic Construct
  source 1..20: mol_type = other RNA
tcctgtaccgatcaatagtg

SEQ ID NO: 13685 - RNA, 19 nt, Synthetic Construct
  source 1..19: mol_type = other RNA
atagggaacgtgagctggg

SEQ ID NO: 13686 - RNA, 19 nt, Synthetic Construct
  source 1..19: mol_type = other RNA
atagggaacgtgagctggg

SEQ ID NO: 13687 - RNA, 18 nt, Synthetic Construct
  source 1..18: mol_type = other RNA
aagaccctgttgagcttg

SEQ ID NO: 13688 - RNA, 18 nt, Synthetic Construct
  source 1..18: mol_type = other RNA
aagaccctgttgagcttg

SEQ ID NO: 13689 - RNA, 23 nt, Synthetic Construct
  source 1..23: mol_type = other RNA
tggtaatacgacgtacatagtgt

SEQ ID NO: 13690 - RNA, 23 nt, Synthetic Construct
  source 1..23: mol_type = other RNA
tggtaatacgacgtacatagtgt

SEQ ID NO: 13691 - RNA, 22 nt, Synthetic Construct
  source 1..22: mol_type = other RNA
ggtagcgaaattccttgtcggg

SEQ ID NO: 13692 - RNA, 18 nt, Synthetic Construct
  source 1..18: mol_type = other RNA
accaaggggtcgtgggtt

SEQ ID NO: 13693 - RNA, 22 nt, Synthetic Construct
  source 1..22: mol_type = other RNA
taccctgtagaaccgaatttgt

SEQ ID NO: 13694 - RNA, 22 nt, Synthetic Construct
  source 1..22: mol_type = other RNA
taccctgtagaaccgaatttgt

SEQ ID NO: 13695 - RNA, 24 nt, Synthetic Construct
  source 1..24: mol_type = other RNA
atcacattgccagggatttccaat

SEQ ID NO: 13696 - RNA, 22 nt, Synthetic Construct
  source 1..22: mol_type = other RNA
tcctgtgctgagctgccccgag

SEQ ID NO: 13697 - RNA, 22 nt, Synthetic Construct
  source 1..22: mol_type = other RNA
tcctgtgctgagctgccccgag

SEQ ID NO: 13698 - RNA, 16 nt, Synthetic Construct
  source 1..16: mol_type = other RNA
cagtcaggatgttggc

SEQ ID NO: 13699 - RNA, 16 nt, Synthetic Construct
  source 1..16: mol_type = other RNA
cagtcaggatgttggc

SEQ ID NO: 13700 - RNA, 22 nt, Synthetic Construct
  source 1..22: mol_type = other RNA
tgaggtaggaggttgtatagtt

SEQ ID NO: 13701 - RNA, 23 nt, Synthetic Construct
  source 1..23: mol_type = other RNA
ggcagggttcgtgactggggtga

SEQ ID NO: 13702 - RNA, 23 nt, Synthetic Construct
  source 1..23: mol_type = other RNA
ggcagggttcgtgactggggtga

SEQ ID NO: 13703 - RNA, 24 nt, Synthetic Construct
  source 1..24: mol_type = other RNA
tatatcggaacgtgcccagtcgtg

SEQ ID NO: 13704 - RNA, 24 nt, Synthetic Construct
  source 1..24: mol_type = other RNA
tatatcggaacgtgcccagtcgtg

SEQ ID NO: 13705 - RNA, 21 nt, Synthetic Construct
  source 1..21: mol_type = other RNA
cataattacttttggtacgcg

SEQ ID NO: 13706 - RNA, 36 nt, Synthetic Construct; identical to SEQ ID NO: 2506
  source 1..36: mol_type = other RNA

SEQ ID NO: 13707 - RNA, 22 nt, Synthetic Construct
  source 1..22: mol_type = other RNA
tgaggtagtagtttgtgccgtt

SEQ ID NO: 13708 - RNA, 22 nt, Synthetic Construct
  source 1..22: mol_type = other RNA
tgaggtagtagtttgtgccgtt

SEQ ID NO: 13709 - RNA, 22 nt, Synthetic Construct
  source 1..22: mol_type = other RNA
tgagaactgaactccatgggtt

SEQ ID NO: 13710 - RNA, 21 nt, Synthetic Construct
  source 1..21: mol_type = other RNA
ngaggtagtaggttgtgtggt

SEQ ID NO: 13711 - RNA, 21 nt, Synthetic Construct
  source 1..21: mol_type = other RNA
ngaggtagtaggttgtgtggt

SEQ ID NO: 13712 - RNA, 30 nt, Synthetic Construct; identical to SEQ ID NO: 1958
  source 1..30: mol_type = other RNA

SEQ ID NO: 13713 - RNA, 30 nt, Synthetic Construct; identical to SEQ ID NO: 1958
  source 1..30: mol_type = other RNA

SEQ ID NO: 13714 - RNA, 22 nt, Synthetic Construct
  source 1..22: mol_type = other RNA
ttcaagtaatccaggatgggct

SEQ ID NO: 13715 - RNA, 18 nt, Synthetic Construct
  source 1..18: mol_type = other RNA
tcagtagctcgaggaaaa

SEQ ID NO: 13716 - RNA, 18 nt, Synthetic Construct
  source 1..18: mol_type = other RNA
tcagtagctcgaggaaaa

SEQ ID NO: 13717 - RNA, 27 nt, Synthetic Construct
  source 1..27: mol_type = other RNA
ccccccaccgctaaatttgactggctt

SEQ ID NO: 13718 - RNA, 27 nt, Synthetic Construct
  source 1..27: mol_type = other RNA
ccccccaccgctaaatttgactggctt

SEQ ID NO: 13719 - RNA, 18 nt, Synthetic Construct
  source 1..18: mol_type = other RNA
atcccactcctgacacca

SEQ ID NO: 13720 - RNA, 18 nt, Synthetic Construct
  source 1..18: mol_type = other RNA
atcccactcctgacacca

SEQ ID NO: 13721 - RNA, 36 nt, Synthetic Construct; identical to SEQ ID NO: 752
  source 1..36: mol_type = other RNA

SEQ ID NO: 13722 - RNA, 36 nt, Synthetic Construct; identical to SEQ ID NO: 752
  source 1..36: mol_type = other RNA

SEQ ID NO: 13723 - RNA, 23 nt, Synthetic Construct
  source 1..23: mol_type = other RNA
tgaggtagtagattgtatagttc

SEQ ID NO: 13724 - RNA, 22 nt, Synthetic Construct
  source 1..22: mol_type = other RNA
tcggatccgtctgagcttggct

SEQ ID NO: 13725 - RNA, 18 nt, Synthetic Construct
  source 1..18: mol_type = other RNA
gctgtgatggccgagtgg

SEQ ID NO: 13726 - RNA, 22 nt, Synthetic Construct
  source 1..22: mol_type = other RNA
tgaggtagtagtctgtgctgtt

SEQ ID NO: 13727 - RNA, 22 nt, Synthetic Construct
  source 1..22: mol_type = other RNA
tgaggtagtagtctgtgctgtt

SEQ ID NO: 13728 - RNA, 37 nt, Synthetic Construct; identical to SEQ ID NO: 2365
  source 1..37: mol_type = other RNA

SEQ ID NO: 13729 - RNA, 22 nt, Synthetic Construct
  source 1..22: mol_type = other RNA
tactgcacttgtcccggcctgt

SEQ ID NO: 13730 - RNA, 21 nt, Synthetic Construct
  source 1..21: mol_type = other RNA
aagaaagattgcaagaactgc

SEQ ID NO: 13731 - RNA, 21 nt, Synthetic Construct
  source 1..21: mol_type = other RNA
aagaaagattgcaagaactgc

SEQ ID NO: 13732 - RNA, 23 nt, Synthetic Construct
  source 1..23: mol_type = other RNA
tgaggtagtaggttgtgtggtta

SEQ ID NO: 13733 - RNA, 34 nt, Synthetic Construct
  source 1..34: mol_type = other RNA
tcccatatggtctagcggttaggattcctggttt

SEQ ID NO: 13734 - RNA, 34 nt, Synthetic Construct; identical to SEQ ID NO: 13733
  source 1..34: mol_type = other RNA

SEQ ID NO: 13735 - RNA, 21 nt, Synthetic Construct
  source 1..21: mol_type = other RNA
tgaggtagtaggttgtatagc

SEQ ID NO: 13736 - RNA, 32 nt, Synthetic Construct; identical to SEQ ID NO: 1128
  source 1..32: mol_type = other RNA

SEQ ID NO: 13737 - RNA, 32 nt, Synthetic Construct; identical to SEQ ID NO: 1128
  source 1..32: mol_type = other RNA

SEQ ID NO: 13738 - RNA, 22 nt, Synthetic Construct
  source 1..22: mol_type = other RNA
aacggaatcccaaaagcagctg

SEQ ID NO: 13739 - RNA, 22 nt, Synthetic Construct
  source 1..22: mol_type = other RNA
aacggaatcccaaaagcagctg

SEQ ID NO: 13740 - RNA, 21 nt, Synthetic Construct
  source 1..21: mol_type = other RNA
cgaggtagtagtttgtgctgt

SEQ ID NO: 13741 - RNA, 23 nt, Synthetic Construct
  source 1..23: mol_type = other RNA
tggtaatacgacgtactaagtgt

SEQ ID NO: 13742 - RNA, 23 nt, Synthetic Construct
  source 1..23: mol_type = other RNA
tggtaatacgacgtactaagtgt

SEQ ID NO: 13743 - RNA, 22 nt, Synthetic Construct
  source 1..22: mol_type = other RNA
tgaggtggtaggttgtatagtt

SEQ ID NO: 13744 - RNA, 22 nt, Synthetic Construct
  source 1..22: mol_type = other RNA
tgaggtggtaggttgtatagtt

SEQ ID NO: 13745 - RNA, 31 nt, Synthetic Construct; identical to SEQ ID NO: 10138
  source 1..31: mol_type = other RNA

SEQ ID NO: 13746 - RNA, 20 nt, Synthetic Construct
  source 1..20: mol_type = other RNA
cggggcagctcagtacagga

SEQ ID NO: 13747 - RNA, 20 nt, Synthetic Construct
  source 1..20: mol_type = other RNA
cggggcagctcagtacagga

SEQ ID NO: 13748 - RNA, 21 nt, Synthetic Construct
  source 1..21: mol_type = other RNA
tggagtgtgacaatggtgttc

SEQ ID NO: 13749 - RNA, 21 nt, Synthetic Construct
  source 1..21: mol_type = other RNA
tggagtgtgacaatggtgttc

SEQ ID NO: 13750 - RNA, 22 nt, Synthetic Construct
  source 1..22: mol_type = other RNA
tgagatagtaggttgtgtggtt

SEQ ID NO: 13751 - RNA, 37 nt, Synthetic Construct; identical to SEQ ID NO: 2447
  source 1..37: mol_type = other RNA

SEQ ID NO: 13752 - RNA, 37 nt, Synthetic Construct; identical to SEQ ID NO: 2447
  source 1..37: mol_type = other RNA

SEQ ID NO: 13753 - RNA, 19 nt, Synthetic Construct
  source 1..19: mol_type = other RNA
gcgaaattccttgtcgggt

SEQ ID NO: 13754 - RNA, 21 nt, Synthetic Construct
  source 1..21: mol_type = other RNA
tcagtgcatcacagaactttg

SEQ ID NO: 13755 - RNA, 16 nt, Synthetic Construct
  source 1..16: mol_type = other RNA
gcagacgaagtgagtg

SEQ ID NO: 13756 - RNA, 16 nt, Synthetic Construct
  source 1..16: mol_type = other RNA
gcagacgaagtgagtg

SEQ ID NO: 13757 - RNA, 22 nt, Synthetic Construct
  source 1..22: mol_type = other RNA
gctcacggaaagagaatgaagc

SEQ ID NO: 13758 - RNA, 22 nt, Synthetic Construct
  source 1..22: mol_type = other RNA
tcgtgccgtgagtaataatgcg

SEQ ID NO: 13759 - RNA, 36 nt, Synthetic Construct; identical to SEQ ID NO: 10982
  source 1..36: mol_type = other RNA

SEQ ID NO: 13760 - RNA, 21 nt, Synthetic Construct
  source 1..21: mol_type = other RNA
tgaggtagtagactgtatagt

SEQ ID NO: 13761 - RNA, 23 nt, Synthetic Construct
  source 1..23: mol_type = other RNA
tggtaataagacgtacttagtgt

SEQ ID NO: 13762 - RNA, 35 nt, Synthetic Construct; identical to SEQ ID NO: 2567
  source 1..35: mol_type = other RNA

SEQ ID NO: 13763 - RNA, 35 nt, Synthetic Construct; identical to SEQ ID NO: 2567
  source 1..35: mol_type = other RNA

SEQ ID NO: 13764 - RNA, 24 nt, Synthetic Construct
  source 1..24: mol_type = other RNA
cgtaaacatccccgactggaagct

SEQ ID NO: 13765 - RNA, 35 nt, Synthetic Construct; identical to SEQ ID NO: 2399
  source 1..35: mol_type = other RNA

SEQ ID NO: 13766 - RNA, 35 nt, Synthetic Construct; identical to SEQ ID NO: 2399
  source 1..35: mol_type = other RNA

SEQ ID NO: 13767 - RNA, 27 nt, Synthetic Construct
  source 1..27: mol_type = other RNA
gttggttcaagcgtgtagtcgtgctct

SEQ ID NO: 13768 - RNA, 27 nt, Synthetic Construct
  source 1..27: mol_type = other RNA
gttggttcaagcgtgtagtcgtgctct

SEQ ID NO: 13769 - RNA, 23 nt, Synthetic Construct
  source 1..23: mol_type = other RNA
aatgacacgatcactcccgttgt

SEQ ID NO: 13770 - RNA, 23 nt, Synthetic Construct
  source 1..23: mol_type = other RNA
aatgacacgatcactcccgttgt

SEQ ID NO: 13771 - RNA, 22 nt, Synthetic Construct
  source 1..22: mol_type = other RNA
gcgttgcaaccagtgccggggg

SEQ ID NO: 13772 - RNA, 22 nt, Synthetic Construct
  source 1..22: mol_type = other RNA
agggctgggtcggtcgggctgg

SEQ ID NO: 13773 - RNA, 22 nt, Synthetic Construct
  source 1..22: mol_type = other RNA
agggctgggtcggtcgggctgg

SEQ ID NO: 13774 - RNA, 21 nt, Synthetic Construct
  source 1..21: mol_type = other RNA
tgaggaagtagattgtatagt

SEQ ID NO: 13775 - RNA, 23 nt, Synthetic Construct
  source 1..23: mol_type = other RNA
tacccattgcatatcggagttgt

SEQ ID NO: 13776 - RNA, 23 nt, Synthetic Construct
  source 1..23: mol_type = other RNA
tacccattgcatatcggagttgt

SEQ ID NO: 13777 - RNA, 22 nt, Synthetic Construct
  source 1..22: mol_type = other RNA
tgaggtagtagattgtgtggtt

SEQ ID NO: 13778 - RNA, 22 nt, Synthetic Construct
  source 1..22: mol_type = other RNA
tgaggtagtagattgtgtggtt

SEQ ID NO: 13779 - RNA, 23 nt, Synthetic Construct
  source 1..23: mol_type = other RNA
ttcaagtaattcaggataggttt

SEQ ID NO: 13780 - RNA, 26 nt, Synthetic Construct
  source 1..26: mol_type = other RNA
ccccccactgctaatttgactggctt

SEQ ID NO: 13781 - RNA, 26 nt, Synthetic Construct
  source 1..26: mol_type = other RNA
ccccccactgctaatttgactggctt

SEQ ID NO: 13782 - RNA, 23 nt, Synthetic Construct
  source 1..23: mol_type = other RNA
cgctcacggaaagagaatgaagc

SEQ ID NO: 13783 - RNA, 22 nt, Synthetic Construct
  source 1..22: mol_type = other RNA
cggaatgtaaagaagtatgtat

SEQ ID NO: 13784 - RNA, 22 nt, Synthetic Construct
  source 1..22: mol_type = other RNA
cggaatgtaaagaagtatgtat

SEQ ID NO: 13785 - RNA, 16 nt, Synthetic Construct
  source 1..16: mol_type = other RNA
gtctatggccatacca

SEQ ID NO: 13786 - RNA, 20 nt, Synthetic Construct
  source 1..20: mol_type = other RNA
agaggtagtaggttgtgtgg

SEQ ID NO: 13787 - RNA, 23 nt, Synthetic Construct
  source 1..23: mol_type = other RNA
tggcaatacgacgtacttagtgt

SEQ ID NO: 13788 - RNA, 34 nt, Synthetic Construct; identical to SEQ ID NO: 2265
  source 1..34: mol_type = other RNA

SEQ ID NO: 13789 - RNA, 22 nt, Synthetic Construct
  source 1..22: mol_type = other RNA
taaatccttaagcgaatctcgc

SEQ ID NO: 13790 - RNA, 22 nt, Synthetic Construct
  source 1..22: mol_type = other RNA
taaatccttaagcgaatctcgc

SEQ ID NO: 13791 - RNA, 19 nt, Synthetic Construct
  source 1..19: mol_type = other RNA
ctgatcgagtcgtcctgcg

SEQ ID NO: 13792 - RNA, 19 nt, Synthetic Construct
  source 1..19: mol_type = other RNA
ctgatcgagtcgtcctgcg

SEQ ID NO: 13793 - RNA, 21 nt, Synthetic Construct
  source 1..21: mol_type = other RNA
tgaggggcagagagcgagaca

SEQ ID NO: 13794 - RNA, 21 nt, Synthetic Construct
  source 1..21: mol_type = other RNA
tgaggggcagagagcgagaca

SEQ ID NO: 13795 - RNA, 16 nt, Synthetic Construct
  source 1..16: mol_type = other RNA
ggcgggggtcgctggt

SEQ ID NO: 13796 - RNA, 22 nt, Synthetic Construct
  source 1..22: mol_type = other RNA
tgaggtagtaggttgtgtggct

SEQ ID NO: 13797 - RNA, 22 nt, Synthetic Construct
  source 1..22: mol_type = other RNA
tgaggtagtaggttgtgtggct

SEQ ID NO: 13798 - RNA, 24 nt, Synthetic Construct
  source 1..24: mol_type = other RNA
tgaggtagtaggttgtgtggttaa

SEQ ID NO: 13799 - RNA, 24 nt, Synthetic Construct
  source 1..24: mol_type = other RNA
tgaggtagtaggttgtgtggttaa

SEQ ID NO: 13800 - RNA, 22 nt, Synthetic Construct
  source 1..22: mol_type = other RNA
tcctgcactgagctgccccgag

SEQ ID NO: 13801 - RNA, 22 nt, Synthetic Construct
  source 1..22: mol_type = other RNA
tcctgcactgagctgccccgag

SEQ ID NO: 13802 - RNA, 21 nt, Synthetic Construct
  source 1..21: mol_type = other RNA
acagtagtctgcacattggtt

SEQ ID NO: 13803 - RNA, 21 nt, Synthetic Construct
  source 1..21: mol_type = other RNA
acagtagtctgcacattggtt

SEQ ID NO: 13804 - RNA, 16 nt, Synthetic Construct
  source 1..16: mol_type = other RNA
tcgtgacgatagtgca

SEQ ID NO: 13805 - RNA, 31 nt, Synthetic Construct
  source 1..31: mol_type = other RNA
tcccacatggtctagcggttaggattcctgg

SEQ ID NO: 13806 - RNA, 31 nt, Synthetic Construct; identical to SEQ ID NO: 13805
  source 1..31: mol_type = other RNA

SEQ ID NO: 13807 - RNA, 22 nt, Synthetic Construct
  source 1..22: mol_type = other RNA
tggcagcacgtaaatattggcg

SEQ ID NO: 13808 - RNA, 22 nt, Synthetic Construct
  source 1..22: mol_type = other RNA
tggcagcacgtaaatattggcg

SEQ ID NO: 13809 - RNA, 20 nt, Synthetic Construct
  source 1..20: mol_type = other RNA
tgaggaagtaggttgtatag

SEQ ID NO: 13810 - RNA, 20 nt, Synthetic Construct
  source 1..20: mol_type = other RNA
tgaggaagtaggttgtatag

SEQ ID NO: 13811 - RNA, 15 nt, Synthetic Construct
  source 1..15: mol_type = other RNA
agttgaccgcctggg

SEQ ID NO: 13812 - RNA, 23 nt, Synthetic Construct
  source 1..23: mol_type = other RNA
cggtaatacgacgtacttagtgt

SEQ ID NO: 13813 - RNA, 22 nt, Synthetic Construct
  source 1..22: mol_type = other RNA
tggagtgtaaagaagtatgtat

SEQ ID NO: 13814 - RNA, 22 nt, Synthetic Construct
  source 1..22: mol_type = other RNA
tggagtgtaaagaagtatgtat

SEQ ID NO: 13815 - RNA, 35 nt, Synthetic Construct; identical to SEQ ID NO: 3369
  source 1..35: mol_type = other RNA

SEQ ID NO: 13816 - RNA, 24 nt, Synthetic Construct
  source 1..24: mol_type = other RNA
tgtaaacatccccgactggaagcc

SEQ ID NO: 13817 - RNA, 24 nt, Synthetic Construct
  source 1..24: mol_type = other RNA
tgtaaacatccccgactggaagcc

SEQ ID NO: 13818 - RNA, 17 nt, Synthetic Construct
  source 1..17: mol_type = other RNA
accaaggggtcgtgggt

SEQ ID NO: 13819 - RNA, 40 nt, Synthetic Construct; identical to SEQ ID NO: 2684
  source 1..40: mol_type = other RNA

SEQ ID NO: 13820 - RNA, 40 nt, Synthetic Construct; identical to SEQ ID NO: 2684
  source 1..40: mol_type = other RNA

SEQ ID NO: 13821 - RNA, 21 nt, Synthetic Construct
  source 1..21: mol_type = other RNA
tcccagtaaacggcggccgta

SEQ ID NO: 13822 - RNA, 21 nt, Synthetic Construct
  source 1..21: mol_type = other RNA
gactatagaactttccccctc

SEQ ID NO: 13823 - RNA, 21 nt, Synthetic Construct
  source 1..21: mol_type = other RNA
tagcagcacatcatggtttac

SEQ ID NO: 13824 - RNA, 21 nt, Synthetic Construct
  source 1..21: mol_type = other RNA
tagcagcacatcatggtttac

SEQ ID NO: 13825 - RNA, 23 nt, Synthetic Construct
  source 1..23: mol_type = other RNA
tggaatgtaaagaagtatgtatt

SEQ ID NO: 13826 - RNA, 23 nt, Synthetic Construct
  source 1..23: mol_type = other RNA
tggaatgtaaagaagtatgtatt

SEQ ID NO: 13827 - RNA, 22 nt, Synthetic Construct
  source 1..22: mol_type = other RNA
gcgtaccgtgagtaataatgcg

SEQ ID NO: 13828 - RNA, 23 nt, Synthetic Construct
  source 1..23: mol_type = other RNA
ctggccctctctgcccttccgta

SEQ ID NO: 13829 - RNA, 23 nt, Synthetic Construct
  source 1..23: mol_type = other RNA
ctggccctctctgcccttccgta

SEQ ID NO: 13830 - RNA, 36 nt, Synthetic Construct; identical to SEQ ID NO: 2478
  source 1..36: mol_type = other RNA

SEQ ID NO: 13831 - RNA, 36 nt, Synthetic Construct; identical to SEQ ID NO: 2478
  source 1..36: mol_type = other RNA

SEQ ID NO: 13832 - RNA, 31 nt, Synthetic Construct; identical to SEQ ID NO: 2507
  source 1..31: mol_type = other RNA

SEQ ID NO: 13833 - RNA, 21 nt, Synthetic Construct
  source 1..21: mol_type = other RNA
tatgtctgctgaccatcacct

SEQ ID NO: 13834 - RNA, 21 nt, Synthetic Construct
  source 1..21: mol_type = other RNA
cccaatacacggtcgacctct

SEQ ID NO: 13835 - RNA, 21 nt, Synthetic Construct
  source 1..21: mol_type = other RNA
cccaatacacggtcgacctct

SEQ ID NO: 13836 - RNA, 19 nt, Synthetic Construct
  source 1..19: mol_type = other RNA
agtcgacgtatagggtgtg

SEQ ID NO: 13837 - RNA, 16 nt, Synthetic Construct
  source 1..16: mol_type = other RNA
ggaattgacggaaggg

SEQ ID NO: 13838 - RNA, 16 nt, Synthetic Construct
  source 1..16: mol_type = other RNA
ggaattgacggaaggg

SEQ ID NO: 13839 - RNA, 22 nt, Synthetic Construct
  source 1..22: mol_type = other RNA
tgaggcagtagattgtatagtt

SEQ ID NO: 13840 - RNA, 20 nt, Synthetic Construct
  source 1..20: mol_type = other RNA
agcagcattgtacagggcta

SEQ ID NO: 13841 - RNA, 20 nt, Synthetic Construct
  source 1..20: mol_type = other RNA
agcagcattgtacagggcta

SEQ ID NO: 13842 - RNA, 20 nt, Synthetic Construct
  source 1..20: mol_type = other RNA
tattgcacattactaagttg

SEQ ID NO: 13843 - RNA, 20 nt, Synthetic Construct
  source 1..20: mol_type = other RNA
tattgcacattactaagttg

SEQ ID NO: 13844 - RNA, 21 nt, Synthetic Construct
  source 1..21: mol_type = other RNA
tgaggtagtaggctgtatagt

SEQ ID NO: 13845 - RNA, 21 nt, Synthetic Construct
  source 1..21: mol_type = other RNA
tgaggtagtaggctgtatagt

SEQ ID NO: 13846 - RNA, 21 nt, Synthetic Construct
  source 1..21: mol_type = other RNA
tatgtcccacccccactcctg

SEQ ID NO: 13847 - RNA, 21 nt, Synthetic Construct
  source 1..21: mol_type = other RNA
tatgtcccacccccactcctg

SEQ ID NO: 13848 - RNA, 24 nt, Synthetic Construct
  source 1..24: mol_type = other RNA
cggagaaggttagctcagccaact

SEQ ID NO: 13849 - RNA, 20 nt, Synthetic Construct
  source 1..20: mol_type = other RNA
acccttgtcattagttgcta

SEQ ID NO: 13850 - RNA, 22 nt, Synthetic Construct
  source 1..22: mol_type = other RNA
cataaagtagaaagcactacta

SEQ ID NO: 13851 - RNA, 22 nt, Synthetic Construct
  source 1..22: mol_type = other RNA
cataaagtagaaagcactacta

SEQ ID NO: 13852 - RNA, 22 nt, Synthetic Construct
  source 1..22: mol_type = other RNA
tgaggtaatagattgtatagtt

SEQ ID NO: 13853 - RNA, 23 nt, Synthetic Construct
  source 1..23: mol_type = other RNA
tcctgtgctgagctgccccgagt

SEQ ID NO: 13854 - RNA, 22 nt, Synthetic Construct
  source 1..22: mol_type = other RNA
gtcagtttgtcaaataccccaa

SEQ ID NO: 13855 - RNA, 25 nt, Synthetic Construct
  source 1..25: mol_type = other RNA
cgactcttagcggtggatcactcgg

SEQ ID NO: 13856 - RNA, 25 nt, Synthetic Construct
  source 1..25: mol_type = other RNA
cgactcttagcggtggatcactcgg

SEQ ID NO: 13857 - RNA, 26 nt, Synthetic Construct
  source 1..26: mol_type = other RNA
tgtaaacatccccgactggaagcttt

SEQ ID NO: 13858 - RNA, 26 nt, Synthetic Construct
  source 1..26: mol_type = other RNA
tgtaaacatccccgactggaagcttt

SEQ ID NO: 13859 - RNA, 22 nt, Synthetic Construct
  source 1..22: mol_type = other RNA
ttggtccccttcaaccagctgt

SEQ ID NO: 13860 - RNA, 22 nt, Synthetic Construct
  source 1..22: mol_type = other RNA
ttggtccccttcaaccagctgt

SEQ ID NO: 13861 - RNA, 22 nt, Synthetic Construct
  source 1..22: mol_type = other RNA
tattgcacttgacccggcctgt

SEQ ID NO: 13862 - RNA, 22 nt, Synthetic Construct
  source 1..22: mol_type = other RNA
tattgcacttgacccggcctgt

SEQ ID NO: 13863 - RNA, 23 nt, Synthetic Construct
  source 1..23: mol_type = other RNA
ggctacattgtctgctgggtttc

SEQ ID NO: 13864 - RNA, 23 nt, Synthetic Construct
  source 1..23: mol_type = other RNA
ggctacattgtctgctgggtttc

SEQ ID NO: 13865 - RNA, 20 nt, Synthetic Construct
  source 1..20: mol_type = other RNA
tgaggtagcaggttgtatag

SEQ ID NO: 13866 - RNA, 20 nt, Synthetic Construct
  source 1..20: mol_type = other RNA
tgaggtagcaggttgtatag

SEQ ID NO: 13867 - RNA, 22 nt, Synthetic Construct
  source 1..22: mol_type = other RNA
tggggtagtagtttgtgctgtt

SEQ ID NO: 13868 - RNA, 22 nt, Synthetic Construct
  source 1..22: mol_type = other RNA
tggggtagtagtttgtgctgtt

SEQ ID NO: 13869 - RNA, 23 nt, Synthetic Construct
  source 1..23: mol_type = other RNA
agcagcactgtacagggctatga

SEQ ID NO: 13870 - RNA, 23 nt, Synthetic Construct
  source 1..23: mol_type = other RNA
caaagtgccgttcgtgcaggtag

SEQ ID NO: 13871 - RNA, 23 nt, Synthetic Construct
  source 1..23: mol_type = other RNA
caaagtgccgttcgtgcaggtag

SEQ ID NO: 13872 - RNA, 22 nt, Synthetic Construct
  source 1..22: mol_type = other RNA
cgttgcacttgtctcggtctga

SEQ ID NO: 13873 - RNA, 35 nt, Synthetic Construct; identical to SEQ ID NO: 2069
  source 1..35: mol_type = other RNA

SEQ ID NO: 13874 - RNA, 23 nt, Synthetic Construct
  source 1..23: mol_type = other RNA
agctcggtctgaggcccctcaga

SEQ ID NO: 13875 - RNA, 23 nt, Synthetic Construct
  source 1..23: mol_type = other RNA
agctcggtctgaggcccctcaga

SEQ ID NO: 13876 - RNA, 19 nt, Synthetic Construct
  source 1..19: mol_type = other RNA
ccagtaaacggcggccgta

SEQ ID NO: 13877 - RNA, 21 nt, Synthetic Construct
  source 1..21: mol_type = other RNA
tgaggggcagagagcgagaca

SEQ ID NO: 13878 - RNA, 21 nt, Synthetic Construct
  source 1..21: mol_type = other RNA
gtagtgtttcctactttatgg

SEQ ID NO: 13879 - RNA, 21 nt, Synthetic Construct
  source 1..21: mol_type = other RNA
gtagtgtttcctactttatgg

SEQ ID NO: 13880 - RNA, 23 nt, Synthetic Construct
  source 1..23: mol_type = other RNA
agaggctggccgtgatgaattcg

SEQ ID NO: 13881 - RNA, 22 nt, Synthetic Construct
  source 1..22: mol_type = other RNA
tcgtaccgtgagtaataatgca

SEQ ID NO: 13882 - RNA, 22 nt, Synthetic Construct
  source 1..22: mol_type = other RNA
tcgtaccgtgagtaataatgca

SEQ ID NO: 13883 - RNA, 21 nt, Synthetic Construct
  source 1..21: mol_type = other RNA
tgtagtgtttcctactttatg

SEQ ID NO: 13884 - RNA, 24 nt, Synthetic Construct
  source 1..24: mol_type = other RNA
agctacatctggctactgggtctc

SEQ ID NO: 13885 - RNA, 24 nt, Synthetic Construct
  source 1..24: mol_type = other RNA
agctacatctggctactgggtctc

SEQ ID NO: 13886 - RNA, 22 nt, Synthetic Construct
  source 1..22: mol_type = other RNA
tgaggtagtagtttgtgcagtt

SEQ ID NO: 13887 - RNA, 22 nt, Synthetic Construct
  source 1..22: mol_type = other RNA
tgaggtagtagtttgtggtgtt

SEQ ID NO: 13888 - RNA, 22 nt, Synthetic Construct
  source 1..22: mol_type = other RNA
tgaggtagtagtttgtggtgtt

SEQ ID NO: 13889 - RNA, 22 nt, Synthetic Construct
  source 1..22: mol_type = other RNA
ttcaagtaatccagggtaggct

SEQ ID NO: 13890 - RNA, 22 nt, Synthetic Construct
  source 1..22: mol_type = other RNA
ttcaagtaatccagggtaggct

SEQ ID NO: 13891 - RNA, 15 nt, Synthetic Construct
  source 1..15: mol_type = other RNA
cgccatttaaagagg

SEQ ID NO: 13892 - RNA, 23 nt, Synthetic Construct
  source 1..23: mol_type = other RNA
tgaggggtagagagcgagacttt

SEQ ID NO: 13893 - RNA, 23 nt, Synthetic Construct
  source 1..23: mol_type = other RNA
tgaggggtagagagcgagacttt

SEQ ID NO: 13894 - RNA, 16 nt, Synthetic Construct
  source 1..16: mol_type = other RNA
gaacgtgagctgggtt

SEQ ID NO: 13895 - RNA, 16 nt, Synthetic Construct
  source 1..16: mol_type = other RNA
gaacgtgagctgggtt

SEQ ID NO: 13896 - RNA, 24 nt, Synthetic Construct
  source 1..24: mol_type = other RNA
tgaggtagtaggttgtgtggttta

SEQ ID NO: 13897 - RNA, 24 nt, Synthetic Construct
  source 1..24: mol_type = other RNA
tgaggtagtaggttgtgtggttta

SEQ ID NO: 13898 - RNA, 21 nt, Synthetic Construct
  source 1..21: mol_type = other RNA
gtagcgaaattccttgtcggg

SEQ ID NO: 13899 - RNA, 22 nt, Synthetic Construct
  source 1..22: mol_type = other RNA
taggtagtttcctgttgttggg

SEQ ID NO: 13900 - RNA, 22 nt, Synthetic Construct
  source 1..22: mol_type = other RNA
taggtagtttcctgttgttggg

SEQ ID NO: 13901 - RNA, 22 nt, Synthetic Construct
  source 1..22: mol_type = other RNA
tcgtaccatgagtaataatgcg

SEQ ID NO: 13902 - RNA, 22 nt, Synthetic Construct
  source 1..22: mol_type = other RNA
tcgtaccatgagtaataatgcg

SEQ ID NO: 13903 - RNA, 22 nt, Synthetic Construct
  source 1..22: mol_type = other RNA
tgaggtagcaggttgtatagtt

SEQ ID NO: 13904 - RNA, 22 nt, Synthetic Construct
  source 1..22: mol_type = other RNA
tgaggtagcaggttgtatagtt

SEQ ID NO: 13905 - RNA, 22 nt, Synthetic Construct
  source 1..22: mol_type = other RNA
caaagtgcttacagtgcaggta

SEQ ID NO: 13906 - RNA, 22 nt, Synthetic Construct
  source 1..22: mol_type = other RNA
caaagtgcttacagtgcaggta

SEQ ID NO: 13907 - RNA, 16 nt, Synthetic Construct
  source 1..16: mol_type = other RNA
gtctacagccatacca

SEQ ID NO: 13908 - RNA, 16 nt, Synthetic Construct
  source 1..16: mol_type = other RNA
gtctacagccatacca

SEQ ID NO: 13909 - RNA, 18 nt, Synthetic Construct
  source 1..18: mol_type = other RNA
tctaatgagactgccggt

SEQ ID NO: 13910 - RNA, 18 nt, Synthetic Construct
  source 1..18: mol_type = other RNA
tctaatgagactgccggt

SEQ ID NO: 13911 - RNA, 16 nt, Synthetic Construct
  source 1..16: mol_type = other RNA
tcagtagctcgaggaa

SEQ ID NO: 13912 - RNA, 16 nt, Synthetic Construct
  source 1..16: mol_type = other RNA
tcagtagctcgaggaa

SEQ ID NO: 13913 - RNA, 30 nt, Synthetic Construct; identical to SEQ ID NO: 1771
  source 1..30: mol_type = other RNA

SEQ ID NO: 13914 - RNA, 18 nt, Synthetic Construct
  source 1..18: mol_type = other RNA
tcccaagggtatggctgt

SEQ ID NO: 13915 - RNA, 21 nt, Synthetic Construct
  source 1..21: mol_type = other RNA
ctagactgaggctccttgagg

SEQ ID NO: 13916 - RNA, 22 nt, Synthetic Construct
  source 1..22: mol_type = other RNA
gtcagtttgtcaaataccccat

SEQ ID NO: 13917 - RNA, 22 nt, Synthetic Construct
  source 1..22: mol_type = other RNA
gtcagtttgtcaaataccccat

SEQ ID NO: 13918 - RNA, 23 nt, Synthetic Construct
  source 1..23: mol_type = other RNA
tcctgtaccgagctgccccgagt

SEQ ID NO: 13919 - RNA, 23 nt, Synthetic Construct
  source 1..23: mol_type = other RNA
tcctgtaccgagctgccccgagt

SEQ ID NO: 13920 - RNA, 18 nt, Synthetic Construct
  source 1..18: mol_type = other RNA
gctgtgatggccgagtgg

SEQ ID NO: 13921 - RNA, 18 nt, Synthetic Construct
  source 1..18: mol_type = other RNA
gctgtgatggccgagtgg

SEQ ID NO: 13922 - RNA, 34 nt, Synthetic Construct; identical to SEQ ID NO: 5595
  source 1..34: mol_type = other RNA

SEQ ID NO: 13923 - RNA, 34 nt, Synthetic Construct; identical to SEQ ID NO: 5595
  source 1..34: mol_type = other RNA

SEQ ID NO: 13924 - RNA, 15 nt, Synthetic Construct
  source 1..15: mol_type = other RNA
gtcaggatgttggct

SEQ ID NO: 13925 - RNA, 15 nt, Synthetic Construct
  source 1..15: mol_type = other RNA
gtcaggatgttggct

SEQ ID NO: 13926 - RNA, 22 nt, Synthetic Construct
  source 1..22: mol_type = other RNA
ttcaagtaatccaggataggcc

SEQ ID NO: 13927 - RNA, 20 nt, Synthetic Construct
  source 1..20: mol_type = other RNA
tagcgaaattccttgtcggg

SEQ ID NO: 13928 - RNA, 20 nt, Synthetic Construct
  source 1..20: mol_type = other RNA
tagcgaaattccttgtcggg

SEQ ID NO: 13929 - RNA, 28 nt, Synthetic Construct
  source 1..28: mol_type = other RNA
cgactcttagcggtggatcactcggctc

SEQ ID NO: 13930 - RNA, 22 nt, Synthetic Construct
  source 1..22: mol_type = other RNA
ttcacagtggctaagttctgca

SEQ ID NO: 13931 - RNA, 27 nt, Synthetic Construct
  source 1..27: mol_type = other RNA
acccccactgctaaatttgactggctt

SEQ ID NO: 13932 - RNA, 32 nt, Synthetic Construct; identical to SEQ ID NO: 2296
  source 1..32: mol_type = other RNA

SEQ ID NO: 13933 - RNA, 32 nt, Synthetic Construct; identical to SEQ ID NO: 2296
  source 1..32: mol_type = other RNA

SEQ ID NO: 13934 - RNA, 22 nt, Synthetic Construct
  source 1..22: mol_type = other RNA
aattgcacggtatccatctgta

SEQ ID NO: 13935 - RNA, 25 nt, Synthetic Construct
  source 1..25: mol_type = other RNA
ttgaggatatgagatcgagacgaca

SEQ ID NO: 13936 - RNA, 21 nt, Synthetic Construct
  source 1..21: mol_type = other RNA
tgaggtagtaggttgcgtggt

SEQ ID NO: 13937 - RNA, 21 nt, Synthetic Construct
  source 1..21: mol_type = other RNA
tgaggtagtaggttgcgtggt

SEQ ID NO: 13938 - RNA, 17 nt, Synthetic Construct
  source 1..17: mol_type = other RNA
agtccggatcgtagtct

SEQ ID NO: 13939 - RNA, 15 nt, Synthetic Construct
  source 1..15: mol_type = other RNA
tagagtagggcggga

SEQ ID NO: 13940 - RNA, 15 nt, Synthetic Construct
  source 1..15: mol_type = other RNA
tagagtagggcggga

SEQ ID NO: 13941 - RNA, 22 nt, Synthetic Construct
  source 1..22: mol_type = other RNA
tgtgactggttgaccagagggt

SEQ ID NO: 13942 - RNA, 22 nt, Synthetic Construct
  source 1..22: mol_type = other RNA
taaatccttaagcgaatctcgc

SEQ ID NO: 13943 - RNA, 22 nt, Synthetic Construct
  source 1..22: mol_type = other RNA
taaatccttaagcgaatctcgc

SEQ ID NO: 13944 - RNA, 21 nt, Synthetic Construct
  source 1..21: mol_type = other RNA
cgtaccgtgagtaataatgcg

SEQ ID NO: 13945 - RNA, 21 nt, Synthetic Construct
  source 1..21: mol_type = other RNA
cgtaccgtgagtaataatgcg

SEQ ID NO: 13946 - RNA, 19 nt, Synthetic Construct
  source 1..19: mol_type = other RNA
tagcttatcagactgatgt

SEQ ID NO: 13947 - RNA, 16 nt, Synthetic Construct
  source 1..16: mol_type = other RNA
aggtcatcattatctg

SEQ ID NO: 13948 - RNA, 16 nt, Synthetic Construct
  source 1..16: mol_type = other RNA
aggtcatcattatctg

SEQ ID NO: 13949 - RNA, 22 nt, Synthetic Construct
  source 1..22: mol_type = other RNA
tgaggtagaagattgtatagtt

SEQ ID NO: 13950 - RNA, 22 nt, Synthetic Construct
  source 1..22: mol_type = other RNA
tgaggtagaagattgtatagtt

SEQ ID NO: 13951 - RNA, 36 nt, Synthetic Construct; identical to SEQ ID NO: 2520
  source 1..36: mol_type = other RNA

SEQ ID NO: 13952 - RNA, 17 nt, Synthetic Construct
  source 1..17: mol_type = other RNA
ccagtaaacggcggccg

SEQ ID NO: 13953 - RNA, 17 nt, Synthetic Construct
  source 1..17: mol_type = other RNA
ccagtaaacggcggccg

SEQ ID NO: 13954 - RNA, 20 nt, Synthetic Construct
  source 1..20: mol_type = other RNA
tgaggtagtaggttgtgcgg

SEQ ID NO: 13955 - RNA, 20 nt, Synthetic Construct
  source 1..20: mol_type = other RNA
tgaggtagtaggttgtgcgg

SEQ ID NO: 13956 - RNA, 21 nt, Synthetic Construct
  source 1..21: mol_type = other RNA
ctggccctctctgcccttccg

SEQ ID NO: 13957 - RNA, 21 nt, Synthetic Construct
  source 1..21: mol_type = other RNA
ctggccctctctgcccttccg

SEQ ID NO: 13958 - RNA, 30 nt, Synthetic Construct; identical to SEQ ID NO: 3933
  source 1..30: mol_type = other RNA

SEQ ID NO: 13959 - RNA, 30 nt, Synthetic Construct; identical to SEQ ID NO: 3933
  source 1..30: mol_type = other RNA

SEQ ID NO: 13960 - RNA, 21 nt, Synthetic Construct
  source 1..21: mol_type = other RNA
cgaggggcagagagcgagact

SEQ ID NO: 13961 - RNA, 21 nt, Synthetic Construct
  source 1..21: mol_type = other RNA
cgaggggcagagagcgagact

SEQ ID NO: 13962 - RNA, 22 nt, Synthetic Construct
  source 1..22: mol_type = other RNA
tcataccgtgagtaataatgcg

SEQ ID NO: 13963 - RNA, 22 nt, Synthetic Construct
  source 1..22: mol_type = other RNA
tcataccgtgagtaataatgcg

SEQ ID NO: 13964 - RNA, 18 nt, Synthetic Construct
  source 1..18: mol_type = other RNA
cttggggttgtaggacca

SEQ ID NO: 13965 - RNA, 18 nt, Synthetic Construct
  source 1..18: mol_type = other RNA
cttggggttgtaggacca

SEQ ID NO: 13966 - RNA, 16 nt, Synthetic Construct
  source 1..16: mol_type = other RNA
atctacggccatacca

SEQ ID NO: 13967 - RNA, 22 nt, Synthetic Construct
  source 1..22: mol_type = other RNA
tgaggtaatagtttgtgctgtt

SEQ ID NO: 13968 - RNA, 20 nt, Synthetic Construct
  source 1..20: mol_type = other RNA
aattgcacggtatccatctg

SEQ ID NO: 13969 - RNA, 20 nt, Synthetic Construct
  source 1..20: mol_type = other RNA
aattgcacggtatccatctg

SEQ ID NO: 13970 - RNA, 22 nt, Synthetic Construct
  source 1..22: mol_type = other RNA
tgaggtagtaggatgtatagtt

SEQ ID NO: 13971 - RNA, 24 nt, Synthetic Construct
  source 1..24: mol_type = other RNA
tgtaaacatccctgactggaagct

SEQ ID NO: 13972 - RNA, 23 nt, Synthetic Construct
  source 1..23: mol_type = other RNA
aatgacacgatcactcccgttga

SEQ ID NO: 13973 - RNA, 23 nt, Synthetic Construct
  source 1..23: mol_type = other RNA
aatgacacgatcactcccgttga

SEQ ID NO: 13974 - RNA, 22 nt, Synthetic Construct
  source 1..22: mol_type = other RNA
taactccttaagcggatctcgc

SEQ ID NO: 13975 - RNA, 22 nt, Synthetic Construct
  source 1..22: mol_type = other RNA
taactccttaagcggatctcgc

SEQ ID NO: 13976 - RNA, 23 nt, Synthetic Construct
  source 1..23: mol_type = other RNA
caaagtgctgttcgtacaggtag

SEQ ID NO: 13977 - RNA, 15 nt, Synthetic Construct
  source 1..15: mol_type = other RNA
gcgtagatatgcgga

SEQ ID NO: 13978 - RNA, 22 nt, Synthetic Construct
  source 1..22: mol_type = other RNA
cagtgcaatgttaaaagggcat

SEQ ID NO: 13979 - RNA, 21 nt, Synthetic Construct
  source 1..21: mol_type = other RNA
tgaggtagcaggttgtgtggt

SEQ ID NO: 13980 - RNA, 21 nt, Synthetic Construct
  source 1..21: mol_type = other RNA
tgaggtagcaggttgtgtggt

SEQ ID NO: 13981 - RNA, 21 nt, Synthetic Construct
  source 1..21: mol_type = other RNA
tggaatgtaaagaagtatgta

SEQ ID NO: 13982 - RNA, 22 nt, Synthetic Construct
  source 1..22: mol_type = other RNA
aaaagctgggttgagagggcgt

SEQ ID NO: 13983 - RNA, 22 nt, Synthetic Construct
  source 1..22: mol_type = other RNA
aaaagctgggttgagagggcgt

SEQ ID NO: 13984 - RNA, 22 nt, Synthetic Construct
  source 1..22: mol_type = other RNA
ctcggcgtggcgtcggtcgtgt

SEQ ID NO: 13985 - RNA, 22 nt, Synthetic Construct
  source 1..22: mol_type = other RNA
ctcggcgtggcgtcggtcgtgt

SEQ ID NO: 13986 - RNA, 22 nt, Synthetic Construct
  source 1..22: mol_type = other RNA
tgaggtagcagtttgtgctgtt

SEQ ID NO: 13987 - RNA, 25 nt, Synthetic Construct
  source 1..25: mol_type = other RNA
ttgaggatatgagatagagacgaca

SEQ ID NO: 13988 - RNA, 25 nt, Synthetic Construct
  source 1..25: mol_type = other RNA
ttgaggatatgagatagagacgaca

SEQ ID NO: 13989 - RNA, 17 nt, Synthetic Construct
  source 1..17: mol_type = other RNA
ccgtgtgaaagtaggtc

SEQ ID NO: 13990 - RNA, 30 nt, Synthetic Construct; identical to SEQ ID NO: 2353
  source 1..30: mol_type = other RNA

SEQ ID NO: 13991 - RNA, 31 nt, Synthetic Construct; identical to SEQ ID NO: 2893
  source 1..31: mol_type = other RNA

SEQ ID NO: 13992 - RNA, 31 nt, Synthetic Construct; identical to SEQ ID NO: 2893
  source 1..31: mol_type = other RNA

SEQ ID NO: 13993 - RNA, 30 nt, Synthetic Construct; identical to SEQ ID NO: 2308
  source 1..30: mol_type = other RNA

SEQ ID NO: 13994 - RNA, 20 nt, Synthetic Construct
  source 1..20: mol_type = other RNA
gcagcacgtaaatattggcg

SEQ ID NO: 13995 - RNA, 20 nt, Synthetic Construct
  source 1..20: mol_type = other RNA
gcagcacgtaaatattggcg

SEQ ID NO: 13996 - RNA, 22 nt, Synthetic Construct
  source 1..22: mol_type = other RNA
cgaggtagtagtttgtgctgtt

SEQ ID NO: 13997 - RNA, 22 nt, Synthetic Construct
  source 1..22: mol_type = other RNA
cgaggtagtagtttgtgctgtt

SEQ ID NO: 13998 - RNA, 15 nt, Synthetic Construct
  source 1..15: mol_type = other RNA
gcggaaggatcattg

SEQ ID NO: 13999 - RNA, 15 nt, Synthetic Construct
  source 1..15: mol_type = other RNA
gcggaaggatcattg

SEQ ID NO: 14000 - RNA, 20 nt, Synthetic Construct
  source 1..20: mol_type = other RNA
tcctgtaccgatcaatagtg

SEQ ID NO: 14001 - RNA, 20 nt, Synthetic Construct
  source 1..20: mol_type = other RNA
tcctgtaccgatcaatagtg

SEQ ID NO: 14002 - RNA, 18 nt, Synthetic Construct
  source 1..18: mol_type = other RNA
atagggaacgtgagctgg

SEQ ID NO: 14003 - RNA, 22 nt, Synthetic Construct
  source 1..22: mol_type = other RNA
tgaggtagtagtttgtgctgct

SEQ ID NO: 14004 - RNA, 16 nt, Synthetic Construct
  source 1..16: mol_type = other RNA
gtccggatcgtagtct

SEQ ID NO: 14005 - RNA, 16 nt, Synthetic Construct
  source 1..16: mol_type = other RNA
gtccggatcgtagtct

SEQ ID NO: 14006 - RNA, 20 nt, Synthetic Construct
  source 1..20: mol_type = other RNA
tgaggcagtaggttgtgtgg

SEQ ID NO: 14007 - RNA, 20 nt, Synthetic Construct
  source 1..20: mol_type = other RNA
tgaggcagtaggttgtgtgg

SEQ ID NO: 14008 - RNA, 22 nt, Synthetic Construct
  source 1..22: mol_type = other RNA
accacagggtagaaccacggaa

SEQ ID NO: 14009 - RNA, 22 nt, Synthetic Construct
  source 1..22: mol_type = other RNA
accacagggtagaaccacggaa

SEQ ID NO: 14010 - RNA, 25 nt, Synthetic Construct
  source 1..25: mol_type = other RNA
gtgaggatatgagatcgagacgaca

SEQ ID NO: 14011 - RNA, 25 nt, Synthetic Construct
  source 1..25: mol_type = other RNA
gtgaggatatgagatcgagacgaca

SEQ ID NO: 14012 - RNA, 23 nt, Synthetic Construct
  source 1..23: mol_type = other RNA
tgaggtagtaggttgtgtagttt

SEQ ID NO: 14013 - RNA, 23 nt, Synthetic Construct
  source 1..23: mol_type = other RNA
tgaggtagtaggttgtgtagttt

SEQ ID NO: 14014 - RNA, 22 nt, Synthetic Construct
  source 1..22: mol_type = other RNA
cactgcacttgtctcggtctga

SEQ ID NO: 14015 - RNA, 22 nt, Synthetic Construct
  source 1..22: mol_type = other RNA
tattgcacttgtcccgacctgt

SEQ ID NO: 14016 - RNA, 22 nt, Synthetic Construct
  source 1..22: mol_type = other RNA
cattgcacttgtcccggcctgt

SEQ ID NO: 14017 - RNA, 22 nt, Synthetic Construct
  source 1..22: mol_type = other RNA
cattgcacttgtcccggcctgt

SEQ ID NO: 14018 - RNA, 16 nt, Synthetic Construct
  source 1..16: mol_type = other RNA
agttgaccgcctgggg

SEQ ID NO: 14019 - RNA, 16 nt, Synthetic Construct
  source 1..16: mol_type = other RNA
agttgaccgcctgggg

SEQ ID NO: 14020 - RNA, 23 nt, Synthetic Construct
  source 1..23: mol_type = other RNA
tctcacacagaaatcgcacccgt

SEQ ID NO: 14021 - RNA, 23 nt, Synthetic Construct
  source 1..23: mol_type = other RNA
tctcacacagaaatcgcacccgt

SEQ ID NO: 14022 - RNA, 17 nt, Synthetic Construct
  source 1..17: mol_type = other RNA
cgcgacctcagatcaga

SEQ ID NO: 14023 - RNA, 17 nt, Synthetic Construct
  source 1..17: mol_type = other RNA
cgcgacctcagatcaga

SEQ ID NO: 14024 - RNA, 28 nt, Synthetic Construct
  source 1..28: mol_type = other RNA
ccccccgctgctaaatttgactggcttt

SEQ ID NO: 14025 - RNA, 22 nt, Synthetic Construct
  source 1..22: mol_type = other RNA
tgaggaagtagtttgtgctgtt

SEQ ID NO: 14026 - RNA, 22 nt, Synthetic Construct
  source 1..22: mol_type = other RNA
tgaggaagtagtttgtgctgtt

SEQ ID NO: 14027 - RNA, 25 nt, Synthetic Construct
  source 1..25: mol_type = other RNA
gcgccgctggtgtagtggtatcatg

SEQ ID NO: 14028 - RNA, 21 nt, Synthetic Construct
  source 1..21: mol_type = other RNA
tgaggggcagggagcgagact

SEQ ID NO: 14029 - RNA, 21 nt, Synthetic Construct
  source 1..21: mol_type = other RNA
tcccgtactgagctgccccga

SEQ ID NO: 14030 - RNA, 21 nt, Synthetic Construct
  source 1..21: mol_type = other RNA
tcccgtactgagctgccccga

SEQ ID NO: 14031 - RNA, 23 nt, Synthetic Construct
  source 1..23: mol_type = other RNA
tgtagtgtttcctactttatggt

SEQ ID NO: 14032 - RNA, 23 nt, Synthetic Construct
  source 1..23: mol_type = other RNA
tgtagtgtttcctactttatggt

SEQ ID NO: 14033 - RNA, 16 nt, Synthetic Construct
  source 1..16: mol_type = other RNA
gtctacggccgtacca

SEQ ID NO: 14034 - RNA, 16 nt, Synthetic Construct
  source 1..16: mol_type = other RNA
gtctacggccgtacca

SEQ ID NO: 14035 - RNA, 32 nt, Synthetic Construct; identical to SEQ ID NO: 2296
  source 1..32: mol_type = other RNA

SEQ ID NO: 14036 - RNA, 17 nt, Synthetic Construct
  source 1..17: mol_type = other RNA
cccctggacctgtactg

SEQ ID NO: 14037 - RNA, 17 nt, Synthetic Construct
  source 1..17: mol_type = other RNA
cccctggacctgtactg

SEQ ID NO: 14038 - RNA, 25 nt, Synthetic Construct
  source 1..25: mol_type = other RNA
caaagtgctgttcgtgcaggtagtt

SEQ ID NO: 14039 - RNA, 31 nt, Synthetic Construct; identical to SEQ ID NO: 1881
  source 1..31: mol_type = other RNA

SEQ ID NO: 14040 - RNA, 31 nt, Synthetic Construct; identical to SEQ ID NO: 1881
  source 1..31: mol_type = other RNA

SEQ ID NO: 14041 - RNA, 17 nt, Synthetic Construct
  source 1..17: mol_type = other RNA
ttggagggcaagtctgg

SEQ ID NO: 14042 - RNA, 17 nt, Synthetic Construct
  source 1..17: mol_type = other RNA
ttggagggcaagtctgg

SEQ ID NO: 14043 - RNA, 16 nt, Synthetic Construct
  source 1..16: mol_type = other RNA
ggccgtcgtcagctcg

SEQ ID NO: 14044 - RNA, 22 nt, Synthetic Construct
  source 1..22: mol_type = other RNA
tgaggtagtaggttgagtggtt

SEQ ID NO: 14045 - RNA, 31 nt, Synthetic Construct; identical to SEQ ID NO: 2442
  source 1..31: mol_type = other RNA

SEQ ID NO: 14046 - RNA, 31 nt, Synthetic Construct; identical to SEQ ID NO: 2442
  source 1..31: mol_type = other RNA

SEQ ID NO: 14047 - RNA, 33 nt, Synthetic Construct; identical to SEQ ID NO: 2266
  source 1..33: mol_type = other RNA

SEQ ID NO: 14048 - RNA, 31 nt, Synthetic Construct; identical to SEQ ID NO: 4881
  source 1..31: mol_type = other RNA

SEQ ID NO: 14049 - RNA, 31 nt, Synthetic Construct; identical to SEQ ID NO: 4881
  source 1..31: mol_type = other RNA

SEQ ID NO: 14050 - RNA, 21 nt, Synthetic Construct
  source 1..21: mol_type = other RNA
tcctgtctgaatatgggggga

SEQ ID NO: 14051 - RNA, 22 nt, Synthetic Construct
  source 1..22: mol_type = other RNA
tgaagtagtaggttgtgtggtt

SEQ ID NO: 14052 - RNA, 15 nt, Synthetic Construct
  source 1..15: mol_type = other RNA
tctacagtccgacga

SEQ ID NO: 14053 - RNA, 15 nt, Synthetic Construct
  source 1..15: mol_type = other RNA
tctacagtccgacga

SEQ ID NO: 14054 - RNA, 20 nt, Synthetic Construct
  source 1..20: mol_type = other RNA
tggaatgtaaagaagtatgt

SEQ ID NO: 14055 - RNA, 20 nt, Synthetic Construct
  source 1..20: mol_type = other RNA
tggaatgtaaagaagtatgt

SEQ ID NO: 14056 - RNA, 22 nt, Synthetic Construct
  source 1..22: mol_type = other RNA
tcctgaactgagctgccccgag

SEQ ID NO: 14057 - RNA, 22 nt, Synthetic Construct
  source 1..22: mol_type = other RNA
tcctgaactgagctgccccgag

SEQ ID NO: 14058 - RNA, 34 nt, Synthetic Construct; identical to SEQ ID NO: 6757
  source 1..34: mol_type = other RNA

SEQ ID NO: 14059 - RNA, 34 nt, Synthetic Construct; identical to SEQ ID NO: 6757
  source 1..34: mol_type = other RNA

SEQ ID NO: 14060 - RNA, 22 nt, Synthetic Construct
  source 1..22: mol_type = other RNA
tcctgtactgagctaccccgag

SEQ ID NO: 14061 - RNA, 22 nt, Synthetic Construct
  source 1..22: mol_type = other RNA
tcctgtactgagctaccccgag

SEQ ID NO: 14062 - RNA, 23 nt, Synthetic Construct
  source 1..23: mol_type = other RNA
caaagtgctgctcgtgcaggtag

SEQ ID NO: 14063 - RNA, 23 nt, Synthetic Construct
  source 1..23: mol_type = other RNA
caaagtgctgctcgtgcaggtag

SEQ ID NO: 14064 - RNA, 24 nt, Synthetic Construct
  source 1..24: mol_type = other RNA
tgaggtagtaggttgtgtggttta

SEQ ID NO: 14065 - RNA, 24 nt, Synthetic Construct
  source 1..24: mol_type = other RNA
tgaggtagtaggttgtgtggttta

SEQ ID NO: 14066 - RNA, 21 nt, Synthetic Construct
  source 1..21: mol_type = other RNA
tctcccaacccttgtaccagt

SEQ ID NO: 14067 - RNA, 21 nt, Synthetic Construct
  source 1..21: mol_type = other RNA
tctcccaacccttgtaccagt

SEQ ID NO: 14068 - RNA, 28 nt, Synthetic Construct
  source 1..28: mol_type = other RNA
tctgcccagtgctctgaatgtcaaagtg

SEQ ID NO: 14069 - RNA, 22 nt, Synthetic Construct
  source 1..22: mol_type = other RNA
tagcggcacgtaaatattggcg

SEQ ID NO: 14070 - RNA, 22 nt, Synthetic Construct
  source 1..22: mol_type = other RNA
tagcggcacgtaaatattggcg

SEQ ID NO: 14071 - RNA, 22 nt, Synthetic Construct
  source 1..22: mol_type = other RNA
tacagtagtctgcacattggtt

SEQ ID NO: 14072 - RNA, 22 nt, Synthetic Construct
  source 1..22: mol_type = other RNA
tattgcacttgacccggcctgt

SEQ ID NO: 14073 - RNA, 22 nt, Synthetic Construct
  source 1..22: mol_type = other RNA
tccctgagaccctaacttgtga

SEQ ID NO: 14074 - RNA, 22 nt, Synthetic Construct
  source 1..22: mol_type = other RNA
tccctgagaccctaacttgtga

SEQ ID NO: 14075 - RNA, 22 nt, Synthetic Construct
  source 1..22: mol_type = other RNA
ggtagcgaaattccttgtcggg

SEQ ID NO: 14076 - RNA, 22 nt, Synthetic Construct
  source 1..22: mol_type = other RNA
ggtagcgaaattccttgtcggg

SEQ ID NO: 14077 - RNA, 22 nt, Synthetic Construct
  source 1..22: mol_type = other RNA
taaggtagtaggttgtgtggtt

SEQ ID NO: 14078 - RNA, 22 nt, Synthetic Construct
  source 1..22: mol_type = other RNA
taaggtagtaggttgtgtggtt

SEQ ID NO: 14079 - RNA, 22 nt, Synthetic Construct
  source 1..22: mol_type = other RNA
nattgcacttgtcccggcctgt

SEQ ID NO: 14080 - RNA, 20 nt, Synthetic Construct
  source 1..20: mol_type = other RNA
gtgccgaagctgtgggattg

SEQ ID NO: 14081 - RNA, 20 nt, Synthetic Construct
  source 1..20: mol_type = other RNA
gtgccgaagctgtgggattg

SEQ ID NO: 14082 - RNA, 35 nt, Synthetic Construct
  source 1..35: mol_type = other RNA
tccgctgagattcagcccgtgttcggaagattttc

SEQ ID NO: 14083 - RNA, 35 nt, Synthetic Construct; identical to SEQ ID NO: 14082
  source 1..35: mol_type = other RNA

SEQ ID NO: 14084 - RNA, 35 nt, Synthetic Construct; identical to SEQ ID NO: 2615
  source 1..35: mol_type = other RNA

SEQ ID NO: 14085 - RNA, 35 nt, Synthetic Construct; identical to SEQ ID NO: 2615
  source 1..35: mol_type = other RNA

SEQ ID NO: 14086 - RNA, 17 nt, Synthetic Construct
  source 1..17: mol_type = other RNA
cctcgcgcgattggagc

SEQ ID NO: 14087 - RNA, 31 nt, Synthetic Construct
  source 1..31: mol_type = other RNA
ctcccggggctacgcctgtctgagcgtcgct

SEQ ID NO: 14088 - RNA, 21 nt, Synthetic Construct
  source 1..21: mol_type = other RNA
aaaccgttaccattactgagt

SEQ ID NO: 14089 - RNA, 21 nt, Synthetic Construct
  source 1..21: mol_type = other RNA
aaaccgttaccattactgagt

SEQ ID NO: 14090 - RNA, 22 nt, Synthetic Construct
  source 1..22: mol_type = other RNA
tgaggaagtagtttgtgctgtt

SEQ ID NO: 14091 - RNA, 17 nt, Synthetic Construct
  source 1..17: mol_type = other RNA
cccctggacctgtactg

SEQ ID NO: 14092 - RNA, 36 nt, Synthetic Construct; identical to SEQ ID NO: 2456
  source 1..36: mol_type = other RNA

SEQ ID NO: 14093 - RNA, 23 nt, Synthetic Construct
  source 1..23: mol_type = other RNA
tggtaatgcgacgtacttagtgt

SEQ ID NO: 14094 - RNA, 23 nt, Synthetic Construct
  source 1..23: mol_type = other RNA
tggtaatgcgacgtacttagtgt

SEQ ID NO: 14095 - RNA, 20 nt, Synthetic Construct
  source 1..20: mol_type = other RNA
ctatacgacctgctgccttt

SEQ ID NO: 14096 - RNA, 20 nt, Synthetic Construct
  source 1..20: mol_type = other RNA
ctatacgacctgctgccttt

SEQ ID NO: 14097 - RNA, 32 nt, Synthetic Construct
  source 1..32: mol_type = other RNA
agtaaggtcagctaaataagctatcgggccca

SEQ ID NO: 14098 - RNA, 32 nt, Synthetic Construct; identical to SEQ ID NO: 14097
  source 1..32: mol_type = other RNA

SEQ ID NO: 14099 - RNA, 15 nt, Synthetic Construct
  source 1..15: mol_type = other RNA
cctcgcgcgattgga

SEQ ID NO: 14100 - RNA, 22 nt, Synthetic Construct
  source 1..22: mol_type = other RNA
taactccttaagcgaatatcgc

SEQ ID NO: 14101 - RNA, 22 nt, Synthetic Construct
  source 1..22: mol_type = other RNA
taactccttaagcgaatatcgc

SEQ ID NO: 14102 - RNA, 27 nt, Synthetic Construct
  source 1..27: mol_type = other RNA
gttggttcaagcgtgtagtcgtgctct

SEQ ID NO: 14103 - RNA, 27 nt, Synthetic Construct
  source 1..27: mol_type = other RNA
gttggttcaagcgtgtagtcgtgctct

SEQ ID NO: 14104 - RNA, 25 nt, Synthetic Construct
  source 1..25: mol_type = other RNA
ccccccactgctaaatttgactggc

SEQ ID NO: 14105 - RNA, 25 nt, Synthetic Construct
  source 1..25: mol_type = other RNA
ccccccactgctaaatttgactggc

SEQ ID NO: 14106 - RNA, 19 nt, Synthetic Construct
  source 1..19: mol_type = other RNA
agtaggtcatcgtcaggct

SEQ ID NO: 14107 - RNA, 19 nt, Synthetic Construct
  source 1..19: mol_type = other RNA
agtaggtcatcgtcaggct

SEQ ID NO: 14108 - RNA, 21 nt, Synthetic Construct
  source 1..21: mol_type = other RNA
tgaggtagtaggctgtatagt

SEQ ID NO: 14109 - RNA, 17 nt, Synthetic Construct
  source 1..17: mol_type = other RNA
tggccgggacagagggc

SEQ ID NO: 14110 - RNA, 21 nt, Synthetic Construct
  source 1..21: mol_type = other RNA
cgtaccgtgagtaataatgcg

SEQ ID NO: 14111 - RNA, 19 nt, Synthetic Construct
  source 1..19: mol_type = other RNA
agcgaaattccttgtcggg

SEQ ID NO: 14112 - RNA, 21 nt, Synthetic Construct
  source 1..21: mol_type = other RNA
ctaatcccagaaacccggtcg

SEQ ID NO: 14113 - RNA, 24 nt, Synthetic Construct
  source 1..24: mol_type = other RNA
gcagctaataccgcatacgacctg

SEQ ID NO: 14114 - RNA, 24 nt, Synthetic Construct
  source 1..24: mol_type = other RNA
gcagctaataccgcatacgacctg

SEQ ID NO: 14115 - RNA, 21 nt, Synthetic Construct
  source 1..21: mol_type = other RNA
tgaggtagtaggttgtacagt

SEQ ID NO: 14116 - RNA, 16 nt, Synthetic Construct
  source 1..16: mol_type = other RNA
ttgaccgctctgacca

SEQ ID NO: 14117 - RNA, 16 nt, Synthetic Construct
  source 1..16: mol_type = other RNA
gcgtagatatgcggag

SEQ ID NO: 14118 - RNA, 23 nt, Synthetic Construct
  source 1..23: mol_type = other RNA
tgaggtagtaggttgtatggttt

SEQ ID NO: 14119 - RNA, 23 nt, Synthetic Construct
  source 1..23: mol_type = other RNA
tgaggtagtaggttgtatggttt

SEQ ID NO: 14120 - RNA, 15 nt, Synthetic Construct
  source 1..15: mol_type = other RNA
gcagagcgtcggtct

SEQ ID NO: 14121 - RNA, 28 nt, Synthetic Construct
  source 1..28: mol_type = other RNA
gctttgatccggagatttccgaatgggg

SEQ ID NO: 14122 - RNA, 19 nt, Synthetic Construct
  source 1..19: mol_type = other RNA
tagcagcacgtaaatattg

SEQ ID NO: 14123 - RNA, 19 nt, Synthetic Construct
  source 1..19: mol_type = other RNA
tagcagcacgtaaatattg

SEQ ID NO: 14124 - RNA, 36 nt, Synthetic Construct; identical to SEQ ID NO: 10982
  source 1..36: mol_type = other RNA

SEQ ID NO: 14125 - RNA, 36 nt, Synthetic Construct; identical to SEQ ID NO: 10982
  source 1..36: mol_type = other RNA

SEQ ID NO: 14126 - RNA, 15 nt, Synthetic Construct
  source 1..15: mol_type = other RNA
gttcggaagattttc

SEQ ID NO: 14127 - RNA, 15 nt, Synthetic Construct
  source 1..15: mol_type = other RNA
gttcggaagattttc

SEQ ID NO: 14128 - RNA, 23 nt, Synthetic Construct
  source 1..23: mol_type = other RNA
tgacctatgaattgacagccaga

SEQ ID NO: 14129 - RNA, 23 nt, Synthetic Construct
  source 1..23: mol_type = other RNA
tgacctatgaattgacagccaga

SEQ ID NO: 14130 - RNA, 25 nt, Synthetic Construct
  source 1..25: mol_type = other RNA
ggtaaaatcgctgagtgaagcattg

SEQ ID NO: 14131 - RNA, 25 nt, Synthetic Construct
  source 1..25: mol_type = other RNA
ggtaaaatcgctgagtgaagcattg

SEQ ID NO: 14132 - RNA, 16 nt, Synthetic Construct
  source 1..16: mol_type = other RNA
gggtgaaagcggggga

SEQ ID NO: 14133 - RNA, 16 nt, Synthetic Construct
  source 1..16: mol_type = other RNA
gggtgaaagcggggga

SEQ ID NO: 14134 - RNA, 22 nt, Synthetic Construct
  source 1..22: mol_type = other RNA
tggagagaaaggcagttcctga

SEQ ID NO: 14135 - RNA, 22 nt, Synthetic Construct
  source 1..22: mol_type = other RNA
tggagagaaaggcagttcctga

SEQ ID NO: 14136 - RNA, 22 nt, Synthetic Construct
  source 1..22: mol_type = other RNA
cgaggtagtaggttgtatagtt

SEQ ID NO: 14137 - RNA, 21 nt, Synthetic Construct
  source 1..21: mol_type = other RNA
tgaggtagtagatcgtatagt

SEQ ID NO: 14138 - RNA, 21 nt, Synthetic Construct
  source 1..21: mol_type = other RNA
tgaggtagtagatcgtatagt

SEQ ID NO: 14139 - RNA, 16 nt, Synthetic Construct
  source 1..16: mol_type = other RNA
gtctacgaccatacca

SEQ ID NO: 14140 - RNA, 16 nt, Synthetic Construct
  source 1..16: mol_type = other RNA
gtctacgaccatacca

SEQ ID NO: 14141 - RNA, 29 nt, Synthetic Construct
  source 1..29: mol_type = other RNA
cccccccactgctaaatttgactggcttt

SEQ ID NO: 14142 - RNA, 21 nt, Synthetic Construct
  source 1..21: mol_type = other RNA
tgaggtagaaggttgtgtggt

SEQ ID NO: 14143 - RNA, 18 nt, Synthetic Construct
  source 1..18: mol_type = other RNA
caacggaatcccaaaagc

SEQ ID NO: 14144 - RNA, 18 nt, Synthetic Construct
  source 1..18: mol_type = other RNA
caacggaatcccaaaagc

SEQ ID NO: 14145 - RNA, 21 nt, Synthetic Construct
  source 1..21: mol_type = other RNA
tgaggtagtaggttgtatggt

SEQ ID NO: 14146 - RNA, 21 nt, Synthetic Construct
  source 1..21: mol_type = other RNA
tgaggtagtaggttgtatggt

SEQ ID NO: 14147 - RNA, 22 nt, Synthetic Construct
  source 1..22: mol_type = other RNA
ttcaagtaatccaggataggca

SEQ ID NO: 14148 - RNA, 22 nt, Synthetic Construct
  source 1..22: mol_type = other RNA
ttcaagtaatccaggataggca

SEQ ID NO: 14149 - RNA, 20 nt, Synthetic Construct
  source 1..20: mol_type = other RNA
gtgccgaagctgtgggattg

SEQ ID NO: 14150 - RNA, 20 nt, Synthetic Construct
  source 1..20: mol_type = other RNA
gtgccgaagctgtgggattg

SEQ ID NO: 14151 - RNA, 23 nt, Synthetic Construct
  source 1..23: mol_type = other RNA
tggaagactagtgattttgttgt

SEQ ID NO: 14152 - RNA, 40 nt, Synthetic Construct; identical to SEQ ID NO: 2684
  source 1..40: mol_type = other RNA

SEQ ID NO: 14153 - RNA, 17 nt, Synthetic Construct
  source 1..17: mol_type = other RNA
ctaatgagactgccggt

SEQ ID NO: 14154 - RNA, 17 nt, Synthetic Construct
  source 1..17: mol_type = other RNA
ctaatgagactgccggt

SEQ ID NO: 14155 - RNA, 22 nt, Synthetic Construct
  source 1..22: mol_type = other RNA
atgacacgatcactcccgttga

SEQ ID NO: 14156 - RNA, 21 nt, Synthetic Construct
  source 1..21: mol_type = other RNA
tcccagtaaacggcggccgta

SEQ ID NO: 14157 - RNA, 22 nt, Synthetic Construct
  source 1..22: mol_type = other RNA
ttcgagtaattcaggataggtt

SEQ ID NO: 14158 - RNA, 22 nt, Synthetic Construct
  source 1..22: mol_type = other RNA
ttcgagtaattcaggataggtt

SEQ ID NO: 14159 - RNA, 22 nt, Synthetic Construct
  source 1..22: mol_type = other RNA
gactatagaactttccccctct

SEQ ID NO: 14160 - RNA, 22 nt, Synthetic Construct
  source 1..22: mol_type = other RNA
gactatagaactttccccctct

SEQ ID NO: 14161 - RNA, 16 nt, Synthetic Construct
  source 1..16: mol_type = other RNA
atgcaagtcgaacggt

SEQ ID NO: 14162 - RNA, 16 nt, Synthetic Construct
  source 1..16: mol_type = other RNA
atgcaagtcgaacggt

SEQ ID NO: 14163 - RNA, 19 nt, Synthetic Construct
  source 1..19: mol_type = other RNA
tgtctgcctcagcgtcggt

SEQ ID NO: 14164 - RNA, 19 nt, Synthetic Construct
  source 1..19: mol_type = other RNA
tgtctgcctcagcgtcggt

SEQ ID NO: 14165 - RNA, 22 nt, Synthetic Construct
  source 1..22: mol_type = other RNA
gagagcctggacacaggtgctg

SEQ ID NO: 14166 - RNA, 22 nt, Synthetic Construct
  source 1..22: mol_type = other RNA
gagagcctggacacaggtgctg

SEQ ID NO: 14167 - RNA, 22 nt, Synthetic Construct
  source 1..22: mol_type = other RNA
tgtggtagtaggttgtatagtt

SEQ ID NO: 14168 - RNA, 22 nt, Synthetic Construct
  source 1..22: mol_type = other RNA
tgtggtagtaggttgtatagtt

SEQ ID NO: 14169 - RNA, 22 nt, Synthetic Construct
  source 1..22: mol_type = other RNA
ttcaccaccttctccacccagc

SEQ ID NO: 14170 - RNA, 22 nt, Synthetic Construct
  source 1..22: mol_type = other RNA
ttcaccaccttctccacccagc

SEQ ID NO: 14171 - RNA, 22 nt, Synthetic Construct
  source 1..22: mol_type = other RNA
ttcaagtaatccaggataggcc

SEQ ID NO: 14172 - RNA, 22 nt, Synthetic Construct
  source 1..22: mol_type = other RNA
ttcaagtaatccaggataggcc

SEQ ID NO: 14173 - RNA, 23 nt, Synthetic Construct
  source 1..23: mol_type = other RNA
taaggtgcatctagtgcagatag

SEQ ID NO: 14174 - RNA, 28 nt, Synthetic Construct
  source 1..28: mol_type = other RNA
tcccacatggtctagcggttaggattcc

SEQ ID NO: 14175 - RNA, 28 nt, Synthetic Construct
  source 1..28: mol_type = other RNA
tcccacatggtctagcggttaggattcc

SEQ ID NO: 14176 - RNA, 16 nt, Synthetic Construct
  source 1..16: mol_type = other RNA
gtctacggccatacta

SEQ ID NO: 14177 - RNA, 23 nt, Synthetic Construct
  source 1..23: mol_type = other RNA
tggcagtgtcttagctggttgtt

SEQ ID NO: 14178 - RNA, 23 nt, Synthetic Construct
  source 1..23: mol_type = other RNA
tggcagtgtcttagctggttgtt

SEQ ID NO: 14179 - RNA, 25 nt, Synthetic Construct
  source 1..25: mol_type = other RNA
ttgaggatatgagatagagacgaca

SEQ ID NO: 14180 - RNA, 27 nt, Synthetic Construct
  source 1..27: mol_type = other RNA
ccccccactgctaaatttaactggctt

SEQ ID NO: 14181 - RNA, 23 nt, Synthetic Construct
  source 1..23: mol_type = other RNA
caacggaatcccaagagcagctg

SEQ ID NO: 14182 - RNA, 22 nt, Synthetic Construct
  source 1..22: mol_type = other RNA
tcgtaccgtgagcaataatgcg

SEQ ID NO: 14183 - RNA, 22 nt, Synthetic Construct
  source 1..22: mol_type = other RNA
tcgtaccgtgagcaataatgcg

SEQ ID NO: 14184 - RNA, 22 nt, Synthetic Construct
  source 1..22: mol_type = other RNA
atcacattgccagggatttcca

SEQ ID NO: 14185 - RNA, 22 nt, Synthetic Construct
  source 1..22: mol_type = other RNA
atcacattgccagggatttcca

SEQ ID NO: 14186 - RNA, 21 nt, Synthetic Construct
  source 1..21: mol_type = other RNA
aggggctggctttcctctggt

SEQ ID NO: 14187 - RNA, 21 nt, Synthetic Construct
  source 1..21: mol_type = other RNA
aggggctggctttcctctggt

SEQ ID NO: 14188 - RNA, 32 nt, Synthetic Construct; identical to SEQ ID NO: 4279
  source 1..32: mol_type = other RNA

SEQ ID NO: 14189 - RNA, 22 nt, Synthetic Construct
  source 1..22: mol_type = other RNA
gtagtgtttcctactttatgga

SEQ ID NO: 14190 - RNA, 22 nt, Synthetic Construct
  source 1..22: mol_type = other RNA
gtagtgtttcctactttatgga

SEQ ID NO: 14191 - RNA, 22 nt, Synthetic Construct
  source 1..22: mol_type = other RNA
caaagaattctccttttgggct

SEQ ID NO: 14192 - RNA, 21 nt, Synthetic Construct
  source 1..21: mol_type = other RNA
ttcaagtaattcaggataggt

SEQ ID NO: 14193 - RNA, 22 nt, Synthetic Construct
  source 1..22: mol_type = other RNA
tcctgtactgagctgtcccgag

SEQ ID NO: 14194 - RNA, 17 nt, Synthetic Construct
  source 1..17: mol_type = other RNA
gaagttgaccgcctggg

SEQ ID NO: 14195 - RNA, 17 nt, Synthetic Construct
  source 1..17: mol_type = other RNA
gaagttgaccgcctggg

SEQ ID NO: 14196 - RNA, 23 nt, Synthetic Construct
  source 1..23: mol_type = other RNA
gtaaacatccttgactggaagct

SEQ ID NO: 14197 - RNA, 16 nt, Synthetic Construct
  source 1..16: mol_type = other RNA
tcgtgacgatagtgca

SEQ ID NO: 14198 - RNA, 16 nt, Synthetic Construct
  source 1..16: mol_type = other RNA
tcgtgacgatagtgca

SEQ ID NO: 14199 - RNA, 23 nt, Synthetic Construct
  source 1..23: mol_type = other RNA
tgagaggcagagagcgagacttt

SEQ ID NO: 14200 - RNA, 21 nt, Synthetic Construct
  source 1..21: mol_type = other RNA
agcagcacgtaaatattggcg

SEQ ID NO: 14201 - RNA, 21 nt, Synthetic Construct
  source 1..21: mol_type = other RNA
agcagcacgtaaatattggcg

SEQ ID NO: 14202 - RNA, 41 nt, Synthetic Construct; identical to SEQ ID NO: 10630
  source 1..41: mol_type = other RNA

SEQ ID NO: 14203 - RNA, 21 nt, Synthetic Construct
  source 1..21: mol_type = other RNA
tgaggtggtaggttgtatagt

SEQ ID NO: 14204 - RNA, 21 nt, Synthetic Construct
  source 1..21: mol_type = other RNA
tgaggtggtaggttgtatagt

SEQ ID NO: 14205 - RNA, 22 nt, Synthetic Construct
  source 1..22: mol_type = other RNA
tgaggtaatagattgtatagtt

SEQ ID NO: 14206 - RNA, 15 nt, Synthetic Construct
  source 1..15: mol_type = other RNA
acctgcatcgagggt

SEQ ID NO: 14207 - RNA, 15 nt, Synthetic Construct
  source 1..15: mol_type = other RNA
acctgcatcgagggt

SEQ ID NO: 14208 - RNA, 15 nt, Synthetic Construct
  source 1..15: mol_type = other RNA
acccttgtcattagt

SEQ ID NO: 14209 - RNA, 22 nt, Synthetic Construct
  source 1..22: mol_type = other RNA
tgagaaccgaattccatgggtt

SEQ ID NO: 14210 - RNA, 18 nt, Synthetic Construct
  source 1..18: mol_type = other RNA
cctgtaccgatcaatagt

SEQ ID NO: 14211 - RNA, 18 nt, Synthetic Construct
  source 1..18: mol_type = other RNA
cctgtaccgatcaatagt

SEQ ID NO: 14212 - RNA, 16 nt, Synthetic Construct
  source 1..16: mol_type = other RNA
cccagaaacccggtcg

SEQ ID NO: 14213 - RNA, 16 nt, Synthetic Construct
  source 1..16: mol_type = other RNA
cccagaaacccggtcg

SEQ ID NO: 14214 - RNA, 31 nt, Synthetic Construct; identical to SEQ ID NO: 2278
  source 1..31: mol_type = other RNA

SEQ ID NO: 14215 - RNA, 31 nt, Synthetic Construct; identical to SEQ ID NO: 2278
  source 1..31: mol_type = other RNA

SEQ ID NO: 14216 - RNA, 28 nt, Synthetic Construct
  source 1..28: mol_type = other RNA
ccccccactgctaaatttgactggcctt

SEQ ID NO: 14217 - RNA, 20 nt, Synthetic Construct
  source 1..20: mol_type = other RNA
tatgtctgctgaccatcacc

SEQ ID NO: 14218 - RNA, 22 nt, Synthetic Construct
  source 1..22: mol_type = other RNA
tgaggtaatagtttgtgctgtt

SEQ ID NO: 14219 - RNA, 22 nt, Synthetic Construct
  source 1..22: mol_type = other RNA
accactgaccgttgactgtacc

SEQ ID NO: 14220 - RNA, 22 nt, Synthetic Construct
  source 1..22: mol_type = other RNA
accactgaccgttgactgtacc

SEQ ID NO: 14221 - RNA, 23 nt, Synthetic Construct
  source 1..23: mol_type = other RNA
tccagtactgagctgccccgagt

SEQ ID NO: 14222 - RNA, 31 nt, Synthetic Construct; identical to SEQ ID NO: 2412
  source 1..31: mol_type = other RNA

SEQ ID NO: 14223 - RNA, 31 nt, Synthetic Construct; identical to SEQ ID NO: 2412
  source 1..31: mol_type = other RNA

SEQ ID NO: 14224 - RNA, 22 nt, Synthetic Construct
  source 1..22: mol_type = other RNA
taactccttaagcgaatctcgc

SEQ ID NO: 14225 - RNA, 22 nt, Synthetic Construct
  source 1..22: mol_type = other RNA
taactccttaagcgaatctcgc

SEQ ID NO: 14226 - RNA, 21 nt, Synthetic Construct
  source 1..21: mol_type = other RNA
tcctgtactgggctgccccga

SEQ ID NO: 14227 - RNA, 21 nt, Synthetic Construct
  source 1..21: mol_type = other RNA
tcctgtactgggctgccccga

SEQ ID NO: 14228 - RNA, 32 nt, Synthetic Construct; identical to SEQ ID NO: 770
  source 1..32: mol_type = other RNA

SEQ ID NO: 14229 - RNA, 21 nt, Synthetic Construct
  source 1..21: mol_type = other RNA
agcgtgcttgactgcgagact

SEQ ID NO: 14230 - RNA, 21 nt, Synthetic Construct
  source 1..21: mol_type = other RNA
agcgtgcttgactgcgagact

SEQ ID NO: 14231 - RNA, 24 nt, Synthetic Construct
  source 1..24: mol_type = other RNA
tagcagcacgtaaatattggcgtt

SEQ ID NO: 14232 - RNA, 21 nt, Synthetic Construct
  source 1..21: mol_type = other RNA
tgaggtggtagattgtatagt

SEQ ID NO: 14233 - RNA, 19 nt, Synthetic Construct
  source 1..19: mol_type = other RNA
gcccagtgctctgaatgtc

SEQ ID NO: 14234 - RNA, 19 nt, Synthetic Construct
  source 1..19: mol_type = other RNA
gcccagtgctctgaatgtc

SEQ ID NO: 14235 - RNA, 21 nt, Synthetic Construct
  source 1..21: mol_type = other RNA
agaggggcagagagcgagact

SEQ ID NO: 14236 - RNA, 20 nt, Synthetic Construct
  source 1..20: mol_type = other RNA
attgcacttgtcccggcctg

SEQ ID NO: 14237 - RNA, 20 nt, Synthetic Construct
  source 1..20: mol_type = other RNA
attgcacttgtcccggcctg

SEQ ID NO: 14238 - RNA, 22 nt, Synthetic Construct
  source 1..22: mol_type = other RNA
tcctgtactgagttgccccgag

SEQ ID NO: 14239 - RNA, 32 nt, Synthetic Construct; identical to SEQ ID NO: 2435
  source 1..32: mol_type = other RNA

SEQ ID NO: 14240 - RNA, 32 nt, Synthetic Construct; identical to SEQ ID NO: 2435
  source 1..32: mol_type = other RNA

SEQ ID NO: 14241 - RNA, 27 nt, Synthetic Construct
  source 1..27: mol_type = other RNA
ccctccactgctaaatttgactggctt

SEQ ID NO: 14242 - RNA, 22 nt, Synthetic Construct
  source 1..22: mol_type = other RNA
tgaggcagtagattgtatagtt

SEQ ID NO: 14243 - RNA, 22 nt, Synthetic Construct
  source 1..22: mol_type = other RNA
tgaggcagtagattgtatagtt

SEQ ID NO: 14244 - RNA, 18 nt, Synthetic Construct
  source 1..18: mol_type = other RNA
accctgctcgctgcgcca

SEQ ID NO: 14245 - RNA, 18 nt, Synthetic Construct
  source 1..18: mol_type = other RNA
accctgctcgctgcgcca

SEQ ID NO: 14246 - RNA, 20 nt, Synthetic Construct
  source 1..20: mol_type = other RNA
atcaagtaatccaggatagg

SEQ ID NO: 14247 - RNA, 32 nt, Synthetic Construct; identical to SEQ ID NO: 2052
  source 1..32: mol_type = other RNA

SEQ ID NO: 14248 - RNA, 32 nt, Synthetic Construct; identical to SEQ ID NO: 2052
  source 1..32: mol_type = other RNA

SEQ ID NO: 14249 - RNA, 17 nt, Synthetic Construct
  source 1..17: mol_type = other RNA
atcgtgacgatagtgca

SEQ ID NO: 14250 - RNA, 17 nt, Synthetic Construct
  source 1..17: mol_type = other RNA
atcgtgacgatagtgca

SEQ ID NO: 14251 - RNA, 21 nt, Synthetic Construct
  source 1..21: mol_type = other RNA
agagttctacagtccgacgat

SEQ ID NO: 14252 - RNA, 21 nt, Synthetic Construct
  source 1..21: mol_type = other RNA
agagttctacagtccgacgat

SEQ ID NO: 14253 - RNA, 22 nt, Synthetic Construct
  source 1..22: mol_type = other RNA
tgtcagtttgtcaaatacccaa

SEQ ID NO: 14254 - RNA, 27 nt, Synthetic Construct
  source 1..27: mol_type = other RNA
ccccccactgctaaatttgattggctt

SEQ ID NO: 14255 - RNA, 27 nt, Synthetic Construct
  source 1..27: mol_type = other RNA
ccccccactgctaaatttgattggctt

SEQ ID NO: 14256 - RNA, 22 nt, Synthetic Construct
  source 1..22: mol_type = other RNA
tggaatgtaaagaggtatgtat

SEQ ID NO: 14257 - RNA, 22 nt, Synthetic Construct
  source 1..22: mol_type = other RNA
tggaatgtaaagaggtatgtat

SEQ ID NO: 14258 - RNA, 22 nt, Synthetic Construct
  source 1..22: mol_type = other RNA
tgagctagtagtttgtgctgtt

SEQ ID NO: 14259 - RNA, 23 nt, Synthetic Construct
  source 1..23: mol_type = other RNA
cactagattgtgagctcctggaa

SEQ ID NO: 14260 - RNA, 23 nt, Synthetic Construct
  source 1..23: mol_type = other RNA
cactagattgtgagctcctggaa

SEQ ID NO: 14261 - RNA, 33 nt, Synthetic Construct; identical to SEQ ID NO: 2126
  source 1..33: mol_type = other RNA

SEQ ID NO: 14262 - RNA, 33 nt, Synthetic Construct; identical to SEQ ID NO: 2126
  source 1..33: mol_type = other RNA

SEQ ID NO: 14263 - RNA, 23 nt, Synthetic Construct
  source 1..23: mol_type = other RNA
tgaggggcagagagcaagacttt

SEQ ID NO: 14264 - RNA, 23 nt, Synthetic Construct
  source 1..23: mol_type = other RNA
tgaggggcagagagcaagacttt

SEQ ID NO: 14265 - RNA, 22 nt, Synthetic Construct
  source 1..22: mol_type = other RNA
tggctcagttcagcaggaacag

SEQ ID NO: 14266 - RNA, 21 nt, Synthetic Construct
  source 1..21: mol_type = other RNA
tttgttcgttcggctcgcgtg

SEQ ID NO: 14267 - RNA, 21 nt, Synthetic Construct
  source 1..21: mol_type = other RNA
tttgttcgttcggctcgcgtg

SEQ ID NO: 14268 - RNA, 22 nt, Synthetic Construct
  source 1..22: mol_type = other RNA
tgaggtagtaggttgtatagat

SEQ ID NO: 14269 - RNA, 18 nt, Synthetic Construct
  source 1..18: mol_type = other RNA
cccaaaggtcgtcggttc

SEQ ID NO: 14270 - RNA, 22 nt, Synthetic Construct
  source 1..22: mol_type = other RNA
tgaggtagtaggttgcgtggtt

SEQ ID NO: 14271 - RNA, 22 nt, Synthetic Construct
  source 1..22: mol_type = other RNA
tgaggtagtaggttgcgtggtt

SEQ ID NO: 14272 - RNA, 34 nt, Synthetic Construct; identical to SEQ ID NO: 2019
  source 1..34: mol_type = other RNA

SEQ ID NO: 14273 - RNA, 34 nt, Synthetic Construct; identical to SEQ ID NO: 2019
  source 1..34: mol_type = other RNA

SEQ ID NO: 14274 - RNA, 36 nt, Synthetic Construct; identical to SEQ ID NO: 2660
  source 1..36: mol_type = other RNA

SEQ ID NO: 14275 - RNA, 36 nt, Synthetic Construct; identical to SEQ ID NO: 2660
  source 1..36: mol_type = other RNA

SEQ ID NO: 14276 - RNA, 32 nt, Synthetic Construct; identical to SEQ ID NO: 8371
  source 1..32: mol_type = other RNA

SEQ ID NO: 14277 - RNA, 32 nt, Synthetic Construct; identical to SEQ ID NO: 8371
  source 1..32: mol_type = other RNA

SEQ ID NO: 14278 - RNA, 15 nt, Synthetic Construct
  source 1..15: mol_type = other RNA
gagtagggcgggaca

SEQ ID NO: 14279 - RNA, 15 nt, Synthetic Construct
  source 1..15: mol_type = other RNA
gagtagggcgggaca

SEQ ID NO: 14280 - RNA, 33 nt, Synthetic Construct; identical to SEQ ID NO: 2253
  source 1..33: mol_type = other RNA

SEQ ID NO: 14281 - RNA, 33 nt, Synthetic Construct; identical to SEQ ID NO: 2253
  source 1..33: mol_type = other RNA

SEQ ID NO: 14282 - RNA, 22 nt, Synthetic Construct
  source 1..22: mol_type = other RNA
actccagccccacagcctcagc

SEQ ID NO: 14283 - RNA, 22 nt, Synthetic Construct
  source 1..22: mol_type = other RNA
actccagccccacagcctcagc

SEQ ID NO: 14284 - RNA, 19 nt, Synthetic Construct
  source 1..19: mol_type = other RNA
cgactcttagcggtggatc

SEQ ID NO: 14285 - RNA, 19 nt, Synthetic Construct
  source 1..19: mol_type = other RNA
cgactcttagcggtggatc

SEQ ID NO: 14286 - RNA, 20 nt, Synthetic Construct
  source 1..20: mol_type = other RNA
tgaggtagtaggtcgtgtgg

SEQ ID NO: 14287 - RNA, 20 nt, Synthetic Construct
  source 1..20: mol_type = other RNA
tgaggtagtaggtcgtgtgg

SEQ ID NO: 14288 - RNA, 21 nt, Synthetic Construct
  source 1..21: mol_type = other RNA
tcctgtacagagctgccccga

SEQ ID NO: 14289 - RNA, 21 nt, Synthetic Construct
  source 1..21: mol_type = other RNA
tcctgtacagagctgccccga

SEQ ID NO: 14290 - RNA, 23 nt, Synthetic Construct
  source 1..23: mol_type = other RNA
ctcactgatcgagtcgtcctgcg

SEQ ID NO: 14291 - RNA, 21 nt, Synthetic Construct
  source 1..21: mol_type = other RNA
tccagtactgagctgccccga

SEQ ID NO: 14292 - RNA, 21 nt, Synthetic Construct
  source 1..21: mol_type = other RNA
tccagtactgagctgccccga

SEQ ID NO: 14293 - RNA, 19 nt, Synthetic Construct
  source 1..19: mol_type = other RNA
ccagtaaacggcggccgta

SEQ ID NO: 14294 - RNA, 21 nt, Synthetic Construct
  source 1..21: mol_type = other RNA
ggaggtagtaggttgtgtggt

SEQ ID NO: 14295 - RNA, 21 nt, Synthetic Construct
  source 1..21: mol_type = other RNA
ggaggtagtaggttgtgtggt

SEQ ID NO: 14296 - RNA, 23 nt, Synthetic Construct
  source 1..23: mol_type = other RNA
tggcagtgtcttagctggttgtt

SEQ ID NO: 14297 - RNA, 23 nt, Synthetic Construct
  source 1..23: mol_type = other RNA
tggcagtgtcttagctggttgtt

SEQ ID NO: 14298 - RNA, 25 nt, Synthetic Construct
  source 1..25: mol_type = other RNA
tcggatccgtctgagcttggctttt

SEQ ID NO: 14299 - RNA, 25 nt, Synthetic Construct
  source 1..25: mol_type = other RNA
tcggatccgtctgagcttggctttt

SEQ ID NO: 14300 - RNA, 27 nt, Synthetic Construct
  source 1..27: mol_type = other RNA
gactcttagcggtggatcactcggctc

SEQ ID NO: 14301 - RNA, 27 nt, Synthetic Construct
  source 1..27: mol_type = other RNA
gactcttagcggtggatcactcggctc

SEQ ID NO: 14302 - RNA, 21 nt, Synthetic Construct
  source 1..21: mol_type = other RNA
tgaggaagtaggttgtgtggt

SEQ ID NO: 14303 - RNA, 21 nt, Synthetic Construct
  source 1..21: mol_type = other RNA
tgaggaagtaggttgtgtggt

SEQ ID NO: 14304 - RNA, 22 nt, Synthetic Construct
  source 1..22: mol_type = other RNA
tcgcagcacgtaaatattggcg

SEQ ID NO: 14305 - RNA, 22 nt, Synthetic Construct
  source 1..22: mol_type = other RNA
tcgcagcacgtaaatattggcg

SEQ ID NO: 14306 - RNA, 21 nt, Synthetic Construct
  source 1..21: mol_type = other RNA
acagtagcctgcacattggtt

SEQ ID NO: 14307 - RNA, 21 nt, Synthetic Construct
  source 1..21: mol_type = other RNA
tggagagaaaggcagttcctg

SEQ ID NO: 14308 - RNA, 21 nt, Synthetic Construct
  source 1..21: mol_type = other RNA
tggagagaaaggcagttcctg

SEQ ID NO: 14309 - RNA, 22 nt, Synthetic Construct
  source 1..22: mol_type = other RNA
ttcaagtaattcaggataggtc

SEQ ID NO: 14310 - RNA, 22 nt, Synthetic Construct
  source 1..22: mol_type = other RNA
tcctgtactgagctaccccgag

SEQ ID NO: 14311 - RNA, 22 nt, Synthetic Construct
  source 1..22: mol_type = other RNA
tcctgtactgagctaccccgag

SEQ ID NO: 14312 - RNA, 21 nt, Synthetic Construct
  source 1..21: mol_type = other RNA
tggggtgtgacaatggtgttt

SEQ ID NO: 14313 - RNA, 18 nt, Synthetic Construct
  source 1..18: mol_type = other RNA
atcccggacgagccccca

SEQ ID NO: 14314 - RNA, 18 nt, Synthetic Construct
  source 1..18: mol_type = other RNA
atcccggacgagccccca

SEQ ID NO: 14315 - RNA, 29 nt, Synthetic Construct
  source 1..29: mol_type = other RNA
ccccccccactgctaaatttgactggctt

SEQ ID NO: 14316 - RNA, 32 nt, Synthetic Construct; identical to SEQ ID NO: 1675
  source 1..32: mol_type = other RNA

SEQ ID NO: 14317 - RNA, 32 nt, Synthetic Construct; identical to SEQ ID NO: 1675
  source 1..32: mol_type = other RNA

SEQ ID NO: 14318 - RNA, 21 nt, Synthetic Construct
  source 1..21: mol_type = other RNA
aggggctggctttcctctggt

SEQ ID NO: 14319 - RNA, 21 nt, Synthetic Construct
  source 1..21: mol_type = other RNA
aggggctggctttcctctggt

SEQ ID NO: 14320 - RNA, 23 nt, Synthetic Construct
  source 1..23: mol_type = other RNA
tgagcgcctcgacgacagagccg

SEQ ID NO: 14321 - RNA, 23 nt, Synthetic Construct
  source 1..23: mol_type = other RNA
tgagcgcctcgacgacagagccg

SEQ ID NO: 14322 - RNA, 21 nt, Synthetic Construct
  source 1..21: mol_type = other RNA
acagtagtctgcacattggtt

SEQ ID NO: 14323 - RNA, 19 nt, Synthetic Construct
  source 1..19: mol_type = other RNA
cattattacttttggtacg

SEQ ID NO: 14324 - RNA, 19 nt, Synthetic Construct
  source 1..19: mol_type = other RNA
cattattacttttggtacg

SEQ ID NO: 14325 - RNA, 21 nt, Synthetic Construct
  source 1..21: mol_type = other RNA
cataattacttttggtacgcg

SEQ ID NO: 14326 - RNA, 21 nt, Synthetic Construct
  source 1..21: mol_type = other RNA
cataattacttttggtacgcg

SEQ ID NO: 14327 - RNA, 22 nt, Synthetic Construct
  source 1..22: mol_type = other RNA
tcgtaccgtgagtagtaatgcg

SEQ ID NO: 14328 - RNA, 20 nt, Synthetic Construct
  source 1..20: mol_type = other RNA
tgaggtagtaggttgtgtgg

SEQ ID NO: 14329 - RNA, 20 nt, Synthetic Construct
  source 1..20: mol_type = other RNA
tgaggtagtaggttgtgtgg

SEQ ID NO: 14330 - RNA, 17 nt, Synthetic Construct
  source 1..17: mol_type = other RNA
taggtcatcgtcaggct

SEQ ID NO: 14331 - RNA, 25 nt, Synthetic Construct
  source 1..25: mol_type = other RNA
ttgagggtatgagatcgagacgaca

SEQ ID NO: 14332 - RNA, 23 nt, Synthetic Construct
  source 1..23: mol_type = other RNA
caaagtgctgttcgcgcaggtag

SEQ ID NO: 14333 - RNA, 25 nt, Synthetic Construct
  source 1..25: mol_type = other RNA
ttgaggatatgagatcgaggcgaca

SEQ ID NO: 14334 - RNA, 25 nt, Synthetic Construct
  source 1..25: mol_type = other RNA
ttgaggatatgagatcgaggcgaca

SEQ ID NO: 14335 - RNA, 21 nt, Synthetic Construct
  source 1..21: mol_type = other RNA
agctcggtctgaggcccctca

SEQ ID NO: 14336 - RNA, 21 nt, Synthetic Construct
  source 1..21: mol_type = other RNA
agctcggtctgaggcccctca

SEQ ID NO: 14337 - RNA, 22 nt, Synthetic Construct
  source 1..22: mol_type = other RNA
cataaagtagaaagcactacta

SEQ ID NO: 14338 - RNA, 22 nt, Synthetic Construct
  source 1..22: mol_type = other RNA
cataaagtagaaagcactacta

SEQ ID NO: 14339 - RNA, 22 nt, Synthetic Construct
  source 1..22: mol_type = other RNA
tgaggtagtaggttgtattgtt

SEQ ID NO: 14340 - RNA, 22 nt, Synthetic Construct
  source 1..22: mol_type = other RNA
tgaggtagtaggttgtattgtt

SEQ ID NO: 14341 - RNA, 20 nt, Synthetic Construct
  source 1..20: mol_type = other RNA
tccctgagaccctaacttgt

SEQ ID NO: 14342 - RNA, 22 nt, Synthetic Construct
  source 1..22: mol_type = other RNA
tggaacgtaaagaagtatgtat

SEQ ID NO: 14343 - RNA, 22 nt, Synthetic Construct
  source 1..22: mol_type = other RNA
tggaacgtaaagaagtatgtat

SEQ ID NO: 14344 - RNA, 21 nt, Synthetic Construct
  source 1..21: mol_type = other RNA
tgaggtagaaggttgtatagt

SEQ ID NO: 14345 - RNA, 21 nt, Synthetic Construct
  source 1..21: mol_type = other RNA
tgaggtagaaggttgtatagt

SEQ ID NO: 14346 - RNA, 32 nt, Synthetic Construct; identical to SEQ ID NO: 2582
  source 1..32: mol_type = other RNA

SEQ ID NO: 14347 - RNA, 32 nt, Synthetic Construct; identical to SEQ ID NO: 2582
  source 1..32: mol_type = other RNA

SEQ ID NO: 14348 - RNA, 18 nt, Synthetic Construct
  source 1..18: mol_type = other RNA
gctattgacgaccgtacc

SEQ ID NO: 14349 - RNA, 18 nt, Synthetic Construct
  source 1..18: mol_type = other RNA
gctattgacgaccgtacc

SEQ ID NO: 14350 - RNA, 16 nt, Synthetic Construct
  source 1..16: mol_type = other RNA
gctattgacgaccgta

SEQ ID NO: 14351 - RNA, 16 nt, Synthetic Construct
  source 1..16: mol_type = other RNA
gctattgacgaccgta

SEQ ID NO: 14352 - RNA, 21 nt, Synthetic Construct
  source 1..21: mol_type = other RNA
taggtagtttcctgttgttgg

SEQ ID NO: 14353 - RNA, 24 nt, Synthetic Construct
  source 1..24: mol_type = other RNA
aacattcattgctgtcggtgggtt

SEQ ID NO: 14354 - RNA, 21 nt, Synthetic Construct
  source 1..21: mol_type = other RNA
ngaggtagtaggttgtgtggt

SEQ ID NO: 14355 - RNA, 21 nt, Synthetic Construct
  source 1..21: mol_type = other RNA
ngaggtagtaggttgtgtggt

SEQ ID NO: 14356 - RNA, 23 nt, Synthetic Construct
  source 1..23: mol_type = other RNA
tctcccaacccttgtaccagtgt

SEQ ID NO: 14357 - RNA, 23 nt, Synthetic Construct
  source 1..23: mol_type = other RNA
tctcccaacccttgtaccagtgt

SEQ ID NO: 14358 - RNA, 22 nt, Synthetic Construct
  source 1..22: mol_type = other RNA
taaggtagtagtttgtgctgtt

SEQ ID NO: 14359 - RNA, 27 nt, Synthetic Construct
  source 1..27: mol_type = other RNA
agagcagctaataccgcatacgacctg

SEQ ID NO: 14360 - RNA, 27 nt, Synthetic Construct
  source 1..27: mol_type = other RNA
agagcagctaataccgcatacgacctg

SEQ ID NO: 14361 - RNA, 22 nt, Synthetic Construct
  source 1..22: mol_type = other RNA
tgaggtagtaggttgtataatt

SEQ ID NO: 14362 - RNA, 21 nt, Synthetic Construct
  source 1..21: mol_type = other RNA
tgaggtagtaggttgtataga

SEQ ID NO: 14363 - RNA, 21 nt, Synthetic Construct
  source 1..21: mol_type = other RNA
tgaggtagtaggttgtataga

SEQ ID NO: 14364 - RNA, 27 nt, Synthetic Construct
  source 1..27: mol_type = other RNA
gaaaaagtcatggaggccatggggttg

SEQ ID NO: 14365 - RNA, 27 nt, Synthetic Construct
  source 1..27: mol_type = other RNA
gaaaaagtcatggaggccatggggttg

SEQ ID NO: 14366 - RNA, 22 nt, Synthetic Construct
  source 1..22: mol_type = other RNA
aggttccggataagtaagagcc

SEQ ID NO: 14367 - RNA, 22 nt, Synthetic Construct
  source 1..22: mol_type = other RNA
aggttccggataagtaagagcc

SEQ ID NO: 14368 - RNA, 22 nt, Synthetic Construct
  source 1..22: mol_type = other RNA
tgtgactggttgaccagagggt

SEQ ID NO: 14369 - RNA, 22 nt, Synthetic Construct
  source 1..22: mol_type = other RNA
tagcagcacgtaaaaattggcg

SEQ ID NO: 14370 - RNA, 22 nt, Synthetic Construct
  source 1..22: mol_type = other RNA
tagcagcacgtaaaaattggcg

SEQ ID NO: 14371 - RNA, 23 nt, Synthetic Construct
  source 1..23: mol_type = other RNA
tgaggggcagagagcgagacttc

SEQ ID NO: 14372 - RNA, 23 nt, Synthetic Construct
  source 1..23: mol_type = other RNA
tgaggggcagagagcgagacttc

SEQ ID NO: 14373 - RNA, 26 nt, Synthetic Construct
  source 1..26: mol_type = other RNA
aatgacacgatcactcccgttgagtt

SEQ ID NO: 14374 - RNA, 19 nt, Synthetic Construct
  source 1..19: mol_type = other RNA
atctgctggaactgcaact

SEQ ID NO: 14375 - RNA, 19 nt, Synthetic Construct
  source 1..19: mol_type = other RNA
atctgctggaactgcaact

SEQ ID NO: 14376 - RNA, 24 nt, Synthetic Construct
  source 1..24: mol_type = other RNA
tgtaaacatccccggctggaagct

SEQ ID NO: 14377 - RNA, 24 nt, Synthetic Construct
  source 1..24: mol_type = other RNA
tgtaaacatccccggctggaagct

SEQ ID NO: 14378 - RNA, 23 nt, Synthetic Construct
  source 1..23: mol_type = other RNA
tggtaatacgacgtgcttagtgt

SEQ ID NO: 14379 - RNA, 31 nt, Synthetic Construct; identical to SEQ ID NO: 2758
  source 1..31: mol_type = other RNA

SEQ ID NO: 14380 - RNA, 31 nt, Synthetic Construct; identical to SEQ ID NO: 2758
  source 1..31: mol_type = other RNA

SEQ ID NO: 14381 - RNA, 21 nt, Synthetic Construct
  source 1..21: mol_type = other RNA
tggggtgtgacaatggtgttt

SEQ ID NO: 14382 - RNA, 21 nt, Synthetic Construct
  source 1..21: mol_type = other RNA
tggggtgtgacaatggtgttt

SEQ ID NO: 14383 - RNA, 27 nt, Synthetic Construct
  source 1..27: mol_type = other RNA
ccccccactgctaaatttgtctggctt

SEQ ID NO: 14384 - RNA, 36 nt, Synthetic Construct; identical to SEQ ID NO: 2520
  source 1..36: mol_type = other RNA

SEQ ID NO: 14385 - RNA, 36 nt, Synthetic Construct; identical to SEQ ID NO: 2520
  source 1..36: mol_type = other RNA

SEQ ID NO: 14386 - RNA, 16 nt, Synthetic Construct
  source 1..16: mol_type = other RNA
ccatgccgcgtgcggg

SEQ ID NO: 14387 - RNA, 16 nt, Synthetic Construct
  source 1..16: mol_type = other RNA
ccatgccgcgtgcggg

SEQ ID NO: 14388 - RNA, 17 nt, Synthetic Construct
  source 1..17: mol_type = other RNA
accggaggaaggtgggg

SEQ ID NO: 14389 - RNA, 17 nt, Synthetic Construct
  source 1..17: mol_type = other RNA
accggaggaaggtgggg

SEQ ID NO: 14390 - RNA, 22 nt, Synthetic Construct
  source 1..22: mol_type = other RNA
tgaggtagtagtttgtgccgtt

SEQ ID NO: 14391 - RNA, 22 nt, Synthetic Construct
  source 1..22: mol_type = other RNA
tgaggtagtagtttgtgccgtt

SEQ ID NO: 14392 - RNA, 22 nt, Synthetic Construct
  source 1..22: mol_type = other RNA
cagagttctacagtccgacgat

SEQ ID NO: 14393 - RNA, 22 nt, Synthetic Construct
  source 1..22: mol_type = other RNA
cagagttctacagtccgacgat

SEQ ID NO: 14394 - RNA, 22 nt, Synthetic Construct
  source 1..22: mol_type = other RNA
tgaggtagtagtttgtgcggtt

SEQ ID NO: 14395 - RNA, 22 nt, Synthetic Construct
  source 1..22: mol_type = other RNA
tgaggtagtagtttgtgcggtt

SEQ ID NO: 14396 - RNA, 23 nt, Synthetic Construct
  source 1..23: mol_type = other RNA
tgaggtagtaggttgtatggtta

SEQ ID NO: 14397 - RNA, 23 nt, Synthetic Construct
  source 1..23: mol_type = other RNA
tgaggtagtaggttgtatggtta

SEQ ID NO: 14398 - RNA, 18 nt, Synthetic Construct
  source 1..18: mol_type = other RNA
tccgacatgcgagggttc

SEQ ID NO: 14399 - RNA, 18 nt, Synthetic Construct
  source 1..18: mol_type = other RNA
tgcgtagatatgcggagg

SEQ ID NO: 14400 - RNA, 22 nt, Synthetic Construct
  source 1..22: mol_type = other RNA
cgaggtagtaggttgtgtggtt

SEQ ID NO: 14401 - RNA, 22 nt, Synthetic Construct
  source 1..22: mol_type = other RNA
cgaggtagtaggttgtgtggtt

SEQ ID NO: 14402 - RNA, 21 nt, Synthetic Construct
  source 1..21: mol_type = other RNA
tggggtagtaggttgtatagt

SEQ ID NO: 14403 - RNA, 21 nt, Synthetic Construct
  source 1..21: mol_type = other RNA
tggggtagtaggttgtatagt

SEQ ID NO: 14404 - RNA, 22 nt, Synthetic Construct
  source 1..22: mol_type = other RNA
tgaggtagtaggttgtatagat

SEQ ID NO: 14405 - RNA, 22 nt, Synthetic Construct
  source 1..22: mol_type = other RNA
tgaggtagtaggttgtatagat

SEQ ID NO: 14406 - RNA, 23 nt, Synthetic Construct
  source 1..23: mol_type = other RNA
taaggggcagagagcgagacttt

SEQ ID NO: 14407 - RNA, 22 nt, Synthetic Construct
  source 1..22: mol_type = other RNA
atcctgtactgagctgccccga

SEQ ID NO: 14408 - RNA, 22 nt, Synthetic Construct
  source 1..22: mol_type = other RNA
atcctgtactgagctgccccga

SEQ ID NO: 14409 - RNA, 22 nt, Synthetic Construct
  source 1..22: mol_type = other RNA
tgaggaagtaggttgtgtggtt

SEQ ID NO: 14410 - RNA, 22 nt, Synthetic Construct
  source 1..22: mol_type = other RNA
tgaggaagtaggttgtgtggtt

SEQ ID NO: 14411 - RNA, 16 nt, Synthetic Construct
  source 1..16: mol_type = other RNA
gcctacggccatacca

SEQ ID NO: 14412 - RNA, 16 nt, Synthetic Construct
  source 1..16: mol_type = other RNA
gcctacggccatacca

SEQ ID NO: 14413 - RNA, 22 nt, Synthetic Construct
  source 1..22: mol_type = other RNA
tgaggtagtagtctgtgctgtt

SEQ ID NO: 14414 - RNA, 22 nt, Synthetic Construct
  source 1..22: mol_type = other RNA
tgaggtagtagtctgtgctgtt

SEQ ID NO: 14415 - RNA, 17 nt, Synthetic Construct
  source 1..17: mol_type = other RNA
agggaacgtgagctggg

SEQ ID NO: 14416 - RNA, 17 nt, Synthetic Construct
  source 1..17: mol_type = other RNA
agggaacgtgagctggg

SEQ ID NO: 14417 - RNA, 25 nt, Synthetic Construct
  source 1..25: mol_type = other RNA
gttgaattgtggtctgtggacgtgg

SEQ ID NO: 14418 - RNA, 25 nt, Synthetic Construct
  source 1..25: mol_type = other RNA
gttgaattgtggtctgtggacgtgg

SEQ ID NO: 14419 - RNA, 35 nt, Synthetic Construct; identical to SEQ ID NO: 757
  source 1..35: mol_type = other RNA

SEQ ID NO: 14420 - RNA, 35 nt, Synthetic Construct; identical to SEQ ID NO: 757
  source 1..35: mol_type = other RNA

SEQ ID NO: 14421 - RNA, 23 nt, Synthetic Construct
  source 1..23: mol_type = other RNA
ggcggttatgcaagacagaggtg

SEQ ID NO: 14422 - RNA, 23 nt, Synthetic Construct
  source 1..23: mol_type = other RNA
ggcggttatgcaagacagaggtg

SEQ ID NO: 14423 - RNA, 23 nt, Synthetic Construct
  source 1..23: mol_type = other RNA
tgaggggcggagagcgagacttt

SEQ ID NO: 14424 - RNA, 23 nt, Synthetic Construct
  source 1..23: mol_type = other RNA
tgaggggcggagagcgagacttt

SEQ ID NO: 14425 - RNA, 22 nt, Synthetic Construct
  source 1..22: mol_type = other RNA
tgaggtagtagattgcatagtt

SEQ ID NO: 14426 - RNA, 15 nt, Synthetic Construct
  source 1..15: mol_type = other RNA
ctaccgtgcgtagga

SEQ ID NO: 14427 - RNA, 15 nt, Synthetic Construct
  source 1..15: mol_type = other RNA
ctaccgtgcgtagga

SEQ ID NO: 14428 - RNA, 25 nt, Synthetic Construct
  source 1..25: mol_type = other RNA
ggtaaaatggctgagtgaagcattg

SEQ ID NO: 14429 - RNA, 25 nt, Synthetic Construct
  source 1..25: mol_type = other RNA
ggtaaaatggctgagtgaagcattg

SEQ ID NO: 14430 - RNA, 23 nt, Synthetic Construct
  source 1..23: mol_type = other RNA
caaggtgctgttcgtgcaggtag

SEQ ID NO: 14431 - RNA, 21 nt, Synthetic Construct
  source 1..21: mol_type = other RNA
cataaagtagaaagcactact

SEQ ID NO: 14432 - RNA, 29 nt, Synthetic Construct
  source 1..29: mol_type = other RNA
cccgtgtgaaagtaggtcatcgtcaggct

SEQ ID NO: 14433 - RNA, 20 nt, Synthetic Construct
  source 1..20: mol_type = other RNA
cccagtaaacggcggccgta

SEQ ID NO: 14434 - RNA, 20 nt, Synthetic Construct
  source 1..20: mol_type = other RNA
cccagtaaacggcggccgta

SEQ ID NO: 14435 - RNA, 22 nt, Synthetic Construct
  source 1..22: mol_type = other RNA
tacagtagtctgcacattggtt

SEQ ID NO: 14436 - RNA, 22 nt, Synthetic Construct
  source 1..22: mol_type = other RNA
tacagtagtctgcacattggtt

SEQ ID NO: 14437 - RNA, 22 nt, Synthetic Construct
  source 1..22: mol_type = other RNA
tgaggaagtaggttgtgtggtt

SEQ ID NO: 14438 - RNA, 22 nt, Synthetic Construct
  source 1..22: mol_type = other RNA
tgaggaagtaggttgtgtggtt

SEQ ID NO: 14439 - RNA, 21 nt, Synthetic Construct
  source 1..21: mol_type = other RNA
tgaggtagtaggttgtgtgga

SEQ ID NO: 14440 - RNA, 22 nt, Synthetic Construct
  source 1..22: mol_type = other RNA
ttctgtactgagctgccccgag

SEQ ID NO: 14441 - RNA, 22 nt, Synthetic Construct
  source 1..22: mol_type = other RNA
ttctgtactgagctgccccgag

SEQ ID NO: 14442 - RNA, 21 nt, Synthetic Construct
  source 1..21: mol_type = other RNA
tagcaccatttgaaatcggtt

SEQ ID NO: 14443 - RNA, 22 nt, Synthetic Construct
  source 1..22: mol_type = other RNA
tggaatgtaaagaagtatgtgt

SEQ ID NO: 14444 - RNA, 22 nt, Synthetic Construct
  source 1..22: mol_type = other RNA
tggaatgtaaagaagtatgtgt

SEQ ID NO: 14445 - RNA, 22 nt, Synthetic Construct
  source 1..22: mol_type = other RNA
ttcaggtaatccaggataggct

SEQ ID NO: 14446 - RNA, 22 nt, Synthetic Construct
  source 1..22: mol_type = other RNA
ttcaggtaatccaggataggct

SEQ ID NO: 14447 - RNA, 20 nt, Synthetic Construct
  source 1..20: mol_type = other RNA
tcctgtaccgatcaatagtg

SEQ ID NO: 14448 - RNA, 15 nt, Synthetic Construct
  source 1..15: mol_type = other RNA
ggccgtcgtcagctc

SEQ ID NO: 14449 - RNA, 22 nt, Synthetic Construct
  source 1..22: mol_type = other RNA
atataatacaacctgctaagtg

SEQ ID NO: 14450 - RNA, 22 nt, Synthetic Construct
  source 1..22: mol_type = other RNA
atataatacaacctgctaagtg

SEQ ID NO: 14451 - RNA, 18 nt, Synthetic Construct
  source 1..18: mol_type = other RNA
gctgtgatggccgagtgg

SEQ ID NO: 14452 - RNA, 18 nt, Synthetic Construct
  source 1..18: mol_type = other RNA
gctgtgatggccgagtgg

SEQ ID NO: 14453 - RNA, 24 nt, Synthetic Construct
  source 1..24: mol_type = other RNA
gggttgtaaaccgcttttgtcagg

SEQ ID NO: 14454 - RNA, 24 nt, Synthetic Construct
  source 1..24: mol_type = other RNA
taccacagggtagaaccacggact

SEQ ID NO: 14455 - RNA, 24 nt, Synthetic Construct
  source 1..24: mol_type = other RNA
taccacagggtagaaccacggact

SEQ ID NO: 14456 - RNA, 16 nt, Synthetic Construct
  source 1..16: mol_type = other RNA
gccagcagccgcggta

SEQ ID NO: 14457 - RNA, 23 nt, Synthetic Construct
  source 1..23: mol_type = other RNA
gcgtggtaggagagcgttctgta

SEQ ID NO: 14458 - RNA, 19 nt, Synthetic Construct
  source 1..19: mol_type = other RNA
acggaagggcaccaccagg

SEQ ID NO: 14459 - RNA, 22 nt, Synthetic Construct
  source 1..22: mol_type = other RNA
tctcccaacccttgtaccagtg

SEQ ID NO: 14460 - RNA, 23 nt, Synthetic Construct
  source 1..23: mol_type = other RNA
aatgacacgatcactcccgttga

SEQ ID NO: 14461 - RNA, 33 nt, Synthetic Construct; identical to SEQ ID NO: 7224
  source 1..33: mol_type = other RNA

SEQ ID NO: 14462 - RNA, 33 nt, Synthetic Construct; identical to SEQ ID NO: 7224
  source 1..33: mol_type = other RNA

SEQ ID NO: 14463 - RNA, 17 nt, Synthetic Construct
  source 1..17: mol_type = other RNA
cagtagctcgaggaaaa

SEQ ID NO: 14464 - RNA, 36 nt, Synthetic Construct; identical to SEQ ID NO: 10982
  source 1..36: mol_type = other RNA

SEQ ID NO: 14465 - RNA, 23 nt, Synthetic Construct
  source 1..23: mol_type = other RNA
tggagacgcggccctgttggagt

SEQ ID NO: 14466 - RNA, 19 nt, Synthetic Construct
  source 1..19: mol_type = other RNA
atcccactcctgacaccat

SEQ ID NO: 14467 - RNA, 19 nt, Synthetic Construct
  source 1..19: mol_type = other RNA
atcccactcctgacaccat

SEQ ID NO: 14468 - RNA, 22 nt, Synthetic Construct
  source 1..22: mol_type = other RNA
tcagcgccgatgatagtgcgga

SEQ ID NO: 14469 - RNA, 25 nt, Synthetic Construct
  source 1..25: mol_type = other RNA
tgcgagagtaggacgttgccaggtt

SEQ ID NO: 14470 - RNA, 25 nt, Synthetic Construct
  source 1..25: mol_type = other RNA
tgcgagagtaggacgttgccaggtt

SEQ ID NO: 14471 - RNA, 20 nt, Synthetic Construct
  source 1..20: mol_type = other RNA
tgagatagtaggttgtgtgg

SEQ ID NO: 14472 - RNA, 20 nt, Synthetic Construct
  source 1..20: mol_type = other RNA
tgagatagtaggttgtgtgg

SEQ ID NO: 14473 - RNA, 16 nt, Synthetic Construct
  source 1..16: mol_type = other RNA
gtctacggccgtacca

SEQ ID NO: 14474 - RNA, 16 nt, Synthetic Construct
  source 1..16: mol_type = other RNA
gtctacggccgtacca

SEQ ID NO: 14475 - RNA, 35 nt, Synthetic Construct; identical to SEQ ID NO: 2450
  source 1..35: mol_type = other RNA

SEQ ID NO: 14476 - RNA, 22 nt, Synthetic Construct
  source 1..22: mol_type = other RNA
aagcagaacgtaaatattggcg

SEQ ID NO: 14477 - RNA, 22 nt, Synthetic Construct
  source 1..22: mol_type = other RNA
ccgtaccgtgagtaataatgcg

SEQ ID NO: 14478 - RNA, 22 nt, Synthetic Construct
  source 1..22: mol_type = other RNA
ccgtaccgtgagtaataatgcg

SEQ ID NO: 14479 - RNA, 22 nt, Synthetic Construct
  source 1..22: mol_type = other RNA
tgaggtagtagattgtgctgtt

SEQ ID NO: 14480 - RNA, 22 nt, Synthetic Construct
  source 1..22: mol_type = other RNA
tgaggtagtagattgtgctgtt

SEQ ID NO: 14481 - RNA, 23 nt, Synthetic Construct
  source 1..23: mol_type = other RNA
tgaggtagtaggttgtgtggttc

SEQ ID NO: 14482 - RNA, 17 nt, Synthetic Construct
  source 1..17: mol_type = other RNA
ccagtaaacggcggccg

SEQ ID NO: 14483 - RNA, 21 nt, Synthetic Construct
  source 1..21: mol_type = other RNA
tggggtagtaggttgtatagt

SEQ ID NO: 14484 - RNA, 17 nt, Synthetic Construct
  source 1..17: mol_type = other RNA
gtccggatcgtagtctg

SEQ ID NO: 14485 - RNA, 17 nt, Synthetic Construct
  source 1..17: mol_type = other RNA
gtccggatcgtagtctg

SEQ ID NO: 14486 - RNA, 22 nt, Synthetic Construct
  source 1..22: mol_type = other RNA
tggaatgtaaagaagcatgtat

SEQ ID NO: 14487 - RNA, 25 nt, Synthetic Construct
  source 1..25: mol_type = other RNA
gctcagtggaaaggatgtgaatcta

SEQ ID NO: 14488 - RNA, 25 nt, Synthetic Construct
  source 1..25: mol_type = other RNA
gctcagtggaaaggatgtgaatcta

SEQ ID NO: 14489 - RNA, 15 nt, Synthetic Construct
  source 1..15: mol_type = other RNA
gcaagtcgaacggta

SEQ ID NO: 14490 - RNA, 31 nt, Synthetic Construct; identical to SEQ ID NO: 2278
  source 1..31: mol_type = other RNA

SEQ ID NO: 14491 - RNA, 27 nt, Synthetic Construct
  source 1..27: mol_type = other RNA
gctttacattggactttgaacagatct

SEQ ID NO: 14492 - RNA, 20 nt, Synthetic Construct
  source 1..20: mol_type = other RNA
ggtcccaagggtatggctgt

SEQ ID NO: 14493 - RNA, 23 nt, Synthetic Construct
  source 1..23: mol_type = other RNA
atgtcccacccccactcctgttt

SEQ ID NO: 14494 - RNA, 23 nt, Synthetic Construct
  source 1..23: mol_type = other RNA
atgtcccacccccactcctgttt

SEQ ID NO: 14495 - RNA, 23 nt, Synthetic Construct
  source 1..23: mol_type = other RNA
tggtaatacgacgtgcttagtgt

SEQ ID NO: 14496 - RNA, 23 nt, Synthetic Construct
  source 1..23: mol_type = other RNA
tggtaatacgacgtgcttagtgt

SEQ ID NO: 14497 - RNA, 22 nt, Synthetic Construct
  source 1..22: mol_type = other RNA
tgaggcagtagtttgtgctgtt

SEQ ID NO: 14498 - RNA, 22 nt, Synthetic Construct
  source 1..22: mol_type = other RNA
tgaggcagtagtttgtgctgtt

SEQ ID NO: 14499 - RNA, 23 nt, Synthetic Construct
  source 1..23: mol_type = other RNA
tggtaatgcgacgtacttagtgt

SEQ ID NO: 14500 - RNA, 15 nt, Synthetic Construct
  source 1..15: mol_type = other RNA
cggcccagactccta

SEQ ID NO: 14501 - RNA, 15 nt, Synthetic Construct
  source 1..15: mol_type = other RNA
ggtcatcgtcaggct

SEQ ID NO: 14502 - RNA, 22 nt, Synthetic Construct
  source 1..22: mol_type = other RNA
tgaggtagtagtttgtgcggtt

SEQ ID NO: 14503 - RNA, 22 nt, Synthetic Construct
  source 1..22: mol_type = other RNA
tgaggtagtagtttgtgcggtt

SEQ ID NO: 14504 - RNA, 22 nt, Synthetic Construct
  source 1..22: mol_type = other RNA
tattgcacttgtctcggcctgt

SEQ ID NO: 14505 - RNA, 22 nt, Synthetic Construct
  source 1..22: mol_type = other RNA
tattgcacttgtctcggcctgt

SEQ ID NO: 14506 - RNA, 25 nt, Synthetic Construct
  source 1..25: mol_type = other RNA
ttgcagctgcctgggagtgacttca

SEQ ID NO: 14507 - RNA, 25 nt, Synthetic Construct
  source 1..25: mol_type = other RNA
ttgcagctgcctgggagtgacttca

SEQ ID NO: 14508 - RNA, 27 nt, Synthetic Construct
  source 1..27: mol_type = other RNA
ccccccactgctaaatttgaccggctt

SEQ ID NO: 14509 - RNA, 21 nt, Synthetic Construct
  source 1..21: mol_type = other RNA
tcctgtactgagttgccccga

SEQ ID NO: 14510 - RNA, 23 nt, Synthetic Construct
  source 1..23: mol_type = other RNA
caacggaaccccaaaagcagctg

SEQ ID NO: 14511 - RNA, 28 nt, Synthetic Construct
  source 1..28: mol_type = other RNA
gtggcattgccgagtagctaagtgcgga

SEQ ID NO: 14512 - RNA, 22 nt, Synthetic Construct
  source 1..22: mol_type = other RNA
taaggtagtaggttgtgtggtt

SEQ ID NO: 14513 - RNA, 22 nt, Synthetic Construct
  source 1..22: mol_type = other RNA
taaggtagtaggttgtgtggtt

SEQ ID NO: 14514 - RNA, 18 nt, Synthetic Construct
  source 1..18: mol_type = other RNA
ggacgttgataggctggg

SEQ ID NO: 14515 - RNA, 20 nt, Synthetic Construct
  source 1..20: mol_type = other RNA
ctgacctatgaattgacagc

SEQ ID NO: 14516 - RNA, 20 nt, Synthetic Construct
  source 1..20: mol_type = other RNA
ctgacctatgaattgacagc

SEQ ID NO: 14517 - RNA, 23 nt, Synthetic Construct
  source 1..23: mol_type = other RNA
ctcactgatcgagtcgtcctgcg

SEQ ID NO: 14518 - RNA, 23 nt, Synthetic Construct
  source 1..23: mol_type = other RNA
ctcactgatcgagtcgtcctgcg

SEQ ID NO: 14519 - RNA, 19 nt, Synthetic Construct
  source 1..19: mol_type = other RNA
tctaatgagactgccggtg

SEQ ID NO: 14520 - RNA, 16 nt, Synthetic Construct
  source 1..16: mol_type = other RNA
gtctacggctatacca

SEQ ID NO: 14521 - RNA, 16 nt, Synthetic Construct
  source 1..16: mol_type = other RNA
gtctacggctatacca

SEQ ID NO: 14522 - RNA, 27 nt, Synthetic Construct
  source 1..27: mol_type = other RNA
ccgtgtgaaagtaggtcatcgtcaggc

SEQ ID NO: 14523 - RNA, 27 nt, Synthetic Construct
  source 1..27: mol_type = other RNA
ccgtgtgaaagtaggtcatcgtcaggc

SEQ ID NO: 14524 - RNA, 23 nt, Synthetic Construct
  source 1..23: mol_type = other RNA
tggtaatacggcgtacttagtgt

SEQ ID NO: 14525 - RNA, 30 nt, Synthetic Construct; identical to SEQ ID NO: 2578
  source 1..30: mol_type = other RNA

SEQ ID NO: 14526 - RNA, 32 nt, Synthetic Construct; identical to SEQ ID NO: 1128
  source 1..32: mol_type = other RNA

SEQ ID NO: 14527 - RNA, 31 nt, Synthetic Construct; identical to SEQ ID NO: 955
  source 1..31: mol_type = other RNA

SEQ ID NO: 14528 - RNA, 31 nt, Synthetic Construct; identical to SEQ ID NO: 955
  source 1..31: mol_type = other RNA

SEQ ID NO: 14529 - RNA, 23 nt, Synthetic Construct
  source 1..23: mol_type = other RNA
tacagtagtctgcacattggttt

SEQ ID NO: 14530 - RNA, 21 nt, Synthetic Construct
  source 1..21: mol_type = other RNA
cgaggtagtaggttgtatagt

SEQ ID NO: 14531 - RNA, 25 nt, Synthetic Construct
  source 1..25: mol_type = other RNA
cgaatgttgctcggtgaaccccttt

SEQ ID NO: 14532 - RNA, 25 nt, Synthetic Construct
  source 1..25: mol_type = other RNA
cgaatgttgctcggtgaaccccttt

SEQ ID NO: 14533 - RNA, 29 nt, Synthetic Construct
  source 1..29: mol_type = other RNA
gctaaacctagccccaaacccactccacc

SEQ ID NO: 14534 - RNA, 30 nt, Synthetic Construct; identical to SEQ ID NO: 2274
  source 1..30: mol_type = other RNA

SEQ ID NO: 14535 - RNA, 29 nt, Synthetic Construct
  source 1..29: mol_type = other RNA
gcattggtggttcagtggtagaattctcg

SEQ ID NO: 14536 - RNA, 29 nt, Synthetic Construct
  source 1..29: mol_type = other RNA
gcattggtggttcagtggtagaattctcg

SEQ ID NO: 14537 - RNA, 22 nt, Synthetic Construct
  source 1..22: mol_type = other RNA
attgcacttgtcccggcctgtt

SEQ ID NO: 14538 - RNA, 23 nt, Synthetic Construct
  source 1..23: mol_type = other RNA
tgaagggcagagagcgagacttt

SEQ ID NO: 14539 - RNA, 22 nt, Synthetic Construct
  source 1..22: mol_type = other RNA
tggagtgtaaagaagtatgtat

SEQ ID NO: 14540 - RNA, 24 nt, Synthetic Construct
  source 1..24: mol_type = other RNA
caaagtgctgttcgtgcaggtaga

SEQ ID NO: 14541 - RNA, 22 nt, Synthetic Construct
  source 1..22: mol_type = other RNA
cgttgcacttgtctcggtctga

SEQ ID NO: 14542 - RNA, 22 nt, Synthetic Construct
  source 1..22: mol_type = other RNA
cgttgcacttgtctcggtctga

SEQ ID NO: 14543 - RNA, 19 nt, Synthetic Construct
  source 1..19: mol_type = other RNA
aacagtcaggatgttggct

SEQ ID NO: 14544 - RNA, 20 nt, Synthetic Construct
  source 1..20: mol_type = other RNA
tgaggtagtaggttgtgtag

SEQ ID NO: 14545 - RNA, 20 nt, Synthetic Construct
  source 1..20: mol_type = other RNA
tgaagtagtaggttgtgtgg

SEQ ID NO: 14546 - RNA, 22 nt, Synthetic Construct
  source 1..22: mol_type = other RNA
tgaggtagtaaattgtatagtt

SEQ ID NO: 14547 - RNA, 22 nt, Synthetic Construct
  source 1..22: mol_type = other RNA
tgaggtagtaaattgtatagtt

SEQ ID NO: 14548 - RNA, 17 nt, Synthetic Construct
  source 1..17: mol_type = other RNA
acagtgtgaatcggcgc

SEQ ID NO: 14549 - RNA, 17 nt, Synthetic Construct
  source 1..17: mol_type = other RNA
acagtgtgaatcggcgc

SEQ ID NO: 14550 - RNA, 20 nt, Synthetic Construct
  source 1..20: mol_type = other RNA
cgaggtagtaggttgtgtgg

SEQ ID NO: 14551 - RNA, 20 nt, Synthetic Construct
  source 1..20: mol_type = other RNA
cgaggtagtaggttgtgtgg

SEQ ID NO: 14552 - RNA, 33 nt, Synthetic Construct; identical to SEQ ID NO: 4947
  source 1..33: mol_type = other RNA

SEQ ID NO: 14553 - RNA, 19 nt, Synthetic Construct
  source 1..19: mol_type = other RNA
gaaaagctgggttgagagg

SEQ ID NO: 14554 - RNA, 19 nt, Synthetic Construct
  source 1..19: mol_type = other RNA
gaaaagctgggttgagagg

SEQ ID NO: 14555 - RNA, 27 nt, Synthetic Construct
  source 1..27: mol_type = other RNA
ccccccactgctaaatttgaccggctt

SEQ ID NO: 14556 - RNA, 27 nt, Synthetic Construct
  source 1..27: mol_type = other RNA
ccccccactgctaaatttgaccggctt

SEQ ID NO: 14557 - RNA, 38 nt, Synthetic Construct; identical to SEQ ID NO: 2492
  source 1..38: mol_type = other RNA

SEQ ID NO: 14558 - RNA, 24 nt, Synthetic Construct
  source 1..24: mol_type = other RNA
tgggtaatacgacgtacttagtgt

SEQ ID NO: 14559 - RNA, 24 nt, Synthetic Construct
  source 1..24: mol_type = other RNA
tgggtaatacgacgtacttagtgt

SEQ ID NO: 14560 - RNA, 22 nt, Synthetic Construct
  source 1..22: mol_type = other RNA
gcagtagtctgcacattggtta

SEQ ID NO: 14561 - RNA, 15 nt, Synthetic Construct
  source 1..15: mol_type = other RNA
cagagttctacagtc

SEQ ID NO: 14562 - RNA, 15 nt, Synthetic Construct
  source 1..15: mol_type = other RNA
cagagttctacagtc

SEQ ID NO: 14563 - RNA, 22 nt, Synthetic Construct
  source 1..22: mol_type = other RNA
tcgtaccgtgagtaataatacg

SEQ ID NO: 14564 - RNA, 23 nt, Synthetic Construct
  source 1..23: mol_type = other RNA
aatgacacgatcactcccgttgt

SEQ ID NO: 14565 - RNA, 23 nt, Synthetic Construct
  source 1..23: mol_type = other RNA
aatgacacgatcactcccgttgt

SEQ ID NO: 14566 - RNA, 20 nt, Synthetic Construct
  source 1..20: mol_type = other RNA
aatgacacgatcactcccgt

SEQ ID NO: 14567 - RNA, 21 nt, Synthetic Construct
  source 1..21: mol_type = other RNA
tggagtgtgacgatggtgttt

SEQ ID NO: 14568 - RNA, 21 nt, Synthetic Construct
  source 1..21: mol_type = other RNA
tggagtgtgacgatggtgttt

SEQ ID NO: 14569 - RNA, 18 nt, Synthetic Construct
  source 1..18: mol_type = other RNA
gtcaggatggccgagcgg

SEQ ID NO: 14570 - RNA, 18 nt, Synthetic Construct
  source 1..18: mol_type = other RNA
gtcaggatggccgagcgg

SEQ ID NO: 14571 - RNA, 23 nt, Synthetic Construct
  source 1..23: mol_type = other RNA
tgaggggcagagagcgagactat

SEQ ID NO: 14572 - RNA, 22 nt, Synthetic Construct
  source 1..22: mol_type = other RNA
tattgcacttgtcccggcctat

SEQ ID NO: 14573 - RNA, 21 nt, Synthetic Construct
  source 1..21: mol_type = other RNA
tgaggtggtaggttgtgtggt

SEQ ID NO: 14574 - RNA, 21 nt, Synthetic Construct
  source 1..21: mol_type = other RNA
tgaggtggtaggttgtgtggt

SEQ ID NO: 14575 - RNA, 24 nt, Synthetic Construct
  source 1..24: mol_type = other RNA
aggaagccctggaggggctggagg

SEQ ID NO: 14576 - RNA, 24 nt, Synthetic Construct
  source 1..24: mol_type = other RNA
aggaagccctggaggggctggagg

SEQ ID NO: 14577 - RNA, 18 nt, Synthetic Construct
  source 1..18: mol_type = other RNA
gtcgacgtatagggtgtg

SEQ ID NO: 14578 - RNA, 18 nt, Synthetic Construct
  source 1..18: mol_type = other RNA
gtcgacgtatagggtgtg

SEQ ID NO: 14579 - RNA, 41 nt, Synthetic Construct; identical to SEQ ID NO: 10630
  source 1..41: mol_type = other RNA

SEQ ID NO: 14580 - RNA, 23 nt, Synthetic Construct
  source 1..23: mol_type = other RNA
tcactgatcgagtcgtcctgcgc

SEQ ID NO: 14581 - RNA, 16 nt, Synthetic Construct
  source 1..16: mol_type = other RNA
gcggctgtagctcagt

SEQ ID NO: 14582 - RNA, 26 nt, Synthetic Construct
  source 1..26: mol_type = other RNA
ttaagtgacgatagcctaggagatac

SEQ ID NO: 14583 - RNA, 22 nt, Synthetic Construct
  source 1..22: mol_type = other RNA
cgaggtagtaggttgtgtggtt

SEQ ID NO: 14584 - RNA, 22 nt, Synthetic Construct
  source 1..22: mol_type = other RNA
cgaggtagtaggttgtgtggtt

SEQ ID NO: 14585 - RNA, 23 nt, Synthetic Construct
  source 1..23: mol_type = other RNA
tgaggggcagagagcgggacttt

SEQ ID NO: 14586 - RNA, 23 nt, Synthetic Construct
  source 1..23: mol_type = other RNA
tgaggggcagagagcgggacttt

SEQ ID NO: 14587 - RNA, 23 nt, Synthetic Construct
  source 1..23: mol_type = other RNA
cgcgacctcagatcagacgtggc

SEQ ID NO: 14588 - RNA, 23 nt, Synthetic Construct
  source 1..23: mol_type = other RNA
cgcgacctcagatcagacgtggc

SEQ ID NO: 14589 - RNA, 21 nt, Synthetic Construct
  source 1..21: mol_type = other RNA
ggctggtccgaaggtagtgag

SEQ ID NO: 14590 - RNA, 21 nt, Synthetic Construct
  source 1..21: mol_type = other RNA
ggctggtccgaaggtagtgag

SEQ ID NO: 14591 - RNA, 35 nt, Synthetic Construct; identical to SEQ ID NO: 2452
  source 1..35: mol_type = other RNA

SEQ ID NO: 14592 - RNA, 18 nt, Synthetic Construct
  source 1..18: mol_type = other RNA
atggccgttcttagttgg

SEQ ID NO: 14593 - RNA, 23 nt, Synthetic Construct
  source 1..23: mol_type = other RNA
caaagtgctgttcgtgcgggtag

SEQ ID NO: 14594 - RNA, 23 nt, Synthetic Construct
  source 1..23: mol_type = other RNA
caaagtgctgttcgtgcgggtag

SEQ ID NO: 14595 - RNA, 22 nt, Synthetic Construct
  source 1..22: mol_type = other RNA
tgagatagtagattgtatagtt

SEQ ID NO: 14596 - RNA, 35 nt, Synthetic Construct; identical to SEQ ID NO: 1501
  source 1..35: mol_type = other RNA

SEQ ID NO: 14597 - RNA, 23 nt, Synthetic Construct
  source 1..23: mol_type = other RNA
tctacagtgcacgtgtctccagt

SEQ ID NO: 14598 - RNA, 24 nt, Synthetic Construct
  source 1..24: mol_type = other RNA
acctggcatacaatgtagatttct

SEQ ID NO: 14599 - RNA, 24 nt, Synthetic Construct
  source 1..24: mol_type = other RNA
acctggcatacaatgtagatttct

SEQ ID NO: 14600 - RNA, 23 nt, Synthetic Construct
  source 1..23: mol_type = other RNA
tggtaatacgacgtacttagtga

SEQ ID NO: 14601 - RNA, 22 nt, Synthetic Construct
  source 1..22: mol_type = other RNA
tcgtgccgtgagtaataatgcg

SEQ ID NO: 14602 - RNA, 22 nt, Synthetic Construct
  source 1..22: mol_type = other RNA
tcgtgccgtgagtaataatgcg

SEQ ID NO: 14603 - RNA, 20 nt, Synthetic Construct
  source 1..20: mol_type = other RNA
cccataaagtagaaagcact

SEQ ID NO: 14604 - RNA, 32 nt, Synthetic Construct; identical to SEQ ID NO: 3541
  source 1..32: mol_type = other RNA

SEQ ID NO: 14605 - RNA, 29 nt, Synthetic Construct
  source 1..29: mol_type = other RNA
ccccccccactgctaaatttgactggctt

SEQ ID NO: 14606 - RNA, 29 nt, Synthetic Construct
  source 1..29: mol_type = other RNA
ccccccccactgctaaatttgactggctt

SEQ ID NO: 14607 - RNA, 22 nt, Synthetic Construct
  source 1..22: mol_type = other RNA
gaagaggacttggaactcgatc

SEQ ID NO: 14608 - RNA, 22 nt, Synthetic Construct
  source 1..22: mol_type = other RNA
gaagaggacttggaactcgatc

SEQ ID NO: 14609 - RNA, 18 nt, Synthetic Construct
  source 1..18: mol_type = other RNA
gaagttgaccgcctgggg

SEQ ID NO: 14610 - RNA, 17 nt, Synthetic Construct
  source 1..17: mol_type = other RNA
cagaactggcgatgcgg

SEQ ID NO: 14611 - RNA, 22 nt, Synthetic Construct
  source 1..22: mol_type = other RNA
acagtagtctgcacattggttg

SEQ ID NO: 14612 - RNA, 25 nt, Synthetic Construct
  source 1..25: mol_type = other RNA
cgtgtatttgacaagctgagttggt

SEQ ID NO: 14613 - RNA, 25 nt, Synthetic Construct
  source 1..25: mol_type = other RNA
cgtgtatttgacaagctgagttggt

SEQ ID NO: 14614 - RNA, 23 nt, Synthetic Construct
  source 1..23: mol_type = other RNA
tgaggggcagagagcgagacttc

SEQ ID NO: 14615 - RNA, 23 nt, Synthetic Construct
  source 1..23: mol_type = other RNA
tgaggggcagagagcgagacttc

SEQ ID NO: 14616 - RNA, 22 nt, Synthetic Construct
  source 1..22: mol_type = other RNA
gtcagtttgtcaaataccccaa

SEQ ID NO: 14617 - RNA, 22 nt, Synthetic Construct
  source 1..22: mol_type = other RNA
gtcagtttgtcaaataccccaa

SEQ ID NO: 14618 - RNA, 22 nt, Synthetic Construct
  source 1..22: mol_type = other RNA
taaggtagtaggttgtgtggtt

SEQ ID NO: 14619 - RNA, 27 nt, Synthetic Construct
  source 1..27: mol_type = other RNA
ccccccactgctaaatttgactggctc

SEQ ID NO: 14620 - RNA, 25 nt, Synthetic Construct
  source 1..25: mol_type = other RNA
ttgaggatatgagatagagacgaca

SEQ ID NO: 14621 - RNA, 27 nt, Synthetic Construct
  source 1..27: mol_type = other RNA
ccccccattgctaaatttgactggctt

SEQ ID NO: 14622 - RNA, 27 nt, Synthetic Construct
  source 1..27: mol_type = other RNA
ccccccattgctaaatttgactggctt

SEQ ID NO: 14623 - RNA, 35 nt, Synthetic Construct; identical to SEQ ID NO: 1497
  source 1..35: mol_type = other RNA

SEQ ID NO: 14624 - RNA, 22 nt, Synthetic Construct
  source 1..22: mol_type = other RNA
gcgtaccgtgagtaataatgcg

SEQ ID NO: 14625 - RNA, 22 nt, Synthetic Construct
  source 1..22: mol_type = other RNA
gcgtaccgtgagtaataatgcg

SEQ ID NO: 14626 - RNA, 23 nt, Synthetic Construct
  source 1..23: mol_type = other RNA
tgaggtagtaggttgtatagttg

SEQ ID NO: 14627 - RNA, 27 nt, Synthetic Construct
  source 1..27: mol_type = other RNA
gactcttagcggtggatcactcggctc

SEQ ID NO: 14628 - RNA, 27 nt, Synthetic Construct
  source 1..27: mol_type = other RNA
gactcttagcggtggatcactcggctc

SEQ ID NO: 14629 - RNA, 21 nt, Synthetic Construct
  source 1..21: mol_type = other RNA
tgaggaagtaggttgtgtggt

SEQ ID NO: 14630 - RNA, 21 nt, Synthetic Construct
  source 1..21: mol_type = other RNA
tgaggaagtaggttgtgtggt

SEQ ID NO: 14631 - RNA, 23 nt, Synthetic Construct
  source 1..23: mol_type = other RNA
cctccctcgggagggcgcgcggg

SEQ ID NO: 14632 - RNA, 23 nt, Synthetic Construct
  source 1..23: mol_type = other RNA
cctccctcgggagggcgcgcggg

SEQ ID NO: 14633 - RNA, 24 nt, Synthetic Construct
  source 1..24: mol_type = other RNA
tcctgtactgagctgccccgagat

SEQ ID NO: 14634 - RNA, 24 nt, Synthetic Construct
  source 1..24: mol_type = other RNA
tcctgtactgagctgccccgagat

SEQ ID NO: 14635 - RNA, 21 nt, Synthetic Construct
  source 1..21: mol_type = other RNA
aatggcgccactagggttgtg

SEQ ID NO: 14636 - RNA, 16 nt, Synthetic Construct
  source 1..16: mol_type = other RNA
agtcaggatgttggct

SEQ ID NO: 14637 - RNA, 16 nt, Synthetic Construct
  source 1..16: mol_type = other RNA
agtcaggatgttggct

SEQ ID NO: 14638 - RNA, 22 nt, Synthetic Construct
  source 1..22: mol_type = other RNA
tgggatgtaaagaagtatgtat

SEQ ID NO: 14639 - RNA, 22 nt, Synthetic Construct
  source 1..22: mol_type = other RNA
tgggatgtaaagaagtatgtat

SEQ ID NO: 14640 - RNA, 22 nt, Synthetic Construct
  source 1..22: mol_type = other RNA
nagcagcacgtaaatattggcg

SEQ ID NO: 14641 - RNA, 22 nt, Synthetic Construct
  source 1..22: mol_type = other RNA
nagcagcacgtaaatattggcg

SEQ ID NO: 14642 - RNA, 34 nt, Synthetic Construct; identical to SEQ ID NO: 385
  source 1..34: mol_type = other RNA

SEQ ID NO: 14643 - RNA, 19 nt, Synthetic Construct
  source 1..19: mol_type = other RNA
tctaatgagactgccggtg

SEQ ID NO: 14644 - RNA, 19 nt, Synthetic Construct
  source 1..19: mol_type = other RNA
tctaatgagactgccggtg

SEQ ID NO: 14645 - RNA, 26 nt, Synthetic Construct
  source 1..26: mol_type = other RNA
ccccccactgctaatttgactggctt

SEQ ID NO: 14646 - RNA, 19 nt, Synthetic Construct
  source 1..19: mol_type = other RNA
aaaccgttaccattactga

SEQ ID NO: 14647 - RNA, 19 nt, Synthetic Construct
  source 1..19: mol_type = other RNA
aaaccgttaccattactga

SEQ ID NO: 14648 - RNA, 21 nt, Synthetic Construct
  source 1..21: mol_type = other RNA
tagtagaccgtatagcgtacg

SEQ ID NO: 14649 - RNA, 34 nt, Synthetic Construct; identical to SEQ ID NO: 2529
  source 1..34: mol_type = other RNA

SEQ ID NO: 14650 - RNA, 31 nt, Synthetic Construct; identical to SEQ ID NO: 1881
  source 1..31: mol_type = other RNA

SEQ ID NO: 14651 - RNA, 31 nt, Synthetic Construct; identical to SEQ ID NO: 1881
  source 1..31: mol_type = other RNA

SEQ ID NO: 14652 - RNA, 20 nt, Synthetic Construct
  source 1..20: mol_type = other RNA
gtacagtactgtgataactg

SEQ ID NO: 14653 - RNA, 20 nt, Synthetic Construct
  source 1..20: mol_type = other RNA
gtacagtactgtgataactg

SEQ ID NO: 14654 - RNA, 34 nt, Synthetic Construct; identical to SEQ ID NO: 385
  source 1..34: mol_type = other RNA

SEQ ID NO: 14655 - RNA, 34 nt, Synthetic Construct; identical to SEQ ID NO: 385
  source 1..34: mol_type = other RNA

SEQ ID NO: 14656 - RNA, 22 nt, Synthetic Construct
  source 1..22: mol_type = other RNA
gaagaggacttggaactcgatc

SEQ ID NO: 14657 - RNA, 22 nt, Synthetic Construct
  source 1..22: mol_type = other RNA
gaagaggacttggaactcgatc

SEQ ID NO: 14658 - RNA, 20 nt, Synthetic Construct
  source 1..20: mol_type = other RNA
tgaggaagtaggttgtatag

SEQ ID NO: 14659 - RNA, 20 nt, Synthetic Construct
  source 1..20: mol_type = other RNA
tgaggaagtaggttgtatag

SEQ ID NO: 14660 - RNA, 15 nt, Synthetic Construct
  source 1..15: mol_type = other RNA
catgccgcgtgcggg

SEQ ID NO: 14661 - RNA, 15 nt, Synthetic Construct
  source 1..15: mol_type = other RNA
catgccgcgtgcggg

SEQ ID NO: 14662 - RNA, 34 nt, Synthetic Construct; identical to SEQ ID NO: 490
  source 1..34: mol_type = other RNA

SEQ ID NO: 14663 - RNA, 16 nt, Synthetic Construct
  source 1..16: mol_type = other RNA
gctattgacgaccgta

SEQ ID NO: 14664 - RNA, 17 nt, Synthetic Construct
  source 1..17: mol_type = other RNA
tcccctggacctgtact

SEQ ID NO: 14665 - RNA, 17 nt, Synthetic Construct
  source 1..17: mol_type = other RNA
tcccctggacctgtact

SEQ ID NO: 14666 - RNA, 17 nt, Synthetic Construct
  source 1..17: mol_type = other RNA
acagtcaggatgttggc

SEQ ID NO: 14667 - RNA, 17 nt, Synthetic Construct
  source 1..17: mol_type = other RNA
acagtcaggatgttggc

SEQ ID NO: 14668 - RNA, 21 nt, Synthetic Construct
  source 1..21: mol_type = other RNA
ctaatcccagaaacccggtcg

SEQ ID NO: 14669 - RNA, 22 nt, Synthetic Construct
  source 1..22: mol_type = other RNA
tattgcacatgtcccggcctgt

SEQ ID NO: 14670 - RNA, 16 nt, Synthetic Construct
  source 1..16: mol_type = other RNA
ccgcttttgtcaggga

SEQ ID NO: 14671 - RNA, 16 nt, Synthetic Construct
  source 1..16: mol_type = other RNA
ccgcttttgtcaggga

SEQ ID NO: 14672 - RNA, 23 nt, Synthetic Construct
  source 1..23: mol_type = other RNA
tgtcagtttgtcaaataccccat

SEQ ID NO: 14673 - RNA, 23 nt, Synthetic Construct
  source 1..23: mol_type = other RNA
tcggaatcgctagtaatcgcgga

SEQ ID NO: 14674 - RNA, 23 nt, Synthetic Construct
  source 1..23: mol_type = other RNA
tcggaatcgctagtaatcgcgga

SEQ ID NO: 14675 - RNA, 16 nt, Synthetic Construct
  source 1..16: mol_type = other RNA
gtctacggacatacca

SEQ ID NO: 14676 - RNA, 16 nt, Synthetic Construct
  source 1..16: mol_type = other RNA
gtctacggacatacca

SEQ ID NO: 14677 - RNA, 22 nt, Synthetic Construct
  source 1..22: mol_type = other RNA
gcagtagtctgcacattggtta

SEQ ID NO: 14678 - RNA, 22 nt, Synthetic Construct
  source 1..22: mol_type = other RNA
gcagtagtctgcacattggtta

SEQ ID NO: 14679 - RNA, 23 nt, Synthetic Construct
  source 1..23: mol_type = other RNA
tgagcgcctcgacgacagagccg

SEQ ID NO: 14680 - RNA, 23 nt, Synthetic Construct
  source 1..23: mol_type = other RNA
tgagcgcctcgacgacagagccg

SEQ ID NO: 14681 - RNA, 32 nt, Synthetic Construct
  source 1..32: mol_type = other RNA
cgcgggagaccggggttcgattccccgacggg

SEQ ID NO: 14682 - RNA, 17 nt, Synthetic Construct
  source 1..17: mol_type = other RNA
tcccctggacctgtact

SEQ ID NO: 14683 - RNA, 23 nt, Synthetic Construct
  source 1..23: mol_type = other RNA
tgcggggctagggctaacagcaa

SEQ ID NO: 14684 - RNA, 23 nt, Synthetic Construct
  source 1..23: mol_type = other RNA
tgcggggctagggctaacagcaa

SEQ ID NO: 14685 - RNA, 21 nt, Synthetic Construct
  source 1..21: mol_type = other RNA
ggaggggcagagagcgagact

SEQ ID NO: 14686 - RNA, 21 nt, Synthetic Construct
  source 1..21: mol_type = other RNA
ggaggggcagagagcgagact

SEQ ID NO: 14687 - RNA, 24 nt, Synthetic Construct
  source 1..24: mol_type = other RNA
tatatcggaacgtgcccagtcgtg

SEQ ID NO: 14688 - RNA, 24 nt, Synthetic Construct
  source 1..24: mol_type = other RNA
tatatcggaacgtgcccagtcgtg

SEQ ID NO: 14689 - RNA, 23 nt, Synthetic Construct
  source 1..23: mol_type = other RNA
caaagtgctcatagtgcaggtag

SEQ ID NO: 14690 - RNA, 22 nt, Synthetic Construct
  source 1..22: mol_type = other RNA
tgaggtagtagtttgagctgtt

SEQ ID NO: 14691 - RNA, 22 nt, Synthetic Construct
  source 1..22: mol_type = other RNA
tgaggtagtagtttgagctgtt

SEQ ID NO: 14692 - RNA, 23 nt, Synthetic Construct
  source 1..23: mol_type = other RNA
tgataatacgacgtacttagtgt

SEQ ID NO: 14693 - RNA, 22 nt, Synthetic Construct
  source 1..22: mol_type = other RNA
tgaggtagtagattgtatggtt

SEQ ID NO: 14694 - RNA, 22 nt, Synthetic Construct
  source 1..22: mol_type = other RNA
tgaggtagtagattgtatggtt

SEQ ID NO: 14695 - RNA, 21 nt, Synthetic Construct
  source 1..21: mol_type = other RNA
cgcgacctcagatcagacgtg

SEQ ID NO: 14696 - RNA, 22 nt, Synthetic Construct
  source 1..22: mol_type = other RNA
tgaggtagcagattgtatagtt

SEQ ID NO: 14697 - RNA, 22 nt, Synthetic Construct
  source 1..22: mol_type = other RNA
tgaggtagcagattgtatagtt

SEQ ID NO: 14698 - RNA, 21 nt, Synthetic Construct
  source 1..21: mol_type = other RNA
aggttccggataagtaagagc

SEQ ID NO: 14699 - RNA, 16 nt, Synthetic Construct
  source 1..16: mol_type = other RNA
ttgaccgctctgacca

SEQ ID NO: 14700 - RNA, 18 nt, Synthetic Construct
  source 1..18: mol_type = other RNA
cctcgcgcgattggagcg

SEQ ID NO: 14701 - RNA, 20 nt, Synthetic Construct
  source 1..20: mol_type = other RNA
tgaggtagtaggttgtatgg

SEQ ID NO: 14702 - RNA, 20 nt, Synthetic Construct
  source 1..20: mol_type = other RNA
tgaggtagtaggttgtatgg

SEQ ID NO: 14703 - RNA, 20 nt, Synthetic Construct
  source 1..20: mol_type = other RNA
tacagtatagatgatgtact

SEQ ID NO: 14704 - RNA, 20 nt, Synthetic Construct
  source 1..20: mol_type = other RNA
tacagtatagatgatgtact

SEQ ID NO: 14705 - RNA, 25 nt, Synthetic Construct
  source 1..25: mol_type = other RNA
ggtaaaatcgctgagtgaagcattg

SEQ ID NO: 14706 - RNA, 25 nt, Synthetic Construct
  source 1..25: mol_type = other RNA
ggtaaaatcgctgagtgaagcattg

SEQ ID NO: 14707 - RNA, 22 nt, Synthetic Construct
  source 1..22: mol_type = other RNA
tgaggtagtagattgtgctgtt

SEQ ID NO: 14708 - RNA, 30 nt, Synthetic Construct; identical to SEQ ID NO: 3933
  source 1..30: mol_type = other RNA

SEQ ID NO: 14709 - RNA, 22 nt, Synthetic Construct
  source 1..22: mol_type = other RNA
tcagcgccgatgatagtgcgga

SEQ ID NO: 14710 - RNA, 22 nt, Synthetic Construct
  source 1..22: mol_type = other RNA
tcagcgccgatgatagtgcgga

SEQ ID NO: 14711 - RNA, 22 nt, Synthetic Construct
  source 1..22: mol_type = other RNA
tgtgcaaatctatgcaaaactg

SEQ ID NO: 14712 - RNA, 22 nt, Synthetic Construct
  source 1..22: mol_type = other RNA
tgtgcaaatctatgcaaaactg

SEQ ID NO: 14713 - RNA, 23 nt, Synthetic Construct
  source 1..23: mol_type = other RNA
tcctgtactgagctgccccggga

SEQ ID NO: 14714 - RNA, 23 nt, Synthetic Construct
  source 1..23: mol_type = other RNA
tcctgtactgagctgccccggga

SEQ ID NO: 14715 - RNA, 22 nt, Synthetic Construct
  source 1..22: mol_type = other RNA
acagtagcctgcacattggtta

SEQ ID NO: 14716 - RNA, 28 nt, Synthetic Construct
  source 1..28: mol_type = other RNA
cccccccactgctaaatttgactggctt

SEQ ID NO: 14717 - RNA, 28 nt, Synthetic Construct
  source 1..28: mol_type = other RNA
cccccccactgctaaatttgactggctt

SEQ ID NO: 14718 - RNA, 22 nt, Synthetic Construct
  source 1..22: mol_type = other RNA
tgaggcagtaggttgtatagtt

SEQ ID NO: 14719 - RNA, 22 nt, Synthetic Construct
  source 1..22: mol_type = other RNA
tgaggcagtaggttgtatagtt

SEQ ID NO: 14720 - RNA, 20 nt, Synthetic Construct
  source 1..20: mol_type = other RNA
tagcgaaattccttgtcggg

SEQ ID NO: 14721 - RNA, 20 nt, Synthetic Construct
  source 1..20: mol_type = other RNA
tagcgaaattccttgtcggg

SEQ ID NO: 14722 - RNA, 18 nt, Synthetic Construct
  source 1..18: mol_type = other RNA
ggtgcaagcgttaatcgg

SEQ ID NO: 14723 - RNA, 24 nt, Synthetic Construct
  source 1..24: mol_type = other RNA
tttccccttggggttgtaggacca

SEQ ID NO: 14724 - RNA, 24 nt, Synthetic Construct
  source 1..24: mol_type = other RNA
tataccgaagctctaggtgcggca

SEQ ID NO: 14725 - RNA, 24 nt, Synthetic Construct
  source 1..24: mol_type = other RNA
tataccgaagctctaggtgcggca

SEQ ID NO: 14726 - RNA, 22 nt, Synthetic Construct
  source 1..22: mol_type = other RNA
tggaatgtaaagaagtatgtgt

SEQ ID NO: 14727 - RNA, 22 nt, Synthetic Construct
  source 1..22: mol_type = other RNA
tggaatgtaaagaagtatgtgt

SEQ ID NO: 14728 - RNA, 21 nt, Synthetic Construct
  source 1..21: mol_type = other RNA
aggggctggctttcctctggt

SEQ ID NO: 14729 - RNA, 21 nt, Synthetic Construct
  source 1..21: mol_type = other RNA
aggggctggctttcctctggt

SEQ ID NO: 14730 - RNA, 24 nt, Synthetic Construct
  source 1..24: mol_type = other RNA
tcccccaggtgtgattctgatttg

SEQ ID NO: 14731 - RNA, 24 nt, Synthetic Construct
  source 1..24: mol_type = other RNA
tcccccaggtgtgattctgatttg

SEQ ID NO: 14732 - RNA, 23 nt, Synthetic Construct
  source 1..23: mol_type = other RNA
tcacacagaaatcgcacccgtct

SEQ ID NO: 14733 - RNA, 23 nt, Synthetic Construct
  source 1..23: mol_type = other RNA
tcacacagaaatcgcacccgtct

SEQ ID NO: 14734 - RNA, 35 nt, Synthetic Construct; identical to SEQ ID NO: 1095
  source 1..35: mol_type = other RNA

SEQ ID NO: 14735 - RNA, 22 nt, Synthetic Construct
  source 1..22: mol_type = other RNA
tgaggtagtaggttgtgaggtt

SEQ ID NO: 14736 - RNA, 22 nt, Synthetic Construct
  source 1..22: mol_type = other RNA
tatcagcacgtaaatattggcg

SEQ ID NO: 14737 - RNA, 22 nt, Synthetic Construct
  source 1..22: mol_type = other RNA
tatcagcacgtaaatattggcg

SEQ ID NO: 14738 - RNA, 22 nt, Synthetic Construct
  source 1..22: mol_type = other RNA
ggaggtagtaggttgtatagtt

SEQ ID NO: 14739 - RNA, 37 nt, Synthetic Construct; identical to SEQ ID NO: 4277
  source 1..37: mol_type = other RNA

SEQ ID NO: 14740 - RNA, 37 nt, Synthetic Construct; identical to SEQ ID NO: 4277
  source 1..37: mol_type = other RNA

SEQ ID NO: 14741 - RNA, 17 nt, Synthetic Construct
  source 1..17: mol_type = other RNA
ccaaggggtcgtgggtt

SEQ ID NO: 14742 - RNA, 17 nt, Synthetic Construct
  source 1..17: mol_type = other RNA
ccaaggggtcgtgggtt

SEQ ID NO: 14743 - RNA, 21 nt, Synthetic Construct
  source 1..21: mol_type = other RNA
tgaggtagtagtttgtacagt

SEQ ID NO: 14744 - RNA, 20 nt, Synthetic Construct
  source 1..20: mol_type = other RNA
tgaggcagtaggttgtgtgg

SEQ ID NO: 14745 - RNA, 18 nt, Synthetic Construct
  source 1..18: mol_type = other RNA
gttaaaaagctcgtagtt

SEQ ID NO: 14746 - RNA, 18 nt, Synthetic Construct
  source 1..18: mol_type = other RNA
gttaaaaagctcgtagtt

SEQ ID NO: 14747 - RNA, 27 nt, Synthetic Construct
  source 1..27: mol_type = other RNA
ncccccactgctaaatttgactggctt

SEQ ID NO: 14748 - RNA, 27 nt, Synthetic Construct
  source 1..27: mol_type = other RNA
ncccccactgctaaatttgactggctt

SEQ ID NO: 14749 - RNA, 18 nt, Synthetic Construct
  source 1..18: mol_type = other RNA
tcagtagctcgaggaaaa

SEQ ID NO: 14750 - RNA, 18 nt, Synthetic Construct
  source 1..18: mol_type = other RNA
tcagtagctcgaggaaaa

SEQ ID NO: 14751 - RNA, 22 nt, Synthetic Construct
  source 1..22: mol_type = other RNA
tagcagcacgcaaatattggcg

SEQ ID NO: 14752 - RNA, 22 nt, Synthetic Construct
  source 1..22: mol_type = other RNA
nattgcacttgtcccggcctgt

SEQ ID NO: 14753 - RNA, 22 nt, Synthetic Construct
  source 1..22: mol_type = other RNA
nattgcacttgtcccggcctgt

SEQ ID NO: 14754 - RNA, 41 nt, Synthetic Construct; identical to SEQ ID NO: 1667
  source 1..41: mol_type = other RNA

SEQ ID NO: 14755 - RNA, 41 nt, Synthetic Construct; identical to SEQ ID NO: 1667
  source 1..41: mol_type = other RNA

SEQ ID NO: 14756 - RNA, 22 nt, Synthetic Construct
  source 1..22: mol_type = other RNA
tgaggtagtaggctgtgtggtt

SEQ ID NO: 14757 - RNA, 22 nt, Synthetic Construct
  source 1..22: mol_type = other RNA
tgaggtagtaggctgtgtggtt

SEQ ID NO: 14758 - RNA, 22 nt, Synthetic Construct
  source 1..22: mol_type = other RNA
tgaagtagtagattgtatagtt

SEQ ID NO: 14759 - RNA, 22 nt, Synthetic Construct
  source 1..22: mol_type = other RNA
tgaagtagtagattgtatagtt

SEQ ID NO: 14760 - RNA, 22 nt, Synthetic Construct
  source 1..22: mol_type = other RNA
agtagtgtttcctactttatgg

SEQ ID NO: 14761 - RNA, 22 nt, Synthetic Construct
  source 1..22: mol_type = other RNA
tgaggtagtaggatgtatagtt

SEQ ID NO: 14762 - RNA, 16 nt, Synthetic Construct
  source 1..16: mol_type = other RNA
gatttgggagtgctcg

SEQ ID NO: 14763 - RNA, 27 nt, Synthetic Construct
  source 1..27: mol_type = other RNA
ctccccactgctaaatttgactggctt

SEQ ID NO: 14764 - RNA, 36 nt, Synthetic Construct; identical to SEQ ID NO: 2469
  source 1..36: mol_type = other RNA

SEQ ID NO: 14765 - RNA, 36 nt, Synthetic Construct; identical to SEQ ID NO: 2469
  source 1..36: mol_type = other RNA

SEQ ID NO: 14766 - RNA, 21 nt, Synthetic Construct
  source 1..21: mol_type = other RNA
cataaagtagaaagcactact

SEQ ID NO: 14767 - RNA, 21 nt, Synthetic Construct
  source 1..21: mol_type = other RNA
tgaggaagtagattgtatagt

SEQ ID NO: 14768 - RNA, 21 nt, Synthetic Construct
  source 1..21: mol_type = other RNA
tgaggaagtagattgtatagt

SEQ ID NO: 14769 - RNA, 22 nt, Synthetic Construct
  source 1..22: mol_type = other RNA
tcccactgcttcacttgactag

SEQ ID NO: 14770 - RNA, 22 nt, Synthetic Construct
  source 1..22: mol_type = other RNA
tcccactgcttcacttgactag

SEQ ID NO: 14771 - RNA, 23 nt, Synthetic Construct
  source 1..23: mol_type = other RNA
tcctgaactgagctgccccgagt

SEQ ID NO: 14772 - RNA, 31 nt, Synthetic Construct; identical to SEQ ID NO: 2412
  source 1..31: mol_type = other RNA

SEQ ID NO: 14773 - RNA, 22 nt, Synthetic Construct
  source 1..22: mol_type = other RNA
tgaggaagtaggttgtatagtt

SEQ ID NO: 14774 - RNA, 22 nt, Synthetic Construct
  source 1..22: mol_type = other RNA
tgaggaagtaggttgtatagtt

SEQ ID NO: 14775 - RNA, 23 nt, Synthetic Construct
  source 1..23: mol_type = other RNA
agctacattgtctgctgggttcc

SEQ ID NO: 14776 - RNA, 36 nt, Synthetic Construct; identical to SEQ ID NO: 6739
  source 1..36: mol_type = other RNA

SEQ ID NO: 14777 - RNA, 36 nt, Synthetic Construct; identical to SEQ ID NO: 6739
  source 1..36: mol_type = other RNA

SEQ ID NO: 14778 - RNA, 22 nt, Synthetic Construct
  source 1..22: mol_type = other RNA
tgaggtagtaggttgtgtagtt

SEQ ID NO: 14779 - RNA, 22 nt, Synthetic Construct
  source 1..22: mol_type = other RNA
tgaggtagtaggttgtgtagtt

SEQ ID NO: 14780 - RNA, 34 nt, Synthetic Construct; identical to SEQ ID NO: 749
  source 1..34: mol_type = other RNA

SEQ ID NO: 14781 - RNA, 34 nt, Synthetic Construct; identical to SEQ ID NO: 749
  source 1..34: mol_type = other RNA

SEQ ID NO: 14782 - RNA, 21 nt, Synthetic Construct
  source 1..21: mol_type = other RNA
tcctgtactgagctaccccga

SEQ ID NO: 14783 - RNA, 21 nt, Synthetic Construct
  source 1..21: mol_type = other RNA
tcctgtactgagctaccccga

SEQ ID NO: 14784 - RNA, 20 nt, Synthetic Construct
  source 1..20: mol_type = other RNA
tcctgtaccgatcaatagtg

SEQ ID NO: 14785 - RNA, 22 nt, Synthetic Construct
  source 1..22: mol_type = other RNA
ttcaagtaattcaggataggtt

SEQ ID NO: 14786 - RNA, 22 nt, Synthetic Construct
  source 1..22: mol_type = other RNA
ccgtaccgtgagtaataatgcg

SEQ ID NO: 14787 - RNA, 25 nt, Synthetic Construct
  source 1..25: mol_type = other RNA
ttgaggatatgagatcgagacaaca

SEQ ID NO: 14788 - RNA, 25 nt, Synthetic Construct
  source 1..25: mol_type = other RNA
ttgaggatatgagatcgagacaaca

SEQ ID NO: 14789 - RNA, 23 nt, Synthetic Construct
  source 1..23: mol_type = other RNA
tcttggagtaggtcattgggtgt

SEQ ID NO: 14790 - RNA, 21 nt, Synthetic Construct
  source 1..21: mol_type = other RNA
actggacttggagtcagaagg

SEQ ID NO: 14791 - RNA, 21 nt, Synthetic Construct
  source 1..21: mol_type = other RNA
actggacttggagtcagaagg

SEQ ID NO: 14792 - RNA, 23 nt, Synthetic Construct
  source 1..23: mol_type = other RNA
ttaatgctaatcgtgatagggga

SEQ ID NO: 14793 - RNA, 17 nt, Synthetic Construct
  source 1..17: mol_type = other RNA
cccctggacctgtactg

SEQ ID NO: 14794 - RNA, 32 nt, Synthetic Construct; identical to SEQ ID NO: 4509
  source 1..32: mol_type = other RNA

SEQ ID NO: 14795 - RNA, 32 nt, Synthetic Construct; identical to SEQ ID NO: 4509
  source 1..32: mol_type = other RNA

SEQ ID NO: 14796 - RNA, 23 nt, Synthetic Construct
  source 1..23: mol_type = other RNA
tgaggagcagagagcgagacttt

SEQ ID NO: 14797 - RNA, 16 nt, Synthetic Construct
  source 1..16: mol_type = other RNA
gaaattccttgtcggg

SEQ ID NO: 14798 - RNA, 16 nt, Synthetic Construct
  source 1..16: mol_type = other RNA
gaaattccttgtcggg

SEQ ID NO: 14799 - RNA, 25 nt, Synthetic Construct
  source 1..25: mol_type = other RNA
ccccactgctaaatttgactggctt

SEQ ID NO: 14800 - RNA, 16 nt, Synthetic Construct
  source 1..16: mol_type = other RNA
gtctacggccgtacca

SEQ ID NO: 14801 - RNA, 16 nt, Synthetic Construct
  source 1..16: mol_type = other RNA
gtctacggccgtacca

SEQ ID NO: 14802 - RNA, 22 nt, Synthetic Construct
  source 1..22: mol_type = other RNA
ctttcagtcggatgtttgcagc

SEQ ID NO: 14803 - RNA, 24 nt, Synthetic Construct
  source 1..24: mol_type = other RNA
tgtaaacatccccgactggaagcc

SEQ ID NO: 14804 - RNA, 23 nt, Synthetic Construct
  source 1..23: mol_type = other RNA
tggtaaaacgacgtacttagtgt

SEQ ID NO: 14805 - RNA, 23 nt, Synthetic Construct
  source 1..23: mol_type = other RNA
tggaatgtaaagaagtatgtata

SEQ ID NO: 14806 - RNA, 23 nt, Synthetic Construct
  source 1..23: mol_type = other RNA
tggaatgtaaagaagtatgtata

SEQ ID NO: 14807 - RNA, 20 nt, Synthetic Construct
  source 1..20: mol_type = other RNA
tgaggtagtaagttgtattg

SEQ ID NO: 14808 - RNA, 22 nt, Synthetic Construct
  source 1..22: mol_type = other RNA
tgaggtagtaggttgtacagtt

SEQ ID NO: 14809 - RNA, 22 nt, Synthetic Construct
  source 1..22: mol_type = other RNA
tgaggtagtaggttgtacagtt

SEQ ID NO: 14810 - RNA, 23 nt, Synthetic Construct
  source 1..23: mol_type = other RNA
caaagtgctgttcgtgcaagtag

SEQ ID NO: 14811 - RNA, 32 nt, Synthetic Construct; identical to SEQ ID NO: 2798
  source 1..32: mol_type = other RNA

SEQ ID NO: 14812 - RNA, 32 nt, Synthetic Construct; identical to SEQ ID NO: 2798
  source 1..32: mol_type = other RNA

SEQ ID NO: 14813 - RNA, 43 nt, Synthetic Construct; identical to SEQ ID NO: 6202
  source 1..43: mol_type = other RNA

SEQ ID NO: 14814 - RNA, 23 nt, Synthetic Construct
  source 1..23: mol_type = other RNA
tggtaattcgacgtacttagtgt

SEQ ID NO: 14815 - RNA, 23 nt, Synthetic Construct
  source 1..23: mol_type = other RNA
caacggaatcccaaaagcagccg

SEQ ID NO: 14816 - RNA, 21 nt, Synthetic Construct
  source 1..21: mol_type = other RNA
cgtaccgtgagtaataatgcg

SEQ ID NO: 14817 - RNA, 21 nt, Synthetic Construct
  source 1..21: mol_type = other RNA
cgtaccgtgagtaataatgcg

SEQ ID NO: 14818 - RNA, 21 nt, Synthetic Construct
  source 1..21: mol_type = other RNA
taactccttaagcgatctcgc

SEQ ID NO: 14819 - RNA, 21 nt, Synthetic Construct
  source 1..21: mol_type = other RNA
taactccttaagcgatctcgc

SEQ ID NO: 14820 - RNA, 21 nt, Synthetic Construct
  source 1..21: mol_type = other RNA
aacccgtagatccgaacttgt

SEQ ID NO: 14821 - RNA, 21 nt, Synthetic Construct
  source 1..21: mol_type = other RNA
cccttggggttgtaggaccac

SEQ ID NO: 14822 - RNA, 21 nt, Synthetic Construct
  source 1..21: mol_type = other RNA
cccttggggttgtaggaccac

SEQ ID NO: 14823 - RNA, 23 nt, Synthetic Construct
  source 1..23: mol_type = other RNA
gtcagtttgtcaaataccccaat

SEQ ID NO: 14824 - RNA, 23 nt, Synthetic Construct
  source 1..23: mol_type = other RNA
gtcagtttgtcaaataccccaat

SEQ ID NO: 14825 - RNA, 16 nt, Synthetic Construct
  source 1..16: mol_type = other RNA
caggacggtggccatg

SEQ ID NO: 14826 - RNA, 16 nt, Synthetic Construct
  source 1..16: mol_type = other RNA
caggacggtggccatg

SEQ ID NO: 14827 - RNA, 16 nt, Synthetic Construct
  source 1..16: mol_type = other RNA
gccagcagccgcggta

SEQ ID NO: 14828 - RNA, 16 nt, Synthetic Construct
  source 1..16: mol_type = other RNA
gccagcagccgcggta

SEQ ID NO: 14829 - RNA, 23 nt, Synthetic Construct
  source 1..23: mol_type = other RNA
ctcactgatcgagtcgtcctgcg

SEQ ID NO: 14830 - RNA, 22 nt, Synthetic Construct
  source 1..22: mol_type = other RNA
tgaggtaggaggttgtatagtt

SEQ ID NO: 14831 - RNA, 22 nt, Synthetic Construct
  source 1..22: mol_type = other RNA
tgaagtagtagtttgtgctgtt

SEQ ID NO: 14832 - RNA, 22 nt, Synthetic Construct
  source 1..22: mol_type = other RNA
tgaagtagtagtttgtgctgtt

SEQ ID NO: 14833 - RNA, 21 nt, Synthetic Construct
  source 1..21: mol_type = other RNA
tggagtgtgacgatggtgttt

SEQ ID NO: 14834 - RNA, 21 nt, Synthetic Construct
  source 1..21: mol_type = other RNA
tggagtgcgacaatggtgttt

SEQ ID NO: 14835 - RNA, 21 nt, Synthetic Construct
  source 1..21: mol_type = other RNA
tggagtgcgacaatggtgttt

SEQ ID NO: 14836 - RNA, 22 nt, Synthetic Construct
  source 1..22: mol_type = other RNA
cgaggtagtaggttgtgtggtt

SEQ ID NO: 14837 - RNA, 22 nt, Synthetic Construct
  source 1..22: mol_type = other RNA
tgaggtagtaggtcgtatagtt

SEQ ID NO: 14838 - RNA, 22 nt, Synthetic Construct
  source 1..22: mol_type = other RNA
tgaggtagtaggtcgtatagtt

SEQ ID NO: 14839 - RNA, 23 nt, Synthetic Construct
  source 1..23: mol_type = other RNA
tggtaatacgacgtacctagtgt

SEQ ID NO: 14840 - RNA, 23 nt, Synthetic Construct
  source 1..23: mol_type = other RNA
tggtaatacgacgtacctagtgt

SEQ ID NO: 14841 - RNA, 21 nt, Synthetic Construct
  source 1..21: mol_type = other RNA
gtccagttttcccaggaatcc

SEQ ID NO: 14842 - RNA, 21 nt, Synthetic Construct
  source 1..21: mol_type = other RNA
gtccagttttcccaggaatcc

SEQ ID NO: 14843 - RNA, 21 nt, Synthetic Construct
  source 1..21: mol_type = other RNA
aagctgccagttgaagaactg

SEQ ID NO: 14844 - RNA, 21 nt, Synthetic Construct
  source 1..21: mol_type = other RNA
aagctgccagttgaagaactg

SEQ ID NO: 14845 - RNA, 24 nt, Synthetic Construct
  source 1..24: mol_type = other RNA
ggtaaacatccccgactggaagct

SEQ ID NO: 14846 - RNA, 26 nt, Synthetic Construct
  source 1..26: mol_type = other RNA
tgtaaacatccccgactggaagcttt

SEQ ID NO: 14847 - RNA, 26 nt, Synthetic Construct
  source 1..26: mol_type = other RNA
tgtaaacatccccgactggaagcttt

SEQ ID NO: 14848 - RNA, 22 nt, Synthetic Construct
  source 1..22: mol_type = other RNA
taactccttaagcgaatatcgc

SEQ ID NO: 14849 - RNA, 22 nt, Synthetic Construct
  source 1..22: mol_type = other RNA
taactccttaagcgaatatcgc

SEQ ID NO: 14850 - RNA, 21 nt, Synthetic Construct
  source 1..21: mol_type = other RNA
ttcggaagaaggggtgcctgg

SEQ ID NO: 14851 - RNA, 21 nt, Synthetic Construct
  source 1..21: mol_type = other RNA
ttcggaagaaggggtgcctgg

SEQ ID NO: 14852 - RNA, 21 nt, Synthetic Construct
  source 1..21: mol_type = other RNA
tcctgtactgagttgccccga

SEQ ID NO: 14853 - RNA, 21 nt, Synthetic Construct
  source 1..21: mol_type = other RNA
tcctgtactgagttgccccga

SEQ ID NO: 14854 - RNA, 19 nt, Synthetic Construct
  source 1..19: mol_type = other RNA
catggccgttcttagttgg

SEQ ID NO: 14855 - RNA, 22 nt, Synthetic Construct
  source 1..22: mol_type = other RNA
tgagatagtagtttgtgctgtt

SEQ ID NO: 14856 - RNA, 22 nt, Synthetic Construct
  source 1..22: mol_type = other RNA
tgagatagtagtttgtgctgtt

SEQ ID NO: 14857 - RNA, 20 nt, Synthetic Construct
  source 1..20: mol_type = other RNA
tagcagcacatcatggttta

SEQ ID NO: 14858 - RNA, 20 nt, Synthetic Construct
  source 1..20: mol_type = other RNA
tagcagcacatcatggttta

SEQ ID NO: 14859 - RNA, 23 nt, Synthetic Construct
  source 1..23: mol_type = other RNA
caaagaattctccttttgggctt

SEQ ID NO: 14860 - RNA, 22 nt, Synthetic Construct
  source 1..22: mol_type = other RNA
ggaggtagtagtttgtgctgtt

SEQ ID NO: 14861 - RNA, 22 nt, Synthetic Construct
  source 1..22: mol_type = other RNA
gcgtaccgtgagtaataatgcg

SEQ ID NO: 14862 - RNA, 21 nt, Synthetic Construct
  source 1..21: mol_type = other RNA
agctacattgtctgctgggtt

SEQ ID NO: 14863 - RNA, 21 nt, Synthetic Construct
  source 1..21: mol_type = other RNA
agctacattgtctgctgggtt

SEQ ID NO: 14864 - RNA, 15 nt, Synthetic Construct
  source 1..15: mol_type = other RNA
gggtgaaagcggggg

SEQ ID NO: 14865 - RNA, 15 nt, Synthetic Construct
  source 1..15: mol_type = other RNA
gggtgaaagcggggg

SEQ ID NO: 14866 - RNA, 19 nt, Synthetic Construct
  source 1..19: mol_type = other RNA
aggacagtgaaacgagtca

SEQ ID NO: 14867 - RNA, 19 nt, Synthetic Construct
  source 1..19: mol_type = other RNA
aggacagtgaaacgagtca

SEQ ID NO: 14868 - RNA, 21 nt, Synthetic Construct
  source 1..21: mol_type = other RNA
taactccttaagcgatctcgc

SEQ ID NO: 14869 - RNA, 21 nt, Synthetic Construct
  source 1..21: mol_type = other RNA
taactccttaagcgatctcgc

SEQ ID NO: 14870 - RNA, 36 nt, Synthetic Construct; identical to SEQ ID NO: 2520
  source 1..36: mol_type = other RNA

SEQ ID NO: 14871 - RNA, 18 nt, Synthetic Construct
  source 1..18: mol_type = other RNA
tcccaagggtatggctgt

SEQ ID NO: 14872 - RNA, 20 nt, Synthetic Construct
  source 1..20: mol_type = other RNA
tctcccaacccttgtaccag

SEQ ID NO: 14873 - RNA, 20 nt, Synthetic Construct
  source 1..20: mol_type = other RNA
tctcccaacccttgtaccag

SEQ ID NO: 14874 - RNA, 21 nt, Synthetic Construct
  source 1..21: mol_type = other RNA
tcctgtactgagctgcccgag

SEQ ID NO: 14875 - RNA, 21 nt, Synthetic Construct
  source 1..21: mol_type = other RNA
tcctgtactgagctgcccgag

SEQ ID NO: 14876 - RNA, 23 nt, Synthetic Construct
  source 1..23: mol_type = other RNA
tggtaatacgacgtacttagcgt

SEQ ID NO: 14877 - RNA, 22 nt, Synthetic Construct
  source 1..22: mol_type = other RNA
cattgcactcgtctcggtctga

SEQ ID NO: 14878 - RNA, 28 nt, Synthetic Construct
  source 1..28: mol_type = other RNA
ccgtgtgaaagtaggtcatcgtcaggct

SEQ ID NO: 14879 - RNA, 19 nt, Synthetic Construct
  source 1..19: mol_type = other RNA
gcgccgatgatagtgcgga

SEQ ID NO: 14880 - RNA, 19 nt, Synthetic Construct
  source 1..19: mol_type = other RNA
gcgccgatgatagtgcgga

SEQ ID NO: 14881 - RNA, 22 nt, Synthetic Construct
  source 1..22: mol_type = other RNA
ttcaagtaacccaggataggct

SEQ ID NO: 14882 - RNA, 22 nt, Synthetic Construct
  source 1..22: mol_type = other RNA
ttcaagtaacccaggataggct

SEQ ID NO: 14883 - RNA, 22 nt, Synthetic Construct
  source 1..22: mol_type = other RNA
cagtgcaatgttaaaagggcat

SEQ ID NO: 14884 - RNA, 22 nt, Synthetic Construct
  source 1..22: mol_type = other RNA
cagtgcaatgttaaaagggcat

SEQ ID NO: 14885 - RNA, 22 nt, Synthetic Construct
  source 1..22: mol_type = other RNA
tgaggcagtagattgtatagtt

SEQ ID NO: 14886 - RNA, 22 nt, Synthetic Construct
  source 1..22: mol_type = other RNA
tgaggcagtagattgtatagtt

SEQ ID NO: 14887 - RNA, 22 nt, Synthetic Construct
  source 1..22: mol_type = other RNA
actggacttggagtcagaaggc

SEQ ID NO: 14888 - RNA, 22 nt, Synthetic Construct
  source 1..22: mol_type = other RNA
actggacttggagtcagaaggc

SEQ ID NO: 14889 - RNA, 34 nt, Synthetic Construct; identical to SEQ ID NO: 2298
  source 1..34: mol_type = other RNA

SEQ ID NO: 14890 - RNA, 22 nt, Synthetic Construct
  source 1..22: mol_type = other RNA
tagctgcacgtaaatattggcg

SEQ ID NO: 14891 - RNA, 22 nt, Synthetic Construct
  source 1..22: mol_type = other RNA
tagctgcacgtaaatattggcg

SEQ ID NO: 14892 - RNA, 16 nt, Synthetic Construct
  source 1..16: mol_type = other RNA
ggtagctcgttgggct

SEQ ID NO: 14893 - RNA, 16 nt, Synthetic Construct
  source 1..16: mol_type = other RNA
ggtagctcgttgggct

SEQ ID NO: 14894 - RNA, 24 nt, Synthetic Construct
  source 1..24: mol_type = other RNA
caacggaatcccaaaagcagctgt

SEQ ID NO: 14895 - RNA, 24 nt, Synthetic Construct
  source 1..24: mol_type = other RNA
caacggaatcccaaaagcagctgt

SEQ ID NO: 14896 - RNA, 23 nt, Synthetic Construct
  source 1..23: mol_type = other RNA
cgaagtgctgttcgtgcaggtag

SEQ ID NO: 14897 - RNA, 22 nt, Synthetic Construct
  source 1..22: mol_type = other RNA
tattgcacttgtcccgacctgt

SEQ ID NO: 14898 - RNA, 22 nt, Synthetic Construct
  source 1..22: mol_type = other RNA
tattgcacttgtcccgacctgt

SEQ ID NO: 14899 - RNA, 16 nt, Synthetic Construct
  source 1..16: mol_type = other RNA
ctactctcagcaacgg

SEQ ID NO: 14900 - RNA, 16 nt, Synthetic Construct
  source 1..16: mol_type = other RNA
ctactctcagcaacgg

SEQ ID NO: 14901 - RNA, 16 nt, Synthetic Construct
  source 1..16: mol_type = other RNA
acggcccagactccta

SEQ ID NO: 14902 - RNA, 21 nt, Synthetic Construct
  source 1..21: mol_type = other RNA
cgaggtagtaggttgtgtggt

SEQ ID NO: 14903 - RNA, 21 nt, Synthetic Construct
  source 1..21: mol_type = other RNA
cgaggtagtaggttgtgtggt

SEQ ID NO: 14904 - RNA, 28 nt, Synthetic Construct
  source 1..28: mol_type = other RNA
cccccccactgctaaatttgactggcta

SEQ ID NO: 14905 - RNA, 17 nt, Synthetic Construct
  source 1..17: mol_type = other RNA
atcgtgacgatagtgca

SEQ ID NO: 14906 - RNA, 17 nt, Synthetic Construct
  source 1..17: mol_type = other RNA
atcgtgacgatagtgca

SEQ ID NO: 14907 - RNA, 23 nt, Synthetic Construct
  source 1..23: mol_type = other RNA
tgaggggtagagagcgagacttt

SEQ ID NO: 14908 - RNA, 23 nt, Synthetic Construct
  source 1..23: mol_type = other RNA
tgaggggtagagagcgagacttt

SEQ ID NO: 14909 - RNA, 22 nt, Synthetic Construct
  source 1..22: mol_type = other RNA
tgaggtagaaggttgtatagtt

SEQ ID NO: 14910 - RNA, 22 nt, Synthetic Construct
  source 1..22: mol_type = other RNA
tgaggtagaaggttgtatagtt

SEQ ID NO: 14911 - RNA, 23 nt, Synthetic Construct
  source 1..23: mol_type = other RNA
tggtaatacgacgtacttagagt

SEQ ID NO: 14912 - RNA, 22 nt, Synthetic Construct
  source 1..22: mol_type = other RNA
ngaggtagtagattgtatagtt

SEQ ID NO: 14913 - RNA, 22 nt, Synthetic Construct
  source 1..22: mol_type = other RNA
ngaggtagtagattgtatagtt

SEQ ID NO: 14914 - RNA, 29 nt, Synthetic Construct
  source 1..29: mol_type = other RNA
ttacaggggttcgaatcccctaggggacg

SEQ ID NO: 14915 - RNA, 15 nt, Synthetic Construct
  source 1..15: mol_type = other RNA
tcgagtcgtcctgcg

SEQ ID NO: 14916 - RNA, 15 nt, Synthetic Construct
  source 1..15: mol_type = other RNA
tcgagtcgtcctgcg

SEQ ID NO: 14917 - RNA, 21 nt, Synthetic Construct
  source 1..21: mol_type = other RNA
aggttccggataagtaaagcc

SEQ ID NO: 14918 - RNA, 21 nt, Synthetic Construct
  source 1..21: mol_type = other RNA
aggttccggataagtaaagcc

SEQ ID NO: 14919 - RNA, 22 nt, Synthetic Construct
  source 1..22: mol_type = other RNA
nagcagcacgtaaatattggcg

SEQ ID NO: 14920 - RNA, 22 nt, Synthetic Construct
  source 1..22: mol_type = other RNA
tagcttatcagactgatgttga

SEQ ID NO: 14921 - RNA, 15 nt, Synthetic Construct
  source 1..15: mol_type = other RNA
ggccgtcgtcagctc

SEQ ID NO: 14922 - RNA, 23 nt, Synthetic Construct
  source 1..23: mol_type = other RNA
caacggaatcccaaaagcagcta

SEQ ID NO: 14923 - RNA, 25 nt, Synthetic Construct
  source 1..25: mol_type = other RNA
atgaggatatgagatcgagacgaca

SEQ ID NO: 14924 - RNA, 25 nt, Synthetic Construct
  source 1..25: mol_type = other RNA
atgaggatatgagatcgagacgaca

SEQ ID NO: 14925 - RNA, 20 nt, Synthetic Construct
  source 1..20: mol_type = other RNA
cggcggggacggcgattggt

SEQ ID NO: 14926 - RNA, 20 nt, Synthetic Construct
  source 1..20: mol_type = other RNA
cggcggggacggcgattggt

SEQ ID NO: 14927 - RNA, 34 nt, Synthetic Construct; identical to SEQ ID NO: 2183
  source 1..34: mol_type = other RNA

SEQ ID NO: 14928 - RNA, 27 nt, Synthetic Construct
  source 1..27: mol_type = other RNA
ccccccactgctagatttgactggctt

SEQ ID NO: 14929 - RNA, 27 nt, Synthetic Construct
  source 1..27: mol_type = other RNA
ccccccactgctagatttgactggctt

SEQ ID NO: 14930 - RNA, 27 nt, Synthetic Construct
  source 1..27: mol_type = other RNA
ccccccactgctaaatttgactggctc

SEQ ID NO: 14931 - RNA, 21 nt, Synthetic Construct
  source 1..21: mol_type = other RNA
gtagcgaaattccttgtcggg

SEQ ID NO: 14932 - RNA, 22 nt, Synthetic Construct
  source 1..22: mol_type = other RNA
agcagcattgtacagggctatt

SEQ ID NO: 14933 - RNA, 22 nt, Synthetic Construct
  source 1..22: mol_type = other RNA
agcagcattgtacagggctatt

SEQ ID NO: 14934 - RNA, 22 nt, Synthetic Construct
  source 1..22: mol_type = other RNA
taactcattaagcgaatctcgc

SEQ ID NO: 14935 - RNA, 22 nt, Synthetic Construct
  source 1..22: mol_type = other RNA
taactcattaagcgaatctcgc

SEQ ID NO: 14936 - RNA, 37 nt, Synthetic Construct; identical to SEQ ID NO: 2607
  source 1..37: mol_type = other RNA

SEQ ID NO: 14937 - RNA, 37 nt, Synthetic Construct; identical to SEQ ID NO: 2607
  source 1..37: mol_type = other RNA

SEQ ID NO: 14938 - RNA, 21 nt, Synthetic Construct
  source 1..21: mol_type = other RNA
tgaggggcagggagcgagact

SEQ ID NO: 14939 - RNA, 21 nt, Synthetic Construct
  source 1..21: mol_type = other RNA
tgaggggcagggagcgagact

SEQ ID NO: 14940 - RNA, 20 nt, Synthetic Construct
  source 1..20: mol_type = other RNA
tggggtagtaggttgtgtgg

SEQ ID NO: 14941 - RNA, 20 nt, Synthetic Construct
  source 1..20: mol_type = other RNA
caggacagtgaaacgagtca

SEQ ID NO: 14942 - RNA, 21 nt, Synthetic Construct
  source 1..21: mol_type = other RNA
cggtcccaagggtatggctgt

SEQ ID NO: 14943 - RNA, 21 nt, Synthetic Construct
  source 1..21: mol_type = other RNA
cggtcccaagggtatggctgt

SEQ ID NO: 14944 - RNA, 24 nt, Synthetic Construct
  source 1..24: mol_type = other RNA
tgtaaacatccccgactggaagct

SEQ ID NO: 14945 - RNA, 22 nt, Synthetic Construct
  source 1..22: mol_type = other RNA
tagcagcacgtaaatatcggcg

SEQ ID NO: 14946 - RNA, 24 nt, Synthetic Construct
  source 1..24: mol_type = other RNA
tgtagacatccccgactggaagct

SEQ ID NO: 14947 - RNA, 21 nt, Synthetic Construct
  source 1..21: mol_type = other RNA
tgaggtagaaggttgtatagt

SEQ ID NO: 14948 - RNA, 21 nt, Synthetic Construct
  source 1..21: mol_type = other RNA
tgaggtagaaggttgtatagt

SEQ ID NO: 14949 - RNA, 22 nt, Synthetic Construct
  source 1..22: mol_type = other RNA
ggtagcgaaattccttgtcggg

SEQ ID NO: 14950 - RNA, 22 nt, Synthetic Construct
  source 1..22: mol_type = other RNA
tgagatagtaggttgtatagtt

SEQ ID NO: 14951 - RNA, 31 nt, Synthetic Construct; identical to SEQ ID NO: 2758
  source 1..31: mol_type = other RNA

SEQ ID NO: 14952 - RNA, 23 nt, Synthetic Construct
  source 1..23: mol_type = other RNA
tcgaccggacctcgaccggctcg

SEQ ID NO: 14953 - RNA, 23 nt, Synthetic Construct
  source 1..23: mol_type = other RNA
tcgaccggacctcgaccggctcg

SEQ ID NO: 14954 - RNA, 16 nt, Synthetic Construct
  source 1..16: mol_type = other RNA
gatttgggagtgctcg

SEQ ID NO: 14955 - RNA, 21 nt, Synthetic Construct
  source 1..21: mol_type = other RNA
gcccgtgttcggaagattttc

SEQ ID NO: 14956 - RNA, 21 nt, Synthetic Construct
  source 1..21: mol_type = other RNA
gcccgtgttcggaagattttc

SEQ ID NO: 14957 - RNA, 32 nt, Synthetic Construct; identical to SEQ ID NO: 1238
  source 1..32: mol_type = other RNA

SEQ ID NO: 14958 - RNA, 32 nt, Synthetic Construct; identical to SEQ ID NO: 1238
  source 1..32: mol_type = other RNA

SEQ ID NO: 14959 - RNA, 22 nt, Synthetic Construct
  source 1..22: mol_type = other RNA
tagcagcacatcatggtttaca

SEQ ID NO: 14960 - RNA, 22 nt, Synthetic Construct
  source 1..22: mol_type = other RNA
tagcagcacatcatggtttaca

SEQ ID NO: 14961 - RNA, 22 nt, Synthetic Construct
  source 1..22: mol_type = other RNA
taactccttaagcgaacctcgc

SEQ ID NO: 14962 - RNA, 21 nt, Synthetic Construct
  source 1..21: mol_type = other RNA
acagtagtctgcacattggtt

SEQ ID NO: 14963 - RNA, 23 nt, Synthetic Construct
  source 1..23: mol_type = other RNA
gactatagaactttccccctcaa

SEQ ID NO: 14964 - RNA, 23 nt, Synthetic Construct
  source 1..23: mol_type = other RNA
gactatagaactttccccctcaa

SEQ ID NO: 14965 - RNA, 23 nt, Synthetic Construct
  source 1..23: mol_type = other RNA
gcgtggtaggagagcgttctgta

SEQ ID NO: 14966 - RNA, 28 nt, Synthetic Construct
  source 1..28: mol_type = other RNA
cccccccactgctaaatttgactggctt

SEQ ID NO: 14967 - RNA, 32 nt, Synthetic Construct
  source 1..32: mol_type = other RNA
gactcttagcggtggatcactcggctcgtgcg

SEQ ID NO: 14968 - RNA, 35 nt, Synthetic Construct; identical to SEQ ID NO: 2548
  source 1..35: mol_type = other RNA

SEQ ID NO: 14969 - RNA, 23 nt, Synthetic Construct
  source 1..23: mol_type = other RNA
ggcagcattgtacagggctatgt

SEQ ID NO: 14970 - RNA, 19 nt, Synthetic Construct
  source 1..19: mol_type = other RNA
aggacagtgaaacgagtca

SEQ ID NO: 14971 - RNA, 29 nt, Synthetic Construct
  source 1..29: mol_type = other RNA
ccccccccactgctaaatttgactggctt

SEQ ID NO: 14972 - RNA, 22 nt, Synthetic Construct
  source 1..22: mol_type = other RNA
tgaggtaataggttgtgtggtt

SEQ ID NO: 14973 - RNA, 22 nt, Synthetic Construct
  source 1..22: mol_type = other RNA
tgaggtaataggttgtgtggtt

SEQ ID NO: 14974 - RNA, 21 nt, Synthetic Construct
  source 1..21: mol_type = other RNA
gagttctacagtccgacgatc

SEQ ID NO: 14975 - RNA, 21 nt, Synthetic Construct
  source 1..21: mol_type = other RNA
gagttctacagtccgacgatc

SEQ ID NO: 14976 - RNA, 21 nt, Synthetic Construct
  source 1..21: mol_type = other RNA
tgaggcagtagattgtatagt

SEQ ID NO: 14977 - RNA, 21 nt, Synthetic Construct
  source 1..21: mol_type = other RNA
tgaggcagtagattgtatagt

SEQ ID NO: 14978 - RNA, 37 nt, Synthetic Construct; identical to SEQ ID NO: 2607
  source 1..37: mol_type = other RNA

SEQ ID NO: 14979 - RNA, 22 nt, Synthetic Construct
  source 1..22: mol_type = other RNA
aaagtgctgttcgtgcaggtag

SEQ ID NO: 14980 - RNA, 27 nt, Synthetic Construct
  source 1..27: mol_type = other RNA
cccccccactgctaaatttgactggct

SEQ ID NO: 14981 - RNA, 23 nt, Synthetic Construct
  source 1..23: mol_type = other RNA
tggtaatacgacgtacttagagt

SEQ ID NO: 14982 - RNA, 23 nt, Synthetic Construct
  source 1..23: mol_type = other RNA
tggtaatacgacgtacttagagt

SEQ ID NO: 14983 - RNA, 21 nt, Synthetic Construct
  source 1..21: mol_type = other RNA
ggctggtccgaaggtagtgag

SEQ ID NO: 14984 - RNA, 21 nt, Synthetic Construct
  source 1..21: mol_type = other RNA
ggctggtccgaaggtagtgag

SEQ ID NO: 14985 - RNA, 23 nt, Synthetic Construct
  source 1..23: mol_type = other RNA
agcaggacggtggccatggaagt

SEQ ID NO: 14986 - RNA, 23 nt, Synthetic Construct
  source 1..23: mol_type = other RNA
agcaggacggtggccatggaagt

SEQ ID NO: 14987 - RNA, 22 nt, Synthetic Construct
  source 1..22: mol_type = other RNA
tggaatgtaaagaagtatgtaa

SEQ ID NO: 14988 - RNA, 21 nt, Synthetic Construct
  source 1..21: mol_type = other RNA
ctagactgaagctccttgaga

SEQ ID NO: 14989 - RNA, 23 nt, Synthetic Construct
  source 1..23: mol_type = other RNA
tccctgtcctccaggagctcacg

SEQ ID NO: 14990 - RNA, 23 nt, Synthetic Construct
  source 1..23: mol_type = other RNA
tccctgtcctccaggagctcacg

SEQ ID NO: 14991 - RNA, 22 nt, Synthetic Construct
  source 1..22: mol_type = other RNA
tgaggtagtaggctgtgtggtt

SEQ ID NO: 14992 - RNA, 22 nt, Synthetic Construct
  source 1..22: mol_type = other RNA
tgaggtagtaggctgtgtggtt

SEQ ID NO: 14993 - RNA, 28 nt, Synthetic Construct
  source 1..28: mol_type = other RNA
ccccccgctgctaaatttgactggcttt

SEQ ID NO: 14994 - RNA, 22 nt, Synthetic Construct
  source 1..22: mol_type = other RNA
tcgtaccgcgagtaataatgcg

SEQ ID NO: 14995 - RNA, 28 nt, Synthetic Construct
  source 1..28: mol_type = other RNA
ccccccactgctaaatttggctggcttt

SEQ ID NO: 14996 - RNA, 28 nt, Synthetic Construct
  source 1..28: mol_type = other RNA
ccccccactgctaaatttggctggcttt

SEQ ID NO: 14997 - RNA, 16 nt, Synthetic Construct
  source 1..16: mol_type = other RNA
gagtttggctggggcg

SEQ ID NO: 14998 - RNA, 16 nt, Synthetic Construct
  source 1..16: mol_type = other RNA
gagtttggctggggcg

SEQ ID NO: 14999 - RNA, 23 nt, Synthetic Construct
  source 1..23: mol_type = other RNA
tcctgtactgagctgccccgggt

SEQ ID NO: 15000 - RNA, 23 nt, Synthetic Construct
  source 1..23: mol_type = other RNA
tcctgtactgagctgccccgggt

SEQ ID NO: 15001 - RNA, 22 nt, Synthetic Construct
  source 1..22: mol_type = other RNA
tagcagcacgtgaatattggcg

SEQ ID NO: 15002 - RNA, 16 nt, Synthetic Construct
  source 1..16: mol_type = other RNA
cgcgacctcagatcag

SEQ ID NO: 15003 - RNA, 16 nt, Synthetic Construct
  source 1..16: mol_type = other RNA
cgcgacctcagatcag

SEQ ID NO: 15004 - RNA, 22 nt, Synthetic Construct
  source 1..22: mol_type = other RNA
tgaggtagtaggttgaatagtt

SEQ ID NO: 15005 - RNA, 22 nt, Synthetic Construct
  source 1..22: mol_type = other RNA
tggggtagtagattgtatagtt

SEQ ID NO: 15006 - RNA, 22 nt, Synthetic Construct
  source 1..22: mol_type = other RNA
taaggtagtaggttgtatagtt

SEQ ID NO: 15007 - RNA, 22 nt, Synthetic Construct
  source 1..22: mol_type = other RNA
taaggtagtaggttgtatagtt

SEQ ID NO: 15008 - RNA, 35 nt, Synthetic Construct; identical to SEQ ID NO: 2505
  source 1..35: mol_type = other RNA

SEQ ID NO: 15009 - RNA, 19 nt, Synthetic Construct
  source 1..19: mol_type = other RNA
accaaggggtcgtgggttc

SEQ ID NO: 15010 - RNA, 19 nt, Synthetic Construct
  source 1..19: mol_type = other RNA
accaaggggtcgtgggttc

SEQ ID NO: 15011 - RNA, 23 nt, Synthetic Construct
  source 1..23: mol_type = other RNA
caacgggatcccaaaagcagctg

SEQ ID NO: 15012 - RNA, 22 nt, Synthetic Construct
  source 1..22: mol_type = other RNA
cattgcgcttgtctcggtctga

SEQ ID NO: 15013 - RNA, 23 nt, Synthetic Construct
  source 1..23: mol_type = other RNA
gtcagtttgtcaaataccccatt

SEQ ID NO: 15014 - RNA, 19 nt, Synthetic Construct
  source 1..19: mol_type = other RNA
tggagtgtgacaatggtga

SEQ ID NO: 15015 - RNA, 19 nt, Synthetic Construct
  source 1..19: mol_type = other RNA
tggagtgtgacaatggtga

SEQ ID NO: 15016 - RNA, 22 nt, Synthetic Construct
  source 1..22: mol_type = other RNA
cacgctcatgcacacacccaca

SEQ ID NO: 15017 - RNA, 35 nt, Synthetic Construct; identical to SEQ ID NO: 2762
  source 1..35: mol_type = other RNA

SEQ ID NO: 15018 - RNA, 35 nt, Synthetic Construct; identical to SEQ ID NO: 2762
  source 1..35: mol_type = other RNA

SEQ ID NO: 15019 - RNA, 35 nt, Synthetic Construct; identical to SEQ ID NO: 737
  source 1..35: mol_type = other RNA

SEQ ID NO: 15020 - RNA, 35 nt, Synthetic Construct; identical to SEQ ID NO: 737
  source 1..35: mol_type = other RNA

SEQ ID NO: 15021 - RNA, 21 nt, Synthetic Construct
  source 1..21: mol_type = other RNA
tgaggtagcaggttgtatagt

SEQ ID NO: 15022 - RNA, 21 nt, Synthetic Construct
  source 1..21: mol_type = other RNA
tgaggtagcaggttgtatagt

SEQ ID NO: 15023 - RNA, 20 nt, Synthetic Construct
  source 1..20: mol_type = other RNA
tcgcgccgtcgggcccgggg

SEQ ID NO: 15024 - RNA, 20 nt, Synthetic Construct
  source 1..20: mol_type = other RNA
tcgcgccgtcgggcccgggg

SEQ ID NO: 15025 - RNA, 40 nt, Synthetic Construct; identical to SEQ ID NO: 2684
  source 1..40: mol_type = other RNA

SEQ ID NO: 15026 - RNA, 22 nt, Synthetic Construct
  source 1..22: mol_type = other RNA
tagcaccatctgaaatcggttt

SEQ ID NO: 15027 - RNA, 23 nt, Synthetic Construct
  source 1..23: mol_type = other RNA
ttggtccccttcaaccagctgtt

SEQ ID NO: 15028 - RNA, 23 nt, Synthetic Construct
  source 1..23: mol_type = other RNA
ttggtccccttcaaccagctgtt

SEQ ID NO: 15029 - RNA, 21 nt, Synthetic Construct
  source 1..21: mol_type = other RNA
tcctgtgctgagctgccccga

SEQ ID NO: 15030 - RNA, 21 nt, Synthetic Construct
  source 1..21: mol_type = other RNA
tcctgtgctgagctgccccga

SEQ ID NO: 15031 - RNA, 23 nt, Synthetic Construct
  source 1..23: mol_type = other RNA
caaagtgctgttcatgcaggtag

SEQ ID NO: 15032 - RNA, 21 nt, Synthetic Construct
  source 1..21: mol_type = other RNA
aattgcacggtatccatctgt

SEQ ID NO: 15033 - RNA, 21 nt, Synthetic Construct
  source 1..21: mol_type = other RNA
aattgcacggtatccatctgt

SEQ ID NO: 15034 - RNA, 15 nt, Synthetic Construct
  source 1..15: mol_type = other RNA
cgccatttaaagagg

SEQ ID NO: 15035 - RNA, 15 nt, Synthetic Construct
  source 1..15: mol_type = other RNA
cgccatttaaagagg

SEQ ID NO: 15036 - RNA, 23 nt, Synthetic Construct
  source 1..23: mol_type = other RNA
tacccattgcatatcggagttgt

SEQ ID NO: 15037 - RNA, 23 nt, Synthetic Construct
  source 1..23: mol_type = other RNA
tacccattgcatatcggagttgt

SEQ ID NO: 15038 - RNA, 20 nt, Synthetic Construct
  source 1..20: mol_type = other RNA
attgcacttgtcccggcctg

SEQ ID NO: 15039 - RNA, 20 nt, Synthetic Construct
  source 1..20: mol_type = other RNA
attgcacttgtcccggcctg

SEQ ID NO: 15040 - RNA, 33 nt, Synthetic Construct; identical to SEQ ID NO: 10461
  source 1..33: mol_type = other RNA

SEQ ID NO: 15041 - RNA, 23 nt, Synthetic Construct
  source 1..23: mol_type = other RNA
tgaggtagtaggttgtgtggttc

SEQ ID NO: 15042 - RNA, 23 nt, Synthetic Construct
  source 1..23: mol_type = other RNA
tgaggtagtaggttgtgtggttc

SEQ ID NO: 15043 - RNA, 21 nt, Synthetic Construct
  source 1..21: mol_type = other RNA
tagcagcacgtaatattggcg

SEQ ID NO: 15044 - RNA, 20 nt, Synthetic Construct
  source 1..20: mol_type = other RNA
tgaggtagtaggttgtgcgg

SEQ ID NO: 15045 - RNA, 20 nt, Synthetic Construct
  source 1..20: mol_type = other RNA
tgaggtagtaggttgtgcgg

SEQ ID NO: 15046 - RNA, 22 nt, Synthetic Construct
  source 1..22: mol_type = other RNA
tagcagcacataaatattggcg

SEQ ID NO: 15047 - RNA, 22 nt, Synthetic Construct
  source 1..22: mol_type = other RNA
tagcagcacataaatattggcg

SEQ ID NO: 15048 - RNA, 23 nt, Synthetic Construct
  source 1..23: mol_type = other RNA
tagtgcaatattgcttatagggt

SEQ ID NO: 15049 - RNA, 23 nt, Synthetic Construct
  source 1..23: mol_type = other RNA
tagtgcaatattgcttatagggt

SEQ ID NO: 15050 - RNA, 24 nt, Synthetic Construct
  source 1..24: mol_type = other RNA
taccctgtagatccgaatttgtgt

SEQ ID NO: 15051 - RNA, 23 nt, Synthetic Construct
  source 1..23: mol_type = other RNA
accacagggtagaaccacggaca

SEQ ID NO: 15052 - RNA, 24 nt, Synthetic Construct
  source 1..24: mol_type = other RNA
caacggaatcccaaaagcagcttt

SEQ ID NO: 15053 - RNA, 24 nt, Synthetic Construct
  source 1..24: mol_type = other RNA
caacggaatcccaaaagcagcttt

SEQ ID NO: 15054 - RNA, 23 nt, Synthetic Construct
  source 1..23: mol_type = other RNA
tcctgtactgagctgcctcgaga

SEQ ID NO: 15055 - RNA, 23 nt, Synthetic Construct
  source 1..23: mol_type = other RNA
tcctgtactgagctgcctcgaga

SEQ ID NO: 15056 - RNA, 20 nt, Synthetic Construct
  source 1..20: mol_type = other RNA
tgaggtagtaggctgtgtgg

SEQ ID NO: 15057 - RNA, 20 nt, Synthetic Construct
  source 1..20: mol_type = other RNA
tgaggtagtaggctgtgtgg

SEQ ID NO: 15058 - RNA, 23 nt, Synthetic Construct
  source 1..23: mol_type = other RNA
tcctgtactgagctaccccgaga

SEQ ID NO: 15059 - RNA, 15 nt, Synthetic Construct
  source 1..15: mol_type = other RNA
ggtggctgtagctca

SEQ ID NO: 15060 - RNA, 15 nt, Synthetic Construct
  source 1..15: mol_type = other RNA
ggtggctgtagctca

SEQ ID NO: 15061 - RNA, 16 nt, Synthetic Construct
  source 1..16: mol_type = other RNA
gtctacggctatacca

SEQ ID NO: 15062 - RNA, 23 nt, Synthetic Construct
  source 1..23: mol_type = other RNA
tcctgcactgagctgccccgagt

SEQ ID NO: 15063 - RNA, 23 nt, Synthetic Construct
  source 1..23: mol_type = other RNA
actagactgaagctccttgaggt

SEQ ID NO: 15064 - RNA, 27 nt, Synthetic Construct
  source 1..27: mol_type = other RNA
ncccccactgctaaatttgactggctt

SEQ ID NO: 15065 - RNA, 22 nt, Synthetic Construct
  source 1..22: mol_type = other RNA
tgaggtagtagattgtacagtt

SEQ ID NO: 15066 - RNA, 22 nt, Synthetic Construct
  source 1..22: mol_type = other RNA
tgaggtagtagattgtacagtt

SEQ ID NO: 15067 - RNA, 22 nt, Synthetic Construct
  source 1..22: mol_type = other RNA
ttcaagtaatccaggataggcc

SEQ ID NO: 15068 - RNA, 22 nt, Synthetic Construct
  source 1..22: mol_type = other RNA
ttcaagtaatccaggataggcc

SEQ ID NO: 15069 - RNA, 21 nt, Synthetic Construct
  source 1..21: mol_type = other RNA
ttagtgacgcgcatgaatgga

SEQ ID NO: 15070 - RNA, 21 nt, Synthetic Construct
  source 1..21: mol_type = other RNA
ttagtgacgcgcatgaatgga

SEQ ID NO: 15071 - RNA, 15 nt, Synthetic Construct
  source 1..15: mol_type = other RNA
acggtcctaaggtag

SEQ ID NO: 15072 - RNA, 23 nt, Synthetic Construct
  source 1..23: mol_type = other RNA
aatgacacgatcactcccgttgt

SEQ ID NO: 15073 - RNA, 23 nt, Synthetic Construct
  source 1..23: mol_type = other RNA
aatgacacgatcactcccgttgt

SEQ ID NO: 15074 - RNA, 23 nt, Synthetic Construct
  source 1..23: mol_type = other RNA
tcctgtactgagctgccccggga

SEQ ID NO: 15075 - RNA, 23 nt, Synthetic Construct
  source 1..23: mol_type = other RNA
tcctgtactgagctgccccggga

SEQ ID NO: 15076 - RNA, 21 nt, Synthetic Construct
  source 1..21: mol_type = other RNA
tcctgcactgagctgccccga

SEQ ID NO: 15077 - RNA, 21 nt, Synthetic Construct
  source 1..21: mol_type = other RNA
tcctgcactgagctgccccga

SEQ ID NO: 15078 - RNA, 15 nt, Synthetic Construct
  source 1..15: mol_type = other RNA
tcgagtcgtcctgcg

SEQ ID NO: 15079 - RNA, 34 nt, Synthetic Construct; identical to SEQ ID NO: 2364
  source 1..34: mol_type = other RNA

SEQ ID NO: 15080 - RNA, 34 nt, Synthetic Construct; identical to SEQ ID NO: 2364
  source 1..34: mol_type = other RNA

SEQ ID NO: 15081 - RNA, 23 nt, Synthetic Construct
  source 1..23: mol_type = other RNA
taactccttaagcgaatctcggc

SEQ ID NO: 15082 - RNA, 23 nt, Synthetic Construct
  source 1..23: mol_type = other RNA
taactccttaagcgaatctcggc

SEQ ID NO: 15083 - RNA, 22 nt, Synthetic Construct
  source 1..22: mol_type = other RNA
tgaggtagtagtttgtgctgtt

SEQ ID NO: 15084 - RNA, 22 nt, Synthetic Construct
  source 1..22: mol_type = other RNA
tgtcagtttgtcaaatacccaa

SEQ ID NO: 15085 - RNA, 20 nt, Synthetic Construct
  source 1..20: mol_type = other RNA
actgatcgagtcgtcctgcg

SEQ ID NO: 15086 - RNA, 20 nt, Synthetic Construct
  source 1..20: mol_type = other RNA
actgatcgagtcgtcctgcg

SEQ ID NO: 15087 - RNA, 23 nt, Synthetic Construct
  source 1..23: mol_type = other RNA
tagcagcacataatggtttgtgg

SEQ ID NO: 15088 - RNA, 22 nt, Synthetic Construct
  source 1..22: mol_type = other RNA
tgaggtagtagtttgagctgtt

SEQ ID NO: 15089 - RNA, 21 nt, Synthetic Construct
  source 1..21: mol_type = other RNA
gtgggcgtttgaagtgaagtg

SEQ ID NO: 15090 - RNA, 21 nt, Synthetic Construct
  source 1..21: mol_type = other RNA
gtgggcgtttgaagtgaagtg

SEQ ID NO: 15091 - RNA, 21 nt, Synthetic Construct
  source 1..21: mol_type = other RNA
taactccttaagcgaatctcg

SEQ ID NO: 15092 - RNA, 23 nt, Synthetic Construct
  source 1..23: mol_type = other RNA
agcagcattgtacagggctacga

SEQ ID NO: 15093 - RNA, 24 nt, Synthetic Construct
  source 1..24: mol_type = other RNA
atgacacgatcactcccgttgagt

SEQ ID NO: 15094 - RNA, 24 nt, Synthetic Construct
  source 1..24: mol_type = other RNA
atgacacgatcactcccgttgagt

SEQ ID NO: 15095 - RNA, 21 nt, Synthetic Construct
  source 1..21: mol_type = other RNA
tcctgtaccgagctgccccga

SEQ ID NO: 15096 - RNA, 21 nt, Synthetic Construct
  source 1..21: mol_type = other RNA
tcctgtaccgagctgccccga

SEQ ID NO: 15097 - RNA, 18 nt, Synthetic Construct
  source 1..18: mol_type = other RNA
cctgaagaataagcaccg

SEQ ID NO: 15098 - RNA, 18 nt, Synthetic Construct
  source 1..18: mol_type = other RNA
cctgaagaataagcaccg

SEQ ID NO: 15099 - RNA, 16 nt, Synthetic Construct
  source 1..16: mol_type = other RNA
gtgacgcgcatgaatg

SEQ ID NO: 15100 - RNA, 16 nt, Synthetic Construct
  source 1..16: mol_type = other RNA
gtgacgcgcatgaatg

SEQ ID NO: 15101 - RNA, 30 nt, Synthetic Construct; identical to SEQ ID NO: 1771
  source 1..30: mol_type = other RNA

SEQ ID NO: 15102 - RNA, 30 nt, Synthetic Construct; identical to SEQ ID NO: 1771
  source 1..30: mol_type = other RNA

SEQ ID NO: 15103 - RNA, 22 nt, Synthetic Construct
  source 1..22: mol_type = other RNA
cctctgggcccttcctccagtt

SEQ ID NO: 15104 - RNA, 22 nt, Synthetic Construct
  source 1..22: mol_type = other RNA
cctctgggcccttcctccagtt

SEQ ID NO: 15105 - RNA, 21 nt, Synthetic Construct
  source 1..21: mol_type = other RNA
cgtaccgtgggtaataatgcg

SEQ ID NO: 15106 - RNA, 21 nt, Synthetic Construct
  source 1..21: mol_type = other RNA
cgtaccgtgggtaataatgcg

SEQ ID NO: 15107 - RNA, 21 nt, Synthetic Construct
  source 1..21: mol_type = other RNA
tgaggtagtaggctgtgtggt

SEQ ID NO: 15108 - RNA, 21 nt, Synthetic Construct
  source 1..21: mol_type = other RNA
tgaggtagtaggctgtgtggt

SEQ ID NO: 15109 - RNA, 21 nt, Synthetic Construct
  source 1..21: mol_type = other RNA
tgaggtaggaggttgtatagt

SEQ ID NO: 15110 - RNA, 21 nt, Synthetic Construct
  source 1..21: mol_type = other RNA
tgaggtaggaggttgtatagt

SEQ ID NO: 15111 - RNA, 21 nt, Synthetic Construct
  source 1..21: mol_type = other RNA
ttctgtactgagctgccccga

SEQ ID NO: 15112 - RNA, 21 nt, Synthetic Construct
  source 1..21: mol_type = other RNA
ttctgtactgagctgccccga

SEQ ID NO: 15113 - RNA, 22 nt, Synthetic Construct
  source 1..22: mol_type = other RNA
tgaggaagtaggttgtgtggtt

SEQ ID NO: 15114 - RNA, 22 nt, Synthetic Construct
  source 1..22: mol_type = other RNA
tgaggaagtaggttgtgtggtt

SEQ ID NO: 15115 - RNA, 22 nt, Synthetic Construct
  source 1..22: mol_type = other RNA
tgagatagtaggttgtgtggtt

SEQ ID NO: 15116 - RNA, 22 nt, Synthetic Construct
  source 1..22: mol_type = other RNA
tgagatagtaggttgtgtggtt

SEQ ID NO: 15117 - RNA, 21 nt, Synthetic Construct
  source 1..21: mol_type = other RNA
tgtgactggttgaccagaggg

SEQ ID NO: 15118 - RNA, 22 nt, Synthetic Construct
  source 1..22: mol_type = other RNA
ctatacgacctgctgcctttct

SEQ ID NO: 15119 - RNA, 22 nt, Synthetic Construct
  source 1..22: mol_type = other RNA
ctatacgacctgctgcctttct

SEQ ID NO: 15120 - RNA, 35 nt, Synthetic Construct; identical to SEQ ID NO: 2762
  source 1..35: mol_type = other RNA

SEQ ID NO: 15121 - RNA, 35 nt, Synthetic Construct; identical to SEQ ID NO: 2762
  source 1..35: mol_type = other RNA

SEQ ID NO: 15122 - RNA, 20 nt, Synthetic Construct
  source 1..20: mol_type = other RNA
tgtcttgcaggccgtcatgc

SEQ ID NO: 15123 - RNA, 20 nt, Synthetic Construct
  source 1..20: mol_type = other RNA
atcacattgccagggatttc

SEQ ID NO: 15124 - RNA, 22 nt, Synthetic Construct
  source 1..22: mol_type = other RNA
tattgtacttgtcccggcctgt

SEQ ID NO: 15125 - RNA, 18 nt, Synthetic Construct
  source 1..18: mol_type = other RNA
gttctacagtccgacgat

SEQ ID NO: 15126 - RNA, 18 nt, Synthetic Construct
  source 1..18: mol_type = other RNA
gttctacagtccgacgat

SEQ ID NO: 15127 - RNA, 21 nt, Synthetic Construct
  source 1..21: mol_type = other RNA
tgaggtagtagattgtatagc

SEQ ID NO: 15128 - RNA, 21 nt, Synthetic Construct
  source 1..21: mol_type = other RNA
tgaggtagtagattgtatagc

SEQ ID NO: 15129 - RNA, 21 nt, Synthetic Construct
  source 1..21: mol_type = other RNA
tgaggtagtagtctgtgctgt

SEQ ID NO: 15130 - RNA, 25 nt, Synthetic Construct
  source 1..25: mol_type = other RNA
ttgaggatatgggatcgagacgaca

SEQ ID NO: 15131 - RNA, 41 nt, Synthetic Construct; identical to SEQ ID NO: 729
  source 1..41: mol_type = other RNA

SEQ ID NO: 15132 - RNA, 41 nt, Synthetic Construct; identical to SEQ ID NO: 729
  source 1..41: mol_type = other RNA

SEQ ID NO: 15133 - RNA, 39 nt, Synthetic Construct; identical to SEQ ID NO: 2398
  source 1..39: mol_type = other RNA

SEQ ID NO: 15134 - RNA, 17 nt, Synthetic Construct
  source 1..17: mol_type = other RNA
agtgggttatcagaact

SEQ ID NO: 15135 - RNA, 29 nt, Synthetic Construct
  source 1..29: mol_type = other RNA
cgactcttagcggtggatcactcggctcg

SEQ ID NO: 15136 - RNA, 29 nt, Synthetic Construct
  source 1..29: mol_type = other RNA
cgactcttagcggtggatcactcggctcg

SEQ ID NO: 15137 - RNA, 22 nt, Synthetic Construct
  source 1..22: mol_type = other RNA
tgaggtagtagattgtgtggtt

SEQ ID NO: 15138 - RNA, 22 nt, Synthetic Construct
  source 1..22: mol_type = other RNA
tgaggtagtagattgtgtggtt

SEQ ID NO: 15139 - RNA, 21 nt, Synthetic Construct
  source 1..21: mol_type = other RNA
ccacctcccctgcaaacgtcc

SEQ ID NO: 15140 - RNA, 21 nt, Synthetic Construct
  source 1..21: mol_type = other RNA
ccacctcccctgcaaacgtcc

SEQ ID NO: 15141 - RNA, 23 nt, Synthetic Construct
  source 1..23: mol_type = other RNA
tcctgtactgagctgccccggga

SEQ ID NO: 15142 - RNA, 23 nt, Synthetic Construct
  source 1..23: mol_type = other RNA
tcctgtactgagctgccccggga

SEQ ID NO: 15143 - RNA, 21 nt, Synthetic Construct
  source 1..21: mol_type = other RNA
agctacattgtctgctgggtt

SEQ ID NO: 15144 - RNA, 21 nt, Synthetic Construct
  source 1..21: mol_type = other RNA
ctaggctgaagctccttgagg

SEQ ID NO: 15145 - RNA, 18 nt, Synthetic Construct
  source 1..18: mol_type = other RNA
ccaaggggtcgtgggttc

SEQ ID NO: 15146 - RNA, 18 nt, Synthetic Construct
  source 1..18: mol_type = other RNA
ccaaggggtcgtgggttc

SEQ ID NO: 15147 - RNA, 22 nt, Synthetic Construct
  source 1..22: mol_type = other RNA
gtagtgtttcctactttatgga

SEQ ID NO: 15148 - RNA, 21 nt, Synthetic Construct
  source 1..21: mol_type = other RNA
tgaggcagtaggttgtatagt

SEQ ID NO: 15149 - RNA, 23 nt, Synthetic Construct
  source 1..23: mol_type = other RNA
agcagcattgtacagggctatgc

SEQ ID NO: 15150 - RNA, 20 nt, Synthetic Construct
  source 1..20: mol_type = other RNA
atcacattgccagggatttc

SEQ ID NO: 15151 - RNA, 19 nt, Synthetic Construct
  source 1..19: mol_type = other RNA
gggataactggcttgtggc

SEQ ID NO: 15152 - RNA, 19 nt, Synthetic Construct
  source 1..19: mol_type = other RNA
gggataactggcttgtggc

SEQ ID NO: 15153 - RNA, 18 nt, Synthetic Construct
  source 1..18: mol_type = other RNA
gtcacggtggccgagtgg

SEQ ID NO: 15154 - RNA, 20 nt, Synthetic Construct
  source 1..20: mol_type = other RNA
tgaggtagtgggttgtgtgg

SEQ ID NO: 15155 - RNA, 22 nt, Synthetic Construct
  source 1..22: mol_type = other RNA
tgaggtagtagattgtataatt

SEQ ID NO: 15156 - RNA, 21 nt, Synthetic Construct
  source 1..21: mol_type = other RNA
tgaggggcagagagcgggact

SEQ ID NO: 15157 - RNA, 21 nt, Synthetic Construct
  source 1..21: mol_type = other RNA
tgaggggcagagagcgggact

SEQ ID NO: 15158 - RNA, 17 nt, Synthetic Construct
  source 1..17: mol_type = other RNA
ccgtgtgaaagtaggtc

SEQ ID NO: 15159 - RNA, 17 nt, Synthetic Construct
  source 1..17: mol_type = other RNA
ccgtgtgaaagtaggtc

SEQ ID NO: 15160 - RNA, 18 nt, Synthetic Construct
  source 1..18: mol_type = other RNA
ggccgtcgtcagctcgtg

SEQ ID NO: 15161 - RNA, 17 nt, Synthetic Construct
  source 1..17: mol_type = other RNA
gcaataacaggtctgtg

SEQ ID NO: 15162 - RNA, 17 nt, Synthetic Construct
  source 1..17: mol_type = other RNA
gcaataacaggtctgtg

SEQ ID NO: 15163 - RNA, 21 nt, Synthetic Construct
  source 1..21: mol_type = other RNA
attgcacttgtcccggcctgt

SEQ ID NO: 15164 - RNA, 21 nt, Synthetic Construct
  source 1..21: mol_type = other RNA
attgcacttgtcccggcctgt

SEQ ID NO: 15165 - RNA, 28 nt, Synthetic Construct
  source 1..28: mol_type = other RNA
cccccccactgctaaatttgactggcta

SEQ ID NO: 15166 - RNA, 24 nt, Synthetic Construct
  source 1..24: mol_type = other RNA
taccacagggtagaaccacggact

SEQ ID NO: 15167 - RNA, 24 nt, Synthetic Construct
  source 1..24: mol_type = other RNA
taccacagggtagaaccacggact

SEQ ID NO: 15168 - RNA, 22 nt, Synthetic Construct
  source 1..22: mol_type = other RNA
taaggtagtagattgtatagtt

SEQ ID NO: 15169 - RNA, 22 nt, Synthetic Construct
  source 1..22: mol_type = other RNA
taaggtagtagattgtatagtt

SEQ ID NO: 15170 - RNA, 22 nt, Synthetic Construct
  source 1..22: mol_type = other RNA
tagcatatcgagcctgagaaca

SEQ ID NO: 15171 - RNA, 22 nt, Synthetic Construct
  source 1..22: mol_type = other RNA
tagcatatcgagcctgagaaca

SEQ ID NO: 15172 - RNA, 22 nt, Synthetic Construct
  source 1..22: mol_type = other RNA
aggttccggataagtaagagcc

SEQ ID NO: 15173 - RNA, 22 nt, Synthetic Construct
  source 1..22: mol_type = other RNA
aggttccggataagtaagagcc

SEQ ID NO: 15174 - RNA, 22 nt, Synthetic Construct
  source 1..22: mol_type = other RNA
tgtcagtttgtcaaatacccct

SEQ ID NO: 15175 - RNA, 22 nt, Synthetic Construct
  source 1..22: mol_type = other RNA
tgtcagtttgtcaaatacccct

SEQ ID NO: 15176 - RNA, 21 nt, Synthetic Construct
  source 1..21: mol_type = other RNA
tgaggcagtaggttgtatagt

SEQ ID NO: 15177 - RNA, 21 nt, Synthetic Construct
  source 1..21: mol_type = other RNA
tgaggcagtaggttgtatagt

SEQ ID NO: 15178 - RNA, 22 nt, Synthetic Construct
  source 1..22: mol_type = other RNA
tatcgcacttgtcccggcctgt

SEQ ID NO: 15179 - RNA, 22 nt, Synthetic Construct
  source 1..22: mol_type = other RNA
tatcgcacttgtcccggcctgt

SEQ ID NO: 15180 - RNA, 20 nt, Synthetic Construct
  source 1..20: mol_type = other RNA
tgaggtaggaggttgtatag

SEQ ID NO: 15181 - RNA, 20 nt, Synthetic Construct
  source 1..20: mol_type = other RNA
tgaggtaggaggttgtatag

SEQ ID NO: 15182 - RNA, 35 nt, Synthetic Construct; identical to SEQ ID NO: 2402
  source 1..35: mol_type = other RNA

SEQ ID NO: 15183 - RNA, 35 nt, Synthetic Construct; identical to SEQ ID NO: 2402
  source 1..35: mol_type = other RNA

SEQ ID NO: 15184 - RNA, 22 nt, Synthetic Construct
  source 1..22: mol_type = other RNA
tggggtagtagattgtatagtt

SEQ ID NO: 15185 - RNA, 22 nt, Synthetic Construct
  source 1..22: mol_type = other RNA
tggggtagtagattgtatagtt

SEQ ID NO: 15186 - RNA, 22 nt, Synthetic Construct
  source 1..22: mol_type = other RNA
tagaagcacgtaaatattggcg

SEQ ID NO: 15187 - RNA, 18 nt, Synthetic Construct
  source 1..18: mol_type = other RNA
ctaatgagactgccggtg

SEQ ID NO: 15188 - RNA, 18 nt, Synthetic Construct
  source 1..18: mol_type = other RNA
ctaatgagactgccggtg

SEQ ID NO: 15189 - RNA, 27 nt, Synthetic Construct
  source 1..27: mol_type = other RNA
ccgtgtgaaagtaggtcatcgtcaggc

SEQ ID NO: 15190 - RNA, 25 nt, Synthetic Construct
  source 1..25: mol_type = other RNA
ttgaggatatgagatcgagacggca

SEQ ID NO: 15191 - RNA, 30 nt, Synthetic Construct; identical to SEQ ID NO: 1194
  source 1..30: mol_type = other RNA

SEQ ID NO: 15192 - RNA, 30 nt, Synthetic Construct; identical to SEQ ID NO: 1194
  source 1..30: mol_type = other RNA

SEQ ID NO: 15193 - RNA, 23 nt, Synthetic Construct
  source 1..23: mol_type = other RNA
ccctgtactgagctgccccgaga

SEQ ID NO: 15194 - RNA, 23 nt, Synthetic Construct
  source 1..23: mol_type = other RNA
ccctgtactgagctgccccgaga

SEQ ID NO: 15195 - RNA, 22 nt, Synthetic Construct
  source 1..22: mol_type = other RNA
tacccattgcatatcggagttg

SEQ ID NO: 15196 - RNA, 22 nt, Synthetic Construct
  source 1..22: mol_type = other RNA
tgaggtagtagattgtatggtt

SEQ ID NO: 15197 - RNA, 23 nt, Synthetic Construct
  source 1..23: mol_type = other RNA
ttccccttggggttgtaggacca

SEQ ID NO: 15198 - RNA, 23 nt, Synthetic Construct
  source 1..23: mol_type = other RNA
ttccccttggggttgtaggacca

SEQ ID NO: 15199 - RNA, 15 nt, Synthetic Construct
  source 1..15: mol_type = other RNA
gttgaccgcctgggg

SEQ ID NO: 15200 - RNA, 23 nt, Synthetic Construct
  source 1..23: mol_type = other RNA
agggctgggtcggtcgggctggg

SEQ ID NO: 15201 - RNA, 23 nt, Synthetic Construct
  source 1..23: mol_type = other RNA
agggctgggtcggtcgggctggg

SEQ ID NO: 15202 - RNA, 23 nt, Synthetic Construct
  source 1..23: mol_type = other RNA
aagcttatcagactgatgttgac

SEQ ID NO: 15203 - RNA, 16 nt, Synthetic Construct
  source 1..16: mol_type = other RNA
ctactctcagcaacgg

SEQ ID NO: 15204 - RNA, 16 nt, Synthetic Construct
  source 1..16: mol_type = other RNA
ctactctcagcaacgg

SEQ ID NO: 15205 - RNA, 22 nt, Synthetic Construct
  source 1..22: mol_type = other RNA
ctttgttcgattccgttgagta

SEQ ID NO: 15206 - RNA, 22 nt, Synthetic Construct
  source 1..22: mol_type = other RNA
ctttgttcgattccgttgagta

SEQ ID NO: 15207 - RNA, 20 nt, Synthetic Construct
  source 1..20: mol_type = other RNA
actgatcgagtcgtcctgcg

SEQ ID NO: 15208 - RNA, 20 nt, Synthetic Construct
  source 1..20: mol_type = other RNA
actgatcgagtcgtcctgcg

SEQ ID NO: 15209 - RNA, 17 nt, Synthetic Construct
  source 1..17: mol_type = other RNA
gccatgccgcgtgcggg

SEQ ID NO: 15210 - RNA, 17 nt, Synthetic Construct
  source 1..17: mol_type = other RNA
gccatgccgcgtgcggg

SEQ ID NO: 15211 - RNA, 22 nt, Synthetic Construct
  source 1..22: mol_type = other RNA
tgaggtagtagattgtacagtt

SEQ ID NO: 15212 - RNA, 23 nt, Synthetic Construct
  source 1..23: mol_type = other RNA
tgaggtagtagtttgtgctgttc

SEQ ID NO: 15213 - RNA, 23 nt, Synthetic Construct
  source 1..23: mol_type = other RNA
tgaggtagtaggttgtgtggttc

SEQ ID NO: 15214 - RNA, 27 nt, Synthetic Construct
  source 1..27: mol_type = other RNA
ccccccgctgctaaatttgactggctt

SEQ ID NO: 15215 - RNA, 21 nt, Synthetic Construct
  source 1..21: mol_type = other RNA
taggtagtttcctgttgttgg

SEQ ID NO: 15216 - RNA, 21 nt, Synthetic Construct
  source 1..21: mol_type = other RNA
taggtagtttcctgttgttgg

SEQ ID NO: 15217 - RNA, 18 nt, Synthetic Construct
  source 1..18: mol_type = other RNA
ggtagcgtggccgagcgg

SEQ ID NO: 15218 - RNA, 18 nt, Synthetic Construct
  source 1..18: mol_type = other RNA
ggtagcgtggccgagcgg

SEQ ID NO: 15219 - RNA, 21 nt, Synthetic Construct
  source 1..21: mol_type = other RNA
tgaggtagtagattgtacagt

SEQ ID NO: 15220 - RNA, 21 nt, Synthetic Construct
  source 1..21: mol_type = other RNA
tgaggtagtagattgtacagt

SEQ ID NO: 15221 - RNA, 22 nt, Synthetic Construct
  source 1..22: mol_type = other RNA
tattgcacttgtcctggcctgt

SEQ ID NO: 15222 - RNA, 22 nt, Synthetic Construct
  source 1..22: mol_type = other RNA
tcctgtgctgagctgccccgag

SEQ ID NO: 15223 - RNA, 22 nt, Synthetic Construct
  source 1..22: mol_type = other RNA
tcctgtgctgagctgccccgag

SEQ ID NO: 15224 - RNA, 22 nt, Synthetic Construct
  source 1..22: mol_type = other RNA
tggggtagtagtttgtgctgtt

SEQ ID NO: 15225 - RNA, 22 nt, Synthetic Construct
  source 1..22: mol_type = other RNA
tggggtagtagtttgtgctgtt

SEQ ID NO: 15226 - RNA, 22 nt, Synthetic Construct
  source 1..22: mol_type = other RNA
tgtcccacccccactcctgttt

SEQ ID NO: 15227 - RNA, 22 nt, Synthetic Construct
  source 1..22: mol_type = other RNA
tgtcccacccccactcctgttt

SEQ ID NO: 15228 - RNA, 22 nt, Synthetic Construct
  source 1..22: mol_type = other RNA
tgaagtagtagattgtatagtt

SEQ ID NO: 15229 - RNA, 15 nt, Synthetic Construct
  source 1..15: mol_type = other RNA
gagctgtggataggg

SEQ ID NO: 15230 - RNA, 22 nt, Synthetic Construct
  source 1..22: mol_type = other RNA
tcgtactgtgagtaataatgcg

SEQ ID NO: 15231 - RNA, 27 nt, Synthetic Construct
  source 1..27: mol_type = other RNA
gcatgggtggttcagtggtagaattct

SEQ ID NO: 15232 - RNA, 16 nt, Synthetic Construct
  source 1..16: mol_type = other RNA
gtccacggccatacca

SEQ ID NO: 15233 - RNA, 16 nt, Synthetic Construct
  source 1..16: mol_type = other RNA
gtccacggccatacca

SEQ ID NO: 15234 - RNA, 20 nt, Synthetic Construct
  source 1..20: mol_type = other RNA
cataaagtagaaagcactac

SEQ ID NO: 15235 - RNA, 20 nt, Synthetic Construct
  source 1..20: mol_type = other RNA
cataaagtagaaagcactac

SEQ ID NO: 15236 - RNA, 23 nt, Synthetic Construct
  source 1..23: mol_type = other RNA
tagcagcacgtaaatattggcgt

SEQ ID NO: 15237 - RNA, 23 nt, Synthetic Construct
  source 1..23: mol_type = other RNA
taaggtgcatctagtgcagatag

SEQ ID NO: 15238 - RNA, 23 nt, Synthetic Construct
  source 1..23: mol_type = other RNA
taaggtgcatctagtgcagatag

SEQ ID NO: 15239 - RNA, 24 nt, Synthetic Construct
  source 1..24: mol_type = other RNA
tgtaagcatccccgactggaagct

SEQ ID NO: 15240 - RNA, 24 nt, Synthetic Construct
  source 1..24: mol_type = other RNA
tgtaagcatccccgactggaagct

SEQ ID NO: 15241 - RNA, 16 nt, Synthetic Construct
  source 1..16: mol_type = other RNA
tggccgtcgtcagctc

SEQ ID NO: 15242 - RNA, 36 nt, Synthetic Construct; identical to SEQ ID NO: 2248
  source 1..36: mol_type = other RNA

SEQ ID NO: 15243 - RNA, 38 nt, Synthetic Construct; identical to SEQ ID NO: 7148
  source 1..38: mol_type = other RNA

SEQ ID NO: 15244 - RNA, 20 nt, Synthetic Construct
  source 1..20: mol_type = other RNA
ttagtgacgcgcatgaatgg

SEQ ID NO: 15245 - RNA, 20 nt, Synthetic Construct
  source 1..20: mol_type = other RNA
tgacctatgaattgacagcc

SEQ ID NO: 15246 - RNA, 20 nt, Synthetic Construct
  source 1..20: mol_type = other RNA
tgacctatgaattgacagcc

SEQ ID NO: 15247 - RNA, 20 nt, Synthetic Construct
  source 1..20: mol_type = other RNA
ctctaatgagactgccggtg

SEQ ID NO: 15248 - RNA, 22 nt, Synthetic Construct
  source 1..22: mol_type = other RNA
tgaggtagtaatttgtgctgtt

SEQ ID NO: 15249 - RNA, 20 nt, Synthetic Construct
  source 1..20: mol_type = other RNA
tggggtagtaggttgtgtgg

SEQ ID NO: 15250 - RNA, 20 nt, Synthetic Construct
  source 1..20: mol_type = other RNA
tggggtagtaggttgtgtgg

SEQ ID NO: 15251 - RNA, 23 nt, Synthetic Construct
  source 1..23: mol_type = other RNA
ccctgtactgagctgccccgagt

SEQ ID NO: 15252 - RNA, 23 nt, Synthetic Construct
  source 1..23: mol_type = other RNA
ccctgtactgagctgccccgagt

SEQ ID NO: 15253 - RNA, 22 nt, Synthetic Construct
  source 1..22: mol_type = other RNA
tgaggtagtaggatgtatagtt

SEQ ID NO: 15254 - RNA, 22 nt, Synthetic Construct
  source 1..22: mol_type = other RNA
tgaggtagtaggatgtatagtt

SEQ ID NO: 15255 - RNA, 19 nt, Synthetic Construct
  source 1..19: mol_type = other RNA
cctgtaccgatcaatagtg

SEQ ID NO: 15256 - RNA, 19 nt, Synthetic Construct
  source 1..19: mol_type = other RNA
cctgtaccgatcaatagtg

SEQ ID NO: 15257 - RNA, 22 nt, Synthetic Construct
  source 1..22: mol_type = other RNA
tgaggtagtaggttgtgctgtt

SEQ ID NO: 15258 - RNA, 22 nt, Synthetic Construct
  source 1..22: mol_type = other RNA
tgaggtagtaggttgtgctgtt

SEQ ID NO: 15259 - RNA, 17 nt, Synthetic Construct
  source 1..17: mol_type = other RNA
cacggcccagactccta

SEQ ID NO: 15260 - RNA, 25 nt, Synthetic Construct
  source 1..25: mol_type = other RNA
ttgaggatgtgagatcgagacgaca

SEQ ID NO: 15261 - RNA, 17 nt, Synthetic Construct
  source 1..17: mol_type = other RNA
accaaggggtcgtgggt

SEQ ID NO: 15262 - RNA, 17 nt, Synthetic Construct
  source 1..17: mol_type = other RNA
accaaggggtcgtgggt

SEQ ID NO: 15263 - RNA, 15 nt, Synthetic Construct
  source 1..15: mol_type = other RNA
cgatatggcatgaga

SEQ ID NO: 15264 - RNA, 19 nt, Synthetic Construct
  source 1..19: mol_type = other RNA
cacatgcaagtcgaacggt

SEQ ID NO: 15265 - RNA, 23 nt, Synthetic Construct
  source 1..23: mol_type = other RNA
gtcagtttgtcaaataccccaat

SEQ ID NO: 15266 - RNA, 22 nt, Synthetic Construct
  source 1..22: mol_type = other RNA
tggaatgtaaagaagtatgtat

SEQ ID NO: 15267 - RNA, 22 nt, Synthetic Construct
  source 1..22: mol_type = other RNA
tggaatgtaaagaagtatgtat

SEQ ID NO: 15268 - RNA, 23 nt, Synthetic Construct
  source 1..23: mol_type = other RNA
tccctggtggtctagtggttagg

SEQ ID NO: 15269 - RNA, 17 nt, Synthetic Construct
  source 1..17: mol_type = other RNA
tggccgtcgtcagctcg

SEQ ID NO: 15270 - RNA, 17 nt, Synthetic Construct
  source 1..17: mol_type = other RNA
tggccgtcgtcagctcg

SEQ ID NO: 15271 - RNA, 21 nt, Synthetic Construct
  source 1..21: mol_type = other RNA
tctcccaacccttgtaccagt

SEQ ID NO: 15272 - RNA, 21 nt, Synthetic Construct
  source 1..21: mol_type = other RNA
tctcccaacccttgtaccagt

SEQ ID NO: 15273 - RNA, 22 nt, Synthetic Construct
  source 1..22: mol_type = other RNA
tattgcactcgtcccggcctgt

SEQ ID NO: 15274 - RNA, 22 nt, Synthetic Construct
  source 1..22: mol_type = other RNA
tattgcactcgtcccggcctgt

SEQ ID NO: 15275 - RNA, 21 nt, Synthetic Construct
  source 1..21: mol_type = other RNA
gcctgctggggtggaacctgg

SEQ ID NO: 15276 - RNA, 21 nt, Synthetic Construct
  source 1..21: mol_type = other RNA
gcctgctggggtggaacctgg

SEQ ID NO: 15277 - RNA, 22 nt, Synthetic Construct
  source 1..22: mol_type = other RNA
tgaggtagaaggttgtgtggtt

SEQ ID NO: 15278 - RNA, 16 nt, Synthetic Construct
  source 1..16: mol_type = other RNA
aggtcatcattatctg

SEQ ID NO: 15279 - RNA, 23 nt, Synthetic Construct
  source 1..23: mol_type = other RNA
aagcagcacgtaaatattggcgt

SEQ ID NO: 15280 - RNA, 21 nt, Synthetic Construct
  source 1..21: mol_type = other RNA
tgaggtagtaggctgtgtggt

SEQ ID NO: 15281 - RNA, 21 nt, Synthetic Construct
  source 1..21: mol_type = other RNA
tgaggtagtaggctgtgtggt

SEQ ID NO: 15282 - RNA, 32 nt, Synthetic Construct; identical to SEQ ID NO: 1128
  source 1..32: mol_type = other RNA

SEQ ID NO: 15283 - RNA, 32 nt, Synthetic Construct; identical to SEQ ID NO: 1128
  source 1..32: mol_type = other RNA

SEQ ID NO: 15284 - RNA, 30 nt, Synthetic Construct; identical to SEQ ID NO: 1641
  source 1..30: mol_type = other RNA

SEQ ID NO: 15285 - RNA, 30 nt, Synthetic Construct; identical to SEQ ID NO: 1641
  source 1..30: mol_type = other RNA

SEQ ID NO: 15286 - RNA, 42 nt, Synthetic Construct; identical to SEQ ID NO: 8009
  source 1..42: mol_type = other RNA

SEQ ID NO: 15287 - RNA, 42 nt, Synthetic Construct; identical to SEQ ID NO: 8009
  source 1..42: mol_type = other RNA

SEQ ID NO: 15288 - RNA, 35 nt, Synthetic Construct; identical to SEQ ID NO: 2518
  source 1..35: mol_type = other RNA

SEQ ID NO: 15289 - RNA, 35 nt, Synthetic Construct; identical to SEQ ID NO: 2518
  source 1..35: mol_type = other RNA

SEQ ID NO: 15290 - RNA, 20 nt, Synthetic Construct
  source 1..20: mol_type = other RNA
aaaagctgggttgagaggga

SEQ ID NO: 15291 - RNA, 20 nt, Synthetic Construct
  source 1..20: mol_type = other RNA
aaaagctgggttgagaggga

SEQ ID NO: 15292 - RNA, 28 nt, Synthetic Construct
  source 1..28: mol_type = other RNA
gcggtataccgaagctctaggtgcggca

SEQ ID NO: 15293 - RNA, 28 nt, Synthetic Construct
  source 1..28: mol_type = other RNA
gcggtataccgaagctctaggtgcggca

SEQ ID NO: 15294 - RNA, 19 nt, Synthetic Construct
  source 1..19: mol_type = other RNA
tggccgtcgtcagctcgtg

SEQ ID NO: 15295 - RNA, 19 nt, Synthetic Construct
  source 1..19: mol_type = other RNA
tggccgtcgtcagctcgtg

SEQ ID NO: 15296 - RNA, 26 nt, Synthetic Construct
  source 1..26: mol_type = other RNA
tctgcccagtgctctgaatgtcaaag

SEQ ID NO: 15297 - RNA, 21 nt, Synthetic Construct
  source 1..21: mol_type = other RNA
tggggtagtaggttgtgtggt

SEQ ID NO: 15298 - RNA, 21 nt, Synthetic Construct
  source 1..21: mol_type = other RNA
tggggtagtaggttgtgtggt

SEQ ID NO: 15299 - RNA, 22 nt, Synthetic Construct
  source 1..22: mol_type = other RNA
ttgtaccgtgagtaataatgcg

SEQ ID NO: 15300 - RNA, 16 nt, Synthetic Construct
  source 1..16: mol_type = other RNA
cacaccgcccgtcgct

SEQ ID NO: 15301 - RNA, 16 nt, Synthetic Construct
  source 1..16: mol_type = other RNA
cacaccgcccgtcgct

SEQ ID NO: 15302 - RNA, 21 nt, Synthetic Construct
  source 1..21: mol_type = other RNA
tgaggtagtagatcgtatagt

SEQ ID NO: 15303 - RNA, 22 nt, Synthetic Construct
  source 1..22: mol_type = other RNA
cggaatcgctagtaatcgcgga

SEQ ID NO: 15304 - RNA, 22 nt, Synthetic Construct
  source 1..22: mol_type = other RNA
tgtagtgtctcctactttatgg

SEQ ID NO: 15305 - RNA, 16 nt, Synthetic Construct
  source 1..16: mol_type = other RNA
ctgcctcagcgtcggt

SEQ ID NO: 15306 - RNA, 16 nt, Synthetic Construct
  source 1..16: mol_type = other RNA
ctgcctcagcgtcggt

SEQ ID NO: 15307 - RNA, 27 nt, Synthetic Construct
  source 1..27: mol_type = other RNA
ccctccactgctaaatttgactggctt

SEQ ID NO: 15308 - RNA, 22 nt, Synthetic Construct
  source 1..22: mol_type = other RNA
tgaggtagtaggttgtagagtt

SEQ ID NO: 15309 - RNA, 19 nt, Synthetic Construct
  source 1..19: mol_type = other RNA
gcgccgatgatagtgcgga

SEQ ID NO: 15310 - RNA, 22 nt, Synthetic Construct
  source 1..22: mol_type = other RNA
tatcggaacgtgcccagtcgtg

SEQ ID NO: 15311 - RNA, 22 nt, Synthetic Construct
  source 1..22: mol_type = other RNA
tattgcacttgtcccggcctat

SEQ ID NO: 15312 - RNA, 22 nt, Synthetic Construct
  source 1..22: mol_type = other RNA
tattgcacttgtcccggcctat

SEQ ID NO: 15313 - RNA, 19 nt, Synthetic Construct
  source 1..19: mol_type = other RNA
cctgtaccgatcaatagtg

SEQ ID NO: 15314 - RNA, 22 nt, Synthetic Construct
  source 1..22: mol_type = other RNA
tgaggtagtagattgtatagta

SEQ ID NO: 15315 - RNA, 22 nt, Synthetic Construct
  source 1..22: mol_type = other RNA
tgaggtagtagattgtatagta

SEQ ID NO: 15316 - RNA, 19 nt, Synthetic Construct
  source 1..19: mol_type = other RNA
cgactcttagcggtggatc

SEQ ID NO: 15317 - RNA, 21 nt, Synthetic Construct
  source 1..21: mol_type = other RNA
tccctgtcctccaggagctct

SEQ ID NO: 15318 - RNA, 21 nt, Synthetic Construct
  source 1..21: mol_type = other RNA
tccctgtcctccaggagctct

SEQ ID NO: 15319 - RNA, 22 nt, Synthetic Construct
  source 1..22: mol_type = other RNA
aagcagcacgtaaatattcgcg

SEQ ID NO: 15320 - RNA, 18 nt, Synthetic Construct
  source 1..18: mol_type = other RNA
gcgaaattccttgtcggg

SEQ ID NO: 15321 - RNA, 19 nt, Synthetic Construct
  source 1..19: mol_type = other RNA
tggccgtcgtcagctcgtg

SEQ ID NO: 15322 - RNA, 19 nt, Synthetic Construct
  source 1..19: mol_type = other RNA
tggccgtcgtcagctcgtg

SEQ ID NO: 15323 - RNA, 22 nt, Synthetic Construct
  source 1..22: mol_type = other RNA
aacccgtagatccgatcttgtg

SEQ ID NO: 15324 - RNA, 21 nt, Synthetic Construct
  source 1..21: mol_type = other RNA
ttcacagtggctaagttctgt

SEQ ID NO: 15325 - RNA, 21 nt, Synthetic Construct
  source 1..21: mol_type = other RNA
tggggtagtagattgtatagt

SEQ ID NO: 15326 - RNA, 22 nt, Synthetic Construct
  source 1..22: mol_type = other RNA
ttatggtttgcctgggactgag

SEQ ID NO: 15327 - RNA, 22 nt, Synthetic Construct
  source 1..22: mol_type = other RNA
ttatggtttgcctgggactgag

SEQ ID NO: 15328 - RNA, 23 nt, Synthetic Construct
  source 1..23: mol_type = other RNA
agcagcattgtacggggctatga

SEQ ID NO: 15329 - RNA, 32 nt, Synthetic Construct; identical to SEQ ID NO: 2318
  source 1..32: mol_type = other RNA

SEQ ID NO: 15330 - RNA, 16 nt, Synthetic Construct
  source 1..16: mol_type = other RNA
tgcacgaaagcgtggg

SEQ ID NO: 15331 - RNA, 16 nt, Synthetic Construct
  source 1..16: mol_type = other RNA
tgcacgaaagcgtggg

SEQ ID NO: 15332 - RNA, 24 nt, Synthetic Construct
  source 1..24: mol_type = other RNA
agcaacattgtctgctgggtttct

SEQ ID NO: 15333 - RNA, 24 nt, Synthetic Construct
  source 1..24: mol_type = other RNA
agcaacattgtctgctgggtttct

SEQ ID NO: 15334 - RNA, 15 nt, Synthetic Construct
  source 1..15: mol_type = other RNA
cggcccagactccta

SEQ ID NO: 15335 - RNA, 22 nt, Synthetic Construct
  source 1..22: mol_type = other RNA
tagcagcacgtaaacattggcg

SEQ ID NO: 15336 - RNA, 37 nt, Synthetic Construct; identical to SEQ ID NO: 2211
  source 1..37: mol_type = other RNA

SEQ ID NO: 15337 - RNA, 37 nt, Synthetic Construct; identical to SEQ ID NO: 2211
  source 1..37: mol_type = other RNA

SEQ ID NO: 15338 - RNA, 22 nt, Synthetic Construct
  source 1..22: mol_type = other RNA
tgaggtagtagtttgtgctggt

SEQ ID NO: 15339 - RNA, 22 nt, Synthetic Construct
  source 1..22: mol_type = other RNA
tggagagaaaggcagttcctga

SEQ ID NO: 15340 - RNA, 21 nt, Synthetic Construct
  source 1..21: mol_type = other RNA
tcctgtactgagccgccccga

SEQ ID NO: 15341 - RNA, 21 nt, Synthetic Construct
  source 1..21: mol_type = other RNA
tcctgtactgagccgccccga

SEQ ID NO: 15342 - RNA, 32 nt, Synthetic Construct; identical to SEQ ID NO: 1128
  source 1..32: mol_type = other RNA

SEQ ID NO: 15343 - RNA, 21 nt, Synthetic Construct
  source 1..21: mol_type = other RNA
cggagtgtgacaatggtgttt

SEQ ID NO: 15344 - RNA, 21 nt, Synthetic Construct
  source 1..21: mol_type = other RNA
cggagtgtgacaatggtgttt

SEQ ID NO: 15345 - RNA, 27 nt, Synthetic Construct
  source 1..27: mol_type = other RNA
gctttacattggactttgaacagatct

SEQ ID NO: 15346 - RNA, 27 nt, Synthetic Construct
  source 1..27: mol_type = other RNA
gctttacattggactttgaacagatct

SEQ ID NO: 15347 - RNA, 18 nt, Synthetic Construct
  source 1..18: mol_type = other RNA
ggtagcgtggccgagtgg

SEQ ID NO: 15348 - RNA, 18 nt, Synthetic Construct
  source 1..18: mol_type = other RNA
atggccgggacagagggc

SEQ ID NO: 15349 - RNA, 24 nt, Synthetic Construct
  source 1..24: mol_type = other RNA
acagtagtctgcacattggttatt

SEQ ID NO: 15350 - RNA, 36 nt, Synthetic Construct; identical to SEQ ID NO: 8838
  source 1..36: mol_type = other RNA

SEQ ID NO: 15351 - RNA, 36 nt, Synthetic Construct; identical to SEQ ID NO: 8838
  source 1..36: mol_type = other RNA

SEQ ID NO: 15352 - RNA, 28 nt, Synthetic Construct
  source 1..28: mol_type = other RNA
ccccccactgctaaatttggctggcttt

SEQ ID NO: 15353 - RNA, 28 nt, Synthetic Construct
  source 1..28: mol_type = other RNA
ccccccactgctaaatttggctggcttt

SEQ ID NO: 15354 - RNA, 23 nt, Synthetic Construct
  source 1..23: mol_type = other RNA
naaagtgctgttcgtgcaggtag

SEQ ID NO: 15355 - RNA, 23 nt, Synthetic Construct
  source 1..23: mol_type = other RNA
naaagtgctgttcgtgcaggtag

SEQ ID NO: 15356 - RNA, 20 nt, Synthetic Construct
  source 1..20: mol_type = other RNA
tgaggtagtaggttgcgtgg

SEQ ID NO: 15357 - RNA, 20 nt, Synthetic Construct
  source 1..20: mol_type = other RNA
tgaggtagtaggttgcgtgg

SEQ ID NO: 15358 - RNA, 20 nt, Synthetic Construct
  source 1..20: mol_type = other RNA
aaaccgttaccattactgag

SEQ ID NO: 15359 - RNA, 20 nt, Synthetic Construct
  source 1..20: mol_type = other RNA
aaaccgttaccattactgag

SEQ ID NO: 15360 - RNA, 15 nt, Synthetic Construct
  source 1..15: mol_type = other RNA
tcctgacggccatag

SEQ ID NO: 15361 - RNA, 15 nt, Synthetic Construct
  source 1..15: mol_type = other RNA
tcctgacggccatag

SEQ ID NO: 15362 - RNA, 21 nt, Synthetic Construct
  source 1..21: mol_type = other RNA
tgaggtagtaggttgtgtggc

SEQ ID NO: 15363 - RNA, 21 nt, Synthetic Construct
  source 1..21: mol_type = other RNA
tgaggtagtaggttgtgtggc

SEQ ID NO: 15364 - RNA, 21 nt, Synthetic Construct
  source 1..21: mol_type = other RNA
tcctgtactgagctgccccgg

SEQ ID NO: 15365 - RNA, 21 nt, Synthetic Construct
  source 1..21: mol_type = other RNA
tcctgtactgagctgccccgg

SEQ ID NO: 15366 - RNA, 23 nt, Synthetic Construct
  source 1..23: mol_type = other RNA
tgtcagtttgtcaaataccccat

SEQ ID NO: 15367 - RNA, 22 nt, Synthetic Construct
  source 1..22: mol_type = other RNA
tagcagcacttaaatattggcg

SEQ ID NO: 15368 - RNA, 22 nt, Synthetic Construct
  source 1..22: mol_type = other RNA
tagcagcacttaaatattggcg

SEQ ID NO: 15369 - RNA, 20 nt, Synthetic Construct
  source 1..20: mol_type = other RNA
tgaggtagcaggttgtgtgg

SEQ ID NO: 15370 - RNA, 22 nt, Synthetic Construct
  source 1..22: mol_type = other RNA
gaagaggacttggaactcgatc

SEQ ID NO: 15371 - RNA, 22 nt, Synthetic Construct
  source 1..22: mol_type = other RNA
tgtcagtttgtcaaatacccca

SEQ ID NO: 15372 - RNA, 22 nt, Synthetic Construct
  source 1..22: mol_type = other RNA
tgtcagtttgtcaaatacccca

SEQ ID NO: 15373 - RNA, 21 nt, Synthetic Construct
  source 1..21: mol_type = other RNA
agcgtgcttgactgcgagact

SEQ ID NO: 15374 - RNA, 19 nt, Synthetic Construct
  source 1..19: mol_type = other RNA
tagtgacgcgcatgaatgg

SEQ ID NO: 15375 - RNA, 19 nt, Synthetic Construct
  source 1..19: mol_type = other RNA
tagtgacgcgcatgaatgg

SEQ ID NO: 15376 - RNA, 22 nt, Synthetic Construct
  source 1..22: mol_type = other RNA
tgaggtagtagtttgtgccgtt

SEQ ID NO: 15377 - RNA, 21 nt, Synthetic Construct
  source 1..21: mol_type = other RNA
tcaggctcagtcccctcccgt

SEQ ID NO: 15378 - RNA, 21 nt, Synthetic Construct
  source 1..21: mol_type = other RNA
tcaggctcagtcccctcccgt

SEQ ID NO: 15379 - RNA, 22 nt, Synthetic Construct
  source 1..22: mol_type = other RNA
gcgttgcaaccagtgccggggg

SEQ ID NO: 15380 - RNA, 22 nt, Synthetic Construct
  source 1..22: mol_type = other RNA
gcgttgcaaccagtgccggggg

SEQ ID NO: 15381 - RNA, 22 nt, Synthetic Construct
  source 1..22: mol_type = other RNA
tgtgactggttgaccagagggg

SEQ ID NO: 15382 - RNA, 26 nt, Synthetic Construct
  source 1..26: mol_type = other RNA
tccctggtggtctagtggttaggatt

SEQ ID NO: 15383 - RNA, 22 nt, Synthetic Construct
  source 1..22: mol_type = other RNA
tgaggtagtaggttgtatggtt

SEQ ID NO: 15384 - RNA, 19 nt, Synthetic Construct
  source 1..19: mol_type = other RNA
cagcactctgcaaagacga

SEQ ID NO: 15385 - RNA, 19 nt, Synthetic Construct
  source 1..19: mol_type = other RNA
cagcactctgcaaagacga

SEQ ID NO: 15386 - RNA, 22 nt, Synthetic Construct
  source 1..22: mol_type = other RNA
accacagggtagaaccacggaa

SEQ ID NO: 15387 - RNA, 22 nt, Synthetic Construct
  source 1..22: mol_type = other RNA
accacagggtagaaccacggaa

SEQ ID NO: 15388 - RNA, 22 nt, Synthetic Construct
  source 1..22: mol_type = other RNA
cgaggtagtaggttgtgtggtt

SEQ ID NO: 15389 - RNA, 33 nt, Synthetic Construct
  source 1..33: mol_type = other RNA
gcccggatagctcagtcggtagagcatcagact

SEQ ID NO: 15390 - RNA, 33 nt, Synthetic Construct; identical to SEQ ID NO: 15389
  source 1..33: mol_type = other RNA

SEQ ID NO: 15391 - RNA, 21 nt, Synthetic Construct
  source 1..21: mol_type = other RNA
tgaggtagtaggttgtgtgat

SEQ ID NO: 15392 - RNA, 21 nt, Synthetic Construct
  source 1..21: mol_type = other RNA
tgaggtagtaggttgtgtgat

SEQ ID NO: 15393 - RNA, 21 nt, Synthetic Construct
  source 1..21: mol_type = other RNA
tggagagtgacaatggtgttt

SEQ ID NO: 15394 - RNA, 22 nt, Synthetic Construct
  source 1..22: mol_type = other RNA
tagcagcacgtaaatattggtg

SEQ ID NO: 15395 - RNA, 23 nt, Synthetic Construct
  source 1..23: mol_type = other RNA
taccctgtagaaccgaatttgtg

SEQ ID NO: 15396 - RNA, 23 nt, Synthetic Construct
  source 1..23: mol_type = other RNA
taccctgtagaaccgaatttgtg

SEQ ID NO: 15397 - RNA, 16 nt, Synthetic Construct
  source 1..16: mol_type = other RNA
gtctacgaccatacca

SEQ ID NO: 15398 - RNA, 34 nt, Synthetic Construct; identical to SEQ ID NO: 6594
  source 1..34: mol_type = other RNA

SEQ ID NO: 15399 - RNA, 34 nt, Synthetic Construct; identical to SEQ ID NO: 6594
  source 1..34: mol_type = other RNA

SEQ ID NO: 15400 - RNA, 18 nt, Synthetic Construct
  source 1..18: mol_type = other RNA
acagtcaggatgttggct

SEQ ID NO: 15401 - RNA, 23 nt, Synthetic Construct
  source 1..23: mol_type = other RNA
tacccattgcatatcggagttgt

SEQ ID NO: 15402 - RNA, 23 nt, Synthetic Construct
  source 1..23: mol_type = other RNA
tacccattgcatatcggagttgt

SEQ ID NO: 15403 - RNA, 22 nt, Synthetic Construct
  source 1..22: mol_type = other RNA
tatagcacttgtcccggcctgt

SEQ ID NO: 15404 - RNA, 22 nt, Synthetic Construct
  source 1..22: mol_type = other RNA
tatagcacttgtcccggcctgt

SEQ ID NO: 15405 - RNA, 22 nt, Synthetic Construct
  source 1..22: mol_type = other RNA
tgaggcagtagtttgtgctgtt

SEQ ID NO: 15406 - RNA, 35 nt, Synthetic Construct; identical to SEQ ID NO: 2402
  source 1..35: mol_type = other RNA

SEQ ID NO: 15407 - RNA, 22 nt, Synthetic Construct
  source 1..22: mol_type = other RNA
ggtagcgaaattccttgtcggg

SEQ ID NO: 15408 - RNA, 22 nt, Synthetic Construct
  source 1..22: mol_type = other RNA
ggtagcgaaattccttgtcggg

SEQ ID NO: 15409 - RNA, 23 nt, Synthetic Construct
  source 1..23: mol_type = other RNA
ggaggtagtaggttgtgtggttt

SEQ ID NO: 15410 - RNA, 26 nt, Synthetic Construct
  source 1..26: mol_type = other RNA
cggctgttaaccgaaaggttggtggt

SEQ ID NO: 15411 - RNA, 26 nt, Synthetic Construct
  source 1..26: mol_type = other RNA
cggctgttaaccgaaaggttggtggt

SEQ ID NO: 15412 - RNA, 21 nt, Synthetic Construct
  source 1..21: mol_type = other RNA
tgaggtagaagattgtatagt

SEQ ID NO: 15413 - RNA, 19 nt, Synthetic Construct
  source 1..19: mol_type = other RNA
cctgtctgaatatgggggg

SEQ ID NO: 15414 - RNA, 19 nt, Synthetic Construct
  source 1..19: mol_type = other RNA
cctgtctgaatatgggggg

SEQ ID NO: 15415 - RNA, 21 nt, Synthetic Construct
  source 1..21: mol_type = other RNA
taactccttaagcaatctcgc

SEQ ID NO: 15416 - RNA, 21 nt, Synthetic Construct
  source 1..21: mol_type = other RNA
taactccttaagcaatctcgc

SEQ ID NO: 15417 - RNA, 23 nt, Synthetic Construct
  source 1..23: mol_type = other RNA
tcggatccgtctgagcttggctt

SEQ ID NO: 15418 - RNA, 22 nt, Synthetic Construct
  source 1..22: mol_type = other RNA
ttgtaccgtgagtaataatgcg

SEQ ID NO: 15419 - RNA, 22 nt, Synthetic Construct
  source 1..22: mol_type = other RNA
tggaatgtaaagaagtatgtaa

SEQ ID NO: 15420 - RNA, 19 nt, Synthetic Construct
  source 1..19: mol_type = other RNA
ccagtaaacggcggccgta

SEQ ID NO: 15421 - RNA, 19 nt, Synthetic Construct
  source 1..19: mol_type = other RNA
ccagtaaacggcggccgta

SEQ ID NO: 15422 - RNA, 32 nt, Synthetic Construct; identical to SEQ ID NO: 4734
  source 1..32: mol_type = other RNA

SEQ ID NO: 15423 - RNA, 21 nt, Synthetic Construct
  source 1..21: mol_type = other RNA
tgaggtagtagatcgtatagt

SEQ ID NO: 15424 - RNA, 21 nt, Synthetic Construct
  source 1..21: mol_type = other RNA
tgaggtagtagatcgtatagt

SEQ ID NO: 15425 - RNA, 23 nt, Synthetic Construct
  source 1..23: mol_type = other RNA
tggaatgtaaagaagtatgtacc

SEQ ID NO: 15426 - RNA, 23 nt, Synthetic Construct
  source 1..23: mol_type = other RNA
tggaatgtaaagaagtatgtacc

SEQ ID NO: 15427 - RNA, 22 nt, Synthetic Construct
  source 1..22: mol_type = other RNA
cattgcacttgtcccggcctgt

SEQ ID NO: 15428 - RNA, 24 nt, Synthetic Construct
  source 1..24: mol_type = other RNA
tgtcagtttgtcaaataccccaac

SEQ ID NO: 15429 - RNA, 24 nt, Synthetic Construct
  source 1..24: mol_type = other RNA
agctacattgtctgctgggtttcg

SEQ ID NO: 15430 - RNA, 24 nt, Synthetic Construct
  source 1..24: mol_type = other RNA
agctacattgtctgctgggtttcg

SEQ ID NO: 15431 - RNA, 19 nt, Synthetic Construct
  source 1..19: mol_type = other RNA
tgaggtagtaggttgtata

SEQ ID NO: 15432 - RNA, 19 nt, Synthetic Construct
  source 1..19: mol_type = other RNA
ctgatcgagtcgtcctgcg

SEQ ID NO: 15433 - RNA, 19 nt, Synthetic Construct
  source 1..19: mol_type = other RNA
ctgatcgagtcgtcctgcg

SEQ ID NO: 15434 - RNA, 22 nt, Synthetic Construct
  source 1..22: mol_type = other RNA
cagggctggcagtgacatgggt

SEQ ID NO: 15435 - RNA, 17 nt, Synthetic Construct
  source 1..17: mol_type = other RNA
tgccagcagccgcggta

SEQ ID NO: 15436 - RNA, 21 nt, Synthetic Construct
  source 1..21: mol_type = other RNA
tcttggagtaggtcattgggt

SEQ ID NO: 15437 - RNA, 22 nt, Synthetic Construct
  source 1..22: mol_type = other RNA
tgagatagtagtttgtgctgtt

SEQ ID NO: 15438 - RNA, 22 nt, Synthetic Construct
  source 1..22: mol_type = other RNA
tgagatagtagtttgtgctgtt

SEQ ID NO: 15439 - RNA, 31 nt, Synthetic Construct; identical to SEQ ID NO: 2412
  source 1..31: mol_type = other RNA

SEQ ID NO: 15440 - RNA, 21 nt, Synthetic Construct
  source 1..21: mol_type = other RNA
gtcagtttgtcaaatacccca

SEQ ID NO: 15441 - RNA, 23 nt, Synthetic Construct
  source 1..23: mol_type = other RNA
tcctgaactgagctgccccgaga

SEQ ID NO: 15442 - RNA, 23 nt, Synthetic Construct
  source 1..23: mol_type = other RNA
tcctgaactgagctgccccgaga

SEQ ID NO: 15443 - RNA, 17 nt, Synthetic Construct
  source 1..17: mol_type = other RNA
cagtagctcgaggaaaa

SEQ ID NO: 15444 - RNA, 17 nt, Synthetic Construct
  source 1..17: mol_type = other RNA
cagtagctcgaggaaaa

SEQ ID NO: 15445 - RNA, 22 nt, Synthetic Construct
  source 1..22: mol_type = other RNA
gctcacggaaagagaatgaagc

SEQ ID NO: 15446 - RNA, 22 nt, Synthetic Construct
  source 1..22: mol_type = other RNA
gctcacggaaagagaatgaagc

SEQ ID NO: 15447 - RNA, 27 nt, Synthetic Construct
  source 1..27: mol_type = other RNA
ccccccactgctaaatttggctggcta

SEQ ID NO: 15448 - RNA, 27 nt, Synthetic Construct
  source 1..27: mol_type = other RNA
ccctccactgctaaatttgactggctt

SEQ ID NO: 15449 - RNA, 22 nt, Synthetic Construct
  source 1..22: mol_type = other RNA
tgaggtagtaggttgtgtgatt

SEQ ID NO: 15450 - RNA, 18 nt, Synthetic Construct
  source 1..18: mol_type = other RNA
tgcagatcttggtggtag

SEQ ID NO: 15451 - RNA, 18 nt, Synthetic Construct
  source 1..18: mol_type = other RNA
tgcagatcttggtggtag

SEQ ID NO: 15452 - RNA, 17 nt, Synthetic Construct
  source 1..17: mol_type = other RNA
tggccgttcttagttgg

SEQ ID NO: 15453 - RNA, 32 nt, Synthetic Construct; identical to SEQ ID NO: 770
  source 1..32: mol_type = other RNA

SEQ ID NO: 15454 - RNA, 27 nt, Synthetic Construct
  source 1..27: mol_type = other RNA
ccccccactgctaaatctgactggctt

SEQ ID NO: 15455 - RNA, 27 nt, Synthetic Construct
  source 1..27: mol_type = other RNA
ccccccactgctaaatctgactggctt

SEQ ID NO: 15456 - RNA, 21 nt, Synthetic Construct
  source 1..21: mol_type = other RNA
tgaggtagtgggttgtgtggt

SEQ ID NO: 15457 - RNA, 21 nt, Synthetic Construct
  source 1..21: mol_type = other RNA
tgaggtagtgggttgtgtggt

SEQ ID NO: 15458 - RNA, 22 nt, Synthetic Construct
  source 1..22: mol_type = other RNA
tgaggtggtagattgtatagtt

SEQ ID NO: 15459 - RNA, 22 nt, Synthetic Construct
  source 1..22: mol_type = other RNA
tgaggtggtagattgtatagtt

SEQ ID NO: 15460 - RNA, 22 nt, Synthetic Construct
  source 1..22: mol_type = other RNA
tgaggtagtagtttatgctgtt

SEQ ID NO: 15461 - RNA, 22 nt, Synthetic Construct
  source 1..22: mol_type = other RNA
tgaggtagtagtttatgctgtt

SEQ ID NO: 15462 - RNA, 33 nt, Synthetic Construct; identical to SEQ ID NO: 2209
  source 1..33: mol_type = other RNA

SEQ ID NO: 15463 - RNA, 33 nt, Synthetic Construct; identical to SEQ ID NO: 2209
  source 1..33: mol_type = other RNA

SEQ ID NO: 15464 - RNA, 31 nt, Synthetic Construct; identical to SEQ ID NO: 14087
  source 1..31: mol_type = other RNA

SEQ ID NO: 15465 - RNA, 31 nt, Synthetic Construct; identical to SEQ ID NO: 14087
  source 1..31: mol_type = other RNA

SEQ ID NO: 15466 - RNA, 36 nt, Synthetic Construct; identical to SEQ ID NO: 2344
  source 1..36: mol_type = other RNA

SEQ ID NO: 15467 - RNA, 22 nt, Synthetic Construct
  source 1..22: mol_type = other RNA
tgtgcaaatccatgcaaaactg

SEQ ID NO: 15468 - RNA, 22 nt, Synthetic Construct
  source 1..22: mol_type = other RNA
tgtgcaaatccatgcaaaactg

SEQ ID NO: 15469 - RNA, 23 nt, Synthetic Construct
  source 1..23: mol_type = other RNA
atgacacgatcactcccgttgag

SEQ ID NO: 15470 - RNA, 22 nt, Synthetic Construct
  source 1..22: mol_type = other RNA
tgaggtagtaggttgtacagtt

SEQ ID NO: 15471 - RNA, 22 nt, Synthetic Construct
  source 1..22: mol_type = other RNA
tgaggtagtaggttgtacagtt

SEQ ID NO: 15472 - RNA, 16 nt, Synthetic Construct
  source 1..16: mol_type = other RNA
tgttcggaagattttc

SEQ ID NO: 15473 - RNA, 22 nt, Synthetic Construct
  source 1..22: mol_type = other RNA
tgtggtagtagtttgtgctgtt

SEQ ID NO: 15474 - RNA, 22 nt, Synthetic Construct
  source 1..22: mol_type = other RNA
tgtggtagtagtttgtgctgtt

SEQ ID NO: 15475 - RNA, 22 nt, Synthetic Construct
  source 1..22: mol_type = other RNA
aaccagcacgtaaatattggcg

SEQ ID NO: 15476 - RNA, 22 nt, Synthetic Construct
  source 1..22: mol_type = other RNA
tgaggtagtagattatatagtt

SEQ ID NO: 15477 - RNA, 22 nt, Synthetic Construct
  source 1..22: mol_type = other RNA
tgaggtagtagattatatagtt

SEQ ID NO: 15478 - RNA, 22 nt, Synthetic Construct
  source 1..22: mol_type = other RNA
tggaatgtaaagaagtatgtaa

SEQ ID NO: 15479 - RNA, 41 nt, Synthetic Construct; identical to SEQ ID NO: 1667
  source 1..41: mol_type = other RNA

SEQ ID NO: 15480 - RNA, 41 nt, Synthetic Construct; identical to SEQ ID NO: 1667
  source 1..41: mol_type = other RNA

SEQ ID NO: 15481 - RNA, 23 nt, Synthetic Construct
  source 1..23: mol_type = other RNA
tcctatactgagctgccccgaga

SEQ ID NO: 15482 - RNA, 23 nt, Synthetic Construct
  source 1..23: mol_type = other RNA
tcctatactgagctgccccgaga

SEQ ID NO: 15483 - RNA, 23 nt, Synthetic Construct
  source 1..23: mol_type = other RNA
tcctgtgctgagctgccccgaga

SEQ ID NO: 15484 - RNA, 23 nt, Synthetic Construct
  source 1..23: mol_type = other RNA
tcctgtgctgagctgccccgaga

SEQ ID NO: 15485 - RNA, 21 nt, Synthetic Construct
  source 1..21: mol_type = other RNA
cgaggtagtagattgtatagt

SEQ ID NO: 15486 - RNA, 19 nt, Synthetic Construct
  source 1..19: mol_type = other RNA
cttggggttgtaggaccac

SEQ ID NO: 15487 - RNA, 21 nt, Synthetic Construct
  source 1..21: mol_type = other RNA
tttggcactagcacatttttg

SEQ ID NO: 15488 - RNA, 21 nt, Synthetic Construct
  source 1..21: mol_type = other RNA
tttggcactagcacatttttg

SEQ ID NO: 15489 - RNA, 21 nt, Synthetic Construct
  source 1..21: mol_type = other RNA
tgaggcagtagattgtatagt

SEQ ID NO: 15490 - RNA, 21 nt, Synthetic Construct
  source 1..21: mol_type = other RNA
tgaggcagtagattgtatagt

SEQ ID NO: 15491 - RNA, 22 nt, Synthetic Construct
  source 1..22: mol_type = other RNA
tgaggtagtaggttgtatagct

SEQ ID NO: 15492 - RNA, 22 nt, Synthetic Construct
  source 1..22: mol_type = other RNA
tgaggtagtaggttgtatagct

SEQ ID NO: 15493 - RNA, 21 nt, Synthetic Construct
  source 1..21: mol_type = other RNA
tcctgtactgggctgccccga

SEQ ID NO: 15494 - RNA, 21 nt, Synthetic Construct
  source 1..21: mol_type = other RNA
tcctgtactgggctgccccga

SEQ ID NO: 15495 - RNA, 23 nt, Synthetic Construct
  source 1..23: mol_type = other RNA
tctctcggctcctcgcggctcgt

SEQ ID NO: 15496 - RNA, 22 nt, Synthetic Construct
  source 1..22: mol_type = other RNA
ttcaagtaacccaggataggct

SEQ ID NO: 15497 - RNA, 16 nt, Synthetic Construct
  source 1..16: mol_type = other RNA
ttggcctcaagtcagg

SEQ ID NO: 15498 - RNA, 16 nt, Synthetic Construct
  source 1..16: mol_type = other RNA
ttggcctcaagtcagg

SEQ ID NO: 15499 - RNA, 35 nt, Synthetic Construct; identical to SEQ ID NO: 14082
  source 1..35: mol_type = other RNA

SEQ ID NO: 15500 - RNA, 35 nt, Synthetic Construct; identical to SEQ ID NO: 14082
  source 1..35: mol_type = other RNA

SEQ ID NO: 15501 - RNA, 16 nt, Synthetic Construct
  source 1..16: mol_type = other RNA
ttcgattccggagagg

SEQ ID NO: 15502 - RNA, 16 nt, Synthetic Construct
  source 1..16: mol_type = other RNA
ttcgattccggagagg

SEQ ID NO: 15503 - RNA, 21 nt, Synthetic Construct
  source 1..21: mol_type = other RNA
tggagtgtgacaatggtgctt

SEQ ID NO: 15504 - RNA, 23 nt, Synthetic Construct
  source 1..23: mol_type = other RNA
caaagtgctgtacgtgcaggtag

SEQ ID NO: 15505 - RNA, 22 nt, Synthetic Construct
  source 1..22: mol_type = other RNA
tgaggtagtagtttgtgttgtt

SEQ ID NO: 15506 - RNA, 37 nt, Synthetic Construct; identical to SEQ ID NO: 8986
  source 1..37: mol_type = other RNA

SEQ ID NO: 15507 - RNA, 37 nt, Synthetic Construct; identical to SEQ ID NO: 8986
  source 1..37: mol_type = other RNA

SEQ ID NO: 15508 - RNA, 22 nt, Synthetic Construct
  source 1..22: mol_type = other RNA
tgaggtagtaggttgtagagtt

SEQ ID NO: 15509 - RNA, 17 nt, Synthetic Construct
  source 1..17: mol_type = other RNA
aggaattgacggaaggg

SEQ ID NO: 15510 - RNA, 17 nt, Synthetic Construct
  source 1..17: mol_type = other RNA
aggaattgacggaaggg

SEQ ID NO: 15511 - RNA, 21 nt, Synthetic Construct
  source 1..21: mol_type = other RNA
atgtcccacccccactcctgt

SEQ ID NO: 15512 - RNA, 21 nt, Synthetic Construct
  source 1..21: mol_type = other RNA
tcctgtactgagctgccccgg

SEQ ID NO: 15513 - RNA, 21 nt, Synthetic Construct
  source 1..21: mol_type = other RNA
tcctgtactgagctgccccgg

SEQ ID NO: 15514 - RNA, 15 nt, Synthetic Construct
  source 1..15: mol_type = other RNA
agttgaccgcctggg

SEQ ID NO: 15515 - RNA, 15 nt, Synthetic Construct
  source 1..15: mol_type = other RNA
agttgaccgcctggg

SEQ ID NO: 15516 - RNA, 19 nt, Synthetic Construct
  source 1..19: mol_type = other RNA
agcgaaattccttgtcggg

SEQ ID NO: 15517 - RNA, 19 nt, Synthetic Construct
  source 1..19: mol_type = other RNA
agcgaaattccttgtcggg

SEQ ID NO: 15518 - RNA, 18 nt, Synthetic Construct
  source 1..18: mol_type = other RNA
tcttcggtagtatagtgg

SEQ ID NO: 15519 - RNA, 18 nt, Synthetic Construct
  source 1..18: mol_type = other RNA
tcttcggtagtatagtgg

SEQ ID NO: 15520 - RNA, 22 nt, Synthetic Construct
  source 1..22: mol_type = other RNA
tgaggcagtagattgtatagtt

SEQ ID NO: 15521 - RNA, 22 nt, Synthetic Construct
  source 1..22: mol_type = other RNA
tgaggcagtagattgtatagtt

SEQ ID NO: 15522 - RNA, 21 nt, Synthetic Construct
  source 1..21: mol_type = other RNA
tggaatgtaaagaagtatgta

SEQ ID NO: 15523 - RNA, 21 nt, Synthetic Construct
  source 1..21: mol_type = other RNA
tggaatgtaaagaagtatgta

SEQ ID NO: 15524 - RNA, 22 nt, Synthetic Construct
  source 1..22: mol_type = other RNA
tccccttggggttgtaggacca

SEQ ID NO: 15525 - RNA, 16 nt, Synthetic Construct
  source 1..16: mol_type = other RNA
gaacgtgagctgggtt

SEQ ID NO: 15526 - RNA, 16 nt, Synthetic Construct
  source 1..16: mol_type = other RNA
gaacgtgagctgggtt

SEQ ID NO: 15527 - RNA, 28 nt, Synthetic Construct
  source 1..28: mol_type = other RNA
gcatgggtggttcagtggtagaattctc

SEQ ID NO: 15528 - RNA, 28 nt, Synthetic Construct
  source 1..28: mol_type = other RNA
gcatgggtggttcagtggtagaattctc

SEQ ID NO: 15529 - RNA, 22 nt, Synthetic Construct
  source 1..22: mol_type = other RNA
tgaggtagtagttcgtgctgtt

SEQ ID NO: 15530 - RNA, 37 nt, Synthetic Construct; identical to SEQ ID NO: 2607
  source 1..37: mol_type = other RNA

SEQ ID NO: 15531 - RNA, 37 nt, Synthetic Construct; identical to SEQ ID NO: 2607
  source 1..37: mol_type = other RNA

SEQ ID NO: 15532 - RNA, 20 nt, Synthetic Construct
  source 1..20: mol_type = other RNA
gaatcgctagtaatcgcgga

SEQ ID NO: 15533 - RNA, 20 nt, Synthetic Construct
  source 1..20: mol_type = other RNA
gaatcgctagtaatcgcgga

SEQ ID NO: 15534 - RNA, 27 nt, Synthetic Construct
  source 1..27: mol_type = other RNA
ccccccactgctaaatttgaccggctt

SEQ ID NO: 15535 - RNA, 22 nt, Synthetic Construct
  source 1..22: mol_type = other RNA
gaagcacattcgcacatcatat

SEQ ID NO: 15536 - RNA, 22 nt, Synthetic Construct
  source 1..22: mol_type = other RNA
gaagcacattcgcacatcatat

SEQ ID NO: 15537 - RNA, 27 nt, Synthetic Construct
  source 1..27: mol_type = other RNA
ggggagctaatcccagaaacccggtcg

SEQ ID NO: 15538 - RNA, 27 nt, Synthetic Construct
  source 1..27: mol_type = other RNA
ggggagctaatcccagaaacccggtcg

SEQ ID NO: 15539 - RNA, 27 nt, Synthetic Construct
  source 1..27: mol_type = other RNA
ccccccactactaaatttgactggctt

SEQ ID NO: 15540 - RNA, 22 nt, Synthetic Construct
  source 1..22: mol_type = other RNA
tggaatgtaaaggagtatgtat

SEQ ID NO: 15541 - RNA, 22 nt, Synthetic Construct
  source 1..22: mol_type = other RNA
tggaatgtaaaggagtatgtat

SEQ ID NO: 15542 - RNA, 18 nt, Synthetic Construct
  source 1..18: mol_type = other RNA
agcaggacggtggccatg

SEQ ID NO: 15543 - RNA, 18 nt, Synthetic Construct
  source 1..18: mol_type = other RNA
agcaggacggtggccatg

SEQ ID NO: 15544 - RNA, 22 nt, Synthetic Construct
  source 1..22: mol_type = other RNA
tggggtagtaggttgtatagtt

SEQ ID NO: 15545 - RNA, 22 nt, Synthetic Construct
  source 1..22: mol_type = other RNA
tggggtagtaggttgtatagtt

SEQ ID NO: 15546 - RNA, 21 nt, Synthetic Construct
  source 1..21: mol_type = other RNA
tgaggtagtagattgtgtagt

SEQ ID NO: 15547 - RNA, 21 nt, Synthetic Construct
  source 1..21: mol_type = other RNA
tgaggtagtagattgtgtagt

SEQ ID NO: 15548 - RNA, 32 nt, Synthetic Construct; identical to SEQ ID NO: 3748
  source 1..32: mol_type = other RNA

SEQ ID NO: 15549 - RNA, 32 nt, Synthetic Construct; identical to SEQ ID NO: 3748
  source 1..32: mol_type = other RNA

SEQ ID NO: 15550 - RNA, 21 nt, Synthetic Construct
  source 1..21: mol_type = other RNA
tgaggtagtggattgtatagt

SEQ ID NO: 15551 - RNA, 21 nt, Synthetic Construct
  source 1..21: mol_type = other RNA
tgaggtagtggattgtatagt

SEQ ID NO: 15552 - RNA, 21 nt, Synthetic Construct
  source 1..21: mol_type = other RNA
tgaggtagtaggttgtgtggc

SEQ ID NO: 15553 - RNA, 28 nt, Synthetic Construct
  source 1..28: mol_type = other RNA
gctttacattggactttgaacagatctg

SEQ ID NO: 15554 - RNA, 28 nt, Synthetic Construct
  source 1..28: mol_type = other RNA
gctttacattggactttgaacagatctg

SEQ ID NO: 15555 - RNA, 22 nt, Synthetic Construct
  source 1..22: mol_type = other RNA
ctttgttcgattccgttgagta

SEQ ID NO: 15556 - RNA, 25 nt, Synthetic Construct
  source 1..25: mol_type = other RNA
ttgaggatatgagatagagacgaca

SEQ ID NO: 15557 - RNA, 23 nt, Synthetic Construct
  source 1..23: mol_type = other RNA
actagactgaagctccttgaggt

SEQ ID NO: 15558 - RNA, 23 nt, Synthetic Construct
  source 1..23: mol_type = other RNA
actagactgaagctccttgaggt

SEQ ID NO: 15559 - RNA, 20 nt, Synthetic Construct
  source 1..20: mol_type = other RNA
tgaggtagtaggttgtatgg

SEQ ID NO: 15560 - RNA, 20 nt, Synthetic Construct
  source 1..20: mol_type = other RNA
tgaggtagtaggttgtatgg

SEQ ID NO: 15561 - RNA, 17 nt, Synthetic Construct
  source 1..17: mol_type = other RNA
tggccgtcgtcagctcg

SEQ ID NO: 15562 - RNA, 17 nt, Synthetic Construct
  source 1..17: mol_type = other RNA
tggccgtcgtcagctcg

SEQ ID NO: 15563 - RNA, 23 nt, Synthetic Construct
  source 1..23: mol_type = other RNA
tggtgatacgacgtacttagtgt

SEQ ID NO: 15564 - RNA, 23 nt, Synthetic Construct
  source 1..23: mol_type = other RNA
tggtgatacgacgtacttagtgt

SEQ ID NO: 15565 - RNA, 16 nt, Synthetic Construct
  source 1..16: mol_type = other RNA
gatttgggagtgctcg

SEQ ID NO: 15566 - RNA, 16 nt, Synthetic Construct
  source 1..16: mol_type = other RNA
gatttgggagtgctcg

SEQ ID NO: 15567 - RNA, 22 nt, Synthetic Construct
  source 1..22: mol_type = other RNA
aggaatgtaaagaagtatgtat

SEQ ID NO: 15568 - RNA, 22 nt, Synthetic Construct
  source 1..22: mol_type = other RNA
aggaatgtaaagaagtatgtat

SEQ ID NO: 15569 - RNA, 21 nt, Synthetic Construct
  source 1..21: mol_type = other RNA
agctcggtctgaggcccctca

SEQ ID NO: 15570 - RNA, 21 nt, Synthetic Construct
  source 1..21: mol_type = other RNA
agctcggtctgaggcccctca

SEQ ID NO: 15571 - RNA, 24 nt, Synthetic Construct
  source 1..24: mol_type = other RNA
ttcaagtaattcaggataggttgt

SEQ ID NO: 15572 - RNA, 24 nt, Synthetic Construct
  source 1..24: mol_type = other RNA
ttcaagtaattcaggataggttgt

SEQ ID NO: 15573 - RNA, 22 nt, Synthetic Construct
  source 1..22: mol_type = other RNA
tggagtgtggcaatggtgtttg

SEQ ID NO: 15574 - RNA, 22 nt, Synthetic Construct
  source 1..22: mol_type = other RNA
tggagtgtggcaatggtgtttg

SEQ ID NO: 15575 - RNA, 24 nt, Synthetic Construct
  source 1..24: mol_type = other RNA
cgactcttagcggtggatcactcg

SEQ ID NO: 15576 - RNA, 24 nt, Synthetic Construct
  source 1..24: mol_type = other RNA
cgactcttagcggtggatcactcg

SEQ ID NO: 15577 - RNA, 23 nt, Synthetic Construct
  source 1..23: mol_type = other RNA
tcctgtactgagctaccccgaga

SEQ ID NO: 15578 - RNA, 21 nt, Synthetic Construct
  source 1..21: mol_type = other RNA
aggttccggataagtagagcc

SEQ ID NO: 15579 - RNA, 22 nt, Synthetic Construct
  source 1..22: mol_type = other RNA
tgaggtagtggattgtatagtt

SEQ ID NO: 15580 - RNA, 22 nt, Synthetic Construct
  source 1..22: mol_type = other RNA
tgaggtagtggattgtatagtt

SEQ ID NO: 15581 - RNA, 26 nt, Synthetic Construct
  source 1..26: mol_type = other RNA
gatttccccttggggttgtaggacca

SEQ ID NO: 15582 - RNA, 26 nt, Synthetic Construct
  source 1..26: mol_type = other RNA
gatttccccttggggttgtaggacca

SEQ ID NO: 15583 - RNA, 19 nt, Synthetic Construct
  source 1..19: mol_type = other RNA
tccctgttcgggcgccatt

SEQ ID NO: 15584 - RNA, 29 nt, Synthetic Construct
  source 1..29: mol_type = other RNA
tgaaggtgggttgtgaagcctgctggagg

SEQ ID NO: 15585 - RNA, 29 nt, Synthetic Construct
  source 1..29: mol_type = other RNA
tgaaggtgggttgtgaagcctgctggagg

SEQ ID NO: 15586 - RNA, 21 nt, Synthetic Construct
  source 1..21: mol_type = other RNA
gtagcgaaattccttgtcggg

SEQ ID NO: 15587 - RNA, 21 nt, Synthetic Construct
  source 1..21: mol_type = other RNA
gtagcgaaattccttgtcggg

SEQ ID NO: 15588 - RNA, 22 nt, Synthetic Construct
  source 1..22: mol_type = other RNA
tcctgtactgagctgccctgag

SEQ ID NO: 15589 - RNA, 22 nt, Synthetic Construct
  source 1..22: mol_type = other RNA
tcctgtactgagctgccctgag

SEQ ID NO: 15590 - RNA, 20 nt, Synthetic Construct
  source 1..20: mol_type = other RNA
gcgtgcttgactgcgagact

SEQ ID NO: 15591 - RNA, 22 nt, Synthetic Construct
  source 1..22: mol_type = other RNA
tcagtagctcgaggaaaagaca

SEQ ID NO: 15592 - RNA, 22 nt, Synthetic Construct
  source 1..22: mol_type = other RNA
tcagtagctcgaggaaaagaca

SEQ ID NO: 15593 - RNA, 27 nt, Synthetic Construct
  source 1..27: mol_type = other RNA
ccccccactgctaaatttgacaggctt

SEQ ID NO: 15594 - RNA, 21 nt, Synthetic Construct
  source 1..21: mol_type = other RNA
cgaggtagtagattgtatagt

SEQ ID NO: 15595 - RNA, 21 nt, Synthetic Construct
  source 1..21: mol_type = other RNA
cgaggtagtagattgtatagt

SEQ ID NO: 15596 - RNA, 23 nt, Synthetic Construct
  source 1..23: mol_type = other RNA
tcactgatcgagtcgtcctgcgc

SEQ ID NO: 15597 - RNA, 23 nt, Synthetic Construct
  source 1..23: mol_type = other RNA
tcactgatcgagtcgtcctgcgc

SEQ ID NO: 15598 - RNA, 19 nt, Synthetic Construct
  source 1..19: mol_type = other RNA
tgagatgaagcactgtagc

SEQ ID NO: 15599 - RNA, 22 nt, Synthetic Construct
  source 1..22: mol_type = other RNA
tgaggtagtaaattgtatagtt

SEQ ID NO: 15600 - RNA, 22 nt, Synthetic Construct
  source 1..22: mol_type = other RNA
tgaggtagtaaattgtatagtt

SEQ ID NO: 15601 - RNA, 16 nt, Synthetic Construct
  source 1..16: mol_type = other RNA
acggcccagactccta

SEQ ID NO: 15602 - RNA, 16 nt, Synthetic Construct
  source 1..16: mol_type = other RNA
acggcccagactccta

SEQ ID NO: 15603 - RNA, 20 nt, Synthetic Construct
  source 1..20: mol_type = other RNA
aagctgccagttgaagaact

SEQ ID NO: 15604 - RNA, 20 nt, Synthetic Construct
  source 1..20: mol_type = other RNA
aagctgccagttgaagaact

SEQ ID NO: 15605 - RNA, 22 nt, Synthetic Construct
  source 1..22: mol_type = other RNA
tgaggtagtaggttgtattgtt

SEQ ID NO: 15606 - RNA, 27 nt, Synthetic Construct
  source 1..27: mol_type = other RNA
gctttacattggactttgaacagatct

SEQ ID NO: 15607 - RNA, 27 nt, Synthetic Construct
  source 1..27: mol_type = other RNA
gctttacattggactttgaacagatct

SEQ ID NO: 15608 - RNA, 30 nt, Synthetic Construct; identical to SEQ ID NO: 11302
  source 1..30: mol_type = other RNA

SEQ ID NO: 15609 - RNA, 22 nt, Synthetic Construct
  source 1..22: mol_type = other RNA
tgagatagtagtttgtgctgtt

SEQ ID NO: 15610 - RNA, 22 nt, Synthetic Construct
  source 1..22: mol_type = other RNA
ttcaagtaattcaggataggtc

SEQ ID NO: 15611 - RNA, 22 nt, Synthetic Construct
  source 1..22: mol_type = other RNA
ttcaagtaattcaggataggtc

SEQ ID NO: 15612 - RNA, 24 nt, Synthetic Construct
  source 1..24: mol_type = other RNA
taccacagggtagaaccacggatt

SEQ ID NO: 15613 - RNA, 24 nt, Synthetic Construct
  source 1..24: mol_type = other RNA
taccacagggtagaaccacggatt

SEQ ID NO: 15614 - RNA, 22 nt, Synthetic Construct
  source 1..22: mol_type = other RNA
tcgtaccgtgggtaataatgcg

SEQ ID NO: 15615 - RNA, 22 nt, Synthetic Construct
  source 1..22: mol_type = other RNA
tcgtaccgtgggtaataatgcg

SEQ ID NO: 15616 - RNA, 21 nt, Synthetic Construct
  source 1..21: mol_type = other RNA
agcagcattgtacagggctat

SEQ ID NO: 15617 - RNA, 21 nt, Synthetic Construct
  source 1..21: mol_type = other RNA
agcagcattgtacagggctat

SEQ ID NO: 15618 - RNA, 17 nt, Synthetic Construct
  source 1..17: mol_type = other RNA
gccatgccgcgtgcggg

SEQ ID NO: 15619 - RNA, 21 nt, Synthetic Construct
  source 1..21: mol_type = other RNA
agcagcattgtacagggctat

SEQ ID NO: 15620 - RNA, 22 nt, Synthetic Construct
  source 1..22: mol_type = other RNA
tcgtaccgtgagtgataatgcg

SEQ ID NO: 15621 - RNA, 22 nt, Synthetic Construct
  source 1..22: mol_type = other RNA
tgtagagcagggagcaggaagc

SEQ ID NO: 15622 - RNA, 22 nt, Synthetic Construct
  source 1..22: mol_type = other RNA
tgtagagcagggagcaggaagc

SEQ ID NO: 15623 - RNA, 22 nt, Synthetic Construct
  source 1..22: mol_type = other RNA
tattgcacttgtctcggcctgt

SEQ ID NO: 15624 - RNA, 32 nt, Synthetic Construct; identical to SEQ ID NO: 2798
  source 1..32: mol_type = other RNA

SEQ ID NO: 15625 - RNA, 22 nt, Synthetic Construct
  source 1..22: mol_type = other RNA
tgaggtagtaggttgtgcggtt

SEQ ID NO: 15626 - RNA, 22 nt, Synthetic Construct
  source 1..22: mol_type = other RNA
tgaggtagtaggttgtgcggtt

SEQ ID NO: 15627 - RNA, 22 nt, Synthetic Construct
  source 1..22: mol_type = other RNA
ccacctcccctgcaaacgtcca

SEQ ID NO: 15628 - RNA, 22 nt, Synthetic Construct
  source 1..22: mol_type = other RNA
ccacctcccctgcaaacgtcca

SEQ ID NO: 15629 - RNA, 30 nt, Synthetic Construct; identical to SEQ ID NO: 2840
  source 1..30: mol_type = other RNA

SEQ ID NO: 15630 - RNA, 16 nt, Synthetic Construct
  source 1..16: mol_type = other RNA
gtctacggccatacca

SEQ ID NO: 15631 - RNA, 22 nt, Synthetic Construct
  source 1..22: mol_type = other RNA
tcctgtacagagctgccccgag

SEQ ID NO: 15632 - RNA, 22 nt, Synthetic Construct
  source 1..22: mol_type = other RNA
tcctgtacagagctgccccgag

SEQ ID NO: 15633 - RNA, 15 nt, Synthetic Construct
  source 1..15: mol_type = other RNA
gtccggatcgtagtc

SEQ ID NO: 15634 - RNA, 15 nt, Synthetic Construct
  source 1..15: mol_type = other RNA
gtccggatcgtagtc

SEQ ID NO: 15635 - RNA, 22 nt, Synthetic Construct
  source 1..22: mol_type = other RNA
tgaggtagtgggttgtatagtt

SEQ ID NO: 15636 - RNA, 22 nt, Synthetic Construct
  source 1..22: mol_type = other RNA
tgaggtagtgggttgtatagtt

SEQ ID NO: 15637 - RNA, 17 nt, Synthetic Construct
  source 1..17: mol_type = other RNA
cgaaattccttgtcggg

SEQ ID NO: 15638 - RNA, 17 nt, Synthetic Construct
  source 1..17: mol_type = other RNA
gtccggatcgtagtctg

SEQ ID NO: 15639 - RNA, 21 nt, Synthetic Construct
  source 1..21: mol_type = other RNA
tgaggtagtagattgtgtagt

SEQ ID NO: 15640 - RNA, 22 nt, Synthetic Construct
  source 1..22: mol_type = other RNA
tagcagcacgtaaatattggca

SEQ ID NO: 15641 - RNA, 22 nt, Synthetic Construct
  source 1..22: mol_type = other RNA
tagcagcacgtaaatattggca

SEQ ID NO: 15642 - RNA, 17 nt, Synthetic Construct
  source 1..17: mol_type = other RNA
acagtcaggatgttggc

SEQ ID NO: 15643 - RNA, 24 nt, Synthetic Construct
  source 1..24: mol_type = other RNA
aagctcggtctgaggcccctcagt

SEQ ID NO: 15644 - RNA, 24 nt, Synthetic Construct
  source 1..24: mol_type = other RNA
aagctcggtctgaggcccctcagt

SEQ ID NO: 15645 - RNA, 29 nt, Synthetic Construct
  source 1..29: mol_type = other RNA
gtgcatgcactctggggttgtgggacagc

SEQ ID NO: 15646 - RNA, 29 nt, Synthetic Construct
  source 1..29: mol_type = other RNA
gtgcatgcactctggggttgtgggacagc

SEQ ID NO: 15647 - RNA, 16 nt, Synthetic Construct
  source 1..16: mol_type = other RNA
tggccgtcgtcagctc

SEQ ID NO: 15648 - RNA, 16 nt, Synthetic Construct
  source 1..16: mol_type = other RNA
tggccgtcgtcagctc

SEQ ID NO: 15649 - RNA, 26 nt, Synthetic Construct
  source 1..26: mol_type = other RNA
aaaagctgggttgagagggcgaattt

SEQ ID NO: 15650 - RNA, 23 nt, Synthetic Construct
  source 1..23: mol_type = other RNA
tggtaatacgacgtacttagagt

SEQ ID NO: 15651 - RNA, 17 nt, Synthetic Construct
  source 1..17: mol_type = other RNA
cacggcccagactccta

SEQ ID NO: 15652 - RNA, 17 nt, Synthetic Construct
  source 1..17: mol_type = other RNA
cacggcccagactccta

SEQ ID NO: 15653 - RNA, 22 nt, Synthetic Construct
  source 1..22: mol_type = other RNA
ttcaggtaatccaggataggct

SEQ ID NO: 15654 - RNA, 21 nt, Synthetic Construct
  source 1..21: mol_type = other RNA
tcctgtactgagctgccacga

SEQ ID NO: 15655 - RNA, 21 nt, Synthetic Construct
  source 1..21: mol_type = other RNA
tcctgtactgagctgccacga

SEQ ID NO: 15656 - RNA, 23 nt, Synthetic Construct
  source 1..23: mol_type = other RNA
tggtaatatgacgtacttagtgt

SEQ ID NO: 15657 - RNA, 23 nt, Synthetic Construct
  source 1..23: mol_type = other RNA
tggtaatatgacgtacttagtgt

SEQ ID NO: 15658 - RNA, 22 nt, Synthetic Construct
  source 1..22: mol_type = other RNA
tgtaaacatcctcgactggaag

SEQ ID NO: 15659 - RNA, 19 nt, Synthetic Construct
  source 1..19: mol_type = other RNA
cctgtaccgatcaatagtg

SEQ ID NO: 15660 - RNA, 19 nt, Synthetic Construct
  source 1..19: mol_type = other RNA
cctgtaccgatcaatagtg

SEQ ID NO: 15661 - RNA, 24 nt, Synthetic Construct
  source 1..24: mol_type = other RNA
tgcaaacatccccgactggaagct

SEQ ID NO: 15662 - RNA, 24 nt, Synthetic Construct
  source 1..24: mol_type = other RNA
tgcaaacatccccgactggaagct

SEQ ID NO: 15663 - RNA, 21 nt, Synthetic Construct
  source 1..21: mol_type = other RNA
ttcacagtggctaagttctga

SEQ ID NO: 15664 - RNA, 21 nt, Synthetic Construct
  source 1..21: mol_type = other RNA
taatactgcctggtaatgatg

SEQ ID NO: 15665 - RNA, 21 nt, Synthetic Construct
  source 1..21: mol_type = other RNA
taatactgcctggtaatgatg

SEQ ID NO: 15666 - RNA, 23 nt, Synthetic Construct
  source 1..23: mol_type = other RNA
tgaggtagtaggttgtatggtta

SEQ ID NO: 15667 - RNA, 23 nt, Synthetic Construct
  source 1..23: mol_type = other RNA
tgaggtagtaggttgtatggtta

SEQ ID NO: 15668 - RNA, 39 nt, Synthetic Construct; identical to SEQ ID NO: 4400
  source 1..39: mol_type = other RNA

SEQ ID NO: 15669 - RNA, 39 nt, Synthetic Construct; identical to SEQ ID NO: 4400
  source 1..39: mol_type = other RNA

SEQ ID NO: 15670 - RNA, 23 nt, Synthetic Construct
  source 1..23: mol_type = other RNA
tgaggtagtaggttgtgtggtct

SEQ ID NO: 15671 - RNA, 20 nt, Synthetic Construct
  source 1..20: mol_type = other RNA
tattgcactcgtcccggcct

SEQ ID NO: 15672 - RNA, 20 nt, Synthetic Construct
  source 1..20: mol_type = other RNA
tattgcactcgtcccggcct

SEQ ID NO: 15673 - RNA, 21 nt, Synthetic Construct
  source 1..21: mol_type = other RNA
cgcatcccctagggcattggt

SEQ ID NO: 15674 - RNA, 21 nt, Synthetic Construct
  source 1..21: mol_type = other RNA
cgcatcccctagggcattggt

SEQ ID NO: 15675 - RNA, 21 nt, Synthetic Construct
  source 1..21: mol_type = other RNA
agaggggcagagagcgagact

SEQ ID NO: 15676 - RNA, 21 nt, Synthetic Construct
  source 1..21: mol_type = other RNA
agaggggcagagagcgagact

SEQ ID NO: 15677 - RNA, 21 nt, Synthetic Construct
  source 1..21: mol_type = other RNA
aaaagctgggttgagagggcg

SEQ ID NO: 15678 - RNA, 22 nt, Synthetic Construct
  source 1..22: mol_type = other RNA
tattgcgcttgtcccggcctgt

SEQ ID NO: 15679 - RNA, 22 nt, Synthetic Construct
  source 1..22: mol_type = other RNA
tattgcgcttgtcccggcctgt

SEQ ID NO: 15680 - RNA, 23 nt, Synthetic Construct
  source 1..23: mol_type = other RNA
tggtaatacgacgtacttagtgt

SEQ ID NO: 15681 - RNA, 22 nt, Synthetic Construct
  source 1..22: mol_type = other RNA
cctctgggcccttcctccagtt

SEQ ID NO: 15682 - RNA, 17 nt, Synthetic Construct
  source 1..17: mol_type = other RNA
cgatctgtagctggtct

SEQ ID NO: 15683 - RNA, 22 nt, Synthetic Construct
  source 1..22: mol_type = other RNA
taactccttaagcgaatctcgc

SEQ ID NO: 15684 - RNA, 22 nt, Synthetic Construct
  source 1..22: mol_type = other RNA
taactccttaagcgaatctcgc

SEQ ID NO: 15685 - RNA, 23 nt, Synthetic Construct
  source 1..23: mol_type = other RNA
ggcagcattgtacagggctatgt

SEQ ID NO: 15686 - RNA, 23 nt, Synthetic Construct
  source 1..23: mol_type = other RNA
tgaggggcagagagcaagacttt

SEQ ID NO: 15687 - RNA, 23 nt, Synthetic Construct
  source 1..23: mol_type = other RNA
tgaggggcagagagcgagacttt

SEQ ID NO: 15688 - RNA, 22 nt, Synthetic Construct
  source 1..22: mol_type = other RNA
tgaggtagtaggttgtatggtt

SEQ ID NO: 15689 - RNA, 21 nt, Synthetic Construct
  source 1..21: mol_type = other RNA
ttatcagaatctccaggggta

SEQ ID NO: 15690 - RNA, 21 nt, Synthetic Construct
  source 1..21: mol_type = other RNA
ttatcagaatctccaggggta

SEQ ID NO: 15691 - RNA, 19 nt, Synthetic Construct
  source 1..19: mol_type = other RNA
tagcttatcagactgatgt

SEQ ID NO: 15692 - RNA, 27 nt, Synthetic Construct
  source 1..27: mol_type = other RNA
ccccccgctgctaaatttgactggcta

SEQ ID NO: 15693 - RNA, 22 nt, Synthetic Construct
  source 1..22: mol_type = other RNA
tgaggtagtagtatgtgctgtt

SEQ ID NO: 15694 - RNA, 28 nt, Synthetic Construct
  source 1..28: mol_type = other RNA
tctgcccagtgctctgaatgtcaaagtg

SEQ ID NO: 15695 - RNA, 29 nt, Synthetic Construct
  source 1..29: mol_type = other RNA
gtaatggcgggaactctggacagactgcc

SEQ ID NO: 15696 - RNA, 29 nt, Synthetic Construct
  source 1..29: mol_type = other RNA
gtaatggcgggaactctggacagactgcc

SEQ ID NO: 15697 - RNA, 27 nt, Synthetic Construct
  source 1..27: mol_type = other RNA
ccccctactgctaaatttgactggctt

SEQ ID NO: 15698 - RNA, 21 nt, Synthetic Construct
  source 1..21: mol_type = other RNA
gactatagaactttccccctc

SEQ ID NO: 15699 - RNA, 21 nt, Synthetic Construct
  source 1..21: mol_type = other RNA
gactatagaactttccccctc

SEQ ID NO: 15700 - RNA, 22 nt, Synthetic Construct
  source 1..22: mol_type = other RNA
tgaggtagtaggtcgtatagtt

SEQ ID NO: 15701 - RNA, 22 nt, Synthetic Construct
  source 1..22: mol_type = other RNA
tgaggtagtaggtcgtatagtt

SEQ ID NO: 15702 - RNA, 22 nt, Synthetic Construct
  source 1..22: mol_type = other RNA
tgtagtgtctcctactttatgg

SEQ ID NO: 15703 - RNA, 22 nt, Synthetic Construct
  source 1..22: mol_type = other RNA
tgtagtgtctcctactttatgg

SEQ ID NO: 15704 - RNA, 21 nt, Synthetic Construct
  source 1..21: mol_type = other RNA
tgaggtagtaggttgtgtagt

SEQ ID NO: 15705 - RNA, 39 nt, Synthetic Construct; identical to SEQ ID NO: 4400
  source 1..39: mol_type = other RNA

SEQ ID NO: 15706 - RNA, 39 nt, Synthetic Construct; identical to SEQ ID NO: 4400
  source 1..39: mol_type = other RNA

SEQ ID NO: 15707 - RNA, 26 nt, Synthetic Construct
  source 1..26: mol_type = other RNA
atttccccttggggttgtaggaccac

SEQ ID NO: 15708 - RNA, 26 nt, Synthetic Construct
  source 1..26: mol_type = other RNA
atttccccttggggttgtaggaccac

SEQ ID NO: 15709 - RNA, 22 nt, Synthetic Construct
  source 1..22: mol_type = other RNA
tgaggtagtaggttgtgtgatt

SEQ ID NO: 15710 - RNA, 22 nt, Synthetic Construct
  source 1..22: mol_type = other RNA
tgaggtagtaggttgtgtgatt

SEQ ID NO: 15711 - RNA, 20 nt, Synthetic Construct
  source 1..20: mol_type = other RNA
tccccggcatctccaccaaa

SEQ ID NO: 15712 - RNA, 20 nt, Synthetic Construct
  source 1..20: mol_type = other RNA
tccccggcatctccaccaaa

SEQ ID NO: 15713 - RNA, 21 nt, Synthetic Construct
  source 1..21: mol_type = other RNA
tcagtgcatcacagaactttg

SEQ ID NO: 15714 - RNA, 21 nt, Synthetic Construct
  source 1..21: mol_type = other RNA
tcagtgcatcacagaactttg

SEQ ID NO: 15715 - RNA, 22 nt, Synthetic Construct
  source 1..22: mol_type = other RNA
tggaatgtaaagaagtatgtaa

SEQ ID NO: 15716 - RNA, 22 nt, Synthetic Construct
  source 1..22: mol_type = other RNA
tggaatgtaaagaagtatgtaa

SEQ ID NO: 15717 - RNA, 23 nt, Synthetic Construct
  source 1..23: mol_type = other RNA
tggtagtacgacgtacttagtgt

SEQ ID NO: 15718 - RNA, 31 nt, Synthetic Construct; identical to SEQ ID NO: 1225
  source 1..31: mol_type = other RNA

SEQ ID NO: 15719 - RNA, 31 nt, Synthetic Construct; identical to SEQ ID NO: 1225
  source 1..31: mol_type = other RNA

SEQ ID NO: 15720 - RNA, 32 nt, Synthetic Construct; identical to SEQ ID NO: 4734
  source 1..32: mol_type = other RNA

SEQ ID NO: 15721 - RNA, 32 nt, Synthetic Construct; identical to SEQ ID NO: 4734
  source 1..32: mol_type = other RNA

SEQ ID NO: 15722 - RNA, 30 nt, Synthetic Construct; identical to SEQ ID NO: 1079
  source 1..30: mol_type = other RNA

SEQ ID NO: 15723 - RNA, 30 nt, Synthetic Construct; identical to SEQ ID NO: 1079
  source 1..30: mol_type = other RNA

SEQ ID NO: 15724 - RNA, 16 nt, Synthetic Construct
  source 1..16: mol_type = other RNA
tcagtagctcgaggaa

SEQ ID NO: 15725 - RNA, 16 nt, Synthetic Construct
  source 1..16: mol_type = other RNA
tcagtagctcgaggaa

SEQ ID NO: 15726 - RNA, 23 nt, Synthetic Construct
  source 1..23: mol_type = other RNA
acctgtactgagctgccccgagt

SEQ ID NO: 15727 - RNA, 22 nt, Synthetic Construct
  source 1..22: mol_type = other RNA
tgaggtagtagattgcatagtt

SEQ ID NO: 15728 - RNA, 22 nt, Synthetic Construct
  source 1..22: mol_type = other RNA
tgaggtagtagattgcatagtt

SEQ ID NO: 15729 - RNA, 20 nt, Synthetic Construct
  source 1..20: mol_type = other RNA
tccctgtcctccaggagctc

SEQ ID NO: 15730 - RNA, 20 nt, Synthetic Construct
  source 1..20: mol_type = other RNA
tccctgtcctccaggagctc

SEQ ID NO: 15731 - RNA, 22 nt, Synthetic Construct
  source 1..22: mol_type = other RNA
tgaggtagtagtttgtgctatt

SEQ ID NO: 15732 - RNA, 26 nt, Synthetic Construct
  source 1..26: mol_type = other RNA
gagcagctaataccgcatacgacctg

SEQ ID NO: 15733 - RNA, 26 nt, Synthetic Construct
  source 1..26: mol_type = other RNA
gagcagctaataccgcatacgacctg

SEQ ID NO: 15734 - RNA, 22 nt, Synthetic Construct
  source 1..22: mol_type = other RNA
caacggaatcccaaaagcagct

SEQ ID NO: 15735 - RNA, 22 nt, Synthetic Construct
  source 1..22: mol_type = other RNA
cataaagtagaaagcactacta

SEQ ID NO: 15736 - RNA, 22 nt, Synthetic Construct
  source 1..22: mol_type = other RNA
cataaagtagaaagcactacta

SEQ ID NO: 15737 - RNA, 22 nt, Synthetic Construct
  source 1..22: mol_type = other RNA
accacagggtagaaccacggaa

SEQ ID NO: 15738 - RNA, 23 nt, Synthetic Construct
  source 1..23: mol_type = other RNA
naaagtgctgttcgtgcaggtag

SEQ ID NO: 15739 - RNA, 23 nt, Synthetic Construct
  source 1..23: mol_type = other RNA
naaagtgctgttcgtgcaggtag

SEQ ID NO: 15740 - RNA, 23 nt, Synthetic Construct
  source 1..23: mol_type = other RNA
caaagtgctgttcgtgcaggtaa

SEQ ID NO: 15741 - RNA, 19 nt, Synthetic Construct
  source 1..19: mol_type = other RNA
tccccggcatctccaccat

SEQ ID NO: 15742 - RNA, 19 nt, Synthetic Construct
  source 1..19: mol_type = other RNA
tccccggcatctccaccat

SEQ ID NO: 15743 - RNA, 18 nt, Synthetic Construct
  source 1..18: mol_type = other RNA
accaaggggtcgtgggtt

SEQ ID NO: 15744 - RNA, 18 nt, Synthetic Construct
  source 1..18: mol_type = other RNA
accaaggggtcgtgggtt

SEQ ID NO: 15745 - RNA, 23 nt, Synthetic Construct
  source 1..23: mol_type = other RNA
tgaggggcagagagcgagacttg

SEQ ID NO: 15746 - RNA, 21 nt, Synthetic Construct
  source 1..21: mol_type = other RNA
tgaggggcagagagcgggact

SEQ ID NO: 15747 - RNA, 22 nt, Synthetic Construct
  source 1..22: mol_type = other RNA
tgagaactgagttccatgggtt

SEQ ID NO: 15748 - RNA, 22 nt, Synthetic Construct
  source 1..22: mol_type = other RNA
tagcttatcagactgatgttga

SEQ ID NO: 15749 - RNA, 22 nt, Synthetic Construct
  source 1..22: mol_type = other RNA
tagcttatcagactgatgttga

SEQ ID NO: 15750 - RNA, 15 nt, Synthetic Construct
  source 1..15: mol_type = other RNA
gctttgatccggaga

SEQ ID NO: 15751 - RNA, 21 nt, Synthetic Construct
  source 1..21: mol_type = other RNA
tgtgactggttgaccagaggg

SEQ ID NO: 15752 - RNA, 22 nt, Synthetic Construct
  source 1..22: mol_type = other RNA
tgtcaactggttgttgggaggg

SEQ ID NO: 15753 - RNA, 22 nt, Synthetic Construct
  source 1..22: mol_type = other RNA
tgtcaactggttgttgggaggg

SEQ ID NO: 15754 - RNA, 42 nt, Synthetic Construct; identical to SEQ ID NO: 8009
  source 1..42: mol_type = other RNA

SEQ ID NO: 15755 - RNA, 21 nt, Synthetic Construct
  source 1..21: mol_type = other RNA
taaggtagtaggttgtatagt

SEQ ID NO: 15756 - RNA, 21 nt, Synthetic Construct
  source 1..21: mol_type = other RNA
taaggtagtaggttgtatagt

SEQ ID NO: 15757 - RNA, 15 nt, Synthetic Construct
  source 1..15: mol_type = other RNA
tgcaagtcgaacggt

SEQ ID NO: 15758 - RNA, 27 nt, Synthetic Construct
  source 1..27: mol_type = other RNA
ccccccattgctaaatttgactggctt

SEQ ID NO: 15759 - RNA, 18 nt, Synthetic Construct
  source 1..18: mol_type = other RNA
accggaggaaggtgggga

SEQ ID NO: 15760 - RNA, 22 nt, Synthetic Construct
  source 1..22: mol_type = other RNA
tcccgtactgagctgccccgag

SEQ ID NO: 15761 - RNA, 22 nt, Synthetic Construct
  source 1..22: mol_type = other RNA
tcccgtactgagctgccccgag

SEQ ID NO: 15762 - RNA, 17 nt, Synthetic Construct
  source 1..17: mol_type = other RNA
cagtcaggatgttggct

SEQ ID NO: 15763 - RNA, 21 nt, Synthetic Construct
  source 1..21: mol_type = other RNA
ttataatacaacctgataagt

SEQ ID NO: 15764 - RNA, 21 nt, Synthetic Construct
  source 1..21: mol_type = other RNA
ttataatacaacctgataagt

SEQ ID NO: 15765 - RNA, 20 nt, Synthetic Construct
  source 1..20: mol_type = other RNA
gctattgacgaccgtaccgc

SEQ ID NO: 15766 - RNA, 20 nt, Synthetic Construct
  source 1..20: mol_type = other RNA
gctattgacgaccgtaccgc

SEQ ID NO: 15767 - RNA, 18 nt, Synthetic Construct
  source 1..18: mol_type = other RNA
acagtcaggatgttggct

SEQ ID NO: 15768 - RNA, 20 nt, Synthetic Construct
  source 1..20: mol_type = other RNA
gggttcgattccggagaggg

SEQ ID NO: 15769 - RNA, 20 nt, Synthetic Construct
  source 1..20: mol_type = other RNA
gggttcgattccggagaggg

SEQ ID NO: 15770 - RNA, 21 nt, Synthetic Construct
  source 1..21: mol_type = other RNA
ctagactgaggctccttgagg

SEQ ID NO: 15771 - RNA, 20 nt, Synthetic Construct
  source 1..20: mol_type = other RNA
tgaggtagtaggttgtgtga

SEQ ID NO: 15772 - RNA, 20 nt, Synthetic Construct
  source 1..20: mol_type = other RNA
tgaggtagtaggttgtgtga

SEQ ID NO: 15773 - RNA, 30 nt, Synthetic Construct; identical to SEQ ID NO: 751
  source 1..30: mol_type = other RNA

SEQ ID NO: 15774 - RNA, 22 nt, Synthetic Construct
  source 1..22: mol_type = other RNA
tgaggtaataggttgtgtggtt

SEQ ID NO: 15775 - RNA, 16 nt, Synthetic Construct
  source 1..16: mol_type = other RNA
tgcaagtcgaacggta

SEQ ID NO: 15776 - RNA, 23 nt, Synthetic Construct
  source 1..23: mol_type = other RNA
tgaggaagtaggttgtgtggttt

SEQ ID NO: 15777 - RNA, 23 nt, Synthetic Construct
  source 1..23: mol_type = other RNA
tgaggaagtaggttgtgtggttt

SEQ ID NO: 15778 - RNA, 22 nt, Synthetic Construct
  source 1..22: mol_type = other RNA
cattgcacttgtcccggtctga

SEQ ID NO: 15779 - RNA, 20 nt, Synthetic Construct
  source 1..20: mol_type = other RNA
agaggtagtaggttgtgtgg

SEQ ID NO: 15780 - RNA, 15 nt, Synthetic Construct
  source 1..15: mol_type = other RNA
accgcttttgtcagg

SEQ ID NO: 15781 - RNA, 22 nt, Synthetic Construct
  source 1..22: mol_type = other RNA
attatggtttgcctgggactga

SEQ ID NO: 15782 - RNA, 22 nt, Synthetic Construct
  source 1..22: mol_type = other RNA
attatggtttgcctgggactga

SEQ ID NO: 15783 - RNA, 24 nt, Synthetic Construct
  source 1..24: mol_type = other RNA
gaaagattaaggcaagaggttagc

SEQ ID NO: 15784 - RNA, 21 nt, Synthetic Construct
  source 1..21: mol_type = other RNA
cgtaccgtgggtaataatgcg

SEQ ID NO: 15785 - RNA, 24 nt, Synthetic Construct
  source 1..24: mol_type = other RNA
tttccccttggggttgtaggacca

SEQ ID NO: 15786 - RNA, 24 nt, Synthetic Construct
  source 1..24: mol_type = other RNA
tttccccttggggttgtaggacca

SEQ ID NO: 15787 - RNA, 18 nt, Synthetic Construct
  source 1..18: mol_type = other RNA
tgcgtagatatgcggagg

SEQ ID NO: 15788 - RNA, 18 nt, Synthetic Construct
  source 1..18: mol_type = other RNA
tgcgtagatatgcggagg

SEQ ID NO: 15789 - RNA, 22 nt, Synthetic Construct
  source 1..22: mol_type = other RNA
tgaggtagtagtctgtgctgtt

SEQ ID NO: 15790 - RNA, 22 nt, Synthetic Construct
  source 1..22: mol_type = other RNA
tgaggtagtagtctgtgctgtt

SEQ ID NO: 15791 - RNA, 17 nt, Synthetic Construct
  source 1..17: mol_type = other RNA
tcagtagctcgaggaaa

SEQ ID NO: 15792 - RNA, 17 nt, Synthetic Construct
  source 1..17: mol_type = other RNA
tcagtagctcgaggaaa

SEQ ID NO: 15793 - RNA, 21 nt, Synthetic Construct
  source 1..21: mol_type = other RNA
ctagactggagctccttgagg

SEQ ID NO: 15794 - RNA, 21 nt, Synthetic Construct
  source 1..21: mol_type = other RNA
ctagactggagctccttgagg

SEQ ID NO: 15795 - RNA, 22 nt, Synthetic Construct
  source 1..22: mol_type = other RNA
tggaatgtaaagaagtatgcat

SEQ ID NO: 15796 - RNA, 22 nt, Synthetic Construct
  source 1..22: mol_type = other RNA
tggaatgtaaagaagtatgcat

SEQ ID NO: 15797 - RNA, 21 nt, Synthetic Construct
  source 1..21: mol_type = other RNA
tgaggtagtagattgtgtagt

SEQ ID NO: 15798 - RNA, 16 nt, Synthetic Construct
  source 1..16: mol_type = other RNA
tgttcggaagattttc

SEQ ID NO: 15799 - RNA, 16 nt, Synthetic Construct
  source 1..16: mol_type = other RNA
tgttcggaagattttc

SEQ ID NO: 15800 - RNA, 24 nt, Synthetic Construct
  source 1..24: mol_type = other RNA
tgtcagtttgtcaaataccccaaa

SEQ ID NO: 15801 - RNA, 24 nt, Synthetic Construct
  source 1..24: mol_type = other RNA
tgtcagtttgtcaaataccccaaa

SEQ ID NO: 15802 - RNA, 22 nt, Synthetic Construct
  source 1..22: mol_type = other RNA
aggggcagagagcgagactttt

SEQ ID NO: 15803 - RNA, 22 nt, Synthetic Construct
  source 1..22: mol_type = other RNA
aggggcagagagcgagactttt

SEQ ID NO: 15804 - RNA, 21 nt, Synthetic Construct
  source 1..21: mol_type = other RNA
ctttgttcgattccgttgagt

SEQ ID NO: 15805 - RNA, 21 nt, Synthetic Construct
  source 1..21: mol_type = other RNA
ctttgttcgattccgttgagt

SEQ ID NO: 15806 - RNA, 22 nt, Synthetic Construct
  source 1..22: mol_type = other RNA
tgaggtagtaagttgtatagtt

SEQ ID NO: 15807 - RNA, 22 nt, Synthetic Construct
  source 1..22: mol_type = other RNA
tgaggtagtaagttgtatagtt

SEQ ID NO: 15808 - RNA, 22 nt, Synthetic Construct
  source 1..22: mol_type = other RNA
tgtgcaaatctatgcaaaactg

SEQ ID NO: 15809 - RNA, 22 nt, Synthetic Construct
  source 1..22: mol_type = other RNA
tgtgcaaatctatgcaaaactg

SEQ ID NO: 15810 - RNA, 21 nt, Synthetic Construct
  source 1..21: mol_type = other RNA
tgaggtagtaggttgtgaggt

SEQ ID NO: 15811 - RNA, 21 nt, Synthetic Construct
  source 1..21: mol_type = other RNA
tgaggtagtaggttgtgaggt

SEQ ID NO: 15812 - RNA, 21 nt, Synthetic Construct
  source 1..21: mol_type = other RNA
ggaggagttcgaaggtacgct

SEQ ID NO: 15813 - RNA, 21 nt, Synthetic Construct
  source 1..21: mol_type = other RNA
ggaggagttcgaaggtacgct

SEQ ID NO: 15814 - RNA, 36 nt, Synthetic Construct
  source 1..36: mol_type = other RNA
tcattggtcgtggttgtagtccgtgcgagaatacca

SEQ ID NO: 15815 - RNA, 36 nt, Synthetic Construct; identical to SEQ ID NO: 15814
  source 1..36: mol_type = other RNA

SEQ ID NO: 15816 - RNA, 21 nt, Synthetic Construct
  source 1..21: mol_type = other RNA
agtcagtttgtcaaatacccc

SEQ ID NO: 15817 - RNA, 33 nt, Synthetic Construct; identical to SEQ ID NO: 2479
  source 1..33: mol_type = other RNA

SEQ ID NO: 15818 - RNA, 21 nt, Synthetic Construct
  source 1..21: mol_type = other RNA
taactccttaagcaatctcgc

SEQ ID NO: 15819 - RNA, 21 nt, Synthetic Construct
  source 1..21: mol_type = other RNA
taactccttaagcaatctcgc

SEQ ID NO: 15820 - RNA, 23 nt, Synthetic Construct
  source 1..23: mol_type = other RNA
tccctggtggtctagtggttagg

SEQ ID NO: 15821 - RNA, 23 nt, Synthetic Construct
  source 1..23: mol_type = other RNA
tccctggtggtctagtggttagg

SEQ ID NO: 15822 - RNA, 22 nt, Synthetic Construct
  source 1..22: mol_type = other RNA
gaatgttgctcggtgaacccct

SEQ ID NO: 15823 - RNA, 22 nt, Synthetic Construct
  source 1..22: mol_type = other RNA
gaatgttgctcggtgaacccct

SEQ ID NO: 15824 - RNA, 35 nt, Synthetic Construct; identical to SEQ ID NO: 2514
  source 1..35: mol_type = other RNA

SEQ ID NO: 15825 - RNA, 22 nt, Synthetic Construct
  source 1..22: mol_type = other RNA
taggtagtttcctgttgttggg

SEQ ID NO: 15826 - RNA, 22 nt, Synthetic Construct
  source 1..22: mol_type = other RNA
taggtagtttcctgttgttggg

SEQ ID NO: 15827 - RNA, 22 nt, Synthetic Construct
  source 1..22: mol_type = other RNA
tgaggtagtaggttgcgtggtt

SEQ ID NO: 15828 - RNA, 22 nt, Synthetic Construct
  source 1..22: mol_type = other RNA
tgaggtagtaggttgcgtggtt

SEQ ID NO: 15829 - RNA, 31 nt, Synthetic Construct; identical to SEQ ID NO: 774
  source 1..31: mol_type = other RNA

SEQ ID NO: 15830 - RNA, 31 nt, Synthetic Construct; identical to SEQ ID NO: 774
  source 1..31: mol_type = other RNA

SEQ ID NO: 15831 - RNA, 22 nt, Synthetic Construct
  source 1..22: mol_type = other RNA
tgaggtagtaggttgtgtggtc

SEQ ID NO: 15832 - RNA, 22 nt, Synthetic Construct
  source 1..22: mol_type = other RNA
tgaggtagtaggttgtgtggtc

SEQ ID NO: 15833 - RNA, 19 nt, Synthetic Construct
  source 1..19: mol_type = other RNA
tgaggtagtaggttgtgtg

SEQ ID NO: 15834 - RNA, 19 nt, Synthetic Construct
  source 1..19: mol_type = other RNA
tgaggtagtaggttgtgtg

SEQ ID NO: 15835 - RNA, 20 nt, Synthetic Construct
  source 1..20: mol_type = other RNA
cattgcacttgtctcggtct

SEQ ID NO: 15836 - RNA, 20 nt, Synthetic Construct
  source 1..20: mol_type = other RNA
cattgcacttgtctcggtct

SEQ ID NO: 15837 - RNA, 22 nt, Synthetic Construct
  source 1..22: mol_type = other RNA
tcgtaccgtgagtaacaatgcg

SEQ ID NO: 15838 - RNA, 23 nt, Synthetic Construct
  source 1..23: mol_type = other RNA
tgtgcaaatctatgcaaaactga

SEQ ID NO: 15839 - RNA, 23 nt, Synthetic Construct
  source 1..23: mol_type = other RNA
tgtgcaaatctatgcaaaactga

SEQ ID NO: 15840 - RNA, 23 nt, Synthetic Construct
  source 1..23: mol_type = other RNA
aacggaatcccaaaagcagctgt

SEQ ID NO: 15841 - RNA, 16 nt, Synthetic Construct
  source 1..16: mol_type = other RNA
cagtcaggatgttggc

SEQ ID NO: 15842 - RNA, 16 nt, Synthetic Construct
  source 1..16: mol_type = other RNA
cagtcaggatgttggc

SEQ ID NO: 15843 - RNA, 18 nt, Synthetic Construct
  source 1..18: mol_type = other RNA
atcgctagtaatcgcgga

SEQ ID NO: 15844 - RNA, 18 nt, Synthetic Construct
  source 1..18: mol_type = other RNA
atcgctagtaatcgcgga

SEQ ID NO: 15845 - RNA, 16 nt, Synthetic Construct
  source 1..16: mol_type = other RNA
cccaaaggtcgtcggt

SEQ ID NO: 15846 - RNA, 16 nt, Synthetic Construct
  source 1..16: mol_type = other RNA
cccaaaggtcgtcggt

SEQ ID NO: 15847 - RNA, 22 nt, Synthetic Construct
  source 1..22: mol_type = other RNA
tagcagcacgtaaatattagcg

SEQ ID NO: 15848 - RNA, 22 nt, Synthetic Construct
  source 1..22: mol_type = other RNA
tagcagcacgtaaatattagcg

SEQ ID NO: 15849 - RNA, 16 nt, Synthetic Construct
  source 1..16: mol_type = other RNA
gtctacggccatacca

SEQ ID NO: 15850 - RNA, 16 nt, Synthetic Construct
  source 1..16: mol_type = other RNA
gtctacggccatacca

SEQ ID NO: 15851 - RNA, 21 nt, Synthetic Construct
  source 1..21: mol_type = other RNA
tgaggtagtagcttgtgctgt

SEQ ID NO: 15852 - RNA, 21 nt, Synthetic Construct
  source 1..21: mol_type = other RNA
tgaggtagtagcttgtgctgt

SEQ ID NO: 15853 - RNA, 25 nt, Synthetic Construct
  source 1..25: mol_type = other RNA
agctcactgatcgagtcgtcctgcg

SEQ ID NO: 15854 - RNA, 21 nt, Synthetic Construct
  source 1..21: mol_type = other RNA
tggagtgtgacaacggtgttt

SEQ ID NO: 15855 - RNA, 21 nt, Synthetic Construct
  source 1..21: mol_type = other RNA
tggagtgtgacaacggtgttt

SEQ ID NO: 15856 - RNA, 22 nt, Synthetic Construct
  source 1..22: mol_type = other RNA
ttcgagtaatccaggataggct

SEQ ID NO: 15857 - RNA, 15 nt, Synthetic Construct
  source 1..15: mol_type = other RNA
tcagtagctcgagga

SEQ ID NO: 15858 - RNA, 15 nt, Synthetic Construct
  source 1..15: mol_type = other RNA
tcagtagctcgagga

SEQ ID NO: 15859 - RNA, 31 nt, Synthetic Construct; identical to SEQ ID NO: 2263
  source 1..31: mol_type = other RNA

SEQ ID NO: 15860 - RNA, 31 nt, Synthetic Construct; identical to SEQ ID NO: 2263
  source 1..31: mol_type = other RNA

SEQ ID NO: 15861 - RNA, 19 nt, Synthetic Construct
  source 1..19: mol_type = other RNA
ccgtgttcggaagattttc

SEQ ID NO: 15862 - RNA, 19 nt, Synthetic Construct
  source 1..19: mol_type = other RNA
ccgtgttcggaagattttc

SEQ ID NO: 15863 - RNA, 22 nt, Synthetic Construct
  source 1..22: mol_type = other RNA
cgaggtagtaggttgtatagtt

SEQ ID NO: 15864 - RNA, 22 nt, Synthetic Construct
  source 1..22: mol_type = other RNA
cgaggtagtaggttgtatagtt

SEQ ID NO: 15865 - RNA, 16 nt, Synthetic Construct
  source 1..16: mol_type = other RNA
ggaattgacggaaggg

SEQ ID NO: 15866 - RNA, 16 nt, Synthetic Construct
  source 1..16: mol_type = other RNA
ggaattgacggaaggg

SEQ ID NO: 15867 - RNA, 23 nt, Synthetic Construct
  source 1..23: mol_type = other RNA
tcctgtactgggctgccccgaga

SEQ ID NO: 15868 - RNA, 23 nt, Synthetic Construct
  source 1..23: mol_type = other RNA
tcctgtactgggctgccccgaga

SEQ ID NO: 15869 - RNA, 21 nt, Synthetic Construct
  source 1..21: mol_type = other RNA
tgaggtagtagattgtataga

SEQ ID NO: 15870 - RNA, 21 nt, Synthetic Construct
  source 1..21: mol_type = other RNA
cgtaccgtgagtaataatgcg

SEQ ID NO: 15871 - RNA, 22 nt, Synthetic Construct
  source 1..22: mol_type = other RNA
tgaggtagtaggtcgtgtggtt

SEQ ID NO: 15872 - RNA, 22 nt, Synthetic Construct
  source 1..22: mol_type = other RNA
tgaggtagtaggtcgtgtggtt

SEQ ID NO: 15873 - RNA, 15 nt, Synthetic Construct
  source 1..15: mol_type = other RNA
gttcggaagattttc

SEQ ID NO: 15874 - RNA, 21 nt, Synthetic Construct
  source 1..21: mol_type = other RNA
ggaggtagtaggttgtgtggt

SEQ ID NO: 15875 - RNA, 21 nt, Synthetic Construct
  source 1..21: mol_type = other RNA
tctcccaacccttgtaccagt

SEQ ID NO: 15876 - RNA, 21 nt, Synthetic Construct
  source 1..21: mol_type = other RNA
tctcccaacccttgtaccagt

SEQ ID NO: 15877 - RNA, 20 nt, Synthetic Construct
  source 1..20: mol_type = other RNA
tacagtatagatgatgtact

SEQ ID NO: 15878 - RNA, 20 nt, Synthetic Construct
  source 1..20: mol_type = other RNA
tacagtatagatgatgtact

SEQ ID NO: 15879 - RNA, 19 nt, Synthetic Construct
  source 1..19: mol_type = other RNA
cagcactctgcaaagacga

SEQ ID NO: 15880 - RNA, 23 nt, Synthetic Construct
  source 1..23: mol_type = other RNA
tggtaatatgacgtacttagtgt

SEQ ID NO: 15881 - RNA, 21 nt, Synthetic Construct
  source 1..21: mol_type = other RNA
atcgggaatgtcgtgtccgcc

SEQ ID NO: 15882 - RNA, 21 nt, Synthetic Construct
  source 1..21: mol_type = other RNA
atcgggaatgtcgtgtccgcc

SEQ ID NO: 15883 - RNA, 22 nt, Synthetic Construct
  source 1..22: mol_type = other RNA
tctttgttcgattccgttgagt

SEQ ID NO: 15884 - RNA, 22 nt, Synthetic Construct
  source 1..22: mol_type = other RNA
tctttgttcgattccgttgagt

SEQ ID NO: 15885 - RNA, 22 nt, Synthetic Construct
  source 1..22: mol_type = other RNA
tagcttatcagactgatgttga

SEQ ID NO: 15886 - RNA, 23 nt, Synthetic Construct
  source 1..23: mol_type = other RNA
ttggtccccttcaaccagctgtt

SEQ ID NO: 15887 - RNA, 23 nt, Synthetic Construct
  source 1..23: mol_type = other RNA
ttggtccccttcaaccagctgtt

SEQ ID NO: 15888 - RNA, 20 nt, Synthetic Construct
  source 1..20: mol_type = other RNA
tgaggtagtaggttgtgagg

SEQ ID NO: 15889 - RNA, 22 nt, Synthetic Construct
  source 1..22: mol_type = other RNA
ctttgttcgattccgttgagta

SEQ ID NO: 15890 - RNA, 19 nt, Synthetic Construct
  source 1..19: mol_type = other RNA
gcgaaattccttgtcgggt

SEQ ID NO: 15891 - RNA, 19 nt, Synthetic Construct
  source 1..19: mol_type = other RNA
gcgaaattccttgtcgggt

SEQ ID NO: 15892 - RNA, 27 nt, Synthetic Construct
  source 1..27: mol_type = other RNA
ccccccactgccaaatttgactggctt

SEQ ID NO: 15893 - RNA, 34 nt, Synthetic Construct; identical to SEQ ID NO: 2553
  source 1..34: mol_type = other RNA

SEQ ID NO: 15894 - RNA, 22 nt, Synthetic Construct
  source 1..22: mol_type = other RNA
ttcaagtaattcaggataggta

SEQ ID NO: 15895 - RNA, 27 nt, Synthetic Construct
  source 1..27: mol_type = other RNA
gcgggcgtagctcaggggtagagcgca

SEQ ID NO: 15896 - RNA, 22 nt, Synthetic Construct
  source 1..22: mol_type = other RNA
tcgaaccgtgagtaataatgcg

SEQ ID NO: 15897 - RNA, 22 nt, Synthetic Construct
  source 1..22: mol_type = other RNA
tcgaaccgtgagtaataatgcg

SEQ ID NO: 15898 - RNA, 25 nt, Synthetic Construct
  source 1..25: mol_type = other RNA
ctgaggatatgagatcgagacgaca

SEQ ID NO: 15899 - RNA, 22 nt, Synthetic Construct
  source 1..22: mol_type = other RNA
cgaggtagtagtttgtgctgtt

SEQ ID NO: 15900 - RNA, 22 nt, Synthetic Construct
  source 1..22: mol_type = other RNA
cgaggtagtagtttgtgctgtt

SEQ ID NO: 15901 - RNA, 19 nt, Synthetic Construct
  source 1..19: mol_type = other RNA
ctgatcgagtcgtcctgcg

SEQ ID NO: 15902 - RNA, 27 nt, Synthetic Construct
  source 1..27: mol_type = other RNA
ccccccactgctaaatttgaccggctt

SEQ ID NO: 15903 - RNA, 22 nt, Synthetic Construct
  source 1..22: mol_type = other RNA
caaagtgctgttcgtgcaggta

SEQ ID NO: 15904 - RNA, 20 nt, Synthetic Construct
  source 1..20: mol_type = other RNA
ccacctcccctgcaaacgtc

SEQ ID NO: 15905 - RNA, 30 nt, Synthetic Construct; identical to SEQ ID NO: 5879
  source 1..30: mol_type = other RNA

SEQ ID NO: 15906 - RNA, 30 nt, Synthetic Construct; identical to SEQ ID NO: 5879
  source 1..30: mol_type = other RNA

SEQ ID NO: 15907 - RNA, 32 nt, Synthetic Construct; identical to SEQ ID NO: 4279
  source 1..32: mol_type = other RNA

SEQ ID NO: 15908 - RNA, 32 nt, Synthetic Construct; identical to SEQ ID NO: 4279
  source 1..32: mol_type = other RNA

SEQ ID NO: 15909 - RNA, 26 nt, Synthetic Construct
  source 1..26: mol_type = other RNA
cgactcttagcggtggatcactcggc

SEQ ID NO: 15910 - RNA, 31 nt, Synthetic Construct
  source 1..31: mol_type = other RNA
tcccatatggtctagcggttaggattcctgg

SEQ ID NO: 15911 - RNA, 31 nt, Synthetic Construct; identical to SEQ ID NO: 15910
  source 1..31: mol_type = other RNA

SEQ ID NO: 15912 - RNA, 21 nt, Synthetic Construct
  source 1..21: mol_type = other RNA
tggagagtgacaatggtgttt

SEQ ID NO: 15913 - RNA, 21 nt, Synthetic Construct
  source 1..21: mol_type = other RNA
tggagagtgacaatggtgttt

SEQ ID NO: 15914 - RNA, 22 nt, Synthetic Construct
  source 1..22: mol_type = other RNA
tgaggtggtaggttgtgtggtt

SEQ ID NO: 15915 - RNA, 22 nt, Synthetic Construct
  source 1..22: mol_type = other RNA
tgaggtggtaggttgtgtggtt

SEQ ID NO: 15916 - RNA, 16 nt, Synthetic Construct
  source 1..16: mol_type = other RNA
gcagacgaagtgagtg

SEQ ID NO: 15917 - RNA, 16 nt, Synthetic Construct
  source 1..16: mol_type = other RNA
gcagacgaagtgagtg

SEQ ID NO: 15918 - RNA, 24 nt, Synthetic Construct
  source 1..24: mol_type = other RNA
tgtaaacatccccgactggaagcc

SEQ ID NO: 15919 - RNA, 22 nt, Synthetic Construct
  source 1..22: mol_type = other RNA
tgaggtagtaggttgtataatt

SEQ ID NO: 15920 - RNA, 22 nt, Synthetic Construct
  source 1..22: mol_type = other RNA
tgaggtagtaggttgtataatt

SEQ ID NO: 15921 - RNA, 22 nt, Synthetic Construct
  source 1..22: mol_type = other RNA
tgaggtagtagattgtatagat

SEQ ID NO: 15922 - RNA, 22 nt, Synthetic Construct
  source 1..22: mol_type = other RNA
tgaggtagtagattgtatagat

SEQ ID NO: 15923 - RNA, 17 nt, Synthetic Construct
  source 1..17: mol_type = other RNA
tctacagtccgacgatc

SEQ ID NO: 15924 - RNA, 17 nt, Synthetic Construct
  source 1..17: mol_type = other RNA
tctacagtccgacgatc

SEQ ID NO: 15925 - RNA, 23 nt, Synthetic Construct
  source 1..23: mol_type = other RNA
gcctgtactgagctgccccgagt

SEQ ID NO: 15926 - RNA, 23 nt, Synthetic Construct
  source 1..23: mol_type = other RNA
tgaggggcagggagcgagacttt

SEQ ID NO: 15927 - RNA, 18 nt, Synthetic Construct
  source 1..18: mol_type = other RNA
gttaaaaagctcgtagtt

SEQ ID NO: 15928 - RNA, 18 nt, Synthetic Construct
  source 1..18: mol_type = other RNA
gttaaaaagctcgtagtt

SEQ ID NO: 15929 - RNA, 18 nt, Synthetic Construct
  source 1..18: mol_type = other RNA
atggccgggacagagggc

SEQ ID NO: 15930 - RNA, 21 nt, Synthetic Construct
  source 1..21: mol_type = other RNA
tcctgtactgagccgccccga

SEQ ID NO: 15931 - RNA, 21 nt, Synthetic Construct
  source 1..21: mol_type = other RNA
tcctgtactgagccgccccga

SEQ ID NO: 15932 - RNA, 23 nt, Synthetic Construct
  source 1..23: mol_type = other RNA
tgagaggcagagagcgagacttt

SEQ ID NO: 15933 - RNA, 23 nt, Synthetic Construct
  source 1..23: mol_type = other RNA
tgagaggcagagagcgagacttt

SEQ ID NO: 15934 - RNA, 23 nt, Synthetic Construct
  source 1..23: mol_type = other RNA
agcagcactgtacagggctatga

SEQ ID NO: 15935 - RNA, 19 nt, Synthetic Construct
  source 1..19: mol_type = other RNA
aacagtcaggatgttggct

SEQ ID NO: 15936 - RNA, 19 nt, Synthetic Construct
  source 1..19: mol_type = other RNA
aacagtcaggatgttggct

SEQ ID NO: 15937 - RNA, 21 nt, Synthetic Construct
  source 1..21: mol_type = other RNA
tcccagtaaacggcggccgta

SEQ ID NO: 15938 - RNA, 21 nt, Synthetic Construct
  source 1..21: mol_type = other RNA
tcccagtaaacggcggccgta

SEQ ID NO: 15939 - RNA, 17 nt, Synthetic Construct
  source 1..17: mol_type = other RNA
tgccagcagccgcggta

SEQ ID NO: 15940 - RNA, 17 nt, Synthetic Construct
  source 1..17: mol_type = other RNA
tgccagcagccgcggta

SEQ ID NO: 15941 - RNA, 23 nt, Synthetic Construct
  source 1..23: mol_type = other RNA
tcccgtactgagctgccccgagt

SEQ ID NO: 15942 - RNA, 23 nt, Synthetic Construct
  source 1..23: mol_type = other RNA
tcccgtactgagctgccccgagt

SEQ ID NO: 15943 - RNA, 22 nt, Synthetic Construct
  source 1..22: mol_type = other RNA
gtcagtttgtcaaataccccat

SEQ ID NO: 15944 - RNA, 21 nt, Synthetic Construct
  source 1..21: mol_type = other RNA
taactccttaagcgatctcgc

SEQ ID NO: 15945 - RNA, 25 nt, Synthetic Construct
  source 1..25: mol_type = other RNA
agctcactgatcgagtcgtcctgcg

SEQ ID NO: 15946 - RNA, 25 nt, Synthetic Construct
  source 1..25: mol_type = other RNA
agctcactgatcgagtcgtcctgcg

SEQ ID NO: 15947 - RNA, 22 nt, Synthetic Construct
  source 1..22: mol_type = other RNA
tggaatgtagagaagtatgtat

SEQ ID NO: 15948 - RNA, 22 nt, Synthetic Construct
  source 1..22: mol_type = other RNA
tggaatgtagagaagtatgtat

SEQ ID NO: 15949 - RNA, 20 nt, Synthetic Construct
  source 1..20: mol_type = other RNA
caaagaattctccttttggg

SEQ ID NO: 15950 - RNA, 20 nt, Synthetic Construct
  source 1..20: mol_type = other RNA
caaagaattctccttttggg

SEQ ID NO: 15951 - RNA, 21 nt, Synthetic Construct
  source 1..21: mol_type = other RNA
tgtagtgtttcctactttatg

SEQ ID NO: 15952 - RNA, 22 nt, Synthetic Construct
  source 1..22: mol_type = other RNA
tgaggtagtagtttgtgatgtt

SEQ ID NO: 15953 - RNA, 24 nt, Synthetic Construct
  source 1..24: mol_type = other RNA
tcagcccgtgttcggaagattttc

SEQ ID NO: 15954 - RNA, 24 nt, Synthetic Construct
  source 1..24: mol_type = other RNA
tcagcccgtgttcggaagattttc

SEQ ID NO: 15955 - RNA, 23 nt, Synthetic Construct
  source 1..23: mol_type = other RNA
tggaatgtaaagaagtatgtata

SEQ ID NO: 15956 - RNA, 23 nt, Synthetic Construct
  source 1..23: mol_type = other RNA
tggaatgtaaagaagtatgtata

SEQ ID NO: 15957 - RNA, 22 nt, Synthetic Construct
  source 1..22: mol_type = other RNA
tgaggtagtagtttgtgcggtt

SEQ ID NO: 15958 - RNA, 19 nt, Synthetic Construct
  source 1..19: mol_type = other RNA
tagcagcacgtaaatattg

SEQ ID NO: 15959 - RNA, 23 nt, Synthetic Construct
  source 1..23: mol_type = other RNA
tgaggggcagagagcgaggcttt

SEQ ID NO: 15960 - RNA, 23 nt, Synthetic Construct
  source 1..23: mol_type = other RNA
tccagtactgagctgccccgaga

SEQ ID NO: 15961 - RNA, 23 nt, Synthetic Construct
  source 1..23: mol_type = other RNA
tccagtactgagctgccccgaga

SEQ ID NO: 15962 - RNA, 23 nt, Synthetic Construct
  source 1..23: mol_type = other RNA
cgctcacggaaagagaatgaagc

SEQ ID NO: 15963 - RNA, 23 nt, Synthetic Construct
  source 1..23: mol_type = other RNA
cgctcacggaaagagaatgaagc

SEQ ID NO: 15964 - RNA, 23 nt, Synthetic Construct
  source 1..23: mol_type = other RNA
agcagcattgtacagggctatgg

SEQ ID NO: 15965 - RNA, 23 nt, Synthetic Construct
  source 1..23: mol_type = other RNA
agcagcattgtacagggctatgg

SEQ ID NO: 15966 - RNA, 22 nt, Synthetic Construct
  source 1..22: mol_type = other RNA
ggaggtagtaggttgtgtggtt

SEQ ID NO: 15967 - RNA, 22 nt, Synthetic Construct
  source 1..22: mol_type = other RNA
ggaggtagtaggttgtgtggtt

SEQ ID NO: 15968 - RNA, 18 nt, Synthetic Construct
  source 1..18: mol_type = other RNA
aagcggtggatgatgtgg

SEQ ID NO: 15969 - RNA, 18 nt, Synthetic Construct
  source 1..18: mol_type = other RNA
aagcggtggatgatgtgg

SEQ ID NO: 15970 - RNA, 25 nt, Synthetic Construct
  source 1..25: mol_type = other RNA
tcgaggatatgagatcgagacgaca

SEQ ID NO: 15971 - RNA, 15 nt, Synthetic Construct
  source 1..15: mol_type = other RNA
gtccggcccgaggca

SEQ ID NO: 15972 - RNA, 15 nt, Synthetic Construct
  source 1..15: mol_type = other RNA
gtccggcccgaggca

SEQ ID NO: 15973 - RNA, 22 nt, Synthetic Construct
  source 1..22: mol_type = other RNA
tgaggtggtaggttgtatagtt

SEQ ID NO: 15974 - RNA, 22 nt, Synthetic Construct
  source 1..22: mol_type = other RNA
tgaggtggtaggttgtatagtt

SEQ ID NO: 15975 - RNA, 23 nt, Synthetic Construct
  source 1..23: mol_type = other RNA
agcagcattgtacagggccatga

SEQ ID NO: 15976 - RNA, 20 nt, Synthetic Construct
  source 1..20: mol_type = other RNA
ttatcagaatctccaggggt

SEQ ID NO: 15977 - RNA, 20 nt, Synthetic Construct
  source 1..20: mol_type = other RNA
ttatcagaatctccaggggt

SEQ ID NO: 15978 - RNA, 25 nt, Synthetic Construct
  source 1..25: mol_type = other RNA
ttgaggatatgagatcgagacgacg

SEQ ID NO: 15979 - RNA, 32 nt, Synthetic Construct; identical to SEQ ID NO: 3713
  source 1..32: mol_type = other RNA

SEQ ID NO: 15980 - RNA, 23 nt, Synthetic Construct
  source 1..23: mol_type = other RNA
tgtgcaaatctatgcaaaactga

SEQ ID NO: 15981 - RNA, 35 nt, Synthetic Construct; identical to SEQ ID NO: 1160
  source 1..35: mol_type = other RNA

SEQ ID NO: 15982 - RNA, 35 nt, Synthetic Construct; identical to SEQ ID NO: 1160
  source 1..35: mol_type = other RNA

SEQ ID NO: 15983 - RNA, 23 nt, Synthetic Construct
  source 1..23: mol_type = other RNA
agctacattgtctgctgggttcc

SEQ ID NO: 15984 - RNA, 23 nt, Synthetic Construct
  source 1..23: mol_type = other RNA
agctacattgtctgctgggttcc

SEQ ID NO: 15985 - RNA, 21 nt, Synthetic Construct
  source 1..21: mol_type = other RNA
ttctgtactgagctgccccga

SEQ ID NO: 15986 - RNA, 21 nt, Synthetic Construct
  source 1..21: mol_type = other RNA
ttctgtactgagctgccccga

SEQ ID NO: 15987 - RNA, 21 nt, Synthetic Construct
  source 1..21: mol_type = other RNA
tcctgtactgagttgccccga

SEQ ID NO: 15988 - RNA, 21 nt, Synthetic Construct
  source 1..21: mol_type = other RNA
tcctgtactgagttgccccga

SEQ ID NO: 15989 - RNA, 20 nt, Synthetic Construct
  source 1..20: mol_type = other RNA
tgaggtagtaggttgtgcgg

SEQ ID NO: 15990 - RNA, 23 nt, Synthetic Construct
  source 1..23: mol_type = other RNA
agctacattgtctgctgggttcc

SEQ ID NO: 15991 - RNA, 23 nt, Synthetic Construct
  source 1..23: mol_type = other RNA
agctacattgtctgctgggttcc

SEQ ID NO: 15992 - RNA, 17 nt, Synthetic Construct
  source 1..17: mol_type = other RNA
tggccgggacagagggc

SEQ ID NO: 15993 - RNA, 17 nt, Synthetic Construct
  source 1..17: mol_type = other RNA
tggccgggacagagggc

SEQ ID NO: 15994 - RNA, 20 nt, Synthetic Construct
  source 1..20: mol_type = other RNA
tgtgaggttggcattgttgt

SEQ ID NO: 15995 - RNA, 20 nt, Synthetic Construct
  source 1..20: mol_type = other RNA
tgtgaggttggcattgttgt

SEQ ID NO: 15996 - RNA, 25 nt, Synthetic Construct
  source 1..25: mol_type = other RNA
gcgccgctggtgtagtggtatcatg

SEQ ID NO: 15997 - RNA, 22 nt, Synthetic Construct
  source 1..22: mol_type = other RNA
tgaggtagtaggttgcgtggtt

SEQ ID NO: 15998 - RNA, 22 nt, Synthetic Construct
  source 1..22: mol_type = other RNA
tgaggtagtaggttgcgtggtt

SEQ ID NO: 15999 - RNA, 23 nt, Synthetic Construct
  source 1..23: mol_type = other RNA
tgaggggcagagagtgagacttt

SEQ ID NO: 16000 - RNA, 23 nt, Synthetic Construct
  source 1..23: mol_type = other RNA
tgaggggcagagagtgagacttt

SEQ ID NO: 16001 - RNA, 22 nt, Synthetic Construct
  source 1..22: mol_type = other RNA
tgaggtagaagattgtatagtt

SEQ ID NO: 16002 - RNA, 23 nt, Synthetic Construct
  source 1..23: mol_type = other RNA
taactccttaagcgaatctcggc

SEQ ID NO: 16003 - RNA, 23 nt, Synthetic Construct
  source 1..23: mol_type = other RNA
tgaggtagtaggttgtatggttt

SEQ ID NO: 16004 - RNA, 23 nt, Synthetic Construct
  source 1..23: mol_type = other RNA
tgaggtagtaggttgtatggttt

SEQ ID NO: 16005 - RNA, 33 nt, Synthetic Construct; identical to SEQ ID NO: 1982
  source 1..33: mol_type = other RNA

SEQ ID NO: 16006 - RNA, 33 nt, Synthetic Construct; identical to SEQ ID NO: 1982
  source 1..33: mol_type = other RNA

SEQ ID NO: 16007 - RNA, 22 nt, Synthetic Construct
  source 1..22: mol_type = other RNA
tgagaactgaattccatgggtc

SEQ ID NO: 16008 - RNA, 22 nt, Synthetic Construct
  source 1..22: mol_type = other RNA
tgagaactgaattccatgggtc

SEQ ID NO: 16009 - RNA, 21 nt, Synthetic Construct
  source 1..21: mol_type = other RNA
tcaggctcagtcccctcccgt

SEQ ID NO: 16010 - RNA, 22 nt, Synthetic Construct
  source 1..22: mol_type = other RNA
tgaggtagtagtttgtgctgtc

SEQ ID NO: 16011 - RNA, 32 nt, Synthetic Construct; identical to SEQ ID NO: 1128
  source 1..32: mol_type = other RNA

SEQ ID NO: 16012 - RNA, 22 nt, Synthetic Construct
  source 1..22: mol_type = other RNA
tagcagcaagtaaatattggcg

SEQ ID NO: 16013 - RNA, 22 nt, Synthetic Construct
  source 1..22: mol_type = other RNA
tagcagcaagtaaatattggcg

SEQ ID NO: 16014 - RNA, 22 nt, Synthetic Construct
  source 1..22: mol_type = other RNA
tcctgtactgagctgtcccgag

SEQ ID NO: 16015 - RNA, 22 nt, Synthetic Construct
  source 1..22: mol_type = other RNA
tcctgtactgagctgtcccgag

SEQ ID NO: 16016 - RNA, 22 nt, Synthetic Construct
  source 1..22: mol_type = other RNA
tgaggtagtaggttgtgtggtt

SEQ ID NO: 16017 - RNA, 33 nt, Synthetic Construct; identical to SEQ ID NO: 4947
  source 1..33: mol_type = other RNA

SEQ ID NO: 16018 - RNA, 33 nt, Synthetic Construct; identical to SEQ ID NO: 4947
  source 1..33: mol_type = other RNA

SEQ ID NO: 16019 - RNA, 19 nt, Synthetic Construct
  source 1..19: mol_type = other RNA
tgtcaactggttgttggga

SEQ ID NO: 16020 - RNA, 19 nt, Synthetic Construct
  source 1..19: mol_type = other RNA
tgtcaactggttgttggga

SEQ ID NO: 16021 - RNA, 16 nt, Synthetic Construct
  source 1..16: mol_type = other RNA
gtctacggccatacaa

SEQ ID NO: 16022 - RNA, 16 nt, Synthetic Construct
  source 1..16: mol_type = other RNA
gtctacggccatacaa

SEQ ID NO: 16023 - RNA, 22 nt, Synthetic Construct
  source 1..22: mol_type = other RNA
tggggtagtaggttgtgtggtt

SEQ ID NO: 16024 - RNA, 22 nt, Synthetic Construct
  source 1..22: mol_type = other RNA
tggggtagtaggttgtgtggtt

SEQ ID NO: 16025 - RNA, 23 nt, Synthetic Construct
  source 1..23: mol_type = other RNA
aggggtgctatctgtgattgagg

SEQ ID NO: 16026 - RNA, 24 nt, Synthetic Construct
  source 1..24: mol_type = other RNA
tcactgatcgagtcgtcctgcgcg

SEQ ID NO: 16027 - RNA, 24 nt, Synthetic Construct
  source 1..24: mol_type = other RNA
tcactgatcgagtcgtcctgcgcg

SEQ ID NO: 16028 - RNA, 18 nt, Synthetic Construct
  source 1..18: mol_type = other RNA
atggccgggacagagggc

SEQ ID NO: 16029 - RNA, 18 nt, Synthetic Construct
  source 1..18: mol_type = other RNA
atggccgggacagagggc

SEQ ID NO: 16030 - RNA, 23 nt, Synthetic Construct
  source 1..23: mol_type = other RNA
tcctgtaccgagctgccccgaga

SEQ ID NO: 16031 - RNA, 23 nt, Synthetic Construct
  source 1..23: mol_type = other RNA
tcctgtaccgagctgccccgaga

SEQ ID NO: 16032 - RNA, 20 nt, Synthetic Construct
  source 1..20: mol_type = other RNA
cgaggtagtaggttgtgtgg

SEQ ID NO: 16033 - RNA, 20 nt, Synthetic Construct
  source 1..20: mol_type = other RNA
cgaggtagtaggttgtgtgg

SEQ ID NO: 16034 - RNA, 18 nt, Synthetic Construct
  source 1..18: mol_type = other RNA
atcacattgccagggatt

SEQ ID NO: 16035 - RNA, 18 nt, Synthetic Construct
  source 1..18: mol_type = other RNA
atcacattgccagggatt

SEQ ID NO: 16036 - RNA, 21 nt, Synthetic Construct
  source 1..21: mol_type = other RNA
tgaggtagtagattgtacagt

SEQ ID NO: 16037 - RNA, 23 nt, Synthetic Construct
  source 1..23: mol_type = other RNA
tgaagggcagagagcgagacttt

SEQ ID NO: 16038 - RNA, 23 nt, Synthetic Construct
  source 1..23: mol_type = other RNA
tgaagggcagagagcgagacttt

SEQ ID NO: 16039 - RNA, 20 nt, Synthetic Construct
  source 1..20: mol_type = other RNA
tgaggtagtaggttgtacag

SEQ ID NO: 16040 - RNA, 20 nt, Synthetic Construct
  source 1..20: mol_type = other RNA
tgaggtagtaggttgtacag

SEQ ID NO: 16041 - RNA, 21 nt, Synthetic Construct
  source 1..21: mol_type = other RNA
tcccagtaaacggcggccgta

SEQ ID NO: 16042 - RNA, 23 nt, Synthetic Construct
  source 1..23: mol_type = other RNA
tcctgtactgagccgccccgagt

SEQ ID NO: 16043 - RNA, 23 nt, Synthetic Construct
  source 1..23: mol_type = other RNA
tcctgtactgagccgccccgagt

SEQ ID NO: 16044 - RNA, 16 nt, Synthetic Construct
  source 1..16: mol_type = other RNA
gaaattccttgtcggg

SEQ ID NO: 16045 - RNA, 23 nt, Synthetic Construct
  source 1..23: mol_type = other RNA
cgaggggcagagagcgagacttt

SEQ ID NO: 16046 - RNA, 23 nt, Synthetic Construct
  source 1..23: mol_type = other RNA
cgaggggcagagagcgagacttt

SEQ ID NO: 16047 - RNA, 21 nt, Synthetic Construct
  source 1..21: mol_type = other RNA
gctattgacgaccgtaccgca

SEQ ID NO: 16048 - RNA, 21 nt, Synthetic Construct
  source 1..21: mol_type = other RNA
gctattgacgaccgtaccgca

SEQ ID NO: 16049 - RNA, 23 nt, Synthetic Construct
  source 1..23: mol_type = other RNA
tcctgtactgagttgccccgaga

SEQ ID NO: 16050 - RNA, 23 nt, Synthetic Construct
  source 1..23: mol_type = other RNA
tcctgtactgagttgccccgaga

SEQ ID NO: 16051 - RNA, 35 nt, Synthetic Construct; identical to SEQ ID NO: 2518
  source 1..35: mol_type = other RNA

SEQ ID NO: 16052 - RNA, 32 nt, Synthetic Construct; identical to SEQ ID NO: 2850
  source 1..32: mol_type = other RNA

SEQ ID NO: 16053 - RNA, 22 nt, Synthetic Construct
  source 1..22: mol_type = other RNA
tgaggtagtaggttatgtggtt

SEQ ID NO: 16054 - RNA, 22 nt, Synthetic Construct
  source 1..22: mol_type = other RNA
tgaggtagtagattgcatagtt

SEQ ID NO: 16055 - RNA, 22 nt, Synthetic Construct
  source 1..22: mol_type = other RNA
tgaggtagtagattgcatagtt

SEQ ID NO: 16056 - RNA, 18 nt, Synthetic Construct
  source 1..18: mol_type = other RNA
gtcgacgtatagggtgtg

SEQ ID NO: 16057 - RNA, 18 nt, Synthetic Construct
  source 1..18: mol_type = other RNA
gtcgacgtatagggtgtg

SEQ ID NO: 16058 - RNA, 23 nt, Synthetic Construct
  source 1..23: mol_type = other RNA
tcctgtactgagctaccccgaga

SEQ ID NO: 16059 - RNA, 23 nt, Synthetic Construct
  source 1..23: mol_type = other RNA
tcctgtactgagctaccccgaga

SEQ ID NO: 16060 - RNA, 19 nt, Synthetic Construct
  source 1..19: mol_type = other RNA
accaaggggtcgtgggttc

SEQ ID NO: 16061 - RNA, 19 nt, Synthetic Construct
  source 1..19: mol_type = other RNA
accaaggggtcgtgggttc

SEQ ID NO: 16062 - RNA, 15 nt, Synthetic Construct
  source 1..15: mol_type = other RNA
aggtgggaggctttg

SEQ ID NO: 16063 - RNA, 15 nt, Synthetic Construct
  source 1..15: mol_type = other RNA
aggtgggaggctttg

SEQ ID NO: 16064 - RNA, 18 nt, Synthetic Construct
  source 1..18: mol_type = other RNA
tcccctggacctgtactg

SEQ ID NO: 16065 - RNA, 18 nt, Synthetic Construct
  source 1..18: mol_type = other RNA
tcccctggacctgtactg

SEQ ID NO: 16066 - RNA, 23 nt, Synthetic Construct
  source 1..23: mol_type = other RNA
tccctggtggtctagtggttagg

SEQ ID NO: 16067 - RNA, 23 nt, Synthetic Construct
  source 1..23: mol_type = other RNA
tccctggtggtctagtggttagg

SEQ ID NO: 16068 - RNA, 24 nt, Synthetic Construct
  source 1..24: mol_type = other RNA
gctcactgatcgagtcgtcctgcg

SEQ ID NO: 16069 - RNA, 24 nt, Synthetic Construct
  source 1..24: mol_type = other RNA
gctcactgatcgagtcgtcctgcg

SEQ ID NO: 16070 - RNA, 23 nt, Synthetic Construct
  source 1..23: mol_type = other RNA
aaaagctgggttgagagggcgaa

SEQ ID NO: 16071 - RNA, 23 nt, Synthetic Construct
  source 1..23: mol_type = other RNA
aaaagctgggttgagagggcgaa

SEQ ID NO: 16072 - RNA, 27 nt, Synthetic Construct
  source 1..27: mol_type = other RNA
ccccccactgctaaatttgactggctc

SEQ ID NO: 16073 - RNA, 17 nt, Synthetic Construct
  source 1..17: mol_type = other RNA
gaagttgaccgcctggg

SEQ ID NO: 16074 - RNA, 22 nt, Synthetic Construct
  source 1..22: mol_type = other RNA
tggaatgtaaggaagtgtgtgt

SEQ ID NO: 16075 - RNA, 22 nt, Synthetic Construct
  source 1..22: mol_type = other RNA
cattgcacttgtctcggtccga

SEQ ID NO: 16076 - RNA, 22 nt, Synthetic Construct
  source 1..22: mol_type = other RNA
cattgcacttgtctcggtccga

SEQ ID NO: 16077 - RNA, 23 nt, Synthetic Construct
  source 1..23: mol_type = other RNA
tcttggagtaggtcattgggtgg

SEQ ID NO: 16078 - RNA, 23 nt, Synthetic Construct
  source 1..23: mol_type = other RNA
ttaatgctaatcgtgataggggt

SEQ ID NO: 16079 - RNA, 23 nt, Synthetic Construct
  source 1..23: mol_type = other RNA
caacggaatcccaagagcagctg

SEQ ID NO: 16080 - RNA, 22 nt, Synthetic Construct
  source 1..22: mol_type = other RNA
tcctgtactgggctgccccgag

SEQ ID NO: 16081 - RNA, 22 nt, Synthetic Construct
  source 1..22: mol_type = other RNA
tcctgtactgggctgccccgag

SEQ ID NO: 16082 - RNA, 17 nt, Synthetic Construct
  source 1..17: mol_type = other RNA
catgcaagtcgaacggt

SEQ ID NO: 16083 - RNA, 20 nt, Synthetic Construct
  source 1..20: mol_type = other RNA
ccgcagagtacagcttggga

SEQ ID NO: 16084 - RNA, 20 nt, Synthetic Construct
  source 1..20: mol_type = other RNA
ccgcagagtacagcttggga

SEQ ID NO: 16085 - RNA, 20 nt, Synthetic Construct
  source 1..20: mol_type = other RNA
agcagcattgtacagggcta

SEQ ID NO: 16086 - RNA, 25 nt, Synthetic Construct
  source 1..25: mol_type = other RNA
tttccccttggggttgtaggaccac

SEQ ID NO: 16087 - RNA, 22 nt, Synthetic Construct
  source 1..22: mol_type = other RNA
tccaagtaatccaggataggct

SEQ ID NO: 16088 - RNA, 19 nt, Synthetic Construct
  source 1..19: mol_type = other RNA
tcagtagctcgaggaaaag

SEQ ID NO: 16089 - RNA, 22 nt, Synthetic Construct
  source 1..22: mol_type = other RNA
ttcgagtaatccaggataggct

SEQ ID NO: 16090 - RNA, 22 nt, Synthetic Construct
  source 1..22: mol_type = other RNA
ttcgagtaatccaggataggct

SEQ ID NO: 16091 - RNA, 25 nt, Synthetic Construct
  source 1..25: mol_type = other RNA
gcgccgctggtgtagtggtatcatg

SEQ ID NO: 16092 - RNA, 25 nt, Synthetic Construct
  source 1..25: mol_type = other RNA
gcgccgctggtgtagtggtatcatg

SEQ ID NO: 16093 - RNA, 21 nt, Synthetic Construct
  source 1..21: mol_type = other RNA
cccataaagtagaaagcacta

SEQ ID NO: 16094 - RNA, 23 nt, Synthetic Construct
  source 1..23: mol_type = other RNA
agcagcaatgtacagggctatga

SEQ ID NO: 16095 - RNA, 22 nt, Synthetic Construct
  source 1..22: mol_type = other RNA
aacccgtagatccgatcttgtg

SEQ ID NO: 16096 - RNA, 22 nt, Synthetic Construct
  source 1..22: mol_type = other RNA
aacccgtagatccgatcttgtg

SEQ ID NO: 16097 - RNA, 22 nt, Synthetic Construct
  source 1..22: mol_type = other RNA
gagagcctggacacaggtgctg

SEQ ID NO: 16098 - RNA, 22 nt, Synthetic Construct
  source 1..22: mol_type = other RNA
cataaagtagaaagcactacta

SEQ ID NO: 16099 - RNA, 22 nt, Synthetic Construct
  source 1..22: mol_type = other RNA
tgaggcagtagattgtatagtt

SEQ ID NO: 16100 - RNA, 22 nt, Synthetic Construct
  source 1..22: mol_type = other RNA
actcggcgtggcgtcggtcgtg

SEQ ID NO: 16101 - RNA, 22 nt, Synthetic Construct
  source 1..22: mol_type = other RNA
actcggcgtggcgtcggtcgtg

SEQ ID NO: 16102 - RNA, 27 nt, Synthetic Construct
  source 1..27: mol_type = other RNA
ccccccactgctgaatttgactggctt

SEQ ID NO: 16103 - RNA, 23 nt, Synthetic Construct
  source 1..23: mol_type = other RNA
tgaggtagtaggttgtgcggttt

SEQ ID NO: 16104 - RNA, 23 nt, Synthetic Construct
  source 1..23: mol_type = other RNA
tgaggtagtaggttgtgcggttt

SEQ ID NO: 16105 - RNA, 17 nt, Synthetic Construct
  source 1..17: mol_type = other RNA
gtgttcggaagattttc

SEQ ID NO: 16106 - RNA, 16 nt, Synthetic Construct
  source 1..16: mol_type = other RNA
tgcgtagatatgcgga

SEQ ID NO: 16107 - RNA, 32 nt, Synthetic Construct; identical to SEQ ID NO: 2086
  source 1..32: mol_type = other RNA

SEQ ID NO: 16108 - RNA, 32 nt, Synthetic Construct; identical to SEQ ID NO: 2086
  source 1..32: mol_type = other RNA

SEQ ID NO: 16109 - RNA, 27 nt, Synthetic Construct
  source 1..27: mol_type = other RNA
ccccccactgctaaatctgactggctt

SEQ ID NO: 16110 - RNA, 23 nt, Synthetic Construct
  source 1..23: mol_type = other RNA
ggcagcattgtacagggctatga

SEQ ID NO: 16111 - RNA, 23 nt, Synthetic Construct
  source 1..23: mol_type = other RNA
ggcagcattgtacagggctatga

SEQ ID NO: 16112 - RNA, 30 nt, Synthetic Construct; identical to SEQ ID NO: 2699
  source 1..30: mol_type = other RNA

SEQ ID NO: 16113 - RNA, 30 nt, Synthetic Construct; identical to SEQ ID NO: 2699
  source 1..30: mol_type = other RNA

SEQ ID NO: 16114 - RNA, 21 nt, Synthetic Construct
  source 1..21: mol_type = other RNA
taactccttaagcaatctcgc

SEQ ID NO: 16115 - RNA, 22 nt, Synthetic Construct
  source 1..22: mol_type = other RNA
tgaggtagtagttagtgctgtt

SEQ ID NO: 16116 - RNA, 22 nt, Synthetic Construct
  source 1..22: mol_type = other RNA
tgtgcaaatccatgcaaaactg

SEQ ID NO: 16117 - RNA, 16 nt, Synthetic Construct
  source 1..16: mol_type = other RNA
atgcaagtcgaacggt

SEQ ID NO: 16118 - RNA, 16 nt, Synthetic Construct
  source 1..16: mol_type = other RNA
atgcaagtcgaacggt

SEQ ID NO: 16119 - RNA, 21 nt, Synthetic Construct
  source 1..21: mol_type = other RNA
tgaggtaggaggttgtatagt

SEQ ID NO: 16120 - RNA, 22 nt, Synthetic Construct
  source 1..22: mol_type = other RNA
cggaatgtaaagaagtatgtat

SEQ ID NO: 16121 - RNA, 22 nt, Synthetic Construct
  source 1..22: mol_type = other RNA
cggaatgtaaagaagtatgtat

SEQ ID NO: 16122 - RNA, 30 nt, Synthetic Construct; identical to SEQ ID NO: 2407
  source 1..30: mol_type = other RNA

SEQ ID NO: 16123 - RNA, 19 nt, Synthetic Construct
  source 1..19: mol_type = other RNA
gtccggatcgtagtctgca

SEQ ID NO: 16124 - RNA, 20 nt, Synthetic Construct
  source 1..20: mol_type = other RNA
ctctaatgagactgccggtg

SEQ ID NO: 16125 - RNA, 20 nt, Synthetic Construct
  source 1..20: mol_type = other RNA
ctctaatgagactgccggtg

SEQ ID NO: 16126 - RNA, 18 nt, Synthetic Construct
  source 1..18: mol_type = other RNA
gcgccgatgatagtgcgg

SEQ ID NO: 16127 - RNA, 18 nt, Synthetic Construct
  source 1..18: mol_type = other RNA
gcgccgatgatagtgcgg

SEQ ID NO: 16128 - RNA, 22 nt, Synthetic Construct
  source 1..22: mol_type = other RNA
ttatcagaatctccaggggtac

SEQ ID NO: 16129 - RNA, 22 nt, Synthetic Construct
  source 1..22: mol_type = other RNA
tatatatatatatgtacgtatg

SEQ ID NO: 16130 - RNA, 22 nt, Synthetic Construct
  source 1..22: mol_type = other RNA
tatatatatatatgtacgtatg

SEQ ID NO: 16131 - RNA, 24 nt, Synthetic Construct
  source 1..24: mol_type = other RNA
gctcactgatcgagtcgtcctgcg

SEQ ID NO: 16132 - RNA, 22 nt, Synthetic Construct
  source 1..22: mol_type = other RNA
ttcaagtaacccaggataggct

SEQ ID NO: 16133 - RNA, 20 nt, Synthetic Construct
  source 1..20: mol_type = other RNA
cccttggggttgtaggacca

SEQ ID NO: 16134 - RNA, 22 nt, Synthetic Construct
  source 1..22: mol_type = other RNA
tcctgtactgagttgccccgag

SEQ ID NO: 16135 - RNA, 22 nt, Synthetic Construct
  source 1..22: mol_type = other RNA
tcctgtactgagttgccccgag

SEQ ID NO: 16136 - RNA, 22 nt, Synthetic Construct
  source 1..22: mol_type = other RNA
tgaagtagtaggttgtatagtt

SEQ ID NO: 16137 - RNA, 22 nt, Synthetic Construct
  source 1..22: mol_type = other RNA
tgaagtagtaggttgtatagtt

SEQ ID NO: 16138 - RNA, 25 nt, Synthetic Construct
  source 1..25: mol_type = other RNA
tgtcagtttgtcaaataccccattt

SEQ ID NO: 16139 - RNA, 15 nt, Synthetic Construct
  source 1..15: mol_type = other RNA
ggtcatcgtcaggct

SEQ ID NO: 16140 - RNA, 15 nt, Synthetic Construct
  source 1..15: mol_type = other RNA
ggtcatcgtcaggct

SEQ ID NO: 16141 - RNA, 21 nt, Synthetic Construct
  source 1..21: mol_type = other RNA
tgaggggcagagagcgagaca

SEQ ID NO: 16142 - RNA, 23 nt, Synthetic Construct
  source 1..23: mol_type = other RNA
caaggtgctgttcgtgcaggtag

SEQ ID NO: 16143 - RNA, 23 nt, Synthetic Construct
  source 1..23: mol_type = other RNA
caaggtgctgttcgtgcaggtag

SEQ ID NO: 16144 - RNA, 23 nt, Synthetic Construct
  source 1..23: mol_type = other RNA
gtctttgttcgattccgttgagt

SEQ ID NO: 16145 - RNA, 23 nt, Synthetic Construct
  source 1..23: mol_type = other RNA
gtctttgttcgattccgttgagt

SEQ ID NO: 16146 - RNA, 16 nt, Synthetic Construct
  source 1..16: mol_type = other RNA
gtctacggccataccg

SEQ ID NO: 16147 - RNA, 16 nt, Synthetic Construct
  source 1..16: mol_type = other RNA
gtctacggccataccg

SEQ ID NO: 16148 - RNA, 21 nt, Synthetic Construct
  source 1..21: mol_type = other RNA
tcctgtactgagctgcccgag

SEQ ID NO: 16149 - RNA, 21 nt, Synthetic Construct
  source 1..21: mol_type = other RNA
tcctgtactgagctgcccgag

SEQ ID NO: 16150 - RNA, 39 nt, Synthetic Construct; identical to SEQ ID NO: 4400
  source 1..39: mol_type = other RNA

SEQ ID NO: 16151 - RNA, 20 nt, Synthetic Construct
  source 1..20: mol_type = other RNA
tggggtagtaggttgtatag

SEQ ID NO: 16152 - RNA, 20 nt, Synthetic Construct
  source 1..20: mol_type = other RNA
tggggtagtaggttgtatag

SEQ ID NO: 16153 - RNA, 15 nt, Synthetic Construct
  source 1..15: mol_type = other RNA
gagctgtggataggg

SEQ ID NO: 16154 - RNA, 20 nt, Synthetic Construct
  source 1..20: mol_type = other RNA
caaagtgctgttcgtgcagg

SEQ ID NO: 16155 - RNA, 20 nt, Synthetic Construct
  source 1..20: mol_type = other RNA
caaagtgctgttcgtgcagg

SEQ ID NO: 16156 - RNA, 23 nt, Synthetic Construct
  source 1..23: mol_type = other RNA
tcctgtactgagctgtcccgaga

SEQ ID NO: 16157 - RNA, 23 nt, Synthetic Construct
  source 1..23: mol_type = other RNA
tcctgtactgagctgtcccgaga

SEQ ID NO: 16158 - RNA, 22 nt, Synthetic Construct
  source 1..22: mol_type = other RNA
aagcagcacctaaatattggcg

SEQ ID NO: 16159 - RNA, 22 nt, Synthetic Construct
  source 1..22: mol_type = other RNA
cagggctggcagtgacatgggt

SEQ ID NO: 16160 - RNA, 18 nt, Synthetic Construct
  source 1..18: mol_type = other RNA
tccgacatgcgagggttc

SEQ ID NO: 16161 - RNA, 16 nt, Synthetic Construct
  source 1..16: mol_type = other RNA
ctgacgctcatgcacg

SEQ ID NO: 16162 - RNA, 16 nt, Synthetic Construct
  source 1..16: mol_type = other RNA
gtctacagccatacca

SEQ ID NO: 16163 - RNA, 22 nt, Synthetic Construct
  source 1..22: mol_type = other RNA
tagcatcacgtaaatattggcg

SEQ ID NO: 16164 - RNA, 22 nt, Synthetic Construct
  source 1..22: mol_type = other RNA
tagcatcacgtaaatattggcg

SEQ ID NO: 16165 - RNA, 25 nt, Synthetic Construct
  source 1..25: mol_type = other RNA
tgagaactgaattccatgggttgtt

SEQ ID NO: 16166 - RNA, 25 nt, Synthetic Construct
  source 1..25: mol_type = other RNA
tgagaactgaattccatgggttgtt

SEQ ID NO: 16167 - RNA, 22 nt, Synthetic Construct
  source 1..22: mol_type = other RNA
tcggatccgtctgagcttggct

SEQ ID NO: 16168 - RNA, 22 nt, Synthetic Construct
  source 1..22: mol_type = other RNA
gtgcatggccgttcttagttgg

SEQ ID NO: 16169 - RNA, 15 nt, Synthetic Construct
  source 1..15: mol_type = other RNA
tagagtagggcggga

SEQ ID NO: 16170 - RNA, 25 nt, Synthetic Construct
  source 1..25: mol_type = other RNA
gtcaggatggccgagcggtctaagg

SEQ ID NO: 16171 - RNA, 22 nt, Synthetic Construct
  source 1..22: mol_type = other RNA
tgaggtagtaggttgtgaggtt

SEQ ID NO: 16172 - RNA, 22 nt, Synthetic Construct
  source 1..22: mol_type = other RNA
tgaggtagtaggttgtgaggtt

SEQ ID NO: 16173 - RNA, 22 nt, Synthetic Construct
  source 1..22: mol_type = other RNA
tgaggaagtagtttgtgctgtt

SEQ ID NO: 16174 - RNA, 22 nt, Synthetic Construct
  source 1..22: mol_type = other RNA
tgaggaagtagtttgtgctgtt

SEQ ID NO: 16175 - RNA, 22 nt, Synthetic Construct
  source 1..22: mol_type = other RNA
cctctgggcccttcctccagtt

SEQ ID NO: 16176 - RNA, 22 nt, Synthetic Construct
  source 1..22: mol_type = other RNA
cctctgggcccttcctccagtt

SEQ ID NO: 16177 - RNA, 17 nt, Synthetic Construct
  source 1..17: mol_type = other RNA
cgactcttagcggtgga

SEQ ID NO: 16178 - RNA, 17 nt, Synthetic Construct
  source 1..17: mol_type = other RNA
cgactcttagcggtgga

SEQ ID NO: 16179 - RNA, 15 nt, Synthetic Construct
  source 1..15: mol_type = other RNA
ggtggctgtagctca

SEQ ID NO: 16180 - RNA, 24 nt, Synthetic Construct
  source 1..24: mol_type = other RNA
tcactgatcgagtcgtcctgcgcg

SEQ ID NO: 16181 - RNA, 24 nt, Synthetic Construct
  source 1..24: mol_type = other RNA
tcactgatcgagtcgtcctgcgcg

SEQ ID NO: 16182 - RNA, 21 nt, Synthetic Construct
  source 1..21: mol_type = other RNA
tgagaactgaattccatgggt

SEQ ID NO: 16183 - RNA, 23 nt, Synthetic Construct
  source 1..23: mol_type = other RNA
tgtgcaaatctatgcaaaactga

SEQ ID NO: 16184 - RNA, 23 nt, Synthetic Construct
  source 1..23: mol_type = other RNA
tgtgcaaatctatgcaaaactga

SEQ ID NO: 16185 - RNA, 22 nt, Synthetic Construct
  source 1..22: mol_type = other RNA
tcgtaccgtgagtaacaatgcg

SEQ ID NO: 16186 - RNA, 21 nt, Synthetic Construct
  source 1..21: mol_type = other RNA
tactccttaagcgaatctcgc

SEQ ID NO: 16187 - RNA, 21 nt, Synthetic Construct
  source 1..21: mol_type = other RNA
tactccttaagcgaatctcgc

SEQ ID NO: 16188 - RNA, 16 nt, Synthetic Construct
  source 1..16: mol_type = other RNA
tggccgtcgtcagctc

SEQ ID NO: 16189 - RNA, 16 nt, Synthetic Construct
  source 1..16: mol_type = other RNA
tggccgtcgtcagctc

SEQ ID NO: 16190 - RNA, 23 nt, Synthetic Construct
  source 1..23: mol_type = other RNA
tgtagtgtttcctactttatggt

SEQ ID NO: 16191 - RNA, 23 nt, Synthetic Construct
  source 1..23: mol_type = other RNA
tggtaatacgacatacttagtgt

SEQ ID NO: 16192 - RNA, 15 nt, Synthetic Construct
  source 1..15: mol_type = other RNA
tcgagtcgtcctgcg

SEQ ID NO: 16193 - RNA, 15 nt, Synthetic Construct
  source 1..15: mol_type = other RNA
tcgagtcgtcctgcg

SEQ ID NO: 16194 - RNA, 17 nt, Synthetic Construct
  source 1..17: mol_type = other RNA
gcggctgtagctcagtt

SEQ ID NO: 16195 - RNA, 19 nt, Synthetic Construct
  source 1..19: mol_type = other RNA
gggtgcaagcgttaatcgg

SEQ ID NO: 16196 - RNA, 19 nt, Synthetic Construct
  source 1..19: mol_type = other RNA
gggtgcaagcgttaatcgg

SEQ ID NO: 16197 - RNA, 21 nt, Synthetic Construct
  source 1..21: mol_type = other RNA
tagcagcacgtaatattggcg

SEQ ID NO: 16198 - RNA, 21 nt, Synthetic Construct
  source 1..21: mol_type = other RNA
tagcagcacgtaatattggcg

SEQ ID NO: 16199 - RNA, 16 nt, Synthetic Construct
  source 1..16: mol_type = other RNA
acggcccagactccta

SEQ ID NO: 16200 - RNA, 16 nt, Synthetic Construct
  source 1..16: mol_type = other RNA
acggcccagactccta

SEQ ID NO: 16201 - RNA, 23 nt, Synthetic Construct
  source 1..23: mol_type = other RNA
tggtaatacgacgtacttagtat

SEQ ID NO: 16202 - RNA, 23 nt, Synthetic Construct
  source 1..23: mol_type = other RNA
tggtaatacgacgtacttagtat

SEQ ID NO: 16203 - RNA, 24 nt, Synthetic Construct
  source 1..24: mol_type = other RNA
tgtgaacatccccgactggaagct

SEQ ID NO: 16204 - RNA, 24 nt, Synthetic Construct
  source 1..24: mol_type = other RNA
tgtgaacatccccgactggaagct

SEQ ID NO: 16205 - RNA, 21 nt, Synthetic Construct
  source 1..21: mol_type = other RNA
tgaggcagtaggttgtatagt

SEQ ID NO: 16206 - RNA, 21 nt, Synthetic Construct
  source 1..21: mol_type = other RNA
tgaggcagtaggttgtatagt

SEQ ID NO: 16207 - RNA, 15 nt, Synthetic Construct
  source 1..15: mol_type = other RNA
cccagaaacccggtc

SEQ ID NO: 16208 - RNA, 22 nt, Synthetic Construct
  source 1..22: mol_type = other RNA
tcctgtattgagctgccccgag

SEQ ID NO: 16209 - RNA, 22 nt, Synthetic Construct
  source 1..22: mol_type = other RNA
tcctgtattgagctgccccgag

SEQ ID NO: 16210 - RNA, 23 nt, Synthetic Construct
  source 1..23: mol_type = other RNA
tggggtagtaggttgtgtggttt

SEQ ID NO: 16211 - RNA, 23 nt, Synthetic Construct
  source 1..23: mol_type = other RNA
tggggtagtaggttgtgtggttt

SEQ ID NO: 16212 - RNA, 19 nt, Synthetic Construct
  source 1..19: mol_type = other RNA
cctgtaccgatcaatagtg

SEQ ID NO: 16213 - RNA, 16 nt, Synthetic Construct
  source 1..16: mol_type = other RNA
tgcgtagatatgcgga

SEQ ID NO: 16214 - RNA, 16 nt, Synthetic Construct
  source 1..16: mol_type = other RNA
tgcgtagatatgcgga

SEQ ID NO: 16215 - RNA, 21 nt, Synthetic Construct
  source 1..21: mol_type = other RNA
acacatgcaagtcgaacggta

SEQ ID NO: 16216 - RNA, 21 nt, Synthetic Construct
  source 1..21: mol_type = other RNA
acacatgcaagtcgaacggta

SEQ ID NO: 16217 - RNA, 23 nt, Synthetic Construct
  source 1..23: mol_type = other RNA
ccccccactgctaaatttgactg

SEQ ID NO: 16218 - RNA, 23 nt, Synthetic Construct
  source 1..23: mol_type = other RNA
ccccccactgctaaatttgactg

SEQ ID NO: 16219 - RNA, 22 nt, Synthetic Construct
  source 1..22: mol_type = other RNA
aagcagcacgtaaatattggag

SEQ ID NO: 16220 - RNA, 15 nt, Synthetic Construct
  source 1..15: mol_type = other RNA
tccggatcgtagtct

SEQ ID NO: 16221 - RNA, 26 nt, Synthetic Construct
  source 1..26: mol_type = other RNA
gcataagcgtgcttgactgcgagact

SEQ ID NO: 16222 - RNA, 21 nt, Synthetic Construct
  source 1..21: mol_type = other RNA
accacagggtagaaccacgga

SEQ ID NO: 16223 - RNA, 21 nt, Synthetic Construct
  source 1..21: mol_type = other RNA
accacagggtagaaccacgga

SEQ ID NO: 16224 - RNA, 18 nt, Synthetic Construct
  source 1..18: mol_type = other RNA
cgtgttcggaagattttc

SEQ ID NO: 16225 - RNA, 35 nt, Synthetic Construct; identical to SEQ ID NO: 2399
  source 1..35: mol_type = other RNA

SEQ ID NO: 16226 - RNA, 22 nt, Synthetic Construct
  source 1..22: mol_type = other RNA
tgaggaagtagattgtatagtt

SEQ ID NO: 16227 - RNA, 22 nt, Synthetic Construct
  source 1..22: mol_type = other RNA
tgaggaagtagattgtatagtt

SEQ ID NO: 16228 - RNA, 19 nt, Synthetic Construct
  source 1..19: mol_type = other RNA
gtacagtactgtgataact

SEQ ID NO: 16229 - RNA, 19 nt, Synthetic Construct
  source 1..19: mol_type = other RNA
gtacagtactgtgataact

SEQ ID NO: 16230 - RNA, 23 nt, Synthetic Construct
  source 1..23: mol_type = other RNA
ccctgtactgagctgccccgagt

SEQ ID NO: 16231 - RNA, 23 nt, Synthetic Construct
  source 1..23: mol_type = other RNA
ccctgtactgagctgccccgagt

SEQ ID NO: 16232 - RNA, 21 nt, Synthetic Construct
  source 1..21: mol_type = other RNA
aggttccggataagtaaagcc

SEQ ID NO: 16233 - RNA, 24 nt, Synthetic Construct
  source 1..24: mol_type = other RNA
gatgaggcgtgataacgagtctgc

SEQ ID NO: 16234 - RNA, 22 nt, Synthetic Construct
  source 1..22: mol_type = other RNA
acagtagcctgcacattggtta

SEQ ID NO: 16235 - RNA, 22 nt, Synthetic Construct
  source 1..22: mol_type = other RNA
acagtagcctgcacattggtta

SEQ ID NO: 16236 - RNA, 15 nt, Synthetic Construct
  source 1..15: mol_type = other RNA
gcagagcgtcggtct

SEQ ID NO: 16237 - RNA, 15 nt, Synthetic Construct
  source 1..15: mol_type = other RNA
gcagagcgtcggtct

SEQ ID NO: 16238 - RNA, 21 nt, Synthetic Construct
  source 1..21: mol_type = other RNA
cactgatcgagtcgtcctgcg

SEQ ID NO: 16239 - RNA, 21 nt, Synthetic Construct
  source 1..21: mol_type = other RNA
cactgatcgagtcgtcctgcg

SEQ ID NO: 16240 - RNA, 24 nt, Synthetic Construct
  source 1..24: mol_type = other RNA
gcgagagtaggacgttgccaggtt

SEQ ID NO: 16241 - RNA, 24 nt, Synthetic Construct
  source 1..24: mol_type = other RNA
gcgagagtaggacgttgccaggtt

SEQ ID NO: 16242 - RNA, 44 nt, Synthetic Construct
  source 1..44: mol_type = other RNA
agcaggacggtggccatggaagtcggaatccgctaaggagtgtg

SEQ ID NO: 16243 - RNA, 44 nt, Synthetic Construct; identical to SEQ ID NO: 16242
  source 1..44: mol_type = other RNA

SEQ ID NO: 16244 - RNA, 15 nt, Synthetic Construct
  source 1..15: mol_type = other RNA
cgagtgacgtagtgt

SEQ ID NO: 16245 - RNA, 15 nt, Synthetic Construct
  source 1..15: mol_type = other RNA
cgagtgacgtagtgt

SEQ ID NO: 16246 - RNA, 15 nt, Synthetic Construct
  source 1..15: mol_type = other RNA
tcgagtcgtcctgcg

SEQ ID NO: 16247 - RNA, 22 nt, Synthetic Construct
  source 1..22: mol_type = other RNA
ttatggtttgcctgggactgag

SEQ ID NO: 16248 - RNA, 22 nt, Synthetic Construct
  source 1..22: mol_type = other RNA
ttatggtttgcctgggactgag

SEQ ID NO: 16249 - RNA, 22 nt, Synthetic Construct
  source 1..22: mol_type = other RNA
tctttgttcgattccgttgagt

SEQ ID NO: 16250 - RNA, 18 nt, Synthetic Construct
  source 1..18: mol_type = other RNA
tcccaagggtatggctgt

SEQ ID NO: 16251 - RNA, 15 nt, Synthetic Construct
  source 1..15: mol_type = other RNA
gtccggatcgtagtc

SEQ ID NO: 16252 - RNA, 18 nt, Synthetic Construct
  source 1..18: mol_type = other RNA
accaaggggtcgtgggtt

SEQ ID NO: 16253 - RNA, 18 nt, Synthetic Construct
  source 1..18: mol_type = other RNA
accaaggggtcgtgggtt

SEQ ID NO: 16254 - RNA, 22 nt, Synthetic Construct
  source 1..22: mol_type = other RNA
tgaggtggtaggttgtgtggtt

SEQ ID NO: 16255 - RNA, 22 nt, Synthetic Construct
  source 1..22: mol_type = other RNA
tgaggtggtaggttgtgtggtt

SEQ ID NO: 16256 - RNA, 24 nt, Synthetic Construct
  source 1..24: mol_type = other RNA
taccctgtagatccgaatttgtgt

SEQ ID NO: 16257 - RNA, 21 nt, Synthetic Construct
  source 1..21: mol_type = other RNA
tgaggtagtaggttgtgtagt

SEQ ID NO: 16258 - RNA, 21 nt, Synthetic Construct
  source 1..21: mol_type = other RNA
tgaggtagtaggttgtgtagt

SEQ ID NO: 16259 - RNA, 25 nt, Synthetic Construct
  source 1..25: mol_type = other RNA
tgagaactgaattccatgggttgtt

SEQ ID NO: 16260 - RNA, 25 nt, Synthetic Construct
  source 1..25: mol_type = other RNA
tgagaactgaattccatgggttgtt

SEQ ID NO: 16261 - RNA, 21 nt, Synthetic Construct
  source 1..21: mol_type = other RNA
ttcacagtggctaagttctgc

SEQ ID NO: 16262 - RNA, 21 nt, Synthetic Construct
  source 1..21: mol_type = other RNA
ttcacagtggctaagttctgc

SEQ ID NO: 16263 - RNA, 16 nt, Synthetic Construct
  source 1..16: mol_type = other RNA
gtccacggccatacca

SEQ ID NO: 16264 - RNA, 24 nt, Synthetic Construct
  source 1..24: mol_type = other RNA
caaagtgcttacagtgcaggtagt

SEQ ID NO: 16265 - RNA, 24 nt, Synthetic Construct
  source 1..24: mol_type = other RNA
caaagtgcttacagtgcaggtagt

SEQ ID NO: 16266 - RNA, 17 nt, Synthetic Construct
  source 1..17: mol_type = other RNA
cctcgcgcgattggagc

SEQ ID NO: 16267 - RNA, 24 nt, Synthetic Construct
  source 1..24: mol_type = other RNA
gcgagagtaggacgttgccaggtt

SEQ ID NO: 16268 - RNA, 24 nt, Synthetic Construct
  source 1..24: mol_type = other RNA
gcgagagtaggacgttgccaggtt

SEQ ID NO: 16269 - RNA, 21 nt, Synthetic Construct
  source 1..21: mol_type = other RNA
taactccttaagcgaatctcg

SEQ ID NO: 16270 - RNA, 21 nt, Synthetic Construct
  source 1..21: mol_type = other RNA
taactccttaagcgaatctcg

SEQ ID NO: 16271 - RNA, 18 nt, Synthetic Construct
  source 1..18: mol_type = other RNA
atcccacttctgacacca

SEQ ID NO: 16272 - RNA, 18 nt, Synthetic Construct
  source 1..18: mol_type = other RNA
atcccacttctgacacca

SEQ ID NO: 16273 - RNA, 21 nt, Synthetic Construct
  source 1..21: mol_type = other RNA
tgaggtagtaggttgtacagt

SEQ ID NO: 16274 - RNA, 21 nt, Synthetic Construct
  source 1..21: mol_type = other RNA
tgaggtagtaggttgtacagt

SEQ ID NO: 16275 - RNA, 18 nt, Synthetic Construct
  source 1..18: mol_type = other RNA
cctgaagaataagcaccg

SEQ ID NO: 16276 - RNA, 23 nt, Synthetic Construct
  source 1..23: mol_type = other RNA
cgcagcattgtacagggctatga

SEQ ID NO: 16277 - RNA, 20 nt, Synthetic Construct
  source 1..20: mol_type = other RNA
caaagtgctgttcgtgcagg

SEQ ID NO: 16278 - RNA, 22 nt, Synthetic Construct
  source 1..22: mol_type = other RNA
cagtgcaatgttaaaagggcat

SEQ ID NO: 16279 - RNA, 22 nt, Synthetic Construct
  source 1..22: mol_type = other RNA
cagtgcaatgttaaaagggcat

SEQ ID NO: 16280 - RNA, 22 nt, Synthetic Construct
  source 1..22: mol_type = other RNA
tggaatgtaaggaagtgtgtgg

SEQ ID NO: 16281 - RNA, 22 nt, Synthetic Construct
  source 1..22: mol_type = other RNA
tggaatgtaaggaagtgtgtgg

SEQ ID NO: 16282 - RNA, 21 nt, Synthetic Construct
  source 1..21: mol_type = other RNA
cactgatcgagtcgtcctgcg

SEQ ID NO: 16283 - RNA, 21 nt, Synthetic Construct
  source 1..21: mol_type = other RNA
tgaggtagtagattgtatagt

SEQ ID NO: 16284 - RNA, 21 nt, Synthetic Construct
  source 1..21: mol_type = other RNA
tgaggtagaagattgtatagt

SEQ ID NO: 16285 - RNA, 35 nt, Synthetic Construct; identical to SEQ ID NO: 2397
  source 1..35: mol_type = other RNA

SEQ ID NO: 16286 - RNA, 35 nt, Synthetic Construct; identical to SEQ ID NO: 2397
  source 1..35: mol_type = other RNA

SEQ ID NO: 16287 - RNA, 24 nt, Synthetic Construct
  source 1..24: mol_type = other RNA
tgtaaacatccccgactggaagtt

SEQ ID NO: 16288 - RNA, 24 nt, Synthetic Construct
  source 1..24: mol_type = other RNA
tgtaaacatccccgactggaagtt

SEQ ID NO: 16289 - RNA, 22 nt, Synthetic Construct
  source 1..22: mol_type = other RNA
ttatggtttgcctgggactgaa

SEQ ID NO: 16290 - RNA, 22 nt, Synthetic Construct
  source 1..22: mol_type = other RNA
ttatggtttgcctgggactgaa

SEQ ID NO: 16291 - RNA, 24 nt, Synthetic Construct
  source 1..24: mol_type = other RNA
tccctgagaccctttaacctgtgt

SEQ ID NO: 16292 - RNA, 32 nt, Synthetic Construct; identical to SEQ ID NO: 4710
  source 1..32: mol_type = other RNA

SEQ ID NO: 16293 - RNA, 32 nt, Synthetic Construct; identical to SEQ ID NO: 4710
  source 1..32: mol_type = other RNA

SEQ ID NO: 16294 - RNA, 23 nt, Synthetic Construct
  source 1..23: mol_type = other RNA
agtcagtttgtcaaataccccaa

SEQ ID NO: 16295 - RNA, 19 nt, Synthetic Construct
  source 1..19: mol_type = other RNA
gggtgcaagcgttaatcgg

SEQ ID NO: 16296 - RNA, 19 nt, Synthetic Construct
  source 1..19: mol_type = other RNA
gggtgcaagcgttaatcgg

SEQ ID NO: 16297 - RNA, 29 nt, Synthetic Construct
  source 1..29: mol_type = other RNA
cattggtggttcagtggtagaattctcgc

SEQ ID NO: 16298 - RNA, 29 nt, Synthetic Construct
  source 1..29: mol_type = other RNA
cattggtggttcagtggtagaattctcgc

SEQ ID NO: 16299 - RNA, 22 nt, Synthetic Construct
  source 1..22: mol_type = other RNA
tgaagtagtagattgtatagtt

SEQ ID NO: 16300 - RNA, 23 nt, Synthetic Construct
  source 1..23: mol_type = other RNA
gggtaatacgacgtacttagtgt

SEQ ID NO: 16301 - RNA, 23 nt, Synthetic Construct
  source 1..23: mol_type = other RNA
gggtaatacgacgtacttagtgt

SEQ ID NO: 16302 - RNA, 21 nt, Synthetic Construct
  source 1..21: mol_type = other RNA
tgaggtagtgggttgtatagt

SEQ ID NO: 16303 - RNA, 22 nt, Synthetic Construct
  source 1..22: mol_type = other RNA
tgtagtgtctcctactttatgg

SEQ ID NO: 16304 - RNA, 19 nt, Synthetic Construct
  source 1..19: mol_type = other RNA
cctgtctgaatatgggggg

SEQ ID NO: 16305 - RNA, 22 nt, Synthetic Construct
  source 1..22: mol_type = other RNA
actccagccccacagcctcagc

SEQ ID NO: 16306 - RNA, 22 nt, Synthetic Construct
  source 1..22: mol_type = other RNA
actccagccccacagcctcagc

SEQ ID NO: 16307 - RNA, 22 nt, Synthetic Construct
  source 1..22: mol_type = other RNA
ttcaagtagtccaggataggct

SEQ ID NO: 16308 - RNA, 23 nt, Synthetic Construct
  source 1..23: mol_type = other RNA
agcaggacggtggccatggaagt

SEQ ID NO: 16309 - RNA, 23 nt, Synthetic Construct
  source 1..23: mol_type = other RNA
agcaggacggtggccatggaagt

SEQ ID NO: 16310 - RNA, 23 nt, Synthetic Construct
  source 1..23: mol_type = other RNA
tggcaatacgacgtacttagtgt

SEQ ID NO: 16311 - RNA, 23 nt, Synthetic Construct
  source 1..23: mol_type = other RNA
tggcaatacgacgtacttagtgt

SEQ ID NO: 16312 - RNA, 41 nt, Synthetic Construct; identical to SEQ ID NO: 781
  source 1..41: mol_type = other RNA

SEQ ID NO: 16313 - RNA, 41 nt, Synthetic Construct; identical to SEQ ID NO: 781
  source 1..41: mol_type = other RNA

SEQ ID NO: 16314 - RNA, 22 nt, Synthetic Construct
  source 1..22: mol_type = other RNA
tcagtgcactacagagctttgt

SEQ ID NO: 16315 - RNA, 22 nt, Synthetic Construct
  source 1..22: mol_type = other RNA
tcagtgcactacagagctttgt

SEQ ID NO: 16316 - RNA, 22 nt, Synthetic Construct
  source 1..22: mol_type = other RNA
tgaagtagtagattgtatagtt

SEQ ID NO: 16317 - RNA, 22 nt, Synthetic Construct
  source 1..22: mol_type = other RNA
tgaagtagtagattgtatagtt

SEQ ID NO: 16318 - RNA, 29 nt, Synthetic Construct
  source 1..29: mol_type = other RNA
ttacaggggttcgaatcccctaggggacg

SEQ ID NO: 16319 - RNA, 33 nt, Synthetic Construct; identical to SEQ ID NO: 2253
  source 1..33: mol_type = other RNA

SEQ ID NO: 16320 - RNA, 22 nt, Synthetic Construct
  source 1..22: mol_type = other RNA
gcgtaccgtgagtaataatgcg

SEQ ID NO: 16321 - RNA, 22 nt, Synthetic Construct
  source 1..22: mol_type = other RNA
gcgtaccgtgagtaataatgcg

SEQ ID NO: 16322 - RNA, 37 nt, Synthetic Construct; identical to SEQ ID NO: 2447
  source 1..37: mol_type = other RNA

SEQ ID NO: 16323 - RNA, 33 nt, Synthetic Construct; identical to SEQ ID NO: 10461
  source 1..33: mol_type = other RNA

SEQ ID NO: 16324 - RNA, 15 nt, Synthetic Construct
  source 1..15: mol_type = other RNA
tggccgtcgtcagct

SEQ ID NO: 16325 - RNA, 15 nt, Synthetic Construct
  source 1..15: mol_type = other RNA
tggccgtcgtcagct

SEQ ID NO: 16326 - RNA, 23 nt, Synthetic Construct
  source 1..23: mol_type = other RNA
tggtaattcgacgtacttagtgt

SEQ ID NO: 16327 - RNA, 20 nt, Synthetic Construct
  source 1..20: mol_type = other RNA
gctattgacgaccgtaccgc

SEQ ID NO: 16328 - RNA, 16 nt, Synthetic Construct
  source 1..16: mol_type = other RNA
acggcccagactccta

SEQ ID NO: 16329 - RNA, 21 nt, Synthetic Construct
  source 1..21: mol_type = other RNA
taaacggcgggagtaactatg

SEQ ID NO: 16330 - RNA, 16 nt, Synthetic Construct
  source 1..16: mol_type = other RNA
ttgaccgctctgacca

SEQ ID NO: 16331 - RNA, 16 nt, Synthetic Construct
  source 1..16: mol_type = other RNA
cccctggacctgtact

SEQ ID NO: 16332 - RNA, 16 nt, Synthetic Construct
  source 1..16: mol_type = other RNA
cccctggacctgtact

SEQ ID NO: 16333 - RNA, 27 nt, Synthetic Construct
  source 1..27: mol_type = other RNA
ccccccactgctaaattcgactggctt

SEQ ID NO: 16334 - RNA, 27 nt, Synthetic Construct
  source 1..27: mol_type = other RNA
ccccccactgctaaattcgactggctt

SEQ ID NO: 16335 - RNA, 27 nt, Synthetic Construct
  source 1..27: mol_type = other RNA
ccccccactgctaaatttgattggctt

SEQ ID NO: 16336 - RNA, 22 nt, Synthetic Construct
  source 1..22: mol_type = other RNA
tgaggtagtagattgtatagtc

SEQ ID NO: 16337 - RNA, 22 nt, Synthetic Construct
  source 1..22: mol_type = other RNA
tcctgtactgagccgccccgag

SEQ ID NO: 16338 - RNA, 22 nt, Synthetic Construct
  source 1..22: mol_type = other RNA
tcctgtactgagccgccccgag

SEQ ID NO: 16339 - RNA, 22 nt, Synthetic Construct
  source 1..22: mol_type = other RNA
cattgcacttgtctcggtccga

SEQ ID NO: 16340 - RNA, 22 nt, Synthetic Construct
  source 1..22: mol_type = other RNA
cattgcacttgtctcggtccga

SEQ ID NO: 16341 - RNA, 22 nt, Synthetic Construct
  source 1..22: mol_type = other RNA
tgaggtagtgggttgtatagtt

SEQ ID NO: 16342 - RNA, 22 nt, Synthetic Construct
  source 1..22: mol_type = other RNA
tgaggtagtgggttgtatagtt

SEQ ID NO: 16343 - RNA, 23 nt, Synthetic Construct
  source 1..23: mol_type = other RNA
atatcggaacgtgcccagtcgtg

SEQ ID NO: 16344 - RNA, 22 nt, Synthetic Construct
  source 1..22: mol_type = other RNA
tgaggtagcaggttgtgtggtt

SEQ ID NO: 16345 - RNA, 22 nt, Synthetic Construct
  source 1..22: mol_type = other RNA
tgaggtagcaggttgtgtggtt

SEQ ID NO: 16346 - RNA, 23 nt, Synthetic Construct
  source 1..23: mol_type = other RNA
cattgcacttgtctcggtctgaa

SEQ ID NO: 16347 - RNA, 23 nt, Synthetic Construct
  source 1..23: mol_type = other RNA
cattgcacttgtctcggtctgaa

SEQ ID NO: 16348 - RNA, 21 nt, Synthetic Construct
  source 1..21: mol_type = other RNA
tatgtcccacccccactcctg

SEQ ID NO: 16349 - RNA, 21 nt, Synthetic Construct
  source 1..21: mol_type = other RNA
tatgtcccacccccactcctg

SEQ ID NO: 16350 - RNA, 16 nt, Synthetic Construct
  source 1..16: mol_type = other RNA
gtgacgcgcatgaatg

SEQ ID NO: 16351 - RNA, 16 nt, Synthetic Construct
  source 1..16: mol_type = other RNA
gtgacgcgcatgaatg

SEQ ID NO: 16352 - RNA, 28 nt, Synthetic Construct
  source 1..28: mol_type = other RNA
ggtggctgtagctcagttggtagagtcc

SEQ ID NO: 16353 - RNA, 28 nt, Synthetic Construct
  source 1..28: mol_type = other RNA
ggtggctgtagctcagttggtagagtcc

SEQ ID NO: 16354 - RNA, 22 nt, Synthetic Construct
  source 1..22: mol_type = other RNA
tagcagcacgtaaatattgacg

SEQ ID NO: 16355 - RNA, 22 nt, Synthetic Construct
  source 1..22: mol_type = other RNA
tagcagcacgtaaatattgacg

SEQ ID NO: 16356 - RNA, 17 nt, Synthetic Construct
  source 1..17: mol_type = other RNA
gttctacagtccgacga

SEQ ID NO: 16357 - RNA, 17 nt, Synthetic Construct
  source 1..17: mol_type = other RNA
gttctacagtccgacga

SEQ ID NO: 16358 - RNA, 22 nt, Synthetic Construct
  source 1..22: mol_type = other RNA
tatcagcacgtaaatattggcg

SEQ ID NO: 16359 - RNA, 31 nt, Synthetic Construct; identical to SEQ ID NO: 2758
  source 1..31: mol_type = other RNA

SEQ ID NO: 16360 - RNA, 18 nt, Synthetic Construct
  source 1..18: mol_type = other RNA
tgcgtagatatgcggagg

SEQ ID NO: 16361 - RNA, 17 nt, Synthetic Construct
  source 1..17: mol_type = other RNA
cgtgagctgggtttaga

SEQ ID NO: 16362 - RNA, 17 nt, Synthetic Construct
  source 1..17: mol_type = other RNA
cgtgagctgggtttaga

SEQ ID NO: 16363 - RNA, 22 nt, Synthetic Construct
  source 1..22: mol_type = other RNA
tgaggtagtagtttgtgctgta

SEQ ID NO: 16364 - RNA, 22 nt, Synthetic Construct
  source 1..22: mol_type = other RNA
tgaggtagtagtttgtgctgta

SEQ ID NO: 16365 - RNA, 21 nt, Synthetic Construct
  source 1..21: mol_type = other RNA
tggagtgtggcaatggtgttt

SEQ ID NO: 16366 - RNA, 21 nt, Synthetic Construct
  source 1..21: mol_type = other RNA
tggagtgtggcaatggtgttt

SEQ ID NO: 16367 - RNA, 16 nt, Synthetic Construct
  source 1..16: mol_type = other RNA
agcaagtcgaacggta

SEQ ID NO: 16368 - RNA, 23 nt, Synthetic Construct
  source 1..23: mol_type = other RNA
ggatatcatcatatactgtaagt

SEQ ID NO: 16369 - RNA, 23 nt, Synthetic Construct
  source 1..23: mol_type = other RNA
ggatatcatcatatactgtaagt

SEQ ID NO: 16370 - RNA, 22 nt, Synthetic Construct
  source 1..22: mol_type = other RNA
acagtagtctgcacattggttt

SEQ ID NO: 16371 - RNA, 22 nt, Synthetic Construct
  source 1..22: mol_type = other RNA
acagtagtctgcacattggttt

SEQ ID NO: 16372 - RNA, 16 nt, Synthetic Construct
  source 1..16: mol_type = other RNA
gcaagaggtcagcggt

SEQ ID NO: 16373 - RNA, 31 nt, Synthetic Construct; identical to SEQ ID NO: 2758
  source 1..31: mol_type = other RNA

SEQ ID NO: 16374 - RNA, 31 nt, Synthetic Construct; identical to SEQ ID NO: 2758
  source 1..31: mol_type = other RNA

SEQ ID NO: 16375 - RNA, 23 nt, Synthetic Construct
  source 1..23: mol_type = other RNA
tctacagtgcacgtgtctccagt

SEQ ID NO: 16376 - RNA, 22 nt, Synthetic Construct
  source 1..22: mol_type = other RNA
tgaggtagtagattgtgtggtt

SEQ ID NO: 16377 - RNA, 22 nt, Synthetic Construct
  source 1..22: mol_type = other RNA
tcaaatcccggacgagccccca

SEQ ID NO: 16378 - RNA, 22 nt, Synthetic Construct
  source 1..22: mol_type = other RNA
tcaaatcccggacgagccccca

SEQ ID NO: 16379 - RNA, 21 nt, Synthetic Construct
  source 1..21: mol_type = other RNA
caacggaatcccaaaagcagc

SEQ ID NO: 16380 - RNA, 26 nt, Synthetic Construct
  source 1..26: mol_type = other RNA
gacttaccaaacctatgcaaactccg

SEQ ID NO: 16381 - RNA, 26 nt, Synthetic Construct
  source 1..26: mol_type = other RNA
gacttaccaaacctatgcaaactccg

SEQ ID NO: 16382 - RNA, 21 nt, Synthetic Construct
  source 1..21: mol_type = other RNA
tgaggcagtaggttgtatagt

SEQ ID NO: 16383 - RNA, 23 nt, Synthetic Construct
  source 1..23: mol_type = other RNA
aggggtgctatctgtgattgagg

SEQ ID NO: 16384 - RNA, 22 nt, Synthetic Construct
  source 1..22: mol_type = other RNA
tagcagcaagtaaatattggcg

SEQ ID NO: 16385 - RNA, 22 nt, Synthetic Construct
  source 1..22: mol_type = other RNA
tagcagcaagtaaatattggcg

SEQ ID NO: 16386 - RNA, 22 nt, Synthetic Construct
  source 1..22: mol_type = other RNA
tcttggagtaggtcattgggtg

SEQ ID NO: 16387 - RNA, 23 nt, Synthetic Construct
  source 1..23: mol_type = other RNA
cgaagtgctgttcgtgcaggtag

SEQ ID NO: 16388 - RNA, 23 nt, Synthetic Construct
  source 1..23: mol_type = other RNA
cgaagtgctgttcgtgcaggtag

SEQ ID NO: 16389 - RNA, 15 nt, Synthetic Construct
  source 1..15: mol_type = other RNA
ttccgaaagtagtgg

SEQ ID NO: 16390 - RNA, 15 nt, Synthetic Construct
  source 1..15: mol_type = other RNA
ttccgaaagtagtgg

SEQ ID NO: 16391 - RNA, 34 nt, Synthetic Construct; identical to SEQ ID NO: 1111
  source 1..34: mol_type = other RNA

SEQ ID NO: 16392 - RNA, 25 nt, Synthetic Construct
  source 1..25: mol_type = other RNA
ggtaaaatagctgagtgaagcattg

SEQ ID NO: 16393 - RNA, 25 nt, Synthetic Construct
  source 1..25: mol_type = other RNA
ggtaaaatagctgagtgaagcattg

SEQ ID NO: 16394 - RNA, 23 nt, Synthetic Construct
  source 1..23: mol_type = other RNA
tgaggtagcaggttgtgtggttt

SEQ ID NO: 16395 - RNA, 23 nt, Synthetic Construct
  source 1..23: mol_type = other RNA
tgaggtagcaggttgtgtggttt

SEQ ID NO: 16396 - RNA, 20 nt, Synthetic Construct
  source 1..20: mol_type = other RNA
tgaggtagtaggttgcatag

SEQ ID NO: 16397 - RNA, 20 nt, Synthetic Construct
  source 1..20: mol_type = other RNA
tgaggtagtaggttgcatag

SEQ ID NO: 16398 - RNA, 22 nt, Synthetic Construct
  source 1..22: mol_type = other RNA
aggttccggataagtaagagcc

SEQ ID NO: 16399 - RNA, 22 nt, Synthetic Construct
  source 1..22: mol_type = other RNA
cctctgggcccttcctccagtt

SEQ ID NO: 16400 - RNA, 21 nt, Synthetic Construct
  source 1..21: mol_type = other RNA
tgaggcagtaggttgtgtggt

SEQ ID NO: 16401 - RNA, 21 nt, Synthetic Construct
  source 1..21: mol_type = other RNA
tgaggcagtaggttgtgtggt

SEQ ID NO: 16402 - RNA, 25 nt, Synthetic Construct
  source 1..25: mol_type = other RNA
gagaaagctcacaagaactgctaac

SEQ ID NO: 16403 - RNA, 25 nt, Synthetic Construct
  source 1..25: mol_type = other RNA
gagaaagctcacaagaactgctaac

SEQ ID NO: 16404 - RNA, 28 nt, Synthetic Construct
  source 1..28: mol_type = other RNA
cccccccactgctaaatttgactggctt

SEQ ID NO: 16405 - RNA, 28 nt, Synthetic Construct
  source 1..28: mol_type = other RNA
cccccccactgctaaatttgactggctt

SEQ ID NO: 16406 - RNA, 36 nt, Synthetic Construct; identical to SEQ ID NO: 2660
  source 1..36: mol_type = other RNA

SEQ ID NO: 16407 - RNA, 17 nt, Synthetic Construct
  source 1..17: mol_type = other RNA
cacggcccagactccta

SEQ ID NO: 16408 - RNA, 21 nt, Synthetic Construct
  source 1..21: mol_type = other RNA
tctttggttatctagctgtat

SEQ ID NO: 16409 - RNA, 21 nt, Synthetic Construct
  source 1..21: mol_type = other RNA
tctttggttatctagctgtat

SEQ ID NO: 16410 - RNA, 22 nt, Synthetic Construct
  source 1..22: mol_type = other RNA
tgaggtagaaggttgtgtggtt

SEQ ID NO: 16411 - RNA, 22 nt, Synthetic Construct
  source 1..22: mol_type = other RNA
tgaggtagaaggttgtgtggtt

SEQ ID NO: 16412 - RNA, 23 nt, Synthetic Construct
  source 1..23: mol_type = other RNA
tcctgtaccgagctgccccgaga

SEQ ID NO: 16413 - RNA, 23 nt, Synthetic Construct
  source 1..23: mol_type = other RNA
tcctgtaccgagctgccccgaga

SEQ ID NO: 16414 - RNA, 32 nt, Synthetic Construct; identical to SEQ ID NO: 2435
  source 1..32: mol_type = other RNA

SEQ ID NO: 16415 - RNA, 27 nt, Synthetic Construct
  source 1..27: mol_type = other RNA
ccccccgctgctaaatttgactggcta

SEQ ID NO: 16416 - RNA, 23 nt, Synthetic Construct
  source 1..23: mol_type = other RNA
caaagtgctgttcatgcaggtag

SEQ ID NO: 16417 - RNA, 21 nt, Synthetic Construct
  source 1..21: mol_type = other RNA
tgaggggcagagagcgaggct

SEQ ID NO: 16418 - RNA, 19 nt, Synthetic Construct
  source 1..19: mol_type = other RNA
atcacattgccagggattt

SEQ ID NO: 16419 - RNA, 19 nt, Synthetic Construct
  source 1..19: mol_type = other RNA
atcacattgccagggattt

SEQ ID NO: 16420 - RNA, 20 nt, Synthetic Construct
  source 1..20: mol_type = other RNA
tacagtatagatgatgtact

SEQ ID NO: 16421 - RNA, 20 nt, Synthetic Construct
  source 1..20: mol_type = other RNA
tacagtatagatgatgtact

SEQ ID NO: 16422 - RNA, 22 nt, Synthetic Construct
  source 1..22: mol_type = other RNA
gtcagtttgtcaaataccccaa

SEQ ID NO: 16423 - RNA, 22 nt, Synthetic Construct
  source 1..22: mol_type = other RNA
gtcagtttgtcaaataccccaa

SEQ ID NO: 16424 - RNA, 22 nt, Synthetic Construct
  source 1..22: mol_type = other RNA
tgtagagcagggagcaggaagc

SEQ ID NO: 16425 - RNA, 22 nt, Synthetic Construct
  source 1..22: mol_type = other RNA
tgtagagcagggagcaggaagc

SEQ ID NO: 16426 - RNA, 19 nt, Synthetic Construct
  source 1..19: mol_type = other RNA
tgtcagtttgtcaaatacc

SEQ ID NO: 16427 - RNA, 21 nt, Synthetic Construct
  source 1..21: mol_type = other RNA
taactccttaagcaatctcgc

SEQ ID NO: 16428 - RNA, 21 nt, Synthetic Construct
  source 1..21: mol_type = other RNA
taactccttaagcaatctcgc

SEQ ID NO: 16429 - RNA, 31 nt, Synthetic Construct; identical to SEQ ID NO: 2423
  source 1..31: mol_type = other RNA

SEQ ID NO: 16430 - RNA, 31 nt, Synthetic Construct; identical to SEQ ID NO: 2423
  source 1..31: mol_type = other RNA

SEQ ID NO: 16431 - RNA, 22 nt, Synthetic Construct
  source 1..22: mol_type = other RNA
tagcagtacgtaaatattggcg

SEQ ID NO: 16432 - RNA, 22 nt, Synthetic Construct
  source 1..22: mol_type = other RNA
tagcagtacgtaaatattggcg

SEQ ID NO: 16433 - RNA, 19 nt, Synthetic Construct
  source 1..19: mol_type = other RNA
gctattgacgaccgtaccg

SEQ ID NO: 16434 - RNA, 19 nt, Synthetic Construct
  source 1..19: mol_type = other RNA
gctattgacgaccgtaccg

SEQ ID NO: 16435 - RNA, 32 nt, Synthetic Construct; identical to SEQ ID NO: 1238
  source 1..32: mol_type = other RNA

SEQ ID NO: 16436 - RNA, 32 nt, Synthetic Construct; identical to SEQ ID NO: 1238
  source 1..32: mol_type = other RNA

SEQ ID NO: 16437 - RNA, 31 nt, Synthetic Construct; identical to SEQ ID NO: 1225
  source 1..31: mol_type = other RNA

SEQ ID NO: 16438 - RNA, 31 nt, Synthetic Construct; identical to SEQ ID NO: 1225
  source 1..31: mol_type = other RNA

SEQ ID NO: 16439 - RNA, 35 nt, Synthetic Construct; identical to SEQ ID NO: 2450
  source 1..35: mol_type = other RNA

SEQ ID NO: 16440 - RNA, 16 nt, Synthetic Construct
  source 1..16: mol_type = other RNA
gtctacggccacacca

SEQ ID NO: 16441 - RNA, 16 nt, Synthetic Construct
  source 1..16: mol_type = other RNA
gtctacggccacacca

SEQ ID NO: 16442 - RNA, 18 nt, Synthetic Construct
  source 1..18: mol_type = other RNA
gctgtgatggccgagtgg

SEQ ID NO: 16443 - RNA, 18 nt, Synthetic Construct
  source 1..18: mol_type = other RNA
gctgtgatggccgagtgg

SEQ ID NO: 16444 - RNA, 31 nt, Synthetic Construct; identical to SEQ ID NO: 4881
  source 1..31: mol_type = other RNA

SEQ ID NO: 16445 - RNA, 31 nt, Synthetic Construct; identical to SEQ ID NO: 4881
  source 1..31: mol_type = other RNA

SEQ ID NO: 16446 - RNA, 22 nt, Synthetic Construct
  source 1..22: mol_type = other RNA
tgagatagtaggttgtgtggtt

SEQ ID NO: 16447 - RNA, 21 nt, Synthetic Construct
  source 1..21: mol_type = other RNA
gtcagtttgtcaaatacccca

SEQ ID NO: 16448 - RNA, 20 nt, Synthetic Construct
  source 1..20: mol_type = other RNA
taactccttagcgatctcgc

SEQ ID NO: 16449 - RNA, 18 nt, Synthetic Construct
  source 1..18: mol_type = other RNA
gcgccgatgatagtgcgg

SEQ ID NO: 16450 - RNA, 18 nt, Synthetic Construct
  source 1..18: mol_type = other RNA
gcgccgatgatagtgcgg

SEQ ID NO: 16451 - RNA, 25 nt, Synthetic Construct
  source 1..25: mol_type = other RNA
tgaggggcagagagcgagacttttt

SEQ ID NO: 16452 - RNA, 27 nt, Synthetic Construct
  source 1..27: mol_type = other RNA
cgcgacctcagatcagacgtggcgacc

SEQ ID NO: 16453 - RNA, 27 nt, Synthetic Construct
  source 1..27: mol_type = other RNA
cgcgacctcagatcagacgtggcgacc

SEQ ID NO: 16454 - RNA, 17 nt, Synthetic Construct
  source 1..17: mol_type = other RNA
tggccgttcttagttgg

SEQ ID NO: 16455 - RNA, 22 nt, Synthetic Construct
  source 1..22: mol_type = other RNA
tgaggtagtagtttgtactgtt

SEQ ID NO: 16456 - RNA, 21 nt, Synthetic Construct
  source 1..21: mol_type = other RNA
tggagtgtgacgatggtgttt

SEQ ID NO: 16457 - RNA, 21 nt, Synthetic Construct
  source 1..21: mol_type = other RNA
tggagtgtgacgatggtgttt

SEQ ID NO: 16458 - RNA, 24 nt, Synthetic Construct
  source 1..24: mol_type = other RNA
tgtaaacatcctacactctcagct

SEQ ID NO: 16459 - RNA, 24 nt, Synthetic Construct
  source 1..24: mol_type = other RNA
tgtaaacatcctacactctcagct

SEQ ID NO: 16460 - RNA, 22 nt, Synthetic Construct
  source 1..22: mol_type = other RNA
tggggtagtagtttgtgctgtt

SEQ ID NO: 16461 - RNA, 19 nt, Synthetic Construct
  source 1..19: mol_type = other RNA
cctcgtcatctaattagtg

SEQ ID NO: 16462 - RNA, 19 nt, Synthetic Construct
  source 1..19: mol_type = other RNA
cctcgtcatctaattagtg

SEQ ID NO: 16463 - RNA, 17 nt, Synthetic Construct
  source 1..17: mol_type = other RNA
agtgacgcgcatgaatg

SEQ ID NO: 16464 - RNA, 17 nt, Synthetic Construct
  source 1..17: mol_type = other RNA
agtgacgcgcatgaatg

SEQ ID NO: 16465 - RNA, 24 nt, Synthetic Construct
  source 1..24: mol_type = other RNA
tcttggagtaggtcattgggtggt

SEQ ID NO: 16466 - RNA, 22 nt, Synthetic Construct
  source 1..22: mol_type = other RNA
tgtggtagtaggttgtatagtt

SEQ ID NO: 16467 - RNA, 19 nt, Synthetic Construct
  source 1..19: mol_type = other RNA
atcccactcctgacaccat

SEQ ID NO: 16468 - RNA, 19 nt, Synthetic Construct
  source 1..19: mol_type = other RNA
atcccactcctgacaccat

SEQ ID NO: 16469 - RNA, 23 nt, Synthetic Construct
  source 1..23: mol_type = other RNA
agcagcattgtacagggctatgt

SEQ ID NO: 16470 - RNA, 23 nt, Synthetic Construct
  source 1..23: mol_type = other RNA
agcagcattgtacagggctatgt

SEQ ID NO: 16471 - RNA, 22 nt, Synthetic Construct
  source 1..22: mol_type = other RNA
cgaggtagtagattgtatagtt

SEQ ID NO: 16472 - RNA, 22 nt, Synthetic Construct
  source 1..22: mol_type = other RNA
cgaggtagtagattgtatagtt

SEQ ID NO: 16473 - RNA, 33 nt, Synthetic Construct; identical to SEQ ID NO: 2419
  source 1..33: mol_type = other RNA

SEQ ID NO: 16474 - RNA, 39 nt, Synthetic Construct; identical to SEQ ID NO: 4939
  source 1..39: mol_type = other RNA

SEQ ID NO: 16475 - RNA, 39 nt, Synthetic Construct; identical to SEQ ID NO: 4939
  source 1..39: mol_type = other RNA

SEQ ID NO: 16476 - RNA, 17 nt, Synthetic Construct
  source 1..17: mol_type = other RNA
gcaataacaggtctgtg

SEQ ID NO: 16477 - RNA, 17 nt, Synthetic Construct
  source 1..17: mol_type = other RNA
gcaataacaggtctgtg

SEQ ID NO: 16478 - RNA, 33 nt, Synthetic Construct; identical to SEQ ID NO: 2638
  source 1..33: mol_type = other RNA

SEQ ID NO: 16479 - RNA, 33 nt, Synthetic Construct; identical to SEQ ID NO: 2638
  source 1..33: mol_type = other RNA

SEQ ID NO: 16480 - RNA, 21 nt, Synthetic Construct
  source 1..21: mol_type = other RNA
ctagactgaggctccttgagg

SEQ ID NO: 16481 - RNA, 21 nt, Synthetic Construct
  source 1..21: mol_type = other RNA
ctagactgaggctccttgagg

SEQ ID NO: 16482 - RNA, 22 nt, Synthetic Construct
  source 1..22: mol_type = other RNA
tgaggtagtagtttgtgctatt

SEQ ID NO: 16483 - RNA, 22 nt, Synthetic Construct
  source 1..22: mol_type = other RNA
tgaggtagtagtttgtgctatt

SEQ ID NO: 16484 - RNA, 21 nt, Synthetic Construct
  source 1..21: mol_type = other RNA
acagcaggacggtggccatgg

SEQ ID NO: 16485 - RNA, 22 nt, Synthetic Construct
  source 1..22: mol_type = other RNA
ngaggtagtagtttgtgctgtt

SEQ ID NO: 16486 - RNA, 22 nt, Synthetic Construct
  source 1..22: mol_type = other RNA
ngaggtagtagtttgtgctgtt

SEQ ID NO: 16487 - RNA, 22 nt, Synthetic Construct
  source 1..22: mol_type = other RNA
ttcgagtaatccaggataggct

SEQ ID NO: 16488 - RNA, 27 nt, Synthetic Construct
  source 1..27: mol_type = other RNA
ccccccactgctaaatttggctggcta

SEQ ID NO: 16489 - RNA, 27 nt, Synthetic Construct
  source 1..27: mol_type = other RNA
ccccccactgctaaatttggctggcta

SEQ ID NO: 16490 - RNA, 21 nt, Synthetic Construct
  source 1..21: mol_type = other RNA
cgaggtagtagattgtatagt

SEQ ID NO: 16491 - RNA, 19 nt, Synthetic Construct
  source 1..19: mol_type = other RNA
gagaaagctcacaagaact

SEQ ID NO: 16492 - RNA, 19 nt, Synthetic Construct
  source 1..19: mol_type = other RNA
gagaaagctcacaagaact

SEQ ID NO: 16493 - RNA, 22 nt, Synthetic Construct
  source 1..22: mol_type = other RNA
taactccttaagcaaatctcgc

SEQ ID NO: 16494 - RNA, 25 nt, Synthetic Construct
  source 1..25: mol_type = other RNA
ttggggatatgagatcgagacgaca

SEQ ID NO: 16495 - RNA, 23 nt, Synthetic Construct
  source 1..23: mol_type = other RNA
tccccttggggttgtaggaccac

SEQ ID NO: 16496 - RNA, 27 nt, Synthetic Construct
  source 1..27: mol_type = other RNA
gactcttagcggtggatcactcggctc

SEQ ID NO: 16497 - RNA, 27 nt, Synthetic Construct
  source 1..27: mol_type = other RNA
gactcttagcggtggatcactcggctc

SEQ ID NO: 16498 - RNA, 22 nt, Synthetic Construct
  source 1..22: mol_type = other RNA
aatgacacgatcactcccgttg

SEQ ID NO: 16499 - RNA, 22 nt, Synthetic Construct
  source 1..22: mol_type = other RNA
aatgacacgatcactcccgttg

SEQ ID NO: 16500 - RNA, 23 nt, Synthetic Construct
  source 1..23: mol_type = other RNA
tcctgtactgagctgccccgagc

SEQ ID NO: 16501 - RNA, 23 nt, Synthetic Construct
  source 1..23: mol_type = other RNA
tcctgtactgagctgccccgagc

SEQ ID NO: 16502 - RNA, 21 nt, Synthetic Construct
  source 1..21: mol_type = other RNA
tcacagtgaaccggtctcttt

SEQ ID NO: 16503 - RNA, 21 nt, Synthetic Construct
  source 1..21: mol_type = other RNA
tcacagtgaaccggtctcttt

SEQ ID NO: 16504 - RNA, 23 nt, Synthetic Construct
  source 1..23: mol_type = other RNA
tccagtactgagctgccccgagt

SEQ ID NO: 16505 - RNA, 23 nt, Synthetic Construct
  source 1..23: mol_type = other RNA
tccagtactgagctgccccgagt

SEQ ID NO: 16506 - RNA, 17 nt, Synthetic Construct
  source 1..17: mol_type = other RNA
tgccagcagccgcggta

SEQ ID NO: 16507 - RNA, 22 nt, Synthetic Construct
  source 1..22: mol_type = other RNA
tgaggaagtagtttgtgctgtt

SEQ ID NO: 16508 - RNA, 22 nt, Synthetic Construct
  source 1..22: mol_type = other RNA
tgaggaagtagtttgtgctgtt

SEQ ID NO: 16509 - RNA, 18 nt, Synthetic Construct
  source 1..18: mol_type = other RNA
cccaaaggtcgtcggttc

SEQ ID NO: 16510 - RNA, 18 nt, Synthetic Construct
  source 1..18: mol_type = other RNA
cccaaaggtcgtcggttc

SEQ ID NO: 16511 - RNA, 22 nt, Synthetic Construct
  source 1..22: mol_type = other RNA
tacgtcatcgttgtcatcgtca

SEQ ID NO: 16512 - RNA, 22 nt, Synthetic Construct
  source 1..22: mol_type = other RNA
tacgtcatcgttgtcatcgtca

SEQ ID NO: 16513 - RNA, 23 nt, Synthetic Construct
  source 1..23: mol_type = other RNA
tgaagggcagagagcgagacttt

SEQ ID NO: 16514 - RNA, 23 nt, Synthetic Construct
  source 1..23: mol_type = other RNA
tgaagggcagagagcgagacttt

SEQ ID NO: 16515 - RNA, 27 nt, Synthetic Construct
  source 1..27: mol_type = other RNA
ccccccactgctaaatttaactggctt

SEQ ID NO: 16516 - RNA, 27 nt, Synthetic Construct
  source 1..27: mol_type = other RNA
gcattggtggttcagtggtagaattct

SEQ ID NO: 16517 - RNA, 23 nt, Synthetic Construct
  source 1..23: mol_type = other RNA
tgtcagtttgtcaaataccccaa

SEQ ID NO: 16518 - RNA, 15 nt, Synthetic Construct
  source 1..15: mol_type = other RNA
catgccgcgtgcggg

SEQ ID NO: 16519 - RNA, 15 nt, Synthetic Construct
  source 1..15: mol_type = other RNA
catgccgcgtgcggg

SEQ ID NO: 16520 - RNA, 21 nt, Synthetic Construct
  source 1..21: mol_type = other RNA
tgaggtagtagtttgtgccgt

SEQ ID NO: 16521 - RNA, 23 nt, Synthetic Construct
  source 1..23: mol_type = other RNA
tgtgactggttgaccagaggggt

SEQ ID NO: 16522 - RNA, 22 nt, Synthetic Construct
  source 1..22: mol_type = other RNA
tcaaatcccggacgagccccca

SEQ ID NO: 16523 - RNA, 22 nt, Synthetic Construct
  source 1..22: mol_type = other RNA
tcaaatcccggacgagccccca

SEQ ID NO: 16524 - RNA, 22 nt, Synthetic Construct
  source 1..22: mol_type = other RNA
atcaagtaattcaggataggtt

SEQ ID NO: 16525 - RNA, 36 nt, Synthetic Construct; identical to SEQ ID NO: 8838
  source 1..36: mol_type = other RNA

SEQ ID NO: 16526 - RNA, 36 nt, Synthetic Construct; identical to SEQ ID NO: 8838
  source 1..36: mol_type = other RNA

SEQ ID NO: 16527 - RNA, 21 nt, Synthetic Construct
  source 1..21: mol_type = other RNA
gctattgacgaccgtaccgca

SEQ ID NO: 16528 - RNA, 19 nt, Synthetic Construct
  source 1..19: mol_type = other RNA
atcacattgccagggattt

SEQ ID NO: 16529 - RNA, 17 nt, Synthetic Construct
  source 1..17: mol_type = other RNA
tagggaacgtgagctgg

SEQ ID NO: 16530 - RNA, 17 nt, Synthetic Construct
  source 1..17: mol_type = other RNA
cagtagctcgaggaaaa

SEQ ID NO: 16531 - RNA, 28 nt, Synthetic Construct
  source 1..28: mol_type = other RNA
ggtggctgtagctcagttggtagagtcc

SEQ ID NO: 16532 - RNA, 28 nt, Synthetic Construct
  source 1..28: mol_type = other RNA
ggtggctgtagctcagttggtagagtcc

SEQ ID NO: 16533 - RNA, 23 nt, Synthetic Construct
  source 1..23: mol_type = other RNA
caacggagtcccaaaagcagctg

SEQ ID NO: 16534 - RNA, 32 nt, Synthetic Construct; identical to SEQ ID NO: 989
  source 1..32: mol_type = other RNA

SEQ ID NO: 16535 - RNA, 32 nt, Synthetic Construct; identical to SEQ ID NO: 989
  source 1..32: mol_type = other RNA

SEQ ID NO: 16536 - RNA, 23 nt, Synthetic Construct
  source 1..23: mol_type = other RNA
tgaggtagtagtttgtacagttg

SEQ ID NO: 16537 - RNA, 23 nt, Synthetic Construct
  source 1..23: mol_type = other RNA
tgaggtagtagtttgtacagttg

SEQ ID NO: 16538 - RNA, 23 nt, Synthetic Construct
  source 1..23: mol_type = other RNA
cgtgtatttgacaagctgagttg

SEQ ID NO: 16539 - RNA, 23 nt, Synthetic Construct
  source 1..23: mol_type = other RNA
cgtgtatttgacaagctgagttg

SEQ ID NO: 16540 - RNA, 23 nt, Synthetic Construct
  source 1..23: mol_type = other RNA
agcagcattgcacagggctatga

SEQ ID NO: 16541 - RNA, 17 nt, Synthetic Construct
  source 1..17: mol_type = other RNA
acagtcaggatgttggc

SEQ ID NO: 16542 - RNA, 17 nt, Synthetic Construct
  source 1..17: mol_type = other RNA
acagtcaggatgttggc

SEQ ID NO: 16543 - RNA, 20 nt, Synthetic Construct
  source 1..20: mol_type = other RNA
tgaggaagtaggttgtgtgg

SEQ ID NO: 16544 - RNA, 20 nt, Synthetic Construct
  source 1..20: mol_type = other RNA
tgaggaagtaggttgtgtgg

SEQ ID NO: 16545 - RNA, 22 nt, Synthetic Construct
  source 1..22: mol_type = other RNA
cattgcacttgtctcagtctga

SEQ ID NO: 16546 - RNA, 24 nt, Synthetic Construct
  source 1..24: mol_type = other RNA
atcacattgccagggatttccaat

SEQ ID NO: 16547 - RNA, 23 nt, Synthetic Construct
  source 1..23: mol_type = other RNA
caacggaatcccaaaagcagccg

SEQ ID NO: 16548 - RNA, 24 nt, Synthetic Construct
  source 1..24: mol_type = other RNA
tgtaaacatccccgactggaggct

SEQ ID NO: 16549 - RNA, 24 nt, Synthetic Construct
  source 1..24: mol_type = other RNA
tgtaaacatccccgactggaggct

SEQ ID NO: 16550 - RNA, 22 nt, Synthetic Construct
  source 1..22: mol_type = other RNA
cattgcacttgcctcggtctga

SEQ ID NO: 16551 - RNA, 21 nt, Synthetic Construct
  source 1..21: mol_type = other RNA
tgaggtagtgggttgtatagt

SEQ ID NO: 16552 - RNA, 21 nt, Synthetic Construct
  source 1..21: mol_type = other RNA
tgaggtagtgggttgtatagt

SEQ ID NO: 16553 - RNA, 23 nt, Synthetic Construct
  source 1..23: mol_type = other RNA
ggctcggtctgaggcccctcagt

SEQ ID NO: 16554 - RNA, 23 nt, Synthetic Construct
  source 1..23: mol_type = other RNA
ggctcggtctgaggcccctcagt

SEQ ID NO: 16555 - RNA, 22 nt, Synthetic Construct
  source 1..22: mol_type = other RNA
tctttgttcgattccgttgagt

SEQ ID NO: 16556 - RNA, 22 nt, Synthetic Construct
  source 1..22: mol_type = other RNA
tctttgttcgattccgttgagt

SEQ ID NO: 16557 - RNA, 20 nt, Synthetic Construct
  source 1..20: mol_type = other RNA
tggaatgtaaagaagtatgt

SEQ ID NO: 16558 - RNA, 21 nt, Synthetic Construct
  source 1..21: mol_type = other RNA
attgcacttgtcccggcctgt

SEQ ID NO: 16559 - RNA, 21 nt, Synthetic Construct
  source 1..21: mol_type = other RNA
attgcacttgtcccggcctgt

SEQ ID NO: 16560 - RNA, 22 nt, Synthetic Construct
  source 1..22: mol_type = other RNA
tagcagcatgtaaatattggcg

SEQ ID NO: 16561 - RNA, 22 nt, Synthetic Construct
  source 1..22: mol_type = other RNA
tagcagcatgtaaatattggcg

SEQ ID NO: 16562 - RNA, 22 nt, Synthetic Construct
  source 1..22: mol_type = other RNA
caaagtgcttacagtgcaggta

SEQ ID NO: 16563 - RNA, 23 nt, Synthetic Construct
  source 1..23: mol_type = other RNA
ccctgtactgagctgccccgagt

SEQ ID NO: 16564 - RNA, 24 nt, Synthetic Construct
  source 1..24: mol_type = other RNA
tgtgatttctgcccagtgctctga

SEQ ID NO: 16565 - RNA, 24 nt, Synthetic Construct
  source 1..24: mol_type = other RNA
tgtgatttctgcccagtgctctga

SEQ ID NO: 16566 - RNA, 22 nt, Synthetic Construct
  source 1..22: mol_type = other RNA
tatcggaacgtgcccagtcgtg

SEQ ID NO: 16567 - RNA, 22 nt, Synthetic Construct
  source 1..22: mol_type = other RNA
tatcggaacgtgcccagtcgtg

SEQ ID NO: 16568 - RNA, 22 nt, Synthetic Construct
  source 1..22: mol_type = other RNA
tgaggtagtaggtcgtgtggtt

SEQ ID NO: 16569 - RNA, 22 nt, Synthetic Construct
  source 1..22: mol_type = other RNA
tgaggtagtaggtcgtgtggtt

SEQ ID NO: 16570 - RNA, 22 nt, Synthetic Construct
  source 1..22: mol_type = other RNA
tgaggtagtaggttgtgttgtt

SEQ ID NO: 16571 - RNA, 22 nt, Synthetic Construct
  source 1..22: mol_type = other RNA
tgaggtagtaggttgtgttgtt

SEQ ID NO: 16572 - RNA, 19 nt, Synthetic Construct
  source 1..19: mol_type = other RNA
tgaggtagtaggttgtata

SEQ ID NO: 16573 - RNA, 21 nt, Synthetic Construct
  source 1..21: mol_type = other RNA
tgaggaagtaggttgtatagt

SEQ ID NO: 16574 - RNA, 21 nt, Synthetic Construct
  source 1..21: mol_type = other RNA
tgaggaagtaggttgtatagt

SEQ ID NO: 16575 - RNA, 17 nt, Synthetic Construct
  source 1..17: mol_type = other RNA
ccaaggggtcgtgggtt

SEQ ID NO: 16576 - RNA, 17 nt, Synthetic Construct
  source 1..17: mol_type = other RNA
ccaaggggtcgtgggtt

SEQ ID NO: 16577 - RNA, 22 nt, Synthetic Construct
  source 1..22: mol_type = other RNA
tcgtaccgtgagtaatgatgcg

SEQ ID NO: 16578 - RNA, 22 nt, Synthetic Construct
  source 1..22: mol_type = other RNA
tcgtaccgtgagtaatgatgcg

SEQ ID NO: 16579 - RNA, 24 nt, Synthetic Construct
  source 1..24: mol_type = other RNA
tgtaaacatcctacactctcagct

SEQ ID NO: 16580 - RNA, 24 nt, Synthetic Construct
  source 1..24: mol_type = other RNA
tgtaaacatcctacactctcagct

SEQ ID NO: 16581 - RNA, 20 nt, Synthetic Construct
  source 1..20: mol_type = other RNA
cccgtgttcggaagattttc

SEQ ID NO: 16582 - RNA, 20 nt, Synthetic Construct
  source 1..20: mol_type = other RNA
cccgtgttcggaagattttc

SEQ ID NO: 16583 - RNA, 22 nt, Synthetic Construct
  source 1..22: mol_type = other RNA
tgaggttgtaggttgtatagtt

SEQ ID NO: 16584 - RNA, 22 nt, Synthetic Construct
  source 1..22: mol_type = other RNA
actggctagggaaaatgattgg

SEQ ID NO: 16585 - RNA, 22 nt, Synthetic Construct
  source 1..22: mol_type = other RNA
actggctagggaaaatgattgg

SEQ ID NO: 16586 - RNA, 21 nt, Synthetic Construct
  source 1..21: mol_type = other RNA
tgtagtgtttcctactttatg

SEQ ID NO: 16587 - RNA, 20 nt, Synthetic Construct
  source 1..20: mol_type = other RNA
tgaggtggtaggttgtgtgg

SEQ ID NO: 16588 - RNA, 20 nt, Synthetic Construct
  source 1..20: mol_type = other RNA
tgaggtggtaggttgtgtgg

SEQ ID NO: 16589 - RNA, 22 nt, Synthetic Construct
  source 1..22: mol_type = other RNA
tgaggtagtaggttgtgtggct

SEQ ID NO: 16590 - RNA, 22 nt, Synthetic Construct
  source 1..22: mol_type = other RNA
tgaggtagtaggttgtgtggct

SEQ ID NO: 16591 - RNA, 35 nt, Synthetic Construct; identical to SEQ ID NO: 2452
  source 1..35: mol_type = other RNA

SEQ ID NO: 16592 - RNA, 15 nt, Synthetic Construct
  source 1..15: mol_type = other RNA
gtccggatcgtagtc

SEQ ID NO: 16593 - RNA, 22 nt, Synthetic Construct
  source 1..22: mol_type = other RNA
tattgcacttgtcccggactgt

SEQ ID NO: 16594 - RNA, 20 nt, Synthetic Construct
  source 1..20: mol_type = other RNA
gcaataacaggtctgtgatg

SEQ ID NO: 16595 - RNA, 20 nt, Synthetic Construct
  source 1..20: mol_type = other RNA
gcaataacaggtctgtgatg

SEQ ID NO: 16596 - RNA, 18 nt, Synthetic Construct
  source 1..18: mol_type = other RNA
gtcgacgtatagggtgtg

SEQ ID NO: 16597 - RNA, 25 nt, Synthetic Construct
  source 1..25: mol_type = other RNA
ttgaggatatgagatcgagacgacg

SEQ ID NO: 16598 - RNA, 25 nt, Synthetic Construct
  source 1..25: mol_type = other RNA
tgtaaacatccttgactggaagctt

SEQ ID NO: 16599 - RNA, 25 nt, Synthetic Construct
  source 1..25: mol_type = other RNA
tgtaaacatccttgactggaagctt

SEQ ID NO: 16600 - RNA, 23 nt, Synthetic Construct
  source 1..23: mol_type = other RNA
tgagcgcctcgacgacagagccg

SEQ ID NO: 16601 - RNA, 23 nt, Synthetic Construct
  source 1..23: mol_type = other RNA
tgagcgcctcgacgacagagccg

SEQ ID NO: 16602 - RNA, 22 nt, Synthetic Construct
  source 1..22: mol_type = other RNA
taatgcacttgtcccggcctgt

SEQ ID NO: 16603 - RNA, 22 nt, Synthetic Construct
  source 1..22: mol_type = other RNA
tcctgtactgagctgtcccgag

SEQ ID NO: 16604 - RNA, 22 nt, Synthetic Construct
  source 1..22: mol_type = other RNA
tcctgtactgagctgtcccgag

SEQ ID NO: 16605 - RNA, 22 nt, Synthetic Construct
  source 1..22: mol_type = other RNA
ctcggcgtggcgtcggtcgtgg

SEQ ID NO: 16606 - RNA, 22 nt, Synthetic Construct
  source 1..22: mol_type = other RNA
ctcggcgtggcgtcggtcgtgg

SEQ ID NO: 16607 - RNA, 16 nt, Synthetic Construct
  source 1..16: mol_type = other RNA
ctacagtccgacgatc

SEQ ID NO: 16608 - RNA, 16 nt, Synthetic Construct
  source 1..16: mol_type = other RNA
ctacagtccgacgatc

SEQ ID NO: 16609 - RNA, 15 nt, Synthetic Construct
  source 1..15: mol_type = other RNA
gtccggcccgaggca

SEQ ID NO: 16610 - RNA, 23 nt, Synthetic Construct
  source 1..23: mol_type = other RNA
tcccacatggtctagcggttagg

SEQ ID NO: 16611 - RNA, 22 nt, Synthetic Construct
  source 1..22: mol_type = other RNA
taggttatccgtgttgccttcg

SEQ ID NO: 16612 - RNA, 24 nt, Synthetic Construct
  source 1..24: mol_type = other RNA
tccctgagaccctttaacctgtgt

SEQ ID NO: 16613 - RNA, 24 nt, Synthetic Construct
  source 1..24: mol_type = other RNA
tccctgagaccctttaacctgtgt

SEQ ID NO: 16614 - RNA, 23 nt, Synthetic Construct
  source 1..23: mol_type = other RNA
gtctttgttcgattccgttgagt

SEQ ID NO: 16615 - RNA, 21 nt, Synthetic Construct
  source 1..21: mol_type = other RNA
tcgtaccgtgagtaataatga

SEQ ID NO: 16616 - RNA, 21 nt, Synthetic Construct
  source 1..21: mol_type = other RNA
tcgtaccgtgagtaataatga

SEQ ID NO: 16617 - RNA, 23 nt, Synthetic Construct
  source 1..23: mol_type = other RNA
atatcggaacgtgcccagtcgtg

SEQ ID NO: 16618 - RNA, 23 nt, Synthetic Construct
  source 1..23: mol_type = other RNA
atatcggaacgtgcccagtcgtg

SEQ ID NO: 16619 - RNA, 22 nt, Synthetic Construct
  source 1..22: mol_type = other RNA
tcctgtactgagctaccccgag

SEQ ID NO: 16620 - RNA, 22 nt, Synthetic Construct
  source 1..22: mol_type = other RNA
tcctgtactgagctaccccgag

SEQ ID NO: 16621 - RNA, 15 nt, Synthetic Construct
  source 1..15: mol_type = other RNA
atccctccgactccg

SEQ ID NO: 16622 - RNA, 15 nt, Synthetic Construct
  source 1..15: mol_type = other RNA
atccctccgactccg

SEQ ID NO: 16623 - RNA, 27 nt, Synthetic Construct
  source 1..27: mol_type = other RNA
ccccccgctgctaaatttgactggctt

SEQ ID NO: 16624 - RNA, 29 nt, Synthetic Construct
  source 1..29: mol_type = other RNA
gcgccgctggtgtagtggtatcatgcaag

SEQ ID NO: 16625 - RNA, 29 nt, Synthetic Construct
  source 1..29: mol_type = other RNA
gcgccgctggtgtagtggtatcatgcaag

SEQ ID NO: 16626 - RNA, 17 nt, Synthetic Construct
  source 1..17: mol_type = other RNA
ggcccttatgggtaggg

SEQ ID NO: 16627 - RNA, 17 nt, Synthetic Construct
  source 1..17: mol_type = other RNA
ggcccttatgggtaggg

SEQ ID NO: 16628 - RNA, 22 nt, Synthetic Construct
  source 1..22: mol_type = other RNA
ngaggtagtagattgtatagtt

SEQ ID NO: 16629 - RNA, 18 nt, Synthetic Construct
  source 1..18: mol_type = other RNA
cctgaagaataagcaccg

SEQ ID NO: 16630 - RNA, 18 nt, Synthetic Construct
  source 1..18: mol_type = other RNA
cctgaagaataagcaccg

SEQ ID NO: 16631 - RNA, 22 nt, Synthetic Construct
  source 1..22: mol_type = other RNA
taactccttaagcgaatctcgt

SEQ ID NO: 16632 - RNA, 22 nt, Synthetic Construct
  source 1..22: mol_type = other RNA
tgaggtagcagtttgtgctgtt

SEQ ID NO: 16633 - RNA, 22 nt, Synthetic Construct
  source 1..22: mol_type = other RNA
tgaggtagcagtttgtgctgtt

SEQ ID NO: 16634 - RNA, 22 nt, Synthetic Construct
  source 1..22: mol_type = other RNA
tgactccttaagcgaatctcgc

SEQ ID NO: 16635 - RNA, 21 nt, Synthetic Construct
  source 1..21: mol_type = other RNA
agatcgaccgtgttatattcg

SEQ ID NO: 16636 - RNA, 21 nt, Synthetic Construct
  source 1..21: mol_type = other RNA
agatcgaccgtgttatattcg

SEQ ID NO: 16637 - RNA, 22 nt, Synthetic Construct
  source 1..22: mol_type = other RNA
tagcagcacgtaagtattggcg

SEQ ID NO: 16638 - RNA, 21 nt, Synthetic Construct
  source 1..21: mol_type = other RNA
actggacttggagtcagaagg

SEQ ID NO: 16639 - RNA, 21 nt, Synthetic Construct
  source 1..21: mol_type = other RNA
actggacttggagtcagaagg

SEQ ID NO: 16640 - RNA, 17 nt, Synthetic Construct
  source 1..17: mol_type = other RNA
atgcaagtcgaacggta

SEQ ID NO: 16641 - RNA, 17 nt, Synthetic Construct
  source 1..17: mol_type = other RNA
atgcaagtcgaacggta

SEQ ID NO: 16642 - RNA, 17 nt, Synthetic Construct
  source 1..17: mol_type = other RNA
cagagacgagtcgacca

SEQ ID NO: 16643 - RNA, 17 nt, Synthetic Construct
  source 1..17: mol_type = other RNA
cagagacgagtcgacca

SEQ ID NO: 16644 - RNA, 20 nt, Synthetic Construct
  source 1..20: mol_type = other RNA
cataaagtagaaagcactac

SEQ ID NO: 16645 - RNA, 22 nt, Synthetic Construct
  source 1..22: mol_type = other RNA
tcctgtactgagccgccccgag

SEQ ID NO: 16646 - RNA, 22 nt, Synthetic Construct
  source 1..22: mol_type = other RNA
tcctgtactgagccgccccgag

SEQ ID NO: 16647 - RNA, 38 nt, Synthetic Construct; identical to SEQ ID NO: 11817
  source 1..38: mol_type = other RNA

SEQ ID NO: 16648 - RNA, 21 nt, Synthetic Construct
  source 1..21: mol_type = other RNA
attagtgacgcgcatgaatgg

SEQ ID NO: 16649 - RNA, 21 nt, Synthetic Construct
  source 1..21: mol_type = other RNA
attagtgacgcgcatgaatgg

SEQ ID NO: 16650 - RNA, 22 nt, Synthetic Construct
  source 1..22: mol_type = other RNA
tcaagagcaataacgaaaaatg

SEQ ID NO: 16651 - RNA, 23 nt, Synthetic Construct
  source 1..23: mol_type = other RNA
agctcggtctgaggcccctcagt

SEQ ID NO: 16652 - RNA, 23 nt, Synthetic Construct
  source 1..23: mol_type = other RNA
agctcggtctgaggcccctcagt

SEQ ID NO: 16653 - RNA, 24 nt, Synthetic Construct
  source 1..24: mol_type = other RNA
gatgaggcgtgataacgagtctgc

SEQ ID NO: 16654 - RNA, 24 nt, Synthetic Construct
  source 1..24: mol_type = other RNA
gatgaggcgtgataacgagtctgc

SEQ ID NO: 16655 - RNA, 21 nt, Synthetic Construct
  source 1..21: mol_type = other RNA
taggtagtttcctgttgttgg

SEQ ID NO: 16656 - RNA, 21 nt, Synthetic Construct
  source 1..21: mol_type = other RNA
taggtagtttcctgttgttgg

SEQ ID NO: 16657 - RNA, 18 nt, Synthetic Construct
  source 1..18: mol_type = other RNA
gtcaggatggccgagcgg

SEQ ID NO: 16658 - RNA, 18 nt, Synthetic Construct
  source 1..18: mol_type = other RNA
gtcaggatggccgagcgg

SEQ ID NO: 16659 - RNA, 24 nt, Synthetic Construct
  source 1..24: mol_type = other RNA
cggagaaggttagctcagccaact

SEQ ID NO: 16660 - RNA, 24 nt, Synthetic Construct
  source 1..24: mol_type = other RNA
cggagaaggttagctcagccaact

SEQ ID NO: 16661 - RNA, 24 nt, Synthetic Construct
  source 1..24: mol_type = other RNA
tgagaactgaattccatgggtttt

SEQ ID NO: 16662 - RNA, 24 nt, Synthetic Construct
  source 1..24: mol_type = other RNA
tgagaactgaattccatgggtttt

SEQ ID NO: 16663 - RNA, 36 nt, Synthetic Construct; identical to SEQ ID NO: 777
  source 1..36: mol_type = other RNA

SEQ ID NO: 16664 - RNA, 23 nt, Synthetic Construct
  source 1..23: mol_type = other RNA
tacagtagtctgcacattggtta

SEQ ID NO: 16665 - RNA, 23 nt, Synthetic Construct
  source 1..23: mol_type = other RNA
tacagtagtctgcacattggtta

SEQ ID NO: 16666 - RNA, 25 nt, Synthetic Construct
  source 1..25: mol_type = other RNA
ttgaggatacgagatcgagacgaca

SEQ ID NO: 16667 - RNA, 19 nt, Synthetic Construct
  source 1..19: mol_type = other RNA
tgagatgaagcactgtagc

SEQ ID NO: 16668 - RNA, 22 nt, Synthetic Construct
  source 1..22: mol_type = other RNA
ttcaagtaacccaggataggct

SEQ ID NO: 16669 - RNA, 22 nt, Synthetic Construct
  source 1..22: mol_type = other RNA
ttcaagtaacccaggataggct

SEQ ID NO: 16670 - RNA, 15 nt, Synthetic Construct
  source 1..15: mol_type = other RNA
atccctccgactccg

SEQ ID NO: 16671 - RNA, 15 nt, Synthetic Construct
  source 1..15: mol_type = other RNA
atccctccgactccg

SEQ ID NO: 16672 - RNA, 20 nt, Synthetic Construct
  source 1..20: mol_type = other RNA
tgtcttgcaggccgtcatgc

SEQ ID NO: 16673 - RNA, 20 nt, Synthetic Construct
  source 1..20: mol_type = other RNA
tgtcttgcaggccgtcatgc

SEQ ID NO: 16674 - RNA, 21 nt, Synthetic Construct
  source 1..21: mol_type = other RNA
cactgatcgagtcgtcctgcg

SEQ ID NO: 16675 - RNA, 21 nt, Synthetic Construct
  source 1..21: mol_type = other RNA
cactgatcgagtcgtcctgcg

SEQ ID NO: 16676 - RNA, 21 nt, Synthetic Construct
  source 1..21: mol_type = other RNA
tgaagtagtaggttgtgtggt

SEQ ID NO: 16677 - RNA, 21 nt, Synthetic Construct
  source 1..21: mol_type = other RNA
tgaagtagtaggttgtgtggt

SEQ ID NO: 16678 - RNA, 18 nt, Synthetic Construct
  source 1..18: mol_type = other RNA
cataaagtagaaagcact

SEQ ID NO: 16679 - RNA, 18 nt, Synthetic Construct
  source 1..18: mol_type = other RNA
cataaagtagaaagcact

SEQ ID NO: 16680 - RNA, 16 nt, Synthetic Construct
  source 1..16: mol_type = other RNA
ccgcttttgtcaggga

SEQ ID NO: 16681 - RNA, 22 nt, Synthetic Construct
  source 1..22: mol_type = other RNA
tccagtactgagctgccccgag

SEQ ID NO: 16682 - RNA, 22 nt, Synthetic Construct
  source 1..22: mol_type = other RNA
tccagtactgagctgccccgag

SEQ ID NO: 16683 - RNA, 26 nt, Synthetic Construct
  source 1..26: mol_type = other RNA
ttaagtgacgatagcctaggagatac

SEQ ID NO: 16684 - RNA, 26 nt, Synthetic Construct
  source 1..26: mol_type = other RNA
ttaagtgacgatagcctaggagatac

SEQ ID NO: 16685 - RNA, 24 nt, Synthetic Construct
  source 1..24: mol_type = other RNA
agcagcattgtacagggctatgat

SEQ ID NO: 16686 - RNA, 24 nt, Synthetic Construct
  source 1..24: mol_type = other RNA
agcagcattgtacagggctatgat

SEQ ID NO: 16687 - RNA, 15 nt, Synthetic Construct
  source 1..15: mol_type = other RNA
tacagtccgacgatc

SEQ ID NO: 16688 - RNA, 15 nt, Synthetic Construct
  source 1..15: mol_type = other RNA
tacagtccgacgatc

SEQ ID NO: 16689 - RNA, 21 nt, Synthetic Construct
  source 1..21: mol_type = other RNA
tcctgtactgagctaccccga

SEQ ID NO: 16690 - RNA, 23 nt, Synthetic Construct
  source 1..23: mol_type = other RNA
tcctgtactgagttgccccgaga

SEQ ID NO: 16691 - RNA, 23 nt, Synthetic Construct
  source 1..23: mol_type = other RNA
tcctgtactgagttgccccgaga

SEQ ID NO: 16692 - RNA, 16 nt, Synthetic Construct
  source 1..16: mol_type = other RNA
agtcaggatgttggct

SEQ ID NO: 16693 - RNA, 24 nt, Synthetic Construct
  source 1..24: mol_type = other RNA
tagcagcacgtaaatattggcgtt

SEQ ID NO: 16694 - RNA, 22 nt, Synthetic Construct
  source 1..22: mol_type = other RNA
tcgcaccgtgagtaataatgcg

SEQ ID NO: 16695 - RNA, 24 nt, Synthetic Construct
  source 1..24: mol_type = other RNA
tgtaaacatccccgactggaagcg

SEQ ID NO: 16696 - RNA, 23 nt, Synthetic Construct
  source 1..23: mol_type = other RNA
agctacattgtctgctgggtttt

SEQ ID NO: 16697 - RNA, 23 nt, Synthetic Construct
  source 1..23: mol_type = other RNA
agctacattgtctgctgggtttt

SEQ ID NO: 16698 - RNA, 24 nt, Synthetic Construct
  source 1..24: mol_type = other RNA
gttcgattccggagagggagcctg

SEQ ID NO: 16699 - RNA, 24 nt, Synthetic Construct
  source 1..24: mol_type = other RNA
gttcgattccggagagggagcctg

SEQ ID NO: 16700 - RNA, 22 nt, Synthetic Construct
  source 1..22: mol_type = other RNA
tcgcagcacgtaaatattggcg

SEQ ID NO: 16701 - RNA, 22 nt, Synthetic Construct
  source 1..22: mol_type = other RNA
tcgcagcacgtaaatattggcg

SEQ ID NO: 16702 - RNA, 21 nt, Synthetic Construct
  source 1..21: mol_type = other RNA
tttggggattctaagaggaag

SEQ ID NO: 16703 - RNA, 21 nt, Synthetic Construct
  source 1..21: mol_type = other RNA
tttggggattctaagaggaag

SEQ ID NO: 16704 - RNA, 18 nt, Synthetic Construct
  source 1..18: mol_type = other RNA
gtctgcctcagcgtcggt

SEQ ID NO: 16705 - RNA, 18 nt, Synthetic Construct
  source 1..18: mol_type = other RNA
gtctgcctcagcgtcggt

SEQ ID NO: 16706 - RNA, 22 nt, Synthetic Construct
  source 1..22: mol_type = other RNA
tgaggtagtaggttgtggggtt

SEQ ID NO: 16707 - RNA, 22 nt, Synthetic Construct
  source 1..22: mol_type = other RNA
tgaggtagtaggttgtggggtt

SEQ ID NO: 16708 - RNA, 22 nt, Synthetic Construct
  source 1..22: mol_type = other RNA
ggtagcgaaattccttgtcggg

SEQ ID NO: 16709 - RNA, 23 nt, Synthetic Construct
  source 1..23: mol_type = other RNA
tcgaccggacctcgaccggctcg

SEQ ID NO: 16710 - RNA, 31 nt, Synthetic Construct; identical to SEQ ID NO: 2423
  source 1..31: mol_type = other RNA

SEQ ID NO: 16711 - RNA, 23 nt, Synthetic Construct
  source 1..23: mol_type = other RNA
tggtaatacgacgtacttagtgc

SEQ ID NO: 16712 - RNA, 17 nt, Synthetic Construct
  source 1..17: mol_type = other RNA
gccatgccgcgtgcggg

SEQ ID NO: 16713 - RNA, 27 nt, Synthetic Construct
  source 1..27: mol_type = other RNA
ccccccactgctaagtttgactggctt

SEQ ID NO: 16714 - RNA, 27 nt, Synthetic Construct
  source 1..27: mol_type = other RNA
ccccccactgctaagtttgactggctt

SEQ ID NO: 16715 - RNA, 27 nt, Synthetic Construct
  source 1..27: mol_type = other RNA
ccccccactgccaaatttgactggctt

SEQ ID NO: 16716 - RNA, 18 nt, Synthetic Construct
  source 1..18: mol_type = other RNA
gctattgacgaccgtacc

SEQ ID NO: 16717 - RNA, 18 nt, Synthetic Construct
  source 1..18: mol_type = other RNA
gctattgacgaccgtacc

SEQ ID NO: 16718 - RNA, 22 nt, Synthetic Construct
  source 1..22: mol_type = other RNA
taaggtagtagtttgtgctgtt

SEQ ID NO: 16719 - RNA, 22 nt, Synthetic Construct
  source 1..22: mol_type = other RNA
taaggtagtagtttgtgctgtt

SEQ ID NO: 16720 - RNA, 22 nt, Synthetic Construct
  source 1..22: mol_type = other RNA
cgaggtagtaggttgtatagtt

SEQ ID NO: 16721 - RNA, 22 nt, Synthetic Construct
  source 1..22: mol_type = other RNA
cgaggtagtaggttgtatagtt

SEQ ID NO: 16722 - RNA, 23 nt, Synthetic Construct
  source 1..23: mol_type = other RNA
tggaaatacgacgtacttagtgt

SEQ ID NO: 16723 - RNA, 23 nt, Synthetic Construct
  source 1..23: mol_type = other RNA
tggaaatacgacgtacttagtgt

SEQ ID NO: 16724 - RNA, 19 nt, Synthetic Construct
  source 1..19: mol_type = other RNA
agtaggtcatcgtcaggct

SEQ ID NO: 16725 - RNA, 19 nt, Synthetic Construct
  source 1..19: mol_type = other RNA
agtaggtcatcgtcaggct

SEQ ID NO: 16726 - RNA, 39 nt, Synthetic Construct
  source 1..39: mol_type = other RNA
tacctggttgatcctgccagtagtcatatgcttgtctca

SEQ ID NO: 16727 - RNA, 21 nt, Synthetic Construct
  source 1..21: mol_type = other RNA
ctagactggagctccttgagg

SEQ ID NO: 16728 - RNA, 22 nt, Synthetic Construct
  source 1..22: mol_type = other RNA
ngaggtagtaggttgtgtggtt

SEQ ID NO: 16729 - RNA, 22 nt, Synthetic Construct
  source 1..22: mol_type = other RNA
ngaggtagtaggttgtgtggtt

SEQ ID NO: 16730 - RNA, 24 nt, Synthetic Construct
  source 1..24: mol_type = other RNA
gttgaattgtggtctgtggacgtg

SEQ ID NO: 16731 - RNA, 24 nt, Synthetic Construct
  source 1..24: mol_type = other RNA
gttgaattgtggtctgtggacgtg

SEQ ID NO: 16732 - RNA, 20 nt, Synthetic Construct
  source 1..20: mol_type = other RNA
tgaggaagtaggttgtatag

SEQ ID NO: 16733 - RNA, 20 nt, Synthetic Construct
  source 1..20: mol_type = other RNA
tgaggaagtaggttgtatag

SEQ ID NO: 16734 - RNA, 22 nt, Synthetic Construct
  source 1..22: mol_type = other RNA
tgaggtagtagattgtgctgtt

SEQ ID NO: 16735 - RNA, 23 nt, Synthetic Construct
  source 1..23: mol_type = other RNA
ggcggttatgcaagacagaggtg

SEQ ID NO: 16736 - RNA, 23 nt, Synthetic Construct
  source 1..23: mol_type = other RNA
ggcggttatgcaagacagaggtg

SEQ ID NO: 16737 - RNA, 19 nt, Synthetic Construct
  source 1..19: mol_type = other RNA
tgtctgcctcagcgtcggt

SEQ ID NO: 16738 - RNA, 19 nt, Synthetic Construct
  source 1..19: mol_type = other RNA
tgtctgcctcagcgtcggt

SEQ ID NO: 16739 - RNA, 15 nt, Synthetic Construct
  source 1..15: mol_type = other RNA
gtacgtgagctgggt

SEQ ID NO: 16740 - RNA, 20 nt, Synthetic Construct
  source 1..20: mol_type = other RNA
ggggatgtagctcagatggt

SEQ ID NO: 16741 - RNA, 20 nt, Synthetic Construct
  source 1..20: mol_type = other RNA
ggggatgtagctcagatggt

SEQ ID NO: 16742 - RNA, 43 nt, Synthetic Construct; identical to SEQ ID NO: 2315
  source 1..43: mol_type = other RNA

SEQ ID NO: 16743 - RNA, 22 nt, Synthetic Construct
  source 1..22: mol_type = other RNA
taactccttaagcgaacctcgc

SEQ ID NO: 16744 - RNA, 22 nt, Synthetic Construct
  source 1..22: mol_type = other RNA
taactccttaagcgaacctcgc

SEQ ID NO: 16745 - RNA, 16 nt, Synthetic Construct
  source 1..16: mol_type = other RNA
gtccggatcgtagtct

SEQ ID NO: 16746 - RNA, 21 nt, Synthetic Construct
  source 1..21: mol_type = other RNA
tgaggtagaaggttgtatagt

SEQ ID NO: 16747 - RNA, 23 nt, Synthetic Construct
  source 1..23: mol_type = other RNA
caagtcactagtggttccgttta

SEQ ID NO: 16748 - RNA, 23 nt, Synthetic Construct
  source 1..23: mol_type = other RNA
caagtcactagtggttccgttta

SEQ ID NO: 16749 - RNA, 23 nt, Synthetic Construct
  source 1..23: mol_type = other RNA
atgtcccacccccactcctgttt

SEQ ID NO: 16750 - RNA, 23 nt, Synthetic Construct
  source 1..23: mol_type = other RNA
agtcagtttgtcaaataccccat

SEQ ID NO: 16751 - RNA, 16 nt, Synthetic Construct
  source 1..16: mol_type = other RNA
gatctgtagctggtct

SEQ ID NO: 16752 - RNA, 23 nt, Synthetic Construct
  source 1..23: mol_type = other RNA
tgaggtagtaggttgtgtagttt

SEQ ID NO: 16753 - RNA, 21 nt, Synthetic Construct
  source 1..21: mol_type = other RNA
cggagtgtgacaatggtgttt

SEQ ID NO: 16754 - RNA, 21 nt, Synthetic Construct
  source 1..21: mol_type = other RNA
cggagtgtgacaatggtgttt

SEQ ID NO: 16755 - RNA, 22 nt, Synthetic Construct
  source 1..22: mol_type = other RNA
tagcagcacgtaaatataggcg

SEQ ID NO: 16756 - RNA, 23 nt, Synthetic Construct
  source 1..23: mol_type = other RNA
cactagattgtgagctcctggaa

SEQ ID NO: 16757 - RNA, 23 nt, Synthetic Construct
  source 1..23: mol_type = other RNA
cactagattgtgagctcctggaa

SEQ ID NO: 16758 - RNA, 23 nt, Synthetic Construct
  source 1..23: mol_type = other RNA
agtcagtttgtcaaataccccat

SEQ ID NO: 16759 - RNA, 22 nt, Synthetic Construct
  source 1..22: mol_type = other RNA
catcgcacttgtctcggtctga

SEQ ID NO: 16760 - RNA, 21 nt, Synthetic Construct
  source 1..21: mol_type = other RNA
tcagtgcatcacagaactttg

SEQ ID NO: 16761 - RNA, 22 nt, Synthetic Construct
  source 1..22: mol_type = other RNA
tatcgcacttgtcccggcctgt

SEQ ID NO: 16762 - RNA, 22 nt, Synthetic Construct
  source 1..22: mol_type = other RNA
tcctgtacagagctgccccgag

SEQ ID NO: 16763 - RNA, 22 nt, Synthetic Construct
  source 1..22: mol_type = other RNA
tcctgtacagagctgccccgag

SEQ ID NO: 16764 - RNA, 22 nt, Synthetic Construct
  source 1..22: mol_type = other RNA
tgaggtagcaggttgtatagtt

SEQ ID NO: 16765 - RNA, 22 nt, Synthetic Construct
  source 1..22: mol_type = other RNA
tgaggtagcaggttgtatagtt

SEQ ID NO: 16766 - RNA, 27 nt, Synthetic Construct
  source 1..27: mol_type = other RNA
gttggttcaagcgtgtagtcgtgctct

SEQ ID NO: 16767 - RNA, 20 nt, Synthetic Construct
  source 1..20: mol_type = other RNA
tagaattctcgcctgccacg

SEQ ID NO: 16768 - RNA, 18 nt, Synthetic Construct
  source 1..18: mol_type = other RNA
aaagcgaatgattagagg

SEQ ID NO: 16769 - RNA, 23 nt, Synthetic Construct
  source 1..23: mol_type = other RNA
tgaggggtagagagcgagacttt

SEQ ID NO: 16770 - RNA, 23 nt, Synthetic Construct
  source 1..23: mol_type = other RNA
ttaatgctaatcgtgataggggt

SEQ ID NO: 16771 - RNA, 23 nt, Synthetic Construct
  source 1..23: mol_type = other RNA
ttaatgctaatcgtgataggggt

SEQ ID NO: 16772 - RNA, 23 nt, Synthetic Construct
  source 1..23: mol_type = other RNA
taaggtgcatctagtgcagatag

SEQ ID NO: 16773 - RNA, 22 nt, Synthetic Construct
  source 1..22: mol_type = other RNA
tgaggtaataggttgtgtggtt

SEQ ID NO: 16774 - RNA, 22 nt, Synthetic Construct
  source 1..22: mol_type = other RNA
tgaggtaataggttgtgtggtt

SEQ ID NO: 16775 - RNA, 23 nt, Synthetic Construct
  source 1..23: mol_type = other RNA
tcgtaccgtgagtaataatgcga

SEQ ID NO: 16776 - RNA, 22 nt, Synthetic Construct
  source 1..22: mol_type = other RNA
tgaggtagtaggttgcatagtt

SEQ ID NO: 16777 - RNA, 22 nt, Synthetic Construct
  source 1..22: mol_type = other RNA
tgaggtagtaggttgcatagtt

SEQ ID NO: 16778 - RNA, 22 nt, Synthetic Construct
  source 1..22: mol_type = other RNA
tagcaacacgtaaatattggcg

SEQ ID NO: 16779 - RNA, 22 nt, Synthetic Construct
  source 1..22: mol_type = other RNA
tagcaacacgtaaatattggcg

SEQ ID NO: 16780 - RNA, 23 nt, Synthetic Construct
  source 1..23: mol_type = other RNA
tgaggtagtgggttgtgtggttt

SEQ ID NO: 16781 - RNA, 22 nt, Synthetic Construct
  source 1..22: mol_type = other RNA
cgaggtagtaggttgtatagtt

SEQ ID NO: 16782 - RNA, 22 nt, Synthetic Construct
  source 1..22: mol_type = other RNA
cgaggtagtaggttgtatagtt

SEQ ID NO: 16783 - RNA, 22 nt, Synthetic Construct
  source 1..22: mol_type = other RNA
tcagtgcactacagagctttgt

SEQ ID NO: 16784 - RNA, 22 nt, Synthetic Construct
  source 1..22: mol_type = other RNA
tgaggtagtagtttgtatagtt

SEQ ID NO: 16785 - RNA, 23 nt, Synthetic Construct
  source 1..23: mol_type = other RNA
tggtaatacgacgtactcagtgt

SEQ ID NO: 16786 - RNA, 22 nt, Synthetic Construct
  source 1..22: mol_type = other RNA
tgaggtagtaggtcgtatagtt

SEQ ID NO: 16787 - RNA, 22 nt, Synthetic Construct
  source 1..22: mol_type = other RNA
aattgcacggtatccatctgta

SEQ ID NO: 16788 - RNA, 22 nt, Synthetic Construct
  source 1..22: mol_type = other RNA
aattgcacggtatccatctgta

SEQ ID NO: 16789 - RNA, 30 nt, Synthetic Construct; identical to SEQ ID NO: 5879
  source 1..30: mol_type = other RNA

SEQ ID NO: 16790 - RNA, 30 nt, Synthetic Construct; identical to SEQ ID NO: 5879
  source 1..30: mol_type = other RNA

SEQ ID NO: 16791 - RNA, 27 nt, Synthetic Construct
  source 1..27: mol_type = other RNA
gatttccccttggggttgtaggaccac

SEQ ID NO: 16792 - RNA, 27 nt, Synthetic Construct
  source 1..27: mol_type = other RNA
gatttccccttggggttgtaggaccac

SEQ ID NO: 16793 - RNA, 22 nt, Synthetic Construct
  source 1..22: mol_type = other RNA
tattgcacttatcccggcctgt

SEQ ID NO: 16794 - RNA, 21 nt, Synthetic Construct
  source 1..21: mol_type = other RNA
tgaggtggtaggttgtatagt

SEQ ID NO: 16795 - RNA, 27 nt, Synthetic Construct
  source 1..27: mol_type = other RNA
ccccccactactaaatttgactggctt

SEQ ID NO: 16796 - RNA, 24 nt, Synthetic Construct
  source 1..24: mol_type = other RNA
atgacacgatcactcccgttgagt

SEQ ID NO: 16797 - RNA, 24 nt, Synthetic Construct
  source 1..24: mol_type = other RNA
atgacacgatcactcccgttgagt

SEQ ID NO: 16798 - RNA, 18 nt, Synthetic Construct
  source 1..18: mol_type = other RNA
tctaatgagactgccggt

SEQ ID NO: 16799 - RNA, 18 nt, Synthetic Construct
  source 1..18: mol_type = other RNA
tctaatgagactgccggt

SEQ ID NO: 16800 - RNA, 25 nt, Synthetic Construct
  source 1..25: mol_type = other RNA
aaaccgttaccattactgagtttag

SEQ ID NO: 16801 - RNA, 30 nt, Synthetic Construct
  source 1..30: mol_type = other RNA
gaaaaagtcatggaggccatggggttggaa

SEQ ID NO: 16802 - RNA, 30 nt, Synthetic Construct; identical to SEQ ID NO: 16801
  source 1..30: mol_type = other RNA

SEQ ID NO: 16803 - RNA, 18 nt, Synthetic Construct
  source 1..18: mol_type = other RNA
tgcagatcttggtggtag

SEQ ID NO: 16804 - RNA, 18 nt, Synthetic Construct
  source 1..18: mol_type = other RNA
tgcagatcttggtggtag

SEQ ID NO: 16805 - RNA, 29 nt, Synthetic Construct
  source 1..29: mol_type = other RNA
gtaatggcgggaactctggacagactgcc

SEQ ID NO: 16806 - RNA, 29 nt, Synthetic Construct
  source 1..29: mol_type = other RNA
gtaatggcgggaactctggacagactgcc

SEQ ID NO: 16807 - RNA, 24 nt, Synthetic Construct
  source 1..24: mol_type = other RNA
cgcgacctcagatcagacgtggcg

SEQ ID NO: 16808 - RNA, 20 nt, Synthetic Construct
  source 1..20: mol_type = other RNA
gaatcgctagtaatcgcgga

SEQ ID NO: 16809 - RNA, 20 nt, Synthetic Construct
  source 1..20: mol_type = other RNA
cccagtaaacggcggccgta

SEQ ID NO: 16810 - RNA, 22 nt, Synthetic Construct
  source 1..22: mol_type = other RNA
cccataaagtagaaagcactac

SEQ ID NO: 16811 - RNA, 22 nt, Synthetic Construct
  source 1..22: mol_type = other RNA
cccataaagtagaaagcactac

SEQ ID NO: 16812 - RNA, 15 nt, Synthetic Construct
  source 1..15: mol_type = other RNA
gcaagtcgaacggta

SEQ ID NO: 16813 - RNA, 15 nt, Synthetic Construct
  source 1..15: mol_type = other RNA
gcaagtcgaacggta

SEQ ID NO: 16814 - RNA, 21 nt, Synthetic Construct
  source 1..21: mol_type = other RNA
tgaggtagcaggttgtatagt

SEQ ID NO: 16815 - RNA, 21 nt, Synthetic Construct
  source 1..21: mol_type = other RNA
tgaggtagcaggttgtatagt

SEQ ID NO: 16816 - RNA, 17 nt, Synthetic Construct
  source 1..17: mol_type = other RNA
cgactcttagcggtgga

SEQ ID NO: 16817 - RNA, 17 nt, Synthetic Construct
  source 1..17: mol_type = other RNA
cgactcttagcggtgga

SEQ ID NO: 16818 - RNA, 35 nt, Synthetic Construct; identical to SEQ ID NO: 2548
  source 1..35: mol_type = other RNA

SEQ ID NO: 16819 - RNA, 37 nt, Synthetic Construct; identical to SEQ ID NO: 2365
  source 1..37: mol_type = other RNA

SEQ ID NO: 16820 - RNA, 27 nt, Synthetic Construct
  source 1..27: mol_type = other RNA
ccccccactgctaagtttgactggctt

SEQ ID NO: 16821 - RNA, 27 nt, Synthetic Construct
  source 1..27: mol_type = other RNA
ccccccactgctaagtttgactggctt

SEQ ID NO: 16822 - RNA, 22 nt, Synthetic Construct
  source 1..22: mol_type = other RNA
ccagtgcactacagaactttgt

SEQ ID NO: 16823 - RNA, 21 nt, Synthetic Construct
  source 1..21: mol_type = other RNA
tgagaactgaattccatgggt

SEQ ID NO: 16824 - RNA, 24 nt, Synthetic Construct
  source 1..24: mol_type = other RNA
cccagtgctctgaatgtcaaagtg

SEQ ID NO: 16825 - RNA, 24 nt, Synthetic Construct
  source 1..24: mol_type = other RNA
cccagtgctctgaatgtcaaagtg

SEQ ID NO: 16826 - RNA, 20 nt, Synthetic Construct
  source 1..20: mol_type = other RNA
ctgacctatgaattgacagc

SEQ ID NO: 16827 - RNA, 21 nt, Synthetic Construct
  source 1..21: mol_type = other RNA
tgaggtagtaggttgtatagt

SEQ ID NO: 16828 - RNA, 22 nt, Synthetic Construct
  source 1..22: mol_type = other RNA
tgaggttgtagtttgtgctgtt

SEQ ID NO: 16829 - RNA, 20 nt, Synthetic Construct
  source 1..20: mol_type = other RNA
tgaggtagaaggttgtgtgg

SEQ ID NO: 16830 - RNA, 21 nt, Synthetic Construct
  source 1..21: mol_type = other RNA
tgtagtgtttcctactttatg

SEQ ID NO: 16831 - RNA, 21 nt, Synthetic Construct
  source 1..21: mol_type = other RNA
tgtagtgtttcctactttatg

SEQ ID NO: 16832 - RNA, 21 nt, Synthetic Construct
  source 1..21: mol_type = other RNA
tcagtgcatcacagaactttg

SEQ ID NO: 16833 - RNA, 21 nt, Synthetic Construct
  source 1..21: mol_type = other RNA
tcagtgcatcacagaactttg

SEQ ID NO: 16834 - RNA, 17 nt, Synthetic Construct
  source 1..17: mol_type = other RNA
gttctacagtccgacga

SEQ ID NO: 16835 - RNA, 17 nt, Synthetic Construct
  source 1..17: mol_type = other RNA
gttctacagtccgacga

SEQ ID NO: 16836 - RNA, 22 nt, Synthetic Construct
  source 1..22: mol_type = other RNA
cagtggttttaccctatggtag

SEQ ID NO: 16837 - RNA, 22 nt, Synthetic Construct
  source 1..22: mol_type = other RNA
cagtggttttaccctatggtag

SEQ ID NO: 16838 - RNA, 31 nt, Synthetic Construct; identical to SEQ ID NO: 2893
  source 1..31: mol_type = other RNA

SEQ ID NO: 16839 - RNA, 23 nt, Synthetic Construct
  source 1..23: mol_type = other RNA
tgaggtagtagtttgtgctgttc

SEQ ID NO: 16840 - RNA, 43 nt, Synthetic Construct; identical to SEQ ID NO: 2315
  source 1..43: mol_type = other RNA

SEQ ID NO: 16841 - RNA, 43 nt, Synthetic Construct; identical to SEQ ID NO: 2315
  source 1..43: mol_type = other RNA

SEQ ID NO: 16842 - RNA, 22 nt, Synthetic Construct
  source 1..22: mol_type = other RNA
tcgtaccgtgagtaacaatgcg

SEQ ID NO: 16843 - RNA, 26 nt, Synthetic Construct
  source 1..26: mol_type = other RNA
aatgacacgatcactcccgttgagtt

SEQ ID NO: 16844 - RNA, 26 nt, Synthetic Construct
  source 1..26: mol_type = other RNA
aatgacacgatcactcccgttgagtt

SEQ ID NO: 16845 - RNA, 21 nt, Synthetic Construct
  source 1..21: mol_type = other RNA
gcagatcttggtggtagtagc

SEQ ID NO: 16846 - RNA, 21 nt, Synthetic Construct
  source 1..21: mol_type = other RNA
gcagatcttggtggtagtagc

SEQ ID NO: 16847 - RNA, 23 nt, Synthetic Construct
  source 1..23: mol_type = other RNA
ggatatcatcatatactgtaagt

SEQ ID NO: 16848 - RNA, 33 nt, Synthetic Construct; identical to SEQ ID NO: 2419
  source 1..33: mol_type = other RNA

SEQ ID NO: 16849 - RNA, 21 nt, Synthetic Construct
  source 1..21: mol_type = other RNA
tgaagtagtaggttgtatagt

SEQ ID NO: 16850 - RNA, 21 nt, Synthetic Construct
  source 1..21: mol_type = other RNA
gccctgacctgtcctgttctg

SEQ ID NO: 16851 - RNA, 21 nt, Synthetic Construct
  source 1..21: mol_type = other RNA
gccctgacctgtcctgttctg

SEQ ID NO: 16852 - RNA, 25 nt, Synthetic Construct
  source 1..25: mol_type = other RNA
tcgaggatatgagatcgagacgaca

SEQ ID NO: 16853 - RNA, 19 nt, Synthetic Construct
  source 1..19: mol_type = other RNA
gtactgacgctcatgcacg

SEQ ID NO: 16854 - RNA, 21 nt, Synthetic Construct
  source 1..21: mol_type = other RNA
tgtcagtttgtcaaataccca

SEQ ID NO: 16855 - RNA, 22 nt, Synthetic Construct
  source 1..22: mol_type = other RNA
tcactgatcgagtcgtcctgcg

SEQ ID NO: 16856 - RNA, 22 nt, Synthetic Construct
  source 1..22: mol_type = other RNA
tcactgatcgagtcgtcctgcg

SEQ ID NO: 16857 - RNA, 24 nt, Synthetic Construct
  source 1..24: mol_type = other RNA
ttccccttggggttgtaggaccac

SEQ ID NO: 16858 - RNA, 15 nt, Synthetic Construct
  source 1..15: mol_type = other RNA
acctgcatcgagggt

SEQ ID NO: 16859 - RNA, 15 nt, Synthetic Construct
  source 1..15: mol_type = other RNA
acctgcatcgagggt

SEQ ID NO: 16860 - RNA, 27 nt, Synthetic Construct
  source 1..27: mol_type = other RNA
ccccccactgcaaaatttgactggctt

SEQ ID NO: 16861 - RNA, 21 nt, Synthetic Construct
  source 1..21: mol_type = other RNA
cgcgacctcagatcagacgtg

SEQ ID NO: 16862 - RNA, 21 nt, Synthetic Construct
  source 1..21: mol_type = other RNA
cgcgacctcagatcagacgtg

SEQ ID NO: 16863 - RNA, 22 nt, Synthetic Construct
  source 1..22: mol_type = other RNA
ctttcagtcggatgtttgcagt

SEQ ID NO: 16864 - RNA, 21 nt, Synthetic Construct
  source 1..21: mol_type = other RNA
tagcaccatctgaaatcggtt

SEQ ID NO: 16865 - RNA, 26 nt, Synthetic Construct
  source 1..26: mol_type = other RNA
gatgcgtggtaggagagcgttctgta

SEQ ID NO: 16866 - RNA, 18 nt, Synthetic Construct
  source 1..18: mol_type = other RNA
tagggaacgtgagctggg

SEQ ID NO: 16867 - RNA, 25 nt, Synthetic Construct
  source 1..25: mol_type = other RNA
ttgaggatatgagatcgagacaaca

SEQ ID NO: 16868 - RNA, 25 nt, Synthetic Construct
  source 1..25: mol_type = other RNA
ttgaggatatgagatcgagacaaca

SEQ ID NO: 16869 - RNA, 17 nt, Synthetic Construct
  source 1..17: mol_type = other RNA
gactcttagcggtggat

SEQ ID NO: 16870 - RNA, 17 nt, Synthetic Construct
  source 1..17: mol_type = other RNA
gactcttagcggtggat

SEQ ID NO: 16871 - RNA, 17 nt, Synthetic Construct
  source 1..17: mol_type = other RNA
gcaataacaggtctgtg

SEQ ID NO: 16872 - RNA, 17 nt, Synthetic Construct
  source 1..17: mol_type = other RNA
gcaataacaggtctgtg

SEQ ID NO: 16873 - RNA, 22 nt, Synthetic Construct
  source 1..22: mol_type = other RNA
taaggtagtagattgtatagtt

SEQ ID NO: 16874 - RNA, 20 nt, Synthetic Construct
  source 1..20: mol_type = other RNA
caacggaatcccaaaagcag

SEQ ID NO: 16875 - RNA, 20 nt, Synthetic Construct
  source 1..20: mol_type = other RNA
caacggaatcccaaaagcag

SEQ ID NO: 16876 - RNA, 21 nt, Synthetic Construct
  source 1..21: mol_type = other RNA
agagttctacagtccgacgat

SEQ ID NO: 16877 - RNA, 21 nt, Synthetic Construct
  source 1..21: mol_type = other RNA
agagttctacagtccgacgat

SEQ ID NO: 16878 - RNA, 22 nt, Synthetic Construct
  source 1..22: mol_type = other RNA
tgaggtagtagtatgtgctgtt

SEQ ID NO: 16879 - RNA, 22 nt, Synthetic Construct
  source 1..22: mol_type = other RNA
tgaggtagtagtatgtgctgtt

SEQ ID NO: 16880 - RNA, 26 nt, Synthetic Construct
  source 1..26: mol_type = other RNA
atgcgagagtaggacgttgccaggtt

SEQ ID NO: 16881 - RNA, 26 nt, Synthetic Construct
  source 1..26: mol_type = other RNA
atgcgagagtaggacgttgccaggtt

SEQ ID NO: 16882 - RNA, 22 nt, Synthetic Construct
  source 1..22: mol_type = other RNA
tgtcaactggttgttgggaggg

SEQ ID NO: 16883 - RNA, 25 nt, Synthetic Construct
  source 1..25: mol_type = other RNA
ttcaagtaatccaggataggctttt

SEQ ID NO: 16884 - RNA, 25 nt, Synthetic Construct
  source 1..25: mol_type = other RNA
ttcaagtaatccaggataggctttt

SEQ ID NO: 16885 - RNA, 21 nt, Synthetic Construct
  source 1..21: mol_type = other RNA
tagcagcacagaaatattggc

SEQ ID NO: 16886 - RNA, 23 nt, Synthetic Construct
  source 1..23: mol_type = other RNA
agcagcattgtacagggctatgg

SEQ ID NO: 16887 - RNA, 23 nt, Synthetic Construct
  source 1..23: mol_type = other RNA
agcagcattgtacagggctatgg

SEQ ID NO: 16888 - RNA, 27 nt, Synthetic Construct
  source 1..27: mol_type = other RNA
ccccccactgctaaatttggctggcta

SEQ ID NO: 16889 - RNA, 27 nt, Synthetic Construct
  source 1..27: mol_type = other RNA
ccccccactgctaaatttggctggcta

SEQ ID NO: 16890 - RNA, 25 nt, Synthetic Construct
  source 1..25: mol_type = other RNA
ttcaagtaatccaggataggctttt

SEQ ID NO: 16891 - RNA, 24 nt, Synthetic Construct
  source 1..24: mol_type = other RNA
tcagtgcatcacagaactttgttt

SEQ ID NO: 16892 - RNA, 15 nt, Synthetic Construct
  source 1..15: mol_type = other RNA
gtagctcgttgggct

SEQ ID NO: 16893 - RNA, 22 nt, Synthetic Construct
  source 1..22: mol_type = other RNA
gtcagtttgtcaaataccccat

SEQ ID NO: 16894 - RNA, 22 nt, Synthetic Construct
  source 1..22: mol_type = other RNA
gtcagtttgtcaaataccccat

SEQ ID NO: 16895 - RNA, 16 nt, Synthetic Construct
  source 1..16: mol_type = other RNA
gcagacgaagtgagtg

SEQ ID NO: 16896 - RNA, 22 nt, Synthetic Construct
  source 1..22: mol_type = other RNA
cagcagcacgtaaatattggcg

SEQ ID NO: 16897 - RNA, 22 nt, Synthetic Construct
  source 1..22: mol_type = other RNA
cagcagcacgtaaatattggcg

SEQ ID NO: 16898 - RNA, 23 nt, Synthetic Construct
  source 1..23: mol_type = other RNA
tgatatgtttgatatattaggtt

SEQ ID NO: 16899 - RNA, 21 nt, Synthetic Construct
  source 1..21: mol_type = other RNA
tgaggaagtaggttgtatagt

SEQ ID NO: 16900 - RNA, 21 nt, Synthetic Construct
  source 1..21: mol_type = other RNA
tgaggaagtaggttgtatagt

SEQ ID NO: 16901 - RNA, 22 nt, Synthetic Construct
  source 1..22: mol_type = other RNA
taactcattaagcgaatctcgc

SEQ ID NO: 16902 - RNA, 22 nt, Synthetic Construct
  source 1..22: mol_type = other RNA
taactcattaagcgaatctcgc

SEQ ID NO: 16903 - RNA, 24 nt, Synthetic Construct
  source 1..24: mol_type = other RNA
tctcacacagaaatcgcacccgtt

SEQ ID NO: 16904 - RNA, 22 nt, Synthetic Construct
  source 1..22: mol_type = other RNA
tgaggtagtagtttgtgcggtt

SEQ ID NO: 16905 - RNA, 22 nt, Synthetic Construct
  source 1..22: mol_type = other RNA
tgaggtagtagtttgtgcggtt

SEQ ID NO: 16906 - RNA, 18 nt, Synthetic Construct
  source 1..18: mol_type = other RNA
cggaagggcaccaccagg

SEQ ID NO: 16907 - RNA, 22 nt, Synthetic Construct
  source 1..22: mol_type = other RNA
tcccgtactgagctgccccgag

SEQ ID NO: 16908 - RNA, 22 nt, Synthetic Construct
  source 1..22: mol_type = other RNA
tcccgtactgagctgccccgag

SEQ ID NO: 16909 - RNA, 22 nt, Synthetic Construct
  source 1..22: mol_type = other RNA
ctcgtaccgtgagtaataatgc

SEQ ID NO: 16910 - RNA, 22 nt, Synthetic Construct
  source 1..22: mol_type = other RNA
ctcgtaccgtgagtaataatgc

SEQ ID NO: 16911 - RNA, 22 nt, Synthetic Construct
  source 1..22: mol_type = other RNA
taaggtagtagattgtatagtt

SEQ ID NO: 16912 - RNA, 22 nt, Synthetic Construct
  source 1..22: mol_type = other RNA
taaggtagtagattgtatagtt

SEQ ID NO: 16913 - RNA, 21 nt, Synthetic Construct
  source 1..21: mol_type = other RNA
gtcagtttgtcaaatacccca

SEQ ID NO: 16914 - RNA, 21 nt, Synthetic Construct
  source 1..21: mol_type = other RNA
gtcagtttgtcaaatacccca

SEQ ID NO: 16915 - RNA, 31 nt, Synthetic Construct; identical to SEQ ID NO: 1627
  source 1..31: mol_type = other RNA

SEQ ID NO: 16916 - RNA, 34 nt, Synthetic Construct; identical to SEQ ID NO: 2317
  source 1..34: mol_type = other RNA

SEQ ID NO: 16917 - RNA, 21 nt, Synthetic Construct
  source 1..21: mol_type = other RNA
gcagatcttggtggtagtagc

SEQ ID NO: 16918 - RNA, 21 nt, Synthetic Construct
  source 1..21: mol_type = other RNA
gcagatcttggtggtagtagc

SEQ ID NO: 16919 - RNA, 17 nt, Synthetic Construct
  source 1..17: mol_type = other RNA
atcgtgacgatagtgca

SEQ ID NO: 16920 - RNA, 20 nt, Synthetic Construct
  source 1..20: mol_type = other RNA
cggcggggacggcgattggt

SEQ ID NO: 16921 - RNA, 33 nt, Synthetic Construct; identical to SEQ ID NO: 2266
  source 1..33: mol_type = other RNA

SEQ ID NO: 16922 - RNA, 33 nt, Synthetic Construct; identical to SEQ ID NO: 2266
  source 1..33: mol_type = other RNA

SEQ ID NO: 16923 - RNA, 20 nt, Synthetic Construct
  source 1..20: mol_type = other RNA
tggggtagtaggttgtatag

SEQ ID NO: 16924 - RNA, 20 nt, Synthetic Construct
  source 1..20: mol_type = other RNA
tggggtagtaggttgtatag

SEQ ID NO: 16925 - RNA, 23 nt, Synthetic Construct
  source 1..23: mol_type = other RNA
atgtcccacccccactcctgtta

SEQ ID NO: 16926 - RNA, 23 nt, Synthetic Construct
  source 1..23: mol_type = other RNA
atgtcccacccccactcctgtta

SEQ ID NO: 16927 - RNA, 19 nt, Synthetic Construct
  source 1..19: mol_type = other RNA
tagcagcacgtaaatattg

SEQ ID NO: 16928 - RNA, 19 nt, Synthetic Construct
  source 1..19: mol_type = other RNA
tagcagcacgtaaatattg

SEQ ID NO: 16929 - RNA, 16 nt, Synthetic Construct
  source 1..16: mol_type = other RNA
gtccacggccatacca

SEQ ID NO: 16930 - RNA, 24 nt, Synthetic Construct
  source 1..24: mol_type = other RNA
aatgacacgatcactcccgttgag

SEQ ID NO: 16931 - RNA, 24 nt, Synthetic Construct
  source 1..24: mol_type = other RNA
aatgacacgatcactcccgttgag

SEQ ID NO: 16932 - RNA, 23 nt, Synthetic Construct
  source 1..23: mol_type = other RNA
caaagtgctgttcgtgcaggtgg

SEQ ID NO: 16933 - RNA, 23 nt, Synthetic Construct
  source 1..23: mol_type = other RNA
caaagtgctgttcgtgcaggtgg

SEQ ID NO: 16934 - RNA, 27 nt, Synthetic Construct
  source 1..27: mol_type = other RNA
gatttccccttggggttgtaggaccac

SEQ ID NO: 16935 - RNA, 22 nt, Synthetic Construct
  source 1..22: mol_type = other RNA
ttaatgctaatcgtgataggga

SEQ ID NO: 16936 - RNA, 22 nt, Synthetic Construct
  source 1..22: mol_type = other RNA
ttaatgctaatcgtgataggga

SEQ ID NO: 16937 - RNA, 34 nt, Synthetic Construct; identical to SEQ ID NO: 6594
  source 1..34: mol_type = other RNA

SEQ ID NO: 16938 - RNA, 34 nt, Synthetic Construct; identical to SEQ ID NO: 6594
  source 1..34: mol_type = other RNA

SEQ ID NO: 16939 - RNA, 23 nt, Synthetic Construct
  source 1..23: mol_type = other RNA
tggtaataagacgtacttagtgt

SEQ ID NO: 16940 - RNA, 23 nt, Synthetic Construct
  source 1..23: mol_type = other RNA
tggtaataagacgtacttagtgt

SEQ ID NO: 16941 - RNA, 21 nt, Synthetic Construct
  source 1..21: mol_type = other RNA
tgaggtagtaggttgcatagt

SEQ ID NO: 16942 - RNA, 21 nt, Synthetic Construct
  source 1..21: mol_type = other RNA
tgaggtagtaggttgcatagt

SEQ ID NO: 16943 - RNA, 16 nt, Synthetic Construct
  source 1..16: mol_type = other RNA
ggtagctcgttgggct

SEQ ID NO: 16944 - RNA, 16 nt, Synthetic Construct
  source 1..16: mol_type = other RNA
ggtagctcgttgggct

SEQ ID NO: 16945 - RNA, 21 nt, Synthetic Construct
  source 1..21: mol_type = other RNA
aaaccgttaccattactgagt

SEQ ID NO: 16946 - RNA, 21 nt, Synthetic Construct
  source 1..21: mol_type = other RNA
aaaccgttaccattactgagt

SEQ ID NO: 16947 - RNA, 21 nt, Synthetic Construct
  source 1..21: mol_type = other RNA
cgaggggcagagagcgagact

SEQ ID NO: 16948 - RNA, 20 nt, Synthetic Construct
  source 1..20: mol_type = other RNA
tgaggtagtgggttgtgtgg

SEQ ID NO: 16949 - RNA, 20 nt, Synthetic Construct
  source 1..20: mol_type = other RNA
tgaggtagtgggttgtgtgg

SEQ ID NO: 16950 - RNA, 21 nt, Synthetic Construct
  source 1..21: mol_type = other RNA
gcagtagtctgcacattggtt

SEQ ID NO: 16951 - RNA, 21 nt, Synthetic Construct
  source 1..21: mol_type = other RNA
gcagtagtctgcacattggtt

SEQ ID NO: 16952 - RNA, 22 nt, Synthetic Construct
  source 1..22: mol_type = other RNA
tggaacgtaaagaagtatgtat

SEQ ID NO: 16953 - RNA, 22 nt, Synthetic Construct
  source 1..22: mol_type = other RNA
tggaacgtaaagaagtatgtat

SEQ ID NO: 16954 - RNA, 22 nt, Synthetic Construct
  source 1..22: mol_type = other RNA
acagtagtctgcacattggttt

SEQ ID NO: 16955 - RNA, 22 nt, Synthetic Construct
  source 1..22: mol_type = other RNA
acagtagtctgcacattggttt

SEQ ID NO: 16956 - RNA, 21 nt, Synthetic Construct
  source 1..21: mol_type = other RNA
tggggtagtagattgtatagt

SEQ ID NO: 16957 - RNA, 21 nt, Synthetic Construct
  source 1..21: mol_type = other RNA
tggggtagtagattgtatagt

SEQ ID NO: 16958 - RNA, 19 nt, Synthetic Construct
  source 1..19: mol_type = other RNA
agctacattgtctgctggg

SEQ ID NO: 16959 - RNA, 19 nt, Synthetic Construct
  source 1..19: mol_type = other RNA
agctacattgtctgctggg

SEQ ID NO: 16960 - RNA, 17 nt, Synthetic Construct
  source 1..17: mol_type = other RNA
tcgctagtaatcgcgga

SEQ ID NO: 16961 - RNA, 23 nt, Synthetic Construct
  source 1..23: mol_type = other RNA
ctcgtaccgtgagtaataatgcg

SEQ ID NO: 16962 - RNA, 23 nt, Synthetic Construct
  source 1..23: mol_type = other RNA
ctcgtaccgtgagtaataatgcg

SEQ ID NO: 16963 - RNA, 17 nt, Synthetic Construct
  source 1..17: mol_type = other RNA
tcagtagctcgaggaaa

SEQ ID NO: 16964 - RNA, 17 nt, Synthetic Construct
  source 1..17: mol_type = other RNA
tcagtagctcgaggaaa

SEQ ID NO: 16965 - RNA, 16 nt, Synthetic Construct
  source 1..16: mol_type = other RNA
gccagcagccgcggta

SEQ ID NO: 16966 - RNA, 21 nt, Synthetic Construct
  source 1..21: mol_type = other RNA
ccccttggggttgtaggacca

SEQ ID NO: 16967 - RNA, 22 nt, Synthetic Construct
  source 1..22: mol_type = other RNA
tcctgtactgagctgacccgag

SEQ ID NO: 16968 - RNA, 22 nt, Synthetic Construct
  source 1..22: mol_type = other RNA
tcctgtactgagctgacccgag

SEQ ID NO: 16969 - RNA, 33 nt, Synthetic Construct; identical to SEQ ID NO: 3082
  source 1..33: mol_type = other RNA

SEQ ID NO: 16970 - RNA, 15 nt, Synthetic Construct
  source 1..15: mol_type = other RNA
gagtagggcgggaca

SEQ ID NO: 16971 - RNA, 22 nt, Synthetic Construct
  source 1..22: mol_type = other RNA
cccataaagtagaaagcactac

SEQ ID NO: 16972 - RNA, 22 nt, Synthetic Construct
  source 1..22: mol_type = other RNA
cccataaagtagaaagcactac

SEQ ID NO: 16973 - RNA, 22 nt, Synthetic Construct
  source 1..22: mol_type = other RNA
atcaagtaattcaggataggtt

SEQ ID NO: 16974 - RNA, 23 nt, Synthetic Construct
  source 1..23: mol_type = other RNA
tcttggagtaggtcattgggtgt

SEQ ID NO: 16975 - RNA, 21 nt, Synthetic Construct
  source 1..21: mol_type = other RNA
tgaggtggtagattgtatagt

SEQ ID NO: 16976 - RNA, 21 nt, Synthetic Construct
  source 1..21: mol_type = other RNA
tgaggtggtagattgtatagt

SEQ ID NO: 16977 - RNA, 23 nt, Synthetic Construct
  source 1..23: mol_type = other RNA
caaagtgctgttcgtgcaggcag

SEQ ID NO: 16978 - RNA, 23 nt, Synthetic Construct
  source 1..23: mol_type = other RNA
caaagtgctgttcgtgcaggcag

SEQ ID NO: 16979 - RNA, 36 nt, Synthetic Construct; identical to SEQ ID NO: 2478
  source 1..36: mol_type = other RNA

SEQ ID NO: 16980 - RNA, 24 nt, Synthetic Construct
  source 1..24: mol_type = other RNA
tgcaaacatccccgactggaagct

SEQ ID NO: 16981 - RNA, 35 nt, Synthetic Construct; identical to SEQ ID NO: 2450
  source 1..35: mol_type = other RNA

SEQ ID NO: 16982 - RNA, 35 nt, Synthetic Construct; identical to SEQ ID NO: 2450
  source 1..35: mol_type = other RNA

SEQ ID NO: 16983 - RNA, 22 nt, Synthetic Construct
  source 1..22: mol_type = other RNA
tgaggtagtggtttgtgctgtt

SEQ ID NO: 16984 - RNA, 35 nt, Synthetic Construct; identical to SEQ ID NO: 2548
  source 1..35: mol_type = other RNA

SEQ ID NO: 16985 - RNA, 35 nt, Synthetic Construct; identical to SEQ ID NO: 2548
  source 1..35: mol_type = other RNA

SEQ ID NO: 16986 - RNA, 22 nt, Synthetic Construct
  source 1..22: mol_type = other RNA
tattgtacttgtcccggcctgt

SEQ ID NO: 16987 - RNA, 22 nt, Synthetic Construct
  source 1..22: mol_type = other RNA
tattgtacttgtcccggcctgt

SEQ ID NO: 16988 - RNA, 22 nt, Synthetic Construct
  source 1..22: mol_type = other RNA
gaatgttgctcggtgaacccct

SEQ ID NO: 16989 - RNA, 21 nt, Synthetic Construct
  source 1..21: mol_type = other RNA
acagcaggacggtggccatgg

SEQ ID NO: 16990 - RNA, 21 nt, Synthetic Construct
  source 1..21: mol_type = other RNA
taactccttaacgaatctcgc

SEQ ID NO: 16991 - RNA, 21 nt, Synthetic Construct
  source 1..21: mol_type = other RNA
atgtcccacccccactcctgt

SEQ ID NO: 16992 - RNA, 22 nt, Synthetic Construct
  source 1..22: mol_type = other RNA
tgaggtagtaggtagtgtggtt

SEQ ID NO: 16993 - RNA, 22 nt, Synthetic Construct
  source 1..22: mol_type = other RNA
tgaggtagtaggtagtgtggtt

SEQ ID NO: 16994 - RNA, 27 nt, Synthetic Construct
  source 1..27: mol_type = other RNA
ccccctactgctaaatttgactggctt

SEQ ID NO: 16995 - RNA, 27 nt, Synthetic Construct
  source 1..27: mol_type = other RNA
ccccctactgctaaatttgactggctt

SEQ ID NO: 16996 - RNA, 21 nt, Synthetic Construct
  source 1..21: mol_type = other RNA
tggaatgtaaagaagtatgta

SEQ ID NO: 16997 - RNA, 21 nt, Synthetic Construct
  source 1..21: mol_type = other RNA
tggaatgtaaagaagtatgta

SEQ ID NO: 16998 - RNA, 22 nt, Synthetic Construct
  source 1..22: mol_type = other RNA
tgaggtagaagtttgtgctgtt

SEQ ID NO: 16999 - RNA, 34 nt, Synthetic Construct
  source 1..34: mol_type = other RNA
attggtcgtggttgtagtccgtgcgagaatacca

SEQ ID NO: 17000 - RNA, 20 nt, Synthetic Construct
  source 1..20: mol_type = other RNA
tcctgtaccgatcaatagtg

SEQ ID NO: 17001 - RNA, 22 nt, Synthetic Construct
  source 1..22: mol_type = other RNA
tcaagagcaataacgaaaaatg

SEQ ID NO: 17002 - RNA, 22 nt, Synthetic Construct
  source 1..22: mol_type = other RNA
tcaagagcaataacgaaaaatg

SEQ ID NO: 17003 - RNA, 19 nt, Synthetic Construct
  source 1..19: mol_type = other RNA
atcacattgccagggattt

SEQ ID NO: 17004 - RNA, 19 nt, Synthetic Construct
  source 1..19: mol_type = other RNA
atcacattgccagggattt

SEQ ID NO: 17005 - RNA, 22 nt, Synthetic Construct
  source 1..22: mol_type = other RNA
gtcagtttgtcaaataccccaa

SEQ ID NO: 17006 - RNA, 22 nt, Synthetic Construct
  source 1..22: mol_type = other RNA
gtcagtttgtcaaataccccaa

SEQ ID NO: 17007 - RNA, 35 nt, Synthetic Construct; identical to SEQ ID NO: 2762
  source 1..35: mol_type = other RNA

SEQ ID NO: 17008 - RNA, 22 nt, Synthetic Construct
  source 1..22: mol_type = other RNA
tgagatagtagattgtatagtt

SEQ ID NO: 17009 - RNA, 22 nt, Synthetic Construct
  source 1..22: mol_type = other RNA
tattgcatttgtcccggcctgt

SEQ ID NO: 17010 - RNA, 22 nt, Synthetic Construct
  source 1..22: mol_type = other RNA
tattgcatttgtcccggcctgt

SEQ ID NO: 17011 - RNA, 23 nt, Synthetic Construct
  source 1..23: mol_type = other RNA
agcagcatagtacagggctatga

SEQ ID NO: 17012 - RNA, 23 nt, Synthetic Construct
  source 1..23: mol_type = other RNA
tgtagtgtttcctactttatgga

SEQ ID NO: 17013 - RNA, 34 nt, Synthetic Construct; identical to SEQ ID NO: 2291
  source 1..34: mol_type = other RNA

SEQ ID NO: 17014 - RNA, 24 nt, Synthetic Construct
  source 1..24: mol_type = other RNA
agctacatctggctactgggtctc

SEQ ID NO: 17015 - RNA, 24 nt, Synthetic Construct
  source 1..24: mol_type = other RNA
agctacatctggctactgggtctc

SEQ ID NO: 17016 - RNA, 21 nt, Synthetic Construct
  source 1..21: mol_type = other RNA
gctattgacgaccgtaccgca

SEQ ID NO: 17017 - RNA, 18 nt, Synthetic Construct
  source 1..18: mol_type = other RNA
cctgtaccgatcaatagt

SEQ ID NO: 17018 - RNA, 22 nt, Synthetic Construct
  source 1..22: mol_type = other RNA
atcacattgccagggatttcca

SEQ ID NO: 17019 - RNA, 23 nt, Synthetic Construct
  source 1..23: mol_type = other RNA
caaagagctgttcgtgcaggtag

SEQ ID NO: 17020 - RNA, 23 nt, Synthetic Construct
  source 1..23: mol_type = other RNA
caaagagctgttcgtgcaggtag

SEQ ID NO: 17021 - RNA, 22 nt, Synthetic Construct
  source 1..22: mol_type = other RNA
tgaggtagtaggttgtgtgatt

SEQ ID NO: 17022 - RNA, 21 nt, Synthetic Construct
  source 1..21: mol_type = other RNA
aaaagctgggttgagagggcg

SEQ ID NO: 17023 - RNA, 21 nt, Synthetic Construct
  source 1..21: mol_type = other RNA
aaaagctgggttgagagggcg

SEQ ID NO: 17024 - RNA, 22 nt, Synthetic Construct
  source 1..22: mol_type = other RNA
tgtagtgtttcctactttatgg

SEQ ID NO: 17025 - RNA, 22 nt, Synthetic Construct
  source 1..22: mol_type = other RNA
tgtagtgtttcctactttatgg

SEQ ID NO: 17026 - RNA, 26 nt, Synthetic Construct
  source 1..26: mol_type = other RNA
cgactcttagcggtggatcactcggc

SEQ ID NO: 17027 - RNA, 26 nt, Synthetic Construct
  source 1..26: mol_type = other RNA
cgactcttagcggtggatcactcggc

SEQ ID NO: 17028 - RNA, 23 nt, Synthetic Construct
  source 1..23: mol_type = other RNA
tgaggtagtaggctgtgtggttt

SEQ ID NO: 17029 - RNA, 22 nt, Synthetic Construct
  source 1..22: mol_type = other RNA
cattgcacttgtcccggtctga

SEQ ID NO: 17030 - RNA, 22 nt, Synthetic Construct
  source 1..22: mol_type = other RNA
cattgcacttgtcccggtctga

SEQ ID NO: 17031 - RNA, 22 nt, Synthetic Construct
  source 1..22: mol_type = other RNA
tgaggtagtaggtagtgtggtt

SEQ ID NO: 17032 - RNA, 22 nt, Synthetic Construct
  source 1..22: mol_type = other RNA
tgaggtagtaggtagtgtggtt

SEQ ID NO: 17033 - RNA, 16 nt, Synthetic Construct
  source 1..16: mol_type = other RNA
gcggtggatgatgtgg

SEQ ID NO: 17034 - RNA, 22 nt, Synthetic Construct
  source 1..22: mol_type = other RNA
cgaggtagtagtttgtgctgtt

SEQ ID NO: 17035 - RNA, 22 nt, Synthetic Construct
  source 1..22: mol_type = other RNA
tgaggtagtagtttgtgttgtt

SEQ ID NO: 17036 - RNA, 22 nt, Synthetic Construct
  source 1..22: mol_type = other RNA
tgaggtagtagtttgtgttgtt

SEQ ID NO: 17037 - RNA, 23 nt, Synthetic Construct
  source 1..23: mol_type = other RNA
tggtgatacgacgtacttagtgt

SEQ ID NO: 17038 - RNA, 21 nt, Synthetic Construct
  source 1..21: mol_type = other RNA
cgaggtagtaggttgtgtggt

SEQ ID NO: 17039 - RNA, 21 nt, Synthetic Construct
  source 1..21: mol_type = other RNA
cgaggtagtaggttgtgtggt

SEQ ID NO: 17040 - RNA, 18 nt, Synthetic Construct
  source 1..18: mol_type = other RNA
cgccgatgatagtgcgga

SEQ ID NO: 17041 - RNA, 18 nt, Synthetic Construct
  source 1..18: mol_type = other RNA
cgccgatgatagtgcgga

SEQ ID NO: 17042 - RNA, 16 nt, Synthetic Construct
  source 1..16: mol_type = other RNA
gcaagaggtcagcggt

SEQ ID NO: 17043 - RNA, 16 nt, Synthetic Construct
  source 1..16: mol_type = other RNA
gcaagaggtcagcggt

SEQ ID NO: 17044 - RNA, 19 nt, Synthetic Construct
  source 1..19: mol_type = other RNA
agcagcattgtacagggct

SEQ ID NO: 17045 - RNA, 15 nt, Synthetic Construct
  source 1..15: mol_type = other RNA
tggccgtcgtcagct

SEQ ID NO: 17046 - RNA, 15 nt, Synthetic Construct
  source 1..15: mol_type = other RNA
tggccgtcgtcagct

SEQ ID NO: 17047 - RNA, 23 nt, Synthetic Construct
  source 1..23: mol_type = other RNA
tgaggggcagagagcgagactta

SEQ ID NO: 17048 - RNA, 23 nt, Synthetic Construct
  source 1..23: mol_type = other RNA
tgaggggcagagagcgagactta

SEQ ID NO: 17049 - RNA, 22 nt, Synthetic Construct
  source 1..22: mol_type = other RNA
ttcaagtaacccaggataggct

SEQ ID NO: 17050 - RNA, 22 nt, Synthetic Construct
  source 1..22: mol_type = other RNA
ttcaagtaacccaggataggct

SEQ ID NO: 17051 - RNA, 35 nt, Synthetic Construct; identical to SEQ ID NO: 757
  source 1..35: mol_type = other RNA

SEQ ID NO: 17052 - RNA, 27 nt, Synthetic Construct
  source 1..27: mol_type = other RNA
ccccccactgctagatttgactggctt

SEQ ID NO: 17053 - RNA, 27 nt, Synthetic Construct
  source 1..27: mol_type = other RNA
ccccccactgctagatttgactggctt

SEQ ID NO: 17054 - RNA, 33 nt, Synthetic Construct; identical to SEQ ID NO: 2638
  source 1..33: mol_type = other RNA

SEQ ID NO: 17055 - RNA, 23 nt, Synthetic Construct
  source 1..23: mol_type = other RNA
tacccattgcatatcggagttgt

SEQ ID NO: 17056 - RNA, 21 nt, Synthetic Construct
  source 1..21: mol_type = other RNA
ggaatcgctagtaatcgcgga

SEQ ID NO: 17057 - RNA, 22 nt, Synthetic Construct
  source 1..22: mol_type = other RNA
tgaggtagtagtttgcgctgtt

SEQ ID NO: 17058 - RNA, 22 nt, Synthetic Construct
  source 1..22: mol_type = other RNA
tgaggtagtagtttgcgctgtt

SEQ ID NO: 17059 - RNA, 21 nt, Synthetic Construct
  source 1..21: mol_type = other RNA
tgaggtagtggattgtatagt

SEQ ID NO: 17060 - RNA, 23 nt, Synthetic Construct
  source 1..23: mol_type = other RNA
tgagcgcctcgacgacagagccg

SEQ ID NO: 17061 - RNA, 23 nt, Synthetic Construct
  source 1..23: mol_type = other RNA
tgagcgcctcgacgacagagccg

SEQ ID NO: 17062 - RNA, 33 nt, Synthetic Construct; identical to SEQ ID NO: 7469
  source 1..33: mol_type = other RNA

SEQ ID NO: 17063 - RNA, 20 nt, Synthetic Construct
  source 1..20: mol_type = other RNA
tgaggtagtaggtcgtatag

SEQ ID NO: 17064 - RNA, 20 nt, Synthetic Construct
  source 1..20: mol_type = other RNA
tgaggtagtaggtcgtatag

SEQ ID NO: 17065 - RNA, 21 nt, Synthetic Construct
  source 1..21: mol_type = other RNA
tcctgtactgagttgccccga

SEQ ID NO: 17066 - RNA, 23 nt, Synthetic Construct
  source 1..23: mol_type = other RNA
tggtaatacgacgtactaagtgt

SEQ ID NO: 17067 - RNA, 22 nt, Synthetic Construct
  source 1..22: mol_type = other RNA
tggaatgtgaagaagtatgtat

SEQ ID NO: 17068 - RNA, 22 nt, Synthetic Construct
  source 1..22: mol_type = other RNA
tggaatgtgaagaagtatgtat

SEQ ID NO: 17069 - RNA, 18 nt, Synthetic Construct
  source 1..18: mol_type = other RNA
tagggaacgtgagctggg

SEQ ID NO: 17070 - RNA, 21 nt, Synthetic Construct
  source 1..21: mol_type = other RNA
tcctgaactgagctgccccga

SEQ ID NO: 17071 - RNA, 21 nt, Synthetic Construct
  source 1..21: mol_type = other RNA
tcctgaactgagctgccccga

SEQ ID NO: 17072 - RNA, 22 nt, Synthetic Construct
  source 1..22: mol_type = other RNA
ggaggtagtaggttgtgtggtt

SEQ ID NO: 17073 - RNA, 22 nt, Synthetic Construct
  source 1..22: mol_type = other RNA
ggaggtagtaggttgtgtggtt

SEQ ID NO: 17074 - RNA, 24 nt, Synthetic Construct
  source 1..24: mol_type = other RNA
ggctacattgtctgctgggtttct

SEQ ID NO: 17075 - RNA, 24 nt, Synthetic Construct
  source 1..24: mol_type = other RNA
ggctacattgtctgctgggtttct

SEQ ID NO: 17076 - RNA, 18 nt, Synthetic Construct
  source 1..18: mol_type = other RNA
ggtgcaagcgttaatcgg

SEQ ID NO: 17077 - RNA, 15 nt, Synthetic Construct
  source 1..15: mol_type = other RNA
aaattccttgtcggg

SEQ ID NO: 17078 - RNA, 15 nt, Synthetic Construct
  source 1..15: mol_type = other RNA
aaattccttgtcggg

SEQ ID NO: 17079 - RNA, 18 nt, Synthetic Construct
  source 1..18: mol_type = other RNA
tcttcggtagtatagtgg

SEQ ID NO: 17080 - RNA, 18 nt, Synthetic Construct
  source 1..18: mol_type = other RNA
tcttcggtagtatagtgg

SEQ ID NO: 17081 - RNA, 22 nt, Synthetic Construct
  source 1..22: mol_type = other RNA
atggatttttggagcagggaga

SEQ ID NO: 17082 - RNA, 22 nt, Synthetic Construct
  source 1..22: mol_type = other RNA
tgaggcagtaggttgtgtggtt

SEQ ID NO: 17083 - RNA, 22 nt, Synthetic Construct
  source 1..22: mol_type = other RNA
tgaggcagtaggttgtgtggtt

SEQ ID NO: 17084 - RNA, 29 nt, Synthetic Construct
  source 1..29: mol_type = other RNA
gcccggctagctcagtcggtagagcatgg

SEQ ID NO: 17085 - RNA, 29 nt, Synthetic Construct
  source 1..29: mol_type = other RNA
gcccggctagctcagtcggtagagcatgg

SEQ ID NO: 17086 - RNA, 23 nt, Synthetic Construct
  source 1..23: mol_type = other RNA
tcctgtactgagccgccccgagt

SEQ ID NO: 17087 - RNA, 23 nt, Synthetic Construct
  source 1..23: mol_type = other RNA
tcctgtactgagccgccccgagt

SEQ ID NO: 17088 - RNA, 23 nt, Synthetic Construct
  source 1..23: mol_type = other RNA
tgacctatgaattgacagccaga

SEQ ID NO: 17089 - RNA, 23 nt, Synthetic Construct
  source 1..23: mol_type = other RNA
tgaggtaggaggttgtatagtta

SEQ ID NO: 17090 - RNA, 22 nt, Synthetic Construct
  source 1..22: mol_type = other RNA
tccaagtaatccaggataggct

SEQ ID NO: 17091 - RNA, 23 nt, Synthetic Construct
  source 1..23: mol_type = other RNA
tcctatactgagctgccccgaga

SEQ ID NO: 17092 - RNA, 20 nt, Synthetic Construct
  source 1..20: mol_type = other RNA
agctacattgtctgctgggt

SEQ ID NO: 17093 - RNA, 20 nt, Synthetic Construct
  source 1..20: mol_type = other RNA
agctacattgtctgctgggt

SEQ ID NO: 17094 - RNA, 22 nt, Synthetic Construct
  source 1..22: mol_type = other RNA
ttctgtactgagctgccccgag

SEQ ID NO: 17095 - RNA, 22 nt, Synthetic Construct
  source 1..22: mol_type = other RNA
tgacctatgaattgacagccag

SEQ ID NO: 17096 - RNA, 22 nt, Synthetic Construct
  source 1..22: mol_type = other RNA
tgacctatgaattgacagccag

SEQ ID NO: 17097 - RNA, 21 nt, Synthetic Construct
  source 1..21: mol_type = other RNA
aagaaagattgcaagaactgc

SEQ ID NO: 17098 - RNA, 21 nt, Synthetic Construct
  source 1..21: mol_type = other RNA
aagaaagattgcaagaactgc

SEQ ID NO: 17099 - RNA, 25 nt, Synthetic Construct
  source 1..25: mol_type = other RNA
ttgaggatatgagatcgaggcgaca

SEQ ID NO: 17100 - RNA, 17 nt, Synthetic Construct
  source 1..17: mol_type = other RNA
agcggtggatgatgtgg

SEQ ID NO: 17101 - RNA, 17 nt, Synthetic Construct
  source 1..17: mol_type = other RNA
agcggtggatgatgtgg

SEQ ID NO: 17102 - RNA, 21 nt, Synthetic Construct
  source 1..21: mol_type = other RNA
gtagcgaaattccttgtcggg

SEQ ID NO: 17103 - RNA, 21 nt, Synthetic Construct
  source 1..21: mol_type = other RNA
gtagcgaaattccttgtcggg

SEQ ID NO: 17104 - RNA, 23 nt, Synthetic Construct
  source 1..23: mol_type = other RNA
ttaatgctaatcgtgatagggga

SEQ ID NO: 17105 - RNA, 21 nt, Synthetic Construct
  source 1..21: mol_type = other RNA
tgaggtagcagattgtatagt

SEQ ID NO: 17106 - RNA, 21 nt, Synthetic Construct
  source 1..21: mol_type = other RNA
tgaggtagcagattgtatagt

SEQ ID NO: 17107 - RNA, 25 nt, Synthetic Construct
  source 1..25: mol_type = other RNA
gggttgtaaaccgcttttgtcaggg

SEQ ID NO: 17108 - RNA, 22 nt, Synthetic Construct
  source 1..22: mol_type = other RNA
cagggctggcagtgacatgggt

SEQ ID NO: 17109 - RNA, 21 nt, Synthetic Construct
  source 1..21: mol_type = other RNA
ctttgttcgattccgttgagt

SEQ ID NO: 17110 - RNA, 21 nt, Synthetic Construct
  source 1..21: mol_type = other RNA
taacactgtctggtaaagatg

SEQ ID NO: 17111 - RNA, 21 nt, Synthetic Construct
  source 1..21: mol_type = other RNA
taacactgtctggtaaagatg

SEQ ID NO: 17112 - RNA, 21 nt, Synthetic Construct
  source 1..21: mol_type = other RNA
aatggcgccactagggttgtg

SEQ ID NO: 17113 - RNA, 23 nt, Synthetic Construct
  source 1..23: mol_type = other RNA
caacgggatcccaaaagcagctg

SEQ ID NO: 17114 - RNA, 22 nt, Synthetic Construct
  source 1..22: mol_type = other RNA
tgaggtagtaggtagtatagtt

SEQ ID NO: 17115 - RNA, 22 nt, Synthetic Construct
  source 1..22: mol_type = other RNA
tgaggtagtaggtagtatagtt

SEQ ID NO: 17116 - RNA, 23 nt, Synthetic Construct
  source 1..23: mol_type = other RNA
tgaggtagtaggttgtatagtta

SEQ ID NO: 17117 - RNA, 21 nt, Synthetic Construct
  source 1..21: mol_type = other RNA
caaagaattctccttttgggc

SEQ ID NO: 17118 - RNA, 23 nt, Synthetic Construct
  source 1..23: mol_type = other RNA
caaagtgcttacagtgcaggtag

SEQ ID NO: 17119 - RNA, 23 nt, Synthetic Construct
  source 1..23: mol_type = other RNA
caaagtgcttacagtgcaggtag

SEQ ID NO: 17120 - RNA, 22 nt, Synthetic Construct
  source 1..22: mol_type = other RNA
tacagtagtctgcacattggtt

SEQ ID NO: 17121 - RNA, 20 nt, Synthetic Construct
  source 1..20: mol_type = other RNA
tgtcagtttgtcaaataccc

SEQ ID NO: 17122 - RNA, 33 nt, Synthetic Construct; identical to SEQ ID NO: 2266
  source 1..33: mol_type = other RNA

SEQ ID NO: 17123 - RNA, 19 nt, Synthetic Construct
  source 1..19: mol_type = other RNA
tcctgtaccgatcaatagt

SEQ ID NO: 17124 - RNA, 22 nt, Synthetic Construct
  source 1..22: mol_type = other RNA
ngaggtagtaggttgtatagtt

SEQ ID NO: 17125 - RNA, 25 nt, Synthetic Construct
  source 1..25: mol_type = other RNA
gcgggcatagcttagtggtaaagtt

SEQ ID NO: 17126 - RNA, 25 nt, Synthetic Construct
  source 1..25: mol_type = other RNA
gcgggcatagcttagtggtaaagtt

SEQ ID NO: 17127 - RNA, 16 nt, Synthetic Construct
  source 1..16: mol_type = other RNA
gtctacggccatgcca

SEQ ID NO: 17128 - RNA, 16 nt, Synthetic Construct
  source 1..16: mol_type = other RNA
ggcgggagtaactatg

SEQ ID NO: 17129 - RNA, 16 nt, Synthetic Construct
  source 1..16: mol_type = other RNA
ggcgggagtaactatg

SEQ ID NO: 17130 - RNA, 21 nt, Synthetic Construct
  source 1..21: mol_type = other RNA
tgtagtgtttcctactttatg

SEQ ID NO: 17131 - RNA, 21 nt, Synthetic Construct
  source 1..21: mol_type = other RNA
tgtagtgtttcctactttatg

SEQ ID NO: 17132 - RNA, 23 nt, Synthetic Construct
  source 1..23: mol_type = other RNA
agcagcattgtacagggctatgt

SEQ ID NO: 17133 - RNA, 23 nt, Synthetic Construct
  source 1..23: mol_type = other RNA
tctttgttcgattccgttgagta

SEQ ID NO: 17134 - RNA, 21 nt, Synthetic Construct
  source 1..21: mol_type = other RNA
tgaggtagtagattgtatagc

SEQ ID NO: 17135 - RNA, 21 nt, Synthetic Construct
  source 1..21: mol_type = other RNA
tgaggtagtagattgtatagc

SEQ ID NO: 17136 - RNA, 20 nt, Synthetic Construct
  source 1..20: mol_type = other RNA
ccgcagagtacagcttggga

SEQ ID NO: 17137 - RNA, 20 nt, Synthetic Construct
  source 1..20: mol_type = other RNA
ccgcagagtacagcttggga

SEQ ID NO: 17138 - RNA, 31 nt, Synthetic Construct; identical to SEQ ID NO: 758
  source 1..31: mol_type = other RNA

SEQ ID NO: 17139 - RNA, 20 nt, Synthetic Construct
  source 1..20: mol_type = other RNA
tgaggtagtaggttgtgtag

SEQ ID NO: 17140 - RNA, 20 nt, Synthetic Construct
  source 1..20: mol_type = other RNA
tgaggtagtaggttgtgtag

SEQ ID NO: 17141 - RNA, 35 nt, Synthetic Construct; identical to SEQ ID NO: 2354
  source 1..35: mol_type = other RNA

SEQ ID NO: 17142 - RNA, 35 nt, Synthetic Construct; identical to SEQ ID NO: 2354
  source 1..35: mol_type = other RNA

SEQ ID NO: 17143 - RNA, 27 nt, Synthetic Construct
  source 1..27: mol_type = other RNA
ccccccaccgctaaatttgactggctt

SEQ ID NO: 17144 - RNA, 27 nt, Synthetic Construct
  source 1..27: mol_type = other RNA
ccccccaccgctaaatttgactggctt

SEQ ID NO: 17145 - RNA, 17 nt, Synthetic Construct
  source 1..17: mol_type = other RNA
agcggtggatgatgtgg

SEQ ID NO: 17146 - RNA, 22 nt, Synthetic Construct
  source 1..22: mol_type = other RNA
tcaggtagtagattgtatagtt

SEQ ID NO: 17147 - RNA, 22 nt, Synthetic Construct
  source 1..22: mol_type = other RNA
taatgcacttgtcccggcctgt

SEQ ID NO: 17148 - RNA, 22 nt, Synthetic Construct
  source 1..22: mol_type = other RNA
taatgcacttgtcccggcctgt

SEQ ID NO: 17149 - RNA, 22 nt, Synthetic Construct
  source 1..22: mol_type = other RNA
tgaagtagtaggttgtatagtt

SEQ ID NO: 17150 - RNA, 22 nt, Synthetic Construct
  source 1..22: mol_type = other RNA
tgaagtagtaggttgtatagtt

SEQ ID NO: 17151 - RNA, 22 nt, Synthetic Construct
  source 1..22: mol_type = other RNA
tcagtagctcgaggaaaagaca

SEQ ID NO: 17152 - RNA, 23 nt, Synthetic Construct
  source 1..23: mol_type = other RNA
ttccccttggggttgtaggacca

SEQ ID NO: 17153 - RNA, 24 nt, Synthetic Construct
  source 1..24: mol_type = other RNA
tgagaactgaattccatgggttat

SEQ ID NO: 17154 - RNA, 24 nt, Synthetic Construct
  source 1..24: mol_type = other RNA
agctcggtctgaggcccctcagta

SEQ ID NO: 17155 - RNA, 24 nt, Synthetic Construct
  source 1..24: mol_type = other RNA
agctcggtctgaggcccctcagta

SEQ ID NO: 17156 - RNA, 21 nt, Synthetic Construct
  source 1..21: mol_type = other RNA
cggcggggacggcgattggtc

SEQ ID NO: 17157 - RNA, 21 nt, Synthetic Construct
  source 1..21: mol_type = other RNA
cggcggggacggcgattggtc

SEQ ID NO: 17158 - RNA, 22 nt, Synthetic Construct
  source 1..22: mol_type = other RNA
gtcagtttgtcaaataccccaa

SEQ ID NO: 17159 - RNA, 31 nt, Synthetic Construct; identical to SEQ ID NO: 13805
  source 1..31: mol_type = other RNA

SEQ ID NO: 17160 - RNA, 31 nt, Synthetic Construct; identical to SEQ ID NO: 13805
  source 1..31: mol_type = other RNA

SEQ ID NO: 17161 - RNA, 18 nt, Synthetic Construct
  source 1..18: mol_type = other RNA
gtccggatcgtagtctgc

SEQ ID NO: 17162 - RNA, 25 nt, Synthetic Construct
  source 1..25: mol_type = other RNA
cctcgcgcgattggagcggccgata

SEQ ID NO: 17163 - RNA, 19 nt, Synthetic Construct
  source 1..19: mol_type = other RNA
gcgccgatgatagtgcgga

SEQ ID NO: 17164 - RNA, 27 nt, Synthetic Construct
  source 1..27: mol_type = other RNA
gcattggtggttcagtggtagaattct

SEQ ID NO: 17165 - RNA, 27 nt, Synthetic Construct
  source 1..27: mol_type = other RNA
gcattggtggttcagtggtagaattct

SEQ ID NO: 17166 - RNA, 22 nt, Synthetic Construct
  source 1..22: mol_type = other RNA
ttgtaccgtgagtaataatgcg

SEQ ID NO: 17167 - RNA, 30 nt, Synthetic Construct; identical to SEQ ID NO: 1641
  source 1..30: mol_type = other RNA

SEQ ID NO: 17168 - RNA, 30 nt, Synthetic Construct; identical to SEQ ID NO: 1641
  source 1..30: mol_type = other RNA

SEQ ID NO: 17169 - RNA, 22 nt, Synthetic Construct
  source 1..22: mol_type = other RNA
taaggtagtagtttgtgctgtt

SEQ ID NO: 17170 - RNA, 22 nt, Synthetic Construct
  source 1..22: mol_type = other RNA
taaggtagtagtttgtgctgtt

SEQ ID NO: 17171 - RNA, 21 nt, Synthetic Construct
  source 1..21: mol_type = other RNA
cagcattgtacagggctatga

SEQ ID NO: 17172 - RNA, 21 nt, Synthetic Construct
  source 1..21: mol_type = other RNA
cagcattgtacagggctatga

SEQ ID NO: 17173 - RNA, 20 nt, Synthetic Construct
  source 1..20: mol_type = other RNA
ggaggtagtaggttgtgtgg

SEQ ID NO: 17174 - RNA, 20 nt, Synthetic Construct
  source 1..20: mol_type = other RNA
cacatgcaagtcgaacggta

SEQ ID NO: 17175 - RNA, 20 nt, Synthetic Construct
  source 1..20: mol_type = other RNA
cacatgcaagtcgaacggta

SEQ ID NO: 17176 - RNA, 17 nt, Synthetic Construct
  source 1..17: mol_type = other RNA
agcggtggatgatgtgg

SEQ ID NO: 17177 - RNA, 22 nt, Synthetic Construct
  source 1..22: mol_type = other RNA
tagcagcacataaatattggcg

SEQ ID NO: 17178 - RNA, 23 nt, Synthetic Construct
  source 1..23: mol_type = other RNA
tgaggtaggaggttgtatagttg

SEQ ID NO: 17179 - RNA, 22 nt, Synthetic Construct
  source 1..22: mol_type = other RNA
tgttgcacttgtcccggcctgt

SEQ ID NO: 17180 - RNA, 22 nt, Synthetic Construct
  source 1..22: mol_type = other RNA
tgttgcacttgtcccggcctgt

SEQ ID NO: 17181 - RNA, 18 nt, Synthetic Construct
  source 1..18: mol_type = other RNA
caacggaatcccaaaagc

SEQ ID NO: 17182 - RNA, 16 nt, Synthetic Construct
  source 1..16: mol_type = other RNA
tccggatcgtagtctg

SEQ ID NO: 17183 - RNA, 21 nt, Synthetic Construct
  source 1..21: mol_type = other RNA
tgaggtagtaggttgtgtggc

SEQ ID NO: 17184 - RNA, 21 nt, Synthetic Construct
  source 1..21: mol_type = other RNA
tgaggtagtaggttgtgtggc

SEQ ID NO: 17185 - RNA, 21 nt, Synthetic Construct
  source 1..21: mol_type = other RNA
tggctcagttcagcaggaaca

SEQ ID NO: 17186 - RNA, 20 nt, Synthetic Construct
  source 1..20: mol_type = other RNA
tcagtagctcgaggaaaaga

SEQ ID NO: 17187 - RNA, 22 nt, Synthetic Construct
  source 1..22: mol_type = other RNA
ttcaagtaatccaggataggtt

SEQ ID NO: 17188 - RNA, 22 nt, Synthetic Construct
  source 1..22: mol_type = other RNA
ttcaagtaatccaggataggtt

SEQ ID NO: 17189 - RNA, 23 nt, Synthetic Construct
  source 1..23: mol_type = other RNA
tggtaatacgacgtacttaatgt

SEQ ID NO: 17190 - RNA, 23 nt, Synthetic Construct
  source 1..23: mol_type = other RNA
tggtaatacgacgtacttaatgt

SEQ ID NO: 17191 - RNA, 23 nt, Synthetic Construct
  source 1..23: mol_type = other RNA
ttatcagaatctccaggggtact

SEQ ID NO: 17192 - RNA, 23 nt, Synthetic Construct
  source 1..23: mol_type = other RNA
ttatcagaatctccaggggtact

SEQ ID NO: 17193 - RNA, 28 nt, Synthetic Construct
  source 1..28: mol_type = other RNA
cccccccactgctaaatttgactggcta

SEQ ID NO: 17194 - RNA, 28 nt, Synthetic Construct
  source 1..28: mol_type = other RNA
cccccccactgctaaatttgactggcta

SEQ ID NO: 17195 - RNA, 22 nt, Synthetic Construct
  source 1..22: mol_type = other RNA
tatgtcccacccccactcctgt

SEQ ID NO: 17196 - RNA, 23 nt, Synthetic Construct
  source 1..23: mol_type = other RNA
cgaggggcagagagcgagacttt

SEQ ID NO: 17197 - RNA, 21 nt, Synthetic Construct
  source 1..21: mol_type = other RNA
gtcagtttgtcaaatacccca

SEQ ID NO: 17198 - RNA, 21 nt, Synthetic Construct
  source 1..21: mol_type = other RNA
gtcagtttgtcaaatacccca

SEQ ID NO: 17199 - RNA, 22 nt, Synthetic Construct
  source 1..22: mol_type = other RNA
tcagtagctcgaggaaaagaca

SEQ ID NO: 17200 - RNA, 15 nt, Synthetic Construct
  source 1..15: mol_type = other RNA
tacctggttgatcct

SEQ ID NO: 17201 - RNA, 23 nt, Synthetic Construct
  source 1..23: mol_type = other RNA
tgggctaagggagatgattgggt

SEQ ID NO: 17202 - RNA, 23 nt, Synthetic Construct
  source 1..23: mol_type = other RNA
tgggctaagggagatgattgggt

SEQ ID NO: 17203 - RNA, 19 nt, Synthetic Construct
  source 1..19: mol_type = other RNA
ccgtgttcggaagattttc

SEQ ID NO: 17204 - RNA, 22 nt, Synthetic Construct
  source 1..22: mol_type = other RNA
tcgtaccgtgggtaataatgcg

SEQ ID NO: 17205 - RNA, 15 nt, Synthetic Construct
  source 1..15: mol_type = other RNA
gtctcgccgacggca

SEQ ID NO: 17206 - RNA, 15 nt, Synthetic Construct
  source 1..15: mol_type = other RNA
gtctcgccgacggca

SEQ ID NO: 17207 - RNA, 29 nt, Synthetic Construct
  source 1..29: mol_type = other RNA
cccccccactgctaaatttgactggctta

SEQ ID NO: 17208 - RNA, 23 nt, Synthetic Construct
  source 1..23: mol_type = other RNA
aacattcaacgctgtcggtgaga

SEQ ID NO: 17209 - RNA, 24 nt, Synthetic Construct
  source 1..24: mol_type = other RNA
gctcactgatcgagtcgtcctgcg

SEQ ID NO: 17210 - RNA, 24 nt, Synthetic Construct
  source 1..24: mol_type = other RNA
gctcactgatcgagtcgtcctgcg

SEQ ID NO: 17211 - RNA, 27 nt, Synthetic Construct
  source 1..27: mol_type = other RNA
ccccccactgctgaatttgactggctt

SEQ ID NO: 17212 - RNA, 27 nt, Synthetic Construct
  source 1..27: mol_type = other RNA
ccccccactgctgaatttgactggctt

SEQ ID NO: 17213 - RNA, 24 nt, Synthetic Construct
  source 1..24: mol_type = other RNA
tgtaaacatccttgactggaagct

SEQ ID NO: 17214 - RNA, 28 nt, Synthetic Construct
  source 1..28: mol_type = other RNA
cgactcttagcggtggatcactcggctc

SEQ ID NO: 17215 - RNA, 15 nt, Synthetic Construct
  source 1..15: mol_type = other RNA
gtcaggatgttggct

SEQ ID NO: 17216 - RNA, 32 nt, Synthetic Construct; identical to SEQ ID NO: 2582
  source 1..32: mol_type = other RNA

SEQ ID NO: 17217 - RNA, 21 nt, Synthetic Construct
  source 1..21: mol_type = other RNA
tgaggaagtaggttgtgtggt

SEQ ID NO: 17218 - RNA, 24 nt, Synthetic Construct
  source 1..24: mol_type = other RNA
tgaggtagtagattgtatagtttt

SEQ ID NO: 17219 - RNA, 24 nt, Synthetic Construct
  source 1..24: mol_type = other RNA
tgaggtagtagattgtatagtttt

SEQ ID NO: 17220 - RNA, 22 nt, Synthetic Construct
  source 1..22: mol_type = other RNA
attatggtttgcctgggactga

SEQ ID NO: 17221 - RNA, 22 nt, Synthetic Construct
  source 1..22: mol_type = other RNA
attatggtttgcctgggactga

SEQ ID NO: 17222 - RNA, 20 nt, Synthetic Construct
  source 1..20: mol_type = other RNA
gcatggccgttcttagttgg

SEQ ID NO: 17223 - RNA, 22 nt, Synthetic Construct
  source 1..22: mol_type = other RNA
ttcaagtagtccaggataggct

SEQ ID NO: 17224 - RNA, 22 nt, Synthetic Construct
  source 1..22: mol_type = other RNA
taggtagtttcctgttgttggg

SEQ ID NO: 17225 - RNA, 21 nt, Synthetic Construct
  source 1..21: mol_type = other RNA
tgaggggcagagagcgagact

SEQ ID NO: 17226 - RNA, 21 nt, Synthetic Construct
  source 1..21: mol_type = other RNA
tcagtgcatcacagaactttg

SEQ ID NO: 17227 - RNA, 37 nt, Synthetic Construct; identical to SEQ ID NO: 5125
  source 1..37: mol_type = other RNA

SEQ ID NO: 17228 - RNA, 37 nt, Synthetic Construct; identical to SEQ ID NO: 5125
  source 1..37: mol_type = other RNA

SEQ ID NO: 17229 - RNA, 21 nt, Synthetic Construct
  source 1..21: mol_type = other RNA
cgtaccgtgagtaataatgcg

SEQ ID NO: 17230 - RNA, 21 nt, Synthetic Construct
  source 1..21: mol_type = other RNA
cgtaccgtgagtaataatgcg

SEQ ID NO: 17231 - RNA, 24 nt, Synthetic Construct
  source 1..24: mol_type = other RNA
agcaacattgtctgctgggtttct

SEQ ID NO: 17232 - RNA, 24 nt, Synthetic Construct
  source 1..24: mol_type = other RNA
agcaacattgtctgctgggtttct

SEQ ID NO: 17233 - RNA, 23 nt, Synthetic Construct
  source 1..23: mol_type = other RNA
cagagtgctgttcgtgcaggtag

SEQ ID NO: 17234 - RNA, 23 nt, Synthetic Construct
  source 1..23: mol_type = other RNA
cagagtgctgttcgtgcaggtag

SEQ ID NO: 17235 - RNA, 22 nt, Synthetic Construct
  source 1..22: mol_type = other RNA
tgaggtagtaggttatatagtt

SEQ ID NO: 17236 - RNA, 22 nt, Synthetic Construct
  source 1..22: mol_type = other RNA
tgaggtagtaggttatatagtt

SEQ ID NO: 17237 - RNA, 22 nt, Synthetic Construct
  source 1..22: mol_type = other RNA
tacaagtaattcaggataggtt

SEQ ID NO: 17238 - RNA, 27 nt, Synthetic Construct
  source 1..27: mol_type = other RNA
gacttaccaaacctatgcaaactccga

SEQ ID NO: 17239 - RNA, 23 nt, Synthetic Construct
  source 1..23: mol_type = other RNA
caaagaattctccttttgggctt

SEQ ID NO: 17240 - RNA, 23 nt, Synthetic Construct
  source 1..23: mol_type = other RNA
caaagaattctccttttgggctt

SEQ ID NO: 17241 - RNA, 22 nt, Synthetic Construct
  source 1..22: mol_type = other RNA
cccagtgctctgaatgtcaaag

SEQ ID NO: 17242 - RNA, 22 nt, Synthetic Construct
  source 1..22: mol_type = other RNA
cccagtgctctgaatgtcaaag

SEQ ID NO: 17243 - RNA, 24 nt, Synthetic Construct
  source 1..24: mol_type = other RNA
tagcagcacgtaaatattggcgtt

SEQ ID NO: 17244 - RNA, 24 nt, Synthetic Construct
  source 1..24: mol_type = other RNA
tagcagcacgtaaatattggcgtt

SEQ ID NO: 17245 - RNA, 23 nt, Synthetic Construct
  source 1..23: mol_type = other RNA
cctccctcgggagggcgcgcggg

SEQ ID NO: 17246 - RNA, 23 nt, Synthetic Construct
  source 1..23: mol_type = other RNA
cctccctcgggagggcgcgcggg

SEQ ID NO: 17247 - RNA, 26 nt, Synthetic Construct
  source 1..26: mol_type = other RNA
tctgcccagtgctctgaatgtcaaag

SEQ ID NO: 17248 - RNA, 23 nt, Synthetic Construct
  source 1..23: mol_type = other RNA
ttaatgctaatcgtgatagggga

SEQ ID NO: 17249 - RNA, 23 nt, Synthetic Construct
  source 1..23: mol_type = other RNA
ttaatgctaatcgtgatagggga

SEQ ID NO: 17250 - RNA, 27 nt, Synthetic Construct
  source 1..27: mol_type = other RNA
ccccccacagctaaatttgactggcta

SEQ ID NO: 17251 - RNA, 18 nt, Synthetic Construct
  source 1..18: mol_type = other RNA
cggaagggcaccaccagg

SEQ ID NO: 17252 - RNA, 22 nt, Synthetic Construct
  source 1..22: mol_type = other RNA
tggggtagtaggttgtatagtt

SEQ ID NO: 17253 - RNA, 22 nt, Synthetic Construct
  source 1..22: mol_type = other RNA
tggggtagtaggttgtatagtt

SEQ ID NO: 17254 - RNA, 16 nt, Synthetic Construct
  source 1..16: mol_type = other RNA
tcgtgacgatagtgca

SEQ ID NO: 17255 - RNA, 16 nt, Synthetic Construct
  source 1..16: mol_type = other RNA
tcgtgacgatagtgca

SEQ ID NO: 17256 - RNA, 19 nt, Synthetic Construct
  source 1..19: mol_type = other RNA
tgtcaactggttgttggga

SEQ ID NO: 17257 - RNA, 19 nt, Synthetic Construct
  source 1..19: mol_type = other RNA
tgtcaactggttgttggga

SEQ ID NO: 17258 - RNA, 15 nt, Synthetic Construct
  source 1..15: mol_type = other RNA
gagagcctggacaca

SEQ ID NO: 17259 - RNA, 23 nt, Synthetic Construct
  source 1..23: mol_type = other RNA
ggcagcattgtacagggctatga

SEQ ID NO: 17260 - RNA, 21 nt, Synthetic Construct
  source 1..21: mol_type = other RNA
tcagtgcatcacagaactttg

SEQ ID NO: 17261 - RNA, 23 nt, Synthetic Construct
  source 1..23: mol_type = other RNA
tgaggtagtaggttgtatagttg

SEQ ID NO: 17262 - RNA, 25 nt, Synthetic Construct
  source 1..25: mol_type = other RNA
gcgccgctggtgtagtggtatcatg

SEQ ID NO: 17263 - RNA, 25 nt, Synthetic Construct
  source 1..25: mol_type = other RNA
gcgccgctggtgtagtggtatcatg

SEQ ID NO: 17264 - RNA, 21 nt, Synthetic Construct
  source 1..21: mol_type = other RNA
tgaggtagtagattgtacagt

SEQ ID NO: 17265 - RNA, 21 nt, Synthetic Construct
  source 1..21: mol_type = other RNA
tgaggtagtagattgtacagt

SEQ ID NO: 17266 - RNA, 21 nt, Synthetic Construct
  source 1..21: mol_type = other RNA
tgaggtagtagcttgtgctgt

SEQ ID NO: 17267 - RNA, 23 nt, Synthetic Construct
  source 1..23: mol_type = other RNA
tgaggtagtagattgtatagttc

SEQ ID NO: 17268 - RNA, 23 nt, Synthetic Construct
  source 1..23: mol_type = other RNA
tgaggtagtagattgtatagttc

SEQ ID NO: 17269 - RNA, 23 nt, Synthetic Construct
  source 1..23: mol_type = other RNA
tgaggtagtagtttgtgctgttg

SEQ ID NO: 17270 - RNA, 22 nt, Synthetic Construct
  source 1..22: mol_type = other RNA
tgaggtggtaggttgtatagtt

SEQ ID NO: 17271 - RNA, 23 nt, Synthetic Construct
  source 1..23: mol_type = other RNA
agtcagtttgtcaaataccccat

SEQ ID NO: 17272 - RNA, 22 nt, Synthetic Construct
  source 1..22: mol_type = other RNA
ggcagcattgtacagggctatg

SEQ ID NO: 17273 - RNA, 20 nt, Synthetic Construct
  source 1..20: mol_type = other RNA
ggtcccaagggtatggctgt

SEQ ID NO: 17274 - RNA, 20 nt, Synthetic Construct
  source 1..20: mol_type = other RNA
ggtcccaagggtatggctgt

SEQ ID NO: 17275 - RNA, 22 nt, Synthetic Construct
  source 1..22: mol_type = other RNA
tgaggtagtagtttgagctgtt

SEQ ID NO: 17276 - RNA, 22 nt, Synthetic Construct
  source 1..22: mol_type = other RNA
tgaggtagtagtttgagctgtt

SEQ ID NO: 17277 - RNA, 19 nt, Synthetic Construct
  source 1..19: mol_type = other RNA
agcgaaattccttgtcggg

SEQ ID NO: 17278 - RNA, 21 nt, Synthetic Construct
  source 1..21: mol_type = other RNA
agctacatctggctactgggt

SEQ ID NO: 17279 - RNA, 21 nt, Synthetic Construct
  source 1..21: mol_type = other RNA
agctacatctggctactgggt

SEQ ID NO: 17280 - RNA, 22 nt, Synthetic Construct
  source 1..22: mol_type = other RNA
tgaggtagtagtttgtatagtt

SEQ ID NO: 17281 - RNA, 22 nt, Synthetic Construct
  source 1..22: mol_type = other RNA
tgaggtagtagtttgtatagtt

SEQ ID NO: 17282 - RNA, 23 nt, Synthetic Construct
  source 1..23: mol_type = other RNA
caaagtgctgtccgtgcaggtag

SEQ ID NO: 17283 - RNA, 23 nt, Synthetic Construct
  source 1..23: mol_type = other RNA
caaagtgctgtccgtgcaggtag

SEQ ID NO: 17284 - RNA, 22 nt, Synthetic Construct
  source 1..22: mol_type = other RNA
acagtagtctgcacattggttt

SEQ ID NO: 17285 - RNA, 22 nt, Synthetic Construct
  source 1..22: mol_type = other RNA
acagtagtctgcacattggttt

SEQ ID NO: 17286 - RNA, 22 nt, Synthetic Construct
  source 1..22: mol_type = other RNA
tgaggtaataggttgtatagtt

SEQ ID NO: 17287 - RNA, 22 nt, Synthetic Construct
  source 1..22: mol_type = other RNA
tgaggtaataggttgtatagtt

SEQ ID NO: 17288 - RNA, 22 nt, Synthetic Construct
  source 1..22: mol_type = other RNA
tttgttcgttcggctcgcgtga

SEQ ID NO: 17289 - RNA, 22 nt, Synthetic Construct
  source 1..22: mol_type = other RNA
tttgttcgttcggctcgcgtga

SEQ ID NO: 17290 - RNA, 21 nt, Synthetic Construct
  source 1..21: mol_type = other RNA
caaagtgcttacagtgcaggt

SEQ ID NO: 17291 - RNA, 19 nt, Synthetic Construct
  source 1..19: mol_type = other RNA
gtccggatcgtagtctgca

SEQ ID NO: 17292 - RNA, 22 nt, Synthetic Construct
  source 1..22: mol_type = other RNA
tcctgtactgagctgctccgag

SEQ ID NO: 17293 - RNA, 22 nt, Synthetic Construct
  source 1..22: mol_type = other RNA
tcctgtactgagctgctccgag

SEQ ID NO: 17294 - RNA, 22 nt, Synthetic Construct
  source 1..22: mol_type = other RNA
tgaggttgtaggttgtatagtt

SEQ ID NO: 17295 - RNA, 20 nt, Synthetic Construct
  source 1..20: mol_type = other RNA
tagcgaaattccttgtcggg

SEQ ID NO: 17296 - RNA, 15 nt, Synthetic Construct
  source 1..15: mol_type = other RNA
acctgcatcgagggt

SEQ ID NO: 17297 - RNA, 26 nt, Synthetic Construct
  source 1..26: mol_type = other RNA
aacattcaacgctgtcggtgagtttt

SEQ ID NO: 17298 - RNA, 23 nt, Synthetic Construct
  source 1..23: mol_type = other RNA
agcagcattgtacggggctatga

SEQ ID NO: 17299 - RNA, 22 nt, Synthetic Construct
  source 1..22: mol_type = other RNA
tgaggtagtaatttgtgctgtt

SEQ ID NO: 17300 - RNA, 22 nt, Synthetic Construct
  source 1..22: mol_type = other RNA
tcaggctcagtcccctcccgat

SEQ ID NO: 17301 - RNA, 22 nt, Synthetic Construct
  source 1..22: mol_type = other RNA
tcaggctcagtcccctcccgat

SEQ ID NO: 17302 - RNA, 35 nt, Synthetic Construct; identical to SEQ ID NO: 737
  source 1..35: mol_type = other RNA

SEQ ID NO: 17303 - RNA, 35 nt, Synthetic Construct; identical to SEQ ID NO: 737
  source 1..35: mol_type = other RNA

SEQ ID NO: 17304 - RNA, 25 nt, Synthetic Construct
  source 1..25: mol_type = other RNA
aaaccgttaccattactgagtttag

SEQ ID NO: 17305 - RNA, 25 nt, Synthetic Construct
  source 1..25: mol_type = other RNA
aaaccgttaccattactgagtttag

SEQ ID NO: 17306 - RNA, 22 nt, Synthetic Construct
  source 1..22: mol_type = other RNA
tgtcagtttgtcaaataccccg

SEQ ID NO: 17307 - RNA, 22 nt, Synthetic Construct
  source 1..22: mol_type = other RNA
tgtcagtttgtcaaataccccg

SEQ ID NO: 17308 - RNA, 24 nt, Synthetic Construct
  source 1..24: mol_type = other RNA
tgaggtagtaggttgtgtggttta

SEQ ID NO: 17309 - RNA, 24 nt, Synthetic Construct
  source 1..24: mol_type = other RNA
tgaggtagtaggttgtgtggttta

SEQ ID NO: 17310 - RNA, 22 nt, Synthetic Construct
  source 1..22: mol_type = other RNA
tgaggtagtaggttgtatagta

SEQ ID NO: 17311 - RNA, 22 nt, Synthetic Construct
  source 1..22: mol_type = other RNA
tgaggtagtaggttgtatagta

SEQ ID NO: 17312 - RNA, 22 nt, Synthetic Construct
  source 1..22: mol_type = other RNA
tagcagcacgtaagtattggcg

SEQ ID NO: 17313 - RNA, 22 nt, Synthetic Construct
  source 1..22: mol_type = other RNA
tagcagcacgtaagtattggcg

SEQ ID NO: 17314 - RNA, 30 nt, Synthetic Construct; identical to SEQ ID NO: 2308
  source 1..30: mol_type = other RNA

SEQ ID NO: 17315 - RNA, 16 nt, Synthetic Construct
  source 1..16: mol_type = other RNA
gcagacgaagtgagtg

SEQ ID NO: 17316 - RNA, 17 nt, Synthetic Construct
  source 1..17: mol_type = other RNA
cagtagctcgaggaaaa

SEQ ID NO: 17317 - RNA, 17 nt, Synthetic Construct
  source 1..17: mol_type = other RNA
cagtagctcgaggaaaa

SEQ ID NO: 17318 - RNA, 21 nt, Synthetic Construct
  source 1..21: mol_type = other RNA
ctagactgaagctccttgggg

SEQ ID NO: 17319 - RNA, 21 nt, Synthetic Construct
  source 1..21: mol_type = other RNA
ctagactgaagctccttgggg

SEQ ID NO: 17320 - RNA, 21 nt, Synthetic Construct
  source 1..21: mol_type = other RNA
cgaggtagtaggttgtatagt

SEQ ID NO: 17321 - RNA, 21 nt, Synthetic Construct
  source 1..21: mol_type = other RNA
cgaggtagtaggttgtatagt

SEQ ID NO: 17322 - RNA, 22 nt, Synthetic Construct
  source 1..22: mol_type = other RNA
tagcttatcagactgatgttga

SEQ ID NO: 17323 - RNA, 22 nt, Synthetic Construct
  source 1..22: mol_type = other RNA
tagcttatcagactgatgttga

SEQ ID NO: 17324 - RNA, 22 nt, Synthetic Construct
  source 1..22: mol_type = other RNA
tgagatagtaggttgtatagtt

SEQ ID NO: 17325 - RNA, 22 nt, Synthetic Construct
  source 1..22: mol_type = other RNA
tgagatagtaggttgtatagtt

SEQ ID NO: 17326 - RNA, 25 nt, Synthetic Construct
  source 1..25: mol_type = other RNA
ggtaaaatggctgagtgaagcattg

SEQ ID NO: 17327 - RNA, 25 nt, Synthetic Construct
  source 1..25: mol_type = other RNA
ggtaaaatggctgagtgaagcattg

SEQ ID NO: 17328 - RNA, 15 nt, Synthetic Construct
  source 1..15: mol_type = other RNA
gtttgatcctggctc

SEQ ID NO: 17329 - RNA, 15 nt, Synthetic Construct
  source 1..15: mol_type = other RNA
gtttgatcctggctc

SEQ ID NO: 17330 - RNA, 21 nt, Synthetic Construct
  source 1..21: mol_type = other RNA
cggagtgtgacaatggtgttt

SEQ ID NO: 17331 - RNA, 23 nt, Synthetic Construct
  source 1..23: mol_type = other RNA
tgaggggcagagagcgagactta

SEQ ID NO: 17332 - RNA, 16 nt, Synthetic Construct
  source 1..16: mol_type = other RNA
tgacgcgcatgaatgg

SEQ ID NO: 17333 - RNA, 16 nt, Synthetic Construct
  source 1..16: mol_type = other RNA
tgacgcgcatgaatgg

SEQ ID NO: 17334 - RNA, 22 nt, Synthetic Construct
  source 1..22: mol_type = other RNA
tattgcacttgtcccggtctgt

SEQ ID NO: 17335 - RNA, 20 nt, Synthetic Construct
  source 1..20: mol_type = other RNA
tattgcacattactaagttg

SEQ ID NO: 17336 - RNA, 20 nt, Synthetic Construct
  source 1..20: mol_type = other RNA
tattgcacattactaagttg

SEQ ID NO: 17337 - RNA, 23 nt, Synthetic Construct
  source 1..23: mol_type = other RNA
ctcactgatcgagtcgtcctgcg

SEQ ID NO: 17338 - RNA, 23 nt, Synthetic Construct
  source 1..23: mol_type = other RNA
ctcactgatcgagtcgtcctgcg

SEQ ID NO: 17339 - RNA, 22 nt, Synthetic Construct
  source 1..22: mol_type = other RNA
cgaggtagtagtttgtgctgtt

SEQ ID NO: 17340 - RNA, 21 nt, Synthetic Construct
  source 1..21: mol_type = other RNA
aaaagctgggttgagagggcg

SEQ ID NO: 17341 - RNA, 21 nt, Synthetic Construct
  source 1..21: mol_type = other RNA
aaaagctgggttgagagggcg

SEQ ID NO: 17342 - RNA, 19 nt, Synthetic Construct
  source 1..19: mol_type = other RNA
gaagaccctgttgagcttg

SEQ ID NO: 17343 - RNA, 23 nt, Synthetic Construct
  source 1..23: mol_type = other RNA
agcagcattgtacagggctacga

SEQ ID NO: 17344 - RNA, 23 nt, Synthetic Construct
  source 1..23: mol_type = other RNA
agcagcattgtacagggctacga

SEQ ID NO: 17345 - RNA, 16 nt, Synthetic Construct
  source 1..16: mol_type = other RNA
gggtgaaagcggggga

SEQ ID NO: 17346 - RNA, 21 nt, Synthetic Construct
  source 1..21: mol_type = other RNA
tgtcccacccccactcctgtt

SEQ ID NO: 17347 - RNA, 21 nt, Synthetic Construct
  source 1..21: mol_type = other RNA
tgtcccacccccactcctgtt

SEQ ID NO: 17348 - RNA, 21 nt, Synthetic Construct
  source 1..21: mol_type = other RNA
cgtaccgtgagtaataacgcg

SEQ ID NO: 17349 - RNA, 20 nt, Synthetic Construct
  source 1..20: mol_type = other RNA
tattgcactcgtcccggcct

SEQ ID NO: 17350 - RNA, 20 nt, Synthetic Construct
  source 1..20: mol_type = other RNA
tattgcactcgtcccggcct

SEQ ID NO: 17351 - RNA, 23 nt, Synthetic Construct
  source 1..23: mol_type = other RNA
agcagcattgtacagggctatgc

SEQ ID NO: 17352 - RNA, 28 nt, Synthetic Construct
  source 1..28: mol_type = other RNA
cccccccactgctaaatttgactggcta

SEQ ID NO: 17353 - RNA, 23 nt, Synthetic Construct
  source 1..23: mol_type = other RNA
tcactgatcgagtcgtcctgcgc

SEQ ID NO: 17354 - RNA, 23 nt, Synthetic Construct
  source 1..23: mol_type = other RNA
tcactgatcgagtcgtcctgcgc

SEQ ID NO: 17355 - RNA, 22 nt, Synthetic Construct
  source 1..22: mol_type = other RNA
taactcattaagcgaatctcgc

SEQ ID NO: 17356 - RNA, 22 nt, Synthetic Construct
  source 1..22: mol_type = other RNA
taactcattaagcgaatctcgc

SEQ ID NO: 17357 - RNA, 31 nt, Synthetic Construct; identical to SEQ ID NO: 14087
  source 1..31: mol_type = other RNA

SEQ ID NO: 17358 - RNA, 31 nt, Synthetic Construct; identical to SEQ ID NO: 14087
  source 1..31: mol_type = other RNA

SEQ ID NO: 17359 - RNA, 22 nt, Synthetic Construct
  source 1..22: mol_type = other RNA
taaccccttaagcgaatctcgc

SEQ ID NO: 17360 - RNA, 22 nt, Synthetic Construct
  source 1..22: mol_type = other RNA
taaccccttaagcgaatctcgc

SEQ ID NO: 17361 - RNA, 16 nt, Synthetic Construct
  source 1..16: mol_type = other RNA
gggaacgtgagctggg

SEQ ID NO: 17362 - RNA, 16 nt, Synthetic Construct
  source 1..16: mol_type = other RNA
gggaacgtgagctggg

SEQ ID NO: 17363 - RNA, 22 nt, Synthetic Construct
  source 1..22: mol_type = other RNA
tagcagcacgtaaatataggcg

SEQ ID NO: 17364 - RNA, 22 nt, Synthetic Construct
  source 1..22: mol_type = other RNA
tagcagcacgtaaatataggcg

SEQ ID NO: 17365 - RNA, 22 nt, Synthetic Construct
  source 1..22: mol_type = other RNA
tgtggtagtaggttgtatagtt

SEQ ID NO: 17366 - RNA, 22 nt, Synthetic Construct
  source 1..22: mol_type = other RNA
tgaggtagtaggttgtattgtt

SEQ ID NO: 17367 - RNA, 24 nt, Synthetic Construct
  source 1..24: mol_type = other RNA
cggagaaggttagctcagccaact

SEQ ID NO: 17368 - RNA, 15 nt, Synthetic Construct
  source 1..15: mol_type = other RNA
cggcccagactccta

SEQ ID NO: 17369 - RNA, 15 nt, Synthetic Construct
  source 1..15: mol_type = other RNA
cggcccagactccta

SEQ ID NO: 17370 - RNA, 21 nt, Synthetic Construct
  source 1..21: mol_type = other RNA
tgaggaagtaggttgtgtggt

SEQ ID NO: 17371 - RNA, 16 nt, Synthetic Construct
  source 1..16: mol_type = other RNA
gtccccttcgtctaga

SEQ ID NO: 17372 - RNA, 16 nt, Synthetic Construct
  source 1..16: mol_type = other RNA
gtccccttcgtctaga

SEQ ID NO: 17373 - RNA, 16 nt, Synthetic Construct
  source 1..16: mol_type = other RNA
tgcaagtcgaacggta

SEQ ID NO: 17374 - RNA, 16 nt, Synthetic Construct
  source 1..16: mol_type = other RNA
tgcaagtcgaacggta

SEQ ID NO: 17375 - RNA, 22 nt, Synthetic Construct
  source 1..22: mol_type = other RNA
tgaggtagtaggttgtgtggat

SEQ ID NO: 17376 - RNA, 20 nt, Synthetic Construct
  source 1..20: mol_type = other RNA
agcagcattgtacagggcta

SEQ ID NO: 17377 - RNA, 20 nt, Synthetic Construct
  source 1..20: mol_type = other RNA
agcagcattgtacagggcta

SEQ ID NO: 17378 - RNA, 22 nt, Synthetic Construct
  source 1..22: mol_type = other RNA
aatgacacgatcactcccgttg

SEQ ID NO: 17379 - RNA, 22 nt, Synthetic Construct
  source 1..22: mol_type = other RNA
atgtcccacccccactcctgtt

SEQ ID NO: 17380 - RNA, 22 nt, Synthetic Construct
  source 1..22: mol_type = other RNA
atgtcccacccccactcctgtt

SEQ ID NO: 17381 - RNA, 18 nt, Synthetic Construct
  source 1..18: mol_type = other RNA
tcagtagctcgaggaaaa

SEQ ID NO: 17382 - RNA, 20 nt, Synthetic Construct
  source 1..20: mol_type = other RNA
ggggatgtagctcagatggt

SEQ ID NO: 17383 - RNA, 20 nt, Synthetic Construct
  source 1..20: mol_type = other RNA
ggggatgtagctcagatggt

SEQ ID NO: 17384 - RNA, 22 nt, Synthetic Construct
  source 1..22: mol_type = other RNA
tagcatatcgagcctgagaaca

SEQ ID NO: 17385 - RNA, 27 nt, Synthetic Construct
  source 1..27: mol_type = other RNA
ccccccactgctgaatttgactggctt

SEQ ID NO: 17386 - RNA, 27 nt, Synthetic Construct
  source 1..27: mol_type = other RNA
ccccccactgctgaatttgactggctt

SEQ ID NO: 17387 - RNA, 22 nt, Synthetic Construct
  source 1..22: mol_type = other RNA
tgaggtagtaggttgaatagtt

SEQ ID NO: 17388 - RNA, 22 nt, Synthetic Construct
  source 1..22: mol_type = other RNA
tgaggtagtaggttgaatagtt

SEQ ID NO: 17389 - RNA, 22 nt, Synthetic Construct
  source 1..22: mol_type = other RNA
aggaatgtaaagaagtatgtat

SEQ ID NO: 17390 - RNA, 37 nt, Synthetic Construct; identical to SEQ ID NO: 5125
  source 1..37: mol_type = other RNA

SEQ ID NO: 17391 - RNA, 37 nt, Synthetic Construct; identical to SEQ ID NO: 5125
  source 1..37: mol_type = other RNA

SEQ ID NO: 17392 - RNA, 21 nt, Synthetic Construct
  source 1..21: mol_type = other RNA
ctttgttcgattccgttgagt

SEQ ID NO: 17393 - RNA, 21 nt, Synthetic Construct
  source 1..21: mol_type = other RNA
ctttgttcgattccgttgagt

SEQ ID NO: 17394 - RNA, 27 nt, Synthetic Construct
  source 1..27: mol_type = other RNA
atagtctttgttcgattccgttgagta

SEQ ID NO: 17395 - RNA, 21 nt, Synthetic Construct
  source 1..21: mol_type = other RNA
caaagaattctccttttgggc

SEQ ID NO: 17396 - RNA, 21 nt, Synthetic Construct
  source 1..21: mol_type = other RNA
caaagaattctccttttgggc

SEQ ID NO: 17397 - RNA, 21 nt, Synthetic Construct
  source 1..21: mol_type = other RNA
tgaggggcagagagcgagact

SEQ ID NO: 17398 - RNA, 21 nt, Synthetic Construct
  source 1..21: mol_type = other RNA
tgaggggcagagagcgagact

SEQ ID NO: 17399 - RNA, 27 nt, Synthetic Construct
  source 1..27: mol_type = other RNA
ccccccactgttaaatttgactggctt

SEQ ID NO: 17400 - RNA, 22 nt, Synthetic Construct
  source 1..22: mol_type = other RNA
tgaggtagtaaattgtatagtt

SEQ ID NO: 17401 - RNA, 21 nt, Synthetic Construct
  source 1..21: mol_type = other RNA
tgaggtagtagatcgtatagt

SEQ ID NO: 17402 - RNA, 19 nt, Synthetic Construct
  source 1..19: mol_type = other RNA
agctacattgtctgctggg

SEQ ID NO: 17403 - RNA, 19 nt, Synthetic Construct
  source 1..19: mol_type = other RNA
agctacattgtctgctggg

SEQ ID NO: 17404 - RNA, 23 nt, Synthetic Construct
  source 1..23: mol_type = other RNA
tgaggtagcaggttgtgtggttt

SEQ ID NO: 17405 - RNA, 20 nt, Synthetic Construct
  source 1..20: mol_type = other RNA
tgtaaacatccttgactgga

SEQ ID NO: 17406 - RNA, 20 nt, Synthetic Construct
  source 1..20: mol_type = other RNA
tgtaaacatccttgactgga

SEQ ID NO: 17407 - RNA, 22 nt, Synthetic Construct
  source 1..22: mol_type = other RNA
taactccttaagcggatctcgc

SEQ ID NO: 17408 - RNA, 22 nt, Synthetic Construct
  source 1..22: mol_type = other RNA
taactccttaagcggatctcgc

SEQ ID NO: 17409 - RNA, 21 nt, Synthetic Construct
  source 1..21: mol_type = other RNA
taactccttaagcgaatctcc

SEQ ID NO: 17410 - RNA, 21 nt, Synthetic Construct
  source 1..21: mol_type = other RNA
taactccttaagcgaatctcc

SEQ ID NO: 17411 - RNA, 16 nt, Synthetic Construct
  source 1..16: mol_type = other RNA
ccatgccgcgtgcggg

SEQ ID NO: 17412 - RNA, 16 nt, Synthetic Construct
  source 1..16: mol_type = other RNA
cgctagtaatcgcgga

SEQ ID NO: 17413 - RNA, 22 nt, Synthetic Construct
  source 1..22: mol_type = other RNA
cggaatcgctagtaatcgcgga

SEQ ID NO: 17414 - RNA, 22 nt, Synthetic Construct
  source 1..22: mol_type = other RNA
cggaatcgctagtaatcgcgga

SEQ ID NO: 17415 - RNA, 22 nt, Synthetic Construct
  source 1..22: mol_type = other RNA
tggcagtgtcttagctggttgt

SEQ ID NO: 17416 - RNA, 22 nt, Synthetic Construct
  source 1..22: mol_type = other RNA
tggcagtgtcttagctggttgt

SEQ ID NO: 17417 - RNA, 21 nt, Synthetic Construct
  source 1..21: mol_type = other RNA
cctctgggcccttcctccagt

SEQ ID NO: 17418 - RNA, 23 nt, Synthetic Construct
  source 1..23: mol_type = other RNA
tgaggtagcaggttgtgtggttt

SEQ ID NO: 17419 - RNA, 19 nt, Synthetic Construct
  source 1..19: mol_type = other RNA
cttggggttgtaggaccac

SEQ ID NO: 17420 - RNA, 19 nt, Synthetic Construct
  source 1..19: mol_type = other RNA
cttggggttgtaggaccac

SEQ ID NO: 17421 - RNA, 23 nt, Synthetic Construct
  source 1..23: mol_type = other RNA
cgactcttagcggtggatcactc

SEQ ID NO: 17422 - RNA, 23 nt, Synthetic Construct
  source 1..23: mol_type = other RNA
cgactcttagcggtggatcactc

SEQ ID NO: 17423 - RNA, 22 nt, Synthetic Construct
  source 1..22: mol_type = other RNA
tgagaactgaactccatgggtt

SEQ ID NO: 17424 - RNA, 22 nt, Synthetic Construct
  source 1..22: mol_type = other RNA
tgagaactgaactccatgggtt

SEQ ID NO: 17425 - RNA, 22 nt, Synthetic Construct
  source 1..22: mol_type = other RNA
tggaatgtaaggaagtgtgtgg

SEQ ID NO: 17426 - RNA, 28 nt, Synthetic Construct
  source 1..28: mol_type = other RNA
ccccccactgctaaatttgaccggcttt

SEQ ID NO: 17427 - RNA, 22 nt, Synthetic Construct
  source 1..22: mol_type = other RNA
tctctcggctcctcgcggctct

SEQ ID NO: 17428 - RNA, 20 nt, Synthetic Construct
  source 1..20: mol_type = other RNA
tgtaaacatccttgactgga

SEQ ID NO: 17429 - RNA, 20 nt, Synthetic Construct
  source 1..20: mol_type = other RNA
tgtaaacatccttgactgga

SEQ ID NO: 17430 - RNA, 22 nt, Synthetic Construct
  source 1..22: mol_type = other RNA
tgagatgaagcactgtagctct

SEQ ID NO: 17431 - RNA, 22 nt, Synthetic Construct
  source 1..22: mol_type = other RNA
tgagatgaagcactgtagctct

SEQ ID NO: 17432 - RNA, 21 nt, Synthetic Construct
  source 1..21: mol_type = other RNA
gtgccgaagctgtgggattga

SEQ ID NO: 17433 - RNA, 21 nt, Synthetic Construct
  source 1..21: mol_type = other RNA
gtgccgaagctgtgggattga

SEQ ID NO: 17434 - RNA, 23 nt, Synthetic Construct
  source 1..23: mol_type = other RNA
tgaggtagtaggttgtgtggttt

SEQ ID NO: 17435 - RNA, 17 nt, Synthetic Construct
  source 1..17: mol_type = other RNA
tctgcctcagcgtcggt

SEQ ID NO: 17436 - RNA, 17 nt, Synthetic Construct
  source 1..17: mol_type = other RNA
tctgcctcagcgtcggt

SEQ ID NO: 17437 - RNA, 20 nt, Synthetic Construct
  source 1..20: mol_type = other RNA
ctggacttggagtcagaagg

SEQ ID NO: 17438 - RNA, 22 nt, Synthetic Construct
  source 1..22: mol_type = other RNA
tgaggtagtagtttgtgctgat

SEQ ID NO: 17439 - RNA, 22 nt, Synthetic Construct
  source 1..22: mol_type = other RNA
tgaggtagtagtttgtgctgat

SEQ ID NO: 17440 - RNA, 18 nt, Synthetic Construct
  source 1..18: mol_type = other RNA
aaccgggcggaaacacca

SEQ ID NO: 17441 - RNA, 18 nt, Synthetic Construct
  source 1..18: mol_type = other RNA
aaccgggcggaaacacca

SEQ ID NO: 17442 - RNA, 23 nt, Synthetic Construct
  source 1..23: mol_type = other RNA
tgaggggcggagagcgagacttt

SEQ ID NO: 17443 - RNA, 23 nt, Synthetic Construct
  source 1..23: mol_type = other RNA
tggagtgtgacaatggtgtttgg

SEQ ID NO: 17444 - RNA, 23 nt, Synthetic Construct
  source 1..23: mol_type = other RNA
tggagtgtgacaatggtgtttgg

SEQ ID NO: 17445 - RNA, 22 nt, Synthetic Construct
  source 1..22: mol_type = other RNA
catcgggaatgtcgtgtccgcc

SEQ ID NO: 17446 - RNA, 21 nt, Synthetic Construct
  source 1..21: mol_type = other RNA
cattgcacttgtctcggtctg

SEQ ID NO: 17447 - RNA, 21 nt, Synthetic Construct
  source 1..21: mol_type = other RNA
cattgcacttgtctcggtctg

SEQ ID NO: 17448 - RNA, 20 nt, Synthetic Construct
  source 1..20: mol_type = other RNA
tgaggtagtaggttgtgtgt

SEQ ID NO: 17449 - RNA, 20 nt, Synthetic Construct
  source 1..20: mol_type = other RNA
tgaggtagtaggctgtatag

SEQ ID NO: 17450 - RNA, 20 nt, Synthetic Construct
  source 1..20: mol_type = other RNA
tgaggtagtaggctgtatag

SEQ ID NO: 17451 - RNA, 22 nt, Synthetic Construct
  source 1..22: mol_type = other RNA
tggggtagtagattgtatagtt

SEQ ID NO: 17452 - RNA, 22 nt, Synthetic Construct
  source 1..22: mol_type = other RNA
tggggtagtagattgtatagtt

SEQ ID NO: 17453 - RNA, 16 nt, Synthetic Construct
  source 1..16: mol_type = other RNA
gtctacgaccatacca

SEQ ID NO: 17454 - RNA, 23 nt, Synthetic Construct
  source 1..23: mol_type = other RNA
tagcttatcagactgatgttgaa

SEQ ID NO: 17455 - RNA, 23 nt, Synthetic Construct
  source 1..23: mol_type = other RNA
tagcttatcagactgatgttgaa

SEQ ID NO: 17456 - RNA, 23 nt, Synthetic Construct
  source 1..23: mol_type = other RNA
tttggtccccttcaaccagctgt

SEQ ID NO: 17457 - RNA, 23 nt, Synthetic Construct
  source 1..23: mol_type = other RNA
tgaggtagtaggttgtgtggtta

SEQ ID NO: 17458 - RNA, 23 nt, Synthetic Construct
  source 1..23: mol_type = other RNA
tcctgtactgagctgctccgaga

SEQ ID NO: 17459 - RNA, 21 nt, Synthetic Construct
  source 1..21: mol_type = other RNA
tggagtgtgacaatggtgtct

SEQ ID NO: 17460 - RNA, 21 nt, Synthetic Construct
  source 1..21: mol_type = other RNA
tggagtgtgacaatggtgtct

SEQ ID NO: 17461 - RNA, 22 nt, Synthetic Construct
  source 1..22: mol_type = other RNA
tgaggtagtaagttgtatagtt

SEQ ID NO: 17462 - RNA, 22 nt, Synthetic Construct
  source 1..22: mol_type = other RNA
tgaggtagtaagttgtatagtt

SEQ ID NO: 17463 - RNA, 27 nt, Synthetic Construct
  source 1..27: mol_type = other RNA
ccccccactgctaaattcgactggctt

SEQ ID NO: 17464 - RNA, 23 nt, Synthetic Construct
  source 1..23: mol_type = other RNA
tgaggtagtaggttgtgcggttt

SEQ ID NO: 17465 - RNA, 22 nt, Synthetic Construct
  source 1..22: mol_type = other RNA
agcagcattgtacagggctatt

SEQ ID NO: 17466 - RNA, 22 nt, Synthetic Construct
  source 1..22: mol_type = other RNA
agcagcattgtacagggctatt

SEQ ID NO: 17467 - RNA, 22 nt, Synthetic Construct
  source 1..22: mol_type = other RNA
tgtggtagtaggttgtgtggtt

SEQ ID NO: 17468 - RNA, 16 nt, Synthetic Construct
  source 1..16: mol_type = other RNA
gtaaacggcgggagta

SEQ ID NO: 17469 - RNA, 16 nt, Synthetic Construct
  source 1..16: mol_type = other RNA
gtaaacggcgggagta

SEQ ID NO: 17470 - RNA, 20 nt, Synthetic Construct
  source 1..20: mol_type = other RNA
cataaagtagaaagcactac

SEQ ID NO: 17471 - RNA, 19 nt, Synthetic Construct
  source 1..19: mol_type = other RNA
cccttgtcattagttgcta

SEQ ID NO: 17472 - RNA, 22 nt, Synthetic Construct
  source 1..22: mol_type = other RNA
aacccgtagatccgatcttgtg

SEQ ID NO: 17473 - RNA, 22 nt, Synthetic Construct
  source 1..22: mol_type = other RNA
aacccgtagatccgatcttgtg

SEQ ID NO: 17474 - RNA, 22 nt, Synthetic Construct
  source 1..22: mol_type = other RNA
tgaggtagtagattgtatagta

SEQ ID NO: 17475 - RNA, 22 nt, Synthetic Construct
  source 1..22: mol_type = other RNA
tgaggtagtagattgtatagta

SEQ ID NO: 17476 - RNA, 22 nt, Synthetic Construct
  source 1..22: mol_type = other RNA
aatgcacccgggcaaggattct

SEQ ID NO: 17477 - RNA, 22 nt, Synthetic Construct
  source 1..22: mol_type = other RNA
aatgcacccgggcaaggattct

SEQ ID NO: 17478 - RNA, 23 nt, Synthetic Construct
  source 1..23: mol_type = other RNA
tggtaatacgacgtactttgtgt

SEQ ID NO: 17479 - RNA, 15 nt, Synthetic Construct
  source 1..15: mol_type = other RNA
gcaagccgaacggta

SEQ ID NO: 17480 - RNA, 41 nt, Synthetic Construct; identical to SEQ ID NO: 10630
  source 1..41: mol_type = other RNA

SEQ ID NO: 17481 - RNA, 41 nt, Synthetic Construct; identical to SEQ ID NO: 10630
  source 1..41: mol_type = other RNA

SEQ ID NO: 17482 - RNA, 22 nt, Synthetic Construct
  source 1..22: mol_type = other RNA
cattgcactcgtctcggtctga

SEQ ID NO: 17483 - RNA, 22 nt, Synthetic Construct
  source 1..22: mol_type = other RNA
cattgcactcgtctcggtctga

SEQ ID NO: 17484 - RNA, 26 nt, Synthetic Construct
  source 1..26: mol_type = other RNA
gaggaacactagtggcgtaggcgaga

SEQ ID NO: 17485 - RNA, 26 nt, Synthetic Construct
  source 1..26: mol_type = other RNA
gaggaacactagtggcgtaggcgaga

SEQ ID NO: 17486 - RNA, 22 nt, Synthetic Construct
  source 1..22: mol_type = other RNA
taactccttaagcgaatctcga

SEQ ID NO: 17487 - RNA, 22 nt, Synthetic Construct
  source 1..22: mol_type = other RNA
taactccttaagcgaatctcga

SEQ ID NO: 17488 - RNA, 25 nt, Synthetic Construct
  source 1..25: mol_type = other RNA
tgtcagtttgtcaaataccccaatt

SEQ ID NO: 17489 - RNA, 25 nt, Synthetic Construct
  source 1..25: mol_type = other RNA
tgtcagtttgtcaaataccccaatt

SEQ ID NO: 17490 - RNA, 21 nt, Synthetic Construct
  source 1..21: mol_type = other RNA
agagttctacagtccgacgat

SEQ ID NO: 17491 - RNA, 21 nt, Synthetic Construct
  source 1..21: mol_type = other RNA
agagttctacagtccgacgat

SEQ ID NO: 17492 - RNA, 28 nt, Synthetic Construct
  source 1..28: mol_type = other RNA
gcggtataccgaagctctaggtgcggca

SEQ ID NO: 17493 - RNA, 28 nt, Synthetic Construct
  source 1..28: mol_type = other RNA
gcggtataccgaagctctaggtgcggca

SEQ ID NO: 17494 - RNA, 19 nt, Synthetic Construct
  source 1..19: mol_type = other RNA
ggggatgtagctcagatgg

SEQ ID NO: 17495 - RNA, 23 nt, Synthetic Construct
  source 1..23: mol_type = other RNA
tctcccaacccttgtaccagtgt

SEQ ID NO: 17496 - RNA, 23 nt, Synthetic Construct
  source 1..23: mol_type = other RNA
tctcccaacccttgtaccagtgt

SEQ ID NO: 17497 - RNA, 27 nt, Synthetic Construct
  source 1..27: mol_type = other RNA
ccccccattgctaaatttgactggctt

SEQ ID NO: 17498 - RNA, 22 nt, Synthetic Construct
  source 1..22: mol_type = other RNA
tgaggttgtagtttgtgctgtt

SEQ ID NO: 17499 - RNA, 22 nt, Synthetic Construct
  source 1..22: mol_type = other RNA
tgaggttgtagtttgtgctgtt

SEQ ID NO: 17500 - RNA, 16 nt, Synthetic Construct
  source 1..16: mol_type = other RNA
cagtcaggatgttggc

SEQ ID NO: 17501 - RNA, 20 nt, Synthetic Construct
  source 1..20: mol_type = other RNA
tagcagcacgtaaatattgg

SEQ ID NO: 17502 - RNA, 20 nt, Synthetic Construct
  source 1..20: mol_type = other RNA
tagcagcacgtaaatattgg

SEQ ID NO: 17503 - RNA, 15 nt, Synthetic Construct
  source 1..15: mol_type = other RNA
ggccgtcgtcagctc

SEQ ID NO: 17504 - RNA, 27 nt, Synthetic Construct
  source 1..27: mol_type = other RNA
cagagttctacagtccgacgatcgatc

SEQ ID NO: 17505 - RNA, 27 nt, Synthetic Construct
  source 1..27: mol_type = other RNA
cagagttctacagtccgacgatcgatc

SEQ ID NO: 17506 - RNA, 20 nt, Synthetic Construct
  source 1..20: mol_type = other RNA
tgacctatgaattgacagcc

SEQ ID NO: 17507 - RNA, 20 nt, Synthetic Construct
  source 1..20: mol_type = other RNA
tgacctatgaattgacagcc

SEQ ID NO: 17508 - RNA, 23 nt, Synthetic Construct
  source 1..23: mol_type = other RNA
cactagattgtgagctcctggat

SEQ ID NO: 17509 - RNA, 23 nt, Synthetic Construct
  source 1..23: mol_type = other RNA
cactagattgtgagctcctggat

SEQ ID NO: 17510 - RNA, 22 nt, Synthetic Construct
  source 1..22: mol_type = other RNA
tgaggtagtagtttatgctgtt

SEQ ID NO: 17511 - RNA, 24 nt, Synthetic Construct
  source 1..24: mol_type = other RNA
aggaagccctggaggggctggagg

SEQ ID NO: 17512 - RNA, 24 nt, Synthetic Construct
  source 1..24: mol_type = other RNA
aggaagccctggaggggctggagg

SEQ ID NO: 17513 - RNA, 22 nt, Synthetic Construct
  source 1..22: mol_type = other RNA
ttcaagtaatccagggtaggct

SEQ ID NO: 17514 - RNA, 22 nt, Synthetic Construct
  source 1..22: mol_type = other RNA
ttcaagtaatccagggtaggct

SEQ ID NO: 17515 - RNA, 22 nt, Synthetic Construct
  source 1..22: mol_type = other RNA
agctcggtctgaggcccctcag

SEQ ID NO: 17516 - RNA, 22 nt, Synthetic Construct
  source 1..22: mol_type = other RNA
agctcggtctgaggcccctcag

SEQ ID NO: 17517 - RNA, 21 nt, Synthetic Construct
  source 1..21: mol_type = other RNA
tgagaactgaattccatgggt

SEQ ID NO: 17518 - RNA, 23 nt, Synthetic Construct
  source 1..23: mol_type = other RNA
tcctgaactgagctgccccgagt

SEQ ID NO: 17519 - RNA, 23 nt, Synthetic Construct
  source 1..23: mol_type = other RNA
tcctgaactgagctgccccgagt

SEQ ID NO: 17520 - RNA, 21 nt, Synthetic Construct
  source 1..21: mol_type = other RNA
tggggtagtagattgtatagt

SEQ ID NO: 17521 - RNA, 21 nt, Synthetic Construct
  source 1..21: mol_type = other RNA
tggggtagtagattgtatagt

SEQ ID NO: 17522 - RNA, 21 nt, Synthetic Construct
  source 1..21: mol_type = other RNA
ccctgtactgagctgccccga

SEQ ID NO: 17523 - RNA, 21 nt, Synthetic Construct
  source 1..21: mol_type = other RNA
ccctgtactgagctgccccga

SEQ ID NO: 17524 - RNA, 15 nt, Synthetic Construct
  source 1..15: mol_type = other RNA
ctaccgtgcgtagga

SEQ ID NO: 17525 - RNA, 15 nt, Synthetic Construct
  source 1..15: mol_type = other RNA
ctaccgtgcgtagga

SEQ ID NO: 17526 - RNA, 22 nt, Synthetic Construct
  source 1..22: mol_type = other RNA
ncgtaccgtgagtaataatgcg

SEQ ID NO: 17527 - RNA, 22 nt, Synthetic Construct
  source 1..22: mol_type = other RNA
ncgtaccgtgagtaataatgcg

SEQ ID NO: 17528 - RNA, 25 nt, Synthetic Construct
  source 1..25: mol_type = other RNA
gaatgttgctcggtgaacccctttt

SEQ ID NO: 17529 - RNA, 25 nt, Synthetic Construct
  source 1..25: mol_type = other RNA
gaatgttgctcggtgaacccctttt

SEQ ID NO: 17530 - RNA, 20 nt, Synthetic Construct
  source 1..20: mol_type = other RNA
tcctgtctgaatatgggggg

SEQ ID NO: 17531 - RNA, 20 nt, Synthetic Construct
  source 1..20: mol_type = other RNA
tcctgtctgaatatgggggg

SEQ ID NO: 17532 - RNA, 22 nt, Synthetic Construct
  source 1..22: mol_type = other RNA
tcctgtactgagctgccccaag

SEQ ID NO: 17533 - RNA, 22 nt, Synthetic Construct
  source 1..22: mol_type = other RNA
tcctgtactgagctgccccaag

SEQ ID NO: 17534 - RNA, 34 nt, Synthetic Construct; identical to SEQ ID NO: 385
  source 1..34: mol_type = other RNA

SEQ ID NO: 17535 - RNA, 22 nt, Synthetic Construct
  source 1..22: mol_type = other RNA
tgaagtagtaggttgtgtggtt

SEQ ID NO: 17536 - RNA, 22 nt, Synthetic Construct
  source 1..22: mol_type = other RNA
tgaagtagtaggttgtgtggtt

SEQ ID NO: 17537 - RNA, 18 nt, Synthetic Construct
  source 1..18: mol_type = other RNA
atcccactcctgacacca

SEQ ID NO: 17538 - RNA, 26 nt, Synthetic Construct
  source 1..26: mol_type = other RNA
tgtcggctcatctcatcctggggctg

SEQ ID NO: 17539 - RNA, 26 nt, Synthetic Construct
  source 1..26: mol_type = other RNA
tgtcggctcatctcatcctggggctg

SEQ ID NO: 17540 - RNA, 17 nt, Synthetic Construct
  source 1..17: mol_type = other RNA
agacagcaggacggtgg

SEQ ID NO: 17541 - RNA, 17 nt, Synthetic Construct
  source 1..17: mol_type = other RNA
agacagcaggacggtgg

SEQ ID NO: 17542 - RNA, 25 nt, Synthetic Construct
  source 1..25: mol_type = other RNA
cgactcttagcggtggatcactcgg

SEQ ID NO: 17543 - RNA, 25 nt, Synthetic Construct
  source 1..25: mol_type = other RNA
cgactcttagcggtggatcactcgg

SEQ ID NO: 17544 - RNA, 21 nt, Synthetic Construct
  source 1..21: mol_type = other RNA
gctattgacgaccgtaccgca

SEQ ID NO: 17545 - RNA, 34 nt, Synthetic Construct; identical to SEQ ID NO: 749
  source 1..34: mol_type = other RNA

SEQ ID NO: 17546 - RNA, 19 nt, Synthetic Construct
  source 1..19: mol_type = other RNA
tggccgtcgtcagctcgtg

SEQ ID NO: 17547 - RNA, 20 nt, Synthetic Construct
  source 1..20: mol_type = other RNA
tgaggtagcaggttgtatag

SEQ ID NO: 17548 - RNA, 20 nt, Synthetic Construct
  source 1..20: mol_type = other RNA
tgaggtagcaggttgtatag

SEQ ID NO: 17549 - RNA, 22 nt, Synthetic Construct
  source 1..22: mol_type = other RNA
tgaggtagtaggttgtatagct

SEQ ID NO: 17550 - RNA, 22 nt, Synthetic Construct
  source 1..22: mol_type = other RNA
tgaggtagtaggttgtatagct

SEQ ID NO: 17551 - RNA, 22 nt, Synthetic Construct
  source 1..22: mol_type = other RNA
tcaagagcaataacgaaaaatg

SEQ ID NO: 17552 - RNA, 22 nt, Synthetic Construct
  source 1..22: mol_type = other RNA
tcaagagcaataacgaaaaatg

SEQ ID NO: 17553 - RNA, 16 nt, Synthetic Construct
  source 1..16: mol_type = other RNA
agcaagtcgaacggta

SEQ ID NO: 17554 - RNA, 22 nt, Synthetic Construct
  source 1..22: mol_type = other RNA
tagcagcacgtgaatattggcg

SEQ ID NO: 17555 - RNA, 22 nt, Synthetic Construct
  source 1..22: mol_type = other RNA
tagcagcacgtgaatattggcg

SEQ ID NO: 17556 - RNA, 23 nt, Synthetic Construct
  source 1..23: mol_type = other RNA
tgaggggcagagagcgaggcttt

SEQ ID NO: 17557 - RNA, 22 nt, Synthetic Construct
  source 1..22: mol_type = other RNA
tgtagtgtttcctactttatgg

SEQ ID NO: 17558 - RNA, 21 nt, Synthetic Construct
  source 1..21: mol_type = other RNA
taaacggcgggagtaactatg

SEQ ID NO: 17559 - RNA, 21 nt, Synthetic Construct
  source 1..21: mol_type = other RNA
taaacggcgggagtaactatg

SEQ ID NO: 17560 - RNA, 23 nt, Synthetic Construct
  source 1..23: mol_type = other RNA
acagtagtctgcacattggttat

SEQ ID NO: 17561 - RNA, 23 nt, Synthetic Construct
  source 1..23: mol_type = other RNA
acagtagtctgcacattggttat

SEQ ID NO: 17562 - RNA, 23 nt, Synthetic Construct
  source 1..23: mol_type = other RNA
tggtaatacgacgtactttgtgt

SEQ ID NO: 17563 - RNA, 23 nt, Synthetic Construct
  source 1..23: mol_type = other RNA
tggtaatacgacgtactttgtgt

SEQ ID NO: 17564 - RNA, 22 nt, Synthetic Construct
  source 1..22: mol_type = other RNA
tgaggtagtagtttgtgctgat

SEQ ID NO: 17565 - RNA, 24 nt, Synthetic Construct
  source 1..24: mol_type = other RNA
acagtagtctgcacattggttatt

SEQ ID NO: 17566 - RNA, 16 nt, Synthetic Construct
  source 1..16: mol_type = other RNA
aggtcatcattatctg

SEQ ID NO: 17567 - RNA, 16 nt, Synthetic Construct
  source 1..16: mol_type = other RNA
aggtcatcattatctg

SEQ ID NO: 17568 - RNA, 27 nt, Synthetic Construct
  source 1..27: mol_type = other RNA
gcccaggtggcggaattggtagacgca

SEQ ID NO: 17569 - RNA, 18 nt, Synthetic Construct
  source 1..18: mol_type = other RNA
gtcacggtggccgagtgg

SEQ ID NO: 17570 - RNA, 18 nt, Synthetic Construct
  source 1..18: mol_type = other RNA
gtcacggtggccgagtgg

SEQ ID NO: 17571 - RNA, 22 nt, Synthetic Construct
  source 1..22: mol_type = other RNA
ccccccactgctaaatttgact

SEQ ID NO: 17572 - RNA, 22 nt, Synthetic Construct
  source 1..22: mol_type = other RNA
ccccccactgctaaatttgact

SEQ ID NO: 17573 - RNA, 20 nt, Synthetic Construct
  source 1..20: mol_type = other RNA
cccataaagtagaaagcact

SEQ ID NO: 17574 - RNA, 22 nt, Synthetic Construct
  source 1..22: mol_type = other RNA
tcgtaccgtaagtaataatgcg

SEQ ID NO: 17575 - RNA, 22 nt, Synthetic Construct
  source 1..22: mol_type = other RNA
tcgtaccgtaagtaataatgcg

SEQ ID NO: 17576 - RNA, 21 nt, Synthetic Construct
  source 1..21: mol_type = other RNA
cccataaagtagaaagcacta

SEQ ID NO: 17577 - RNA, 21 nt, Synthetic Construct
  source 1..21: mol_type = other RNA
cccataaagtagaaagcacta

SEQ ID NO: 17578 - RNA, 22 nt, Synthetic Construct
  source 1..22: mol_type = other RNA
tattgcacctgtcccggcctgt

SEQ ID NO: 17579 - RNA, 22 nt, Synthetic Construct
  source 1..22: mol_type = other RNA
tattgcacctgtcccggcctgt

SEQ ID NO: 17580 - RNA, 19 nt, Synthetic Construct
  source 1..19: mol_type = other RNA
tccctgagaccctaacttg

SEQ ID NO: 17581 - RNA, 19 nt, Synthetic Construct
  source 1..19: mol_type = other RNA
tccctgagaccctaacttg

SEQ ID NO: 17582 - RNA, 24 nt, Synthetic Construct
  source 1..24: mol_type = other RNA
gcgagagtaggacgttgccaggtt

SEQ ID NO: 17583 - RNA, 22 nt, Synthetic Construct
  source 1..22: mol_type = other RNA
ctcggcgtggcgtcggtcgtgg

SEQ ID NO: 17584 - RNA, 22 nt, Synthetic Construct
  source 1..22: mol_type = other RNA
ctcggcgtggcgtcggtcgtgg

SEQ ID NO: 17585 - RNA, 22 nt, Synthetic Construct
  source 1..22: mol_type = other RNA
tgaggtggtaggttgtgtggtt

SEQ ID NO: 17586 - RNA, 22 nt, Synthetic Construct
  source 1..22: mol_type = other RNA
tgaggtggtaggttgtgtggtt

SEQ ID NO: 17587 - RNA, 20 nt, Synthetic Construct
  source 1..20: mol_type = other RNA
ggaggtagtaggttgtgtgg

SEQ ID NO: 17588 - RNA, 20 nt, Synthetic Construct
  source 1..20: mol_type = other RNA
ggaggtagtaggttgtgtgg

SEQ ID NO: 17589 - RNA, 19 nt, Synthetic Construct
  source 1..19: mol_type = other RNA
tagcaccatctgaaatcgg

SEQ ID NO: 17590 - RNA, 22 nt, Synthetic Construct
  source 1..22: mol_type = other RNA
tgtagtgcttcctactttatgg

SEQ ID NO: 17591 - RNA, 16 nt, Synthetic Construct
  source 1..16: mol_type = other RNA
accgcttttgtcaggg

SEQ ID NO: 17592 - RNA, 16 nt, Synthetic Construct
  source 1..16: mol_type = other RNA
accgcttttgtcaggg

SEQ ID NO: 17593 - RNA, 18 nt, Synthetic Construct
  source 1..18: mol_type = other RNA
tccgacatgcgagggttc

SEQ ID NO: 17594 - RNA, 18 nt, Synthetic Construct
  source 1..18: mol_type = other RNA
tccgacatgcgagggttc

SEQ ID NO: 17595 - RNA, 31 nt, Synthetic Construct; identical to SEQ ID NO: 2293
  source 1..31: mol_type = other RNA

SEQ ID NO: 17596 - RNA, 25 nt, Synthetic Construct
  source 1..25: mol_type = other RNA
ttgaggatatgaggtcgagacgaca

SEQ ID NO: 17597 - RNA, 21 nt, Synthetic Construct
  source 1..21: mol_type = other RNA
tgaggggcagagagcgagaca

SEQ ID NO: 17598 - RNA, 22 nt, Synthetic Construct
  source 1..22: mol_type = other RNA
ttgtaccgtgagtaataatgcg

SEQ ID NO: 17599 - RNA, 22 nt, Synthetic Construct
  source 1..22: mol_type = other RNA
ttgtaccgtgagtaataatgcg

SEQ ID NO: 17600 - RNA, 33 nt, Synthetic Construct; identical to SEQ ID NO: 2386
  source 1..33: mol_type = other RNA

SEQ ID NO: 17601 - RNA, 18 nt, Synthetic Construct
  source 1..18: mol_type = other RNA
cattcttgcgacccgggt

SEQ ID NO: 17602 - RNA, 18 nt, Synthetic Construct
  source 1..18: mol_type = other RNA
cattcttgcgacccgggt

SEQ ID NO: 17603 - RNA, 21 nt, Synthetic Construct
  source 1..21: mol_type = other RNA
taactccttagcgaatctcgc

SEQ ID NO: 17604 - RNA, 21 nt, Synthetic Construct
  source 1..21: mol_type = other RNA
taactccttagcgaatctcgc

SEQ ID NO: 17605 - RNA, 23 nt, Synthetic Construct
  source 1..23: mol_type = other RNA
naaagtgctgttcgtgcaggtag

SEQ ID NO: 17606 - RNA, 23 nt, Synthetic Construct
  source 1..23: mol_type = other RNA
naaagtgctgttcgtgcaggtag

SEQ ID NO: 17607 - RNA, 20 nt, Synthetic Construct
  source 1..20: mol_type = other RNA
tgaggtagtaggttgtgtag

SEQ ID NO: 17608 - RNA, 20 nt, Synthetic Construct
  source 1..20: mol_type = other RNA
tgaggtagtaggttgtgtag

SEQ ID NO: 17609 - RNA, 23 nt, Synthetic Construct
  source 1..23: mol_type = other RNA
tgaggggcagggagcgagacttt

SEQ ID NO: 17610 - RNA, 23 nt, Synthetic Construct
  source 1..23: mol_type = other RNA
tgaggggcagggagcgagacttt

SEQ ID NO: 17611 - RNA, 27 nt, Synthetic Construct
  source 1..27: mol_type = other RNA
tcctgagtagctcagcggcagagcggg

SEQ ID NO: 17612 - RNA, 27 nt, Synthetic Construct
  source 1..27: mol_type = other RNA
tcctgagtagctcagcggcagagcggg

SEQ ID NO: 17613 - RNA, 23 nt, Synthetic Construct
  source 1..23: mol_type = other RNA
tcacacagaaatcgcacccgtca

SEQ ID NO: 17614 - RNA, 23 nt, Synthetic Construct
  source 1..23: mol_type = other RNA
tcacacagaaatcgcacccgtca

SEQ ID NO: 17615 - RNA, 16 nt, Synthetic Construct
  source 1..16: mol_type = other RNA
gcctacggccatacca

SEQ ID NO: 17616 - RNA, 22 nt, Synthetic Construct
  source 1..22: mol_type = other RNA
ncgtaccgtgagtaataatgcg

SEQ ID NO: 17617 - RNA, 22 nt, Synthetic Construct
  source 1..22: mol_type = other RNA
ncgtaccgtgagtaataatgcg

SEQ ID NO: 17618 - RNA, 30 nt, Synthetic Construct; identical to SEQ ID NO: 6405
  source 1..30: mol_type = other RNA

SEQ ID NO: 17619 - RNA, 30 nt, Synthetic Construct; identical to SEQ ID NO: 6405
  source 1..30: mol_type = other RNA

SEQ ID NO: 17620 - RNA, 20 nt, Synthetic Construct
  source 1..20: mol_type = other RNA
tgaggtagtaggttgtgtag

SEQ ID NO: 17621 - RNA, 23 nt, Synthetic Construct
  source 1..23: mol_type = other RNA
tcaggctcagtcccctcccgttt

SEQ ID NO: 17622 - RNA, 23 nt, Synthetic Construct
  source 1..23: mol_type = other RNA
tcaggctcagtcccctcccgttt

SEQ ID NO: 17623 - RNA, 23 nt, Synthetic Construct
  source 1..23: mol_type = other RNA
tggtaatacaacgtacttagtgt

SEQ ID NO: 17624 - RNA, 21 nt, Synthetic Construct
  source 1..21: mol_type = other RNA
taactccttaagcaatctcgc

SEQ ID NO: 17625 - RNA, 21 nt, Synthetic Construct
  source 1..21: mol_type = other RNA
taactccttaagcaatctcgc

SEQ ID NO: 17626 - RNA, 25 nt, Synthetic Construct
  source 1..25: mol_type = other RNA
ccccccactgctaaatttgactgga

SEQ ID NO: 17627 - RNA, 25 nt, Synthetic Construct
  source 1..25: mol_type = other RNA
ccccccactgctaaatttgactgga

SEQ ID NO: 17628 - RNA, 16 nt, Synthetic Construct
  source 1..16: mol_type = other RNA
agttgaccgcctgggg

SEQ ID NO: 17629 - RNA, 23 nt, Synthetic Construct
  source 1..23: mol_type = other RNA
tagcagcacataatggtttgtgg

SEQ ID NO: 17630 - RNA, 22 nt, Synthetic Construct
  source 1..22: mol_type = other RNA
tgaggtaataggttgtgtggtt

SEQ ID NO: 17631 - RNA, 22 nt, Synthetic Construct
  source 1..22: mol_type = other RNA
attgcacttgtcccggcctgtt

SEQ ID NO: 17632 - RNA, 22 nt, Synthetic Construct
  source 1..22: mol_type = other RNA
attgcacttgtcccggcctgtt

SEQ ID NO: 17633 - RNA, 22 nt, Synthetic Construct
  source 1..22: mol_type = other RNA
cgactcttagcggtggatcact

SEQ ID NO: 17634 - RNA, 22 nt, Synthetic Construct
  source 1..22: mol_type = other RNA
tcctgtactgagctgccccgtg

SEQ ID NO: 17635 - RNA, 22 nt, Synthetic Construct
  source 1..22: mol_type = other RNA
tcctgtactgagctgccccgtg

SEQ ID NO: 17636 - RNA, 22 nt, Synthetic Construct
  source 1..22: mol_type = other RNA
tgaggtagtagattgtatagat

SEQ ID NO: 17637 - RNA, 22 nt, Synthetic Construct
  source 1..22: mol_type = other RNA
tgaggtagtagattgtatagat

SEQ ID NO: 17638 - RNA, 29 nt, Synthetic Construct
  source 1..29: mol_type = other RNA
cccgtgtgaaagtaggtcatcgtcaggct

SEQ ID NO: 17639 - RNA, 29 nt, Synthetic Construct
  source 1..29: mol_type = other RNA
cccgtgtgaaagtaggtcatcgtcaggct

SEQ ID NO: 17640 - RNA, 23 nt, Synthetic Construct
  source 1..23: mol_type = other RNA
tcctgaactgagctgccccgaga

SEQ ID NO: 17641 - RNA, 23 nt, Synthetic Construct
  source 1..23: mol_type = other RNA
tcctgaactgagctgccccgaga

SEQ ID NO: 17642 - RNA, 22 nt, Synthetic Construct
  source 1..22: mol_type = other RNA
tgaggtggtagtttgtgctgtt

SEQ ID NO: 17643 - RNA, 21 nt, Synthetic Construct
  source 1..21: mol_type = other RNA
tgaggaagtagattgtatagt

SEQ ID NO: 17644 - RNA, 23 nt, Synthetic Construct
  source 1..23: mol_type = other RNA
tgacctatgaattgacagccagt

SEQ ID NO: 17645 - RNA, 22 nt, Synthetic Construct
  source 1..22: mol_type = other RNA
tagcagcacgtaaatgttggcg

SEQ ID NO: 17646 - RNA, 24 nt, Synthetic Construct
  source 1..24: mol_type = other RNA
gtctttgttcgattccgttgagta

SEQ ID NO: 17647 - RNA, 23 nt, Synthetic Construct
  source 1..23: mol_type = other RNA
tgtagtgtttcctactttatggt

SEQ ID NO: 17648 - RNA, 23 nt, Synthetic Construct
  source 1..23: mol_type = other RNA
tgtagtgtttcctactttatggt

SEQ ID NO: 17649 - RNA, 22 nt, Synthetic Construct
  source 1..22: mol_type = other RNA
tgaggtagtaggctgtatagtt

SEQ ID NO: 17650 - RNA, 22 nt, Synthetic Construct
  source 1..22: mol_type = other RNA
tgaggtagtaggctgtatagtt

SEQ ID NO: 17651 - RNA, 19 nt, Synthetic Construct
  source 1..19: mol_type = other RNA
atctgctggaactgcaact

SEQ ID NO: 17652 - RNA, 19 nt, Synthetic Construct
  source 1..19: mol_type = other RNA
atctgctggaactgcaact

SEQ ID NO: 17653 - RNA, 20 nt, Synthetic Construct
  source 1..20: mol_type = other RNA
tgaggtagtaggttgcatag

SEQ ID NO: 17654 - RNA, 20 nt, Synthetic Construct
  source 1..20: mol_type = other RNA
tgaggtagtaggttgcatag

SEQ ID NO: 17655 - RNA, 20 nt, Synthetic Construct
  source 1..20: mol_type = other RNA
caggacagtgaaacgagtca

SEQ ID NO: 17656 - RNA, 20 nt, Synthetic Construct
  source 1..20: mol_type = other RNA
caggacagtgaaacgagtca

SEQ ID NO: 17657 - RNA, 23 nt, Synthetic Construct
  source 1..23: mol_type = other RNA
tcccccaggtgtgattctgattt

SEQ ID NO: 17658 - RNA, 23 nt, Synthetic Construct
  source 1..23: mol_type = other RNA
tcccccaggtgtgattctgattt

SEQ ID NO: 17659 - RNA, 31 nt, Synthetic Construct; identical to SEQ ID NO: 5506
  source 1..31: mol_type = other RNA

SEQ ID NO: 17660 - RNA, 20 nt, Synthetic Construct
  source 1..20: mol_type = other RNA
ttagtgacgcgcatgaatgg

SEQ ID NO: 17661 - RNA, 21 nt, Synthetic Construct
  source 1..21: mol_type = other RNA
tgaggtagcagattgtatagt

SEQ ID NO: 17662 - RNA, 24 nt, Synthetic Construct
  source 1..24: mol_type = other RNA
gaggtgtagaataggtgggagctt

SEQ ID NO: 17663 - RNA, 23 nt, Synthetic Construct
  source 1..23: mol_type = other RNA
agcagcattgtacagggccatga

SEQ ID NO: 17664 - RNA, 31 nt, Synthetic Construct; identical to SEQ ID NO: 2293
  source 1..31: mol_type = other RNA

SEQ ID NO: 17665 - RNA, 31 nt, Synthetic Construct; identical to SEQ ID NO: 2293
  source 1..31: mol_type = other RNA

SEQ ID NO: 17666 - RNA, 23 nt, Synthetic Construct
  source 1..23: mol_type = other RNA
tctttgttcgattccgttgagta

SEQ ID NO: 17667 - RNA, 23 nt, Synthetic Construct
  source 1..23: mol_type = other RNA
tctttgttcgattccgttgagta

SEQ ID NO: 17668 - RNA, 20 nt, Synthetic Construct
  source 1..20: mol_type = other RNA
tgaggtagtaggttgtatgg

SEQ ID NO: 17669 - RNA, 26 nt, Synthetic Construct
  source 1..26: mol_type = other RNA
ccccccactgctaatttgactggctt

SEQ ID NO: 17670 - RNA, 23 nt, Synthetic Construct
  source 1..23: mol_type = other RNA
caaagtgttgttcgtgcaggtag

SEQ ID NO: 17671 - RNA, 23 nt, Synthetic Construct
  source 1..23: mol_type = other RNA
caaagtgttgttcgtgcaggtag

SEQ ID NO: 17672 - RNA, 19 nt, Synthetic Construct
  source 1..19: mol_type = other RNA
tgtcaactggttgttggga

SEQ ID NO: 17673 - RNA, 22 nt, Synthetic Construct
  source 1..22: mol_type = other RNA
tgaggtagtaggttatgtggtt

SEQ ID NO: 17674 - RNA, 22 nt, Synthetic Construct
  source 1..22: mol_type = other RNA
tgaggtagtagtttgcgctgtt

SEQ ID NO: 17675 - RNA, 35 nt, Synthetic Construct; identical to SEQ ID NO: 737
  source 1..35: mol_type = other RNA

SEQ ID NO: 17676 - RNA, 35 nt, Synthetic Construct; identical to SEQ ID NO: 737
  source 1..35: mol_type = other RNA

SEQ ID NO: 17677 - RNA, 16 nt, Synthetic Construct
  source 1..16: mol_type = other RNA
ccatgccgcgtgcggg

SEQ ID NO: 17678 - RNA, 21 nt, Synthetic Construct
  source 1..21: mol_type = other RNA
tggggtagtagtttgtgctgt

SEQ ID NO: 17679 - RNA, 21 nt, Synthetic Construct
  source 1..21: mol_type = other RNA
tgaggtagcaggttgtatagt

SEQ ID NO: 17680 - RNA, 22 nt, Synthetic Construct
  source 1..22: mol_type = other RNA
accatcgaccgttgattgtacc

SEQ ID NO: 17681 - RNA, 39 nt, Synthetic Construct; identical to SEQ ID NO: 759
  source 1..39: mol_type = other RNA

SEQ ID NO: 17682 - RNA, 39 nt, Synthetic Construct; identical to SEQ ID NO: 759
  source 1..39: mol_type = other RNA

SEQ ID NO: 17683 - RNA, 21 nt, Synthetic Construct
  source 1..21: mol_type = other RNA
tcaggctcagtcccctcccga

SEQ ID NO: 17684 - RNA, 21 nt, Synthetic Construct
  source 1..21: mol_type = other RNA
tcaggctcagtcccctcccga

SEQ ID NO: 17685 - RNA, 22 nt, Synthetic Construct
  source 1..22: mol_type = other RNA
tcgtaccgtgagtaatgatgcg

SEQ ID NO: 17686 - RNA, 34 nt, Synthetic Construct; identical to SEQ ID NO: 749
  source 1..34: mol_type = other RNA

SEQ ID NO: 17687 - RNA, 34 nt, Synthetic Construct; identical to SEQ ID NO: 749
  source 1..34: mol_type = other RNA

SEQ ID NO: 17688 - RNA, 22 nt, Synthetic Construct
  source 1..22: mol_type = other RNA
tgaggttgtaggttgtatagtt

SEQ ID NO: 17689 - RNA, 22 nt, Synthetic Construct
  source 1..22: mol_type = other RNA
tgaggttgtaggttgtatagtt

SEQ ID NO: 17690 - RNA, 15 nt, Synthetic Construct
  source 1..15: mol_type = other RNA
ttccgaaagtagtgg

SEQ ID NO: 17691 - RNA, 15 nt, Synthetic Construct
  source 1..15: mol_type = other RNA
ttccgaaagtagtgg

SEQ ID NO: 17692 - RNA, 22 nt, Synthetic Construct
  source 1..22: mol_type = other RNA
agcagcattgtacagggctatt

SEQ ID NO: 17693 - RNA, 25 nt, Synthetic Construct
  source 1..25: mol_type = other RNA
caaagtgctgttcgtgcaggtagtt

SEQ ID NO: 17694 - RNA, 22 nt, Synthetic Construct
  source 1..22: mol_type = other RNA
tgaggtagtaggttgcatagtt

SEQ ID NO: 17695 - RNA, 21 nt, Synthetic Construct
  source 1..21: mol_type = other RNA
ggaggtagtagattgtatagt

SEQ ID NO: 17696 - RNA, 21 nt, Synthetic Construct
  source 1..21: mol_type = other RNA
ggaggtagtagattgtatagt

SEQ ID NO: 17697 - RNA, 15 nt, Synthetic Construct
  source 1..15: mol_type = other RNA
ggtgaaagcggggga

SEQ ID NO: 17698 - RNA, 15 nt, Synthetic Construct
  source 1..15: mol_type = other RNA
ggtgaaagcggggga

SEQ ID NO: 17699 - RNA, 26 nt, Synthetic Construct
  source 1..26: mol_type = other RNA
gatgcgtggtaggagagcgttctgta

SEQ ID NO: 17700 - RNA, 32 nt, Synthetic Construct; identical to SEQ ID NO: 3092
  source 1..32: mol_type = other RNA

SEQ ID NO: 17701 - RNA, 16 nt, Synthetic Construct
  source 1..16: mol_type = other RNA
gtctacggccatgcca

SEQ ID NO: 17702 - RNA, 16 nt, Synthetic Construct
  source 1..16: mol_type = other RNA
gtctacggccatgcca

SEQ ID NO: 17703 - RNA, 21 nt, Synthetic Construct
  source 1..21: mol_type = other RNA
agccatcatttaaagaaagcg

SEQ ID NO: 17704 - RNA, 22 nt, Synthetic Construct
  source 1..22: mol_type = other RNA
tatcggaacgtgcccagtcgtg

SEQ ID NO: 17705 - RNA, 23 nt, Synthetic Construct
  source 1..23: mol_type = other RNA
tggtaatacgacgcacttagtgt

SEQ ID NO: 17706 - RNA, 22 nt, Synthetic Construct
  source 1..22: mol_type = other RNA
tgaggtagtaggctgtatagtt

SEQ ID NO: 17707 - RNA, 27 nt, Synthetic Construct
  source 1..27: mol_type = other RNA
gacttaccaaacctatgcaaactccga

SEQ ID NO: 17708 - RNA, 27 nt, Synthetic Construct
  source 1..27: mol_type = other RNA
gacttaccaaacctatgcaaactccga

SEQ ID NO: 17709 - RNA, 32 nt, Synthetic Construct; identical to SEQ ID NO: 3541
  source 1..32: mol_type = other RNA

SEQ ID NO: 17710 - RNA, 32 nt, Synthetic Construct; identical to SEQ ID NO: 3541
  source 1..32: mol_type = other RNA

SEQ ID NO: 17711 - RNA, 22 nt, Synthetic Construct
  source 1..22: mol_type = other RNA
taaggtagtagattgtatagtt

SEQ ID NO: 17712 - RNA, 22 nt, Synthetic Construct
  source 1..22: mol_type = other RNA
tatatatatatatgtacgtatg

SEQ ID NO: 17713 - RNA, 21 nt, Synthetic Construct
  source 1..21: mol_type = other RNA
tgaggtagtagattgtatagt

SEQ ID NO: 17714 - RNA, 20 nt, Synthetic Construct
  source 1..20: mol_type = other RNA
ccttggggttgtaggaccac

SEQ ID NO: 17715 - RNA, 16 nt, Synthetic Construct
  source 1..16: mol_type = other RNA
gcggtggatgatgtgg

SEQ ID NO: 17716 - RNA, 21 nt, Synthetic Construct
  source 1..21: mol_type = other RNA
aatggcgccactagggttgtg

SEQ ID NO: 17717 - RNA, 21 nt, Synthetic Construct
  source 1..21: mol_type = other RNA
aatggcgccactagggttgtg

SEQ ID NO: 17718 - RNA, 24 nt, Synthetic Construct
  source 1..24: mol_type = other RNA
taccacagggtagaaccacggaca

SEQ ID NO: 17719 - RNA, 24 nt, Synthetic Construct
  source 1..24: mol_type = other RNA
taccacagggtagaaccacggaca

SEQ ID NO: 17720 - RNA, 15 nt, Synthetic Construct
  source 1..15: mol_type = other RNA
gcaagccgaacggta

SEQ ID NO: 17721 - RNA, 15 nt, Synthetic Construct
  source 1..15: mol_type = other RNA
gcaagccgaacggta

SEQ ID NO: 17722 - RNA, 24 nt, Synthetic Construct
  source 1..24: mol_type = other RNA
tgtaagcatccccgactggaagct

SEQ ID NO: 17723 - RNA, 24 nt, Synthetic Construct
  source 1..24: mol_type = other RNA
tgtaagcatccccgactggaagct

SEQ ID NO: 17724 - RNA, 22 nt, Synthetic Construct
  source 1..22: mol_type = other RNA
tgaggtagtggattgtatagtt

SEQ ID NO: 17725 - RNA, 22 nt, Synthetic Construct
  source 1..22: mol_type = other RNA
tgaggtagtggattgtatagtt

SEQ ID NO: 17726 - RNA, 21 nt, Synthetic Construct
  source 1..21: mol_type = other RNA
ttagtgacgcgcatgaatgga

SEQ ID NO: 17727 - RNA, 21 nt, Synthetic Construct
  source 1..21: mol_type = other RNA
ttagtgacgcgcatgaatgga

SEQ ID NO: 17728 - RNA, 19 nt, Synthetic Construct
  source 1..19: mol_type = other RNA
tcctgtaccgatcaatagt

SEQ ID NO: 17729 - RNA, 19 nt, Synthetic Construct
  source 1..19: mol_type = other RNA
tcctgtaccgatcaatagt

SEQ ID NO: 17730 - RNA, 22 nt, Synthetic Construct
  source 1..22: mol_type = other RNA
cgaggtagtagattgtatagtt

SEQ ID NO: 17731 - RNA, 21 nt, Synthetic Construct
  source 1..21: mol_type = other RNA
cgaggtagtagtttgtgctgt

SEQ ID NO: 17732 - RNA, 21 nt, Synthetic Construct
  source 1..21: mol_type = other RNA
cgaggtagtagtttgtgctgt

SEQ ID NO: 17733 - RNA, 19 nt, Synthetic Construct
  source 1..19: mol_type = other RNA
cctgtctgaatatgggggg

SEQ ID NO: 17734 - RNA, 22 nt, Synthetic Construct
  source 1..22: mol_type = other RNA
tgaggtggtagtttgtgctgtt

SEQ ID NO: 17735 - RNA, 23 nt, Synthetic Construct
  source 1..23: mol_type = other RNA
tcctgaactgagctgccccgaga

SEQ ID NO: 17736 - RNA, 23 nt, Synthetic Construct
  source 1..23: mol_type = other RNA
tggtaacacgacgtacttagtgt

SEQ ID NO: 17737 - RNA, 16 nt, Synthetic Construct
  source 1..16: mol_type = other RNA
tacacaccgcccgtcg

SEQ ID NO: 17738 - RNA, 16 nt, Synthetic Construct
  source 1..16: mol_type = other RNA
tacacaccgcccgtcg

SEQ ID NO: 17739 - RNA, 23 nt, Synthetic Construct
  source 1..23: mol_type = other RNA
aaaagctgggttgagagggcgat

SEQ ID NO: 17740 - RNA, 25 nt, Synthetic Construct
  source 1..25: mol_type = other RNA
gtcaggatggccgagcggtctaagg

SEQ ID NO: 17741 - RNA, 20 nt, Synthetic Construct
  source 1..20: mol_type = other RNA
tagcagcacataatggtttg

SEQ ID NO: 17742 - RNA, 22 nt, Synthetic Construct
  source 1..22: mol_type = other RNA
tacagtactgtgataactgaag

SEQ ID NO: 17743 - RNA, 22 nt, Synthetic Construct
  source 1..22: mol_type = other RNA
tacagtactgtgataactgaag

SEQ ID NO: 17744 - RNA, 26 nt, Synthetic Construct
  source 1..26: mol_type = other RNA
tgtaaacatccttgactggaagcttt

SEQ ID NO: 17745 - RNA, 26 nt, Synthetic Construct
  source 1..26: mol_type = other RNA
tgtaaacatccttgactggaagcttt

SEQ ID NO: 17746 - RNA, 37 nt, Synthetic Construct; identical to SEQ ID NO: 743
  source 1..37: mol_type = other RNA

SEQ ID NO: 17747 - RNA, 37 nt, Synthetic Construct; identical to SEQ ID NO: 743
  source 1..37: mol_type = other RNA

SEQ ID NO: 17748 - RNA, 21 nt, Synthetic Construct
  source 1..21: mol_type = other RNA
ctggacttggagtcagaaggc

SEQ ID NO: 17749 - RNA, 25 nt, Synthetic Construct
  source 1..25: mol_type = other RNA
aatgacacgatcactcccgttgagt

SEQ ID NO: 17750 - RNA, 25 nt, Synthetic Construct
  source 1..25: mol_type = other RNA
aatgacacgatcactcccgttgagt

SEQ ID NO: 17751 - RNA, 19 nt, Synthetic Construct
  source 1..19: mol_type = other RNA
tgtaaacatccttgactgg

SEQ ID NO: 17752 - RNA, 22 nt, Synthetic Construct
  source 1..22: mol_type = other RNA
tgaggtagtaggttgtagagtt

SEQ ID NO: 17753 - RNA, 22 nt, Synthetic Construct
  source 1..22: mol_type = other RNA
tgaggtagtaggttgtagagtt

SEQ ID NO: 17754 - RNA, 21 nt, Synthetic Construct
  source 1..21: mol_type = other RNA
agcagcacgtaaatattggcg

SEQ ID NO: 17755 - RNA, 21 nt, Synthetic Construct
  source 1..21: mol_type = other RNA
agcagcacgtaaatattggcg

SEQ ID NO: 17756 - RNA, 18 nt, Synthetic Construct
  source 1..18: mol_type = other RNA
ggtagcgtggccgagtgg

SEQ ID NO: 17757 - RNA, 18 nt, Synthetic Construct
  source 1..18: mol_type = other RNA
ggtagcgtggccgagtgg

SEQ ID NO: 17758 - RNA, 22 nt, Synthetic Construct
  source 1..22: mol_type = other RNA
aatgcacccgggcaaggattct

SEQ ID NO: 17759 - RNA, 22 nt, Synthetic Construct
  source 1..22: mol_type = other RNA
aatgcacccgggcaaggattct

SEQ ID NO: 17760 - RNA, 17 nt, Synthetic Construct
  source 1..17: mol_type = other RNA
aagttgaccgcctgggg

SEQ ID NO: 17761 - RNA, 17 nt, Synthetic Construct
  source 1..17: mol_type = other RNA
aagttgaccgcctgggg

SEQ ID NO: 17762 - RNA, 22 nt, Synthetic Construct
  source 1..22: mol_type = other RNA
taaggtagtagtttgtgctgtt

SEQ ID NO: 17763 - RNA, 16 nt, Synthetic Construct
  source 1..16: mol_type = other RNA
ctgacgctcatgcacg

SEQ ID NO: 17764 - RNA, 18 nt, Synthetic Construct
  source 1..18: mol_type = other RNA
gggagtatggtcgcaagg

SEQ ID NO: 17765 - RNA, 21 nt, Synthetic Construct
  source 1..21: mol_type = other RNA
tgaggcagtaggttgtgtggt

SEQ ID NO: 17766 - RNA, 21 nt, Synthetic Construct
  source 1..21: mol_type = other RNA
tgaggcagtaggttgtgtggt

SEQ ID NO: 17767 - RNA, 22 nt, Synthetic Construct
  source 1..22: mol_type = other RNA
cgaggtagtaggttgtgtggtt

SEQ ID NO: 17768 - RNA, 21 nt, Synthetic Construct
  source 1..21: mol_type = other RNA
caatggccgggacagagggct

SEQ ID NO: 17769 - RNA, 23 nt, Synthetic Construct
  source 1..23: mol_type = other RNA
cgaggggcagagagcgagacttt

SEQ ID NO: 17770 - RNA, 23 nt, Synthetic Construct
  source 1..23: mol_type = other RNA
cgaggggcagagagcgagacttt

SEQ ID NO: 17771 - RNA, 23 nt, Synthetic Construct
  source 1..23: mol_type = other RNA
caaagtgctgctcgtgcaggtag

SEQ ID NO: 17772 - RNA, 16 nt, Synthetic Construct
  source 1..16: mol_type = other RNA
gcggctgtagctcagt

SEQ ID NO: 17773 - RNA, 16 nt, Synthetic Construct
  source 1..16: mol_type = other RNA
gcggctgtagctcagt

SEQ ID NO: 17774 - RNA, 30 nt, Synthetic Construct; identical to SEQ ID NO: 3933
  source 1..30: mol_type = other RNA

SEQ ID NO: 17775 - RNA, 22 nt, Synthetic Construct
  source 1..22: mol_type = other RNA
tgaggtagtaggttgtacagtt

SEQ ID NO: 17776 - RNA, 24 nt, Synthetic Construct
  source 1..24: mol_type = other RNA
ttccccttggggttgtaggaccac

SEQ ID NO: 17777 - RNA, 24 nt, Synthetic Construct
  source 1..24: mol_type = other RNA
ttccccttggggttgtaggaccac

SEQ ID NO: 17778 - RNA, 19 nt, Synthetic Construct
  source 1..19: mol_type = other RNA
ccttggggttgtaggacca

SEQ ID NO: 17779 - RNA, 22 nt, Synthetic Construct
  source 1..22: mol_type = other RNA
agtggggaacccttccatgagg

SEQ ID NO: 17780 - RNA, 22 nt, Synthetic Construct
  source 1..22: mol_type = other RNA
agtggggaacccttccatgagg

SEQ ID NO: 17781 - RNA, 22 nt, Synthetic Construct
  source 1..22: mol_type = other RNA
ttcaagtaatccagggtaggct

SEQ ID NO: 17782 - RNA, 18 nt, Synthetic Construct
  source 1..18: mol_type = other RNA
cttggggttgtaggacca

SEQ ID NO: 17783 - RNA, 18 nt, Synthetic Construct
  source 1..18: mol_type = other RNA
cttggggttgtaggacca

SEQ ID NO: 17784 - RNA, 21 nt, Synthetic Construct
  source 1..21: mol_type = other RNA
tgaggtagtagattgtacagt

SEQ ID NO: 17785 - RNA, 21 nt, Synthetic Construct
  source 1..21: mol_type = other RNA
tgaggtagtagattgtacagt

SEQ ID NO: 17786 - RNA, 22 nt, Synthetic Construct
  source 1..22: mol_type = other RNA
aagaagcacgtaaatattggcg

SEQ ID NO: 17787 - RNA, 23 nt, Synthetic Construct
  source 1..23: mol_type = other RNA
tcctgtactgagctaccccgaga

SEQ ID NO: 17788 - RNA, 23 nt, Synthetic Construct
  source 1..23: mol_type = other RNA
tcctgtactgagctaccccgaga

SEQ ID NO: 17789 - RNA, 16 nt, Synthetic Construct
  source 1..16: mol_type = other RNA
ccaaggggtcgtgggt

SEQ ID NO: 17790 - RNA, 16 nt, Synthetic Construct
  source 1..16: mol_type = other RNA
ccaaggggtcgtgggt

SEQ ID NO: 17791 - RNA, 17 nt, Synthetic Construct
  source 1..17: mol_type = other RNA
gggataactggcttgtg

SEQ ID NO: 17792 - RNA, 17 nt, Synthetic Construct
  source 1..17: mol_type = other RNA
gggataactggcttgtg

SEQ ID NO: 17793 - RNA, 44 nt, Synthetic Construct; identical to SEQ ID NO: 722
  source 1..44: mol_type = other RNA

SEQ ID NO: 17794 - RNA, 44 nt, Synthetic Construct; identical to SEQ ID NO: 722
  source 1..44: mol_type = other RNA

SEQ ID NO: 17795 - RNA, 16 nt, Synthetic Construct
  source 1..16: mol_type = other RNA
caggacggtggccatg

SEQ ID NO: 17796 - RNA, 35 nt, Synthetic Construct; identical to SEQ ID NO: 2615
  source 1..35: mol_type = other RNA

SEQ ID NO: 17797 - RNA, 21 nt, Synthetic Construct
  source 1..21: mol_type = other RNA
taactccttaagcgatctcgc

SEQ ID NO: 17798 - RNA, 21 nt, Synthetic Construct
  source 1..21: mol_type = other RNA
taactccttaagcgatctcgc

SEQ ID NO: 17799 - RNA, 16 nt, Synthetic Construct
  source 1..16: mol_type = other RNA
ttgaccgctctgacca

SEQ ID NO: 17800 - RNA, 21 nt, Synthetic Construct
  source 1..21: mol_type = other RNA
tgaggtagtagtttgtgctga

SEQ ID NO: 17801 - RNA, 23 nt, Synthetic Construct
  source 1..23: mol_type = other RNA
agcaacattgtctgctgggtttc

SEQ ID NO: 17802 - RNA, 31 nt, Synthetic Construct; identical to SEQ ID NO: 2310
  source 1..31: mol_type = other RNA

SEQ ID NO: 17803 - RNA, 19 nt, Synthetic Construct
  source 1..19: mol_type = other RNA
cctgtaccgatcaatagtg

SEQ ID NO: 17804 - RNA, 23 nt, Synthetic Construct
  source 1..23: mol_type = other RNA
tgaggtagtaggttgtgtggtta

SEQ ID NO: 17805 - RNA, 23 nt, Synthetic Construct
  source 1..23: mol_type = other RNA
tgaggtagtaggttgtgtggtta

SEQ ID NO: 17806 - RNA, 30 nt, Synthetic Construct; identical to SEQ ID NO: 5879
  source 1..30: mol_type = other RNA

SEQ ID NO: 17807 - RNA, 30 nt, Synthetic Construct; identical to SEQ ID NO: 5879
  source 1..30: mol_type = other RNA

SEQ ID NO: 17808 - RNA, 22 nt, Synthetic Construct
  source 1..22: mol_type = other RNA
tgaggtagtgggttgtgtggtt

SEQ ID NO: 17809 - RNA, 22 nt, Synthetic Construct
  source 1..22: mol_type = other RNA
tgaggtagtgggttgtgtggtt

SEQ ID NO: 17810 - RNA, 31 nt, Synthetic Construct; identical to SEQ ID NO: 5943
  source 1..31: mol_type = other RNA

SEQ ID NO: 17811 - RNA, 31 nt, Synthetic Construct; identical to SEQ ID NO: 5943
  source 1..31: mol_type = other RNA

SEQ ID NO: 17812 - RNA, 22 nt, Synthetic Construct
  source 1..22: mol_type = other RNA
tcgtaccgtgagcaataatgcg

SEQ ID NO: 17813 - RNA, 22 nt, Synthetic Construct
  source 1..22: mol_type = other RNA
tgaggtagtggattgtatagtt

SEQ ID NO: 17814 - RNA, 23 nt, Synthetic Construct
  source 1..23: mol_type = other RNA
tgtcagtttgccaaataccccaa

SEQ ID NO: 17815 - RNA, 22 nt, Synthetic Construct
  source 1..22: mol_type = other RNA
tgaggtagtagactgtatagtt

SEQ ID NO: 17816 - RNA, 22 nt, Synthetic Construct
  source 1..22: mol_type = other RNA
tgaggtagtaggttgtgtgatt

SEQ ID NO: 17817 - RNA, 22 nt, Synthetic Construct
  source 1..22: mol_type = other RNA
tgaggtagtaggttgtgtgatt

SEQ ID NO: 17818 - RNA, 22 nt, Synthetic Construct
  source 1..22: mol_type = other RNA
cagagttctacagtccgacgat

SEQ ID NO: 17819 - RNA, 22 nt, Synthetic Construct
  source 1..22: mol_type = other RNA
cagagttctacagtccgacgat

SEQ ID NO: 17820 - RNA, 21 nt, Synthetic Construct
  source 1..21: mol_type = other RNA
taacactgtctggtaacgatg

SEQ ID NO: 17821 - RNA, 21 nt, Synthetic Construct
  source 1..21: mol_type = other RNA
taacactgtctggtaacgatg

SEQ ID NO: 17822 - RNA, 23 nt, Synthetic Construct
  source 1..23: mol_type = other RNA
gcctgctggggtggaacctggtt

SEQ ID NO: 17823 - RNA, 23 nt, Synthetic Construct
  source 1..23: mol_type = other RNA
gcctgctggggtggaacctggtt

SEQ ID NO: 17824 - RNA, 21 nt, Synthetic Construct
  source 1..21: mol_type = other RNA
cggcggggacggcgattggtc

SEQ ID NO: 17825 - RNA, 21 nt, Synthetic Construct
  source 1..21: mol_type = other RNA
cggcggggacggcgattggtc

SEQ ID NO: 17826 - RNA, 19 nt, Synthetic Construct
  source 1..19: mol_type = other RNA
tttgttcgttcggctcgcg

SEQ ID NO: 17827 - RNA, 19 nt, Synthetic Construct
  source 1..19: mol_type = other RNA
tttgttcgttcggctcgcg

SEQ ID NO: 17828 - RNA, 27 nt, Synthetic Construct
  source 1..27: mol_type = other RNA
ccccccacagctaaatttgactggcta

SEQ ID NO: 17829 - RNA, 21 nt, Synthetic Construct
  source 1..21: mol_type = other RNA
tggagtgtgacaatggtgttc

SEQ ID NO: 17830 - RNA, 21 nt, Synthetic Construct
  source 1..21: mol_type = other RNA
tggagtgtgacaatggtgttc

SEQ ID NO: 17831 - RNA, 19 nt, Synthetic Construct
  source 1..19: mol_type = other RNA
cagcactctgcaaagacga

SEQ ID NO: 17832 - RNA, 19 nt, Synthetic Construct
  source 1..19: mol_type = other RNA
cagcactctgcaaagacga

SEQ ID NO: 17833 - RNA, 22 nt, Synthetic Construct
  source 1..22: mol_type = other RNA
tagcagcacgtaaatattggca

SEQ ID NO: 17834 - RNA, 32 nt, Synthetic Construct; identical to SEQ ID NO: 753
  source 1..32: mol_type = other RNA

SEQ ID NO: 17835 - RNA, 32 nt, Synthetic Construct; identical to SEQ ID NO: 753
  source 1..32: mol_type = other RNA

SEQ ID NO: 17836 - RNA, 23 nt, Synthetic Construct
  source 1..23: mol_type = other RNA
tggtaatacggcgtacttagtgt

SEQ ID NO: 17837 - RNA, 23 nt, Synthetic Construct
  source 1..23: mol_type = other RNA
tggtaatacggcgtacttagtgt

SEQ ID NO: 17838 - RNA, 23 nt, Synthetic Construct
  source 1..23: mol_type = other RNA
tcctgtactgggctgccccgagt

SEQ ID NO: 17839 - RNA, 23 nt, Synthetic Construct
  source 1..23: mol_type = other RNA
tcctgtactgggctgccccgagt

SEQ ID NO: 17840 - RNA, 22 nt, Synthetic Construct
  source 1..22: mol_type = other RNA
taactccttaagtgaatctcgc

SEQ ID NO: 17841 - RNA, 33 nt, Synthetic Construct; identical to SEQ ID NO: 1982
  source 1..33: mol_type = other RNA

SEQ ID NO: 17842 - RNA, 15 nt, Synthetic Construct
  source 1..15: mol_type = other RNA
ccagaaacccggtcg

SEQ ID NO: 17843 - RNA, 18 nt, Synthetic Construct
  source 1..18: mol_type = other RNA
cagcactctgcaaagacg

SEQ ID NO: 17844 - RNA, 22 nt, Synthetic Construct
  source 1..22: mol_type = other RNA
tctctcggctcctcgcggctcg

SEQ ID NO: 17845 - RNA, 22 nt, Synthetic Construct
  source 1..22: mol_type = other RNA
tctctcggctcctcgcggctcg

SEQ ID NO: 17846 - RNA, 16 nt, Synthetic Construct
  source 1..16: mol_type = other RNA
gatttgggagtgctcg

SEQ ID NO: 17847 - RNA, 23 nt, Synthetic Construct
  source 1..23: mol_type = other RNA
agcggcattgtacagggctatga

SEQ ID NO: 17848 - RNA, 23 nt, Synthetic Construct
  source 1..23: mol_type = other RNA
tcccgtactgagctgccccgagt

SEQ ID NO: 17849 - RNA, 23 nt, Synthetic Construct
  source 1..23: mol_type = other RNA
tcccgtactgagctgccccgagt

SEQ ID NO: 17850 - RNA, 21 nt, Synthetic Construct
  source 1..21: mol_type = other RNA
cgaggtagtagattgtatagt

SEQ ID NO: 17851 - RNA, 21 nt, Synthetic Construct
  source 1..21: mol_type = other RNA
cgaggtagtagattgtatagt

SEQ ID NO: 17852 - RNA, 16 nt, Synthetic Construct
  source 1..16: mol_type = other RNA
gtctacggccgtacca

SEQ ID NO: 17853 - RNA, 38 nt, Synthetic Construct; identical to SEQ ID NO: 7148
  source 1..38: mol_type = other RNA

SEQ ID NO: 17854 - RNA, 38 nt, Synthetic Construct; identical to SEQ ID NO: 7148
  source 1..38: mol_type = other RNA

SEQ ID NO: 17855 - RNA, 19 nt, Synthetic Construct
  source 1..19: mol_type = other RNA
tgaggtagtagattgtata

SEQ ID NO: 17856 - RNA, 23 nt, Synthetic Construct
  source 1..23: mol_type = other RNA
tggtaatacgacgtacttagagt

SEQ ID NO: 17857 - RNA, 23 nt, Synthetic Construct
  source 1..23: mol_type = other RNA
tggtaatacgacgtacttagagt

SEQ ID NO: 17858 - RNA, 22 nt, Synthetic Construct
  source 1..22: mol_type = other RNA
ngaggtagtaggttgtgtggtt

SEQ ID NO: 17859 - RNA, 23 nt, Synthetic Construct
  source 1..23: mol_type = other RNA
tttggtccccttcaaccagctgt

SEQ ID NO: 17860 - RNA, 23 nt, Synthetic Construct
  source 1..23: mol_type = other RNA
tttggtccccttcaaccagctgt

SEQ ID NO: 17861 - RNA, 20 nt, Synthetic Construct
  source 1..20: mol_type = other RNA
tggggtagtaggttgtatag

SEQ ID NO: 17862 - RNA, 20 nt, Synthetic Construct
  source 1..20: mol_type = other RNA
tggggtagtaggttgtatag

SEQ ID NO: 17863 - RNA, 20 nt, Synthetic Construct
  source 1..20: mol_type = other RNA
acccttgtcattagttgcta

SEQ ID NO: 17864 - RNA, 23 nt, Synthetic Construct
  source 1..23: mol_type = other RNA
tcccgtactgagctgccccgaga

SEQ ID NO: 17865 - RNA, 23 nt, Synthetic Construct
  source 1..23: mol_type = other RNA
tcccgtactgagctgccccgaga

SEQ ID NO: 17866 - RNA, 22 nt, Synthetic Construct
  source 1..22: mol_type = other RNA
tctcccaacccttgtaccagtg

SEQ ID NO: 17867 - RNA, 22 nt, Synthetic Construct
  source 1..22: mol_type = other RNA
tctcccaacccttgtaccagtg

SEQ ID NO: 17868 - RNA, 24 nt, Synthetic Construct
  source 1..24: mol_type = other RNA
tgtaaacatccccgactggaagtt

SEQ ID NO: 17869 - RNA, 20 nt, Synthetic Construct
  source 1..20: mol_type = other RNA
tgaggtagtaggttgtgtgt

SEQ ID NO: 17870 - RNA, 20 nt, Synthetic Construct
  source 1..20: mol_type = other RNA
tgaggtagtaggttgtgtgt

SEQ ID NO: 17871 - RNA, 24 nt, Synthetic Construct
  source 1..24: mol_type = other RNA
tcagtgcatcacagaactttgttt

SEQ ID NO: 17872 - RNA, 21 nt, Synthetic Construct
  source 1..21: mol_type = other RNA
cagtgcaatgttaaaagggca

SEQ ID NO: 17873 - RNA, 21 nt, Synthetic Construct
  source 1..21: mol_type = other RNA
cagtgcaatgttaaaagggca

SEQ ID NO: 17874 - RNA, 20 nt, Synthetic Construct
  source 1..20: mol_type = other RNA
tggagtgtgacaatggtgtt

SEQ ID NO: 17875 - RNA, 20 nt, Synthetic Construct
  source 1..20: mol_type = other RNA
tggagtgtgacaatggtgtt

SEQ ID NO: 17876 - RNA, 22 nt, Synthetic Construct
  source 1..22: mol_type = other RNA
agcagcattgtacagggctatt

SEQ ID NO: 17877 - RNA, 22 nt, Synthetic Construct
  source 1..22: mol_type = other RNA
tcactgatcgagtcgtcctgcg

SEQ ID NO: 17878 - RNA, 18 nt, Synthetic Construct
  source 1..18: mol_type = other RNA
cctgtaccgatcaatagt

SEQ ID NO: 17879 - RNA, 20 nt, Synthetic Construct
  source 1..20: mol_type = other RNA
tcagtagctcgaggaaaaga

SEQ ID NO: 17880 - RNA, 20 nt, Synthetic Construct
  source 1..20: mol_type = other RNA
tcagtagctcgaggaaaaga

SEQ ID NO: 17881 - RNA, 22 nt, Synthetic Construct
  source 1..22: mol_type = other RNA
ttcaagtaacccaggataggct

SEQ ID NO: 17882 - RNA, 22 nt, Synthetic Construct
  source 1..22: mol_type = other RNA
tgaggtagaagattgtatagtt

SEQ ID NO: 17883 - RNA, 22 nt, Synthetic Construct
  source 1..22: mol_type = other RNA
tgaggtagaagattgtatagtt

SEQ ID NO: 17884 - RNA, 20 nt, Synthetic Construct
  source 1..20: mol_type = other RNA
ggggatgtagctcagatggt

SEQ ID NO: 17885 - RNA, 20 nt, Synthetic Construct
  source 1..20: mol_type = other RNA
ggggatgtagctcagatggt

SEQ ID NO: 17886 - RNA, 23 nt, Synthetic Construct
  source 1..23: mol_type = other RNA
actcggcgtggcgtcggtcgtgt

SEQ ID NO: 17887 - RNA, 23 nt, Synthetic Construct
  source 1..23: mol_type = other RNA
actcggcgtggcgtcggtcgtgt

SEQ ID NO: 17888 - RNA, 22 nt, Synthetic Construct
  source 1..22: mol_type = other RNA
tagcagcacgtaaatattggca

SEQ ID NO: 17889 - RNA, 23 nt, Synthetic Construct
  source 1..23: mol_type = other RNA
tgaggggcagggagcgagacttt

SEQ ID NO: 17890 - RNA, 23 nt, Synthetic Construct
  source 1..23: mol_type = other RNA
tgaggggcagggagcgagacttt

SEQ ID NO: 17891 - RNA, 23 nt, Synthetic Construct
  source 1..23: mol_type = other RNA
tctttgttcgattccgttgagta

SEQ ID NO: 17892 - RNA, 23 nt, Synthetic Construct
  source 1..23: mol_type = other RNA
tctttgttcgattccgttgagta

SEQ ID NO: 17893 - RNA, 16 nt, Synthetic Construct
  source 1..16: mol_type = other RNA
accgcttttgtcaggg

SEQ ID NO: 17894 - RNA, 16 nt, Synthetic Construct
  source 1..16: mol_type = other RNA
accgcttttgtcaggg

SEQ ID NO: 17895 - RNA, 19 nt, Synthetic Construct
  source 1..19: mol_type = other RNA
ggctggtccgaaggtagtg

SEQ ID NO: 17896 - RNA, 19 nt, Synthetic Construct
  source 1..19: mol_type = other RNA
ggctggtccgaaggtagtg

SEQ ID NO: 17897 - RNA, 23 nt, Synthetic Construct
  source 1..23: mol_type = other RNA
caaagtgctgttcgcgcaggtag

SEQ ID NO: 17898 - RNA, 23 nt, Synthetic Construct
  source 1..23: mol_type = other RNA
caaagtgctgttcgcgcaggtag

SEQ ID NO: 17899 - RNA, 20 nt, Synthetic Construct
  source 1..20: mol_type = other RNA
tcagtagctcgaggaaaaga

SEQ ID NO: 17900 - RNA, 20 nt, Synthetic Construct
  source 1..20: mol_type = other RNA
tcagtagctcgaggaaaaga

SEQ ID NO: 17901 - RNA, 21 nt, Synthetic Construct
  source 1..21: mol_type = other RNA
tgaggtagtaggtcgtatagt

SEQ ID NO: 17902 - RNA, 21 nt, Synthetic Construct
  source 1..21: mol_type = other RNA
tgaggtagtaggtcgtatagt

SEQ ID NO: 17903 - RNA, 24 nt, Synthetic Construct
  source 1..24: mol_type = other RNA
agcaacattgtctgctgggtttct

SEQ ID NO: 17904 - RNA, 24 nt, Synthetic Construct
  source 1..24: mol_type = other RNA
agcaacattgtctgctgggtttct

SEQ ID NO: 17905 - RNA, 23 nt, Synthetic Construct
  source 1..23: mol_type = other RNA
gcctgtactgagctgccccgagt

SEQ ID NO: 17906 - RNA, 19 nt, Synthetic Construct
  source 1..19: mol_type = other RNA
atctgctggaactgcaact

SEQ ID NO: 17907 - RNA, 19 nt, Synthetic Construct
  source 1..19: mol_type = other RNA
atctgctggaactgcaact

SEQ ID NO: 17908 - RNA, 15 nt, Synthetic Construct
  source 1..15: mol_type = other RNA
aaattccttgtcggg

SEQ ID NO: 17909 - RNA, 32 nt, Synthetic Construct; identical to SEQ ID NO: 8371
  source 1..32: mol_type = other RNA

SEQ ID NO: 17910 - RNA, 32 nt, Synthetic Construct; identical to SEQ ID NO: 8371
  source 1..32: mol_type = other RNA

SEQ ID NO: 17911 - RNA, 23 nt, Synthetic Construct
  source 1..23: mol_type = other RNA
tccctggtggtctagtggttagg

SEQ ID NO: 17912 - RNA, 23 nt, Synthetic Construct
  source 1..23: mol_type = other RNA
tccctggtggtctagtggttagg

SEQ ID NO: 17913 - RNA, 22 nt, Synthetic Construct
  source 1..22: mol_type = other RNA
tattgcacttgccccggcctgt

SEQ ID NO: 17914 - RNA, 23 nt, Synthetic Construct
  source 1..23: mol_type = other RNA
tggtaatacgacgtactttgtgt

SEQ ID NO: 17915 - RNA, 21 nt, Synthetic Construct
  source 1..21: mol_type = other RNA
tgaggtagtaggttgtacagt

SEQ ID NO: 17916 - RNA, 21 nt, Synthetic Construct
  source 1..21: mol_type = other RNA
tgaggtagtaggttgtacagt

SEQ ID NO: 17917 - RNA, 20 nt, Synthetic Construct
  source 1..20: mol_type = other RNA
tgaggaagtaggttgtatag

SEQ ID NO: 17918 - RNA, 20 nt, Synthetic Construct
  source 1..20: mol_type = other RNA
tcgcgccgtcgggcccgggg

SEQ ID NO: 17919 - RNA, 20 nt, Synthetic Construct
  source 1..20: mol_type = other RNA
tcgcgccgtcgggcccgggg

SEQ ID NO: 17920 - RNA, 16 nt, Synthetic Construct
  source 1..16: mol_type = other RNA
tgcacgaaagcgtggg

SEQ ID NO: 17921 - RNA, 16 nt, Synthetic Construct
  source 1..16: mol_type = other RNA
tgcacgaaagcgtggg

SEQ ID NO: 17922 - RNA, 16 nt, Synthetic Construct
  source 1..16: mol_type = other RNA
cccagaaacccggtcg

SEQ ID NO: 17923 - RNA, 23 nt, Synthetic Construct
  source 1..23: mol_type = other RNA
agcagcattgtgcagggctatga

SEQ ID NO: 17924 - RNA, 21 nt, Synthetic Construct
  source 1..21: mol_type = other RNA
tggaatgtaaggaagtgtgtg

SEQ ID NO: 17925 - RNA, 22 nt, Synthetic Construct
  source 1..22: mol_type = other RNA
cgaggtagtagattgtatagtt

SEQ ID NO: 17926 - RNA, 22 nt, Synthetic Construct
  source 1..22: mol_type = other RNA
cgaggtagtagattgtatagtt

SEQ ID NO: 17927 - RNA, 23 nt, Synthetic Construct
  source 1..23: mol_type = other RNA
tgtcagtttgtcaaataccccaa

SEQ ID NO: 17928 - RNA, 18 nt, Synthetic Construct
  source 1..18: mol_type = other RNA
aaggaattgacggaaggg

SEQ ID NO: 17929 - RNA, 18 nt, Synthetic Construct
  source 1..18: mol_type = other RNA
aaggaattgacggaaggg

SEQ ID NO: 17930 - RNA, 22 nt, Synthetic Construct
  source 1..22: mol_type = other RNA
caacggaatcccaaaagcagct

SEQ ID NO: 17931 - RNA, 22 nt, Synthetic Construct
  source 1..22: mol_type = other RNA
caacggaatcccaaaagcagct

SEQ ID NO: 17932 - RNA, 23 nt, Synthetic Construct
  source 1..23: mol_type = other RNA
tgaggtggtaggttgtgtggttt

SEQ ID NO: 17933 - RNA, 23 nt, Synthetic Construct
  source 1..23: mol_type = other RNA
tgaggtggtaggttgtgtggttt

SEQ ID NO: 17934 - RNA, 22 nt, Synthetic Construct
  source 1..22: mol_type = other RNA
tcgtaccgtgagtaataatgtg

SEQ ID NO: 17935 - RNA, 22 nt, Synthetic Construct
  source 1..22: mol_type = other RNA
tcgtaccgtgagtaataatgtg

SEQ ID NO: 17936 - RNA, 23 nt, Synthetic Construct
  source 1..23: mol_type = other RNA
gctgactcctagtccagggctct

SEQ ID NO: 17937 - RNA, 23 nt, Synthetic Construct
  source 1..23: mol_type = other RNA
gctgactcctagtccagggctct

SEQ ID NO: 17938 - RNA, 16 nt, Synthetic Construct
  source 1..16: mol_type = other RNA
cccgtcgctactaccg

SEQ ID NO: 17939 - RNA, 16 nt, Synthetic Construct
  source 1..16: mol_type = other RNA
cccgtcgctactaccg

SEQ ID NO: 17940 - RNA, 22 nt, Synthetic Construct
  source 1..22: mol_type = other RNA
tgaggtagtagattgtgtagtt

SEQ ID NO: 17941 - RNA, 22 nt, Synthetic Construct
  source 1..22: mol_type = other RNA
tgaggtagtagattgtgtagtt

SEQ ID NO: 17942 - RNA, 23 nt, Synthetic Construct
  source 1..23: mol_type = other RNA
gtaaacatccttgactggaagct

SEQ ID NO: 17943 - RNA, 22 nt, Synthetic Construct
  source 1..22: mol_type = other RNA
aacggaatcccaaaagcagctg

SEQ ID NO: 17944 - RNA, 22 nt, Synthetic Construct
  source 1..22: mol_type = other RNA
aacggaatcccaaaagcagctg

SEQ ID NO: 17945 - RNA, 24 nt, Synthetic Construct
  source 1..24: mol_type = other RNA
tgtcagtttgtcaaataccccaac

SEQ ID NO: 17946 - RNA, 31 nt, Synthetic Construct; identical to SEQ ID NO: 2333
  source 1..31: mol_type = other RNA

SEQ ID NO: 17947 - RNA, 22 nt, Synthetic Construct
  source 1..22: mol_type = other RNA
tcgtaccgtgagtagtaatgcg

SEQ ID NO: 17948 - RNA, 22 nt, Synthetic Construct
  source 1..22: mol_type = other RNA
tcgtaccgtgagtagtaatgcg

SEQ ID NO: 17949 - RNA, 20 nt, Synthetic Construct
  source 1..20: mol_type = other RNA
tctcccaacccttgtaccag

SEQ ID NO: 17950 - RNA, 22 nt, Synthetic Construct
  source 1..22: mol_type = other RNA
tggaatgtaaagaagtacgtat

SEQ ID NO: 17951 - RNA, 22 nt, Synthetic Construct
  source 1..22: mol_type = other RNA
tggaatgtaaagaagtacgtat

SEQ ID NO: 17952 - RNA, 22 nt, Synthetic Construct
  source 1..22: mol_type = other RNA
cattgcgcttgtctcggtctga

SEQ ID NO: 17953 - RNA, 22 nt, Synthetic Construct
  source 1..22: mol_type = other RNA
cattgcgcttgtctcggtctga

SEQ ID NO: 17954 - RNA, 24 nt, Synthetic Construct
  source 1..24: mol_type = other RNA
tgtaaacatccccgactgggagct

SEQ ID NO: 17955 - RNA, 22 nt, Synthetic Construct
  source 1..22: mol_type = other RNA
aagcagcacgtaaatattcgcg

SEQ ID NO: 17956 - RNA, 22 nt, Synthetic Construct
  source 1..22: mol_type = other RNA
aagcagcacgtaaatattcgcg

SEQ ID NO: 17957 - RNA, 21 nt, Synthetic Construct
  source 1..21: mol_type = other RNA
tgaggtagtaggttgtgtagt

SEQ ID NO: 17958 - RNA, 21 nt, Synthetic Construct
  source 1..21: mol_type = other RNA
tgaggtagtaggttgtgtagt

SEQ ID NO: 17959 - RNA, 25 nt, Synthetic Construct
  source 1..25: mol_type = other RNA
ccccccactgctaaatttgactggc

SEQ ID NO: 17960 - RNA, 25 nt, Synthetic Construct
  source 1..25: mol_type = other RNA
ccccccactgctaaatttgactggc

SEQ ID NO: 17961 - RNA, 23 nt, Synthetic Construct
  source 1..23: mol_type = other RNA
taccctgtagatccgaatttgtg

SEQ ID NO: 17962 - RNA, 19 nt, Synthetic Construct
  source 1..19: mol_type = other RNA
ccagtaaacggcggccgta

SEQ ID NO: 17963 - RNA, 22 nt, Synthetic Construct
  source 1..22: mol_type = other RNA
tgtggtagtaggttgtgtggtt

SEQ ID NO: 17964 - RNA, 22 nt, Synthetic Construct
  source 1..22: mol_type = other RNA
tgtggtagtaggttgtgtggtt

SEQ ID NO: 17965 - RNA, 21 nt, Synthetic Construct
  source 1..21: mol_type = other RNA
tgtcagtttgtcaaatacccc

SEQ ID NO: 17966 - RNA, 36 nt, Synthetic Construct; identical to SEQ ID NO: 2444
  source 1..36: mol_type = other RNA

SEQ ID NO: 17967 - RNA, 36 nt, Synthetic Construct; identical to SEQ ID NO: 2444
  source 1..36: mol_type = other RNA

SEQ ID NO: 17968 - RNA, 24 nt, Synthetic Construct
  source 1..24: mol_type = other RNA
aaaccgttaccattactgagttta

SEQ ID NO: 17969 - RNA, 16 nt, Synthetic Construct
  source 1..16: mol_type = other RNA
gcctacggccatacca

SEQ ID NO: 17970 - RNA, 16 nt, Synthetic Construct
  source 1..16: mol_type = other RNA
gcctacggccatacca

SEQ ID NO: 17971 - RNA, 22 nt, Synthetic Construct
  source 1..22: mol_type = other RNA
ggaggtagtagtttgtgctgtt

SEQ ID NO: 17972 - RNA, 24 nt, Synthetic Construct
  source 1..24: mol_type = other RNA
taccacagggtagaaccacggaca

SEQ ID NO: 17973 - RNA, 24 nt, Synthetic Construct
  source 1..24: mol_type = other RNA
taccacagggtagaaccacggaca

SEQ ID NO: 17974 - RNA, 21 nt, Synthetic Construct
  source 1..21: mol_type = other RNA
cgtaccgtgagtaataacgcg

SEQ ID NO: 17975 - RNA, 21 nt, Synthetic Construct
  source 1..21: mol_type = other RNA
agccatcatttaaagaaagcg

SEQ ID NO: 17976 - RNA, 21 nt, Synthetic Construct
  source 1..21: mol_type = other RNA
agccatcatttaaagaaagcg

SEQ ID NO: 17977 - RNA, 24 nt, Synthetic Construct
  source 1..24: mol_type = other RNA
tgtaaacatccccgactggaagcg

SEQ ID NO: 17978 - RNA, 24 nt, Synthetic Construct
  source 1..24: mol_type = other RNA
tgtaaacatccccgactggaagcg

SEQ ID NO: 17979 - RNA, 19 nt, Synthetic Construct
  source 1..19: mol_type = other RNA
cccttgtcattagttgcta

SEQ ID NO: 17980 - RNA, 19 nt, Synthetic Construct
  source 1..19: mol_type = other RNA
cccttgtcattagttgcta

SEQ ID NO: 17981 - RNA, 22 nt, Synthetic Construct
  source 1..22: mol_type = other RNA
tgaggtagtaggttgtatagct

SEQ ID NO: 17982 - RNA, 17 nt, Synthetic Construct
  source 1..17: mol_type = other RNA
tgccagcagccgcggta

SEQ ID NO: 17983 - RNA, 21 nt, Synthetic Construct
  source 1..21: mol_type = other RNA
tgaggtagtggattgtatagt

SEQ ID NO: 17984 - RNA, 16 nt, Synthetic Construct
  source 1..16: mol_type = other RNA
gaaaaagtcatggagg

SEQ ID NO: 17985 - RNA, 16 nt, Synthetic Construct
  source 1..16: mol_type = other RNA
gaaaaagtcatggagg

SEQ ID NO: 17986 - RNA, 23 nt, Synthetic Construct
  source 1..23: mol_type = other RNA
tgaggggcagagagcgagacttc

SEQ ID NO: 17987 - RNA, 16 nt, Synthetic Construct
  source 1..16: mol_type = other RNA
gtctacagccatacca

SEQ ID NO: 17988 - RNA, 22 nt, Synthetic Construct
  source 1..22: mol_type = other RNA
tcgtaccgtgagtaataatacg

SEQ ID NO: 17989 - RNA, 21 nt, Synthetic Construct
  source 1..21: mol_type = other RNA
ggaggagttcgaaggtacgct

SEQ ID NO: 17990 - RNA, 23 nt, Synthetic Construct
  source 1..23: mol_type = other RNA
tgtcagtttgccaaataccccaa

SEQ ID NO: 17991 - RNA, 23 nt, Synthetic Construct
  source 1..23: mol_type = other RNA
tgtcagtttgccaaataccccaa

SEQ ID NO: 17992 - RNA, 29 nt, Synthetic Construct
  source 1..29: mol_type = other RNA
cgactcttagcggtggatcactcggctcg

SEQ ID NO: 17993 - RNA, 29 nt, Synthetic Construct
  source 1..29: mol_type = other RNA
cgactcttagcggtggatcactcggctcg

SEQ ID NO: 17994 - RNA, 22 nt, Synthetic Construct
  source 1..22: mol_type = other RNA
tccagtactgagctgccccgag

SEQ ID NO: 17995 - RNA, 22 nt, Synthetic Construct
  source 1..22: mol_type = other RNA
tccagtactgagctgccccgag

SEQ ID NO: 17996 - RNA, 19 nt, Synthetic Construct
  source 1..19: mol_type = other RNA
gagaaagctcacaagaact

SEQ ID NO: 17997 - RNA, 19 nt, Synthetic Construct
  source 1..19: mol_type = other RNA
gagaaagctcacaagaact

SEQ ID NO: 17998 - RNA, 22 nt, Synthetic Construct
  source 1..22: mol_type = other RNA
tcaggtagtagattgtatagtt

SEQ ID NO: 17999 - RNA, 21 nt, Synthetic Construct
  source 1..21: mol_type = other RNA
gccctgacctgtcctgttctg

SEQ ID NO: 18000 - RNA, 21 nt, Synthetic Construct
  source 1..21: mol_type = other RNA
gccctgacctgtcctgttctg

SEQ ID NO: 18001 - RNA, 22 nt, Synthetic Construct
  source 1..22: mol_type = other RNA
ncctgtactgagctgccccgag

SEQ ID NO: 18002 - RNA, 22 nt, Synthetic Construct
  source 1..22: mol_type = other RNA
ncctgtactgagctgccccgag

SEQ ID NO: 18003 - RNA, 23 nt, Synthetic Construct
  source 1..23: mol_type = other RNA
caaagtgctgttcgtgcagatag

SEQ ID NO: 18004 - RNA, 22 nt, Synthetic Construct
  source 1..22: mol_type = other RNA
tgaggtagtaggttgtgcggtt

SEQ ID NO: 18005 - RNA, 22 nt, Synthetic Construct
  source 1..22: mol_type = other RNA
tgaggtagtaggttgtgcggtt

SEQ ID NO: 18006 - RNA, 22 nt, Synthetic Construct
  source 1..22: mol_type = other RNA
tcctgtactaagctgccccgag

SEQ ID NO: 18007 - RNA, 22 nt, Synthetic Construct
  source 1..22: mol_type = other RNA
tcctgtactaagctgccccgag

SEQ ID NO: 18008 - RNA, 22 nt, Synthetic Construct
  source 1..22: mol_type = other RNA
tagcagcacgtaaatactggcg

SEQ ID NO: 18009 - RNA, 20 nt, Synthetic Construct
  source 1..20: mol_type = other RNA
tattgcactcgtcccggcct

SEQ ID NO: 18010 - RNA, 22 nt, Synthetic Construct
  source 1..22: mol_type = other RNA
taaccccttaagcgaatctcgc

SEQ ID NO: 18011 - RNA, 22 nt, Synthetic Construct
  source 1..22: mol_type = other RNA
taaccccttaagcgaatctcgc

SEQ ID NO: 18012 - RNA, 22 nt, Synthetic Construct
  source 1..22: mol_type = other RNA
tgaggtagtaggttgtatagtc

SEQ ID NO: 18013 - RNA, 22 nt, Synthetic Construct
  source 1..22: mol_type = other RNA
tgaggtagtaggttgtatagtc

SEQ ID NO: 18014 - RNA, 26 nt, Synthetic Construct
  source 1..26: mol_type = other RNA
gagcagctaataccgcatacgacctg

SEQ ID NO: 18015 - RNA, 18 nt, Synthetic Construct
  source 1..18: mol_type = other RNA
acggcgggagtaactatg

SEQ ID NO: 18016 - RNA, 21 nt, Synthetic Construct
  source 1..21: mol_type = other RNA
aatggcgccactagggttgtg

SEQ ID NO: 18017 - RNA, 21 nt, Synthetic Construct
  source 1..21: mol_type = other RNA
aatggcgccactagggttgtg

SEQ ID NO: 18018 - RNA, 22 nt, Synthetic Construct
  source 1..22: mol_type = other RNA
tgaggtagtaggctgtatagtt

SEQ ID NO: 18019 - RNA, 22 nt, Synthetic Construct
  source 1..22: mol_type = other RNA
tgaggtagtaggctgtatagtt

SEQ ID NO: 18020 - RNA, 34 nt, Synthetic Construct; identical to SEQ ID NO: 16999
  source 1..34: mol_type = other RNA

SEQ ID NO: 18021 - RNA, 22 nt, Synthetic Construct
  source 1..22: mol_type = other RNA
taactccttgagcgaatctcgc

SEQ ID NO: 18022 - RNA, 22 nt, Synthetic Construct
  source 1..22: mol_type = other RNA
tgaggtagtagaatgtatagtt

SEQ ID NO: 18023 - RNA, 22 nt, Synthetic Construct
  source 1..22: mol_type = other RNA
tgaggtagtagaatgtatagtt

SEQ ID NO: 18024 - RNA, 21 nt, Synthetic Construct
  source 1..21: mol_type = other RNA
tgaggtagtaggttgcatagt

SEQ ID NO: 18025 - RNA, 15 nt, Synthetic Construct
  source 1..15: mol_type = other RNA
gctatgggatttgtt

SEQ ID NO: 18026 - RNA, 23 nt, Synthetic Construct
  source 1..23: mol_type = other RNA
tgaggtagtaggttgtgcggttt

SEQ ID NO: 18027 - RNA, 23 nt, Synthetic Construct
  source 1..23: mol_type = other RNA
caaagagctgttcgtgcaggtag

SEQ ID NO: 18028 - RNA, 20 nt, Synthetic Construct
  source 1..20: mol_type = other RNA
ggggatgtagctcagatggt

SEQ ID NO: 18029 - RNA, 22 nt, Synthetic Construct
  source 1..22: mol_type = other RNA
caagtcactagtggttccgttt

SEQ ID NO: 18030 - RNA, 22 nt, Synthetic Construct
  source 1..22: mol_type = other RNA
caagtcactagtggttccgttt

SEQ ID NO: 18031 - RNA, 22 nt, Synthetic Construct
  source 1..22: mol_type = other RNA
tagcagcacgtaaatattgacg

SEQ ID NO: 18032 - RNA, 22 nt, Synthetic Construct
  source 1..22: mol_type = other RNA
tagcagcacgtaaatattgacg

SEQ ID NO: 18033 - RNA, 20 nt, Synthetic Construct
  source 1..20: mol_type = other RNA
caaagaattctccttttggg

SEQ ID NO: 18034 - RNA, 22 nt, Synthetic Construct
  source 1..22: mol_type = other RNA
tgaggtagtaggttgtgttgtt

SEQ ID NO: 18035 - RNA, 22 nt, Synthetic Construct
  source 1..22: mol_type = other RNA
tgaggtagtaggttgtgttgtt

SEQ ID NO: 18036 - RNA, 20 nt, Synthetic Construct
  source 1..20: mol_type = other RNA
gtgccgaagctgtgggattg

SEQ ID NO: 18037 - RNA, 15 nt, Synthetic Construct
  source 1..15: mol_type = other RNA
gtttgatcctggctc

SEQ ID NO: 18038 - RNA, 21 nt, Synthetic Construct
  source 1..21: mol_type = other RNA
cgaggggcagagagcgagact

SEQ ID NO: 18039 - RNA, 21 nt, Synthetic Construct
  source 1..21: mol_type = other RNA
cgaggggcagagagcgagact

SEQ ID NO: 18040 - RNA, 24 nt, Synthetic Construct
  source 1..24: mol_type = other RNA
tcctccctcgggagggcgcgcggg

SEQ ID NO: 18041 - RNA, 24 nt, Synthetic Construct
  source 1..24: mol_type = other RNA
tcctccctcgggagggcgcgcggg

SEQ ID NO: 18042 - RNA, 23 nt, Synthetic Construct
  source 1..23: mol_type = other RNA
agcagcattgtacagggctgtga

SEQ ID NO: 18043 - RNA, 20 nt, Synthetic Construct
  source 1..20: mol_type = other RNA
agctacattgtctgctgggt

SEQ ID NO: 18044 - RNA, 23 nt, Synthetic Construct
  source 1..23: mol_type = other RNA
tgaggggcagggagcgagacttt

SEQ ID NO: 18045 - RNA, 15 nt, Synthetic Construct
  source 1..15: mol_type = other RNA
gcaagtcgagcggta

SEQ ID NO: 18046 - RNA, 21 nt, Synthetic Construct
  source 1..21: mol_type = other RNA
gactatagaactttccccctc

SEQ ID NO: 18047 - RNA, 20 nt, Synthetic Construct
  source 1..20: mol_type = other RNA
accacagggtagaaccacgg

SEQ ID NO: 18048 - RNA, 22 nt, Synthetic Construct
  source 1..22: mol_type = other RNA
ngaggtagtagattgtatagtt

SEQ ID NO: 18049 - RNA, 22 nt, Synthetic Construct
  source 1..22: mol_type = other RNA
ngaggtagtagattgtatagtt

SEQ ID NO: 18050 - RNA, 23 nt, Synthetic Construct
  source 1..23: mol_type = other RNA
caacggagtcccaaaagcagctg

SEQ ID NO: 18051 - RNA, 23 nt, Synthetic Construct
  source 1..23: mol_type = other RNA
tgtcagtttgtcaaataccccaa

SEQ ID NO: 18052 - RNA, 23 nt, Synthetic Construct
  source 1..23: mol_type = other RNA
cgagagtaggacgttgccaggtt

SEQ ID NO: 18053 - RNA, 23 nt, Synthetic Construct
  source 1..23: mol_type = other RNA
cgagagtaggacgttgccaggtt

SEQ ID NO: 18054 - RNA, 22 nt, Synthetic Construct
  source 1..22: mol_type = other RNA
tgaggtggtaggttgtgtggtt

SEQ ID NO: 18055 - RNA, 21 nt, Synthetic Construct
  source 1..21: mol_type = other RNA
aatgacacgatcactcccgtt

SEQ ID NO: 18056 - RNA, 23 nt, Synthetic Construct
  source 1..23: mol_type = other RNA
agtcagtttgtcaaataccccaa

SEQ ID NO: 18057 - RNA, 32 nt, Synthetic Construct; identical to SEQ ID NO: 4734
  source 1..32: mol_type = other RNA

SEQ ID NO: 18058 - RNA, 32 nt, Synthetic Construct; identical to SEQ ID NO: 4734
  source 1..32: mol_type = other RNA

SEQ ID NO: 18059 - RNA, 18 nt, Synthetic Construct
  source 1..18: mol_type = other RNA
cataaagtagaaagcact

SEQ ID NO: 18060 - RNA, 23 nt, Synthetic Construct
  source 1..23: mol_type = other RNA
tgaggagcagagagcgagacttt

SEQ ID NO: 18061 - RNA, 23 nt, Synthetic Construct
  source 1..23: mol_type = other RNA
tgaggagcagagagcgagacttt

SEQ ID NO: 18062 - RNA, 24 nt, Synthetic Construct
  source 1..24: mol_type = other RNA
tgtaaacatccccgactggaagtt

SEQ ID NO: 18063 - RNA, 25 nt, Synthetic Construct
  source 1..25: mol_type = other RNA
atgaggatatgagatcgagacgaca

SEQ ID NO: 18064 - RNA, 21 nt, Synthetic Construct
  source 1..21: mol_type = other RNA
caaagaattctccttttgggc

SEQ ID NO: 18065 - RNA, 19 nt, Synthetic Construct
  source 1..19: mol_type = other RNA
cacatgcaagtcgaacggt

SEQ ID NO: 18066 - RNA, 19 nt, Synthetic Construct
  source 1..19: mol_type = other RNA
cacatgcaagtcgaacggt

SEQ ID NO: 18067 - RNA, 19 nt, Synthetic Construct
  source 1..19: mol_type = other RNA
acatgcaagtcgaacggta

SEQ ID NO: 18068 - RNA, 19 nt, Synthetic Construct
  source 1..19: mol_type = other RNA
acatgcaagtcgaacggta

SEQ ID NO: 18069 - RNA, 21 nt, Synthetic Construct
  source 1..21: mol_type = other RNA
tggagtgcgacaatggtgttt

SEQ ID NO: 18070 - RNA, 21 nt, Synthetic Construct
  source 1..21: mol_type = other RNA
tggagtgcgacaatggtgttt

SEQ ID NO: 18071 - RNA, 22 nt, Synthetic Construct
  source 1..22: mol_type = other RNA
tgaggtagtagaatgtatagtt

SEQ ID NO: 18072 - RNA, 22 nt, Synthetic Construct
  source 1..22: mol_type = other RNA
cagtgcaatgttaaaagggcat

SEQ ID NO: 18073 - RNA, 22 nt, Synthetic Construct
  source 1..22: mol_type = other RNA
cagtgcaatgttaaaagggcat

SEQ ID NO: 18074 - RNA, 23 nt, Synthetic Construct
  source 1..23: mol_type = other RNA
caacggaatcccaaaagcggctg

SEQ ID NO: 18075 - RNA, 17 nt, Synthetic Construct
  source 1..17: mol_type = other RNA
tctgcctcagcgtcggt

SEQ ID NO: 18076 - RNA, 17 nt, Synthetic Construct
  source 1..17: mol_type = other RNA
tctgcctcagcgtcggt

SEQ ID NO: 18077 - RNA, 25 nt, Synthetic Construct
  source 1..25: mol_type = other RNA
ttgaggatatgagatagagacgaca

SEQ ID NO: 18078 - RNA, 25 nt, Synthetic Construct
  source 1..25: mol_type = other RNA
ttgaggatatgagatagagacgaca

SEQ ID NO: 18079 - RNA, 21 nt, Synthetic Construct
  source 1..21: mol_type = other RNA
cattattacttttggtacgcg

SEQ ID NO: 18080 - RNA, 21 nt, Synthetic Construct
  source 1..21: mol_type = other RNA
acagtagtctgcacattggtt

SEQ ID NO: 18081 - RNA, 21 nt, Synthetic Construct
  source 1..21: mol_type = other RNA
acagtagtctgcacattggtt

SEQ ID NO: 18082 - RNA, 21 nt, Synthetic Construct
  source 1..21: mol_type = other RNA
tgaggtagaaggttgtatagt

SEQ ID NO: 18083 - RNA, 23 nt, Synthetic Construct
  source 1..23: mol_type = other RNA
tgaggggcagagagtgagacttt

SEQ ID NO: 18084 - RNA, 23 nt, Synthetic Construct
  source 1..23: mol_type = other RNA
tgaggggcagagagtgagacttt

SEQ ID NO: 18085 - RNA, 19 nt, Synthetic Construct
  source 1..19: mol_type = other RNA
agcagcattgtacagggct

SEQ ID NO: 18086 - RNA, 19 nt, Synthetic Construct
  source 1..19: mol_type = other RNA
agcagcattgtacagggct

SEQ ID NO: 18087 - RNA, 35 nt, Synthetic Construct; identical to SEQ ID NO: 1160
  source 1..35: mol_type = other RNA

SEQ ID NO: 18088 - RNA, 35 nt, Synthetic Construct; identical to SEQ ID NO: 1160
  source 1..35: mol_type = other RNA

SEQ ID NO: 18089 - RNA, 17 nt, Synthetic Construct
  source 1..17: mol_type = other RNA
cgtgagctgggtttaga

SEQ ID NO: 18090 - RNA, 17 nt, Synthetic Construct
  source 1..17: mol_type = other RNA
cgtgagctgggtttaga

SEQ ID NO: 18091 - RNA, 16 nt, Synthetic Construct
  source 1..16: mol_type = other RNA
cccctggacctgtact

SEQ ID NO: 18092 - RNA, 21 nt, Synthetic Construct
  source 1..21: mol_type = other RNA
tggggtgtgacaatggtgttt

SEQ ID NO: 18093 - RNA, 21 nt, Synthetic Construct
  source 1..21: mol_type = other RNA
tggggtgtgacaatggtgttt

SEQ ID NO: 18094 - RNA, 22 nt, Synthetic Construct
  source 1..22: mol_type = other RNA
tgagatagtagtttgtgctgtt

SEQ ID NO: 18095 - RNA, 22 nt, Synthetic Construct
  source 1..22: mol_type = other RNA
tgagatagtagtttgtgctgtt

SEQ ID NO: 18096 - RNA, 22 nt, Synthetic Construct
  source 1..22: mol_type = other RNA
ncgtaccgtgagtaataatgcg

SEQ ID NO: 18097 - RNA, 22 nt, Synthetic Construct
  source 1..22: mol_type = other RNA
ncgtaccgtgagtaataatgcg

SEQ ID NO: 18098 - RNA, 22 nt, Synthetic Construct
  source 1..22: mol_type = other RNA
tgaggtagtagtttgtgctggt

SEQ ID NO: 18099 - RNA, 22 nt, Synthetic Construct
  source 1..22: mol_type = other RNA
tgaggtagtagtttgtgctggt

SEQ ID NO: 18100 - RNA, 23 nt, Synthetic Construct
  source 1..23: mol_type = other RNA
tgaggtagtaggttgtgcggttt

SEQ ID NO: 18101 - RNA, 23 nt, Synthetic Construct
  source 1..23: mol_type = other RNA
tgaggtagtaggttgtgcggttt

SEQ ID NO: 18102 - RNA, 16 nt, Synthetic Construct
  source 1..16: mol_type = other RNA
atctacggccatacca

SEQ ID NO: 18103 - RNA, 16 nt, Synthetic Construct
  source 1..16: mol_type = other RNA
atctacggccatacca

SEQ ID NO: 18104 - RNA, 22 nt, Synthetic Construct
  source 1..22: mol_type = other RNA
ccgtaccgtgagtaataatgcg

SEQ ID NO: 18105 - RNA, 31 nt, Synthetic Construct; identical to SEQ ID NO: 2215
  source 1..31: mol_type = other RNA

SEQ ID NO: 18106 - RNA, 17 nt, Synthetic Construct
  source 1..17: mol_type = other RNA
cttgaccgctctgacca

SEQ ID NO: 18107 - RNA, 21 nt, Synthetic Construct
  source 1..21: mol_type = other RNA
tgaggtagtaggttgtgcggt

SEQ ID NO: 18108 - RNA, 21 nt, Synthetic Construct
  source 1..21: mol_type = other RNA
tgaggtagtaggttgtgcggt

SEQ ID NO: 18109 - RNA, 27 nt, Synthetic Construct
  source 1..27: mol_type = other RNA
ccccccactactaaatttgactggctt

SEQ ID NO: 18110 - RNA, 23 nt, Synthetic Construct
  source 1..23: mol_type = other RNA
tgaggggcagagagtgagacttt

SEQ ID NO: 18111 - RNA, 22 nt, Synthetic Construct
  source 1..22: mol_type = other RNA
tgtggtgtttcctactttatgg

SEQ ID NO: 18112 - RNA, 23 nt, Synthetic Construct
  source 1..23: mol_type = other RNA
acctgtactgagctgccccgaga

SEQ ID NO: 18113 - RNA, 27 nt, Synthetic Construct
  source 1..27: mol_type = other RNA
ccccccactgccaaatttgactggctt

SEQ ID NO: 18114 - RNA, 25 nt, Synthetic Construct
  source 1..25: mol_type = other RNA
cgaatgttgctcggtgaaccccttt

SEQ ID NO: 18115 - RNA, 25 nt, Synthetic Construct
  source 1..25: mol_type = other RNA
cgaatgttgctcggtgaaccccttt

SEQ ID NO: 18116 - RNA, 23 nt, Synthetic Construct
  source 1..23: mol_type = other RNA
tgtagtgtttcctactttatgga

SEQ ID NO: 18117 - RNA, 23 nt, Synthetic Construct
  source 1..23: mol_type = other RNA
caaagtgctattcgtgcaggtag

SEQ ID NO: 18118 - RNA, 20 nt, Synthetic Construct
  source 1..20: mol_type = other RNA
gagtaggacgttgccaggtt

SEQ ID NO: 18119 - RNA, 20 nt, Synthetic Construct
  source 1..20: mol_type = other RNA
gagtaggacgttgccaggtt

SEQ ID NO: 18120 - RNA, 23 nt, Synthetic Construct
  source 1..23: mol_type = other RNA
tagtgcaatattgcttatagggt

SEQ ID NO: 18121 - RNA, 23 nt, Synthetic Construct
  source 1..23: mol_type = other RNA
tagtgcaatattgcttatagggt

SEQ ID NO: 18122 - RNA, 21 nt, Synthetic Construct
  source 1..21: mol_type = other RNA
ccctgtactgagctgccccga

SEQ ID NO: 18123 - RNA, 21 nt, Synthetic Construct
  source 1..21: mol_type = other RNA
ccctgtactgagctgccccga

SEQ ID NO: 18124 - RNA, 15 nt, Synthetic Construct
  source 1..15: mol_type = other RNA
ttccgaaagtagtgg

SEQ ID NO: 18125 - RNA, 23 nt, Synthetic Construct
  source 1..23: mol_type = other RNA
tcaggctcagtcccctcccgttt

SEQ ID NO: 18126 - RNA, 23 nt, Synthetic Construct
  source 1..23: mol_type = other RNA
tcaggctcagtcccctcccgttt

SEQ ID NO: 18127 - RNA, 20 nt, Synthetic Construct
  source 1..20: mol_type = other RNA
ttcaagtaatccaggatagg

SEQ ID NO: 18128 - RNA, 23 nt, Synthetic Construct
  source 1..23: mol_type = other RNA
tgaggggcagagagtgagacttt

SEQ ID NO: 18129 - RNA, 23 nt, Synthetic Construct
  source 1..23: mol_type = other RNA
tgaggggcagagagtgagacttt

SEQ ID NO: 18130 - RNA, 24 nt, Synthetic Construct
  source 1..24: mol_type = other RNA
gaaagattaaggcaagaggttagc

SEQ ID NO: 18131 - RNA, 24 nt, Synthetic Construct
  source 1..24: mol_type = other RNA
gaaagattaaggcaagaggttagc

SEQ ID NO: 18132 - RNA, 23 nt, Synthetic Construct
  source 1..23: mol_type = other RNA
tcctgtactgagctgtcccgaga

SEQ ID NO: 18133 - RNA, 19 nt, Synthetic Construct
  source 1..19: mol_type = other RNA
gcagaactggcgatgcggg

SEQ ID NO: 18134 - RNA, 21 nt, Synthetic Construct
  source 1..21: mol_type = other RNA
tgaggtagtaggttgtgcggt

SEQ ID NO: 18135 - RNA, 21 nt, Synthetic Construct
  source 1..21: mol_type = other RNA
tgaggtagtaggttgtgcggt

SEQ ID NO: 18136 - RNA, 22 nt, Synthetic Construct
  source 1..22: mol_type = other RNA
tgaggtagtaggttgtgtggta

SEQ ID NO: 18137 - RNA, 21 nt, Synthetic Construct
  source 1..21: mol_type = other RNA
gtcagtttgtcaaatacccca

SEQ ID NO: 18138 - RNA, 18 nt, Synthetic Construct
  source 1..18: mol_type = other RNA
cccttgtcattagttgct

SEQ ID NO: 18139 - RNA, 23 nt, Synthetic Construct
  source 1..23: mol_type = other RNA
gtctttgttcgattccgttgagt

SEQ ID NO: 18140 - RNA, 23 nt, Synthetic Construct
  source 1..23: mol_type = other RNA
gtctttgttcgattccgttgagt

SEQ ID NO: 18141 - RNA, 22 nt, Synthetic Construct
  source 1..22: mol_type = other RNA
gtgccgaagctgtgggattgat

SEQ ID NO: 18142 - RNA, 22 nt, Synthetic Construct
  source 1..22: mol_type = other RNA
gtgccgaagctgtgggattgat

SEQ ID NO: 18143 - RNA, 26 nt, Synthetic Construct
  source 1..26: mol_type = other RNA
tccctggtggtctagtggttaggatt

SEQ ID NO: 18144 - RNA, 26 nt, Synthetic Construct
  source 1..26: mol_type = other RNA
tccctggtggtctagtggttaggatt

SEQ ID NO: 18145 - RNA, 35 nt, Synthetic Construct; identical to SEQ ID NO: 2450
  source 1..35: mol_type = other RNA

SEQ ID NO: 18146 - RNA, 35 nt, Synthetic Construct; identical to SEQ ID NO: 2450
  source 1..35: mol_type = other RNA

SEQ ID NO: 18147 - RNA, 19 nt, Synthetic Construct
  source 1..19: mol_type = other RNA
cacatgcaagtcgaacggt

SEQ ID NO: 18148 - RNA, 18 nt, Synthetic Construct
  source 1..18: mol_type = other RNA
gcaggacggtggccatgg

SEQ ID NO: 18149 - RNA, 18 nt, Synthetic Construct
  source 1..18: mol_type = other RNA
gcaggacggtggccatgg

SEQ ID NO: 18150 - RNA, 22 nt, Synthetic Construct
  source 1..22: mol_type = other RNA
ttcaagtaatccaggataggca

SEQ ID NO: 18151 - RNA, 24 nt, Synthetic Construct
  source 1..24: mol_type = other RNA
agctacatctggctactgggtctc

SEQ ID NO: 18152 - RNA, 24 nt, Synthetic Construct
  source 1..24: mol_type = other RNA
agctacatctggctactgggtctc

SEQ ID NO: 18153 - RNA, 20 nt, Synthetic Construct
  source 1..20: mol_type = other RNA
tagcttatcagactgatgtt

SEQ ID NO: 18154 - RNA, 20 nt, Synthetic Construct
  source 1..20: mol_type = other RNA
tagcttatcagactgatgtt

SEQ ID NO: 18155 - RNA, 23 nt, Synthetic Construct
  source 1..23: mol_type = other RNA
caacggaaccccaaaagcagctg

SEQ ID NO: 18156 - RNA, 21 nt, Synthetic Construct
  source 1..21: mol_type = other RNA
tgaggtagtaggttgtgtggt

SEQ ID NO: 18157 - RNA, 21 nt, Synthetic Construct
  source 1..21: mol_type = other RNA
tgaggtagtaggttgtgtggt

SEQ ID NO: 18158 - RNA, 27 nt, Synthetic Construct
  source 1..27: mol_type = other RNA
gttggttcaagcgtgtagtcgtgctct

SEQ ID NO: 18159 - RNA, 19 nt, Synthetic Construct
  source 1..19: mol_type = other RNA
attccggttgttcttctct

SEQ ID NO: 18160 - RNA, 27 nt, Synthetic Construct
  source 1..27: mol_type = other RNA
ncccccactgctaaatttgactggctt

SEQ ID NO: 18161 - RNA, 22 nt, Synthetic Construct
  source 1..22: mol_type = other RNA
tgaggtagtaggttgtagagtt

SEQ ID NO: 18162 - RNA, 22 nt, Synthetic Construct
  source 1..22: mol_type = other RNA
tgaggtagtaggttgtagagtt

SEQ ID NO: 18163 - RNA, 17 nt, Synthetic Construct
  source 1..17: mol_type = other RNA
cagtcaggatgttggct

SEQ ID NO: 18164 - RNA, 28 nt, Synthetic Construct
  source 1..28: mol_type = other RNA
ggcagggttcgtgactggggtgaagtcg

SEQ ID NO: 18165 - RNA, 22 nt, Synthetic Construct
  source 1..22: mol_type = other RNA
aggggcagagagcgagactttt

SEQ ID NO: 18166 - RNA, 22 nt, Synthetic Construct
  source 1..22: mol_type = other RNA
aggggcagagagcgagactttt

SEQ ID NO: 18167 - RNA, 22 nt, Synthetic Construct
  source 1..22: mol_type = other RNA
tgaggtagtaggttgtatagtt

SEQ ID NO: 18168 - RNA, 22 nt, Synthetic Construct
  source 1..22: mol_type = other RNA
tgaggtagaaggttgtatagtt

SEQ ID NO: 18169 - RNA, 22 nt, Synthetic Construct
  source 1..22: mol_type = other RNA
tgaggtagaaggttgtatagtt

SEQ ID NO: 18170 - RNA, 22 nt, Synthetic Construct
  source 1..22: mol_type = other RNA
tgagaactgaatcccatgggtt

SEQ ID NO: 18171 - RNA, 32 nt, Synthetic Construct; identical to SEQ ID NO: 2798
  source 1..32: mol_type = other RNA

SEQ ID NO: 18172 - RNA, 32 nt, Synthetic Construct; identical to SEQ ID NO: 2798
  source 1..32: mol_type = other RNA

SEQ ID NO: 18173 - RNA, 16 nt, Synthetic Construct
  source 1..16: mol_type = other RNA
tcagtagctcgaggaa

SEQ ID NO: 18174 - RNA, 22 nt, Synthetic Construct
  source 1..22: mol_type = other RNA
tgaggtagtaggttatatagtt

SEQ ID NO: 18175 - RNA, 23 nt, Synthetic Construct
  source 1..23: mol_type = other RNA
caaagcgctgttcgtgcaggtag

SEQ ID NO: 18176 - RNA, 23 nt, Synthetic Construct
  source 1..23: mol_type = other RNA
caaagcgctgttcgtgcaggtag

SEQ ID NO: 18177 - RNA, 19 nt, Synthetic Construct
  source 1..19: mol_type = other RNA
tctaatgagactgccggtg

SEQ ID NO: 18178 - RNA, 19 nt, Synthetic Construct
  source 1..19: mol_type = other RNA
tctaatgagactgccggtg

SEQ ID NO: 18179 - RNA, 28 nt, Synthetic Construct
  source 1..28: mol_type = other RNA
ccgtgtgaaagtaggtcatcgtcaggct

SEQ ID NO: 18180 - RNA, 28 nt, Synthetic Construct
  source 1..28: mol_type = other RNA
ccgtgtgaaagtaggtcatcgtcaggct

SEQ ID NO: 18181 - RNA, 22 nt, Synthetic Construct
  source 1..22: mol_type = other RNA
tcctgaactgagctgccccgag

SEQ ID NO: 18182 - RNA, 22 nt, Synthetic Construct
  source 1..22: mol_type = other RNA
tcctgaactgagctgccccgag

SEQ ID NO: 18183 - RNA, 22 nt, Synthetic Construct
  source 1..22: mol_type = other RNA
tggagtgtgacaatggtgcttg

SEQ ID NO: 18184 - RNA, 22 nt, Synthetic Construct
  source 1..22: mol_type = other RNA
tggagtgtgacaatggtgcttg

SEQ ID NO: 18185 - RNA, 21 nt, Synthetic Construct
  source 1..21: mol_type = other RNA
tctttggttatctagctgtat

SEQ ID NO: 18186 - RNA, 21 nt, Synthetic Construct
  source 1..21: mol_type = other RNA
tctttggttatctagctgtat

SEQ ID NO: 18187 - RNA, 23 nt, Synthetic Construct
  source 1..23: mol_type = other RNA
caacggaatcccgaaagcagctg

SEQ ID NO: 18188 - RNA, 27 nt, Synthetic Construct
  source 1..27: mol_type = other RNA
ccccccactgctaaatttggctggctt

SEQ ID NO: 18189 - RNA, 27 nt, Synthetic Construct
  source 1..27: mol_type = other RNA
ccccccactgctaaatttggctggctt

SEQ ID NO: 18190 - RNA, 21 nt, Synthetic Construct
  source 1..21: mol_type = other RNA
tgaggtagtaggttgtatagc

SEQ ID NO: 18191 - RNA, 21 nt, Synthetic Construct
  source 1..21: mol_type = other RNA
tgaggtagtaggttgtatagc

SEQ ID NO: 18192 - RNA, 22 nt, Synthetic Construct
  source 1..22: mol_type = other RNA
attgcacttgtcccggcctgta

SEQ ID NO: 18193 - RNA, 22 nt, Synthetic Construct
  source 1..22: mol_type = other RNA
attgcacttgtcccggcctgta

SEQ ID NO: 18194 - RNA, 22 nt, Synthetic Construct
  source 1..22: mol_type = other RNA
tgaggtagtgggttgtatagtt

SEQ ID NO: 18195 - RNA, 22 nt, Synthetic Construct
  source 1..22: mol_type = other RNA
tgaggtagtagattgtaaagtt

SEQ ID NO: 18196 - RNA, 22 nt, Synthetic Construct
  source 1..22: mol_type = other RNA
tgaggtagtagattgtaaagtt

SEQ ID NO: 18197 - RNA, 19 nt, Synthetic Construct
  source 1..19: mol_type = other RNA
gctattgacgaccgtaccg

SEQ ID NO: 18198 - RNA, 20 nt, Synthetic Construct
  source 1..20: mol_type = other RNA
cagagttctacagtccgacg

SEQ ID NO: 18199 - RNA, 20 nt, Synthetic Construct
  source 1..20: mol_type = other RNA
cagagttctacagtccgacg

SEQ ID NO: 18200 - RNA, 21 nt, Synthetic Construct
  source 1..21: mol_type = other RNA
cccataaagtagaaagcacta

SEQ ID NO: 18201 - RNA, 24 nt, Synthetic Construct
  source 1..24: mol_type = other RNA
tgtaaacatcctacactctcagct

SEQ ID NO: 18202 - RNA, 20 nt, Synthetic Construct
  source 1..20: mol_type = other RNA
ccacctcccctgcaaacgtc

SEQ ID NO: 18203 - RNA, 27 nt, Synthetic Construct
  source 1..27: mol_type = other RNA
ccccccgctgctaaatttgactggcta

SEQ ID NO: 18204 - RNA, 27 nt, Synthetic Construct
  source 1..27: mol_type = other RNA
ccccccgctgctaaatttgactggcta

SEQ ID NO: 18205 - RNA, 18 nt, Synthetic Construct
  source 1..18: mol_type = other RNA
cctgtaccgatcaatagt

SEQ ID NO: 18206 - RNA, 22 nt, Synthetic Construct
  source 1..22: mol_type = other RNA
taaggtagtaggttgtatagtt

SEQ ID NO: 18207 - RNA, 21 nt, Synthetic Construct
  source 1..21: mol_type = other RNA
tgaggtagtagattgtataga

SEQ ID NO: 18208 - RNA, 21 nt, Synthetic Construct
  source 1..21: mol_type = other RNA
tgaggtagtagattgtataga

SEQ ID NO: 18209 - RNA, 21 nt, Synthetic Construct
  source 1..21: mol_type = other RNA
tgaggtagtaggctgtatagt

SEQ ID NO: 18210 - RNA, 22 nt, Synthetic Construct
  source 1..22: mol_type = other RNA
tgtggtagtagtttgtgctgtt

SEQ ID NO: 18211 - RNA, 27 nt, Synthetic Construct
  source 1..27: mol_type = other RNA
cgactcttagcggtggatcactcggct

SEQ ID NO: 18212 - RNA, 17 nt, Synthetic Construct
  source 1..17: mol_type = other RNA
accggaggaaggtgggg

SEQ ID NO: 18213 - RNA, 22 nt, Synthetic Construct
  source 1..22: mol_type = other RNA
taactccttaggcgaatctcgc

SEQ ID NO: 18214 - RNA, 20 nt, Synthetic Construct
  source 1..20: mol_type = other RNA
tctctcggctcctcgcggct

SEQ ID NO: 18215 - RNA, 20 nt, Synthetic Construct
  source 1..20: mol_type = other RNA
tctctcggctcctcgcggct

SEQ ID NO: 18216 - RNA, 21 nt, Synthetic Construct
  source 1..21: mol_type = other RNA
agagtaggacgttgccaggtt

SEQ ID NO: 18217 - RNA, 26 nt, Synthetic Construct
  source 1..26: mol_type = other RNA
gacttaccaaacctatgcaaactccg

SEQ ID NO: 18218 - RNA, 32 nt, Synthetic Construct; identical to SEQ ID NO: 2086
  source 1..32: mol_type = other RNA

SEQ ID NO: 18219 - RNA, 22 nt, Synthetic Construct
  source 1..22: mol_type = other RNA
ggcagcattgtacagggctatg

SEQ ID NO: 18220 - RNA, 22 nt, Synthetic Construct
  source 1..22: mol_type = other RNA
ggcagcattgtacagggctatg

SEQ ID NO: 18221 - RNA, 23 nt, Synthetic Construct
  source 1..23: mol_type = other RNA
tgaggtagtaggttgtgtggttc

SEQ ID NO: 18222 - RNA, 22 nt, Synthetic Construct
  source 1..22: mol_type = other RNA
tagcagcacgtacatattggcg

SEQ ID NO: 18223 - RNA, 22 nt, Synthetic Construct
  source 1..22: mol_type = other RNA
tagcagcacgtacatattggcg

SEQ ID NO: 18224 - RNA, 22 nt, Synthetic Construct
  source 1..22: mol_type = other RNA
tctctcggctcctcgcggctct

SEQ ID NO: 18225 - RNA, 22 nt, Synthetic Construct
  source 1..22: mol_type = other RNA
tctctcggctcctcgcggctct

SEQ ID NO: 18226 - RNA, 22 nt, Synthetic Construct
  source 1..22: mol_type = other RNA
aagcagcacgtaaatattggag

SEQ ID NO: 18227 - RNA, 24 nt, Synthetic Construct
  source 1..24: mol_type = other RNA
ctcactgatcgagtcgtcctgcgc

SEQ ID NO: 18228 - RNA, 22 nt, Synthetic Construct
  source 1..22: mol_type = other RNA
aaagtgctgttcgtgcaggtag

SEQ ID NO: 18229 - RNA, 21 nt, Synthetic Construct
  source 1..21: mol_type = other RNA
taactccttagcgaatctcgc

SEQ ID NO: 18230 - RNA, 21 nt, Synthetic Construct
  source 1..21: mol_type = other RNA
taactccttagcgaatctcgc

SEQ ID NO: 18231 - RNA, 21 nt, Synthetic Construct
  source 1..21: mol_type = other RNA
tgaggtagcagattgtatagt

SEQ ID NO: 18232 - RNA, 21 nt, Synthetic Construct
  source 1..21: mol_type = other RNA
tgaggtagtagattgtacagt

SEQ ID NO: 18233 - RNA, 23 nt, Synthetic Construct
  source 1..23: mol_type = other RNA
tgaggggcagagagcgaggcttt

SEQ ID NO: 18234 - RNA, 23 nt, Synthetic Construct
  source 1..23: mol_type = other RNA
tgaggggcagagagcgaggcttt

SEQ ID NO: 18235 - RNA, 35 nt, Synthetic Construct; identical to SEQ ID NO: 1490
  source 1..35: mol_type = other RNA

SEQ ID NO: 18236 - RNA, 35 nt, Synthetic Construct; identical to SEQ ID NO: 1490
  source 1..35: mol_type = other RNA

SEQ ID NO: 18237 - RNA, 23 nt, Synthetic Construct
  source 1..23: mol_type = other RNA
ggcagcattgtacagggctatga

SEQ ID NO: 18238 - RNA, 23 nt, Synthetic Construct
  source 1..23: mol_type = other RNA
ggcagcattgtacagggctatga

SEQ ID NO: 18239 - RNA, 18 nt, Synthetic Construct
  source 1..18: mol_type = other RNA
ggtagcgtggccgagtgg

SEQ ID NO: 18240 - RNA, 15 nt, Synthetic Construct
  source 1..15: mol_type = other RNA
gcaagtcgagcggta

SEQ ID NO: 18241 - RNA, 22 nt, Synthetic Construct
  source 1..22: mol_type = other RNA
cattgcacttgcctcggtctga

SEQ ID NO: 18242 - RNA, 22 nt, Synthetic Construct
  source 1..22: mol_type = other RNA
cattgcacttgcctcggtctga

SEQ ID NO: 18243 - RNA, 23 nt, Synthetic Construct
  source 1..23: mol_type = other RNA
tagcaccatttgaaatcagtgtt

SEQ ID NO: 18244 - RNA, 23 nt, Synthetic Construct
  source 1..23: mol_type = other RNA
tagcaccatttgaaatcagtgtt

SEQ ID NO: 18245 - RNA, 21 nt, Synthetic Construct
  source 1..21: mol_type = other RNA
tgaggtagtaggttgtgtgga

SEQ ID NO: 18246 - RNA, 27 nt, Synthetic Construct
  source 1..27: mol_type = other RNA
ccccccacagctaaatttgactggctt

SEQ ID NO: 18247 - RNA, 22 nt, Synthetic Construct
  source 1..22: mol_type = other RNA
ttcaagtaattcaggataggta

SEQ ID NO: 18248 - RNA, 15 nt, Synthetic Construct
  source 1..15: mol_type = other RNA
tagagtagggcggga

SEQ ID NO: 18249 - RNA, 15 nt, Synthetic Construct
  source 1..15: mol_type = other RNA
tagagtagggcggga

SEQ ID NO: 18250 - RNA, 22 nt, Synthetic Construct
  source 1..22: mol_type = other RNA
tcactgatcgagtcgtcctgcg

SEQ ID NO: 18251 - RNA, 22 nt, Synthetic Construct
  source 1..22: mol_type = other RNA
tcactgatcgagtcgtcctgcg

SEQ ID NO: 18252 - RNA, 22 nt, Synthetic Construct
  source 1..22: mol_type = other RNA
gaagcacattcgcacatcatat

SEQ ID NO: 18253 - RNA, 22 nt, Synthetic Construct
  source 1..22: mol_type = other RNA
gaagcacattcgcacatcatat

SEQ ID NO: 18254 - RNA, 22 nt, Synthetic Construct
  source 1..22: mol_type = other RNA
aacattcaacgctgtcggtgag

SEQ ID NO: 18255 - RNA, 22 nt, Synthetic Construct
  source 1..22: mol_type = other RNA
aacattcaacgctgtcggtgag

SEQ ID NO: 18256 - RNA, 20 nt, Synthetic Construct
  source 1..20: mol_type = other RNA
ggaggtagtaggttgtatag

SEQ ID NO: 18257 - RNA, 24 nt, Synthetic Construct
  source 1..24: mol_type = other RNA
caacggaatcccaaaagcagctgt

SEQ ID NO: 18258 - RNA, 24 nt, Synthetic Construct
  source 1..24: mol_type = other RNA
caacggaatcccaaaagcagctgt

SEQ ID NO: 18259 - RNA, 21 nt, Synthetic Construct
  source 1..21: mol_type = other RNA
taaggtagtaggttgtgtggt

SEQ ID NO: 18260 - RNA, 21 nt, Synthetic Construct
  source 1..21: mol_type = other RNA
taaggtagtaggttgtgtggt

SEQ ID NO: 18261 - RNA, 23 nt, Synthetic Construct
  source 1..23: mol_type = other RNA
caaagagctgttcgtgcaggtag

SEQ ID NO: 18262 - RNA, 23 nt, Synthetic Construct
  source 1..23: mol_type = other RNA
caaagagctgttcgtgcaggtag

SEQ ID NO: 18263 - RNA, 21 nt, Synthetic Construct
  source 1..21: mol_type = other RNA
tggggtagtaggttgtatagt

SEQ ID NO: 18264 - RNA, 21 nt, Synthetic Construct
  source 1..21: mol_type = other RNA
tggggtagtaggttgtatagt

SEQ ID NO: 18265 - RNA, 22 nt, Synthetic Construct
  source 1..22: mol_type = other RNA
aaaccgttaccattactgagtt

SEQ ID NO: 18266 - RNA, 22 nt, Synthetic Construct
  source 1..22: mol_type = other RNA
aaaccgttaccattactgagtt

SEQ ID NO: 18267 - RNA, 18 nt, Synthetic Construct
  source 1..18: mol_type = other RNA
cctgcggaaggatcatta

SEQ ID NO: 18268 - RNA, 24 nt, Synthetic Construct
  source 1..24: mol_type = other RNA
gtcagtttgtcaaataccccaatt

SEQ ID NO: 18269 - RNA, 24 nt, Synthetic Construct
  source 1..24: mol_type = other RNA
gtcagtttgtcaaataccccaatt

SEQ ID NO: 18270 - RNA, 34 nt, Synthetic Construct; identical to SEQ ID NO: 490
  source 1..34: mol_type = other RNA

SEQ ID NO: 18271 - RNA, 34 nt, Synthetic Construct; identical to SEQ ID NO: 490
  source 1..34: mol_type = other RNA

SEQ ID NO: 18272 - RNA, 20 nt, Synthetic Construct
  source 1..20: mol_type = other RNA
cataaagtagaaagcactac

SEQ ID NO: 18273 - RNA, 37 nt, Synthetic Construct; identical to SEQ ID NO: 2482
  source 1..37: mol_type = other RNA

SEQ ID NO: 18274 - RNA, 24 nt, Synthetic Construct
  source 1..24: mol_type = other RNA
caacggaatcccaaaagcagctgc

SEQ ID NO: 18275 - RNA, 22 nt, Synthetic Construct
  source 1..22: mol_type = other RNA
tagcagcacgtagatattggcg

SEQ ID NO: 18276 - RNA, 22 nt, Synthetic Construct
  source 1..22: mol_type = other RNA
cggaatcgctagtaatcgcgga

SEQ ID NO: 18277 - RNA, 21 nt, Synthetic Construct
  source 1..21: mol_type = other RNA
cgtaccgtgagtaatagtgcg

SEQ ID NO: 18278 - RNA, 23 nt, Synthetic Construct
  source 1..23: mol_type = other RNA
tgtcagtttgccaaataccccaa

SEQ ID NO: 18279 - RNA, 22 nt, Synthetic Construct
  source 1..22: mol_type = other RNA
tgagatagtaggttgtatagtt

SEQ ID NO: 18280 - RNA, 22 nt, Synthetic Construct
  source 1..22: mol_type = other RNA
tgagatagtaggttgtatagtt

SEQ ID NO: 18281 - RNA, 24 nt, Synthetic Construct
  source 1..24: mol_type = other RNA
cgactcttagcggtggatcactcg

SEQ ID NO: 18282 - RNA, 24 nt, Synthetic Construct
  source 1..24: mol_type = other RNA
cgactcttagcggtggatcactcg

SEQ ID NO: 18283 - RNA, 22 nt, Synthetic Construct
  source 1..22: mol_type = other RNA
tgagatagtaggttgtgtggtt

SEQ ID NO: 18284 - RNA, 22 nt, Synthetic Construct
  source 1..22: mol_type = other RNA
tgagatagtaggttgtgtggtt

SEQ ID NO: 18285 - RNA, 19 nt, Synthetic Construct
  source 1..19: mol_type = other RNA
cggaagaaggggtgcctgg

SEQ ID NO: 18286 - RNA, 19 nt, Synthetic Construct
  source 1..19: mol_type = other RNA
cggaagaaggggtgcctgg

SEQ ID NO: 18287 - RNA, 22 nt, Synthetic Construct
  source 1..22: mol_type = other RNA
tgaggtagtaggttgtataatt

SEQ ID NO: 18288 - RNA, 19 nt, Synthetic Construct
  source 1..19: mol_type = other RNA
gtacagtactgtgataact

SEQ ID NO: 18289 - RNA, 19 nt, Synthetic Construct
  source 1..19: mol_type = other RNA
gtacagtactgtgataact

SEQ ID NO: 18290 - RNA, 22 nt, Synthetic Construct
  source 1..22: mol_type = other RNA
tgaagtagtagtttgtgctgtt

SEQ ID NO: 18291 - RNA, 21 nt, Synthetic Construct
  source 1..21: mol_type = other RNA
tcaggctcagtcccctcccgt

SEQ ID NO: 18292 - RNA, 21 nt, Synthetic Construct
  source 1..21: mol_type = other RNA
tcaggctcagtcccctcccgt

SEQ ID NO: 18293 - RNA, 22 nt, Synthetic Construct
  source 1..22: mol_type = other RNA
agagaactgaattccatgggtt

SEQ ID NO: 18294 - RNA, 18 nt, Synthetic Construct
  source 1..18: mol_type = other RNA
gtggggagtttggctggg

SEQ ID NO: 18295 - RNA, 24 nt, Synthetic Construct
  source 1..24: mol_type = other RNA
tgtaaacatccccgaccggaagct

SEQ ID NO: 18296 - RNA, 24 nt, Synthetic Construct
  source 1..24: mol_type = other RNA
tgtaaacatccccgaccggaagct

SEQ ID NO: 18297 - RNA, 22 nt, Synthetic Construct
  source 1..22: mol_type = other RNA
catcgggaatgtcgtgtccgcc

SEQ ID NO: 18298 - RNA, 22 nt, Synthetic Construct
  source 1..22: mol_type = other RNA
catcgggaatgtcgtgtccgcc

SEQ ID NO: 18299 - RNA, 27 nt, Synthetic Construct
  source 1..27: mol_type = other RNA
cgcgggtaaacggcgggagtaactatg

SEQ ID NO: 18300 - RNA, 21 nt, Synthetic Construct
  source 1..21: mol_type = other RNA
ctggccctctctgcccttccg

SEQ ID NO: 18301 - RNA, 21 nt, Synthetic Construct
  source 1..21: mol_type = other RNA
ctggccctctctgcccttccg

SEQ ID NO: 18302 - RNA, 17 nt, Synthetic Construct
  source 1..17: mol_type = other RNA
ctgcggaaggatcattg

SEQ ID NO: 18303 - RNA, 17 nt, Synthetic Construct
  source 1..17: mol_type = other RNA
ctgcggaaggatcattg

SEQ ID NO: 18304 - RNA, 28 nt, Synthetic Construct
  source 1..28: mol_type = other RNA
tgttggttcaagcgtgtagtcgtgctct

SEQ ID NO: 18305 - RNA, 28 nt, Synthetic Construct
  source 1..28: mol_type = other RNA
tgttggttcaagcgtgtagtcgtgctct

SEQ ID NO: 18306 - RNA, 33 nt, Synthetic Construct; identical to SEQ ID NO: 2479
  source 1..33: mol_type = other RNA

SEQ ID NO: 18307 - RNA, 33 nt, Synthetic Construct; identical to SEQ ID NO: 2479
  source 1..33: mol_type = other RNA

SEQ ID NO: 18308 - RNA, 23 nt, Synthetic Construct
  source 1..23: mol_type = other RNA
cacccggctgtgtgcacatgtgc

SEQ ID NO: 18309 - RNA, 23 nt, Synthetic Construct
  source 1..23: mol_type = other RNA
cacccggctgtgtgcacatgtgc

SEQ ID NO: 18310 - RNA, 15 nt, Synthetic Construct
  source 1..15: mol_type = other RNA
gcaagtcgagcggta

SEQ ID NO: 18311 - RNA, 15 nt, Synthetic Construct
  source 1..15: mol_type = other RNA
gcaagtcgagcggta

SEQ ID NO: 18312 - RNA, 22 nt, Synthetic Construct
  source 1..22: mol_type = other RNA
tggaatgtaaagaagtatgtaa

SEQ ID NO: 18313 - RNA, 22 nt, Synthetic Construct
  source 1..22: mol_type = other RNA
tggaatgtaaagaagtatgtaa

SEQ ID NO: 18314 - RNA, 24 nt, Synthetic Construct
  source 1..24: mol_type = other RNA
gtctttgttcgattccgttgagta

SEQ ID NO: 18315 - RNA, 24 nt, Synthetic Construct
  source 1..24: mol_type = other RNA
gtctttgttcgattccgttgagta

SEQ ID NO: 18316 - RNA, 20 nt, Synthetic Construct
  source 1..20: mol_type = other RNA
cataaagtagaaagcactac

SEQ ID NO: 18317 - RNA, 20 nt, Synthetic Construct
  source 1..20: mol_type = other RNA
cataaagtagaaagcactac

SEQ ID NO: 18318 - RNA, 36 nt, Synthetic Construct; identical to SEQ ID NO: 6739
  source 1..36: mol_type = other RNA

SEQ ID NO: 18319 - RNA, 36 nt, Synthetic Construct; identical to SEQ ID NO: 6739
  source 1..36: mol_type = other RNA

SEQ ID NO: 18320 - RNA, 37 nt, Synthetic Construct; identical to SEQ ID NO: 2607
  source 1..37: mol_type = other RNA

SEQ ID NO: 18321 - RNA, 19 nt, Synthetic Construct
  source 1..19: mol_type = other RNA
cattattacttttggtacg

SEQ ID NO: 18322 - RNA, 19 nt, Synthetic Construct
  source 1..19: mol_type = other RNA
cattattacttttggtacg

SEQ ID NO: 18323 - RNA, 28 nt, Synthetic Construct
  source 1..28: mol_type = other RNA
gctttacattggactttgaacagatctg

SEQ ID NO: 18324 - RNA, 23 nt, Synthetic Construct
  source 1..23: mol_type = other RNA
tggtaatacgacgtacttaatgt

SEQ ID NO: 18325 - RNA, 23 nt, Synthetic Construct
  source 1..23: mol_type = other RNA
ttggtccccttcaaccagctgta

SEQ ID NO: 18326 - RNA, 22 nt, Synthetic Construct
  source 1..22: mol_type = other RNA
tcagtagctcgaggaaaagaca

SEQ ID NO: 18327 - RNA, 15 nt, Synthetic Construct
  source 1..15: mol_type = other RNA
gtctcgccgacggca

SEQ ID NO: 18328 - RNA, 21 nt, Synthetic Construct
  source 1..21: mol_type = other RNA
tatgtcccacccccactcctg

SEQ ID NO: 18329 - RNA, 22 nt, Synthetic Construct
  source 1..22: mol_type = other RNA
ttgtacatggtaggctttcatt

SEQ ID NO: 18330 - RNA, 22 nt, Synthetic Construct
  source 1..22: mol_type = other RNA
ttgtacatggtaggctttcatt

SEQ ID NO: 18331 - RNA, 34 nt, Synthetic Construct; identical to SEQ ID NO: 1111
  source 1..34: mol_type = other RNA

SEQ ID NO: 18332 - RNA, 23 nt, Synthetic Construct
  source 1..23: mol_type = other RNA
ttatggtttgcctgggactgagt

SEQ ID NO: 18333 - RNA, 36 nt, Synthetic Construct; identical to SEQ ID NO: 2456
  source 1..36: mol_type = other RNA

SEQ ID NO: 18334 - RNA, 18 nt, Synthetic Construct
  source 1..18: mol_type = other RNA
gcagcgatggccgagtgg

SEQ ID NO: 18335 - RNA, 18 nt, Synthetic Construct
  source 1..18: mol_type = other RNA
gcagcgatggccgagtgg

SEQ ID NO: 18336 - RNA, 23 nt, Synthetic Construct
  source 1..23: mol_type = other RNA
aagcttatcagactgatgttgac

SEQ ID NO: 18337 - RNA, 32 nt, Synthetic Construct; identical to SEQ ID NO: 2296
  source 1..32: mol_type = other RNA

SEQ ID NO: 18338 - RNA, 15 nt, Synthetic Construct
  source 1..15: mol_type = other RNA
cggcccagactccta

SEQ ID NO: 18339 - RNA, 16 nt, Synthetic Construct
  source 1..16: mol_type = other RNA
ccctttgtacacaccg

SEQ ID NO: 18340 - RNA, 16 nt, Synthetic Construct
  source 1..16: mol_type = other RNA
ccctttgtacacaccg

SEQ ID NO: 18341 - RNA, 18 nt, Synthetic Construct
  source 1..18: mol_type = other RNA
gggagtatggtcgcaagg

SEQ ID NO: 18342 - RNA, 22 nt, Synthetic Construct
  source 1..22: mol_type = other RNA
cattgcacttgtctcggcctga

SEQ ID NO: 18343 - RNA, 22 nt, Synthetic Construct
  source 1..22: mol_type = other RNA
cattgcacttgtctcggcctga

SEQ ID NO: 18344 - RNA, 35 nt, Synthetic Construct; identical to SEQ ID NO: 757
  source 1..35: mol_type = other RNA

SEQ ID NO: 18345 - RNA, 22 nt, Synthetic Construct
  source 1..22: mol_type = other RNA
tagcagcacgaaaatattggcg

SEQ ID NO: 18346 - RNA, 22 nt, Synthetic Construct
  source 1..22: mol_type = other RNA
tagcagcacgaaaatattggcg

SEQ ID NO: 18347 - RNA, 23 nt, Synthetic Construct
  source 1..23: mol_type = other RNA
tcaggctcagtcccctcccgttt

SEQ ID NO: 18348 - RNA, 23 nt, Synthetic Construct
  source 1..23: mol_type = other RNA
tcaggctcagtcccctcccgttt

SEQ ID NO: 18349 - RNA, 18 nt, Synthetic Construct
  source 1..18: mol_type = other RNA
tcgacgctagcggatcct

SEQ ID NO: 18350 - RNA, 18 nt, Synthetic Construct
  source 1..18: mol_type = other RNA
tcgacgctagcggatcct

SEQ ID NO: 18351 - RNA, 33 nt, Synthetic Construct; identical to SEQ ID NO: 2253
  source 1..33: mol_type = other RNA

SEQ ID NO: 18352 - RNA, 33 nt, Synthetic Construct; identical to SEQ ID NO: 2253
  source 1..33: mol_type = other RNA

SEQ ID NO: 18353 - RNA, 35 nt, Synthetic Construct; identical to SEQ ID NO: 1490
  source 1..35: mol_type = other RNA

SEQ ID NO: 18354 - RNA, 35 nt, Synthetic Construct; identical to SEQ ID NO: 1490
  source 1..35: mol_type = other RNA

SEQ ID NO: 18355 - RNA, 19 nt, Synthetic Construct
  source 1..19: mol_type = other RNA
cgactcttagcggtggatc

SEQ ID NO: 18356 - RNA, 19 nt, Synthetic Construct
  source 1..19: mol_type = other RNA
cgactcttagcggtggatc

SEQ ID NO: 18357 - RNA, 21 nt, Synthetic Construct
  source 1..21: mol_type = other RNA
tgaggtagtagattgtacagt

SEQ ID NO: 18358 - RNA, 23 nt, Synthetic Construct
  source 1..23: mol_type = other RNA
tcccgtactgagctgccccgagt

SEQ ID NO: 18359 - RNA, 18 nt, Synthetic Construct
  source 1..18: mol_type = other RNA
cagcactctgcaaagacg

SEQ ID NO: 18360 - RNA, 18 nt, Synthetic Construct
  source 1..18: mol_type = other RNA
cagcactctgcaaagacg

SEQ ID NO: 18361 - RNA, 23 nt, Synthetic Construct
  source 1..23: mol_type = other RNA
aaaccgttaccattactgagttt

SEQ ID NO: 18362 - RNA, 23 nt, Synthetic Construct
  source 1..23: mol_type = other RNA
aaaccgttaccattactgagttt

SEQ ID NO: 18363 - RNA, 21 nt, Synthetic Construct
  source 1..21: mol_type = other RNA
gcctgtactgagctgccccga

SEQ ID NO: 18364 - RNA, 22 nt, Synthetic Construct
  source 1..22: mol_type = other RNA
tgaggtagtagcttgtgctgtt

SEQ ID NO: 18365 - RNA, 22 nt, Synthetic Construct
  source 1..22: mol_type = other RNA
tgaggtagtagcttgtgctgtt

SEQ ID NO: 18366 - RNA, 28 nt, Synthetic Construct
  source 1..28: mol_type = other RNA
cccccccactgctaaatttgactggctt

SEQ ID NO: 18367 - RNA, 25 nt, Synthetic Construct
  source 1..25: mol_type = other RNA
gaatgttgctcggtgaacccctttt

SEQ ID NO: 18368 - RNA, 25 nt, Synthetic Construct
  source 1..25: mol_type = other RNA
gaatgttgctcggtgaacccctttt

SEQ ID NO: 18369 - RNA, 22 nt, Synthetic Construct
  source 1..22: mol_type = other RNA
taactccttaagcgaatatcgc

SEQ ID NO: 18370 - RNA, 22 nt, Synthetic Construct
  source 1..22: mol_type = other RNA
taactccttaagcgaatatcgc

SEQ ID NO: 18371 - RNA, 24 nt, Synthetic Construct
  source 1..24: mol_type = other RNA
atgacacgatcactcccgttgagt

SEQ ID NO: 18372 - RNA, 15 nt, Synthetic Construct
  source 1..15: mol_type = other RNA
cagagttctacagtc

SEQ ID NO: 18373 - RNA, 15 nt, Synthetic Construct
  source 1..15: mol_type = other RNA
cagagttctacagtc

SEQ ID NO: 18374 - RNA, 21 nt, Synthetic Construct
  source 1..21: mol_type = other RNA
tgaggtagtagattgtataga

SEQ ID NO: 18375 - RNA, 21 nt, Synthetic Construct
  source 1..21: mol_type = other RNA
tgaggtagtagattgtataga

SEQ ID NO: 18376 - RNA, 23 nt, Synthetic Construct
  source 1..23: mol_type = other RNA
tgaggggcagagagcgagactct

SEQ ID NO: 18377 - RNA, 22 nt, Synthetic Construct
  source 1..22: mol_type = other RNA
tgaggtagtaggttatatagtt

SEQ ID NO: 18378 - RNA, 22 nt, Synthetic Construct
  source 1..22: mol_type = other RNA
tgaggtagtaggttatatagtt

SEQ ID NO: 18379 - RNA, 21 nt, Synthetic Construct
  source 1..21: mol_type = other RNA
tcctgtctgaatatgggggga

SEQ ID NO: 18380 - RNA, 21 nt, Synthetic Construct
  source 1..21: mol_type = other RNA
tcctgtctgaatatgggggga

SEQ ID NO: 18381 - RNA, 21 nt, Synthetic Construct
  source 1..21: mol_type = other RNA
tgaggcagtaggttgtatagt

SEQ ID NO: 18382 - RNA, 21 nt, Synthetic Construct
  source 1..21: mol_type = other RNA
tgaggcagtaggttgtatagt

SEQ ID NO: 18383 - RNA, 19 nt, Synthetic Construct
  source 1..19: mol_type = other RNA
tgaggtagtaggttgtgtg

SEQ ID NO: 18384 - RNA, 19 nt, Synthetic Construct
  source 1..19: mol_type = other RNA
tgaggtagtaggttgtgtg

SEQ ID NO: 18385 - RNA, 27 nt, Synthetic Construct
  source 1..27: mol_type = other RNA
gcatgggtggttcagtggtagaattct

SEQ ID NO: 18386 - RNA, 17 nt, Synthetic Construct
  source 1..17: mol_type = other RNA
catgcaagtcgaacggt

SEQ ID NO: 18387 - RNA, 26 nt, Synthetic Construct
  source 1..26: mol_type = other RNA
tgtcggctcatctcatcctggggctg

SEQ ID NO: 18388 - RNA, 26 nt, Synthetic Construct
  source 1..26: mol_type = other RNA
tgtcggctcatctcatcctggggctg

SEQ ID NO: 18389 - RNA, 27 nt, Synthetic Construct
  source 1..27: mol_type = other RNA
ccccccactgctaaatttgactagctt

SEQ ID NO: 18390 - RNA, 21 nt, Synthetic Construct
  source 1..21: mol_type = other RNA
cgaggtagtaggttgtatagt

SEQ ID NO: 18391 - RNA, 22 nt, Synthetic Construct
  source 1..22: mol_type = other RNA
taactccttaagcgaatcccgc

SEQ ID NO: 18392 - RNA, 21 nt, Synthetic Construct
  source 1..21: mol_type = other RNA
cattattacttttggtacgcg

SEQ ID NO: 18393 - RNA, 21 nt, Synthetic Construct
  source 1..21: mol_type = other RNA
cattattacttttggtacgcg

SEQ ID NO: 18394 - RNA, 24 nt, Synthetic Construct
  source 1..24: mol_type = other RNA
tgtgaacatccccgactggaagct

SEQ ID NO: 18395 - RNA, 24 nt, Synthetic Construct
  source 1..24: mol_type = other RNA
tgtgaacatccccgactggaagct

SEQ ID NO: 18396 - RNA, 17 nt, Synthetic Construct
  source 1..17: mol_type = other RNA
tggccgggacagagggc

SEQ ID NO: 18397 - RNA, 20 nt, Synthetic Construct
  source 1..20: mol_type = other RNA
gccatcatttaaagaaagcg

SEQ ID NO: 18398 - RNA, 22 nt, Synthetic Construct
  source 1..22: mol_type = other RNA
tgaggtagtagattgtatggtt

SEQ ID NO: 18399 - RNA, 22 nt, Synthetic Construct
  source 1..22: mol_type = other RNA
tgaggtagtagattgtatggtt

SEQ ID NO: 18400 - RNA, 21 nt, Synthetic Construct
  source 1..21: mol_type = other RNA
ccctgtactgagctgccccga

SEQ ID NO: 18401 - RNA, 21 nt, Synthetic Construct
  source 1..21: mol_type = other RNA
ccctgtactgagctgccccga

SEQ ID NO: 18402 - RNA, 22 nt, Synthetic Construct
  source 1..22: mol_type = other RNA
tcggatccgtctgagcttggct

SEQ ID NO: 18403 - RNA, 22 nt, Synthetic Construct
  source 1..22: mol_type = other RNA
tcgtaccgtgagcaataatgcg

SEQ ID NO: 18404 - RNA, 22 nt, Synthetic Construct
  source 1..22: mol_type = other RNA
tcgtaccgtgagcaataatgcg

SEQ ID NO: 18405 - RNA, 18 nt, Synthetic Construct
  source 1..18: mol_type = other RNA
agggaacgtgagctgggt

SEQ ID NO: 18406 - RNA, 18 nt, Synthetic Construct
  source 1..18: mol_type = other RNA
agggaacgtgagctgggt

SEQ ID NO: 18407 - RNA, 17 nt, Synthetic Construct
  source 1..17: mol_type = other RNA
cctcgcgcgattggagc

SEQ ID NO: 18408 - RNA, 17 nt, Synthetic Construct
  source 1..17: mol_type = other RNA
cctcgcgcgattggagc

SEQ ID NO: 18409 - RNA, 20 nt, Synthetic Construct
  source 1..20: mol_type = other RNA
gtcagtttgtcaaatacccc

SEQ ID NO: 18410 - RNA, 20 nt, Synthetic Construct
  source 1..20: mol_type = other RNA
gtcagtttgtcaaatacccc

SEQ ID NO: 18411 - RNA, 21 nt, Synthetic Construct
  source 1..21: mol_type = other RNA
cgaggtagtaggttgtatagt

SEQ ID NO: 18412 - RNA, 21 nt, Synthetic Construct
  source 1..21: mol_type = other RNA
cgaggtagtaggttgtatagt

SEQ ID NO: 18413 - RNA, 17 nt, Synthetic Construct
  source 1..17: mol_type = other RNA
agacagcaggacggtgg

SEQ ID NO: 18414 - RNA, 17 nt, Synthetic Construct
  source 1..17: mol_type = other RNA
agacagcaggacggtgg

SEQ ID NO: 18415 - RNA, 30 nt, Synthetic Construct; identical to SEQ ID NO: 10539
  source 1..30: mol_type = other RNA

SEQ ID NO: 18416 - RNA, 30 nt, Synthetic Construct; identical to SEQ ID NO: 10539
  source 1..30: mol_type = other RNA

SEQ ID NO: 18417 - RNA, 22 nt, Synthetic Construct
  source 1..22: mol_type = other RNA
tgagatagtagattgtatagtt

SEQ ID NO: 18418 - RNA, 22 nt, Synthetic Construct
  source 1..22: mol_type = other RNA
tgagatagtagattgtatagtt

SEQ ID NO: 18419 - RNA, 22 nt, Synthetic Construct
  source 1..22: mol_type = other RNA
tgaggtagtagtttgtgctgct

SEQ ID NO: 18420 - RNA, 22 nt, Synthetic Construct
  source 1..22: mol_type = other RNA
tgaggtagtagtttgtgctgct

SEQ ID NO: 18421 - RNA, 22 nt, Synthetic Construct
  source 1..22: mol_type = other RNA
tagcaacacgtaaatattggcg

SEQ ID NO: 18422 - RNA, 22 nt, Synthetic Construct
  source 1..22: mol_type = other RNA
tagcaacacgtaaatattggcg

SEQ ID NO: 18423 - RNA, 21 nt, Synthetic Construct
  source 1..21: mol_type = other RNA
tgaggggcagagagcgaggct

SEQ ID NO: 18424 - RNA, 21 nt, Synthetic Construct
  source 1..21: mol_type = other RNA
tgaggggcagagagcgaggct

SEQ ID NO: 18425 - RNA, 32 nt, Synthetic Construct
  source 1..32: mol_type = other RNA
gtttccgtagtgtagtggtcatcacgttcgcc

SEQ ID NO: 18426 - RNA, 24 nt, Synthetic Construct
  source 1..24: mol_type = other RNA
tgtcagtttgtcaaataccccaag

SEQ ID NO: 18427 - RNA, 24 nt, Synthetic Construct
  source 1..24: mol_type = other RNA
tgtcagtttgtcaaataccccaag

SEQ ID NO: 18428 - RNA, 22 nt, Synthetic Construct
  source 1..22: mol_type = other RNA
caactccttaagcgaatctcgc

SEQ ID NO: 18429 - RNA, 24 nt, Synthetic Construct
  source 1..24: mol_type = other RNA
gaaagattaaggcaagaggttagc

SEQ ID NO: 18430 - RNA, 26 nt, Synthetic Construct
  source 1..26: mol_type = other RNA
tgtccccgcgaggggcccggggcggg

SEQ ID NO: 18431 - RNA, 26 nt, Synthetic Construct
  source 1..26: mol_type = other RNA
tgtccccgcgaggggcccggggcggg

SEQ ID NO: 18432 - RNA, 22 nt, Synthetic Construct
  source 1..22: mol_type = other RNA
tgaggtagtagtttgtatagtt

SEQ ID NO: 18433 - RNA, 20 nt, Synthetic Construct
  source 1..20: mol_type = other RNA
tccctgtcctccaggagctc

SEQ ID NO: 18434 - RNA, 20 nt, Synthetic Construct
  source 1..20: mol_type = other RNA
tccctgtcctccaggagctc

SEQ ID NO: 18435 - RNA, 15 nt, Synthetic Construct
  source 1..15: mol_type = other RNA
cagtgaaacgagtca

SEQ ID NO: 18436 - RNA, 15 nt, Synthetic Construct
  source 1..15: mol_type = other RNA
cagtgaaacgagtca

SEQ ID NO: 18437 - RNA, 23 nt, Synthetic Construct
  source 1..23: mol_type = other RNA
tggtaatacaacgtacttagtgt

SEQ ID NO: 18438 - RNA, 23 nt, Synthetic Construct
  source 1..23: mol_type = other RNA
tggtaatacaacgtacttagtgt

SEQ ID NO: 18439 - RNA, 25 nt, Synthetic Construct
  source 1..25: mol_type = other RNA
tgagaactgaattccataggctgtt

SEQ ID NO: 18440 - RNA, 23 nt, Synthetic Construct
  source 1..23: mol_type = other RNA
taggtagtttcctgttgttgggt

SEQ ID NO: 18441 - RNA, 22 nt, Synthetic Construct
  source 1..22: mol_type = other RNA
ttcgagtaattcaggataggtt

SEQ ID NO: 18442 - RNA, 22 nt, Synthetic Construct
  source 1..22: mol_type = other RNA
ttcgagtaattcaggataggtt

SEQ ID NO: 18443 - RNA, 16 nt, Synthetic Construct
  source 1..16: mol_type = other RNA
gtcaacggccatacca

SEQ ID NO: 18444 - RNA, 16 nt, Synthetic Construct
  source 1..16: mol_type = other RNA
tacctggttgatcctg

SEQ ID NO: 18445 - RNA, 16 nt, Synthetic Construct
  source 1..16: mol_type = other RNA
tacctggttgatcctg

SEQ ID NO: 18446 - RNA, 22 nt, Synthetic Construct
  source 1..22: mol_type = other RNA
tattgcacttgttccggcctgt

SEQ ID NO: 18447 - RNA, 22 nt, Synthetic Construct
  source 1..22: mol_type = other RNA
tattgcacttgttccggcctgt

SEQ ID NO: 18448 - RNA, 28 nt, Synthetic Construct
  source 1..28: mol_type = other RNA
ccgtgtgaaagtaggtcatcgtcaggct

SEQ ID NO: 18449 - RNA, 28 nt, Synthetic Construct
  source 1..28: mol_type = other RNA
ccgtgtgaaagtaggtcatcgtcaggct

SEQ ID NO: 18450 - RNA, 23 nt, Synthetic Construct
  source 1..23: mol_type = other RNA
tgaggtagtagattgtatagtta

SEQ ID NO: 18451 - RNA, 22 nt, Synthetic Construct
  source 1..22: mol_type = other RNA
tgaggtagtaggttgtatggta

SEQ ID NO: 18452 - RNA, 22 nt, Synthetic Construct
  source 1..22: mol_type = other RNA
tgaggtagtaggttgtatggta

SEQ ID NO: 18453 - RNA, 21 nt, Synthetic Construct
  source 1..21: mol_type = other RNA
tgtcttgcaggccgtcatgca

SEQ ID NO: 18454 - RNA, 21 nt, Synthetic Construct
  source 1..21: mol_type = other RNA
tgtcttgcaggccgtcatgca

SEQ ID NO: 18455 - RNA, 19 nt, Synthetic Construct
  source 1..19: mol_type = other RNA
aacagtcaggatgttggct

SEQ ID NO: 18456 - RNA, 24 nt, Synthetic Construct
  source 1..24: mol_type = other RNA
tcttggagtaggtcattgggtggt

SEQ ID NO: 18457 - RNA, 15 nt, Synthetic Construct
  source 1..15: mol_type = other RNA
cgagtgacgtagtgt

SEQ ID NO: 18458 - RNA, 22 nt, Synthetic Construct
  source 1..22: mol_type = other RNA
tgtaaacatcctacactctcag

SEQ ID NO: 18459 - RNA, 22 nt, Synthetic Construct
  source 1..22: mol_type = other RNA
tgtaaacatcctacactctcag

SEQ ID NO: 18460 - RNA, 17 nt, Synthetic Construct
  source 1..17: mol_type = other RNA
tctgcctcagcgtcggt

SEQ ID NO: 18461 - RNA, 17 nt, Synthetic Construct
  source 1..17: mol_type = other RNA
tctgcctcagcgtcggt

SEQ ID NO: 18462 - RNA, 23 nt, Synthetic Construct
  source 1..23: mol_type = other RNA
tcccacatggtctagcggttagg

SEQ ID NO: 18463 - RNA, 22 nt, Synthetic Construct
  source 1..22: mol_type = other RNA
tgaggtagtagtttgtgctgtg

SEQ ID NO: 18464 - RNA, 17 nt, Synthetic Construct
  source 1..17: mol_type = other RNA
agtgacgcgcatgaatg

SEQ ID NO: 18465 - RNA, 17 nt, Synthetic Construct
  source 1..17: mol_type = other RNA
agtgacgcgcatgaatg

SEQ ID NO: 18466 - RNA, 21 nt, Synthetic Construct
  source 1..21: mol_type = other RNA
acctgtactgagctgccccga

SEQ ID NO: 18467 - RNA, 31 nt, Synthetic Construct; identical to SEQ ID NO: 9212
  source 1..31: mol_type = other RNA

SEQ ID NO: 18468 - RNA, 31 nt, Synthetic Construct; identical to SEQ ID NO: 9212
  source 1..31: mol_type = other RNA

SEQ ID NO: 18469 - RNA, 22 nt, Synthetic Construct
  source 1..22: mol_type = other RNA
ttataatacaacctgataagtg

SEQ ID NO: 18470 - RNA, 22 nt, Synthetic Construct
  source 1..22: mol_type = other RNA
ttataatacaacctgataagtg

SEQ ID NO: 18471 - RNA, 15 nt, Synthetic Construct
  source 1..15: mol_type = other RNA
cccagaaacccggtc

SEQ ID NO: 18472 - RNA, 15 nt, Synthetic Construct
  source 1..15: mol_type = other RNA
cccagaaacccggtc

SEQ ID NO: 18473 - RNA, 31 nt, Synthetic Construct; identical to SEQ ID NO: 5506
  source 1..31: mol_type = other RNA

SEQ ID NO: 18474 - RNA, 31 nt, Synthetic Construct; identical to SEQ ID NO: 5506
  source 1..31: mol_type = other RNA

SEQ ID NO: 18475 - RNA, 22 nt, Synthetic Construct
  source 1..22: mol_type = other RNA
tagcagcacgtaagtattggcg

SEQ ID NO: 18476 - RNA, 22 nt, Synthetic Construct
  source 1..22: mol_type = other RNA
tagcagcacgtaagtattggcg

SEQ ID NO: 18477 - RNA, 21 nt, Synthetic Construct
  source 1..21: mol_type = other RNA
tggagtgtgacaatggtgtct

SEQ ID NO: 18478 - RNA, 22 nt, Synthetic Construct
  source 1..22: mol_type = other RNA
taaccccttaagcgaatctcgc

SEQ ID NO: 18479 - RNA, 17 nt, Synthetic Construct
  source 1..17: mol_type = other RNA
accaaggggtcgtgggt

SEQ ID NO: 18480 - RNA, 17 nt, Synthetic Construct
  source 1..17: mol_type = other RNA
accaaggggtcgtgggt

SEQ ID NO: 18481 - RNA, 22 nt, Synthetic Construct
  source 1..22: mol_type = other RNA
aacggaatcccaaaagcagctg

SEQ ID NO: 18482 - RNA, 21 nt, Synthetic Construct
  source 1..21: mol_type = other RNA
tggagtgtgacaatggtgctt

SEQ ID NO: 18483 - RNA, 21 nt, Synthetic Construct
  source 1..21: mol_type = other RNA
tggagtgtgacaatggtgctt

SEQ ID NO: 18484 - RNA, 20 nt, Synthetic Construct
  source 1..20: mol_type = other RNA
ttcacagtggctaagttctg

SEQ ID NO: 18485 - RNA, 23 nt, Synthetic Construct
  source 1..23: mol_type = other RNA
tcgaccggacctcgaccggctcg

SEQ ID NO: 18486 - RNA, 23 nt, Synthetic Construct
  source 1..23: mol_type = other RNA
tcgaccggacctcgaccggctcg

SEQ ID NO: 18487 - RNA, 22 nt, Synthetic Construct
  source 1..22: mol_type = other RNA
tgaggtagtagcttgtgctgtt

SEQ ID NO: 18488 - RNA, 26 nt, Synthetic Construct
  source 1..26: mol_type = other RNA
agctacattgtctgctgggtttcttt

SEQ ID NO: 18489 - RNA, 26 nt, Synthetic Construct
  source 1..26: mol_type = other RNA
agctacattgtctgctgggtttcttt

SEQ ID NO: 18490 - RNA, 23 nt, Synthetic Construct
  source 1..23: mol_type = other RNA
tcctgcactgagctgccccgaga

SEQ ID NO: 18491 - RNA, 23 nt, Synthetic Construct
  source 1..23: mol_type = other RNA
tcctgcactgagctgccccgaga

SEQ ID NO: 18492 - RNA, 23 nt, Synthetic Construct
  source 1..23: mol_type = other RNA
tggggtagtaggttgtgtggttt

SEQ ID NO: 18493 - RNA, 26 nt, Synthetic Construct
  source 1..26: mol_type = other RNA
atttccccttggggttgtaggaccac

SEQ ID NO: 18494 - RNA, 23 nt, Synthetic Construct
  source 1..23: mol_type = other RNA
tcctgtactgagctgccacgagt

SEQ ID NO: 18495 - RNA, 23 nt, Synthetic Construct
  source 1..23: mol_type = other RNA
tcctgtactgagctgccacgagt

SEQ ID NO: 18496 - RNA, 22 nt, Synthetic Construct
  source 1..22: mol_type = other RNA
gcactctaatgagactgccggt

SEQ ID NO: 18497 - RNA, 21 nt, Synthetic Construct
  source 1..21: mol_type = other RNA
acacatgcaagtcgaacggta

SEQ ID NO: 18498 - RNA, 21 nt, Synthetic Construct
  source 1..21: mol_type = other RNA
acacatgcaagtcgaacggta

SEQ ID NO: 18499 - RNA, 23 nt, Synthetic Construct
  source 1..23: mol_type = other RNA
tacccattgcatatcggagttgt

SEQ ID NO: 18500 - RNA, 23 nt, Synthetic Construct
  source 1..23: mol_type = other RNA
tacccattgcatatcggagttgt

SEQ ID NO: 18501 - RNA, 22 nt, Synthetic Construct
  source 1..22: mol_type = other RNA
tggctcagttcagcaggaacag

SEQ ID NO: 18502 - RNA, 22 nt, Synthetic Construct
  source 1..22: mol_type = other RNA
tggctcagttcagcaggaacag

SEQ ID NO: 18503 - RNA, 20 nt, Synthetic Construct
  source 1..20: mol_type = other RNA
ccacctcccctgcaaacgtc

SEQ ID NO: 18504 - RNA, 20 nt, Synthetic Construct
  source 1..20: mol_type = other RNA
ccacctcccctgcaaacgtc

SEQ ID NO: 18505 - RNA, 24 nt, Synthetic Construct
  source 1..24: mol_type = other RNA
caacggaatcccaaaagcagctat

SEQ ID NO: 18506 - RNA, 21 nt, Synthetic Construct
  source 1..21: mol_type = other RNA
cataattacttttggtacgcg

SEQ ID NO: 18507 - RNA, 22 nt, Synthetic Construct
  source 1..22: mol_type = other RNA
tattgcgcttgtcccggcctgt

SEQ ID NO: 18508 - RNA, 22 nt, Synthetic Construct
  source 1..22: mol_type = other RNA
tattgcgcttgtcccggcctgt

SEQ ID NO: 18509 - RNA, 29 nt, Synthetic Construct
  source 1..29: mol_type = other RNA
agtaaggtcagctaaataagctatcgggc

SEQ ID NO: 18510 - RNA, 29 nt, Synthetic Construct
  source 1..29: mol_type = other RNA
agtaaggtcagctaaataagctatcgggc

SEQ ID NO: 18511 - RNA, 22 nt, Synthetic Construct
  source 1..22: mol_type = other RNA
taactccttaagcggatctcgc

SEQ ID NO: 18512 - RNA, 22 nt, Synthetic Construct
  source 1..22: mol_type = other RNA
tccccttggggttgtaggacca

SEQ ID NO: 18513 - RNA, 22 nt, Synthetic Construct
  source 1..22: mol_type = other RNA
tccccttggggttgtaggacca

SEQ ID NO: 18514 - RNA, 21 nt, Synthetic Construct
  source 1..21: mol_type = other RNA
agctacattgtctgctgggtt

SEQ ID NO: 18515 - RNA, 22 nt, Synthetic Construct
  source 1..22: mol_type = other RNA
taactccttaagcgagtctcgc

SEQ ID NO: 18516 - RNA, 22 nt, Synthetic Construct
  source 1..22: mol_type = other RNA
taactccttaagcgagtctcgc

SEQ ID NO: 18517 - RNA, 22 nt, Synthetic Construct
  source 1..22: mol_type = other RNA
tcgtaccgtgagcaataatgcg

SEQ ID NO: 18518 - RNA, 24 nt, Synthetic Construct
  source 1..24: mol_type = other RNA
ggtaaacatccccgactggaagct

SEQ ID NO: 18519 - RNA, 27 nt, Synthetic Construct
  source 1..27: mol_type = other RNA
ccccccactgctaaatttgactgactt

SEQ ID NO: 18520 - RNA, 23 nt, Synthetic Construct
  source 1..23: mol_type = other RNA
agcagcattgtacagggctacga

SEQ ID NO: 18521 - RNA, 23 nt, Synthetic Construct
  source 1..23: mol_type = other RNA
agcagcattgtacagggctacga

SEQ ID NO: 18522 - RNA, 24 nt, Synthetic Construct
  source 1..24: mol_type = other RNA
gcagctaataccgcatacgacctg

SEQ ID NO: 18523 - RNA, 22 nt, Synthetic Construct
  source 1..22: mol_type = other RNA
tagcagcacgtaaatattggtg

SEQ ID NO: 18524 - RNA, 22 nt, Synthetic Construct
  source 1..22: mol_type = other RNA
aggaatgtaaagaagtatgtat

SEQ ID NO: 18525 - RNA, 17 nt, Synthetic Construct
  source 1..17: mol_type = other RNA
gcggctgtagctcagtt

SEQ ID NO: 18526 - RNA, 17 nt, Synthetic Construct
  source 1..17: mol_type = other RNA
gcggctgtagctcagtt

SEQ ID NO: 18527 - RNA, 21 nt, Synthetic Construct
  source 1..21: mol_type = other RNA
tcaggctcagtcccctcccga

SEQ ID NO: 18528 - RNA, 22 nt, Synthetic Construct
  source 1..22: mol_type = other RNA
tcgtaccgtgagtaataatgca

SEQ ID NO: 18529 - RNA, 22 nt, Synthetic Construct
  source 1..22: mol_type = other RNA
tcgtaccgtgagtaataatgca

SEQ ID NO: 18530 - RNA, 21 nt, Synthetic Construct
  source 1..21: mol_type = other RNA
caaagtgctgttcgtgcaggt

SEQ ID NO: 18531 - RNA, 20 nt, Synthetic Construct
  source 1..20: mol_type = other RNA
tggagtgtgacaatggtgtt

SEQ ID NO: 18532 - RNA, 20 nt, Synthetic Construct
  source 1..20: mol_type = other RNA
tggagtgtgacaatggtgtt

SEQ ID NO: 18533 - RNA, 23 nt, Synthetic Construct
  source 1..23: mol_type = other RNA
tgaggtagtaggttgtgtagttt

SEQ ID NO: 18534 - RNA, 22 nt, Synthetic Construct
  source 1..22: mol_type = other RNA
tgaggtggtagtttgtgctgtt

SEQ ID NO: 18535 - RNA, 22 nt, Synthetic Construct
  source 1..22: mol_type = other RNA
tgaggtggtagtttgtgctgtt

SEQ ID NO: 18536 - RNA, 22 nt, Synthetic Construct
  source 1..22: mol_type = other RNA
tgaggtagtagatcgtatagtt

SEQ ID NO: 18537 - RNA, 19 nt, Synthetic Construct
  source 1..19: mol_type = other RNA
agtcgacgtatagggtgtg

SEQ ID NO: 18538 - RNA, 21 nt, Synthetic Construct
  source 1..21: mol_type = other RNA
cagtgcaatgttaaaagggca

SEQ ID NO: 18539 - RNA, 21 nt, Synthetic Construct
  source 1..21: mol_type = other RNA
cagtgcaatgttaaaagggca

SEQ ID NO: 18540 - RNA, 18 nt, Synthetic Construct
  source 1..18: mol_type = other RNA
ctaatgagactgccggtg

SEQ ID NO: 18541 - RNA, 19 nt, Synthetic Construct
  source 1..19: mol_type = other RNA
cttggggttgtaggaccac

SEQ ID NO: 18542 - RNA, 19 nt, Synthetic Construct
  source 1..19: mol_type = other RNA
cttggggttgtaggaccac

SEQ ID NO: 18543 - RNA, 24 nt, Synthetic Construct
  source 1..24: mol_type = other RNA
acagtagtctgcacattggttatt

SEQ ID NO: 18544 - RNA, 34 nt, Synthetic Construct; identical to SEQ ID NO: 2367
  source 1..34: mol_type = other RNA

SEQ ID NO: 18545 - RNA, 22 nt, Synthetic Construct
  source 1..22: mol_type = other RNA
tgaggtagtagattgtgtagtt

SEQ ID NO: 18546 - RNA, 22 nt, Synthetic Construct
  source 1..22: mol_type = other RNA
tgaggtagtagattgtgtagtt

SEQ ID NO: 18547 - RNA, 22 nt, Synthetic Construct
  source 1..22: mol_type = other RNA
taaggtagtaggttgtatagtt

SEQ ID NO: 18548 - RNA, 22 nt, Synthetic Construct
  source 1..22: mol_type = other RNA
taaggtagtaggttgtatagtt

SEQ ID NO: 18549 - RNA, 22 nt, Synthetic Construct
  source 1..22: mol_type = other RNA
tgaggtggtaggttgtatagtt

SEQ ID NO: 18550 - RNA, 21 nt, Synthetic Construct
  source 1..21: mol_type = other RNA
ctgacctatgaattgacagcc

SEQ ID NO: 18551 - RNA, 19 nt, Synthetic Construct
  source 1..19: mol_type = other RNA
cgactcttagcggtggatc

SEQ ID NO: 18552 - RNA, 21 nt, Synthetic Construct
  source 1..21: mol_type = other RNA
gtcagtttgtcaaatacccca

SEQ ID NO: 18553 - RNA, 21 nt, Synthetic Construct
  source 1..21: mol_type = other RNA
tcctgtctgaatatgggggga

SEQ ID NO: 18554 - RNA, 21 nt, Synthetic Construct
  source 1..21: mol_type = other RNA
tcctgtctgaatatgggggga

SEQ ID NO: 18555 - RNA, 16 nt, Synthetic Construct
  source 1..16: mol_type = other RNA
agcaagtcgaacggta

SEQ ID NO: 18556 - RNA, 16 nt, Synthetic Construct
  source 1..16: mol_type = other RNA
agcaagtcgaacggta

SEQ ID NO: 18557 - RNA, 23 nt, Synthetic Construct
  source 1..23: mol_type = other RNA
tgaggggcagagagagagacttt

SEQ ID NO: 18558 - RNA, 22 nt, Synthetic Construct
  source 1..22: mol_type = other RNA
tgaggtagtagtctgtgctgtt

SEQ ID NO: 18559 - RNA, 22 nt, Synthetic Construct
  source 1..22: mol_type = other RNA
tgtcaactggttgttgggaggg

SEQ ID NO: 18560 - RNA, 22 nt, Synthetic Construct
  source 1..22: mol_type = other RNA
tgtcaactggttgttgggaggg

SEQ ID NO: 18561 - RNA, 20 nt, Synthetic Construct
  source 1..20: mol_type = other RNA
tgtcagtttgtcaaataccc

SEQ ID NO: 18562 - RNA, 20 nt, Synthetic Construct
  source 1..20: mol_type = other RNA
tgtcagtttgtcaaataccc

SEQ ID NO: 18563 - RNA, 27 nt, Synthetic Construct
  source 1..27: mol_type = other RNA
ccccccactgctaagtttgactggctt

SEQ ID NO: 18564 - RNA, 27 nt, Synthetic Construct
  source 1..27: mol_type = other RNA
ccccccactgctaagtttgactggctt

SEQ ID NO: 18565 - RNA, 22 nt, Synthetic Construct
  source 1..22: mol_type = other RNA
taactccctaagcgaatctcgc

SEQ ID NO: 18566 - RNA, 17 nt, Synthetic Construct
  source 1..17: mol_type = other RNA
agaccctgttgagcttg

SEQ ID NO: 18567 - RNA, 22 nt, Synthetic Construct
  source 1..22: mol_type = other RNA
tgtcagtttgtcaaataccccg

SEQ ID NO: 18568 - RNA, 22 nt, Synthetic Construct
  source 1..22: mol_type = other RNA
tgaggtagtaggttgtgctgtt

SEQ ID NO: 18569 - RNA, 27 nt, Synthetic Construct
  source 1..27: mol_type = other RNA
ccccccacaaccgcgcttgactagctt

SEQ ID NO: 18570 - RNA, 27 nt, Synthetic Construct
  source 1..27: mol_type = other RNA
ccccccacaaccgcgcttgactagctt

SEQ ID NO: 18571 - RNA, 15 nt, Synthetic Construct
  source 1..15: mol_type = other RNA
tcagtagctcgagga

SEQ ID NO: 18572 - RNA, 21 nt, Synthetic Construct
  source 1..21: mol_type = other RNA
tactccttaagcgaatctcgc

SEQ ID NO: 18573 - RNA, 21 nt, Synthetic Construct
  source 1..21: mol_type = other RNA
tactccttaagcgaatctcgc

SEQ ID NO: 18574 - RNA, 23 nt, Synthetic Construct
  source 1..23: mol_type = other RNA
ttccccttggggttgtaggacca

SEQ ID NO: 18575 - RNA, 16 nt, Synthetic Construct
  source 1..16: mol_type = other RNA
gtgacgcgcatgaatg

SEQ ID NO: 18576 - RNA, 17 nt, Synthetic Construct
  source 1..17: mol_type = other RNA
cggcgggagtaactatg

SEQ ID NO: 18577 - RNA, 24 nt, Synthetic Construct
  source 1..24: mol_type = other RNA
aacattcattgctgtcggtgggtt

SEQ ID NO: 18578 - RNA, 22 nt, Synthetic Construct
  source 1..22: mol_type = other RNA
tgaggtagtagattgtgtggtt

SEQ ID NO: 18579 - RNA, 20 nt, Synthetic Construct
  source 1..20: mol_type = other RNA
cgcgacctcagatcagacgt

SEQ ID NO: 18580 - RNA, 20 nt, Synthetic Construct
  source 1..20: mol_type = other RNA
cgcgacctcagatcagacgt

SEQ ID NO: 18581 - RNA, 22 nt, Synthetic Construct
  source 1..22: mol_type = other RNA
gaagttgttcgtggtggattcg

SEQ ID NO: 18582 - RNA, 24 nt, Synthetic Construct
  source 1..24: mol_type = other RNA
tgtaaacatcctacactctcagct

SEQ ID NO: 18583 - RNA, 24 nt, Synthetic Construct
  source 1..24: mol_type = other RNA
tgtaaacatcctacactctcagct

SEQ ID NO: 18584 - RNA, 29 nt, Synthetic Construct
  source 1..29: mol_type = other RNA
cgactcttagcggtggatcactcggctcg

SEQ ID NO: 18585 - RNA, 29 nt, Synthetic Construct
  source 1..29: mol_type = other RNA
cgactcttagcggtggatcactcggctcg

SEQ ID NO: 18586 - RNA, 24 nt, Synthetic Construct
  source 1..24: mol_type = other RNA
tgaggtagtaggttgtgtggtttc

SEQ ID NO: 18587 - RNA, 24 nt, Synthetic Construct
  source 1..24: mol_type = other RNA
tgaggtagtaggttgtgtggtttc

SEQ ID NO: 18588 - RNA, 18 nt, Synthetic Construct
  source 1..18: mol_type = other RNA
ctaatgagactgccggtg

SEQ ID NO: 18589 - RNA, 23 nt, Synthetic Construct
  source 1..23: mol_type = other RNA
agcaacattgtctgctgggtttc

SEQ ID NO: 18590 - RNA, 23 nt, Synthetic Construct
  source 1..23: mol_type = other RNA
agcaacattgtctgctgggtttc

SEQ ID NO: 18591 - RNA, 15 nt, Synthetic Construct
  source 1..15: mol_type = other RNA
cagtgaaacgagtca

SEQ ID NO: 18592 - RNA, 22 nt, Synthetic Construct
  source 1..22: mol_type = other RNA
tgagctagtagtttgtgctgtt

SEQ ID NO: 18593 - RNA, 22 nt, Synthetic Construct
  source 1..22: mol_type = other RNA
tgagctagtagtttgtgctgtt

SEQ ID NO: 18594 - RNA, 32 nt, Synthetic Construct; identical to SEQ ID NO: 1238
  source 1..32: mol_type = other RNA

SEQ ID NO: 18595 - RNA, 32 nt, Synthetic Construct; identical to SEQ ID NO: 1238
  source 1..32: mol_type = other RNA

SEQ ID NO: 18596 - RNA, 20 nt, Synthetic Construct
  source 1..20: mol_type = other RNA
tagcagcacgtaaatattgg

SEQ ID NO: 18597 - RNA, 20 nt, Synthetic Construct
  source 1..20: mol_type = other RNA
tagcagcacgtaaatattgg

SEQ ID NO: 18598 - RNA, 23 nt, Synthetic Construct
  source 1..23: mol_type = other RNA
tcctgtactgagccgccccgagt

SEQ ID NO: 18599 - RNA, 17 nt, Synthetic Construct
  source 1..17: mol_type = other RNA
cccctggacctgtactg

SEQ ID NO: 18600 - RNA, 17 nt, Synthetic Construct
  source 1..17: mol_type = other RNA
cccctggacctgtactg

SEQ ID NO: 18601 - RNA, 22 nt, Synthetic Construct
  source 1..22: mol_type = other RNA
ccccttggggttgtaggaccac

SEQ ID NO: 18602 - RNA, 20 nt, Synthetic Construct
  source 1..20: mol_type = other RNA
aattgcacggtatccatctg

SEQ ID NO: 18603 - RNA, 20 nt, Synthetic Construct
  source 1..20: mol_type = other RNA
aattgcacggtatccatctg

SEQ ID NO: 18604 - RNA, 20 nt, Synthetic Construct
  source 1..20: mol_type = other RNA
cacatgcaagtcgaacggta

SEQ ID NO: 18605 - RNA, 23 nt, Synthetic Construct
  source 1..23: mol_type = other RNA
cgaggggcagagagcgagacttt

SEQ ID NO: 18606 - RNA, 17 nt, Synthetic Construct
  source 1..17: mol_type = other RNA
cgaaattccttgtcggg

SEQ ID NO: 18607 - RNA, 17 nt, Synthetic Construct
  source 1..17: mol_type = other RNA
cgaaattccttgtcggg

SEQ ID NO: 18608 - RNA, 31 nt, Synthetic Construct; identical to SEQ ID NO: 5506
  source 1..31: mol_type = other RNA

SEQ ID NO: 18609 - RNA, 31 nt, Synthetic Construct; identical to SEQ ID NO: 5506
  source 1..31: mol_type = other RNA

SEQ ID NO: 18610 - RNA, 39 nt, Synthetic Construct; identical to SEQ ID NO: 2398
  source 1..39: mol_type = other RNA

SEQ ID NO: 18611 - RNA, 22 nt, Synthetic Construct
  source 1..22: mol_type = other RNA
tgaggtagtagtttgtgctgat

SEQ ID NO: 18612 - RNA, 22 nt, Synthetic Construct
  source 1..22: mol_type = other RNA
tagcagcacgtgaatattggcg

SEQ ID NO: 18613 - RNA, 22 nt, Synthetic Construct
  source 1..22: mol_type = other RNA
tagcagcacgtgaatattggcg

SEQ ID NO: 18614 - RNA, 22 nt, Synthetic Construct
  source 1..22: mol_type = other RNA
tgaggtagtagattgtaaagtt

SEQ ID NO: 18615 - RNA, 22 nt, Synthetic Construct
  source 1..22: mol_type = other RNA
tgaggtagtagattgtaaagtt

SEQ ID NO: 18616 - RNA, 23 nt, Synthetic Construct
  source 1..23: mol_type = other RNA
gcctgtactgagctgccccgaga

SEQ ID NO: 18617 - RNA, 24 nt, Synthetic Construct
  source 1..24: mol_type = other RNA
agcagcattgtacagggctatgag

SEQ ID NO: 18618 - RNA, 25 nt, Synthetic Construct
  source 1..25: mol_type = other RNA
ttgaggatatgagatcgggacgaca

SEQ ID NO: 18619 - RNA, 25 nt, Synthetic Construct
  source 1..25: mol_type = other RNA
ttgaggatatgagatcgggacgaca

SEQ ID NO: 18620 - RNA, 21 nt, Synthetic Construct
  source 1..21: mol_type = other RNA
gtagtgtttcctactttatgg

SEQ ID NO: 18621 - RNA, 22 nt, Synthetic Construct
  source 1..22: mol_type = other RNA
tgaggtaatagtttgtgctgtt

SEQ ID NO: 18622 - RNA, 22 nt, Synthetic Construct
  source 1..22: mol_type = other RNA
tgaggtaatagtttgtgctgtt

SEQ ID NO: 18623 - RNA, 23 nt, Synthetic Construct
  source 1..23: mol_type = other RNA
actcggcgtggcgtcggtcgtgt

SEQ ID NO: 18624 - RNA, 23 nt, Synthetic Construct
  source 1..23: mol_type = other RNA
actcggcgtggcgtcggtcgtgt

SEQ ID NO: 18625 - RNA, 24 nt, Synthetic Construct
  source 1..24: mol_type = other RNA
tagtgcaatattgcttatagggtt

SEQ ID NO: 18626 - RNA, 21 nt, Synthetic Construct
  source 1..21: mol_type = other RNA
tggggggcagagagcgagact

SEQ ID NO: 18627 - RNA, 21 nt, Synthetic Construct
  source 1..21: mol_type = other RNA
tggggggcagagagcgagact

SEQ ID NO: 18628 - RNA, 16 nt, Synthetic Construct
  source 1..16: mol_type = other RNA
gtctatggccatacca

SEQ ID NO: 18629 - RNA, 24 nt, Synthetic Construct
  source 1..24: mol_type = other RNA
tgtaaacatccccgactggaagct

SEQ ID NO: 18630 - RNA, 20 nt, Synthetic Construct
  source 1..20: mol_type = other RNA
aaaccgttaccattactgag

SEQ ID NO: 18631 - RNA, 20 nt, Synthetic Construct
  source 1..20: mol_type = other RNA
aaaccgttaccattactgag

SEQ ID NO: 18632 - RNA, 24 nt, Synthetic Construct
  source 1..24: mol_type = other RNA
tgcaaacatccccgactggaagct

SEQ ID NO: 18633 - RNA, 24 nt, Synthetic Construct
  source 1..24: mol_type = other RNA
tgcaaacatccccgactggaagct

SEQ ID NO: 18634 - RNA, 20 nt, Synthetic Construct
  source 1..20: mol_type = other RNA
cccttggggttgtaggacca

SEQ ID NO: 18635 - RNA, 20 nt, Synthetic Construct
  source 1..20: mol_type = other RNA
cccttggggttgtaggacca

SEQ ID NO: 18636 - RNA, 28 nt, Synthetic Construct
  source 1..28: mol_type = other RNA
ccccccactgctaaatttgactggcctt

SEQ ID NO: 18637 - RNA, 28 nt, Synthetic Construct
  source 1..28: mol_type = other RNA
ccccccactgctaaatttgactggcctt

SEQ ID NO: 18638 - RNA, 25 nt, Synthetic Construct
  source 1..25: mol_type = other RNA
atgaggatatgagatcgagacgaca

SEQ ID NO: 18639 - RNA, 23 nt, Synthetic Construct
  source 1..23: mol_type = other RNA
tcctgcactgagctgccccgaga

SEQ ID NO: 18640 - RNA, 23 nt, Synthetic Construct
  source 1..23: mol_type = other RNA
tcctgcactgagctgccccgaga

SEQ ID NO: 18641 - RNA, 22 nt, Synthetic Construct
  source 1..22: mol_type = other RNA
atcctgtactgagctgccccga

SEQ ID NO: 18642 - RNA, 22 nt, Synthetic Construct
  source 1..22: mol_type = other RNA
atcctgtactgagctgccccga

SEQ ID NO: 18643 - RNA, 21 nt, Synthetic Construct
  source 1..21: mol_type = other RNA
agaggggcagagagcgagact

SEQ ID NO: 18644 - RNA, 21 nt, Synthetic Construct
  source 1..21: mol_type = other RNA
agaggggcagagagcgagact

SEQ ID NO: 18645 - RNA, 29 nt, Synthetic Construct
  source 1..29: mol_type = other RNA
gtgcatgcactctggggttgtgggacagc

SEQ ID NO: 18646 - RNA, 15 nt, Synthetic Construct
  source 1..15: mol_type = other RNA
tgcctcagcgtcggt

SEQ ID NO: 18647 - RNA, 15 nt, Synthetic Construct
  source 1..15: mol_type = other RNA
tgcctcagcgtcggt

SEQ ID NO: 18648 - RNA, 22 nt, Synthetic Construct
  source 1..22: mol_type = other RNA
tcaaatcccggacgagccccca

SEQ ID NO: 18649 - RNA, 22 nt, Synthetic Construct
  source 1..22: mol_type = other RNA
tcaaatcccggacgagccccca

SEQ ID NO: 18650 - RNA, 18 nt, Synthetic Construct
  source 1..18: mol_type = other RNA
cgcgacctcagatcagac

SEQ ID NO: 18651 - RNA, 18 nt, Synthetic Construct
  source 1..18: mol_type = other RNA
cgcgacctcagatcagac

SEQ ID NO: 18652 - RNA, 26 nt, Synthetic Construct
  source 1..26: mol_type = other RNA
gcgggcgtagctcaggggtagagcgc

SEQ ID NO: 18653 - RNA, 27 nt, Synthetic Construct
  source 1..27: mol_type = other RNA
ctccccactgctaaatttgactggctt

SEQ ID NO: 18654 - RNA, 22 nt, Synthetic Construct
  source 1..22: mol_type = other RNA
tgaggtagtaggtcgtatagtt

SEQ ID NO: 18655 - RNA, 32 nt, Synthetic Construct; identical to SEQ ID NO: 734
  source 1..32: mol_type = other RNA

SEQ ID NO: 18656 - RNA, 25 nt, Synthetic Construct
  source 1..25: mol_type = other RNA
gaatgttgctcggtgaacccctttt

SEQ ID NO: 18657 - RNA, 25 nt, Synthetic Construct
  source 1..25: mol_type = other RNA
gaatgttgctcggtgaacccctttt

SEQ ID NO: 18658 - RNA, 22 nt, Synthetic Construct
  source 1..22: mol_type = other RNA
tgaggtagtaagttgtatagtt

SEQ ID NO: 18659 - RNA, 18 nt, Synthetic Construct
  source 1..18: mol_type = other RNA
ccaaggggtcgtgggttc

SEQ ID NO: 18660 - RNA, 18 nt, Synthetic Construct
  source 1..18: mol_type = other RNA
ccaaggggtcgtgggttc

SEQ ID NO: 18661 - RNA, 18 nt, Synthetic Construct
  source 1..18: mol_type = other RNA
gcgaaattccttgtcggg

SEQ ID NO: 18662 - RNA, 23 nt, Synthetic Construct
  source 1..23: mol_type = other RNA
tcctgtactgagttgccccgaga

SEQ ID NO: 18663 - RNA, 22 nt, Synthetic Construct
  source 1..22: mol_type = other RNA
ctatacgacctgctgcctttct

SEQ ID NO: 18664 - RNA, 22 nt, Synthetic Construct
  source 1..22: mol_type = other RNA
ctatacgacctgctgcctttct

SEQ ID NO: 18665 - RNA, 16 nt, Synthetic Construct
  source 1..16: mol_type = other RNA
ctgcctcagcgtcggt

SEQ ID NO: 18666 - RNA, 16 nt, Synthetic Construct
  source 1..16: mol_type = other RNA
ctgcctcagcgtcggt

SEQ ID NO: 18667 - RNA, 22 nt, Synthetic Construct
  source 1..22: mol_type = other RNA
tgaggtagtaggttgtatagct

SEQ ID NO: 18668 - RNA, 21 nt, Synthetic Construct
  source 1..21: mol_type = other RNA
tggggggcagagagcgagact

SEQ ID NO: 18669 - RNA, 25 nt, Synthetic Construct
  source 1..25: mol_type = other RNA
tctaattagtgacgcgcatgaatgg

SEQ ID NO: 18670 - RNA, 25 nt, Synthetic Construct
  source 1..25: mol_type = other RNA
tctaattagtgacgcgcatgaatgg

SEQ ID NO: 18671 - RNA, 18 nt, Synthetic Construct
  source 1..18: mol_type = other RNA
ctaatgagactgccggtg

SEQ ID NO: 18672 - RNA, 18 nt, Synthetic Construct
  source 1..18: mol_type = other RNA
ctaatgagactgccggtg

SEQ ID NO: 18673 - RNA, 39 nt, Synthetic Construct; identical to SEQ ID NO: 759
  source 1..39: mol_type = other RNA

SEQ ID NO: 18674 - RNA, 18 nt, Synthetic Construct
  source 1..18: mol_type = other RNA
cctcgcgcgattggagcg

SEQ ID NO: 18675 - RNA, 18 nt, Synthetic Construct
  source 1..18: mol_type = other RNA
cctcgcgcgattggagcg

SEQ ID NO: 18676 - RNA, 17 nt, Synthetic Construct
  source 1..17: mol_type = other RNA
gggataactggcttgtg

SEQ ID NO: 18677 - RNA, 17 nt, Synthetic Construct
  source 1..17: mol_type = other RNA
gggataactggcttgtg

SEQ ID NO: 18678 - RNA, 22 nt, Synthetic Construct
  source 1..22: mol_type = other RNA
tcagtgcactacagagctttgt

SEQ ID NO: 18679 - RNA, 31 nt, Synthetic Construct; identical to SEQ ID NO: 14087
  source 1..31: mol_type = other RNA

SEQ ID NO: 18680 - RNA, 17 nt, Synthetic Construct
  source 1..17: mol_type = other RNA
aggaattgacggaaggg

SEQ ID NO: 18681 - RNA, 17 nt, Synthetic Construct
  source 1..17: mol_type = other RNA
aggaattgacggaaggg

SEQ ID NO: 18682 - RNA, 21 nt, Synthetic Construct
  source 1..21: mol_type = other RNA
tgaggtagtagattgtgtagt

SEQ ID NO: 18683 - RNA, 23 nt, Synthetic Construct
  source 1..23: mol_type = other RNA
tgaggtagtaggttgtatggtta

SEQ ID NO: 18684 - RNA, 23 nt, Synthetic Construct
  source 1..23: mol_type = other RNA
tacagtagtctgcacattggttt

SEQ ID NO: 18685 - RNA, 23 nt, Synthetic Construct
  source 1..23: mol_type = other RNA
tacagtagtctgcacattggttt

SEQ ID NO: 18686 - RNA, 22 nt, Synthetic Construct
  source 1..22: mol_type = other RNA
tattgcatttgtcccggcctgt

SEQ ID NO: 18687 - RNA, 22 nt, Synthetic Construct
  source 1..22: mol_type = other RNA
tattgcatttgtcccggcctgt

SEQ ID NO: 18688 - RNA, 23 nt, Synthetic Construct
  source 1..23: mol_type = other RNA
tgaggtagtaggttgtatggttt

SEQ ID NO: 18689 - RNA, 23 nt, Synthetic Construct
  source 1..23: mol_type = other RNA
tgaggtagtaggttgtatggttt

SEQ ID NO: 18690 - RNA, 25 nt, Synthetic Construct
  source 1..25: mol_type = other RNA
tgtaaacatccttgactggaagctt

SEQ ID NO: 18691 - RNA, 22 nt, Synthetic Construct
  source 1..22: mol_type = other RNA
tgaggtagtaggtcgtgtggtt

SEQ ID NO: 18692 - RNA, 22 nt, Synthetic Construct
  source 1..22: mol_type = other RNA
tgaggtagtagactgtatagtt

SEQ ID NO: 18693 - RNA, 22 nt, Synthetic Construct
  source 1..22: mol_type = other RNA
tgaggtagtagactgtatagtt

SEQ ID NO: 18694 - RNA, 22 nt, Synthetic Construct
  source 1..22: mol_type = other RNA
ttcaagtaacccaggataggct

SEQ ID NO: 18695 - RNA, 20 nt, Synthetic Construct
  source 1..20: mol_type = other RNA
gtacagtactgtgataactg

SEQ ID NO: 18696 - RNA, 20 nt, Synthetic Construct
  source 1..20: mol_type = other RNA
aaaccgttaccattactgag

SEQ ID NO: 18697 - RNA, 20 nt, Synthetic Construct
  source 1..20: mol_type = other RNA
aaaccgttaccattactgag

SEQ ID NO: 18698 - RNA, 22 nt, Synthetic Construct
  source 1..22: mol_type = other RNA
tgagaactgaattccatgggta

SEQ ID NO: 18699 - RNA, 22 nt, Synthetic Construct
  source 1..22: mol_type = other RNA
tcgtaccgtaagtaataatgcg

SEQ ID NO: 18700 - RNA, 23 nt, Synthetic Construct
  source 1..23: mol_type = other RNA
agcagcattgtacggggctatga

SEQ ID NO: 18701 - RNA, 23 nt, Synthetic Construct
  source 1..23: mol_type = other RNA
agcagcattgtacggggctatga

SEQ ID NO: 18702 - RNA, 17 nt, Synthetic Construct
  source 1..17: mol_type = other RNA
tcccggacgagccccca

SEQ ID NO: 18703 - RNA, 17 nt, Synthetic Construct
  source 1..17: mol_type = other RNA
tcccggacgagccccca

SEQ ID NO: 18704 - RNA, 21 nt, Synthetic Construct
  source 1..21: mol_type = other RNA
tgaggcagtaggttgtgtggt

SEQ ID NO: 18705 - RNA, 21 nt, Synthetic Construct
  source 1..21: mol_type = other RNA
tgaggcagtaggttgtgtggt

SEQ ID NO: 18706 - RNA, 22 nt, Synthetic Construct
  source 1..22: mol_type = other RNA
aggaatgtaaagaagtatgtat

SEQ ID NO: 18707 - RNA, 22 nt, Synthetic Construct
  source 1..22: mol_type = other RNA
aggaatgtaaagaagtatgtat

SEQ ID NO: 18708 - RNA, 25 nt, Synthetic Construct
  source 1..25: mol_type = other RNA
ggtaaaatagctgagtgaagcattg

SEQ ID NO: 18709 - RNA, 22 nt, Synthetic Construct
  source 1..22: mol_type = other RNA
ngaggtagtaggttgtgtggtt

SEQ ID NO: 18710 - RNA, 22 nt, Synthetic Construct
  source 1..22: mol_type = other RNA
ngaggtagtaggttgtgtggtt

SEQ ID NO: 18711 - RNA, 23 nt, Synthetic Construct
  source 1..23: mol_type = other RNA
cgtgtatttgacaagctgagttg

SEQ ID NO: 18712 - RNA, 23 nt, Synthetic Construct
  source 1..23: mol_type = other RNA
cgtgtatttgacaagctgagttg

SEQ ID NO: 18713 - RNA, 20 nt, Synthetic Construct
  source 1..20: mol_type = other RNA
tgaggtagtaggttgcatag

SEQ ID NO: 18714 - RNA, 20 nt, Synthetic Construct
  source 1..20: mol_type = other RNA
tgaggtagtaggttgcatag

SEQ ID NO: 18715 - RNA, 22 nt, Synthetic Construct
  source 1..22: mol_type = other RNA
tgaggtagtagattgtgtagtt

SEQ ID NO: 18716 - RNA, 22 nt, Synthetic Construct
  source 1..22: mol_type = other RNA
tgaggtagtaggttgcatagtt

SEQ ID NO: 18717 - RNA, 22 nt, Synthetic Construct
  source 1..22: mol_type = other RNA
tgaggtagcaggttgtatagtt

SEQ ID NO: 18718 - RNA, 21 nt, Synthetic Construct
  source 1..21: mol_type = other RNA
tcctgtgctgagctgccccga

SEQ ID NO: 18719 - RNA, 21 nt, Synthetic Construct
  source 1..21: mol_type = other RNA
tcctgtgctgagctgccccga

SEQ ID NO: 18720 - RNA, 28 nt, Synthetic Construct
  source 1..28: mol_type = other RNA
tgttggttcaagcgtgtagtcgtgctct

SEQ ID NO: 18721 - RNA, 28 nt, Synthetic Construct
  source 1..28: mol_type = other RNA
ggatttccccttggggttgtaggaccac

SEQ ID NO: 18722 - RNA, 28 nt, Synthetic Construct
  source 1..28: mol_type = other RNA
ggatttccccttggggttgtaggaccac

SEQ ID NO: 18723 - RNA, 16 nt, Synthetic Construct
  source 1..16: mol_type = other RNA
gtcaacggccatacca

SEQ ID NO: 18724 - RNA, 22 nt, Synthetic Construct
  source 1..22: mol_type = other RNA
gcactctaatgagactgccggt

SEQ ID NO: 18725 - RNA, 22 nt, Synthetic Construct
  source 1..22: mol_type = other RNA
gcactctaatgagactgccggt

SEQ ID NO: 18726 - RNA, 19 nt, Synthetic Construct
  source 1..19: mol_type = other RNA
gcccagtgctctgaatgtc

SEQ ID NO: 18727 - RNA, 19 nt, Synthetic Construct
  source 1..19: mol_type = other RNA
gcccagtgctctgaatgtc

SEQ ID NO: 18728 - RNA, 35 nt, Synthetic Construct; identical to SEQ ID NO: 2397
  source 1..35: mol_type = other RNA

SEQ ID NO: 18729 - RNA, 23 nt, Synthetic Construct
  source 1..23: mol_type = other RNA
agcaggacggtggccatggaagt

SEQ ID NO: 18730 - RNA, 23 nt, Synthetic Construct
  source 1..23: mol_type = other RNA
agcaggacggtggccatggaagt

SEQ ID NO: 18731 - RNA, 22 nt, Synthetic Construct
  source 1..22: mol_type = other RNA
tacagtagtctgcacattggtt

SEQ ID NO: 18732 - RNA, 18 nt, Synthetic Construct
  source 1..18: mol_type = other RNA
atcccacttctgacacca

SEQ ID NO: 18733 - RNA, 18 nt, Synthetic Construct
  source 1..18: mol_type = other RNA
atcccacttctgacacca

SEQ ID NO: 18734 - RNA, 21 nt, Synthetic Construct
  source 1..21: mol_type = other RNA
tgaggtagcagattgtatagt

SEQ ID NO: 18735 - RNA, 22 nt, Synthetic Construct
  source 1..22: mol_type = other RNA
tcgtaccgtgagcaataatgcg

SEQ ID NO: 18736 - RNA, 22 nt, Synthetic Construct
  source 1..22: mol_type = other RNA
tcgtaccgtgagcaataatgcg

SEQ ID NO: 18737 - RNA, 16 nt, Synthetic Construct
  source 1..16: mol_type = other RNA
gactacggccatacca

SEQ ID NO: 18738 - RNA, 16 nt, Synthetic Construct
  source 1..16: mol_type = other RNA
gactacggccatacca

SEQ ID NO: 18739 - RNA, 16 nt, Synthetic Construct
  source 1..16: mol_type = other RNA
gggtctgtagctcagt

SEQ ID NO: 18740 - RNA, 22 nt, Synthetic Construct
  source 1..22: mol_type = other RNA
gaaaagctgggttgagagggcg

SEQ ID NO: 18741 - RNA, 22 nt, Synthetic Construct
  source 1..22: mol_type = other RNA
gaaaagctgggttgagagggcg

SEQ ID NO: 18742 - RNA, 23 nt, Synthetic Construct
  source 1..23: mol_type = other RNA
tacagtactgtgataactgaaga

SEQ ID NO: 18743 - RNA, 23 nt, Synthetic Construct
  source 1..23: mol_type = other RNA
tacagtactgtgataactgaaga

SEQ ID NO: 18744 - RNA, 18 nt, Synthetic Construct
  source 1..18: mol_type = other RNA
cattcttgcgacccgggt

SEQ ID NO: 18745 - RNA, 18 nt, Synthetic Construct
  source 1..18: mol_type = other RNA
cattcttgcgacccgggt

SEQ ID NO: 18746 - RNA, 22 nt, Synthetic Construct
  source 1..22: mol_type = other RNA
gcacattacacggtcgacctct

SEQ ID NO: 18747 - RNA, 22 nt, Synthetic Construct
  source 1..22: mol_type = other RNA
gcacattacacggtcgacctct

SEQ ID NO: 18748 - RNA, 18 nt, Synthetic Construct
  source 1..18: mol_type = other RNA
cctgtaccgatcaatagt

SEQ ID NO: 18749 - RNA, 18 nt, Synthetic Construct
  source 1..18: mol_type = other RNA
cctgtaccgatcaatagt

SEQ ID NO: 18750 - RNA, 22 nt, Synthetic Construct
  source 1..22: mol_type = other RNA
gaaaagctgggttgagagggcg

SEQ ID NO: 18751 - RNA, 22 nt, Synthetic Construct
  source 1..22: mol_type = other RNA
gaaaagctgggttgagagggcg

SEQ ID NO: 18752 - RNA, 22 nt, Synthetic Construct
  source 1..22: mol_type = other RNA
tagcagcacgtaaatattggcg

SEQ ID NO: 18753 - RNA, 22 nt, Synthetic Construct
  source 1..22: mol_type = other RNA
tagcagcacgtaaatattggcg

SEQ ID NO: 18754 - RNA, 22 nt, Synthetic Construct
  source 1..22: mol_type = other RNA
actggacttggagtcagaaggc

SEQ ID NO: 18755 - RNA, 22 nt, Synthetic Construct
  source 1..22: mol_type = other RNA
actggacttggagtcagaaggc

SEQ ID NO: 18756 - RNA, 21 nt, Synthetic Construct
  source 1..21: mol_type = other RNA
atcacattgccagggatttcc

SEQ ID NO: 18757 - RNA, 23 nt, Synthetic Construct
  source 1..23: mol_type = other RNA
agggctgggtcggtcgggctggg

SEQ ID NO: 18758 - RNA, 23 nt, Synthetic Construct
  source 1..23: mol_type = other RNA
agggctgggtcggtcgggctggg

SEQ ID NO: 18759 - RNA, 27 nt, Synthetic Construct
  source 1..27: mol_type = other RNA
cccctcactgctaaatttgactggctt

SEQ ID NO: 18760 - RNA, 16 nt, Synthetic Construct
  source 1..16: mol_type = other RNA
tgcacgaaagcgtggg

SEQ ID NO: 18761 - RNA, 16 nt, Synthetic Construct
  source 1..16: mol_type = other RNA
cccaaaggtcgtcggt

SEQ ID NO: 18762 - RNA, 16 nt, Synthetic Construct
  source 1..16: mol_type = other RNA
cccaaaggtcgtcggt

SEQ ID NO: 18763 - RNA, 20 nt, Synthetic Construct
  source 1..20: mol_type = other RNA
agcagcattgtacagggcta

SEQ ID NO: 18764 - RNA, 22 nt, Synthetic Construct
  source 1..22: mol_type = other RNA
agctcggtctgaggcccctcag

SEQ ID NO: 18765 - RNA, 22 nt, Synthetic Construct
  source 1..22: mol_type = other RNA
agctcggtctgaggcccctcag

SEQ ID NO: 18766 - RNA, 18 nt, Synthetic Construct
  source 1..18: mol_type = other RNA
tctaatgagactgccggt

SEQ ID NO: 18767 - RNA, 22 nt, Synthetic Construct
  source 1..22: mol_type = other RNA
tgaagtagtaggttgtatagtt

SEQ ID NO: 18768 - RNA, 30 nt, Synthetic Construct; identical to SEQ ID NO: 11302
  source 1..30: mol_type = other RNA

SEQ ID NO: 18769 - RNA, 39 nt, Synthetic Construct
  source 1..39: mol_type = other RNA
tcggaatccgctaaggagtgtgtaacaactcacctgccg

SEQ ID NO: 18770 - RNA, 23 nt, Synthetic Construct
  source 1..23: mol_type = other RNA
tgaggtagtaggttgtatggttt

SEQ ID NO: 18771 - RNA, 37 nt, Synthetic Construct; identical to SEQ ID NO: 2365
  source 1..37: mol_type = other RNA

SEQ ID NO: 18772 - RNA, 23 nt, Synthetic Construct
  source 1..23: mol_type = other RNA
tgaggtagtaggttgtgtggttg

SEQ ID NO: 18773 - RNA, 23 nt, Synthetic Construct
  source 1..23: mol_type = other RNA
tgaggtagtaggttgtgtggttg

SEQ ID NO: 18774 - RNA, 22 nt, Synthetic Construct
  source 1..22: mol_type = other RNA
tatgtcccacccccactcctgt

SEQ ID NO: 18775 - RNA, 23 nt, Synthetic Construct
  source 1..23: mol_type = other RNA
tcgaggagctcacagtctagtaa

SEQ ID NO: 18776 - RNA, 23 nt, Synthetic Construct
  source 1..23: mol_type = other RNA
tcgaggagctcacagtctagtaa

SEQ ID NO: 18777 - RNA, 21 nt, Synthetic Construct
  source 1..21: mol_type = other RNA
taaggtagtaggttgtgtggt

SEQ ID NO: 18778 - RNA, 41 nt, Synthetic Construct; identical to SEQ ID NO: 1667
  source 1..41: mol_type = other RNA

SEQ ID NO: 18779 - RNA, 41 nt, Synthetic Construct; identical to SEQ ID NO: 1667
  source 1..41: mol_type = other RNA

SEQ ID NO: 18780 - RNA, 19 nt, Synthetic Construct
  source 1..19: mol_type = other RNA
tagcttatcagactgatgt

SEQ ID NO: 18781 - RNA, 19 nt, Synthetic Construct
  source 1..19: mol_type = other RNA
tagcttatcagactgatgt

SEQ ID NO: 18782 - RNA, 21 nt, Synthetic Construct
  source 1..21: mol_type = other RNA
taactccttagcgaatctcgc

SEQ ID NO: 18783 - RNA, 21 nt, Synthetic Construct
  source 1..21: mol_type = other RNA
taactccttagcgaatctcgc

SEQ ID NO: 18784 - RNA, 16 nt, Synthetic Construct
  source 1..16: mol_type = other RNA
tgcaagtcgaacggta

SEQ ID NO: 18785 - RNA, 16 nt, Synthetic Construct
  source 1..16: mol_type = other RNA
tgcaagtcgaacggta

SEQ ID NO: 18786 - RNA, 21 nt, Synthetic Construct
  source 1..21: mol_type = other RNA
tggagagaaaggcagttcctg

SEQ ID NO: 18787 - RNA, 21 nt, Synthetic Construct
  source 1..21: mol_type = other RNA
tggagagaaaggcagttcctg

SEQ ID NO: 18788 - RNA, 22 nt, Synthetic Construct
  source 1..22: mol_type = other RNA
aagcatatcgagcctgagaaca

SEQ ID NO: 18789 - RNA, 22 nt, Synthetic Construct
  source 1..22: mol_type = other RNA
aagcatatcgagcctgagaaca

SEQ ID NO: 18790 - RNA, 20 nt, Synthetic Construct
  source 1..20: mol_type = other RNA
tagcgaaattccttgtcggg

SEQ ID NO: 18791 - RNA, 22 nt, Synthetic Construct
  source 1..22: mol_type = other RNA
tagcagcacgtaaacattggcg

SEQ ID NO: 18792 - RNA, 16 nt, Synthetic Construct
  source 1..16: mol_type = other RNA
tcgtgacgatagtgca

SEQ ID NO: 18793 - RNA, 31 nt, Synthetic Construct; identical to SEQ ID NO: 2295
  source 1..31: mol_type = other RNA

SEQ ID NO: 18794 - RNA, 31 nt, Synthetic Construct; identical to SEQ ID NO: 2295
  source 1..31: mol_type = other RNA

SEQ ID NO: 18795 - RNA, 22 nt, Synthetic Construct
  source 1..22: mol_type = other RNA
tcctgtactgagctgtcccgag

SEQ ID NO: 18796 - RNA, 22 nt, Synthetic Construct
  source 1..22: mol_type = other RNA
tcctgtactgagctgtcccgag

SEQ ID NO: 18797 - RNA, 22 nt, Synthetic Construct
  source 1..22: mol_type = other RNA
gcactctaatgagactgccggt

SEQ ID NO: 18798 - RNA, 22 nt, Synthetic Construct
  source 1..22: mol_type = other RNA
gaaaagctgggttgagagggcg

SEQ ID NO: 18799 - RNA, 22 nt, Synthetic Construct
  source 1..22: mol_type = other RNA
gaaaagctgggttgagagggcg

SEQ ID NO: 18800 - RNA, 23 nt, Synthetic Construct
  source 1..23: mol_type = other RNA
aagcagcacgtaaatattggcgt

SEQ ID NO: 18801 - RNA, 20 nt, Synthetic Construct
  source 1..20: mol_type = other RNA
caacggaatcccaaaagcag

SEQ ID NO: 18802 - RNA, 20 nt, Synthetic Construct
  source 1..20: mol_type = other RNA
caacggaatcccaaaagcag

SEQ ID NO: 18803 - RNA, 17 nt, Synthetic Construct
  source 1..17: mol_type = other RNA
gggtctgtagctcagtc

SEQ ID NO: 18804 - RNA, 17 nt, Synthetic Construct
  source 1..17: mol_type = other RNA
gggtctgtagctcagtc

SEQ ID NO: 18805 - RNA, 22 nt, Synthetic Construct
  source 1..22: mol_type = other RNA
tcgtaccgtgggtaataatgcg

SEQ ID NO: 18806 - RNA, 22 nt, Synthetic Construct
  source 1..22: mol_type = other RNA
gagagtaggacgttgccaggtt

SEQ ID NO: 18807 - RNA, 22 nt, Synthetic Construct
  source 1..22: mol_type = other RNA
gagagtaggacgttgccaggtt

SEQ ID NO: 18808 - RNA, 19 nt, Synthetic Construct
  source 1..19: mol_type = other RNA
tttgttcgttcggctcgcg

SEQ ID NO: 18809 - RNA, 19 nt, Synthetic Construct
  source 1..19: mol_type = other RNA
tttgttcgttcggctcgcg

SEQ ID NO: 18810 - RNA, 36 nt, Synthetic Construct; identical to SEQ ID NO: 10982
  source 1..36: mol_type = other RNA

SEQ ID NO: 18811 - RNA, 22 nt, Synthetic Construct
  source 1..22: mol_type = other RNA
tcgtaccgtgagtaataaagcg

SEQ ID NO: 18812 - RNA, 22 nt, Synthetic Construct
  source 1..22: mol_type = other RNA
tcgtaccgtgagtaataaagcg

SEQ ID NO: 18813 - RNA, 27 nt, Synthetic Construct
  source 1..27: mol_type = other RNA
ccccccactgctaaatttgtctggctt

SEQ ID NO: 18814 - RNA, 27 nt, Synthetic Construct
  source 1..27: mol_type = other RNA
ccccccactgctaaatttgtctggctt

SEQ ID NO: 18815 - RNA, 22 nt, Synthetic Construct
  source 1..22: mol_type = other RNA
tattgcacctgtcccggcctgt

SEQ ID NO: 18816 - RNA, 23 nt, Synthetic Construct
  source 1..23: mol_type = other RNA
tgaggtagtaggttgtgtggtat

SEQ ID NO: 18817 - RNA, 27 nt, Synthetic Construct
  source 1..27: mol_type = other RNA
gcattggtggttcagtggtagaattct

SEQ ID NO: 18818 - RNA, 20 nt, Synthetic Construct
  source 1..20: mol_type = other RNA
caaagaattctccttttggg

SEQ ID NO: 18819 - RNA, 23 nt, Synthetic Construct
  source 1..23: mol_type = other RNA
agcagcattgtacagggctatgg

SEQ ID NO: 18820 - RNA, 23 nt, Synthetic Construct
  source 1..23: mol_type = other RNA
agcagcattgtacagggctatgg

SEQ ID NO: 18821 - RNA, 17 nt, Synthetic Construct
  source 1..17: mol_type = other RNA
tcccagaaacccggtcg

SEQ ID NO: 18822 - RNA, 21 nt, Synthetic Construct
  source 1..21: mol_type = other RNA
caaagaattctccttttgggc

SEQ ID NO: 18823 - RNA, 21 nt, Synthetic Construct
  source 1..21: mol_type = other RNA
caaagaattctccttttgggc

SEQ ID NO: 18824 - RNA, 21 nt, Synthetic Construct
  source 1..21: mol_type = other RNA
acagtagcctgcacattggtt

SEQ ID NO: 18825 - RNA, 21 nt, Synthetic Construct
  source 1..21: mol_type = other RNA
acagtagcctgcacattggtt

SEQ ID NO: 18826 - RNA, 22 nt, Synthetic Construct
  source 1..22: mol_type = other RNA
tgaggtagtagtttgcgctgtt

SEQ ID NO: 18827 - RNA, 31 nt, Synthetic Construct; identical to SEQ ID NO: 2295
  source 1..31: mol_type = other RNA

SEQ ID NO: 18828 - RNA, 22 nt, Synthetic Construct
  source 1..22: mol_type = other RNA
tgaggtagcagtttgtgctgtt

SEQ ID NO: 18829 - RNA, 27 nt, Synthetic Construct
  source 1..27: mol_type = other RNA
ccccccactgctaaattcgactggctt

SEQ ID NO: 18830 - RNA, 27 nt, Synthetic Construct
  source 1..27: mol_type = other RNA
ccccccactgctaaattcgactggctt

SEQ ID NO: 18831 - RNA, 15 nt, Synthetic Construct
  source 1..15: mol_type = other RNA
catgccgcgtgcggg

SEQ ID NO: 18832 - RNA, 23 nt, Synthetic Construct
  source 1..23: mol_type = other RNA
tgaggggcagagagcgggacttt

SEQ ID NO: 18833 - RNA, 23 nt, Synthetic Construct
  source 1..23: mol_type = other RNA
tgaggtaggaggttgtatagttg

SEQ ID NO: 18834 - RNA, 36 nt, Synthetic Construct; identical to SEQ ID NO: 3596
  source 1..36: mol_type = other RNA

SEQ ID NO: 18835 - RNA, 36 nt, Synthetic Construct; identical to SEQ ID NO: 3596
  source 1..36: mol_type = other RNA

SEQ ID NO: 18836 - RNA, 22 nt, Synthetic Construct
  source 1..22: mol_type = other RNA
tgaggtagtagtttgtgctgct

SEQ ID NO: 18837 - RNA, 22 nt, Synthetic Construct
  source 1..22: mol_type = other RNA
tgaggtagtagtttgtgctgct

SEQ ID NO: 18838 - RNA, 22 nt, Synthetic Construct
  source 1..22: mol_type = other RNA
actggacttggagtcagaagga

SEQ ID NO: 18839 - RNA, 22 nt, Synthetic Construct
  source 1..22: mol_type = other RNA
actggacttggagtcagaagga

SEQ ID NO: 18840 - RNA, 16 nt, Synthetic Construct
  source 1..16: mol_type = other RNA
gtctacggccatacaa

SEQ ID NO: 18841 - RNA, 31 nt, Synthetic Construct; identical to SEQ ID NO: 2263
  source 1..31: mol_type = other RNA

SEQ ID NO: 18842 - RNA, 23 nt, Synthetic Construct
  source 1..23: mol_type = other RNA
caaagtgctgtttgtgcaggtag

SEQ ID NO: 18843 - RNA, 22 nt, Synthetic Construct
  source 1..22: mol_type = other RNA
tcaagagcaataacgaaaaatg

SEQ ID NO: 18844 - RNA, 16 nt, Synthetic Construct
  source 1..16: mol_type = other RNA
gtctgcggccatacca

SEQ ID NO: 18845 - RNA, 20 nt, Synthetic Construct
  source 1..20: mol_type = other RNA
caaagaattctccttttggg

SEQ ID NO: 18846 - RNA, 20 nt, Synthetic Construct
  source 1..20: mol_type = other RNA
caaagaattctccttttggg

SEQ ID NO: 18847 - RNA, 23 nt, Synthetic Construct
  source 1..23: mol_type = other RNA
tgaggggcagagagcgagacttt

SEQ ID NO: 18848 - RNA, 22 nt, Synthetic Construct
  source 1..22: mol_type = other RNA
accacagggtagaaccacggaa

SEQ ID NO: 18849 - RNA, 22 nt, Synthetic Construct
  source 1..22: mol_type = other RNA
accacagggtagaaccacggaa

SEQ ID NO: 18850 - RNA, 26 nt, Synthetic Construct
  source 1..26: mol_type = other RNA
tgtaaacatccttgactggaagcttt

SEQ ID NO: 18851 - RNA, 35 nt, Synthetic Construct; identical to SEQ ID NO: 2452
  source 1..35: mol_type = other RNA

SEQ ID NO: 18852 - RNA, 35 nt, Synthetic Construct; identical to SEQ ID NO: 2452
  source 1..35: mol_type = other RNA

SEQ ID NO: 18853 - RNA, 24 nt, Synthetic Construct
  source 1..24: mol_type = other RNA
tcctgtactgagctgccccgagat

SEQ ID NO: 18854 - RNA, 24 nt, Synthetic Construct
  source 1..24: mol_type = other RNA
tcctgtactgagctgccccgagat

SEQ ID NO: 18855 - RNA, 22 nt, Synthetic Construct
  source 1..22: mol_type = other RNA
ctcggcgtggcgtcggtcgtgt

SEQ ID NO: 18856 - RNA, 22 nt, Synthetic Construct
  source 1..22: mol_type = other RNA
ctcggcgtggcgtcggtcgtgt

SEQ ID NO: 18857 - RNA, 23 nt, Synthetic Construct
  source 1..23: mol_type = other RNA
tggtaatacgacgtactttgtgt

SEQ ID NO: 18858 - RNA, 23 nt, Synthetic Construct
  source 1..23: mol_type = other RNA
tggtaatacgacgtactttgtgt

SEQ ID NO: 18859 - RNA, 24 nt, Synthetic Construct
  source 1..24: mol_type = other RNA
caacggaatcccaaaagcagctga

SEQ ID NO: 18860 - RNA, 24 nt, Synthetic Construct
  source 1..24: mol_type = other RNA
caacggaatcccaaaagcagctga

SEQ ID NO: 18861 - RNA, 22 nt, Synthetic Construct
  source 1..22: mol_type = other RNA
ttcaagtaattcaggataggct

SEQ ID NO: 18862 - RNA, 22 nt, Synthetic Construct
  source 1..22: mol_type = other RNA
ttcaagtaattcaggataggct

SEQ ID NO: 18863 - RNA, 21 nt, Synthetic Construct
  source 1..21: mol_type = other RNA
ggagtatgcagagcaagatca

SEQ ID NO: 18864 - RNA, 21 nt, Synthetic Construct
  source 1..21: mol_type = other RNA
ggagtatgcagagcaagatca

SEQ ID NO: 18865 - RNA, 21 nt, Synthetic Construct
  source 1..21: mol_type = other RNA
tgaggaagtaggttgtatagt

SEQ ID NO: 18866 - RNA, 44 nt, Synthetic Construct; identical to SEQ ID NO: 6685
  source 1..44: mol_type = other RNA

SEQ ID NO: 18867 - RNA, 44 nt, Synthetic Construct; identical to SEQ ID NO: 6685
  source 1..44: mol_type = other RNA

SEQ ID NO: 18868 - RNA, 23 nt, Synthetic Construct
  source 1..23: mol_type = other RNA
cccagtgttcagactacctgttc

SEQ ID NO: 18869 - RNA, 21 nt, Synthetic Construct
  source 1..21: mol_type = other RNA
tgaggtagcagattgtatagt

SEQ ID NO: 18870 - RNA, 21 nt, Synthetic Construct
  source 1..21: mol_type = other RNA
tgaggtagcagattgtatagt

SEQ ID NO: 18871 - RNA, 15 nt, Synthetic Construct
  source 1..15: mol_type = other RNA
tccggatcgtagtct

SEQ ID NO: 18872 - RNA, 22 nt, Synthetic Construct
  source 1..22: mol_type = other RNA
tgaggcagtaggttgtgtggtt

SEQ ID NO: 18873 - RNA, 22 nt, Synthetic Construct
  source 1..22: mol_type = other RNA
tgaggcagtaggttgtgtggtt

SEQ ID NO: 18874 - RNA, 20 nt, Synthetic Construct
  source 1..20: mol_type = other RNA
tcctgtctgaatatgggggg

SEQ ID NO: 18875 - RNA, 27 nt, Synthetic Construct
  source 1..27: mol_type = other RNA
catgcgagagtaggacgttgccaggtt

SEQ ID NO: 18876 - RNA, 27 nt, Synthetic Construct
  source 1..27: mol_type = other RNA
catgcgagagtaggacgttgccaggtt

SEQ ID NO: 18877 - RNA, 22 nt, Synthetic Construct
  source 1..22: mol_type = other RNA
tcgtaccgtgagtaacaatgcg

SEQ ID NO: 18878 - RNA, 22 nt, Synthetic Construct
  source 1..22: mol_type = other RNA
tcgtaccgtgagtaacaatgcg

SEQ ID NO: 18879 - RNA, 19 nt, Synthetic Construct
  source 1..19: mol_type = other RNA
aaccgggcggaaacaccat

SEQ ID NO: 18880 - RNA, 35 nt, Synthetic Construct; identical to SEQ ID NO: 2514
  source 1..35: mol_type = other RNA

SEQ ID NO: 18881 - RNA, 35 nt, Synthetic Construct; identical to SEQ ID NO: 2514
  source 1..35: mol_type = other RNA

SEQ ID NO: 18882 - RNA, 21 nt, Synthetic Construct
  source 1..21: mol_type = other RNA
taaacggcgggagtaactatg

SEQ ID NO: 18883 - RNA, 21 nt, Synthetic Construct
  source 1..21: mol_type = other RNA
taaacggcgggagtaactatg

SEQ ID NO: 18884 - RNA, 16 nt, Synthetic Construct
  source 1..16: mol_type = other RNA
gtctgcggccatacca

SEQ ID NO: 18885 - RNA, 16 nt, Synthetic Construct
  source 1..16: mol_type = other RNA
gtctgcggccatacca

SEQ ID NO: 18886 - RNA, 23 nt, Synthetic Construct
  source 1..23: mol_type = other RNA
atgacacgatcactcccgttgag

SEQ ID NO: 18887 - RNA, 23 nt, Synthetic Construct
  source 1..23: mol_type = other RNA
atgacacgatcactcccgttgag

SEQ ID NO: 18888 - RNA, 21 nt, Synthetic Construct
  source 1..21: mol_type = other RNA
ctagaccgaagctccttgagg

SEQ ID NO: 18889 - RNA, 21 nt, Synthetic Construct
  source 1..21: mol_type = other RNA
ttataatacaacctgataagt

SEQ ID NO: 18890 - RNA, 23 nt, Synthetic Construct
  source 1..23: mol_type = other RNA
tcttggagtaggtcattgggtgg

SEQ ID NO: 18891 - RNA, 19 nt, Synthetic Construct
  source 1..19: mol_type = other RNA
aacggcgggagtaactatg

SEQ ID NO: 18892 - RNA, 19 nt, Synthetic Construct
  source 1..19: mol_type = other RNA
aaaagctgggttgagaggg

SEQ ID NO: 18893 - RNA, 19 nt, Synthetic Construct
  source 1..19: mol_type = other RNA
aaaagctgggttgagaggg

SEQ ID NO: 18894 - RNA, 22 nt, Synthetic Construct
  source 1..22: mol_type = other RNA
aacccgtagatccgatcttgtg

SEQ ID NO: 18895 - RNA, 22 nt, Synthetic Construct
  source 1..22: mol_type = other RNA
aacccgtagatccgatcttgtg

SEQ ID NO: 18896 - RNA, 22 nt, Synthetic Construct
  source 1..22: mol_type = other RNA
tccaagtaattcaggataggtt

SEQ ID NO: 18897 - RNA, 22 nt, Synthetic Construct
  source 1..22: mol_type = other RNA
tccaagtaattcaggataggtt

SEQ ID NO: 18898 - RNA, 23 nt, Synthetic Construct
  source 1..23: mol_type = other RNA
tgaggtagtaggttgcgtggttt

SEQ ID NO: 18899 - RNA, 22 nt, Synthetic Construct
  source 1..22: mol_type = other RNA
tgaggtagtagatcgtatagtt

SEQ ID NO: 18900 - RNA, 22 nt, Synthetic Construct
  source 1..22: mol_type = other RNA
tgaggtagtagatcgtatagtt

SEQ ID NO: 18901 - RNA, 39 nt, Synthetic Construct; identical to SEQ ID NO: 804
  source 1..39: mol_type = other RNA

SEQ ID NO: 18902 - RNA, 34 nt, Synthetic Construct; identical to SEQ ID NO: 2186
  source 1..34: mol_type = other RNA

SEQ ID NO: 18903 - RNA, 22 nt, Synthetic Construct
  source 1..22: mol_type = other RNA
tgaggactgaattccatgggtt

SEQ ID NO: 18904 - RNA, 22 nt, Synthetic Construct
  source 1..22: mol_type = other RNA
tattgcacttgtctcggcctgt

SEQ ID NO: 18905 - RNA, 21 nt, Synthetic Construct
  source 1..21: mol_type = other RNA
gtagtgtttcctactttatgg

SEQ ID NO: 18906 - RNA, 25 nt, Synthetic Construct
  source 1..25: mol_type = other RNA
ttgaggatatgagatcgggacgaca

SEQ ID NO: 18907 - RNA, 23 nt, Synthetic Construct
  source 1..23: mol_type = other RNA
tctcacacagaaatcgcacccgt

SEQ ID NO: 18908 - RNA, 22 nt, Synthetic Construct
  source 1..22: mol_type = other RNA
aggaatgtaaagaagtatgtat

SEQ ID NO: 18909 - RNA, 22 nt, Synthetic Construct
  source 1..22: mol_type = other RNA
aggaatgtaaagaagtatgtat

SEQ ID NO: 18910 - RNA, 21 nt, Synthetic Construct
  source 1..21: mol_type = other RNA
ggaatcgctagtaatcgcgga

SEQ ID NO: 18911 - RNA, 21 nt, Synthetic Construct
  source 1..21: mol_type = other RNA
ggaatcgctagtaatcgcgga

SEQ ID NO: 18912 - RNA, 23 nt, Synthetic Construct
  source 1..23: mol_type = other RNA
tggtaatacgacgtacttagtga

SEQ ID NO: 18913 - RNA, 17 nt, Synthetic Construct
  source 1..17: mol_type = other RNA
tcagtagctcgaggaaa

SEQ ID NO: 18914 - RNA, 27 nt, Synthetic Construct
  source 1..27: mol_type = other RNA
ccgtgtgaaagtaggtcatcgtcaggc

SEQ ID NO: 18915 - RNA, 22 nt, Synthetic Construct
  source 1..22: mol_type = other RNA
aaccagcacgtaaatattggcg

SEQ ID NO: 18916 - RNA, 22 nt, Synthetic Construct
  source 1..22: mol_type = other RNA
tgaggtagtagtttgtgctgct

SEQ ID NO: 18917 - RNA, 22 nt, Synthetic Construct
  source 1..22: mol_type = other RNA
tgaggtagtagtttgtgctgct

SEQ ID NO: 18918 - RNA, 21 nt, Synthetic Construct
  source 1..21: mol_type = other RNA
taactccttaagcgaactcgc

SEQ ID NO: 18919 - RNA, 22 nt, Synthetic Construct
  source 1..22: mol_type = other RNA
tgaggtagtagattatatagtt

SEQ ID NO: 18920 - RNA, 21 nt, Synthetic Construct
  source 1..21: mol_type = other RNA
cgtaccgtgagtaatgatgcg

SEQ ID NO: 18921 - RNA, 23 nt, Synthetic Construct
  source 1..23: mol_type = other RNA
aacggaatcccaaaagcagctgt

SEQ ID NO: 18922 - RNA, 23 nt, Synthetic Construct
  source 1..23: mol_type = other RNA
aacggaatcccaaaagcagctgt

SEQ ID NO: 18923 - RNA, 22 nt, Synthetic Construct
  source 1..22: mol_type = other RNA
acagtagtctgcacattggttt

SEQ ID NO: 18924 - RNA, 22 nt, Synthetic Construct
  source 1..22: mol_type = other RNA
acagtagtctgcacattggttt

SEQ ID NO: 18925 - RNA, 21 nt, Synthetic Construct
  source 1..21: mol_type = other RNA
taaggtagtaggttgtatagt

SEQ ID NO: 18926 - RNA, 27 nt, Synthetic Construct
  source 1..27: mol_type = other RNA
ccccccaccgctaaatttgactggctt

SEQ ID NO: 18927 - RNA, 27 nt, Synthetic Construct
  source 1..27: mol_type = other RNA
ccccccaccgctaaatttgactggctt

SEQ ID NO: 18928 - RNA, 17 nt, Synthetic Construct
  source 1..17: mol_type = other RNA
tggccgtcgtcagctcg

SEQ ID NO: 18929 - RNA, 20 nt, Synthetic Construct
  source 1..20: mol_type = other RNA
ccgcagagtacagcttggga

SEQ ID NO: 18930 - RNA, 24 nt, Synthetic Construct
  source 1..24: mol_type = other RNA
gaggtgtagaataggtgggagctt

SEQ ID NO: 18931 - RNA, 24 nt, Synthetic Construct
  source 1..24: mol_type = other RNA
gaggtgtagaataggtgggagctt

SEQ ID NO: 18932 - RNA, 27 nt, Synthetic Construct
  source 1..27: mol_type = other RNA
gcattggtggttcagtggtagaattct

SEQ ID NO: 18933 - RNA, 18 nt, Synthetic Construct
  source 1..18: mol_type = other RNA
cataaagtagaaagcact

SEQ ID NO: 18934 - RNA, 23 nt, Synthetic Construct
  source 1..23: mol_type = other RNA
tcctgtaccgagctgccccgagt

SEQ ID NO: 18935 - RNA, 23 nt, Synthetic Construct
  source 1..23: mol_type = other RNA
tcctgtaccgagctgccccgagt

SEQ ID NO: 18936 - RNA, 22 nt, Synthetic Construct
  source 1..22: mol_type = other RNA
cgtaccgtgagtaataatgcgt

SEQ ID NO: 18937 - RNA, 22 nt, Synthetic Construct
  source 1..22: mol_type = other RNA
cgtaccgtgagtaataatgcgt

SEQ ID NO: 18938 - RNA, 24 nt, Synthetic Construct
  source 1..24: mol_type = other RNA
gggttgtaaaccgcttttgtcagg

SEQ ID NO: 18939 - RNA, 23 nt, Synthetic Construct
  source 1..23: mol_type = other RNA
cctccctcgggagggcgcgcggg

SEQ ID NO: 18940 - RNA, 23 nt, Synthetic Construct
  source 1..23: mol_type = other RNA
cattgcacttgtctcggtctgaa

SEQ ID NO: 18941 - RNA, 36 nt, Synthetic Construct; identical to SEQ ID NO: 2456
  source 1..36: mol_type = other RNA

SEQ ID NO: 18942 - RNA, 36 nt, Synthetic Construct; identical to SEQ ID NO: 2456
  source 1..36: mol_type = other RNA

SEQ ID NO: 18943 - RNA, 26 nt, Synthetic Construct
  source 1..26: mol_type = other RNA
gatttccccttggggttgtaggacca

SEQ ID NO: 18944 - RNA, 24 nt, Synthetic Construct
  source 1..24: mol_type = other RNA
agcagcattgtacagggctatgag

SEQ ID NO: 18945 - RNA, 21 nt, Synthetic Construct
  source 1..21: mol_type = other RNA
tgaggtagtagattgtatggt

SEQ ID NO: 18946 - RNA, 21 nt, Synthetic Construct
  source 1..21: mol_type = other RNA
tgaggtagtagattgtatggt

SEQ ID NO: 18947 - RNA, 21 nt, Synthetic Construct
  source 1..21: mol_type = other RNA
tgaggtagtaggttgtataga

SEQ ID NO: 18948 - RNA, 21 nt, Synthetic Construct
  source 1..21: mol_type = other RNA
tgaggtagtaggttgtataga

SEQ ID NO: 18949 - RNA, 21 nt, Synthetic Construct
  source 1..21: mol_type = other RNA
cattattacttttggtacgcg

SEQ ID NO: 18950 - RNA, 21 nt, Synthetic Construct
  source 1..21: mol_type = other RNA
cattattacttttggtacgcg

SEQ ID NO: 18951 - RNA, 23 nt, Synthetic Construct
  source 1..23: mol_type = other RNA
caaagtgttgttcgtgcaggtag

SEQ ID NO: 18952 - RNA, 23 nt, Synthetic Construct
  source 1..23: mol_type = other RNA
caaagtgttgttcgtgcaggtag

SEQ ID NO: 18953 - RNA, 18 nt, Synthetic Construct
  source 1..18: mol_type = other RNA
atggccgttcttagttgg

SEQ ID NO: 18954 - RNA, 18 nt, Synthetic Construct
  source 1..18: mol_type = other RNA
atggccgttcttagttgg

SEQ ID NO: 18955 - RNA, 20 nt, Synthetic Construct
  source 1..20: mol_type = other RNA
tgaggtagtgggttgtatag

SEQ ID NO: 18956 - RNA, 20 nt, Synthetic Construct
  source 1..20: mol_type = other RNA
tgaggtagtgggttgtatag

SEQ ID NO: 18957 - RNA, 22 nt, Synthetic Construct
  source 1..22: mol_type = other RNA
tgaggtagtgggttgtatagtt

SEQ ID NO: 18958 - RNA, 30 nt, Synthetic Construct; identical to SEQ ID NO: 2407
  source 1..30: mol_type = other RNA

SEQ ID NO: 18959 - RNA, 21 nt, Synthetic Construct
  source 1..21: mol_type = other RNA
ctttgttcgattccgttgagt

SEQ ID NO: 18960 - RNA, 43 nt, Synthetic Construct; identical to SEQ ID NO: 725
  source 1..43: mol_type = other RNA

SEQ ID NO: 18961 - RNA, 22 nt, Synthetic Construct
  source 1..22: mol_type = other RNA
tgaggtagtggattgtatagtt

SEQ ID NO: 18962 - RNA, 22 nt, Synthetic Construct
  source 1..22: mol_type = other RNA
tgaggtagtggattgtatagtt

SEQ ID NO: 18963 - RNA, 22 nt, Synthetic Construct
  source 1..22: mol_type = other RNA
tgaggtagtagattgtataatt

SEQ ID NO: 18964 - RNA, 22 nt, Synthetic Construct
  source 1..22: mol_type = other RNA
tgaggtagtagattgtataatt

SEQ ID NO: 18965 - RNA, 20 nt, Synthetic Construct
  source 1..20: mol_type = other RNA
tattgcactcgtcccggcct

SEQ ID NO: 18966 - RNA, 23 nt, Synthetic Construct
  source 1..23: mol_type = other RNA
tgaggtaggaggttgtatagttg

SEQ ID NO: 18967 - RNA, 22 nt, Synthetic Construct
  source 1..22: mol_type = other RNA
taactcctcaagcgaatctcgc

SEQ ID NO: 18968 - RNA, 22 nt, Synthetic Construct
  source 1..22: mol_type = other RNA
tgaggtagtaggttgtgtggtt

SEQ ID NO: 18969 - RNA, 22 nt, Synthetic Construct
  source 1..22: mol_type = other RNA
acctgtactgagctgccccgag

SEQ ID NO: 18970 - RNA, 21 nt, Synthetic Construct
  source 1..21: mol_type = other RNA
tgaggtagtagattgcatagt

SEQ ID NO: 18971 - RNA, 21 nt, Synthetic Construct
  source 1..21: mol_type = other RNA
tgaggtagtagattgcatagt

SEQ ID NO: 18972 - RNA, 23 nt, Synthetic Construct
  source 1..23: mol_type = other RNA
caaagcgctgttcgtgcaggtag

SEQ ID NO: 18973 - RNA, 23 nt, Synthetic Construct
  source 1..23: mol_type = other RNA
caaagcgctgttcgtgcaggtag

SEQ ID NO: 18974 - RNA, 22 nt, Synthetic Construct
  source 1..22: mol_type = other RNA
taaggtagtaggttgtgtggtt

SEQ ID NO: 18975 - RNA, 16 nt, Synthetic Construct
  source 1..16: mol_type = other RNA
tacctggttgatcctg

SEQ ID NO: 18976 - RNA, 16 nt, Synthetic Construct
  source 1..16: mol_type = other RNA
tacctggttgatcctg

SEQ ID NO: 18977 - RNA, 15 nt, Synthetic Construct
  source 1..15: mol_type = other RNA
cccagaaacccggtc

SEQ ID NO: 18978 - RNA, 15 nt, Synthetic Construct
  source 1..15: mol_type = other RNA
cccagaaacccggtc

SEQ ID NO: 18979 - RNA, 28 nt, Synthetic Construct
  source 1..28: mol_type = other RNA
ccccccactgctaaatttgactggcctt

SEQ ID NO: 18980 - RNA, 28 nt, Synthetic Construct
  source 1..28: mol_type = other RNA
ccccccactgctaaatttgactggcctt

SEQ ID NO: 18981 - RNA, 23 nt, Synthetic Construct
  source 1..23: mol_type = other RNA
ttggtccccttcaaccagctgta

SEQ ID NO: 18982 - RNA, 23 nt, Synthetic Construct
  source 1..23: mol_type = other RNA
ttggtccccttcaaccagctgta

SEQ ID NO: 18983 - RNA, 21 nt, Synthetic Construct
  source 1..21: mol_type = other RNA
tgaggtagtagtttgtgccgt

SEQ ID NO: 18984 - RNA, 21 nt, Synthetic Construct
  source 1..21: mol_type = other RNA
tgaggtagtagtttgtgccgt

SEQ ID NO: 18985 - RNA, 20 nt, Synthetic Construct
  source 1..20: mol_type = other RNA
tgtcttgcaggccgtcatgc

SEQ ID NO: 18986 - RNA, 20 nt, Synthetic Construct
  source 1..20: mol_type = other RNA
tgtcttgcaggccgtcatgc

SEQ ID NO: 18987 - RNA, 20 nt, Synthetic Construct
  source 1..20: mol_type = other RNA
tgaggtagtaggtcgtatag

SEQ ID NO: 18988 - RNA, 20 nt, Synthetic Construct
  source 1..20: mol_type = other RNA
tgaggtagtaggtcgtatag

SEQ ID NO: 18989 - RNA, 23 nt, Synthetic Construct
  source 1..23: mol_type = other RNA
tgaggggcagagagcgggacttt

SEQ ID NO: 18990 - RNA, 23 nt, Synthetic Construct
  source 1..23: mol_type = other RNA
tgaggggcagagagcgggacttt

SEQ ID NO: 18991 - RNA, 31 nt, Synthetic Construct
  source 1..31: mol_type = other RNA
gcccggctagctcagtcggtagagcatgaga

SEQ ID NO: 18992 - RNA, 31 nt, Synthetic Construct; identical to SEQ ID NO: 18991
  source 1..31: mol_type = other RNA

SEQ ID NO: 18993 - RNA, 17 nt, Synthetic Construct
  source 1..17: mol_type = other RNA
gggaacgtgagctgggt

SEQ ID NO: 18994 - RNA, 21 nt, Synthetic Construct
  source 1..21: mol_type = other RNA
ggaggtagtaggttgtgtggt

SEQ ID NO: 18995 - RNA, 21 nt, Synthetic Construct
  source 1..21: mol_type = other RNA
ggaggtagtaggttgtgtggt

SEQ ID NO: 18996 - RNA, 22 nt, Synthetic Construct
  source 1..22: mol_type = other RNA
tgaggtagtaggttgtatagtt

SEQ ID NO: 18997 - RNA, 15 nt, Synthetic Construct
  source 1..15: mol_type = other RNA
ttccgaaagtagtgg

SEQ ID NO: 18998 - RNA, 16 nt, Synthetic Construct
  source 1..16: mol_type = other RNA
gcggtggatgatgtgg

SEQ ID NO: 18999 - RNA, 16 nt, Synthetic Construct
  source 1..16: mol_type = other RNA
gcggtggatgatgtgg

SEQ ID NO: 19000 - RNA, 25 nt, Synthetic Construct
  source 1..25: mol_type = other RNA
ttgaggatatgagatcgagacgaca

SEQ ID NO: 19001 - RNA, 22 nt, Synthetic Construct
  source 1..22: mol_type = other RNA
tctctcggctcctcgcggctct

SEQ ID NO: 19002 - RNA, 19 nt, Synthetic Construct
  source 1..19: mol_type = other RNA
gaagaccctgttgagcttg

SEQ ID NO: 19003 - RNA, 22 nt, Synthetic Construct
  source 1..22: mol_type = other RNA
tgtggtagtagattgtatagtt

SEQ ID NO: 19004 - RNA, 22 nt, Synthetic Construct
  source 1..22: mol_type = other RNA
tgtggtagtagattgtatagtt

SEQ ID NO: 19005 - RNA, 22 nt, Synthetic Construct
  source 1..22: mol_type = other RNA
tattgcacttgtcccgacctgt

SEQ ID NO: 19006 - RNA, 22 nt, Synthetic Construct
  source 1..22: mol_type = other RNA
tattgcacttgtcccgacctgt

SEQ ID NO: 19007 - RNA, 15 nt, Synthetic Construct
  source 1..15: mol_type = other RNA
gcagagcgtcggtct

SEQ ID NO: 19008 - RNA, 15 nt, Synthetic Construct
  source 1..15: mol_type = other RNA
gcagagcgtcggtct

SEQ ID NO: 19009 - RNA, 22 nt, Synthetic Construct
  source 1..22: mol_type = other RNA
cgaggtagtaggttgtatagtt

SEQ ID NO: 19010 - RNA, 15 nt, Synthetic Construct
  source 1..15: mol_type = other RNA
aggtgggaggctttg

SEQ ID NO: 19011 - RNA, 16 nt, Synthetic Construct
  source 1..16: mol_type = other RNA
gtctacggccatacta

SEQ ID NO: 19012 - RNA, 24 nt, Synthetic Construct
  source 1..24: mol_type = other RNA
gcgggcgtagctcaggggtagagc

SEQ ID NO: 19013 - RNA, 24 nt, Synthetic Construct
  source 1..24: mol_type = other RNA
gcgggcgtagctcaggggtagagc

SEQ ID NO: 19014 - RNA, 18 nt, Synthetic Construct
  source 1..18: mol_type = other RNA
gctgtgatggccgagtgg

SEQ ID NO: 19015 - RNA, 18 nt, Synthetic Construct
  source 1..18: mol_type = other RNA
catgcaagtcgaacggta

SEQ ID NO: 19016 - RNA, 18 nt, Synthetic Construct
  source 1..18: mol_type = other RNA
catgcaagtcgaacggta

SEQ ID NO: 19017 - RNA, 21 nt, Synthetic Construct
  source 1..21: mol_type = other RNA
caacggaatcccaaaagcagc

SEQ ID NO: 19018 - RNA, 21 nt, Synthetic Construct
  source 1..21: mol_type = other RNA
caacggaatcccaaaagcagc

SEQ ID NO: 19019 - RNA, 22 nt, Synthetic Construct
  source 1..22: mol_type = other RNA
tgaggtagtagattatatagtt

SEQ ID NO: 19020 - RNA, 22 nt, Synthetic Construct
  source 1..22: mol_type = other RNA
tgaggtagtagattatatagtt

SEQ ID NO: 19021 - RNA, 28 nt, Synthetic Construct
  source 1..28: mol_type = other RNA
ggcagggttcgtgactggggtgaagtcg

SEQ ID NO: 19022 - RNA, 27 nt, Synthetic Construct
  source 1..27: mol_type = other RNA
ccccccactgctaaatttgacaggctt

SEQ ID NO: 19023 - RNA, 15 nt, Synthetic Construct
  source 1..15: mol_type = other RNA
aggtgggaggctttg

SEQ ID NO: 19024 - RNA, 15 nt, Synthetic Construct
  source 1..15: mol_type = other RNA
aggtgggaggctttg

SEQ ID NO: 19025 - RNA, 21 nt, Synthetic Construct
  source 1..21: mol_type = other RNA
tcctgtaccgagctgccccga

SEQ ID NO: 19026 - RNA, 21 nt, Synthetic Construct
  source 1..21: mol_type = other RNA
tcctgtaccgagctgccccga

SEQ ID NO: 19027 - RNA, 28 nt, Synthetic Construct
  source 1..28: mol_type = other RNA
ccccccgctgctaaatttgactggcttt

SEQ ID NO: 19028 - RNA, 28 nt, Synthetic Construct
  source 1..28: mol_type = other RNA
ccccccgctgctaaatttgactggcttt

SEQ ID NO: 19029 - RNA, 23 nt, Synthetic Construct
  source 1..23: mol_type = other RNA
caaagtgccgttcgtgcaggtag

SEQ ID NO: 19030 - RNA, 22 nt, Synthetic Construct
  source 1..22: mol_type = other RNA
attgcacttgtcccggcctgtt

SEQ ID NO: 19031 - RNA, 22 nt, Synthetic Construct
  source 1..22: mol_type = other RNA
attgcacttgtcccggcctgtt

SEQ ID NO: 19032 - RNA, 22 nt, Synthetic Construct
  source 1..22: mol_type = other RNA
tattgcacttgttccggcctgt

SEQ ID NO: 19033 - RNA, 22 nt, Synthetic Construct
  source 1..22: mol_type = other RNA
tattgcacttgttccggcctgt

SEQ ID NO: 19034 - RNA, 22 nt, Synthetic Construct
  source 1..22: mol_type = other RNA
tgaggtagtggtttgtgctgtt

SEQ ID NO: 19035 - RNA, 18 nt, Synthetic Construct
  source 1..18: mol_type = other RNA
cggcgggagtaactatga

SEQ ID NO: 19036 - RNA, 22 nt, Synthetic Construct
  source 1..22: mol_type = other RNA
tgaggtagtagattgtatagct

SEQ ID NO: 19037 - RNA, 22 nt, Synthetic Construct
  source 1..22: mol_type = other RNA
tgaggtagtagattgtatagct

SEQ ID NO: 19038 - RNA, 24 nt, Synthetic Construct
  source 1..24: mol_type = other RNA
gttgaattgtggtctgtggacgtg

SEQ ID NO: 19039 - RNA, 24 nt, Synthetic Construct
  source 1..24: mol_type = other RNA
gttgaattgtggtctgtggacgtg

SEQ ID NO: 19040 - RNA, 22 nt, Synthetic Construct
  source 1..22: mol_type = other RNA
ttcaagtaattcaggataggtc

SEQ ID NO: 19041 - RNA, 22 nt, Synthetic Construct
  source 1..22: mol_type = other RNA
ttcaagtaattcaggataggtc

SEQ ID NO: 19042 - RNA, 23 nt, Synthetic Construct
  source 1..23: mol_type = other RNA
caaagtgcttacagtgcaggtag

SEQ ID NO: 19043 - RNA, 23 nt, Synthetic Construct
  source 1..23: mol_type = other RNA
caacggaatcccaaaagcagcta

SEQ ID NO: 19044 - RNA, 22 nt, Synthetic Construct
  source 1..22: mol_type = other RNA
cattgcacttgtctcggtctgg

SEQ ID NO: 19045 - RNA, 30 nt, Synthetic Construct; identical to SEQ ID NO: 2840
  source 1..30: mol_type = other RNA

SEQ ID NO: 19046 - RNA, 23 nt, Synthetic Construct
  source 1..23: mol_type = other RNA
caacggaatcccaaaagcggctg

SEQ ID NO: 19047 - RNA, 21 nt, Synthetic Construct
  source 1..21: mol_type = other RNA
cagagttctacagtccgacga

SEQ ID NO: 19048 - RNA, 21 nt, Synthetic Construct
  source 1..21: mol_type = other RNA
cagagttctacagtccgacga

SEQ ID NO: 19049 - RNA, 20 nt, Synthetic Construct
  source 1..20: mol_type = other RNA
agagttctacagtccgacga

SEQ ID NO: 19050 - RNA, 20 nt, Synthetic Construct
  source 1..20: mol_type = other RNA
agagttctacagtccgacga

SEQ ID NO: 19051 - RNA, 27 nt, Synthetic Construct
  source 1..27: mol_type = other RNA
atagtctttgttcgattccgttgagta

SEQ ID NO: 19052 - RNA, 27 nt, Synthetic Construct
  source 1..27: mol_type = other RNA
atagtctttgttcgattccgttgagta

SEQ ID NO: 19053 - RNA, 22 nt, Synthetic Construct
  source 1..22: mol_type = other RNA
cattgcgcttgtctcggtctga

SEQ ID NO: 19054 - RNA, 22 nt, Synthetic Construct
  source 1..22: mol_type = other RNA
cattgcgcttgtctcggtctga

SEQ ID NO: 19055 - RNA, 22 nt, Synthetic Construct
  source 1..22: mol_type = other RNA
tgaggtagtagattgtataatt

SEQ ID NO: 19056 - RNA, 23 nt, Synthetic Construct
  source 1..23: mol_type = other RNA
tggtaatacgatgtacttagtgt

SEQ ID NO: 19057 - RNA, 23 nt, Synthetic Construct
  source 1..23: mol_type = other RNA
tgaggggcagagagcgagacctt

SEQ ID NO: 19058 - RNA, 16 nt, Synthetic Construct
  source 1..16: mol_type = other RNA
ccgcttttgtcaggga

SEQ ID NO: 19059 - RNA, 16 nt, Synthetic Construct
  source 1..16: mol_type = other RNA
ccgcttttgtcaggga

SEQ ID NO: 19060 - RNA, 22 nt, Synthetic Construct
  source 1..22: mol_type = other RNA
tggaatgcaaagaagtatgtat

SEQ ID NO: 19061 - RNA, 22 nt, Synthetic Construct
  source 1..22: mol_type = other RNA
tggaatgcaaagaagtatgtat

SEQ ID NO: 19062 - RNA, 20 nt, Synthetic Construct
  source 1..20: mol_type = other RNA
gagtaggacgttgccaggtt

SEQ ID NO: 19063 - RNA, 16 nt, Synthetic Construct
  source 1..16: mol_type = other RNA
ttggcctcaagtcagg

SEQ ID NO: 19064 - RNA, 21 nt, Synthetic Construct
  source 1..21: mol_type = other RNA
cgaggggcagagagcgagact

SEQ ID NO: 19065 - RNA, 21 nt, Synthetic Construct
  source 1..21: mol_type = other RNA
cgaggggcagagagcgagact

SEQ ID NO: 19066 - RNA, 22 nt, Synthetic Construct
  source 1..22: mol_type = other RNA
tgaggtagtagattgtatagat

SEQ ID NO: 19067 - RNA, 25 nt, Synthetic Construct
  source 1..25: mol_type = other RNA
agcagcattgtacagggctatgaat

SEQ ID NO: 19068 - RNA, 27 nt, Synthetic Construct
  source 1..27: mol_type = other RNA
gcgggcgtagctcaggggtagagcgca

SEQ ID NO: 19069 - RNA, 27 nt, Synthetic Construct
  source 1..27: mol_type = other RNA
gcgggcgtagctcaggggtagagcgca

SEQ ID NO: 19070 - RNA, 22 nt, Synthetic Construct
  source 1..22: mol_type = other RNA
tgaggtagcagattgtatagtt

SEQ ID NO: 19071 - RNA, 22 nt, Synthetic Construct
  source 1..22: mol_type = other RNA
tgaggtagcagattgtatagtt

SEQ ID NO: 19072 - RNA, 21 nt, Synthetic Construct
  source 1..21: mol_type = other RNA
cctctgggcccttcctccagt

SEQ ID NO: 19073 - RNA, 21 nt, Synthetic Construct
  source 1..21: mol_type = other RNA
cctctgggcccttcctccagt

SEQ ID NO: 19074 - RNA, 22 nt, Synthetic Construct
  source 1..22: mol_type = other RNA
tggaagactagtgattttgttg

SEQ ID NO: 19075 - RNA, 22 nt, Synthetic Construct
  source 1..22: mol_type = other RNA
tggaagactagtgattttgttg

SEQ ID NO: 19076 - RNA, 23 nt, Synthetic Construct
  source 1..23: mol_type = other RNA
acctgtactgagctgccccgagt

SEQ ID NO: 19077 - RNA, 22 nt, Synthetic Construct
  source 1..22: mol_type = other RNA
aatgacacgatcactcccgttg

SEQ ID NO: 19078 - RNA, 22 nt, Synthetic Construct
  source 1..22: mol_type = other RNA
aatgacacgatcactcccgttg

SEQ ID NO: 19079 - RNA, 23 nt, Synthetic Construct
  source 1..23: mol_type = other RNA
tgtagtgtttcctactttatggt

SEQ ID NO: 19080 - RNA, 24 nt, Synthetic Construct
  source 1..24: mol_type = other RNA
tgaggtagtaggttgtgtggttta

SEQ ID NO: 19081 - RNA, 24 nt, Synthetic Construct
  source 1..24: mol_type = other RNA
tgaggtagtaggttgtgtggttta

SEQ ID NO: 19082 - RNA, 22 nt, Synthetic Construct
  source 1..22: mol_type = other RNA
tgaggtaataggttgtatagtt

SEQ ID NO: 19083 - RNA, 23 nt, Synthetic Construct
  source 1..23: mol_type = other RNA
tctcacacagaaatcgcacccgt

SEQ ID NO: 19084 - RNA, 23 nt, Synthetic Construct
  source 1..23: mol_type = other RNA
tctcacacagaaatcgcacccgt

SEQ ID NO: 19085 - RNA, 34 nt, Synthetic Construct; identical to SEQ ID NO: 490
  source 1..34: mol_type = other RNA

SEQ ID NO: 19086 - RNA, 17 nt, Synthetic Construct
  source 1..17: mol_type = other RNA
tggccgtcgtcagctcg

SEQ ID NO: 19087 - RNA, 23 nt, Synthetic Construct
  source 1..23: mol_type = other RNA
tggaatgtaaagaagtatgtata

SEQ ID NO: 19088 - RNA, 27 nt, Synthetic Construct
  source 1..27: mol_type = other RNA
ctccccactgctaaatttgactggctt

SEQ ID NO: 19089 - RNA, 22 nt, Synthetic Construct
  source 1..22: mol_type = other RNA
tattgcatttgtcccggcctgt

SEQ ID NO: 19090 - RNA, 30 nt, Synthetic Construct; identical to SEQ ID NO: 1535
  source 1..30: mol_type = other RNA

SEQ ID NO: 19091 - RNA, 17 nt, Synthetic Construct
  source 1..17: mol_type = other RNA
tcccagaaacccggtcg

SEQ ID NO: 19092 - RNA, 23 nt, Synthetic Construct
  source 1..23: mol_type = other RNA
tggtaatacgacgtactaagtgt

SEQ ID NO: 19093 - RNA, 23 nt, Synthetic Construct
  source 1..23: mol_type = other RNA
caaagtgctgtttgtgcaggtag

SEQ ID NO: 19094 - RNA, 23 nt, Synthetic Construct
  source 1..23: mol_type = other RNA
caaagtgctgtttgtgcaggtag

SEQ ID NO: 19095 - RNA, 17 nt, Synthetic Construct
  source 1..17: mol_type = other RNA
atcgtgacgatagtgca

SEQ ID NO: 19096 - RNA, 22 nt, Synthetic Construct
  source 1..22: mol_type = other RNA
tgagatgaagcactgtagctct

SEQ ID NO: 19097 - RNA, 22 nt, Synthetic Construct
  source 1..22: mol_type = other RNA
tgagatgaagcactgtagctct

SEQ ID NO: 19098 - RNA, 27 nt, Synthetic Construct
  source 1..27: mol_type = other RNA
cccctcactgctaaatttgactggctt

SEQ ID NO: 19099 - RNA, 22 nt, Synthetic Construct
  source 1..22: mol_type = other RNA
tagcagtacgtaaatattggcg

SEQ ID NO: 19100 - RNA, 22 nt, Synthetic Construct
  source 1..22: mol_type = other RNA
tagcagtacgtaaatattggcg

SEQ ID NO: 19101 - RNA, 21 nt, Synthetic Construct
  source 1..21: mol_type = other RNA
tgaggtagtagattgcatagt

SEQ ID NO: 19102 - RNA, 21 nt, Synthetic Construct
  source 1..21: mol_type = other RNA
tgaggtagtagattgcatagt

SEQ ID NO: 19103 - RNA, 21 nt, Synthetic Construct
  source 1..21: mol_type = other RNA
ctggccctctctgcccttccg

SEQ ID NO: 19104 - RNA, 21 nt, Synthetic Construct
  source 1..21: mol_type = other RNA
ctggccctctctgcccttccg

SEQ ID NO: 19105 - RNA, 22 nt, Synthetic Construct
  source 1..22: mol_type = other RNA
tgaggtagtagattgtacagtt

SEQ ID NO: 19106 - RNA, 22 nt, Synthetic Construct
  source 1..22: mol_type = other RNA
tgaggtagtagattgtacagtt

SEQ ID NO: 19107 - RNA, 27 nt, Synthetic Construct
  source 1..27: mol_type = other RNA
ccccccactgctaaatttgacaggctt

SEQ ID NO: 19108 - RNA, 16 nt, Synthetic Construct
  source 1..16: mol_type = other RNA
gcagacgaagtgagtg

SEQ ID NO: 19109 - RNA, 20 nt, Synthetic Construct
  source 1..20: mol_type = other RNA
ttatcagaatctccaggggt

SEQ ID NO: 19110 - RNA, 20 nt, Synthetic Construct
  source 1..20: mol_type = other RNA
ttatcagaatctccaggggt

SEQ ID NO: 19111 - RNA, 17 nt, Synthetic Construct
  source 1..17: mol_type = other RNA
acagtcaggatgttggc

SEQ ID NO: 19112 - RNA, 30 nt, Synthetic Construct; identical to SEQ ID NO: 768
  source 1..30: mol_type = other RNA

SEQ ID NO: 19113 - RNA, 21 nt, Synthetic Construct
  source 1..21: mol_type = other RNA
tatgtctgctgaccatcacct

SEQ ID NO: 19114 - RNA, 20 nt, Synthetic Construct
  source 1..20: mol_type = other RNA
tgaggtagtaggctgtatag

SEQ ID NO: 19115 - RNA, 20 nt, Synthetic Construct
  source 1..20: mol_type = other RNA
tgaggtagtaggctgtatag

SEQ ID NO: 19116 - RNA, 22 nt, Synthetic Construct
  source 1..22: mol_type = other RNA
tagcagcacgtaaatatcggcg

SEQ ID NO: 19117 - RNA, 22 nt, Synthetic Construct
  source 1..22: mol_type = other RNA
tagcagcacgtaaatatcggcg

SEQ ID NO: 19118 - RNA, 16 nt, Synthetic Construct
  source 1..16: mol_type = other RNA
cccagaaacccggtcg

SEQ ID NO: 19119 - RNA, 20 nt, Synthetic Construct
  source 1..20: mol_type = other RNA
tgaggtagtaggtcgtgtgg

SEQ ID NO: 19120 - RNA, 22 nt, Synthetic Construct
  source 1..22: mol_type = other RNA
tgaggtagtagattgtataatt

SEQ ID NO: 19121 - RNA, 22 nt, Synthetic Construct
  source 1..22: mol_type = other RNA
tgaggtagtagattgtataatt

SEQ ID NO: 19122 - RNA, 24 nt, Synthetic Construct
  source 1..24: mol_type = other RNA
agtaaacatccttgactggaagct

SEQ ID NO: 19123 - RNA, 22 nt, Synthetic Construct
  source 1..22: mol_type = other RNA
ttcaagtagtccaggataggct

SEQ ID NO: 19124 - RNA, 22 nt, Synthetic Construct
  source 1..22: mol_type = other RNA
ttcaagtagtccaggataggct

SEQ ID NO: 19125 - RNA, 20 nt, Synthetic Construct
  source 1..20: mol_type = other RNA
tctcccaacccttgtaccag

SEQ ID NO: 19126 - RNA, 20 nt, Synthetic Construct
  source 1..20: mol_type = other RNA
tctcccaacccttgtaccag

SEQ ID NO: 19127 - RNA, 22 nt, Synthetic Construct
  source 1..22: mol_type = other RNA
tcataccgtgagtaataatgcg

SEQ ID NO: 19128 - RNA, 21 nt, Synthetic Construct
  source 1..21: mol_type = other RNA
tgaggaagtagattgtatagt

SEQ ID NO: 19129 - RNA, 21 nt, Synthetic Construct
  source 1..21: mol_type = other RNA
tgaggaagtagattgtatagt

SEQ ID NO: 19130 - RNA, 22 nt, Synthetic Construct
  source 1..22: mol_type = other RNA
tcgaaaccatcctctgctacca

SEQ ID NO: 19131 - RNA, 23 nt, Synthetic Construct
  source 1..23: mol_type = other RNA
tgaggtagtaggttgtatggttt

SEQ ID NO: 19132 - RNA, 21 nt, Synthetic Construct
  source 1..21: mol_type = other RNA
tgaggcagtagattgtatagt

SEQ ID NO: 19133 - RNA, 18 nt, Synthetic Construct
  source 1..18: mol_type = other RNA
cgactcttagcggtggat

SEQ ID NO: 19134 - RNA, 18 nt, Synthetic Construct
  source 1..18: mol_type = other RNA
cgactcttagcggtggat

SEQ ID NO: 19135 - RNA, 23 nt, Synthetic Construct
  source 1..23: mol_type = other RNA
ctcactgatcgagtcgtcctgcg

SEQ ID NO: 19136 - RNA, 21 nt, Synthetic Construct
  source 1..21: mol_type = other RNA
acagtagtctgcacattggtt

SEQ ID NO: 19137 - RNA, 22 nt, Synthetic Construct
  source 1..22: mol_type = other RNA
ttatggtttgcctgggactgat

SEQ ID NO: 19138 - RNA, 22 nt, Synthetic Construct
  source 1..22: mol_type = other RNA
ttatggtttgcctgggactgat

SEQ ID NO: 19139 - RNA, 21 nt, Synthetic Construct
  source 1..21: mol_type = other RNA
tagcaccatctgaaatcggta

SEQ ID NO: 19140 - RNA, 17 nt, Synthetic Construct
  source 1..17: mol_type = other RNA
cgactcttagcggtgga

SEQ ID NO: 19141 - RNA, 17 nt, Synthetic Construct
  source 1..17: mol_type = other RNA
cgactcttagcggtgga

SEQ ID NO: 19142 - RNA, 17 nt, Synthetic Construct
  source 1..17: mol_type = other RNA
ggcccttatgggtaggg

SEQ ID NO: 19143 - RNA, 17 nt, Synthetic Construct
  source 1..17: mol_type = other RNA
tcgctagtaatcgcgga

SEQ ID NO: 19144 - RNA, 17 nt, Synthetic Construct
  source 1..17: mol_type = other RNA
tcgctagtaatcgcgga

SEQ ID NO: 19145 - RNA, 27 nt, Synthetic Construct
  source 1..27: mol_type = other RNA
ccccctactgctaaatttgactggctt

SEQ ID NO: 19146 - RNA, 27 nt, Synthetic Construct
  source 1..27: mol_type = other RNA
ccccctactgctaaatttgactggctt

SEQ ID NO: 19147 - RNA, 23 nt, Synthetic Construct
  source 1..23: mol_type = other RNA
tggtaatacgacgtactcagtgt

SEQ ID NO: 19148 - RNA, 23 nt, Synthetic Construct
  source 1..23: mol_type = other RNA
tggtaatacgacgtactcagtgt

SEQ ID NO: 19149 - RNA, 22 nt, Synthetic Construct
  source 1..22: mol_type = other RNA
tgaggtagtagtttgtgcggtt

SEQ ID NO: 19150 - RNA, 22 nt, Synthetic Construct
  source 1..22: mol_type = other RNA
tgaggtagtagtttgtgcggtt

SEQ ID NO: 19151 - RNA, 23 nt, Synthetic Construct
  source 1..23: mol_type = other RNA
tggaatgtaaagaagtatgtata

SEQ ID NO: 19152 - RNA, 23 nt, Synthetic Construct
  source 1..23: mol_type = other RNA
tgaggtagtaggttgtatagtta

SEQ ID NO: 19153 - RNA, 21 nt, Synthetic Construct
  source 1..21: mol_type = other RNA
taactcttaagcgaatctcgc

SEQ ID NO: 19154 - RNA, 32 nt, Synthetic Construct; identical to SEQ ID NO: 2467
  source 1..32: mol_type = other RNA

SEQ ID NO: 19155 - RNA, 32 nt, Synthetic Construct; identical to SEQ ID NO: 2467
  source 1..32: mol_type = other RNA

SEQ ID NO: 19156 - RNA, 23 nt, Synthetic Construct
  source 1..23: mol_type = other RNA
tgaggggcagagagtgagacttt

SEQ ID NO: 19157 - RNA, 17 nt, Synthetic Construct
  source 1..17: mol_type = other RNA
ccagtaaacggcggccg

SEQ ID NO: 19158 - RNA, 17 nt, Synthetic Construct
  source 1..17: mol_type = other RNA
ccagtaaacggcggccg

SEQ ID NO: 19159 - RNA, 23 nt, Synthetic Construct
  source 1..23: mol_type = other RNA
tgaggggaagagagcgagacttt

SEQ ID NO: 19160 - RNA, 22 nt, Synthetic Construct
  source 1..22: mol_type = other RNA
tgaggtggtaggttgtatagtt

SEQ ID NO: 19161 - RNA, 22 nt, Synthetic Construct
  source 1..22: mol_type = other RNA
tgaggtggtaggttgtatagtt

SEQ ID NO: 19162 - RNA, 31 nt, Synthetic Construct; identical to SEQ ID NO: 960
  source 1..31: mol_type = other RNA

SEQ ID NO: 19163 - RNA, 24 nt, Synthetic Construct
  source 1..24: mol_type = other RNA
tgtaaacatccccgactggaagtt

SEQ ID NO: 19164 - RNA, 24 nt, Synthetic Construct
  source 1..24: mol_type = other RNA
tgtaaacatccccgactggaagtt

SEQ ID NO: 19165 - RNA, 21 nt, Synthetic Construct
  source 1..21: mol_type = other RNA
tactccttaagcgaatctcgc

SEQ ID NO: 19166 - RNA, 20 nt, Synthetic Construct
  source 1..20: mol_type = other RNA
tcccgggtttcggcaccatt

SEQ ID NO: 19167 - RNA, 25 nt, Synthetic Construct
  source 1..25: mol_type = other RNA
aaaagctgggttgagagggcgaatt

SEQ ID NO: 19168 - RNA, 25 nt, Synthetic Construct
  source 1..25: mol_type = other RNA
aaaagctgggttgagagggcgaatt

SEQ ID NO: 19169 - RNA, 23 nt, Synthetic Construct
  source 1..23: mol_type = other RNA
ctcgtaccgtgagtaataatgcg

SEQ ID NO: 19170 - RNA, 19 nt, Synthetic Construct
  source 1..19: mol_type = other RNA
gctattgacgaccgtaccg

SEQ ID NO: 19171 - RNA, 19 nt, Synthetic Construct
  source 1..19: mol_type = other RNA
gctattgacgaccgtaccg

SEQ ID NO: 19172 - RNA, 21 nt, Synthetic Construct
  source 1..21: mol_type = other RNA
ctatacgacctgctgcctttc

SEQ ID NO: 19173 - RNA, 21 nt, Synthetic Construct
  source 1..21: mol_type = other RNA
ctatacgacctgctgcctttc

SEQ ID NO: 19174 - RNA, 21 nt, Synthetic Construct
  source 1..21: mol_type = other RNA
tgaagtagtaggttgtatagt

SEQ ID NO: 19175 - RNA, 21 nt, Synthetic Construct
  source 1..21: mol_type = other RNA
tgaagtagtaggttgtatagt

SEQ ID NO: 19176 - RNA, 22 nt, Synthetic Construct
  source 1..22: mol_type = other RNA
aggaatgtaaagaagtatgtat

SEQ ID NO: 19177 - RNA, 22 nt, Synthetic Construct
  source 1..22: mol_type = other RNA
aggaatgtaaagaagtatgtat

SEQ ID NO: 19178 - RNA, 23 nt, Synthetic Construct
  source 1..23: mol_type = other RNA
tgaggtagtaggctgtgtggttt

SEQ ID NO: 19179 - RNA, 22 nt, Synthetic Construct
  source 1..22: mol_type = other RNA
tgaggtagtagattgtgtagtt

SEQ ID NO: 19180 - RNA, 18 nt, Synthetic Construct
  source 1..18: mol_type = other RNA
cgccgatgatagtgcgga

SEQ ID NO: 19181 - RNA, 19 nt, Synthetic Construct
  source 1..19: mol_type = other RNA
tagcagcacgtaaatattg

SEQ ID NO: 19182 - RNA, 19 nt, Synthetic Construct
  source 1..19: mol_type = other RNA
tagcagcacgtaaatattg

SEQ ID NO: 19183 - RNA, 24 nt, Synthetic Construct
  source 1..24: mol_type = other RNA
agcagcattgtacagggctatgag

SEQ ID NO: 19184 - RNA, 21 nt, Synthetic Construct
  source 1..21: mol_type = other RNA
ctagactgaagctccttgggg

SEQ ID NO: 19185 - RNA, 21 nt, Synthetic Construct
  source 1..21: mol_type = other RNA
tccctgagaccctaacttgtg

SEQ ID NO: 19186 - RNA, 21 nt, Synthetic Construct
  source 1..21: mol_type = other RNA
tccctgagaccctaacttgtg

SEQ ID NO: 19187 - RNA, 23 nt, Synthetic Construct
  source 1..23: mol_type = other RNA
gtcagtttgtcaaataccccaaa

SEQ ID NO: 19188 - RNA, 23 nt, Synthetic Construct
  source 1..23: mol_type = other RNA
gtcagtttgtcaaataccccaaa

SEQ ID NO: 19189 - RNA, 23 nt, Synthetic Construct
  source 1..23: mol_type = other RNA
actagattgtgagctcctggagt

SEQ ID NO: 19190 - RNA, 23 nt, Synthetic Construct
  source 1..23: mol_type = other RNA
actagattgtgagctcctggagt

SEQ ID NO: 19191 - RNA, 21 nt, Synthetic Construct
  source 1..21: mol_type = other RNA
tgaggtagtagcttgtgctgt

SEQ ID NO: 19192 - RNA, 21 nt, Synthetic Construct
  source 1..21: mol_type = other RNA
tgaggtagtagcttgtgctgt

SEQ ID NO: 19193 - RNA, 21 nt, Synthetic Construct
  source 1..21: mol_type = other RNA
tgaggaagtaggttgtgtggt

SEQ ID NO: 19194 - RNA, 27 nt, Synthetic Construct
  source 1..27: mol_type = other RNA
cgactcttagcggtggatcactcggct

SEQ ID NO: 19195 - RNA, 23 nt, Synthetic Construct
  source 1..23: mol_type = other RNA
agcagcgttgtacagggctatga

SEQ ID NO: 19196 - RNA, 23 nt, Synthetic Construct
  source 1..23: mol_type = other RNA
agcagcgttgtacagggctatga

SEQ ID NO: 19197 - RNA, 22 nt, Synthetic Construct
  source 1..22: mol_type = other RNA
tgaggtagtagttcgtgctgtt

SEQ ID NO: 19198 - RNA, 22 nt, Synthetic Construct
  source 1..22: mol_type = other RNA
tgaggtagtagttcgtgctgtt

SEQ ID NO: 19199 - RNA, 15 nt, Synthetic Construct
  source 1..15: mol_type = other RNA
ggtgaaagcggggga

SEQ ID NO: 19200 - RNA, 23 nt, Synthetic Construct
  source 1..23: mol_type = other RNA
tcaggctcagtcccctcccgttt

SEQ ID NO: 19201 - RNA, 23 nt, Synthetic Construct
  source 1..23: mol_type = other RNA
tcaggctcagtcccctcccgttt

SEQ ID NO: 19202 - RNA, 18 nt, Synthetic Construct
  source 1..18: mol_type = other RNA
gctgtgatggccgagtgg

SEQ ID NO: 19203 - RNA, 22 nt, Synthetic Construct
  source 1..22: mol_type = other RNA
tttggtccccttcaaccagctg

SEQ ID NO: 19204 - RNA, 20 nt, Synthetic Construct
  source 1..20: mol_type = other RNA
tggctcagttcagcaggaaa

SEQ ID NO: 19205 - RNA, 20 nt, Synthetic Construct
  source 1..20: mol_type = other RNA
tggctcagttcagcaggaaa

SEQ ID NO: 19206 - RNA, 19 nt, Synthetic Construct
  source 1..19: mol_type = other RNA
cagcactctgcaaagacga

SEQ ID NO: 19207 - RNA, 22 nt, Synthetic Construct
  source 1..22: mol_type = other RNA
gagaactgaattccatgggttg

SEQ ID NO: 19208 - RNA, 22 nt, Synthetic Construct
  source 1..22: mol_type = other RNA
gagaactgaattccatgggttg

SEQ ID NO: 19209 - RNA, 22 nt, Synthetic Construct
  source 1..22: mol_type = other RNA
tcgtaccgtgagtaatgatgcg

SEQ ID NO: 19210 - RNA, 17 nt, Synthetic Construct
  source 1..17: mol_type = other RNA
tggccgttcttagttgg

SEQ ID NO: 19211 - RNA, 37 nt, Synthetic Construct; identical to SEQ ID NO: 2447
  source 1..37: mol_type = other RNA

SEQ ID NO: 19212 - RNA, 23 nt, Synthetic Construct
  source 1..23: mol_type = other RNA
aaaagctgggttgagagggcgat

SEQ ID NO: 19213 - RNA, 16 nt, Synthetic Construct
  source 1..16: mol_type = other RNA
cgctagtaatcgcgga

SEQ ID NO: 19214 - RNA, 16 nt, Synthetic Construct
  source 1..16: mol_type = other RNA
cgctagtaatcgcgga

SEQ ID NO: 19215 - RNA, 23 nt, Synthetic Construct
  source 1..23: mol_type = other RNA
caaagaattctccttttgggctt

SEQ ID NO: 19216 - RNA, 22 nt, Synthetic Construct
  source 1..22: mol_type = other RNA
cattgcacctgtctcggtctga

SEQ ID NO: 19217 - RNA, 22 nt, Synthetic Construct
  source 1..22: mol_type = other RNA
cattgcacctgtctcggtctga

SEQ ID NO: 19218 - RNA, 22 nt, Synthetic Construct
  source 1..22: mol_type = other RNA
tgaggtagtagtttgtggtgtt

SEQ ID NO: 19219 - RNA, 22 nt, Synthetic Construct
  source 1..22: mol_type = other RNA
tgaggtagtaggttgtattgtt

SEQ ID NO: 19220 - RNA, 22 nt, Synthetic Construct
  source 1..22: mol_type = other RNA
tgaggtagtaggttgtattgtt

SEQ ID NO: 19221 - RNA, 21 nt, Synthetic Construct
  source 1..21: mol_type = other RNA
actggacttggagtcagaagg

SEQ ID NO: 19222 - RNA, 21 nt, Synthetic Construct
  source 1..21: mol_type = other RNA
actggacttggagtcagaagg

SEQ ID NO: 19223 - RNA, 22 nt, Synthetic Construct
  source 1..22: mol_type = other RNA
tcctgtactgagttgccccgag

SEQ ID NO: 19224 - RNA, 22 nt, Synthetic Construct
  source 1..22: mol_type = other RNA
tcctgtactgagttgccccgag

SEQ ID NO: 19225 - RNA, 20 nt, Synthetic Construct
  source 1..20: mol_type = other RNA
gagtaggacgttgccaggtt

SEQ ID NO: 19226 - RNA, 20 nt, Synthetic Construct
  source 1..20: mol_type = other RNA
gagtaggacgttgccaggtt

SEQ ID NO: 19227 - RNA, 15 nt, Synthetic Construct
  source 1..15: mol_type = other RNA
ggtggctgtagctca

SEQ ID NO: 19228 - RNA, 21 nt, Synthetic Construct
  source 1..21: mol_type = other RNA
tgaggcagtagattgtatagt

SEQ ID NO: 19229 - RNA, 21 nt, Synthetic Construct
  source 1..21: mol_type = other RNA
tgaggcagtagattgtatagt

SEQ ID NO: 19230 - RNA, 23 nt, Synthetic Construct
  source 1..23: mol_type = other RNA
tggtaatacgacgtacttggtgt

SEQ ID NO: 19231 - RNA, 23 nt, Synthetic Construct
  source 1..23: mol_type = other RNA
tggtaatacgacgtacttggtgt

SEQ ID NO: 19232 - RNA, 36 nt, Synthetic Construct; identical to SEQ ID NO: 10333
  source 1..36: mol_type = other RNA

SEQ ID NO: 19233 - RNA, 25 nt, Synthetic Construct
  source 1..25: mol_type = other RNA
tattgcacttgtcccggcctgtttt

SEQ ID NO: 19234 - RNA, 25 nt, Synthetic Construct
  source 1..25: mol_type = other RNA
tattgcacttgtcccggcctgtttt

SEQ ID NO: 19235 - RNA, 18 nt, Synthetic Construct
  source 1..18: mol_type = other RNA
gtggggagtttggctggg

SEQ ID NO: 19236 - RNA, 28 nt, Synthetic Construct
  source 1..28: mol_type = other RNA
cccccccactgctaaatttgactggctt

SEQ ID NO: 19237 - RNA, 15 nt, Synthetic Construct
  source 1..15: mol_type = other RNA
agttgaccgcctggg

SEQ ID NO: 19238 - RNA, 23 nt, Synthetic Construct
  source 1..23: mol_type = other RNA
tgaggtagtaggttgtgtggtaa

SEQ ID NO: 19239 - RNA, 23 nt, Synthetic Construct
  source 1..23: mol_type = other RNA
tgaggtagtaggttgtgtggtaa

SEQ ID NO: 19240 - RNA, 17 nt, Synthetic Construct
  source 1..17: mol_type = other RNA
cggcgggagtaactatg

SEQ ID NO: 19241 - RNA, 23 nt, Synthetic Construct
  source 1..23: mol_type = other RNA
tgtcagtttgccaaataccccaa

SEQ ID NO: 19242 - RNA, 27 nt, Synthetic Construct
  source 1..27: mol_type = other RNA
ggggagctaatcccagaaacccggtcg

SEQ ID NO: 19243 - RNA, 21 nt, Synthetic Construct
  source 1..21: mol_type = other RNA
tggagcgtgacaatggtgttt

SEQ ID NO: 19244 - RNA, 21 nt, Synthetic Construct
  source 1..21: mol_type = other RNA
tgtcagtttgtcaaatacccc

SEQ ID NO: 19245 - RNA, 16 nt, Synthetic Construct
  source 1..16: mol_type = other RNA
tgcggaaggatcattg

SEQ ID NO: 19246 - RNA, 16 nt, Synthetic Construct
  source 1..16: mol_type = other RNA
tgcggaaggatcattg

SEQ ID NO: 19247 - RNA, 19 nt, Synthetic Construct
  source 1..19: mol_type = other RNA
tcagtagctcgaggaaaag

SEQ ID NO: 19248 - RNA, 19 nt, Synthetic Construct
  source 1..19: mol_type = other RNA
tcagtagctcgaggaaaag

SEQ ID NO: 19249 - RNA, 21 nt, Synthetic Construct
  source 1..21: mol_type = other RNA
gtagtgtttcctactttatgg

SEQ ID NO: 19250 - RNA, 22 nt, Synthetic Construct
  source 1..22: mol_type = other RNA
tgaggtagtagttagtgctgtt

SEQ ID NO: 19251 - RNA, 22 nt, Synthetic Construct
  source 1..22: mol_type = other RNA
tgaggtagtagttagtgctgtt

SEQ ID NO: 19252 - RNA, 37 nt, Synthetic Construct; identical to SEQ ID NO: 1620
  source 1..37: mol_type = other RNA

SEQ ID NO: 19253 - RNA, 37 nt, Synthetic Construct; identical to SEQ ID NO: 1620
  source 1..37: mol_type = other RNA

SEQ ID NO: 19254 - RNA, 16 nt, Synthetic Construct
  source 1..16: mol_type = other RNA
ttctacagtccgacga

SEQ ID NO: 19255 - RNA, 16 nt, Synthetic Construct
  source 1..16: mol_type = other RNA
ttctacagtccgacga

SEQ ID NO: 19256 - RNA, 22 nt, Synthetic Construct
  source 1..22: mol_type = other RNA
ttgtaccgtgagtaataatgcg

SEQ ID NO: 19257 - RNA, 22 nt, Synthetic Construct
  source 1..22: mol_type = other RNA
ttgtaccgtgagtaataatgcg

SEQ ID NO: 19258 - RNA, 24 nt, Synthetic Construct
  source 1..24: mol_type = other RNA
aaaccgttaccattactgagttta

SEQ ID NO: 19259 - RNA, 24 nt, Synthetic Construct
  source 1..24: mol_type = other RNA
aaaccgttaccattactgagttta

SEQ ID NO: 19260 - RNA, 20 nt, Synthetic Construct
  source 1..20: mol_type = other RNA
tgaggtagtagtttgtacag

SEQ ID NO: 19261 - RNA, 20 nt, Synthetic Construct
  source 1..20: mol_type = other RNA
tgaggtagtagtttgtacag

SEQ ID NO: 19262 - RNA, 18 nt, Synthetic Construct
  source 1..18: mol_type = other RNA
tccgacatgcgagggttc

SEQ ID NO: 19263 - RNA, 18 nt, Synthetic Construct
  source 1..18: mol_type = other RNA
tccgacatgcgagggttc

SEQ ID NO: 19264 - RNA, 22 nt, Synthetic Construct
  source 1..22: mol_type = other RNA
cattgcgcttgtctcggtctga

SEQ ID NO: 19265 - RNA, 22 nt, Synthetic Construct
  source 1..22: mol_type = other RNA
tgaggcagtaggttgtatagtt

SEQ ID NO: 19266 - RNA, 37 nt, Synthetic Construct; identical to SEQ ID NO: 2211
  source 1..37: mol_type = other RNA

SEQ ID NO: 19267 - RNA, 23 nt, Synthetic Construct
  source 1..23: mol_type = other RNA
agcagcattgcacagggctatga

SEQ ID NO: 19268 - RNA, 23 nt, Synthetic Construct
  source 1..23: mol_type = other RNA
tccccttggggttgtaggaccac

SEQ ID NO: 19269 - RNA, 23 nt, Synthetic Construct
  source 1..23: mol_type = other RNA
tccccttggggttgtaggaccac

SEQ ID NO: 19270 - RNA, 25 nt, Synthetic Construct
  source 1..25: mol_type = other RNA
tgaggtagtaggttgtgtggttatt

SEQ ID NO: 19271 - RNA, 19 nt, Synthetic Construct
  source 1..19: mol_type = other RNA
tttctgcccagtgctctga

SEQ ID NO: 19272 - RNA, 17 nt, Synthetic Construct
  source 1..17: mol_type = other RNA
tagggaacgtgagctgg

SEQ ID NO: 19273 - RNA, 23 nt, Synthetic Construct
  source 1..23: mol_type = other RNA
tgaggtggtaggttgtgtggttt

SEQ ID NO: 19274 - RNA, 20 nt, Synthetic Construct
  source 1..20: mol_type = other RNA
cgtaccgtgagtaataatgc

SEQ ID NO: 19275 - RNA, 20 nt, Synthetic Construct
  source 1..20: mol_type = other RNA
cgtaccgtgagtaataatgc

SEQ ID NO: 19276 - RNA, 22 nt, Synthetic Construct
  source 1..22: mol_type = other RNA
ttcaagtaattcgggataggtt

SEQ ID NO: 19277 - RNA, 22 nt, Synthetic Construct
  source 1..22: mol_type = other RNA
ttcaagtaattcgggataggtt

SEQ ID NO: 19278 - RNA, 22 nt, Synthetic Construct
  source 1..22: mol_type = other RNA
aagcagcacctaaatattggcg

SEQ ID NO: 19279 - RNA, 32 nt, Synthetic Construct; identical to SEQ ID NO: 989
  source 1..32: mol_type = other RNA

SEQ ID NO: 19280 - RNA, 32 nt, Synthetic Construct; identical to SEQ ID NO: 989
  source 1..32: mol_type = other RNA

SEQ ID NO: 19281 - RNA, 20 nt, Synthetic Construct
  source 1..20: mol_type = other RNA
atcacattgccagggatttc

SEQ ID NO: 19282 - RNA, 27 nt, Synthetic Construct
  source 1..27: mol_type = other RNA
ctccccactgctaaatttgactggctt

SEQ ID NO: 19283 - RNA, 20 nt, Synthetic Construct
  source 1..20: mol_type = other RNA
tgtcagtttgtcaaataccc

SEQ ID NO: 19284 - RNA, 22 nt, Synthetic Construct
  source 1..22: mol_type = other RNA
tgaggtagtaatttgtgctgtt

SEQ ID NO: 19285 - RNA, 22 nt, Synthetic Construct
  source 1..22: mol_type = other RNA
tgaggtagtaatttgtgctgtt

SEQ ID NO: 19286 - RNA, 24 nt, Synthetic Construct
  source 1..24: mol_type = other RNA
tgtaaacatcctcgactggaagct

SEQ ID NO: 19287 - RNA, 24 nt, Synthetic Construct
  source 1..24: mol_type = other RNA
tgtaaacatcctcgactggaagct

SEQ ID NO: 19288 - RNA, 15 nt, Synthetic Construct
  source 1..15: mol_type = other RNA
catgccgcgtgcggg

SEQ ID NO: 19289 - RNA, 22 nt, Synthetic Construct
  source 1..22: mol_type = other RNA
tgaggtagtagttcgtgctgtt

SEQ ID NO: 19290 - RNA, 22 nt, Synthetic Construct
  source 1..22: mol_type = other RNA
tgaggtagtagttcgtgctgtt

SEQ ID NO: 19291 - RNA, 23 nt, Synthetic Construct
  source 1..23: mol_type = other RNA
tgaggtagtaggttgtgtggctt

SEQ ID NO: 19292 - RNA, 19 nt, Synthetic Construct
  source 1..19: mol_type = other RNA
agcagcattgtacagggct

SEQ ID NO: 19293 - RNA, 19 nt, Synthetic Construct
  source 1..19: mol_type = other RNA
agcagcattgtacagggct

SEQ ID NO: 19294 - RNA, 23 nt, Synthetic Construct
  source 1..23: mol_type = other RNA
tggtaatacgacgtactaagtgt

SEQ ID NO: 19295 - RNA, 23 nt, Synthetic Construct
  source 1..23: mol_type = other RNA
tggtaatacgacgtactaagtgt

SEQ ID NO: 19296 - RNA, 16 nt, Synthetic Construct
  source 1..16: mol_type = other RNA
gtcaacggccatacca

SEQ ID NO: 19297 - RNA, 16 nt, Synthetic Construct
  source 1..16: mol_type = other RNA
gtcaacggccatacca

SEQ ID NO: 19298 - RNA, 35 nt, Synthetic Construct
  source 1..35: mol_type = other RNA
tcccacatggtctagcggttaggattcctggtttt

SEQ ID NO: 19299 - RNA, 35 nt, Synthetic Construct; identical to SEQ ID NO: 19298
  source 1..35: mol_type = other RNA

SEQ ID NO: 19300 - RNA, 22 nt, Synthetic Construct
  source 1..22: mol_type = other RNA
tccaagtaatccaggataggct

SEQ ID NO: 19301 - RNA, 22 nt, Synthetic Construct
  source 1..22: mol_type = other RNA
tccaagtaatccaggataggct

SEQ ID NO: 19302 - RNA, 30 nt, Synthetic Construct; identical to SEQ ID NO: 2699
  source 1..30: mol_type = other RNA

SEQ ID NO: 19303 - RNA, 30 nt, Synthetic Construct; identical to SEQ ID NO: 2699
  source 1..30: mol_type = other RNA

SEQ ID NO: 19304 - RNA, 23 nt, Synthetic Construct
  source 1..23: mol_type = other RNA
agtcagtttgtcaaataccccaa

SEQ ID NO: 19305 - RNA, 24 nt, Synthetic Construct
  source 1..24: mol_type = other RNA
tgtcagtttgtcaaataccccaag

SEQ ID NO: 19306 - RNA, 24 nt, Synthetic Construct
  source 1..24: mol_type = other RNA
tgtcagtttgtcaaataccccaag

SEQ ID NO: 19307 - RNA, 22 nt, Synthetic Construct
  source 1..22: mol_type = other RNA
tgaggtagtagcttgtgctgtt

SEQ ID NO: 19308 - RNA, 19 nt, Synthetic Construct
  source 1..19: mol_type = other RNA
ccgtgttcggaagattttc

SEQ ID NO: 19309 - RNA, 21 nt, Synthetic Construct
  source 1..21: mol_type = other RNA
acagcaggacggtggccatgg

SEQ ID NO: 19310 - RNA, 21 nt, Synthetic Construct
  source 1..21: mol_type = other RNA
acagcaggacggtggccatgg

SEQ ID NO: 19311 - RNA, 16 nt, Synthetic Construct
  source 1..16: mol_type = other RNA
ggtagctcgttgggct

SEQ ID NO: 19312 - RNA, 22 nt, Synthetic Construct
  source 1..22: mol_type = other RNA
atcacattgccagggatttcca

SEQ ID NO: 19313 - RNA, 22 nt, Synthetic Construct
  source 1..22: mol_type = other RNA
atcacattgccagggatttcca

SEQ ID NO: 19314 - RNA, 24 nt, Synthetic Construct
  source 1..24: mol_type = other RNA
tttggcaatggtagaactcacact

SEQ ID NO: 19315 - RNA, 24 nt, Synthetic Construct
  source 1..24: mol_type = other RNA
tttggcaatggtagaactcacact

SEQ ID NO: 19316 - RNA, 23 nt, Synthetic Construct
  source 1..23: mol_type = other RNA
tagcagcacataatggtttgtgg

SEQ ID NO: 19317 - RNA, 33 nt, Synthetic Construct; identical to SEQ ID NO: 7224
  source 1..33: mol_type = other RNA

SEQ ID NO: 19318 - RNA, 33 nt, Synthetic Construct; identical to SEQ ID NO: 7224
  source 1..33: mol_type = other RNA

SEQ ID NO: 19319 - RNA, 22 nt, Synthetic Construct
  source 1..22: mol_type = other RNA
ggtcggcccacggccctggcgg

SEQ ID NO: 19320 - RNA, 22 nt, Synthetic Construct
  source 1..22: mol_type = other RNA
ggtcggcccacggccctggcgg

SEQ ID NO: 19321 - RNA, 23 nt, Synthetic Construct
  source 1..23: mol_type = other RNA
atgtcccacccccactcctgtta

SEQ ID NO: 19322 - RNA, 23 nt, Synthetic Construct
  source 1..23: mol_type = other RNA
atgtcccacccccactcctgtta

SEQ ID NO: 19323 - RNA, 25 nt, Synthetic Construct
  source 1..25: mol_type = other RNA
ggtaaaatcgctgagtgaagcattg

SEQ ID NO: 19324 - RNA, 22 nt, Synthetic Construct
  source 1..22: mol_type = other RNA
tgaggtagtaggttgtgtggct

SEQ ID NO: 19325 - RNA, 22 nt, Synthetic Construct
  source 1..22: mol_type = other RNA
cattgcacttgtctcagtctga

SEQ ID NO: 19326 - RNA, 26 nt, Synthetic Construct
  source 1..26: mol_type = other RNA
tccctggtggtctagtggttaggatt

SEQ ID NO: 19327 - RNA, 20 nt, Synthetic Construct
  source 1..20: mol_type = other RNA
tacagtatagatgatgtact

SEQ ID NO: 19328 - RNA, 24 nt, Synthetic Construct
  source 1..24: mol_type = other RNA
aaaagctgggttgagagggcgaaa

SEQ ID NO: 19329 - RNA, 23 nt, Synthetic Construct
  source 1..23: mol_type = other RNA
tcctgtactgagctgccctgaga

SEQ ID NO: 19330 - RNA, 23 nt, Synthetic Construct
  source 1..23: mol_type = other RNA
tcctgtactgagctgccctgaga

SEQ ID NO: 19331 - RNA, 25 nt, Synthetic Construct
  source 1..25: mol_type = other RNA
atttccccttggggttgtaggacca

SEQ ID NO: 19332 - RNA, 22 nt, Synthetic Construct
  source 1..22: mol_type = other RNA
tgaggtagtaggttgtataatt

SEQ ID NO: 19333 - RNA, 24 nt, Synthetic Construct
  source 1..24: mol_type = other RNA
tttccccttggggttgtaggacca

SEQ ID NO: 19334 - RNA, 18 nt, Synthetic Construct
  source 1..18: mol_type = other RNA
cctgcggaaggatcattg

SEQ ID NO: 19335 - RNA, 18 nt, Synthetic Construct
  source 1..18: mol_type = other RNA
cctgcggaaggatcattg

SEQ ID NO: 19336 - RNA, 27 nt, Synthetic Construct
  source 1..27: mol_type = other RNA
cgcgggtaaacggcgggagtaactatg

SEQ ID NO: 19337 - RNA, 22 nt, Synthetic Construct
  source 1..22: mol_type = other RNA
tagctccttaagcgaatctcgc

SEQ ID NO: 19338 - RNA, 22 nt, Synthetic Construct
  source 1..22: mol_type = other RNA
tagctccttaagcgaatctcgc

SEQ ID NO: 19339 - RNA, 22 nt, Synthetic Construct
  source 1..22: mol_type = other RNA
tgtcagtttgtcaaatacccaa

SEQ ID NO: 19340 - RNA, 22 nt, Synthetic Construct
  source 1..22: mol_type = other RNA
tatatatatatatgtacgtatg

SEQ ID NO: 19341 - RNA, 22 nt, Synthetic Construct
  source 1..22: mol_type = other RNA
tatatatatatatgtacgtatg

SEQ ID NO: 19342 - RNA, 18 nt, Synthetic Construct
  source 1..18: mol_type = other RNA
gcagcgatggccgagtgg

SEQ ID NO: 19343 - RNA, 18 nt, Synthetic Construct
  source 1..18: mol_type = other RNA
gcagcgatggccgagtgg

SEQ ID NO: 19344 - RNA, 24 nt, Synthetic Construct
  source 1..24: mol_type = other RNA
agtcagtttgtcaaataccccaat

SEQ ID NO: 19345 - RNA, 23 nt, Synthetic Construct
  source 1..23: mol_type = other RNA
tgaggggcggagagcgagacttt

SEQ ID NO: 19346 - RNA, 23 nt, Synthetic Construct
  source 1..23: mol_type = other RNA
tgaggggcggagagcgagacttt

SEQ ID NO: 19347 - RNA, 25 nt, Synthetic Construct
  source 1..25: mol_type = other RNA
aaaccgttaccattactgagtttag

SEQ ID NO: 19348 - RNA, 24 nt, Synthetic Construct
  source 1..24: mol_type = other RNA
agctacatctggctactgggtctc

SEQ ID NO: 19349 - RNA, 24 nt, Synthetic Construct
  source 1..24: mol_type = other RNA
agctacatctggctactgggtctc

SEQ ID NO: 19350 - RNA, 18 nt, Synthetic Construct
  source 1..18: mol_type = other RNA
gtccggatcgtagtctgc

SEQ ID NO: 19351 - RNA, 18 nt, Synthetic Construct
  source 1..18: mol_type = other RNA
gtccggatcgtagtctgc

SEQ ID NO: 19352 - RNA, 22 nt, Synthetic Construct
  source 1..22: mol_type = other RNA
gaatgttgctcggtgaacccct

SEQ ID NO: 19353 - RNA, 22 nt, Synthetic Construct
  source 1..22: mol_type = other RNA
gaatgttgctcggtgaacccct

SEQ ID NO: 19354 - RNA, 31 nt, Synthetic Construct; identical to SEQ ID NO: 1881
  source 1..31: mol_type = other RNA

SEQ ID NO: 19355 - RNA, 21 nt, Synthetic Construct
  source 1..21: mol_type = other RNA
ttcaagtaattcaggataggt

SEQ ID NO: 19356 - RNA, 21 nt, Synthetic Construct
  source 1..21: mol_type = other RNA
ttcaagtaattcaggataggt

SEQ ID NO: 19357 - RNA, 27 nt, Synthetic Construct
  source 1..27: mol_type = other RNA
ccccccactgctaaatttggctggctt

SEQ ID NO: 19358 - RNA, 27 nt, Synthetic Construct
  source 1..27: mol_type = other RNA
ccccccactgctaaatttggctggctt

SEQ ID NO: 19359 - RNA, 16 nt, Synthetic Construct
  source 1..16: mol_type = other RNA
gggaacgtgagctggg

SEQ ID NO: 19360 - RNA, 16 nt, Synthetic Construct
  source 1..16: mol_type = other RNA
gggaacgtgagctggg

SEQ ID NO: 19361 - RNA, 18 nt, Synthetic Construct
  source 1..18: mol_type = other RNA
cctgaagaataagcaccg

SEQ ID NO: 19362 - RNA, 25 nt, Synthetic Construct
  source 1..25: mol_type = other RNA
gctcagtggaaaggatgtgaatcta

SEQ ID NO: 19363 - RNA, 25 nt, Synthetic Construct
  source 1..25: mol_type = other RNA
gctcagtggaaaggatgtgaatcta

SEQ ID NO: 19364 - RNA, 33 nt, Synthetic Construct; identical to SEQ ID NO: 7469
  source 1..33: mol_type = other RNA

SEQ ID NO: 19365 - RNA, 33 nt, Synthetic Construct; identical to SEQ ID NO: 7469
  source 1..33: mol_type = other RNA

SEQ ID NO: 19366 - RNA, 21 nt, Synthetic Construct
  source 1..21: mol_type = other RNA
gtgccgaagctgtgggattga

SEQ ID NO: 19367 - RNA, 21 nt, Synthetic Construct
  source 1..21: mol_type = other RNA
gtgccgaagctgtgggattga

SEQ ID NO: 19368 - RNA, 22 nt, Synthetic Construct
  source 1..22: mol_type = other RNA
taactccttaagcgaatcccgc

SEQ ID NO: 19369 - RNA, 22 nt, Synthetic Construct
  source 1..22: mol_type = other RNA
taactccttaagcgaatcccgc

SEQ ID NO: 19370 - RNA, 17 nt, Synthetic Construct
  source 1..17: mol_type = other RNA
ccaaggggtcgtgggtt

SEQ ID NO: 19371 - RNA, 22 nt, Synthetic Construct
  source 1..22: mol_type = other RNA
tcctgtactgagccgccccgag

SEQ ID NO: 19372 - RNA, 22 nt, Synthetic Construct
  source 1..22: mol_type = other RNA
tcctgtactgagccgccccgag

SEQ ID NO: 19373 - RNA, 23 nt, Synthetic Construct
  source 1..23: mol_type = other RNA
tgagaggcagagagcgagacttt

SEQ ID NO: 19374 - RNA, 18 nt, Synthetic Construct
  source 1..18: mol_type = other RNA
tccgacatgcgagggttc

SEQ ID NO: 19375 - RNA, 16 nt, Synthetic Construct
  source 1..16: mol_type = other RNA
tgcacgaaagcgtggg

SEQ ID NO: 19376 - RNA, 22 nt, Synthetic Construct
  source 1..22: mol_type = other RNA
tagcttatcagactgatgttgg

SEQ ID NO: 19377 - RNA, 32 nt, Synthetic Construct; identical to SEQ ID NO: 2052
  source 1..32: mol_type = other RNA

SEQ ID NO: 19378 - RNA, 32 nt, Synthetic Construct; identical to SEQ ID NO: 2052
  source 1..32: mol_type = other RNA

SEQ ID NO: 19379 - RNA, 22 nt, Synthetic Construct
  source 1..22: mol_type = other RNA
tgagatagtaggttgtatagtt

SEQ ID NO: 19380 - RNA, 21 nt, Synthetic Construct
  source 1..21: mol_type = other RNA
actggacttggagtcagaagg

SEQ ID NO: 19381 - RNA, 21 nt, Synthetic Construct
  source 1..21: mol_type = other RNA
actggacttggagtcagaagg

SEQ ID NO: 19382 - RNA, 24 nt, Synthetic Construct
  source 1..24: mol_type = other RNA
caagtcactagtggttccgtttag

SEQ ID NO: 19383 - RNA, 24 nt, Synthetic Construct
  source 1..24: mol_type = other RNA
caagtcactagtggttccgtttag

SEQ ID NO: 19384 - RNA, 23 nt, Synthetic Construct
  source 1..23: mol_type = other RNA
tattgcacttgtcccggcctgta

SEQ ID NO: 19385 - RNA, 29 nt, Synthetic Construct
  source 1..29: mol_type = other RNA
gcatgggtggttcagtggtagaattctcg

SEQ ID NO: 19386 - RNA, 29 nt, Synthetic Construct
  source 1..29: mol_type = other RNA
gcatgggtggttcagtggtagaattctcg

SEQ ID NO: 19387 - RNA, 22 nt, Synthetic Construct
  source 1..22: mol_type = other RNA
tgaggtagtagttagtgctgtt

SEQ ID NO: 19388 - RNA, 22 nt, Synthetic Construct
  source 1..22: mol_type = other RNA
tgaggtagtaggttgtaaagtt

SEQ ID NO: 19389 - RNA, 22 nt, Synthetic Construct
  source 1..22: mol_type = other RNA
tgaggtagtaggttgtaaagtt

SEQ ID NO: 19390 - RNA, 26 nt, Synthetic Construct
  source 1..26: mol_type = other RNA
tccctggtggtctagtggttaggatt

SEQ ID NO: 19391 - RNA, 22 nt, Synthetic Construct
  source 1..22: mol_type = other RNA
tattgcacttgccccggcctgt

SEQ ID NO: 19392 - RNA, 22 nt, Synthetic Construct
  source 1..22: mol_type = other RNA
tattgcacttgccccggcctgt

SEQ ID NO: 19393 - RNA, 20 nt, Synthetic Construct
  source 1..20: mol_type = other RNA
taaggtagtaggttgtgtgg

SEQ ID NO: 19394 - RNA, 21 nt, Synthetic Construct
  source 1..21: mol_type = other RNA
tggagtgtggcaatggtgttt

SEQ ID NO: 19395 - RNA, 35 nt, Synthetic Construct; identical to SEQ ID NO: 1095
  source 1..35: mol_type = other RNA

SEQ ID NO: 19396 - RNA, 35 nt, Synthetic Construct; identical to SEQ ID NO: 1095
  source 1..35: mol_type = other RNA

SEQ ID NO: 19397 - RNA, 18 nt, Synthetic Construct
  source 1..18: mol_type = other RNA
cccaaaggtcgtcggttc

SEQ ID NO: 19398 - RNA, 18 nt, Synthetic Construct
  source 1..18: mol_type = other RNA
cccaaaggtcgtcggttc

SEQ ID NO: 19399 - RNA, 19 nt, Synthetic Construct
  source 1..19: mol_type = other RNA
gtactgacgctcatgcacg

SEQ ID NO: 19400 - RNA, 22 nt, Synthetic Construct
  source 1..22: mol_type = other RNA
tgaggtagtagtttgtggtgtt

SEQ ID NO: 19401 - RNA, 22 nt, Synthetic Construct
  source 1..22: mol_type = other RNA
tgaggtagtagtttgtggtgtt

SEQ ID NO: 19402 - RNA, 22 nt, Synthetic Construct
  source 1..22: mol_type = other RNA
tgagatagtagattgtatagtt

SEQ ID NO: 19403 - RNA, 22 nt, Synthetic Construct
  source 1..22: mol_type = other RNA
tgagatagtagattgtatagtt

SEQ ID NO: 19404 - RNA, 22 nt, Synthetic Construct
  source 1..22: mol_type = other RNA
ngaggtagtaggttgtatagtt

SEQ ID NO: 19405 - RNA, 22 nt, Synthetic Construct
  source 1..22: mol_type = other RNA
ngaggtagtaggttgtatagtt

SEQ ID NO: 19406 - RNA, 21 nt, Synthetic Construct
  source 1..21: mol_type = other RNA
tgaggggcagagggcgagact

SEQ ID NO: 19407 - RNA, 21 nt, Synthetic Construct
  source 1..21: mol_type = other RNA
tgaggggcagagggcgagact

SEQ ID NO: 19408 - RNA, 22 nt, Synthetic Construct
  source 1..22: mol_type = other RNA
gtagtgtttcctactttatgga

SEQ ID NO: 19409 - RNA, 21 nt, Synthetic Construct
  source 1..21: mol_type = other RNA
tgaggggcggagagcgagact

SEQ ID NO: 19410 - RNA, 21 nt, Synthetic Construct
  source 1..21: mol_type = other RNA
tgaggggcggagagcgagact

SEQ ID NO: 19411 - RNA, 22 nt, Synthetic Construct
  source 1..22: mol_type = other RNA
tccctgagaccctaacttgtga

SEQ ID NO: 19412 - RNA, 22 nt, Synthetic Construct
  source 1..22: mol_type = other RNA
tccctgagaccctaacttgtga

SEQ ID NO: 19413 - RNA, 39 nt, Synthetic Construct; identical to SEQ ID NO: 804
  source 1..39: mol_type = other RNA

SEQ ID NO: 19414 - RNA, 39 nt, Synthetic Construct; identical to SEQ ID NO: 804
  source 1..39: mol_type = other RNA

SEQ ID NO: 19415 - RNA, 24 nt, Synthetic Construct
  source 1..24: mol_type = other RNA
tcttggagtaggtcattgggtgga

SEQ ID NO: 19416 - RNA, 21 nt, Synthetic Construct
  source 1..21: mol_type = other RNA
ctcggcgtggcgtcggtcgtg

SEQ ID NO: 19417 - RNA, 21 nt, Synthetic Construct
  source 1..21: mol_type = other RNA
ctcggcgtggcgtcggtcgtg

SEQ ID NO: 19418 - RNA, 22 nt, Synthetic Construct
  source 1..22: mol_type = other RNA
tgaggtagtgggttgtatagtt

SEQ ID NO: 19419 - RNA, 23 nt, Synthetic Construct
  source 1..23: mol_type = other RNA
agaggggcagagagcgagacttt

SEQ ID NO: 19420 - RNA, 31 nt, Synthetic Construct; identical to SEQ ID NO: 6001
  source 1..31: mol_type = other RNA

SEQ ID NO: 19421 - RNA, 31 nt, Synthetic Construct; identical to SEQ ID NO: 6001
  source 1..31: mol_type = other RNA

SEQ ID NO: 19422 - RNA, 23 nt, Synthetic Construct
  source 1..23: mol_type = other RNA
aatgacacgatcactcccgttgt

SEQ ID NO: 19423 - RNA, 19 nt, Synthetic Construct
  source 1..19: mol_type = other RNA
aacggcgggagtaactatg

SEQ ID NO: 19424 - RNA, 41 nt, Synthetic Construct; identical to SEQ ID NO: 781
  source 1..41: mol_type = other RNA

SEQ ID NO: 19425 - RNA, 41 nt, Synthetic Construct; identical to SEQ ID NO: 781
  source 1..41: mol_type = other RNA

SEQ ID NO: 19426 - RNA, 21 nt, Synthetic Construct
  source 1..21: mol_type = other RNA
cactgatcgagtcgtcctgcg

SEQ ID NO: 19427 - RNA, 16 nt, Synthetic Construct
  source 1..16: mol_type = other RNA
cacaccgcccgtcgct

SEQ ID NO: 19428 - RNA, 16 nt, Synthetic Construct
  source 1..16: mol_type = other RNA
cacaccgcccgtcgct

SEQ ID NO: 19429 - RNA, 24 nt, Synthetic Construct
  source 1..24: mol_type = other RNA
tatatcggaacgtgcccagtcgtg

SEQ ID NO: 19430 - RNA, 23 nt, Synthetic Construct
  source 1..23: mol_type = other RNA
caacggaatcccaaaagcagcta

SEQ ID NO: 19431 - RNA, 22 nt, Synthetic Construct
  source 1..22: mol_type = other RNA
tcgtaccgtgagtaataatgtg

SEQ ID NO: 19432 - RNA, 20 nt, Synthetic Construct
  source 1..20: mol_type = other RNA
ctcgtagttggatcttggga

SEQ ID NO: 19433 - RNA, 22 nt, Synthetic Construct
  source 1..22: mol_type = other RNA
taactccttaagcgagtctcgc

SEQ ID NO: 19434 - RNA, 22 nt, Synthetic Construct
  source 1..22: mol_type = other RNA
atcaagtaattcaggataggtt

SEQ ID NO: 19435 - RNA, 20 nt, Synthetic Construct
  source 1..20: mol_type = other RNA
gctattgacgaccgtaccgc

SEQ ID NO: 19436 - RNA, 20 nt, Synthetic Construct
  source 1..20: mol_type = other RNA
gctattgacgaccgtaccgc

SEQ ID NO: 19437 - RNA, 22 nt, Synthetic Construct
  source 1..22: mol_type = other RNA
gagagtaggacgttgccaggtt

SEQ ID NO: 19438 - RNA, 22 nt, Synthetic Construct
  source 1..22: mol_type = other RNA
gagagtaggacgttgccaggtt

SEQ ID NO: 19439 - RNA, 16 nt, Synthetic Construct
  source 1..16: mol_type = other RNA
gcagacgaagtgagtg

SEQ ID NO: 19440 - RNA, 16 nt, Synthetic Construct
  source 1..16: mol_type = other RNA
gcagacgaagtgagtg

SEQ ID NO: 19441 - RNA, 23 nt, Synthetic Construct
  source 1..23: mol_type = other RNA
tcctgtactgagctgctccgaga

SEQ ID NO: 19442 - RNA, 23 nt, Synthetic Construct
  source 1..23: mol_type = other RNA
tcctgtactgagctgctccgaga

SEQ ID NO: 19443 - RNA, 22 nt, Synthetic Construct
  source 1..22: mol_type = other RNA
ccctgtactgagctgccccgag

SEQ ID NO: 19444 - RNA, 22 nt, Synthetic Construct
  source 1..22: mol_type = other RNA
ccctgtactgagctgccccgag

SEQ ID NO: 19445 - RNA, 23 nt, Synthetic Construct
  source 1..23: mol_type = other RNA
tcgaccggacctcgaccggctcg

SEQ ID NO: 19446 - RNA, 23 nt, Synthetic Construct
  source 1..23: mol_type = other RNA
tcgaccggacctcgaccggctcg

SEQ ID NO: 19447 - RNA, 25 nt, Synthetic Construct
  source 1..25: mol_type = other RNA
aatgacacgatcactcccgttgaga

SEQ ID NO: 19448 - RNA, 25 nt, Synthetic Construct
  source 1..25: mol_type = other RNA
aatgacacgatcactcccgttgaga

SEQ ID NO: 19449 - RNA, 16 nt, Synthetic Construct
  source 1..16: mol_type = other RNA
gtccggatcgtagtct

SEQ ID NO: 19450 - RNA, 17 nt, Synthetic Construct
  source 1..17: mol_type = other RNA
cccctggacctgtactg

SEQ ID NO: 19451 - RNA, 18 nt, Synthetic Construct
  source 1..18: mol_type = other RNA
tcttcggtagtatagtgg

SEQ ID NO: 19452 - RNA, 17 nt, Synthetic Construct
  source 1..17: mol_type = other RNA
cgatctgtagctggtct

SEQ ID NO: 19453 - RNA, 17 nt, Synthetic Construct
  source 1..17: mol_type = other RNA
cgatctgtagctggtct

SEQ ID NO: 19454 - RNA, 18 nt, Synthetic Construct
  source 1..18: mol_type = other RNA
tcccctggacctgtactg

SEQ ID NO: 19455 - RNA, 16 nt, Synthetic Construct
  source 1..16: mol_type = other RNA
ggcgggggtcgctggt

SEQ ID NO: 19456 - RNA, 16 nt, Synthetic Construct
  source 1..16: mol_type = other RNA
ggcgggggtcgctggt

SEQ ID NO: 19457 - RNA, 21 nt, Synthetic Construct
  source 1..21: mol_type = other RNA
taactcctaagcgaatctcgc

SEQ ID NO: 19458 - RNA, 16 nt, Synthetic Construct
  source 1..16: mol_type = other RNA
gagctgtggatagggg

SEQ ID NO: 19459 - RNA, 23 nt, Synthetic Construct
  source 1..23: mol_type = other RNA
ttatggtttgcctgggactgagt

SEQ ID NO: 19460 - RNA, 22 nt, Synthetic Construct
  source 1..22: mol_type = other RNA
tcactgatcgagtcgtcctgcg

SEQ ID NO: 19461 - RNA, 22 nt, Synthetic Construct
  source 1..22: mol_type = other RNA
tgaggtagtaggttgtacagtt

SEQ ID NO: 19462 - RNA, 25 nt, Synthetic Construct
  source 1..25: mol_type = other RNA
tgtaaacatccccgactggaagctt

SEQ ID NO: 19463 - RNA, 22 nt, Synthetic Construct
  source 1..22: mol_type = other RNA
tatatatatatatgtacgtatg

SEQ ID NO: 19464 - RNA, 22 nt, Synthetic Construct
  source 1..22: mol_type = other RNA
tatatatatatatgtacgtatg

SEQ ID NO: 19465 - RNA, 21 nt, Synthetic Construct
  source 1..21: mol_type = other RNA
ctagactgaggctccttgagg

SEQ ID NO: 19466 - RNA, 28 nt, Synthetic Construct
  source 1..28: mol_type = other RNA
ccccccactgctaaatttggctggcttt

SEQ ID NO: 19467 - RNA, 28 nt, Synthetic Construct
  source 1..28: mol_type = other RNA
ccccccactgctaaatttggctggcttt

SEQ ID NO: 19468 - RNA, 20 nt, Synthetic Construct
  source 1..20: mol_type = other RNA
actgatcgagtcgtcctgcg

SEQ ID NO: 19469 - RNA, 18 nt, Synthetic Construct
  source 1..18: mol_type = other RNA
aaccgggcggaaacacca

SEQ ID NO: 19470 - RNA, 18 nt, Synthetic Construct
  source 1..18: mol_type = other RNA
aaccgggcggaaacacca

SEQ ID NO: 19471 - RNA, 22 nt, Synthetic Construct
  source 1..22: mol_type = other RNA
gaagttgttcgtggtggattcg

SEQ ID NO: 19472 - RNA, 21 nt, Synthetic Construct
  source 1..21: mol_type = other RNA
caacggaatcccaaaagcagc

SEQ ID NO: 19473 - RNA, 21 nt, Synthetic Construct
  source 1..21: mol_type = other RNA
caacggaatcccaaaagcagc

SEQ ID NO: 19474 - RNA, 21 nt, Synthetic Construct
  source 1..21: mol_type = other RNA
tatgtctgctgaccatcacct

SEQ ID NO: 19475 - RNA, 21 nt, Synthetic Construct
  source 1..21: mol_type = other RNA
tatgtctgctgaccatcacct

SEQ ID NO: 19476 - RNA, 25 nt, Synthetic Construct
  source 1..25: mol_type = other RNA
cctcgcgcgattggagcggccgata

SEQ ID NO: 19477 - RNA, 25 nt, Synthetic Construct
  source 1..25: mol_type = other RNA
cctcgcgcgattggagcggccgata

SEQ ID NO: 19478 - RNA, 22 nt, Synthetic Construct
  source 1..22: mol_type = other RNA
tgaggtagtaggttgtgttgtt

SEQ ID NO: 19479 - RNA, 15 nt, Synthetic Construct
  source 1..15: mol_type = other RNA
tcagtagctcgagga

SEQ ID NO: 19480 - RNA, 15 nt, Synthetic Construct
  source 1..15: mol_type = other RNA
tcagtagctcgagga

SEQ ID NO: 19481 - RNA, 25 nt, Synthetic Construct
  source 1..25: mol_type = other RNA
gttgaattgtggtctgtggacgtgg

SEQ ID NO: 19482 - RNA, 25 nt, Synthetic Construct
  source 1..25: mol_type = other RNA
gttgaattgtggtctgtggacgtgg

SEQ ID NO: 19483 - RNA, 29 nt, Synthetic Construct
  source 1..29: mol_type = other RNA
gcccggctagctcagtcggtagagcatgg

SEQ ID NO: 19484 - RNA, 22 nt, Synthetic Construct
  source 1..22: mol_type = other RNA
cagtgcaatgttaaaagggcat

SEQ ID NO: 19485 - RNA, 21 nt, Synthetic Construct
  source 1..21: mol_type = other RNA
ctagactgaagctccttgagt

SEQ ID NO: 19486 - RNA, 21 nt, Synthetic Construct
  source 1..21: mol_type = other RNA
ctagactgaagctccttgagt

SEQ ID NO: 19487 - RNA, 16 nt, Synthetic Construct
  source 1..16: mol_type = other RNA
ctctacggccatacca

SEQ ID NO: 19488 - RNA, 16 nt, Synthetic Construct
  source 1..16: mol_type = other RNA
ctctacggccatacca

SEQ ID NO: 19489 - RNA, 25 nt, Synthetic Construct
  source 1..25: mol_type = other RNA
gagaaagctcacaagaactgctaac

SEQ ID NO: 19490 - RNA, 24 nt, Synthetic Construct
  source 1..24: mol_type = other RNA
gggttgtaaaccgcttttgtcagg

SEQ ID NO: 19491 - RNA, 21 nt, Synthetic Construct
  source 1..21: mol_type = other RNA
caaagaattctccttttgggc

SEQ ID NO: 19492 - RNA, 21 nt, Synthetic Construct
  source 1..21: mol_type = other RNA
caaagaattctccttttgggc

SEQ ID NO: 19493 - RNA, 22 nt, Synthetic Construct
  source 1..22: mol_type = other RNA
tgacgtagtaggttgtatagtt

SEQ ID NO: 19494 - RNA, 21 nt, Synthetic Construct
  source 1..21: mol_type = other RNA
gcccgtgttcggaagattttc

SEQ ID NO: 19495 - RNA, 21 nt, Synthetic Construct
  source 1..21: mol_type = other RNA
cgtaccgtgagtaataatgcg

SEQ ID NO: 19496 - RNA, 21 nt, Synthetic Construct
  source 1..21: mol_type = other RNA
cgtaccgtgagtaataatgcg

SEQ ID NO: 19497 - RNA, 23 nt, Synthetic Construct
  source 1..23: mol_type = other RNA
tggggtagtaggttgtgtggttt

SEQ ID NO: 19498 - RNA, 23 nt, Synthetic Construct
  source 1..23: mol_type = other RNA
tggggtagtaggttgtgtggttt

SEQ ID NO: 19499 - RNA, 23 nt, Synthetic Construct
  source 1..23: mol_type = other RNA
gttctacagtccgacgatcgatc

SEQ ID NO: 19500 - RNA, 23 nt, Synthetic Construct
  source 1..23: mol_type = other RNA
gttctacagtccgacgatcgatc

SEQ ID NO: 19501 - RNA, 22 nt, Synthetic Construct
  source 1..22: mol_type = other RNA
ttcaagtaatccaggatgggct

SEQ ID NO: 19502 - RNA, 22 nt, Synthetic Construct
  source 1..22: mol_type = other RNA
tggaatgtaaggaagtgtgtgg

SEQ ID NO: 19503 - RNA, 23 nt, Synthetic Construct
  source 1..23: mol_type = other RNA
tggaatgtaaagaagtatgtata

SEQ ID NO: 19504 - RNA, 32 nt, Synthetic Construct; identical to SEQ ID NO: 989
  source 1..32: mol_type = other RNA

SEQ ID NO: 19505 - RNA, 23 nt, Synthetic Construct
  source 1..23: mol_type = other RNA
gctgactcctagtccagggctct

SEQ ID NO: 19506 - RNA, 23 nt, Synthetic Construct
  source 1..23: mol_type = other RNA
gctgactcctagtccagggctct

SEQ ID NO: 19507 - RNA, 23 nt, Synthetic Construct
  source 1..23: mol_type = other RNA
cctcgcgcgattggagcggccga

SEQ ID NO: 19508 - RNA, 18 nt, Synthetic Construct
  source 1..18: mol_type = other RNA
ggctttgaagtaaggtcg

SEQ ID NO: 19509 - RNA, 27 nt, Synthetic Construct
  source 1..27: mol_type = other RNA
agagcagctaataccgcatacgacctg

SEQ ID NO: 19510 - RNA, 23 nt, Synthetic Construct
  source 1..23: mol_type = other RNA
caaagtgctgttcgtacaggtag

SEQ ID NO: 19511 - RNA, 16 nt, Synthetic Construct
  source 1..16: mol_type = other RNA
atgcaagtcgaacggt

SEQ ID NO: 19512 - RNA, 23 nt, Synthetic Construct
  source 1..23: mol_type = other RNA
aaaagctgggttgagagggcgtt

SEQ ID NO: 19513 - RNA, 23 nt, Synthetic Construct
  source 1..23: mol_type = other RNA
aaaagctgggttgagagggcgtt

SEQ ID NO: 19514 - RNA, 23 nt, Synthetic Construct
  source 1..23: mol_type = other RNA
cagcccgtgttcggaagattttc

SEQ ID NO: 19515 - RNA, 20 nt, Synthetic Construct
  source 1..20: mol_type = other RNA
tccccggcatctccaccaaa

SEQ ID NO: 19516 - RNA, 20 nt, Synthetic Construct
  source 1..20: mol_type = other RNA
tccccggcatctccaccaaa

SEQ ID NO: 19517 - RNA, 27 nt, Synthetic Construct
  source 1..27: mol_type = other RNA
ccccccactgctaaatttgactagctt

SEQ ID NO: 19518 - RNA, 20 nt, Synthetic Construct
  source 1..20: mol_type = other RNA
tatgtctgctgaccatcacc

SEQ ID NO: 19519 - RNA, 20 nt, Synthetic Construct
  source 1..20: mol_type = other RNA
tatgtctgctgaccatcacc

SEQ ID NO: 19520 - RNA, 22 nt, Synthetic Construct
  source 1..22: mol_type = other RNA
tgaggtagtagtctgtgctgtt

SEQ ID NO: 19521 - RNA, 22 nt, Synthetic Construct
  source 1..22: mol_type = other RNA
tcccgtactgagctgccccgag

SEQ ID NO: 19522 - RNA, 22 nt, Synthetic Construct
  source 1..22: mol_type = other RNA
tcccgtactgagctgccccgag

SEQ ID NO: 19523 - RNA, 20 nt, Synthetic Construct
  source 1..20: mol_type = other RNA
tatgtctgctgaccatcacc

SEQ ID NO: 19524 - RNA, 21 nt, Synthetic Construct
  source 1..21: mol_type = other RNA
tcacagtgaaccggtctcttt

SEQ ID NO: 19525 - RNA, 21 nt, Synthetic Construct
  source 1..21: mol_type = other RNA
tcacagtgaaccggtctcttt

SEQ ID NO: 19526 - RNA, 19 nt, Synthetic Construct
  source 1..19: mol_type = other RNA
cccttgtcattagttgcta

SEQ ID NO: 19527 - RNA, 22 nt, Synthetic Construct
  source 1..22: mol_type = other RNA
taaggtagtagtttgtgctgtt

SEQ ID NO: 19528 - RNA, 22 nt, Synthetic Construct
  source 1..22: mol_type = other RNA
taaggtagtagtttgtgctgtt

SEQ ID NO: 19529 - RNA, 22 nt, Synthetic Construct
  source 1..22: mol_type = other RNA
tgaggcagtagtttgtgctgtt

SEQ ID NO: 19530 - RNA, 22 nt, Synthetic Construct
  source 1..22: mol_type = other RNA
tgaggtagtagattgtatggtt

SEQ ID NO: 19531 - RNA, 21 nt, Synthetic Construct
  source 1..21: mol_type = other RNA
agctcggtctgaggcccctca

SEQ ID NO: 19532 - RNA, 20 nt, Synthetic Construct
  source 1..20: mol_type = other RNA
caacggaatcccaaaagcag

SEQ ID NO: 19533 - RNA, 20 nt, Synthetic Construct
  source 1..20: mol_type = other RNA
caacggaatcccaaaagcag

SEQ ID NO: 19534 - RNA, 29 nt, Synthetic Construct
  source 1..29: mol_type = other RNA
gcgccgctggtgtagtggtatcatgcaag

SEQ ID NO: 19535 - RNA, 22 nt, Synthetic Construct
  source 1..22: mol_type = other RNA
tagcagctcgtaaatattggcg

SEQ ID NO: 19536 - RNA, 22 nt, Synthetic Construct
  source 1..22: mol_type = other RNA
tagcagctcgtaaatattggcg

SEQ ID NO: 19537 - RNA, 27 nt, Synthetic Construct
  source 1..27: mol_type = other RNA
ccccccgctgctaaatttgactggctt

SEQ ID NO: 19538 - RNA, 27 nt, Synthetic Construct
  source 1..27: mol_type = other RNA
ccccccgctgctaaatttgactggctt

SEQ ID NO: 19539 - RNA, 17 nt, Synthetic Construct
  source 1..17: mol_type = other RNA
gtgttcggaagattttc

SEQ ID NO: 19540 - RNA, 22 nt, Synthetic Construct
  source 1..22: mol_type = other RNA
tcctgtactgagctgccccggg

SEQ ID NO: 19541 - RNA, 22 nt, Synthetic Construct
  source 1..22: mol_type = other RNA
tcctgtactgagctgccccggg

SEQ ID NO: 19542 - RNA, 17 nt, Synthetic Construct
  source 1..17: mol_type = other RNA
catgcaagtcgaacggt

SEQ ID NO: 19543 - RNA, 17 nt, Synthetic Construct
  source 1..17: mol_type = other RNA
catgcaagtcgaacggt

SEQ ID NO: 19544 - RNA, 22 nt, Synthetic Construct
  source 1..22: mol_type = other RNA
accctgtagatccgaatttgtg

SEQ ID NO: 19545 - RNA, 32 nt, Synthetic Construct; identical to SEQ ID NO: 4279
  source 1..32: mol_type = other RNA

SEQ ID NO: 19546 - RNA, 22 nt, Synthetic Construct
  source 1..22: mol_type = other RNA
tcagtgcatgacagaacttggg

SEQ ID NO: 19547 - RNA, 28 nt, Synthetic Construct
  source 1..28: mol_type = other RNA
ggcagggttcgtgactggggtgaagtcg

SEQ ID NO: 19548 - RNA, 28 nt, Synthetic Construct
  source 1..28: mol_type = other RNA
ggcagggttcgtgactggggtgaagtcg

SEQ ID NO: 19549 - RNA, 20 nt, Synthetic Construct
  source 1..20: mol_type = other RNA
acctgtactgagctgccccg

SEQ ID NO: 19550 - RNA, 21 nt, Synthetic Construct
  source 1..21: mol_type = other RNA
ggagtatgcagagcaagatca

SEQ ID NO: 19551 - RNA, 16 nt, Synthetic Construct
  source 1..16: mol_type = other RNA
cagtcaggatgttggc

SEQ ID NO: 19552 - RNA, 16 nt, Synthetic Construct
  source 1..16: mol_type = other RNA
cagtcaggatgttggc

SEQ ID NO: 19553 - RNA, 15 nt, Synthetic Construct
  source 1..15: mol_type = other RNA
tccggatcgtagtct

SEQ ID NO: 19554 - RNA, 15 nt, Synthetic Construct
  source 1..15: mol_type = other RNA
tccggatcgtagtct

SEQ ID NO: 19555 - RNA, 21 nt, Synthetic Construct
  source 1..21: mol_type = other RNA
tcctgtactgagccgccccga

SEQ ID NO: 19556 - RNA, 21 nt, Synthetic Construct
  source 1..21: mol_type = other RNA
tcctgtactgagccgccccga

SEQ ID NO: 19557 - RNA, 20 nt, Synthetic Construct
  source 1..20: mol_type = other RNA
gtcagtttgtcaaatacccc

SEQ ID NO: 19558 - RNA, 19 nt, Synthetic Construct
  source 1..19: mol_type = other RNA
cattattacttttggtacg

SEQ ID NO: 19559 - RNA, 23 nt, Synthetic Construct
  source 1..23: mol_type = other RNA
aaaccgttaccattactgagttt

SEQ ID NO: 19560 - RNA, 16 nt, Synthetic Construct
  source 1..16: mol_type = other RNA
aggtcatcgtcaggct

SEQ ID NO: 19561 - RNA, 16 nt, Synthetic Construct
  source 1..16: mol_type = other RNA
aggtcatcgtcaggct

SEQ ID NO: 19562 - RNA, 21 nt, Synthetic Construct
  source 1..21: mol_type = other RNA
tagcttatcagactgatgttg

SEQ ID NO: 19563 - RNA, 21 nt, Synthetic Construct
  source 1..21: mol_type = other RNA
tagcttatcagactgatgttg

SEQ ID NO: 19564 - RNA, 28 nt, Synthetic Construct
  source 1..28: mol_type = other RNA
ggcagggttcgtgactggggtgaagtcg

SEQ ID NO: 19565 - RNA, 28 nt, Synthetic Construct
  source 1..28: mol_type = other RNA
ggcagggttcgtgactggggtgaagtcg

SEQ ID NO: 19566 - RNA, 28 nt, Synthetic Construct
  source 1..28: mol_type = other RNA
tgttggttcaagcgtgtagtcgtgctct

SEQ ID NO: 19567 - RNA, 28 nt, Synthetic Construct
  source 1..28: mol_type = other RNA
tgttggttcaagcgtgtagtcgtgctct

SEQ ID NO: 19568 - RNA, 23 nt, Synthetic Construct
  source 1..23: mol_type = other RNA
tctcacacagaaatcgcacccgt

SEQ ID NO: 19569 - RNA, 22 nt, Synthetic Construct
  source 1..22: mol_type = other RNA
tgaggtagtagtttgtgctgct

SEQ ID NO: 19570 - RNA, 22 nt, Synthetic Construct
  source 1..22: mol_type = other RNA
tgaggtagtagtttgtgctgta

SEQ ID NO: 19571 - RNA, 22 nt, Synthetic Construct
  source 1..22: mol_type = other RNA
tgaggtagtagtttgtgctgta

SEQ ID NO: 19572 - RNA, 22 nt, Synthetic Construct
  source 1..22: mol_type = other RNA
taccagcacgtaaatattggcg

SEQ ID NO: 19573 - RNA, 22 nt, Synthetic Construct
  source 1..22: mol_type = other RNA
tgaggtagtaggatgtatagtt

SEQ ID NO: 19574 - RNA, 22 nt, Synthetic Construct
  source 1..22: mol_type = other RNA
tgaggtagtaggatgtatagtt

SEQ ID NO: 19575 - RNA, 22 nt, Synthetic Construct
  source 1..22: mol_type = other RNA
tgaggtagtaggttgtggggtt

SEQ ID NO: 19576 - RNA, 22 nt, Synthetic Construct
  source 1..22: mol_type = other RNA
tgaggtagtaggttgtggggtt

SEQ ID NO: 19577 - RNA, 17 nt, Synthetic Construct
  source 1..17: mol_type = other RNA
ctaatgagactgccggt

SEQ ID NO: 19578 - RNA, 18 nt, Synthetic Construct
  source 1..18: mol_type = other RNA
gcgccgatgatagtgcgg

SEQ ID NO: 19579 - RNA, 21 nt, Synthetic Construct
  source 1..21: mol_type = other RNA
cccttggggttgtaggaccac

SEQ ID NO: 19580 - RNA, 21 nt, Synthetic Construct
  source 1..21: mol_type = other RNA
tcctgtactgagctgcaccga

SEQ ID NO: 19581 - RNA, 21 nt, Synthetic Construct
  source 1..21: mol_type = other RNA
tcctgtactgagctgcaccga

SEQ ID NO: 19582 - RNA, 24 nt, Synthetic Construct
  source 1..24: mol_type = other RNA
aagctcggtctgaggcccctcagt

SEQ ID NO: 19583 - RNA, 24 nt, Synthetic Construct
  source 1..24: mol_type = other RNA
aagctcggtctgaggcccctcagt

SEQ ID NO: 19584 - RNA, 15 nt, Synthetic Construct
  source 1..15: mol_type = other RNA
ggccgtcgtcagctc

SEQ ID NO: 19585 - RNA, 15 nt, Synthetic Construct
  source 1..15: mol_type = other RNA
ggccgtcgtcagctc

SEQ ID NO: 19586 - RNA, 21 nt, Synthetic Construct
  source 1..21: mol_type = other RNA
tagcagcacgtaaatattggc

SEQ ID NO: 19587 - RNA, 31 nt, Synthetic Construct; identical to SEQ ID NO: 7160
  source 1..31: mol_type = other RNA

SEQ ID NO: 19588 - RNA, 31 nt, Synthetic Construct; identical to SEQ ID NO: 7160
  source 1..31: mol_type = other RNA

SEQ ID NO: 19589 - RNA, 21 nt, Synthetic Construct
  source 1..21: mol_type = other RNA
taatactgcctggtaatgatg

SEQ ID NO: 19590 - RNA, 21 nt, Synthetic Construct
  source 1..21: mol_type = other RNA
taatactgcctggtaatgatg

SEQ ID NO: 19591 - RNA, 22 nt, Synthetic Construct
  source 1..22: mol_type = other RNA
aagaagcacgtaaatattggcg

SEQ ID NO: 19592 - RNA, 21 nt, Synthetic Construct
  source 1..21: mol_type = other RNA
aagctgccagttgaagaactg

SEQ ID NO: 19593 - RNA, 21 nt, Synthetic Construct
  source 1..21: mol_type = other RNA
aagctgccagttgaagaactg

SEQ ID NO: 19594 - RNA, 22 nt, Synthetic Construct
  source 1..22: mol_type = other RNA
tcacagtgaaccggtctcttta

SEQ ID NO: 19595 - RNA, 21 nt, Synthetic Construct
  source 1..21: mol_type = other RNA
agaggtagtaggttgtgtggt

SEQ ID NO: 19596 - RNA, 16 nt, Synthetic Construct
  source 1..16: mol_type = other RNA
ctctacggccatacca

SEQ ID NO: 19597 - RNA, 20 nt, Synthetic Construct
  source 1..20: mol_type = other RNA
tgaggtagtaggtcgtgtgg

SEQ ID NO: 19598 - RNA, 20 nt, Synthetic Construct
  source 1..20: mol_type = other RNA
tgaggtagtaggtcgtgtgg

SEQ ID NO: 19599 - RNA, 22 nt, Synthetic Construct
  source 1..22: mol_type = other RNA
tcctgtactgagttgccccgag

SEQ ID NO: 19600 - RNA, 22 nt, Synthetic Construct
  source 1..22: mol_type = other RNA
tcctgtactgagttgccccgag

SEQ ID NO: 19601 - RNA, 22 nt, Synthetic Construct
  source 1..22: mol_type = other RNA
gaagaggacttggaactcgatc

SEQ ID NO: 19602 - RNA, 23 nt, Synthetic Construct
  source 1..23: mol_type = other RNA
caaagtgctgttcgtgtaggtag

SEQ ID NO: 19603 - RNA, 21 nt, Synthetic Construct
  source 1..21: mol_type = other RNA
tactccttaagcgaatctcgc

SEQ ID NO: 19604 - RNA, 21 nt, Synthetic Construct
  source 1..21: mol_type = other RNA
tactccttaagcgaatctcgc

SEQ ID NO: 19605 - RNA, 27 nt, Synthetic Construct
  source 1..27: mol_type = other RNA
cgtgtgaaagtaggtcatcgtcaggct

SEQ ID NO: 19606 - RNA, 27 nt, Synthetic Construct
  source 1..27: mol_type = other RNA
cgtgtgaaagtaggtcatcgtcaggct

SEQ ID NO: 19607 - RNA, 21 nt, Synthetic Construct
  source 1..21: mol_type = other RNA
tgaggtagtaggttgtatggt

SEQ ID NO: 19608 - RNA, 19 nt, Synthetic Construct
  source 1..19: mol_type = other RNA
aggacagtgaaacgagtca

SEQ ID NO: 19609 - RNA, 19 nt, Synthetic Construct
  source 1..19: mol_type = other RNA
aggacagtgaaacgagtca

SEQ ID NO: 19610 - RNA, 22 nt, Synthetic Construct
  source 1..22: mol_type = other RNA
tgaggtagtaggttgtgtggat

SEQ ID NO: 19611 - RNA, 25 nt, Synthetic Construct
  source 1..25: mol_type = other RNA
ttgaggatatgagatcgaggcgaca

SEQ ID NO: 19612 - RNA, 25 nt, Synthetic Construct
  source 1..25: mol_type = other RNA
ttgaggatatgagatcgaggcgaca

SEQ ID NO: 19613 - RNA, 22 nt, Synthetic Construct
  source 1..22: mol_type = other RNA
tgaggtagtgggttgtatagtt

SEQ ID NO: 19614 - RNA, 22 nt, Synthetic Construct
  source 1..22: mol_type = other RNA
tgaggtagtgggttgtatagtt

SEQ ID NO: 19615 - RNA, 22 nt, Synthetic Construct
  source 1..22: mol_type = other RNA
acagtagtctgcacattggttt

SEQ ID NO: 19616 - RNA, 22 nt, Synthetic Construct
  source 1..22: mol_type = other RNA
taactacttaagcgaatctcgc

SEQ ID NO: 19617 - RNA, 22 nt, Synthetic Construct
  source 1..22: mol_type = other RNA
taactacttaagcgaatctcgc

SEQ ID NO: 19618 - RNA, 27 nt, Synthetic Construct
  source 1..27: mol_type = other RNA
ccccccacagctaaatttgactggctt

SEQ ID NO: 19619 - RNA, 22 nt, Synthetic Construct
  source 1..22: mol_type = other RNA
catcgggaatgtcgtgtccgcc

SEQ ID NO: 19620 - RNA, 22 nt, Synthetic Construct
  source 1..22: mol_type = other RNA
catcgggaatgtcgtgtccgcc

SEQ ID NO: 19621 - RNA, 37 nt, Synthetic Construct; identical to SEQ ID NO: 8986
  source 1..37: mol_type = other RNA

SEQ ID NO: 19622 - RNA, 37 nt, Synthetic Construct; identical to SEQ ID NO: 8986
  source 1..37: mol_type = other RNA

SEQ ID NO: 19623 - RNA, 23 nt, Synthetic Construct
  source 1..23: mol_type = other RNA
atatcggaacgtgcccagtcgtg

SEQ ID NO: 19624 - RNA, 20 nt, Synthetic Construct
  source 1..20: mol_type = other RNA
ccacctcccctgcaaacgtc

SEQ ID NO: 19625 - RNA, 20 nt, Synthetic Construct
  source 1..20: mol_type = other RNA
ccacctcccctgcaaacgtc

SEQ ID NO: 19626 - RNA, 20 nt, Synthetic Construct
  source 1..20: mol_type = other RNA
ggggatgtagctcagatggt

SEQ ID NO: 19627 - RNA, 21 nt, Synthetic Construct
  source 1..21: mol_type = other RNA
tccctgtcctccaggagctca

SEQ ID NO: 19628 - RNA, 19 nt, Synthetic Construct
  source 1..19: mol_type = other RNA
tgtcaactggttgttggga

SEQ ID NO: 19629 - RNA, 22 nt, Synthetic Construct
  source 1..22: mol_type = other RNA
ggaggtagtaggttgtgtggtt

SEQ ID NO: 19630 - RNA, 22 nt, Synthetic Construct
  source 1..22: mol_type = other RNA
ggaggtagtaggttgtgtggtt

SEQ ID NO: 19631 - RNA, 19 nt, Synthetic Construct
  source 1..19: mol_type = other RNA
ggggatgtagctcagatgg

SEQ ID NO: 19632 - RNA, 23 nt, Synthetic Construct
  source 1..23: mol_type = other RNA
tacagtactgtgataactgaaga

SEQ ID NO: 19633 - RNA, 18 nt, Synthetic Construct
  source 1..18: mol_type = other RNA
ggctttgaagtaaggtcg

SEQ ID NO: 19634 - RNA, 18 nt, Synthetic Construct
  source 1..18: mol_type = other RNA
ggctttgaagtaaggtcg

SEQ ID NO: 19635 - RNA, 23 nt, Synthetic Construct
  source 1..23: mol_type = other RNA
tcggatccgtctgagcttggctt

SEQ ID NO: 19636 - RNA, 21 nt, Synthetic Construct
  source 1..21: mol_type = other RNA
tgaggtagaaggttgtgtggt

SEQ ID NO: 19637 - RNA, 21 nt, Synthetic Construct
  source 1..21: mol_type = other RNA
tgaggtagaaggttgtgtggt

SEQ ID NO: 19638 - RNA, 23 nt, Synthetic Construct
  source 1..23: mol_type = other RNA
caacggaatcccaaaagcagctt

SEQ ID NO: 19639 - RNA, 24 nt, Synthetic Construct
  source 1..24: mol_type = other RNA
aatgacacgatcactcccgttgag

SEQ ID NO: 19640 - RNA, 24 nt, Synthetic Construct
  source 1..24: mol_type = other RNA
aatgacacgatcactcccgttgag

SEQ ID NO: 19641 - RNA, 17 nt, Synthetic Construct
  source 1..17: mol_type = other RNA
agtgacgcgcatgaatg

SEQ ID NO: 19642 - RNA, 17 nt, Synthetic Construct
  source 1..17: mol_type = other RNA
agtgacgcgcatgaatg

SEQ ID NO: 19643 - RNA, 17 nt, Synthetic Construct
  source 1..17: mol_type = other RNA
gcggctgtagctcagtt

SEQ ID NO: 19644 - RNA, 22 nt, Synthetic Construct
  source 1..22: mol_type = other RNA
tagcagcacgcaaatattggcg

SEQ ID NO: 19645 - RNA, 22 nt, Synthetic Construct
  source 1..22: mol_type = other RNA
tagcagcacgcaaatattggcg

SEQ ID NO: 19646 - RNA, 16 nt, Synthetic Construct
  source 1..16: mol_type = other RNA
gtaaacggcgggagta

SEQ ID NO: 19647 - RNA, 16 nt, Synthetic Construct
  source 1..16: mol_type = other RNA
gtaaacggcgggagta

SEQ ID NO: 19648 - RNA, 16 nt, Synthetic Construct
  source 1..16: mol_type = other RNA
gtccccttcgtctaga

SEQ ID NO: 19649 - RNA, 18 nt, Synthetic Construct
  source 1..18: mol_type = other RNA
gcgaaattccttgtcggg

SEQ ID NO: 19650 - RNA, 18 nt, Synthetic Construct
  source 1..18: mol_type = other RNA
gcgaaattccttgtcggg

SEQ ID NO: 19651 - RNA, 23 nt, Synthetic Construct
  source 1..23: mol_type = other RNA
tgagaactgaattccatgggttt

SEQ ID NO: 19652 - RNA, 23 nt, Synthetic Construct
  source 1..23: mol_type = other RNA
tgagaactgaattccatgggttt

SEQ ID NO: 19653 - RNA, 22 nt, Synthetic Construct
  source 1..22: mol_type = other RNA
tattgcactcgtcccggcctgt

SEQ ID NO: 19654 - RNA, 24 nt, Synthetic Construct
  source 1..24: mol_type = other RNA
tgaggtagtaggttgtgtggttaa

SEQ ID NO: 19655 - RNA, 24 nt, Synthetic Construct
  source 1..24: mol_type = other RNA
tgaggtagtaggttgtgtggttaa

SEQ ID NO: 19656 - RNA, 22 nt, Synthetic Construct
  source 1..22: mol_type = other RNA
tgaggtagtagtttgtgctgtt

SEQ ID NO: 19657 - RNA, 22 nt, Synthetic Construct
  source 1..22: mol_type = other RNA
tgaggtagtagtttgtgctgtt

SEQ ID NO: 19658 - RNA, 21 nt, Synthetic Construct
  source 1..21: mol_type = other RNA
taggtagtttcctgttgttgg

SEQ ID NO: 19659 - RNA, 25 nt, Synthetic Construct
  source 1..25: mol_type = other RNA
ttgaggatatgagatcgagacaaca

SEQ ID NO: 19660 - RNA, 16 nt, Synthetic Construct
  source 1..16: mol_type = other RNA
gaccctgttgagcttg

SEQ ID NO: 19661 - RNA, 22 nt, Synthetic Construct
  source 1..22: mol_type = other RNA
tgaggtagaagtttgtgctgtt

SEQ ID NO: 19662 - RNA, 22 nt, Synthetic Construct
  source 1..22: mol_type = other RNA
tgaggtagaagtttgtgctgtt

SEQ ID NO: 19663 - RNA, 27 nt, Synthetic Construct
  source 1..27: mol_type = other RNA
cccctcactgctaaatttgactggctt

SEQ ID NO: 19664 - RNA, 23 nt, Synthetic Construct
  source 1..23: mol_type = other RNA
nggtaatacgacgtacttagtgt

SEQ ID NO: 19665 - RNA, 21 nt, Synthetic Construct
  source 1..21: mol_type = other RNA
accacagggtagaaccacgga

SEQ ID NO: 19666 - RNA, 21 nt, Synthetic Construct
  source 1..21: mol_type = other RNA
accacagggtagaaccacgga

SEQ ID NO: 19667 - RNA, 23 nt, Synthetic Construct
  source 1..23: mol_type = other RNA
caacggaatcccagaagcagctg

SEQ ID NO: 19668 - RNA, 20 nt, Synthetic Construct
  source 1..20: mol_type = other RNA
tgaggtggtaggttgtgtgg

SEQ ID NO: 19669 - RNA, 20 nt, Synthetic Construct
  source 1..20: mol_type = other RNA
gcgtgcttgactgcgagact

SEQ ID NO: 19670 - RNA, 22 nt, Synthetic Construct
  source 1..22: mol_type = other RNA
cgttgcacttgtctcggtctga

SEQ ID NO: 19671 - RNA, 31 nt, Synthetic Construct; identical to SEQ ID NO: 2333
  source 1..31: mol_type = other RNA

SEQ ID NO: 19672 - RNA, 24 nt, Synthetic Construct
  source 1..24: mol_type = other RNA
caagtcactagtggttccgtttag

SEQ ID NO: 19673 - RNA, 24 nt, Synthetic Construct
  source 1..24: mol_type = other RNA
caagtcactagtggttccgtttag

SEQ ID NO: 19674 - RNA, 23 nt, Synthetic Construct
  source 1..23: mol_type = other RNA
agcagcgttgtacagggctatga

SEQ ID NO: 19675 - RNA, 23 nt, Synthetic Construct
  source 1..23: mol_type = other RNA
agcagcgttgtacagggctatga

SEQ ID NO: 19676 - RNA, 23 nt, Synthetic Construct
  source 1..23: mol_type = other RNA
agaggggcagagagcgagacttt

SEQ ID NO: 19677 - RNA, 20 nt, Synthetic Construct
  source 1..20: mol_type = other RNA
ggtcccaagggtatggctgt

SEQ ID NO: 19678 - RNA, 21 nt, Synthetic Construct
  source 1..21: mol_type = other RNA
cattattacttttggtacgcg

SEQ ID NO: 19679 - RNA, 21 nt, Synthetic Construct
  source 1..21: mol_type = other RNA
cattattacttttggtacgcg

SEQ ID NO: 19680 - RNA, 21 nt, Synthetic Construct
  source 1..21: mol_type = other RNA
taactccttaagcgaactcgc

SEQ ID NO: 19681 - RNA, 21 nt, Synthetic Construct
  source 1..21: mol_type = other RNA
taactccttaagcgaactcgc

SEQ ID NO: 19682 - RNA, 18 nt, Synthetic Construct
  source 1..18: mol_type = other RNA
accaaggggtcgtgggtt

SEQ ID NO: 19683 - RNA, 22 nt, Synthetic Construct
  source 1..22: mol_type = other RNA
tgaggtagtaggttgtgctgtt

SEQ ID NO: 19684 - RNA, 21 nt, Synthetic Construct
  source 1..21: mol_type = other RNA
tgaggtagtagtctgtgctgt

SEQ ID NO: 19685 - RNA, 15 nt, Synthetic Construct
  source 1..15: mol_type = other RNA
gcgtagatatgcgga

SEQ ID NO: 19686 - RNA, 24 nt, Synthetic Construct
  source 1..24: mol_type = other RNA
tgtcagtttgtcaaataccccatt

SEQ ID NO: 19687 - RNA, 39 nt, Synthetic Construct; identical to SEQ ID NO: 16726
  source 1..39: mol_type = other RNA

SEQ ID NO: 19688 - RNA, 21 nt, Synthetic Construct
  source 1..21: mol_type = other RNA
atgtcccacccccactcctgt

SEQ ID NO: 19689 - RNA, 21 nt, Synthetic Construct
  source 1..21: mol_type = other RNA
atgtcccacccccactcctgt

SEQ ID NO: 19690 - RNA, 22 nt, Synthetic Construct
  source 1..22: mol_type = other RNA
tcgtaccatgagtaataatgcg

SEQ ID NO: 19691 - RNA, 21 nt, Synthetic Construct
  source 1..21: mol_type = other RNA
cccataaagtagaaagcacta

SEQ ID NO: 19692 - RNA, 21 nt, Synthetic Construct
  source 1..21: mol_type = other RNA
cccataaagtagaaagcacta

SEQ ID NO: 19693 - RNA, 22 nt, Synthetic Construct
  source 1..22: mol_type = other RNA
tccaagtaatccaggataggct

SEQ ID NO: 19694 - RNA, 23 nt, Synthetic Construct
  source 1..23: mol_type = other RNA
tggtaatacgacgtacatagtgt

SEQ ID NO: 19695 - RNA, 17 nt, Synthetic Construct
  source 1..17: mol_type = other RNA
taggtcatcgtcaggct

SEQ ID NO: 19696 - RNA, 23 nt, Synthetic Construct
  source 1..23: mol_type = other RNA
tcctgtaccgagctgccccgagt

SEQ ID NO: 19697 - RNA, 24 nt, Synthetic Construct
  source 1..24: mol_type = other RNA
tgggtaatacgacgtacttagtgt

SEQ ID NO: 19698 - RNA, 37 nt, Synthetic Construct; identical to SEQ ID NO: 5125
  source 1..37: mol_type = other RNA

SEQ ID NO: 19699 - RNA, 23 nt, Synthetic Construct
  source 1..23: mol_type = other RNA
ggaggtagtaggttgtgtggttt

SEQ ID NO: 19700 - RNA, 21 nt, Synthetic Construct
  source 1..21: mol_type = other RNA
cccttggggttgtaggaccac

SEQ ID NO: 19701 - RNA, 21 nt, Synthetic Construct
  source 1..21: mol_type = other RNA
cccttggggttgtaggaccac

SEQ ID NO: 19702 - RNA, 18 nt, Synthetic Construct
  source 1..18: mol_type = other RNA
catgcaagtcgaacggta

SEQ ID NO: 19703 - RNA, 18 nt, Synthetic Construct
  source 1..18: mol_type = other RNA
cgaggatccattggaggg

SEQ ID NO: 19704 - RNA, 18 nt, Synthetic Construct
  source 1..18: mol_type = other RNA
cgaggatccattggaggg

SEQ ID NO: 19705 - RNA, 23 nt, Synthetic Construct
  source 1..23: mol_type = other RNA
cctcgcgcgattggagcggccga

SEQ ID NO: 19706 - RNA, 23 nt, Synthetic Construct
  source 1..23: mol_type = other RNA
cctcgcgcgattggagcggccga

SEQ ID NO: 19707 - RNA, 22 nt, Synthetic Construct
  source 1..22: mol_type = other RNA
tggggtagtagtttgtgctgtt

SEQ ID NO: 19708 - RNA, 19 nt, Synthetic Construct
  source 1..19: mol_type = other RNA
gctattgacgaccgtaccg

SEQ ID NO: 19709 - RNA, 20 nt, Synthetic Construct
  source 1..20: mol_type = other RNA
cccttggggttgtaggacca

SEQ ID NO: 19710 - RNA, 20 nt, Synthetic Construct
  source 1..20: mol_type = other RNA
cccttggggttgtaggacca

SEQ ID NO: 19711 - RNA, 20 nt, Synthetic Construct
  source 1..20: mol_type = other RNA
tattgcacttgtcccggcct

SEQ ID NO: 19712 - RNA, 20 nt, Synthetic Construct
  source 1..20: mol_type = other RNA
tattgcacttgtcccggcct

SEQ ID NO: 19713 - RNA, 23 nt, Synthetic Construct
  source 1..23: mol_type = other RNA
ggaggggcagagagcgagacttt

SEQ ID NO: 19714 - RNA, 23 nt, Synthetic Construct
  source 1..23: mol_type = other RNA
ggaggggcagagagcgagacttt

SEQ ID NO: 19715 - RNA, 30 nt, Synthetic Construct; identical to SEQ ID NO: 739
  source 1..30: mol_type = other RNA

SEQ ID NO: 19716 - RNA, 21 nt, Synthetic Construct
  source 1..21: mol_type = other RNA
agctacatctggctactgggt

SEQ ID NO: 19717 - RNA, 21 nt, Synthetic Construct
  source 1..21: mol_type = other RNA
agctacatctggctactgggt

SEQ ID NO: 19718 - RNA, 21 nt, Synthetic Construct
  source 1..21: mol_type = other RNA
tagcagcacgtaaatattggc

SEQ ID NO: 19719 - RNA, 21 nt, Synthetic Construct
  source 1..21: mol_type = other RNA
tagcagcacgtaaatattggc

SEQ ID NO: 19720 - RNA, 22 nt, Synthetic Construct
  source 1..22: mol_type = other RNA
tagtagcacgtaaatattggcg

SEQ ID NO: 19721 - RNA, 22 nt, Synthetic Construct
  source 1..22: mol_type = other RNA
tagtagcacgtaaatattggcg

SEQ ID NO: 19722 - RNA, 26 nt, Synthetic Construct
  source 1..26: mol_type = other RNA
ggtggctgtagctcagttggtagagt

SEQ ID NO: 19723 - RNA, 20 nt, Synthetic Construct
  source 1..20: mol_type = other RNA
tgaggtagtaggttgtacag

SEQ ID NO: 19724 - RNA, 20 nt, Synthetic Construct
  source 1..20: mol_type = other RNA
tgaggtagtaggttgtacag

SEQ ID NO: 19725 - RNA, 23 nt, Synthetic Construct
  source 1..23: mol_type = other RNA
caaagtgctgttcgtgcgggtag

SEQ ID NO: 19726 - RNA, 23 nt, Synthetic Construct
  source 1..23: mol_type = other RNA
caaagtgctgttcgtgcgggtag

SEQ ID NO: 19727 - RNA, 22 nt, Synthetic Construct
  source 1..22: mol_type = other RNA
tgaggcagtaggttgtgtggtt

SEQ ID NO: 19728 - RNA, 22 nt, Synthetic Construct
  source 1..22: mol_type = other RNA
tgaggcagtaggttgtgtggtt

SEQ ID NO: 19729 - RNA, 24 nt, Synthetic Construct
  source 1..24: mol_type = other RNA
tgtaaacaaccccgactggaagct

SEQ ID NO: 19730 - RNA, 24 nt, Synthetic Construct
  source 1..24: mol_type = other RNA
tgtaaacaaccccgactggaagct

SEQ ID NO: 19731 - RNA, 21 nt, Synthetic Construct
  source 1..21: mol_type = other RNA
aacattcaacgctgtcggtga

SEQ ID NO: 19732 - RNA, 27 nt, Synthetic Construct
  source 1..27: mol_type = other RNA
ccccccattgctaaatttgactggctt

SEQ ID NO: 19733 - RNA, 22 nt, Synthetic Construct
  source 1..22: mol_type = other RNA
tgaggtagtggtttgtgctgtt

SEQ ID NO: 19734 - RNA, 22 nt, Synthetic Construct
  source 1..22: mol_type = other RNA
tgaggtagtggtttgtgctgtt

SEQ ID NO: 19735 - RNA, 22 nt, Synthetic Construct
  source 1..22: mol_type = other RNA
tgtggtgtttcctactttatgg

SEQ ID NO: 19736 - RNA, 21 nt, Synthetic Construct
  source 1..21: mol_type = other RNA
gactatagaactttccccctc

SEQ ID NO: 19737 - RNA, 21 nt, Synthetic Construct
  source 1..21: mol_type = other RNA
gactatagaactttccccctc

SEQ ID NO: 19738 - RNA, 30 nt, Synthetic Construct
  source 1..30: mol_type = other RNA
tcccacatggtctagcggttaggattcctg

SEQ ID NO: 19739 - RNA, 30 nt, Synthetic Construct; identical to SEQ ID NO: 19738
  source 1..30: mol_type = other RNA

SEQ ID NO: 19740 - RNA, 22 nt, Synthetic Construct
  source 1..22: mol_type = other RNA
tgaggtggtaggttgtgtggtt

SEQ ID NO: 19741 - RNA, 22 nt, Synthetic Construct
  source 1..22: mol_type = other RNA
tgaggtagtagttcgtgctgtt

SEQ ID NO: 19742 - RNA, 22 nt, Synthetic Construct
  source 1..22: mol_type = other RNA
tgaggtagtagttcgtgctgtt

SEQ ID NO: 19743 - RNA, 20 nt, Synthetic Construct
  source 1..20: mol_type = other RNA
actgatcgagtcgtcctgcg

SEQ ID NO: 19744 - RNA, 21 nt, Synthetic Construct
  source 1..21: mol_type = other RNA
tgaggggcagagagcgagacc

SEQ ID NO: 19745 - RNA, 21 nt, Synthetic Construct
  source 1..21: mol_type = other RNA
tgaggggcagagagcgagacc

SEQ ID NO: 19746 - RNA, 21 nt, Synthetic Construct
  source 1..21: mol_type = other RNA
atcgggaatgtcgtgtccgcc

SEQ ID NO: 19747 - RNA, 21 nt, Synthetic Construct
  source 1..21: mol_type = other RNA
atcgggaatgtcgtgtccgcc

SEQ ID NO: 19748 - RNA, 23 nt, Synthetic Construct
  source 1..23: mol_type = other RNA
ggcagggttcgtgactggggtga

SEQ ID NO: 19749 - RNA, 27 nt, Synthetic Construct
  source 1..27: mol_type = other RNA
ccccccactgctgaatttgactggctt

SEQ ID NO: 19750 - RNA, 27 nt, Synthetic Construct
  source 1..27: mol_type = other RNA
ccccccactgctgaatttgactggctt

SEQ ID NO: 19751 - RNA, 24 nt, Synthetic Construct
  source 1..24: mol_type = other RNA
caacggaatcccaaaagcagctat

SEQ ID NO: 19752 - RNA, 21 nt, Synthetic Construct
  source 1..21: mol_type = other RNA
tcctgtactgagctgccacga

SEQ ID NO: 19753 - RNA, 21 nt, Synthetic Construct
  source 1..21: mol_type = other RNA
tcctgtactgagctgccacga

SEQ ID NO: 19754 - RNA, 22 nt, Synthetic Construct
  source 1..22: mol_type = other RNA
ttcaagtaatccgggataggct

SEQ ID NO: 19755 - RNA, 22 nt, Synthetic Construct
  source 1..22: mol_type = other RNA
ttcaagtaatccgggataggct

SEQ ID NO: 19756 - RNA, 20 nt, Synthetic Construct
  source 1..20: mol_type = other RNA
cccgtgttcggaagattttc

SEQ ID NO: 19757 - RNA, 22 nt, Synthetic Construct
  source 1..22: mol_type = other RNA
tgttggttcaagcgtgtagtcg

SEQ ID NO: 19758 - RNA, 22 nt, Synthetic Construct
  source 1..22: mol_type = other RNA
tgttggttcaagcgtgtagtcg

SEQ ID NO: 19759 - RNA, 21 nt, Synthetic Construct
  source 1..21: mol_type = other RNA
taacactgtctggtaaagatg

SEQ ID NO: 19760 - RNA, 21 nt, Synthetic Construct
  source 1..21: mol_type = other RNA
taacactgtctggtaaagatg

SEQ ID NO: 19761 - RNA, 19 nt, Synthetic Construct
  source 1..19: mol_type = other RNA
tgaggtagtaggttgtata

SEQ ID NO: 19762 - RNA, 19 nt, Synthetic Construct
  source 1..19: mol_type = other RNA
tgaggtagtaggttgtata

SEQ ID NO: 19763 - RNA, 23 nt, Synthetic Construct
  source 1..23: mol_type = other RNA
tagcttatcagactgatgttgac

SEQ ID NO: 19764 - RNA, 23 nt, Synthetic Construct
  source 1..23: mol_type = other RNA
tagcttatcagactgatgttgac

SEQ ID NO: 19765 - RNA, 15 nt, Synthetic Construct
  source 1..15: mol_type = other RNA
tcagtagctcgagga

SEQ ID NO: 19766 - RNA, 35 nt, Synthetic Construct; identical to SEQ ID NO: 2069
  source 1..35: mol_type = other RNA

SEQ ID NO: 19767 - RNA, 35 nt, Synthetic Construct; identical to SEQ ID NO: 2069
  source 1..35: mol_type = other RNA

SEQ ID NO: 19768 - RNA, 23 nt, Synthetic Construct
  source 1..23: mol_type = other RNA
tgaggggcagagagcgagacttc

SEQ ID NO: 19769 - RNA, 23 nt, Synthetic Construct
  source 1..23: mol_type = other RNA
tgaggggcagagagcgagacttc

SEQ ID NO: 19770 - RNA, 16 nt, Synthetic Construct
  source 1..16: mol_type = other RNA
ccggaggaaggtgggg

SEQ ID NO: 19771 - RNA, 27 nt, Synthetic Construct
  source 1..27: mol_type = other RNA
cctcccactgctaaatttgactggctt

SEQ ID NO: 19772 - RNA, 22 nt, Synthetic Construct
  source 1..22: mol_type = other RNA
ttcaagtaattcaggataggtt

SEQ ID NO: 19773 - RNA, 32 nt, Synthetic Construct; identical to SEQ ID NO: 3541
  source 1..32: mol_type = other RNA

SEQ ID NO: 19774 - RNA, 35 nt, Synthetic Construct; identical to SEQ ID NO: 25
  source 1..35: mol_type = other RNA

SEQ ID NO: 19775 - RNA, 24 nt, Synthetic Construct
  source 1..24: mol_type = other RNA
tgaggtagtaggttgtgtggttta

SEQ ID NO: 19776 - RNA, 22 nt, Synthetic Construct
  source 1..22: mol_type = other RNA
atcacattgccagggatttcca

SEQ ID NO: 19777 - RNA, 23 nt, Synthetic Construct
  source 1..23: mol_type = other RNA
tgaggtagtaggttgtgcggttt

SEQ ID NO: 19778 - RNA, 17 nt, Synthetic Construct
  source 1..17: mol_type = other RNA
gttctacagtccgacga

SEQ ID NO: 19779 - RNA, 17 nt, Synthetic Construct
  source 1..17: mol_type = other RNA
gttctacagtccgacga

SEQ ID NO: 19780 - RNA, 34 nt, Synthetic Construct; identical to SEQ ID NO: 385
  source 1..34: mol_type = other RNA

SEQ ID NO: 19781 - RNA, 20 nt, Synthetic Construct
  source 1..20: mol_type = other RNA
tagcgaaattccttgtcggg

SEQ ID NO: 19782 - RNA, 20 nt, Synthetic Construct
  source 1..20: mol_type = other RNA
tagcgaaattccttgtcggg

SEQ ID NO: 19783 - RNA, 31 nt, Synthetic Construct; identical to SEQ ID NO: 2293
  source 1..31: mol_type = other RNA

SEQ ID NO: 19784 - RNA, 22 nt, Synthetic Construct
  source 1..22: mol_type = other RNA
tcgtaccgtgagtagtaatgcg

SEQ ID NO: 19785 - RNA, 42 nt, Synthetic Construct; identical to SEQ ID NO: 6990
  source 1..42: mol_type = other RNA

SEQ ID NO: 19786 - RNA, 42 nt, Synthetic Construct; identical to SEQ ID NO: 6990
  source 1..42: mol_type = other RNA

SEQ ID NO: 19787 - RNA, 22 nt, Synthetic Construct
  source 1..22: mol_type = other RNA
tattgcactcgtcccggcctgt

SEQ ID NO: 19788 - RNA, 23 nt, Synthetic Construct
  source 1..23: mol_type = other RNA
tgtcggtttgtcaaataccccaa

SEQ ID NO: 19789 - RNA, 20 nt, Synthetic Construct
  source 1..20: mol_type = other RNA
aatgcacccgggcaaggatt

SEQ ID NO: 19790 - RNA, 20 nt, Synthetic Construct
  source 1..20: mol_type = other RNA
aatgcacccgggcaaggatt

SEQ ID NO: 19791 - RNA, 22 nt, Synthetic Construct
  source 1..22: mol_type = other RNA
tgtcccacccccactcctgttt

SEQ ID NO: 19792 - RNA, 22 nt, Synthetic Construct
  source 1..22: mol_type = other RNA
tgtcccacccccactcctgttt

SEQ ID NO: 19793 - RNA, 22 nt, Synthetic Construct
  source 1..22: mol_type = other RNA
tcgtgccgtgagtaataatgcg

SEQ ID NO: 19794 - RNA, 22 nt, Synthetic Construct
  source 1..22: mol_type = other RNA
cccataaagtagaaagcactac

SEQ ID NO: 19795 - RNA, 22 nt, Synthetic Construct
  source 1..22: mol_type = other RNA
cccataaagtagaaagcactac

SEQ ID NO: 19796 - RNA, 23 nt, Synthetic Construct
  source 1..23: mol_type = other RNA
tgaggtagtagtttgtgctgtta

SEQ ID NO: 19797 - RNA, 22 nt, Synthetic Construct
  source 1..22: mol_type = other RNA
gcctgtactgagctgccccgag

SEQ ID NO: 19798 - RNA, 18 nt, Synthetic Construct
  source 1..18: mol_type = other RNA
cggcgggagtaactatga

SEQ ID NO: 19799 - RNA, 23 nt, Synthetic Construct
  source 1..23: mol_type = other RNA
tcctgcactgagctgccccgagt

SEQ ID NO: 19800 - RNA, 22 nt, Synthetic Construct
  source 1..22: mol_type = other RNA
tgaggtagtagattatatagtt

SEQ ID NO: 19801 - RNA, 22 nt, Synthetic Construct
  source 1..22: mol_type = other RNA
tgaggtagtagattatatagtt

SEQ ID NO: 19802 - RNA, 17 nt, Synthetic Construct
  source 1..17: mol_type = other RNA
cgcgacctcagatcaga

SEQ ID NO: 19803 - RNA, 30 nt, Synthetic Construct; identical to SEQ ID NO: 970
  source 1..30: mol_type = other RNA

SEQ ID NO: 19804 - RNA, 19 nt, Synthetic Construct
  source 1..19: mol_type = other RNA
tctaatgagactgccggtg

SEQ ID NO: 19805 - RNA, 22 nt, Synthetic Construct
  source 1..22: mol_type = other RNA
tgaggtagtaggttgaatagtt

SEQ ID NO: 19806 - RNA, 22 nt, Synthetic Construct
  source 1..22: mol_type = other RNA
tgaggtagtaggttgaatagtt

SEQ ID NO: 19807 - RNA, 16 nt, Synthetic Construct
  source 1..16: mol_type = other RNA
aggtcatcattatctg

SEQ ID NO: 19808 - RNA, 23 nt, Synthetic Construct
  source 1..23: mol_type = other RNA
agcagcattgtacggggctatga

SEQ ID NO: 19809 - RNA, 20 nt, Synthetic Construct
  source 1..20: mol_type = other RNA
tacagtatagatgatgtact

SEQ ID NO: 19810 - RNA, 25 nt, Synthetic Construct
  source 1..25: mol_type = other RNA
ggtaaaattgctgagtgaagcattg

SEQ ID NO: 19811 - RNA, 25 nt, Synthetic Construct
  source 1..25: mol_type = other RNA
ggtaaaattgctgagtgaagcattg

SEQ ID NO: 19812 - RNA, 22 nt, Synthetic Construct
  source 1..22: mol_type = other RNA
tgaggtaataggttgtatagtt

SEQ ID NO: 19813 - RNA, 22 nt, Synthetic Construct
  source 1..22: mol_type = other RNA
tgaggtaataggttgtatagtt

SEQ ID NO: 19814 - RNA, 22 nt, Synthetic Construct
  source 1..22: mol_type = other RNA
taactccttaggcgaatctcgc

SEQ ID NO: 19815 - RNA, 22 nt, Synthetic Construct
  source 1..22: mol_type = other RNA
taactccttaggcgaatctcgc

SEQ ID NO: 19816 - RNA, 16 nt, Synthetic Construct
  source 1..16: mol_type = other RNA
cgactcttagcggtgg

SEQ ID NO: 19817 - RNA, 16 nt, Synthetic Construct
  source 1..16: mol_type = other RNA
cgactcttagcggtgg

SEQ ID NO: 19818 - RNA, 24 nt, Synthetic Construct
  source 1..24: mol_type = other RNA
agtaaacatccttgactggaagct

SEQ ID NO: 19819 - RNA, 21 nt, Synthetic Construct
  source 1..21: mol_type = other RNA
aaaccgttaccattactgagt

SEQ ID NO: 19820 - RNA, 20 nt, Synthetic Construct
  source 1..20: mol_type = other RNA
tgaggaagtaggttgtgtgg

SEQ ID NO: 19821 - RNA, 37 nt, Synthetic Construct; identical to SEQ ID NO: 4277
  source 1..37: mol_type = other RNA

SEQ ID NO: 19822 - RNA, 23 nt, Synthetic Construct
  source 1..23: mol_type = other RNA
tctttggttatctagctgtatgt

SEQ ID NO: 19823 - RNA, 23 nt, Synthetic Construct
  source 1..23: mol_type = other RNA
tctttggttatctagctgtatgt

SEQ ID NO: 19824 - RNA, 20 nt, Synthetic Construct
  source 1..20: mol_type = other RNA
gctattgacgaccgtaccgc

SEQ ID NO: 19825 - RNA, 21 nt, Synthetic Construct
  source 1..21: mol_type = other RNA
aacggaatcccaaaagcagct

SEQ ID NO: 19826 - RNA, 21 nt, Synthetic Construct
  source 1..21: mol_type = other RNA
aacggaatcccaaaagcagct

SEQ ID NO: 19827 - RNA, 16 nt, Synthetic Construct
  source 1..16: mol_type = other RNA
gtctacggccataccg

SEQ ID NO: 19828 - RNA, 16 nt, Synthetic Construct
  source 1..16: mol_type = other RNA
gtctacggccataccg

SEQ ID NO: 19829 - RNA, 19 nt, Synthetic Construct
  source 1..19: mol_type = other RNA
tcctgtaccgatcaatagt

SEQ ID NO: 19830 - RNA, 24 nt, Synthetic Construct
  source 1..24: mol_type = other RNA
agcagcattgtacagggctatgtt

SEQ ID NO: 19831 - RNA, 23 nt, Synthetic Construct
  source 1..23: mol_type = other RNA
gcctgtactgagctgccccgaga

SEQ ID NO: 19832 - RNA, 24 nt, Synthetic Construct
  source 1..24: mol_type = other RNA
taccacagggtagaaccacggaca

SEQ ID NO: 19833 - RNA, 24 nt, Synthetic Construct
  source 1..24: mol_type = other RNA
taccacagggtagaaccacggaca

SEQ ID NO: 19834 - RNA, 21 nt, Synthetic Construct
  source 1..21: mol_type = other RNA
acacatgcaagtcgaacggta

SEQ ID NO: 19835 - RNA, 16 nt, Synthetic Construct
  source 1..16: mol_type = other RNA
gcaagaggtcagcggt

SEQ ID NO: 19836 - RNA, 42 nt, Synthetic Construct
  source 1..42: mol_type = other RNA
cctacttggataactgtggtaattctagagctaatacatgcc

SEQ ID NO: 19837 - RNA, 24 nt, Synthetic Construct
  source 1..24: mol_type = other RNA
tatatcggaacgtgcccagtcgtg

SEQ ID NO: 19838 - RNA, 17 nt, Synthetic Construct
  source 1..17: mol_type = other RNA
cagaactggcgatgcgg

SEQ ID NO: 19839 - RNA, 16 nt, Synthetic Construct
  source 1..16: mol_type = other RNA
gcctacggccatacca

SEQ ID NO: 19840 - RNA, 32 nt, Synthetic Construct; identical to SEQ ID NO: 2052
  source 1..32: mol_type = other RNA

SEQ ID NO: 19841 - RNA, 23 nt, Synthetic Construct
  source 1..23: mol_type = other RNA
taaagtgctgttcgtgcaggtag

SEQ ID NO: 19842 - RNA, 35 nt, Synthetic Construct; identical to SEQ ID NO: 3369
  source 1..35: mol_type = other RNA

SEQ ID NO: 19843 - RNA, 35 nt, Synthetic Construct; identical to SEQ ID NO: 3369
  source 1..35: mol_type = other RNA

SEQ ID NO: 19844 - RNA, 16 nt, Synthetic Construct
  source 1..16: mol_type = other RNA
gtctacggccataccg

SEQ ID NO: 19845 - RNA, 27 nt, Synthetic Construct
  source 1..27: mol_type = other RNA
ccgtgtgaaagtaggtcatcgtcaggc

SEQ ID NO: 19846 - RNA, 21 nt, Synthetic Construct
  source 1..21: mol_type = other RNA
tgaggtagtaggtcgtgtggt

SEQ ID NO: 19847 - RNA, 21 nt, Synthetic Construct
  source 1..21: mol_type = other RNA
tgaggtagtaggtcgtgtggt

SEQ ID NO: 19848 - RNA, 18 nt, Synthetic Construct
  source 1..18: mol_type = other RNA
ttgggagcgggcgggcgg

SEQ ID NO: 19849 - RNA, 18 nt, Synthetic Construct
  source 1..18: mol_type = other RNA
ttgggagcgggcgggcgg

SEQ ID NO: 19850 - RNA, 19 nt, Synthetic Construct
  source 1..19: mol_type = other RNA
aaaagctgggttgagaggg

SEQ ID NO: 19851 - RNA, 22 nt, Synthetic Construct
  source 1..22: mol_type = other RNA
aaaccgttaccattactgagtt

SEQ ID NO: 19852 - RNA, 22 nt, Synthetic Construct
  source 1..22: mol_type = other RNA
aaaccgttaccattactgagtt

SEQ ID NO: 19853 - RNA, 34 nt, Synthetic Construct; identical to SEQ ID NO: 2375
  source 1..34: mol_type = other RNA

SEQ ID NO: 19854 - RNA, 34 nt, Synthetic Construct; identical to SEQ ID NO: 2375
  source 1..34: mol_type = other RNA

SEQ ID NO: 19855 - RNA, 20 nt, Synthetic Construct
  source 1..20: mol_type = other RNA
tgaggtagtaggttgtatgg

SEQ ID NO: 19856 - RNA, 20 nt, Synthetic Construct
  source 1..20: mol_type = other RNA
tgaggtagtaggttgtatgg

SEQ ID NO: 19857 - RNA, 17 nt, Synthetic Construct
  source 1..17: mol_type = other RNA
cgcgacctcagatcaga

SEQ ID NO: 19858 - RNA, 23 nt, Synthetic Construct
  source 1..23: mol_type = other RNA
ggctcggtctgaggcccctcagt

SEQ ID NO: 19859 - RNA, 23 nt, Synthetic Construct
  source 1..23: mol_type = other RNA
ggctcggtctgaggcccctcagt

SEQ ID NO: 19860 - RNA, 21 nt, Synthetic Construct
  source 1..21: mol_type = other RNA
taaacggcgggagtaactatg

SEQ ID NO: 19861 - RNA, 21 nt, Synthetic Construct
  source 1..21: mol_type = other RNA
taaacggcgggagtaactatg

SEQ ID NO: 19862 - RNA, 20 nt, Synthetic Construct
  source 1..20: mol_type = other RNA
tagcaccatctgaaatcggt

SEQ ID NO: 19863 - RNA, 34 nt, Synthetic Construct; identical to SEQ ID NO: 749
  source 1..34: mol_type = other RNA

SEQ ID NO: 19864 - RNA, 22 nt, Synthetic Construct
  source 1..22: mol_type = other RNA
tcgtaccgtgagcaataatgcg

SEQ ID NO: 19865 - RNA, 22 nt, Synthetic Construct
  source 1..22: mol_type = other RNA
tcctgtactgagctgctccgag

SEQ ID NO: 19866 - RNA, 22 nt, Synthetic Construct
  source 1..22: mol_type = other RNA
tgaggtagtagattgtacagtt

SEQ ID NO: 19867 - RNA, 22 nt, Synthetic Construct
  source 1..22: mol_type = other RNA
tgaggtagtagattgtacagtt

SEQ ID NO: 19868 - RNA, 20 nt, Synthetic Construct
  source 1..20: mol_type = other RNA
cattgcacttgtctcggtct

SEQ ID NO: 19869 - RNA, 20 nt, Synthetic Construct
  source 1..20: mol_type = other RNA
cattgcacttgtctcggtct

SEQ ID NO: 19870 - RNA, 22 nt, Synthetic Construct
  source 1..22: mol_type = other RNA
tcacagtgaaccggtctctttt

SEQ ID NO: 19871 - RNA, 23 nt, Synthetic Construct
  source 1..23: mol_type = other RNA
actggacttggagtcagaaggca

SEQ ID NO: 19872 - RNA, 20 nt, Synthetic Construct
  source 1..20: mol_type = other RNA
ggaggtagtaggttgtgtgg

SEQ ID NO: 19873 - RNA, 20 nt, Synthetic Construct
  source 1..20: mol_type = other RNA
ggaggtagtaggttgtgtgg

SEQ ID NO: 19874 - RNA, 23 nt, Synthetic Construct
  source 1..23: mol_type = other RNA
tgaggtagtagtttgtgctgttg

SEQ ID NO: 19875 - RNA, 23 nt, Synthetic Construct
  source 1..23: mol_type = other RNA
tgaggtagtagtttgtgctgttg

SEQ ID NO: 19876 - RNA, 27 nt, Synthetic Construct
  source 1..27: mol_type = other RNA
cgtgtgaaagtaggtcatcgtcaggct

SEQ ID NO: 19877 - RNA, 27 nt, Synthetic Construct
  source 1..27: mol_type = other RNA
cgtgtgaaagtaggtcatcgtcaggct

SEQ ID NO: 19878 - RNA, 21 nt, Synthetic Construct
  source 1..21: mol_type = other RNA
tgaggtagtagtttgtacagt

SEQ ID NO: 19879 - RNA, 23 nt, Synthetic Construct
  source 1..23: mol_type = other RNA
tcctgtactgggctgccccgagt

SEQ ID NO: 19880 - RNA, 18 nt, Synthetic Construct
  source 1..18: mol_type = other RNA
tctaatgagactgccggt

SEQ ID NO: 19881 - RNA, 21 nt, Synthetic Construct
  source 1..21: mol_type = other RNA
tcctgtactgagctgccccaa

SEQ ID NO: 19882 - RNA, 21 nt, Synthetic Construct
  source 1..21: mol_type = other RNA
tcctgtactgagctgccccaa

SEQ ID NO: 19883 - RNA, 23 nt, Synthetic Construct
  source 1..23: mol_type = other RNA
cactagattgtgagctcctggag

SEQ ID NO: 19884 - RNA, 23 nt, Synthetic Construct
  source 1..23: mol_type = other RNA
cactagattgtgagctcctggag

SEQ ID NO: 19885 - RNA, 23 nt, Synthetic Construct
  source 1..23: mol_type = other RNA
tcccgtactgagctgccccgaga

SEQ ID NO: 19886 - RNA, 23 nt, Synthetic Construct
  source 1..23: mol_type = other RNA
tcccgtactgagctgccccgaga

SEQ ID NO: 19887 - RNA, 21 nt, Synthetic Construct
  source 1..21: mol_type = other RNA
ctagaccgaagctccttgagg

SEQ ID NO: 19888 - RNA, 21 nt, Synthetic Construct
  source 1..21: mol_type = other RNA
aggttccggataagtaaagcc

SEQ ID NO: 19889 - RNA, 21 nt, Synthetic Construct
  source 1..21: mol_type = other RNA
aggttccggataagtaaagcc

SEQ ID NO: 19890 - RNA, 15 nt, Synthetic Construct
  source 1..15: mol_type = other RNA
gtagctcgttgggct

SEQ ID NO: 19891 - RNA, 15 nt, Synthetic Construct
  source 1..15: mol_type = other RNA
gtagctcgttgggct

SEQ ID NO: 19892 - RNA, 22 nt, Synthetic Construct
  source 1..22: mol_type = other RNA
tggaatgtaaggaagtgtgtgt

SEQ ID NO: 19893 - RNA, 22 nt, Synthetic Construct
  source 1..22: mol_type = other RNA
tggaatgtaaggaagtgtgtgt

SEQ ID NO: 19894 - RNA, 22 nt, Synthetic Construct
  source 1..22: mol_type = other RNA
tcttggagtaggtcattgggtg

SEQ ID NO: 19895 - RNA, 23 nt, Synthetic Construct
  source 1..23: mol_type = other RNA
tgaggtagtaggttgtgtagttt

SEQ ID NO: 19896 - RNA, 23 nt, Synthetic Construct
  source 1..23: mol_type = other RNA
tgaggtagtaggttgtgtagttt

SEQ ID NO: 19897 - RNA, 18 nt, Synthetic Construct
  source 1..18: mol_type = other RNA
gtcgacgtatagggtgtg

SEQ ID NO: 19898 - RNA, 18 nt, Synthetic Construct
  source 1..18: mol_type = other RNA
gtcgacgtatagggtgtg

SEQ ID NO: 19899 - RNA, 30 nt, Synthetic Construct; identical to SEQ ID NO: 2353
  source 1..30: mol_type = other RNA

SEQ ID NO: 19900 - RNA, 30 nt, Synthetic Construct; identical to SEQ ID NO: 2353
  source 1..30: mol_type = other RNA

SEQ ID NO: 19901 - RNA, 16 nt, Synthetic Construct
  source 1..16: mol_type = other RNA
gcgtagatatgcggag

SEQ ID NO: 19902 - RNA, 16 nt, Synthetic Construct
  source 1..16: mol_type = other RNA
gcgtagatatgcggag

SEQ ID NO: 19903 - RNA, 28 nt, Synthetic Construct
  source 1..28: mol_type = other RNA
ccgtgtgaaagtaggtcatcgtcaggct

SEQ ID NO: 19904 - RNA, 28 nt, Synthetic Construct
  source 1..28: mol_type = other RNA
ccgtgtgaaagtaggtcatcgtcaggct

SEQ ID NO: 19905 - RNA, 16 nt, Synthetic Construct
  source 1..16: mol_type = other RNA
ccggaggaaggtgggg

SEQ ID NO: 19906 - RNA, 16 nt, Synthetic Construct
  source 1..16: mol_type = other RNA
ccggaggaaggtgggg

SEQ ID NO: 19907 - RNA, 16 nt, Synthetic Construct
  source 1..16: mol_type = other RNA
cgctagtaatcgcgga

SEQ ID NO: 19908 - RNA, 16 nt, Synthetic Construct
  source 1..16: mol_type = other RNA
cgctagtaatcgcgga

SEQ ID NO: 19909 - RNA, 31 nt, Synthetic Construct; identical to SEQ ID NO: 2427
  source 1..31: mol_type = other RNA

SEQ ID NO: 19910 - RNA, 31 nt, Synthetic Construct; identical to SEQ ID NO: 2427
  source 1..31: mol_type = other RNA

SEQ ID NO: 19911 - RNA, 30 nt, Synthetic Construct; identical to SEQ ID NO: 2840
  source 1..30: mol_type = other RNA

SEQ ID NO: 19912 - RNA, 30 nt, Synthetic Construct; identical to SEQ ID NO: 2840
  source 1..30: mol_type = other RNA

SEQ ID NO: 19913 - RNA, 30 nt, Synthetic Construct; identical to SEQ ID NO: 2308
  source 1..30: mol_type = other RNA

SEQ ID NO: 19914 - RNA, 30 nt, Synthetic Construct; identical to SEQ ID NO: 2308
  source 1..30: mol_type = other RNA

SEQ ID NO: 19915 - RNA, 35 nt, Synthetic Construct; identical to SEQ ID NO: 2762
  source 1..35: mol_type = other RNA

SEQ ID NO: 19916 - RNA, 35 nt, Synthetic Construct; identical to SEQ ID NO: 2762
  source 1..35: mol_type = other RNA

SEQ ID NO: 19917 - RNA, 24 nt, Synthetic Construct
  source 1..24: mol_type = other RNA
gggttgtaaaccgcttttgtcagg

SEQ ID NO: 19918 - RNA, 24 nt, Synthetic Construct
  source 1..24: mol_type = other RNA
gggttgtaaaccgcttttgtcagg

SEQ ID NO: 19919 - RNA, 22 nt, Synthetic Construct
  source 1..22: mol_type = other RNA
gagagcctggacacaggtgctg

SEQ ID NO: 19920 - RNA, 22 nt, Synthetic Construct
  source 1..22: mol_type = other RNA
gagagcctggacacaggtgctg

SEQ ID NO: 19921 - RNA, 31 nt, Synthetic Construct; identical to SEQ ID NO: 2758
  source 1..31: mol_type = other RNA

SEQ ID NO: 19922 - RNA, 31 nt, Synthetic Construct; identical to SEQ ID NO: 2758
  source 1..31: mol_type = other RNA

SEQ ID NO: 19923 - RNA, 35 nt, Synthetic Construct; identical to SEQ ID NO: 2069
  source 1..35: mol_type = other RNA

SEQ ID NO: 19924 - RNA, 35 nt, Synthetic Construct; identical to SEQ ID NO: 2069
  source 1..35: mol_type = other RNA

SEQ ID NO: 19925 - RNA, 32 nt, Synthetic Construct; identical to SEQ ID NO: 2850
  source 1..32: mol_type = other RNA

SEQ ID NO: 19926 - RNA, 32 nt, Synthetic Construct; identical to SEQ ID NO: 2850
  source 1..32: mol_type = other RNA

SEQ ID NO: 19927 - RNA, 19 nt, Synthetic Construct
  source 1..19: mol_type = other RNA
gtactgacgctcatgcacg

SEQ ID NO: 19928 - RNA, 19 nt, Synthetic Construct
  source 1..19: mol_type = other RNA
gtactgacgctcatgcacg

SEQ ID NO: 19929 - RNA, 16 nt, Synthetic Construct
  source 1..16: mol_type = other RNA
ctgacgctcatgcacg

SEQ ID NO: 19930 - RNA, 16 nt, Synthetic Construct
  source 1..16: mol_type = other RNA
ctgacgctcatgcacg

SEQ ID NO: 19931 - RNA, 28 nt, Synthetic Construct
  source 1..28: mol_type = other RNA
ccgtgtgaaagtaggtcatcgtcaggct

SEQ ID NO: 19932 - RNA, 28 nt, Synthetic Construct
  source 1..28: mol_type = other RNA
ccgtgtgaaagtaggtcatcgtcaggct

SEQ ID NO: 19933 - RNA, 31 nt, Synthetic Construct; identical to SEQ ID NO: 960
  source 1..31: mol_type = other RNA

SEQ ID NO: 19934 - RNA, 31 nt, Synthetic Construct; identical to SEQ ID NO: 960
  source 1..31: mol_type = other RNA

SEQ ID NO: 19935 - RNA, 32 nt, Synthetic Construct; identical to SEQ ID NO: 2318
  source 1..32: mol_type = other RNA

SEQ ID NO: 19936 - RNA, 32 nt, Synthetic Construct; identical to SEQ ID NO: 2318
  source 1..32: mol_type = other RNA

SEQ ID NO: 19937 - RNA, 37 nt, Synthetic Construct; identical to SEQ ID NO: 2365
  source 1..37: mol_type = other RNA

SEQ ID NO: 19938 - RNA, 37 nt, Synthetic Construct; identical to SEQ ID NO: 2365
  source 1..37: mol_type = other RNA

SEQ ID NO: 19939 - RNA, 23 nt, Synthetic Construct
  source 1..23: mol_type = other RNA
gcgtggtaggagagcgttctgta

SEQ ID NO: 19940 - RNA, 23 nt, Synthetic Construct
  source 1..23: mol_type = other RNA
gcgtggtaggagagcgttctgta

SEQ ID NO: 19941 - RNA, 33 nt, Synthetic Construct; identical to SEQ ID NO: 2253
  source 1..33: mol_type = other RNA

SEQ ID NO: 19942 - RNA, 33 nt, Synthetic Construct; identical to SEQ ID NO: 2253
  source 1..33: mol_type = other RNA

SEQ ID NO: 19943 - RNA, 29 nt, Synthetic Construct
  source 1..29: mol_type = other RNA
ttacaggggttcgaatcccctaggggacg

SEQ ID NO: 19944 - RNA, 29 nt, Synthetic Construct
  source 1..29: mol_type = other RNA
ttacaggggttcgaatcccctaggggacg

SEQ ID NO: 19945 - RNA, 22 nt, Synthetic Construct
  source 1..22: mol_type = other RNA
ggcagggttcgtgactggggtg

SEQ ID NO: 19946 - RNA, 22 nt, Synthetic Construct
  source 1..22: mol_type = other RNA
ggcagggttcgtgactggggtg

SEQ ID NO: 19947 - RNA, 16 nt, Synthetic Construct
  source 1..16: mol_type = other RNA
tgcgtagatatgcgga

SEQ ID NO: 19948 - RNA, 16 nt, Synthetic Construct
  source 1..16: mol_type = other RNA
tgcgtagatatgcgga

SEQ ID NO: 19949 - RNA, 33 nt, Synthetic Construct; identical to SEQ ID NO: 2386
  source 1..33: mol_type = other RNA

SEQ ID NO: 19950 - RNA, 33 nt, Synthetic Construct; identical to SEQ ID NO: 2386
  source 1..33: mol_type = other RNA

SEQ ID NO: 19951 - RNA, 25 nt, Synthetic Construct
  source 1..25: mol_type = other RNA
gggttgtaaaccgcttttgtcaggg

SEQ ID NO: 19952 - RNA, 25 nt, Synthetic Construct
  source 1..25: mol_type = other RNA
gggttgtaaaccgcttttgtcaggg

SEQ ID NO: 19953 - RNA, 18 nt, Synthetic Construct
  source 1..18: mol_type = other RNA
tcccaagggtatggctgt

SEQ ID NO: 19954 - RNA, 18 nt, Synthetic Construct
  source 1..18: mol_type = other RNA
tcccaagggtatggctgt

SEQ ID NO: 19955 - RNA, 34 nt, Synthetic Construct; identical to SEQ ID NO: 2183
  source 1..34: mol_type = other RNA

SEQ ID NO: 19956 - RNA, 34 nt, Synthetic Construct; identical to SEQ ID NO: 2183
  source 1..34: mol_type = other RNA

SEQ ID NO: 19957 - RNA, 18 nt, Synthetic Construct
  source 1..18: mol_type = other RNA
gtcgacgtatagggtgtg

SEQ ID NO: 19958 - RNA, 18 nt, Synthetic Construct
  source 1..18: mol_type = other RNA
gtcgacgtatagggtgtg

SEQ ID NO: 19959 - RNA, 36 nt, Synthetic Construct; identical to SEQ ID NO: 2344
  source 1..36: mol_type = other RNA

SEQ ID NO: 19960 - RNA, 36 nt, Synthetic Construct; identical to SEQ ID NO: 2344
  source 1..36: mol_type = other RNA

SEQ ID NO: 19961 - RNA, 21 nt, Synthetic Construct
  source 1..21: mol_type = other RNA
gctttgatccggagatttccg

SEQ ID NO: 19962 - RNA, 21 nt, Synthetic Construct
  source 1..21: mol_type = other RNA
gctttgatccggagatttccg

SEQ ID NO: 19963 - RNA, 30 nt, Synthetic Construct; identical to SEQ ID NO: 2578
  source 1..30: mol_type = other RNA

SEQ ID NO: 19964 - RNA, 30 nt, Synthetic Construct; identical to SEQ ID NO: 2578
  source 1..30: mol_type = other RNA

SEQ ID NO: 19965 - RNA, 21 nt, Synthetic Construct
  source 1..21: mol_type = other RNA
atcggaacgtgcccagtcgtg

SEQ ID NO: 19966 - RNA, 21 nt, Synthetic Construct
  source 1..21: mol_type = other RNA
atcggaacgtgcccagtcgtg

SEQ ID NO: 19967 - RNA, 39 nt, Synthetic Construct; identical to SEQ ID NO: 2398
  source 1..39: mol_type = other RNA

SEQ ID NO: 19968 - RNA, 39 nt, Synthetic Construct; identical to SEQ ID NO: 2398
  source 1..39: mol_type = other RNA

SEQ ID NO: 19969 - RNA, 16 nt, Synthetic Construct
  source 1..16: mol_type = other RNA
gtcgacgtatagggtg

SEQ ID NO: 19970 - RNA, 16 nt, Synthetic Construct
  source 1..16: mol_type = other RNA
gtcgacgtatagggtg

SEQ ID NO: 19971 - RNA, 17 nt, Synthetic Construct
  source 1..17: mol_type = other RNA
gcgtagatatgcggagg

SEQ ID NO: 19972 - RNA, 17 nt, Synthetic Construct
  source 1..17: mol_type = other RNA
gcgtagatatgcggagg

SEQ ID NO: 19973 - RNA, 32 nt, Synthetic Construct; identical to SEQ ID NO: 2296
  source 1..32: mol_type = other RNA

SEQ ID NO: 19974 - RNA, 32 nt, Synthetic Construct; identical to SEQ ID NO: 2296
  source 1..32: mol_type = other RNA

SEQ ID NO: 19975 - RNA, 28 nt, Synthetic Construct
  source 1..28: mol_type = other RNA
ccgtgtgaaagtaggtcatcgtcaggct

SEQ ID NO: 19976 - RNA, 28 nt, Synthetic Construct
  source 1..28: mol_type = other RNA
ccgtgtgaaagtaggtcatcgtcaggct

SEQ ID NO: 19977 - RNA, 29 nt, Synthetic Construct
  source 1..29: mol_type = other RNA
tgaaggtgggttgtgaagcctgctggagg

SEQ ID NO: 19978 - RNA, 29 nt, Synthetic Construct
  source 1..29: mol_type = other RNA
tgaaggtgggttgtgaagcctgctggagg

SEQ ID NO: 19979 - RNA, 22 nt, Synthetic Construct
  source 1..22: mol_type = other RNA
cggaatcgctagtaatcgcgga

SEQ ID NO: 19980 - RNA, 22 nt, Synthetic Construct
  source 1..22: mol_type = other RNA
cggaatcgctagtaatcgcgga

SEQ ID NO: 19981 - RNA, 17 nt, Synthetic Construct
  source 1..17: mol_type = other RNA
gtcgacgtatagggtgt

SEQ ID NO: 19982 - RNA, 17 nt, Synthetic Construct
  source 1..17: mol_type = other RNA
gtcgacgtatagggtgt

SEQ ID NO: 19983 - RNA, 18 nt, Synthetic Construct
  source 1..18: mol_type = other RNA
gtcgacgtatagggtgtg

SEQ ID NO: 19984 - RNA, 18 nt, Synthetic Construct
  source 1..18: mol_type = other RNA
gtcgacgtatagggtgtg

SEQ ID NO: 19985 - RNA, 36 nt, Synthetic Construct; identical to SEQ ID NO: 2366
  source 1..36: mol_type = other RNA

SEQ ID NO: 19986 - RNA, 36 nt, Synthetic Construct; identical to SEQ ID NO: 2366
  source 1..36: mol_type = other RNA

SEQ ID NO: 19987 - RNA, 31 nt, Synthetic Construct; identical to SEQ ID NO: 2278
  source 1..31: mol_type = other RNA

SEQ ID NO: 19988 - RNA, 31 nt, Synthetic Construct; identical to SEQ ID NO: 2278
  source 1..31: mol_type = other RNA

SEQ ID NO: 19989 - RNA, 34 nt, Synthetic Construct; identical to SEQ ID NO: 2317
  source 1..34: mol_type = other RNA

SEQ ID NO: 19990 - RNA, 34 nt, Synthetic Construct; identical to SEQ ID NO: 2317
  source 1..34: mol_type = other RNA

SEQ ID NO: 19991 - RNA, 15 nt, Synthetic Construct
  source 1..15: mol_type = other RNA
gagctgtggataggg

SEQ ID NO: 19992 - RNA, 15 nt, Synthetic Construct
  source 1..15: mol_type = other RNA
gagctgtggataggg

SEQ ID NO: 19993 - RNA, 34 nt, Synthetic Construct; identical to SEQ ID NO: 2265
  source 1..34: mol_type = other RNA

SEQ ID NO: 19994 - RNA, 34 nt, Synthetic Construct; identical to SEQ ID NO: 2265
  source 1..34: mol_type = other RNA

SEQ ID NO: 19995 - RNA, 21 nt, Synthetic Construct
  source 1..21: mol_type = other RNA
tgaggtagcaggttgtgtggt

SEQ ID NO: 19996 - RNA, 21 nt, Synthetic Construct
  source 1..21: mol_type = other RNA
tgaggtagcaggttgtgtggt

SEQ ID NO: 19997 - RNA, 22 nt, Synthetic Construct
  source 1..22: mol_type = other RNA
ccggtcccaagggtatggctgt

SEQ ID NO: 19998 - RNA, 22 nt, Synthetic Construct
  source 1..22: mol_type = other RNA
ccggtcccaagggtatggctgt

SEQ ID NO: 19999 - RNA, 15 nt, Synthetic Construct
  source 1..15: mol_type = other RNA
gctagtaatcgcgga

SEQ ID NO: 20000 - RNA, 15 nt, Synthetic Construct
  source 1..15: mol_type = other RNA
gctagtaatcgcgga

SEQ ID NO: 20001 - RNA, 35 nt, Synthetic Construct; identical to SEQ ID NO: 2450
  source 1..35: mol_type = other RNA

SEQ ID NO: 20002 - RNA, 35 nt, Synthetic Construct; identical to SEQ ID NO: 2450
  source 1..35: mol_type = other RNA

SEQ ID NO: 20003 - RNA, 30 nt, Synthetic Construct; identical to SEQ ID NO: 2274
  source 1..30: mol_type = other RNA

SEQ ID NO: 20004 - RNA, 30 nt, Synthetic Construct; identical to SEQ ID NO: 2274
  source 1..30: mol_type = other RNA

SEQ ID NO: 20005 - RNA, 15 nt, Synthetic Construct
  source 1..15: mol_type = other RNA
gagagcctggacaca

SEQ ID NO: 20006 - RNA, 15 nt, Synthetic Construct
  source 1..15: mol_type = other RNA
gagagcctggacaca

SEQ ID NO: 20007 - RNA, 15 nt, Synthetic Construct
  source 1..15: mol_type = other RNA
gcgtagatatgcgga

SEQ ID NO: 20008 - RNA, 15 nt, Synthetic Construct
  source 1..15: mol_type = other RNA
gcgtagatatgcgga

SEQ ID NO: 20009 - RNA, 34 nt, Synthetic Construct; identical to SEQ ID NO: 2364
  source 1..34: mol_type = other RNA

SEQ ID NO: 20010 - RNA, 34 nt, Synthetic Construct; identical to SEQ ID NO: 2364
  source 1..34: mol_type = other RNA

SEQ ID NO: 20011 - RNA, 32 nt, Synthetic Construct; identical to SEQ ID NO: 2798
  source 1..32: mol_type = other RNA

SEQ ID NO: 20012 - RNA, 32 nt, Synthetic Construct; identical to SEQ ID NO: 2798
  source 1..32: mol_type = other RNA

SEQ ID NO: 20013 - RNA, 22 nt, Synthetic Construct
  source 1..22: mol_type = other RNA
cggaggagttcgaaggtacgct

SEQ ID NO: 20014 - RNA, 22 nt, Synthetic Construct
  source 1..22: mol_type = other RNA
cggaggagttcgaaggtacgct

SEQ ID NO: 20015 - RNA, 31 nt, Synthetic Construct; identical to SEQ ID NO: 2310
  source 1..31: mol_type = other RNA

SEQ ID NO: 20016 - RNA, 31 nt, Synthetic Construct; identical to SEQ ID NO: 2310
  source 1..31: mol_type = other RNA

SEQ ID NO: 20017 - RNA, 15 nt, Synthetic Construct
  source 1..15: mol_type = other RNA
cctcgcgcgattgga

SEQ ID NO: 20018 - RNA, 15 nt, Synthetic Construct
  source 1..15: mol_type = other RNA
cctcgcgcgattgga

SEQ ID NO: 20019 - RNA, 16 nt, Synthetic Construct
  source 1..16: mol_type = other RNA
gtcaacggccatacca

SEQ ID NO: 20020 - RNA, 16 nt, Synthetic Construct
  source 1..16: mol_type = other RNA
gtcaacggccatacca

SEQ ID NO: 20021 - RNA, 18 nt, Synthetic Construct
  source 1..18: mol_type = other RNA
tgcgtagatatgcggagg

SEQ ID NO: 20022 - RNA, 18 nt, Synthetic Construct
  source 1..18: mol_type = other RNA
tgcgtagatatgcggagg

SEQ ID NO: 20023 - RNA, 35 nt, Synthetic Construct; identical to SEQ ID NO: 2615
  source 1..35: mol_type = other RNA

SEQ ID NO: 20024 - RNA, 35 nt, Synthetic Construct; identical to SEQ ID NO: 2615
  source 1..35: mol_type = other RNA

SEQ ID NO: 20025 - RNA, 30 nt, Synthetic Construct; identical to SEQ ID NO: 2353
  source 1..30: mol_type = other RNA

SEQ ID NO: 20026 - RNA, 30 nt, Synthetic Construct; identical to SEQ ID NO: 2353
  source 1..30: mol_type = other RNA

SEQ ID NO: 20027 - RNA, 31 nt, Synthetic Construct; identical to SEQ ID NO: 2893
  source 1..31: mol_type = other RNA

SEQ ID NO: 20028 - RNA, 31 nt, Synthetic Construct; identical to SEQ ID NO: 2893
  source 1..31: mol_type = other RNA

SEQ ID NO: 20029 - RNA, 36 nt, Synthetic Construct; identical to SEQ ID NO: 2248
  source 1..36: mol_type = other RNA

SEQ ID NO: 20030 - RNA, 36 nt, Synthetic Construct; identical to SEQ ID NO: 2248
  source 1..36: mol_type = other RNA

SEQ ID NO: 20031 - RNA, 33 nt, Synthetic Construct; identical to SEQ ID NO: 2395
  source 1..33: mol_type = other RNA

SEQ ID NO: 20032 - RNA, 33 nt, Synthetic Construct; identical to SEQ ID NO: 2395
  source 1..33: mol_type = other RNA

SEQ ID NO: 20033 - RNA, 16 nt, Synthetic Construct
  source 1..16: mol_type = other RNA
tgcgtagatatgcgga

SEQ ID NO: 20034 - RNA, 15 nt, Synthetic Construct
  source 1..15: mol_type = other RNA
gagtagggcgggaca

SEQ ID NO: 20035 - RNA, 15 nt, Synthetic Construct
  source 1..15: mol_type = other RNA
gagtagggcgggaca

SEQ ID NO: 20036 - RNA, 25 nt, Synthetic Construct
  source 1..25: mol_type = other RNA
gggttgtaaaccgcttttgtcaggg

SEQ ID NO: 20037 - RNA, 17 nt, Synthetic Construct
  source 1..17: mol_type = other RNA
accggaggaaggtgggg

SEQ ID NO: 20038 - RNA, 17 nt, Synthetic Construct
  source 1..17: mol_type = other RNA
accggaggaaggtgggg

SEQ ID NO: 20039 - RNA, 15 nt, Synthetic Construct
  source 1..15: mol_type = other RNA
gtcgacgtatagggt

SEQ ID NO: 20040 - RNA, 15 nt, Synthetic Construct
  source 1..15: mol_type = other RNA
gtcgacgtatagggt

SEQ ID NO: 20041 - RNA, 31 nt, Synthetic Construct; identical to SEQ ID NO: 2507
  source 1..31: mol_type = other RNA

SEQ ID NO: 20042 - RNA, 31 nt, Synthetic Construct; identical to SEQ ID NO: 2507
  source 1..31: mol_type = other RNA

SEQ ID NO: 20043 - RNA, 15 nt, Synthetic Construct
  source 1..15: mol_type = other RNA
gcaagtcgaacggta

SEQ ID NO: 20044 - RNA, 15 nt, Synthetic Construct
  source 1..15: mol_type = other RNA
gcaagtcgaacggta

SEQ ID NO: 20045 - RNA, 18 nt, Synthetic Construct
  source 1..18: mol_type = other RNA
accggaggaaggtgggga

SEQ ID NO: 20046 - RNA, 18 nt, Synthetic Construct
  source 1..18: mol_type = other RNA
accggaggaaggtgggga

SEQ ID NO: 20047 - RNA, 21 nt, Synthetic Construct
  source 1..21: mol_type = other RNA
ctaatcccagaaacccggtcg

SEQ ID NO: 20048 - RNA, 21 nt, Synthetic Construct
  source 1..21: mol_type = other RNA
ctaatcccagaaacccggtcg

SEQ ID NO: 20049 - RNA, 34 nt, Synthetic Construct; identical to SEQ ID NO: 2291
  source 1..34: mol_type = other RNA

SEQ ID NO: 20050 - RNA, 34 nt, Synthetic Construct; identical to SEQ ID NO: 2291
  source 1..34: mol_type = other RNA

SEQ ID NO: 20051 - RNA, 34 nt, Synthetic Construct; identical to SEQ ID NO: 2553
  source 1..34: mol_type = other RNA

SEQ ID NO: 20052 - RNA, 34 nt, Synthetic Construct; identical to SEQ ID NO: 2553
  source 1..34: mol_type = other RNA

SEQ ID NO: 20053 - RNA, 36 nt, Synthetic Construct; identical to SEQ ID NO: 2520
  source 1..36: mol_type = other RNA

SEQ ID NO: 20054 - RNA, 36 nt, Synthetic Construct; identical to SEQ ID NO: 2520
  source 1..36: mol_type = other RNA

SEQ ID NO: 20055 - RNA, 26 nt, Synthetic Construct
  source 1..26: mol_type = other RNA
gatgcgtggtaggagagcgttctgta

SEQ ID NO: 20056 - RNA, 26 nt, Synthetic Construct
  source 1..26: mol_type = other RNA
gatgcgtggtaggagagcgttctgta

SEQ ID NO: 20057 - RNA, 31 nt, Synthetic Construct; identical to SEQ ID NO: 2293
  source 1..31: mol_type = other RNA

SEQ ID NO: 20058 - RNA, 31 nt, Synthetic Construct; identical to SEQ ID NO: 2293
  source 1..31: mol_type = other RNA

SEQ ID NO: 20059 - RNA, 15 nt, Synthetic Construct
  source 1..15: mol_type = other RNA
gctttgatccggaga

SEQ ID NO: 20060 - RNA, 15 nt, Synthetic Construct
  source 1..15: mol_type = other RNA
gctttgatccggaga

SEQ ID NO: 20061 - RNA, 31 nt, Synthetic Construct; identical to SEQ ID NO: 960
  source 1..31: mol_type = other RNA

SEQ ID NO: 20062 - RNA, 31 nt, Synthetic Construct; identical to SEQ ID NO: 960
  source 1..31: mol_type = other RNA

SEQ ID NO: 20063 - RNA, 23 nt, Synthetic Construct
  source 1..23: mol_type = other RNA
taaagtgcttatagtgcaggtag

SEQ ID NO: 20064 - RNA, 23 nt, Synthetic Construct
  source 1..23: mol_type = other RNA
taaagtgcttatagtgcaggtag

SEQ ID NO: 20065 - RNA, 34 nt, Synthetic Construct; identical to SEQ ID NO: 2265
  source 1..34: mol_type = other RNA

SEQ ID NO: 20066 - RNA, 34 nt, Synthetic Construct; identical to SEQ ID NO: 2265
  source 1..34: mol_type = other RNA

SEQ ID NO: 20067 - RNA, 31 nt, Synthetic Construct; identical to SEQ ID NO: 2215
  source 1..31: mol_type = other RNA

SEQ ID NO: 20068 - RNA, 31 nt, Synthetic Construct; identical to SEQ ID NO: 2215
  source 1..31: mol_type = other RNA

SEQ ID NO: 20069 - RNA, 23 nt, Synthetic Construct
  source 1..23: mol_type = other RNA
ggcagggttcgtgactggggtga

SEQ ID NO: 20070 - RNA, 23 nt, Synthetic Construct
  source 1..23: mol_type = other RNA
ggcagggttcgtgactggggtga

SEQ ID NO: 20071 - RNA, 36 nt, Synthetic Construct; identical to SEQ ID NO: 2506
  source 1..36: mol_type = other RNA

SEQ ID NO: 20072 - RNA, 36 nt, Synthetic Construct; identical to SEQ ID NO: 2506
  source 1..36: mol_type = other RNA

SEQ ID NO: 20073 - RNA, 35 nt, Synthetic Construct; identical to SEQ ID NO: 2762
  source 1..35: mol_type = other RNA

SEQ ID NO: 20074 - RNA, 35 nt, Synthetic Construct; identical to SEQ ID NO: 2762
  source 1..35: mol_type = other RNA

SEQ ID NO: 20075 - RNA, 21 nt, Synthetic Construct
  source 1..21: mol_type = other RNA
cgaggtagtaggttgtgtggt

SEQ ID NO: 20076 - RNA, 21 nt, Synthetic Construct
  source 1..21: mol_type = other RNA
cgaggtagtaggttgtgtggt

SEQ ID NO: 20077 - RNA, 31 nt, Synthetic Construct; identical to SEQ ID NO: 2758
  source 1..31: mol_type = other RNA

SEQ ID NO: 20078 - RNA, 31 nt, Synthetic Construct; identical to SEQ ID NO: 2758
  source 1..31: mol_type = other RNA

SEQ ID NO: 20079 - RNA, 32 nt, Synthetic Construct; identical to SEQ ID NO: 2582
  source 1..32: mol_type = other RNA

SEQ ID NO: 20080 - RNA, 32 nt, Synthetic Construct; identical to SEQ ID NO: 2582
  source 1..32: mol_type = other RNA

SEQ ID NO: 20081 - RNA, 21 nt, Synthetic Construct
  source 1..21: mol_type = other RNA
tcccgtactgagctgccccga

SEQ ID NO: 20082 - RNA, 21 nt, Synthetic Construct
  source 1..21: mol_type = other RNA
tcccgtactgagctgccccga

SEQ ID NO: 20083 - RNA, 43 nt, Synthetic Construct; identical to SEQ ID NO: 2315
  source 1..43: mol_type = other RNA

SEQ ID NO: 20084 - RNA, 43 nt, Synthetic Construct; identical to SEQ ID NO: 2315
  source 1..43: mol_type = other RNA

SEQ ID NO: 20085 - RNA, 36 nt, Synthetic Construct; identical to SEQ ID NO: 2546
  source 1..36: mol_type = other RNA

SEQ ID NO: 20086 - RNA, 36 nt, Synthetic Construct; identical to SEQ ID NO: 2546
  source 1..36: mol_type = other RNA

SEQ ID NO: 20087 - RNA, 32 nt, Synthetic Construct; identical to SEQ ID NO: 2435
  source 1..32: mol_type = other RNA

SEQ ID NO: 20088 - RNA, 32 nt, Synthetic Construct; identical to SEQ ID NO: 2435
  source 1..32: mol_type = other RNA

SEQ ID NO: 20089 - RNA, 31 nt, Synthetic Construct; identical to SEQ ID NO: 2423
  source 1..31: mol_type = other RNA

SEQ ID NO: 20090 - RNA, 31 nt, Synthetic Construct; identical to SEQ ID NO: 2423
  source 1..31: mol_type = other RNA

SEQ ID NO: 20091 - RNA, 22 nt, Synthetic Construct
  source 1..22: mol_type = other RNA
cctcgcgcgattggagcggccg

SEQ ID NO: 20092 - RNA, 22 nt, Synthetic Construct
  source 1..22: mol_type = other RNA
cctcgcgcgattggagcggccg

SEQ ID NO: 20093 - RNA, 34 nt, Synthetic Construct; identical to SEQ ID NO: 2529
  source 1..34: mol_type = other RNA

SEQ ID NO: 20094 - RNA, 34 nt, Synthetic Construct; identical to SEQ ID NO: 2529
  source 1..34: mol_type = other RNA

SEQ ID NO: 20095 - RNA, 22 nt, Synthetic Construct
  source 1..22: mol_type = other RNA
tgtagtgtttcctactttatgg

SEQ ID NO: 20096 - RNA, 22 nt, Synthetic Construct
  source 1..22: mol_type = other RNA
tgtagtgtttcctactttatgg

SEQ ID NO: 20097 - RNA, 29 nt, Synthetic Construct
  source 1..29: mol_type = other RNA
cccgtgtgaaagtaggtcatcgtcaggct

SEQ ID NO: 20098 - RNA, 29 nt, Synthetic Construct
  source 1..29: mol_type = other RNA
cccgtgtgaaagtaggtcatcgtcaggct

SEQ ID NO: 20099 - RNA, 21 nt, Synthetic Construct
  source 1..21: mol_type = other RNA
cggtcccaagggtatggctgt

SEQ ID NO: 20100 - RNA, 21 nt, Synthetic Construct
  source 1..21: mol_type = other RNA
cggtcccaagggtatggctgt

SEQ ID NO: 20101 - RNA, 35 nt, Synthetic Construct; identical to SEQ ID NO: 2269
  source 1..35: mol_type = other RNA

SEQ ID NO: 20102 - RNA, 35 nt, Synthetic Construct; identical to SEQ ID NO: 2269
  source 1..35: mol_type = other RNA

SEQ ID NO: 20103 - RNA, 22 nt, Synthetic Construct
  source 1..22: mol_type = other RNA
ccggtcccaagggtatggctgt

SEQ ID NO: 20104 - RNA, 16 nt, Synthetic Construct
  source 1..16: mol_type = other RNA
gtcgacgtatagggtg

SEQ ID NO: 20105 - RNA, 34 nt, Synthetic Construct; identical to SEQ ID NO: 2186
  source 1..34: mol_type = other RNA

SEQ ID NO: 20106 - RNA, 34 nt, Synthetic Construct; identical to SEQ ID NO: 2186
  source 1..34: mol_type = other RNA

SEQ ID NO: 20107 - RNA, 36 nt, Synthetic Construct; identical to SEQ ID NO: 2469
  source 1..36: mol_type = other RNA

SEQ ID NO: 20108 - RNA, 36 nt, Synthetic Construct; identical to SEQ ID NO: 2469
  source 1..36: mol_type = other RNA

SEQ ID NO: 20109 - RNA, 23 nt, Synthetic Construct
  source 1..23: mol_type = other RNA
tcctgtactgagccgccccgaga

SEQ ID NO: 20110 - RNA, 23 nt, Synthetic Construct
  source 1..23: mol_type = other RNA
tcctgtactgagccgccccgaga

SEQ ID NO: 20111 - RNA, 41 nt, Synthetic Construct; identical to SEQ ID NO: 2441
  source 1..41: mol_type = other RNA

SEQ ID NO: 20112 - RNA, 41 nt, Synthetic Construct; identical to SEQ ID NO: 2441
  source 1..41: mol_type = other RNA

SEQ ID NO: 20113 - RNA, 16 nt, Synthetic Construct
  source 1..16: mol_type = other RNA
gtcaacggccatacca

SEQ ID NO: 20114 - RNA, 16 nt, Synthetic Construct
  source 1..16: mol_type = other RNA
gtcaacggccatacca

SEQ ID NO: 20115 - RNA, 31 nt, Synthetic Construct; identical to SEQ ID NO: 2263
  source 1..31: mol_type = other RNA

SEQ ID NO: 20116 - RNA, 31 nt, Synthetic Construct; identical to SEQ ID NO: 2263
  source 1..31: mol_type = other RNA

SEQ ID NO: 20117 - RNA, 15 nt, Synthetic Construct
  source 1..15: mol_type = other RNA
gcgtagatatgcgga

SEQ ID NO: 20118 - RNA, 33 nt, Synthetic Construct; identical to SEQ ID NO: 2126
  source 1..33: mol_type = other RNA

SEQ ID NO: 20119 - RNA, 33 nt, Synthetic Construct; identical to SEQ ID NO: 2126
  source 1..33: mol_type = other RNA

SEQ ID NO: 20120 - RNA, 31 nt, Synthetic Construct; identical to SEQ ID NO: 2427
  source 1..31: mol_type = other RNA

SEQ ID NO: 20121 - RNA, 31 nt, Synthetic Construct; identical to SEQ ID NO: 2427
  source 1..31: mol_type = other RNA

SEQ ID NO: 20122 - RNA, 35 nt, Synthetic Construct; identical to SEQ ID NO: 2399
  source 1..35: mol_type = other RNA

SEQ ID NO: 20123 - RNA, 35 nt, Synthetic Construct; identical to SEQ ID NO: 2399
  source 1..35: mol_type = other RNA

SEQ ID NO: 20124 - RNA, 22 nt, Synthetic Construct
  source 1..22: mol_type = other RNA
ttctgtactgagctgccccgag

SEQ ID NO: 20125 - RNA, 22 nt, Synthetic Construct
  source 1..22: mol_type = other RNA
ttctgtactgagctgccccgag

SEQ ID NO: 20126 - RNA, 16 nt, Synthetic Construct
  source 1..16: mol_type = other RNA
gcgtagatatgcggag

SEQ ID NO: 20127 - RNA, 16 nt, Synthetic Construct
  source 1..16: mol_type = other RNA
gcgtagatatgcggag

SEQ ID NO: 20128 - RNA, 17 nt, Synthetic Construct
  source 1..17: mol_type = other RNA
gtcgacgtatagggtgt

SEQ ID NO: 20129 - RNA, 35 nt, Synthetic Construct; identical to SEQ ID NO: 2069
  source 1..35: mol_type = other RNA

SEQ ID NO: 20130 - RNA, 30 nt, Synthetic Construct; identical to SEQ ID NO: 2308
  source 1..30: mol_type = other RNA

SEQ ID NO: 20131 - RNA, 30 nt, Synthetic Construct; identical to SEQ ID NO: 2308
  source 1..30: mol_type = other RNA

SEQ ID NO: 20132 - RNA, 16 nt, Synthetic Construct
  source 1..16: mol_type = other RNA
gtccggatcgtagtct

SEQ ID NO: 20133 - RNA, 16 nt, Synthetic Construct
  source 1..16: mol_type = other RNA
gtccggatcgtagtct

SEQ ID NO: 20134 - RNA, 31 nt, Synthetic Construct; identical to SEQ ID NO: 2427
  source 1..31: mol_type = other RNA

SEQ ID NO: 20135 - RNA, 15 nt, Synthetic Construct
  source 1..15: mol_type = other RNA
tccggatcgtagtct

SEQ ID NO: 20136 - RNA, 15 nt, Synthetic Construct
  source 1..15: mol_type = other RNA
tccggatcgtagtct

SEQ ID NO: 20137 - RNA, 35 nt, Synthetic Construct; identical to SEQ ID NO: 2762
  source 1..35: mol_type = other RNA

SEQ ID NO: 20138 - RNA, 35 nt, Synthetic Construct; identical to SEQ ID NO: 2762
  source 1..35: mol_type = other RNA

SEQ ID NO: 20139 - RNA, 16 nt, Synthetic Construct
  source 1..16: mol_type = other RNA
gggtgaaagcggggga

SEQ ID NO: 20140 - RNA, 16 nt, Synthetic Construct
  source 1..16: mol_type = other RNA
gggtgaaagcggggga

SEQ ID NO: 20141 - RNA, 33 nt, Synthetic Construct; identical to SEQ ID NO: 2266
  source 1..33: mol_type = other RNA

SEQ ID NO: 20142 - RNA, 33 nt, Synthetic Construct; identical to SEQ ID NO: 2266
  source 1..33: mol_type = other RNA

SEQ ID NO: 20143 - RNA, 17 nt, Synthetic Construct
  source 1..17: mol_type = other RNA
tcgctagtaatcgcgga

SEQ ID NO: 20144 - RNA, 17 nt, Synthetic Construct
  source 1..17: mol_type = other RNA
tcgctagtaatcgcgga

SEQ ID NO: 20145 - RNA, 16 nt, Synthetic Construct
  source 1..16: mol_type = other RNA
cgctagtaatcgcgga

SEQ ID NO: 20146 - RNA, 16 nt, Synthetic Construct
  source 1..16: mol_type = other RNA
cgctagtaatcgcgga

SEQ ID NO: 20147 - RNA, 18 nt, Synthetic Construct
  source 1..18: mol_type = other RNA
accggaggaaggtgggga

SEQ ID NO: 20148 - RNA, 20 nt, Synthetic Construct
  source 1..20: mol_type = other RNA
tgtcagtttgtcaaataccc

SEQ ID NO: 20149 - RNA, 20 nt, Synthetic Construct
  source 1..20: mol_type = other RNA
tgtcagtttgtcaaataccc

SEQ ID NO: 20150 - RNA, 36 nt, Synthetic Construct; identical to SEQ ID NO: 2444
  source 1..36: mol_type = other RNA

SEQ ID NO: 20151 - RNA, 36 nt, Synthetic Construct; identical to SEQ ID NO: 2444
  source 1..36: mol_type = other RNA

SEQ ID NO: 20152 - RNA, 20 nt, Synthetic Construct
  source 1..20: mol_type = other RNA
caatggccgggacagagggc

SEQ ID NO: 20153 - RNA, 20 nt, Synthetic Construct
  source 1..20: mol_type = other RNA
caatggccgggacagagggc

SEQ ID NO: 20154 - RNA, 15 nt, Synthetic Construct
  source 1..15: mol_type = other RNA
gggtgaaagcggggg

SEQ ID NO: 20155 - RNA, 15 nt, Synthetic Construct
  source 1..15: mol_type = other RNA
gggtgaaagcggggg

SEQ ID NO: 20156 - RNA, 34 nt, Synthetic Construct; identical to SEQ ID NO: 2019
  source 1..34: mol_type = other RNA

SEQ ID NO: 20157 - RNA, 34 nt, Synthetic Construct; identical to SEQ ID NO: 2019
  source 1..34: mol_type = other RNA

SEQ ID NO: 20158 - RNA, 38 nt, Synthetic Construct; identical to SEQ ID NO: 2492
  source 1..38: mol_type = other RNA

SEQ ID NO: 20159 - RNA, 20 nt, Synthetic Construct
  source 1..20: mol_type = other RNA
tgaggtagtaggttgtgcgg

SEQ ID NO: 20160 - RNA, 20 nt, Synthetic Construct
  source 1..20: mol_type = other RNA
tgaggtagtaggttgtgcgg

SEQ ID NO: 20161 - RNA, 32 nt, Synthetic Construct; identical to SEQ ID NO: 2850
  source 1..32: mol_type = other RNA

SEQ ID NO: 20162 - RNA, 32 nt, Synthetic Construct; identical to SEQ ID NO: 2850
  source 1..32: mol_type = other RNA

SEQ ID NO: 20163 - RNA, 30 nt, Synthetic Construct; identical to SEQ ID NO: 2840
  source 1..30: mol_type = other RNA

SEQ ID NO: 20164 - RNA, 30 nt, Synthetic Construct; identical to SEQ ID NO: 2840
  source 1..30: mol_type = other RNA

SEQ ID NO: 20165 - RNA, 33 nt, Synthetic Construct; identical to SEQ ID NO: 3082
  source 1..33: mol_type = other RNA

SEQ ID NO: 20166 - RNA, 33 nt, Synthetic Construct; identical to SEQ ID NO: 3082
  source 1..33: mol_type = other RNA

SEQ ID NO: 20167 - RNA, 23 nt, Synthetic Construct
  source 1..23: mol_type = other RNA
tcctgtaccgagctgccccgagt

SEQ ID NO: 20168 - RNA, 23 nt, Synthetic Construct
  source 1..23: mol_type = other RNA
tcctgtaccgagctgccccgagt

SEQ ID NO: 20169 - RNA, 20 nt, Synthetic Construct
  source 1..20: mol_type = other RNA
tgaggtagtaggttgcgtgg

SEQ ID NO: 20170 - RNA, 20 nt, Synthetic Construct
  source 1..20: mol_type = other RNA
tgaggtagtaggttgcgtgg

SEQ ID NO: 20171 - RNA, 20 nt, Synthetic Construct
  source 1..20: mol_type = other RNA
tgaggtagtaggctgtgtgg

SEQ ID NO: 20172 - RNA, 20 nt, Synthetic Construct
  source 1..20: mol_type = other RNA
tgaggtagtaggctgtgtgg

SEQ ID NO: 20173 - RNA, 35 nt, Synthetic Construct; identical to SEQ ID NO: 2397
  source 1..35: mol_type = other RNA

SEQ ID NO: 20174 - RNA, 35 nt, Synthetic Construct; identical to SEQ ID NO: 2397
  source 1..35: mol_type = other RNA

SEQ ID NO: 20175 - RNA, 17 nt, Synthetic Construct
  source 1..17: mol_type = other RNA
gtccggatcgtagtctg

SEQ ID NO: 20176 - RNA, 17 nt, Synthetic Construct
  source 1..17: mol_type = other RNA
gtccggatcgtagtctg

SEQ ID NO: 20177 - RNA, 34 nt, Synthetic Construct; identical to SEQ ID NO: 2364
  source 1..34: mol_type = other RNA

SEQ ID NO: 20178 - RNA, 35 nt, Synthetic Construct; identical to SEQ ID NO: 2548
  source 1..35: mol_type = other RNA

SEQ ID NO: 20179 - RNA, 35 nt, Synthetic Construct; identical to SEQ ID NO: 2548
  source 1..35: mol_type = other RNA

SEQ ID NO: 20180 - RNA, 35 nt, Synthetic Construct; identical to SEQ ID NO: 2354
  source 1..35: mol_type = other RNA

SEQ ID NO: 20181 - RNA, 35 nt, Synthetic Construct; identical to SEQ ID NO: 2354
  source 1..35: mol_type = other RNA

SEQ ID NO: 20182 - RNA, 21 nt, Synthetic Construct
  source 1..21: mol_type = other RNA
tgaggtagtaggttgcgtggt

SEQ ID NO: 20183 - RNA, 21 nt, Synthetic Construct
  source 1..21: mol_type = other RNA
tgaggtagtaggttgcgtggt

SEQ ID NO: 20184 - RNA, 31 nt, Synthetic Construct; identical to SEQ ID NO: 2442
  source 1..31: mol_type = other RNA

SEQ ID NO: 20185 - RNA, 31 nt, Synthetic Construct; identical to SEQ ID NO: 2442
  source 1..31: mol_type = other RNA

SEQ ID NO: 20186 - RNA, 31 nt, Synthetic Construct; identical to SEQ ID NO: 2333
  source 1..31: mol_type = other RNA

SEQ ID NO: 20187 - RNA, 31 nt, Synthetic Construct; identical to SEQ ID NO: 2333
  source 1..31: mol_type = other RNA

SEQ ID NO: 20188 - RNA, 16 nt, Synthetic Construct
  source 1..16: mol_type = other RNA
ccggaggaaggtgggg

SEQ ID NO: 20189 - RNA, 16 nt, Synthetic Construct
  source 1..16: mol_type = other RNA
ccggaggaaggtgggg

SEQ ID NO: 20190 - RNA, 22 nt, Synthetic Construct
  source 1..22: mol_type = other RNA
tgtagtgtttcctactttatgg

SEQ ID NO: 20191 - RNA, 21 nt, Synthetic Construct
  source 1..21: mol_type = other RNA
tgaggtggtaggttgtgtggt

SEQ ID NO: 20192 - RNA, 21 nt, Synthetic Construct
  source 1..21: mol_type = other RNA
tgaggtggtaggttgtgtggt

SEQ ID NO: 20193 - RNA, 34 nt, Synthetic Construct; identical to SEQ ID NO: 2265
  source 1..34: mol_type = other RNA

SEQ ID NO: 20194 - RNA, 34 nt, Synthetic Construct; identical to SEQ ID NO: 2265
  source 1..34: mol_type = other RNA

SEQ ID NO: 20195 - RNA, 32 nt, Synthetic Construct; identical to SEQ ID NO: 2086
  source 1..32: mol_type = other RNA

SEQ ID NO: 20196 - RNA, 32 nt, Synthetic Construct; identical to SEQ ID NO: 2086
  source 1..32: mol_type = other RNA

SEQ ID NO: 20197 - RNA, 15 nt, Synthetic Construct
  source 1..15: mol_type = other RNA
gcaagtcgaacggta

SEQ ID NO: 20198 - RNA, 15 nt, Synthetic Construct
  source 1..15: mol_type = other RNA
gcaagtcgaacggta

SEQ ID NO: 20199 - RNA, 21 nt, Synthetic Construct
  source 1..21: mol_type = other RNA
tgaggtagtgggttgtgtggt

SEQ ID NO: 20200 - RNA, 21 nt, Synthetic Construct
  source 1..21: mol_type = other RNA
tgaggtagtgggttgtgtggt

SEQ ID NO: 20201 - RNA, 30 nt, Synthetic Construct; identical to SEQ ID NO: 1958
  source 1..30: mol_type = other RNA

SEQ ID NO: 20202 - RNA, 30 nt, Synthetic Construct; identical to SEQ ID NO: 1958
  source 1..30: mol_type = other RNA

SEQ ID NO: 20203 - RNA, 22 nt, Synthetic Construct
  source 1..22: mol_type = other RNA
tatcggaacgtgcccagtcgtg

SEQ ID NO: 20204 - RNA, 22 nt, Synthetic Construct
  source 1..22: mol_type = other RNA
tatcggaacgtgcccagtcgtg

SEQ ID NO: 20205 - RNA, 17 nt, Synthetic Construct
  source 1..17: mol_type = other RNA
gcgtagatatgcggagg

SEQ ID NO: 20206 - RNA, 17 nt, Synthetic Construct
  source 1..17: mol_type = other RNA
gcgtagatatgcggagg

SEQ ID NO: 20207 - RNA, 35 nt, Synthetic Construct; identical to SEQ ID NO: 2069
  source 1..35: mol_type = other RNA

SEQ ID NO: 20208 - RNA, 35 nt, Synthetic Construct; identical to SEQ ID NO: 2069
  source 1..35: mol_type = other RNA

SEQ ID NO: 20209 - RNA, 15 nt, Synthetic Construct
  source 1..15: mol_type = other RNA
gtccggatcgtagtc

SEQ ID NO: 20210 - RNA, 15 nt, Synthetic Construct
  source 1..15: mol_type = other RNA
gtccggatcgtagtc

SEQ ID NO: 20211 - RNA, 18 nt, Synthetic Construct
  source 1..18: mol_type = other RNA
atcgctagtaatcgcgga

SEQ ID NO: 20212 - RNA, 18 nt, Synthetic Construct
  source 1..18: mol_type = other RNA
atcgctagtaatcgcgga

SEQ ID NO: 20213 - RNA, 23 nt, Synthetic Construct
  source 1..23: mol_type = other RNA
tcccgtactgagctgccccgaga

SEQ ID NO: 20214 - RNA, 23 nt, Synthetic Construct
  source 1..23: mol_type = other RNA
tcccgtactgagctgccccgaga

SEQ ID NO: 20215 - RNA, 22 nt, Synthetic Construct
  source 1..22: mol_type = other RNA
ggcagggttcgtgactggggtg

SEQ ID NO: 20216 - RNA, 22 nt, Synthetic Construct
  source 1..22: mol_type = other RNA
ggcagggttcgtgactggggtg

SEQ ID NO: 20217 - RNA, 22 nt, Synthetic Construct
  source 1..22: mol_type = other RNA
cggaggagttcgaaggtacgct

SEQ ID NO: 20218 - RNA, 16 nt, Synthetic Construct
  source 1..16: mol_type = other RNA
ccggaggaaggtgggg

SEQ ID NO: 20219 - RNA, 34 nt, Synthetic Construct; identical to SEQ ID NO: 2367
  source 1..34: mol_type = other RNA

SEQ ID NO: 20220 - RNA, 34 nt, Synthetic Construct; identical to SEQ ID NO: 2367
  source 1..34: mol_type = other RNA

SEQ ID NO: 20221 - RNA, 36 nt, Synthetic Construct; identical to SEQ ID NO: 2344
  source 1..36: mol_type = other RNA

SEQ ID NO: 20222 - RNA, 36 nt, Synthetic Construct; identical to SEQ ID NO: 2344
  source 1..36: mol_type = other RNA

SEQ ID NO: 20223 - RNA, 32 nt, Synthetic Construct; identical to SEQ ID NO: 2318
  source 1..32: mol_type = other RNA

SEQ ID NO: 20224 - RNA, 32 nt, Synthetic Construct; identical to SEQ ID NO: 2318
  source 1..32: mol_type = other RNA

SEQ ID NO: 20225 - RNA, 33 nt, Synthetic Construct; identical to SEQ ID NO: 2253
  source 1..33: mol_type = other RNA

SEQ ID NO: 20226 - RNA, 33 nt, Synthetic Construct; identical to SEQ ID NO: 2253
  source 1..33: mol_type = other RNA

SEQ ID NO: 20227 - RNA, 31 nt, Synthetic Construct; identical to SEQ ID NO: 2295
  source 1..31: mol_type = other RNA

SEQ ID NO: 20228 - RNA, 31 nt, Synthetic Construct; identical to SEQ ID NO: 2295
  source 1..31: mol_type = other RNA

SEQ ID NO: 20229 - RNA, 21 nt, Synthetic Construct
  source 1..21: mol_type = other RNA
atcggaacgtgcccagtcgtg

SEQ ID NO: 20230 - RNA, 15 nt, Synthetic Construct
  source 1..15: mol_type = other RNA
tcctgacggccatag

SEQ ID NO: 20231 - RNA, 15 nt, Synthetic Construct
  source 1..15: mol_type = other RNA
tcctgacggccatag

SEQ ID NO: 20232 - RNA, 22 nt, Synthetic Construct
  source 1..22: mol_type = other RNA
gagagcctggacacaggtgctg

SEQ ID NO: 20233 - RNA, 22 nt, Synthetic Construct
  source 1..22: mol_type = other RNA
gagagcctggacacaggtgctg

SEQ ID NO: 20234 - RNA, 16 nt, Synthetic Construct
  source 1..16: mol_type = other RNA
cgctagtaatcgcgga

SEQ ID NO: 20235 - RNA, 16 nt, Synthetic Construct
  source 1..16: mol_type = other RNA
cgctagtaatcgcgga

SEQ ID NO: 20236 - RNA, 35 nt, Synthetic Construct; identical to SEQ ID NO: 757
  source 1..35: mol_type = other RNA

SEQ ID NO: 20237 - RNA, 35 nt, Synthetic Construct; identical to SEQ ID NO: 757
  source 1..35: mol_type = other RNA

SEQ ID NO: 20238 - RNA, 30 nt, Synthetic Construct; identical to SEQ ID NO: 2353
  source 1..30: mol_type = other RNA

SEQ ID NO: 20239 - RNA, 30 nt, Synthetic Construct; identical to SEQ ID NO: 2353
  source 1..30: mol_type = other RNA

SEQ ID NO: 20240 - RNA, 16 nt, Synthetic Construct
  source 1..16: mol_type = other RNA
gcgtagatatgcggag

SEQ ID NO: 20241 - RNA, 16 nt, Synthetic Construct
  source 1..16: mol_type = other RNA
gcgtagatatgcggag

SEQ ID NO: 20242 - RNA, 15 nt, Synthetic Construct
  source 1..15: mol_type = other RNA
gcaagtcgaacggta

SEQ ID NO: 20243 - RNA, 15 nt, Synthetic Construct
  source 1..15: mol_type = other RNA
gcaagtcgaacggta

SEQ ID NO: 20244 - RNA, 28 nt, Synthetic Construct
  source 1..28: mol_type = other RNA
ccgtgtgaaagtaggtcatcgtcaggct

SEQ ID NO: 20245 - RNA, 28 nt, Synthetic Construct
  source 1..28: mol_type = other RNA
ccgtgtgaaagtaggtcatcgtcaggct

SEQ ID NO: 20246 - RNA, 16 nt, Synthetic Construct
  source 1..16: mol_type = other RNA
gcggtggatgatgtgg

SEQ ID NO: 20247 - RNA, 16 nt, Synthetic Construct
  source 1..16: mol_type = other RNA
gcggtggatgatgtgg

SEQ ID NO: 20248 - RNA, 23 nt, Synthetic Construct
  source 1..23: mol_type = other RNA
taaagtgcttatagtgcaggtag

SEQ ID NO: 20249 - RNA, 23 nt, Synthetic Construct
  source 1..23: mol_type = other RNA
taaagtgcttatagtgcaggtag

SEQ ID NO: 20250 - RNA, 20 nt, Synthetic Construct
  source 1..20: mol_type = other RNA
tggggtagtaggttgtgtgg

SEQ ID NO: 20251 - RNA, 20 nt, Synthetic Construct
  source 1..20: mol_type = other RNA
tggggtagtaggttgtgtgg

SEQ ID NO: 20252 - RNA, 19 nt, Synthetic Construct
  source 1..19: mol_type = other RNA
agtcgacgtatagggtgtg

SEQ ID NO: 20253 - RNA, 19 nt, Synthetic Construct
  source 1..19: mol_type = other RNA
agtcgacgtatagggtgtg

SEQ ID NO: 20254 - RNA, 34 nt, Synthetic Construct; identical to SEQ ID NO: 2375
  source 1..34: mol_type = other RNA

SEQ ID NO: 20255 - RNA, 34 nt, Synthetic Construct; identical to SEQ ID NO: 2375
  source 1..34: mol_type = other RNA

SEQ ID NO: 20256 - RNA, 33 nt, Synthetic Construct; identical to SEQ ID NO: 2386
  source 1..33: mol_type = other RNA

SEQ ID NO: 20257 - RNA, 39 nt, Synthetic Construct; identical to SEQ ID NO: 2398
  source 1..39: mol_type = other RNA

SEQ ID NO: 20258 - RNA, 39 nt, Synthetic Construct; identical to SEQ ID NO: 2398
  source 1..39: mol_type = other RNA

SEQ ID NO: 20259 - RNA, 22 nt, Synthetic Construct
  source 1..22: mol_type = other RNA
nattgcacttgtcccggcctgt

SEQ ID NO: 20260 - RNA, 22 nt, Synthetic Construct
  source 1..22: mol_type = other RNA
nattgcacttgtcccggcctgt

SEQ ID NO: 20261 - RNA, 24 nt, Synthetic Construct
  source 1..24: mol_type = other RNA
gatgaggcgtgataacgagtctgc

SEQ ID NO: 20262 - RNA, 24 nt, Synthetic Construct
  source 1..24: mol_type = other RNA
gatgaggcgtgataacgagtctgc

SEQ ID NO: 20263 - RNA, 31 nt, Synthetic Construct; identical to SEQ ID NO: 2758
  source 1..31: mol_type = other RNA

SEQ ID NO: 20264 - RNA, 31 nt, Synthetic Construct; identical to SEQ ID NO: 2758
  source 1..31: mol_type = other RNA

SEQ ID NO: 20265 - RNA, 32 nt, Synthetic Construct; identical to SEQ ID NO: 3092
  source 1..32: mol_type = other RNA

SEQ ID NO: 20266 - RNA, 32 nt, Synthetic Construct; identical to SEQ ID NO: 3092
  source 1..32: mol_type = other RNA

SEQ ID NO: 20267 - RNA, 30 nt, Synthetic Construct; identical to SEQ ID NO: 2578
  source 1..30: mol_type = other RNA

SEQ ID NO: 20268 - RNA, 30 nt, Synthetic Construct; identical to SEQ ID NO: 2578
  source 1..30: mol_type = other RNA

SEQ ID NO: 20269 - RNA, 15 nt, Synthetic Construct
  source 1..15: mol_type = other RNA
tcctgacggccatag

SEQ ID NO: 20270 - RNA, 15 nt, Synthetic Construct
  source 1..15: mol_type = other RNA
tcctgacggccatag

SEQ ID NO: 20271 - RNA, 22 nt, Synthetic Construct
  source 1..22: mol_type = other RNA
tgttggttcaagcgtgtagtcg

SEQ ID NO: 20272 - RNA, 22 nt, Synthetic Construct
  source 1..22: mol_type = other RNA
tgttggttcaagcgtgtagtcg

SEQ ID NO: 20273 - RNA, 28 nt, Synthetic Construct
  source 1..28: mol_type = other RNA
ggcagggttcgtgactggggtgaagtcg

SEQ ID NO: 20274 - RNA, 31 nt, Synthetic Construct; identical to SEQ ID NO: 2427
  source 1..31: mol_type = other RNA

SEQ ID NO: 20275 - RNA, 31 nt, Synthetic Construct; identical to SEQ ID NO: 2427
  source 1..31: mol_type = other RNA

SEQ ID NO: 20276 - RNA, 34 nt, Synthetic Construct; identical to SEQ ID NO: 2183
  source 1..34: mol_type = other RNA

SEQ ID NO: 20277 - RNA, 34 nt, Synthetic Construct; identical to SEQ ID NO: 2183
  source 1..34: mol_type = other RNA

SEQ ID NO: 20278 - RNA, 27 nt, Synthetic Construct
  source 1..27: mol_type = other RNA
ccgtgtgaaagtaggtcatcgtcaggc

SEQ ID NO: 20279 - RNA, 27 nt, Synthetic Construct
  source 1..27: mol_type = other RNA
ccgtgtgaaagtaggtcatcgtcaggc

SEQ ID NO: 20280 - RNA, 31 nt, Synthetic Construct; identical to SEQ ID NO: 2893
  source 1..31: mol_type = other RNA

SEQ ID NO: 20281 - RNA, 31 nt, Synthetic Construct; identical to SEQ ID NO: 2893
  source 1..31: mol_type = other RNA

SEQ ID NO: 20282 - RNA, 20 nt, Synthetic Construct
  source 1..20: mol_type = other RNA
cgaggtagtaggttgtgtgg

SEQ ID NO: 20283 - RNA, 20 nt, Synthetic Construct
  source 1..20: mol_type = other RNA
cgaggtagtaggttgtgtgg

SEQ ID NO: 20284 - RNA, 33 nt, Synthetic Construct; identical to SEQ ID NO: 2386
  source 1..33: mol_type = other RNA

SEQ ID NO: 20285 - RNA, 33 nt, Synthetic Construct; identical to SEQ ID NO: 2386
  source 1..33: mol_type = other RNA

SEQ ID NO: 20286 - RNA, 17 nt, Synthetic Construct
  source 1..17: mol_type = other RNA
agcggtggatgatgtgg

SEQ ID NO: 20287 - RNA, 17 nt, Synthetic Construct
  source 1..17: mol_type = other RNA
agcggtggatgatgtgg

SEQ ID NO: 20288 - RNA, 16 nt, Synthetic Construct
  source 1..16: mol_type = other RNA
ctgacgctcatgcacg

SEQ ID NO: 20289 - RNA, 16 nt, Synthetic Construct
  source 1..16: mol_type = other RNA
ctgacgctcatgcacg

SEQ ID NO: 20290 - RNA, 24 nt, Synthetic Construct
  source 1..24: mol_type = other RNA
gggttgtaaaccgcttttgtcagg

SEQ ID NO: 20291 - RNA, 24 nt, Synthetic Construct
  source 1..24: mol_type = other RNA
gggttgtaaaccgcttttgtcagg

SEQ ID NO: 20292 - RNA, 31 nt, Synthetic Construct; identical to SEQ ID NO: 2442
  source 1..31: mol_type = other RNA

SEQ ID NO: 20293 - RNA, 34 nt, Synthetic Construct; identical to SEQ ID NO: 2317
  source 1..34: mol_type = other RNA

SEQ ID NO: 20294 - RNA, 34 nt, Synthetic Construct; identical to SEQ ID NO: 2317
  source 1..34: mol_type = other RNA

SEQ ID NO: 20295 - RNA, 23 nt, Synthetic Construct
  source 1..23: mol_type = other RNA
tcctgtactgagctgccccgggt

SEQ ID NO: 20296 - RNA, 23 nt, Synthetic Construct
  source 1..23: mol_type = other RNA
tcctgtactgagctgccccgggt

SEQ ID NO: 20297 - RNA, 35 nt, Synthetic Construct; identical to SEQ ID NO: 2450
  source 1..35: mol_type = other RNA

SEQ ID NO: 20298 - RNA, 35 nt, Synthetic Construct; identical to SEQ ID NO: 2450
  source 1..35: mol_type = other RNA

SEQ ID NO: 20299 - RNA, 22 nt, Synthetic Construct
  source 1..22: mol_type = other RNA
cggaatcgctagtaatcgcgga

SEQ ID NO: 20300 - RNA, 22 nt, Synthetic Construct
  source 1..22: mol_type = other RNA
cggaatcgctagtaatcgcgga

SEQ ID NO: 20301 - RNA, 21 nt, Synthetic Construct
  source 1..21: mol_type = other RNA
atcggaacgtgcccagtcgtg

SEQ ID NO: 20302 - RNA, 21 nt, Synthetic Construct
  source 1..21: mol_type = other RNA
atcggaacgtgcccagtcgtg

SEQ ID NO: 20303 - RNA, 21 nt, Synthetic Construct
  source 1..21: mol_type = other RNA
gctttgatccggagatttccg

SEQ ID NO: 20304 - RNA, 21 nt, Synthetic Construct
  source 1..21: mol_type = other RNA
gctttgatccggagatttccg

SEQ ID NO: 20305 - RNA, 17 nt, Synthetic Construct
  source 1..17: mol_type = other RNA
accggaggaaggtgggg

SEQ ID NO: 20306 - RNA, 23 nt, Synthetic Construct
  source 1..23: mol_type = other RNA
gcgtggtaggagagcgttctgta

SEQ ID NO: 20307 - RNA, 23 nt, Synthetic Construct
  source 1..23: mol_type = other RNA
gcgtggtaggagagcgttctgta

SEQ ID NO: 20308 - RNA, 16 nt, Synthetic Construct
  source 1..16: mol_type = other RNA
gtcgacgtatagggtg

SEQ ID NO: 20309 - RNA, 16 nt, Synthetic Construct
  source 1..16: mol_type = other RNA
gtcgacgtatagggtg

SEQ ID NO: 20310 - RNA, 16 nt, Synthetic Construct
  source 1..16: mol_type = other RNA
gcgtagatatgcggag

SEQ ID NO: 20311 - RNA, 23 nt, Synthetic Construct
  source 1..23: mol_type = other RNA
ggcagggttcgtgactggggtga

SEQ ID NO: 20312 - RNA, 37 nt, Synthetic Construct; identical to SEQ ID NO: 2365
  source 1..37: mol_type = other RNA

SEQ ID NO: 20313 - RNA, 37 nt, Synthetic Construct; identical to SEQ ID NO: 2365
  source 1..37: mol_type = other RNA

SEQ ID NO: 20314 - RNA, 23 nt, Synthetic Construct
  source 1..23: mol_type = other RNA
tgaggtagtaggttgtgtggttc

SEQ ID NO: 20315 - RNA, 22 nt, Synthetic Construct
  source 1..22: mol_type = other RNA
tgtagtgtttcctactttatgg

SEQ ID NO: 20316 - RNA, 15 nt, Synthetic Construct
  source 1..15: mol_type = other RNA
gagctgtggataggg

SEQ ID NO: 20317 - RNA, 15 nt, Synthetic Construct
  source 1..15: mol_type = other RNA
gagctgtggataggg

SEQ ID NO: 20318 - RNA, 32 nt, Synthetic Construct; identical to SEQ ID NO: 2296
  source 1..32: mol_type = other RNA

SEQ ID NO: 20319 - RNA, 32 nt, Synthetic Construct; identical to SEQ ID NO: 2296
  source 1..32: mol_type = other RNA

SEQ ID NO: 20320 - RNA, 15 nt, Synthetic Construct
  source 1..15: mol_type = other RNA
cctcgcgcgattgga

SEQ ID NO: 20321 - RNA, 15 nt, Synthetic Construct
  source 1..15: mol_type = other RNA
cctcgcgcgattgga

SEQ ID NO: 20322 - RNA, 21 nt, Synthetic Construct
  source 1..21: mol_type = other RNA
tcctgtaccgagctgccccga

SEQ ID NO: 20323 - RNA, 21 nt, Synthetic Construct
  source 1..21: mol_type = other RNA
tcctgtaccgagctgccccga

SEQ ID NO: 20324 - RNA, 35 nt, Synthetic Construct; identical to SEQ ID NO: 2450
  source 1..35: mol_type = other RNA

SEQ ID NO: 20325 - RNA, 35 nt, Synthetic Construct; identical to SEQ ID NO: 2450
  source 1..35: mol_type = other RNA

SEQ ID NO: 20326 - RNA, 36 nt, Synthetic Construct; identical to SEQ ID NO: 2506
  source 1..36: mol_type = other RNA

SEQ ID NO: 20327 - RNA, 36 nt, Synthetic Construct; identical to SEQ ID NO: 2506
  source 1..36: mol_type = other RNA

SEQ ID NO: 20328 - RNA, 23 nt, Synthetic Construct
  source 1..23: mol_type = other RNA
tcctgtactgagctgccccggga

SEQ ID NO: 20329 - RNA, 23 nt, Synthetic Construct
  source 1..23: mol_type = other RNA
tcctgtactgagctgccccggga

SEQ ID NO: 20330 - RNA, 17 nt, Synthetic Construct
  source 1..17: mol_type = other RNA
gtcgacgtatagggtgt

SEQ ID NO: 20331 - RNA, 17 nt, Synthetic Construct
  source 1..17: mol_type = other RNA
gtcgacgtatagggtgt

SEQ ID NO: 20332 - RNA, 44 nt, Synthetic Construct; identical to SEQ ID NO: 5536
  source 1..44: mol_type = other RNA

SEQ ID NO: 20333 - RNA, 44 nt, Synthetic Construct; identical to SEQ ID NO: 5536
  source 1..44: mol_type = other RNA

SEQ ID NO: 20334 - RNA, 33 nt, Synthetic Construct; identical to SEQ ID NO: 2253
  source 1..33: mol_type = other RNA

SEQ ID NO: 20335 - RNA, 33 nt, Synthetic Construct; identical to SEQ ID NO: 2253
  source 1..33: mol_type = other RNA

SEQ ID NO: 20336 - RNA, 15 nt, Synthetic Construct
  source 1..15: mol_type = other RNA
gcgtagatatgcgga

SEQ ID NO: 20337 - RNA, 15 nt, Synthetic Construct
  source 1..15: mol_type = other RNA
gcgtagatatgcgga

SEQ ID NO: 20338 - RNA, 23 nt, Synthetic Construct
  source 1..23: mol_type = other RNA
ggcagggttcgtgactggggtga

SEQ ID NO: 20339 - RNA, 30 nt, Synthetic Construct; identical to SEQ ID NO: 1958
  source 1..30: mol_type = other RNA

SEQ ID NO: 20340 - RNA, 30 nt, Synthetic Construct; identical to SEQ ID NO: 2274
  source 1..30: mol_type = other RNA

SEQ ID NO: 20341 - RNA, 30 nt, Synthetic Construct; identical to SEQ ID NO: 2274
  source 1..30: mol_type = other RNA

SEQ ID NO: 20342 - RNA, 33 nt, Synthetic Construct; identical to SEQ ID NO: 2395
  source 1..33: mol_type = other RNA

SEQ ID NO: 20343 - RNA, 16 nt, Synthetic Construct
  source 1..16: mol_type = other RNA
cccagaaacccggtcg

SEQ ID NO: 20344 - RNA, 16 nt, Synthetic Construct
  source 1..16: mol_type = other RNA
cccagaaacccggtcg

SEQ ID NO: 20345 - RNA, 17 nt, Synthetic Construct
  source 1..17: mol_type = other RNA
accggaggaaggtgggg

SEQ ID NO: 20346 - RNA, 17 nt, Synthetic Construct
  source 1..17: mol_type = other RNA
accggaggaaggtgggg

SEQ ID NO: 20347 - RNA, 19 nt, Synthetic Construct
  source 1..19: mol_type = other RNA
gtactgacgctcatgcacg

SEQ ID NO: 20348 - RNA, 19 nt, Synthetic Construct
  source 1..19: mol_type = other RNA
gtactgacgctcatgcacg

SEQ ID NO: 20349 - RNA, 23 nt, Synthetic Construct
  source 1..23: mol_type = other RNA
ccctgtactgagctgccccgaga

SEQ ID NO: 20350 - RNA, 23 nt, Synthetic Construct
  source 1..23: mol_type = other RNA
ccctgtactgagctgccccgaga

SEQ ID NO: 20351 - RNA, 34 nt, Synthetic Construct; identical to SEQ ID NO: 2291
  source 1..34: mol_type = other RNA

SEQ ID NO: 20352 - RNA, 32 nt, Synthetic Construct; identical to SEQ ID NO: 2798
  source 1..32: mol_type = other RNA

SEQ ID NO: 20353 - RNA, 32 nt, Synthetic Construct; identical to SEQ ID NO: 2798
  source 1..32: mol_type = other RNA

SEQ ID NO: 20354 - RNA, 16 nt, Synthetic Construct
  source 1..16: mol_type = other RNA
gccagcagccgcggta

SEQ ID NO: 20355 - RNA, 16 nt, Synthetic Construct
  source 1..16: mol_type = other RNA
gccagcagccgcggta

SEQ ID NO: 20356 - RNA, 16 nt, Synthetic Construct
  source 1..16: mol_type = other RNA
gtcaacggccatacca

SEQ ID NO: 20357 - RNA, 16 nt, Synthetic Construct
  source 1..16: mol_type = other RNA
gtcaacggccatacca

SEQ ID NO: 20358 - RNA, 34 nt, Synthetic Construct; identical to SEQ ID NO: 2317
  source 1..34: mol_type = other RNA

SEQ ID NO: 20359 - RNA, 25 nt, Synthetic Construct
  source 1..25: mol_type = other RNA
gggttgtaaaccgcttttgtcaggg

SEQ ID NO: 20360 - RNA, 25 nt, Synthetic Construct
  source 1..25: mol_type = other RNA
gggttgtaaaccgcttttgtcaggg

SEQ ID NO: 20361 - RNA, 23 nt, Synthetic Construct
  source 1..23: mol_type = other RNA
tccctggtggtctagtggttagg

SEQ ID NO: 20362 - RNA, 23 nt, Synthetic Construct
  source 1..23: mol_type = other RNA
gcgtggtaggagagcgttctgta

SEQ ID NO: 20363 - RNA, 31 nt, Synthetic Construct; identical to SEQ ID NO: 2507
  source 1..31: mol_type = other RNA

SEQ ID NO: 20364 - RNA, 31 nt, Synthetic Construct; identical to SEQ ID NO: 2507
  source 1..31: mol_type = other RNA

SEQ ID NO: 20365 - RNA, 31 nt, Synthetic Construct; identical to SEQ ID NO: 2427
  source 1..31: mol_type = other RNA

SEQ ID NO: 20366 - RNA, 21 nt, Synthetic Construct
  source 1..21: mol_type = other RNA
tgaggtagcaggttgtgtggt

SEQ ID NO: 20367 - RNA, 21 nt, Synthetic Construct
  source 1..21: mol_type = other RNA
tgaggtagcaggttgtgtggt

SEQ ID NO: 20368 - RNA, 15 nt, Synthetic Construct
  source 1..15: mol_type = other RNA
gagagcctggacaca

SEQ ID NO: 20369 - RNA, 15 nt, Synthetic Construct
  source 1..15: mol_type = other RNA
gagagcctggacaca

SEQ ID NO: 20370 - RNA, 23 nt, Synthetic Construct
  source 1..23: mol_type = other RNA
tcctgtaccgagctgccccgaga

SEQ ID NO: 20371 - RNA, 23 nt, Synthetic Construct
  source 1..23: mol_type = other RNA
tcctgtaccgagctgccccgaga

SEQ ID NO: 20372 - RNA, 36 nt, Synthetic Construct; identical to SEQ ID NO: 2366
  source 1..36: mol_type = other RNA

SEQ ID NO: 20373 - RNA, 36 nt, Synthetic Construct; identical to SEQ ID NO: 2366
  source 1..36: mol_type = other RNA

SEQ ID NO: 20374 - RNA, 23 nt, Synthetic Construct
  source 1..23: mol_type = other RNA
taaagtgcttatagtgcaggtag

SEQ ID NO: 20375 - RNA, 17 nt, Synthetic Construct
  source 1..17: mol_type = other RNA
gcgtagatatgcggagg

SEQ ID NO: 20376 - RNA, 35 nt, Synthetic Construct; identical to SEQ ID NO: 757
  source 1..35: mol_type = other RNA

SEQ ID NO: 20377 - RNA, 21 nt, Synthetic Construct
  source 1..21: mol_type = other RNA
tggggtagtaggttgtgtggt

SEQ ID NO: 20378 - RNA, 21 nt, Synthetic Construct
  source 1..21: mol_type = other RNA
tggggtagtaggttgtgtggt

SEQ ID NO: 20379 - RNA, 18 nt, Synthetic Construct
  source 1..18: mol_type = other RNA
tgcgtagatatgcggagg

SEQ ID NO: 20380 - RNA, 15 nt, Synthetic Construct
  source 1..15: mol_type = other RNA
gtcgacgtatagggt

SEQ ID NO: 20381 - RNA, 15 nt, Synthetic Construct
  source 1..15: mol_type = other RNA
gtcgacgtatagggt

SEQ ID NO: 20382 - RNA, 33 nt, Synthetic Construct; identical to SEQ ID NO: 2395
  source 1..33: mol_type = other RNA

SEQ ID NO: 20383 - RNA, 33 nt, Synthetic Construct; identical to SEQ ID NO: 2395
  source 1..33: mol_type = other RNA

SEQ ID NO: 20384 - RNA, 34 nt, Synthetic Construct; identical to SEQ ID NO: 2553
  source 1..34: mol_type = other RNA

SEQ ID NO: 20385 - RNA, 22 nt, Synthetic Construct
  source 1..22: mol_type = other RNA
nattgcacttgtcccggcctgt

SEQ ID NO: 20386 - RNA, 22 nt, Synthetic Construct
  source 1..22: mol_type = other RNA
nattgcacttgtcccggcctgt

SEQ ID NO: 20387 - RNA, 22 nt, Synthetic Construct
  source 1..22: mol_type = other RNA
ttctgtactgagctgccccgag

SEQ ID NO: 20388 - RNA, 22 nt, Synthetic Construct
  source 1..22: mol_type = other RNA
ttctgtactgagctgccccgag

SEQ ID NO: 20389 - RNA, 34 nt, Synthetic Construct; identical to SEQ ID NO: 2186
  source 1..34: mol_type = other RNA

SEQ ID NO: 20390 - RNA, 34 nt, Synthetic Construct; identical to SEQ ID NO: 2186
  source 1..34: mol_type = other RNA

SEQ ID NO: 20391 - RNA, 22 nt, Synthetic Construct
  source 1..22: mol_type = other RNA
cctcgcgcgattggagcggccg

SEQ ID NO: 20392 - RNA, 15 nt, Synthetic Construct
  source 1..15: mol_type = other RNA
gcaagtcgaacggta

SEQ ID NO: 20393 - RNA, 15 nt, Synthetic Construct
  source 1..15: mol_type = other RNA
gcaagtcgaacggta

SEQ ID NO: 20394 - RNA, 36 nt, Synthetic Construct; identical to SEQ ID NO: 2248
  source 1..36: mol_type = other RNA

SEQ ID NO: 20395 - RNA, 36 nt, Synthetic Construct; identical to SEQ ID NO: 2248
  source 1..36: mol_type = other RNA

SEQ ID NO: 20396 - RNA, 19 nt, Synthetic Construct
  source 1..19: mol_type = other RNA
ccagtaaacggcggccgta

SEQ ID NO: 20397 - RNA, 19 nt, Synthetic Construct
  source 1..19: mol_type = other RNA
ccagtaaacggcggccgta

SEQ ID NO: 20398 - RNA, 22 nt, Synthetic Construct
  source 1..22: mol_type = other RNA
tcctatactgagctgccccgag

SEQ ID NO: 20399 - RNA, 22 nt, Synthetic Construct
  source 1..22: mol_type = other RNA
tcctatactgagctgccccgag

SEQ ID NO: 20400 - RNA, 22 nt, Synthetic Construct
  source 1..22: mol_type = other RNA
ccggtcccaagggtatggctgt

SEQ ID NO: 20401 - RNA, 22 nt, Synthetic Construct
  source 1..22: mol_type = other RNA
ccggtcccaagggtatggctgt

SEQ ID NO: 20402 - RNA, 16 nt, Synthetic Construct
  source 1..16: mol_type = other RNA
tgcaagtcgaacggta

SEQ ID NO: 20403 - RNA, 16 nt, Synthetic Construct
  source 1..16: mol_type = other RNA
tgcaagtcgaacggta

SEQ ID NO: 20404 - RNA, 36 nt, Synthetic Construct; identical to SEQ ID NO: 2546
  source 1..36: mol_type = other RNA

SEQ ID NO: 20405 - RNA, 34 nt, Synthetic Construct; identical to SEQ ID NO: 2291
  source 1..34: mol_type = other RNA

SEQ ID NO: 20406 - RNA, 34 nt, Synthetic Construct; identical to SEQ ID NO: 2291
  source 1..34: mol_type = other RNA

SEQ ID NO: 20407 - RNA, 31 nt, Synthetic Construct; identical to SEQ ID NO: 2310
  source 1..31: mol_type = other RNA

SEQ ID NO: 20408 - RNA, 31 nt, Synthetic Construct; identical to SEQ ID NO: 2310
  source 1..31: mol_type = other RNA

SEQ ID NO: 20409 - RNA, 32 nt, Synthetic Construct; identical to SEQ ID NO: 2318
  source 1..32: mol_type = other RNA

SEQ ID NO: 20410 - RNA, 32 nt, Synthetic Construct; identical to SEQ ID NO: 2318
  source 1..32: mol_type = other RNA

SEQ ID NO: 20411 - RNA, 22 nt, Synthetic Construct
  source 1..22: mol_type = other RNA
cggaggagttcgaaggtacgct

SEQ ID NO: 20412 - RNA, 22 nt, Synthetic Construct
  source 1..22: mol_type = other RNA
cggaggagttcgaaggtacgct

SEQ ID NO: 20413 - RNA, 34 nt, Synthetic Construct; identical to SEQ ID NO: 2183
  source 1..34: mol_type = other RNA

SEQ ID NO: 20414 - RNA, 15 nt, Synthetic Construct
  source 1..15: mol_type = other RNA
gctagtaatcgcgga

SEQ ID NO: 20415 - RNA, 29 nt, Synthetic Construct
  source 1..29: mol_type = other RNA
ttacaggggttcgaatcccctaggggacg

SEQ ID NO: 20416 - RNA, 29 nt, Synthetic Construct
  source 1..29: mol_type = other RNA
ttacaggggttcgaatcccctaggggacg

SEQ ID NO: 20417 - RNA, 36 nt, Synthetic Construct; identical to SEQ ID NO: 2546
  source 1..36: mol_type = other RNA

SEQ ID NO: 20418 - RNA, 36 nt, Synthetic Construct; identical to SEQ ID NO: 2546
  source 1..36: mol_type = other RNA

SEQ ID NO: 20419 - RNA, 34 nt, Synthetic Construct; identical to SEQ ID NO: 2553
  source 1..34: mol_type = other RNA

SEQ ID NO: 20420 - RNA, 34 nt, Synthetic Construct; identical to SEQ ID NO: 2553
  source 1..34: mol_type = other RNA

SEQ ID NO: 20421 - RNA, 16 nt, Synthetic Construct
  source 1..16: mol_type = other RNA
aggtcatcattatctg

SEQ ID NO: 20422 - RNA, 16 nt, Synthetic Construct
  source 1..16: mol_type = other RNA
aggtcatcattatctg

SEQ ID NO: 20423 - RNA, 22 nt, Synthetic Construct
  source 1..22: mol_type = other RNA
cggaatcgctagtaatcgcgga

SEQ ID NO: 20424 - RNA, 22 nt, Synthetic Construct
  source 1..22: mol_type = other RNA
cggaatcgctagtaatcgcgga

SEQ ID NO: 20425 - RNA, 22 nt, Synthetic Construct
  source 1..22: mol_type = other RNA
ncctgtactgagctgccccgag

SEQ ID NO: 20426 - RNA, 22 nt, Synthetic Construct
  source 1..22: mol_type = other RNA
ncctgtactgagctgccccgag

SEQ ID NO: 20427 - RNA, 18 nt, Synthetic Construct
  source 1..18: mol_type = other RNA
accggaggaaggtgggga

SEQ ID NO: 20428 - RNA, 18 nt, Synthetic Construct
  source 1..18: mol_type = other RNA
accggaggaaggtgggga

SEQ ID NO: 20429 - RNA, 35 nt, Synthetic Construct; identical to SEQ ID NO: 2567
  source 1..35: mol_type = other RNA

SEQ ID NO: 20430 - RNA, 35 nt, Synthetic Construct; identical to SEQ ID NO: 2567
  source 1..35: mol_type = other RNA

SEQ ID NO: 20431 - RNA, 18 nt, Synthetic Construct
  source 1..18: mol_type = other RNA
gtcgacgtatagggtgtg

SEQ ID NO: 20432 - RNA, 32 nt, Synthetic Construct; identical to SEQ ID NO: 2435
  source 1..32: mol_type = other RNA

SEQ ID NO: 20433 - RNA, 32 nt, Synthetic Construct; identical to SEQ ID NO: 2435
  source 1..32: mol_type = other RNA

SEQ ID NO: 20434 - RNA, 34 nt, Synthetic Construct; identical to SEQ ID NO: 2529
  source 1..34: mol_type = other RNA

SEQ ID NO: 20435 - RNA, 34 nt, Synthetic Construct; identical to SEQ ID NO: 2529
  source 1..34: mol_type = other RNA

SEQ ID NO: 20436 - RNA, 15 nt, Synthetic Construct
  source 1..15: mol_type = other RNA
tgcaagtcgaacggt

SEQ ID NO: 20437 - RNA, 15 nt, Synthetic Construct
  source 1..15: mol_type = other RNA
tgcaagtcgaacggt

SEQ ID NO: 20438 - RNA, 15 nt, Synthetic Construct
  source 1..15: mol_type = other RNA
gagtagggcgggaca

SEQ ID NO: 20439 - RNA, 15 nt, Synthetic Construct
  source 1..15: mol_type = other RNA
gagtagggcgggaca

SEQ ID NO: 20440 - RNA, 15 nt, Synthetic Construct
  source 1..15: mol_type = other RNA
ccgcttttgtcaggg

SEQ ID NO: 20441 - RNA, 15 nt, Synthetic Construct
  source 1..15: mol_type = other RNA
ccgcttttgtcaggg

SEQ ID NO: 20442 - RNA, 18 nt, Synthetic Construct
  source 1..18: mol_type = other RNA
agcaggacggtggccatg

SEQ ID NO: 20443 - RNA, 21 nt, Synthetic Construct
  source 1..21: mol_type = other RNA
tgaggtagtaggttgtgtagt

SEQ ID NO: 20444 - RNA, 21 nt, Synthetic Construct
  source 1..21: mol_type = other RNA
tgaggtagtaggttgtgtagt

SEQ ID NO: 20445 - RNA, 36 nt, Synthetic Construct; identical to SEQ ID NO: 2366
  source 1..36: mol_type = other RNA

SEQ ID NO: 20446 - RNA, 31 nt, Synthetic Construct; identical to SEQ ID NO: 2215
  source 1..31: mol_type = other RNA

SEQ ID NO: 20447 - RNA, 31 nt, Synthetic Construct; identical to SEQ ID NO: 2215
  source 1..31: mol_type = other RNA

SEQ ID NO: 20448 - RNA, 31 nt, Synthetic Construct; identical to SEQ ID NO: 2442
  source 1..31: mol_type = other RNA

SEQ ID NO: 20449 - RNA, 23 nt, Synthetic Construct
  source 1..23: mol_type = other RNA
taaagtgcttatagtgcaggtag

SEQ ID NO: 20450 - RNA, 23 nt, Synthetic Construct
  source 1..23: mol_type = other RNA
taaagtgcttatagtgcaggtag

SEQ ID NO: 20451 - RNA, 15 nt, Synthetic Construct
  source 1..15: mol_type = other RNA
gctagtaatcgcgga

SEQ ID NO: 20452 - RNA, 15 nt, Synthetic Construct
  source 1..15: mol_type = other RNA
gctagtaatcgcgga

SEQ ID NO: 20453 - RNA, 21 nt, Synthetic Construct
  source 1..21: mol_type = other RNA
ctaatcccagaaacccggtcg

SEQ ID NO: 20454 - RNA, 21 nt, Synthetic Construct
  source 1..21: mol_type = other RNA
ctaatcccagaaacccggtcg

SEQ ID NO: 20455 - RNA, 21 nt, Synthetic Construct
  source 1..21: mol_type = other RNA
gctttgatccggagatttccg

SEQ ID NO: 20456 - RNA, 15 nt, Synthetic Construct
  source 1..15: mol_type = other RNA
ggtcatcgtcaggct

SEQ ID NO: 20457 - RNA, 15 nt, Synthetic Construct
  source 1..15: mol_type = other RNA
ggtcatcgtcaggct

SEQ ID NO: 20458 - RNA, 15 nt, Synthetic Construct
  source 1..15: mol_type = other RNA
gtcgacgtatagggt

SEQ ID NO: 20459 - RNA, 23 nt, Synthetic Construct
  source 1..23: mol_type = other RNA
tcggaatcgctagtaatcgcgga

SEQ ID NO: 20460 - RNA, 23 nt, Synthetic Construct
  source 1..23: mol_type = other RNA
tcggaatcgctagtaatcgcgga

SEQ ID NO: 20461 - RNA, 21 nt, Synthetic Construct
  source 1..21: mol_type = other RNA
tccagtactgagctgccccga

SEQ ID NO: 20462 - RNA, 21 nt, Synthetic Construct
  source 1..21: mol_type = other RNA
tccagtactgagctgccccga

SEQ ID NO: 20463 - RNA, 20 nt, Synthetic Construct
  source 1..20: mol_type = other RNA
tgtcagtttgtcaaataccc

SEQ ID NO: 20464 - RNA, 20 nt, Synthetic Construct
  source 1..20: mol_type = other RNA
tgtcagtttgtcaaataccc

SEQ ID NO: 20465 - RNA, 35 nt, Synthetic Construct; identical to SEQ ID NO: 2269
  source 1..35: mol_type = other RNA

SEQ ID NO: 20466 - RNA, 35 nt, Synthetic Construct; identical to SEQ ID NO: 2269
  source 1..35: mol_type = other RNA

SEQ ID NO: 20467 - RNA, 18 nt, Synthetic Construct
  source 1..18: mol_type = other RNA
gtcgacgtatagggtgtg

SEQ ID NO: 20468 - RNA, 18 nt, Synthetic Construct
  source 1..18: mol_type = other RNA
gtcgacgtatagggtgtg

SEQ ID NO: 20469 - RNA, 32 nt, Synthetic Construct; identical to SEQ ID NO: 3092
  source 1..32: mol_type = other RNA

SEQ ID NO: 20470 - RNA, 23 nt, Synthetic Construct
  source 1..23: mol_type = other RNA
ggcagggttcgtgactggggtga

SEQ ID NO: 20471 - RNA, 23 nt, Synthetic Construct
  source 1..23: mol_type = other RNA
ggcagggttcgtgactggggtga

SEQ ID NO: 20472 - RNA, 15 nt, Synthetic Construct
  source 1..15: mol_type = other RNA
gctttgatccggaga

SEQ ID NO: 20473 - RNA, 15 nt, Synthetic Construct
  source 1..15: mol_type = other RNA
gctttgatccggaga

SEQ ID NO: 20474 - RNA, 17 nt, Synthetic Construct
  source 1..17: mol_type = other RNA
agtccggatcgtagtct

SEQ ID NO: 20475 - RNA, 17 nt, Synthetic Construct
  source 1..17: mol_type = other RNA
agtccggatcgtagtct

SEQ ID NO: 20476 - RNA, 30 nt, Synthetic Construct; identical to SEQ ID NO: 2578
  source 1..30: mol_type = other RNA

SEQ ID NO: 20477 - RNA, 22 nt, Synthetic Construct
  source 1..22: mol_type = other RNA
ggcagggttcgtgactggggtg

SEQ ID NO: 20478 - RNA, 31 nt, Synthetic Construct; identical to SEQ ID NO: 2278
  source 1..31: mol_type = other RNA

SEQ ID NO: 20479 - RNA, 31 nt, Synthetic Construct; identical to SEQ ID NO: 2278
  source 1..31: mol_type = other RNA

SEQ ID NO: 20480 - RNA, 35 nt, Synthetic Construct; identical to SEQ ID NO: 2450
  source 1..35: mol_type = other RNA

SEQ ID NO: 20481 - RNA, 23 nt, Synthetic Construct
  source 1..23: mol_type = other RNA
ccctgtactgagctgccccgagt

SEQ ID NO: 20482 - RNA, 23 nt, Synthetic Construct
  source 1..23: mol_type = other RNA
ccctgtactgagctgccccgagt

SEQ ID NO: 20483 - RNA, 41 nt, Synthetic Construct; identical to SEQ ID NO: 2441
  source 1..41: mol_type = other RNA

SEQ ID NO: 20484 - RNA, 41 nt, Synthetic Construct; identical to SEQ ID NO: 2441
  source 1..41: mol_type = other RNA

SEQ ID NO: 20485 - RNA, 37 nt, Synthetic Construct; identical to SEQ ID NO: 2211
  source 1..37: mol_type = other RNA

SEQ ID NO: 20486 - RNA, 37 nt, Synthetic Construct; identical to SEQ ID NO: 2211
  source 1..37: mol_type = other RNA

SEQ ID NO: 20487 - RNA, 22 nt, Synthetic Construct
  source 1..22: mol_type = other RNA
cctcgcgcgattggagcggccg

SEQ ID NO: 20488 - RNA, 22 nt, Synthetic Construct
  source 1..22: mol_type = other RNA
cctcgcgcgattggagcggccg

SEQ ID NO: 20489 - RNA, 23 nt, Synthetic Construct
  source 1..23: mol_type = other RNA
atatcggaacgtgcccagtcgtg

SEQ ID NO: 20490 - RNA, 23 nt, Synthetic Construct
  source 1..23: mol_type = other RNA
atatcggaacgtgcccagtcgtg

SEQ ID NO: 20491 - RNA, 16 nt, Synthetic Construct
  source 1..16: mol_type = other RNA
ccggaggaaggtgggg

SEQ ID NO: 20492 - RNA, 16 nt, Synthetic Construct
  source 1..16: mol_type = other RNA
ccggaggaaggtgggg

SEQ ID NO: 20493 - RNA, 39 nt, Synthetic Construct; identical to SEQ ID NO: 2398
  source 1..39: mol_type = other RNA

SEQ ID NO: 20494 - RNA, 39 nt, Synthetic Construct; identical to SEQ ID NO: 2398
  source 1..39: mol_type = other RNA

SEQ ID NO: 20495 - RNA, 32 nt, Synthetic Construct; identical to SEQ ID NO: 2582
  source 1..32: mol_type = other RNA

SEQ ID NO: 20496 - RNA, 32 nt, Synthetic Construct; identical to SEQ ID NO: 2582
  source 1..32: mol_type = other RNA

SEQ ID NO: 20497 - RNA, 35 nt, Synthetic Construct; identical to SEQ ID NO: 3369
  source 1..35: mol_type = other RNA

SEQ ID NO: 20498 - RNA, 35 nt, Synthetic Construct; identical to SEQ ID NO: 3369
  source 1..35: mol_type = other RNA

SEQ ID NO: 20499 - RNA, 26 nt, Synthetic Construct
  source 1..26: mol_type = other RNA
gatgcgtggtaggagagcgttctgta

SEQ ID NO: 20500 - RNA, 26 nt, Synthetic Construct
  source 1..26: mol_type = other RNA
gatgcgtggtaggagagcgttctgta

SEQ ID NO: 20501 - RNA, 29 nt, Synthetic Construct
  source 1..29: mol_type = other RNA
tgaaggtgggttgtgaagcctgctggagg

SEQ ID NO: 20502 - RNA, 29 nt, Synthetic Construct
  source 1..29: mol_type = other RNA
tgaaggtgggttgtgaagcctgctggagg

SEQ ID NO: 20503 - RNA, 16 nt, Synthetic Construct
  source 1..16: mol_type = other RNA
tgcgtagatatgcgga

SEQ ID NO: 20504 - RNA, 16 nt, Synthetic Construct
  source 1..16: mol_type = other RNA
tgcgtagatatgcgga

SEQ ID NO: 20505 - RNA, 17 nt, Synthetic Construct
  source 1..17: mol_type = other RNA
agcggtggatgatgtgg

SEQ ID NO: 20506 - RNA, 31 nt, Synthetic Construct; identical to SEQ ID NO: 2423
  source 1..31: mol_type = other RNA

SEQ ID NO: 20507 - RNA, 31 nt, Synthetic Construct; identical to SEQ ID NO: 2423
  source 1..31: mol_type = other RNA

SEQ ID NO: 20508 - RNA, 38 nt, Synthetic Construct; identical to SEQ ID NO: 2492
  source 1..38: mol_type = other RNA

SEQ ID NO: 20509 - RNA, 38 nt, Synthetic Construct; identical to SEQ ID NO: 2492
  source 1..38: mol_type = other RNA

SEQ ID NO: 20510 - RNA, 34 nt, Synthetic Construct; identical to SEQ ID NO: 2364
  source 1..34: mol_type = other RNA

SEQ ID NO: 20511 - RNA, 34 nt, Synthetic Construct; identical to SEQ ID NO: 2364
  source 1..34: mol_type = other RNA

SEQ ID NO: 20512 - RNA, 30 nt, Synthetic Construct; identical to SEQ ID NO: 1958
  source 1..30: mol_type = other RNA

SEQ ID NO: 20513 - RNA, 33 nt, Synthetic Construct; identical to SEQ ID NO: 3082
  source 1..33: mol_type = other RNA

SEQ ID NO: 20514 - RNA, 33 nt, Synthetic Construct; identical to SEQ ID NO: 3082
  source 1..33: mol_type = other RNA

SEQ ID NO: 20515 - RNA, 35 nt, Synthetic Construct; identical to SEQ ID NO: 2452
  source 1..35: mol_type = other RNA

SEQ ID NO: 20516 - RNA, 35 nt, Synthetic Construct; identical to SEQ ID NO: 2452
  source 1..35: mol_type = other RNA

SEQ ID NO: 20517 - RNA, 16 nt, Synthetic Construct
  source 1..16: mol_type = other RNA
tgcaagtcgaacggta

SEQ ID NO: 20518 - RNA, 16 nt, Synthetic Construct
  source 1..16: mol_type = other RNA
tgcaagtcgaacggta

SEQ ID NO: 20519 - RNA, 23 nt, Synthetic Construct
  source 1..23: mol_type = other RNA
tgaggggtagagagcgagacttt

SEQ ID NO: 20520 - RNA, 23 nt, Synthetic Construct
  source 1..23: mol_type = other RNA
tgaggggtagagagcgagacttt

SEQ ID NO: 20521 - RNA, 35 nt, Synthetic Construct; identical to SEQ ID NO: 2069
  source 1..35: mol_type = other RNA

SEQ ID NO: 20522 - RNA, 35 nt, Synthetic Construct; identical to SEQ ID NO: 2069
  source 1..35: mol_type = other RNA

SEQ ID NO: 20523 - RNA, 31 nt, Synthetic Construct; identical to SEQ ID NO: 2293
  source 1..31: mol_type = other RNA

SEQ ID NO: 20524 - RNA, 31 nt, Synthetic Construct; identical to SEQ ID NO: 2293
  source 1..31: mol_type = other RNA

SEQ ID NO: 20525 - RNA, 35 nt, Synthetic Construct; identical to SEQ ID NO: 2518
  source 1..35: mol_type = other RNA

SEQ ID NO: 20526 - RNA, 35 nt, Synthetic Construct; identical to SEQ ID NO: 2518
  source 1..35: mol_type = other RNA

SEQ ID NO: 20527 - RNA, 35 nt, Synthetic Construct; identical to SEQ ID NO: 2505
  source 1..35: mol_type = other RNA

SEQ ID NO: 20528 - RNA, 35 nt, Synthetic Construct; identical to SEQ ID NO: 2505
  source 1..35: mol_type = other RNA

SEQ ID NO: 20529 - RNA, 36 nt, Synthetic Construct; identical to SEQ ID NO: 2546
  source 1..36: mol_type = other RNA

SEQ ID NO: 20530 - RNA, 36 nt, Synthetic Construct; identical to SEQ ID NO: 2546
  source 1..36: mol_type = other RNA

SEQ ID NO: 20531 - RNA, 35 nt, Synthetic Construct; identical to SEQ ID NO: 2399
  source 1..35: mol_type = other RNA

SEQ ID NO: 20532 - RNA, 35 nt, Synthetic Construct; identical to SEQ ID NO: 2399
  source 1..35: mol_type = other RNA

SEQ ID NO: 20533 - RNA, 36 nt, Synthetic Construct; identical to SEQ ID NO: 2469
  source 1..36: mol_type = other RNA

SEQ ID NO: 20534 - RNA, 36 nt, Synthetic Construct; identical to SEQ ID NO: 2469
  source 1..36: mol_type = other RNA

SEQ ID NO: 20535 - RNA, 18 nt, Synthetic Construct
  source 1..18: mol_type = other RNA
gcgaaattccttgtcggg

SEQ ID NO: 20536 - RNA, 18 nt, Synthetic Construct
  source 1..18: mol_type = other RNA
gcgaaattccttgtcggg

SEQ ID NO: 20537 - RNA, 22 nt, Synthetic Construct
  source 1..22: mol_type = other RNA
tcctgtactgagctgctccgag

SEQ ID NO: 20538 - RNA, 22 nt, Synthetic Construct
  source 1..22: mol_type = other RNA
tcctgtactgagctgctccgag

SEQ ID NO: 20539 - RNA, 18 nt, Synthetic Construct
  source 1..18: mol_type = other RNA
tcccaagggtatggctgt

SEQ ID NO: 20540 - RNA, 18 nt, Synthetic Construct
  source 1..18: mol_type = other RNA
tcccaagggtatggctgt

SEQ ID NO: 20541 - RNA, 21 nt, Synthetic Construct
  source 1..21: mol_type = other RNA
tcccagtaaacggcggccgta

SEQ ID NO: 20542 - RNA, 21 nt, Synthetic Construct
  source 1..21: mol_type = other RNA
tcccagtaaacggcggccgta

SEQ ID NO: 20543 - RNA, 22 nt, Synthetic Construct
  source 1..22: mol_type = other RNA
gagagcctggacacaggtgctg

SEQ ID NO: 20544 - RNA, 22 nt, Synthetic Construct
  source 1..22: mol_type = other RNA
gagagcctggacacaggtgctg

SEQ ID NO: 20545 - RNA, 18 nt, Synthetic Construct
  source 1..18: mol_type = other RNA
tcccaagggtatggctgt

SEQ ID NO: 20546 - RNA, 21 nt, Synthetic Construct
  source 1..21: mol_type = other RNA
tgaggcagtaggttgtgtggt

SEQ ID NO: 20547 - RNA, 21 nt, Synthetic Construct
  source 1..21: mol_type = other RNA
tgaggcagtaggttgtgtggt

SEQ ID NO: 20548 - RNA, 18 nt, Synthetic Construct
  source 1..18: mol_type = other RNA
accggaggaaggtgggga

SEQ ID NO: 20549 - RNA, 20 nt, Synthetic Construct
  source 1..20: mol_type = other RNA
cccagtaaacggcggccgta

SEQ ID NO: 20550 - RNA, 20 nt, Synthetic Construct
  source 1..20: mol_type = other RNA
cccagtaaacggcggccgta

SEQ ID NO: 20551 - RNA, 31 nt, Synthetic Construct; identical to SEQ ID NO: 2263
  source 1..31: mol_type = other RNA

SEQ ID NO: 20552 - RNA, 31 nt, Synthetic Construct; identical to SEQ ID NO: 2263
  source 1..31: mol_type = other RNA

SEQ ID NO: 20553 - RNA, 33 nt, Synthetic Construct; identical to SEQ ID NO: 2126
  source 1..33: mol_type = other RNA

SEQ ID NO: 20554 - RNA, 33 nt, Synthetic Construct; identical to SEQ ID NO: 2126
  source 1..33: mol_type = other RNA

SEQ ID NO: 20555 - RNA, 15 nt, Synthetic Construct
  source 1..15: mol_type = other RNA
gagtagggcgggaca

SEQ ID NO: 20556 - RNA, 17 nt, Synthetic Construct
  source 1..17: mol_type = other RNA
cgcgacctcagatcaga

SEQ ID NO: 20557 - RNA, 17 nt, Synthetic Construct
  source 1..17: mol_type = other RNA
cgcgacctcagatcaga

SEQ ID NO: 20558 - RNA, 22 nt, Synthetic Construct
  source 1..22: mol_type = other RNA
ggcagggttcgtgactggggtg

SEQ ID NO: 20559 - RNA, 22 nt, Synthetic Construct
  source 1..22: mol_type = other RNA
ggcagggttcgtgactggggtg

SEQ ID NO: 20560 - RNA, 34 nt, Synthetic Construct; identical to SEQ ID NO: 2298
  source 1..34: mol_type = other RNA

SEQ ID NO: 20561 - RNA, 34 nt, Synthetic Construct; identical to SEQ ID NO: 2298
  source 1..34: mol_type = other RNA

SEQ ID NO: 20562 - RNA, 21 nt, Synthetic Construct
  source 1..21: mol_type = other RNA
cggtcccaagggtatggctgt

SEQ ID NO: 20563 - RNA, 21 nt, Synthetic Construct
  source 1..21: mol_type = other RNA
cggtcccaagggtatggctgt

SEQ ID NO: 20564 - RNA, 35 nt, Synthetic Construct; identical to SEQ ID NO: 2615
  source 1..35: mol_type = other RNA

SEQ ID NO: 20565 - RNA, 35 nt, Synthetic Construct; identical to SEQ ID NO: 2615
  source 1..35: mol_type = other RNA

SEQ ID NO: 20566 - RNA, 21 nt, Synthetic Construct
  source 1..21: mol_type = other RNA
tcctgcactgagctgccccga

SEQ ID NO: 20567 - RNA, 21 nt, Synthetic Construct
  source 1..21: mol_type = other RNA
tcctgcactgagctgccccga

SEQ ID NO: 20568 - RNA, 23 nt, Synthetic Construct
  source 1..23: mol_type = other RNA
tcctgtactgagccgccccgagt

SEQ ID NO: 20569 - RNA, 23 nt, Synthetic Construct
  source 1..23: mol_type = other RNA
tcctgtactgagccgccccgagt

SEQ ID NO: 20570 - RNA, 35 nt, Synthetic Construct; identical to SEQ ID NO: 2402
  source 1..35: mol_type = other RNA

SEQ ID NO: 20571 - RNA, 35 nt, Synthetic Construct; identical to SEQ ID NO: 2402
  source 1..35: mol_type = other RNA

SEQ ID NO: 20572 - RNA, 33 nt, Synthetic Construct; identical to SEQ ID NO: 3082
  source 1..33: mol_type = other RNA

SEQ ID NO: 20573 - RNA, 18 nt, Synthetic Construct
  source 1..18: mol_type = other RNA
ggctttgaagtaaggtcg

SEQ ID NO: 20574 - RNA, 18 nt, Synthetic Construct
  source 1..18: mol_type = other RNA
ggctttgaagtaaggtcg

SEQ ID NO: 20575 - RNA, 18 nt, Synthetic Construct
  source 1..18: mol_type = other RNA
tgcgtagatatgcggagg

SEQ ID NO: 20576 - RNA, 18 nt, Synthetic Construct
  source 1..18: mol_type = other RNA
tgcgtagatatgcggagg

SEQ ID NO: 20577 - RNA, 32 nt, Synthetic Construct; identical to SEQ ID NO: 2798
  source 1..32: mol_type = other RNA

SEQ ID NO: 20578 - RNA, 32 nt, Synthetic Construct; identical to SEQ ID NO: 2798
  source 1..32: mol_type = other RNA

SEQ ID NO: 20579 - RNA, 31 nt, Synthetic Construct; identical to SEQ ID NO: 960
  source 1..31: mol_type = other RNA

SEQ ID NO: 20580 - RNA, 31 nt, Synthetic Construct; identical to SEQ ID NO: 960
  source 1..31: mol_type = other RNA

SEQ ID NO: 20581 - RNA, 31 nt, Synthetic Construct; identical to SEQ ID NO: 2423
  source 1..31: mol_type = other RNA

SEQ ID NO: 20582 - RNA, 31 nt, Synthetic Construct; identical to SEQ ID NO: 2423
  source 1..31: mol_type = other RNA

SEQ ID NO: 20583 - RNA, 22 nt, Synthetic Construct
  source 1..22: mol_type = other RNA
tcctgtactgaactgccccgag

SEQ ID NO: 20584 - RNA, 22 nt, Synthetic Construct
  source 1..22: mol_type = other RNA
tcctgtactgaactgccccgag

SEQ ID NO: 20585 - RNA, 22 nt, Synthetic Construct
  source 1..22: mol_type = other RNA
ggcagggttcgtgactggggtg

SEQ ID NO: 20586 - RNA, 31 nt, Synthetic Construct; identical to SEQ ID NO: 2310
  source 1..31: mol_type = other RNA

SEQ ID NO: 20587 - RNA, 15 nt, Synthetic Construct
  source 1..15: mol_type = other RNA
gagagcctggacaca

SEQ ID NO: 20588 - RNA, 22 nt, Synthetic Construct
  source 1..22: mol_type = other RNA
ccggtcccaagggtatggctgt

SEQ ID NO: 20589 - RNA, 36 nt, Synthetic Construct; identical to SEQ ID NO: 2469
  source 1..36: mol_type = other RNA

SEQ ID NO: 20590 - RNA, 36 nt, Synthetic Construct; identical to SEQ ID NO: 2469
  source 1..36: mol_type = other RNA

SEQ ID NO: 20591 - RNA, 21 nt, Synthetic Construct
  source 1..21: mol_type = other RNA
atcggaacgtgcccagtcgtg

SEQ ID NO: 20592 - RNA, 21 nt, Synthetic Construct
  source 1..21: mol_type = other RNA
atcggaacgtgcccagtcgtg

SEQ ID NO: 20593 - RNA, 22 nt, Synthetic Construct
  source 1..22: mol_type = other RNA
gagagcctggacacaggtgctg

SEQ ID NO: 20594 - RNA, 32 nt, Synthetic Construct; identical to SEQ ID NO: 2052
  source 1..32: mol_type = other RNA

SEQ ID NO: 20595 - RNA, 32 nt, Synthetic Construct; identical to SEQ ID NO: 2052
  source 1..32: mol_type = other RNA

SEQ ID NO: 20596 - RNA, 35 nt, Synthetic Construct; identical to SEQ ID NO: 2069
  source 1..35: mol_type = other RNA

SEQ ID NO: 20597 - RNA, 16 nt, Synthetic Construct
  source 1..16: mol_type = other RNA
gggtgaaagcggggga

SEQ ID NO: 20598 - RNA, 16 nt, Synthetic Construct
  source 1..16: mol_type = other RNA
gggtgaaagcggggga

SEQ ID NO: 20599 - RNA, 32 nt, Synthetic Construct; identical to SEQ ID NO: 2296
  source 1..32: mol_type = other RNA

SEQ ID NO: 20600 - RNA, 32 nt, Synthetic Construct; identical to SEQ ID NO: 2296
  source 1..32: mol_type = other RNA

SEQ ID NO: 20601 - RNA, 31 nt, Synthetic Construct; identical to SEQ ID NO: 2333
  source 1..31: mol_type = other RNA

SEQ ID NO: 20602 - RNA, 31 nt, Synthetic Construct; identical to SEQ ID NO: 2333
  source 1..31: mol_type = other RNA

SEQ ID NO: 20603 - RNA, 34 nt, Synthetic Construct; identical to SEQ ID NO: 2375
  source 1..34: mol_type = other RNA

SEQ ID NO: 20604 - RNA, 34 nt, Synthetic Construct; identical to SEQ ID NO: 2375
  source 1..34: mol_type = other RNA

SEQ ID NO: 20605 - RNA, 24 nt, Synthetic Construct
  source 1..24: mol_type = other RNA
gggttgtaaaccgcttttgtcagg

SEQ ID NO: 20606 - RNA, 24 nt, Synthetic Construct
  source 1..24: mol_type = other RNA
gggttgtaaaccgcttttgtcagg

SEQ ID NO: 20607 - RNA, 32 nt, Synthetic Construct; identical to SEQ ID NO: 2086
  source 1..32: mol_type = other RNA

SEQ ID NO: 20608 - RNA, 29 nt, Synthetic Construct
  source 1..29: mol_type = other RNA
cccgtgtgaaagtaggtcatcgtcaggct

SEQ ID NO: 20609 - RNA, 29 nt, Synthetic Construct
  source 1..29: mol_type = other RNA
cccgtgtgaaagtaggtcatcgtcaggct

SEQ ID NO: 20610 - RNA, 20 nt, Synthetic Construct
  source 1..20: mol_type = other RNA
tgaggtagtaggttgcgtgg

SEQ ID NO: 20611 - RNA, 20 nt, Synthetic Construct
  source 1..20: mol_type = other RNA
tgaggtagtaggttgcgtgg

SEQ ID NO: 20612 - RNA, 32 nt, Synthetic Construct; identical to SEQ ID NO: 2582
  source 1..32: mol_type = other RNA

SEQ ID NO: 20613 - RNA, 36 nt, Synthetic Construct; identical to SEQ ID NO: 2506
  source 1..36: mol_type = other RNA

SEQ ID NO: 20614 - RNA, 15 nt, Synthetic Construct
  source 1..15: mol_type = other RNA
tcctgacggccatag

SEQ ID NO: 20615 - RNA, 15 nt, Synthetic Construct
  source 1..15: mol_type = other RNA
tcctgacggccatag

SEQ ID NO: 20616 - RNA, 32 nt, Synthetic Construct; identical to SEQ ID NO: 2086
  source 1..32: mol_type = other RNA

SEQ ID NO: 20617 - RNA, 32 nt, Synthetic Construct; identical to SEQ ID NO: 2086
  source 1..32: mol_type = other RNA

SEQ ID NO: 20618 - RNA, 35 nt, Synthetic Construct; identical to SEQ ID NO: 2399
  source 1..35: mol_type = other RNA

SEQ ID NO: 20619 - RNA, 35 nt, Synthetic Construct; identical to SEQ ID NO: 2399
  source 1..35: mol_type = other RNA

SEQ ID NO: 20620 - RNA, 20 nt, Synthetic Construct
  source 1..20: mol_type = other RNA
tgaggtagtaggtcgtgtgg

SEQ ID NO: 20621 - RNA, 20 nt, Synthetic Construct
  source 1..20: mol_type = other RNA
tgaggtagtaggtcgtgtgg

SEQ ID NO: 20622 - RNA, 34 nt, Synthetic Construct; identical to SEQ ID NO: 2265
  source 1..34: mol_type = other RNA

SEQ ID NO: 20623 - RNA, 34 nt, Synthetic Construct; identical to SEQ ID NO: 2265
  source 1..34: mol_type = other RNA

SEQ ID NO: 20624 - RNA, 16 nt, Synthetic Construct
  source 1..16: mol_type = other RNA
gcggtggatgatgtgg

SEQ ID NO: 20625 - RNA, 31 nt, Synthetic Construct; identical to SEQ ID NO: 2427
  source 1..31: mol_type = other RNA

SEQ ID NO: 20626 - RNA, 20 nt, Synthetic Construct
  source 1..20: mol_type = other RNA
caatggccgggacagagggc

SEQ ID NO: 20627 - RNA, 20 nt, Synthetic Construct
  source 1..20: mol_type = other RNA
caatggccgggacagagggc

SEQ ID NO: 20628 - RNA, 15 nt, Synthetic Construct
  source 1..15: mol_type = other RNA
gggtgaaagcggggg

SEQ ID NO: 20629 - RNA, 15 nt, Synthetic Construct
  source 1..15: mol_type = other RNA
gggtgaaagcggggg

SEQ ID NO: 20630 - RNA, 15 nt, Synthetic Construct
  source 1..15: mol_type = other RNA
gagctgtggataggg

SEQ ID NO: 20631 - RNA, 35 nt, Synthetic Construct; identical to SEQ ID NO: 2514
  source 1..35: mol_type = other RNA

SEQ ID NO: 20632 - RNA, 35 nt, Synthetic Construct; identical to SEQ ID NO: 2514
  source 1..35: mol_type = other RNA

SEQ ID NO: 20633 - RNA, 22 nt, Synthetic Construct
  source 1..22: mol_type = other RNA
tcctgtactgagctgccctgag

SEQ ID NO: 20634 - RNA, 22 nt, Synthetic Construct
  source 1..22: mol_type = other RNA
tcctgtactgagctgccctgag

SEQ ID NO: 20635 - RNA, 29 nt, Synthetic Construct
  source 1..29: mol_type = other RNA
cccgtgtgaaagtaggtcatcgtcaggct

SEQ ID NO: 20636 - RNA, 31 nt, Synthetic Construct; identical to SEQ ID NO: 2442
  source 1..31: mol_type = other RNA

SEQ ID NO: 20637 - RNA, 31 nt, Synthetic Construct; identical to SEQ ID NO: 2442
  source 1..31: mol_type = other RNA

SEQ ID NO: 20638 - RNA, 23 nt, Synthetic Construct
  source 1..23: mol_type = other RNA
ggcagggttcgtgactggggtga

SEQ ID NO: 20639 - RNA, 16 nt, Synthetic Construct
  source 1..16: mol_type = other RNA
gtccggatcgtagtct

SEQ ID NO: 20640 - RNA, 16 nt, Synthetic Construct
  source 1..16: mol_type = other RNA
gtccggatcgtagtct

SEQ ID NO: 20641 - RNA, 36 nt, Synthetic Construct; identical to SEQ ID NO: 2520
  source 1..36: mol_type = other RNA

SEQ ID NO: 20642 - RNA, 36 nt, Synthetic Construct; identical to SEQ ID NO: 2520
  source 1..36: mol_type = other RNA

SEQ ID NO: 20643 - RNA, 16 nt, Synthetic Construct
  source 1..16: mol_type = other RNA
gcggtggatgatgtgg

SEQ ID NO: 20644 - RNA, 16 nt, Synthetic Construct
  source 1..16: mol_type = other RNA
gcggtggatgatgtgg

SEQ ID NO: 20645 - RNA, 23 nt, Synthetic Construct
  source 1..23: mol_type = other RNA
tggtaatacaacgtacttagtgt

SEQ ID NO: 20646 - RNA, 23 nt, Synthetic Construct
  source 1..23: mol_type = other RNA
tggtaatacaacgtacttagtgt

SEQ ID NO: 20647 - RNA, 36 nt, Synthetic Construct; identical to SEQ ID NO: 2444
  source 1..36: mol_type = other RNA

SEQ ID NO: 20648 - RNA, 36 nt, Synthetic Construct; identical to SEQ ID NO: 2444
  source 1..36: mol_type = other RNA

SEQ ID NO: 20649 - RNA, 32 nt, Synthetic Construct; identical to SEQ ID NO: 5582
  source 1..32: mol_type = other RNA

SEQ ID NO: 20650 - RNA, 32 nt, Synthetic Construct; identical to SEQ ID NO: 5582
  source 1..32: mol_type = other RNA

SEQ ID NO: 20651 - RNA, 39 nt, Synthetic Construct; identical to SEQ ID NO: 4400
  source 1..39: mol_type = other RNA

SEQ ID NO: 20652 - RNA, 21 nt, Synthetic Construct
  source 1..21: mol_type = other RNA
tgaggtggtaggttgtgtggt

SEQ ID NO: 20653 - RNA, 21 nt, Synthetic Construct
  source 1..21: mol_type = other RNA
tgaggtggtaggttgtgtggt

SEQ ID NO: 20654 - RNA, 31 nt, Synthetic Construct; identical to SEQ ID NO: 2278
  source 1..31: mol_type = other RNA

SEQ ID NO: 20655 - RNA, 16 nt, Synthetic Construct
  source 1..16: mol_type = other RNA
cgctagtaatcgcgga

SEQ ID NO: 20656 - RNA, 25 nt, Synthetic Construct
  source 1..25: mol_type = other RNA
gggttgtaaaccgcttttgtcaggg

SEQ ID NO: 20657 - RNA, 25 nt, Synthetic Construct
  source 1..25: mol_type = other RNA
gggttgtaaaccgcttttgtcaggg

SEQ ID NO: 20658 - RNA, 15 nt, Synthetic Construct
  source 1..15: mol_type = other RNA
gtccggatcgtagtc

SEQ ID NO: 20659 - RNA, 15 nt, Synthetic Construct
  source 1..15: mol_type = other RNA
gtccggatcgtagtc

SEQ ID NO: 20660 - RNA, 20 nt, Synthetic Construct
  source 1..20: mol_type = other RNA
cacatgcaagtcgaacggta

SEQ ID NO: 20661 - RNA, 20 nt, Synthetic Construct
  source 1..20: mol_type = other RNA
cacatgcaagtcgaacggta

SEQ ID NO: 20662 - RNA, 41 nt, Synthetic Construct; identical to SEQ ID NO: 2441
  source 1..41: mol_type = other RNA

SEQ ID NO: 20663 - RNA, 41 nt, Synthetic Construct; identical to SEQ ID NO: 2441
  source 1..41: mol_type = other RNA

SEQ ID NO: 20664 - RNA, 17 nt, Synthetic Construct
  source 1..17: mol_type = other RNA
accggaggaaggtgggg

SEQ ID NO: 20665 - RNA, 16 nt, Synthetic Construct
  source 1..16: mol_type = other RNA
gatttgggagtgctcg

SEQ ID NO: 20666 - RNA, 16 nt, Synthetic Construct
  source 1..16: mol_type = other RNA
gatttgggagtgctcg

SEQ ID NO: 20667 - RNA, 21 nt, Synthetic Construct
  source 1..21: mol_type = other RNA
gctttgatccggagatttccg

SEQ ID NO: 20668 - RNA, 21 nt, Synthetic Construct
  source 1..21: mol_type = other RNA
gctttgatccggagatttccg

SEQ ID NO: 20669 - RNA, 20 nt, Synthetic Construct
  source 1..20: mol_type = other RNA
tcagtagctcgaggaaaaga

SEQ ID NO: 20670 - RNA, 20 nt, Synthetic Construct
  source 1..20: mol_type = other RNA
tcagtagctcgaggaaaaga

SEQ ID NO: 20671 - RNA, 31 nt, Synthetic Construct; identical to SEQ ID NO: 2293
  source 1..31: mol_type = other RNA

SEQ ID NO: 20672 - RNA, 31 nt, Synthetic Construct; identical to SEQ ID NO: 2293
  source 1..31: mol_type = other RNA

SEQ ID NO: 20673 - RNA, 16 nt, Synthetic Construct
  source 1..16: mol_type = other RNA
tgcaagtcgaacggta

SEQ ID NO: 20674 - RNA, 16 nt, Synthetic Construct
  source 1..16: mol_type = other RNA
tgcaagtcgaacggta

SEQ ID NO: 20675 - RNA, 21 nt, Synthetic Construct
  source 1..21: mol_type = other RNA
tcctgtactgagctgccccgg

SEQ ID NO: 20676 - RNA, 21 nt, Synthetic Construct
  source 1..21: mol_type = other RNA
tcctgtactgagctgccccgg

SEQ ID NO: 20677 - RNA, 20 nt, Synthetic Construct
  source 1..20: mol_type = other RNA
tgaggtagtaggctgtgtgg

SEQ ID NO: 20678 - RNA, 20 nt, Synthetic Construct
  source 1..20: mol_type = other RNA
tgaggtagtaggctgtgtgg

SEQ ID NO: 20679 - RNA, 34 nt, Synthetic Construct; identical to SEQ ID NO: 2375
  source 1..34: mol_type = other RNA

SEQ ID NO: 20680 - RNA, 34 nt, Synthetic Construct; identical to SEQ ID NO: 2375
  source 1..34: mol_type = other RNA

SEQ ID NO: 20681 - RNA, 43 nt, Synthetic Construct; identical to SEQ ID NO: 2315
  source 1..43: mol_type = other RNA

SEQ ID NO: 20682 - RNA, 43 nt, Synthetic Construct; identical to SEQ ID NO: 2315
  source 1..43: mol_type = other RNA

SEQ ID NO: 20683 - RNA, 30 nt, Synthetic Construct; identical to SEQ ID NO: 2308
  source 1..30: mol_type = other RNA

SEQ ID NO: 20684 - RNA, 30 nt, Synthetic Construct; identical to SEQ ID NO: 2308
  source 1..30: mol_type = other RNA

SEQ ID NO: 20685 - RNA, 17 nt, Synthetic Construct
  source 1..17: mol_type = other RNA
gtcgacgtatagggtgt

SEQ ID NO: 20686 - RNA, 31 nt, Synthetic Construct; identical to SEQ ID NO: 960
  source 1..31: mol_type = other RNA

SEQ ID NO: 20687 - RNA, 31 nt, Synthetic Construct; identical to SEQ ID NO: 960
  source 1..31: mol_type = other RNA

SEQ ID NO: 20688 - RNA, 31 nt, Synthetic Construct; identical to SEQ ID NO: 2442
  source 1..31: mol_type = other RNA

SEQ ID NO: 20689 - RNA, 15 nt, Synthetic Construct
  source 1..15: mol_type = other RNA
gagtagggcgggaca

SEQ ID NO: 20690 - RNA, 15 nt, Synthetic Construct
  source 1..15: mol_type = other RNA
gagtagggcgggaca

SEQ ID NO: 20691 - RNA, 23 nt, Synthetic Construct
  source 1..23: mol_type = other RNA
tcctgcactgagctgccccgaga

SEQ ID NO: 20692 - RNA, 23 nt, Synthetic Construct
  source 1..23: mol_type = other RNA
tcctgcactgagctgccccgaga

SEQ ID NO: 20693 - RNA, 26 nt, Synthetic Construct
  source 1..26: mol_type = other RNA
gagcagctaataccgcatacgacctg

SEQ ID NO: 20694 - RNA, 26 nt, Synthetic Construct
  source 1..26: mol_type = other RNA
gagcagctaataccgcatacgacctg

SEQ ID NO: 20695 - RNA, 35 nt, Synthetic Construct; identical to SEQ ID NO: 2548
  source 1..35: mol_type = other RNA

SEQ ID NO: 20696 - RNA, 35 nt, Synthetic Construct; identical to SEQ ID NO: 2548
  source 1..35: mol_type = other RNA

SEQ ID NO: 20697 - RNA, 32 nt, Synthetic Construct; identical to SEQ ID NO: 2435
  source 1..32: mol_type = other RNA

SEQ ID NO: 20698 - RNA, 32 nt, Synthetic Construct; identical to SEQ ID NO: 2435
  source 1..32: mol_type = other RNA

SEQ ID NO: 20699 - RNA, 16 nt, Synthetic Construct
  source 1..16: mol_type = other RNA
cccagaaacccggtcg

SEQ ID NO: 20700 - RNA, 16 nt, Synthetic Construct
  source 1..16: mol_type = other RNA
cccagaaacccggtcg

SEQ ID NO: 20701 - RNA, 19 nt, Synthetic Construct
  source 1..19: mol_type = other RNA
agtcgacgtatagggtgtg

SEQ ID NO: 20702 - RNA, 19 nt, Synthetic Construct
  source 1..19: mol_type = other RNA
agtcgacgtatagggtgtg

SEQ ID NO: 20703 - RNA, 31 nt, Synthetic Construct; identical to SEQ ID NO: 2310
  source 1..31: mol_type = other RNA

SEQ ID NO: 20704 - RNA, 31 nt, Synthetic Construct; identical to SEQ ID NO: 2310
  source 1..31: mol_type = other RNA

SEQ ID NO: 20705 - RNA, 27 nt, Synthetic Construct
  source 1..27: mol_type = other RNA
agagcagctaataccgcatacgacctg

SEQ ID NO: 20706 - RNA, 27 nt, Synthetic Construct
  source 1..27: mol_type = other RNA
agagcagctaataccgcatacgacctg

SEQ ID NO: 20707 - RNA, 22 nt, Synthetic Construct
  source 1..22: mol_type = other RNA
cggaggagttcgaaggtacgct

SEQ ID NO: 20708 - RNA, 23 nt, Synthetic Construct
  source 1..23: mol_type = other RNA
tggaaatacgacgtacttagtgt

SEQ ID NO: 20709 - RNA, 23 nt, Synthetic Construct
  source 1..23: mol_type = other RNA
tggaaatacgacgtacttagtgt

SEQ ID NO: 20710 - RNA, 31 nt, Synthetic Construct; identical to SEQ ID NO: 2278
  source 1..31: mol_type = other RNA

SEQ ID NO: 20711 - RNA, 31 nt, Synthetic Construct; identical to SEQ ID NO: 2278
  source 1..31: mol_type = other RNA

SEQ ID NO: 20712 - RNA, 30 nt, Synthetic Construct; identical to SEQ ID NO: 1194
  source 1..30: mol_type = other RNA

SEQ ID NO: 20713 - RNA, 30 nt, Synthetic Construct; identical to SEQ ID NO: 1194
  source 1..30: mol_type = other RNA

SEQ ID NO: 20714 - RNA, 32 nt, Synthetic Construct; identical to SEQ ID NO: 2318
  source 1..32: mol_type = other RNA

SEQ ID NO: 20715 - RNA, 16 nt, Synthetic Construct
  source 1..16: mol_type = other RNA
gtcgacgtatagggtg

SEQ ID NO: 20716 - RNA, 23 nt, Synthetic Construct
  source 1..23: mol_type = other RNA
tggaaatacgacgtacttagtgt

SEQ ID NO: 20717 - RNA, 23 nt, Synthetic Construct
  source 1..23: mol_type = other RNA
tggaaatacgacgtacttagtgt

SEQ ID NO: 20718 - RNA, 36 nt, Synthetic Construct; identical to SEQ ID NO: 2456
  source 1..36: mol_type = other RNA

SEQ ID NO: 20719 - RNA, 36 nt, Synthetic Construct; identical to SEQ ID NO: 2456
  source 1..36: mol_type = other RNA

SEQ ID NO: 20720 - RNA, 20 nt, Synthetic Construct
  source 1..20: mol_type = other RNA
tgaggtggtaggttgtgtgg

SEQ ID NO: 20721 - RNA, 20 nt, Synthetic Construct
  source 1..20: mol_type = other RNA
tgaggtggtaggttgtgtgg

SEQ ID NO: 20722 - RNA, 36 nt, Synthetic Construct; identical to SEQ ID NO: 2444
  source 1..36: mol_type = other RNA

SEQ ID NO: 20723 - RNA, 36 nt, Synthetic Construct; identical to SEQ ID NO: 2444
  source 1..36: mol_type = other RNA

SEQ ID NO: 20724 - RNA, 23 nt, Synthetic Construct
  source 1..23: mol_type = other RNA
tagcagcacataatggtttgtgg

SEQ ID NO: 20725 - RNA, 26 nt, Synthetic Construct
  source 1..26: mol_type = other RNA
gatttccccttggggttgtaggacca

SEQ ID NO: 20726 - RNA, 26 nt, Synthetic Construct
  source 1..26: mol_type = other RNA
gatttccccttggggttgtaggacca

SEQ ID NO: 20727 - RNA, 15 nt, Synthetic Construct
  source 1..15: mol_type = other RNA
ccgcttttgtcaggg

SEQ ID NO: 20728 - RNA, 15 nt, Synthetic Construct
  source 1..15: mol_type = other RNA
ccgcttttgtcaggg

SEQ ID NO: 20729 - RNA, 36 nt, Synthetic Construct; identical to SEQ ID NO: 2366
  source 1..36: mol_type = other RNA

SEQ ID NO: 20730 - RNA, 36 nt, Synthetic Construct; identical to SEQ ID NO: 2366
  source 1..36: mol_type = other RNA

SEQ ID NO: 20731 - RNA, 33 nt, Synthetic Construct; identical to SEQ ID NO: 2253
  source 1..33: mol_type = other RNA

SEQ ID NO: 20732 - RNA, 36 nt, Synthetic Construct; identical to SEQ ID NO: 2344
  source 1..36: mol_type = other RNA

SEQ ID NO: 20733 - RNA, 36 nt, Synthetic Construct; identical to SEQ ID NO: 2344
  source 1..36: mol_type = other RNA

SEQ ID NO: 20734 - RNA, 22 nt, Synthetic Construct
  source 1..22: mol_type = other RNA
ncctgtactgagctgccccgag

SEQ ID NO: 20735 - RNA, 22 nt, Synthetic Construct
  source 1..22: mol_type = other RNA
ncctgtactgagctgccccgag

SEQ ID NO: 20736 - RNA, 33 nt, Synthetic Construct; identical to SEQ ID NO: 2266
  source 1..33: mol_type = other RNA

SEQ ID NO: 20737 - RNA, 33 nt, Synthetic Construct; identical to SEQ ID NO: 2266
  source 1..33: mol_type = other RNA

SEQ ID NO: 20738 - RNA, 23 nt, Synthetic Construct
  source 1..23: mol_type = other RNA
tccagtactgagctgccccgaga

SEQ ID NO: 20739 - RNA, 23 nt, Synthetic Construct
  source 1..23: mol_type = other RNA
tccagtactgagctgccccgaga

SEQ ID NO: 20740 - RNA, 17 nt, Synthetic Construct
  source 1..17: mol_type = other RNA
tcccagaaacccggtcg

SEQ ID NO: 20741 - RNA, 17 nt, Synthetic Construct
  source 1..17: mol_type = other RNA
tcccagaaacccggtcg

SEQ ID NO: 20742 - RNA, 23 nt, Synthetic Construct
  source 1..23: mol_type = other RNA
ggcagggttcgtgactggggtga

SEQ ID NO: 20743 - RNA, 23 nt, Synthetic Construct
  source 1..23: mol_type = other RNA
ggcagggttcgtgactggggtga

SEQ ID NO: 20744 - RNA, 34 nt, Synthetic Construct; identical to SEQ ID NO: 2186
  source 1..34: mol_type = other RNA

SEQ ID NO: 20745 - RNA, 31 nt, Synthetic Construct; identical to SEQ ID NO: 2263
  source 1..31: mol_type = other RNA

SEQ ID NO: 20746 - RNA, 31 nt, Synthetic Construct; identical to SEQ ID NO: 2263
  source 1..31: mol_type = other RNA

SEQ ID NO: 20747 - RNA, 18 nt, Synthetic Construct
  source 1..18: mol_type = other RNA
atcgctagtaatcgcgga

SEQ ID NO: 20748 - RNA, 18 nt, Synthetic Construct
  source 1..18: mol_type = other RNA
atcgctagtaatcgcgga

SEQ ID NO: 20749 - RNA, 35 nt, Synthetic Construct; identical to SEQ ID NO: 757
  source 1..35: mol_type = other RNA

SEQ ID NO: 20750 - RNA, 35 nt, Synthetic Construct; identical to SEQ ID NO: 757
  source 1..35: mol_type = other RNA

SEQ ID NO: 20751 - RNA, 20 nt, Synthetic Construct
  source 1..20: mol_type = other RNA
tgaggtagtaggttgtgcgg

SEQ ID NO: 20752 - RNA, 20 nt, Synthetic Construct
  source 1..20: mol_type = other RNA
tgaggtagtaggttgtgcgg

SEQ ID NO: 20753 - RNA, 18 nt, Synthetic Construct
  source 1..18: mol_type = other RNA
ggctttgaagtaaggtcg

SEQ ID NO: 20754 - RNA, 18 nt, Synthetic Construct
  source 1..18: mol_type = other RNA
ggctttgaagtaaggtcg

SEQ ID NO: 20755 - RNA, 31 nt, Synthetic Construct; identical to SEQ ID NO: 1881
  source 1..31: mol_type = other RNA

SEQ ID NO: 20756 - RNA, 31 nt, Synthetic Construct; identical to SEQ ID NO: 1881
  source 1..31: mol_type = other RNA

SEQ ID NO: 20757 - RNA, 23 nt, Synthetic Construct
  source 1..23: mol_type = other RNA
cgaggggcagagagcgagacttt

SEQ ID NO: 20758 - RNA, 21 nt, Synthetic Construct
  source 1..21: mol_type = other RNA
atcggaacgtgcccagtcgtg

SEQ ID NO: 20759 - RNA, 16 nt, Synthetic Construct
  source 1..16: mol_type = other RNA
tgcgtagatatgcgga

SEQ ID NO: 20760 - RNA, 16 nt, Synthetic Construct
  source 1..16: mol_type = other RNA
tgcgtagatatgcgga

SEQ ID NO: 20761 - RNA, 17 nt, Synthetic Construct
  source 1..17: mol_type = other RNA
gtccggatcgtagtctg

SEQ ID NO: 20762 - RNA, 17 nt, Synthetic Construct
  source 1..17: mol_type = other RNA
gtccggatcgtagtctg

SEQ ID NO: 20763 - RNA, 35 nt, Synthetic Construct; identical to SEQ ID NO: 2397
  source 1..35: mol_type = other RNA

SEQ ID NO: 20764 - RNA, 35 nt, Synthetic Construct; identical to SEQ ID NO: 2397
  source 1..35: mol_type = other RNA

SEQ ID NO: 20765 - RNA, 21 nt, Synthetic Construct
  source 1..21: mol_type = other RNA
tgaggtagtaggtcgtgtggt

SEQ ID NO: 20766 - RNA, 21 nt, Synthetic Construct
  source 1..21: mol_type = other RNA
tgaggtagtaggtcgtgtggt

SEQ ID NO: 20767 - RNA, 37 nt, Synthetic Construct; identical to SEQ ID NO: 2365
  source 1..37: mol_type = other RNA

SEQ ID NO: 20768 - RNA, 37 nt, Synthetic Construct; identical to SEQ ID NO: 2365
  source 1..37: mol_type = other RNA

SEQ ID NO: 20769 - RNA, 30 nt, Synthetic Construct; identical to SEQ ID NO: 2353
  source 1..30: mol_type = other RNA

SEQ ID NO: 20770 - RNA, 23 nt, Synthetic Construct
  source 1..23: mol_type = other RNA
tcctgtactgagccgccccgaga

SEQ ID NO: 20771 - RNA, 23 nt, Synthetic Construct
  source 1..23: mol_type = other RNA
tcctgtactgagccgccccgaga

SEQ ID NO: 20772 - RNA, 15 nt, Synthetic Construct
  source 1..15: mol_type = other RNA
cctcgcgcgattgga

SEQ ID NO: 20773 - RNA, 34 nt, Synthetic Construct; identical to SEQ ID NO: 2183
  source 1..34: mol_type = other RNA

SEQ ID NO: 20774 - RNA, 34 nt, Synthetic Construct; identical to SEQ ID NO: 2183
  source 1..34: mol_type = other RNA

SEQ ID NO: 20775 - RNA, 34 nt, Synthetic Construct; identical to SEQ ID NO: 2298
  source 1..34: mol_type = other RNA

SEQ ID NO: 20776 - RNA, 34 nt, Synthetic Construct; identical to SEQ ID NO: 2298
  source 1..34: mol_type = other RNA

SEQ ID NO: 20777 - RNA, 23 nt, Synthetic Construct
  source 1..23: mol_type = other RNA
tcctgtgctgagctgccccgagt

SEQ ID NO: 20778 - RNA, 23 nt, Synthetic Construct
  source 1..23: mol_type = other RNA
tcctgtgctgagctgccccgagt

SEQ ID NO: 20779 - RNA, 35 nt, Synthetic Construct; identical to SEQ ID NO: 2548
  source 1..35: mol_type = other RNA

SEQ ID NO: 20780 - RNA, 35 nt, Synthetic Construct; identical to SEQ ID NO: 2548
  source 1..35: mol_type = other RNA

SEQ ID NO: 20781 - RNA, 30 nt, Synthetic Construct; identical to SEQ ID NO: 2407
  source 1..30: mol_type = other RNA

SEQ ID NO: 20782 - RNA, 30 nt, Synthetic Construct; identical to SEQ ID NO: 2407
  source 1..30: mol_type = other RNA

SEQ ID NO: 20783 - RNA, 33 nt, Synthetic Construct; identical to SEQ ID NO: 2253
  source 1..33: mol_type = other RNA

SEQ ID NO: 20784 - RNA, 34 nt, Synthetic Construct; identical to SEQ ID NO: 2317
  source 1..34: mol_type = other RNA

SEQ ID NO: 20785 - RNA, 34 nt, Synthetic Construct; identical to SEQ ID NO: 2317
  source 1..34: mol_type = other RNA

SEQ ID NO: 20786 - RNA, 35 nt, Synthetic Construct; identical to SEQ ID NO: 2354
  source 1..35: mol_type = other RNA

SEQ ID NO: 20787 - RNA, 18 nt, Synthetic Construct
  source 1..18: mol_type = other RNA
cgtgttcggaagattttc

SEQ ID NO: 20788 - RNA, 18 nt, Synthetic Construct
  source 1..18: mol_type = other RNA
cgtgttcggaagattttc

SEQ ID NO: 20789 - RNA, 24 nt, Synthetic Construct
  source 1..24: mol_type = other RNA
tatatcggaacgtgcccagtcgtg

SEQ ID NO: 20790 - RNA, 24 nt, Synthetic Construct
  source 1..24: mol_type = other RNA
tatatcggaacgtgcccagtcgtg

SEQ ID NO: 20791 - RNA, 29 nt, Synthetic Construct
  source 1..29: mol_type = other RNA
tgaaggtgggttgtgaagcctgctggagg

SEQ ID NO: 20792 - RNA, 29 nt, Synthetic Construct
  source 1..29: mol_type = other RNA
tgaaggtgggttgtgaagcctgctggagg

SEQ ID NO: 20793 - RNA, 35 nt, Synthetic Construct; identical to SEQ ID NO: 2397
  source 1..35: mol_type = other RNA

SEQ ID NO: 20794 - RNA, 35 nt, Synthetic Construct; identical to SEQ ID NO: 2397
  source 1..35: mol_type = other RNA

SEQ ID NO: 20795 - RNA, 34 nt, Synthetic Construct; identical to SEQ ID NO: 2291
  source 1..34: mol_type = other RNA

SEQ ID NO: 20796 - RNA, 31 nt, Synthetic Construct; identical to SEQ ID NO: 2507
  source 1..31: mol_type = other RNA

SEQ ID NO: 20797 - RNA, 28 nt, Synthetic Construct
  source 1..28: mol_type = other RNA
ccgtgtgaaagtaggtcatcgtcaggct

SEQ ID NO: 20798 - RNA, 21 nt, Synthetic Construct
  source 1..21: mol_type = other RNA
tgaggggcagagagcgagacc

SEQ ID NO: 20799 - RNA, 36 nt, Synthetic Construct; identical to SEQ ID NO: 2248
  source 1..36: mol_type = other RNA

SEQ ID NO: 20800 - RNA, 34 nt, Synthetic Construct; identical to SEQ ID NO: 2317
  source 1..34: mol_type = other RNA

SEQ ID NO: 20801 - RNA, 21 nt, Synthetic Construct
  source 1..21: mol_type = other RNA
tcctgtactgggctgccccga

SEQ ID NO: 20802 - RNA, 21 nt, Synthetic Construct
  source 1..21: mol_type = other RNA
tcctgtactgggctgccccga

SEQ ID NO: 20803 - RNA, 35 nt, Synthetic Construct; identical to SEQ ID NO: 2269
  source 1..35: mol_type = other RNA

SEQ ID NO: 20804 - RNA, 21 nt, Synthetic Construct
  source 1..21: mol_type = other RNA
tccagtactgagctgccccga

SEQ ID NO: 20805 - RNA, 21 nt, Synthetic Construct
  source 1..21: mol_type = other RNA
tccagtactgagctgccccga

SEQ ID NO: 20806 - RNA, 30 nt, Synthetic Construct; identical to SEQ ID NO: 2274
  source 1..30: mol_type = other RNA

SEQ ID NO: 20807 - RNA, 30 nt, Synthetic Construct; identical to SEQ ID NO: 2274
  source 1..30: mol_type = other RNA

SEQ ID NO: 20808 - RNA, 15 nt, Synthetic Construct
  source 1..15: mol_type = other RNA
gagctgtggataggg

SEQ ID NO: 20809 - RNA, 17 nt, Synthetic Construct
  source 1..17: mol_type = other RNA
taggtcatcgtcaggct

SEQ ID NO: 20810 - RNA, 17 nt, Synthetic Construct
  source 1..17: mol_type = other RNA
taggtcatcgtcaggct

SEQ ID NO: 20811 - RNA, 35 nt, Synthetic Construct; identical to SEQ ID NO: 2615
  source 1..35: mol_type = other RNA

SEQ ID NO: 20812 - RNA, 35 nt, Synthetic Construct; identical to SEQ ID NO: 2615
  source 1..35: mol_type = other RNA

SEQ ID NO: 20813 - RNA, 32 nt, Synthetic Construct; identical to SEQ ID NO: 2086
  source 1..32: mol_type = other RNA

SEQ ID NO: 20814 - RNA, 34 nt, Synthetic Construct; identical to SEQ ID NO: 2019
  source 1..34: mol_type = other RNA

SEQ ID NO: 20815 - RNA, 34 nt, Synthetic Construct; identical to SEQ ID NO: 2019
  source 1..34: mol_type = other RNA

SEQ ID NO: 20816 - RNA, 34 nt, Synthetic Construct; identical to SEQ ID NO: 2529
  source 1..34: mol_type = other RNA

SEQ ID NO: 20817 - RNA, 34 nt, Synthetic Construct; identical to SEQ ID NO: 2529
  source 1..34: mol_type = other RNA

SEQ ID NO: 20818 - RNA, 33 nt, Synthetic Construct; identical to SEQ ID NO: 2126
  source 1..33: mol_type = other RNA

SEQ ID NO: 20819 - RNA, 31 nt, Synthetic Construct; identical to SEQ ID NO: 2215
  source 1..31: mol_type = other RNA

SEQ ID NO: 20820 - RNA, 15 nt, Synthetic Construct
  source 1..15: mol_type = other RNA
tccggatcgtagtct

SEQ ID NO: 20821 - RNA, 15 nt, Synthetic Construct
  source 1..15: mol_type = other RNA
tccggatcgtagtct

SEQ ID NO: 20822 - RNA, 16 nt, Synthetic Construct
  source 1..16: mol_type = other RNA
ggtgggggtcgttggt

SEQ ID NO: 20823 - RNA, 16 nt, Synthetic Construct
  source 1..16: mol_type = other RNA
ggtgggggtcgttggt

SEQ ID NO: 20824 - RNA, 21 nt, Synthetic Construct
  source 1..21: mol_type = other RNA
cggtcccaagggtatggctgt

SEQ ID NO: 20825 - RNA, 19 nt, Synthetic Construct
  source 1..19: mol_type = other RNA
ccgtgttcggaagattttc

SEQ ID NO: 20826 - RNA, 19 nt, Synthetic Construct
  source 1..19: mol_type = other RNA
ccgtgttcggaagattttc

SEQ ID NO: 20827 - RNA, 32 nt, Synthetic Construct; identical to SEQ ID NO: 3092
  source 1..32: mol_type = other RNA

SEQ ID NO: 20828 - RNA, 18 nt, Synthetic Construct
  source 1..18: mol_type = other RNA
tgcgtagatatgcggagg

SEQ ID NO: 20829 - RNA, 18 nt, Synthetic Construct
  source 1..18: mol_type = other RNA
tgcgtagatatgcggagg

SEQ ID NO: 20830 - RNA, 21 nt, Synthetic Construct
  source 1..21: mol_type = other RNA
taaggtagtaggttgtgtggt

SEQ ID NO: 20831 - RNA, 21 nt, Synthetic Construct
  source 1..21: mol_type = other RNA
taaggtagtaggttgtgtggt

SEQ ID NO: 20832 - RNA, 16 nt, Synthetic Construct
  source 1..16: mol_type = other RNA
gtccccttcgtctaga

SEQ ID NO: 20833 - RNA, 16 nt, Synthetic Construct
  source 1..16: mol_type = other RNA
gtccccttcgtctaga

SEQ ID NO: 20834 - RNA, 34 nt, Synthetic Construct; identical to SEQ ID NO: 2553
  source 1..34: mol_type = other RNA

SEQ ID NO: 20835 - RNA, 16 nt, Synthetic Construct
  source 1..16: mol_type = other RNA
cccagaaacccggtcg

SEQ ID NO: 20836 - RNA, 16 nt, Synthetic Construct
  source 1..16: mol_type = other RNA
cccagaaacccggtcg

SEQ ID NO: 20837 - RNA, 16 nt, Synthetic Construct
  source 1..16: mol_type = other RNA
gtcaacggccatacca

SEQ ID NO: 20838 - RNA, 16 nt, Synthetic Construct
  source 1..16: mol_type = other RNA
gtcaacggccatacca

SEQ ID NO: 20839 - RNA, 35 nt, Synthetic Construct; identical to SEQ ID NO: 2762
  source 1..35: mol_type = other RNA

SEQ ID NO: 20840 - RNA, 35 nt, Synthetic Construct; identical to SEQ ID NO: 2354
  source 1..35: mol_type = other RNA

SEQ ID NO: 20841 - RNA, 35 nt, Synthetic Construct; identical to SEQ ID NO: 2354
  source 1..35: mol_type = other RNA

SEQ ID NO: 20842 - RNA, 33 nt, Synthetic Construct; identical to SEQ ID NO: 2479
  source 1..33: mol_type = other RNA

SEQ ID NO: 20843 - RNA, 33 nt, Synthetic Construct; identical to SEQ ID NO: 2479
  source 1..33: mol_type = other RNA

SEQ ID NO: 20844 - RNA, 23 nt, Synthetic Construct
  source 1..23: mol_type = other RNA
tggaaatacgacgtacttagtgt

SEQ ID NO: 20845 - RNA, 23 nt, Synthetic Construct
  source 1..23: mol_type = other RNA
tggaaatacgacgtacttagtgt

SEQ ID NO: 20846 - RNA, 17 nt, Synthetic Construct
  source 1..17: mol_type = other RNA
agcggtggatgatgtgg

SEQ ID NO: 20847 - RNA, 17 nt, Synthetic Construct
  source 1..17: mol_type = other RNA
agcggtggatgatgtgg

SEQ ID NO: 20848 - RNA, 31 nt, Synthetic Construct; identical to SEQ ID NO: 2215
  source 1..31: mol_type = other RNA

SEQ ID NO: 20849 - RNA, 31 nt, Synthetic Construct; identical to SEQ ID NO: 2215
  source 1..31: mol_type = other RNA

SEQ ID NO: 20850 - RNA, 20 nt, Synthetic Construct
  source 1..20: mol_type = other RNA
tagcaccatttgaaatcagt

SEQ ID NO: 20851 - RNA, 18 nt, Synthetic Construct
  source 1..18: mol_type = other RNA
catgcaagtcgaacggta

SEQ ID NO: 20852 - RNA, 18 nt, Synthetic Construct
  source 1..18: mol_type = other RNA
catgcaagtcgaacggta

SEQ ID NO: 20853 - RNA, 34 nt, Synthetic Construct; identical to SEQ ID NO: 2317
  source 1..34: mol_type = other RNA

SEQ ID NO: 20854 - RNA, 29 nt, Synthetic Construct
  source 1..29: mol_type = other RNA
cccgtgtgaaagtaggtcatcgtcaggct

SEQ ID NO: 20855 - RNA, 29 nt, Synthetic Construct
  source 1..29: mol_type = other RNA
cccgtgtgaaagtaggtcatcgtcaggct

SEQ ID NO: 20856 - RNA, 30 nt, Synthetic Construct; identical to SEQ ID NO: 1958
  source 1..30: mol_type = other RNA

SEQ ID NO: 20857 - RNA, 17 nt, Synthetic Construct
  source 1..17: mol_type = other RNA
gtccggatcgtagtctg

SEQ ID NO: 20858 - RNA, 20 nt, Synthetic Construct
  source 1..20: mol_type = other RNA
tggggtagtaggttgtgtgg

SEQ ID NO: 20859 - RNA, 20 nt, Synthetic Construct
  source 1..20: mol_type = other RNA
tggggtagtaggttgtgtgg

SEQ ID NO: 20860 - RNA, 16 nt, Synthetic Construct
  source 1..16: mol_type = other RNA
gagctgtggatagggg

SEQ ID NO: 20861 - RNA, 16 nt, Synthetic Construct
  source 1..16: mol_type = other RNA
gagctgtggatagggg

SEQ ID NO: 20862 - RNA, 15 nt, Synthetic Construct
  source 1..15: mol_type = other RNA
gagctgtggataggg

SEQ ID NO: 20863 - RNA, 15 nt, Synthetic Construct
  source 1..15: mol_type = other RNA
gagctgtggataggg

SEQ ID NO: 20864 - RNA, 25 nt, Synthetic Construct
  source 1..25: mol_type = other RNA
gggttgtaaaccgcttttgtcaggg

SEQ ID NO: 20865 - RNA, 30 nt, Synthetic Construct; identical to SEQ ID NO: 1958
  source 1..30: mol_type = other RNA

SEQ ID NO: 20866 - RNA, 30 nt, Synthetic Construct; identical to SEQ ID NO: 1958
  source 1..30: mol_type = other RNA

SEQ ID NO: 20867 - RNA, 27 nt, Synthetic Construct
  source 1..27: mol_type = other RNA
ccgtgtgaaagtaggtcatcgtcaggc

SEQ ID NO: 20868 - RNA, 27 nt, Synthetic Construct
  source 1..27: mol_type = other RNA
ccgtgtgaaagtaggtcatcgtcaggc

SEQ ID NO: 20869 - RNA, 15 nt, Synthetic Construct
  source 1..15: mol_type = other RNA
tgcaagtcgaacggt

SEQ ID NO: 20870 - RNA, 15 nt, Synthetic Construct
  source 1..15: mol_type = other RNA
tgcaagtcgaacggt

SEQ ID NO: 20871 - RNA, 16 nt, Synthetic Construct
  source 1..16: mol_type = other RNA
gtctacggccataccg

SEQ ID NO: 20872 - RNA, 16 nt, Synthetic Construct
  source 1..16: mol_type = other RNA
gtctacggccataccg

SEQ ID NO: 20873 - RNA, 35 nt, Synthetic Construct; identical to SEQ ID NO: 2548
  source 1..35: mol_type = other RNA

SEQ ID NO: 20874 - RNA, 35 nt, Synthetic Construct; identical to SEQ ID NO: 2762
  source 1..35: mol_type = other RNA

SEQ ID NO: 20875 - RNA, 35 nt, Synthetic Construct; identical to SEQ ID NO: 2762
  source 1..35: mol_type = other RNA

SEQ ID NO: 20876 - RNA, 23 nt, Synthetic Construct
  source 1..23: mol_type = other RNA
tcctgtactgggctgccccgagt

SEQ ID NO: 20877 - RNA, 23 nt, Synthetic Construct
  source 1..23: mol_type = other RNA
tcctgtactgggctgccccgagt

SEQ ID NO: 20878 - RNA, 36 nt, Synthetic Construct; identical to SEQ ID NO: 2506
  source 1..36: mol_type = other RNA

SEQ ID NO: 20879 - RNA, 36 nt, Synthetic Construct; identical to SEQ ID NO: 2506
  source 1..36: mol_type = other RNA

SEQ ID NO: 20880 - RNA, 21 nt, Synthetic Construct
  source 1..21: mol_type = other RNA
cggtcccaagggtatggctgt

SEQ ID NO: 20881 - RNA, 21 nt, Synthetic Construct
  source 1..21: mol_type = other RNA
cggtcccaagggtatggctgt

SEQ ID NO: 20882 - RNA, 36 nt, Synthetic Construct; identical to SEQ ID NO: 2546
  source 1..36: mol_type = other RNA

SEQ ID NO: 20883 - RNA, 33 nt, Synthetic Construct; identical to SEQ ID NO: 2266
  source 1..33: mol_type = other RNA

SEQ ID NO: 20884 - RNA, 21 nt, Synthetic Construct
  source 1..21: mol_type = other RNA
taaggtagtaggttgtgtggt

SEQ ID NO: 20885 - RNA, 21 nt, Synthetic Construct
  source 1..21: mol_type = other RNA
taaggtagtaggttgtgtggt

SEQ ID NO: 20886 - RNA, 15 nt, Synthetic Construct
  source 1..15: mol_type = other RNA
tcctgacggccatag

SEQ ID NO: 20887 - RNA, 15 nt, Synthetic Construct
  source 1..15: mol_type = other RNA
tcctgacggccatag

SEQ ID NO: 20888 - RNA, 15 nt, Synthetic Construct
  source 1..15: mol_type = other RNA
ccgcttttgtcaggg

SEQ ID NO: 20889 - RNA, 15 nt, Synthetic Construct
  source 1..15: mol_type = other RNA
ccgcttttgtcaggg

SEQ ID NO: 20890 - RNA, 31 nt, Synthetic Construct; identical to SEQ ID NO: 2758
  source 1..31: mol_type = other RNA

SEQ ID NO: 20891 - RNA, 23 nt, Synthetic Construct
  source 1..23: mol_type = other RNA
tggtagtacgacgtacttagtgt

SEQ ID NO: 20892 - RNA, 23 nt, Synthetic Construct
  source 1..23: mol_type = other RNA
tggtagtacgacgtacttagtgt

SEQ ID NO: 20893 - RNA, 33 nt, Synthetic Construct; identical to SEQ ID NO: 1982
  source 1..33: mol_type = other RNA

SEQ ID NO: 20894 - RNA, 33 nt, Synthetic Construct; identical to SEQ ID NO: 1982
  source 1..33: mol_type = other RNA

SEQ ID NO: 20895 - RNA, 34 nt, Synthetic Construct; identical to SEQ ID NO: 2367
  source 1..34: mol_type = other RNA

SEQ ID NO: 20896 - RNA, 34 nt, Synthetic Construct; identical to SEQ ID NO: 2367
  source 1..34: mol_type = other RNA

SEQ ID NO: 20897 - RNA, 22 nt, Synthetic Construct
  source 1..22: mol_type = other RNA
cctcgcgcgattggagcggccg

SEQ ID NO: 20898 - RNA, 18 nt, Synthetic Construct
  source 1..18: mol_type = other RNA
gcgaaattccttgtcggg

SEQ ID NO: 20899 - RNA, 18 nt, Synthetic Construct
  source 1..18: mol_type = other RNA
gcgaaattccttgtcggg

SEQ ID NO: 20900 - RNA, 21 nt, Synthetic Construct
  source 1..21: mol_type = other RNA
tgaggtagtaggctgtgtggt

SEQ ID NO: 20901 - RNA, 21 nt, Synthetic Construct
  source 1..21: mol_type = other RNA
tgaggtagtaggctgtgtggt

SEQ ID NO: 20902 - RNA, 24 nt, Synthetic Construct
  source 1..24: mol_type = other RNA
gatgaggcgtgataacgagtctgc

SEQ ID NO: 20903 - RNA, 24 nt, Synthetic Construct
  source 1..24: mol_type = other RNA
gatgaggcgtgataacgagtctgc

SEQ ID NO: 20904 - RNA, 34 nt, Synthetic Construct; identical to SEQ ID NO: 2364
  source 1..34: mol_type = other RNA

SEQ ID NO: 20905 - RNA, 34 nt, Synthetic Construct; identical to SEQ ID NO: 2364
  source 1..34: mol_type = other RNA

SEQ ID NO: 20906 - RNA, 16 nt, Synthetic Construct
  source 1..16: mol_type = other RNA
ccatgccgcgtgcggg

SEQ ID NO: 20907 - RNA, 16 nt, Synthetic Construct
  source 1..16: mol_type = other RNA
ccatgccgcgtgcggg

SEQ ID NO: 20908 - RNA, 32 nt, Synthetic Construct; identical to SEQ ID NO: 2318
  source 1..32: mol_type = other RNA

SEQ ID NO: 20909 - RNA, 32 nt, Synthetic Construct; identical to SEQ ID NO: 3092
  source 1..32: mol_type = other RNA

SEQ ID NO: 20910 - RNA, 32 nt, Synthetic Construct; identical to SEQ ID NO: 3092
  source 1..32: mol_type = other RNA

SEQ ID NO: 20911 - RNA, 19 nt, Synthetic Construct
  source 1..19: mol_type = other RNA
ccagtaaacggcggccgta

SEQ ID NO: 20912 - RNA, 19 nt, Synthetic Construct
  source 1..19: mol_type = other RNA
ccagtaaacggcggccgta

SEQ ID NO: 20913 - RNA, 29 nt, Synthetic Construct
  source 1..29: mol_type = other RNA
ttacaggggttcgaatcccctaggggacg

SEQ ID NO: 20914 - RNA, 29 nt, Synthetic Construct
  source 1..29: mol_type = other RNA
ttacaggggttcgaatcccctaggggacg

SEQ ID NO: 20915 - RNA, 17 nt, Synthetic Construct
  source 1..17: mol_type = other RNA
tcgctagtaatcgcgga

SEQ ID NO: 20916 - RNA, 17 nt, Synthetic Construct
  source 1..17: mol_type = other RNA
tcgctagtaatcgcgga

SEQ ID NO: 20917 - RNA, 39 nt, Synthetic Construct; identical to SEQ ID NO: 2398
  source 1..39: mol_type = other RNA

SEQ ID NO: 20918 - RNA, 36 nt, Synthetic Construct; identical to SEQ ID NO: 2520
  source 1..36: mol_type = other RNA

SEQ ID NO: 20919 - RNA, 36 nt, Synthetic Construct; identical to SEQ ID NO: 2520
  source 1..36: mol_type = other RNA

SEQ ID NO: 20920 - RNA, 16 nt, Synthetic Construct
  source 1..16: mol_type = other RNA
gtctacggccgtacca

SEQ ID NO: 20921 - RNA, 16 nt, Synthetic Construct
  source 1..16: mol_type = other RNA
gtctacggccgtacca

SEQ ID NO: 20922 - RNA, 26 nt, Synthetic Construct
  source 1..26: mol_type = other RNA
ggcgcttgagagaactctggagaagg

SEQ ID NO: 20923 - RNA, 26 nt, Synthetic Construct
  source 1..26: mol_type = other RNA
ggcgcttgagagaactctggagaagg

SEQ ID NO: 20924 - RNA, 22 nt, Synthetic Construct
  source 1..22: mol_type = other RNA
tatcggaacgtgcccagtcgtg

SEQ ID NO: 20925 - RNA, 22 nt, Synthetic Construct
  source 1..22: mol_type = other RNA
tatcggaacgtgcccagtcgtg

SEQ ID NO: 20926 - RNA, 34 nt, Synthetic Construct; identical to SEQ ID NO: 2364
  source 1..34: mol_type = other RNA

SEQ ID NO: 20927 - RNA, 16 nt, Synthetic Construct
  source 1..16: mol_type = other RNA
gatctgtagctggtct

SEQ ID NO: 20928 - RNA, 16 nt, Synthetic Construct
  source 1..16: mol_type = other RNA
gatctgtagctggtct

SEQ ID NO: 20929 - RNA, 25 nt, Synthetic Construct
  source 1..25: mol_type = other RNA
gggttgtaaaccgcttttgtcaggg

SEQ ID NO: 20930 - RNA, 22 nt, Synthetic Construct
  source 1..22: mol_type = other RNA
tgtagtgtttcctactttatgg

SEQ ID NO: 20931 - RNA, 22 nt, Synthetic Construct
  source 1..22: mol_type = other RNA
tgtagtgtttcctactttatgg

SEQ ID NO: 20932 - RNA, 20 nt, Synthetic Construct
  source 1..20: mol_type = other RNA
cgaggtagtaggttgtgtgg

SEQ ID NO: 20933 - RNA, 20 nt, Synthetic Construct
  source 1..20: mol_type = other RNA
cgaggtagtaggttgtgtgg

SEQ ID NO: 20934 - RNA, 15 nt, Synthetic Construct
  source 1..15: mol_type = other RNA
ggtcatcgtcaggct

SEQ ID NO: 20935 - RNA, 21 nt, Synthetic Construct
  source 1..21: mol_type = other RNA
tggggtagtaggttgtgtggt

SEQ ID NO: 20936 - RNA, 21 nt, Synthetic Construct
  source 1..21: mol_type = other RNA
tggggtagtaggttgtgtggt

SEQ ID NO: 20937 - RNA, 23 nt, Synthetic Construct
  source 1..23: mol_type = other RNA
tcctgtactgagctgccccgggt

SEQ ID NO: 20938 - RNA, 23 nt, Synthetic Construct
  source 1..23: mol_type = other RNA
tcctgtactgagctgccccgggt

SEQ ID NO: 20939 - RNA, 33 nt, Synthetic Construct; identical to SEQ ID NO: 2556
  source 1..33: mol_type = other RNA

SEQ ID NO: 20940 - RNA, 33 nt, Synthetic Construct; identical to SEQ ID NO: 2556
  source 1..33: mol_type = other RNA

SEQ ID NO: 20941 - RNA, 20 nt, Synthetic Construct
  source 1..20: mol_type = other RNA
caatggccgggacagagggc

SEQ ID NO: 20942 - RNA, 33 nt, Synthetic Construct; identical to SEQ ID NO: 2386
  source 1..33: mol_type = other RNA

SEQ ID NO: 20943 - RNA, 21 nt, Synthetic Construct
  source 1..21: mol_type = other RNA
tgaggtagtaggttgtatggt

SEQ ID NO: 20944 - RNA, 25 nt, Synthetic Construct
  source 1..25: mol_type = other RNA
tgtcagtttgtcaaataccccaatt

SEQ ID NO: 20945 - RNA, 25 nt, Synthetic Construct
  source 1..25: mol_type = other RNA
tgtcagtttgtcaaataccccaatt

SEQ ID NO: 20946 - RNA, 37 nt, Synthetic Construct; identical to SEQ ID NO: 2211
  source 1..37: mol_type = other RNA

SEQ ID NO: 20947 - RNA, 37 nt, Synthetic Construct; identical to SEQ ID NO: 2211
  source 1..37: mol_type = other RNA

SEQ ID NO: 20948 - RNA, 22 nt, Synthetic Construct
  source 1..22: mol_type = other RNA
tcctgtactgagctgtcccgag

SEQ ID NO: 20949 - RNA, 22 nt, Synthetic Construct
  source 1..22: mol_type = other RNA
tcctgtactgagctgtcccgag

SEQ ID NO: 20950 - RNA, 21 nt, Synthetic Construct
  source 1..21: mol_type = other RNA
ctaatcccagaaacccggtcg

SEQ ID NO: 20951 - RNA, 21 nt, Synthetic Construct
  source 1..21: mol_type = other RNA
ctaatcccagaaacccggtcg

SEQ ID NO: 20952 - RNA, 17 nt, Synthetic Construct
  source 1..17: mol_type = other RNA
gggtctgtagctcagtc

SEQ ID NO: 20953 - RNA, 17 nt, Synthetic Construct
  source 1..17: mol_type = other RNA
gggtctgtagctcagtc

SEQ ID NO: 20954 - RNA, 19 nt, Synthetic Construct
  source 1..19: mol_type = other RNA
cacatgcaagtcgaacggt

SEQ ID NO: 20955 - RNA, 19 nt, Synthetic Construct
  source 1..19: mol_type = other RNA
cacatgcaagtcgaacggt

SEQ ID NO: 20956 - RNA, 15 nt, Synthetic Construct
  source 1..15: mol_type = other RNA
gcgtagatatgcgga

SEQ ID NO: 20957 - RNA, 23 nt, Synthetic Construct
  source 1..23: mol_type = other RNA
gcgtggtaggagagcgttctgta

SEQ ID NO: 20958 - RNA, 23 nt, Synthetic Construct
  source 1..23: mol_type = other RNA
gcgtggtaggagagcgttctgta

SEQ ID NO: 20959 - RNA, 21 nt, Synthetic Construct
  source 1..21: mol_type = other RNA
cataaagtagaaagcactact

SEQ ID NO: 20960 - RNA, 21 nt, Synthetic Construct
  source 1..21: mol_type = other RNA
cataaagtagaaagcactact

SEQ ID NO: 20961 - RNA, 29 nt, Synthetic Construct
  source 1..29: mol_type = other RNA
cccgtgtgaaagtaggtcatcgtcaggct

SEQ ID NO: 20962 - RNA, 21 nt, Synthetic Construct
  source 1..21: mol_type = other RNA
tccagtactgagctgccccga

SEQ ID NO: 20963 - RNA, 21 nt, Synthetic Construct
  source 1..21: mol_type = other RNA
tccagtactgagctgccccga

SEQ ID NO: 20964 - RNA, 33 nt, Synthetic Construct; identical to SEQ ID NO: 2395
  source 1..33: mol_type = other RNA

SEQ ID NO: 20965 - RNA, 33 nt, Synthetic Construct; identical to SEQ ID NO: 2395
  source 1..33: mol_type = other RNA

SEQ ID NO: 20966 - RNA, 23 nt, Synthetic Construct
  source 1..23: mol_type = other RNA
tggtaatacgacgtgcttagtgt

SEQ ID NO: 20967 - RNA, 23 nt, Synthetic Construct
  source 1..23: mol_type = other RNA
tggtaatacgacgtgcttagtgt

SEQ ID NO: 20968 - RNA, 23 nt, Synthetic Construct
  source 1..23: mol_type = other RNA
tcctgtgctgagctgccccgaga

SEQ ID NO: 20969 - RNA, 23 nt, Synthetic Construct
  source 1..23: mol_type = other RNA
tcctgtgctgagctgccccgaga

SEQ ID NO: 20970 - RNA, 21 nt, Synthetic Construct
  source 1..21: mol_type = other RNA
tgaggtagtaggttgcgtggt

SEQ ID NO: 20971 - RNA, 21 nt, Synthetic Construct
  source 1..21: mol_type = other RNA
tgaggtagtaggttgcgtggt

SEQ ID NO: 20972 - RNA, 23 nt, Synthetic Construct
  source 1..23: mol_type = other RNA
tccagtactgagctgccccgaga

SEQ ID NO: 20973 - RNA, 23 nt, Synthetic Construct
  source 1..23: mol_type = other RNA
tccagtactgagctgccccgaga

SEQ ID NO: 20974 - RNA, 34 nt, Synthetic Construct; identical to SEQ ID NO: 2367
  source 1..34: mol_type = other RNA

SEQ ID NO: 20975 - RNA, 18 nt, Synthetic Construct
  source 1..18: mol_type = other RNA
gaagttgaccgcctgggg

SEQ ID NO: 20976 - RNA, 18 nt, Synthetic Construct
  source 1..18: mol_type = other RNA
gaagttgaccgcctgggg

SEQ ID NO: 20977 - RNA, 26 nt, Synthetic Construct
  source 1..26: mol_type = other RNA
gatttccccttggggttgtaggacca

SEQ ID NO: 20978 - RNA, 26 nt, Synthetic Construct
  source 1..26: mol_type = other RNA
gatttccccttggggttgtaggacca

SEQ ID NO: 20979 - RNA, 22 nt, Synthetic Construct
  source 1..22: mol_type = other RNA
tgaggtagtaggttgtgtggtc

SEQ ID NO: 20980 - RNA, 22 nt, Synthetic Construct
  source 1..22: mol_type = other RNA
tgaggtagtaggttgtgtggtc

SEQ ID NO: 20981 - RNA, 22 nt, Synthetic Construct
  source 1..22: mol_type = other RNA
ccggtcccaagggtatggctgt

SEQ ID NO: 20982 - RNA, 22 nt, Synthetic Construct
  source 1..22: mol_type = other RNA
ccggtcccaagggtatggctgt

SEQ ID NO: 20983 - RNA, 31 nt, Synthetic Construct; identical to SEQ ID NO: 2310
  source 1..31: mol_type = other RNA

SEQ ID NO: 20984 - RNA, 31 nt, Synthetic Construct; identical to SEQ ID NO: 2507
  source 1..31: mol_type = other RNA

SEQ ID NO: 20985 - RNA, 31 nt, Synthetic Construct; identical to SEQ ID NO: 2507
  source 1..31: mol_type = other RNA

SEQ ID NO: 20986 - RNA, 33 nt, Synthetic Construct; identical to SEQ ID NO: 2395
  source 1..33: mol_type = other RNA

SEQ ID NO: 20987 - RNA, 16 nt, Synthetic Construct
  source 1..16: mol_type = other RNA
ccggaggaaggtgggg

SEQ ID NO: 20988 - RNA, 23 nt, Synthetic Construct
  source 1..23: mol_type = other RNA
tgaggggcggagagcgagacttt

SEQ ID NO: 20989 - RNA, 23 nt, Synthetic Construct
  source 1..23: mol_type = other RNA
tggtaatacaacgtacttagtgt

SEQ ID NO: 20990 - RNA, 23 nt, Synthetic Construct
  source 1..23: mol_type = other RNA
tggtaatacaacgtacttagtgt

SEQ ID NO: 20991 - RNA, 34 nt, Synthetic Construct; identical to SEQ ID NO: 2291
  source 1..34: mol_type = other RNA

SEQ ID NO: 20992 - RNA, 34 nt, Synthetic Construct; identical to SEQ ID NO: 2291
  source 1..34: mol_type = other RNA

SEQ ID NO: 20993 - RNA, 21 nt, Synthetic Construct
  source 1..21: mol_type = other RNA
cgaggtagtaggttgtgtggt

SEQ ID NO: 20994 - RNA, 21 nt, Synthetic Construct
  source 1..21: mol_type = other RNA
cgaggtagtaggttgtgtggt

SEQ ID NO: 20995 - RNA, 21 nt, Synthetic Construct
  source 1..21: mol_type = other RNA
atcggaacgtgcccagtcgtg

SEQ ID NO: 20996 - RNA, 22 nt, Synthetic Construct
  source 1..22: mol_type = other RNA
tatcggaacgtgcccagtcgtg

SEQ ID NO: 20997 - RNA, 22 nt, Synthetic Construct
  source 1..22: mol_type = other RNA
tatcggaacgtgcccagtcgtg

SEQ ID NO: 20998 - RNA, 18 nt, Synthetic Construct
  source 1..18: mol_type = other RNA
gtcgacgtatagggtgtg

SEQ ID NO: 20999 - RNA, 17 nt, Synthetic Construct
  source 1..17: mol_type = other RNA
agcggtggatgatgtgg

SEQ ID NO: 21000 - RNA, 17 nt, Synthetic Construct
  source 1..17: mol_type = other RNA
agcggtggatgatgtgg

SEQ ID NO: 21001 - RNA, 18 nt, Synthetic Construct
  source 1..18: mol_type = other RNA
cagcactctgcaaagacg

SEQ ID NO: 21002 - RNA, 18 nt, Synthetic Construct
  source 1..18: mol_type = other RNA
cagcactctgcaaagacg

SEQ ID NO: 21003 - RNA, 23 nt, Synthetic Construct
  source 1..23: mol_type = other RNA
tccagtactgagctgccccgagt

SEQ ID NO: 21004 - RNA, 23 nt, Synthetic Construct
  source 1..23: mol_type = other RNA
tccagtactgagctgccccgagt

SEQ ID NO: 21005 - RNA, 22 nt, Synthetic Construct
  source 1..22: mol_type = other RNA
tgttggttcaagcgtgtagtcg

SEQ ID NO: 21006 - RNA, 22 nt, Synthetic Construct
  source 1..22: mol_type = other RNA
tgttggttcaagcgtgtagtcg

SEQ ID NO: 21007 - RNA, 35 nt, Synthetic Construct; identical to SEQ ID NO: 2354
  source 1..35: mol_type = other RNA

SEQ ID NO: 21008 - RNA, 35 nt, Synthetic Construct; identical to SEQ ID NO: 2354
  source 1..35: mol_type = other RNA

SEQ ID NO: 21009 - RNA, 22 nt, Synthetic Construct
  source 1..22: mol_type = other RNA
tgaggtagtagtttgtgctgtg

SEQ ID NO: 21010 - RNA, 16 nt, Synthetic Construct
  source 1..16: mol_type = other RNA
gaaattccttgtcggg

SEQ ID NO: 21011 - RNA, 16 nt, Synthetic Construct
  source 1..16: mol_type = other RNA
gaaattccttgtcggg

SEQ ID NO: 21012 - RNA, 31 nt, Synthetic Construct; identical to SEQ ID NO: 2295
  source 1..31: mol_type = other RNA

SEQ ID NO: 21013 - RNA, 31 nt, Synthetic Construct; identical to SEQ ID NO: 2295
  source 1..31: mol_type = other RNA

SEQ ID NO: 21014 - RNA, 21 nt, Synthetic Construct
  source 1..21: mol_type = other RNA
gtgggcgtttgaagtgaagtg

SEQ ID NO: 21015 - RNA, 21 nt, Synthetic Construct
  source 1..21: mol_type = other RNA
tgaggtagtgggttgtgtggt

SEQ ID NO: 21016 - RNA, 21 nt, Synthetic Construct
  source 1..21: mol_type = other RNA
tgaggtagtgggttgtgtggt

SEQ ID NO: 21017 - RNA, 31 nt, Synthetic Construct; identical to SEQ ID NO: 2295
  source 1..31: mol_type = other RNA

SEQ ID NO: 21018 - RNA, 31 nt, Synthetic Construct; identical to SEQ ID NO: 2295
  source 1..31: mol_type = other RNA

SEQ ID NO: 21019 - RNA, 22 nt, Synthetic Construct
  source 1..22: mol_type = other RNA
ccggtcccaagggtatggctgt

SEQ ID NO: 21020 - RNA, 16 nt, Synthetic Construct
  source 1..16: mol_type = other RNA
gtccccttcgtctaga

SEQ ID NO: 21021 - RNA, 15 nt, Synthetic Construct
  source 1..15: mol_type = other RNA
catgccgcgtgcggg

SEQ ID NO: 21022 - RNA, 21 nt, Synthetic Construct
  source 1..21: mol_type = other RNA
tgaggggcagagagcgagacc

SEQ ID NO: 21023 - RNA, 22 nt, Synthetic Construct
  source 1..22: mol_type = other RNA
ggcagggttcgtgactggggtg

SEQ ID NO: 21024 - RNA, 31 nt, Synthetic Construct; identical to SEQ ID NO: 2412
  source 1..31: mol_type = other RNA

SEQ ID NO: 21025 - RNA, 31 nt, Synthetic Construct; identical to SEQ ID NO: 2412
  source 1..31: mol_type = other RNA

SEQ ID NO: 21026 - RNA, 17 nt, Synthetic Construct
  source 1..17: mol_type = other RNA
accggaggaaggtgggg

SEQ ID NO: 21027 - RNA, 17 nt, Synthetic Construct
  source 1..17: mol_type = other RNA
accggaggaaggtgggg

SEQ ID NO: 21028 - RNA, 17 nt, Synthetic Construct
  source 1..17: mol_type = other RNA
tcgctagtaatcgcgga

SEQ ID NO: 21029 - RNA, 17 nt, Synthetic Construct
  source 1..17: mol_type = other RNA
tcgctagtaatcgcgga

SEQ ID NO: 21030 - RNA, 35 nt, Synthetic Construct; identical to SEQ ID NO: 3369
  source 1..35: mol_type = other RNA

SEQ ID NO: 21031 - RNA, 35 nt, Synthetic Construct; identical to SEQ ID NO: 3369
  source 1..35: mol_type = other RNA

SEQ ID NO: 21032 - RNA, 26 nt, Synthetic Construct
  source 1..26: mol_type = other RNA
ggcgcttgagagaactctggagaagg

SEQ ID NO: 21033 - RNA, 26 nt, Synthetic Construct
  source 1..26: mol_type = other RNA
ggcgcttgagagaactctggagaagg

SEQ ID NO: 21034 - RNA, 26 nt, Synthetic Construct
  source 1..26: mol_type = other RNA
gatgcgtggtaggagagcgttctgta

SEQ ID NO: 21035 - RNA, 26 nt, Synthetic Construct
  source 1..26: mol_type = other RNA
gatgcgtggtaggagagcgttctgta

SEQ ID NO: 21036 - RNA, 20 nt, Synthetic Construct
  source 1..20: mol_type = other RNA
tgaggtagcaggttgtgtgg

SEQ ID NO: 21037 - RNA, 20 nt, Synthetic Construct
  source 1..20: mol_type = other RNA
tgaggtagcaggttgtgtgg

SEQ ID NO: 21038 - RNA, 33 nt, Synthetic Construct; identical to SEQ ID NO: 2126
  source 1..33: mol_type = other RNA

SEQ ID NO: 21039 - RNA, 33 nt, Synthetic Construct; identical to SEQ ID NO: 2126
  source 1..33: mol_type = other RNA

SEQ ID NO: 21040 - RNA, 16 nt, Synthetic Construct
  source 1..16: mol_type = other RNA
aggtcatcattatctg

SEQ ID NO: 21041 - RNA, 16 nt, Synthetic Construct
  source 1..16: mol_type = other RNA
aggtcatcattatctg

SEQ ID NO: 21042 - RNA, 35 nt, Synthetic Construct; identical to SEQ ID NO: 2505
  source 1..35: mol_type = other RNA

SEQ ID NO: 21043 - RNA, 35 nt, Synthetic Construct; identical to SEQ ID NO: 2505
  source 1..35: mol_type = other RNA

SEQ ID NO: 21044 - RNA, 15 nt, Synthetic Construct
  source 1..15: mol_type = other RNA
gagagcctggacaca

SEQ ID NO: 21045 - RNA, 15 nt, Synthetic Construct
  source 1..15: mol_type = other RNA
gagagcctggacaca

SEQ ID NO: 21046 - RNA, 20 nt, Synthetic Construct
  source 1..20: mol_type = other RNA
tgaggaagtaggttgtgtgg

SEQ ID NO: 21047 - RNA, 20 nt, Synthetic Construct
  source 1..20: mol_type = other RNA
tgaggaagtaggttgtgtgg

SEQ ID NO: 21048 - RNA, 35 nt, Synthetic Construct; identical to SEQ ID NO: 2452
  source 1..35: mol_type = other RNA

SEQ ID NO: 21049 - RNA, 35 nt, Synthetic Construct; identical to SEQ ID NO: 2452
  source 1..35: mol_type = other RNA

SEQ ID NO: 21050 - RNA, 22 nt, Synthetic Construct
  source 1..22: mol_type = other RNA
tcctgtactgagctaccccgag

SEQ ID NO: 21051 - RNA, 22 nt, Synthetic Construct
  source 1..22: mol_type = other RNA
tcctgtactgagctaccccgag

SEQ ID NO: 21052 - RNA, 33 nt, Synthetic Construct; identical to SEQ ID NO: 2386
  source 1..33: mol_type = other RNA

SEQ ID NO: 21053 - RNA, 33 nt, Synthetic Construct; identical to SEQ ID NO: 2386
  source 1..33: mol_type = other RNA

SEQ ID NO: 21054 - RNA, 37 nt, Synthetic Construct; identical to SEQ ID NO: 2365
  source 1..37: mol_type = other RNA

SEQ ID NO: 21055 - RNA, 34 nt, Synthetic Construct; identical to SEQ ID NO: 2553
  source 1..34: mol_type = other RNA

SEQ ID NO: 21056 - RNA, 34 nt, Synthetic Construct; identical to SEQ ID NO: 2553
  source 1..34: mol_type = other RNA

SEQ ID NO: 21057 - RNA, 16 nt, Synthetic Construct
  source 1..16: mol_type = other RNA
ctcagtagctcgagga

SEQ ID NO: 21058 - RNA, 16 nt, Synthetic Construct
  source 1..16: mol_type = other RNA
ctcagtagctcgagga

SEQ ID NO: 21059 - RNA, 20 nt, Synthetic Construct
  source 1..20: mol_type = other RNA
tgaggtagtaggttgtgtgt

SEQ ID NO: 21060 - RNA, 20 nt, Synthetic Construct
  source 1..20: mol_type = other RNA
tgaggtagtaggttgtgtgt

SEQ ID NO: 21061 - RNA, 27 nt, Synthetic Construct
  source 1..27: mol_type = other RNA
atagtctttgttcgattccgttgagta

SEQ ID NO: 21062 - RNA, 27 nt, Synthetic Construct
  source 1..27: mol_type = other RNA
atagtctttgttcgattccgttgagta

SEQ ID NO: 21063 - RNA, 16 nt, Synthetic Construct
  source 1..16: mol_type = other RNA
cccctggacctgtact

SEQ ID NO: 21064 - RNA, 16 nt, Synthetic Construct
  source 1..16: mol_type = other RNA
cccctggacctgtact

SEQ ID NO: 21065 - RNA, 19 nt, Synthetic Construct
  source 1..19: mol_type = other RNA
cacatgcaagtcgaacggt

SEQ ID NO: 21066 - RNA, 19 nt, Synthetic Construct
  source 1..19: mol_type = other RNA
cacatgcaagtcgaacggt

SEQ ID NO: 21067 - RNA, 32 nt, Synthetic Construct; identical to SEQ ID NO: 2850
  source 1..32: mol_type = other RNA

SEQ ID NO: 21068 - RNA, 28 nt, Synthetic Construct
  source 1..28: mol_type = other RNA
ccgtgtgaaagtaggtcatcgtcaggct

SEQ ID NO: 21069 - RNA, 16 nt, Synthetic Construct
  source 1..16: mol_type = other RNA
gtctgcggccatacca

SEQ ID NO: 21070 - RNA, 16 nt, Synthetic Construct
  source 1..16: mol_type = other RNA
gtctgcggccatacca

SEQ ID NO: 21071 - RNA, 15 nt, Synthetic Construct
  source 1..15: mol_type = other RNA
gttgaccgcctgggg

SEQ ID NO: 21072 - RNA, 15 nt, Synthetic Construct
  source 1..15: mol_type = other RNA
gttgaccgcctgggg

SEQ ID NO: 21073 - RNA, 22 nt, Synthetic Construct
  source 1..22: mol_type = other RNA
cggaggagttcgaaggtacgct

SEQ ID NO: 21074 - RNA, 22 nt, Synthetic Construct
  source 1..22: mol_type = other RNA
cggaggagttcgaaggtacgct

SEQ ID NO: 21075 - RNA, 16 nt, Synthetic Construct
  source 1..16: mol_type = other RNA
gagctgtggatagggg

SEQ ID NO: 21076 - RNA, 16 nt, Synthetic Construct
  source 1..16: mol_type = other RNA
gagctgtggatagggg

SEQ ID NO: 21077 - RNA, 35 nt, Synthetic Construct; identical to SEQ ID NO: 2450
  source 1..35: mol_type = other RNA

SEQ ID NO: 21078 - RNA, 35 nt, Synthetic Construct; identical to SEQ ID NO: 2450
  source 1..35: mol_type = other RNA

SEQ ID NO: 21079 - RNA, 23 nt, Synthetic Construct
  source 1..23: mol_type = other RNA
tcctgaactgagctgccccgaga

SEQ ID NO: 21080 - RNA, 23 nt, Synthetic Construct
  source 1..23: mol_type = other RNA
tcctgaactgagctgccccgaga

SEQ ID NO: 21081 - RNA, 34 nt, Synthetic Construct; identical to SEQ ID NO: 2291
  source 1..34: mol_type = other RNA

SEQ ID NO: 21082 - RNA, 35 nt, Synthetic Construct; identical to SEQ ID NO: 1095
  source 1..35: mol_type = other RNA

SEQ ID NO: 21083 - RNA, 16 nt, Synthetic Construct
  source 1..16: mol_type = other RNA
ctgacgctcatgcacg

SEQ ID NO: 21084 - RNA, 16 nt, Synthetic Construct
  source 1..16: mol_type = other RNA
ctgacgctcatgcacg

SEQ ID NO: 21085 - RNA, 16 nt, Synthetic Construct
  source 1..16: mol_type = other RNA
gatctgtagctggtct

SEQ ID NO: 21086 - RNA, 16 nt, Synthetic Construct
  source 1..16: mol_type = other RNA
gatctgtagctggtct

SEQ ID NO: 21087 - RNA, 16 nt, Synthetic Construct
  source 1..16: mol_type = other RNA
tgcaagtcgaacggta

SEQ ID NO: 21088 - RNA, 16 nt, Synthetic Construct
  source 1..16: mol_type = other RNA
tgcaagtcgaacggta

SEQ ID NO: 21089 - RNA, 16 nt, Synthetic Construct
  source 1..16: mol_type = other RNA
ctcagtagctcgagga

SEQ ID NO: 21090 - RNA, 16 nt, Synthetic Construct
  source 1..16: mol_type = other RNA
ctcagtagctcgagga

SEQ ID NO: 21091 - RNA, 23 nt, Synthetic Construct
  source 1..23: mol_type = other RNA
taccctgtagaaccgaatttgtg

SEQ ID NO: 21092 - RNA, 23 nt, Synthetic Construct
  source 1..23: mol_type = other RNA
tcctgtaccgagctgccccgagt

SEQ ID NO: 21093 - RNA, 36 nt, Synthetic Construct; identical to SEQ ID NO: 2506
  source 1..36: mol_type = other RNA

SEQ ID NO: 21094 - RNA, 30 nt, Synthetic Construct; identical to SEQ ID NO: 1194
  source 1..30: mol_type = other RNA

SEQ ID NO: 21095 - RNA, 30 nt, Synthetic Construct; identical to SEQ ID NO: 1194
  source 1..30: mol_type = other RNA

SEQ ID NO: 21096 - RNA, 34 nt, Synthetic Construct; identical to SEQ ID NO: 2183
  source 1..34: mol_type = other RNA

SEQ ID NO: 21097 - RNA, 15 nt, Synthetic Construct
  source 1..15: mol_type = other RNA
cctcgcgcgattgga

SEQ ID NO: 21098 - RNA, 15 nt, Synthetic Construct
  source 1..15: mol_type = other RNA
cctcgcgcgattgga

SEQ ID NO: 21099 - RNA, 23 nt, Synthetic Construct
  source 1..23: mol_type = other RNA
tcctgtaccgagctgccccgagt

SEQ ID NO: 21100 - RNA, 23 nt, Synthetic Construct
  source 1..23: mol_type = other RNA
tcctgtaccgagctgccccgagt

SEQ ID NO: 21101 - RNA, 17 nt, Synthetic Construct
  source 1..17: mol_type = other RNA
agtccggatcgtagtct

SEQ ID NO: 21102 - RNA, 17 nt, Synthetic Construct
  source 1..17: mol_type = other RNA
agtccggatcgtagtct

SEQ ID NO: 21103 - RNA, 36 nt, Synthetic Construct; identical to SEQ ID NO: 2366
  source 1..36: mol_type = other RNA

SEQ ID NO: 21104 - RNA, 23 nt, Synthetic Construct
  source 1..23: mol_type = other RNA
tagcaccatttgaaatcagtgtt

SEQ ID NO: 21105 - RNA, 27 nt, Synthetic Construct
  source 1..27: mol_type = other RNA
ccgtgtgaaagtaggtcatcgtcaggc

SEQ ID NO: 21106 - RNA, 27 nt, Synthetic Construct
  source 1..27: mol_type = other RNA
ccgtgtgaaagtaggtcatcgtcaggc

SEQ ID NO: 21107 - RNA, 34 nt, Synthetic Construct; identical to SEQ ID NO: 2367
  source 1..34: mol_type = other RNA

SEQ ID NO: 21108 - RNA, 34 nt, Synthetic Construct; identical to SEQ ID NO: 2367
  source 1..34: mol_type = other RNA

SEQ ID NO: 21109 - RNA, 18 nt, Synthetic Construct
  source 1..18: mol_type = other RNA
ggctttgaagtaaggtcg

SEQ ID NO: 21110 - RNA, 18 nt, Synthetic Construct
  source 1..18: mol_type = other RNA
ggctttgaagtaaggtcg

SEQ ID NO: 21111 - RNA, 31 nt, Synthetic Construct; identical to SEQ ID NO: 2758
  source 1..31: mol_type = other RNA

SEQ ID NO: 21112 - RNA, 31 nt, Synthetic Construct; identical to SEQ ID NO: 2758
  source 1..31: mol_type = other RNA

SEQ ID NO: 21113 - RNA, 33 nt, Synthetic Construct; identical to SEQ ID NO: 3082
  source 1..33: mol_type = other RNA

SEQ ID NO: 21114 - RNA, 33 nt, Synthetic Construct; identical to SEQ ID NO: 2266
  source 1..33: mol_type = other RNA

SEQ ID NO: 21115 - RNA, 33 nt, Synthetic Construct; identical to SEQ ID NO: 2266
  source 1..33: mol_type = other RNA

SEQ ID NO: 21116 - RNA, 18 nt, Synthetic Construct
  source 1..18: mol_type = other RNA
accggaggaaggtgggga

SEQ ID NO: 21117 - RNA, 22 nt, Synthetic Construct
  source 1..22: mol_type = other RNA
tcctgtactgagctgccccggg

SEQ ID NO: 21118 - RNA, 22 nt, Synthetic Construct
  source 1..22: mol_type = other RNA
tcctgtactgagctgccccggg

SEQ ID NO: 21119 - RNA, 35 nt, Synthetic Construct; identical to SEQ ID NO: 2514
  source 1..35: mol_type = other RNA

SEQ ID NO: 21120 - RNA, 35 nt, Synthetic Construct; identical to SEQ ID NO: 2514
  source 1..35: mol_type = other RNA

SEQ ID NO: 21121 - RNA, 23 nt, Synthetic Construct
  source 1..23: mol_type = other RNA
tcctgtactgagctgccccggga

SEQ ID NO: 21122 - RNA, 23 nt, Synthetic Construct
  source 1..23: mol_type = other RNA
tcctgtactgagctgccccggga

SEQ ID NO: 21123 - RNA, 21 nt, Synthetic Construct
  source 1..21: mol_type = other RNA
tcccagtaaacggcggccgta

SEQ ID NO: 21124 - RNA, 21 nt, Synthetic Construct
  source 1..21: mol_type = other RNA
tcccagtaaacggcggccgta

SEQ ID NO: 21125 - RNA, 36 nt, Synthetic Construct; identical to SEQ ID NO: 2248
  source 1..36: mol_type = other RNA

SEQ ID NO: 21126 - RNA, 36 nt, Synthetic Construct; identical to SEQ ID NO: 2248
  source 1..36: mol_type = other RNA

SEQ ID NO: 21127 - RNA, 21 nt, Synthetic Construct
  source 1..21: mol_type = other RNA
tgaggtagtaggtcgtgtggt

SEQ ID NO: 21128 - RNA, 21 nt, Synthetic Construct
  source 1..21: mol_type = other RNA
tgaggtagtaggtcgtgtggt

SEQ ID NO: 21129 - RNA, 16 nt, Synthetic Construct
  source 1..16: mol_type = other RNA
gcggtggatgatgtgg

SEQ ID NO: 21130 - RNA, 17 nt, Synthetic Construct
  source 1..17: mol_type = other RNA
gccatgccgcgtgcggg

SEQ ID NO: 21131 - RNA, 18 nt, Synthetic Construct
  source 1..18: mol_type = other RNA
atcgctagtaatcgcgga

SEQ ID NO: 21132 - RNA, 18 nt, Synthetic Construct
  source 1..18: mol_type = other RNA
gcgaaattccttgtcggg

SEQ ID NO: 21133 - RNA, 18 nt, Synthetic Construct
  source 1..18: mol_type = other RNA
gcgaaattccttgtcggg

SEQ ID NO: 21134 - RNA, 32 nt, Synthetic Construct; identical to SEQ ID NO: 3092
  source 1..32: mol_type = other RNA

SEQ ID NO: 21135 - RNA, 22 nt, Synthetic Construct
  source 1..22: mol_type = other RNA
ctccctcgggagggcgcgcggg

SEQ ID NO: 21136 - RNA, 22 nt, Synthetic Construct
  source 1..22: mol_type = other RNA
ctccctcgggagggcgcgcggg

SEQ ID NO: 21137 - RNA, 17 nt, Synthetic Construct
  source 1..17: mol_type = other RNA
gaagttgaccgcctggg

SEQ ID NO: 21138 - RNA, 17 nt, Synthetic Construct
  source 1..17: mol_type = other RNA
gaagttgaccgcctggg

SEQ ID NO: 21139 - RNA, 34 nt, Synthetic Construct; identical to SEQ ID NO: 2364
  source 1..34: mol_type = other RNA

SEQ ID NO: 21140 - RNA, 23 nt, Synthetic Construct
  source 1..23: mol_type = other RNA
tccagtactgagctgccccgagt

SEQ ID NO: 21141 - RNA, 23 nt, Synthetic Construct
  source 1..23: mol_type = other RNA
tccagtactgagctgccccgagt

SEQ ID NO: 21142 - RNA, 22 nt, Synthetic Construct
  source 1..22: mol_type = other RNA
tcctgcactgagctgccccgag

SEQ ID NO: 21143 - RNA, 22 nt, Synthetic Construct
  source 1..22: mol_type = other RNA
tcctgcactgagctgccccgag

SEQ ID NO: 21144 - RNA, 17 nt, Synthetic Construct
  source 1..17: mol_type = other RNA
gcgtagatatgcggagg

SEQ ID NO: 21145 - RNA, 17 nt, Synthetic Construct
  source 1..17: mol_type = other RNA
gcgtagatatgcggagg

SEQ ID NO: 21146 - RNA, 22 nt, Synthetic Construct
  source 1..22: mol_type = other RNA
tgaggtagtaggttatgtggtt

SEQ ID NO: 21147 - RNA, 22 nt, Synthetic Construct
  source 1..22: mol_type = other RNA
tgaggtagtaggttatgtggtt

SEQ ID NO: 21148 - RNA, 21 nt, Synthetic Construct
  source 1..21: mol_type = other RNA
acagcaggacggtggccatgg

SEQ ID NO: 21149 - RNA, 21 nt, Synthetic Construct
  source 1..21: mol_type = other RNA
acagcaggacggtggccatgg

SEQ ID NO: 21150 - RNA, 35 nt, Synthetic Construct; identical to SEQ ID NO: 2399
  source 1..35: mol_type = other RNA

SEQ ID NO: 21151 - RNA, 16 nt, Synthetic Construct
  source 1..16: mol_type = other RNA
gtcgacgtatagggtg

SEQ ID NO: 21152 - RNA, 16 nt, Synthetic Construct
  source 1..16: mol_type = other RNA
gtcgacgtatagggtg

SEQ ID NO: 21153 - RNA, 18 nt, Synthetic Construct
  source 1..18: mol_type = other RNA
cctcgcgcgattggagcg

SEQ ID NO: 21154 - RNA, 18 nt, Synthetic Construct
  source 1..18: mol_type = other RNA
cctcgcgcgattggagcg

SEQ ID NO: 21155 - RNA, 32 nt, Synthetic Construct; identical to SEQ ID NO: 2467
  source 1..32: mol_type = other RNA

SEQ ID NO: 21156 - RNA, 32 nt, Synthetic Construct; identical to SEQ ID NO: 2467
  source 1..32: mol_type = other RNA

SEQ ID NO: 21157 - RNA, 23 nt, Synthetic Construct
  source 1..23: mol_type = other RNA
tcggaatcgctagtaatcgcgga

SEQ ID NO: 21158 - RNA, 23 nt, Synthetic Construct
  source 1..23: mol_type = other RNA
tcggaatcgctagtaatcgcgga

SEQ ID NO: 21159 - RNA, 30 nt, Synthetic Construct; identical to SEQ ID NO: 2407
  source 1..30: mol_type = other RNA

SEQ ID NO: 21160 - RNA, 17 nt, Synthetic Construct
  source 1..17: mol_type = other RNA
catgcaagtcgaacggt

SEQ ID NO: 21161 - RNA, 17 nt, Synthetic Construct
  source 1..17: mol_type = other RNA
catgcaagtcgaacggt

SEQ ID NO: 21162 - RNA, 23 nt, Synthetic Construct
  source 1..23: mol_type = other RNA
tgaggggcagagagcgagactct

SEQ ID NO: 21163 - RNA, 23 nt, Synthetic Construct
  source 1..23: mol_type = other RNA
tgaggggcagagagcgagactct

SEQ ID NO: 21164 - RNA, 24 nt, Synthetic Construct
  source 1..24: mol_type = other RNA
tatatcggaacgtgcccagtcgtg

SEQ ID NO: 21165 - RNA, 21 nt, Synthetic Construct
  source 1..21: mol_type = other RNA
tgaggtagtaggttgtgcggt

SEQ ID NO: 21166 - RNA, 21 nt, Synthetic Construct
  source 1..21: mol_type = other RNA
tgaggtagtaggttgtgcggt

SEQ ID NO: 21167 - RNA, 23 nt, Synthetic Construct
  source 1..23: mol_type = other RNA
atatcggaacgtgcccagtcgtg

SEQ ID NO: 21168 - RNA, 23 nt, Synthetic Construct
  source 1..23: mol_type = other RNA
atatcggaacgtgcccagtcgtg

SEQ ID NO: 21169 - RNA, 43 nt, Synthetic Construct; identical to SEQ ID NO: 2315
  source 1..43: mol_type = other RNA

SEQ ID NO: 21170 - RNA, 43 nt, Synthetic Construct; identical to SEQ ID NO: 2315
  source 1..43: mol_type = other RNA

SEQ ID NO: 21171 - RNA, 15 nt, Synthetic Construct
  source 1..15: mol_type = other RNA
ttccgaaagtagtgg

SEQ ID NO: 21172 - RNA, 15 nt, Synthetic Construct
  source 1..15: mol_type = other RNA
ttccgaaagtagtgg

SEQ ID NO: 21173 - RNA, 23 nt, Synthetic Construct
  source 1..23: mol_type = other RNA
tggcagtgtcttagctggttgtt

SEQ ID NO: 21174 - RNA, 39 nt, Synthetic Construct; identical to SEQ ID NO: 2398
  source 1..39: mol_type = other RNA

SEQ ID NO: 21175 - RNA, 30 nt, Synthetic Construct; identical to SEQ ID NO: 1771
  source 1..30: mol_type = other RNA

SEQ ID NO: 21176 - RNA, 30 nt, Synthetic Construct; identical to SEQ ID NO: 1771
  source 1..30: mol_type = other RNA

SEQ ID NO: 21177 - RNA, 16 nt, Synthetic Construct
  source 1..16: mol_type = other RNA
gtccggatcgtagtct

SEQ ID NO: 21178 - RNA, 16 nt, Synthetic Construct
  source 1..16: mol_type = other RNA
gtccggatcgtagtct

SEQ ID NO: 21179 - RNA, 21 nt, Synthetic Construct
  source 1..21: mol_type = other RNA
tgaggaagtaggttgtgtggt

SEQ ID NO: 21180 - RNA, 21 nt, Synthetic Construct
  source 1..21: mol_type = other RNA
tgaggaagtaggttgtgtggt

SEQ ID NO: 21181 - RNA, 35 nt, Synthetic Construct; identical to SEQ ID NO: 2505
  source 1..35: mol_type = other RNA

SEQ ID NO: 21182 - RNA, 35 nt, Synthetic Construct; identical to SEQ ID NO: 2505
  source 1..35: mol_type = other RNA

SEQ ID NO: 21183 - RNA, 21 nt, Synthetic Construct
  source 1..21: mol_type = other RNA
tgaggtagtagtttgtgctgc

SEQ ID NO: 21184 - RNA, 23 nt, Synthetic Construct
  source 1..23: mol_type = other RNA
cgaggggcagagagcgagacttt

SEQ ID NO: 21185 - RNA, 15 nt, Synthetic Construct
  source 1..15: mol_type = other RNA
ggtcatcgtcaggct

SEQ ID NO: 21186 - RNA, 15 nt, Synthetic Construct
  source 1..15: mol_type = other RNA
ggtcatcgtcaggct

SEQ ID NO: 21187 - RNA, 24 nt, Synthetic Construct
  source 1..24: mol_type = other RNA
gatgaggcgtgataacgagtctgc

SEQ ID NO: 21188 - RNA, 24 nt, Synthetic Construct
  source 1..24: mol_type = other RNA
gatgaggcgtgataacgagtctgc

SEQ ID NO: 21189 - RNA, 35 nt, Synthetic Construct; identical to SEQ ID NO: 2518
  source 1..35: mol_type = other RNA

SEQ ID NO: 21190 - RNA, 35 nt, Synthetic Construct; identical to SEQ ID NO: 2518
  source 1..35: mol_type = other RNA

SEQ ID NO: 21191 - RNA, 34 nt, Synthetic Construct; identical to SEQ ID NO: 2529
  source 1..34: mol_type = other RNA

SEQ ID NO: 21192 - RNA, 32 nt, Synthetic Construct; identical to SEQ ID NO: 3541
  source 1..32: mol_type = other RNA

SEQ ID NO: 21193 - RNA, 32 nt, Synthetic Construct; identical to SEQ ID NO: 3541
  source 1..32: mol_type = other RNA

SEQ ID NO: 21194 - RNA, 20 nt, Synthetic Construct
  source 1..20: mol_type = other RNA
cccagtaaacggcggccgta

SEQ ID NO: 21195 - RNA, 20 nt, Synthetic Construct
  source 1..20: mol_type = other RNA
cccagtaaacggcggccgta

SEQ ID NO: 21196 - RNA, 23 nt, Synthetic Construct
  source 1..23: mol_type = other RNA
agcagcattgtacagggctatgt

SEQ ID NO: 21197 - RNA, 32 nt, Synthetic Construct; identical to SEQ ID NO: 2086
  source 1..32: mol_type = other RNA

SEQ ID NO: 21198 - RNA, 32 nt, Synthetic Construct; identical to SEQ ID NO: 2086
  source 1..32: mol_type = other RNA

SEQ ID NO: 21199 - RNA, 30 nt, Synthetic Construct; identical to SEQ ID NO: 2407
  source 1..30: mol_type = other RNA

SEQ ID NO: 21200 - RNA, 30 nt, Synthetic Construct; identical to SEQ ID NO: 2407
  source 1..30: mol_type = other RNA

SEQ ID NO: 21201 - RNA, 22 nt, Synthetic Construct
  source 1..22: mol_type = other RNA
ttctgtactgagctgccccgag

SEQ ID NO: 21202 - RNA, 22 nt, Synthetic Construct
  source 1..22: mol_type = other RNA
ttctgtactgagctgccccgag

SEQ ID NO: 21203 - RNA, 21 nt, Synthetic Construct
  source 1..21: mol_type = other RNA
tgaggtagtaggttgtgtggc

SEQ ID NO: 21204 - RNA, 21 nt, Synthetic Construct
  source 1..21: mol_type = other RNA
tgaggtagtaggttgtgtggc

SEQ ID NO: 21205 - RNA, 15 nt, Synthetic Construct
  source 1..15: mol_type = other RNA
accggaggaaggtgg

SEQ ID NO: 21206 - RNA, 15 nt, Synthetic Construct
  source 1..15: mol_type = other RNA
accggaggaaggtgg

SEQ ID NO: 21207 - RNA, 17 nt, Synthetic Construct
  source 1..17: mol_type = other RNA
gtcgacgtatagggtgt

SEQ ID NO: 21208 - RNA, 17 nt, Synthetic Construct
  source 1..17: mol_type = other RNA
gtcgacgtatagggtgt

SEQ ID NO: 21209 - RNA, 35 nt, Synthetic Construct; identical to SEQ ID NO: 2762
  source 1..35: mol_type = other RNA

SEQ ID NO: 21210 - RNA, 16 nt, Synthetic Construct
  source 1..16: mol_type = other RNA
ggccgtcgtcagctcg

SEQ ID NO: 21211 - RNA, 16 nt, Synthetic Construct
  source 1..16: mol_type = other RNA
ggccgtcgtcagctcg

SEQ ID NO: 21212 - RNA, 38 nt, Synthetic Construct; identical to SEQ ID NO: 2492
  source 1..38: mol_type = other RNA

SEQ ID NO: 21213 - RNA, 38 nt, Synthetic Construct; identical to SEQ ID NO: 2492
  source 1..38: mol_type = other RNA

SEQ ID NO: 21214 - RNA, 15 nt, Synthetic Construct
  source 1..15: mol_type = other RNA
tccggatcgtagtct

SEQ ID NO: 21215 - RNA, 15 nt, Synthetic Construct
  source 1..15: mol_type = other RNA
tccggatcgtagtct

SEQ ID NO: 21216 - RNA, 16 nt, Synthetic Construct
  source 1..16: mol_type = other RNA
aggtcatcattatctg

SEQ ID NO: 21217 - RNA, 16 nt, Synthetic Construct
  source 1..16: mol_type = other RNA
aggtcatcattatctg

SEQ ID NO: 21218 - RNA, 15 nt, Synthetic Construct
  source 1..15: mol_type = other RNA
gtccggatcgtagtc

SEQ ID NO: 21219 - RNA, 15 nt, Synthetic Construct
  source 1..15: mol_type = other RNA
gtccggatcgtagtc

SEQ ID NO: 21220 - RNA, 24 nt, Synthetic Construct
  source 1..24: mol_type = other RNA
cgactcttagcggtggatcactcg

SEQ ID NO: 21221 - RNA, 24 nt, Synthetic Construct
  source 1..24: mol_type = other RNA
cgactcttagcggtggatcactcg

SEQ ID NO: 21222 - RNA, 37 nt, Synthetic Construct; identical to SEQ ID NO: 2607
  source 1..37: mol_type = other RNA

SEQ ID NO: 21223 - RNA, 37 nt, Synthetic Construct; identical to SEQ ID NO: 2607
  source 1..37: mol_type = other RNA

SEQ ID NO: 21224 - RNA, 36 nt, Synthetic Construct; identical to SEQ ID NO: 2506
  source 1..36: mol_type = other RNA

SEQ ID NO: 21225 - RNA, 15 nt, Synthetic Construct
  source 1..15: mol_type = other RNA
catgccgcgtgcggg

SEQ ID NO: 21226 - RNA, 36 nt, Synthetic Construct; identical to SEQ ID NO: 2344
  source 1..36: mol_type = other RNA

SEQ ID NO: 21227 - RNA, 32 nt, Synthetic Construct; identical to SEQ ID NO: 2582
  source 1..32: mol_type = other RNA

SEQ ID NO: 21228 - RNA, 17 nt, Synthetic Construct
  source 1..17: mol_type = other RNA
gaagttgaccgcctggg

SEQ ID NO: 21229 - RNA, 22 nt, Synthetic Construct
  source 1..22: mol_type = other RNA
ncctgtactgagctgccccgag

SEQ ID NO: 21230 - RNA, 22 nt, Synthetic Construct
  source 1..22: mol_type = other RNA
ncctgtactgagctgccccgag

SEQ ID NO: 21231 - RNA, 35 nt, Synthetic Construct; identical to SEQ ID NO: 2548
  source 1..35: mol_type = other RNA

SEQ ID NO: 21232 - RNA, 16 nt, Synthetic Construct
  source 1..16: mol_type = other RNA
ctcagtagctcgagga

SEQ ID NO: 21233 - RNA, 16 nt, Synthetic Construct
  source 1..16: mol_type = other RNA
ctcagtagctcgagga

SEQ ID NO: 21234 - RNA, 21 nt, Synthetic Construct
  source 1..21: mol_type = other RNA
tcccgtactgagctgccccga

SEQ ID NO: 21235 - RNA, 21 nt, Synthetic Construct
  source 1..21: mol_type = other RNA
tcccgtactgagctgccccga

SEQ ID NO: 21236 - RNA, 16 nt, Synthetic Construct
  source 1..16: mol_type = other RNA
tgcgtagatatgcgga

SEQ ID NO: 21237 - RNA, 34 nt, Synthetic Construct; identical to SEQ ID NO: 2019
  source 1..34: mol_type = other RNA

SEQ ID NO: 21238 - RNA, 30 nt, Synthetic Construct; identical to SEQ ID NO: 2274
  source 1..30: mol_type = other RNA

SEQ ID NO: 21239 - RNA, 19 nt, Synthetic Construct
  source 1..19: mol_type = other RNA
cccttgtcattagttgcta

SEQ ID NO: 21240 - RNA, 19 nt, Synthetic Construct
  source 1..19: mol_type = other RNA
cccttgtcattagttgcta

SEQ ID NO: 21241 - RNA, 23 nt, Synthetic Construct
  source 1..23: mol_type = other RNA
tgaggggcagagagcgagactct

SEQ ID NO: 21242 - RNA, 23 nt, Synthetic Construct
  source 1..23: mol_type = other RNA
tgaggggcagagagcgagactct

SEQ ID NO: 21243 - RNA, 16 nt, Synthetic Construct
  source 1..16: mol_type = other RNA
gagctgtggatagggg

SEQ ID NO: 21244 - RNA, 16 nt, Synthetic Construct
  source 1..16: mol_type = other RNA
gagctgtggatagggg

SEQ ID NO: 21245 - RNA, 16 nt, Synthetic Construct
  source 1..16: mol_type = other RNA
cgctagtaatcgcgga

SEQ ID NO: 21246 - RNA, 32 nt, Synthetic Construct; identical to SEQ ID NO: 3541
  source 1..32: mol_type = other RNA

SEQ ID NO: 21247 - RNA, 32 nt, Synthetic Construct; identical to SEQ ID NO: 3541
  source 1..32: mol_type = other RNA

SEQ ID NO: 21248 - RNA, 20 nt, Synthetic Construct
  source 1..20: mol_type = other RNA
tgaggtagtgggttgtgtgg

SEQ ID NO: 21249 - RNA, 20 nt, Synthetic Construct
  source 1..20: mol_type = other RNA
tgaggtagtgggttgtgtgg

SEQ ID NO: 21250 - RNA, 20 nt, Synthetic Construct
  source 1..20: mol_type = other RNA
tgaggcagtaggttgtgtgg

SEQ ID NO: 21251 - RNA, 20 nt, Synthetic Construct
  source 1..20: mol_type = other RNA
tgaggcagtaggttgtgtgg

SEQ ID NO: 21252 - RNA, 17 nt, Synthetic Construct
  source 1..17: mol_type = other RNA
tcgctagtaatcgcgga

SEQ ID NO: 21253 - RNA, 17 nt, Synthetic Construct
  source 1..17: mol_type = other RNA
agcggtggatgatgtgg

SEQ ID NO: 21254 - RNA, 33 nt, Synthetic Construct; identical to SEQ ID NO: 2556
  source 1..33: mol_type = other RNA

SEQ ID NO: 21255 - RNA, 33 nt, Synthetic Construct; identical to SEQ ID NO: 2556
  source 1..33: mol_type = other RNA

SEQ ID NO: 21256 - RNA, 18 nt, Synthetic Construct
  source 1..18: mol_type = other RNA
tgcgtagatatgcggagg

SEQ ID NO: 21257 - RNA, 31 nt, Synthetic Construct; identical to SEQ ID NO: 2507
  source 1..31: mol_type = other RNA

SEQ ID NO: 21258 - RNA, 23 nt, Synthetic Construct
  source 1..23: mol_type = other RNA
tgaggggcagggagcgagacttt

SEQ ID NO: 21259 - RNA, 32 nt, Synthetic Construct; identical to SEQ ID NO: 5582
  source 1..32: mol_type = other RNA

SEQ ID NO: 21260 - RNA, 32 nt, Synthetic Construct; identical to SEQ ID NO: 5582
  source 1..32: mol_type = other RNA

SEQ ID NO: 21261 - RNA, 35 nt, Synthetic Construct; identical to SEQ ID NO: 2514
  source 1..35: mol_type = other RNA

SEQ ID NO: 21262 - RNA, 35 nt, Synthetic Construct; identical to SEQ ID NO: 2514
  source 1..35: mol_type = other RNA

SEQ ID NO: 21263 - RNA, 18 nt, Synthetic Construct
  source 1..18: mol_type = other RNA
gaagttgaccgcctgggg

SEQ ID NO: 21264 - RNA, 33 nt, Synthetic Construct; identical to SEQ ID NO: 2126
  source 1..33: mol_type = other RNA

SEQ ID NO: 21265 - RNA, 18 nt, Synthetic Construct
  source 1..18: mol_type = other RNA
accggaggaaggtgggga

SEQ ID NO: 21266 - RNA, 18 nt, Synthetic Construct
  source 1..18: mol_type = other RNA
accggaggaaggtgggga

SEQ ID NO: 21267 - RNA, 35 nt, Synthetic Construct; identical to SEQ ID NO: 2452
  source 1..35: mol_type = other RNA

SEQ ID NO: 21268 - RNA, 35 nt, Synthetic Construct; identical to SEQ ID NO: 2452
  source 1..35: mol_type = other RNA

SEQ ID NO: 21269 - RNA, 15 nt, Synthetic Construct
  source 1..15: mol_type = other RNA
gggtgaaagcggggg

SEQ ID NO: 21270 - RNA, 15 nt, Synthetic Construct
  source 1..15: mol_type = other RNA
gggtgaaagcggggg

SEQ ID NO: 21271 - RNA, 16 nt, Synthetic Construct
  source 1..16: mol_type = other RNA
agttgaccgcctgggg

SEQ ID NO: 21272 - RNA, 16 nt, Synthetic Construct
  source 1..16: mol_type = other RNA
agttgaccgcctgggg

SEQ ID NO: 21273 - RNA, 18 nt, Synthetic Construct
  source 1..18: mol_type = other RNA
cctcgcgcgattggagcg

SEQ ID NO: 21274 - RNA, 18 nt, Synthetic Construct
  source 1..18: mol_type = other RNA
cctcgcgcgattggagcg

SEQ ID NO: 21275 - RNA, 36 nt, Synthetic Construct; identical to SEQ ID NO: 2456
  source 1..36: mol_type = other RNA

SEQ ID NO: 21276 - RNA, 36 nt, Synthetic Construct; identical to SEQ ID NO: 2456
  source 1..36: mol_type = other RNA

SEQ ID NO: 21277 - RNA, 26 nt, Synthetic Construct
  source 1..26: mol_type = other RNA
gcataagcgtgcttgactgcgagact

SEQ ID NO: 21278 - RNA, 26 nt, Synthetic Construct
  source 1..26: mol_type = other RNA
gcataagcgtgcttgactgcgagact

SEQ ID NO: 21279 - RNA, 16 nt, Synthetic Construct
  source 1..16: mol_type = other RNA
cccctggacctgtact

SEQ ID NO: 21280 - RNA, 16 nt, Synthetic Construct
  source 1..16: mol_type = other RNA
cccctggacctgtact

SEQ ID NO: 21281 - RNA, 22 nt, Synthetic Construct
  source 1..22: mol_type = other RNA
aacccgtagatccgatcttgtg

SEQ ID NO: 21282 - RNA, 17 nt, Synthetic Construct
  source 1..17: mol_type = other RNA
cgatctgtagctggtct

SEQ ID NO: 21283 - RNA, 17 nt, Synthetic Construct
  source 1..17: mol_type = other RNA
cgatctgtagctggtct

SEQ ID NO: 21284 - RNA, 15 nt, Synthetic Construct
  source 1..15: mol_type = other RNA
gttgaccgcctgggg

SEQ ID NO: 21285 - RNA, 17 nt, Synthetic Construct
  source 1..17: mol_type = other RNA
gactcttagcggtggat

SEQ ID NO: 21286 - RNA, 17 nt, Synthetic Construct
  source 1..17: mol_type = other RNA
gactcttagcggtggat

SEQ ID NO: 21287 - RNA, 36 nt, Synthetic Construct; identical to SEQ ID NO: 2546
  source 1..36: mol_type = other RNA

SEQ ID NO: 21288 - RNA, 18 nt, Synthetic Construct
  source 1..18: mol_type = other RNA
ggctttgaagtaaggtcg

SEQ ID NO: 21289 - RNA, 26 nt, Synthetic Construct
  source 1..26: mol_type = other RNA
tgtcggctcatctcatcctggggctg

SEQ ID NO: 21290 - RNA, 26 nt, Synthetic Construct
  source 1..26: mol_type = other RNA
tgtcggctcatctcatcctggggctg

SEQ ID NO: 21291 - RNA, 19 nt, Synthetic Construct
  source 1..19: mol_type = other RNA
cccttgtcattagttgcta

SEQ ID NO: 21292 - RNA, 19 nt, Synthetic Construct
  source 1..19: mol_type = other RNA
cccttgtcattagttgcta

SEQ ID NO: 21293 - RNA, 17 nt, Synthetic Construct
  source 1..17: mol_type = other RNA
cgatctgtagctggtct

SEQ ID NO: 21294 - RNA, 17 nt, Synthetic Construct
  source 1..17: mol_type = other RNA
cgatctgtagctggtct

SEQ ID NO: 21295 - RNA, 18 nt, Synthetic Construct
  source 1..18: mol_type = other RNA
cctcgcgcgattggagcg

SEQ ID NO: 21296 - RNA, 18 nt, Synthetic Construct
  source 1..18: mol_type = other RNA
cctcgcgcgattggagcg

SEQ ID NO: 21297 - RNA, 23 nt, Synthetic Construct
  source 1..23: mol_type = other RNA
atatcggaacgtgcccagtcgtg

SEQ ID NO: 21298 - RNA, 23 nt, Synthetic Construct
  source 1..23: mol_type = other RNA
atatcggaacgtgcccagtcgtg

SEQ ID NO: 21299 - RNA, 21 nt, Synthetic Construct
  source 1..21: mol_type = other RNA
gctttgatccggagatttccg

SEQ ID NO: 21300 - RNA, 31 nt, Synthetic Construct; identical to SEQ ID NO: 5943
  source 1..31: mol_type = other RNA

SEQ ID NO: 21301 - RNA, 31 nt, Synthetic Construct; identical to SEQ ID NO: 5943
  source 1..31: mol_type = other RNA

SEQ ID NO: 21302 - RNA, 23 nt, Synthetic Construct
  source 1..23: mol_type = other RNA
tggtagtacgacgtacttagtgt

SEQ ID NO: 21303 - RNA, 23 nt, Synthetic Construct
  source 1..23: mol_type = other RNA
tggtagtacgacgtacttagtgt

SEQ ID NO: 21304 - RNA, 33 nt, Synthetic Construct; identical to SEQ ID NO: 3082
  source 1..33: mol_type = other RNA

SEQ ID NO: 21305 - RNA, 33 nt, Synthetic Construct; identical to SEQ ID NO: 3082
  source 1..33: mol_type = other RNA

SEQ ID NO: 21306 - RNA, 23 nt, Synthetic Construct
  source 1..23: mol_type = other RNA
tcctgtactgagccgccccgagt

SEQ ID NO: 21307 - RNA, 23 nt, Synthetic Construct
  source 1..23: mol_type = other RNA
tcctgtactgagccgccccgagt

SEQ ID NO: 21308 - RNA, 17 nt, Synthetic Construct
  source 1..17: mol_type = other RNA
gtccggatcgtagtctg

SEQ ID NO: 21309 - RNA, 17 nt, Synthetic Construct
  source 1..17: mol_type = other RNA
gtccggatcgtagtctg

SEQ ID NO: 21310 - RNA, 17 nt, Synthetic Construct
  source 1..17: mol_type = other RNA
catgcaagtcgaacggt

SEQ ID NO: 21311 - RNA, 17 nt, Synthetic Construct
  source 1..17: mol_type = other RNA
catgcaagtcgaacggt

SEQ ID NO: 21312 - RNA, 22 nt, Synthetic Construct
  source 1..22: mol_type = other RNA
cctcgcgcgattggagcggccg

SEQ ID NO: 21313 - RNA, 22 nt, Synthetic Construct
  source 1..22: mol_type = other RNA
cctcgcgcgattggagcggccg

SEQ ID NO: 21314 - RNA, 36 nt, Synthetic Construct; identical to SEQ ID NO: 2456
  source 1..36: mol_type = other RNA

SEQ ID NO: 21315 - RNA, 36 nt, Synthetic Construct; identical to SEQ ID NO: 2456
  source 1..36: mol_type = other RNA

SEQ ID NO: 21316 - RNA, 30 nt, Synthetic Construct; identical to SEQ ID NO: 2407
  source 1..30: mol_type = other RNA

SEQ ID NO: 21317 - RNA, 30 nt, Synthetic Construct; identical to SEQ ID NO: 2407
  source 1..30: mol_type = other RNA

SEQ ID NO: 21318 - RNA, 30 nt, Synthetic Construct; identical to SEQ ID NO: 2578
  source 1..30: mol_type = other RNA

SEQ ID NO: 21319 - RNA, 15 nt, Synthetic Construct
  source 1..15: mol_type = other RNA
gctttgatccggaga

SEQ ID NO: 21320 - RNA, 15 nt, Synthetic Construct
  source 1..15: mol_type = other RNA
gctttgatccggaga

SEQ ID NO: 21321 - RNA, 34 nt, Synthetic Construct; identical to SEQ ID NO: 385
  source 1..34: mol_type = other RNA

SEQ ID NO: 21322 - RNA, 34 nt, Synthetic Construct; identical to SEQ ID NO: 385
  source 1..34: mol_type = other RNA

SEQ ID NO: 21323 - RNA, 16 nt, Synthetic Construct
  source 1..16: mol_type = other RNA
gtccccttcgtctaga

SEQ ID NO: 21324 - RNA, 16 nt, Synthetic Construct
  source 1..16: mol_type = other RNA
gtccccttcgtctaga

SEQ ID NO: 21325 - RNA, 18 nt, Synthetic Construct
  source 1..18: mol_type = other RNA
ggctttgaagtaaggtcg

SEQ ID NO: 21326 - RNA, 38 nt, Synthetic Construct; identical to SEQ ID NO: 2492
  source 1..38: mol_type = other RNA

SEQ ID NO: 21327 - RNA, 38 nt, Synthetic Construct; identical to SEQ ID NO: 2492
  source 1..38: mol_type = other RNA

SEQ ID NO: 21328 - RNA, 15 nt, Synthetic Construct
  source 1..15: mol_type = other RNA
gagtagggcgggaca

SEQ ID NO: 21329 - RNA, 36 nt, Synthetic Construct; identical to SEQ ID NO: 2366
  source 1..36: mol_type = other RNA

SEQ ID NO: 21330 - RNA, 16 nt, Synthetic Construct
  source 1..16: mol_type = other RNA
ggtgggggtcgttggt

SEQ ID NO: 21331 - RNA, 16 nt, Synthetic Construct
  source 1..16: mol_type = other RNA
ggcgggggtcgctggt

SEQ ID NO: 21332 - RNA, 16 nt, Synthetic Construct
  source 1..16: mol_type = other RNA
ggcgggggtcgctggt

SEQ ID NO: 21333 - RNA, 30 nt, Synthetic Construct; identical to SEQ ID NO: 2578
  source 1..30: mol_type = other RNA

SEQ ID NO: 21334 - RNA, 30 nt, Synthetic Construct; identical to SEQ ID NO: 2578
  source 1..30: mol_type = other RNA

SEQ ID NO: 21335 - RNA, 30 nt, Synthetic Construct; identical to SEQ ID NO: 2578
  source 1..30: mol_type = other RNA

SEQ ID NO: 21336 - RNA, 23 nt, Synthetic Construct
  source 1..23: mol_type = other RNA
tcctgtactgggctgccccgaga

SEQ ID NO: 21337 - RNA, 23 nt, Synthetic Construct
  source 1..23: mol_type = other RNA
tcctgtactgggctgccccgaga

SEQ ID NO: 21338 - RNA, 37 nt, Synthetic Construct; identical to SEQ ID NO: 2211
  source 1..37: mol_type = other RNA

SEQ ID NO: 21339 - RNA, 37 nt, Synthetic Construct; identical to SEQ ID NO: 2211
  source 1..37: mol_type = other RNA

SEQ ID NO: 21340 - RNA, 16 nt, Synthetic Construct
  source 1..16: mol_type = other RNA
gcggtggatgatgtgg

SEQ ID NO: 21341 - RNA, 16 nt, Synthetic Construct
  source 1..16: mol_type = other RNA
gcggtggatgatgtgg

SEQ ID NO: 21342 - RNA, 32 nt, Synthetic Construct; identical to SEQ ID NO: 2798
  source 1..32: mol_type = other RNA

SEQ ID NO: 21343 - RNA, 31 nt, Synthetic Construct; identical to SEQ ID NO: 2215
  source 1..31: mol_type = other RNA

SEQ ID NO: 21344 - RNA, 37 nt, Synthetic Construct; identical to SEQ ID NO: 2447
  source 1..37: mol_type = other RNA

SEQ ID NO: 21345 - RNA, 37 nt, Synthetic Construct; identical to SEQ ID NO: 2447
  source 1..37: mol_type = other RNA

SEQ ID NO: 21346 - RNA, 23 nt, Synthetic Construct
  source 1..23: mol_type = other RNA
tcccgtactgagctgccccgaga

SEQ ID NO: 21347 - RNA, 23 nt, Synthetic Construct
  source 1..23: mol_type = other RNA
tcccgtactgagctgccccgaga

SEQ ID NO: 21348 - RNA, 22 nt, Synthetic Construct
  source 1..22: mol_type = other RNA
tctttggttatctagctgtatg

SEQ ID NO: 21349 - RNA, 33 nt, Synthetic Construct; identical to SEQ ID NO: 2638
  source 1..33: mol_type = other RNA

SEQ ID NO: 21350 - RNA, 33 nt, Synthetic Construct; identical to SEQ ID NO: 2638
  source 1..33: mol_type = other RNA

SEQ ID NO: 21351 - RNA, 20 nt, Synthetic Construct
  source 1..20: mol_type = other RNA
tgaggtagtaggttgtgtga

SEQ ID NO: 21352 - RNA, 20 nt, Synthetic Construct
  source 1..20: mol_type = other RNA
tgaggtagtaggttgtgtga

SEQ ID NO: 21353 - RNA, 32 nt, Synthetic Construct; identical to SEQ ID NO: 2798
  source 1..32: mol_type = other RNA

SEQ ID NO: 21354 - RNA, 29 nt, Synthetic Construct
  source 1..29: mol_type = other RNA
cccgtgtgaaagtaggtcatcgtcaggct

SEQ ID NO: 21355 - RNA, 20 nt, Synthetic Construct
  source 1..20: mol_type = other RNA
tgaggtagtaggttgcatag

SEQ ID NO: 21356 - RNA, 20 nt, Synthetic Construct
  source 1..20: mol_type = other RNA
tgaggtagtaggttgcatag

SEQ ID NO: 21357 - RNA, 32 nt, Synthetic Construct; identical to SEQ ID NO: 2052
  source 1..32: mol_type = other RNA

SEQ ID NO: 21358 - RNA, 32 nt, Synthetic Construct; identical to SEQ ID NO: 2052
  source 1..32: mol_type = other RNA

SEQ ID NO: 21359 - RNA, 26 nt, Synthetic Construct
  source 1..26: mol_type = other RNA
gatgcgtggtaggagagcgttctgta

SEQ ID NO: 21360 - RNA, 17 nt, Synthetic Construct
  source 1..17: mol_type = other RNA
cgcgacctcagatcaga

SEQ ID NO: 21361 - RNA, 17 nt, Synthetic Construct
  source 1..17: mol_type = other RNA
cgcgacctcagatcaga

SEQ ID NO: 21362 - RNA, 16 nt, Synthetic Construct
  source 1..16: mol_type = other RNA
gaaattccttgtcggg

SEQ ID NO: 21363 - RNA, 16 nt, Synthetic Construct
  source 1..16: mol_type = other RNA
gaaattccttgtcggg

SEQ ID NO: 21364 - RNA, 17 nt, Synthetic Construct
  source 1..17: mol_type = other RNA
gcgtagatatgcggagg

SEQ ID NO: 21365 - RNA, 22 nt, Synthetic Construct
  source 1..22: mol_type = other RNA
tatcggaacgtgcccagtcgtg

SEQ ID NO: 21366 - RNA, 17 nt, Synthetic Construct
  source 1..17: mol_type = other RNA
tcccagaaacccggtcg

SEQ ID NO: 21367 - RNA, 17 nt, Synthetic Construct
  source 1..17: mol_type = other RNA
tcccagaaacccggtcg

SEQ ID NO: 21368 - RNA, 21 nt, Synthetic Construct
  source 1..21: mol_type = other RNA
tgaggggcagagagcgagaca

SEQ ID NO: 21369 - RNA, 41 nt, Synthetic Construct; identical to SEQ ID NO: 2441
  source 1..41: mol_type = other RNA

SEQ ID NO: 21370 - RNA, 23 nt, Synthetic Construct
  source 1..23: mol_type = other RNA
tggtaatacgacgtacttagcgt

SEQ ID NO: 21371 - RNA, 23 nt, Synthetic Construct
  source 1..23: mol_type = other RNA
tggtaatacgacgtacttagcgt

SEQ ID NO: 21372 - RNA, 32 nt, Synthetic Construct; identical to SEQ ID NO: 2582
  source 1..32: mol_type = other RNA

SEQ ID NO: 21373 - RNA, 32 nt, Synthetic Construct; identical to SEQ ID NO: 2582
  source 1..32: mol_type = other RNA

SEQ ID NO: 21374 - RNA, 15 nt, Synthetic Construct
  source 1..15: mol_type = other RNA
gagtagggcgggaca

SEQ ID NO: 21375 - RNA, 39 nt, Synthetic Construct; identical to SEQ ID NO: 2980
  source 1..39: mol_type = other RNA

SEQ ID NO: 21376 - RNA, 39 nt, Synthetic Construct; identical to SEQ ID NO: 2980
  source 1..39: mol_type = other RNA

SEQ ID NO: 21377 - RNA, 21 nt, Synthetic Construct
  source 1..21: mol_type = other RNA
ggaatcgctagtaatcgcgga

SEQ ID NO: 21378 - RNA, 21 nt, Synthetic Construct
  source 1..21: mol_type = other RNA
ggaatcgctagtaatcgcgga

SEQ ID NO: 21379 - RNA, 17 nt, Synthetic Construct
  source 1..17: mol_type = other RNA
cgcgacctcagatcaga

SEQ ID NO: 21380 - RNA, 17 nt, Synthetic Construct
  source 1..17: mol_type = other RNA
cgcgacctcagatcaga

SEQ ID NO: 21381 - RNA, 16 nt, Synthetic Construct
  source 1..16: mol_type = other RNA
gtctacagccatacca

SEQ ID NO: 21382 - RNA, 16 nt, Synthetic Construct
  source 1..16: mol_type = other RNA
gtctacagccatacca

SEQ ID NO: 21383 - RNA, 17 nt, Synthetic Construct
  source 1..17: mol_type = other RNA
accggaggaaggtgggg

SEQ ID NO: 21384 - RNA, 16 nt, Synthetic Construct
  source 1..16: mol_type = other RNA
ggcgggggtcgctggt

SEQ ID NO: 21385 - RNA, 16 nt, Synthetic Construct
  source 1..16: mol_type = other RNA
ggcgggggtcgctggt

SEQ ID NO: 21386 - RNA, 35 nt, Synthetic Construct; identical to SEQ ID NO: 2269
  source 1..35: mol_type = other RNA

SEQ ID NO: 21387 - RNA, 35 nt, Synthetic Construct; identical to SEQ ID NO: 2269
  source 1..35: mol_type = other RNA

SEQ ID NO: 21388 - RNA, 19 nt, Synthetic Construct
  source 1..19: mol_type = other RNA
ccgtgttcggaagattttc

SEQ ID NO: 21389 - RNA, 19 nt, Synthetic Construct
  source 1..19: mol_type = other RNA
ccgtgttcggaagattttc

SEQ ID NO: 21390 - RNA, 23 nt, Synthetic Construct
  source 1..23: mol_type = other RNA
taaagtgcttatagtgcaggtag

SEQ ID NO: 21391 - RNA, 26 nt, Synthetic Construct
  source 1..26: mol_type = other RNA
gcataagcgtgcttgactgcgagact

SEQ ID NO: 21392 - RNA, 26 nt, Synthetic Construct
  source 1..26: mol_type = other RNA
gcataagcgtgcttgactgcgagact

SEQ ID NO: 21393 - RNA, 16 nt, Synthetic Construct
  source 1..16: mol_type = other RNA
ccatgccgcgtgcggg

SEQ ID NO: 21394 - RNA, 16 nt, Synthetic Construct
  source 1..16: mol_type = other RNA
ggcgggggtcgctggt

SEQ ID NO: 21395 - RNA, 16 nt, Synthetic Construct
  source 1..16: mol_type = other RNA
ggcgggggtcgctggt

SEQ ID NO: 21396 - RNA, 33 nt, Synthetic Construct; identical to SEQ ID NO: 2479
  source 1..33: mol_type = other RNA

SEQ ID NO: 21397 - RNA, 33 nt, Synthetic Construct; identical to SEQ ID NO: 2479
  source 1..33: mol_type = other RNA

SEQ ID NO: 21398 - RNA, 23 nt, Synthetic Construct
  source 1..23: mol_type = other RNA
tcctgtactgggctgccccgagt

SEQ ID NO: 21399 - RNA, 23 nt, Synthetic Construct
  source 1..23: mol_type = other RNA
tcctgtactgggctgccccgagt

SEQ ID NO: 21400 - RNA, 22 nt, Synthetic Construct
  source 1..22: mol_type = other RNA
tcctgtgctgagctgccccgag

SEQ ID NO: 21401 - RNA, 22 nt, Synthetic Construct
  source 1..22: mol_type = other RNA
tcctgtgctgagctgccccgag

SEQ ID NO: 21402 - RNA, 43 nt, Synthetic Construct; identical to SEQ ID NO: 6202
  source 1..43: mol_type = other RNA

SEQ ID NO: 21403 - RNA, 43 nt, Synthetic Construct; identical to SEQ ID NO: 6202
  source 1..43: mol_type = other RNA

SEQ ID NO: 21404 - RNA, 17 nt, Synthetic Construct
  source 1..17: mol_type = other RNA
gccatgccgcgtgcggg

SEQ ID NO: 21405 - RNA, 17 nt, Synthetic Construct
  source 1..17: mol_type = other RNA
gccatgccgcgtgcggg

SEQ ID NO: 21406 - RNA, 15 nt, Synthetic Construct
  source 1..15: mol_type = other RNA
gttgaccgcctgggg

SEQ ID NO: 21407 - RNA, 15 nt, Synthetic Construct
  source 1..15: mol_type = other RNA
gttgaccgcctgggg

SEQ ID NO: 21408 - RNA, 16 nt, Synthetic Construct
  source 1..16: mol_type = other RNA
ccatgccgcgtgcggg

SEQ ID NO: 21409 - RNA, 23 nt, Synthetic Construct
  source 1..23: mol_type = other RNA
tctttggttatctagctgtatgt

SEQ ID NO: 21410 - RNA, 15 nt, Synthetic Construct
  source 1..15: mol_type = other RNA
accggaggaaggtgg

SEQ ID NO: 21411 - RNA, 15 nt, Synthetic Construct
  source 1..15: mol_type = other RNA
accggaggaaggtgg

SEQ ID NO: 21412 - RNA, 21 nt, Synthetic Construct
  source 1..21: mol_type = other RNA
tcctgtaccgagctgccccga

SEQ ID NO: 21413 - RNA, 21 nt, Synthetic Construct
  source 1..21: mol_type = other RNA
tcctgtaccgagctgccccga

SEQ ID NO: 21414 - RNA, 21 nt, Synthetic Construct
  source 1..21: mol_type = other RNA
tgaggtagtaggttgtatggt

SEQ ID NO: 21415 - RNA, 21 nt, Synthetic Construct
  source 1..21: mol_type = other RNA
tgaggtagtaggttgtatggt

SEQ ID NO: 21416 - RNA, 18 nt, Synthetic Construct
  source 1..18: mol_type = other RNA
cagcactctgcaaagacg

SEQ ID NO: 21417 - RNA, 18 nt, Synthetic Construct
  source 1..18: mol_type = other RNA
cagcactctgcaaagacg

SEQ ID NO: 21418 - RNA, 26 nt, Synthetic Construct
  source 1..26: mol_type = other RNA
gagcagctaataccgcatacgacctg

SEQ ID NO: 21419 - RNA, 26 nt, Synthetic Construct
  source 1..26: mol_type = other RNA
gagcagctaataccgcatacgacctg

SEQ ID NO: 21420 - RNA, 24 nt, Synthetic Construct
  source 1..24: mol_type = other RNA
cggagaaggttagctcagccaact

SEQ ID NO: 21421 - RNA, 24 nt, Synthetic Construct
  source 1..24: mol_type = other RNA
cggagaaggttagctcagccaact

SEQ ID NO: 21422 - RNA, 33 nt, Synthetic Construct; identical to SEQ ID NO: 2556
  source 1..33: mol_type = other RNA

SEQ ID NO: 21423 - RNA, 33 nt, Synthetic Construct; identical to SEQ ID NO: 2556
  source 1..33: mol_type = other RNA

SEQ ID NO: 21424 - RNA, 21 nt, Synthetic Construct
  source 1..21: mol_type = other RNA
tcctgaactgagctgccccga

SEQ ID NO: 21425 - RNA, 21 nt, Synthetic Construct
  source 1..21: mol_type = other RNA
tcctgaactgagctgccccga

SEQ ID NO: 21426 - RNA, 22 nt, Synthetic Construct
  source 1..22: mol_type = other RNA
nattgcacttgtcccggcctgt

SEQ ID NO: 21427 - RNA, 17 nt, Synthetic Construct
  source 1..17: mol_type = other RNA
gaagttgaccgcctggg

SEQ ID NO: 21428 - RNA, 17 nt, Synthetic Construct
  source 1..17: mol_type = other RNA
gaagttgaccgcctggg

SEQ ID NO: 21429 - RNA, 17 nt, Synthetic Construct
  source 1..17: mol_type = other RNA
tcccctggacctgtact

SEQ ID NO: 21430 - RNA, 17 nt, Synthetic Construct
  source 1..17: mol_type = other RNA
tcccctggacctgtact

SEQ ID NO: 21431 - RNA, 23 nt, Synthetic Construct
  source 1..23: mol_type = other RNA
tcctgtaccgagctgccccgaga

SEQ ID NO: 21432 - RNA, 23 nt, Synthetic Construct
  source 1..23: mol_type = other RNA
tcctgtaccgagctgccccgaga

SEQ ID NO: 21433 - RNA, 22 nt, Synthetic Construct
  source 1..22: mol_type = other RNA
ctccctcgggagggcgcgcggg

SEQ ID NO: 21434 - RNA, 22 nt, Synthetic Construct
  source 1..22: mol_type = other RNA
ctccctcgggagggcgcgcggg

SEQ ID NO: 21435 - RNA, 36 nt, Synthetic Construct; identical to SEQ ID NO: 11035
  source 1..36: mol_type = other RNA

SEQ ID NO: 21436 - RNA, 36 nt, Synthetic Construct; identical to SEQ ID NO: 11035
  source 1..36: mol_type = other RNA

SEQ ID NO: 21437 - RNA, 16 nt, Synthetic Construct
  source 1..16: mol_type = other RNA
gatctgtagctggtct

SEQ ID NO: 21438 - RNA, 16 nt, Synthetic Construct
  source 1..16: mol_type = other RNA
gatctgtagctggtct

SEQ ID NO: 21439 - RNA, 17 nt, Synthetic Construct
  source 1..17: mol_type = other RNA
tggccgtcgtcagctcg

SEQ ID NO: 21440 - RNA, 17 nt, Synthetic Construct
  source 1..17: mol_type = other RNA
tggccgtcgtcagctcg

SEQ ID NO: 21441 - RNA, 15 nt, Synthetic Construct
  source 1..15: mol_type = other RNA
gctagtaatcgcgga

SEQ ID NO: 21442 - RNA, 23 nt, Synthetic Construct
  source 1..23: mol_type = other RNA
ccctgtactgagctgccccgaga

SEQ ID NO: 21443 - RNA, 23 nt, Synthetic Construct
  source 1..23: mol_type = other RNA
ccctgtactgagctgccccgaga

SEQ ID NO: 21444 - RNA, 36 nt, Synthetic Construct; identical to SEQ ID NO: 2248
  source 1..36: mol_type = other RNA

SEQ ID NO: 21445 - RNA, 20 nt, Synthetic Construct
  source 1..20: mol_type = other RNA
tgaggtggtaggttgtgtgg

SEQ ID NO: 21446 - RNA, 20 nt, Synthetic Construct
  source 1..20: mol_type = other RNA
tgaggtggtaggttgtgtgg

SEQ ID NO: 21447 - RNA, 27 nt, Synthetic Construct
  source 1..27: mol_type = other RNA
atagtctttgttcgattccgttgagta

SEQ ID NO: 21448 - RNA, 27 nt, Synthetic Construct
  source 1..27: mol_type = other RNA
atagtctttgttcgattccgttgagta

SEQ ID NO: 21449 - RNA, 22 nt, Synthetic Construct
  source 1..22: mol_type = other RNA
ccccttggggttgtaggaccac

SEQ ID NO: 21450 - RNA, 22 nt, Synthetic Construct
  source 1..22: mol_type = other RNA
ccccttggggttgtaggaccac

SEQ ID NO: 21451 - RNA, 16 nt, Synthetic Construct
  source 1..16: mol_type = other RNA
cgactcttagcggtgg

SEQ ID NO: 21452 - RNA, 16 nt, Synthetic Construct
  source 1..16: mol_type = other RNA
cgactcttagcggtgg

SEQ ID NO: 21453 - RNA, 24 nt, Synthetic Construct
  source 1..24: mol_type = other RNA
gcagctaataccgcatacgacctg

SEQ ID NO: 21454 - RNA, 24 nt, Synthetic Construct
  source 1..24: mol_type = other RNA
gcagctaataccgcatacgacctg

SEQ ID NO: 21455 - RNA, 23 nt, Synthetic Construct
  source 1..23: mol_type = other RNA
tggaaatacgacgtacttagtgt

SEQ ID NO: 21456 - RNA, 23 nt, Synthetic Construct
  source 1..23: mol_type = other RNA
tggaaatacgacgtacttagtgt

SEQ ID NO: 21457 - RNA, 23 nt, Synthetic Construct
  source 1..23: mol_type = other RNA
tgaggggcagagagcgagacttc

SEQ ID NO: 21458 - RNA, 18 nt, Synthetic Construct
  source 1..18: mol_type = other RNA
cagcactctgcaaagacg

SEQ ID NO: 21459 - RNA, 18 nt, Synthetic Construct
  source 1..18: mol_type = other RNA
cagcactctgcaaagacg

SEQ ID NO: 21460 - RNA, 30 nt, Synthetic Construct; identical to SEQ ID NO: 2353
  source 1..30: mol_type = other RNA

SEQ ID NO: 21461 - RNA, 30 nt, Synthetic Construct; identical to SEQ ID NO: 2353
  source 1..30: mol_type = other RNA

SEQ ID NO: 21462 - RNA, 27 nt, Synthetic Construct
  source 1..27: mol_type = other RNA
agagcagctaataccgcatacgacctg

SEQ ID NO: 21463 - RNA, 27 nt, Synthetic Construct
  source 1..27: mol_type = other RNA
agagcagctaataccgcatacgacctg

SEQ ID NO: 21464 - RNA, 15 nt, Synthetic Construct
  source 1..15: mol_type = other RNA
accggaggaaggtgg

SEQ ID NO: 21465 - RNA, 15 nt, Synthetic Construct
  source 1..15: mol_type = other RNA
accggaggaaggtgg

SEQ ID NO: 21466 - RNA, 33 nt, Synthetic Construct; identical to SEQ ID NO: 2479
  source 1..33: mol_type = other RNA

SEQ ID NO: 21467 - RNA, 33 nt, Synthetic Construct; identical to SEQ ID NO: 2479
  source 1..33: mol_type = other RNA

SEQ ID NO: 21468 - RNA, 34 nt, Synthetic Construct; identical to SEQ ID NO: 2186
  source 1..34: mol_type = other RNA

SEQ ID NO: 21469 - RNA, 34 nt, Synthetic Construct; identical to SEQ ID NO: 2186
  source 1..34: mol_type = other RNA

SEQ ID NO: 21470 - RNA, 20 nt, Synthetic Construct
  source 1..20: mol_type = other RNA
tgaggtagtaggttgtatgg

SEQ ID NO: 21471 - RNA, 15 nt, Synthetic Construct
  source 1..15: mol_type = other RNA
gagagcctggacaca

SEQ ID NO: 21472 - RNA, 32 nt, Synthetic Construct; identical to SEQ ID NO: 2086
  source 1..32: mol_type = other RNA

SEQ ID NO: 21473 - RNA, 33 nt, Synthetic Construct; identical to SEQ ID NO: 1982
  source 1..33: mol_type = other RNA

SEQ ID NO: 21474 - RNA, 33 nt, Synthetic Construct; identical to SEQ ID NO: 1982
  source 1..33: mol_type = other RNA

SEQ ID NO: 21475 - RNA, 36 nt, Synthetic Construct; identical to SEQ ID NO: 2469
  source 1..36: mol_type = other RNA

SEQ ID NO: 21476 - RNA, 22 nt, Synthetic Construct
  source 1..22: mol_type = other RNA
tcctgtactaagctgccccgag

SEQ ID NO: 21477 - RNA, 22 nt, Synthetic Construct
  source 1..22: mol_type = other RNA
tcctgtactaagctgccccgag

SEQ ID NO: 21478 - RNA, 30 nt, Synthetic Construct; identical to SEQ ID NO: 751
  source 1..30: mol_type = other RNA

SEQ ID NO: 21479 - RNA, 15 nt, Synthetic Construct
  source 1..15: mol_type = other RNA
ggtgaaagcggggga

SEQ ID NO: 21480 - RNA, 15 nt, Synthetic Construct
  source 1..15: mol_type = other RNA
ggtgaaagcggggga

SEQ ID NO: 21481 - RNA, 21 nt, Synthetic Construct
  source 1..21: mol_type = other RNA
ggaatcgctagtaatcgcgga

SEQ ID NO: 21482 - RNA, 21 nt, Synthetic Construct
  source 1..21: mol_type = other RNA
ggaatcgctagtaatcgcgga

SEQ ID NO: 21483 - RNA, 18 nt, Synthetic Construct
  source 1..18: mol_type = other RNA
atcgctagtaatcgcgga

SEQ ID NO: 21484 - RNA, 18 nt, Synthetic Construct
  source 1..18: mol_type = other RNA
atcgctagtaatcgcgga

SEQ ID NO: 21485 - RNA, 33 nt, Synthetic Construct; identical to SEQ ID NO: 4947
  source 1..33: mol_type = other RNA

SEQ ID NO: 21486 - RNA, 16 nt, Synthetic Construct
  source 1..16: mol_type = other RNA
cccctggacctgtact

SEQ ID NO: 21487 - RNA, 16 nt, Synthetic Construct
  source 1..16: mol_type = other RNA
cccctggacctgtact

SEQ ID NO: 21488 - RNA, 17 nt, Synthetic Construct
  source 1..17: mol_type = other RNA
cgatctgtagctggtct

SEQ ID NO: 21489 - RNA, 17 nt, Synthetic Construct
  source 1..17: mol_type = other RNA
cgatctgtagctggtct

SEQ ID NO: 21490 - RNA, 20 nt, Synthetic Construct
  source 1..20: mol_type = other RNA
acccttgtcattagttgcta

SEQ ID NO: 21491 - RNA, 20 nt, Synthetic Construct
  source 1..20: mol_type = other RNA
acccttgtcattagttgcta

SEQ ID NO: 21492 - RNA, 23 nt, Synthetic Construct
  source 1..23: mol_type = other RNA
tggtaatacgacgtgcttagtgt

SEQ ID NO: 21493 - RNA, 23 nt, Synthetic Construct
  source 1..23: mol_type = other RNA
tggtaatacgacgtgcttagtgt

SEQ ID NO: 21494 - RNA, 37 nt, Synthetic Construct; identical to SEQ ID NO: 2447
  source 1..37: mol_type = other RNA

SEQ ID NO: 21495 - RNA, 37 nt, Synthetic Construct; identical to SEQ ID NO: 2447
  source 1..37: mol_type = other RNA

SEQ ID NO: 21496 - RNA, 22 nt, Synthetic Construct
  source 1..22: mol_type = other RNA
tgttggttcaagcgtgtagtcg

SEQ ID NO: 21497 - RNA, 22 nt, Synthetic Construct
  source 1..22: mol_type = other RNA
tgttggttcaagcgtgtagtcg

SEQ ID NO: 21498 - RNA, 30 nt, Synthetic Construct; identical to SEQ ID NO: 3933
  source 1..30: mol_type = other RNA

SEQ ID NO: 21499 - RNA, 16 nt, Synthetic Construct
  source 1..16: mol_type = other RNA
ggccgtcgtcagctcg

SEQ ID NO: 21500 - RNA, 16 nt, Synthetic Construct
  source 1..16: mol_type = other RNA
ggccgtcgtcagctcg

SEQ ID NO: 21501 - RNA, 16 nt, Synthetic Construct
  source 1..16: mol_type = other RNA
cgctagtaatcgcgga

SEQ ID NO: 21502 - RNA, 16 nt, Synthetic Construct
  source 1..16: mol_type = other RNA
cgctagtaatcgcgga

SEQ ID NO: 21503 - RNA, 23 nt, Synthetic Construct
  source 1..23: mol_type = other RNA
tggtaatacgacgtacttagtgc

SEQ ID NO: 21504 - RNA, 23 nt, Synthetic Construct
  source 1..23: mol_type = other RNA
tggtaatacgacgtacttagtgc

SEQ ID NO: 21505 - RNA, 16 nt, Synthetic Construct
  source 1..16: mol_type = other RNA
gcgtagatatgcggag

SEQ ID NO: 21506 - RNA, 16 nt, Synthetic Construct
  source 1..16: mol_type = other RNA
gcgtagatatgcggag

SEQ ID NO: 21507 - RNA, 37 nt, Synthetic Construct; identical to SEQ ID NO: 5125
  source 1..37: mol_type = other RNA

SEQ ID NO: 21508 - RNA, 23 nt, Synthetic Construct
  source 1..23: mol_type = other RNA
tgagaggcagagagcgagacttt

SEQ ID NO: 21509 - RNA, 23 nt, Synthetic Construct
  source 1..23: mol_type = other RNA
tgagaggcagagagcgagacttt

SEQ ID NO: 21510 - RNA, 23 nt, Synthetic Construct
  source 1..23: mol_type = other RNA
tagcagcacgtaaatattggcgt

SEQ ID NO: 21511 - RNA, 33 nt, Synthetic Construct; identical to SEQ ID NO: 3082
  source 1..33: mol_type = other RNA

SEQ ID NO: 21512 - RNA, 23 nt, Synthetic Construct
  source 1..23: mol_type = other RNA
tcggaatcgctagtaatcgcgga

SEQ ID NO: 21513 - RNA, 23 nt, Synthetic Construct
  source 1..23: mol_type = other RNA
tcggaatcgctagtaatcgcgga

SEQ ID NO: 21514 - RNA, 23 nt, Synthetic Construct
  source 1..23: mol_type = other RNA
tgaggggcagagagcgaggcttt

SEQ ID NO: 21515 - RNA, 31 nt, Synthetic Construct; identical to SEQ ID NO: 2278
  source 1..31: mol_type = other RNA

SEQ ID NO: 21516 - RNA, 36 nt, Synthetic Construct; identical to SEQ ID NO: 2478
  source 1..36: mol_type = other RNA

SEQ ID NO: 21517 - RNA, 36 nt, Synthetic Construct; identical to SEQ ID NO: 2478
  source 1..36: mol_type = other RNA

SEQ ID NO: 21518 - RNA, 23 nt, Synthetic Construct
  source 1..23: mol_type = other RNA
cctcgcgcgattggagcggccga

SEQ ID NO: 21519 - RNA, 33 nt, Synthetic Construct; identical to SEQ ID NO: 2266
  source 1..33: mol_type = other RNA

SEQ ID NO: 21520 - RNA, 15 nt, Synthetic Construct
  source 1..15: mol_type = other RNA
tgcaagtcgaacggt

SEQ ID NO: 21521 - RNA, 15 nt, Synthetic Construct
  source 1..15: mol_type = other RNA
tgcaagtcgaacggt

SEQ ID NO: 21522 - RNA, 22 nt, Synthetic Construct
  source 1..22: mol_type = other RNA
tgtgcaaatctatgcaaaactg

SEQ ID NO: 21523 - RNA, 22 nt, Synthetic Construct
  source 1..22: mol_type = other RNA
tgtgcaaatctatgcaaaactg

SEQ ID NO: 21524 - RNA, 24 nt, Synthetic Construct
  source 1..24: mol_type = other RNA
cggagaaggttagctcagccaact

SEQ ID NO: 21525 - RNA, 24 nt, Synthetic Construct
  source 1..24: mol_type = other RNA
cggagaaggttagctcagccaact

SEQ ID NO: 21526 - RNA, 35 nt, Synthetic Construct; identical to SEQ ID NO: 2269
  source 1..35: mol_type = other RNA

SEQ ID NO: 21527 - RNA, 16 nt, Synthetic Construct
  source 1..16: mol_type = other RNA
gtctacggccatgcca

SEQ ID NO: 21528 - RNA, 16 nt, Synthetic Construct
  source 1..16: mol_type = other RNA
gtctacggccatgcca

SEQ ID NO: 21529 - RNA, 17 nt, Synthetic Construct
  source 1..17: mol_type = other RNA
gccatgccgcgtgcggg

SEQ ID NO: 21530 - RNA, 39 nt, Synthetic Construct; identical to SEQ ID NO: 4400
  source 1..39: mol_type = other RNA

SEQ ID NO: 21531 - RNA, 39 nt, Synthetic Construct; identical to SEQ ID NO: 4400
  source 1..39: mol_type = other RNA

SEQ ID NO: 21532 - RNA, 35 nt, Synthetic Construct; identical to SEQ ID NO: 3369
  source 1..35: mol_type = other RNA

SEQ ID NO: 21533 - RNA, 35 nt, Synthetic Construct; identical to SEQ ID NO: 3369
  source 1..35: mol_type = other RNA

SEQ ID NO: 21534 - RNA, 24 nt, Synthetic Construct
  source 1..24: mol_type = other RNA
tatatcggaacgtgcccagtcgtg

SEQ ID NO: 21535 - RNA, 24 nt, Synthetic Construct
  source 1..24: mol_type = other RNA
tatatcggaacgtgcccagtcgtg

SEQ ID NO: 21536 - RNA, 23 nt, Synthetic Construct
  source 1..23: mol_type = other RNA
tgaggggtagagagcgagacttt

SEQ ID NO: 21537 - RNA, 23 nt, Synthetic Construct
  source 1..23: mol_type = other RNA
tgaggggtagagagcgagacttt

SEQ ID NO: 21538 - RNA, 19 nt, Synthetic Construct
  source 1..19: mol_type = other RNA
cccttgtcattagttgcta

SEQ ID NO: 21539 - RNA, 19 nt, Synthetic Construct
  source 1..19: mol_type = other RNA
cccttgtcattagttgcta

SEQ ID NO: 21540 - RNA, 16 nt, Synthetic Construct
  source 1..16: mol_type = other RNA
ctcagtagctcgagga

SEQ ID NO: 21541 - RNA, 18 nt, Synthetic Construct
  source 1..18: mol_type = other RNA
catgcaagtcgaacggta

SEQ ID NO: 21542 - RNA, 18 nt, Synthetic Construct
  source 1..18: mol_type = other RNA
catgcaagtcgaacggta

SEQ ID NO: 21543 - RNA, 31 nt, Synthetic Construct; identical to SEQ ID NO: 2333
  source 1..31: mol_type = other RNA

SEQ ID NO: 21544 - RNA, 31 nt, Synthetic Construct; identical to SEQ ID NO: 2333
  source 1..31: mol_type = other RNA

SEQ ID NO: 21545 - RNA, 15 nt, Synthetic Construct
  source 1..15: mol_type = other RNA
ggtcatcgtcaggct

SEQ ID NO: 21546 - RNA, 21 nt, Synthetic Construct
  source 1..21: mol_type = other RNA
tgaggtagtaggttgtgtagt

SEQ ID NO: 21547 - RNA, 21 nt, Synthetic Construct
  source 1..21: mol_type = other RNA
tgaggtagtaggttgtgtagt

SEQ ID NO: 21548 - RNA, 33 nt, Synthetic Construct; identical to SEQ ID NO: 2395
  source 1..33: mol_type = other RNA

SEQ ID NO: 21549 - RNA, 15 nt, Synthetic Construct
  source 1..15: mol_type = other RNA
gtcgacgtatagggt

SEQ ID NO: 21550 - RNA, 18 nt, Synthetic Construct
  source 1..18: mol_type = other RNA
cctcgcgcgattggagcg

SEQ ID NO: 21551 - RNA, 35 nt, Synthetic Construct; identical to SEQ ID NO: 2354
  source 1..35: mol_type = other RNA

SEQ ID NO: 21552 - RNA, 21 nt, Synthetic Construct
  source 1..21: mol_type = other RNA
gtagtgtttcctactttatgg

SEQ ID NO: 21553 - RNA, 20 nt, Synthetic Construct
  source 1..20: mol_type = other RNA
tgaggtagtaggttgtgtag

SEQ ID NO: 21554 - RNA, 20 nt, Synthetic Construct
  source 1..20: mol_type = other RNA
tgaggtagtaggttgtgtag

SEQ ID NO: 21555 - RNA, 19 nt, Synthetic Construct
  source 1..19: mol_type = other RNA
gcgaaattccttgtcgggt

SEQ ID NO: 21556 - RNA, 19 nt, Synthetic Construct
  source 1..19: mol_type = other RNA
gcgaaattccttgtcgggt

SEQ ID NO: 21557 - RNA, 20 nt, Synthetic Construct
  source 1..20: mol_type = other RNA
acccttgtcattagttgcta

SEQ ID NO: 21558 - RNA, 20 nt, Synthetic Construct
  source 1..20: mol_type = other RNA
acccttgtcattagttgcta

SEQ ID NO: 21559 - RNA, 20 nt, Synthetic Construct
  source 1..20: mol_type = other RNA
tgaggaagtaggttgtgtgg

SEQ ID NO: 21560 - RNA, 20 nt, Synthetic Construct
  source 1..20: mol_type = other RNA
tgaggaagtaggttgtgtgg

SEQ ID NO: 21561 - RNA, 16 nt, Synthetic Construct
  source 1..16: mol_type = other RNA
gcgtagatatgcggag

SEQ ID NO: 21562 - RNA, 16 nt, Synthetic Construct
  source 1..16: mol_type = other RNA
gaaattccttgtcggg

SEQ ID NO: 21563 - RNA, 16 nt, Synthetic Construct
  source 1..16: mol_type = other RNA
gaaattccttgtcggg

SEQ ID NO: 21564 - RNA, 35 nt, Synthetic Construct; identical to SEQ ID NO: 2567
  source 1..35: mol_type = other RNA

SEQ ID NO: 21565 - RNA, 35 nt, Synthetic Construct; identical to SEQ ID NO: 2567
  source 1..35: mol_type = other RNA

SEQ ID NO: 21566 - RNA, 28 nt, Synthetic Construct
  source 1..28: mol_type = other RNA
tcccacatggtctagcggttaggattcc

SEQ ID NO: 21567 - RNA, 28 nt, Synthetic Construct
  source 1..28: mol_type = other RNA
tcccacatggtctagcggttaggattcc

SEQ ID NO: 21568 - RNA, 23 nt, Synthetic Construct
  source 1..23: mol_type = other RNA
tcctgaactgagctgccccgaga

SEQ ID NO: 21569 - RNA, 23 nt, Synthetic Construct
  source 1..23: mol_type = other RNA
tcctgaactgagctgccccgaga

SEQ ID NO: 21570 - RNA, 22 nt, Synthetic Construct
  source 1..22: mol_type = other RNA
tcctgtacagagctgccccgag

SEQ ID NO: 21571 - RNA, 22 nt, Synthetic Construct
  source 1..22: mol_type = other RNA
tcctgtacagagctgccccgag

SEQ ID NO: 21572 - RNA, 21 nt, Synthetic Construct
  source 1..21: mol_type = other RNA
tgaggtagtaggctgtgtggt

SEQ ID NO: 21573 - RNA, 21 nt, Synthetic Construct
  source 1..21: mol_type = other RNA
tgaggtagtaggctgtgtggt

SEQ ID NO: 21574 - RNA, 28 nt, Synthetic Construct
  source 1..28: mol_type = other RNA
ggcagggttcgtgactggggtgaagtcg

SEQ ID NO: 21575 - RNA, 28 nt, Synthetic Construct
  source 1..28: mol_type = other RNA
ggcagggttcgtgactggggtgaagtcg

SEQ ID NO: 21576 - RNA, 32 nt, Synthetic Construct; identical to SEQ ID NO: 2318
  source 1..32: mol_type = other RNA

SEQ ID NO: 21577 - RNA, 19 nt, Synthetic Construct
  source 1..19: mol_type = other RNA
cacatgcaagtcgaacggt

SEQ ID NO: 21578 - RNA, 19 nt, Synthetic Construct
  source 1..19: mol_type = other RNA
cacatgcaagtcgaacggt

SEQ ID NO: 21579 - RNA, 22 nt, Synthetic Construct
  source 1..22: mol_type = other RNA
nattgcacttgtcccggcctgt

SEQ ID NO: 21580 - RNA, 22 nt, Synthetic Construct
  source 1..22: mol_type = other RNA
nattgcacttgtcccggcctgt

SEQ ID NO: 21581 - RNA, 37 nt, Synthetic Construct; identical to SEQ ID NO: 2482
  source 1..37: mol_type = other RNA

SEQ ID NO: 21582 - RNA, 37 nt, Synthetic Construct; identical to SEQ ID NO: 2482
  source 1..37: mol_type = other RNA

SEQ ID NO: 21583 - RNA, 33 nt, Synthetic Construct; identical to SEQ ID NO: 2126
  source 1..33: mol_type = other RNA

SEQ ID NO: 21584 - RNA, 16 nt, Synthetic Construct
  source 1..16: mol_type = other RNA
gcgtagatatgcggag

SEQ ID NO: 21585 - RNA, 22 nt, Synthetic Construct
  source 1..22: mol_type = other RNA
tcctatactgagctgccccgag

SEQ ID NO: 21586 - RNA, 22 nt, Synthetic Construct
  source 1..22: mol_type = other RNA
tcctatactgagctgccccgag

SEQ ID NO: 21587 - RNA, 21 nt, Synthetic Construct
  source 1..21: mol_type = other RNA
tcctgtgctgagctgccccga

SEQ ID NO: 21588 - RNA, 21 nt, Synthetic Construct
  source 1..21: mol_type = other RNA
tcctgtgctgagctgccccga

SEQ ID NO: 21589 - RNA, 34 nt, Synthetic Construct; identical to SEQ ID NO: 2019
  source 1..34: mol_type = other RNA

SEQ ID NO: 21590 - RNA, 34 nt, Synthetic Construct; identical to SEQ ID NO: 2019
  source 1..34: mol_type = other RNA

SEQ ID NO: 21591 - RNA, 27 nt, Synthetic Construct
  source 1..27: mol_type = other RNA
agagcagctaataccgcatacgacctg

SEQ ID NO: 21592 - RNA, 27 nt, Synthetic Construct
  source 1..27: mol_type = other RNA
agagcagctaataccgcatacgacctg

SEQ ID NO: 21593 - RNA, 22 nt, Synthetic Construct
  source 1..22: mol_type = other RNA
tgaggtagtaggttgtatggtt

SEQ ID NO: 21594 - RNA, 25 nt, Synthetic Construct
  source 1..25: mol_type = other RNA
cctcgcgcgattggagcggccgata

SEQ ID NO: 21595 - RNA, 25 nt, Synthetic Construct
  source 1..25: mol_type = other RNA
cctcgcgcgattggagcggccgata

SEQ ID NO: 21596 - RNA, 35 nt, Synthetic Construct; identical to SEQ ID NO: 2069
  source 1..35: mol_type = other RNA

SEQ ID NO: 21597 - RNA, 18 nt, Synthetic Construct
  source 1..18: mol_type = other RNA
cgccgatgatagtgcgga

SEQ ID NO: 21598 - RNA, 18 nt, Synthetic Construct
  source 1..18: mol_type = other RNA
cgccgatgatagtgcgga

SEQ ID NO: 21599 - RNA, 23 nt, Synthetic Construct
  source 1..23: mol_type = other RNA
tggtaatacgacgtacttagcgt

SEQ ID NO: 21600 - RNA, 23 nt, Synthetic Construct
  source 1..23: mol_type = other RNA
tggtaatacgacgtacttagcgt

SEQ ID NO: 21601 - RNA, 23 nt, Synthetic Construct
  source 1..23: mol_type = other RNA
tctttggttatctagctgtatga

SEQ ID NO: 21602 - RNA, 16 nt, Synthetic Construct
  source 1..16: mol_type = other RNA
cccctggacctgtact

SEQ ID NO: 21603 - RNA, 23 nt, Synthetic Construct
  source 1..23: mol_type = other RNA
cctcgcgcgattggagcggccga

SEQ ID NO: 21604 - RNA, 23 nt, Synthetic Construct
  source 1..23: mol_type = other RNA
cctcgcgcgattggagcggccga

SEQ ID NO: 21605 - RNA, 22 nt, Synthetic Construct
  source 1..22: mol_type = other RNA
tgaagtagtaggttgtgtggtt

SEQ ID NO: 21606 - RNA, 22 nt, Synthetic Construct
  source 1..22: mol_type = other RNA
tgaagtagtaggttgtgtggtt

SEQ ID NO: 21607 - RNA, 18 nt, Synthetic Construct
  source 1..18: mol_type = other RNA
acagtcaggatgttggct

SEQ ID NO: 21608 - RNA, 18 nt, Synthetic Construct
  source 1..18: mol_type = other RNA
acagtcaggatgttggct

SEQ ID NO: 21609 - RNA, 34 nt, Synthetic Construct; identical to SEQ ID NO: 2186
  source 1..34: mol_type = other RNA

SEQ ID NO: 21610 - RNA, 20 nt, Synthetic Construct
  source 1..20: mol_type = other RNA
tcagtagctcgaggaaaaga

SEQ ID NO: 21611 - RNA, 20 nt, Synthetic Construct
  source 1..20: mol_type = other RNA
tcagtagctcgaggaaaaga

SEQ ID NO: 21612 - RNA, 23 nt, Synthetic Construct
  source 1..23: mol_type = other RNA
tcctgtactgagctgccccgagg

SEQ ID NO: 21613 - RNA, 23 nt, Synthetic Construct
  source 1..23: mol_type = other RNA
tcctgtactgagctgccccgagg

SEQ ID NO: 21614 - RNA, 31 nt, Synthetic Construct; identical to SEQ ID NO: 2310
  source 1..31: mol_type = other RNA

SEQ ID NO: 21615 - RNA, 21 nt, Synthetic Construct
  source 1..21: mol_type = other RNA
tgaggggcagagagcgggact

SEQ ID NO: 21616 - RNA, 21 nt, Synthetic Construct
  source 1..21: mol_type = other RNA
tgaggggcagagagcgggact

SEQ ID NO: 21617 - RNA, 28 nt, Synthetic Construct
  source 1..28: mol_type = other RNA
ccgtgtgaaagtaggtcatcgtcaggct

SEQ ID NO: 21618 - RNA, 21 nt, Synthetic Construct
  source 1..21: mol_type = other RNA
tggagagtgacaatggtgttt

SEQ ID NO: 21619 - RNA, 21 nt, Synthetic Construct
  source 1..21: mol_type = other RNA
tggagagtgacaatggtgttt

SEQ ID NO: 21620 - RNA, 23 nt, Synthetic Construct
  source 1..23: mol_type = other RNA
tggtaatacggcgtacttagtgt

SEQ ID NO: 21621 - RNA, 23 nt, Synthetic Construct
  source 1..23: mol_type = other RNA
tggtaatacggcgtacttagtgt

SEQ ID NO: 21622 - RNA, 38 nt, Synthetic Construct; identical to SEQ ID NO: 2492
  source 1..38: mol_type = other RNA

SEQ ID NO: 21623 - RNA, 23 nt, Synthetic Construct
  source 1..23: mol_type = other RNA
tggtaatacgacatacttagtgt

SEQ ID NO: 21624 - RNA, 23 nt, Synthetic Construct
  source 1..23: mol_type = other RNA
tggtaatacgacatacttagtgt

SEQ ID NO: 21625 - RNA, 23 nt, Synthetic Construct
  source 1..23: mol_type = other RNA
tgaggggcagagagcgggacttt

SEQ ID NO: 21626 - RNA, 20 nt, Synthetic Construct
  source 1..20: mol_type = other RNA
cacatgcaagtcgaacggta

SEQ ID NO: 21627 - RNA, 20 nt, Synthetic Construct
  source 1..20: mol_type = other RNA
cacatgcaagtcgaacggta

SEQ ID NO: 21628 - RNA, 16 nt, Synthetic Construct
  source 1..16: mol_type = other RNA
gtcaacggccatacca

SEQ ID NO: 21629 - RNA, 31 nt, Synthetic Construct; identical to SEQ ID NO: 758
  source 1..31: mol_type = other RNA

SEQ ID NO: 21630 - RNA, 31 nt, Synthetic Construct; identical to SEQ ID NO: 758
  source 1..31: mol_type = other RNA

SEQ ID NO: 21631 - RNA, 25 nt, Synthetic Construct
  source 1..25: mol_type = other RNA
cctcgcgcgattggagcggccgata

SEQ ID NO: 21632 - RNA, 25 nt, Synthetic Construct
  source 1..25: mol_type = other RNA
cctcgcgcgattggagcggccgata

SEQ ID NO: 21633 - RNA, 22 nt, Synthetic Construct
  source 1..22: mol_type = other RNA
ngaggtagtaggttgtgtggtt

SEQ ID NO: 21634 - RNA, 22 nt, Synthetic Construct
  source 1..22: mol_type = other RNA
ngaggtagtaggttgtgtggtt

SEQ ID NO: 21635 - RNA, 23 nt, Synthetic Construct
  source 1..23: mol_type = other RNA
gcgtggtaggagagcgttctgta

SEQ ID NO: 21636 - RNA, 15 nt, Synthetic Construct
  source 1..15: mol_type = other RNA
ggtgaaagcggggga

SEQ ID NO: 21637 - RNA, 15 nt, Synthetic Construct
  source 1..15: mol_type = other RNA
ggtgaaagcggggga

SEQ ID NO: 21638 - RNA, 43 nt, Synthetic Construct; identical to SEQ ID NO: 727
  source 1..43: mol_type = other RNA

SEQ ID NO: 21639 - RNA, 43 nt, Synthetic Construct; identical to SEQ ID NO: 727
  source 1..43: mol_type = other RNA

SEQ ID NO: 21640 - RNA, 35 nt, Synthetic Construct; identical to SEQ ID NO: 2397
  source 1..35: mol_type = other RNA

SEQ ID NO: 21641 - RNA, 35 nt, Synthetic Construct; identical to SEQ ID NO: 2450
  source 1..35: mol_type = other RNA

SEQ ID NO: 21642 - RNA, 22 nt, Synthetic Construct
  source 1..22: mol_type = other RNA
nattgcacttgtcccggcctgt

SEQ ID NO: 21643 - RNA, 22 nt, Synthetic Construct
  source 1..22: mol_type = other RNA
gcactctaatgagactgccggt

SEQ ID NO: 21644 - RNA, 22 nt, Synthetic Construct
  source 1..22: mol_type = other RNA
gcactctaatgagactgccggt

SEQ ID NO: 21645 - RNA, 31 nt, Synthetic Construct; identical to SEQ ID NO: 2427
  source 1..31: mol_type = other RNA

SEQ ID NO: 21646 - RNA, 31 nt, Synthetic Construct; identical to SEQ ID NO: 2427
  source 1..31: mol_type = other RNA

SEQ ID NO: 21647 - RNA, 22 nt, Synthetic Construct
  source 1..22: mol_type = other RNA
tccagcatcagtgattttgttg

SEQ ID NO: 21648 - RNA, 16 nt, Synthetic Construct
  source 1..16: mol_type = other RNA
ggtgggggtcgttggt

SEQ ID NO: 21649 - RNA, 16 nt, Synthetic Construct
  source 1..16: mol_type = other RNA
ggtgggggtcgttggt

SEQ ID NO: 21650 - RNA, 33 nt, Synthetic Construct; identical to SEQ ID NO: 2253
  source 1..33: mol_type = other RNA

SEQ ID NO: 21651 - RNA, 17 nt, Synthetic Construct
  source 1..17: mol_type = other RNA
gcgtagatatgcggagg

SEQ ID NO: 21652 - RNA, 33 nt, Synthetic Construct; identical to SEQ ID NO: 2638
  source 1..33: mol_type = other RNA

SEQ ID NO: 21653 - RNA, 33 nt, Synthetic Construct; identical to SEQ ID NO: 2638
  source 1..33: mol_type = other RNA

SEQ ID NO: 21654 - RNA, 21 nt, Synthetic Construct
  source 1..21: mol_type = other RNA
cataaagtagaaagcactact

SEQ ID NO: 21655 - RNA, 21 nt, Synthetic Construct
  source 1..21: mol_type = other RNA
cataaagtagaaagcactact

SEQ ID NO: 21656 - RNA, 21 nt, Synthetic Construct
  source 1..21: mol_type = other RNA
agcgtgcttgactgcgagact

SEQ ID NO: 21657 - RNA, 21 nt, Synthetic Construct
  source 1..21: mol_type = other RNA
agcgtgcttgactgcgagact

SEQ ID NO: 21658 - RNA, 18 nt, Synthetic Construct
  source 1..18: mol_type = other RNA
cgccgatgatagtgcgga

SEQ ID NO: 21659 - RNA, 18 nt, Synthetic Construct
  source 1..18: mol_type = other RNA
cgccgatgatagtgcgga

SEQ ID NO: 21660 - RNA, 34 nt, Synthetic Construct; identical to SEQ ID NO: 2529
  source 1..34: mol_type = other RNA

SEQ ID NO: 21661 - RNA, 19 nt, Synthetic Construct
  source 1..19: mol_type = other RNA
tgagatgaagcactgtagc

SEQ ID NO: 21662 - RNA, 19 nt, Synthetic Construct
  source 1..19: mol_type = other RNA
tgtcaactggttgttggga

SEQ ID NO: 21663 - RNA, 31 nt, Synthetic Construct; identical to SEQ ID NO: 2758
  source 1..31: mol_type = other RNA

SEQ ID NO: 21664 - RNA, 36 nt, Synthetic Construct; identical to SEQ ID NO: 2478
  source 1..36: mol_type = other RNA

SEQ ID NO: 21665 - RNA, 36 nt, Synthetic Construct; identical to SEQ ID NO: 2478
  source 1..36: mol_type = other RNA

SEQ ID NO: 21666 - RNA, 33 nt, Synthetic Construct; identical to SEQ ID NO: 2253
  source 1..33: mol_type = other RNA

SEQ ID NO: 21667 - RNA, 33 nt, Synthetic Construct; identical to SEQ ID NO: 2253
  source 1..33: mol_type = other RNA

SEQ ID NO: 21668 - RNA, 17 nt, Synthetic Construct
  source 1..17: mol_type = other RNA
tcccctggacctgtact

SEQ ID NO: 21669 - RNA, 21 nt, Synthetic Construct
  source 1..21: mol_type = other RNA
tgtagtgtttcctactttatg

SEQ ID NO: 21670 - RNA, 38 nt, Synthetic Construct; identical to SEQ ID NO: 2492
  source 1..38: mol_type = other RNA

SEQ ID NO: 21671 - RNA, 33 nt, Synthetic Construct; identical to SEQ ID NO: 2638
  source 1..33: mol_type = other RNA

SEQ ID NO: 21672 - RNA, 33 nt, Synthetic Construct; identical to SEQ ID NO: 2638
  source 1..33: mol_type = other RNA

SEQ ID NO: 21673 - RNA, 21 nt, Synthetic Construct
  source 1..21: mol_type = other RNA
tctttggttatctagctgtat

SEQ ID NO: 21674 - RNA, 23 nt, Synthetic Construct
  source 1..23: mol_type = other RNA
tcccgtactgagctgccccgagt

SEQ ID NO: 21675 - RNA, 23 nt, Synthetic Construct
  source 1..23: mol_type = other RNA
tcccgtactgagctgccccgagt

SEQ ID NO: 21676 - RNA, 23 nt, Synthetic Construct
  source 1..23: mol_type = other RNA
tgaggggcagagagcaagacttt

SEQ ID NO: 21677 - RNA, 23 nt, Synthetic Construct
  source 1..23: mol_type = other RNA
tgaggggcagagagcaagacttt

SEQ ID NO: 21678 - RNA, 20 nt, Synthetic Construct
  source 1..20: mol_type = other RNA
tgaggtagtaggctgtatag

SEQ ID NO: 21679 - RNA, 20 nt, Synthetic Construct
  source 1..20: mol_type = other RNA
tgaggtagtaggctgtatag

SEQ ID NO: 21680 - RNA, 16 nt, Synthetic Construct
  source 1..16: mol_type = other RNA
gggtctgtagctcagt

SEQ ID NO: 21681 - RNA, 16 nt, Synthetic Construct
  source 1..16: mol_type = other RNA
gggtctgtagctcagt

SEQ ID NO: 21682 - RNA, 21 nt, Synthetic Construct
  source 1..21: mol_type = other RNA
tgaggtagtaggttgtgcggt

SEQ ID NO: 21683 - RNA, 21 nt, Synthetic Construct
  source 1..21: mol_type = other RNA
tgaggtagtaggttgtgcggt

SEQ ID NO: 21684 - RNA, 17 nt, Synthetic Construct
  source 1..17: mol_type = other RNA
gccatgccgcgtgcggg

SEQ ID NO: 21685 - RNA, 17 nt, Synthetic Construct
  source 1..17: mol_type = other RNA
gccatgccgcgtgcggg

SEQ ID NO: 21686 - RNA, 20 nt, Synthetic Construct
  source 1..20: mol_type = other RNA
cacatgcaagtcgaacggta

SEQ ID NO: 21687 - RNA, 20 nt, Synthetic Construct
  source 1..20: mol_type = other RNA
cacatgcaagtcgaacggta

SEQ ID NO: 21688 - RNA, 18 nt, Synthetic Construct
  source 1..18: mol_type = other RNA
catgcaagtcgaacggta

SEQ ID NO: 21689 - RNA, 18 nt, Synthetic Construct
  source 1..18: mol_type = other RNA
catgcaagtcgaacggta

SEQ ID NO: 21690 - RNA, 23 nt, Synthetic Construct
  source 1..23: mol_type = other RNA
ggcagggttcgtgactggggtga

SEQ ID NO: 21691 - RNA, 18 nt, Synthetic Construct
  source 1..18: mol_type = other RNA
ggccgtcgtcagctcgtg

SEQ ID NO: 21692 - RNA, 18 nt, Synthetic Construct
  source 1..18: mol_type = other RNA
ggccgtcgtcagctcgtg

SEQ ID NO: 21693 - RNA, 23 nt, Synthetic Construct
  source 1..23: mol_type = other RNA
tgagaggcagagagcgagacttt

SEQ ID NO: 21694 - RNA, 32 nt, Synthetic Construct; identical to SEQ ID NO: 3541
  source 1..32: mol_type = other RNA

SEQ ID NO: 21695 - RNA, 32 nt, Synthetic Construct; identical to SEQ ID NO: 3541
  source 1..32: mol_type = other RNA

SEQ ID NO: 21696 - RNA, 23 nt, Synthetic Construct
  source 1..23: mol_type = other RNA
tcctgtactgggctgccccgagt

SEQ ID NO: 21697 - RNA, 23 nt, Synthetic Construct
  source 1..23: mol_type = other RNA
tcctgtactgggctgccccgagt

SEQ ID NO: 21698 - RNA, 16 nt, Synthetic Construct
  source 1..16: mol_type = other RNA
gggtgaaagcggggga

SEQ ID NO: 21699 - RNA, 17 nt, Synthetic Construct
  source 1..17: mol_type = other RNA
catgcaagtcgaacggt

SEQ ID NO: 21700 - RNA, 17 nt, Synthetic Construct
  source 1..17: mol_type = other RNA
catgcaagtcgaacggt

SEQ ID NO: 21701 - RNA, 31 nt, Synthetic Construct; identical to SEQ ID NO: 2263
  source 1..31: mol_type = other RNA

SEQ ID NO: 21702 - RNA, 16 nt, Synthetic Construct
  source 1..16: mol_type = other RNA
gccagcagccgcggta

SEQ ID NO: 21703 - RNA, 16 nt, Synthetic Construct
  source 1..16: mol_type = other RNA
gccagcagccgcggta

SEQ ID NO: 21704 - RNA, 38 nt, Synthetic Construct; identical to SEQ ID NO: 2492
  source 1..38: mol_type = other RNA

SEQ ID NO: 21705 - RNA, 17 nt, Synthetic Construct
  source 1..17: mol_type = other RNA
tcccagaaacccggtcg

SEQ ID NO: 21706 - RNA, 17 nt, Synthetic Construct
  source 1..17: mol_type = other RNA
tcccagaaacccggtcg

SEQ ID NO: 21707 - RNA, 23 nt, Synthetic Construct
  source 1..23: mol_type = other RNA
tcccgtactgagctgccccgagt

SEQ ID NO: 21708 - RNA, 23 nt, Synthetic Construct
  source 1..23: mol_type = other RNA
tcccgtactgagctgccccgagt

SEQ ID NO: 21709 - RNA, 16 nt, Synthetic Construct
  source 1..16: mol_type = other RNA
ggtgggggtcgttggt

SEQ ID NO: 21710 - RNA, 16 nt, Synthetic Construct
  source 1..16: mol_type = other RNA
ggtgggggtcgttggt

SEQ ID NO: 21711 - RNA, 20 nt, Synthetic Construct
  source 1..20: mol_type = other RNA
tgaggtagtaggtcgtgtgg

SEQ ID NO: 21712 - RNA, 20 nt, Synthetic Construct
  source 1..20: mol_type = other RNA
tgaggtagtaggtcgtgtgg

SEQ ID NO: 21713 - RNA, 16 nt, Synthetic Construct
  source 1..16: mol_type = other RNA
ggccgtcgtcagctcg

SEQ ID NO: 21714 - RNA, 16 nt, Synthetic Construct
  source 1..16: mol_type = other RNA
ggccgtcgtcagctcg

SEQ ID NO: 21715 - RNA, 26 nt, Synthetic Construct
  source 1..26: mol_type = other RNA
gcataagcgtgcttgactgcgagact

SEQ ID NO: 21716 - RNA, 26 nt, Synthetic Construct
  source 1..26: mol_type = other RNA
gcataagcgtgcttgactgcgagact

SEQ ID NO: 21717 - RNA, 25 nt, Synthetic Construct
  source 1..25: mol_type = other RNA
cctcgcgcgattggagcggccgata

SEQ ID NO: 21718 - RNA, 25 nt, Synthetic Construct
  source 1..25: mol_type = other RNA
cctcgcgcgattggagcggccgata

SEQ ID NO: 21719 - RNA, 23 nt, Synthetic Construct
  source 1..23: mol_type = other RNA
tggtaatacgacgtacttggtgt

SEQ ID NO: 21720 - RNA, 23 nt, Synthetic Construct
  source 1..23: mol_type = other RNA
tggtaatacgacgtacttggtgt

SEQ ID NO: 21721 - RNA, 23 nt, Synthetic Construct
  source 1..23: mol_type = other RNA
tcctgtactgagctgccccgggt

SEQ ID NO: 21722 - RNA, 16 nt, Synthetic Construct
  source 1..16: mol_type = other RNA
gcaagaggtcagcggt

SEQ ID NO: 21723 - RNA, 16 nt, Synthetic Construct
  source 1..16: mol_type = other RNA
gcaagaggtcagcggt

SEQ ID NO: 21724 - RNA, 23 nt, Synthetic Construct
  source 1..23: mol_type = other RNA
cctcgcgcgattggagcggccga

SEQ ID NO: 21725 - RNA, 23 nt, Synthetic Construct
  source 1..23: mol_type = other RNA
cctcgcgcgattggagcggccga

SEQ ID NO: 21726 - RNA, 23 nt, Synthetic Construct
  source 1..23: mol_type = other RNA
tcctgtactgagctgccccgggt

SEQ ID NO: 21727 - RNA, 22 nt, Synthetic Construct
  source 1..22: mol_type = other RNA
ttctgtactgagctgccccgag

SEQ ID NO: 21728 - RNA, 22 nt, Synthetic Construct
  source 1..22: mol_type = other RNA
ttctgtactgagctgccccgag

SEQ ID NO: 21729 - RNA, 35 nt, Synthetic Construct; identical to SEQ ID NO: 2354
  source 1..35: mol_type = other RNA

SEQ ID NO: 21730 - RNA, 35 nt, Synthetic Construct; identical to SEQ ID NO: 2615
  source 1..35: mol_type = other RNA

SEQ ID NO: 21731 - RNA, 21 nt, Synthetic Construct
  source 1..21: mol_type = other RNA
gctttgatccggagatttccg

SEQ ID NO: 21732 - RNA, 35 nt, Synthetic Construct; identical to SEQ ID NO: 2518
  source 1..35: mol_type = other RNA

SEQ ID NO: 21733 - RNA, 35 nt, Synthetic Construct; identical to SEQ ID NO: 2518
  source 1..35: mol_type = other RNA

SEQ ID NO: 21734 - RNA, 23 nt, Synthetic Construct
  source 1..23: mol_type = other RNA
tcctgtaccgagctgccccgagt

SEQ ID NO: 21735 - RNA, 21 nt, Synthetic Construct
  source 1..21: mol_type = other RNA
cgaggggcagagagcgagact

SEQ ID NO: 21736 - RNA, 21 nt, Synthetic Construct
  source 1..21: mol_type = other RNA
cgaggggcagagagcgagact

SEQ ID NO: 21737 - RNA, 31 nt, Synthetic Construct; identical to SEQ ID NO: 2442
  source 1..31: mol_type = other RNA

SEQ ID NO: 21738 - RNA, 34 nt, Synthetic Construct; identical to SEQ ID NO: 2553
  source 1..34: mol_type = other RNA

SEQ ID NO: 21739 - RNA, 21 nt, Synthetic Construct
  source 1..21: mol_type = other RNA
tcctgcactgagctgccccga

SEQ ID NO: 21740 - RNA, 21 nt, Synthetic Construct
  source 1..21: mol_type = other RNA
tcctgcactgagctgccccga

SEQ ID NO: 21741 - RNA, 32 nt, Synthetic Construct; identical to SEQ ID NO: 2296
  source 1..32: mol_type = other RNA

SEQ ID NO: 21742 - RNA, 18 nt, Synthetic Construct
  source 1..18: mol_type = other RNA
tcccaagggtatggctgt

SEQ ID NO: 21743 - RNA, 18 nt, Synthetic Construct
  source 1..18: mol_type = other RNA
tcccaagggtatggctgt

SEQ ID NO: 21744 - RNA, 22 nt, Synthetic Construct
  source 1..22: mol_type = other RNA
tgaggtagcaggttgtgtggtt

SEQ ID NO: 21745 - RNA, 16 nt, Synthetic Construct
  source 1..16: mol_type = other RNA
ccgcttttgtcaggga

SEQ ID NO: 21746 - RNA, 16 nt, Synthetic Construct
  source 1..16: mol_type = other RNA
ccgcttttgtcaggga

SEQ ID NO: 21747 - RNA, 35 nt, Synthetic Construct; identical to SEQ ID NO: 2402
  source 1..35: mol_type = other RNA

SEQ ID NO: 21748 - RNA, 35 nt, Synthetic Construct; identical to SEQ ID NO: 2402
  source 1..35: mol_type = other RNA

SEQ ID NO: 21749 - RNA, 34 nt, Synthetic Construct; identical to SEQ ID NO: 2186
  source 1..34: mol_type = other RNA

SEQ ID NO: 21750 - RNA, 26 nt, Synthetic Construct
  source 1..26: mol_type = other RNA
gcataagcgtgcttgactgcgagact

SEQ ID NO: 21751 - RNA, 15 nt, Synthetic Construct
  source 1..15: mol_type = other RNA
ccagaaacccggtcg

SEQ ID NO: 21752 - RNA, 15 nt, Synthetic Construct
  source 1..15: mol_type = other RNA
ccagaaacccggtcg

SEQ ID NO: 21753 - RNA, 17 nt, Synthetic Construct
  source 1..17: mol_type = other RNA
gaagttgaccgcctggg

SEQ ID NO: 21754 - RNA, 17 nt, Synthetic Construct
  source 1..17: mol_type = other RNA
gaagttgaccgcctggg

SEQ ID NO: 21755 - RNA, 21 nt, Synthetic Construct
  source 1..21: mol_type = other RNA
gtagcgaaattccttgtcggg

SEQ ID NO: 21756 - RNA, 21 nt, Synthetic Construct
  source 1..21: mol_type = other RNA
gtagcgaaattccttgtcggg

SEQ ID NO: 21757 - RNA, 25 nt, Synthetic Construct
  source 1..25: mol_type = other RNA
ttgaggatatgagatcgaggcgaca

SEQ ID NO: 21758 - RNA, 25 nt, Synthetic Construct
  source 1..25: mol_type = other RNA
ttgaggatatgagatcgaggcgaca

SEQ ID NO: 21759 - RNA, 18 nt, Synthetic Construct
  source 1..18: mol_type = other RNA
gaagttgaccgcctgggg

SEQ ID NO: 21760 - RNA, 18 nt, Synthetic Construct
  source 1..18: mol_type = other RNA
gaagttgaccgcctgggg

SEQ ID NO: 21761 - RNA, 15 nt, Synthetic Construct
  source 1..15: mol_type = other RNA
ggtgaaagcggggga

SEQ ID NO: 21762 - RNA, 15 nt, Synthetic Construct
  source 1..15: mol_type = other RNA
ggtgaaagcggggga

SEQ ID NO: 21763 - RNA, 31 nt, Synthetic Construct; identical to SEQ ID NO: 2427
  source 1..31: mol_type = other RNA

SEQ ID NO: 21764 - RNA, 15 nt, Synthetic Construct
  source 1..15: mol_type = other RNA
gcgtagatatgcgga

SEQ ID NO: 21765 - RNA, 15 nt, Synthetic Construct
  source 1..15: mol_type = other RNA
gcgtagatatgcgga

SEQ ID NO: 21766 - RNA, 15 nt, Synthetic Construct
  source 1..15: mol_type = other RNA
gggtgaaagcggggg

SEQ ID NO: 21767 - RNA, 22 nt, Synthetic Construct
  source 1..22: mol_type = other RNA
tcctgtactgagctgctccgag

SEQ ID NO: 21768 - RNA, 22 nt, Synthetic Construct
  source 1..22: mol_type = other RNA
tcctgtactgagctgctccgag

SEQ ID NO: 21769 - RNA, 28 nt, Synthetic Construct
  source 1..28: mol_type = other RNA
tcccacatggtctagcggttaggattcc

SEQ ID NO: 21770 - RNA, 28 nt, Synthetic Construct
  source 1..28: mol_type = other RNA
tcccacatggtctagcggttaggattcc

SEQ ID NO: 21771 - RNA, 17 nt, Synthetic Construct
  source 1..17: mol_type = other RNA
tcgctagtaatcgcgga

SEQ ID NO: 21772 - RNA, 23 nt, Synthetic Construct
  source 1..23: mol_type = other RNA
ccctgtactgagctgccccgagt

SEQ ID NO: 21773 - RNA, 18 nt, Synthetic Construct
  source 1..18: mol_type = other RNA
tgcgtagatatgcggagg

SEQ ID NO: 21774 - RNA, 23 nt, Synthetic Construct
  source 1..23: mol_type = other RNA
tccagtactgagctgccccgaga

SEQ ID NO: 21775 - RNA, 23 nt, Synthetic Construct
  source 1..23: mol_type = other RNA
tccagtactgagctgccccgaga

SEQ ID NO: 21776 - RNA, 21 nt, Synthetic Construct
  source 1..21: mol_type = other RNA
tgaggaagtaggttgtgtggt

SEQ ID NO: 21777 - RNA, 21 nt, Synthetic Construct
  source 1..21: mol_type = other RNA
tgaggaagtaggttgtgtggt

SEQ ID NO: 21778 - RNA, 39 nt, Synthetic Construct; identical to SEQ ID NO: 2398
  source 1..39: mol_type = other RNA

SEQ ID NO: 21779 - RNA, 17 nt, Synthetic Construct
  source 1..17: mol_type = other RNA
gggtctgtagctcagtc

SEQ ID NO: 21780 - RNA, 17 nt, Synthetic Construct
  source 1..17: mol_type = other RNA
gggtctgtagctcagtc

SEQ ID NO: 21781 - RNA, 16 nt, Synthetic Construct
  source 1..16: mol_type = other RNA
gtccacggccatacca

SEQ ID NO: 21782 - RNA, 16 nt, Synthetic Construct
  source 1..16: mol_type = other RNA
gtccacggccatacca

SEQ ID NO: 21783 - RNA, 27 nt, Synthetic Construct
  source 1..27: mol_type = other RNA
atagtctttgttcgattccgttgagta

SEQ ID NO: 21784 - RNA, 27 nt, Synthetic Construct
  source 1..27: mol_type = other RNA
atagtctttgttcgattccgttgagta

SEQ ID NO: 21785 - RNA, 35 nt, Synthetic Construct; identical to SEQ ID NO: 2402
  source 1..35: mol_type = other RNA

SEQ ID NO: 21786 - RNA, 35 nt, Synthetic Construct; identical to SEQ ID NO: 2402
  source 1..35: mol_type = other RNA

SEQ ID NO: 21787 - RNA, 16 nt, Synthetic Construct
  source 1..16: mol_type = other RNA
gagctgtggatagggg

SEQ ID NO: 21788 - RNA, 19 nt, Synthetic Construct
  source 1..19: mol_type = other RNA
cccttgtcattagttgcta

SEQ ID NO: 21789 - RNA, 21 nt, Synthetic Construct
  source 1..21: mol_type = other RNA
ggaatcgctagtaatcgcgga

SEQ ID NO: 21790 - RNA, 21 nt, Synthetic Construct
  source 1..21: mol_type = other RNA
ggaatcgctagtaatcgcgga

SEQ ID NO: 21791 - RNA, 20 nt, Synthetic Construct
  source 1..20: mol_type = other RNA
caatggccgggacagagggc

SEQ ID NO: 21792 - RNA, 44 nt, Synthetic Construct; identical to SEQ ID NO: 3447
  source 1..44: mol_type = other RNA

SEQ ID NO: 21793 - RNA, 22 nt, Synthetic Construct
  source 1..22: mol_type = other RNA
ctccctcgggagggcgcgcggg

SEQ ID NO: 21794 - RNA, 22 nt, Synthetic Construct
  source 1..22: mol_type = other RNA
ctccctcgggagggcgcgcggg

SEQ ID NO: 21795 - RNA, 21 nt, Synthetic Construct
  source 1..21: mol_type = other RNA
gtgggcgtttgaagtgaagtg

SEQ ID NO: 21796 - RNA, 21 nt, Synthetic Construct
  source 1..21: mol_type = other RNA
gtgggcgtttgaagtgaagtg

SEQ ID NO: 21797 - RNA, 23 nt, Synthetic Construct
  source 1..23: mol_type = other RNA
atatcggaacgtgcccagtcgtg

SEQ ID NO: 21798 - RNA, 34 nt, Synthetic Construct; identical to SEQ ID NO: 2019
  source 1..34: mol_type = other RNA

SEQ ID NO: 21799 - RNA, 22 nt, Synthetic Construct
  source 1..22: mol_type = other RNA
cggaatcgctagtaatcgcgga

SEQ ID NO: 21800 - RNA, 35 nt, Synthetic Construct; identical to SEQ ID NO: 757
  source 1..35: mol_type = other RNA

SEQ ID NO: 21801 - RNA, 35 nt, Synthetic Construct; identical to SEQ ID NO: 757
  source 1..35: mol_type = other RNA

SEQ ID NO: 21802 - RNA, 20 nt, Synthetic Construct
  source 1..20: mol_type = other RNA
tgaggtagtgggttgtgtgg

SEQ ID NO: 21803 - RNA, 20 nt, Synthetic Construct
  source 1..20: mol_type = other RNA
tgaggtagtgggttgtgtgg

SEQ ID NO: 21804 - RNA, 22 nt, Synthetic Construct
  source 1..22: mol_type = other RNA
tgtagtgtttcctactttatgg

SEQ ID NO: 21805 - RNA, 16 nt, Synthetic Construct
  source 1..16: mol_type = other RNA
ccatgccgcgtgcggg

SEQ ID NO: 21806 - RNA, 16 nt, Synthetic Construct
  source 1..16: mol_type = other RNA
ccatgccgcgtgcggg

SEQ ID NO: 21807 - RNA, 17 nt, Synthetic Construct
  source 1..17: mol_type = other RNA
gaagttgaccgcctggg

SEQ ID NO: 21808 - RNA, 41 nt, Synthetic Construct; identical to SEQ ID NO: 781
  source 1..41: mol_type = other RNA

SEQ ID NO: 21809 - RNA, 18 nt, Synthetic Construct
  source 1..18: mol_type = other RNA
gaagttgaccgcctgggg

SEQ ID NO: 21810 - RNA, 19 nt, Synthetic Construct
  source 1..19: mol_type = other RNA
ccagtaaacggcggccgta

SEQ ID NO: 21811 - RNA, 19 nt, Synthetic Construct
  source 1..19: mol_type = other RNA
ccagtaaacggcggccgta

SEQ ID NO: 21812 - RNA, 35 nt, Synthetic Construct; identical to SEQ ID NO: 2567
  source 1..35: mol_type = other RNA

SEQ ID NO: 21813 - RNA, 35 nt, Synthetic Construct; identical to SEQ ID NO: 2567
  source 1..35: mol_type = other RNA

SEQ ID NO: 21814 - RNA, 17 nt, Synthetic Construct
  source 1..17: mol_type = other RNA
gtgttcggaagattttc

SEQ ID NO: 21815 - RNA, 17 nt, Synthetic Construct
  source 1..17: mol_type = other RNA
gtgttcggaagattttc

SEQ ID NO: 21816 - RNA, 22 nt, Synthetic Construct
  source 1..22: mol_type = other RNA
tgaggtagtaggttgtgtagtt

SEQ ID NO: 21817 - RNA, 22 nt, Synthetic Construct
  source 1..22: mol_type = other RNA
tgaggtagtaggttgtgtagtt

SEQ ID NO: 21818 - RNA, 16 nt, Synthetic Construct
  source 1..16: mol_type = other RNA
gcctacggccatacca

SEQ ID NO: 21819 - RNA, 16 nt, Synthetic Construct
  source 1..16: mol_type = other RNA
gcctacggccatacca

SEQ ID NO: 21820 - RNA, 21 nt, Synthetic Construct
  source 1..21: mol_type = other RNA
gttggttcaagcgtgtagtcg

SEQ ID NO: 21821 - RNA, 21 nt, Synthetic Construct
  source 1..21: mol_type = other RNA
gttggttcaagcgtgtagtcg

SEQ ID NO: 21822 - RNA, 31 nt, Synthetic Construct; identical to SEQ ID NO: 2442
  source 1..31: mol_type = other RNA

SEQ ID NO: 21823 - RNA, 31 nt, Synthetic Construct; identical to SEQ ID NO: 2442
  source 1..31: mol_type = other RNA

SEQ ID NO: 21824 - RNA, 21 nt, Synthetic Construct
  source 1..21: mol_type = other RNA
tggagagtgacaatggtgttt

SEQ ID NO: 21825 - RNA, 21 nt, Synthetic Construct
  source 1..21: mol_type = other RNA
tggagagtgacaatggtgttt

SEQ ID NO: 21826 - RNA, 16 nt, Synthetic Construct
  source 1..16: mol_type = other RNA
gggtgaaagcggggga

SEQ ID NO: 21827 - RNA, 16 nt, Synthetic Construct
  source 1..16: mol_type = other RNA
gggtgaaagcggggga

SEQ ID NO: 21828 - RNA, 20 nt, Synthetic Construct
  source 1..20: mol_type = other RNA
caatggccgggacagagggc

SEQ ID NO: 21829 - RNA, 20 nt, Synthetic Construct
  source 1..20: mol_type = other RNA
caatggccgggacagagggc

SEQ ID NO: 21830 - RNA, 21 nt, Synthetic Construct
  source 1..21: mol_type = other RNA
agcgtgcttgactgcgagact

SEQ ID NO: 21831 - RNA, 21 nt, Synthetic Construct
  source 1..21: mol_type = other RNA
agcgtgcttgactgcgagact

SEQ ID NO: 21832 - RNA, 21 nt, Synthetic Construct
  source 1..21: mol_type = other RNA
tgaggcagtaggttgtgtggt

SEQ ID NO: 21833 - RNA, 21 nt, Synthetic Construct
  source 1..21: mol_type = other RNA
tgaggcagtaggttgtgtggt

SEQ ID NO: 21834 - RNA, 21 nt, Synthetic Construct
  source 1..21: mol_type = other RNA
cggtcccaagggtatggctgt

SEQ ID NO: 21835 - RNA, 21 nt, Synthetic Construct
  source 1..21: mol_type = other RNA
tgaggtagtaggttgtgtgga

SEQ ID NO: 21836 - RNA, 21 nt, Synthetic Construct
  source 1..21: mol_type = other RNA
tgaggtagtaggttgtgtgga

SEQ ID NO: 21837 - RNA, 16 nt, Synthetic Construct
  source 1..16: mol_type = other RNA
ccatgccgcgtgcggg

SEQ ID NO: 21838 - RNA, 16 nt, Synthetic Construct
  source 1..16: mol_type = other RNA
ccatgccgcgtgcggg

SEQ ID NO: 21839 - RNA, 21 nt, Synthetic Construct
  source 1..21: mol_type = other RNA
acagcaggacggtggccatgg

SEQ ID NO: 21840 - RNA, 21 nt, Synthetic Construct
  source 1..21: mol_type = other RNA
acagcaggacggtggccatgg

SEQ ID NO: 21841 - RNA, 19 nt, Synthetic Construct
  source 1..19: mol_type = other RNA
cgactcttagcggtggatc

SEQ ID NO: 21842 - RNA, 19 nt, Synthetic Construct
  source 1..19: mol_type = other RNA
cgactcttagcggtggatc

SEQ ID NO: 21843 - RNA, 22 nt, Synthetic Construct
  source 1..22: mol_type = other RNA
taggtagtttcctgttgttggg

SEQ ID NO: 21844 - RNA, 17 nt, Synthetic Construct
  source 1..17: mol_type = other RNA
cagtcaggatgttggct

SEQ ID NO: 21845 - RNA, 17 nt, Synthetic Construct
  source 1..17: mol_type = other RNA
cagtcaggatgttggct

SEQ ID NO: 21846 - RNA, 17 nt, Synthetic Construct
  source 1..17: mol_type = other RNA
tcccctggacctgtact

SEQ ID NO: 21847 - RNA, 17 nt, Synthetic Construct
  source 1..17: mol_type = other RNA
tcccctggacctgtact

SEQ ID NO: 21848 - RNA, 21 nt, Synthetic Construct
  source 1..21: mol_type = other RNA
cgcgacctcagatcagacgtg

SEQ ID NO: 21849 - RNA, 21 nt, Synthetic Construct
  source 1..21: mol_type = other RNA
cgcgacctcagatcagacgtg

SEQ ID NO: 21850 - RNA, 21 nt, Synthetic Construct
  source 1..21: mol_type = other RNA
tgaggtagtaggttgtgaggt

SEQ ID NO: 21851 - RNA, 21 nt, Synthetic Construct
  source 1..21: mol_type = other RNA
tgaggtagtaggttgtgaggt

SEQ ID NO: 21852 - RNA, 23 nt, Synthetic Construct
  source 1..23: mol_type = other RNA
tcctgtactgagccgccccgaga

SEQ ID NO: 21853 - RNA, 23 nt, Synthetic Construct
  source 1..23: mol_type = other RNA
tcctgtactgagccgccccgaga

SEQ ID NO: 21854 - RNA, 17 nt, Synthetic Construct
  source 1..17: mol_type = other RNA
cagtcaggatgttggct

SEQ ID NO: 21855 - RNA, 17 nt, Synthetic Construct
  source 1..17: mol_type = other RNA
cagtcaggatgttggct

SEQ ID NO: 21856 - RNA, 22 nt, Synthetic Construct
  source 1..22: mol_type = other RNA
tatcggaacgtgcccagtcgtg

SEQ ID NO: 21857 - RNA, 31 nt, Synthetic Construct; identical to SEQ ID NO: 2333
  source 1..31: mol_type = other RNA

SEQ ID NO: 21858 - RNA, 30 nt, Synthetic Construct; identical to SEQ ID NO: 2274
  source 1..30: mol_type = other RNA

SEQ ID NO: 21859 - RNA, 23 nt, Synthetic Construct
  source 1..23: mol_type = other RNA
tggtaatacggcgtacttagtgt

SEQ ID NO: 21860 - RNA, 23 nt, Synthetic Construct
  source 1..23: mol_type = other RNA
tggtaatacggcgtacttagtgt

SEQ ID NO: 21861 - RNA, 21 nt, Synthetic Construct
  source 1..21: mol_type = other RNA
tcctgtctgaatatgggggga

SEQ ID NO: 21862 - RNA, 21 nt, Synthetic Construct
  source 1..21: mol_type = other RNA
tcctgtctgaatatgggggga

SEQ ID NO: 21863 - RNA, 17 nt, Synthetic Construct
  source 1..17: mol_type = other RNA
gggtctgtagctcagtc

SEQ ID NO: 21864 - RNA, 17 nt, Synthetic Construct
  source 1..17: mol_type = other RNA
gggtctgtagctcagtc

SEQ ID NO: 21865 - RNA, 32 nt, Synthetic Construct; identical to SEQ ID NO: 4710
  source 1..32: mol_type = other RNA

SEQ ID NO: 21866 - RNA, 32 nt, Synthetic Construct; identical to SEQ ID NO: 4710
  source 1..32: mol_type = other RNA

SEQ ID NO: 21867 - RNA, 23 nt, Synthetic Construct
  source 1..23: mol_type = other RNA
tggtaatacgacgtacttagtgc

SEQ ID NO: 21868 - RNA, 23 nt, Synthetic Construct
  source 1..23: mol_type = other RNA
tggtaatacgacgtacttagtgc

SEQ ID NO: 21869 - RNA, 32 nt, Synthetic Construct; identical to SEQ ID NO: 2318
  source 1..32: mol_type = other RNA

SEQ ID NO: 21870 - RNA, 32 nt, Synthetic Construct; identical to SEQ ID NO: 2318
  source 1..32: mol_type = other RNA

SEQ ID NO: 21871 - RNA, 23 nt, Synthetic Construct
  source 1..23: mol_type = other RNA
tggtaatacgacgcacttagtgt

SEQ ID NO: 21872 - RNA, 23 nt, Synthetic Construct
  source 1..23: mol_type = other RNA
tggtaatacgacgcacttagtgt

SEQ ID NO: 21873 - RNA, 22 nt, Synthetic Construct
  source 1..22: mol_type = other RNA
tcctgtaccgagctgccccgag

SEQ ID NO: 21874 - RNA, 22 nt, Synthetic Construct
  source 1..22: mol_type = other RNA
tcctgtaccgagctgccccgag

SEQ ID NO: 21875 - RNA, 22 nt, Synthetic Construct
  source 1..22: mol_type = other RNA
ctttgttcgattccgttgagta

SEQ ID NO: 21876 - RNA, 22 nt, Synthetic Construct
  source 1..22: mol_type = other RNA
ctttgttcgattccgttgagta

SEQ ID NO: 21877 - RNA, 32 nt, Synthetic Construct; identical to SEQ ID NO: 2467
  source 1..32: mol_type = other RNA

SEQ ID NO: 21878 - RNA, 32 nt, Synthetic Construct; identical to SEQ ID NO: 2467
  source 1..32: mol_type = other RNA

SEQ ID NO: 21879 - RNA, 20 nt, Synthetic Construct
  source 1..20: mol_type = other RNA
tgaggaagtaggttgtatag

SEQ ID NO: 21880 - RNA, 20 nt, Synthetic Construct
  source 1..20: mol_type = other RNA
tgaggaagtaggttgtatag

SEQ ID NO: 21881 - RNA, 28 nt, Synthetic Construct
  source 1..28: mol_type = other RNA
ggatttccccttggggttgtaggaccac

SEQ ID NO: 21882 - RNA, 28 nt, Synthetic Construct
  source 1..28: mol_type = other RNA
ggatttccccttggggttgtaggaccac

SEQ ID NO: 21883 - RNA, 17 nt, Synthetic Construct
  source 1..17: mol_type = other RNA
cgatctgtagctggtct

SEQ ID NO: 21884 - RNA, 31 nt, Synthetic Construct; identical to SEQ ID NO: 758
  source 1..31: mol_type = other RNA

SEQ ID NO: 21885 - RNA, 31 nt, Synthetic Construct; identical to SEQ ID NO: 758
  source 1..31: mol_type = other RNA

SEQ ID NO: 21886 - RNA, 33 nt, Synthetic Construct; identical to SEQ ID NO: 2479
  source 1..33: mol_type = other RNA

SEQ ID NO: 21887 - RNA, 20 nt, Synthetic Construct
  source 1..20: mol_type = other RNA
tgaggtagtaggttgtacag

SEQ ID NO: 21888 - RNA, 20 nt, Synthetic Construct
  source 1..20: mol_type = other RNA
tgaggtagtaggttgtacag

SEQ ID NO: 21889 - RNA, 30 nt, Synthetic Construct; identical to SEQ ID NO: 751
  source 1..30: mol_type = other RNA

SEQ ID NO: 21890 - RNA, 30 nt, Synthetic Construct; identical to SEQ ID NO: 751
  source 1..30: mol_type = other RNA

SEQ ID NO: 21891 - RNA, 21 nt, Synthetic Construct
  source 1..21: mol_type = other RNA
agcgtgcttgactgcgagact

SEQ ID NO: 21892 - RNA, 21 nt, Synthetic Construct
  source 1..21: mol_type = other RNA
agcgtgcttgactgcgagact

SEQ ID NO: 21893 - RNA, 21 nt, Synthetic Construct
  source 1..21: mol_type = other RNA
cggtcccaagggtatggctgt

SEQ ID NO: 21894 - RNA, 23 nt, Synthetic Construct
  source 1..23: mol_type = other RNA
tggtaatacgacgtacttagtat

SEQ ID NO: 21895 - RNA, 23 nt, Synthetic Construct
  source 1..23: mol_type = other RNA
tggtaatacgacgtacttagtat

SEQ ID NO: 21896 - RNA, 16 nt, Synthetic Construct
  source 1..16: mol_type = other RNA
gggtctgtagctcagt

SEQ ID NO: 21897 - RNA, 16 nt, Synthetic Construct
  source 1..16: mol_type = other RNA
gggtctgtagctcagt

SEQ ID NO: 21898 - RNA, 22 nt, Synthetic Construct
  source 1..22: mol_type = other RNA
cggaggagttcgaaggtacgct

SEQ ID NO: 21899 - RNA, 21 nt, Synthetic Construct
  source 1..21: mol_type = other RNA
atcacattgccagggatttcc

SEQ ID NO: 21900 - RNA, 30 nt, Synthetic Construct; identical to SEQ ID NO: 2308
  source 1..30: mol_type = other RNA

SEQ ID NO: 21901 - RNA, 22 nt, Synthetic Construct
  source 1..22: mol_type = other RNA
cgaggtagtaggttgtgtggtt

SEQ ID NO: 21902 - RNA, 22 nt, Synthetic Construct
  source 1..22: mol_type = other RNA
gagagcctggacacaggtgctg

SEQ ID NO: 21903 - RNA, 22 nt, Synthetic Construct
  source 1..22: mol_type = other RNA
gagagcctggacacaggtgctg

SEQ ID NO: 21904 - RNA, 17 nt, Synthetic Construct
  source 1..17: mol_type = other RNA
cctcgcgcgattggagc

SEQ ID NO: 21905 - RNA, 17 nt, Synthetic Construct
  source 1..17: mol_type = other RNA
cctcgcgcgattggagc

SEQ ID NO: 21906 - RNA, 15 nt, Synthetic Construct
  source 1..15: mol_type = other RNA
gtcgacgtatagggt

SEQ ID NO: 21907 - RNA, 15 nt, Synthetic Construct
  source 1..15: mol_type = other RNA
gtcgacgtatagggt

SEQ ID NO: 21908 - RNA, 15 nt, Synthetic Construct
  source 1..15: mol_type = other RNA
gcgtagatatgcgga

SEQ ID NO: 21909 - RNA, 16 nt, Synthetic Construct
  source 1..16: mol_type = other RNA
ccggaggaaggtgggg

SEQ ID NO: 21910 - RNA, 27 nt, Synthetic Construct
  source 1..27: mol_type = other RNA
gactcttagcggtggatcactcggctc

SEQ ID NO: 21911 - RNA, 27 nt, Synthetic Construct
  source 1..27: mol_type = other RNA
gactcttagcggtggatcactcggctc

SEQ ID NO: 21912 - RNA, 17 nt, Synthetic Construct
  source 1..17: mol_type = other RNA
gccatgccgcgtgcggg

SEQ ID NO: 21913 - RNA, 17 nt, Synthetic Construct
  source 1..17: mol_type = other RNA
gccatgccgcgtgcggg

SEQ ID NO: 21914 - RNA, 18 nt, Synthetic Construct
  source 1..18: mol_type = other RNA
ggccgtcgtcagctcgtg

SEQ ID NO: 21915 - RNA, 18 nt, Synthetic Construct
  source 1..18: mol_type = other RNA
ggccgtcgtcagctcgtg

SEQ ID NO: 21916 - RNA, 18 nt, Synthetic Construct
  source 1..18: mol_type = other RNA
cagcactctgcaaagacg

SEQ ID NO: 21917 - RNA, 31 nt, Synthetic Construct; identical to SEQ ID NO: 2278
  source 1..31: mol_type = other RNA

SEQ ID NO: 21918 - RNA, 16 nt, Synthetic Construct
  source 1..16: mol_type = other RNA
agttgaccgcctgggg

SEQ ID NO: 21919 - RNA, 16 nt, Synthetic Construct
  source 1..16: mol_type = other RNA
agttgaccgcctgggg

SEQ ID NO: 21920 - RNA, 32 nt, Synthetic Construct; identical to SEQ ID NO: 2052
  source 1..32: mol_type = other RNA

SEQ ID NO: 21921 - RNA, 32 nt, Synthetic Construct; identical to SEQ ID NO: 2052
  source 1..32: mol_type = other RNA

SEQ ID NO: 21922 - RNA, 15 nt, Synthetic Construct
  source 1..15: mol_type = other RNA
ttccgaaagtagtgg

SEQ ID NO: 21923 - RNA, 15 nt, Synthetic Construct
  source 1..15: mol_type = other RNA
ttccgaaagtagtgg

SEQ ID NO: 21924 - RNA, 34 nt, Synthetic Construct; identical to SEQ ID NO: 2529
  source 1..34: mol_type = other RNA

SEQ ID NO: 21925 - RNA, 18 nt, Synthetic Construct
  source 1..18: mol_type = other RNA
gaagttgaccgcctgggg

SEQ ID NO: 21926 - RNA, 18 nt, Synthetic Construct
  source 1..18: mol_type = other RNA
gaagttgaccgcctgggg

SEQ ID NO: 21927 - RNA, 30 nt, Synthetic Construct; identical to SEQ ID NO: 3933
  source 1..30: mol_type = other RNA

SEQ ID NO: 21928 - RNA, 30 nt, Synthetic Construct; identical to SEQ ID NO: 3933
  source 1..30: mol_type = other RNA

SEQ ID NO: 21929 - RNA, 23 nt, Synthetic Construct
  source 1..23: mol_type = other RNA
tggcaatacgacgtacttagtgt

SEQ ID NO: 21930 - RNA, 23 nt, Synthetic Construct
  source 1..23: mol_type = other RNA
tggcaatacgacgtacttagtgt

SEQ ID NO: 21931 - RNA, 24 nt, Synthetic Construct
  source 1..24: mol_type = other RNA
tgtaaacatccccgactggaagcc

SEQ ID NO: 21932 - RNA, 23 nt, Synthetic Construct
  source 1..23: mol_type = other RNA
tgaggggcagagggcgagacttt

SEQ ID NO: 21933 - RNA, 26 nt, Synthetic Construct
  source 1..26: mol_type = other RNA
atgcgagagtaggacgttgccaggtt

SEQ ID NO: 21934 - RNA, 26 nt, Synthetic Construct
  source 1..26: mol_type = other RNA
atgcgagagtaggacgttgccaggtt

SEQ ID NO: 21935 - RNA, 35 nt, Synthetic Construct; identical to SEQ ID NO: 2567
  source 1..35: mol_type = other RNA

SEQ ID NO: 21936 - RNA, 35 nt, Synthetic Construct; identical to SEQ ID NO: 2567
  source 1..35: mol_type = other RNA

SEQ ID NO: 21937 - RNA, 23 nt, Synthetic Construct
  source 1..23: mol_type = other RNA
ccctgtactgagctgccccgagt

SEQ ID NO: 21938 - RNA, 23 nt, Synthetic Construct
  source 1..23: mol_type = other RNA
ccctgtactgagctgccccgagt

SEQ ID NO: 21939 - RNA, 15 nt, Synthetic Construct
  source 1..15: mol_type = other RNA
ttccgaaagtagtgg

SEQ ID NO: 21940 - RNA, 16 nt, Synthetic Construct
  source 1..16: mol_type = other RNA
ccgcttttgtcaggga

SEQ ID NO: 21941 - RNA, 16 nt, Synthetic Construct
  source 1..16: mol_type = other RNA
ccgcttttgtcaggga

SEQ ID NO: 21942 - RNA, 31 nt, Synthetic Construct; identical to SEQ ID NO: 1627
  source 1..31: mol_type = other RNA

SEQ ID NO: 21943 - RNA, 31 nt, Synthetic Construct; identical to SEQ ID NO: 1627
  source 1..31: mol_type = other RNA

SEQ ID NO: 21944 - RNA, 23 nt, Synthetic Construct
  source 1..23: mol_type = other RNA
tcctgtactgagccgccccgagt

SEQ ID NO: 21945 - RNA, 18 nt, Synthetic Construct
  source 1..18: mol_type = other RNA
gcgccgatgatagtgcgg

SEQ ID NO: 21946 - RNA, 42 nt, Synthetic Construct; identical to SEQ ID NO: 748
  source 1..42: mol_type = other RNA

SEQ ID NO: 21947 - RNA, 16 nt, Synthetic Construct
  source 1..16: mol_type = other RNA
tccgaaccgactagtg

SEQ ID NO: 21948 - RNA, 16 nt, Synthetic Construct
  source 1..16: mol_type = other RNA
tccgaaccgactagtg

SEQ ID NO: 21949 - RNA, 23 nt, Synthetic Construct
  source 1..23: mol_type = other RNA
tggtaatacgacgtacttggtgt

SEQ ID NO: 21950 - RNA, 23 nt, Synthetic Construct
  source 1..23: mol_type = other RNA
tggtaatacgacgtacttggtgt

SEQ ID NO: 21951 - RNA, 23 nt, Synthetic Construct
  source 1..23: mol_type = other RNA
tggtaatacgacgtacttggtgt

SEQ ID NO: 21952 - RNA, 23 nt, Synthetic Construct
  source 1..23: mol_type = other RNA
tggtaatacgacgtacttggtgt

SEQ ID NO: 21953 - RNA, 21 nt, Synthetic Construct
  source 1..21: mol_type = other RNA
taggtagtttcctgttgttgg

SEQ ID NO: 21954 - RNA, 24 nt, Synthetic Construct
  source 1..24: mol_type = other RNA
gcagctaataccgcatacgacctg

SEQ ID NO: 21955 - RNA, 24 nt, Synthetic Construct
  source 1..24: mol_type = other RNA
gcagctaataccgcatacgacctg

SEQ ID NO: 21956 - RNA, 27 nt, Synthetic Construct
  source 1..27: mol_type = other RNA
agagcagctaataccgcatacgacctg

SEQ ID NO: 21957 - RNA, 16 nt, Synthetic Construct
  source 1..16: mol_type = other RNA
atctacggccatacca

SEQ ID NO: 21958 - RNA, 16 nt, Synthetic Construct
  source 1..16: mol_type = other RNA
atctacggccatacca

SEQ ID NO: 21959 - RNA, 21 nt, Synthetic Construct
  source 1..21: mol_type = other RNA
tgaggtagtaggttgtatggt

SEQ ID NO: 21960 - RNA, 21 nt, Synthetic Construct
  source 1..21: mol_type = other RNA
tgaggtagtaggttgtatggt

SEQ ID NO: 21961 - RNA, 16 nt, Synthetic Construct
  source 1..16: mol_type = other RNA
gatttgggagtgctcg

SEQ ID NO: 21962 - RNA, 16 nt, Synthetic Construct
  source 1..16: mol_type = other RNA
gatttgggagtgctcg

SEQ ID NO: 21963 - RNA, 21 nt, Synthetic Construct
  source 1..21: mol_type = other RNA
gctttgatccggagatttccg

SEQ ID NO: 21964 - RNA, 21 nt, Synthetic Construct
  source 1..21: mol_type = other RNA
gctttgatccggagatttccg

SEQ ID NO: 21965 - RNA, 24 nt, Synthetic Construct
  source 1..24: mol_type = other RNA
cggagaaggttagctcagccaact

SEQ ID NO: 21966 - RNA, 24 nt, Synthetic Construct
  source 1..24: mol_type = other RNA
cggagaaggttagctcagccaact

SEQ ID NO: 21967 - RNA, 30 nt, Synthetic Construct; identical to SEQ ID NO: 1958
  source 1..30: mol_type = other RNA

SEQ ID NO: 21968 - RNA, 30 nt, Synthetic Construct; identical to SEQ ID NO: 1958
  source 1..30: mol_type = other RNA

SEQ ID NO: 21969 - RNA, 16 nt, Synthetic Construct
  source 1..16: mol_type = other RNA
tgcgtagatatgcgga

SEQ ID NO: 21970 - RNA, 21 nt, Synthetic Construct
  source 1..21: mol_type = other RNA
acagcaggacggtggccatgg

SEQ ID NO: 21971 - RNA, 21 nt, Synthetic Construct
  source 1..21: mol_type = other RNA
acagcaggacggtggccatgg

SEQ ID NO: 21972 - RNA, 32 nt, Synthetic Construct; identical to SEQ ID NO: 3713
  source 1..32: mol_type = other RNA

SEQ ID NO: 21973 - RNA, 32 nt, Synthetic Construct; identical to SEQ ID NO: 3713
  source 1..32: mol_type = other RNA

SEQ ID NO: 21974 - RNA, 36 nt, Synthetic Construct; identical to SEQ ID NO: 2344
  source 1..36: mol_type = other RNA

SEQ ID NO: 21975 - RNA, 16 nt, Synthetic Construct
  source 1..16: mol_type = other RNA
ccgcttttgtcaggga

SEQ ID NO: 21976 - RNA, 16 nt, Synthetic Construct
  source 1..16: mol_type = other RNA
ccgcttttgtcaggga

SEQ ID NO: 21977 - RNA, 22 nt, Synthetic Construct
  source 1..22: mol_type = other RNA
tcggatccgtctgagcttggct

SEQ ID NO: 21978 - RNA, 33 nt, Synthetic Construct; identical to SEQ ID NO: 10232
  source 1..33: mol_type = other RNA

SEQ ID NO: 21979 - RNA, 33 nt, Synthetic Construct; identical to SEQ ID NO: 10232
  source 1..33: mol_type = other RNA

SEQ ID NO: 21980 - RNA, 25 nt, Synthetic Construct
  source 1..25: mol_type = other RNA
ctgaggatatgagatcgagacgaca

SEQ ID NO: 21981 - RNA, 25 nt, Synthetic Construct
  source 1..25: mol_type = other RNA
ctgaggatatgagatcgagacgaca

SEQ ID NO: 21982 - RNA, 23 nt, Synthetic Construct
  source 1..23: mol_type = other RNA
tggtaatgcgacgtacttagtgt

SEQ ID NO: 21983 - RNA, 23 nt, Synthetic Construct
  source 1..23: mol_type = other RNA
tggtaatgcgacgtacttagtgt

SEQ ID NO: 21984 - RNA, 15 nt, Synthetic Construct
  source 1..15: mol_type = other RNA
catgccgcgtgcggg

SEQ ID NO: 21985 - RNA, 15 nt, Synthetic Construct
  source 1..15: mol_type = other RNA
catgccgcgtgcggg

SEQ ID NO: 21986 - RNA, 33 nt, Synthetic Construct; identical to SEQ ID NO: 2638
  source 1..33: mol_type = other RNA

SEQ ID NO: 21987 - RNA, 20 nt, Synthetic Construct
  source 1..20: mol_type = other RNA
tggggtagtaggttgtatag

SEQ ID NO: 21988 - RNA, 20 nt, Synthetic Construct
  source 1..20: mol_type = other RNA
tggggtagtaggttgtatag

SEQ ID NO: 21989 - RNA, 35 nt, Synthetic Construct; identical to SEQ ID NO: 2548
  source 1..35: mol_type = other RNA

SEQ ID NO: 21990 - RNA, 37 nt, Synthetic Construct; identical to SEQ ID NO: 2447
  source 1..37: mol_type = other RNA

SEQ ID NO: 21991 - RNA, 37 nt, Synthetic Construct; identical to SEQ ID NO: 2447
  source 1..37: mol_type = other RNA

SEQ ID NO: 21992 - RNA, 18 nt, Synthetic Construct
  source 1..18: mol_type = other RNA
cgactcttagcggtggat

SEQ ID NO: 21993 - RNA, 18 nt, Synthetic Construct
  source 1..18: mol_type = other RNA
cgactcttagcggtggat

SEQ ID NO: 21994 - RNA, 16 nt, Synthetic Construct
  source 1..16: mol_type = other RNA
ggccgtcgtcagctcg

SEQ ID NO: 21995 - RNA, 19 nt, Synthetic Construct
  source 1..19: mol_type = other RNA
tgtcaactggttgttggga

SEQ ID NO: 21996 - RNA, 17 nt, Synthetic Construct
  source 1..17: mol_type = other RNA
tggccgtcgtcagctcg

SEQ ID NO: 21997 - RNA, 17 nt, Synthetic Construct
  source 1..17: mol_type = other RNA
tggccgtcgtcagctcg

SEQ ID NO: 21998 - RNA, 15 nt, Synthetic Construct
  source 1..15: mol_type = other RNA
cctcgcgcgattgga

SEQ ID NO: 21999 - RNA, 15 nt, Synthetic Construct
  source 1..15: mol_type = other RNA
gagctgtggataggg

SEQ ID NO: 22000 - RNA, 21 nt, Synthetic Construct
  source 1..21: mol_type = other RNA
tgaggtagtaggttgtgaggt

SEQ ID NO: 22001 - RNA, 21 nt, Synthetic Construct
  source 1..21: mol_type = other RNA
tgaggtagtaggttgtgaggt

SEQ ID NO: 22002 - RNA, 28 nt, Synthetic Construct
  source 1..28: mol_type = other RNA
gctttgatccggagatttccgaatgggg

SEQ ID NO: 22003 - RNA, 31 nt, Synthetic Construct; identical to SEQ ID NO: 2295
  source 1..31: mol_type = other RNA

SEQ ID NO: 22004 - RNA, 32 nt, Synthetic Construct; identical to SEQ ID NO: 4734
  source 1..32: mol_type = other RNA

SEQ ID NO: 22005 - RNA, 32 nt, Synthetic Construct; identical to SEQ ID NO: 4734
  source 1..32: mol_type = other RNA

SEQ ID NO: 22006 - RNA, 23 nt, Synthetic Construct
  source 1..23: mol_type = other RNA
gtaaacatccttgactggaagct

SEQ ID NO: 22007 - RNA, 23 nt, Synthetic Construct
  source 1..23: mol_type = other RNA
gtaaacatccttgactggaagct

SEQ ID NO: 22008 - RNA, 32 nt, Synthetic Construct; identical to SEQ ID NO: 2798
  source 1..32: mol_type = other RNA

SEQ ID NO: 22009 - RNA, 36 nt, Synthetic Construct; identical to SEQ ID NO: 2478
  source 1..36: mol_type = other RNA

SEQ ID NO: 22010 - RNA, 36 nt, Synthetic Construct; identical to SEQ ID NO: 2478
  source 1..36: mol_type = other RNA

SEQ ID NO: 22011 - RNA, 35 nt, Synthetic Construct; identical to SEQ ID NO: 2762
  source 1..35: mol_type = other RNA

SEQ ID NO: 22012 - RNA, 20 nt, Synthetic Construct
  source 1..20: mol_type = other RNA
gaatcgctagtaatcgcgga

SEQ ID NO: 22013 - RNA, 20 nt, Synthetic Construct
  source 1..20: mol_type = other RNA
gaatcgctagtaatcgcgga

SEQ ID NO: 22014 - RNA, 22 nt, Synthetic Construct
  source 1..22: mol_type = other RNA
cggaatcgctagtaatcgcgga

SEQ ID NO: 22015 - RNA, 22 nt, Synthetic Construct
  source 1..22: mol_type = other RNA
cggaatcgctagtaatcgcgga

SEQ ID NO: 22016 - RNA, 16 nt, Synthetic Construct
  source 1..16: mol_type = other RNA
gctattgacgaccgta

SEQ ID NO: 22017 - RNA, 16 nt, Synthetic Construct
  source 1..16: mol_type = other RNA
gctattgacgaccgta

SEQ ID NO: 22018 - RNA, 23 nt, Synthetic Construct
  source 1..23: mol_type = other RNA
tggtaacacgacgtacttagtgt

SEQ ID NO: 22019 - RNA, 23 nt, Synthetic Construct
  source 1..23: mol_type = other RNA
tggtaacacgacgtacttagtgt

SEQ ID NO: 22020 - RNA, 21 nt, Synthetic Construct
  source 1..21: mol_type = other RNA
tgaggggcagagggcgagact

SEQ ID NO: 22021 - RNA, 21 nt, Synthetic Construct
  source 1..21: mol_type = other RNA
tgaggggcagagggcgagact

SEQ ID NO: 22022 - RNA, 35 nt, Synthetic Construct; identical to SEQ ID NO: 2069
  source 1..35: mol_type = other RNA

SEQ ID NO: 22023 - RNA, 35 nt, Synthetic Construct; identical to SEQ ID NO: 2069
  source 1..35: mol_type = other RNA

SEQ ID NO: 22024 - RNA, 24 nt, Synthetic Construct
  source 1..24: mol_type = other RNA
tgtaaacatccctgactggaagct

SEQ ID NO: 22025 - RNA, 37 nt, Synthetic Construct; identical to SEQ ID NO: 2607
  source 1..37: mol_type = other RNA

SEQ ID NO: 22026 - RNA, 37 nt, Synthetic Construct; identical to SEQ ID NO: 2607
  source 1..37: mol_type = other RNA

SEQ ID NO: 22027 - RNA, 44 nt, Synthetic Construct; identical to SEQ ID NO: 5536
  source 1..44: mol_type = other RNA

SEQ ID NO: 22028 - RNA, 44 nt, Synthetic Construct; identical to SEQ ID NO: 5536
  source 1..44: mol_type = other RNA

SEQ ID NO: 22029 - RNA, 39 nt, Synthetic Construct; identical to SEQ ID NO: 10211
  source 1..39: mol_type = other RNA

SEQ ID NO: 22030 - RNA, 39 nt, Synthetic Construct; identical to SEQ ID NO: 10211
  source 1..39: mol_type = other RNA

SEQ ID NO: 22031 - RNA, 22 nt, Synthetic Construct
  source 1..22: mol_type = other RNA
tcctgtactgagttgccccgag

SEQ ID NO: 22032 - RNA, 22 nt, Synthetic Construct
  source 1..22: mol_type = other RNA
tcctgtactgagttgccccgag

SEQ ID NO: 22033 - RNA, 30 nt, Synthetic Construct; identical to SEQ ID NO: 768
  source 1..30: mol_type = other RNA

SEQ ID NO: 22034 - RNA, 30 nt, Synthetic Construct; identical to SEQ ID NO: 768
  source 1..30: mol_type = other RNA

SEQ ID NO: 22035 - RNA, 36 nt, Synthetic Construct; identical to SEQ ID NO: 2444
  source 1..36: mol_type = other RNA

SEQ ID NO: 22036 - RNA, 22 nt, Synthetic Construct
  source 1..22: mol_type = other RNA
cccataaagtagaaagcactac

SEQ ID NO: 22037 - RNA, 22 nt, Synthetic Construct
  source 1..22: mol_type = other RNA
cccataaagtagaaagcactac

SEQ ID NO: 22038 - RNA, 22 nt, Synthetic Construct
  source 1..22: mol_type = other RNA
tgaagtagtaggttgtgtggtt

SEQ ID NO: 22039 - RNA, 15 nt, Synthetic Construct
  source 1..15: mol_type = other RNA
gggtgaaagcggggg

SEQ ID NO: 22040 - RNA, 37 nt, Synthetic Construct; identical to SEQ ID NO: 5125
  source 1..37: mol_type = other RNA

SEQ ID NO: 22041 - RNA, 37 nt, Synthetic Construct; identical to SEQ ID NO: 5125
  source 1..37: mol_type = other RNA

SEQ ID NO: 22042 - RNA, 23 nt, Synthetic Construct
  source 1..23: mol_type = other RNA
ggcggttatgcaagacagaggtg

SEQ ID NO: 22043 - RNA, 23 nt, Synthetic Construct
  source 1..23: mol_type = other RNA
ggcggttatgcaagacagaggtg

SEQ ID NO: 22044 - RNA, 22 nt, Synthetic Construct
  source 1..22: mol_type = other RNA
tcctgtactgaactgccccgag

SEQ ID NO: 22045 - RNA, 22 nt, Synthetic Construct
  source 1..22: mol_type = other RNA
tcctgtactgaactgccccgag

SEQ ID NO: 22046 - RNA, 15 nt, Synthetic Construct
  source 1..15: mol_type = other RNA
gttgaccgcctgggg

SEQ ID NO: 22047 - RNA, 21 nt, Synthetic Construct
  source 1..21: mol_type = other RNA
tggagtgtgacaatggtgttc

SEQ ID NO: 22048 - RNA, 21 nt, Synthetic Construct
  source 1..21: mol_type = other RNA
tggagtgtgacaatggtgttc

SEQ ID NO: 22049 - RNA, 31 nt, Synthetic Construct; identical to SEQ ID NO: 2295
  source 1..31: mol_type = other RNA

SEQ ID NO: 22050 - RNA, 36 nt, Synthetic Construct; identical to SEQ ID NO: 2520
  source 1..36: mol_type = other RNA

SEQ ID NO: 22051 - RNA, 39 nt, Synthetic Construct; identical to SEQ ID NO: 2398
  source 1..39: mol_type = other RNA

SEQ ID NO: 22052 - RNA, 39 nt, Synthetic Construct; identical to SEQ ID NO: 2398
  source 1..39: mol_type = other RNA

SEQ ID NO: 22053 - RNA, 22 nt, Synthetic Construct
  source 1..22: mol_type = other RNA
tgttggttcaagcgtgtagtcg

SEQ ID NO: 22054 - RNA, 35 nt, Synthetic Construct; identical to SEQ ID NO: 2514
  source 1..35: mol_type = other RNA

SEQ ID NO: 22055 - RNA, 31 nt, Synthetic Construct; identical to SEQ ID NO: 2412
  source 1..31: mol_type = other RNA

SEQ ID NO: 22056 - RNA, 31 nt, Synthetic Construct; identical to SEQ ID NO: 1627
  source 1..31: mol_type = other RNA

SEQ ID NO: 22057 - RNA, 31 nt, Synthetic Construct; identical to SEQ ID NO: 1627
  source 1..31: mol_type = other RNA

SEQ ID NO: 22058 - RNA, 22 nt, Synthetic Construct
  source 1..22: mol_type = other RNA
ttctgtactgagctgccccgag

SEQ ID NO: 22059 - RNA, 22 nt, Synthetic Construct
  source 1..22: mol_type = other RNA
cattgcacttgtcccggcctgt

SEQ ID NO: 22060 - RNA, 37 nt, Synthetic Construct; identical to SEQ ID NO: 4277
  source 1..37: mol_type = other RNA

SEQ ID NO: 22061 - RNA, 37 nt, Synthetic Construct; identical to SEQ ID NO: 4277
  source 1..37: mol_type = other RNA

SEQ ID NO: 22062 - RNA, 31 nt, Synthetic Construct; identical to SEQ ID NO: 2215
  source 1..31: mol_type = other RNA

SEQ ID NO: 22063 - RNA, 24 nt, Synthetic Construct
  source 1..24: mol_type = other RNA
gtctttgttcgattccgttgagta

SEQ ID NO: 22064 - RNA, 24 nt, Synthetic Construct
  source 1..24: mol_type = other RNA
gtctttgttcgattccgttgagta

SEQ ID NO: 22065 - RNA, 19 nt, Synthetic Construct
  source 1..19: mol_type = other RNA
agtcgacgtatagggtgtg

SEQ ID NO: 22066 - RNA, 15 nt, Synthetic Construct
  source 1..15: mol_type = other RNA
gttgaccgcctgggg

SEQ ID NO: 22067 - RNA, 15 nt, Synthetic Construct
  source 1..15: mol_type = other RNA
gttgaccgcctgggg

SEQ ID NO: 22068 - RNA, 37 nt, Synthetic Construct; identical to SEQ ID NO: 2607
  source 1..37: mol_type = other RNA

SEQ ID NO: 22069 - RNA, 21 nt, Synthetic Construct
  source 1..21: mol_type = other RNA
tcctgaactgagctgccccga

SEQ ID NO: 22070 - RNA, 21 nt, Synthetic Construct
  source 1..21: mol_type = other RNA
tcctgaactgagctgccccga

SEQ ID NO: 22071 - RNA, 18 nt, Synthetic Construct
  source 1..18: mol_type = other RNA
gtcgacgtatagggtgtg

SEQ ID NO: 22072 - RNA, 23 nt, Synthetic Construct
  source 1..23: mol_type = other RNA
tagtaatacgacgtacttagtgt

SEQ ID NO: 22073 - RNA, 27 nt, Synthetic Construct
  source 1..27: mol_type = other RNA
gatttccccttggggttgtaggaccac

SEQ ID NO: 22074 - RNA, 27 nt, Synthetic Construct
  source 1..27: mol_type = other RNA
gatttccccttggggttgtaggaccac

SEQ ID NO: 22075 - RNA, 16 nt, Synthetic Construct
  source 1..16: mol_type = other RNA
gcggtggatgatgtgg

SEQ ID NO: 22076 - RNA, 32 nt, Synthetic Construct; identical to SEQ ID NO: 2798
  source 1..32: mol_type = other RNA

SEQ ID NO: 22077 - RNA, 32 nt, Synthetic Construct; identical to SEQ ID NO: 2798
  source 1..32: mol_type = other RNA

SEQ ID NO: 22078 - RNA, 30 nt, Synthetic Construct; identical to SEQ ID NO: 3933
  source 1..30: mol_type = other RNA

SEQ ID NO: 22079 - RNA, 24 nt, Synthetic Construct
  source 1..24: mol_type = other RNA
tgtaaacatccccgactggaagtt

SEQ ID NO: 22080 - RNA, 32 nt, Synthetic Construct; identical to SEQ ID NO: 2582
  source 1..32: mol_type = other RNA

SEQ ID NO: 22081 - RNA, 26 nt, Synthetic Construct
  source 1..26: mol_type = other RNA
gagcagctaataccgcatacgacctg

SEQ ID NO: 22082 - RNA, 23 nt, Synthetic Construct
  source 1..23: mol_type = other RNA
tgaggggcagagagcgagacttt

SEQ ID NO: 22083 - RNA, 32 nt, Synthetic Construct; identical to SEQ ID NO: 4710
  source 1..32: mol_type = other RNA

SEQ ID NO: 22084 - RNA, 30 nt, Synthetic Construct; identical to SEQ ID NO: 2274
  source 1..30: mol_type = other RNA

SEQ ID NO: 22085 - RNA, 21 nt, Synthetic Construct
  source 1..21: mol_type = other RNA
tcccgtactgagctgccccga

SEQ ID NO: 22086 - RNA, 21 nt, Synthetic Construct
  source 1..21: mol_type = other RNA
tcccgtactgagctgccccga

SEQ ID NO: 22087 - RNA, 18 nt, Synthetic Construct
  source 1..18: mol_type = other RNA
cgcgacctcagatcagac

SEQ ID NO: 22088 - RNA, 18 nt, Synthetic Construct
  source 1..18: mol_type = other RNA
cgcgacctcagatcagac

SEQ ID NO: 22089 - RNA, 24 nt, Synthetic Construct
  source 1..24: mol_type = other RNA
cggagaaggttagctcagccaact

SEQ ID NO: 22090 - RNA, 30 nt, Synthetic Construct; identical to SEQ ID NO: 1236
  source 1..30: mol_type = other RNA

SEQ ID NO: 22091 - RNA, 30 nt, Synthetic Construct; identical to SEQ ID NO: 1236
  source 1..30: mol_type = other RNA

SEQ ID NO: 22092 - RNA, 31 nt, Synthetic Construct; identical to SEQ ID NO: 2423
  source 1..31: mol_type = other RNA

SEQ ID NO: 22093 - RNA, 15 nt, Synthetic Construct
  source 1..15: mol_type = other RNA
ggtgaaagcggggga

SEQ ID NO: 22094 - RNA, 22 nt, Synthetic Construct
  source 1..22: mol_type = other RNA
tcctgtactgagctgccccaag

SEQ ID NO: 22095 - RNA, 22 nt, Synthetic Construct
  source 1..22: mol_type = other RNA
tcctgtactgagctgccccaag

SEQ ID NO: 22096 - RNA, 19 nt, Synthetic Construct
  source 1..19: mol_type = other RNA
agtcgacgtatagggtgtg

SEQ ID NO: 22097 - RNA, 19 nt, Synthetic Construct
  source 1..19: mol_type = other RNA
agtcgacgtatagggtgtg

SEQ ID NO: 22098 - RNA, 25 nt, Synthetic Construct
  source 1..25: mol_type = other RNA
ttgaggatatgagatcgaggcgaca

SEQ ID NO: 22099 - RNA, 25 nt, Synthetic Construct
  source 1..25: mol_type = other RNA
ttgaggatatgagatcgaggcgaca

SEQ ID NO: 22100 - RNA, 36 nt, Synthetic Construct; identical to SEQ ID NO: 2546
  source 1..36: mol_type = other RNA

SEQ ID NO: 22101 - RNA, 36 nt, Synthetic Construct; identical to SEQ ID NO: 2546
  source 1..36: mol_type = other RNA

SEQ ID NO: 22102 - RNA, 15 nt, Synthetic Construct
  source 1..15: mol_type = other RNA
ccgcttttgtcaggg

SEQ ID NO: 22103 - RNA, 15 nt, Synthetic Construct
  source 1..15: mol_type = other RNA
ccgcttttgtcaggg

SEQ ID NO: 22104 - RNA, 33 nt, Synthetic Construct; identical to SEQ ID NO: 1982
  source 1..33: mol_type = other RNA

SEQ ID NO: 22105 - RNA, 33 nt, Synthetic Construct; identical to SEQ ID NO: 1982
  source 1..33: mol_type = other RNA

SEQ ID NO: 22106 - RNA, 37 nt, Synthetic Construct; identical to SEQ ID NO: 2607
  source 1..37: mol_type = other RNA

SEQ ID NO: 22107 - RNA, 32 nt, Synthetic Construct; identical to SEQ ID NO: 4279
  source 1..32: mol_type = other RNA

SEQ ID NO: 22108 - RNA, 32 nt, Synthetic Construct; identical to SEQ ID NO: 4279
  source 1..32: mol_type = other RNA

SEQ ID NO: 22109 - RNA, 20 nt, Synthetic Construct
  source 1..20: mol_type = other RNA
tgaggcagtaggttgtatag

SEQ ID NO: 22110 - RNA, 20 nt, Synthetic Construct
  source 1..20: mol_type = other RNA
tgaggcagtaggttgtatag

SEQ ID NO: 22111 - RNA, 23 nt, Synthetic Construct
  source 1..23: mol_type = other RNA
cctcgcgcgattggagcggccga

SEQ ID NO: 22112 - RNA, 23 nt, Synthetic Construct
  source 1..23: mol_type = other RNA
cctcgcgcgattggagcggccga

SEQ ID NO: 22113 - RNA, 18 nt, Synthetic Construct
  source 1..18: mol_type = other RNA
atcgctagtaatcgcgga

SEQ ID NO: 22114 - RNA, 23 nt, Synthetic Construct
  source 1..23: mol_type = other RNA
tggaatgtaaagaagtatgtacc

SEQ ID NO: 22115 - RNA, 31 nt, Synthetic Construct; identical to SEQ ID NO: 2507
  source 1..31: mol_type = other RNA

SEQ ID NO: 22116 - RNA, 21 nt, Synthetic Construct
  source 1..21: mol_type = other RNA
tcctgtactgagccgccccga

SEQ ID NO: 22117 - RNA, 21 nt, Synthetic Construct
  source 1..21: mol_type = other RNA
tcctgtactgagccgccccga

SEQ ID NO: 22118 - RNA, 22 nt, Synthetic Construct
  source 1..22: mol_type = other RNA
ggcagggttcgtgactggggtg

SEQ ID NO: 22119 - RNA, 22 nt, Synthetic Construct
  source 1..22: mol_type = other RNA
ggcagggttcgtgactggggtg

SEQ ID NO: 22120 - RNA, 32 nt, Synthetic Construct; identical to SEQ ID NO: 2467
  source 1..32: mol_type = other RNA

SEQ ID NO: 22121 - RNA, 32 nt, Synthetic Construct; identical to SEQ ID NO: 2467
  source 1..32: mol_type = other RNA

SEQ ID NO: 22122 - RNA, 22 nt, Synthetic Construct
  source 1..22: mol_type = other RNA
ttataatacaacctgataagtg

SEQ ID NO: 22123 - RNA, 35 nt, Synthetic Construct; identical to SEQ ID NO: 2402
  source 1..35: mol_type = other RNA

SEQ ID NO: 22124 - RNA, 35 nt, Synthetic Construct; identical to SEQ ID NO: 2402
  source 1..35: mol_type = other RNA

SEQ ID NO: 22125 - RNA, 23 nt, Synthetic Construct
  source 1..23: mol_type = other RNA
tcctgtactgagctgccctgagt

SEQ ID NO: 22126 - RNA, 23 nt, Synthetic Construct
  source 1..23: mol_type = other RNA
tcctgtactgagctgccctgagt

SEQ ID NO: 22127 - RNA, 22 nt, Synthetic Construct
  source 1..22: mol_type = other RNA
tcctgtactgagctgcctcgag

SEQ ID NO: 22128 - RNA, 22 nt, Synthetic Construct
  source 1..22: mol_type = other RNA
tcctgtactgagctgcctcgag

SEQ ID NO: 22129 - RNA, 37 nt, Synthetic Construct; identical to SEQ ID NO: 2211
  source 1..37: mol_type = other RNA

SEQ ID NO: 22130 - RNA, 23 nt, Synthetic Construct
  source 1..23: mol_type = other RNA
tgaggggcagagagcgaggcttt

SEQ ID NO: 22131 - RNA, 22 nt, Synthetic Construct
  source 1..22: mol_type = other RNA
tgttggttcaagcgtgtagtcg

SEQ ID NO: 22132 - RNA, 31 nt, Synthetic Construct; identical to SEQ ID NO: 2423
  source 1..31: mol_type = other RNA

SEQ ID NO: 22133 - RNA, 31 nt, Synthetic Construct; identical to SEQ ID NO: 2423
  source 1..31: mol_type = other RNA

SEQ ID NO: 22134 - RNA, 26 nt, Synthetic Construct
  source 1..26: mol_type = other RNA
ttaagtgacgatagcctaggagatac

SEQ ID NO: 22135 - RNA, 26 nt, Synthetic Construct
  source 1..26: mol_type = other RNA
ttaagtgacgatagcctaggagatac

SEQ ID NO: 22136 - RNA, 24 nt, Synthetic Construct
  source 1..24: mol_type = other RNA
tatatcggaacgtgcccagtcgtg

SEQ ID NO: 22137 - RNA, 24 nt, Synthetic Construct
  source 1..24: mol_type = other RNA
tatatcggaacgtgcccagtcgtg

SEQ ID NO: 22138 - RNA, 38 nt, Synthetic Construct; identical to SEQ ID NO: 2492
  source 1..38: mol_type = other RNA

SEQ ID NO: 22139 - RNA, 38 nt, Synthetic Construct; identical to SEQ ID NO: 2492
  source 1..38: mol_type = other RNA

SEQ ID NO: 22140 - RNA, 32 nt, Synthetic Construct; identical to SEQ ID NO: 3541
  source 1..32: mol_type = other RNA

SEQ ID NO: 22141 - RNA, 16 nt, Synthetic Construct
  source 1..16: mol_type = other RNA
cgctagtaatcgcgga

SEQ ID NO: 22142 - RNA, 31 nt, Synthetic Construct; identical to SEQ ID NO: 2412
  source 1..31: mol_type = other RNA

SEQ ID NO: 22143 - RNA, 31 nt, Synthetic Construct; identical to SEQ ID NO: 2412
  source 1..31: mol_type = other RNA

SEQ ID NO: 22144 - RNA, 16 nt, Synthetic Construct
  source 1..16: mol_type = other RNA
gcaagaggtcagcggt

SEQ ID NO: 22145 - RNA, 16 nt, Synthetic Construct
  source 1..16: mol_type = other RNA
gcaagaggtcagcggt

SEQ ID NO: 22146 - RNA, 35 nt, Synthetic Construct; identical to SEQ ID NO: 1490
  source 1..35: mol_type = other RNA

SEQ ID NO: 22147 - RNA, 21 nt, Synthetic Construct
  source 1..21: mol_type = other RNA
ccctgtactgagctgccccga

SEQ ID NO: 22148 - RNA, 21 nt, Synthetic Construct
  source 1..21: mol_type = other RNA
ccctgtactgagctgccccga

SEQ ID NO: 22149 - RNA, 21 nt, Synthetic Construct
  source 1..21: mol_type = other RNA
tgaggtagcaggttgtgtggt

SEQ ID NO: 22150 - RNA, 21 nt, Synthetic Construct
  source 1..21: mol_type = other RNA
tgaggtagcaggttgtgtggt

SEQ ID NO: 22151 - RNA, 27 nt, Synthetic Construct
  source 1..27: mol_type = other RNA
ccgtgtgaaagtaggtcatcgtcaggc

SEQ ID NO: 22152 - RNA, 22 nt, Synthetic Construct
  source 1..22: mol_type = other RNA
ggatatcatcatatactgtaag

SEQ ID NO: 22153 - RNA, 22 nt, Synthetic Construct
  source 1..22: mol_type = other RNA
ggatatcatcatatactgtaag

SEQ ID NO: 22154 - RNA, 24 nt, Synthetic Construct
  source 1..24: mol_type = other RNA
ggttgtaaaccgcttttgtcaggg

SEQ ID NO: 22155 - RNA, 24 nt, Synthetic Construct
  source 1..24: mol_type = other RNA
ggttgtaaaccgcttttgtcaggg

SEQ ID NO: 22156 - RNA, 20 nt, Synthetic Construct
  source 1..20: mol_type = other RNA
cccagtaaacggcggccgta

SEQ ID NO: 22157 - RNA, 20 nt, Synthetic Construct
  source 1..20: mol_type = other RNA
cccagtaaacggcggccgta

SEQ ID NO: 22158 - RNA, 21 nt, Synthetic Construct
  source 1..21: mol_type = other RNA
cataaagtagaaagcactact

SEQ ID NO: 22159 - RNA, 21 nt, Synthetic Construct
  source 1..21: mol_type = other RNA
tcccagtaaacggcggccgta

SEQ ID NO: 22160 - RNA, 21 nt, Synthetic Construct
  source 1..21: mol_type = other RNA
tcccagtaaacggcggccgta

SEQ ID NO: 22161 - RNA, 31 nt, Synthetic Construct; identical to SEQ ID NO: 1627
  source 1..31: mol_type = other RNA

SEQ ID NO: 22162 - RNA, 31 nt, Synthetic Construct; identical to SEQ ID NO: 1627
  source 1..31: mol_type = other RNA

SEQ ID NO: 22163 - RNA, 18 nt, Synthetic Construct
  source 1..18: mol_type = other RNA
acagtcaggatgttggct

SEQ ID NO: 22164 - RNA, 18 nt, Synthetic Construct
  source 1..18: mol_type = other RNA
acagtcaggatgttggct

SEQ ID NO: 22165 - RNA, 23 nt, Synthetic Construct
  source 1..23: mol_type = other RNA
gtaaacatccttgactggaagct

SEQ ID NO: 22166 - RNA, 23 nt, Synthetic Construct
  source 1..23: mol_type = other RNA
gtaaacatccttgactggaagct

SEQ ID NO: 22167 - RNA, 35 nt, Synthetic Construct; identical to SEQ ID NO: 2518
  source 1..35: mol_type = other RNA

SEQ ID NO: 22168 - RNA, 35 nt, Synthetic Construct; identical to SEQ ID NO: 2518
  source 1..35: mol_type = other RNA

SEQ ID NO: 22169 - RNA, 21 nt, Synthetic Construct
  source 1..21: mol_type = other RNA
gttggttcaagcgtgtagtcg

SEQ ID NO: 22170 - RNA, 20 nt, Synthetic Construct
  source 1..20: mol_type = other RNA
gaatcgctagtaatcgcgga

SEQ ID NO: 22171 - RNA, 20 nt, Synthetic Construct
  source 1..20: mol_type = other RNA
gaatcgctagtaatcgcgga

SEQ ID NO: 22172 - RNA, 16 nt, Synthetic Construct
  source 1..16: mol_type = other RNA
gtctacggccatacaa

SEQ ID NO: 22173 - RNA, 16 nt, Synthetic Construct
  source 1..16: mol_type = other RNA
gtctacggccatacaa

SEQ ID NO: 22174 - RNA, 15 nt, Synthetic Construct
  source 1..15: mol_type = other RNA
cgccatttaaagagg

SEQ ID NO: 22175 - RNA, 15 nt, Synthetic Construct
  source 1..15: mol_type = other RNA
cgccatttaaagagg

SEQ ID NO: 22176 - RNA, 16 nt, Synthetic Construct
  source 1..16: mol_type = other RNA
gtctacggccatacaa

SEQ ID NO: 22177 - RNA, 16 nt, Synthetic Construct
  source 1..16: mol_type = other RNA
gtctacggccatacaa

SEQ ID NO: 22178 - RNA, 15 nt, Synthetic Construct
  source 1..15: mol_type = other RNA
ccagaaacccggtcg

SEQ ID NO: 22179 - RNA, 15 nt, Synthetic Construct
  source 1..15: mol_type = other RNA
ccagaaacccggtcg

SEQ ID NO: 22180 - RNA, 20 nt, Synthetic Construct
  source 1..20: mol_type = other RNA
gaatcgctagtaatcgcgga

SEQ ID NO: 22181 - RNA, 30 nt, Synthetic Construct; identical to SEQ ID NO: 1236
  source 1..30: mol_type = other RNA

SEQ ID NO: 22182 - RNA, 30 nt, Synthetic Construct; identical to SEQ ID NO: 1236
  source 1..30: mol_type = other RNA

SEQ ID NO: 22183 - RNA, 16 nt, Synthetic Construct
  source 1..16: mol_type = other RNA
gtccccttcgtctaga

SEQ ID NO: 22184 - RNA, 16 nt, Synthetic Construct
  source 1..16: mol_type = other RNA
gtccccttcgtctaga

SEQ ID NO: 22185 - RNA, 20 nt, Synthetic Construct
  source 1..20: mol_type = other RNA
gtgccgaagctgtgggattg

SEQ ID NO: 22186 - RNA, 20 nt, Synthetic Construct
  source 1..20: mol_type = other RNA
gtgccgaagctgtgggattg

SEQ ID NO: 22187 - RNA, 18 nt, Synthetic Construct
  source 1..18: mol_type = other RNA
cgccgatgatagtgcgga

SEQ ID NO: 22188 - RNA, 18 nt, Synthetic Construct
  source 1..18: mol_type = other RNA
cgccgatgatagtgcgga

SEQ ID NO: 22189 - RNA, 23 nt, Synthetic Construct
  source 1..23: mol_type = other RNA
tgaggtagtaggttgtgtggttc

SEQ ID NO: 22190 - RNA, 23 nt, Synthetic Construct
  source 1..23: mol_type = other RNA
tgaggtagtaggttgtgtggttc

SEQ ID NO: 22191 - RNA, 16 nt, Synthetic Construct
  source 1..16: mol_type = other RNA
ccggaggaaggtgggg

SEQ ID NO: 22192 - RNA, 16 nt, Synthetic Construct
  source 1..16: mol_type = other RNA
ccggaggaaggtgggg

SEQ ID NO: 22193 - RNA, 21 nt, Synthetic Construct
  source 1..21: mol_type = other RNA
gttggttcaagcgtgtagtcg

SEQ ID NO: 22194 - RNA, 21 nt, Synthetic Construct
  source 1..21: mol_type = other RNA
gttggttcaagcgtgtagtcg

SEQ ID NO: 22195 - RNA, 23 nt, Synthetic Construct
  source 1..23: mol_type = other RNA
tggtaatacgacgtacttggtgt

SEQ ID NO: 22196 - RNA, 23 nt, Synthetic Construct
  source 1..23: mol_type = other RNA
tggtaatacgacgtacttggtgt

SEQ ID NO: 22197 - RNA, 21 nt, Synthetic Construct
  source 1..21: mol_type = other RNA
tgaggggcagagggcgagact

SEQ ID NO: 22198 - RNA, 21 nt, Synthetic Construct
  source 1..21: mol_type = other RNA
tgaggggcagagggcgagact

SEQ ID NO: 22199 - RNA, 17 nt, Synthetic Construct
  source 1..17: mol_type = other RNA
cgatctgtagctggtct

SEQ ID NO: 22200 - RNA, 35 nt, Synthetic Construct; identical to SEQ ID NO: 2615
  source 1..35: mol_type = other RNA

SEQ ID NO: 22201 - RNA, 20 nt, Synthetic Construct
  source 1..20: mol_type = other RNA
gtcagtttgtcaaatacccc

SEQ ID NO: 22202 - RNA, 36 nt, Synthetic Construct; identical to SEQ ID NO: 2444
  source 1..36: mol_type = other RNA

SEQ ID NO: 22203 - RNA, 36 nt, Synthetic Construct; identical to SEQ ID NO: 2444
  source 1..36: mol_type = other RNA

SEQ ID NO: 22204 - RNA, 23 nt, Synthetic Construct
  source 1..23: mol_type = other RNA
tcctgtgctgagctgccccgagt

SEQ ID NO: 22205 - RNA, 21 nt, Synthetic Construct
  source 1..21: mol_type = other RNA
tccctgagaccctaacttgtg

SEQ ID NO: 22206 - RNA, 20 nt, Synthetic Construct
  source 1..20: mol_type = other RNA
tgaggaagtaggttgtatag

SEQ ID NO: 22207 - RNA, 20 nt, Synthetic Construct
  source 1..20: mol_type = other RNA
tgaggaagtaggttgtatag

SEQ ID NO: 22208 - RNA, 22 nt, Synthetic Construct
  source 1..22: mol_type = other RNA
tcctatactgagctgccccgag

SEQ ID NO: 22209 - RNA, 22 nt, Synthetic Construct
  source 1..22: mol_type = other RNA
tcctatactgagctgccccgag

SEQ ID NO: 22210 - RNA, 34 nt, Synthetic Construct; identical to SEQ ID NO: 2367
  source 1..34: mol_type = other RNA

SEQ ID NO: 22211 - RNA, 34 nt, Synthetic Construct; identical to SEQ ID NO: 2375
  source 1..34: mol_type = other RNA

SEQ ID NO: 22212 - RNA, 34 nt, Synthetic Construct; identical to SEQ ID NO: 2375
  source 1..34: mol_type = other RNA

SEQ ID NO: 22213 - RNA, 27 nt, Synthetic Construct
  source 1..27: mol_type = other RNA
ggatttccccttggggttgtaggacca

SEQ ID NO: 22214 - RNA, 27 nt, Synthetic Construct
  source 1..27: mol_type = other RNA
ggatttccccttggggttgtaggacca

SEQ ID NO: 22215 - RNA, 31 nt, Synthetic Construct; identical to SEQ ID NO: 2412
  source 1..31: mol_type = other RNA

SEQ ID NO: 22216 - RNA, 31 nt, Synthetic Construct; identical to SEQ ID NO: 2412
  source 1..31: mol_type = other RNA

SEQ ID NO: 22217 - RNA, 18 nt, Synthetic Construct
  source 1..18: mol_type = other RNA
gcgccgatgatagtgcgg

SEQ ID NO: 22218 - RNA, 18 nt, Synthetic Construct
  source 1..18: mol_type = other RNA
gcgccgatgatagtgcgg

SEQ ID NO: 22219 - RNA, 23 nt, Synthetic Construct
  source 1..23: mol_type = other RNA
tctttgttcgattccgttgagta

SEQ ID NO: 22220 - RNA, 23 nt, Synthetic Construct
  source 1..23: mol_type = other RNA
tctttgttcgattccgttgagta

SEQ ID NO: 22221 - RNA, 23 nt, Synthetic Construct
  source 1..23: mol_type = other RNA
tgaggggcagggagcgagacttt

SEQ ID NO: 22222 - RNA, 22 nt, Synthetic Construct
  source 1..22: mol_type = other RNA
tccagtactgagctgccccgag

SEQ ID NO: 22223 - RNA, 22 nt, Synthetic Construct
  source 1..22: mol_type = other RNA
tccagtactgagctgccccgag

SEQ ID NO: 22224 - RNA, 17 nt, Synthetic Construct
  source 1..17: mol_type = other RNA
cccctggacctgtactg

SEQ ID NO: 22225 - RNA, 17 nt, Synthetic Construct
  source 1..17: mol_type = other RNA
cccctggacctgtactg

SEQ ID NO: 22226 - RNA, 30 nt, Synthetic Construct; identical to SEQ ID NO: 2407
  source 1..30: mol_type = other RNA

SEQ ID NO: 22227 - RNA, 21 nt, Synthetic Construct
  source 1..21: mol_type = other RNA
tgaggtagtaggttgtgtgat

SEQ ID NO: 22228 - RNA, 21 nt, Synthetic Construct
  source 1..21: mol_type = other RNA
tgaggtagtaggttgtgtgat

SEQ ID NO: 22229 - RNA, 20 nt, Synthetic Construct
  source 1..20: mol_type = other RNA
tcagtagctcgaggaaaaga

SEQ ID NO: 22230 - RNA, 20 nt, Synthetic Construct
  source 1..20: mol_type = other RNA
tcagtagctcgaggaaaaga

SEQ ID NO: 22231 - RNA, 15 nt, Synthetic Construct
  source 1..15: mol_type = other RNA
tagagtagggcggga

SEQ ID NO: 22232 - RNA, 15 nt, Synthetic Construct
  source 1..15: mol_type = other RNA
tagagtagggcggga

SEQ ID NO: 22233 - RNA, 23 nt, Synthetic Construct
  source 1..23: mol_type = other RNA
tggtaatacgacgtacctagtgt

SEQ ID NO: 22234 - RNA, 23 nt, Synthetic Construct
  source 1..23: mol_type = other RNA
tggtaatacgacgtacctagtgt

SEQ ID NO: 22235 - RNA, 31 nt, Synthetic Construct; identical to SEQ ID NO: 5506
  source 1..31: mol_type = other RNA

SEQ ID NO: 22236 - RNA, 31 nt, Synthetic Construct; identical to SEQ ID NO: 5506
  source 1..31: mol_type = other RNA

SEQ ID NO: 22237 - RNA, 15 nt, Synthetic Construct
  source 1..15: mol_type = other RNA
tagagtagggcggga

SEQ ID NO: 22238 - RNA, 32 nt, Synthetic Construct; identical to SEQ ID NO: 2850
  source 1..32: mol_type = other RNA

SEQ ID NO: 22239 - RNA, 21 nt, Synthetic Construct
  source 1..21: mol_type = other RNA
cattattacttttggtacgcg

SEQ ID NO: 22240 - RNA, 22 nt, Synthetic Construct
  source 1..22: mol_type = other RNA
tgaggtagcaggttgtgtggtt

SEQ ID NO: 22241 - RNA, 22 nt, Synthetic Construct
  source 1..22: mol_type = other RNA
tgaggtagcaggttgtgtggtt

SEQ ID NO: 22242 - RNA, 34 nt, Synthetic Construct; identical to SEQ ID NO: 2375
  source 1..34: mol_type = other RNA

SEQ ID NO: 22243 - RNA, 17 nt, Synthetic Construct
  source 1..17: mol_type = other RNA
gtccggatcgtagtctg

SEQ ID NO: 22244 - RNA, 32 nt, Synthetic Construct; identical to SEQ ID NO: 4279
  source 1..32: mol_type = other RNA

SEQ ID NO: 22245 - RNA, 32 nt, Synthetic Construct; identical to SEQ ID NO: 4279
  source 1..32: mol_type = other RNA

SEQ ID NO: 22246 - RNA, 26 nt, Synthetic Construct
  source 1..26: mol_type = other RNA
gagcagctaataccgcatacgacctg

SEQ ID NO: 22247 - RNA, 18 nt, Synthetic Construct
  source 1..18: mol_type = other RNA
ggctttgaagtaaggtcg

SEQ ID NO: 22248 - RNA, 18 nt, Synthetic Construct
  source 1..18: mol_type = other RNA
ggctttgaagtaaggtcg

SEQ ID NO: 22249 - RNA, 23 nt, Synthetic Construct
  source 1..23: mol_type = other RNA
tggtaattcgacgtacttagtgt

SEQ ID NO: 22250 - RNA, 23 nt, Synthetic Construct
  source 1..23: mol_type = other RNA
tggtaattcgacgtacttagtgt

SEQ ID NO: 22251 - RNA, 24 nt, Synthetic Construct
  source 1..24: mol_type = other RNA
gcagctaataccgcatacgacctg

SEQ ID NO: 22252 - RNA, 24 nt, Synthetic Construct
  source 1..24: mol_type = other RNA
gcagctaataccgcatacgacctg

SEQ ID NO: 22253 - RNA, 36 nt, Synthetic Construct; identical to SEQ ID NO: 2546
  source 1..36: mol_type = other RNA

SEQ ID NO: 22254 - RNA, 22 nt, Synthetic Construct
  source 1..22: mol_type = other RNA
tggggtagtaggttgtgtggtt

SEQ ID NO: 22255 - RNA, 22 nt, Synthetic Construct
  source 1..22: mol_type = other RNA
tggggtagtaggttgtgtggtt

SEQ ID NO: 22256 - RNA, 23 nt, Synthetic Construct
  source 1..23: mol_type = other RNA
tcctgcactgagctgccccgaga

SEQ ID NO: 22257 - RNA, 23 nt, Synthetic Construct
  source 1..23: mol_type = other RNA
tcctgcactgagctgccccgaga

SEQ ID NO: 22258 - RNA, 23 nt, Synthetic Construct
  source 1..23: mol_type = other RNA
tggtaatgcgacgtacttagtgt

SEQ ID NO: 22259 - RNA, 23 nt, Synthetic Construct
  source 1..23: mol_type = other RNA
tggtaatgcgacgtacttagtgt

SEQ ID NO: 22260 - RNA, 36 nt, Synthetic Construct; identical to SEQ ID NO: 2506
  source 1..36: mol_type = other RNA

SEQ ID NO: 22261 - RNA, 36 nt, Synthetic Construct; identical to SEQ ID NO: 2506
  source 1..36: mol_type = other RNA

SEQ ID NO: 22262 - RNA, 23 nt, Synthetic Construct
  source 1..23: mol_type = other RNA
atatcggaacgtgcccagtcgtg

SEQ ID NO: 22263 - RNA, 22 nt, Synthetic Construct
  source 1..22: mol_type = other RNA
taccctgtagaaccgaatttgt

SEQ ID NO: 22264 - RNA, 24 nt, Synthetic Construct
  source 1..24: mol_type = other RNA
tgtaaacacccccgactggaagct

SEQ ID NO: 22265 - RNA, 32 nt, Synthetic Construct; identical to SEQ ID NO: 2435
  source 1..32: mol_type = other RNA

SEQ ID NO: 22266 - RNA, 32 nt, Synthetic Construct; identical to SEQ ID NO: 2435
  source 1..32: mol_type = other RNA

SEQ ID NO: 22267 - RNA, 23 nt, Synthetic Construct
  source 1..23: mol_type = other RNA
tcctgtgctgagctgccccgagt

SEQ ID NO: 22268 - RNA, 23 nt, Synthetic Construct
  source 1..23: mol_type = other RNA
tcctgtgctgagctgccccgagt

SEQ ID NO: 22269 - RNA, 18 nt, Synthetic Construct
  source 1..18: mol_type = other RNA
cctcgcgcgattggagcg

SEQ ID NO: 22270 - RNA, 17 nt, Synthetic Construct
  source 1..17: mol_type = other RNA
tggccgggacagagggc

SEQ ID NO: 22271 - RNA, 17 nt, Synthetic Construct
  source 1..17: mol_type = other RNA
tggccgggacagagggc

SEQ ID NO: 22272 - RNA, 22 nt, Synthetic Construct
  source 1..22: mol_type = other RNA
gagagcctggacacaggtgctg

SEQ ID NO: 22273 - RNA, 21 nt, Synthetic Construct
  source 1..21: mol_type = other RNA
tgaggtagtaggttgtgtagt

SEQ ID NO: 22274 - RNA, 21 nt, Synthetic Construct
  source 1..21: mol_type = other RNA
tcctgtactgagctgccctga

SEQ ID NO: 22275 - RNA, 21 nt, Synthetic Construct
  source 1..21: mol_type = other RNA
tcctgtactgagctgccctga

SEQ ID NO: 22276 - RNA, 16 nt, Synthetic Construct
  source 1..16: mol_type = other RNA
gatctgtagctggtct

SEQ ID NO: 22277 - RNA, 21 nt, Synthetic Construct
  source 1..21: mol_type = other RNA
atcggaacgtgcccagtcgtg

SEQ ID NO: 22278 - RNA, 21 nt, Synthetic Construct
  source 1..21: mol_type = other RNA
atcggaacgtgcccagtcgtg

SEQ ID NO: 22279 - RNA, 18 nt, Synthetic Construct
  source 1..18: mol_type = other RNA
tcagtagctcgaggaaaa

SEQ ID NO: 22280 - RNA, 18 nt, Synthetic Construct
  source 1..18: mol_type = other RNA
tcagtagctcgaggaaaa

SEQ ID NO: 22281 - RNA, 23 nt, Synthetic Construct
  source 1..23: mol_type = other RNA
ccctgtactgagctgccccgagt

SEQ ID NO: 22282 - RNA, 23 nt, Synthetic Construct
  source 1..23: mol_type = other RNA
ccctgtactgagctgccccgagt

SEQ ID NO: 22283 - RNA, 41 nt, Synthetic Construct; identical to SEQ ID NO: 2441
  source 1..41: mol_type = other RNA

SEQ ID NO: 22284 - RNA, 41 nt, Synthetic Construct; identical to SEQ ID NO: 2441
  source 1..41: mol_type = other RNA

SEQ ID NO: 22285 - RNA, 29 nt, Synthetic Construct
  source 1..29: mol_type = other RNA
tgaaggtgggttgtgaagcctgctggagg

SEQ ID NO: 22286 - RNA, 29 nt, Synthetic Construct
  source 1..29: mol_type = other RNA
tgaaggtgggttgtgaagcctgctggagg

SEQ ID NO: 22287 - RNA, 21 nt, Synthetic Construct
  source 1..21: mol_type = other RNA
tgaggggcagagagcgagacc

SEQ ID NO: 22288 - RNA, 21 nt, Synthetic Construct
  source 1..21: mol_type = other RNA
tgaggggcagagagcgagacc

SEQ ID NO: 22289 - RNA, 20 nt, Synthetic Construct
  source 1..20: mol_type = other RNA
acccttgtcattagttgcta

SEQ ID NO: 22290 - RNA, 20 nt, Synthetic Construct
  source 1..20: mol_type = other RNA
acccttgtcattagttgcta

SEQ ID NO: 22291 - RNA, 22 nt, Synthetic Construct
  source 1..22: mol_type = other RNA
cggaatcgctagtaatcgcgga

SEQ ID NO: 22292 - RNA, 37 nt, Synthetic Construct; identical to SEQ ID NO: 2365
  source 1..37: mol_type = other RNA

SEQ ID NO: 22293 - RNA, 24 nt, Synthetic Construct
  source 1..24: mol_type = other RNA
gtctttgttcgattccgttgagta

SEQ ID NO: 22294 - RNA, 24 nt, Synthetic Construct
  source 1..24: mol_type = other RNA
gtctttgttcgattccgttgagta

SEQ ID NO: 22295 - RNA, 21 nt, Synthetic Construct
  source 1..21: mol_type = other RNA
tcctgtaccgagctgccccga

SEQ ID NO: 22296 - RNA, 21 nt, Synthetic Construct
  source 1..21: mol_type = other RNA
tcctgtaccgagctgccccga

SEQ ID NO: 22297 - RNA, 22 nt, Synthetic Construct
  source 1..22: mol_type = other RNA
gctcacggaaagagaatgaagc

SEQ ID NO: 22298 - RNA, 22 nt, Synthetic Construct
  source 1..22: mol_type = other RNA
gctcacggaaagagaatgaagc

SEQ ID NO: 22299 - RNA, 24 nt, Synthetic Construct
  source 1..24: mol_type = other RNA
tgtaaacacccccgactggaagct

SEQ ID NO: 22300 - RNA, 32 nt, Synthetic Construct; identical to SEQ ID NO: 3541
  source 1..32: mol_type = other RNA

SEQ ID NO: 22301 - RNA, 21 nt, Synthetic Construct
  source 1..21: mol_type = other RNA
ctagactgaagctccttgggg

SEQ ID NO: 22302 - RNA, 21 nt, Synthetic Construct
  source 1..21: mol_type = other RNA
aagaaagattgcaagaactgc

SEQ ID NO: 22303 - RNA, 21 nt, Synthetic Construct
  source 1..21: mol_type = other RNA
aagaaagattgcaagaactgc

SEQ ID NO: 22304 - RNA, 19 nt, Synthetic Construct
  source 1..19: mol_type = other RNA
tgtcaactggttgttggga

SEQ ID NO: 22305 - RNA, 19 nt, Synthetic Construct
  source 1..19: mol_type = other RNA
tgtcaactggttgttggga

SEQ ID NO: 22306 - RNA, 17 nt, Synthetic Construct
  source 1..17: mol_type = other RNA
ggcccttatgggtaggg

SEQ ID NO: 22307 - RNA, 21 nt, Synthetic Construct
  source 1..21: mol_type = other RNA
tggagtgtgacaatggtgctt

SEQ ID NO: 22308 - RNA, 21 nt, Synthetic Construct
  source 1..21: mol_type = other RNA
tggagtgtgacaatggtgctt

SEQ ID NO: 22309 - RNA, 31 nt, Synthetic Construct; identical to SEQ ID NO: 2278
  source 1..31: mol_type = other RNA

SEQ ID NO: 22310 - RNA, 31 nt, Synthetic Construct; identical to SEQ ID NO: 2278
  source 1..31: mol_type = other RNA

SEQ ID NO: 22311 - RNA, 23 nt, Synthetic Construct
  source 1..23: mol_type = other RNA
tgaggggcagagagcgagacttc

SEQ ID NO: 22312 - RNA, 20 nt, Synthetic Construct
  source 1..20: mol_type = other RNA
tgaggcagtaggttgtgtgg

SEQ ID NO: 22313 - RNA, 20 nt, Synthetic Construct
  source 1..20: mol_type = other RNA
tgaggcagtaggttgtgtgg

SEQ ID NO: 22314 - RNA, 26 nt, Synthetic Construct
  source 1..26: mol_type = other RNA
tgtcggctcatctcatcctggggctg

SEQ ID NO: 22315 - RNA, 26 nt, Synthetic Construct
  source 1..26: mol_type = other RNA
tgtcggctcatctcatcctggggctg

SEQ ID NO: 22316 - RNA, 23 nt, Synthetic Construct
  source 1..23: mol_type = other RNA
cctcgcgcgattggagcggccga

SEQ ID NO: 22317 - RNA, 22 nt, Synthetic Construct
  source 1..22: mol_type = other RNA
gcactctaatgagactgccggt

SEQ ID NO: 22318 - RNA, 22 nt, Synthetic Construct
  source 1..22: mol_type = other RNA
gcactctaatgagactgccggt

SEQ ID NO: 22319 - RNA, 23 nt, Synthetic Construct
  source 1..23: mol_type = other RNA
taaagtgcttatagtgcaggtag

SEQ ID NO: 22320 - RNA, 23 nt, Synthetic Construct
  source 1..23: mol_type = other RNA
taaagtgcttatagtgcaggtag

SEQ ID NO: 22321 - RNA, 19 nt, Synthetic Construct
  source 1..19: mol_type = other RNA
cctgtctgaatatgggggg

SEQ ID NO: 22322 - RNA, 35 nt, Synthetic Construct; identical to SEQ ID NO: 2450
  source 1..35: mol_type = other RNA

SEQ ID NO: 22323 - RNA, 30 nt, Synthetic Construct; identical to SEQ ID NO: 2308
  source 1..30: mol_type = other RNA

SEQ ID NO: 22324 - RNA, 30 nt, Synthetic Construct; identical to SEQ ID NO: 2308
  source 1..30: mol_type = other RNA

SEQ ID NO: 22325 - RNA, 23 nt, Synthetic Construct
  source 1..23: mol_type = other RNA
tggaatgtaaagaagtatgtacc

SEQ ID NO: 22326 - RNA, 23 nt, Synthetic Construct
  source 1..23: mol_type = other RNA
tggaatgtaaagaagtatgtacc

SEQ ID NO: 22327 - RNA, 22 nt, Synthetic Construct
  source 1..22: mol_type = other RNA
tgaggtagtaggttgtgtggta

SEQ ID NO: 22328 - RNA, 22 nt, Synthetic Construct
  source 1..22: mol_type = other RNA
tgaggtagtaggttgtgtggta

SEQ ID NO: 22329 - RNA, 21 nt, Synthetic Construct
  source 1..21: mol_type = other RNA
tcctgtactgggctgccccga

SEQ ID NO: 22330 - RNA, 21 nt, Synthetic Construct
  source 1..21: mol_type = other RNA
tcctgtactgggctgccccga

SEQ ID NO: 22331 - RNA, 22 nt, Synthetic Construct
  source 1..22: mol_type = other RNA
cctcgcgcgattggagcggccg

SEQ ID NO: 22332 - RNA, 23 nt, Synthetic Construct
  source 1..23: mol_type = other RNA
tggtaatacgacgtacctagtgt

SEQ ID NO: 22333 - RNA, 23 nt, Synthetic Construct
  source 1..23: mol_type = other RNA
tggtaatacgacgtacctagtgt

SEQ ID NO: 22334 - RNA, 20 nt, Synthetic Construct
  source 1..20: mol_type = other RNA
tgaggtagcaggttgtgtgg

SEQ ID NO: 22335 - RNA, 20 nt, Synthetic Construct
  source 1..20: mol_type = other RNA
tgaggtagcaggttgtgtgg

SEQ ID NO: 22336 - RNA, 24 nt, Synthetic Construct
  source 1..24: mol_type = other RNA
gggttgtaaaccgcttttgtcagg

SEQ ID NO: 22337 - RNA, 24 nt, Synthetic Construct
  source 1..24: mol_type = other RNA
gggttgtaaaccgcttttgtcagg

SEQ ID NO: 22338 - RNA, 21 nt, Synthetic Construct
  source 1..21: mol_type = other RNA
tgaggtagtagtttgtgctgc

SEQ ID NO: 22339 - RNA, 18 nt, Synthetic Construct
  source 1..18: mol_type = other RNA
gtaggtcatcgtcaggct

SEQ ID NO: 22340 - RNA, 18 nt, Synthetic Construct
  source 1..18: mol_type = other RNA
gtaggtcatcgtcaggct

SEQ ID NO: 22341 - RNA, 23 nt, Synthetic Construct
  source 1..23: mol_type = other RNA
tggtaatacgacgtacttagtat

SEQ ID NO: 22342 - RNA, 23 nt, Synthetic Construct
  source 1..23: mol_type = other RNA
tggtaatacgacgtacttagtat

SEQ ID NO: 22343 - RNA, 22 nt, Synthetic Construct
  source 1..22: mol_type = other RNA
tccctgagaccctaacttgtga

SEQ ID NO: 22344 - RNA, 32 nt, Synthetic Construct; identical to SEQ ID NO: 2296
  source 1..32: mol_type = other RNA

SEQ ID NO: 22345 - RNA, 32 nt, Synthetic Construct; identical to SEQ ID NO: 2296
  source 1..32: mol_type = other RNA

SEQ ID NO: 22346 - RNA, 30 nt, Synthetic Construct; identical to SEQ ID NO: 3933
  source 1..30: mol_type = other RNA

SEQ ID NO: 22347 - RNA, 30 nt, Synthetic Construct; identical to SEQ ID NO: 3933
  source 1..30: mol_type = other RNA

SEQ ID NO: 22348 - RNA, 20 nt, Synthetic Construct
  source 1..20: mol_type = other RNA
tgaggtagtaggttgcatag

SEQ ID NO: 22349 - RNA, 20 nt, Synthetic Construct
  source 1..20: mol_type = other RNA
tgaggtagtaggttgcatag

SEQ ID NO: 22350 - RNA, 25 nt, Synthetic Construct
  source 1..25: mol_type = other RNA
cgactcttagcggtggatcactcgg

SEQ ID NO: 22351 - RNA, 25 nt, Synthetic Construct
  source 1..25: mol_type = other RNA
cgactcttagcggtggatcactcgg

SEQ ID NO: 22352 - RNA, 37 nt, Synthetic Construct; identical to SEQ ID NO: 2365
  source 1..37: mol_type = other RNA

SEQ ID NO: 22353 - RNA, 24 nt, Synthetic Construct
  source 1..24: mol_type = other RNA
tatatcggaacgtgcccagtcgtg

SEQ ID NO: 22354 - RNA, 28 nt, Synthetic Construct
  source 1..28: mol_type = other RNA
cgactcttagcggtggatcactcggctc

SEQ ID NO: 22355 - RNA, 28 nt, Synthetic Construct
  source 1..28: mol_type = other RNA
cgactcttagcggtggatcactcggctc

SEQ ID NO: 22356 - RNA, 30 nt, Synthetic Construct; identical to SEQ ID NO: 2353
  source 1..30: mol_type = other RNA

SEQ ID NO: 22357 - RNA, 21 nt, Synthetic Construct
  source 1..21: mol_type = other RNA
ggaatcgctagtaatcgcgga

SEQ ID NO: 22358 - RNA, 21 nt, Synthetic Construct
  source 1..21: mol_type = other RNA
tccagtactgagctgccccga

SEQ ID NO: 22359 - RNA, 21 nt, Synthetic Construct
  source 1..21: mol_type = other RNA
tccagtactgagctgccccga

SEQ ID NO: 22360 - RNA, 37 nt, Synthetic Construct; identical to SEQ ID NO: 4277
  source 1..37: mol_type = other RNA

SEQ ID NO: 22361 - RNA, 17 nt, Synthetic Construct
  source 1..17: mol_type = other RNA
cctcgcgcgattggagc

SEQ ID NO: 22362 - RNA, 17 nt, Synthetic Construct
  source 1..17: mol_type = other RNA
cctcgcgcgattggagc

SEQ ID NO: 22363 - RNA, 17 nt, Synthetic Construct
  source 1..17: mol_type = other RNA
agcggtggatgatgtgg

SEQ ID NO: 22364 - RNA, 33 nt, Synthetic Construct; identical to SEQ ID NO: 1982
  source 1..33: mol_type = other RNA

SEQ ID NO: 22365 - RNA, 30 nt, Synthetic Construct; identical to SEQ ID NO: 1771
  source 1..30: mol_type = other RNA

SEQ ID NO: 22366 - RNA, 21 nt, Synthetic Construct
  source 1..21: mol_type = other RNA
cgaggggcagagagcgagact

SEQ ID NO: 22367 - RNA, 21 nt, Synthetic Construct
  source 1..21: mol_type = other RNA
cgaggggcagagagcgagact

SEQ ID NO: 22368 - RNA, 16 nt, Synthetic Construct
  source 1..16: mol_type = other RNA
tgcgtagatatgcgga

SEQ ID NO: 22369 - RNA, 16 nt, Synthetic Construct
  source 1..16: mol_type = other RNA
tgcgtagatatgcgga

SEQ ID NO: 22370 - RNA, 36 nt, Synthetic Construct; identical to SEQ ID NO: 2344
  source 1..36: mol_type = other RNA

SEQ ID NO: 22371 - RNA, 36 nt, Synthetic Construct; identical to SEQ ID NO: 2344
  source 1..36: mol_type = other RNA

SEQ ID NO: 22372 - RNA, 30 nt, Synthetic Construct; identical to SEQ ID NO: 6467
  source 1..30: mol_type = other RNA

SEQ ID NO: 22373 - RNA, 30 nt, Synthetic Construct; identical to SEQ ID NO: 6467
  source 1..30: mol_type = other RNA

SEQ ID NO: 22374 - RNA, 22 nt, Synthetic Construct
  source 1..22: mol_type = other RNA
tcacagtgaaccggtctctttt

SEQ ID NO: 22375 - RNA, 35 nt, Synthetic Construct; identical to SEQ ID NO: 2399
  source 1..35: mol_type = other RNA

SEQ ID NO: 22376 - RNA, 35 nt, Synthetic Construct; identical to SEQ ID NO: 2399
  source 1..35: mol_type = other RNA

SEQ ID NO: 22377 - RNA, 16 nt, Synthetic Construct
  source 1..16: mol_type = other RNA
gcaagaggtcagcggt

SEQ ID NO: 22378 - RNA, 16 nt, Synthetic Construct
  source 1..16: mol_type = other RNA
gcaagaggtcagcggt

SEQ ID NO: 22379 - RNA, 21 nt, Synthetic Construct
  source 1..21: mol_type = other RNA
tcctgtactgagctgccccgg

SEQ ID NO: 22380 - RNA, 21 nt, Synthetic Construct
  source 1..21: mol_type = other RNA
tcctgtactgagctgccccgg

SEQ ID NO: 22381 - RNA, 33 nt, Synthetic Construct; identical to SEQ ID NO: 2266
  source 1..33: mol_type = other RNA

SEQ ID NO: 22382 - RNA, 22 nt, Synthetic Construct
  source 1..22: mol_type = other RNA
cattgcacttgtcccggcctgt

SEQ ID NO: 22383 - RNA, 22 nt, Synthetic Construct
  source 1..22: mol_type = other RNA
tcaagagcaataacgaaaaatg

SEQ ID NO: 22384 - RNA, 20 nt, Synthetic Construct
  source 1..20: mol_type = other RNA
ggtcccaagggtatggctgt

SEQ ID NO: 22385 - RNA, 20 nt, Synthetic Construct
  source 1..20: mol_type = other RNA
ggtcccaagggtatggctgt

SEQ ID NO: 22386 - RNA, 35 nt, Synthetic Construct; identical to SEQ ID NO: 2505
  source 1..35: mol_type = other RNA

SEQ ID NO: 22387 - RNA, 35 nt, Synthetic Construct; identical to SEQ ID NO: 2505
  source 1..35: mol_type = other RNA

SEQ ID NO: 22388 - RNA, 15 nt, Synthetic Construct
  source 1..15: mol_type = other RNA
acggtcctaaggtag

SEQ ID NO: 22389 - RNA, 15 nt, Synthetic Construct
  source 1..15: mol_type = other RNA
acggtcctaaggtag

SEQ ID NO: 22390 - RNA, 30 nt, Synthetic Construct; identical to SEQ ID NO: 1771
  source 1..30: mol_type = other RNA

SEQ ID NO: 22391 - RNA, 18 nt, Synthetic Construct
  source 1..18: mol_type = other RNA
atggccgggacagagggc

SEQ ID NO: 22392 - RNA, 18 nt, Synthetic Construct
  source 1..18: mol_type = other RNA
atggccgggacagagggc

SEQ ID NO: 22393 - RNA, 32 nt, Synthetic Construct; identical to SEQ ID NO: 3713
  source 1..32: mol_type = other RNA

SEQ ID NO: 22394 - RNA, 32 nt, Synthetic Construct; identical to SEQ ID NO: 3713
  source 1..32: mol_type = other RNA

SEQ ID NO: 22395 - RNA, 17 nt, Synthetic Construct
  source 1..17: mol_type = other RNA
gtccggatcgtagtctg

SEQ ID NO: 22396 - RNA, 18 nt, Synthetic Construct
  source 1..18: mol_type = other RNA
atggccgggacagagggc

SEQ ID NO: 22397 - RNA, 18 nt, Synthetic Construct
  source 1..18: mol_type = other RNA
atggccgggacagagggc

SEQ ID NO: 22398 - RNA, 23 nt, Synthetic Construct
  source 1..23: mol_type = other RNA
tgaggggcagagagcaagacttt

SEQ ID NO: 22399 - RNA, 23 nt, Synthetic Construct
  source 1..23: mol_type = other RNA
tgaggggcagagagcaagacttt

SEQ ID NO: 22400 - RNA, 24 nt, Synthetic Construct
  source 1..24: mol_type = other RNA
gtctttgttcgattccgttgagta

SEQ ID NO: 22401 - RNA, 24 nt, Synthetic Construct
  source 1..24: mol_type = other RNA
gtctttgttcgattccgttgagta

SEQ ID NO: 22402 - RNA, 15 nt, Synthetic Construct
  source 1..15: mol_type = other RNA
gagtagggcgggaca

SEQ ID NO: 22403 - RNA, 15 nt, Synthetic Construct
  source 1..15: mol_type = other RNA
gagtagggcgggaca

SEQ ID NO: 22404 - RNA, 27 nt, Synthetic Construct
  source 1..27: mol_type = other RNA
gatttccccttggggttgtaggaccac

SEQ ID NO: 22405 - RNA, 27 nt, Synthetic Construct
  source 1..27: mol_type = other RNA
gatttccccttggggttgtaggaccac

SEQ ID NO: 22406 - RNA, 30 nt, Synthetic Construct; identical to SEQ ID NO: 751
  source 1..30: mol_type = other RNA

SEQ ID NO: 22407 - RNA, 30 nt, Synthetic Construct; identical to SEQ ID NO: 751
  source 1..30: mol_type = other RNA

SEQ ID NO: 22408 - RNA, 30 nt, Synthetic Construct; identical to SEQ ID NO: 1958
  source 1..30: mol_type = other RNA

SEQ ID NO: 22409 - RNA, 22 nt, Synthetic Construct
  source 1..22: mol_type = other RNA
tgaggtagtaggctgtgtggtt

SEQ ID NO: 22410 - RNA, 25 nt, Synthetic Construct
  source 1..25: mol_type = other RNA
tttccccttggggttgtaggaccac

SEQ ID NO: 22411 - RNA, 25 nt, Synthetic Construct
  source 1..25: mol_type = other RNA
tttccccttggggttgtaggaccac

SEQ ID NO: 22412 - RNA, 23 nt, Synthetic Construct
  source 1..23: mol_type = other RNA
tggtaacacgacgtacttagtgt

SEQ ID NO: 22413 - RNA, 23 nt, Synthetic Construct
  source 1..23: mol_type = other RNA
tggtaacacgacgtacttagtgt

SEQ ID NO: 22414 - RNA, 16 nt, Synthetic Construct
  source 1..16: mol_type = other RNA
ctcagtagctcgagga

SEQ ID NO: 22415 - RNA, 19 nt, Synthetic Construct
  source 1..19: mol_type = other RNA
gggtgcaagcgttaatcgg

SEQ ID NO: 22416 - RNA, 19 nt, Synthetic Construct
  source 1..19: mol_type = other RNA
gggtgcaagcgttaatcgg

SEQ ID NO: 22417 - RNA, 31 nt, Synthetic Construct; identical to SEQ ID NO: 2293
  source 1..31: mol_type = other RNA

SEQ ID NO: 22418 - RNA, 31 nt, Synthetic Construct; identical to SEQ ID NO: 2293
  source 1..31: mol_type = other RNA

SEQ ID NO: 22419 - RNA, 16 nt, Synthetic Construct
  source 1..16: mol_type = other RNA
ccatgccgcgtgcggg

SEQ ID NO: 22420 - RNA, 16 nt, Synthetic Construct
  source 1..16: mol_type = other RNA
ccatgccgcgtgcggg

SEQ ID NO: 22421 - RNA, 16 nt, Synthetic Construct
  source 1..16: mol_type = other RNA
cccagaaacccggtcg

SEQ ID NO: 22422 - RNA, 16 nt, Synthetic Construct
  source 1..16: mol_type = other RNA
cccagaaacccggtcg

SEQ ID NO: 22423 - RNA, 18 nt, Synthetic Construct
  source 1..18: mol_type = other RNA
cataaagtagaaagcact

SEQ ID NO: 22424 - RNA, 18 nt, Synthetic Construct
  source 1..18: mol_type = other RNA
cataaagtagaaagcact

SEQ ID NO: 22425 - RNA, 23 nt, Synthetic Construct
  source 1..23: mol_type = other RNA
gggtaatacgacgtacttagtgt

SEQ ID NO: 22426 - RNA, 23 nt, Synthetic Construct
  source 1..23: mol_type = other RNA
gggtaatacgacgtacttagtgt

SEQ ID NO: 22427 - RNA, 23 nt, Synthetic Construct
  source 1..23: mol_type = other RNA
ggaggggcagagagcgagacttt

SEQ ID NO: 22428 - RNA, 20 nt, Synthetic Construct
  source 1..20: mol_type = other RNA
tgaggtagtaggttgtgtgt

SEQ ID NO: 22429 - RNA, 23 nt, Synthetic Construct
  source 1..23: mol_type = other RNA
tgaggggcagagagcgaggcttt

SEQ ID NO: 22430 - RNA, 23 nt, Synthetic Construct
  source 1..23: mol_type = other RNA
tgaggggcagagagcgaggcttt

SEQ ID NO: 22431 - RNA, 20 nt, Synthetic Construct
  source 1..20: mol_type = other RNA
cgcgacctcagatcagacgt

SEQ ID NO: 22432 - RNA, 20 nt, Synthetic Construct
  source 1..20: mol_type = other RNA
cgcgacctcagatcagacgt

SEQ ID NO: 22433 - RNA, 21 nt, Synthetic Construct
  source 1..21: mol_type = other RNA
tcctgtactgagctgccccaa

SEQ ID NO: 22434 - RNA, 21 nt, Synthetic Construct
  source 1..21: mol_type = other RNA
tcctgtactgagctgccccaa

SEQ ID NO: 22435 - RNA, 16 nt, Synthetic Construct
  source 1..16: mol_type = other RNA
gctattgacgaccgta

SEQ ID NO: 22436 - RNA, 16 nt, Synthetic Construct
  source 1..16: mol_type = other RNA
gctattgacgaccgta

SEQ ID NO: 22437 - RNA, 17 nt, Synthetic Construct
  source 1..17: mol_type = other RNA
cctcgcgcgattggagc

SEQ ID NO: 22438 - RNA, 26 nt, Synthetic Construct
  source 1..26: mol_type = other RNA
gcataagcgtgcttgactgcgagact

SEQ ID NO: 22439 - RNA, 23 nt, Synthetic Construct
  source 1..23: mol_type = other RNA
taaggggcagagagcgagacttt

SEQ ID NO: 22440 - RNA, 23 nt, Synthetic Construct
  source 1..23: mol_type = other RNA
taaggggcagagagcgagacttt

SEQ ID NO: 22441 - RNA, 33 nt, Synthetic Construct; identical to SEQ ID NO: 2126
  source 1..33: mol_type = other RNA

SEQ ID NO: 22442 - RNA, 17 nt, Synthetic Construct
  source 1..17: mol_type = other RNA
aagttgaccgcctgggg

SEQ ID NO: 22443 - RNA, 17 nt, Synthetic Construct
  source 1..17: mol_type = other RNA
aagttgaccgcctgggg

SEQ ID NO: 22444 - RNA, 35 nt, Synthetic Construct; identical to SEQ ID NO: 2505
  source 1..35: mol_type = other RNA

SEQ ID NO: 22445 - RNA, 25 nt, Synthetic Construct
  source 1..25: mol_type = other RNA
ttgaggatatgagatcgagacgaca

SEQ ID NO: 22446 - RNA, 25 nt, Synthetic Construct
  source 1..25: mol_type = other RNA
ttgaggatatgagatcgagacgaca

SEQ ID NO: 22447 - RNA, 36 nt, Synthetic Construct; identical to SEQ ID NO: 2344
  source 1..36: mol_type = other RNA

SEQ ID NO: 22448 - RNA, 34 nt, Synthetic Construct; identical to SEQ ID NO: 2364
  source 1..34: mol_type = other RNA

SEQ ID NO: 22449 - RNA, 34 nt, Synthetic Construct; identical to SEQ ID NO: 2364
  source 1..34: mol_type = other RNA

SEQ ID NO: 22450 - RNA, 22 nt, Synthetic Construct
  source 1..22: mol_type = other RNA
tggaatgtaaggaagtatgtat

SEQ ID NO: 22451 - RNA, 22 nt, Synthetic Construct
  source 1..22: mol_type = other RNA
tggaatgtaaggaagtatgtat

SEQ ID NO: 22452 - RNA, 23 nt, Synthetic Construct
  source 1..23: mol_type = other RNA
cgactcttagcggtggatcactc

SEQ ID NO: 22453 - RNA, 23 nt, Synthetic Construct
  source 1..23: mol_type = other RNA
cgactcttagcggtggatcactc

SEQ ID NO: 22454 - RNA, 43 nt, Synthetic Construct; identical to SEQ ID NO: 3562
  source 1..43: mol_type = other RNA

SEQ ID NO: 22455 - RNA, 23 nt, Synthetic Construct
  source 1..23: mol_type = other RNA
tgaggggcggagagcgagacttt

SEQ ID NO: 22456 - RNA, 23 nt, Synthetic Construct
  source 1..23: mol_type = other RNA
tccagtactgagctgccccgaga

SEQ ID NO: 22457 - RNA, 23 nt, Synthetic Construct
  source 1..23: mol_type = other RNA
tccagtactgagctgccccgaga

SEQ ID NO: 22458 - RNA, 23 nt, Synthetic Construct
  source 1..23: mol_type = other RNA
tagcagcacgtaaatattggcgt

SEQ ID NO: 22459 - RNA, 23 nt, Synthetic Construct
  source 1..23: mol_type = other RNA
tagcagcacgtaaatattggcgt

SEQ ID NO: 22460 - RNA, 18 nt, Synthetic Construct
  source 1..18: mol_type = other RNA
ggccgtcgtcagctcgtg

SEQ ID NO: 22461 - RNA, 18 nt, Synthetic Construct
  source 1..18: mol_type = other RNA
ggccgtcgtcagctcgtg

SEQ ID NO: 22462 - RNA, 25 nt, Synthetic Construct
  source 1..25: mol_type = other RNA
gggttgtaaaccgcttttgtcaggg

SEQ ID NO: 22463 - RNA, 25 nt, Synthetic Construct
  source 1..25: mol_type = other RNA
gggttgtaaaccgcttttgtcaggg

SEQ ID NO: 22464 - RNA, 16 nt, Synthetic Construct
  source 1..16: mol_type = other RNA
gggtgaaagcggggga

SEQ ID NO: 22465 - RNA, 22 nt, Synthetic Construct
  source 1..22: mol_type = other RNA
ccccttggggttgtaggaccac

SEQ ID NO: 22466 - RNA, 22 nt, Synthetic Construct
  source 1..22: mol_type = other RNA
ccccttggggttgtaggaccac

SEQ ID NO: 22467 - RNA, 16 nt, Synthetic Construct
  source 1..16: mol_type = other RNA
gggtctgtagctcagt

SEQ ID NO: 22468 - RNA, 16 nt, Synthetic Construct
  source 1..16: mol_type = other RNA
gggtctgtagctcagt

SEQ ID NO: 22469 - RNA, 39 nt, Synthetic Construct; identical to SEQ ID NO: 10211
  source 1..39: mol_type = other RNA

SEQ ID NO: 22470 - RNA, 34 nt, Synthetic Construct; identical to SEQ ID NO: 2364
  source 1..34: mol_type = other RNA

SEQ ID NO: 22471 - RNA, 21 nt, Synthetic Construct
  source 1..21: mol_type = other RNA
tgaggggcagagagcgggact

SEQ ID NO: 22472 - RNA, 21 nt, Synthetic Construct
  source 1..21: mol_type = other RNA
tgaggggcagagagcgggact

SEQ ID NO: 22473 - RNA, 32 nt, Synthetic Construct; identical to SEQ ID NO: 3713
  source 1..32: mol_type = other RNA

SEQ ID NO: 22474 - RNA, 15 nt, Synthetic Construct
  source 1..15: mol_type = other RNA
tagagtagggcggga

SEQ ID NO: 22475 - RNA, 15 nt, Synthetic Construct
  source 1..15: mol_type = other RNA
tagagtagggcggga

SEQ ID NO: 22476 - RNA, 23 nt, Synthetic Construct
  source 1..23: mol_type = other RNA
tgaggggcagagagcgagacttc

SEQ ID NO: 22477 - RNA, 23 nt, Synthetic Construct
  source 1..23: mol_type = other RNA
tgaggggcagagagcgagacttc

SEQ ID NO: 22478 - RNA, 26 nt, Synthetic Construct
  source 1..26: mol_type = other RNA
gacttaccaaacctatgcaaactccg

SEQ ID NO: 22479 - RNA, 26 nt, Synthetic Construct
  source 1..26: mol_type = other RNA
gacttaccaaacctatgcaaactccg

SEQ ID NO: 22480 - RNA, 18 nt, Synthetic Construct
  source 1..18: mol_type = other RNA
gcgccgatgatagtgcgg

SEQ ID NO: 22481 - RNA, 18 nt, Synthetic Construct
  source 1..18: mol_type = other RNA
gcgccgatgatagtgcgg

SEQ ID NO: 22482 - RNA, 18 nt, Synthetic Construct
  source 1..18: mol_type = other RNA
gaagttgaccgcctgggg

SEQ ID NO: 22483 - RNA, 18 nt, Synthetic Construct
  source 1..18: mol_type = other RNA
atggccgggacagagggc

SEQ ID NO: 22484 - RNA, 18 nt, Synthetic Construct
  source 1..18: mol_type = other RNA
atggccgggacagagggc

SEQ ID NO: 22485 - RNA, 17 nt, Synthetic Construct
  source 1..17: mol_type = other RNA
cccctggacctgtactg

SEQ ID NO: 22486 - RNA, 17 nt, Synthetic Construct
  source 1..17: mol_type = other RNA
cccctggacctgtactg

SEQ ID NO: 22487 - RNA, 33 nt, Synthetic Construct; identical to SEQ ID NO: 2386
  source 1..33: mol_type = other RNA

SEQ ID NO: 22488 - RNA, 33 nt, Synthetic Construct; identical to SEQ ID NO: 2386
  source 1..33: mol_type = other RNA

SEQ ID NO: 22489 - RNA, 25 nt, Synthetic Construct
  source 1..25: mol_type = other RNA
gtgaggatatgagatcgagacgaca

SEQ ID NO: 22490 - RNA, 25 nt, Synthetic Construct
  source 1..25: mol_type = other RNA
gtgaggatatgagatcgagacgaca

SEQ ID NO: 22491 - RNA, 22 nt, Synthetic Construct
  source 1..22: mol_type = other RNA
caaagtgctgttcgtgcaggta

SEQ ID NO: 22492 - RNA, 22 nt, Synthetic Construct
  source 1..22: mol_type = other RNA
caaagtgctgttcgtgcaggta

SEQ ID NO: 22493 - RNA, 15 nt, Synthetic Construct
  source 1..15: mol_type = other RNA
catgccgcgtgcggg

SEQ ID NO: 22494 - RNA, 15 nt, Synthetic Construct
  source 1..15: mol_type = other RNA
catgccgcgtgcggg

SEQ ID NO: 22495 - RNA, 36 nt, Synthetic Construct; identical to SEQ ID NO: 2469
  source 1..36: mol_type = other RNA

SEQ ID NO: 22496 - RNA, 36 nt, Synthetic Construct; identical to SEQ ID NO: 2469
  source 1..36: mol_type = other RNA

SEQ ID NO: 22497 - RNA, 22 nt, Synthetic Construct
  source 1..22: mol_type = other RNA
tgaggtagtaggttatgtggtt

SEQ ID NO: 22498 - RNA, 22 nt, Synthetic Construct
  source 1..22: mol_type = other RNA
tgaggtagtaggttatgtggtt

SEQ ID NO: 22499 - RNA, 22 nt, Synthetic Construct
  source 1..22: mol_type = other RNA
tggcagtgtcttagctggttgt

SEQ ID NO: 22500 - RNA, 17 nt, Synthetic Construct
  source 1..17: mol_type = other RNA
taggtcatcgtcaggct

SEQ ID NO: 22501 - RNA, 17 nt, Synthetic Construct
  source 1..17: mol_type = other RNA
taggtcatcgtcaggct

SEQ ID NO: 22502 - RNA, 21 nt, Synthetic Construct
  source 1..21: mol_type = other RNA
tggagtgtgacgatggtgttt

SEQ ID NO: 22503 - RNA, 21 nt, Synthetic Construct
  source 1..21: mol_type = other RNA
tggagtgtgacgatggtgttt

SEQ ID NO: 22504 - RNA, 36 nt, Synthetic Construct; identical to SEQ ID NO: 2456
  source 1..36: mol_type = other RNA

SEQ ID NO: 22505 - RNA, 36 nt, Synthetic Construct; identical to SEQ ID NO: 2456
  source 1..36: mol_type = other RNA

SEQ ID NO: 22506 - RNA, 23 nt, Synthetic Construct
  source 1..23: mol_type = other RNA
tggtaatacgacgtactcagtgt

SEQ ID NO: 22507 - RNA, 23 nt, Synthetic Construct
  source 1..23: mol_type = other RNA
tggtaatacgacgtactcagtgt

SEQ ID NO: 22508 - RNA, 28 nt, Synthetic Construct
  source 1..28: mol_type = other RNA
cgactcttagcggtggatcactcggctc

SEQ ID NO: 22509 - RNA, 28 nt, Synthetic Construct
  source 1..28: mol_type = other RNA
cgactcttagcggtggatcactcggctc

SEQ ID NO: 22510 - RNA, 21 nt, Synthetic Construct
  source 1..21: mol_type = other RNA
ggaatcgctagtaatcgcgga

SEQ ID NO: 22511 - RNA, 32 nt, Synthetic Construct; identical to SEQ ID NO: 3092
  source 1..32: mol_type = other RNA

SEQ ID NO: 22512 - RNA, 32 nt, Synthetic Construct; identical to SEQ ID NO: 3092
  source 1..32: mol_type = other RNA

SEQ ID NO: 22513 - RNA, 35 nt, Synthetic Construct; identical to SEQ ID NO: 2548
  source 1..35: mol_type = other RNA

SEQ ID NO: 22514 - RNA, 35 nt, Synthetic Construct; identical to SEQ ID NO: 2548
  source 1..35: mol_type = other RNA

SEQ ID NO: 22515 - RNA, 15 nt, Synthetic Construct
  source 1..15: mol_type = other RNA
cctcgcgcgattgga

SEQ ID NO: 22516 - RNA, 15 nt, Synthetic Construct
  source 1..15: mol_type = other RNA
cctcgcgcgattgga

SEQ ID NO: 22517 - RNA, 34 nt, Synthetic Construct; identical to SEQ ID NO: 2291
  source 1..34: mol_type = other RNA

SEQ ID NO: 22518 - RNA, 34 nt, Synthetic Construct; identical to SEQ ID NO: 2317
  source 1..34: mol_type = other RNA

SEQ ID NO: 22519 - RNA, 34 nt, Synthetic Construct; identical to SEQ ID NO: 2317
  source 1..34: mol_type = other RNA

SEQ ID NO: 22520 - RNA, 21 nt, Synthetic Construct
  source 1..21: mol_type = other RNA
ctagactgaagctccttgggg

SEQ ID NO: 22521 - RNA, 23 nt, Synthetic Construct
  source 1..23: mol_type = other RNA
tcggaatcgctagtaatcgcgga

SEQ ID NO: 22522 - RNA, 23 nt, Synthetic Construct
  source 1..23: mol_type = other RNA
nggtaatacgacgtacttagtgt

SEQ ID NO: 22523 - RNA, 23 nt, Synthetic Construct
  source 1..23: mol_type = other RNA
nggtaatacgacgtacttagtgt

SEQ ID NO: 22524 - RNA, 20 nt, Synthetic Construct
  source 1..20: mol_type = other RNA
gcgtgcttgactgcgagact

SEQ ID NO: 22525 - RNA, 20 nt, Synthetic Construct
  source 1..20: mol_type = other RNA
gcgtgcttgactgcgagact

SEQ ID NO: 22526 - RNA, 22 nt, Synthetic Construct
  source 1..22: mol_type = other RNA
tgaggtagtaggttgtgtggct

SEQ ID NO: 22527 - RNA, 33 nt, Synthetic Construct; identical to SEQ ID NO: 2209
  source 1..33: mol_type = other RNA

SEQ ID NO: 22528 - RNA, 23 nt, Synthetic Construct
  source 1..23: mol_type = other RNA
tgaggggcagagagcgaggcttt

SEQ ID NO: 22529 - RNA, 23 nt, Synthetic Construct
  source 1..23: mol_type = other RNA
tgaggggcagagagcgaggcttt

SEQ ID NO: 22530 - RNA, 23 nt, Synthetic Construct
  source 1..23: mol_type = other RNA
ggcagggttcgtgactggggtga

SEQ ID NO: 22531 - RNA, 23 nt, Synthetic Construct
  source 1..23: mol_type = other RNA
ggcagggttcgtgactggggtga

SEQ ID NO: 22532 - RNA, 22 nt, Synthetic Construct
  source 1..22: mol_type = other RNA
ctttgttcgattccgttgagta

SEQ ID NO: 22533 - RNA, 22 nt, Synthetic Construct
  source 1..22: mol_type = other RNA
ctttgttcgattccgttgagta

SEQ ID NO: 22534 - RNA, 15 nt, Synthetic Construct
  source 1..15: mol_type = other RNA
cccagaaacccggtc

SEQ ID NO: 22535 - RNA, 15 nt, Synthetic Construct
  source 1..15: mol_type = other RNA
cccagaaacccggtc

SEQ ID NO: 22536 - RNA, 25 nt, Synthetic Construct
  source 1..25: mol_type = other RNA
cctcgcgcgattggagcggccgata

SEQ ID NO: 22537 - RNA, 22 nt, Synthetic Construct
  source 1..22: mol_type = other RNA
gcgttgcaaccagtgccggggg

SEQ ID NO: 22538 - RNA, 18 nt, Synthetic Construct
  source 1..18: mol_type = other RNA
gtccggatcgtagtctgc

SEQ ID NO: 22539 - RNA, 18 nt, Synthetic Construct
  source 1..18: mol_type = other RNA
gtccggatcgtagtctgc

SEQ ID NO: 22540 - RNA, 18 nt, Synthetic Construct
  source 1..18: mol_type = other RNA
gctgtgatggccgagtgg

SEQ ID NO: 22541 - RNA, 23 nt, Synthetic Construct
  source 1..23: mol_type = other RNA
tggtaatacgacgcacttagtgt

SEQ ID NO: 22542 - RNA, 23 nt, Synthetic Construct
  source 1..23: mol_type = other RNA
tggtaatacgacgcacttagtgt

SEQ ID NO: 22543 - RNA, 22 nt, Synthetic Construct
  source 1..22: mol_type = other RNA
ggcagggttcgtgactggggtg

SEQ ID NO: 22544 - RNA, 31 nt, Synthetic Construct; identical to SEQ ID NO: 2310
  source 1..31: mol_type = other RNA

SEQ ID NO: 22545 - RNA, 31 nt, Synthetic Construct; identical to SEQ ID NO: 2310
  source 1..31: mol_type = other RNA

SEQ ID NO: 22546 - RNA, 16 nt, Synthetic Construct
  source 1..16: mol_type = other RNA
gtccccttcgtctaga

SEQ ID NO: 22547 - RNA, 41 nt, Synthetic Construct; identical to SEQ ID NO: 2441
  source 1..41: mol_type = other RNA

SEQ ID NO: 22548 - RNA, 23 nt, Synthetic Construct
  source 1..23: mol_type = other RNA
tcggaatcgctagtaatcgcgga

SEQ ID NO: 22549 - RNA, 23 nt, Synthetic Construct
  source 1..23: mol_type = other RNA
tggaatgtaaagaagtatgtacc

SEQ ID NO: 22550 - RNA, 23 nt, Synthetic Construct
  source 1..23: mol_type = other RNA
tggaatgtaaagaagtatgtacc

SEQ ID NO: 22551 - RNA, 23 nt, Synthetic Construct
  source 1..23: mol_type = other RNA
caaagtgctgttcgtgcaggtgg

SEQ ID NO: 22552 - RNA, 15 nt, Synthetic Construct
  source 1..15: mol_type = other RNA
accgcttttgtcagg

SEQ ID NO: 22553 - RNA, 15 nt, Synthetic Construct
  source 1..15: mol_type = other RNA
accgcttttgtcagg

SEQ ID NO: 22554 - RNA, 19 nt, Synthetic Construct
  source 1..19: mol_type = other RNA
gtccggatcgtagtctgca

SEQ ID NO: 22555 - RNA, 19 nt, Synthetic Construct
  source 1..19: mol_type = other RNA
gtccggatcgtagtctgca

SEQ ID NO: 22556 - RNA, 30 nt, Synthetic Construct; identical to SEQ ID NO: 2840
  source 1..30: mol_type = other RNA

SEQ ID NO: 22557 - RNA, 34 nt, Synthetic Construct; identical to SEQ ID NO: 2183
  source 1..34: mol_type = other RNA

SEQ ID NO: 22558 - RNA, 34 nt, Synthetic Construct; identical to SEQ ID NO: 2183
  source 1..34: mol_type = other RNA

SEQ ID NO: 22559 - RNA, 16 nt, Synthetic Construct
  source 1..16: mol_type = other RNA
agttgaccgcctgggg

SEQ ID NO: 22560 - RNA, 16 nt, Synthetic Construct
  source 1..16: mol_type = other RNA
agttgaccgcctgggg

SEQ ID NO: 22561 - RNA, 33 nt, Synthetic Construct; identical to SEQ ID NO: 1982
  source 1..33: mol_type = other RNA

SEQ ID NO: 22562 - RNA, 17 nt, Synthetic Construct
  source 1..17: mol_type = other RNA
accggaggaaggtgggg

SEQ ID NO: 22563 - RNA, 17 nt, Synthetic Construct
  source 1..17: mol_type = other RNA
accggaggaaggtgggg

SEQ ID NO: 22564 - RNA, 34 nt, Synthetic Construct; identical to SEQ ID NO: 2529
  source 1..34: mol_type = other RNA

SEQ ID NO: 22565 - RNA, 34 nt, Synthetic Construct; identical to SEQ ID NO: 2529
  source 1..34: mol_type = other RNA

SEQ ID NO: 22566 - RNA, 35 nt, Synthetic Construct; identical to SEQ ID NO: 2450
  source 1..35: mol_type = other RNA

SEQ ID NO: 22567 - RNA, 23 nt, Synthetic Construct
  source 1..23: mol_type = other RNA
gtctttgttcgattccgttgagt

SEQ ID NO: 22568 - RNA, 23 nt, Synthetic Construct
  source 1..23: mol_type = other RNA
gtctttgttcgattccgttgagt

SEQ ID NO: 22569 - RNA, 23 nt, Synthetic Construct
  source 1..23: mol_type = other RNA
tgaggggcagagagcgagacctt

SEQ ID NO: 22570 - RNA, 26 nt, Synthetic Construct
  source 1..26: mol_type = other RNA
gatgcgtggtaggagagcgttctgta

SEQ ID NO: 22571 - RNA, 31 nt, Synthetic Construct; identical to SEQ ID NO: 2758
  source 1..31: mol_type = other RNA

SEQ ID NO: 22572 - RNA, 28 nt, Synthetic Construct
  source 1..28: mol_type = other RNA
gctttgatccggagatttccgaatgggg

SEQ ID NO: 22573 - RNA, 28 nt, Synthetic Construct
  source 1..28: mol_type = other RNA
gctttgatccggagatttccgaatgggg

SEQ ID NO: 22574 - RNA, 20 nt, Synthetic Construct
  source 1..20: mol_type = other RNA
tgaggtagtaggttgtgtgg

SEQ ID NO: 22575 - RNA, 20 nt, Synthetic Construct
  source 1..20: mol_type = other RNA
tgaggtagtaggttgtgtgg

SEQ ID NO: 22576 - RNA, 23 nt, Synthetic Construct
  source 1..23: mol_type = other RNA
tgaggtagtaggttgtgtggttc

SEQ ID NO: 22577 - RNA, 18 nt, Synthetic Construct
  source 1..18: mol_type = other RNA
gcgccgatgatagtgcgg

SEQ ID NO: 22578 - RNA, 16 nt, Synthetic Construct
  source 1..16: mol_type = other RNA
cccctggacctgtact

SEQ ID NO: 22579 - RNA, 23 nt, Synthetic Construct
  source 1..23: mol_type = other RNA
tacagtagtctgcacattggttt

SEQ ID NO: 22580 - RNA, 36 nt, Synthetic Construct; identical to SEQ ID NO: 2520
  source 1..36: mol_type = other RNA

SEQ ID NO: 22581 - RNA, 22 nt, Synthetic Construct
  source 1..22: mol_type = other RNA
tgtagtgtttcctactttatgg

SEQ ID NO: 22582 - RNA, 20 nt, Synthetic Construct
  source 1..20: mol_type = other RNA
gaatcgctagtaatcgcgga

SEQ ID NO: 22583 - RNA, 25 nt, Synthetic Construct
  source 1..25: mol_type = other RNA
gtgaggatatgagatcgagacgaca

SEQ ID NO: 22584 - RNA, 25 nt, Synthetic Construct
  source 1..25: mol_type = other RNA
gtgaggatatgagatcgagacgaca

SEQ ID NO: 22585 - RNA, 15 nt, Synthetic Construct
  source 1..15: mol_type = other RNA
tcgagtcgtcctgcg

SEQ ID NO: 22586 - RNA, 34 nt, Synthetic Construct; identical to SEQ ID NO: 2291
  source 1..34: mol_type = other RNA

SEQ ID NO: 22587 - RNA, 34 nt, Synthetic Construct; identical to SEQ ID NO: 2291
  source 1..34: mol_type = other RNA

SEQ ID NO: 22588 - RNA, 32 nt, Synthetic Construct; identical to SEQ ID NO: 2086
  source 1..32: mol_type = other RNA

SEQ ID NO: 22589 - RNA, 27 nt, Synthetic Construct
  source 1..27: mol_type = other RNA
ccccccactgctgaatttgactggctt

SEQ ID NO: 22590 - RNA, 17 nt, Synthetic Construct
  source 1..17: mol_type = other RNA
tcccagaaacccggtcg

SEQ ID NO: 22591 - RNA, 17 nt, Synthetic Construct
  source 1..17: mol_type = other RNA
tcccagaaacccggtcg

SEQ ID NO: 22592 - RNA, 20 nt, Synthetic Construct
  source 1..20: mol_type = other RNA
tgaggtagtaggttgtacag

SEQ ID NO: 22593 - RNA, 20 nt, Synthetic Construct
  source 1..20: mol_type = other RNA
tgaggtagtaggttgtacag

SEQ ID NO: 22594 - RNA, 23 nt, Synthetic Construct
  source 1..23: mol_type = other RNA
tggtagtacgacgtacttagtgt

SEQ ID NO: 22595 - RNA, 23 nt, Synthetic Construct
  source 1..23: mol_type = other RNA
tcctgtactgagctgccccggga

SEQ ID NO: 22596 - RNA, 23 nt, Synthetic Construct
  source 1..23: mol_type = other RNA
tcctgtactgagctgccccggga

SEQ ID NO: 22597 - RNA, 25 nt, Synthetic Construct
  source 1..25: mol_type = other RNA
ttgaggatatgaggtcgagacgaca

SEQ ID NO: 22598 - RNA, 25 nt, Synthetic Construct
  source 1..25: mol_type = other RNA
ttgaggatatgaggtcgagacgaca

SEQ ID NO: 22599 - RNA, 23 nt, Synthetic Construct
  source 1..23: mol_type = other RNA
tcctgtactgagccgccccgagt

SEQ ID NO: 22600 - RNA, 23 nt, Synthetic Construct
  source 1..23: mol_type = other RNA
tcctgtactgagccgccccgagt

SEQ ID NO: 22601 - RNA, 22 nt, Synthetic Construct
  source 1..22: mol_type = other RNA
tgaggaagtaggttgtgtggtt

SEQ ID NO: 22602 - RNA, 22 nt, Synthetic Construct
  source 1..22: mol_type = other RNA
tgaggaagtaggttgtgtggtt

SEQ ID NO: 22603 - RNA, 22 nt, Synthetic Construct
  source 1..22: mol_type = other RNA
tctttgttcgattccgttgagt

SEQ ID NO: 22604 - RNA, 22 nt, Synthetic Construct
  source 1..22: mol_type = other RNA
tctttgttcgattccgttgagt

SEQ ID NO: 22605 - RNA, 26 nt, Synthetic Construct
  source 1..26: mol_type = other RNA
ggcgcttgagagaactctggagaagg

SEQ ID NO: 22606 - RNA, 23 nt, Synthetic Construct
  source 1..23: mol_type = other RNA
tgaggagcagagagcgagacttt

SEQ ID NO: 22607 - RNA, 23 nt, Synthetic Construct
  source 1..23: mol_type = other RNA
tgaggagcagagagcgagacttt

SEQ ID NO: 22608 - RNA, 18 nt, Synthetic Construct
  source 1..18: mol_type = other RNA
acagtcaggatgttggct

SEQ ID NO: 22609 - RNA, 18 nt, Synthetic Construct
  source 1..18: mol_type = other RNA
acagtcaggatgttggct

SEQ ID NO: 22610 - RNA, 30 nt, Synthetic Construct; identical to SEQ ID NO: 1236
  source 1..30: mol_type = other RNA

SEQ ID NO: 22611 - RNA, 30 nt, Synthetic Construct; identical to SEQ ID NO: 1236
  source 1..30: mol_type = other RNA

SEQ ID NO: 22612 - RNA, 28 nt, Synthetic Construct
  source 1..28: mol_type = other RNA
gctttacattggactttgaacagatctg

SEQ ID NO: 22613 - RNA, 28 nt, Synthetic Construct
  source 1..28: mol_type = other RNA
gctttacattggactttgaacagatctg

SEQ ID NO: 22614 - RNA, 20 nt, Synthetic Construct
  source 1..20: mol_type = other RNA
tgaggtagtaggctgtgtgg

SEQ ID NO: 22615 - RNA, 20 nt, Synthetic Construct
  source 1..20: mol_type = other RNA
tgaggtagtaggctgtgtgg

SEQ ID NO: 22616 - RNA, 22 nt, Synthetic Construct
  source 1..22: mol_type = other RNA
gctcacggaaagagaatgaagc

SEQ ID NO: 22617 - RNA, 22 nt, Synthetic Construct
  source 1..22: mol_type = other RNA
gctcacggaaagagaatgaagc

SEQ ID NO: 22618 - RNA, 16 nt, Synthetic Construct
  source 1..16: mol_type = other RNA
tgcacgaaagcgtggg

SEQ ID NO: 22619 - RNA, 22 nt, Synthetic Construct
  source 1..22: mol_type = other RNA
caaagtgctgttcgtgcaggta

SEQ ID NO: 22620 - RNA, 22 nt, Synthetic Construct
  source 1..22: mol_type = other RNA
caaagtgctgttcgtgcaggta

SEQ ID NO: 22621 - RNA, 21 nt, Synthetic Construct
  source 1..21: mol_type = other RNA
tgaagtagtaggttgtgtggt

SEQ ID NO: 22622 - RNA, 21 nt, Synthetic Construct
  source 1..21: mol_type = other RNA
tgaagtagtaggttgtgtggt

SEQ ID NO: 22623 - RNA, 31 nt, Synthetic Construct; identical to SEQ ID NO: 2263
  source 1..31: mol_type = other RNA

SEQ ID NO: 22624 - RNA, 31 nt, Synthetic Construct; identical to SEQ ID NO: 2263
  source 1..31: mol_type = other RNA

SEQ ID NO: 22625 - RNA, 22 nt, Synthetic Construct
  source 1..22: mol_type = other RNA
tgaggtggtaggttgtgtggtt

SEQ ID NO: 22626 - RNA, 17 nt, Synthetic Construct
  source 1..17: mol_type = other RNA
ggcccttatgggtaggg

SEQ ID NO: 22627 - RNA, 17 nt, Synthetic Construct
  source 1..17: mol_type = other RNA
ggcccttatgggtaggg

SEQ ID NO: 22628 - RNA, 28 nt, Synthetic Construct
  source 1..28: mol_type = other RNA
gctttgatccggagatttccgaatgggg

SEQ ID NO: 22629 - RNA, 28 nt, Synthetic Construct
  source 1..28: mol_type = other RNA
gctttgatccggagatttccgaatgggg

SEQ ID NO: 22630 - RNA, 22 nt, Synthetic Construct
  source 1..22: mol_type = other RNA
tggggtagtaggttgtgtggtt

SEQ ID NO: 22631 - RNA, 22 nt, Synthetic Construct
  source 1..22: mol_type = other RNA
tggggtagtaggttgtgtggtt

SEQ ID NO: 22632 - RNA, 17 nt, Synthetic Construct
  source 1..17: mol_type = other RNA
cagtcaggatgttggct

SEQ ID NO: 22633 - RNA, 17 nt, Synthetic Construct
  source 1..17: mol_type = other RNA
cagtcaggatgttggct

SEQ ID NO: 22634 - RNA, 23 nt, Synthetic Construct
  source 1..23: mol_type = other RNA
tagtaatacgacgtacttagtgt

SEQ ID NO: 22635 - RNA, 23 nt, Synthetic Construct
  source 1..23: mol_type = other RNA
tagtaatacgacgtacttagtgt

SEQ ID NO: 22636 - RNA, 21 nt, Synthetic Construct
  source 1..21: mol_type = other RNA
tgaggggcagagagcgagaca

SEQ ID NO: 22637 - RNA, 20 nt, Synthetic Construct
  source 1..20: mol_type = other RNA
ggaggtagtaggttgtgtgg

SEQ ID NO: 22638 - RNA, 20 nt, Synthetic Construct
  source 1..20: mol_type = other RNA
ggaggtagtaggttgtgtgg

SEQ ID NO: 22639 - RNA, 18 nt, Synthetic Construct
  source 1..18: mol_type = other RNA
tgcgtagatatgcggagg

SEQ ID NO: 22640 - RNA, 18 nt, Synthetic Construct
  source 1..18: mol_type = other RNA
tgcgtagatatgcggagg

SEQ ID NO: 22641 - RNA, 20 nt, Synthetic Construct
  source 1..20: mol_type = other RNA
caggacagtgaaacgagtca

SEQ ID NO: 22642 - RNA, 20 nt, Synthetic Construct
  source 1..20: mol_type = other RNA
caggacagtgaaacgagtca

SEQ ID NO: 22643 - RNA, 22 nt, Synthetic Construct
  source 1..22: mol_type = other RNA
atataatacaacctgctaagtg

SEQ ID NO: 22644 - RNA, 22 nt, Synthetic Construct
  source 1..22: mol_type = other RNA
tgaggtagtaggttgtgtgatt

SEQ ID NO: 22645 - RNA, 30 nt, Synthetic Construct; identical to SEQ ID NO: 2274
  source 1..30: mol_type = other RNA

SEQ ID NO: 22646 - RNA, 30 nt, Synthetic Construct; identical to SEQ ID NO: 2274
  source 1..30: mol_type = other RNA

SEQ ID NO: 22647 - RNA, 16 nt, Synthetic Construct
  source 1..16: mol_type = other RNA
ggtagctcgttgggct

SEQ ID NO: 22648 - RNA, 16 nt, Synthetic Construct
  source 1..16: mol_type = other RNA
ggtagctcgttgggct

SEQ ID NO: 22649 - RNA, 22 nt, Synthetic Construct
  source 1..22: mol_type = other RNA
tgagatagtaggttgtgtggtt

SEQ ID NO: 22650 - RNA, 31 nt, Synthetic Construct; identical to SEQ ID NO: 2507
  source 1..31: mol_type = other RNA

SEQ ID NO: 22651 - RNA, 31 nt, Synthetic Construct; identical to SEQ ID NO: 2507
  source 1..31: mol_type = other RNA

SEQ ID NO: 22652 - RNA, 17 nt, Synthetic Construct
  source 1..17: mol_type = other RNA
gccatgccgcgtgcggg

SEQ ID NO: 22653 - RNA, 35 nt, Synthetic Construct; identical to SEQ ID NO: 2514
  source 1..35: mol_type = other RNA

SEQ ID NO: 22654 - RNA, 35 nt, Synthetic Construct; identical to SEQ ID NO: 2514
  source 1..35: mol_type = other RNA

SEQ ID NO: 22655 - RNA, 23 nt, Synthetic Construct
  source 1..23: mol_type = other RNA
tggtgatacgacgtacttagtgt

SEQ ID NO: 22656 - RNA, 23 nt, Synthetic Construct
  source 1..23: mol_type = other RNA
tggtgatacgacgtacttagtgt

SEQ ID NO: 22657 - RNA, 24 nt, Synthetic Construct
  source 1..24: mol_type = other RNA
ggttgtaaaccgcttttgtcaggg

SEQ ID NO: 22658 - RNA, 24 nt, Synthetic Construct
  source 1..24: mol_type = other RNA
gggttgtaaaccgcttttgtcagg

SEQ ID NO: 22659 - RNA, 19 nt, Synthetic Construct
  source 1..19: mol_type = other RNA
ctgatcgagtcgtcctgcg

SEQ ID NO: 22660 - RNA, 27 nt, Synthetic Construct
  source 1..27: mol_type = other RNA
ncccccactgctaaatttgactggctt

SEQ ID NO: 22661 - RNA, 27 nt, Synthetic Construct
  source 1..27: mol_type = other RNA
ncccccactgctaaatttgactggctt

SEQ ID NO: 22662 - RNA, 32 nt, Synthetic Construct; identical to SEQ ID NO: 4279
  source 1..32: mol_type = other RNA

SEQ ID NO: 22663 - RNA, 21 nt, Synthetic Construct
  source 1..21: mol_type = other RNA
gctattgacgaccgtaccgca

SEQ ID NO: 22664 - RNA, 21 nt, Synthetic Construct
  source 1..21: mol_type = other RNA
gctattgacgaccgtaccgca

SEQ ID NO: 22665 - RNA, 16 nt, Synthetic Construct
  source 1..16: mol_type = other RNA
ctgacgctcatgcacg

SEQ ID NO: 22666 - RNA, 16 nt, Synthetic Construct
  source 1..16: mol_type = other RNA
ctgacgctcatgcacg

SEQ ID NO: 22667 - RNA, 22 nt, Synthetic Construct
  source 1..22: mol_type = other RNA
tgtcaactggttgttgggaggg

SEQ ID NO: 22668 - RNA, 22 nt, Synthetic Construct
  source 1..22: mol_type = other RNA
tgtcaactggttgttgggaggg

SEQ ID NO: 22669 - RNA, 36 nt, Synthetic Construct; identical to SEQ ID NO: 2366
  source 1..36: mol_type = other RNA

SEQ ID NO: 22670 - RNA, 36 nt, Synthetic Construct; identical to SEQ ID NO: 2366
  source 1..36: mol_type = other RNA

SEQ ID NO: 22671 - RNA, 23 nt, Synthetic Construct
  source 1..23: mol_type = other RNA
tagtaatacgacgtacttagtgt

SEQ ID NO: 22672 - RNA, 23 nt, Synthetic Construct
  source 1..23: mol_type = other RNA
tagtaatacgacgtacttagtgt

SEQ ID NO: 22673 - RNA, 32 nt, Synthetic Construct; identical to SEQ ID NO: 2467
  source 1..32: mol_type = other RNA

SEQ ID NO: 22674 - RNA, 22 nt, Synthetic Construct
  source 1..22: mol_type = other RNA
tgaggtagtaggttgtatggta

SEQ ID NO: 22675 - RNA, 23 nt, Synthetic Construct
  source 1..23: mol_type = other RNA
tcctgtactgggctgccccgagt

SEQ ID NO: 22676 - RNA, 35 nt, Synthetic Construct; identical to SEQ ID NO: 2397
  source 1..35: mol_type = other RNA

SEQ ID NO: 22677 - RNA, 35 nt, Synthetic Construct; identical to SEQ ID NO: 2397
  source 1..35: mol_type = other RNA

SEQ ID NO: 22678 - RNA, 29 nt, Synthetic Construct
  source 1..29: mol_type = other RNA
ttacaggggttcgaatcccctaggggacg

SEQ ID NO: 22679 - RNA, 29 nt, Synthetic Construct
  source 1..29: mol_type = other RNA
ttacaggggttcgaatcccctaggggacg

SEQ ID NO: 22680 - RNA, 23 nt, Synthetic Construct
  source 1..23: mol_type = other RNA
tcctgtactgagctgccctgaga

SEQ ID NO: 22681 - RNA, 23 nt, Synthetic Construct
  source 1..23: mol_type = other RNA
tcctgtactgagctgccctgaga

SEQ ID NO: 22682 - RNA, 37 nt, Synthetic Construct; identical to SEQ ID NO: 2447
  source 1..37: mol_type = other RNA

SEQ ID NO: 22683 - RNA, 27 nt, Synthetic Construct
  source 1..27: mol_type = other RNA
agagcagctaataccgcatacgacctg

SEQ ID NO: 22684 - RNA, 27 nt, Synthetic Construct
  source 1..27: mol_type = other RNA
agagcagctaataccgcatacgacctg

SEQ ID NO: 22685 - RNA, 15 nt, Synthetic Construct
  source 1..15: mol_type = other RNA
gttcggaagattttc

SEQ ID NO: 22686 - RNA, 15 nt, Synthetic Construct
  source 1..15: mol_type = other RNA
gttcggaagattttc

SEQ ID NO: 22687 - RNA, 34 nt, Synthetic Construct; identical to SEQ ID NO: 2183
  source 1..34: mol_type = other RNA

SEQ ID NO: 22688 - RNA, 19 nt, Synthetic Construct
  source 1..19: mol_type = other RNA
gcgccgatgatagtgcgga

SEQ ID NO: 22689 - RNA, 23 nt, Synthetic Construct
  source 1..23: mol_type = other RNA
tgaggggcagagggcgagacttt

SEQ ID NO: 22690 - RNA, 38 nt, Synthetic Construct; identical to SEQ ID NO: 11817
  source 1..38: mol_type = other RNA

SEQ ID NO: 22691 - RNA, 38 nt, Synthetic Construct; identical to SEQ ID NO: 11817
  source 1..38: mol_type = other RNA

SEQ ID NO: 22692 - RNA, 35 nt, Synthetic Construct; identical to SEQ ID NO: 2397
  source 1..35: mol_type = other RNA

SEQ ID NO: 22693 - RNA, 19 nt, Synthetic Construct
  source 1..19: mol_type = other RNA
cctgtctgaatatgggggg

SEQ ID NO: 22694 - RNA, 19 nt, Synthetic Construct
  source 1..19: mol_type = other RNA
cctgtctgaatatgggggg

SEQ ID NO: 22695 - RNA, 22 nt, Synthetic Construct
  source 1..22: mol_type = other RNA
ggaggagttcgaaggtacgcta

SEQ ID NO: 22696 - RNA, 22 nt, Synthetic Construct
  source 1..22: mol_type = other RNA
ggaggagttcgaaggtacgcta

SEQ ID NO: 22697 - RNA, 23 nt, Synthetic Construct
  source 1..23: mol_type = other RNA
tggtaatacgacgtacttagtgt

SEQ ID NO: 22698 - RNA, 23 nt, Synthetic Construct
  source 1..23: mol_type = other RNA
tggtaatacgacgtacttagtgt

SEQ ID NO: 22699 - RNA, 31 nt, Synthetic Construct; identical to SEQ ID NO: 1627
  source 1..31: mol_type = other RNA

SEQ ID NO: 22700 - RNA, 31 nt, Synthetic Construct; identical to SEQ ID NO: 1627
  source 1..31: mol_type = other RNA

SEQ ID NO: 22701 - RNA, 19 nt, Synthetic Construct
  source 1..19: mol_type = other RNA
ctgatcgagtcgtcctgcg

SEQ ID NO: 22702 - RNA, 19 nt, Synthetic Construct
  source 1..19: mol_type = other RNA
ctgatcgagtcgtcctgcg

SEQ ID NO: 22703 - RNA, 16 nt, Synthetic Construct
  source 1..16: mol_type = other RNA
ccatgccgcgtgcggg

SEQ ID NO: 22704 - RNA, 16 nt, Synthetic Construct
  source 1..16: mol_type = other RNA
gtcaacggccatacca

SEQ ID NO: 22705 - RNA, 33 nt, Synthetic Construct; identical to SEQ ID NO: 2556
  source 1..33: mol_type = other RNA

SEQ ID NO: 22706 - RNA, 33 nt, Synthetic Construct; identical to SEQ ID NO: 2556
  source 1..33: mol_type = other RNA

SEQ ID NO: 22707 - RNA, 26 nt, Synthetic Construct
  source 1..26: mol_type = other RNA
gagcagctaataccgcatacgacctg

SEQ ID NO: 22708 - RNA, 26 nt, Synthetic Construct
  source 1..26: mol_type = other RNA
gagcagctaataccgcatacgacctg

SEQ ID NO: 22709 - RNA, 33 nt, Synthetic Construct; identical to SEQ ID NO: 2266
  source 1..33: mol_type = other RNA

SEQ ID NO: 22710 - RNA, 33 nt, Synthetic Construct; identical to SEQ ID NO: 2266
  source 1..33: mol_type = other RNA

SEQ ID NO: 22711 - RNA, 22 nt, Synthetic Construct
  source 1..22: mol_type = other RNA
gcactctaatgagactgccggt

SEQ ID NO: 22712 - RNA, 32 nt, Synthetic Construct; identical to SEQ ID NO: 2296
  source 1..32: mol_type = other RNA

SEQ ID NO: 22713 - RNA, 23 nt, Synthetic Construct
  source 1..23: mol_type = other RNA
agcagcattgtacagggctatgt

SEQ ID NO: 22714 - RNA, 23 nt, Synthetic Construct
  source 1..23: mol_type = other RNA
tggtaattcgacgtacttagtgt

SEQ ID NO: 22715 - RNA, 23 nt, Synthetic Construct
  source 1..23: mol_type = other RNA
tggtaattcgacgtacttagtgt

SEQ ID NO: 22716 - RNA, 18 nt, Synthetic Construct
  source 1..18: mol_type = other RNA
tctaatgagactgccggt

SEQ ID NO: 22717 - RNA, 18 nt, Synthetic Construct
  source 1..18: mol_type = other RNA
tctaatgagactgccggt

SEQ ID NO: 22718 - RNA, 21 nt, Synthetic Construct
  source 1..21: mol_type = other RNA
ctaatcccagaaacccggtcg

SEQ ID NO: 22719 - RNA, 21 nt, Synthetic Construct
  source 1..21: mol_type = other RNA
ctaatcccagaaacccggtcg

SEQ ID NO: 22720 - RNA, 16 nt, Synthetic Construct
  source 1..16: mol_type = other RNA
gagctgtggatagggg

SEQ ID NO: 22721 - RNA, 23 nt, Synthetic Construct
  source 1..23: mol_type = other RNA
tgaggggcagagagcgggacttt

SEQ ID NO: 22722 - RNA, 22 nt, Synthetic Construct
  source 1..22: mol_type = other RNA
taacagtctacagccatggtcg

SEQ ID NO: 22723 - RNA, 22 nt, Synthetic Construct
  source 1..22: mol_type = other RNA
cgactcttagcggtggatcact

SEQ ID NO: 22724 - RNA, 21 nt, Synthetic Construct
  source 1..21: mol_type = other RNA
gtgggcgtttgaagtgaagtg

SEQ ID NO: 22725 - RNA, 21 nt, Synthetic Construct
  source 1..21: mol_type = other RNA
gtgggcgtttgaagtgaagtg

SEQ ID NO: 22726 - RNA, 22 nt, Synthetic Construct
  source 1..22: mol_type = other RNA
tcctgtactgagccgccccgag

SEQ ID NO: 22727 - RNA, 22 nt, Synthetic Construct
  source 1..22: mol_type = other RNA
tcctgtactgagccgccccgag

SEQ ID NO: 22728 - RNA, 21 nt, Synthetic Construct
  source 1..21: mol_type = other RNA
tcctgtctgaatatgggggga

SEQ ID NO: 22729 - RNA, 18 nt, Synthetic Construct
  source 1..18: mol_type = other RNA
accggaggaaggtgggga

SEQ ID NO: 22730 - RNA, 20 nt, Synthetic Construct
  source 1..20: mol_type = other RNA
tgaggtagtaggttgcgtgg

SEQ ID NO: 22731 - RNA, 20 nt, Synthetic Construct
  source 1..20: mol_type = other RNA
tgaggtagtaggttgcgtgg

SEQ ID NO: 22732 - RNA, 17 nt, Synthetic Construct
  source 1..17: mol_type = other RNA
gcgtagatatgcggagg

SEQ ID NO: 22733 - RNA, 17 nt, Synthetic Construct
  source 1..17: mol_type = other RNA
gcgtagatatgcggagg

SEQ ID NO: 22734 - RNA, 18 nt, Synthetic Construct
  source 1..18: mol_type = other RNA
cgccgatgatagtgcgga

SEQ ID NO: 22735 - RNA, 23 nt, Synthetic Construct
  source 1..23: mol_type = other RNA
tgaggggcagagggcgagacttt

SEQ ID NO: 22736 - RNA, 23 nt, Synthetic Construct
  source 1..23: mol_type = other RNA
tgaggggcagagggcgagacttt

SEQ ID NO: 22737 - RNA, 20 nt, Synthetic Construct
  source 1..20: mol_type = other RNA
gccatcatttaaagaaagcg

SEQ ID NO: 22738 - RNA, 20 nt, Synthetic Construct
  source 1..20: mol_type = other RNA
gccatcatttaaagaaagcg

SEQ ID NO: 22739 - RNA, 34 nt, Synthetic Construct; identical to SEQ ID NO: 2317
  source 1..34: mol_type = other RNA

SEQ ID NO: 22740 - RNA, 33 nt, Synthetic Construct; identical to SEQ ID NO: 2209
  source 1..33: mol_type = other RNA

SEQ ID NO: 22741 - RNA, 33 nt, Synthetic Construct; identical to SEQ ID NO: 2209
  source 1..33: mol_type = other RNA

SEQ ID NO: 22742 - RNA, 23 nt, Synthetic Construct
  source 1..23: mol_type = other RNA
cggtaatacgacgtacttagtgt

SEQ ID NO: 22743 - RNA, 23 nt, Synthetic Construct
  source 1..23: mol_type = other RNA
cggtaatacgacgtacttagtgt

SEQ ID NO: 22744 - RNA, 44 nt, Synthetic Construct; identical to SEQ ID NO: 5536
  source 1..44: mol_type = other RNA

SEQ ID NO: 22745 - RNA, 44 nt, Synthetic Construct; identical to SEQ ID NO: 5536
  source 1..44: mol_type = other RNA

SEQ ID NO: 22746 - RNA, 17 nt, Synthetic Construct
  source 1..17: mol_type = other RNA
tggccgggacagagggc

SEQ ID NO: 22747 - RNA, 17 nt, Synthetic Construct
  source 1..17: mol_type = other RNA
tggccgggacagagggc

SEQ ID NO: 22748 - RNA, 26 nt, Synthetic Construct
  source 1..26: mol_type = other RNA
tgtcggctcatctcatcctggggctg

SEQ ID NO: 22749 - RNA, 24 nt, Synthetic Construct
  source 1..24: mol_type = other RNA
tgtaaacatccctgactggaagct

SEQ ID NO: 22750 - RNA, 21 nt, Synthetic Construct
  source 1..21: mol_type = other RNA
cacgtcatacaatggccggga

SEQ ID NO: 22751 - RNA, 21 nt, Synthetic Construct
  source 1..21: mol_type = other RNA
cacgtcatacaatggccggga

SEQ ID NO: 22752 - RNA, 27 nt, Synthetic Construct
  source 1..27: mol_type = other RNA
ggatttccccttggggttgtaggacca

SEQ ID NO: 22753 - RNA, 27 nt, Synthetic Construct
  source 1..27: mol_type = other RNA
ggatttccccttggggttgtaggacca

SEQ ID NO: 22754 - RNA, 24 nt, Synthetic Construct
  source 1..24: mol_type = other RNA
tcggctcatctcatcctggggctg

SEQ ID NO: 22755 - RNA, 24 nt, Synthetic Construct
  source 1..24: mol_type = other RNA
tcggctcatctcatcctggggctg

SEQ ID NO: 22756 - RNA, 21 nt, Synthetic Construct
  source 1..21: mol_type = other RNA
agccatcatttaaagaaagcg

SEQ ID NO: 22757 - RNA, 21 nt, Synthetic Construct
  source 1..21: mol_type = other RNA
agccatcatttaaagaaagcg

SEQ ID NO: 22758 - RNA, 33 nt, Synthetic Construct; identical to SEQ ID NO: 2479
  source 1..33: mol_type = other RNA

SEQ ID NO: 22759 - RNA, 33 nt, Synthetic Construct; identical to SEQ ID NO: 2479
  source 1..33: mol_type = other RNA

SEQ ID NO: 22760 - RNA, 36 nt, Synthetic Construct; identical to SEQ ID NO: 2660
  source 1..36: mol_type = other RNA

SEQ ID NO: 22761 - RNA, 36 nt, Synthetic Construct; identical to SEQ ID NO: 2660
  source 1..36: mol_type = other RNA

SEQ ID NO: 22762 - RNA, 22 nt, Synthetic Construct
  source 1..22: mol_type = other RNA
tgaggtagtagtttgtgctgtc

SEQ ID NO: 22763 - RNA, 15 nt, Synthetic Construct
  source 1..15: mol_type = other RNA
gagagcctggacaca

SEQ ID NO: 22764 - RNA, 15 nt, Synthetic Construct
  source 1..15: mol_type = other RNA
gagagcctggacaca

SEQ ID NO: 22765 - RNA, 25 nt, Synthetic Construct
  source 1..25: mol_type = other RNA
ttgaggatatgaggtcgagacgaca

SEQ ID NO: 22766 - RNA, 25 nt, Synthetic Construct
  source 1..25: mol_type = other RNA
ttgaggatatgaggtcgagacgaca

SEQ ID NO: 22767 - RNA, 20 nt, Synthetic Construct
  source 1..20: mol_type = other RNA
gcgtgcttgactgcgagact

SEQ ID NO: 22768 - RNA, 20 nt, Synthetic Construct
  source 1..20: mol_type = other RNA
gcgtgcttgactgcgagact

SEQ ID NO: 22769 - RNA, 28 nt, Synthetic Construct
  source 1..28: mol_type = other RNA
gctttacattggactttgaacagatctg

SEQ ID NO: 22770 - RNA, 28 nt, Synthetic Construct
  source 1..28: mol_type = other RNA
gctttacattggactttgaacagatctg

SEQ ID NO: 22771 - RNA, 17 nt, Synthetic Construct
  source 1..17: mol_type = other RNA
gaagttgaccgcctggg

SEQ ID NO: 22772 - RNA, 23 nt, Synthetic Construct
  source 1..23: mol_type = other RNA
tcctgtactgggctgccccgagt

SEQ ID NO: 22773 - RNA, 17 nt, Synthetic Construct
  source 1..17: mol_type = other RNA
accggaggaaggtgggg

SEQ ID NO: 22774 - RNA, 19 nt, Synthetic Construct
  source 1..19: mol_type = other RNA
ccgtgttcggaagattttc

SEQ ID NO: 22775 - RNA, 19 nt, Synthetic Construct
  source 1..19: mol_type = other RNA
ccgtgttcggaagattttc

SEQ ID NO: 22776 - RNA, 22 nt, Synthetic Construct
  source 1..22: mol_type = other RNA
tcctgtactgagctgccctgag

SEQ ID NO: 22777 - RNA, 22 nt, Synthetic Construct
  source 1..22: mol_type = other RNA
tcctgtactgagctgccctgag

SEQ ID NO: 22778 - RNA, 18 nt, Synthetic Construct
  source 1..18: mol_type = other RNA
acagtcaggatgttggct

SEQ ID NO: 22779 - RNA, 25 nt, Synthetic Construct
  source 1..25: mol_type = other RNA
ctgaggatatgagatcgagacgaca

SEQ ID NO: 22780 - RNA, 25 nt, Synthetic Construct
  source 1..25: mol_type = other RNA
ctgaggatatgagatcgagacgaca

SEQ ID NO: 22781 - RNA, 21 nt, Synthetic Construct
  source 1..21: mol_type = other RNA
cggtcccaagggtatggctgt

SEQ ID NO: 22782 - RNA, 21 nt, Synthetic Construct
  source 1..21: mol_type = other RNA
cggtcccaagggtatggctgt

SEQ ID NO: 22783 - RNA, 21 nt, Synthetic Construct
  source 1..21: mol_type = other RNA
tctttggttatctagctgtat

SEQ ID NO: 22784 - RNA, 21 nt, Synthetic Construct
  source 1..21: mol_type = other RNA
tctttggttatctagctgtat

SEQ ID NO: 22785 - RNA, 21 nt, Synthetic Construct
  source 1..21: mol_type = other RNA
tggggtgtgacaatggtgttt

SEQ ID NO: 22786 - RNA, 21 nt, Synthetic Construct
  source 1..21: mol_type = other RNA
tggggtgtgacaatggtgttt

SEQ ID NO: 22787 - RNA, 15 nt, Synthetic Construct
  source 1..15: mol_type = other RNA
ggtgaaagcggggga

SEQ ID NO: 22788 - RNA, 23 nt, Synthetic Construct
  source 1..23: mol_type = other RNA
gcgtggtaggagagcgttctgta

SEQ ID NO: 22789 - RNA, 23 nt, Synthetic Construct
  source 1..23: mol_type = other RNA
gcgtggtaggagagcgttctgta

SEQ ID NO: 22790 - RNA, 33 nt, Synthetic Construct; identical to SEQ ID NO: 3082
  source 1..33: mol_type = other RNA

SEQ ID NO: 22791 - RNA, 33 nt, Synthetic Construct; identical to SEQ ID NO: 3082
  source 1..33: mol_type = other RNA

SEQ ID NO: 22792 - RNA, 20 nt, Synthetic Construct
  source 1..20: mol_type = other RNA
tgaggtagcaggttgtatag

SEQ ID NO: 22793 - RNA, 20 nt, Synthetic Construct
  source 1..20: mol_type = other RNA
tgaggtagcaggttgtatag

SEQ ID NO: 22794 - RNA, 15 nt, Synthetic Construct
  source 1..15: mol_type = other RNA
gagagcctggacaca

SEQ ID NO: 22795 - RNA, 24 nt, Synthetic Construct
  source 1..24: mol_type = other RNA
tgtaaacatccccgactggaagcc

SEQ ID NO: 22796 - RNA, 16 nt, Synthetic Construct
  source 1..16: mol_type = other RNA
atgcaagtcgaacggt

SEQ ID NO: 22797 - RNA, 16 nt, Synthetic Construct
  source 1..16: mol_type = other RNA
atgcaagtcgaacggt

SEQ ID NO: 22798 - RNA, 35 nt, Synthetic Construct; identical to SEQ ID NO: 2269
  source 1..35: mol_type = other RNA

SEQ ID NO: 22799 - RNA, 15 nt, Synthetic Construct
  source 1..15: mol_type = other RNA
agttgaccgcctggg

SEQ ID NO: 22800 - RNA, 15 nt, Synthetic Construct
  source 1..15: mol_type = other RNA
agttgaccgcctggg

SEQ ID NO: 22801 - RNA, 34 nt, Synthetic Construct; identical to SEQ ID NO: 2019
  source 1..34: mol_type = other RNA

SEQ ID NO: 22802 - RNA, 16 nt, Synthetic Construct
  source 1..16: mol_type = other RNA
cgactcttagcggtgg

SEQ ID NO: 22803 - RNA, 16 nt, Synthetic Construct
  source 1..16: mol_type = other RNA
cgactcttagcggtgg

SEQ ID NO: 22804 - RNA, 15 nt, Synthetic Construct
  source 1..15: mol_type = other RNA
ttccgaaagtagtgg

SEQ ID NO: 22805 - RNA, 23 nt, Synthetic Construct
  source 1..23: mol_type = other RNA
ggtagcgaaattccttgtcgggt

SEQ ID NO: 22806 - RNA, 23 nt, Synthetic Construct
  source 1..23: mol_type = other RNA
ggtagcgaaattccttgtcgggt

SEQ ID NO: 22807 - RNA, 23 nt, Synthetic Construct
  source 1..23: mol_type = other RNA
tggcaatacgacgtacttagtgt

SEQ ID NO: 22808 - RNA, 23 nt, Synthetic Construct
  source 1..23: mol_type = other RNA
tggcaatacgacgtacttagtgt

SEQ ID NO: 22809 - RNA, 22 nt, Synthetic Construct
  source 1..22: mol_type = other RNA
ncctgtactgagctgccccgag

SEQ ID NO: 22810 - RNA, 22 nt, Synthetic Construct
  source 1..22: mol_type = other RNA
ncctgtactgagctgccccgag

SEQ ID NO: 22811 - RNA, 34 nt, Synthetic Construct; identical to SEQ ID NO: 2553
  source 1..34: mol_type = other RNA

SEQ ID NO: 22812 - RNA, 34 nt, Synthetic Construct; identical to SEQ ID NO: 2553
  source 1..34: mol_type = other RNA

SEQ ID NO: 22813 - RNA, 16 nt, Synthetic Construct
  source 1..16: mol_type = other RNA
agttgaccgcctgggg

SEQ ID NO: 22814 - RNA, 22 nt, Synthetic Construct
  source 1..22: mol_type = other RNA
tcctgtattgagctgccccgag

SEQ ID NO: 22815 - RNA, 22 nt, Synthetic Construct
  source 1..22: mol_type = other RNA
tcctgtattgagctgccccgag

SEQ ID NO: 22816 - RNA, 22 nt, Synthetic Construct
  source 1..22: mol_type = other RNA
tagcttatcagactgatgttga

SEQ ID NO: 22817 - RNA, 21 nt, Synthetic Construct
  source 1..21: mol_type = other RNA
tcctgcactgagctgccccga

SEQ ID NO: 22818 - RNA, 21 nt, Synthetic Construct
  source 1..21: mol_type = other RNA
tcctgcactgagctgccccga

SEQ ID NO: 22819 - RNA, 23 nt, Synthetic Construct
  source 1..23: mol_type = other RNA
ggaggggcagagagcgagacttt

SEQ ID NO: 22820 - RNA, 16 nt, Synthetic Construct
  source 1..16: mol_type = other RNA
gtcgacgtatagggtg

SEQ ID NO: 22821 - RNA, 16 nt, Synthetic Construct
  source 1..16: mol_type = other RNA
gtcgacgtatagggtg

SEQ ID NO: 22822 - RNA, 23 nt, Synthetic Construct
  source 1..23: mol_type = other RNA
caaagaattctccttttgggctt

SEQ ID NO: 22823 - RNA, 21 nt, Synthetic Construct
  source 1..21: mol_type = other RNA
tgaggggcagagggcgagact

SEQ ID NO: 22824 - RNA, 23 nt, Synthetic Construct
  source 1..23: mol_type = other RNA
tggaatgtaaagaagtatgtata

SEQ ID NO: 22825 - RNA, 33 nt, Synthetic Construct; identical to SEQ ID NO: 2638
  source 1..33: mol_type = other RNA

SEQ ID NO: 22826 - RNA, 21 nt, Synthetic Construct
  source 1..21: mol_type = other RNA
gttggttcaagcgtgtagtcg

SEQ ID NO: 22827 - RNA, 21 nt, Synthetic Construct
  source 1..21: mol_type = other RNA
gttggttcaagcgtgtagtcg

SEQ ID NO: 22828 - RNA, 17 nt, Synthetic Construct
  source 1..17: mol_type = other RNA
cctcgcgcgattggagc

SEQ ID NO: 22829 - RNA, 17 nt, Synthetic Construct
  source 1..17: mol_type = other RNA
cctcgcgcgattggagc

SEQ ID NO: 22830 - RNA, 22 nt, Synthetic Construct
  source 1..22: mol_type = other RNA
tgagatagtaggttgtgtggtt

SEQ ID NO: 22831 - RNA, 22 nt, Synthetic Construct
  source 1..22: mol_type = other RNA
tgagatagtaggttgtgtggtt

SEQ ID NO: 22832 - RNA, 27 nt, Synthetic Construct
  source 1..27: mol_type = other RNA
ggggagctaatcccagaaacccggtcg

SEQ ID NO: 22833 - RNA, 27 nt, Synthetic Construct
  source 1..27: mol_type = other RNA
ggggagctaatcccagaaacccggtcg

SEQ ID NO: 22834 - RNA, 21 nt, Synthetic Construct
  source 1..21: mol_type = other RNA
agccatcatttaaagaaagcg

SEQ ID NO: 22835 - RNA, 21 nt, Synthetic Construct
  source 1..21: mol_type = other RNA
agccatcatttaaagaaagcg

SEQ ID NO: 22836 - RNA, 30 nt, Synthetic Construct; identical to SEQ ID NO: 2407
  source 1..30: mol_type = other RNA

SEQ ID NO: 22837 - RNA, 30 nt, Synthetic Construct; identical to SEQ ID NO: 2407
  source 1..30: mol_type = other RNA

SEQ ID NO: 22838 - RNA, 23 nt, Synthetic Construct
  source 1..23: mol_type = other RNA
tggtaatacgacgtgcttagtgt

SEQ ID NO: 22839 - RNA, 23 nt, Synthetic Construct
  source 1..23: mol_type = other RNA
tggtaatacgacgtgcttagtgt

SEQ ID NO: 22840 - RNA, 22 nt, Synthetic Construct
  source 1..22: mol_type = other RNA
cggaggagttcgaaggtacgct

SEQ ID NO: 22841 - RNA, 22 nt, Synthetic Construct
  source 1..22: mol_type = other RNA
cggaggagttcgaaggtacgct

SEQ ID NO: 22842 - RNA, 19 nt, Synthetic Construct
  source 1..19: mol_type = other RNA
tgtcaactggttgttggga

SEQ ID NO: 22843 - RNA, 19 nt, Synthetic Construct
  source 1..19: mol_type = other RNA
tgtcaactggttgttggga

SEQ ID NO: 22844 - RNA, 23 nt, Synthetic Construct
  source 1..23: mol_type = other RNA
cggtaatacgacgtacttagtgt

SEQ ID NO: 22845 - RNA, 23 nt, Synthetic Construct
  source 1..23: mol_type = other RNA
cggtaatacgacgtacttagtgt

SEQ ID NO: 22846 - RNA, 20 nt, Synthetic Construct
  source 1..20: mol_type = other RNA
tgaggcagtaggttgtatag

SEQ ID NO: 22847 - RNA, 20 nt, Synthetic Construct
  source 1..20: mol_type = other RNA
tgaggcagtaggttgtatag

SEQ ID NO: 22848 - RNA, 20 nt, Synthetic Construct
  source 1..20: mol_type = other RNA
tcctgtctgaatatgggggg

SEQ ID NO: 22849 - RNA, 20 nt, Synthetic Construct
  source 1..20: mol_type = other RNA
caggacagtgaaacgagtca

SEQ ID NO: 22850 - RNA, 20 nt, Synthetic Construct
  source 1..20: mol_type = other RNA
caggacagtgaaacgagtca

SEQ ID NO: 22851 - RNA, 35 nt, Synthetic Construct; identical to SEQ ID NO: 2402
  source 1..35: mol_type = other RNA

SEQ ID NO: 22852 - RNA, 22 nt, Synthetic Construct
  source 1..22: mol_type = other RNA
ngaggtagtaggttgtgtggtt

SEQ ID NO: 22853 - RNA, 22 nt, Synthetic Construct
  source 1..22: mol_type = other RNA
ngaggtagtaggttgtgtggtt

SEQ ID NO: 22854 - RNA, 21 nt, Synthetic Construct
  source 1..21: mol_type = other RNA
tgaggggcagagggcgagact

SEQ ID NO: 22855 - RNA, 23 nt, Synthetic Construct
  source 1..23: mol_type = other RNA
tgaggggcagagagcaagacttt

SEQ ID NO: 22856 - RNA, 32 nt, Synthetic Construct; identical to SEQ ID NO: 4710
  source 1..32: mol_type = other RNA

SEQ ID NO: 22857 - RNA, 32 nt, Synthetic Construct; identical to SEQ ID NO: 4710
  source 1..32: mol_type = other RNA

SEQ ID NO: 22858 - RNA, 28 nt, Synthetic Construct
  source 1..28: mol_type = other RNA
ggcagggttcgtgactggggtgaagtcg

SEQ ID NO: 22859 - RNA, 17 nt, Synthetic Construct
  source 1..17: mol_type = other RNA
gtcgacgtatagggtgt

SEQ ID NO: 22860 - RNA, 17 nt, Synthetic Construct
  source 1..17: mol_type = other RNA
gtcgacgtatagggtgt

SEQ ID NO: 22861 - RNA, 16 nt, Synthetic Construct
  source 1..16: mol_type = other RNA
gagctgtggatagggg

SEQ ID NO: 22862 - RNA, 16 nt, Synthetic Construct
  source 1..16: mol_type = other RNA
gagctgtggatagggg

SEQ ID NO: 22863 - RNA, 17 nt, Synthetic Construct
  source 1..17: mol_type = other RNA
cgaaattccttgtcggg

SEQ ID NO: 22864 - RNA, 17 nt, Synthetic Construct
  source 1..17: mol_type = other RNA
cgaaattccttgtcggg

SEQ ID NO: 22865 - RNA, 34 nt, Synthetic Construct; identical to SEQ ID NO: 385
  source 1..34: mol_type = other RNA

SEQ ID NO: 22866 - RNA, 15 nt, Synthetic Construct
  source 1..15: mol_type = other RNA
gagctgtggataggg

SEQ ID NO: 22867 - RNA, 15 nt, Synthetic Construct
  source 1..15: mol_type = other RNA
gagctgtggataggg

SEQ ID NO: 22868 - RNA, 21 nt, Synthetic Construct
  source 1..21: mol_type = other RNA
tcctgtgctgagctgccccga

SEQ ID NO: 22869 - RNA, 21 nt, Synthetic Construct
  source 1..21: mol_type = other RNA
tcctgtgctgagctgccccga

SEQ ID NO: 22870 - RNA, 23 nt, Synthetic Construct
  source 1..23: mol_type = other RNA
ttcaagtaattcaggataggttt

SEQ ID NO: 22871 - RNA, 32 nt, Synthetic Construct; identical to SEQ ID NO: 4279
  source 1..32: mol_type = other RNA

SEQ ID NO: 22872 - RNA, 24 nt, Synthetic Construct
  source 1..24: mol_type = other RNA
cggagaaggttagctcagccaact

SEQ ID NO: 22873 - RNA, 43 nt, Synthetic Construct; identical to SEQ ID NO: 725
  source 1..43: mol_type = other RNA

SEQ ID NO: 22874 - RNA, 15 nt, Synthetic Construct
  source 1..15: mol_type = other RNA
tagagtagggcggga

SEQ ID NO: 22875 - RNA, 22 nt, Synthetic Construct
  source 1..22: mol_type = other RNA
tgaggtagtgggttgtgtggtt

SEQ ID NO: 22876 - RNA, 28 nt, Synthetic Construct
  source 1..28: mol_type = other RNA
gctttgatccggagatttccgaatgggg

SEQ ID NO: 22877 - RNA, 30 nt, Synthetic Construct; identical to SEQ ID NO: 1771
  source 1..30: mol_type = other RNA

SEQ ID NO: 22878 - RNA, 30 nt, Synthetic Construct; identical to SEQ ID NO: 1771
  source 1..30: mol_type = other RNA

SEQ ID NO: 22879 - RNA, 22 nt, Synthetic Construct
  source 1..22: mol_type = other RNA
tgaagtagtaggttgtgtggtt

SEQ ID NO: 22880 - RNA, 22 nt, Synthetic Construct
  source 1..22: mol_type = other RNA
tgaagtagtaggttgtgtggtt

SEQ ID NO: 22881 - RNA, 21 nt, Synthetic Construct
  source 1..21: mol_type = other RNA
tgaggggcggagagcgagact

SEQ ID NO: 22882 - RNA, 21 nt, Synthetic Construct
  source 1..21: mol_type = other RNA
tgaggggcggagagcgagact

SEQ ID NO: 22883 - RNA, 28 nt, Synthetic Construct
  source 1..28: mol_type = other RNA
tgttggttcaagcgtgtagtcgtgctct

SEQ ID NO: 22884 - RNA, 28 nt, Synthetic Construct
  source 1..28: mol_type = other RNA
tgttggttcaagcgtgtagtcgtgctct

SEQ ID NO: 22885 - RNA, 22 nt, Synthetic Construct
  source 1..22: mol_type = other RNA
tcagtagctcgaggaaaagaca

SEQ ID NO: 22886 - RNA, 22 nt, Synthetic Construct
  source 1..22: mol_type = other RNA
tcagtagctcgaggaaaagaca

SEQ ID NO: 22887 - RNA, 21 nt, Synthetic Construct
  source 1..21: mol_type = other RNA
ngaggtagtaggttgtgtggt

SEQ ID NO: 22888 - RNA, 21 nt, Synthetic Construct
  source 1..21: mol_type = other RNA
ngaggtagtaggttgtgtggt

SEQ ID NO: 22889 - RNA, 33 nt, Synthetic Construct; identical to SEQ ID NO: 2395
  source 1..33: mol_type = other RNA

SEQ ID NO: 22890 - RNA, 33 nt, Synthetic Construct; identical to SEQ ID NO: 2395
  source 1..33: mol_type = other RNA

SEQ ID NO: 22891 - RNA, 29 nt, Synthetic Construct
  source 1..29: mol_type = other RNA
ttacaggggttcgaatcccctaggggacg

SEQ ID NO: 22892 - RNA, 17 nt, Synthetic Construct
  source 1..17: mol_type = other RNA
tggccgtcgtcagctcg

SEQ ID NO: 22893 - RNA, 15 nt, Synthetic Construct
  source 1..15: mol_type = other RNA
gtcgtcctgcgcgga

SEQ ID NO: 22894 - RNA, 15 nt, Synthetic Construct
  source 1..15: mol_type = other RNA
gtcgtcctgcgcgga

SEQ ID NO: 22895 - RNA, 35 nt, Synthetic Construct; identical to SEQ ID NO: 2548
  source 1..35: mol_type = other RNA

SEQ ID NO: 22896 - RNA, 21 nt, Synthetic Construct
  source 1..21: mol_type = other RNA
tgaggtagtgggttgtgtggt

SEQ ID NO: 22897 - RNA, 21 nt, Synthetic Construct
  source 1..21: mol_type = other RNA
tgaggtagtgggttgtgtggt

SEQ ID NO: 22898 - RNA, 19 nt, Synthetic Construct
  source 1..19: mol_type = other RNA
gcgccgatgatagtgcgga

SEQ ID NO: 22899 - RNA, 19 nt, Synthetic Construct
  source 1..19: mol_type = other RNA
gcgccgatgatagtgcgga

SEQ ID NO: 22900 - RNA, 17 nt, Synthetic Construct
  source 1..17: mol_type = other RNA
agcggtggatgatgtgg

SEQ ID NO: 22901 - RNA, 19 nt, Synthetic Construct
  source 1..19: mol_type = other RNA
cccttgtcattagttgcta

SEQ ID NO: 22902 - RNA, 23 nt, Synthetic Construct
  source 1..23: mol_type = other RNA
tgaggagcagagagcgagacttt

SEQ ID NO: 22903 - RNA, 23 nt, Synthetic Construct
  source 1..23: mol_type = other RNA
tgaggagcagagagcgagacttt

SEQ ID NO: 22904 - RNA, 24 nt, Synthetic Construct
  source 1..24: mol_type = other RNA
tcactgatcgagtcgtcctgcgcg

SEQ ID NO: 22905 - RNA, 24 nt, Synthetic Construct
  source 1..24: mol_type = other RNA
tcactgatcgagtcgtcctgcgcg

SEQ ID NO: 22906 - RNA, 18 nt, Synthetic Construct
  source 1..18: mol_type = other RNA
tcccaagggtatggctgt

SEQ ID NO: 22907 - RNA, 21 nt, Synthetic Construct
  source 1..21: mol_type = other RNA
acagcaggacggtggccatgg

SEQ ID NO: 22908 - RNA, 21 nt, Synthetic Construct
  source 1..21: mol_type = other RNA
acagcaggacggtggccatgg

SEQ ID NO: 22909 - RNA, 35 nt, Synthetic Construct; identical to SEQ ID NO: 2354
  source 1..35: mol_type = other RNA

SEQ ID NO: 22910 - RNA, 35 nt, Synthetic Construct; identical to SEQ ID NO: 2354
  source 1..35: mol_type = other RNA

SEQ ID NO: 22911 - RNA, 22 nt, Synthetic Construct
  source 1..22: mol_type = other RNA
agtagtgtttcctactttatgg

SEQ ID NO: 22912 - RNA, 19 nt, Synthetic Construct
  source 1..19: mol_type = other RNA
ccgtgttcggaagattttc

SEQ ID NO: 22913 - RNA, 19 nt, Synthetic Construct
  source 1..19: mol_type = other RNA
ccgtgttcggaagattttc

SEQ ID NO: 22914 - RNA, 26 nt, Synthetic Construct
  source 1..26: mol_type = other RNA
tgtcggctcatctcatcctggggctg

SEQ ID NO: 22915 - RNA, 16 nt, Synthetic Construct
  source 1..16: mol_type = other RNA
tgcacgaaagcgtggg

SEQ ID NO: 22916 - RNA, 16 nt, Synthetic Construct
  source 1..16: mol_type = other RNA
tgcacgaaagcgtggg

SEQ ID NO: 22917 - RNA, 22 nt, Synthetic Construct
  source 1..22: mol_type = other RNA
tgaggtagtaggttgcgtggtt

SEQ ID NO: 22918 - RNA, 16 nt, Synthetic Construct
  source 1..16: mol_type = other RNA
aggtcatcgtcaggct

SEQ ID NO: 22919 - RNA, 16 nt, Synthetic Construct
  source 1..16: mol_type = other RNA
aggtcatcgtcaggct

SEQ ID NO: 22920 - RNA, 18 nt, Synthetic Construct
  source 1..18: mol_type = other RNA
accaaggggtcgtgggtt

SEQ ID NO: 22921 - RNA, 18 nt, Synthetic Construct
  source 1..18: mol_type = other RNA
accaaggggtcgtgggtt

SEQ ID NO: 22922 - RNA, 26 nt, Synthetic Construct
  source 1..26: mol_type = other RNA
gatgcgtggtaggagagcgttctgta

SEQ ID NO: 22923 - RNA, 26 nt, Synthetic Construct
  source 1..26: mol_type = other RNA
gatgcgtggtaggagagcgttctgta

SEQ ID NO: 22924 - RNA, 23 nt, Synthetic Construct
  source 1..23: mol_type = other RNA
tggtgatacgacgtacttagtgt

SEQ ID NO: 22925 - RNA, 23 nt, Synthetic Construct
  source 1..23: mol_type = other RNA
tggtgatacgacgtacttagtgt

SEQ ID NO: 22926 - RNA, 19 nt, Synthetic Construct
  source 1..19: mol_type = other RNA
gcgaaattccttgtcgggt

SEQ ID NO: 22927 - RNA, 19 nt, Synthetic Construct
  source 1..19: mol_type = other RNA
gcgaaattccttgtcgggt

SEQ ID NO: 22928 - RNA, 22 nt, Synthetic Construct
  source 1..22: mol_type = other RNA
tgaggtagtagtttgtgctgta

SEQ ID NO: 22929 - RNA, 18 nt, Synthetic Construct
  source 1..18: mol_type = other RNA
gtccggatcgtagtctgc

SEQ ID NO: 22930 - RNA, 18 nt, Synthetic Construct
  source 1..18: mol_type = other RNA
gtccggatcgtagtctgc

SEQ ID NO: 22931 - RNA, 15 nt, Synthetic Construct
  source 1..15: mol_type = other RNA
ccagaaacccggtcg

SEQ ID NO: 22932 - RNA, 15 nt, Synthetic Construct
  source 1..15: mol_type = other RNA
ccagaaacccggtcg

SEQ ID NO: 22933 - RNA, 30 nt, Synthetic Construct; identical to SEQ ID NO: 3933
  source 1..30: mol_type = other RNA

SEQ ID NO: 22934 - RNA, 30 nt, Synthetic Construct; identical to SEQ ID NO: 3933
  source 1..30: mol_type = other RNA

SEQ ID NO: 22935 - RNA, 20 nt, Synthetic Construct
  source 1..20: mol_type = other RNA
ggtcccaagggtatggctgt

SEQ ID NO: 22936 - RNA, 20 nt, Synthetic Construct
  source 1..20: mol_type = other RNA
ggtcccaagggtatggctgt

SEQ ID NO: 22937 - RNA, 23 nt, Synthetic Construct
  source 1..23: mol_type = other RNA
tcctgtgctgagctgccccgaga

SEQ ID NO: 22938 - RNA, 23 nt, Synthetic Construct
  source 1..23: mol_type = other RNA
tcctgtgctgagctgccccgaga

SEQ ID NO: 22939 - RNA, 29 nt, Synthetic Construct
  source 1..29: mol_type = other RNA
tgaaggtgggttgtgaagcctgctggagg

SEQ ID NO: 22940 - RNA, 17 nt, Synthetic Construct
  source 1..17: mol_type = other RNA
tggccgtcgtcagctcg

SEQ ID NO: 22941 - RNA, 17 nt, Synthetic Construct
  source 1..17: mol_type = other RNA
tggccgtcgtcagctcg

SEQ ID NO: 22942 - RNA, 31 nt, Synthetic Construct; identical to SEQ ID NO: 2215
  source 1..31: mol_type = other RNA

SEQ ID NO: 22943 - RNA, 31 nt, Synthetic Construct; identical to SEQ ID NO: 2215
  source 1..31: mol_type = other RNA

SEQ ID NO: 22944 - RNA, 20 nt, Synthetic Construct
  source 1..20: mol_type = other RNA
ctgacctatgaattgacagc

SEQ ID NO: 22945 - RNA, 20 nt, Synthetic Construct
  source 1..20: mol_type = other RNA
ctgacctatgaattgacagc

SEQ ID NO: 22946 - RNA, 15 nt, Synthetic Construct
  source 1..15: mol_type = other RNA
ggtcatcgtcaggct

SEQ ID NO: 22947 - RNA, 19 nt, Synthetic Construct
  source 1..19: mol_type = other RNA
ctgatcgagtcgtcctgcg

SEQ ID NO: 22948 - RNA, 19 nt, Synthetic Construct
  source 1..19: mol_type = other RNA
ctgatcgagtcgtcctgcg

SEQ ID NO: 22949 - RNA, 39 nt, Synthetic Construct; identical to SEQ ID NO: 4400
  source 1..39: mol_type = other RNA

SEQ ID NO: 22950 - RNA, 39 nt, Synthetic Construct; identical to SEQ ID NO: 4400
  source 1..39: mol_type = other RNA

SEQ ID NO: 22951 - RNA, 22 nt, Synthetic Construct
  source 1..22: mol_type = other RNA
tccagtactgagctgccccgag

SEQ ID NO: 22952 - RNA, 22 nt, Synthetic Construct
  source 1..22: mol_type = other RNA
tccagtactgagctgccccgag

SEQ ID NO: 22953 - RNA, 15 nt, Synthetic Construct
  source 1..15: mol_type = other RNA
gttgaccgcctgggg

SEQ ID NO: 22954 - RNA, 19 nt, Synthetic Construct
  source 1..19: mol_type = other RNA
tggccgtcgtcagctcgtg

SEQ ID NO: 22955 - RNA, 19 nt, Synthetic Construct
  source 1..19: mol_type = other RNA
tggccgtcgtcagctcgtg

SEQ ID NO: 22956 - RNA, 33 nt, Synthetic Construct; identical to SEQ ID NO: 2253
  source 1..33: mol_type = other RNA

SEQ ID NO: 22957 - RNA, 21 nt, Synthetic Construct
  source 1..21: mol_type = other RNA
ctttgttcgattccgttgagt

SEQ ID NO: 22958 - RNA, 21 nt, Synthetic Construct
  source 1..21: mol_type = other RNA
ctttgttcgattccgttgagt

SEQ ID NO: 22959 - RNA, 20 nt, Synthetic Construct
  source 1..20: mol_type = other RNA
gcgtgcttgactgcgagact

SEQ ID NO: 22960 - RNA, 16 nt, Synthetic Construct
  source 1..16: mol_type = other RNA
tgttcggaagattttc

SEQ ID NO: 22961 - RNA, 16 nt, Synthetic Construct
  source 1..16: mol_type = other RNA
tgttcggaagattttc

SEQ ID NO: 22962 - RNA, 23 nt, Synthetic Construct
  source 1..23: mol_type = other RNA
tcctgaactgagctgccccgaga

SEQ ID NO: 22963 - RNA, 23 nt, Synthetic Construct
  source 1..23: mol_type = other RNA
tcctgaactgagctgccccgaga

SEQ ID NO: 22964 - RNA, 23 nt, Synthetic Construct
  source 1..23: mol_type = other RNA
tcctgcactgagctgccccgaga

SEQ ID NO: 22965 - RNA, 21 nt, Synthetic Construct
  source 1..21: mol_type = other RNA
ctaatcccagaaacccggtcg

SEQ ID NO: 22966 - RNA, 16 nt, Synthetic Construct
  source 1..16: mol_type = other RNA
tgcacgaaagcgtggg

SEQ ID NO: 22967 - RNA, 16 nt, Synthetic Construct
  source 1..16: mol_type = other RNA
tgcacgaaagcgtggg

SEQ ID NO: 22968 - RNA, 44 nt, Synthetic Construct; identical to SEQ ID NO: 5536
  source 1..44: mol_type = other RNA

SEQ ID NO: 22969 - RNA, 44 nt, Synthetic Construct; identical to SEQ ID NO: 5536
  source 1..44: mol_type = other RNA

SEQ ID NO: 22970 - RNA, 17 nt, Synthetic Construct
  source 1..17: mol_type = other RNA
tcccctggacctgtact

SEQ ID NO: 22971 - RNA, 17 nt, Synthetic Construct
  source 1..17: mol_type = other RNA
tcccctggacctgtact

SEQ ID NO: 22972 - RNA, 23 nt, Synthetic Construct
  source 1..23: mol_type = other RNA
tgaggggcagagagcgggacttt

SEQ ID NO: 22973 - RNA, 23 nt, Synthetic Construct
  source 1..23: mol_type = other RNA
tgaggggcagagagcgggacttt

SEQ ID NO: 22974 - RNA, 22 nt, Synthetic Construct
  source 1..22: mol_type = other RNA
tcctgtgctgagctgccccgag

SEQ ID NO: 22975 - RNA, 22 nt, Synthetic Construct
  source 1..22: mol_type = other RNA
tcctgtgctgagctgccccgag

SEQ ID NO: 22976 - RNA, 18 nt, Synthetic Construct
  source 1..18: mol_type = other RNA
gaagttgaccgcctgggg

SEQ ID NO: 22977 - RNA, 18 nt, Synthetic Construct
  source 1..18: mol_type = other RNA
gaagttgaccgcctgggg

SEQ ID NO: 22978 - RNA, 20 nt, Synthetic Construct
  source 1..20: mol_type = other RNA
gaatcgctagtaatcgcgga

SEQ ID NO: 22979 - RNA, 20 nt, Synthetic Construct
  source 1..20: mol_type = other RNA
gaatcgctagtaatcgcgga

SEQ ID NO: 22980 - RNA, 21 nt, Synthetic Construct
  source 1..21: mol_type = other RNA
aagaaagattgcaagaactgc

SEQ ID NO: 22981 - RNA, 21 nt, Synthetic Construct
  source 1..21: mol_type = other RNA
aagaaagattgcaagaactgc

SEQ ID NO: 22982 - RNA, 22 nt, Synthetic Construct
  source 1..22: mol_type = other RNA
gtcagtttgtcaaataccccat

SEQ ID NO: 22983 - RNA, 28 nt, Synthetic Construct
  source 1..28: mol_type = other RNA
ggatttccccttggggttgtaggaccac

SEQ ID NO: 22984 - RNA, 28 nt, Synthetic Construct
  source 1..28: mol_type = other RNA
ggatttccccttggggttgtaggaccac

SEQ ID NO: 22985 - RNA, 18 nt, Synthetic Construct
  source 1..18: mol_type = other RNA
cctcgcgcgattggagcg

SEQ ID NO: 22986 - RNA, 18 nt, Synthetic Construct
  source 1..18: mol_type = other RNA
cctcgcgcgattggagcg

SEQ ID NO: 22987 - RNA, 22 nt, Synthetic Construct
  source 1..22: mol_type = other RNA
tcagtagctcgaggaaaagaca

SEQ ID NO: 22988 - RNA, 22 nt, Synthetic Construct
  source 1..22: mol_type = other RNA
tcagtagctcgaggaaaagaca

SEQ ID NO: 22989 - RNA, 19 nt, Synthetic Construct
  source 1..19: mol_type = other RNA
cctgtctgaatatgggggg

SEQ ID NO: 22990 - RNA, 19 nt, Synthetic Construct
  source 1..19: mol_type = other RNA
cctgtctgaatatgggggg

SEQ ID NO: 22991 - RNA, 26 nt, Synthetic Construct
  source 1..26: mol_type = other RNA
gacttaccaaacctatgcaaactccg

SEQ ID NO: 22992 - RNA, 26 nt, Synthetic Construct
  source 1..26: mol_type = other RNA
gacttaccaaacctatgcaaactccg

SEQ ID NO: 22993 - RNA, 21 nt, Synthetic Construct
  source 1..21: mol_type = other RNA
tgaggggcagggagcgagact

SEQ ID NO: 22994 - RNA, 21 nt, Synthetic Construct
  source 1..21: mol_type = other RNA
tgaggggcagggagcgagact

SEQ ID NO: 22995 - RNA, 23 nt, Synthetic Construct
  source 1..23: mol_type = other RNA
tcctgtactgagccgccccgagt

SEQ ID NO: 22996 - RNA, 20 nt, Synthetic Construct
  source 1..20: mol_type = other RNA
ctctaatgagactgccggtg

SEQ ID NO: 22997 - RNA, 20 nt, Synthetic Construct
  source 1..20: mol_type = other RNA
ctctaatgagactgccggtg

SEQ ID NO: 22998 - RNA, 18 nt, Synthetic Construct
  source 1..18: mol_type = other RNA
cgtgttcggaagattttc

SEQ ID NO: 22999 - RNA, 18 nt, Synthetic Construct
  source 1..18: mol_type = other RNA
cgtgttcggaagattttc

SEQ ID NO: 23000 - RNA, 36 nt, Synthetic Construct; identical to SEQ ID NO: 2660
  source 1..36: mol_type = other RNA

SEQ ID NO: 23001 - RNA, 36 nt, Synthetic Construct; identical to SEQ ID NO: 2660
  source 1..36: mol_type = other RNA

SEQ ID NO: 23002 - RNA, 19 nt, Synthetic Construct
  source 1..19: mol_type = other RNA
gtccggatcgtagtctgca

SEQ ID NO: 23003 - RNA, 19 nt, Synthetic Construct
  source 1..19: mol_type = other RNA
gtccggatcgtagtctgca

SEQ ID NO: 23004 - RNA, 22 nt, Synthetic Construct
  source 1..22: mol_type = other RNA
tgaggtagtaggttgtgtgatt

SEQ ID NO: 23005 - RNA, 22 nt, Synthetic Construct
  source 1..22: mol_type = other RNA
tgaggtagtaggttgtgtgatt

SEQ ID NO: 23006 - RNA, 22 nt, Synthetic Construct
  source 1..22: mol_type = other RNA
tcctgtactgagctgtcccgag

SEQ ID NO: 23007 - RNA, 22 nt, Synthetic Construct
  source 1..22: mol_type = other RNA
tcctgtactgagctgtcccgag

SEQ ID NO: 23008 - RNA, 35 nt, Synthetic Construct; identical to SEQ ID NO: 3369
  source 1..35: mol_type = other RNA

SEQ ID NO: 23009 - RNA, 30 nt, Synthetic Construct; identical to SEQ ID NO: 1194
  source 1..30: mol_type = other RNA

SEQ ID NO: 23010 - RNA, 30 nt, Synthetic Construct; identical to SEQ ID NO: 1194
  source 1..30: mol_type = other RNA

SEQ ID NO: 23011 - RNA, 37 nt, Synthetic Construct; identical to SEQ ID NO: 2365
  source 1..37: mol_type = other RNA

SEQ ID NO: 23012 - RNA, 37 nt, Synthetic Construct; identical to SEQ ID NO: 2365
  source 1..37: mol_type = other RNA

SEQ ID NO: 23013 - RNA, 43 nt, Synthetic Construct; identical to SEQ ID NO: 6202
  source 1..43: mol_type = other RNA

SEQ ID NO: 23014 - RNA, 43 nt, Synthetic Construct; identical to SEQ ID NO: 6202
  source 1..43: mol_type = other RNA

SEQ ID NO: 23015 - RNA, 24 nt, Synthetic Construct
  source 1..24: mol_type = other RNA
tatatcggaacgtgcccagtcgtg

SEQ ID NO: 23016 - RNA, 24 nt, Synthetic Construct
  source 1..24: mol_type = other RNA
tatatcggaacgtgcccagtcgtg

SEQ ID NO: 23017 - RNA, 25 nt, Synthetic Construct
  source 1..25: mol_type = other RNA
ttgaggatacgagatcgagacgaca

SEQ ID NO: 23018 - RNA, 25 nt, Synthetic Construct
  source 1..25: mol_type = other RNA
ttgaggatacgagatcgagacgaca

SEQ ID NO: 23019 - RNA, 21 nt, Synthetic Construct
  source 1..21: mol_type = other RNA
gctttgatccggagatttccg

SEQ ID NO: 23020 - RNA, 15 nt, Synthetic Construct
  source 1..15: mol_type = other RNA
gtccggcccgaggca

SEQ ID NO: 23021 - RNA, 15 nt, Synthetic Construct
  source 1..15: mol_type = other RNA
gtccggcccgaggca

SEQ ID NO: 23022 - RNA, 35 nt, Synthetic Construct; identical to SEQ ID NO: 10694
  source 1..35: mol_type = other RNA

SEQ ID NO: 23023 - RNA, 35 nt, Synthetic Construct; identical to SEQ ID NO: 10694
  source 1..35: mol_type = other RNA

SEQ ID NO: 23024 - RNA, 29 nt, Synthetic Construct
  source 1..29: mol_type = other RNA
ccccccccactgctaaatttgactggctt

SEQ ID NO: 23025 - RNA, 29 nt, Synthetic Construct
  source 1..29: mol_type = other RNA
ccccccccactgctaaatttgactggctt

SEQ ID NO: 23026 - RNA, 36 nt, Synthetic Construct; identical to SEQ ID NO: 2248
  source 1..36: mol_type = other RNA

SEQ ID NO: 23027 - RNA, 36 nt, Synthetic Construct; identical to SEQ ID NO: 2248
  source 1..36: mol_type = other RNA

SEQ ID NO: 23028 - RNA, 20 nt, Synthetic Construct
  source 1..20: mol_type = other RNA
actgatcgagtcgtcctgcg

SEQ ID NO: 23029 - RNA, 20 nt, Synthetic Construct
  source 1..20: mol_type = other RNA
actgatcgagtcgtcctgcg

SEQ ID NO: 23030 - RNA, 23 nt, Synthetic Construct
  source 1..23: mol_type = other RNA
ggcggttatgcaagacagaggtg

SEQ ID NO: 23031 - RNA, 36 nt, Synthetic Construct; identical to SEQ ID NO: 2456
  source 1..36: mol_type = other RNA

SEQ ID NO: 23032 - RNA, 22 nt, Synthetic Construct
  source 1..22: mol_type = other RNA
tgaggtagtaggctgtgtggtt

SEQ ID NO: 23033 - RNA, 22 nt, Synthetic Construct
  source 1..22: mol_type = other RNA
tgaggtagtaggctgtgtggtt

SEQ ID NO: 23034 - RNA, 26 nt, Synthetic Construct
  source 1..26: mol_type = other RNA
gatttccccttggggttgtaggacca

SEQ ID NO: 23035 - RNA, 26 nt, Synthetic Construct
  source 1..26: mol_type = other RNA
gatttccccttggggttgtaggacca

SEQ ID NO: 23036 - RNA, 37 nt, Synthetic Construct; identical to SEQ ID NO: 5125
  source 1..37: mol_type = other RNA

SEQ ID NO: 23037 - RNA, 15 nt, Synthetic Construct
  source 1..15: mol_type = other RNA
cgccatttaaagagg

SEQ ID NO: 23038 - RNA, 15 nt, Synthetic Construct
  source 1..15: mol_type = other RNA
cgccatttaaagagg

SEQ ID NO: 23039 - RNA, 21 nt, Synthetic Construct
  source 1..21: mol_type = other RNA
gtgggcgtttgaagtgaagtg

SEQ ID NO: 23040 - RNA, 21 nt, Synthetic Construct
  source 1..21: mol_type = other RNA
gtgggcgtttgaagtgaagtg

SEQ ID NO: 23041 - RNA, 15 nt, Synthetic Construct
  source 1..15: mol_type = other RNA
catgccgcgtgcggg

SEQ ID NO: 23042 - RNA, 17 nt, Synthetic Construct
  source 1..17: mol_type = other RNA
ccgtgtgaaagtaggtc

SEQ ID NO: 23043 - RNA, 17 nt, Synthetic Construct
  source 1..17: mol_type = other RNA
ccgtgtgaaagtaggtc

SEQ ID NO: 23044 - RNA, 20 nt, Synthetic Construct
  source 1..20: mol_type = other RNA
tggggtagtaggttgtgtgg

SEQ ID NO: 23045 - RNA, 20 nt, Synthetic Construct
  source 1..20: mol_type = other RNA
tggggtagtaggttgtgtgg

SEQ ID NO: 23046 - RNA, 22 nt, Synthetic Construct
  source 1..22: mol_type = other RNA
tgaggtagtaggctgtgtggtt

SEQ ID NO: 23047 - RNA, 22 nt, Synthetic Construct
  source 1..22: mol_type = other RNA
tgaggtagtaggctgtgtggtt

SEQ ID NO: 23048 - RNA, 15 nt, Synthetic Construct
  source 1..15: mol_type = other RNA
acctgcatcgagggt

SEQ ID NO: 23049 - RNA, 15 nt, Synthetic Construct
  source 1..15: mol_type = other RNA
acctgcatcgagggt

SEQ ID NO: 23050 - RNA, 22 nt, Synthetic Construct
  source 1..22: mol_type = other RNA
cctcgcgcgattggagcggccg

SEQ ID NO: 23051 - RNA, 22 nt, Synthetic Construct
  source 1..22: mol_type = other RNA
cctcgcgcgattggagcggccg

SEQ ID NO: 23052 - RNA, 22 nt, Synthetic Construct
  source 1..22: mol_type = other RNA
ccggtcccaagggtatggctgt

SEQ ID NO: 23053 - RNA, 22 nt, Synthetic Construct
  source 1..22: mol_type = other RNA
tcctgtactgagctaccccgag

SEQ ID NO: 23054 - RNA, 22 nt, Synthetic Construct
  source 1..22: mol_type = other RNA
tcctgtactgagctaccccgag

SEQ ID NO: 23055 - RNA, 15 nt, Synthetic Construct
  source 1..15: mol_type = other RNA
ccgcttttgtcaggg

SEQ ID NO: 23056 - RNA, 16 nt, Synthetic Construct
  source 1..16: mol_type = other RNA
ggcgggggtcgctggt

SEQ ID NO: 23057 - RNA, 19 nt, Synthetic Construct
  source 1..19: mol_type = other RNA
tggccgtcgtcagctcgtg

SEQ ID NO: 23058 - RNA, 19 nt, Synthetic Construct
  source 1..19: mol_type = other RNA
tggccgtcgtcagctcgtg

SEQ ID NO: 23059 - RNA, 32 nt, Synthetic Construct; identical to SEQ ID NO: 4710
  source 1..32: mol_type = other RNA

SEQ ID NO: 23060 - RNA, 43 nt, Synthetic Construct; identical to SEQ ID NO: 727
  source 1..43: mol_type = other RNA

SEQ ID NO: 23061 - RNA, 43 nt, Synthetic Construct; identical to SEQ ID NO: 727
  source 1..43: mol_type = other RNA

SEQ ID NO: 23062 - RNA, 31 nt, Synthetic Construct; identical to SEQ ID NO: 2412
  source 1..31: mol_type = other RNA

SEQ ID NO: 23063 - RNA, 31 nt, Synthetic Construct; identical to SEQ ID NO: 2412
  source 1..31: mol_type = other RNA

SEQ ID NO: 23064 - RNA, 16 nt, Synthetic Construct
  source 1..16: mol_type = other RNA
ctcagtagctcgagga

SEQ ID NO: 23065 - RNA, 16 nt, Synthetic Construct
  source 1..16: mol_type = other RNA
ctcagtagctcgagga

SEQ ID NO: 23066 - RNA, 19 nt, Synthetic Construct
  source 1..19: mol_type = other RNA
gcgaaattccttgtcgggt

SEQ ID NO: 23067 - RNA, 19 nt, Synthetic Construct
  source 1..19: mol_type = other RNA
gcgaaattccttgtcgggt

SEQ ID NO: 23068 - RNA, 22 nt, Synthetic Construct
  source 1..22: mol_type = other RNA
gctcttgactgaagtcccagta

SEQ ID NO: 23069 - RNA, 22 nt, Synthetic Construct
  source 1..22: mol_type = other RNA
gctcttgactgaagtcccagta

SEQ ID NO: 23070 - RNA, 32 nt, Synthetic Construct; identical to SEQ ID NO: 2582
  source 1..32: mol_type = other RNA

SEQ ID NO: 23071 - RNA, 32 nt, Synthetic Construct; identical to SEQ ID NO: 2582
  source 1..32: mol_type = other RNA

SEQ ID NO: 23072 - RNA, 32 nt, Synthetic Construct; identical to SEQ ID NO: 3092
  source 1..32: mol_type = other RNA

SEQ ID NO: 23073 - RNA, 15 nt, Synthetic Construct
  source 1..15: mol_type = other RNA
cctcgcgcgattgga

SEQ ID NO: 23074 - RNA, 21 nt, Synthetic Construct
  source 1..21: mol_type = other RNA
tcccagtaaacggcggccgta

SEQ ID NO: 23075 - RNA, 23 nt, Synthetic Construct
  source 1..23: mol_type = other RNA
tgaggggcagagagtgagacttt

SEQ ID NO: 23076 - RNA, 23 nt, Synthetic Construct
  source 1..23: mol_type = other RNA
tgaggggcagagagtgagacttt

SEQ ID NO: 23077 - RNA, 18 nt, Synthetic Construct
  source 1..18: mol_type = other RNA
tcccctggacctgtactg

SEQ ID NO: 23078 - RNA, 18 nt, Synthetic Construct
  source 1..18: mol_type = other RNA
tcccctggacctgtactg

SEQ ID NO: 23079 - RNA, 16 nt, Synthetic Construct
  source 1..16: mol_type = other RNA
gtctacgaccatacca

SEQ ID NO: 23080 - RNA, 16 nt, Synthetic Construct
  source 1..16: mol_type = other RNA
gtctacgaccatacca

SEQ ID NO: 23081 - RNA, 23 nt, Synthetic Construct
  source 1..23: mol_type = other RNA
tgaggggcagagagcgagacctt

SEQ ID NO: 23082 - RNA, 23 nt, Synthetic Construct
  source 1..23: mol_type = other RNA
tgaggggcagagagcgagacctt

SEQ ID NO: 23083 - RNA, 17 nt, Synthetic Construct
  source 1..17: mol_type = other RNA
agtccggatcgtagtct

SEQ ID NO: 23084 - RNA, 17 nt, Synthetic Construct
  source 1..17: mol_type = other RNA
agtccggatcgtagtct

SEQ ID NO: 23085 - RNA, 22 nt, Synthetic Construct
  source 1..22: mol_type = other RNA
ccggtcccaagggtatggctgt

SEQ ID NO: 23086 - RNA, 22 nt, Synthetic Construct
  source 1..22: mol_type = other RNA
ccggtcccaagggtatggctgt

SEQ ID NO: 23087 - RNA, 16 nt, Synthetic Construct
  source 1..16: mol_type = other RNA
ggccgtcgtcagctcg

SEQ ID NO: 23088 - RNA, 16 nt, Synthetic Construct
  source 1..16: mol_type = other RNA
ggccgtcgtcagctcg

SEQ ID NO: 23089 - RNA, 22 nt, Synthetic Construct
  source 1..22: mol_type = other RNA
gcgttgcaaccagtgccggggg

SEQ ID NO: 23090 - RNA, 22 nt, Synthetic Construct
  source 1..22: mol_type = other RNA
gcgttgcaaccagtgccggggg

SEQ ID NO: 23091 - RNA, 16 nt, Synthetic Construct
  source 1..16: mol_type = other RNA
ggcgggggtcgctggt

SEQ ID NO: 23092 - RNA, 18 nt, Synthetic Construct
  source 1..18: mol_type = other RNA
accaaggggtcgtgggtt

SEQ ID NO: 23093 - RNA, 18 nt, Synthetic Construct
  source 1..18: mol_type = other RNA
accaaggggtcgtgggtt

SEQ ID NO: 23094 - RNA, 23 nt, Synthetic Construct
  source 1..23: mol_type = other RNA
tcctgtaccgagctgccccgaga

SEQ ID NO: 23095 - RNA, 23 nt, Synthetic Construct
  source 1..23: mol_type = other RNA
tcctgtaccgagctgccccgaga

SEQ ID NO: 23096 - RNA, 15 nt, Synthetic Construct
  source 1..15: mol_type = other RNA
tggccgtcgtcagct

SEQ ID NO: 23097 - RNA, 15 nt, Synthetic Construct
  source 1..15: mol_type = other RNA
tggccgtcgtcagct

SEQ ID NO: 23098 - RNA, 22 nt, Synthetic Construct
  source 1..22: mol_type = other RNA
ctttgttcgattccgttgagta

SEQ ID NO: 23099 - RNA, 22 nt, Synthetic Construct
  source 1..22: mol_type = other RNA
ctttgttcgattccgttgagta

SEQ ID NO: 23100 - RNA, 21 nt, Synthetic Construct
  source 1..21: mol_type = other RNA
tgaggtagtaggttgtgtgat

SEQ ID NO: 23101 - RNA, 21 nt, Synthetic Construct
  source 1..21: mol_type = other RNA
tgaggtagtaggttgtgtgat

SEQ ID NO: 23102 - RNA, 23 nt, Synthetic Construct
  source 1..23: mol_type = other RNA
taaggggcagagagcgagacttt

SEQ ID NO: 23103 - RNA, 25 nt, Synthetic Construct
  source 1..25: mol_type = other RNA
ttgaggatatgagatcgagacaaca

SEQ ID NO: 23104 - RNA, 25 nt, Synthetic Construct
  source 1..25: mol_type = other RNA
ttgaggatatgagatcgagacaaca

SEQ ID NO: 23105 - RNA, 19 nt, Synthetic Construct
  source 1..19: mol_type = other RNA
gcgccgatgatagtgcgga

SEQ ID NO: 23106 - RNA, 19 nt, Synthetic Construct
  source 1..19: mol_type = other RNA
gcgccgatgatagtgcgga

SEQ ID NO: 23107 - RNA, 35 nt, Synthetic Construct; identical to SEQ ID NO: 2615
  source 1..35: mol_type = other RNA

SEQ ID NO: 23108 - RNA, 18 nt, Synthetic Construct
  source 1..18: mol_type = other RNA
tcccctggacctgtactg

SEQ ID NO: 23109 - RNA, 18 nt, Synthetic Construct
  source 1..18: mol_type = other RNA
tcccctggacctgtactg

SEQ ID NO: 23110 - RNA, 21 nt, Synthetic Construct
  source 1..21: mol_type = other RNA
tcctgtctgaatatgggggga

SEQ ID NO: 23111 - RNA, 21 nt, Synthetic Construct
  source 1..21: mol_type = other RNA
tcctgtctgaatatgggggga

SEQ ID NO: 23112 - RNA, 19 nt, Synthetic Construct
  source 1..19: mol_type = other RNA
accaaggggtcgtgggttc

SEQ ID NO: 23113 - RNA, 19 nt, Synthetic Construct
  source 1..19: mol_type = other RNA
accaaggggtcgtgggttc

SEQ ID NO: 23114 - RNA, 15 nt, Synthetic Construct
  source 1..15: mol_type = other RNA
cgccatttaaagagg

SEQ ID NO: 23115 - RNA, 15 nt, Synthetic Construct
  source 1..15: mol_type = other RNA
cgccatttaaagagg

SEQ ID NO: 23116 - RNA, 21 nt, Synthetic Construct
  source 1..21: mol_type = other RNA
tggagtgtgacagtggtgttt

SEQ ID NO: 23117 - RNA, 21 nt, Synthetic Construct
  source 1..21: mol_type = other RNA
tggagtgtgacagtggtgttt

SEQ ID NO: 23118 - RNA, 32 nt, Synthetic Construct; identical to SEQ ID NO: 3713
  source 1..32: mol_type = other RNA

SEQ ID NO: 23119 - RNA, 32 nt, Synthetic Construct; identical to SEQ ID NO: 3713
  source 1..32: mol_type = other RNA

SEQ ID NO: 23120 - RNA, 22 nt, Synthetic Construct
  source 1..22: mol_type = other RNA
tgaggtagtaggttgtgtggtc

SEQ ID NO: 23121 - RNA, 22 nt, Synthetic Construct
  source 1..22: mol_type = other RNA
tgaggtagtaggttgtgtggtc

SEQ ID NO: 23122 - RNA, 35 nt, Synthetic Construct; identical to SEQ ID NO: 2518
  source 1..35: mol_type = other RNA

SEQ ID NO: 23123 - RNA, 27 nt, Synthetic Construct
  source 1..27: mol_type = other RNA
gatttccccttggggttgtaggaccac

SEQ ID NO: 23124 - RNA, 27 nt, Synthetic Construct
  source 1..27: mol_type = other RNA
gatttccccttggggttgtaggaccac

SEQ ID NO: 23125 - RNA, 16 nt, Synthetic Construct
  source 1..16: mol_type = other RNA
ggtagctcgttgggct

SEQ ID NO: 23126 - RNA, 16 nt, Synthetic Construct
  source 1..16: mol_type = other RNA
ggtagctcgttgggct

SEQ ID NO: 23127 - RNA, 15 nt, Synthetic Construct
  source 1..15: mol_type = other RNA
ttccgaaagtagtgg

SEQ ID NO: 23128 - RNA, 15 nt, Synthetic Construct
  source 1..15: mol_type = other RNA
ttccgaaagtagtgg

SEQ ID NO: 23129 - RNA, 22 nt, Synthetic Construct
  source 1..22: mol_type = other RNA
tggaatgtagagaagtatgtat

SEQ ID NO: 23130 - RNA, 22 nt, Synthetic Construct
  source 1..22: mol_type = other RNA
tggaatgtagagaagtatgtat

SEQ ID NO: 23131 - RNA, 15 nt, Synthetic Construct
  source 1..15: mol_type = other RNA
gtcaggatgttggct

SEQ ID NO: 23132 - RNA, 15 nt, Synthetic Construct
  source 1..15: mol_type = other RNA
gtcaggatgttggct

SEQ ID NO: 23133 - RNA, 30 nt, Synthetic Construct; identical to SEQ ID NO: 2407
  source 1..30: mol_type = other RNA

SEQ ID NO: 23134 - RNA, 15 nt, Synthetic Construct
  source 1..15: mol_type = other RNA
accggaggaaggtgg

SEQ ID NO: 23135 - RNA, 15 nt, Synthetic Construct
  source 1..15: mol_type = other RNA
accggaggaaggtgg

SEQ ID NO: 23136 - RNA, 19 nt, Synthetic Construct
  source 1..19: mol_type = other RNA
gcgccgatgatagtgcgga

SEQ ID NO: 23137 - RNA, 19 nt, Synthetic Construct
  source 1..19: mol_type = other RNA
gcgccgatgatagtgcgga

SEQ ID NO: 23138 - RNA, 37 nt, Synthetic Construct; identical to SEQ ID NO: 2607
  source 1..37: mol_type = other RNA

SEQ ID NO: 23139 - RNA, 37 nt, Synthetic Construct; identical to SEQ ID NO: 2607
  source 1..37: mol_type = other RNA

SEQ ID NO: 23140 - RNA, 19 nt, Synthetic Construct
  source 1..19: mol_type = other RNA
accaaggggtcgtgggttc

SEQ ID NO: 23141 - RNA, 19 nt, Synthetic Construct
  source 1..19: mol_type = other RNA
accaaggggtcgtgggttc

SEQ ID NO: 23142 - RNA, 39 nt, Synthetic Construct; identical to SEQ ID NO: 759
  source 1..39: mol_type = other RNA

SEQ ID NO: 23143 - RNA, 21 nt, Synthetic Construct
  source 1..21: mol_type = other RNA
aagaaagattgcaagaactgc

SEQ ID NO: 23144 - RNA, 21 nt, Synthetic Construct
  source 1..21: mol_type = other RNA
aagaaagattgcaagaactgc

SEQ ID NO: 23145 - RNA, 18 nt, Synthetic Construct
  source 1..18: mol_type = other RNA
cctgaagaataagcaccg

SEQ ID NO: 23146 - RNA, 18 nt, Synthetic Construct
  source 1..18: mol_type = other RNA
cctgaagaataagcaccg

SEQ ID NO: 23147 - RNA, 22 nt, Synthetic Construct
  source 1..22: mol_type = other RNA
tctttgttcgattccgttgagt

SEQ ID NO: 23148 - RNA, 22 nt, Synthetic Construct
  source 1..22: mol_type = other RNA
tctttgttcgattccgttgagt

SEQ ID NO: 23149 - RNA, 37 nt, Synthetic Construct; identical to SEQ ID NO: 5125
  source 1..37: mol_type = other RNA

SEQ ID NO: 23150 - RNA, 37 nt, Synthetic Construct; identical to SEQ ID NO: 5125
  source 1..37: mol_type = other RNA

SEQ ID NO: 23151 - RNA, 23 nt, Synthetic Construct
  source 1..23: mol_type = other RNA
tcctgtgctgagctgccccgagt

SEQ ID NO: 23152 - RNA, 23 nt, Synthetic Construct
  source 1..23: mol_type = other RNA
tcccgtactgagctgccccgaga

SEQ ID NO: 23153 - RNA, 23 nt, Synthetic Construct
  source 1..23: mol_type = other RNA
tcccgtactgagctgccccgaga

SEQ ID NO: 23154 - RNA, 35 nt, Synthetic Construct; identical to SEQ ID NO: 2615
  source 1..35: mol_type = other RNA

SEQ ID NO: 23155 - RNA, 35 nt, Synthetic Construct; identical to SEQ ID NO: 2615
  source 1..35: mol_type = other RNA

SEQ ID NO: 23156 - RNA, 23 nt, Synthetic Construct
  source 1..23: mol_type = other RNA
cgctcacggaaagagaatgaagc

SEQ ID NO: 23157 - RNA, 23 nt, Synthetic Construct
  source 1..23: mol_type = other RNA
cgctcacggaaagagaatgaagc

SEQ ID NO: 23158 - RNA, 18 nt, Synthetic Construct
  source 1..18: mol_type = other RNA
tcagtagctcgaggaaaa

SEQ ID NO: 23159 - RNA, 18 nt, Synthetic Construct
  source 1..18: mol_type = other RNA
tcagtagctcgaggaaaa

SEQ ID NO: 23160 - RNA, 15 nt, Synthetic Construct
  source 1..15: mol_type = other RNA
acccttgtcattagt

SEQ ID NO: 23161 - RNA, 15 nt, Synthetic Construct
  source 1..15: mol_type = other RNA
acccttgtcattagt

SEQ ID NO: 23162 - RNA, 21 nt, Synthetic Construct
  source 1..21: mol_type = other RNA
ggaggagttcgaaggtacgct

SEQ ID NO: 23163 - RNA, 23 nt, Synthetic Construct
  source 1..23: mol_type = other RNA
cctcgcgcgattggagcggccga

SEQ ID NO: 23164 - RNA, 26 nt, Synthetic Construct
  source 1..26: mol_type = other RNA
atgcgagagtaggacgttgccaggtt

SEQ ID NO: 23165 - RNA, 26 nt, Synthetic Construct
  source 1..26: mol_type = other RNA
atgcgagagtaggacgttgccaggtt

SEQ ID NO: 23166 - RNA, 16 nt, Synthetic Construct
  source 1..16: mol_type = other RNA
ccgcttttgtcaggga

SEQ ID NO: 23167 - RNA, 23 nt, Synthetic Construct
  source 1..23: mol_type = other RNA
tccctggtggtctagtggttagg

SEQ ID NO: 23168 - RNA, 16 nt, Synthetic Construct
  source 1..16: mol_type = other RNA
gtctacagccatacca

SEQ ID NO: 23169 - RNA, 16 nt, Synthetic Construct
  source 1..16: mol_type = other RNA
gtctacagccatacca

SEQ ID NO: 23170 - RNA, 23 nt, Synthetic Construct
  source 1..23: mol_type = other RNA
tgaggggcagagagcgaggcttt

SEQ ID NO: 23171 - RNA, 23 nt, Synthetic Construct
  source 1..23: mol_type = other RNA
tgaggggcagagagcgaggcttt

SEQ ID NO: 23172 - RNA, 22 nt, Synthetic Construct
  source 1..22: mol_type = other RNA
tgaggtagtaggttgcgtggtt

SEQ ID NO: 23173 - RNA, 22 nt, Synthetic Construct
  source 1..22: mol_type = other RNA
tgaggtagtaggttgcgtggtt

SEQ ID NO: 23174 - RNA, 44 nt, Synthetic Construct; identical to SEQ ID NO: 4262
  source 1..44: mol_type = other RNA

SEQ ID NO: 23175 - RNA, 21 nt, Synthetic Construct
  source 1..21: mol_type = other RNA
agcgtgcttgactgcgagact

SEQ ID NO: 23176 - RNA, 22 nt, Synthetic Construct
  source 1..22: mol_type = other RNA
cggaggagttcgaaggtacgct

SEQ ID NO: 23177 - RNA, 36 nt, Synthetic Construct; identical to SEQ ID NO: 2660
  source 1..36: mol_type = other RNA

SEQ ID NO: 23178 - RNA, 17 nt, Synthetic Construct
  source 1..17: mol_type = other RNA
cagtcaggatgttggct

SEQ ID NO: 23179 - RNA, 18 nt, Synthetic Construct
  source 1..18: mol_type = other RNA
cgactcttagcggtggat

SEQ ID NO: 23180 - RNA, 18 nt, Synthetic Construct
  source 1..18: mol_type = other RNA
cgactcttagcggtggat

SEQ ID NO: 23181 - RNA, 24 nt, Synthetic Construct
  source 1..24: mol_type = other RNA
tcctgtactgagctgccccgagtt

SEQ ID NO: 23182 - RNA, 24 nt, Synthetic Construct
  source 1..24: mol_type = other RNA
tcctgtactgagctgccccgagtt

SEQ ID NO: 23183 - RNA, 15 nt, Synthetic Construct
  source 1..15: mol_type = other RNA
gagctgtggataggg

SEQ ID NO: 23184 - RNA, 18 nt, Synthetic Construct
  source 1..18: mol_type = other RNA
atcgctagtaatcgcgga

SEQ ID NO: 23185 - RNA, 31 nt, Synthetic Construct; identical to SEQ ID NO: 1881
  source 1..31: mol_type = other RNA

SEQ ID NO: 23186 - RNA, 31 nt, Synthetic Construct; identical to SEQ ID NO: 1881
  source 1..31: mol_type = other RNA

SEQ ID NO: 23187 - RNA, 16 nt, Synthetic Construct
  source 1..16: mol_type = other RNA
agttgaccgcctgggg

SEQ ID NO: 23188 - RNA, 15 nt, Synthetic Construct
  source 1..15: mol_type = other RNA
agttgaccgcctggg

SEQ ID NO: 23189 - RNA, 15 nt, Synthetic Construct
  source 1..15: mol_type = other RNA
agttgaccgcctggg

SEQ ID NO: 23190 - RNA, 22 nt, Synthetic Construct
  source 1..22: mol_type = other RNA
agggggaaagttctatagtcct

SEQ ID NO: 23191 - RNA, 22 nt, Synthetic Construct
  source 1..22: mol_type = other RNA
agggggaaagttctatagtcct

SEQ ID NO: 23192 - RNA, 36 nt, Synthetic Construct; identical to SEQ ID NO: 2660
  source 1..36: mol_type = other RNA

SEQ ID NO: 23193 - RNA, 36 nt, Synthetic Construct; identical to SEQ ID NO: 2660
  source 1..36: mol_type = other RNA

SEQ ID NO: 23194 - RNA, 19 nt, Synthetic Construct
  source 1..19: mol_type = other RNA
cccttgtcattagttgcta

SEQ ID NO: 23195 - RNA, 19 nt, Synthetic Construct
  source 1..19: mol_type = other RNA
cccttgtcattagttgcta

SEQ ID NO: 23196 - RNA, 22 nt, Synthetic Construct
  source 1..22: mol_type = other RNA
tatcggaacgtgcccagtcgtg

SEQ ID NO: 23197 - RNA, 22 nt, Synthetic Construct
  source 1..22: mol_type = other RNA
tatcggaacgtgcccagtcgtg

SEQ ID NO: 23198 - RNA, 21 nt, Synthetic Construct
  source 1..21: mol_type = other RNA
gctattgacgaccgtaccgca

SEQ ID NO: 23199 - RNA, 21 nt, Synthetic Construct
  source 1..21: mol_type = other RNA
gctattgacgaccgtaccgca

SEQ ID NO: 23200 - RNA, 36 nt, Synthetic Construct; identical to SEQ ID NO: 2469
  source 1..36: mol_type = other RNA

SEQ ID NO: 23201 - RNA, 23 nt, Synthetic Construct
  source 1..23: mol_type = other RNA
tgaggggcagagagcgagactta

SEQ ID NO: 23202 - RNA, 34 nt, Synthetic Construct; identical to SEQ ID NO: 2553
  source 1..34: mol_type = other RNA

SEQ ID NO: 23203 - RNA, 15 nt, Synthetic Construct
  source 1..15: mol_type = other RNA
gggtgaaagcggggg

SEQ ID NO: 23204 - RNA, 15 nt, Synthetic Construct
  source 1..15: mol_type = other RNA
gggtgaaagcggggg

SEQ ID NO: 23205 - RNA, 20 nt, Synthetic Construct
  source 1..20: mol_type = other RNA
tgaggtggtaggttgtatag

SEQ ID NO: 23206 - RNA, 20 nt, Synthetic Construct
  source 1..20: mol_type = other RNA
tgaggtggtaggttgtatag

SEQ ID NO: 23207 - RNA, 15 nt, Synthetic Construct
  source 1..15: mol_type = other RNA
atccctccgactccg

SEQ ID NO: 23208 - RNA, 15 nt, Synthetic Construct
  source 1..15: mol_type = other RNA
atccctccgactccg

SEQ ID NO: 23209 - RNA, 36 nt, Synthetic Construct; identical to SEQ ID NO: 2248
  source 1..36: mol_type = other RNA

SEQ ID NO: 23210 - RNA, 21 nt, Synthetic Construct
  source 1..21: mol_type = other RNA
tgaggggcagggagcgagact

SEQ ID NO: 23211 - RNA, 21 nt, Synthetic Construct
  source 1..21: mol_type = other RNA
tgaggggcagggagcgagact

SEQ ID NO: 23212 - RNA, 22 nt, Synthetic Construct
  source 1..22: mol_type = other RNA
tgaggtagtaggttgcgtggtt

SEQ ID NO: 23213 - RNA, 22 nt, Synthetic Construct
  source 1..22: mol_type = other RNA
tgaggtagtaggttgcgtggtt

SEQ ID NO: 23214 - RNA, 16 nt, Synthetic Construct
  source 1..16: mol_type = other RNA
ggccgtcgtcagctcg

SEQ ID NO: 23215 - RNA, 32 nt, Synthetic Construct; identical to SEQ ID NO: 2086
  source 1..32: mol_type = other RNA

SEQ ID NO: 23216 - RNA, 32 nt, Synthetic Construct; identical to SEQ ID NO: 2086
  source 1..32: mol_type = other RNA

SEQ ID NO: 23217 - RNA, 22 nt, Synthetic Construct
  source 1..22: mol_type = other RNA
tggagtgtaaagaagtatgtat

SEQ ID NO: 23218 - RNA, 22 nt, Synthetic Construct
  source 1..22: mol_type = other RNA
tggagtgtaaagaagtatgtat

SEQ ID NO: 23219 - RNA, 15 nt, Synthetic Construct
  source 1..15: mol_type = other RNA
cggcccagactccta

SEQ ID NO: 23220 - RNA, 15 nt, Synthetic Construct
  source 1..15: mol_type = other RNA
cggcccagactccta

SEQ ID NO: 23221 - RNA, 21 nt, Synthetic Construct
  source 1..21: mol_type = other RNA
tgaggggcagggagcgagact

SEQ ID NO: 23222 - RNA, 22 nt, Synthetic Construct
  source 1..22: mol_type = other RNA
cgactcttagcggtggatcact

SEQ ID NO: 23223 - RNA, 22 nt, Synthetic Construct
  source 1..22: mol_type = other RNA
cgactcttagcggtggatcact

SEQ ID NO: 23224 - RNA, 23 nt, Synthetic Construct
  source 1..23: mol_type = other RNA
tggtaatacgacgtactcagtgt

SEQ ID NO: 23225 - RNA, 23 nt, Synthetic Construct
  source 1..23: mol_type = other RNA
tggtaatacgacgtactcagtgt

SEQ ID NO: 23226 - RNA, 20 nt, Synthetic Construct
  source 1..20: mol_type = other RNA
ccgcagagtacagcttggga

SEQ ID NO: 23227 - RNA, 16 nt, Synthetic Construct
  source 1..16: mol_type = other RNA
tcagtagctcgaggaa

SEQ ID NO: 23228 - RNA, 16 nt, Synthetic Construct
  source 1..16: mol_type = other RNA
tcagtagctcgaggaa

SEQ ID NO: 23229 - RNA, 26 nt, Synthetic Construct
  source 1..26: mol_type = other RNA
gcataagcgtgcttgactgcgagact

SEQ ID NO: 23230 - RNA, 23 nt, Synthetic Construct
  source 1..23: mol_type = other RNA
tcctgtactgagctgccccgggt

SEQ ID NO: 23231 - RNA, 23 nt, Synthetic Construct
  source 1..23: mol_type = other RNA
tcctgtactgagctgccccgggt

SEQ ID NO: 23232 - RNA, 33 nt, Synthetic Construct; identical to SEQ ID NO: 3082
  source 1..33: mol_type = other RNA

SEQ ID NO: 23233 - RNA, 16 nt, Synthetic Construct
  source 1..16: mol_type = other RNA
ctgacgctcatgcacg

SEQ ID NO: 23234 - RNA, 27 nt, Synthetic Construct
  source 1..27: mol_type = other RNA
ccgtgtgaaagtaggtcatcgtcaggc

SEQ ID NO: 23235 - RNA, 31 nt, Synthetic Construct; identical to SEQ ID NO: 2295
  source 1..31: mol_type = other RNA

SEQ ID NO: 23236 - RNA, 31 nt, Synthetic Construct; identical to SEQ ID NO: 2295
  source 1..31: mol_type = other RNA

SEQ ID NO: 23237 - RNA, 20 nt, Synthetic Construct
  source 1..20: mol_type = other RNA
actgatcgagtcgtcctgcg

SEQ ID NO: 23238 - RNA, 20 nt, Synthetic Construct
  source 1..20: mol_type = other RNA
actgatcgagtcgtcctgcg

SEQ ID NO: 23239 - RNA, 22 nt, Synthetic Construct
  source 1..22: mol_type = other RNA
ggatatcatcatatactgtaag

SEQ ID NO: 23240 - RNA, 22 nt, Synthetic Construct
  source 1..22: mol_type = other RNA
ggatatcatcatatactgtaag

SEQ ID NO: 23241 - RNA, 23 nt, Synthetic Construct
  source 1..23: mol_type = other RNA
tggtaattcgacgtacttagtgt

SEQ ID NO: 23242 - RNA, 23 nt, Synthetic Construct
  source 1..23: mol_type = other RNA
tggtaattcgacgtacttagtgt

SEQ ID NO: 23243 - RNA, 18 nt, Synthetic Construct
  source 1..18: mol_type = other RNA
cataaagtagaaagcact

SEQ ID NO: 23244 - RNA, 18 nt, Synthetic Construct
  source 1..18: mol_type = other RNA
cataaagtagaaagcact

SEQ ID NO: 23245 - RNA, 20 nt, Synthetic Construct
  source 1..20: mol_type = other RNA
cgaggtagtaggttgtgtgg

SEQ ID NO: 23246 - RNA, 20 nt, Synthetic Construct
  source 1..20: mol_type = other RNA
cgaggtagtaggttgtgtgg

SEQ ID NO: 23247 - RNA, 30 nt, Synthetic Construct; identical to SEQ ID NO: 2578
  source 1..30: mol_type = other RNA

SEQ ID NO: 23248 - RNA, 30 nt, Synthetic Construct; identical to SEQ ID NO: 2578
  source 1..30: mol_type = other RNA

SEQ ID NO: 23249 - RNA, 20 nt, Synthetic Construct
  source 1..20: mol_type = other RNA
ccgcagagtacagcttggga

SEQ ID NO: 23250 - RNA, 20 nt, Synthetic Construct
  source 1..20: mol_type = other RNA
ccgcagagtacagcttggga

SEQ ID NO: 23251 - RNA, 16 nt, Synthetic Construct
  source 1..16: mol_type = other RNA
gcggtggatgatgtgg

SEQ ID NO: 23252 - RNA, 15 nt, Synthetic Construct
  source 1..15: mol_type = other RNA
gctttgatccggaga

SEQ ID NO: 23253 - RNA, 15 nt, Synthetic Construct
  source 1..15: mol_type = other RNA
gctttgatccggaga

SEQ ID NO: 23254 - RNA, 25 nt, Synthetic Construct
  source 1..25: mol_type = other RNA
agctcactgatcgagtcgtcctgcg

SEQ ID NO: 23255 - RNA, 16 nt, Synthetic Construct
  source 1..16: mol_type = other RNA
ccaaggggtcgtgggt

SEQ ID NO: 23256 - RNA, 16 nt, Synthetic Construct
  source 1..16: mol_type = other RNA
ccaaggggtcgtgggt

SEQ ID NO: 23257 - RNA, 21 nt, Synthetic Construct
  source 1..21: mol_type = other RNA
cgaggtagtaggttgtgtggt

SEQ ID NO: 23258 - RNA, 21 nt, Synthetic Construct
  source 1..21: mol_type = other RNA
cgaggtagtaggttgtgtggt

SEQ ID NO: 23259 - RNA, 31 nt, Synthetic Construct; identical to SEQ ID NO: 2263
  source 1..31: mol_type = other RNA

SEQ ID NO: 23260 - RNA, 30 nt, Synthetic Construct; identical to SEQ ID NO: 768
  source 1..30: mol_type = other RNA

SEQ ID NO: 23261 - RNA, 30 nt, Synthetic Construct; identical to SEQ ID NO: 768
  source 1..30: mol_type = other RNA

SEQ ID NO: 23262 - RNA, 21 nt, Synthetic Construct
  source 1..21: mol_type = other RNA
ctttgttcgattccgttgagt

SEQ ID NO: 23263 - RNA, 21 nt, Synthetic Construct
  source 1..21: mol_type = other RNA
ctttgttcgattccgttgagt

SEQ ID NO: 23264 - RNA, 21 nt, Synthetic Construct
  source 1..21: mol_type = other RNA
aagaaagattgcaagaactgc

SEQ ID NO: 23265 - RNA, 31 nt, Synthetic Construct; identical to SEQ ID NO: 5506
  source 1..31: mol_type = other RNA

SEQ ID NO: 23266 - RNA, 31 nt, Synthetic Construct; identical to SEQ ID NO: 5506
  source 1..31: mol_type = other RNA

SEQ ID NO: 23267 - RNA, 35 nt, Synthetic Construct; identical to SEQ ID NO: 757
  source 1..35: mol_type = other RNA

SEQ ID NO: 23268 - RNA, 35 nt, Synthetic Construct; identical to SEQ ID NO: 757
  source 1..35: mol_type = other RNA

SEQ ID NO: 23269 - RNA, 25 nt, Synthetic Construct
  source 1..25: mol_type = other RNA
tttccccttggggttgtaggaccac

SEQ ID NO: 23270 - RNA, 25 nt, Synthetic Construct
  source 1..25: mol_type = other RNA
tttccccttggggttgtaggaccac

SEQ ID NO: 23271 - RNA, 32 nt, Synthetic Construct; identical to SEQ ID NO: 2296
  source 1..32: mol_type = other RNA

SEQ ID NO: 23272 - RNA, 31 nt, Synthetic Construct; identical to SEQ ID NO: 2423
  source 1..31: mol_type = other RNA

SEQ ID NO: 23273 - RNA, 23 nt, Synthetic Construct
  source 1..23: mol_type = other RNA
tgaggggcagagagcgagactct

SEQ ID NO: 23274 - RNA, 23 nt, Synthetic Construct
  source 1..23: mol_type = other RNA
tgaggggcagagagcgagactct

SEQ ID NO: 23275 - RNA, 28 nt, Synthetic Construct
  source 1..28: mol_type = other RNA
gctttgatccggagatttccgaatgggg

SEQ ID NO: 23276 - RNA, 28 nt, Synthetic Construct
  source 1..28: mol_type = other RNA
gctttgatccggagatttccgaatgggg

SEQ ID NO: 23277 - RNA, 21 nt, Synthetic Construct
  source 1..21: mol_type = other RNA
ggagtatgcagagcaagatca

SEQ ID NO: 23278 - RNA, 21 nt, Synthetic Construct
  source 1..21: mol_type = other RNA
ggagtatgcagagcaagatca

SEQ ID NO: 23279 - RNA, 15 nt, Synthetic Construct
  source 1..15: mol_type = other RNA
tccggatcgtagtct

SEQ ID NO: 23280 - RNA, 15 nt, Synthetic Construct
  source 1..15: mol_type = other RNA
tccggatcgtagtct

SEQ ID NO: 23281 - RNA, 33 nt, Synthetic Construct; identical to SEQ ID NO: 2126
  source 1..33: mol_type = other RNA

SEQ ID NO: 23282 - RNA, 33 nt, Synthetic Construct; identical to SEQ ID NO: 2126
  source 1..33: mol_type = other RNA

SEQ ID NO: 23283 - RNA, 21 nt, Synthetic Construct
  source 1..21: mol_type = other RNA
cactgatcgagtcgtcctgcg

SEQ ID NO: 23284 - RNA, 21 nt, Synthetic Construct
  source 1..21: mol_type = other RNA
cactgatcgagtcgtcctgcg

SEQ ID NO: 23285 - RNA, 22 nt, Synthetic Construct
  source 1..22: mol_type = other RNA
gcactctaatgagactgccggt

SEQ ID NO: 23286 - RNA, 22 nt, Synthetic Construct
  source 1..22: mol_type = other RNA
gcactctaatgagactgccggt

SEQ ID NO: 23287 - RNA, 22 nt, Synthetic Construct
  source 1..22: mol_type = other RNA
tatcggaacgtgcccagtcgtg

SEQ ID NO: 23288 - RNA, 35 nt, Synthetic Construct; identical to SEQ ID NO: 2762
  source 1..35: mol_type = other RNA

SEQ ID NO: 23289 - RNA, 20 nt, Synthetic Construct
  source 1..20: mol_type = other RNA
gtgccgaagctgtgggattg

SEQ ID NO: 23290 - RNA, 20 nt, Synthetic Construct
  source 1..20: mol_type = other RNA
gtgccgaagctgtgggattg

SEQ ID NO: 23291 - RNA, 27 nt, Synthetic Construct
  source 1..27: mol_type = other RNA
gacttaccaaacctatgcaaactccga

SEQ ID NO: 23292 - RNA, 27 nt, Synthetic Construct
  source 1..27: mol_type = other RNA
gacttaccaaacctatgcaaactccga

SEQ ID NO: 23293 - RNA, 16 nt, Synthetic Construct
  source 1..16: mol_type = other RNA
gtccggatcgtagtct

SEQ ID NO: 23294 - RNA, 16 nt, Synthetic Construct
  source 1..16: mol_type = other RNA
gtccggatcgtagtct

SEQ ID NO: 23295 - RNA, 19 nt, Synthetic Construct
  source 1..19: mol_type = other RNA
agtcgacgtatagggtgtg

SEQ ID NO: 23296 - RNA, 18 nt, Synthetic Construct
  source 1..18: mol_type = other RNA
tcccaagggtatggctgt

SEQ ID NO: 23297 - RNA, 18 nt, Synthetic Construct
  source 1..18: mol_type = other RNA
tcccaagggtatggctgt

SEQ ID NO: 23298 - RNA, 21 nt, Synthetic Construct
  source 1..21: mol_type = other RNA
tgaggggcagagagcgaggct

SEQ ID NO: 23299 - RNA, 21 nt, Synthetic Construct
  source 1..21: mol_type = other RNA
tgaggggcagagagcgaggct

SEQ ID NO: 23300 - RNA, 23 nt, Synthetic Construct
  source 1..23: mol_type = other RNA
tccctggtggtctagtggttagg

SEQ ID NO: 23301 - RNA, 20 nt, Synthetic Construct
  source 1..20: mol_type = other RNA
tgaggtagtaggttgtatgg

SEQ ID NO: 23302 - RNA, 20 nt, Synthetic Construct
  source 1..20: mol_type = other RNA
tgaggtagtaggttgtatgg

SEQ ID NO: 23303 - RNA, 27 nt, Synthetic Construct
  source 1..27: mol_type = other RNA
ggatttccccttggggttgtaggacca

SEQ ID NO: 23304 - RNA, 27 nt, Synthetic Construct
  source 1..27: mol_type = other RNA
ggatttccccttggggttgtaggacca

SEQ ID NO: 23305 - RNA, 28 nt, Synthetic Construct
  source 1..28: mol_type = other RNA
cgactcttagcggtggatcactcggctc

SEQ ID NO: 23306 - RNA, 16 nt, Synthetic Construct
  source 1..16: mol_type = other RNA
cccctggacctgtact

SEQ ID NO: 23307 - RNA, 16 nt, Synthetic Construct
  source 1..16: mol_type = other RNA
cccctggacctgtact

SEQ ID NO: 23308 - RNA, 28 nt, Synthetic Construct
  source 1..28: mol_type = other RNA
gctttacattggactttgaacagatctg

SEQ ID NO: 23309 - RNA, 23 nt, Synthetic Construct
  source 1..23: mol_type = other RNA
tggtaatacaacgtacttagtgt

SEQ ID NO: 23310 - RNA, 21 nt, Synthetic Construct
  source 1..21: mol_type = other RNA
aagaaagattgcaagaactgc

SEQ ID NO: 23311 - RNA, 21 nt, Synthetic Construct
  source 1..21: mol_type = other RNA
aagaaagattgcaagaactgc

SEQ ID NO: 23312 - RNA, 22 nt, Synthetic Construct
  source 1..22: mol_type = other RNA
nattgcacttgtcccggcctgt

SEQ ID NO: 23313 - RNA, 22 nt, Synthetic Construct
  source 1..22: mol_type = other RNA
nattgcacttgtcccggcctgt

SEQ ID NO: 23314 - RNA, 23 nt, Synthetic Construct
  source 1..23: mol_type = other RNA
tccccttggggttgtaggaccac

SEQ ID NO: 23315 - RNA, 23 nt, Synthetic Construct
  source 1..23: mol_type = other RNA
tccccttggggttgtaggaccac

SEQ ID NO: 23316 - RNA, 23 nt, Synthetic Construct
  source 1..23: mol_type = other RNA
nggtaatacgacgtacttagtgt

SEQ ID NO: 23317 - RNA, 23 nt, Synthetic Construct
  source 1..23: mol_type = other RNA
nggtaatacgacgtacttagtgt

SEQ ID NO: 23318 - RNA, 27 nt, Synthetic Construct
  source 1..27: mol_type = other RNA
gacttaccaaacctatgcaaactccga

SEQ ID NO: 23319 - RNA, 27 nt, Synthetic Construct
  source 1..27: mol_type = other RNA
gacttaccaaacctatgcaaactccga

SEQ ID NO: 23320 - RNA, 28 nt, Synthetic Construct
  source 1..28: mol_type = other RNA
gctttgatccggagatttccgaatgggg

SEQ ID NO: 23321 - RNA, 23 nt, Synthetic Construct
  source 1..23: mol_type = other RNA
tggtaattcgacgtacttagtgt

SEQ ID NO: 23322 - RNA, 23 nt, Synthetic Construct
  source 1..23: mol_type = other RNA
tggtaattcgacgtacttagtgt

SEQ ID NO: 23323 - RNA, 17 nt, Synthetic Construct
  source 1..17: mol_type = other RNA
cgatctgtagctggtct

SEQ ID NO: 23324 - RNA, 17 nt, Synthetic Construct
  source 1..17: mol_type = other RNA
cgatctgtagctggtct

SEQ ID NO: 23325 - RNA, 22 nt, Synthetic Construct
  source 1..22: mol_type = other RNA
tgaagtagtaggttgtgtggtt

SEQ ID NO: 23326 - RNA, 31 nt, Synthetic Construct; identical to SEQ ID NO: 2215
  source 1..31: mol_type = other RNA

SEQ ID NO: 23327 - RNA, 16 nt, Synthetic Construct
  source 1..16: mol_type = other RNA
gatttgggagtgctcg

SEQ ID NO: 23328 - RNA, 16 nt, Synthetic Construct
  source 1..16: mol_type = other RNA
gatttgggagtgctcg

SEQ ID NO: 23329 - RNA, 22 nt, Synthetic Construct
  source 1..22: mol_type = other RNA
tgtcaactggttgttgggaggg

SEQ ID NO: 23330 - RNA, 23 nt, Synthetic Construct
  source 1..23: mol_type = other RNA
tggtaacacgacgtacttagtgt

SEQ ID NO: 23331 - RNA, 23 nt, Synthetic Construct
  source 1..23: mol_type = other RNA
tggtaacacgacgtacttagtgt

SEQ ID NO: 23332 - RNA, 24 nt, Synthetic Construct
  source 1..24: mol_type = other RNA
tcactgatcgagtcgtcctgcgcg

SEQ ID NO: 23333 - RNA, 24 nt, Synthetic Construct
  source 1..24: mol_type = other RNA
tcactgatcgagtcgtcctgcgcg

SEQ ID NO: 23334 - RNA, 23 nt, Synthetic Construct
  source 1..23: mol_type = other RNA
tgaggggcagagagcgagacctt

SEQ ID NO: 23335 - RNA, 32 nt, Synthetic Construct; identical to SEQ ID NO: 770
  source 1..32: mol_type = other RNA

SEQ ID NO: 23336 - RNA, 18 nt, Synthetic Construct
  source 1..18: mol_type = other RNA
gcgaaattccttgtcggg

SEQ ID NO: 23337 - RNA, 35 nt, Synthetic Construct; identical to SEQ ID NO: 2452
  source 1..35: mol_type = other RNA

SEQ ID NO: 23338 - RNA, 35 nt, Synthetic Construct; identical to SEQ ID NO: 2452
  source 1..35: mol_type = other RNA

SEQ ID NO: 23339 - RNA, 17 nt, Synthetic Construct
  source 1..17: mol_type = other RNA
cgaaattccttgtcggg

SEQ ID NO: 23340 - RNA, 22 nt, Synthetic Construct
  source 1..22: mol_type = other RNA
tcgaaccgtgagtaataatgcg

SEQ ID NO: 23341 - RNA, 27 nt, Synthetic Construct
  source 1..27: mol_type = other RNA
ccgtgtgaaagtaggtcatcgtcaggc

SEQ ID NO: 23342 - RNA, 27 nt, Synthetic Construct
  source 1..27: mol_type = other RNA
ccgtgtgaaagtaggtcatcgtcaggc

SEQ ID NO: 23343 - RNA, 21 nt, Synthetic Construct
  source 1..21: mol_type = other RNA
cgcgacctcagatcagacgtg

SEQ ID NO: 23344 - RNA, 21 nt, Synthetic Construct
  source 1..21: mol_type = other RNA
cgcgacctcagatcagacgtg

SEQ ID NO: 23345 - RNA, 18 nt, Synthetic Construct
  source 1..18: mol_type = other RNA
cgcgacctcagatcagac

SEQ ID NO: 23346 - RNA, 18 nt, Synthetic Construct
  source 1..18: mol_type = other RNA
cgcgacctcagatcagac

SEQ ID NO: 23347 - RNA, 24 nt, Synthetic Construct
  source 1..24: mol_type = other RNA
gcagctaataccgcatacgacctg

SEQ ID NO: 23348 - RNA, 24 nt, Synthetic Construct
  source 1..24: mol_type = other RNA
gcagctaataccgcatacgacctg

SEQ ID NO: 23349 - RNA, 21 nt, Synthetic Construct
  source 1..21: mol_type = other RNA
atcacattgccagggatttcc

SEQ ID NO: 23350 - RNA, 21 nt, Synthetic Construct
  source 1..21: mol_type = other RNA
atcacattgccagggatttcc

SEQ ID NO: 23351 - RNA, 23 nt, Synthetic Construct
  source 1..23: mol_type = other RNA
tggtaatacgacatacttagtgt

SEQ ID NO: 23352 - RNA, 23 nt, Synthetic Construct
  source 1..23: mol_type = other RNA
tggtaatacgacatacttagtgt

SEQ ID NO: 23353 - RNA, 15 nt, Synthetic Construct
  source 1..15: mol_type = other RNA
ggtggctgtagctca

SEQ ID NO: 23354 - RNA, 23 nt, Synthetic Construct
  source 1..23: mol_type = other RNA
ggcggttatgcaagacagaggtg

SEQ ID NO: 23355 - RNA, 23 nt, Synthetic Construct
  source 1..23: mol_type = other RNA
ggcggttatgcaagacagaggtg

SEQ ID NO: 23356 - RNA, 18 nt, Synthetic Construct
  source 1..18: mol_type = other RNA
accggaggaaggtgggga

SEQ ID NO: 23357 - RNA, 18 nt, Synthetic Construct
  source 1..18: mol_type = other RNA
accggaggaaggtgggga

SEQ ID NO: 23358 - RNA, 17 nt, Synthetic Construct
  source 1..17: mol_type = other RNA
tggccgggacagagggc

SEQ ID NO: 23359 - RNA, 17 nt, Synthetic Construct
  source 1..17: mol_type = other RNA
tggccgggacagagggc

SEQ ID NO: 23360 - RNA, 26 nt, Synthetic Construct
  source 1..26: mol_type = other RNA
tgtcggctcatctcatcctggggctg

SEQ ID NO: 23361 - RNA, 26 nt, Synthetic Construct
  source 1..26: mol_type = other RNA
tgtcggctcatctcatcctggggctg

SEQ ID NO: 23362 - RNA, 16 nt, Synthetic Construct
  source 1..16: mol_type = other RNA
ggcgggggtcgctggt

SEQ ID NO: 23363 - RNA, 34 nt, Synthetic Construct; identical to SEQ ID NO: 2186
  source 1..34: mol_type = other RNA

SEQ ID NO: 23364 - RNA, 34 nt, Synthetic Construct; identical to SEQ ID NO: 2186
  source 1..34: mol_type = other RNA

SEQ ID NO: 23365 - RNA, 20 nt, Synthetic Construct
  source 1..20: mol_type = other RNA
tggggtagtaggttgtatag

SEQ ID NO: 23366 - RNA, 20 nt, Synthetic Construct
  source 1..20: mol_type = other RNA
tggggtagtaggttgtatag

SEQ ID NO: 23367 - RNA, 31 nt, Synthetic Construct; identical to SEQ ID NO: 7160
  source 1..31: mol_type = other RNA

SEQ ID NO: 23368 - RNA, 31 nt, Synthetic Construct; identical to SEQ ID NO: 7160
  source 1..31: mol_type = other RNA

SEQ ID NO: 23369 - RNA, 15 nt, Synthetic Construct
  source 1..15: mol_type = other RNA
gcgtagatatgcgga

SEQ ID NO: 23370 - RNA, 15 nt, Synthetic Construct
  source 1..15: mol_type = other RNA
gcgtagatatgcgga

SEQ ID NO: 23371 - RNA, 23 nt, Synthetic Construct
  source 1..23: mol_type = other RNA
cgctcacggaaagagaatgaagc

SEQ ID NO: 23372 - RNA, 23 nt, Synthetic Construct
  source 1..23: mol_type = other RNA
cgctcacggaaagagaatgaagc

SEQ ID NO: 23373 - RNA, 32 nt, Synthetic Construct; identical to SEQ ID NO: 4279
  source 1..32: mol_type = other RNA

SEQ ID NO: 23374 - RNA, 32 nt, Synthetic Construct; identical to SEQ ID NO: 4279
  source 1..32: mol_type = other RNA

SEQ ID NO: 23375 - RNA, 21 nt, Synthetic Construct
  source 1..21: mol_type = other RNA
gtagcgaaattccttgtcggg

SEQ ID NO: 23376 - RNA, 21 nt, Synthetic Construct
  source 1..21: mol_type = other RNA
gtagcgaaattccttgtcggg

SEQ ID NO: 23377 - RNA, 21 nt, Synthetic Construct
  source 1..21: mol_type = other RNA
atcggaacgtgcccagtcgtg

SEQ ID NO: 23378 - RNA, 15 nt, Synthetic Construct
  source 1..15: mol_type = other RNA
gagtagggcgggaca

SEQ ID NO: 23379 - RNA, 30 nt, Synthetic Construct; identical to SEQ ID NO: 2353
  source 1..30: mol_type = other RNA

SEQ ID NO: 23380 - RNA, 22 nt, Synthetic Construct
  source 1..22: mol_type = other RNA
tcagtagctcgaggaaaagaca

SEQ ID NO: 23381 - RNA, 22 nt, Synthetic Construct
  source 1..22: mol_type = other RNA
tcagtagctcgaggaaaagaca

SEQ ID NO: 23382 - RNA, 20 nt, Synthetic Construct
  source 1..20: mol_type = other RNA
cccagtaaacggcggccgta

SEQ ID NO: 23383 - RNA, 16 nt, Synthetic Construct
  source 1..16: mol_type = other RNA
gctattgacgaccgta

SEQ ID NO: 23384 - RNA, 16 nt, Synthetic Construct
  source 1..16: mol_type = other RNA
gctattgacgaccgta

SEQ ID NO: 23385 - RNA, 22 nt, Synthetic Construct
  source 1..22: mol_type = other RNA
ccctgtactgagctgccccgag

SEQ ID NO: 23386 - RNA, 22 nt, Synthetic Construct
  source 1..22: mol_type = other RNA
ccctgtactgagctgccccgag

SEQ ID NO: 23387 - RNA, 24 nt, Synthetic Construct
  source 1..24: mol_type = other RNA
gcagctaataccgcatacgacctg

SEQ ID NO: 23388 - RNA, 22 nt, Synthetic Construct
  source 1..22: mol_type = other RNA
tgaggtagtagtttgtggtgtt

SEQ ID NO: 23389 - RNA, 25 nt, Synthetic Construct
  source 1..25: mol_type = other RNA
cctcgcgcgattggagcggccgata

SEQ ID NO: 23390 - RNA, 22 nt, Synthetic Construct
  source 1..22: mol_type = other RNA
tgaggtagcaggttgtgtggtt

SEQ ID NO: 23391 - RNA, 22 nt, Synthetic Construct
  source 1..22: mol_type = other RNA
tgaggtagcaggttgtgtggtt

SEQ ID NO: 23392 - RNA, 22 nt, Synthetic Construct
  source 1..22: mol_type = other RNA
tggaatgtaaagaggtatgtat

SEQ ID NO: 23393 - RNA, 22 nt, Synthetic Construct
  source 1..22: mol_type = other RNA
tggaatgtaaagaggtatgtat

SEQ ID NO: 23394 - RNA, 21 nt, Synthetic Construct
  source 1..21: mol_type = other RNA
gttggttcaagcgtgtagtcg

SEQ ID NO: 23395 - RNA, 16 nt, Synthetic Construct
  source 1..16: mol_type = other RNA
gtctacggccataccg

SEQ ID NO: 23396 - RNA, 16 nt, Synthetic Construct
  source 1..16: mol_type = other RNA
gtctacggccataccg

SEQ ID NO: 23397 - RNA, 17 nt, Synthetic Construct
  source 1..17: mol_type = other RNA
cccctggacctgtactg

SEQ ID NO: 23398 - RNA, 17 nt, Synthetic Construct
  source 1..17: mol_type = other RNA
cccctggacctgtactg

SEQ ID NO: 23399 - RNA, 24 nt, Synthetic Construct
  source 1..24: mol_type = other RNA
gatgaggcgtgataacgagtctgc

SEQ ID NO: 23400 - RNA, 23 nt, Synthetic Construct
  source 1..23: mol_type = other RNA
gtctttgttcgattccgttgagt

SEQ ID NO: 23401 - RNA, 23 nt, Synthetic Construct
  source 1..23: mol_type = other RNA
gtctttgttcgattccgttgagt

SEQ ID NO: 23402 - RNA, 23 nt, Synthetic Construct
  source 1..23: mol_type = other RNA
gggtaatacgacgtacttagtgt

SEQ ID NO: 23403 - RNA, 18 nt, Synthetic Construct
  source 1..18: mol_type = other RNA
cctgaagaataagcaccg

SEQ ID NO: 23404 - RNA, 20 nt, Synthetic Construct
  source 1..20: mol_type = other RNA
ggtcccaagggtatggctgt

SEQ ID NO: 23405 - RNA, 20 nt, Synthetic Construct
  source 1..20: mol_type = other RNA
ggtcccaagggtatggctgt

SEQ ID NO: 23406 - RNA, 17 nt, Synthetic Construct
  source 1..17: mol_type = other RNA
cgaaattccttgtcggg

SEQ ID NO: 23407 - RNA, 17 nt, Synthetic Construct
  source 1..17: mol_type = other RNA
cgaaattccttgtcggg

SEQ ID NO: 23408 - RNA, 26 nt, Synthetic Construct
  source 1..26: mol_type = other RNA
tgtccccgcgaggggcccggggcggg

SEQ ID NO: 23409 - RNA, 26 nt, Synthetic Construct
  source 1..26: mol_type = other RNA
tgtccccgcgaggggcccggggcggg

SEQ ID NO: 23410 - RNA, 23 nt, Synthetic Construct
  source 1..23: mol_type = other RNA
tgaggggcagagagcgggacttt

SEQ ID NO: 23411 - RNA, 23 nt, Synthetic Construct
  source 1..23: mol_type = other RNA
tgaggggcagagagcgggacttt

SEQ ID NO: 23412 - RNA, 20 nt, Synthetic Construct
  source 1..20: mol_type = other RNA
ctctaatgagactgccggtg

SEQ ID NO: 23413 - RNA, 20 nt, Synthetic Construct
  source 1..20: mol_type = other RNA
ctctaatgagactgccggtg

SEQ ID NO: 23414 - RNA, 16 nt, Synthetic Construct
  source 1..16: mol_type = other RNA
aggtcatcattatctg

SEQ ID NO: 23415 - RNA, 16 nt, Synthetic Construct
  source 1..16: mol_type = other RNA
gtctgcggccatacca

SEQ ID NO: 23416 - RNA, 16 nt, Synthetic Construct
  source 1..16: mol_type = other RNA
gtctgcggccatacca

SEQ ID NO: 23417 - RNA, 15 nt, Synthetic Construct
  source 1..15: mol_type = other RNA
cgccatttaaagagg

SEQ ID NO: 23418 - RNA, 23 nt, Synthetic Construct
  source 1..23: mol_type = other RNA
tggtaatacgtcgtacttagtgt

SEQ ID NO: 23419 - RNA, 23 nt, Synthetic Construct
  source 1..23: mol_type = other RNA
tggtaatacgtcgtacttagtgt

SEQ ID NO: 23420 - RNA, 22 nt, Synthetic Construct
  source 1..22: mol_type = other RNA
tattgcacctgtcccggcctgt

SEQ ID NO: 23421 - RNA, 15 nt, Synthetic Construct
  source 1..15: mol_type = other RNA
catgccgcgtgcggg

SEQ ID NO: 23422 - RNA, 15 nt, Synthetic Construct
  source 1..15: mol_type = other RNA
catgccgcgtgcggg

SEQ ID NO: 23423 - RNA, 22 nt, Synthetic Construct
  source 1..22: mol_type = other RNA
tgaggaagtaggttgtgtggtt

SEQ ID NO: 23424 - RNA, 22 nt, Synthetic Construct
  source 1..22: mol_type = other RNA
tgaggaagtaggttgtgtggtt

SEQ ID NO: 23425 - RNA, 21 nt, Synthetic Construct
  source 1..21: mol_type = other RNA
agcgtgcttgactgcgagact

SEQ ID NO: 23426 - RNA, 21 nt, Synthetic Construct
  source 1..21: mol_type = other RNA
agcgtgcttgactgcgagact

SEQ ID NO: 23427 - RNA, 23 nt, Synthetic Construct
  source 1..23: mol_type = other RNA
tggtaatatgacgtacttagtgt

SEQ ID NO: 23428 - RNA, 23 nt, Synthetic Construct
  source 1..23: mol_type = other RNA
tggtaatatgacgtacttagtgt

SEQ ID NO: 23429 - RNA, 22 nt, Synthetic Construct
  source 1..22: mol_type = other RNA
cgaggtagtaggttgtgtggtt

SEQ ID NO: 23430 - RNA, 23 nt, Synthetic Construct
  source 1..23: mol_type = other RNA
tcactgatcgagtcgtcctgcgc

SEQ ID NO: 23431 - RNA, 23 nt, Synthetic Construct
  source 1..23: mol_type = other RNA
tcactgatcgagtcgtcctgcgc

SEQ ID NO: 23432 - RNA, 29 nt, Synthetic Construct
  source 1..29: mol_type = other RNA
cccgtgtgaaagtaggtcatcgtcaggct

SEQ ID NO: 23433 - RNA, 29 nt, Synthetic Construct
  source 1..29: mol_type = other RNA
cccgtgtgaaagtaggtcatcgtcaggct

SEQ ID NO: 23434 - RNA, 21 nt, Synthetic Construct
  source 1..21: mol_type = other RNA
gtagtgtttcctactttatgg

SEQ ID NO: 23435 - RNA, 32 nt, Synthetic Construct; identical to SEQ ID NO: 4734
  source 1..32: mol_type = other RNA

SEQ ID NO: 23436 - RNA, 32 nt, Synthetic Construct; identical to SEQ ID NO: 4734
  source 1..32: mol_type = other RNA

SEQ ID NO: 23437 - RNA, 23 nt, Synthetic Construct
  source 1..23: mol_type = other RNA
ctcactgatcgagtcgtcctgcg

SEQ ID NO: 23438 - RNA, 23 nt, Synthetic Construct
  source 1..23: mol_type = other RNA
ctcactgatcgagtcgtcctgcg

SEQ ID NO: 23439 - RNA, 35 nt, Synthetic Construct; identical to SEQ ID NO: 2354
  source 1..35: mol_type = other RNA

SEQ ID NO: 23440 - RNA, 34 nt, Synthetic Construct; identical to SEQ ID NO: 2367
  source 1..34: mol_type = other RNA

SEQ ID NO: 23441 - RNA, 34 nt, Synthetic Construct; identical to SEQ ID NO: 2367
  source 1..34: mol_type = other RNA

SEQ ID NO: 23442 - RNA, 32 nt, Synthetic Construct; identical to SEQ ID NO: 2798
  source 1..32: mol_type = other RNA

SEQ ID NO: 23443 - RNA, 33 nt, Synthetic Construct; identical to SEQ ID NO: 4947
  source 1..33: mol_type = other RNA

SEQ ID NO: 23444 - RNA, 23 nt, Synthetic Construct
  source 1..23: mol_type = other RNA
tctttggttatctagctgtatgt

SEQ ID NO: 23445 - RNA, 23 nt, Synthetic Construct
  source 1..23: mol_type = other RNA
tctttggttatctagctgtatgt

SEQ ID NO: 23446 - RNA, 22 nt, Synthetic Construct
  source 1..22: mol_type = other RNA
cgaggtagtaggttgtgtggtt

SEQ ID NO: 23447 - RNA, 22 nt, Synthetic Construct
  source 1..22: mol_type = other RNA
cgaggtagtaggttgtgtggtt

SEQ ID NO: 23448 - RNA, 18 nt, Synthetic Construct
  source 1..18: mol_type = other RNA
ccaaggggtcgtgggttc

SEQ ID NO: 23449 - RNA, 18 nt, Synthetic Construct
  source 1..18: mol_type = other RNA
ccaaggggtcgtgggttc

SEQ ID NO: 23450 - RNA, 17 nt, Synthetic Construct
  source 1..17: mol_type = other RNA
cacggcccagactccta

SEQ ID NO: 23451 - RNA, 17 nt, Synthetic Construct
  source 1..17: mol_type = other RNA
cacggcccagactccta

SEQ ID NO: 23452 - RNA, 27 nt, Synthetic Construct
  source 1..27: mol_type = other RNA
gttggttcaagcgtgtagtcgtgctct

SEQ ID NO: 23453 - RNA, 35 nt, Synthetic Construct; identical to SEQ ID NO: 2399
  source 1..35: mol_type = other RNA

SEQ ID NO: 23454 - RNA, 22 nt, Synthetic Construct
  source 1..22: mol_type = other RNA
ctttgttcgattccgttgagta

SEQ ID NO: 23455 - RNA, 23 nt, Synthetic Construct
  source 1..23: mol_type = other RNA
tcctgtactgggctgccccgaga

SEQ ID NO: 23456 - RNA, 23 nt, Synthetic Construct
  source 1..23: mol_type = other RNA
tcctgtactgggctgccccgaga

SEQ ID NO: 23457 - RNA, 17 nt, Synthetic Construct
  source 1..17: mol_type = other RNA
tcccctggacctgtact

SEQ ID NO: 23458 - RNA, 21 nt, Synthetic Construct
  source 1..21: mol_type = other RNA
tgaggggcagagagcgggact

SEQ ID NO: 23459 - RNA, 20 nt, Synthetic Construct
  source 1..20: mol_type = other RNA
gcgtgcttgactgcgagact

SEQ ID NO: 23460 - RNA, 20 nt, Synthetic Construct
  source 1..20: mol_type = other RNA
gcgtgcttgactgcgagact

SEQ ID NO: 23461 - RNA, 15 nt, Synthetic Construct
  source 1..15: mol_type = other RNA
tgcaagtcgaacggt

SEQ ID NO: 23462 - RNA, 15 nt, Synthetic Construct
  source 1..15: mol_type = other RNA
tgcaagtcgaacggt

SEQ ID NO: 23463 - RNA, 20 nt, Synthetic Construct
  source 1..20: mol_type = other RNA
tgaggtagtaggttgtgcgg

SEQ ID NO: 23464 - RNA, 20 nt, Synthetic Construct
  source 1..20: mol_type = other RNA
tgaggtagtaggttgtgcgg

SEQ ID NO: 23465 - RNA, 23 nt, Synthetic Construct
  source 1..23: mol_type = other RNA
tggtaacacgacgtacttagtgt

SEQ ID NO: 23466 - RNA, 23 nt, Synthetic Construct
  source 1..23: mol_type = other RNA
tggtaacacgacgtacttagtgt

SEQ ID NO: 23467 - RNA, 27 nt, Synthetic Construct
  source 1..27: mol_type = other RNA
gctttacattggactttgaacagatct

SEQ ID NO: 23468 - RNA, 27 nt, Synthetic Construct
  source 1..27: mol_type = other RNA
gctttacattggactttgaacagatct

SEQ ID NO: 23469 - RNA, 23 nt, Synthetic Construct
  source 1..23: mol_type = other RNA
ccctgtactgagctgccccgagt

SEQ ID NO: 23470 - RNA, 22 nt, Synthetic Construct
  source 1..22: mol_type = other RNA
tgaggtagtaggttgtggggtt

SEQ ID NO: 23471 - RNA, 15 nt, Synthetic Construct
  source 1..15: mol_type = other RNA
aggtgggaggctttg

SEQ ID NO: 23472 - RNA, 15 nt, Synthetic Construct
  source 1..15: mol_type = other RNA
aggtgggaggctttg

SEQ ID NO: 23473 - RNA, 16 nt, Synthetic Construct
  source 1..16: mol_type = other RNA
ggtagctcgttgggct

SEQ ID NO: 23474 - RNA, 16 nt, Synthetic Construct
  source 1..16: mol_type = other RNA
gtctacggacatacca

SEQ ID NO: 23475 - RNA, 17 nt, Synthetic Construct
  source 1..17: mol_type = other RNA
cgatctgtagctggtct

SEQ ID NO: 23476 - RNA, 19 nt, Synthetic Construct
  source 1..19: mol_type = other RNA
cacatgcaagtcgaacggt

SEQ ID NO: 23477 - RNA, 19 nt, Synthetic Construct
  source 1..19: mol_type = other RNA
cacatgcaagtcgaacggt

SEQ ID NO: 23478 - RNA, 17 nt, Synthetic Construct
  source 1..17: mol_type = other RNA
ggcccttatgggtaggg

SEQ ID NO: 23479 - RNA, 17 nt, Synthetic Construct
  source 1..17: mol_type = other RNA
ggcccttatgggtaggg

SEQ ID NO: 23480 - RNA, 17 nt, Synthetic Construct
  source 1..17: mol_type = other RNA
tcccctggacctgtact

SEQ ID NO: 23481 - RNA, 25 nt, Synthetic Construct
  source 1..25: mol_type = other RNA
ttgaggatatgagatcgagacgaca

SEQ ID NO: 23482 - RNA, 25 nt, Synthetic Construct
  source 1..25: mol_type = other RNA
ttgaggatatgagatcgagacgaca

SEQ ID NO: 23483 - RNA, 39 nt, Synthetic Construct; identical to SEQ ID NO: 4400
  source 1..39: mol_type = other RNA

SEQ ID NO: 23484 - RNA, 15 nt, Synthetic Construct
  source 1..15: mol_type = other RNA
tcgagtcgtcctgcg

SEQ ID NO: 23485 - RNA, 15 nt, Synthetic Construct
  source 1..15: mol_type = other RNA
tcgagtcgtcctgcg

SEQ ID NO: 23486 - RNA, 25 nt, Synthetic Construct
  source 1..25: mol_type = other RNA
ttgaggatatgagatcgagacgacg

SEQ ID NO: 23487 - RNA, 25 nt, Synthetic Construct
  source 1..25: mol_type = other RNA
ttgaggatatgagatcgagacgacg

SEQ ID NO: 23488 - RNA, 27 nt, Synthetic Construct
  source 1..27: mol_type = other RNA
gctttacattggactttgaacagatct

SEQ ID NO: 23489 - RNA, 27 nt, Synthetic Construct
  source 1..27: mol_type = other RNA
gctttacattggactttgaacagatct

SEQ ID NO: 23490 - RNA, 16 nt, Synthetic Construct
  source 1..16: mol_type = other RNA
gtctacagccatacca

SEQ ID NO: 23491 - RNA, 16 nt, Synthetic Construct
  source 1..16: mol_type = other RNA
gtctacagccatacca

SEQ ID NO: 23492 - RNA, 28 nt, Synthetic Construct
  source 1..28: mol_type = other RNA
ccccccactgctaaatttggctggcttt

SEQ ID NO: 23493 - RNA, 36 nt, Synthetic Construct; identical to SEQ ID NO: 2520
  source 1..36: mol_type = other RNA

SEQ ID NO: 23494 - RNA, 36 nt, Synthetic Construct; identical to SEQ ID NO: 2520
  source 1..36: mol_type = other RNA

SEQ ID NO: 23495 - RNA, 16 nt, Synthetic Construct
  source 1..16: mol_type = other RNA
gtctacggctatacca

SEQ ID NO: 23496 - RNA, 16 nt, Synthetic Construct
  source 1..16: mol_type = other RNA
gtctacggctatacca

SEQ ID NO: 23497 - RNA, 25 nt, Synthetic Construct
  source 1..25: mol_type = other RNA
ttgaggatatgggatcgagacgaca

SEQ ID NO: 23498 - RNA, 25 nt, Synthetic Construct
  source 1..25: mol_type = other RNA
ttgaggatatgggatcgagacgaca

SEQ ID NO: 23499 - RNA, 22 nt, Synthetic Construct
  source 1..22: mol_type = other RNA
tgaggtagtaggttgtgcggtt

SEQ ID NO: 23500 - RNA, 22 nt, Synthetic Construct
  source 1..22: mol_type = other RNA
tgaggtagtaggttgtgcggtt

SEQ ID NO: 23501 - RNA, 25 nt, Synthetic Construct
  source 1..25: mol_type = other RNA
agctcactgatcgagtcgtcctgcg

SEQ ID NO: 23502 - RNA, 25 nt, Synthetic Construct
  source 1..25: mol_type = other RNA
agctcactgatcgagtcgtcctgcg

SEQ ID NO: 23503 - RNA, 25 nt, Synthetic Construct
  source 1..25: mol_type = other RNA
gggttgtaaaccgcttttgtcaggg

SEQ ID NO: 23504 - RNA, 20 nt, Synthetic Construct
  source 1..20: mol_type = other RNA
ccgcagagtacagcttggga

SEQ ID NO: 23505 - RNA, 20 nt, Synthetic Construct
  source 1..20: mol_type = other RNA
ccgcagagtacagcttggga

SEQ ID NO: 23506 - RNA, 23 nt, Synthetic Construct
  source 1..23: mol_type = other RNA
tgaggggcagagagcgagactta

SEQ ID NO: 23507 - RNA, 21 nt, Synthetic Construct
  source 1..21: mol_type = other RNA
tgtagtgtttcctactttatg

SEQ ID NO: 23508 - RNA, 21 nt, Synthetic Construct
  source 1..21: mol_type = other RNA
tcctgtactgagccgccccga

SEQ ID NO: 23509 - RNA, 21 nt, Synthetic Construct
  source 1..21: mol_type = other RNA
tcctgtactgagccgccccga

SEQ ID NO: 23510 - RNA, 16 nt, Synthetic Construct
  source 1..16: mol_type = other RNA
gaaattccttgtcggg

SEQ ID NO: 23511 - RNA, 23 nt, Synthetic Construct
  source 1..23: mol_type = other RNA
cgctcacggaaagagaatgaagc

SEQ ID NO: 23512 - RNA, 15 nt, Synthetic Construct
  source 1..15: mol_type = other RNA
ggtgaaagcggggga

SEQ ID NO: 23513 - RNA, 15 nt, Synthetic Construct
  source 1..15: mol_type = other RNA
ggtgaaagcggggga

SEQ ID NO: 23514 - RNA, 34 nt, Synthetic Construct; identical to SEQ ID NO: 385
  source 1..34: mol_type = other RNA

SEQ ID NO: 23515 - RNA, 33 nt, Synthetic Construct; identical to SEQ ID NO: 2209
  source 1..33: mol_type = other RNA

SEQ ID NO: 23516 - RNA, 33 nt, Synthetic Construct; identical to SEQ ID NO: 2209
  source 1..33: mol_type = other RNA

SEQ ID NO: 23517 - RNA, 22 nt, Synthetic Construct
  source 1..22: mol_type = other RNA
tgaggtagtagtttgtgctgtc

SEQ ID NO: 23518 - RNA, 22 nt, Synthetic Construct
  source 1..22: mol_type = other RNA
tgaggtagtagtttgtgctgtc

SEQ ID NO: 23519 - RNA, 23 nt, Synthetic Construct
  source 1..23: mol_type = other RNA
tcggaatcgctagtaatcgcgga

SEQ ID NO: 23520 - RNA, 23 nt, Synthetic Construct
  source 1..23: mol_type = other RNA
tcggaatcgctagtaatcgcgga

SEQ ID NO: 23521 - RNA, 22 nt, Synthetic Construct
  source 1..22: mol_type = other RNA
cgaggtagtaggttgtgtggtt

SEQ ID NO: 23522 - RNA, 22 nt, Synthetic Construct
  source 1..22: mol_type = other RNA
cgaggtagtaggttgtgtggtt

SEQ ID NO: 23523 - RNA, 16 nt, Synthetic Construct
  source 1..16: mol_type = other RNA
gatttgggagtgctcg

SEQ ID NO: 23524 - RNA, 17 nt, Synthetic Construct
  source 1..17: mol_type = other RNA
ccagtaaacggcggccg

SEQ ID NO: 23525 - RNA, 17 nt, Synthetic Construct
  source 1..17: mol_type = other RNA
ccagtaaacggcggccg

SEQ ID NO: 23526 - RNA, 37 nt, Synthetic Construct; identical to SEQ ID NO: 2447
  source 1..37: mol_type = other RNA

SEQ ID NO: 23527 - RNA, 37 nt, Synthetic Construct; identical to SEQ ID NO: 2447
  source 1..37: mol_type = other RNA

SEQ ID NO: 23528 - RNA, 23 nt, Synthetic Construct
  source 1..23: mol_type = other RNA
ctcactgatcgagtcgtcctgcg

SEQ ID NO: 23529 - RNA, 23 nt, Synthetic Construct
  source 1..23: mol_type = other RNA
ctcactgatcgagtcgtcctgcg

SEQ ID NO: 23530 - RNA, 21 nt, Synthetic Construct
  source 1..21: mol_type = other RNA
ggctggtccgaaggtagtgag

SEQ ID NO: 23531 - RNA, 21 nt, Synthetic Construct
  source 1..21: mol_type = other RNA
ggctggtccgaaggtagtgag

SEQ ID NO: 23532 - RNA, 31 nt, Synthetic Construct; identical to SEQ ID NO: 2278
  source 1..31: mol_type = other RNA

SEQ ID NO: 23533 - RNA, 19 nt, Synthetic Construct
  source 1..19: mol_type = other RNA
cctgtctgaatatgggggg

SEQ ID NO: 23534 - RNA, 19 nt, Synthetic Construct
  source 1..19: mol_type = other RNA
cctgtctgaatatgggggg

SEQ ID NO: 23535 - RNA, 23 nt, Synthetic Construct
  source 1..23: mol_type = other RNA
tcctgcactgagctgccccgagt

SEQ ID NO: 23536 - RNA, 23 nt, Synthetic Construct
  source 1..23: mol_type = other RNA
tcctgcactgagctgccccgagt

SEQ ID NO: 23537 - RNA, 18 nt, Synthetic Construct
  source 1..18: mol_type = other RNA
tgcgtagatatgcggagg

SEQ ID NO: 23538 - RNA, 33 nt, Synthetic Construct; identical to SEQ ID NO: 2386
  source 1..33: mol_type = other RNA

SEQ ID NO: 23539 - RNA, 15 nt, Synthetic Construct
  source 1..15: mol_type = other RNA
acctgcatcgagggt

SEQ ID NO: 23540 - RNA, 15 nt, Synthetic Construct
  source 1..15: mol_type = other RNA
acctgcatcgagggt

SEQ ID NO: 23541 - RNA, 17 nt, Synthetic Construct
  source 1..17: mol_type = other RNA
agcggtggatgatgtgg

SEQ ID NO: 23542 - RNA, 17 nt, Synthetic Construct
  source 1..17: mol_type = other RNA
agcggtggatgatgtgg

SEQ ID NO: 23543 - RNA, 37 nt, Synthetic Construct; identical to SEQ ID NO: 2211
  source 1..37: mol_type = other RNA

SEQ ID NO: 23544 - RNA, 37 nt, Synthetic Construct; identical to SEQ ID NO: 2211
  source 1..37: mol_type = other RNA

SEQ ID NO: 23545 - RNA, 23 nt, Synthetic Construct
  source 1..23: mol_type = other RNA
tggtaatacgacgtacttagtgc

SEQ ID NO: 23546 - RNA, 23 nt, Synthetic Construct
  source 1..23: mol_type = other RNA
tggtaatacgacgtacttagtgc

SEQ ID NO: 23547 - RNA, 20 nt, Synthetic Construct
  source 1..20: mol_type = other RNA
tcctgtctgaatatgggggg

SEQ ID NO: 23548 - RNA, 20 nt, Synthetic Construct
  source 1..20: mol_type = other RNA
tcctgtctgaatatgggggg

SEQ ID NO: 23549 - RNA, 22 nt, Synthetic Construct
  source 1..22: mol_type = other RNA
tatcgcacttgtcccggcctgt

SEQ ID NO: 23550 - RNA, 16 nt, Synthetic Construct
  source 1..16: mol_type = other RNA
ccggaggaaggtgggg

SEQ ID NO: 23551 - RNA, 16 nt, Synthetic Construct
  source 1..16: mol_type = other RNA
gtcgacgtatagggtg

SEQ ID NO: 23552 - RNA, 22 nt, Synthetic Construct
  source 1..22: mol_type = other RNA
ttcaagtaattcaggataggtt

SEQ ID NO: 23553 - RNA, 21 nt, Synthetic Construct
  source 1..21: mol_type = other RNA
tgaggtagtaggttgtgtggc

SEQ ID NO: 23554 - RNA, 21 nt, Synthetic Construct
  source 1..21: mol_type = other RNA
tgaggtagtaggttgtgtggc

SEQ ID NO: 23555 - RNA, 23 nt, Synthetic Construct
  source 1..23: mol_type = other RNA
tgaggggcggagagcgagacttt

SEQ ID NO: 23556 - RNA, 23 nt, Synthetic Construct
  source 1..23: mol_type = other RNA
tgaggggcggagagcgagacttt

SEQ ID NO: 23557 - RNA, 20 nt, Synthetic Construct
  source 1..20: mol_type = other RNA
tgaggtagcaggttgtatag

SEQ ID NO: 23558 - RNA, 20 nt, Synthetic Construct
  source 1..20: mol_type = other RNA
tgaggtagcaggttgtatag

SEQ ID NO: 23559 - RNA, 22 nt, Synthetic Construct
  source 1..22: mol_type = other RNA
tggaatgcaaagaagtatgtat

SEQ ID NO: 23560 - RNA, 22 nt, Synthetic Construct
  source 1..22: mol_type = other RNA
tggaatgcaaagaagtatgtat

SEQ ID NO: 23561 - RNA, 17 nt, Synthetic Construct
  source 1..17: mol_type = other RNA
tcgctagtaatcgcgga

SEQ ID NO: 23562 - RNA, 17 nt, Synthetic Construct
  source 1..17: mol_type = other RNA
tcgctagtaatcgcgga

SEQ ID NO: 23563 - RNA, 26 nt, Synthetic Construct
  source 1..26: mol_type = other RNA
gacttaccaaacctatgcaaactccg

SEQ ID NO: 23564 - RNA, 26 nt, Synthetic Construct
  source 1..26: mol_type = other RNA
gacttaccaaacctatgcaaactccg

SEQ ID NO: 23565 - RNA, 22 nt, Synthetic Construct
  source 1..22: mol_type = other RNA
tggaatgtaaagaagtacgtat

SEQ ID NO: 23566 - RNA, 22 nt, Synthetic Construct
  source 1..22: mol_type = other RNA
tggaatgtaaagaagtacgtat

SEQ ID NO: 23567 - RNA, 21 nt, Synthetic Construct
  source 1..21: mol_type = other RNA
ggaggggcagagagcgagact

SEQ ID NO: 23568 - RNA, 35 nt, Synthetic Construct; identical to SEQ ID NO: 2269
  source 1..35: mol_type = other RNA

SEQ ID NO: 23569 - RNA, 35 nt, Synthetic Construct; identical to SEQ ID NO: 2269
  source 1..35: mol_type = other RNA

SEQ ID NO: 23570 - RNA, 36 nt, Synthetic Construct; identical to SEQ ID NO: 2506
  source 1..36: mol_type = other RNA

SEQ ID NO: 23571 - RNA, 23 nt, Synthetic Construct
  source 1..23: mol_type = other RNA
tggtaatacgacgtacttagtgt

SEQ ID NO: 23572 - RNA, 23 nt, Synthetic Construct
  source 1..23: mol_type = other RNA
tggtaatacgacgtacttagtgt

SEQ ID NO: 23573 - RNA, 21 nt, Synthetic Construct
  source 1..21: mol_type = other RNA
ngaggtagtaggttgtgtggt

SEQ ID NO: 23574 - RNA, 21 nt, Synthetic Construct
  source 1..21: mol_type = other RNA
ngaggtagtaggttgtgtggt

SEQ ID NO: 23575 - RNA, 17 nt, Synthetic Construct
  source 1..17: mol_type = other RNA
gtccggatcgtagtctg

SEQ ID NO: 23576 - RNA, 17 nt, Synthetic Construct
  source 1..17: mol_type = other RNA
gtccggatcgtagtctg

SEQ ID NO: 23577 - RNA, 23 nt, Synthetic Construct
  source 1..23: mol_type = other RNA
tggtaattcgacgtacttagtgt

SEQ ID NO: 23578 - RNA, 28 nt, Synthetic Construct
  source 1..28: mol_type = other RNA
ggcagggttcgtgactggggtgaagtcg

SEQ ID NO: 23579 - RNA, 18 nt, Synthetic Construct
  source 1..18: mol_type = other RNA
cctgaagaataagcaccg

SEQ ID NO: 23580 - RNA, 18 nt, Synthetic Construct
  source 1..18: mol_type = other RNA
cctgaagaataagcaccg

SEQ ID NO: 23581 - RNA, 22 nt, Synthetic Construct
  source 1..22: mol_type = other RNA
tgaggtagtagtttgtgctgtc

SEQ ID NO: 23582 - RNA, 22 nt, Synthetic Construct
  source 1..22: mol_type = other RNA
tgaggtagtagtttgtgctgtc

SEQ ID NO: 23583 - RNA, 15 nt, Synthetic Construct
  source 1..15: mol_type = other RNA
cccagaaacccggtc

SEQ ID NO: 23584 - RNA, 15 nt, Synthetic Construct
  source 1..15: mol_type = other RNA
cccagaaacccggtc

SEQ ID NO: 23585 - RNA, 36 nt, Synthetic Construct; identical to SEQ ID NO: 2478
  source 1..36: mol_type = other RNA

SEQ ID NO: 23586 - RNA, 36 nt, Synthetic Construct; identical to SEQ ID NO: 2478
  source 1..36: mol_type = other RNA

SEQ ID NO: 23587 - RNA, 22 nt, Synthetic Construct
  source 1..22: mol_type = other RNA
gctcacggaaagagaatgaagc

SEQ ID NO: 23588 - RNA, 18 nt, Synthetic Construct
  source 1..18: mol_type = other RNA
cccaaaggtcgtcggttc

SEQ ID NO: 23589 - RNA, 18 nt, Synthetic Construct
  source 1..18: mol_type = other RNA
cccaaaggtcgtcggttc

SEQ ID NO: 23590 - RNA, 23 nt, Synthetic Construct
  source 1..23: mol_type = other RNA
tgaggggcagagagcgagacctt

SEQ ID NO: 23591 - RNA, 23 nt, Synthetic Construct
  source 1..23: mol_type = other RNA
tgaggggcagagagcgagacctt

SEQ ID NO: 23592 - RNA, 23 nt, Synthetic Construct
  source 1..23: mol_type = other RNA
ctcactgatcgagtcgtcctgcg

SEQ ID NO: 23593 - RNA, 31 nt, Synthetic Construct; identical to SEQ ID NO: 2412
  source 1..31: mol_type = other RNA

SEQ ID NO: 23594 - RNA, 23 nt, Synthetic Construct
  source 1..23: mol_type = other RNA
tccccttggggttgtaggaccac

SEQ ID NO: 23595 - RNA, 23 nt, Synthetic Construct
  source 1..23: mol_type = other RNA
tccccttggggttgtaggaccac

SEQ ID NO: 23596 - RNA, 21 nt, Synthetic Construct
  source 1..21: mol_type = other RNA
tgaggggcagagagcgagact

SEQ ID NO: 23597 - RNA, 21 nt, Synthetic Construct
  source 1..21: mol_type = other RNA
tgaggggcagagagcgagact

SEQ ID NO: 23598 - RNA, 31 nt, Synthetic Construct; identical to SEQ ID NO: 2333
  source 1..31: mol_type = other RNA

SEQ ID NO: 23599 - RNA, 20 nt, Synthetic Construct
  source 1..20: mol_type = other RNA
tgaggtagtaggttgtgtgt

SEQ ID NO: 23600 - RNA, 15 nt, Synthetic Construct
  source 1..15: mol_type = other RNA
gtcgacgtatagggt

SEQ ID NO: 23601 - RNA, 15 nt, Synthetic Construct
  source 1..15: mol_type = other RNA
gtcgacgtatagggt

SEQ ID NO: 23602 - RNA, 17 nt, Synthetic Construct
  source 1..17: mol_type = other RNA
gaagttgaccgcctggg

SEQ ID NO: 23603 - RNA, 17 nt, Synthetic Construct
  source 1..17: mol_type = other RNA
gaagttgaccgcctggg

SEQ ID NO: 23604 - RNA, 16 nt, Synthetic Construct
  source 1..16: mol_type = other RNA
gatctgtagctggtct

SEQ ID NO: 23605 - RNA, 16 nt, Synthetic Construct
  source 1..16: mol_type = other RNA
gatctgtagctggtct

SEQ ID NO: 23606 - RNA, 15 nt, Synthetic Construct
  source 1..15: mol_type = other RNA
ggccgtcgtcagctc

SEQ ID NO: 23607 - RNA, 15 nt, Synthetic Construct
  source 1..15: mol_type = other RNA
ggccgtcgtcagctc

SEQ ID NO: 23608 - RNA, 15 nt, Synthetic Construct
  source 1..15: mol_type = other RNA
gttgaccgcctgggg

SEQ ID NO: 23609 - RNA, 15 nt, Synthetic Construct
  source 1..15: mol_type = other RNA
gttgaccgcctgggg

SEQ ID NO: 23610 - RNA, 16 nt, Synthetic Construct
  source 1..16: mol_type = other RNA
gcggctgtagctcagt

SEQ ID NO: 23611 - RNA, 16 nt, Synthetic Construct
  source 1..16: mol_type = other RNA
gcggctgtagctcagt

SEQ ID NO: 23612 - RNA, 23 nt, Synthetic Construct
  source 1..23: mol_type = other RNA
atatcggaacgtgcccagtcgtg

SEQ ID NO: 23613 - RNA, 23 nt, Synthetic Construct
  source 1..23: mol_type = other RNA
atatcggaacgtgcccagtcgtg

SEQ ID NO: 23614 - RNA, 34 nt, Synthetic Construct; identical to SEQ ID NO: 6594
  source 1..34: mol_type = other RNA

SEQ ID NO: 23615 - RNA, 34 nt, Synthetic Construct; identical to SEQ ID NO: 6594
  source 1..34: mol_type = other RNA

SEQ ID NO: 23616 - RNA, 39 nt, Synthetic Construct; identical to SEQ ID NO: 2398
  source 1..39: mol_type = other RNA

SEQ ID NO: 23617 - RNA, 22 nt, Synthetic Construct
  source 1..22: mol_type = other RNA
tcctgtacagagctgccccgag

SEQ ID NO: 23618 - RNA, 22 nt, Synthetic Construct
  source 1..22: mol_type = other RNA
tcctgtacagagctgccccgag

SEQ ID NO: 23619 - RNA, 15 nt, Synthetic Construct
  source 1..15: mol_type = other RNA
acggtcctaaggtag

SEQ ID NO: 23620 - RNA, 15 nt, Synthetic Construct
  source 1..15: mol_type = other RNA
acggtcctaaggtag

SEQ ID NO: 23621 - RNA, 32 nt, Synthetic Construct; identical to SEQ ID NO: 4734
  source 1..32: mol_type = other RNA

SEQ ID NO: 23622 - RNA, 32 nt, Synthetic Construct; identical to SEQ ID NO: 4734
  source 1..32: mol_type = other RNA

SEQ ID NO: 23623 - RNA, 16 nt, Synthetic Construct
  source 1..16: mol_type = other RNA
ggtgggggtcgttggt

SEQ ID NO: 23624 - RNA, 16 nt, Synthetic Construct
  source 1..16: mol_type = other RNA
ggtgggggtcgttggt

SEQ ID NO: 23625 - RNA, 22 nt, Synthetic Construct
  source 1..22: mol_type = other RNA
tcggatccgtctgagcttggct

SEQ ID NO: 23626 - RNA, 22 nt, Synthetic Construct
  source 1..22: mol_type = other RNA
tcggatccgtctgagcttggct

SEQ ID NO: 23627 - RNA, 23 nt, Synthetic Construct
  source 1..23: mol_type = other RNA
tagcagcacataatggtttgtgg

SEQ ID NO: 23628 - RNA, 22 nt, Synthetic Construct
  source 1..22: mol_type = other RNA
tgtcaactggttgttgggaggg

SEQ ID NO: 23629 - RNA, 22 nt, Synthetic Construct
  source 1..22: mol_type = other RNA
tgtcaactggttgttgggaggg

SEQ ID NO: 23630 - RNA, 22 nt, Synthetic Construct
  source 1..22: mol_type = other RNA
tggaacgtaaagaagtatgtat

SEQ ID NO: 23631 - RNA, 22 nt, Synthetic Construct
  source 1..22: mol_type = other RNA
tggaacgtaaagaagtatgtat

SEQ ID NO: 23632 - RNA, 19 nt, Synthetic Construct
  source 1..19: mol_type = other RNA
gtccggatcgtagtctgca

SEQ ID NO: 23633 - RNA, 19 nt, Synthetic Construct
  source 1..19: mol_type = other RNA
gtccggatcgtagtctgca

SEQ ID NO: 23634 - RNA, 24 nt, Synthetic Construct
  source 1..24: mol_type = other RNA
ttccccttggggttgtaggaccac

SEQ ID NO: 23635 - RNA, 24 nt, Synthetic Construct
  source 1..24: mol_type = other RNA
ttccccttggggttgtaggaccac

SEQ ID NO: 23636 - RNA, 30 nt, Synthetic Construct; identical to SEQ ID NO: 2578
  source 1..30: mol_type = other RNA

SEQ ID NO: 23637 - RNA, 23 nt, Synthetic Construct
  source 1..23: mol_type = other RNA
tggtagtacgacgtacttagtgt

SEQ ID NO: 23638 - RNA, 23 nt, Synthetic Construct
  source 1..23: mol_type = other RNA
tggtagtacgacgtacttagtgt

SEQ ID NO: 23639 - RNA, 22 nt, Synthetic Construct
  source 1..22: mol_type = other RNA
tcctgtactgggctgccccgag

SEQ ID NO: 23640 - RNA, 22 nt, Synthetic Construct
  source 1..22: mol_type = other RNA
tcctgtactgggctgccccgag

SEQ ID NO: 23641 - RNA, 22 nt, Synthetic Construct
  source 1..22: mol_type = other RNA
tgaggcagtaggttgtgtggtt

SEQ ID NO: 23642 - RNA, 21 nt, Synthetic Construct
  source 1..21: mol_type = other RNA
tgaggtagtagattgtatagc

SEQ ID NO: 23643 - RNA, 21 nt, Synthetic Construct
  source 1..21: mol_type = other RNA
gtgggcgtttgaagtgaagtg

SEQ ID NO: 23644 - RNA, 18 nt, Synthetic Construct
  source 1..18: mol_type = other RNA
gcgaaattccttgtcggg

SEQ ID NO: 23645 - RNA, 18 nt, Synthetic Construct
  source 1..18: mol_type = other RNA
gcgaaattccttgtcggg

SEQ ID NO: 23646 - RNA, 23 nt, Synthetic Construct
  source 1..23: mol_type = other RNA
agcagcattgtacagggctatgt

SEQ ID NO: 23647 - RNA, 22 nt, Synthetic Construct
  source 1..22: mol_type = other RNA
tgggatgtaaagaagtatgtat

SEQ ID NO: 23648 - RNA, 22 nt, Synthetic Construct
  source 1..22: mol_type = other RNA
tgggatgtaaagaagtatgtat

SEQ ID NO: 23649 - RNA, 20 nt, Synthetic Construct
  source 1..20: mol_type = other RNA
caggacagtgaaacgagtca

SEQ ID NO: 23650 - RNA, 20 nt, Synthetic Construct
  source 1..20: mol_type = other RNA
caggacagtgaaacgagtca

SEQ ID NO: 23651 - RNA, 15 nt, Synthetic Construct
  source 1..15: mol_type = other RNA
acggtcctaaggtag

SEQ ID NO: 23652 - RNA, 16 nt, Synthetic Construct
  source 1..16: mol_type = other RNA
tccggatcgtagtctg

SEQ ID NO: 23653 - RNA, 16 nt, Synthetic Construct
  source 1..16: mol_type = other RNA
tccggatcgtagtctg

SEQ ID NO: 23654 - RNA, 21 nt, Synthetic Construct
  source 1..21: mol_type = other RNA
ggaggagttcgaaggtacgct

SEQ ID NO: 23655 - RNA, 21 nt, Synthetic Construct
  source 1..21: mol_type = other RNA
ggaggagttcgaaggtacgct

SEQ ID NO: 23656 - RNA, 17 nt, Synthetic Construct
  source 1..17: mol_type = other RNA
aagttgaccgcctgggg

SEQ ID NO: 23657 - RNA, 17 nt, Synthetic Construct
  source 1..17: mol_type = other RNA
aagttgaccgcctgggg

SEQ ID NO: 23658 - RNA, 27 nt, Synthetic Construct
  source 1..27: mol_type = other RNA
cgtgtgaaagtaggtcatcgtcaggct

SEQ ID NO: 23659 - RNA, 27 nt, Synthetic Construct
  source 1..27: mol_type = other RNA
cgtgtgaaagtaggtcatcgtcaggct

SEQ ID NO: 23660 - RNA, 18 nt, Synthetic Construct
  source 1..18: mol_type = other RNA
ggctttgaagtaaggtcg

SEQ ID NO: 23661 - RNA, 22 nt, Synthetic Construct
  source 1..22: mol_type = other RNA
tgtggtagtaggttgtgtggtt

SEQ ID NO: 23662 - RNA, 22 nt, Synthetic Construct
  source 1..22: mol_type = other RNA
tgtggtagtaggttgtgtggtt

SEQ ID NO: 23663 - RNA, 21 nt, Synthetic Construct
  source 1..21: mol_type = other RNA
tgaggggcggagagcgagact

SEQ ID NO: 23664 - RNA, 21 nt, Synthetic Construct
  source 1..21: mol_type = other RNA
tgaggggcggagagcgagact

SEQ ID NO: 23665 - RNA, 43 nt, Synthetic Construct; identical to SEQ ID NO: 2315
  source 1..43: mol_type = other RNA

SEQ ID NO: 23666 - RNA, 43 nt, Synthetic Construct; identical to SEQ ID NO: 2315
  source 1..43: mol_type = other RNA

SEQ ID NO: 23667 - RNA, 22 nt, Synthetic Construct
  source 1..22: mol_type = other RNA
tgaggtagtaggtcgtgtggtt

SEQ ID NO: 23668 - RNA, 21 nt, Synthetic Construct
  source 1..21: mol_type = other RNA
cacgtcatacaatggccggga

SEQ ID NO: 23669 - RNA, 23 nt, Synthetic Construct
  source 1..23: mol_type = other RNA
tggtaatacgatgtacttagtgt

SEQ ID NO: 23670 - RNA, 23 nt, Synthetic Construct
  source 1..23: mol_type = other RNA
tggtaatacgatgtacttagtgt

SEQ ID NO: 23671 - RNA, 22 nt, Synthetic Construct
  source 1..22: mol_type = other RNA
tgaggtagtaggttgtgtggtc

SEQ ID NO: 23672 - RNA, 22 nt, Synthetic Construct
  source 1..22: mol_type = other RNA
tcttgtactgagctgccccgag

SEQ ID NO: 23673 - RNA, 22 nt, Synthetic Construct
  source 1..22: mol_type = other RNA
tcttgtactgagctgccccgag

SEQ ID NO: 23674 - RNA, 16 nt, Synthetic Construct
  source 1..16: mol_type = other RNA
gcctacggccatacca

SEQ ID NO: 23675 - RNA, 16 nt, Synthetic Construct
  source 1..16: mol_type = other RNA
gcctacggccatacca

SEQ ID NO: 23676 - RNA, 27 nt, Synthetic Construct
  source 1..27: mol_type = other RNA
gatttccccttggggttgtaggaccac

SEQ ID NO: 23677 - RNA, 27 nt, Synthetic Construct
  source 1..27: mol_type = other RNA
gatttccccttggggttgtaggaccac

SEQ ID NO: 23678 - RNA, 33 nt, Synthetic Construct; identical to SEQ ID NO: 1982
  source 1..33: mol_type = other RNA

SEQ ID NO: 23679 - RNA, 39 nt, Synthetic Construct; identical to SEQ ID NO: 4400
  source 1..39: mol_type = other RNA

SEQ ID NO: 23680 - RNA, 39 nt, Synthetic Construct; identical to SEQ ID NO: 4400
  source 1..39: mol_type = other RNA

SEQ ID NO: 23681 - RNA, 19 nt, Synthetic Construct
  source 1..19: mol_type = other RNA
gcgaaattccttgtcgggt

SEQ ID NO: 23682 - RNA, 23 nt, Synthetic Construct
  source 1..23: mol_type = other RNA
ggcggttatgcaagacagaggtg

SEQ ID NO: 23683 - RNA, 23 nt, Synthetic Construct
  source 1..23: mol_type = other RNA
ggcggttatgcaagacagaggtg

SEQ ID NO: 23684 - RNA, 21 nt, Synthetic Construct
  source 1..21: mol_type = other RNA
cactgatcgagtcgtcctgcg

SEQ ID NO: 23685 - RNA, 21 nt, Synthetic Construct
  source 1..21: mol_type = other RNA
cactgatcgagtcgtcctgcg

SEQ ID NO: 23686 - RNA, 19 nt, Synthetic Construct
  source 1..19: mol_type = other RNA
gggtgcaagcgttaatcgg

SEQ ID NO: 23687 - RNA, 31 nt, Synthetic Construct; identical to SEQ ID NO: 2333
  source 1..31: mol_type = other RNA

SEQ ID NO: 23688 - RNA, 31 nt, Synthetic Construct; identical to SEQ ID NO: 2333
  source 1..31: mol_type = other RNA

SEQ ID NO: 23689 - RNA, 21 nt, Synthetic Construct
  source 1..21: mol_type = other RNA
tggaatgtaaagaagtatgta

SEQ ID NO: 23690 - RNA, 18 nt, Synthetic Construct
  source 1..18: mol_type = other RNA
gtccccttcgtctagagg

SEQ ID NO: 23691 - RNA, 18 nt, Synthetic Construct
  source 1..18: mol_type = other RNA
gtccccttcgtctagagg

SEQ ID NO: 23692 - RNA, 23 nt, Synthetic Construct
  source 1..23: mol_type = other RNA
tctttgttcgattccgttgagta

SEQ ID NO: 23693 - RNA, 23 nt, Synthetic Construct
  source 1..23: mol_type = other RNA
tctttgttcgattccgttgagta

SEQ ID NO: 23694 - RNA, 32 nt, Synthetic Construct; identical to SEQ ID NO: 5582
  source 1..32: mol_type = other RNA

SEQ ID NO: 23695 - RNA, 32 nt, Synthetic Construct; identical to SEQ ID NO: 5582
  source 1..32: mol_type = other RNA

SEQ ID NO: 23696 - RNA, 15 nt, Synthetic Construct
  source 1..15: mol_type = other RNA
ttccgaaagtagtgg

SEQ ID NO: 23697 - RNA, 15 nt, Synthetic Construct
  source 1..15: mol_type = other RNA
ttccgaaagtagtgg

SEQ ID NO: 23698 - RNA, 15 nt, Synthetic Construct
  source 1..15: mol_type = other RNA
gtccggatcgtagtc

SEQ ID NO: 23699 - RNA, 15 nt, Synthetic Construct
  source 1..15: mol_type = other RNA
gtccggatcgtagtc

SEQ ID NO: 23700 - RNA, 22 nt, Synthetic Construct
  source 1..22: mol_type = other RNA
ctttcagtcggatgtttgcagc

SEQ ID NO: 23701 - RNA, 35 nt, Synthetic Construct; identical to SEQ ID NO: 2069
  source 1..35: mol_type = other RNA

SEQ ID NO: 23702 - RNA, 23 nt, Synthetic Construct
  source 1..23: mol_type = other RNA
tggtaatacgacgtacttagtgc

SEQ ID NO: 23703 - RNA, 23 nt, Synthetic Construct
  source 1..23: mol_type = other RNA
tggtaatacgacgtacttagtgc

SEQ ID NO: 23704 - RNA, 31 nt, Synthetic Construct; identical to SEQ ID NO: 2507
  source 1..31: mol_type = other RNA

SEQ ID NO: 23705 - RNA, 18 nt, Synthetic Construct
  source 1..18: mol_type = other RNA
tctaatgagactgccggt

SEQ ID NO: 23706 - RNA, 18 nt, Synthetic Construct
  source 1..18: mol_type = other RNA
tctaatgagactgccggt

SEQ ID NO: 23707 - RNA, 24 nt, Synthetic Construct
  source 1..24: mol_type = other RNA
gatgaggcgtgataacgagtctgc

SEQ ID NO: 23708 - RNA, 24 nt, Synthetic Construct
  source 1..24: mol_type = other RNA
gatgaggcgtgataacgagtctgc

SEQ ID NO: 23709 - RNA, 28 nt, Synthetic Construct
  source 1..28: mol_type = other RNA
tgttggttcaagcgtgtagtcgtgctct

SEQ ID NO: 23710 - RNA, 24 nt, Synthetic Construct
  source 1..24: mol_type = other RNA
tagcagcacgtaaatattggcgtt

SEQ ID NO: 23711 - RNA, 32 nt, Synthetic Construct; identical to SEQ ID NO: 1238
  source 1..32: mol_type = other RNA

SEQ ID NO: 23712 - RNA, 32 nt, Synthetic Construct; identical to SEQ ID NO: 1238
  source 1..32: mol_type = other RNA

SEQ ID NO: 23713 - RNA, 22 nt, Synthetic Construct
  source 1..22: mol_type = other RNA
tcctgtactaagctgccccgag

SEQ ID NO: 23714 - RNA, 22 nt, Synthetic Construct
  source 1..22: mol_type = other RNA
tcctgtactaagctgccccgag

SEQ ID NO: 23715 - RNA, 34 nt, Synthetic Construct; identical to SEQ ID NO: 6757
  source 1..34: mol_type = other RNA

SEQ ID NO: 23716 - RNA, 34 nt, Synthetic Construct; identical to SEQ ID NO: 6757
  source 1..34: mol_type = other RNA

SEQ ID NO: 23717 - RNA, 34 nt, Synthetic Construct; identical to SEQ ID NO: 2019
  source 1..34: mol_type = other RNA

SEQ ID NO: 23718 - RNA, 34 nt, Synthetic Construct; identical to SEQ ID NO: 2019
  source 1..34: mol_type = other RNA

SEQ ID NO: 23719 - RNA, 22 nt, Synthetic Construct
  source 1..22: mol_type = other RNA
tcactgatcgagtcgtcctgcg

SEQ ID NO: 23720 - RNA, 21 nt, Synthetic Construct
  source 1..21: mol_type = other RNA
tgaggtagcaggttgtgtggt

SEQ ID NO: 23721 - RNA, 21 nt, Synthetic Construct
  source 1..21: mol_type = other RNA
tgaggtagcaggttgtgtggt

SEQ ID NO: 23722 - RNA, 20 nt, Synthetic Construct
  source 1..20: mol_type = other RNA
tccctgtcctccaggagctc

SEQ ID NO: 23723 - RNA, 24 nt, Synthetic Construct
  source 1..24: mol_type = other RNA
gctcactgatcgagtcgtcctgcg

SEQ ID NO: 23724 - RNA, 24 nt, Synthetic Construct
  source 1..24: mol_type = other RNA
gctcactgatcgagtcgtcctgcg

SEQ ID NO: 23725 - RNA, 18 nt, Synthetic Construct
  source 1..18: mol_type = other RNA
cagcactctgcaaagacg

SEQ ID NO: 23726 - RNA, 17 nt, Synthetic Construct
  source 1..17: mol_type = other RNA
gtcgacgtatagggtgt

SEQ ID NO: 23727 - RNA, 31 nt, Synthetic Construct; identical to SEQ ID NO: 1881
  source 1..31: mol_type = other RNA

SEQ ID NO: 23728 - RNA, 31 nt, Synthetic Construct; identical to SEQ ID NO: 1881
  source 1..31: mol_type = other RNA

SEQ ID NO: 23729 - RNA, 15 nt, Synthetic Construct
  source 1..15: mol_type = other RNA
ggtcatcgtcaggct

SEQ ID NO: 23730 - RNA, 15 nt, Synthetic Construct
  source 1..15: mol_type = other RNA
ggtcatcgtcaggct

SEQ ID NO: 23731 - RNA, 25 nt, Synthetic Construct
  source 1..25: mol_type = other RNA
cctcgcgcgattggagcggccgata

SEQ ID NO: 23732 - RNA, 25 nt, Synthetic Construct
  source 1..25: mol_type = other RNA
cctcgcgcgattggagcggccgata

SEQ ID NO: 23733 - RNA, 22 nt, Synthetic Construct
  source 1..22: mol_type = other RNA
cctcgcgcgattggagcggccg

SEQ ID NO: 23734 - RNA, 24 nt, Synthetic Construct
  source 1..24: mol_type = other RNA
gctcactgatcgagtcgtcctgcg

SEQ ID NO: 23735 - RNA, 24 nt, Synthetic Construct
  source 1..24: mol_type = other RNA
gctcactgatcgagtcgtcctgcg

SEQ ID NO: 23736 - RNA, 23 nt, Synthetic Construct
  source 1..23: mol_type = other RNA
tcactgatcgagtcgtcctgcgc

SEQ ID NO: 23737 - RNA, 23 nt, Synthetic Construct
  source 1..23: mol_type = other RNA
tcactgatcgagtcgtcctgcgc

SEQ ID NO: 23738 - RNA, 15 nt, Synthetic Construct
  source 1..15: mol_type = other RNA
tcgagtcgtcctgcg

SEQ ID NO: 23739 - RNA, 15 nt, Synthetic Construct
  source 1..15: mol_type = other RNA
tcgagtcgtcctgcg

SEQ ID NO: 23740 - RNA, 16 nt, Synthetic Construct
  source 1..16: mol_type = other RNA
gcggtggatgatgtgg

SEQ ID NO: 23741 - RNA, 16 nt, Synthetic Construct
  source 1..16: mol_type = other RNA
gcggtggatgatgtgg

SEQ ID NO: 23742 - RNA, 30 nt, Synthetic Construct; identical to SEQ ID NO: 3933
  source 1..30: mol_type = other RNA

SEQ ID NO: 23743 - RNA, 16 nt, Synthetic Construct
  source 1..16: mol_type = other RNA
gccagcagccgcggta

SEQ ID NO: 23744 - RNA, 16 nt, Synthetic Construct
  source 1..16: mol_type = other RNA
gccagcagccgcggta

SEQ ID NO: 23745 - RNA, 20 nt, Synthetic Construct
  source 1..20: mol_type = other RNA
tcctgtaccgatcaatagtg

SEQ ID NO: 23746 - RNA, 22 nt, Synthetic Construct
  source 1..22: mol_type = other RNA
ncctgtactgagctgccccgag

SEQ ID NO: 23747 - RNA, 15 nt, Synthetic Construct
  source 1..15: mol_type = other RNA
gtctcgccgacggca

SEQ ID NO: 23748 - RNA, 15 nt, Synthetic Construct
  source 1..15: mol_type = other RNA
gtctcgccgacggca

SEQ ID NO: 23749 - RNA, 21 nt, Synthetic Construct
  source 1..21: mol_type = other RNA
ctttgttcgattccgttgagt

SEQ ID NO: 23750 - RNA, 30 nt, Synthetic Construct; identical to SEQ ID NO: 1771
  source 1..30: mol_type = other RNA

SEQ ID NO: 23751 - RNA, 16 nt, Synthetic Construct
  source 1..16: mol_type = other RNA
ctcagtagctcgagga

SEQ ID NO: 23752 - RNA, 22 nt, Synthetic Construct
  source 1..22: mol_type = other RNA
tgaggtagtaggttgtgcggtt

SEQ ID NO: 23753 - RNA, 20 nt, Synthetic Construct
  source 1..20: mol_type = other RNA
tagaattctcgcctgccacg

SEQ ID NO: 23754 - RNA, 20 nt, Synthetic Construct
  source 1..20: mol_type = other RNA
tagaattctcgcctgccacg

SEQ ID NO: 23755 - RNA, 22 nt, Synthetic Construct
  source 1..22: mol_type = other RNA
tggaatgtaaaggagtatgtat

SEQ ID NO: 23756 - RNA, 22 nt, Synthetic Construct
  source 1..22: mol_type = other RNA
tggaatgtaaaggagtatgtat

SEQ ID NO: 23757 - RNA, 22 nt, Synthetic Construct
  source 1..22: mol_type = other RNA
gcactctaatgagactgccggt

SEQ ID NO: 23758 - RNA, 17 nt, Synthetic Construct
  source 1..17: mol_type = other RNA
ccgtgtgaaagtaggtc

SEQ ID NO: 23759 - RNA, 17 nt, Synthetic Construct
  source 1..17: mol_type = other RNA
ccgtgtgaaagtaggtc

SEQ ID NO: 23760 - RNA, 16 nt, Synthetic Construct
  source 1..16: mol_type = other RNA
gggtctgtagctcagt

SEQ ID NO: 23761 - RNA, 16 nt, Synthetic Construct
  source 1..16: mol_type = other RNA
gggtctgtagctcagt

SEQ ID NO: 23762 - RNA, 16 nt, Synthetic Construct
  source 1..16: mol_type = other RNA
gggtctgtagctcagt

SEQ ID NO: 23763 - RNA, 18 nt, Synthetic Construct
  source 1..18: mol_type = other RNA
atcgctagtaatcgcgga

SEQ ID NO: 23764 - RNA, 18 nt, Synthetic Construct
  source 1..18: mol_type = other RNA
atcgctagtaatcgcgga

SEQ ID NO: 23765 - RNA, 22 nt, Synthetic Construct
  source 1..22: mol_type = other RNA
gctcacggaaagagaatgaagc

SEQ ID NO: 23766 - RNA, 22 nt, Synthetic Construct
  source 1..22: mol_type = other RNA
tagcatatcgagcctgagaaca

SEQ ID NO: 23767 - RNA, 22 nt, Synthetic Construct
  source 1..22: mol_type = other RNA
tagcatatcgagcctgagaaca

SEQ ID NO: 23768 - RNA, 15 nt, Synthetic Construct
  source 1..15: mol_type = other RNA
aggtgggaggctttg

SEQ ID NO: 23769 - RNA, 15 nt, Synthetic Construct
  source 1..15: mol_type = other RNA
aggtgggaggctttg

SEQ ID NO: 23770 - RNA, 15 nt, Synthetic Construct
  source 1..15: mol_type = other RNA
tagagtagggcggga

SEQ ID NO: 23771 - RNA, 15 nt, Synthetic Construct
  source 1..15: mol_type = other RNA
tagagtagggcggga

SEQ ID NO: 23772 - RNA, 23 nt, Synthetic Construct
  source 1..23: mol_type = other RNA
caaagtgcttacagtgcaggtag

SEQ ID NO: 23773 - RNA, 23 nt, Synthetic Construct
  source 1..23: mol_type = other RNA
caaagtgcttacagtgcaggtag

SEQ ID NO: 23774 - RNA, 28 nt, Synthetic Construct
  source 1..28: mol_type = other RNA
tgttggttcaagcgtgtagtcgtgctct

SEQ ID NO: 23775 - RNA, 28 nt, Synthetic Construct
  source 1..28: mol_type = other RNA
tgttggttcaagcgtgtagtcgtgctct

SEQ ID NO: 23776 - RNA, 22 nt, Synthetic Construct
  source 1..22: mol_type = other RNA
tcctgtactgagccgccccgag

SEQ ID NO: 23777 - RNA, 22 nt, Synthetic Construct
  source 1..22: mol_type = other RNA
tcctgtactgagccgccccgag

SEQ ID NO: 23778 - RNA, 15 nt, Synthetic Construct
  source 1..15: mol_type = other RNA
cgatatggcatgaga

SEQ ID NO: 23779 - RNA, 15 nt, Synthetic Construct
  source 1..15: mol_type = other RNA
cgatatggcatgaga

SEQ ID NO: 23780 - RNA, 33 nt, Synthetic Construct; identical to SEQ ID NO: 2479
  source 1..33: mol_type = other RNA

SEQ ID NO: 23781 - RNA, 24 nt, Synthetic Construct
  source 1..24: mol_type = other RNA
tgtaaacatccttgactggaagct

SEQ ID NO: 23782 - RNA, 21 nt, Synthetic Construct
  source 1..21: mol_type = other RNA
tgaggtagtaggttgcgtggt

SEQ ID NO: 23783 - RNA, 21 nt, Synthetic Construct
  source 1..21: mol_type = other RNA
tgaggtagtaggttgcgtggt

SEQ ID NO: 23784 - RNA, 23 nt, Synthetic Construct
  source 1..23: mol_type = other RNA
tggtaatatgacgtacttagtgt

SEQ ID NO: 23785 - RNA, 23 nt, Synthetic Construct
  source 1..23: mol_type = other RNA
tggtaatatgacgtacttagtgt

SEQ ID NO: 23786 - RNA, 16 nt, Synthetic Construct
  source 1..16: mol_type = other RNA
ccaaggggtcgtgggt

SEQ ID NO: 23787 - RNA, 16 nt, Synthetic Construct
  source 1..16: mol_type = other RNA
ccaaggggtcgtgggt

SEQ ID NO: 23788 - RNA, 32 nt, Synthetic Construct; identical to SEQ ID NO: 2318
  source 1..32: mol_type = other RNA

SEQ ID NO: 23789 - RNA, 22 nt, Synthetic Construct
  source 1..22: mol_type = other RNA
acagtagtctgcacattggttt

SEQ ID NO: 23790 - RNA, 22 nt, Synthetic Construct
  source 1..22: mol_type = other RNA
acagtagtctgcacattggttt

SEQ ID NO: 23791 - RNA, 18 nt, Synthetic Construct
  source 1..18: mol_type = other RNA
ccaaggggtcgtgggttc

SEQ ID NO: 23792 - RNA, 18 nt, Synthetic Construct
  source 1..18: mol_type = other RNA
ccaaggggtcgtgggttc

SEQ ID NO: 23793 - RNA, 20 nt, Synthetic Construct
  source 1..20: mol_type = other RNA
acccttgtcattagttgcta

SEQ ID NO: 23794 - RNA, 16 nt, Synthetic Construct
  source 1..16: mol_type = other RNA
gaaattccttgtcggg

SEQ ID NO: 23795 - RNA, 27 nt, Synthetic Construct
  source 1..27: mol_type = other RNA
gttggttcaagcgtgtagtcgtgctct

SEQ ID NO: 23796 - RNA, 27 nt, Synthetic Construct
  source 1..27: mol_type = other RNA
gttggttcaagcgtgtagtcgtgctct

SEQ ID NO: 23797 - RNA, 17 nt, Synthetic Construct
  source 1..17: mol_type = other RNA
acagtcaggatgttggc

SEQ ID NO: 23798 - RNA, 17 nt, Synthetic Construct
  source 1..17: mol_type = other RNA
acagtcaggatgttggc

SEQ ID NO: 23799 - RNA, 21 nt, Synthetic Construct
  source 1..21: mol_type = other RNA
tgaagtagtaggttgtgtggt

SEQ ID NO: 23800 - RNA, 21 nt, Synthetic Construct
  source 1..21: mol_type = other RNA
tgaagtagtaggttgtgtggt

SEQ ID NO: 23801 - RNA, 16 nt, Synthetic Construct
  source 1..16: mol_type = other RNA
gggtgaaagcggggga

SEQ ID NO: 23802 - RNA, 22 nt, Synthetic Construct
  source 1..22: mol_type = other RNA
tcccgtactgagctgccccgag

SEQ ID NO: 23803 - RNA, 22 nt, Synthetic Construct
  source 1..22: mol_type = other RNA
tcccgtactgagctgccccgag

SEQ ID NO: 23804 - RNA, 34 nt, Synthetic Construct; identical to SEQ ID NO: 2265
  source 1..34: mol_type = other RNA

SEQ ID NO: 23805 - RNA, 21 nt, Synthetic Construct
  source 1..21: mol_type = other RNA
tcccagtaaacggcggccgta

SEQ ID NO: 23806 - RNA, 21 nt, Synthetic Construct
  source 1..21: mol_type = other RNA
tcccagtaaacggcggccgta

SEQ ID NO: 23807 - RNA, 16 nt, Synthetic Construct
  source 1..16: mol_type = other RNA
gccagcagccgcggta

SEQ ID NO: 23808 - RNA, 38 nt, Synthetic Construct; identical to SEQ ID NO: 11817
  source 1..38: mol_type = other RNA

SEQ ID NO: 23809 - RNA, 37 nt, Synthetic Construct; identical to SEQ ID NO: 4277
  source 1..37: mol_type = other RNA

SEQ ID NO: 23810 - RNA, 37 nt, Synthetic Construct; identical to SEQ ID NO: 4277
  source 1..37: mol_type = other RNA

SEQ ID NO: 23811 - RNA, 23 nt, Synthetic Construct
  source 1..23: mol_type = other RNA
tgaagggcagagagcgagacttt

SEQ ID NO: 23812 - RNA, 23 nt, Synthetic Construct
  source 1..23: mol_type = other RNA
tgaagggcagagagcgagacttt

SEQ ID NO: 23813 - RNA, 22 nt, Synthetic Construct
  source 1..22: mol_type = other RNA
tgaggtagtagtttgtggtgtt

SEQ ID NO: 23814 - RNA, 35 nt, Synthetic Construct; identical to SEQ ID NO: 3369
  source 1..35: mol_type = other RNA

SEQ ID NO: 23815 - RNA, 35 nt, Synthetic Construct; identical to SEQ ID NO: 3369
  source 1..35: mol_type = other RNA

SEQ ID NO: 23816 - RNA, 20 nt, Synthetic Construct
  source 1..20: mol_type = other RNA
tgaggtagtaggttgtgagg

SEQ ID NO: 23817 - RNA, 20 nt, Synthetic Construct
  source 1..20: mol_type = other RNA
tgaggtagtaggttgtgagg

SEQ ID NO: 23818 - RNA, 23 nt, Synthetic Construct
  source 1..23: mol_type = other RNA
tggggggcagagagcgagacttt

SEQ ID NO: 23819 - RNA, 26 nt, Synthetic Construct
  source 1..26: mol_type = other RNA
gagcagctaataccgcatacgacctg

SEQ ID NO: 23820 - RNA, 22 nt, Synthetic Construct
  source 1..22: mol_type = other RNA
tgaggtagtaggttgtgtagtt

SEQ ID NO: 23821 - RNA, 22 nt, Synthetic Construct
  source 1..22: mol_type = other RNA
tgaggtagtaggttgtgtagtt

SEQ ID NO: 23822 - RNA, 23 nt, Synthetic Construct
  source 1..23: mol_type = other RNA
tgaggggcagagagcgagacttc

SEQ ID NO: 23823 - RNA, 23 nt, Synthetic Construct
  source 1..23: mol_type = other RNA
tgaggggcagagagcgagacttc

SEQ ID NO: 23824 - RNA, 22 nt, Synthetic Construct
  source 1..22: mol_type = other RNA
ctccctcgggagggcgcgcggg

SEQ ID NO: 23825 - RNA, 22 nt, Synthetic Construct
  source 1..22: mol_type = other RNA
ctccctcgggagggcgcgcggg

SEQ ID NO: 23826 - RNA, 23 nt, Synthetic Construct
  source 1..23: mol_type = other RNA
cctcgcgcgattggagcggccga

SEQ ID NO: 23827 - RNA, 23 nt, Synthetic Construct
  source 1..23: mol_type = other RNA
cctcgcgcgattggagcggccga

SEQ ID NO: 23828 - RNA, 34 nt, Synthetic Construct; identical to SEQ ID NO: 385
  source 1..34: mol_type = other RNA

SEQ ID NO: 23829 - RNA, 28 nt, Synthetic Construct
  source 1..28: mol_type = other RNA
cgactcttagcggtggatcactcggctc

SEQ ID NO: 23830 - RNA, 28 nt, Synthetic Construct
  source 1..28: mol_type = other RNA
cgactcttagcggtggatcactcggctc

SEQ ID NO: 23831 - RNA, 15 nt, Synthetic Construct
  source 1..15: mol_type = other RNA
gtcaggatgttggct

SEQ ID NO: 23832 - RNA, 22 nt, Synthetic Construct
  source 1..22: mol_type = other RNA
atcacattgccagggatttcca

SEQ ID NO: 23833 - RNA, 26 nt, Synthetic Construct
  source 1..26: mol_type = other RNA
ggcgcttgagagaactctggagaagg

SEQ ID NO: 23834 - RNA, 23 nt, Synthetic Construct
  source 1..23: mol_type = other RNA
tggtaatgcgacgtacttagtgt

SEQ ID NO: 23835 - RNA, 23 nt, Synthetic Construct
  source 1..23: mol_type = other RNA
tggtaatgcgacgtacttagtgt

SEQ ID NO: 23836 - RNA, 36 nt, Synthetic Construct; identical to SEQ ID NO: 2478
  source 1..36: mol_type = other RNA

SEQ ID NO: 23837 - RNA, 18 nt, Synthetic Construct
  source 1..18: mol_type = other RNA
cagcactctgcaaagacg

SEQ ID NO: 23838 - RNA, 18 nt, Synthetic Construct
  source 1..18: mol_type = other RNA
cagcactctgcaaagacg

SEQ ID NO: 23839 - RNA, 36 nt, Synthetic Construct; identical to SEQ ID NO: 2444
  source 1..36: mol_type = other RNA

SEQ ID NO: 23840 - RNA, 23 nt, Synthetic Construct
  source 1..23: mol_type = other RNA
tcctgcactgagctgccccgaga

SEQ ID NO: 23841 - RNA, 21 nt, Synthetic Construct
  source 1..21: mol_type = other RNA
cggagtgtgacaatggtgttt

SEQ ID NO: 23842 - RNA, 21 nt, Synthetic Construct
  source 1..21: mol_type = other RNA
cggagtgtgacaatggtgttt

SEQ ID NO: 23843 - RNA, 43 nt, Synthetic Construct; identical to SEQ ID NO: 4585
  source 1..43: mol_type = other RNA

SEQ ID NO: 23844 - RNA, 22 nt, Synthetic Construct
  source 1..22: mol_type = other RNA
tattgcacttgccccggcctgt

SEQ ID NO: 23845 - RNA, 19 nt, Synthetic Construct
  source 1..19: mol_type = other RNA
gctattgacgaccgtaccg

SEQ ID NO: 23846 - RNA, 19 nt, Synthetic Construct
  source 1..19: mol_type = other RNA
gctattgacgaccgtaccg

SEQ ID NO: 23847 - RNA, 22 nt, Synthetic Construct
  source 1..22: mol_type = other RNA
tcctgcactgagctgccccgag

SEQ ID NO: 23848 - RNA, 22 nt, Synthetic Construct
  source 1..22: mol_type = other RNA
tcctgcactgagctgccccgag

SEQ ID NO: 23849 - RNA, 16 nt, Synthetic Construct
  source 1..16: mol_type = other RNA
accgcttttgtcaggg

SEQ ID NO: 23850 - RNA, 16 nt, Synthetic Construct
  source 1..16: mol_type = other RNA
accgcttttgtcaggg

SEQ ID NO: 23851 - RNA, 22 nt, Synthetic Construct
  source 1..22: mol_type = other RNA
tgaggtagtgggttgtgtggtt

SEQ ID NO: 23852 - RNA, 22 nt, Synthetic Construct
  source 1..22: mol_type = other RNA
tgaggtagtgggttgtgtggtt

SEQ ID NO: 23853 - RNA, 20 nt, Synthetic Construct
  source 1..20: mol_type = other RNA
tgaggtagtgggttgtgtgg

SEQ ID NO: 23854 - RNA, 20 nt, Synthetic Construct
  source 1..20: mol_type = other RNA
tgaggtagtgggttgtgtgg

SEQ ID NO: 23855 - RNA, 26 nt, Synthetic Construct
  source 1..26: mol_type = other RNA
tgtcggctcatctcatcctggggctg

SEQ ID NO: 23856 - RNA, 26 nt, Synthetic Construct
  source 1..26: mol_type = other RNA
tgtcggctcatctcatcctggggctg

SEQ ID NO: 23857 - RNA, 32 nt, Synthetic Construct; identical to SEQ ID NO: 4734
  source 1..32: mol_type = other RNA

SEQ ID NO: 23858 - RNA, 22 nt, Synthetic Construct
  source 1..22: mol_type = other RNA
tctttggttatctagctgtatg

SEQ ID NO: 23859 - RNA, 22 nt, Synthetic Construct
  source 1..22: mol_type = other RNA
tctttggttatctagctgtatg

SEQ ID NO: 23860 - RNA, 32 nt, Synthetic Construct; identical to SEQ ID NO: 3713
  source 1..32: mol_type = other RNA

SEQ ID NO: 23861 - RNA, 19 nt, Synthetic Construct
  source 1..19: mol_type = other RNA
agcgaaattccttgtcggg

SEQ ID NO: 23862 - RNA, 19 nt, Synthetic Construct
  source 1..19: mol_type = other RNA
agcgaaattccttgtcggg

SEQ ID NO: 23863 - RNA, 16 nt, Synthetic Construct
  source 1..16: mol_type = other RNA
agtcaggatgttggct

SEQ ID NO: 23864 - RNA, 18 nt, Synthetic Construct
  source 1..18: mol_type = other RNA
ccagtaaacggcggccgt

SEQ ID NO: 23865 - RNA, 18 nt, Synthetic Construct
  source 1..18: mol_type = other RNA
ccagtaaacggcggccgt

SEQ ID NO: 23866 - RNA, 22 nt, Synthetic Construct
  source 1..22: mol_type = other RNA
gctcacggaaagagaatgaagc

SEQ ID NO: 23867 - RNA, 22 nt, Synthetic Construct
  source 1..22: mol_type = other RNA
gctcacggaaagagaatgaagc

SEQ ID NO: 23868 - RNA, 21 nt, Synthetic Construct
  source 1..21: mol_type = other RNA
ggaggagttcgaaggtacgct

SEQ ID NO: 23869 - RNA, 21 nt, Synthetic Construct
  source 1..21: mol_type = other RNA
ggaggagttcgaaggtacgct

SEQ ID NO: 23870 - RNA, 35 nt, Synthetic Construct; identical to SEQ ID NO: 2452
  source 1..35: mol_type = other RNA

SEQ ID NO: 23871 - RNA, 31 nt, Synthetic Construct; identical to SEQ ID NO: 2310
  source 1..31: mol_type = other RNA

SEQ ID NO: 23872 - RNA, 17 nt, Synthetic Construct
  source 1..17: mol_type = other RNA
tcgctagtaatcgcgga

SEQ ID NO: 23873 - RNA, 23 nt, Synthetic Construct
  source 1..23: mol_type = other RNA
cgcgacctcagatcagacgtggc

SEQ ID NO: 23874 - RNA, 23 nt, Synthetic Construct
  source 1..23: mol_type = other RNA
cgcgacctcagatcagacgtggc

SEQ ID NO: 23875 - RNA, 15 nt, Synthetic Construct
  source 1..15: mol_type = other RNA
ggccgtcgtcagctc

SEQ ID NO: 23876 - RNA, 15 nt, Synthetic Construct
  source 1..15: mol_type = other RNA
ggccgtcgtcagctc

SEQ ID NO: 23877 - RNA, 16 nt, Synthetic Construct
  source 1..16: mol_type = other RNA
ggtagctcgttgggct

SEQ ID NO: 23878 - RNA, 27 nt, Synthetic Construct
  source 1..27: mol_type = other RNA
ggggagctaatcccagaaacccggtcg

SEQ ID NO: 23879 - RNA, 27 nt, Synthetic Construct
  source 1..27: mol_type = other RNA
ggggagctaatcccagaaacccggtcg

SEQ ID NO: 23880 - RNA, 33 nt, Synthetic Construct; identical to SEQ ID NO: 2209
  source 1..33: mol_type = other RNA

SEQ ID NO: 23881 - RNA, 33 nt, Synthetic Construct; identical to SEQ ID NO: 2209
  source 1..33: mol_type = other RNA

SEQ ID NO: 23882 - RNA, 22 nt, Synthetic Construct
  source 1..22: mol_type = other RNA
gagagcctggacacaggtgctg

SEQ ID NO: 23883 - RNA, 25 nt, Synthetic Construct
  source 1..25: mol_type = other RNA
ggtaaaatggctgagtgaagcattg

SEQ ID NO: 23884 - RNA, 25 nt, Synthetic Construct
  source 1..25: mol_type = other RNA
ggtaaaatggctgagtgaagcattg

SEQ ID NO: 23885 - RNA, 20 nt, Synthetic Construct
  source 1..20: mol_type = other RNA
tcctgtaccgatcaatagtg

SEQ ID NO: 23886 - RNA, 20 nt, Synthetic Construct
  source 1..20: mol_type = other RNA
tcctgtaccgatcaatagtg

SEQ ID NO: 23887 - RNA, 23 nt, Synthetic Construct
  source 1..23: mol_type = other RNA
tagcagcacgtaaatattggcgt

SEQ ID NO: 23888 - RNA, 23 nt, Synthetic Construct
  source 1..23: mol_type = other RNA
tagcagcacgtaaatattggcgt

SEQ ID NO: 23889 - RNA, 23 nt, Synthetic Construct
  source 1..23: mol_type = other RNA
tgagaggcagagagcgagacttt

SEQ ID NO: 23890 - RNA, 23 nt, Synthetic Construct
  source 1..23: mol_type = other RNA
tgagaggcagagagcgagacttt

SEQ ID NO: 23891 - RNA, 17 nt, Synthetic Construct
  source 1..17: mol_type = other RNA
cacggcccagactccta

SEQ ID NO: 23892 - RNA, 17 nt, Synthetic Construct
  source 1..17: mol_type = other RNA
cacggcccagactccta

SEQ ID NO: 23893 - RNA, 33 nt, Synthetic Construct; identical to SEQ ID NO: 2395
  source 1..33: mol_type = other RNA

SEQ ID NO: 23894 - RNA, 27 nt, Synthetic Construct
  source 1..27: mol_type = other RNA
atagtctttgttcgattccgttgagta

SEQ ID NO: 23895 - RNA, 27 nt, Synthetic Construct
  source 1..27: mol_type = other RNA
atagtctttgttcgattccgttgagta

SEQ ID NO: 23896 - RNA, 19 nt, Synthetic Construct
  source 1..19: mol_type = other RNA
gggtgcaagcgttaatcgg

SEQ ID NO: 23897 - RNA, 19 nt, Synthetic Construct
  source 1..19: mol_type = other RNA
gggtgcaagcgttaatcgg

SEQ ID NO: 23898 - RNA, 15 nt, Synthetic Construct
  source 1..15: mol_type = other RNA
acccttgtcattagt

SEQ ID NO: 23899 - RNA, 15 nt, Synthetic Construct
  source 1..15: mol_type = other RNA
acccttgtcattagt

SEQ ID NO: 23900 - RNA, 16 nt, Synthetic Construct
  source 1..16: mol_type = other RNA
ggcgggggtcgctggt

SEQ ID NO: 23901 - RNA, 16 nt, Synthetic Construct
  source 1..16: mol_type = other RNA
ggcgggggtcgctggt

SEQ ID NO: 23902 - RNA, 20 nt, Synthetic Construct
  source 1..20: mol_type = other RNA
tgaggtagtaggttgtgtgt

SEQ ID NO: 23903 - RNA, 20 nt, Synthetic Construct
  source 1..20: mol_type = other RNA
tgaggtagtaggttgtgtgt

SEQ ID NO: 23904 - RNA, 16 nt, Synthetic Construct
  source 1..16: mol_type = other RNA
gtctacggccatacaa

SEQ ID NO: 23905 - RNA, 16 nt, Synthetic Construct
  source 1..16: mol_type = other RNA
agcaagtcgaacggta

SEQ ID NO: 23906 - RNA, 16 nt, Synthetic Construct
  source 1..16: mol_type = other RNA
agcaagtcgaacggta

SEQ ID NO: 23907 - RNA, 21 nt, Synthetic Construct
  source 1..21: mol_type = other RNA
tggagtgtgacaatggtgctt

SEQ ID NO: 23908 - RNA, 21 nt, Synthetic Construct
  source 1..21: mol_type = other RNA
tggagtgtgacaatggtgctt

SEQ ID NO: 23909 - RNA, 21 nt, Synthetic Construct
  source 1..21: mol_type = other RNA
tgaggtagtaggttgtatggt

SEQ ID NO: 23910 - RNA, 21 nt, Synthetic Construct
  source 1..21: mol_type = other RNA
tgaggtagtaggttgtatggt

SEQ ID NO: 23911 - RNA, 19 nt, Synthetic Construct
  source 1..19: mol_type = other RNA
aacagtcaggatgttggct

SEQ ID NO: 23912 - RNA, 19 nt, Synthetic Construct
  source 1..19: mol_type = other RNA
aacagtcaggatgttggct

SEQ ID NO: 23913 - RNA, 22 nt, Synthetic Construct
  source 1..22: mol_type = other RNA
tattgcacctgtcccggcctgt

SEQ ID NO: 23914 - RNA, 25 nt, Synthetic Construct
  source 1..25: mol_type = other RNA
agctcactgatcgagtcgtcctgcg

SEQ ID NO: 23915 - RNA, 25 nt, Synthetic Construct
  source 1..25: mol_type = other RNA
agctcactgatcgagtcgtcctgcg

SEQ ID NO: 23916 - RNA, 24 nt, Synthetic Construct
  source 1..24: mol_type = other RNA
cggagaaggttagctcagccaact

SEQ ID NO: 23917 - RNA, 24 nt, Synthetic Construct
  source 1..24: mol_type = other RNA
cggagaaggttagctcagccaact

SEQ ID NO: 23918 - RNA, 17 nt, Synthetic Construct
  source 1..17: mol_type = other RNA
cgaaattccttgtcggg

SEQ ID NO: 23919 - RNA, 17 nt, Synthetic Construct
  source 1..17: mol_type = other RNA
cgaaattccttgtcggg

SEQ ID NO: 23920 - RNA, 41 nt, Synthetic Construct; identical to SEQ ID NO: 781
  source 1..41: mol_type = other RNA

SEQ ID NO: 23921 - RNA, 21 nt, Synthetic Construct
  source 1..21: mol_type = other RNA
tcctgtctgaatatgggggga

SEQ ID NO: 23922 - RNA, 16 nt, Synthetic Construct
  source 1..16: mol_type = other RNA
tggccgtcgtcagctc

SEQ ID NO: 23923 - RNA, 16 nt, Synthetic Construct
  source 1..16: mol_type = other RNA
tggccgtcgtcagctc

SEQ ID NO: 23924 - RNA, 23 nt, Synthetic Construct
  source 1..23: mol_type = other RNA
tgagaggcagagagcgagacttt

SEQ ID NO: 23925 - RNA, 31 nt, Synthetic Construct; identical to SEQ ID NO: 2442
  source 1..31: mol_type = other RNA

SEQ ID NO: 23926 - RNA, 31 nt, Synthetic Construct; identical to SEQ ID NO: 2442
  source 1..31: mol_type = other RNA

SEQ ID NO: 23927 - RNA, 18 nt, Synthetic Construct
  source 1..18: mol_type = other RNA
gtcgacgtatagggtgtg

SEQ ID NO: 23928 - RNA, 17 nt, Synthetic Construct
  source 1..17: mol_type = other RNA
ccaaggggtcgtgggtt

SEQ ID NO: 23929 - RNA, 17 nt, Synthetic Construct
  source 1..17: mol_type = other RNA
ccaaggggtcgtgggtt

SEQ ID NO: 23930 - RNA, 18 nt, Synthetic Construct
  source 1..18: mol_type = other RNA
ggccgtcgtcagctcgtg

SEQ ID NO: 23931 - RNA, 23 nt, Synthetic Construct
  source 1..23: mol_type = other RNA
tggtaatgcgacgtacttagtgt

SEQ ID NO: 23932 - RNA, 37 nt, Synthetic Construct; identical to SEQ ID NO: 2607
  source 1..37: mol_type = other RNA

SEQ ID NO: 23933 - RNA, 16 nt, Synthetic Construct
  source 1..16: mol_type = other RNA
tcagtagctcgaggaa

SEQ ID NO: 23934 - RNA, 16 nt, Synthetic Construct
  source 1..16: mol_type = other RNA
tcagtagctcgaggaa

SEQ ID NO: 23935 - RNA, 22 nt, Synthetic Construct
  source 1..22: mol_type = other RNA
tgaggcagtaggttgtgtggtt

SEQ ID NO: 23936 - RNA, 22 nt, Synthetic Construct
  source 1..22: mol_type = other RNA
tgaggcagtaggttgtgtggtt

SEQ ID NO: 23937 - RNA, 39 nt, Synthetic Construct; identical to SEQ ID NO: 4400
  source 1..39: mol_type = other RNA

SEQ ID NO: 23938 - RNA, 23 nt, Synthetic Construct
  source 1..23: mol_type = other RNA
tgaggggcagagagcaagacttt

SEQ ID NO: 23939 - RNA, 16 nt, Synthetic Construct
  source 1..16: mol_type = other RNA
ccaaggggtcgtgggt

SEQ ID NO: 23940 - RNA, 16 nt, Synthetic Construct
  source 1..16: mol_type = other RNA
ccaaggggtcgtgggt

SEQ ID NO: 23941 - RNA, 28 nt, Synthetic Construct
  source 1..28: mol_type = other RNA
ccgtgtgaaagtaggtcatcgtcaggct

SEQ ID NO: 23942 - RNA, 21 nt, Synthetic Construct
  source 1..21: mol_type = other RNA
tgaggtagtagattgtatagc

SEQ ID NO: 23943 - RNA, 17 nt, Synthetic Construct
  source 1..17: mol_type = other RNA
gccatgccgcgtgcggg

SEQ ID NO: 23944 - RNA, 17 nt, Synthetic Construct
  source 1..17: mol_type = other RNA
gccatgccgcgtgcggg

SEQ ID NO: 23945 - RNA, 16 nt, Synthetic Construct
  source 1..16: mol_type = other RNA
gcctacggccatacca

SEQ ID NO: 23946 - RNA, 16 nt, Synthetic Construct
  source 1..16: mol_type = other RNA
gcctacggccatacca

SEQ ID NO: 23947 - RNA, 16 nt, Synthetic Construct
  source 1..16: mol_type = other RNA
gggtgaaagcggggga

SEQ ID NO: 23948 - RNA, 16 nt, Synthetic Construct
  source 1..16: mol_type = other RNA
gggtgaaagcggggga

SEQ ID NO: 23949 - RNA, 15 nt, Synthetic Construct
  source 1..15: mol_type = other RNA
tccggatcgtagtct

SEQ ID NO: 23950 - RNA, 31 nt, Synthetic Construct; identical to SEQ ID NO: 2758
  source 1..31: mol_type = other RNA

SEQ ID NO: 23951 - RNA, 17 nt, Synthetic Construct
  source 1..17: mol_type = other RNA
cccctggacctgtactg

SEQ ID NO: 23952 - RNA, 16 nt, Synthetic Construct
  source 1..16: mol_type = other RNA
ccatgccgcgtgcggg

SEQ ID NO: 23953 - RNA, 23 nt, Synthetic Construct
  source 1..23: mol_type = other RNA
tggaatgtaaagaagtatgtatt

SEQ ID NO: 23954 - RNA, 21 nt, Synthetic Construct
  source 1..21: mol_type = other RNA
gctattgacgaccgtaccgca

SEQ ID NO: 23955 - RNA, 21 nt, Synthetic Construct
  source 1..21: mol_type = other RNA
gctattgacgaccgtaccgca

SEQ ID NO: 23956 - RNA, 19 nt, Synthetic Construct
  source 1..19: mol_type = other RNA
tctaatgagactgccggtg

SEQ ID NO: 23957 - RNA, 19 nt, Synthetic Construct
  source 1..19: mol_type = other RNA
tctaatgagactgccggtg

SEQ ID NO: 23958 - RNA, 37 nt, Synthetic Construct; identical to SEQ ID NO: 2607
  source 1..37: mol_type = other RNA

SEQ ID NO: 23959 - RNA, 37 nt, Synthetic Construct; identical to SEQ ID NO: 2607
  source 1..37: mol_type = other RNA

SEQ ID NO: 23960 - RNA, 20 nt, Synthetic Construct
  source 1..20: mol_type = other RNA
ttcaagtaatccaggatagg

SEQ ID NO: 23961 - RNA, 23 nt, Synthetic Construct
  source 1..23: mol_type = other RNA
tgaggtagtaggttgtatggttt

SEQ ID NO: 23962 - RNA, 22 nt, Synthetic Construct
  source 1..22: mol_type = other RNA
cgactcttagcggtggatcact

SEQ ID NO: 23963 - RNA, 22 nt, Synthetic Construct
  source 1..22: mol_type = other RNA
cgactcttagcggtggatcact

SEQ ID NO: 23964 - RNA, 28 nt, Synthetic Construct
  source 1..28: mol_type = other RNA
ggcagggttcgtgactggggtgaagtcg

SEQ ID NO: 23965 - RNA, 28 nt, Synthetic Construct
  source 1..28: mol_type = other RNA
ggcagggttcgtgactggggtgaagtcg

SEQ ID NO: 23966 - RNA, 17 nt, Synthetic Construct
  source 1..17: mol_type = other RNA
ccaaggggtcgtgggtt

SEQ ID NO: 23967 - RNA, 17 nt, Synthetic Construct
  source 1..17: mol_type = other RNA
ccaaggggtcgtgggtt

SEQ ID NO: 23968 - RNA, 21 nt, Synthetic Construct
  source 1..21: mol_type = other RNA
gtagcgaaattccttgtcggg

SEQ ID NO: 23969 - RNA, 21 nt, Synthetic Construct
  source 1..21: mol_type = other RNA
gtagcgaaattccttgtcggg

SEQ ID NO: 23970 - RNA, 22 nt, Synthetic Construct
  source 1..22: mol_type = other RNA
tgaggtagtagtttgtgctgtc

SEQ ID NO: 23971 - RNA, 18 nt, Synthetic Construct
  source 1..18: mol_type = other RNA
tcccctggacctgtactg

SEQ ID NO: 23972 - RNA, 21 nt, Synthetic Construct
  source 1..21: mol_type = other RNA
cactgatcgagtcgtcctgcg

SEQ ID NO: 23973 - RNA, 22 nt, Synthetic Construct
  source 1..22: mol_type = other RNA
cccataaagtagaaagcactac

SEQ ID NO: 23974 - RNA, 22 nt, Synthetic Construct
  source 1..22: mol_type = other RNA
cccataaagtagaaagcactac

SEQ ID NO: 23975 - RNA, 21 nt, Synthetic Construct
  source 1..21: mol_type = other RNA
tgaggtagaaggttgtgtggt

SEQ ID NO: 23976 - RNA, 21 nt, Synthetic Construct
  source 1..21: mol_type = other RNA
tgaggtagaaggttgtgtggt

SEQ ID NO: 23977 - RNA, 15 nt, Synthetic Construct
  source 1..15: mol_type = other RNA
tggccgtcgtcagct

SEQ ID NO: 23978 - RNA, 15 nt, Synthetic Construct
  source 1..15: mol_type = other RNA
tggccgtcgtcagct

SEQ ID NO: 23979 - RNA, 23 nt, Synthetic Construct
  source 1..23: mol_type = other RNA
tgaagggcagagagcgagacttt

SEQ ID NO: 23980 - RNA, 23 nt, Synthetic Construct
  source 1..23: mol_type = other RNA
tgaagggcagagagcgagacttt

SEQ ID NO: 23981 - RNA, 21 nt, Synthetic Construct
  source 1..21: mol_type = other RNA
cgtaccgtgagtaataatgca

SEQ ID NO: 23982 - RNA, 21 nt, Synthetic Construct
  source 1..21: mol_type = other RNA
ggaatcgctagtaatcgcgga

SEQ ID NO: 23983 - RNA, 21 nt, Synthetic Construct
  source 1..21: mol_type = other RNA
ggaatcgctagtaatcgcgga

SEQ ID NO: 23984 - RNA, 20 nt, Synthetic Construct
  source 1..20: mol_type = other RNA
ctctaatgagactgccggtg

SEQ ID NO: 23985 - RNA, 17 nt, Synthetic Construct
  source 1..17: mol_type = other RNA
gtgttcggaagattttc

SEQ ID NO: 23986 - RNA, 17 nt, Synthetic Construct
  source 1..17: mol_type = other RNA
gtgttcggaagattttc

SEQ ID NO: 23987 - RNA, 32 nt, Synthetic Construct; identical to SEQ ID NO: 734
  source 1..32: mol_type = other RNA

SEQ ID NO: 23988 - RNA, 18 nt, Synthetic Construct
  source 1..18: mol_type = other RNA
gcgccgatgatagtgcgg

SEQ ID NO: 23989 - RNA, 18 nt, Synthetic Construct
  source 1..18: mol_type = other RNA
gcgccgatgatagtgcgg

SEQ ID NO: 23990 - RNA, 18 nt, Synthetic Construct
  source 1..18: mol_type = other RNA
cctcgcgcgattggagcg

SEQ ID NO: 23991 - RNA, 23 nt, Synthetic Construct
  source 1..23: mol_type = other RNA
tgaggggcagagagtgagacttt

SEQ ID NO: 23992 - RNA, 23 nt, Synthetic Construct
  source 1..23: mol_type = other RNA
tgaggggcagagagtgagacttt

SEQ ID NO: 23993 - RNA, 28 nt, Synthetic Construct
  source 1..28: mol_type = other RNA
ggcagggttcgtgactggggtgaagtcg

SEQ ID NO: 23994 - RNA, 20 nt, Synthetic Construct
  source 1..20: mol_type = other RNA
tcctgtaccgatcaatagtg

SEQ ID NO: 23995 - RNA, 20 nt, Synthetic Construct
  source 1..20: mol_type = other RNA
tcctgtaccgatcaatagtg

SEQ ID NO: 23996 - RNA, 16 nt, Synthetic Construct
  source 1..16: mol_type = other RNA
gaaattccttgtcggg

SEQ ID NO: 23997 - RNA, 16 nt, Synthetic Construct
  source 1..16: mol_type = other RNA
gaaattccttgtcggg

SEQ ID NO: 23998 - RNA, 36 nt, Synthetic Construct; identical to SEQ ID NO: 2366
  source 1..36: mol_type = other RNA

SEQ ID NO: 23999 - RNA, 22 nt, Synthetic Construct
  source 1..22: mol_type = other RNA
tgagatagtaggttgtgtggtt

SEQ ID NO: 24000 - RNA, 22 nt, Synthetic Construct
  source 1..22: mol_type = other RNA
tgagatagtaggttgtgtggtt

SEQ ID NO: 24001 - RNA, 20 nt, Synthetic Construct
  source 1..20: mol_type = other RNA
tcctgtctgaatatgggggg

SEQ ID NO: 24002 - RNA, 16 nt, Synthetic Construct
  source 1..16: mol_type = other RNA
aggtcatcattatctg

SEQ ID NO: 24003 - RNA, 16 nt, Synthetic Construct
  source 1..16: mol_type = other RNA
aggtcatcattatctg

SEQ ID NO: 24004 - RNA, 16 nt, Synthetic Construct
  source 1..16: mol_type = other RNA
acggcccagactccta

SEQ ID NO: 24005 - RNA, 16 nt, Synthetic Construct
  source 1..16: mol_type = other RNA
acggcccagactccta

SEQ ID NO: 24006 - RNA, 25 nt, Synthetic Construct
  source 1..25: mol_type = other RNA
ttgaggatatgagatcgaggcgaca

SEQ ID NO: 24007 - RNA, 25 nt, Synthetic Construct
  source 1..25: mol_type = other RNA
ttgaggatatgagatcgaggcgaca

SEQ ID NO: 24008 - RNA, 22 nt, Synthetic Construct
  source 1..22: mol_type = other RNA
cattgcgcttgtctcggtctga

SEQ ID NO: 24009 - RNA, 34 nt, Synthetic Construct; identical to SEQ ID NO: 2529
  source 1..34: mol_type = other RNA

SEQ ID NO: 24010 - RNA, 32 nt, Synthetic Construct; identical to SEQ ID NO: 2052
  source 1..32: mol_type = other RNA

SEQ ID NO: 24011 - RNA, 32 nt, Synthetic Construct; identical to SEQ ID NO: 2052
  source 1..32: mol_type = other RNA

SEQ ID NO: 24012 - RNA, 19 nt, Synthetic Construct
  source 1..19: mol_type = other RNA
accaaggggtcgtgggttc

SEQ ID NO: 24013 - RNA, 19 nt, Synthetic Construct
  source 1..19: mol_type = other RNA
accaaggggtcgtgggttc

SEQ ID NO: 24014 - RNA, 15 nt, Synthetic Construct
  source 1..15: mol_type = other RNA
gtcaggatgttggct

SEQ ID NO: 24015 - RNA, 15 nt, Synthetic Construct
  source 1..15: mol_type = other RNA
gtcaggatgttggct

SEQ ID NO: 24016 - RNA, 15 nt, Synthetic Construct
  source 1..15: mol_type = other RNA
ggccgtcgtcagctc

SEQ ID NO: 24017 - RNA, 15 nt, Synthetic Construct
  source 1..15: mol_type = other RNA
ggccgtcgtcagctc

SEQ ID NO: 24018 - RNA, 21 nt, Synthetic Construct
  source 1..21: mol_type = other RNA
aacattcattgctgtcggtgg

SEQ ID NO: 24019 - RNA, 23 nt, Synthetic Construct
  source 1..23: mol_type = other RNA
tggtaatacgacgtgcttagtgt

SEQ ID NO: 24020 - RNA, 23 nt, Synthetic Construct
  source 1..23: mol_type = other RNA
tggtaatacgacgtgcttagtgt

SEQ ID NO: 24021 - RNA, 17 nt, Synthetic Construct
  source 1..17: mol_type = other RNA
tcccctggacctgtact

SEQ ID NO: 24022 - RNA, 17 nt, Synthetic Construct
  source 1..17: mol_type = other RNA
tcccctggacctgtact

SEQ ID NO: 24023 - RNA, 19 nt, Synthetic Construct
  source 1..19: mol_type = other RNA
aacagtcaggatgttggct

SEQ ID NO: 24024 - RNA, 31 nt, Synthetic Construct; identical to SEQ ID NO: 5943
  source 1..31: mol_type = other RNA

SEQ ID NO: 24025 - RNA, 31 nt, Synthetic Construct; identical to SEQ ID NO: 5943
  source 1..31: mol_type = other RNA

SEQ ID NO: 24026 - RNA, 20 nt, Synthetic Construct
  source 1..20: mol_type = other RNA
tgaggaagtaggttgtgtgg

SEQ ID NO: 24027 - RNA, 20 nt, Synthetic Construct
  source 1..20: mol_type = other RNA
tgaggaagtaggttgtgtgg

SEQ ID NO: 24028 - RNA, 20 nt, Synthetic Construct
  source 1..20: mol_type = other RNA
tgaggtagtaggttgtatgg

SEQ ID NO: 24029 - RNA, 18 nt, Synthetic Construct
  source 1..18: mol_type = other RNA
tcagtagctcgaggaaaa

SEQ ID NO: 24030 - RNA, 18 nt, Synthetic Construct
  source 1..18: mol_type = other RNA
tcagtagctcgaggaaaa

SEQ ID NO: 24031 - RNA, 23 nt, Synthetic Construct
  source 1..23: mol_type = other RNA
cgactcttagcggtggatcactc

SEQ ID NO: 24032 - RNA, 23 nt, Synthetic Construct
  source 1..23: mol_type = other RNA
cgactcttagcggtggatcactc

SEQ ID NO: 24033 - RNA, 15 nt, Synthetic Construct
  source 1..15: mol_type = other RNA
cggcccagactccta

SEQ ID NO: 24034 - RNA, 15 nt, Synthetic Construct
  source 1..15: mol_type = other RNA
cggcccagactccta

SEQ ID NO: 24035 - RNA, 32 nt, Synthetic Construct; identical to SEQ ID NO: 2582
  source 1..32: mol_type = other RNA

SEQ ID NO: 24036 - RNA, 23 nt, Synthetic Construct
  source 1..23: mol_type = other RNA
tgaggggcagagggcgagacttt

SEQ ID NO: 24037 - RNA, 23 nt, Synthetic Construct
  source 1..23: mol_type = other RNA
tgaggggcagagggcgagacttt

SEQ ID NO: 24038 - RNA, 30 nt, Synthetic Construct; identical to SEQ ID NO: 2308
  source 1..30: mol_type = other RNA

SEQ ID NO: 24039 - RNA, 31 nt, Synthetic Construct; identical to SEQ ID NO: 1881
  source 1..31: mol_type = other RNA

SEQ ID NO: 24040 - RNA, 18 nt, Synthetic Construct
  source 1..18: mol_type = other RNA
ggtgcaagcgttaatcgg

SEQ ID NO: 24041 - RNA, 18 nt, Synthetic Construct
  source 1..18: mol_type = other RNA
ggtgcaagcgttaatcgg

SEQ ID NO: 24042 - RNA, 16 nt, Synthetic Construct
  source 1..16: mol_type = other RNA
gatctgtagctggtct

SEQ ID NO: 24043 - RNA, 22 nt, Synthetic Construct
  source 1..22: mol_type = other RNA
tattgcacttgccccggcctgt

SEQ ID NO: 24044 - RNA, 22 nt, Synthetic Construct
  source 1..22: mol_type = other RNA
tcactgatcgagtcgtcctgcg

SEQ ID NO: 24045 - RNA, 22 nt, Synthetic Construct
  source 1..22: mol_type = other RNA
tcactgatcgagtcgtcctgcg

SEQ ID NO: 24046 - RNA, 22 nt, Synthetic Construct
  source 1..22: mol_type = other RNA
ttataatacaacctgataagtg

SEQ ID NO: 24047 - RNA, 19 nt, Synthetic Construct
  source 1..19: mol_type = other RNA
ctgatcgagtcgtcctgcg

SEQ ID NO: 24048 - RNA, 19 nt, Synthetic Construct
  source 1..19: mol_type = other RNA
ctgatcgagtcgtcctgcg

SEQ ID NO: 24049 - RNA, 31 nt, Synthetic Construct; identical to SEQ ID NO: 2412
  source 1..31: mol_type = other RNA

SEQ ID NO: 24050 - RNA, 17 nt, Synthetic Construct
  source 1..17: mol_type = other RNA
accaaggggtcgtgggt

SEQ ID NO: 24051 - RNA, 17 nt, Synthetic Construct
  source 1..17: mol_type = other RNA
accaaggggtcgtgggt

SEQ ID NO: 24052 - RNA, 21 nt, Synthetic Construct
  source 1..21: mol_type = other RNA
agaggggcagagagcgagact

SEQ ID NO: 24053 - RNA, 21 nt, Synthetic Construct
  source 1..21: mol_type = other RNA
agaggggcagagagcgagact

SEQ ID NO: 24054 - RNA, 23 nt, Synthetic Construct
  source 1..23: mol_type = other RNA
tgaggggtagagagcgagacttt

SEQ ID NO: 24055 - RNA, 22 nt, Synthetic Construct
  source 1..22: mol_type = other RNA
tgaggtagtaggttatgtggtt

SEQ ID NO: 24056 - RNA, 16 nt, Synthetic Construct
  source 1..16: mol_type = other RNA
ggtagctcgttgggct

SEQ ID NO: 24057 - RNA, 16 nt, Synthetic Construct
  source 1..16: mol_type = other RNA
ggtagctcgttgggct

SEQ ID NO: 24058 - RNA, 18 nt, Synthetic Construct
  source 1..18: mol_type = other RNA
cgccgatgatagtgcgga

SEQ ID NO: 24059 - RNA, 18 nt, Synthetic Construct
  source 1..18: mol_type = other RNA
cgccgatgatagtgcgga

SEQ ID NO: 24060 - RNA, 15 nt, Synthetic Construct
  source 1..15: mol_type = other RNA
agttgaccgcctggg

SEQ ID NO: 24061 - RNA, 15 nt, Synthetic Construct
  source 1..15: mol_type = other RNA
agttgaccgcctggg

SEQ ID NO: 24062 - RNA, 17 nt, Synthetic Construct
  source 1..17: mol_type = other RNA
cctcgcgcgattggagc

SEQ ID NO: 24063 - RNA, 22 nt, Synthetic Construct
  source 1..22: mol_type = other RNA
gcgttgcaaccagtgccggggg

SEQ ID NO: 24064 - RNA, 22 nt, Synthetic Construct
  source 1..22: mol_type = other RNA
gcgttgcaaccagtgccggggg

SEQ ID NO: 24065 - RNA, 25 nt, Synthetic Construct
  source 1..25: mol_type = other RNA
gcgccgctggtgtagtggtatcatg

SEQ ID NO: 24066 - RNA, 23 nt, Synthetic Construct
  source 1..23: mol_type = other RNA
tggtaatacggcgtacttagtgt

SEQ ID NO: 24067 - RNA, 22 nt, Synthetic Construct
  source 1..22: mol_type = other RNA
tgaggtagtaggttgtggggtt

SEQ ID NO: 24068 - RNA, 22 nt, Synthetic Construct
  source 1..22: mol_type = other RNA
tgaggtagtaggttgtggggtt

SEQ ID NO: 24069 - RNA, 26 nt, Synthetic Construct
  source 1..26: mol_type = other RNA
gatgcgtggtaggagagcgttctgta

SEQ ID NO: 24070 - RNA, 18 nt, Synthetic Construct
  source 1..18: mol_type = other RNA
gtccggatcgtagtctgc

SEQ ID NO: 24071 - RNA, 18 nt, Synthetic Construct
  source 1..18: mol_type = other RNA
gtccggatcgtagtctgc

SEQ ID NO: 24072 - RNA, 21 nt, Synthetic Construct
  source 1..21: mol_type = other RNA
ggagtatgcagagcaagatca

SEQ ID NO: 24073 - RNA, 21 nt, Synthetic Construct
  source 1..21: mol_type = other RNA
ggagtatgcagagcaagatca

SEQ ID NO: 24074 - RNA, 17 nt, Synthetic Construct
  source 1..17: mol_type = other RNA
catgcaagtcgaacggt

SEQ ID NO: 24075 - RNA, 17 nt, Synthetic Construct
  source 1..17: mol_type = other RNA
catgcaagtcgaacggt

SEQ ID NO: 24076 - RNA, 22 nt, Synthetic Construct
  source 1..22: mol_type = other RNA
tgaggtagtaggttgtgtagtt

SEQ ID NO: 24077 - RNA, 34 nt, Synthetic Construct; identical to SEQ ID NO: 2019
  source 1..34: mol_type = other RNA

SEQ ID NO: 24078 - RNA, 25 nt, Synthetic Construct
  source 1..25: mol_type = other RNA
ttggggatatgagatcgagacgaca

SEQ ID NO: 24079 - RNA, 25 nt, Synthetic Construct
  source 1..25: mol_type = other RNA
ttggggatatgagatcgagacgaca

SEQ ID NO: 24080 - RNA, 19 nt, Synthetic Construct
  source 1..19: mol_type = other RNA
agtcgacgtatagggtgtg

SEQ ID NO: 24081 - RNA, 19 nt, Synthetic Construct
  source 1..19: mol_type = other RNA
agtcgacgtatagggtgtg

SEQ ID NO: 24082 - RNA, 17 nt, Synthetic Construct
  source 1..17: mol_type = other RNA
gcgtagatatgcggagg

SEQ ID NO: 24083 - RNA, 23 nt, Synthetic Construct
  source 1..23: mol_type = other RNA
tgaggtagtaggttgtgtggtaa

SEQ ID NO: 24084 - RNA, 23 nt, Synthetic Construct
  source 1..23: mol_type = other RNA
tgaggtagtaggttgtgtggtaa

SEQ ID NO: 24085 - RNA, 35 nt, Synthetic Construct; identical to SEQ ID NO: 10694
  source 1..35: mol_type = other RNA

SEQ ID NO: 24086 - RNA, 22 nt, Synthetic Construct
  source 1..22: mol_type = other RNA
cattgcgcttgtctcggtctga

SEQ ID NO: 24087 - RNA, 23 nt, Synthetic Construct
  source 1..23: mol_type = other RNA
tgataatacgacgtacttagtgt

SEQ ID NO: 24088 - RNA, 23 nt, Synthetic Construct
  source 1..23: mol_type = other RNA
tgataatacgacgtacttagtgt

SEQ ID NO: 24089 - RNA, 15 nt, Synthetic Construct
  source 1..15: mol_type = other RNA
gctttgatccggaga

SEQ ID NO: 24090 - RNA, 25 nt, Synthetic Construct
  source 1..25: mol_type = other RNA
tgtaaacatccttgactggaagctt

SEQ ID NO: 24091 - RNA, 15 nt, Synthetic Construct
  source 1..15: mol_type = other RNA
gcgtagatatgcgga

SEQ ID NO: 24092 - RNA, 20 nt, Synthetic Construct
  source 1..20: mol_type = other RNA
tcctgtaccgatcaatagtg

SEQ ID NO: 24093 - RNA, 16 nt, Synthetic Construct
  source 1..16: mol_type = other RNA
atgcaagtcgaacggt

SEQ ID NO: 24094 - RNA, 16 nt, Synthetic Construct
  source 1..16: mol_type = other RNA
atgcaagtcgaacggt

SEQ ID NO: 24095 - RNA, 15 nt, Synthetic Construct
  source 1..15: mol_type = other RNA
gtccggcccgaggca

SEQ ID NO: 24096 - RNA, 15 nt, Synthetic Construct
  source 1..15: mol_type = other RNA
gtccggcccgaggca

SEQ ID NO: 24097 - RNA, 16 nt, Synthetic Construct
  source 1..16: mol_type = other RNA
gcggctgtagctcagt

SEQ ID NO: 24098 - RNA, 16 nt, Synthetic Construct
  source 1..16: mol_type = other RNA
gcggctgtagctcagt

SEQ ID NO: 24099 - RNA, 23 nt, Synthetic Construct
  source 1..23: mol_type = other RNA
tagtgcaatattgcttatagggt

SEQ ID NO: 24100 - RNA, 15 nt, Synthetic Construct
  source 1..15: mol_type = other RNA
cagtgaaacgagtca

SEQ ID NO: 24101 - RNA, 15 nt, Synthetic Construct
  source 1..15: mol_type = other RNA
cagtgaaacgagtca

SEQ ID NO: 24102 - RNA, 32 nt, Synthetic Construct; identical to SEQ ID NO: 5582
  source 1..32: mol_type = other RNA

SEQ ID NO: 24103 - RNA, 32 nt, Synthetic Construct; identical to SEQ ID NO: 5582
  source 1..32: mol_type = other RNA

SEQ ID NO: 24104 - RNA, 32 nt, Synthetic Construct; identical to SEQ ID NO: 3541
  source 1..32: mol_type = other RNA

SEQ ID NO: 24105 - RNA, 32 nt, Synthetic Construct; identical to SEQ ID NO: 3541
  source 1..32: mol_type = other RNA

SEQ ID NO: 24106 - RNA, 22 nt, Synthetic Construct
  source 1..22: mol_type = other RNA
taacactgtctggtaacgatgt

SEQ ID NO: 24107 - RNA, 22 nt, Synthetic Construct
  source 1..22: mol_type = other RNA
taacactgtctggtaacgatgt

SEQ ID NO: 24108 - RNA, 17 nt, Synthetic Construct
  source 1..17: mol_type = other RNA
acagtcaggatgttggc

SEQ ID NO: 24109 - RNA, 17 nt, Synthetic Construct
  source 1..17: mol_type = other RNA
acagtcaggatgttggc

SEQ ID NO: 24110 - RNA, 21 nt, Synthetic Construct
  source 1..21: mol_type = other RNA
tgaggggcagagagcgagacc

SEQ ID NO: 24111 - RNA, 21 nt, Synthetic Construct
  source 1..21: mol_type = other RNA
tgaggggcagagagcgagacc

SEQ ID NO: 24112 - RNA, 36 nt, Synthetic Construct; identical to SEQ ID NO: 2660
  source 1..36: mol_type = other RNA

SEQ ID NO: 24113 - RNA, 24 nt, Synthetic Construct
  source 1..24: mol_type = other RNA
tcagtgcatcacagaactttgttt

SEQ ID NO: 24114 - RNA, 16 nt, Synthetic Construct
  source 1..16: mol_type = other RNA
gtccccttcgtctaga

SEQ ID NO: 24115 - RNA, 18 nt, Synthetic Construct
  source 1..18: mol_type = other RNA
caacggaatcccaaaagc

SEQ ID NO: 24116 - RNA, 18 nt, Synthetic Construct
  source 1..18: mol_type = other RNA
caacggaatcccaaaagc

SEQ ID NO: 24117 - RNA, 22 nt, Synthetic Construct
  source 1..22: mol_type = other RNA
tgttggttcaagcgtgtagtcg

SEQ ID NO: 24118 - RNA, 22 nt, Synthetic Construct
  source 1..22: mol_type = other RNA
tgttggttcaagcgtgtagtcg

SEQ ID NO: 24119 - RNA, 22 nt, Synthetic Construct
  source 1..22: mol_type = other RNA
tattgcacttgtcccggcccgt

SEQ ID NO: 24120 - RNA, 21 nt, Synthetic Construct
  source 1..21: mol_type = other RNA
actggacttggagtcagaagg

SEQ ID NO: 24121 - RNA, 27 nt, Synthetic Construct
  source 1..27: mol_type = other RNA
gttggttcaagcgtgtagtcgtgctct

SEQ ID NO: 24122 - RNA, 27 nt, Synthetic Construct
  source 1..27: mol_type = other RNA
gttggttcaagcgtgtagtcgtgctct

SEQ ID NO: 24123 - RNA, 17 nt, Synthetic Construct
  source 1..17: mol_type = other RNA
ggcccttatgggtaggg

SEQ ID NO: 24124 - RNA, 17 nt, Synthetic Construct
  source 1..17: mol_type = other RNA
ggcccttatgggtaggg

SEQ ID NO: 24125 - RNA, 23 nt, Synthetic Construct
  source 1..23: mol_type = other RNA
tcctgtaccgagctgccccgagt

SEQ ID NO: 24126 - RNA, 23 nt, Synthetic Construct
  source 1..23: mol_type = other RNA
tcctgtaccgagctgccccgagt

SEQ ID NO: 24127 - RNA, 23 nt, Synthetic Construct
  source 1..23: mol_type = other RNA
tcctgcactgagctgccccgaga

SEQ ID NO: 24128 - RNA, 23 nt, Synthetic Construct
  source 1..23: mol_type = other RNA
tcctgcactgagctgccccgaga

SEQ ID NO: 24129 - RNA, 16 nt, Synthetic Construct
  source 1..16: mol_type = other RNA
agtcaggatgttggct

SEQ ID NO: 24130 - RNA, 16 nt, Synthetic Construct
  source 1..16: mol_type = other RNA
agtcaggatgttggct

SEQ ID NO: 24131 - RNA, 20 nt, Synthetic Construct
  source 1..20: mol_type = other RNA
caatggccgggacagagggc

SEQ ID NO: 24132 - RNA, 20 nt, Synthetic Construct
  source 1..20: mol_type = other RNA
caatggccgggacagagggc

SEQ ID NO: 24133 - RNA, 21 nt, Synthetic Construct
  source 1..21: mol_type = other RNA
cggtcccaagggtatggctgt

SEQ ID NO: 24134 - RNA, 42 nt, Synthetic Construct; identical to SEQ ID NO: 733
  source 1..42: mol_type = other RNA

SEQ ID NO: 24135 - RNA, 20 nt, Synthetic Construct
  source 1..20: mol_type = other RNA
gtgccgaagctgtgggattg

SEQ ID NO: 24136 - RNA, 20 nt, Synthetic Construct
  source 1..20: mol_type = other RNA
gtgccgaagctgtgggattg

SEQ ID NO: 24137 - RNA, 17 nt, Synthetic Construct
  source 1..17: mol_type = other RNA
tggccgtcgtcagctcg

SEQ ID NO: 24138 - RNA, 29 nt, Synthetic Construct
  source 1..29: mol_type = other RNA
cccgtgtgaaagtaggtcatcgtcaggct

SEQ ID NO: 24139 - RNA, 21 nt, Synthetic Construct
  source 1..21: mol_type = other RNA
tcacagtgaaccggtctcttt

SEQ ID NO: 24140 - RNA, 18 nt, Synthetic Construct
  source 1..18: mol_type = other RNA
cgtgttcggaagattttc

SEQ ID NO: 24141 - RNA, 18 nt, Synthetic Construct
  source 1..18: mol_type = other RNA
cgtgttcggaagattttc

SEQ ID NO: 24142 - RNA, 19 nt, Synthetic Construct
  source 1..19: mol_type = other RNA
ccagtaaacggcggccgta

SEQ ID NO: 24143 - RNA, 16 nt, Synthetic Construct
  source 1..16: mol_type = other RNA
gtctacgaccatacca

SEQ ID NO: 24144 - RNA, 23 nt, Synthetic Construct
  source 1..23: mol_type = other RNA
tgaggggcggagagcgagacttt

SEQ ID NO: 24145 - RNA, 23 nt, Synthetic Construct
  source 1..23: mol_type = other RNA
tgaggggcggagagcgagacttt

SEQ ID NO: 24146 - RNA, 26 nt, Synthetic Construct
  source 1..26: mol_type = other RNA
gcataagcgtgcttgactgcgagact

SEQ ID NO: 24147 - RNA, 26 nt, Synthetic Construct
  source 1..26: mol_type = other RNA
gcataagcgtgcttgactgcgagact

SEQ ID NO: 24148 - RNA, 37 nt, Synthetic Construct; identical to SEQ ID NO: 4277
  source 1..37: mol_type = other RNA

SEQ ID NO: 24149 - RNA, 37 nt, Synthetic Construct; identical to SEQ ID NO: 4277
  source 1..37: mol_type = other RNA

SEQ ID NO: 24150 - RNA, 33 nt, Synthetic Construct; identical to SEQ ID NO: 2266
  source 1..33: mol_type = other RNA

SEQ ID NO: 24151 - RNA, 17 nt, Synthetic Construct
  source 1..17: mol_type = other RNA
tggccgtcgtcagctcg

SEQ ID NO: 24152 - RNA, 17 nt, Synthetic Construct
  source 1..17: mol_type = other RNA
tggccgtcgtcagctcg

SEQ ID NO: 24153 - RNA, 21 nt, Synthetic Construct
  source 1..21: mol_type = other RNA
cgtaccgtgagtaataatgca

SEQ ID NO: 24154 - RNA, 21 nt, Synthetic Construct
  source 1..21: mol_type = other RNA
ctaatcccagaaacccggtcg

SEQ ID NO: 24155 - RNA, 33 nt, Synthetic Construct; identical to SEQ ID NO: 1982
  source 1..33: mol_type = other RNA

SEQ ID NO: 24156 - RNA, 33 nt, Synthetic Construct; identical to SEQ ID NO: 1982
  source 1..33: mol_type = other RNA

SEQ ID NO: 24157 - RNA, 25 nt, Synthetic Construct
  source 1..25: mol_type = other RNA
gtgaggatatgagatcgagacgaca

SEQ ID NO: 24158 - RNA, 25 nt, Synthetic Construct
  source 1..25: mol_type = other RNA
gtgaggatatgagatcgagacgaca

SEQ ID NO: 24159 - RNA, 24 nt, Synthetic Construct
  source 1..24: mol_type = other RNA
gtcagtttgtcaaataccccaatt

SEQ ID NO: 24160 - RNA, 24 nt, Synthetic Construct
  source 1..24: mol_type = other RNA
gtcagtttgtcaaataccccaatt

SEQ ID NO: 24161 - RNA, 20 nt, Synthetic Construct
  source 1..20: mol_type = other RNA
ctgacctatgaattgacagc

SEQ ID NO: 24162 - RNA, 20 nt, Synthetic Construct
  source 1..20: mol_type = other RNA
ctgacctatgaattgacagc

SEQ ID NO: 24163 - RNA, 22 nt, Synthetic Construct
  source 1..22: mol_type = other RNA
tgtggtagtaggttgtgtggtt

SEQ ID NO: 24164 - RNA, 22 nt, Synthetic Construct
  source 1..22: mol_type = other RNA
tgtggtagtaggttgtgtggtt

SEQ ID NO: 24165 - RNA, 34 nt, Synthetic Construct; identical to SEQ ID NO: 2367
  source 1..34: mol_type = other RNA

SEQ ID NO: 24166 - RNA, 23 nt, Synthetic Construct
  source 1..23: mol_type = other RNA
cgcgacctcagatcagacgtggc

SEQ ID NO: 24167 - RNA, 23 nt, Synthetic Construct
  source 1..23: mol_type = other RNA
cgcgacctcagatcagacgtggc

SEQ ID NO: 24168 - RNA, 22 nt, Synthetic Construct
  source 1..22: mol_type = other RNA
tggaatgtaaggaagtatgtat

SEQ ID NO: 24169 - RNA, 22 nt, Synthetic Construct
  source 1..22: mol_type = other RNA
tggaatgtaaggaagtatgtat

SEQ ID NO: 24170 - RNA, 20 nt, Synthetic Construct
  source 1..20: mol_type = other RNA
tcctgtctgaatatgggggg

SEQ ID NO: 24171 - RNA, 20 nt, Synthetic Construct
  source 1..20: mol_type = other RNA
tcctgtctgaatatgggggg

SEQ ID NO: 24172 - RNA, 15 nt, Synthetic Construct
  source 1..15: mol_type = other RNA
gtagctcgttgggct

SEQ ID NO: 24173 - RNA, 15 nt, Synthetic Construct
  source 1..15: mol_type = other RNA
gtagctcgttgggct

SEQ ID NO: 24174 - RNA, 15 nt, Synthetic Construct
  source 1..15: mol_type = other RNA
ttccgaaagtagtgg

SEQ ID NO: 24175 - RNA, 16 nt, Synthetic Construct
  source 1..16: mol_type = other RNA
gtccacggccatacca

SEQ ID NO: 24176 - RNA, 16 nt, Synthetic Construct
  source 1..16: mol_type = other RNA
gtccacggccatacca

SEQ ID NO: 24177 - RNA, 33 nt, Synthetic Construct; identical to SEQ ID NO: 2386
  source 1..33: mol_type = other RNA

SEQ ID NO: 24178 - RNA, 20 nt, Synthetic Construct
  source 1..20: mol_type = other RNA
ggtcccaagggtatggctgt

SEQ ID NO: 24179 - RNA, 15 nt, Synthetic Construct
  source 1..15: mol_type = other RNA
gtcaggatgttggct

SEQ ID NO: 24180 - RNA, 15 nt, Synthetic Construct
  source 1..15: mol_type = other RNA
gtcaggatgttggct

SEQ ID NO: 24181 - RNA, 34 nt, Synthetic Construct; identical to SEQ ID NO: 2298
  source 1..34: mol_type = other RNA

SEQ ID NO: 24182 - RNA, 21 nt, Synthetic Construct
  source 1..21: mol_type = other RNA
tgaggaagtaggttgtgtggt

SEQ ID NO: 24183 - RNA, 21 nt, Synthetic Construct
  source 1..21: mol_type = other RNA
tgaggaagtaggttgtgtggt

SEQ ID NO: 24184 - RNA, 37 nt, Synthetic Construct; identical to SEQ ID NO: 2447
  source 1..37: mol_type = other RNA

SEQ ID NO: 24185 - RNA, 22 nt, Synthetic Construct
  source 1..22: mol_type = other RNA
ctttgttcgattccgttgagta

SEQ ID NO: 24186 - RNA, 20 nt, Synthetic Construct
  source 1..20: mol_type = other RNA
cccataaagtagaaagcact

SEQ ID NO: 24187 - RNA, 20 nt, Synthetic Construct
  source 1..20: mol_type = other RNA
cccataaagtagaaagcact

SEQ ID NO: 24188 - RNA, 22 nt, Synthetic Construct
  source 1..22: mol_type = other RNA
tgaggtagtaggttgtatagtg

SEQ ID NO: 24189 - RNA, 20 nt, Synthetic Construct
  source 1..20: mol_type = other RNA
tagaattctcgcctgccacg

SEQ ID NO: 24190 - RNA, 20 nt, Synthetic Construct
  source 1..20: mol_type = other RNA
tagaattctcgcctgccacg

SEQ ID NO: 24191 - RNA, 32 nt, Synthetic Construct; identical to SEQ ID NO: 4710
  source 1..32: mol_type = other RNA

SEQ ID NO: 24192 - RNA, 32 nt, Synthetic Construct; identical to SEQ ID NO: 4710
  source 1..32: mol_type = other RNA

SEQ ID NO: 24193 - RNA, 22 nt, Synthetic Construct
  source 1..22: mol_type = other RNA
tgaggtagtgggttgtgtggtt

SEQ ID NO: 24194 - RNA, 22 nt, Synthetic Construct
  source 1..22: mol_type = other RNA
tgaggtagtgggttgtgtggtt

SEQ ID NO: 24195 - RNA, 23 nt, Synthetic Construct
  source 1..23: mol_type = other RNA
tggtaatacgacgtacttagcgt

SEQ ID NO: 24196 - RNA, 23 nt, Synthetic Construct
  source 1..23: mol_type = other RNA
tggtaatacgacgtacttagcgt

SEQ ID NO: 24197 - RNA, 21 nt, Synthetic Construct
  source 1..21: mol_type = other RNA
taacactgtctggtaaagatg

SEQ ID NO: 24198 - RNA, 21 nt, Synthetic Construct
  source 1..21: mol_type = other RNA
taacactgtctggtaaagatg

SEQ ID NO: 24199 - RNA, 23 nt, Synthetic Construct
  source 1..23: mol_type = other RNA
tctttggttatctagctgtatgt

SEQ ID NO: 24200 - RNA, 23 nt, Synthetic Construct
  source 1..23: mol_type = other RNA
tctttggttatctagctgtatgt

SEQ ID NO: 24201 - RNA, 32 nt, Synthetic Construct; identical to SEQ ID NO: 2435
  source 1..32: mol_type = other RNA

SEQ ID NO: 24202 - RNA, 39 nt, Synthetic Construct; identical to SEQ ID NO: 4400
  source 1..39: mol_type = other RNA

SEQ ID NO: 24203 - RNA, 17 nt, Synthetic Construct
  source 1..17: mol_type = other RNA
atgcaagtcgaacggta

SEQ ID NO: 24204 - RNA, 17 nt, Synthetic Construct
  source 1..17: mol_type = other RNA
atgcaagtcgaacggta

SEQ ID NO: 24205 - RNA, 19 nt, Synthetic Construct
  source 1..19: mol_type = other RNA
gctattgacgaccgtaccg

SEQ ID NO: 24206 - RNA, 19 nt, Synthetic Construct
  source 1..19: mol_type = other RNA
gctattgacgaccgtaccg

SEQ ID NO: 24207 - RNA, 21 nt, Synthetic Construct
  source 1..21: mol_type = other RNA
aacccgtagatccgaacttgt

SEQ ID NO: 24208 - RNA, 22 nt, Synthetic Construct
  source 1..22: mol_type = other RNA
cccataaagtagaaagcactac

SEQ ID NO: 24209 - RNA, 22 nt, Synthetic Construct
  source 1..22: mol_type = other RNA
cccataaagtagaaagcactac

SEQ ID NO: 24210 - RNA, 17 nt, Synthetic Construct
  source 1..17: mol_type = other RNA
gtgttcggaagattttc

SEQ ID NO: 24211 - RNA, 17 nt, Synthetic Construct
  source 1..17: mol_type = other RNA
gtgttcggaagattttc

SEQ ID NO: 24212 - RNA, 23 nt, Synthetic Construct
  source 1..23: mol_type = other RNA
tggtaatacgacgcacttagtgt

SEQ ID NO: 24213 - RNA, 23 nt, Synthetic Construct
  source 1..23: mol_type = other RNA
tggtaatacgacgcacttagtgt

SEQ ID NO: 24214 - RNA, 16 nt, Synthetic Construct
  source 1..16: mol_type = other RNA
tggccgtcgtcagctc

SEQ ID NO: 24215 - RNA, 16 nt, Synthetic Construct
  source 1..16: mol_type = other RNA
tggccgtcgtcagctc

SEQ ID NO: 24216 - RNA, 22 nt, Synthetic Construct
  source 1..22: mol_type = other RNA
cggaatcgctagtaatcgcgga

SEQ ID NO: 24217 - RNA, 23 nt, Synthetic Construct
  source 1..23: mol_type = other RNA
gggtaatacgacgtacttagtgt

SEQ ID NO: 24218 - RNA, 23 nt, Synthetic Construct
  source 1..23: mol_type = other RNA
gggtaatacgacgtacttagtgt

SEQ ID NO: 24219 - RNA, 24 nt, Synthetic Construct
  source 1..24: mol_type = other RNA
ttccccttggggttgtaggaccac

SEQ ID NO: 24220 - RNA, 24 nt, Synthetic Construct
  source 1..24: mol_type = other RNA
ttccccttggggttgtaggaccac

SEQ ID NO: 24221 - RNA, 17 nt, Synthetic Construct
  source 1..17: mol_type = other RNA
ctaatgagactgccggt

SEQ ID NO: 24222 - RNA, 17 nt, Synthetic Construct
  source 1..17: mol_type = other RNA
ctaatgagactgccggt

SEQ ID NO: 24223 - RNA, 21 nt, Synthetic Construct
  source 1..21: mol_type = other RNA
tcctgtactgagctgcctcga

SEQ ID NO: 24224 - RNA, 21 nt, Synthetic Construct
  source 1..21: mol_type = other RNA
tcctgtactgagctgcctcga

SEQ ID NO: 24225 - RNA, 21 nt, Synthetic Construct
  source 1..21: mol_type = other RNA
agccatcatttaaagaaagcg

SEQ ID NO: 24226 - RNA, 21 nt, Synthetic Construct
  source 1..21: mol_type = other RNA
agccatcatttaaagaaagcg

SEQ ID NO: 24227 - RNA, 16 nt, Synthetic Construct
  source 1..16: mol_type = other RNA
gtctacggccgtacca

SEQ ID NO: 24228 - RNA, 16 nt, Synthetic Construct
  source 1..16: mol_type = other RNA
gtctacggccgtacca

SEQ ID NO: 24229 - RNA, 23 nt, Synthetic Construct
  source 1..23: mol_type = other RNA
tggtaatacgacatacttagtgt

SEQ ID NO: 24230 - RNA, 22 nt, Synthetic Construct
  source 1..22: mol_type = other RNA
tcagcgccgatgatagtgcgga

SEQ ID NO: 24231 - RNA, 22 nt, Synthetic Construct
  source 1..22: mol_type = other RNA
tcagcgccgatgatagtgcgga

SEQ ID NO: 24232 - RNA, 23 nt, Synthetic Construct
  source 1..23: mol_type = other RNA
tcctgtactgggctgccccgagt

SEQ ID NO: 24233 - RNA, 23 nt, Synthetic Construct
  source 1..23: mol_type = other RNA
tcctgtactgggctgccccgagt

SEQ ID NO: 24234 - RNA, 15 nt, Synthetic Construct
  source 1..15: mol_type = other RNA
gtctcgccgacggca

SEQ ID NO: 24235 - RNA, 15 nt, Synthetic Construct
  source 1..15: mol_type = other RNA
gtctcgccgacggca

SEQ ID NO: 24236 - RNA, 37 nt, Synthetic Construct; identical to SEQ ID NO: 2447
  source 1..37: mol_type = other RNA

SEQ ID NO: 24237 - RNA, 17 nt, Synthetic Construct
  source 1..17: mol_type = other RNA
ctaatgagactgccggt

SEQ ID NO: 24238 - RNA, 17 nt, Synthetic Construct
  source 1..17: mol_type = other RNA
ctaatgagactgccggt

SEQ ID NO: 24239 - RNA, 22 nt, Synthetic Construct
  source 1..22: mol_type = other RNA
taaggtagtaggttgtgtggtt

SEQ ID NO: 24240 - RNA, 22 nt, Synthetic Construct
  source 1..22: mol_type = other RNA
taaggtagtaggttgtgtggtt

SEQ ID NO: 24241 - RNA, 18 nt, Synthetic Construct
  source 1..18: mol_type = other RNA
catgcaagtcgaacggta

SEQ ID NO: 24242 - RNA, 18 nt, Synthetic Construct
  source 1..18: mol_type = other RNA
catgcaagtcgaacggta

SEQ ID NO: 24243 - RNA, 41 nt, Synthetic Construct; identical to SEQ ID NO: 2441
  source 1..41: mol_type = other RNA

SEQ ID NO: 24244 - RNA, 27 nt, Synthetic Construct
  source 1..27: mol_type = other RNA
ccgtgtgaaagtaggtcatcgtcaggc

SEQ ID NO: 24245 - RNA, 26 nt, Synthetic Construct
  source 1..26: mol_type = other RNA
gaggaacactagtggcgtaggcgaga

SEQ ID NO: 24246 - RNA, 26 nt, Synthetic Construct
  source 1..26: mol_type = other RNA
gaggaacactagtggcgtaggcgaga

SEQ ID NO: 24247 - RNA, 22 nt, Synthetic Construct
  source 1..22: mol_type = other RNA
tgaggtagtaggttgtgtggct

SEQ ID NO: 24248 - RNA, 22 nt, Synthetic Construct
  source 1..22: mol_type = other RNA
tgaggtagtaggttgtgtggct

SEQ ID NO: 24249 - RNA, 20 nt, Synthetic Construct
  source 1..20: mol_type = other RNA
actgatcgagtcgtcctgcg

SEQ ID NO: 24250 - RNA, 20 nt, Synthetic Construct
  source 1..20: mol_type = other RNA
actgatcgagtcgtcctgcg

SEQ ID NO: 24251 - RNA, 15 nt, Synthetic Construct
  source 1..15: mol_type = other RNA
gcaagtcgagcggta

SEQ ID NO: 24252 - RNA, 15 nt, Synthetic Construct
  source 1..15: mol_type = other RNA
gcaagtcgagcggta

SEQ ID NO: 24253 - RNA, 36 nt, Synthetic Construct; identical to SEQ ID NO: 10982
  source 1..36: mol_type = other RNA

SEQ ID NO: 24254 - RNA, 36 nt, Synthetic Construct; identical to SEQ ID NO: 10982
  source 1..36: mol_type = other RNA

SEQ ID NO: 24255 - RNA, 23 nt, Synthetic Construct
  source 1..23: mol_type = other RNA
tcctgtactgagccgccccgaga

SEQ ID NO: 24256 - RNA, 23 nt, Synthetic Construct
  source 1..23: mol_type = other RNA
tcctgtactgagccgccccgaga

SEQ ID NO: 24257 - RNA, 20 nt, Synthetic Construct
  source 1..20: mol_type = other RNA
tgaggtaggaggttgtatag

SEQ ID NO: 24258 - RNA, 21 nt, Synthetic Construct
  source 1..21: mol_type = other RNA
tgaggtagtagcttgtgctgt

SEQ ID NO: 24259 - RNA, 18 nt, Synthetic Construct
  source 1..18: mol_type = other RNA
cgccgatgatagtgcgga

SEQ ID NO: 24260 - RNA, 16 nt, Synthetic Construct
  source 1..16: mol_type = other RNA
accgcttttgtcaggg

SEQ ID NO: 24261 - RNA, 16 nt, Synthetic Construct
  source 1..16: mol_type = other RNA
accgcttttgtcaggg

SEQ ID NO: 24262 - RNA, 31 nt, Synthetic Construct; identical to SEQ ID NO: 5506
  source 1..31: mol_type = other RNA

SEQ ID NO: 24263 - RNA, 31 nt, Synthetic Construct; identical to SEQ ID NO: 5506
  source 1..31: mol_type = other RNA

SEQ ID NO: 24264 - RNA, 21 nt, Synthetic Construct
  source 1..21: mol_type = other RNA
gtagcgaaattccttgtcggg

SEQ ID NO: 24265 - RNA, 21 nt, Synthetic Construct
  source 1..21: mol_type = other RNA
gtagcgaaattccttgtcggg

SEQ ID NO: 24266 - RNA, 23 nt, Synthetic Construct
  source 1..23: mol_type = other RNA
tcccgtactgagctgccccgagt

SEQ ID NO: 24267 - RNA, 16 nt, Synthetic Construct
  source 1..16: mol_type = other RNA
ctctacggccatacca

SEQ ID NO: 24268 - RNA, 17 nt, Synthetic Construct
  source 1..17: mol_type = other RNA
tgccagcagccgcggta

SEQ ID NO: 24269 - RNA, 17 nt, Synthetic Construct
  source 1..17: mol_type = other RNA
tgccagcagccgcggta

SEQ ID NO: 24270 - RNA, 23 nt, Synthetic Construct
  source 1..23: mol_type = other RNA
tggtaatgcgacgtacttagtgt

SEQ ID NO: 24271 - RNA, 23 nt, Synthetic Construct
  source 1..23: mol_type = other RNA
tggtaatgcgacgtacttagtgt

SEQ ID NO: 24272 - RNA, 18 nt, Synthetic Construct
  source 1..18: mol_type = other RNA
accaaggggtcgtgggtt

SEQ ID NO: 24273 - RNA, 34 nt, Synthetic Construct; identical to SEQ ID NO: 2186
  source 1..34: mol_type = other RNA

SEQ ID NO: 24274 - RNA, 18 nt, Synthetic Construct
  source 1..18: mol_type = other RNA
ggccgtcgtcagctcgtg

SEQ ID NO: 24275 - RNA, 18 nt, Synthetic Construct
  source 1..18: mol_type = other RNA
ggccgtcgtcagctcgtg

SEQ ID NO: 24276 - RNA, 25 nt, Synthetic Construct
  source 1..25: mol_type = other RNA
ttggggatatgagatcgagacgaca

SEQ ID NO: 24277 - RNA, 25 nt, Synthetic Construct
  source 1..25: mol_type = other RNA
ttggggatatgagatcgagacgaca

SEQ ID NO: 24278 - RNA, 17 nt, Synthetic Construct
  source 1..17: mol_type = other RNA
taggtcatcgtcaggct

SEQ ID NO: 24279 - RNA, 17 nt, Synthetic Construct
  source 1..17: mol_type = other RNA
taggtcatcgtcaggct

SEQ ID NO: 24280 - RNA, 22 nt, Synthetic Construct
  source 1..22: mol_type = other RNA
tcctgtactgagctgctccgag

SEQ ID NO: 24281 - RNA, 22 nt, Synthetic Construct
  source 1..22: mol_type = other RNA
tcctgtactgagctgctccgag

SEQ ID NO: 24282 - RNA, 23 nt, Synthetic Construct
  source 1..23: mol_type = other RNA
tggtaatacgacgtacttagtgc

SEQ ID NO: 24283 - RNA, 21 nt, Synthetic Construct
  source 1..21: mol_type = other RNA
tggagtgcgacaatggtgttt

SEQ ID NO: 24284 - RNA, 21 nt, Synthetic Construct
  source 1..21: mol_type = other RNA
tggagtgcgacaatggtgttt

SEQ ID NO: 24285 - RNA, 22 nt, Synthetic Construct
  source 1..22: mol_type = other RNA
tggaatgtaaagaagtatgtgt

SEQ ID NO: 24286 - RNA, 22 nt, Synthetic Construct
  source 1..22: mol_type = other RNA
tggaatgtaaagaagtatgtgt

SEQ ID NO: 24287 - RNA, 21 nt, Synthetic Construct
  source 1..21: mol_type = other RNA
caaagtgctgttcgtgcaggt

SEQ ID NO: 24288 - RNA, 21 nt, Synthetic Construct
  source 1..21: mol_type = other RNA
caaagtgctgttcgtgcaggt

SEQ ID NO: 24289 - RNA, 23 nt, Synthetic Construct
  source 1..23: mol_type = other RNA
gtctttgttcgattccgttgagt

SEQ ID NO: 24290 - RNA, 37 nt, Synthetic Construct; identical to SEQ ID NO: 2482
  source 1..37: mol_type = other RNA

SEQ ID NO: 24291 - RNA, 37 nt, Synthetic Construct; identical to SEQ ID NO: 2482
  source 1..37: mol_type = other RNA

SEQ ID NO: 24292 - RNA, 22 nt, Synthetic Construct
  source 1..22: mol_type = other RNA
tgttggttcaagcgtgtagtcg

SEQ ID NO: 24293 - RNA, 31 nt, Synthetic Construct; identical to SEQ ID NO: 2295
  source 1..31: mol_type = other RNA

SEQ ID NO: 24294 - RNA, 16 nt, Synthetic Construct
  source 1..16: mol_type = other RNA
gtcaacggccatacca

SEQ ID NO: 24295 - RNA, 18 nt, Synthetic Construct
  source 1..18: mol_type = other RNA
ctaatgagactgccggtg

SEQ ID NO: 24296 - RNA, 18 nt, Synthetic Construct
  source 1..18: mol_type = other RNA
ctaatgagactgccggtg

SEQ ID NO: 24297 - RNA, 23 nt, Synthetic Construct
  source 1..23: mol_type = other RNA
gactatagaactttccccctcat

SEQ ID NO: 24298 - RNA, 23 nt, Synthetic Construct
  source 1..23: mol_type = other RNA
gactatagaactttccccctcat

SEQ ID NO: 24299 - RNA, 20 nt, Synthetic Construct
  source 1..20: mol_type = other RNA
tcagtagctcgaggaaaaga

SEQ ID NO: 24300 - RNA, 20 nt, Synthetic Construct
  source 1..20: mol_type = other RNA
tcagtagctcgaggaaaaga

SEQ ID NO: 24301 - RNA, 16 nt, Synthetic Construct
  source 1..16: mol_type = other RNA
gcgtagatatgcggag

SEQ ID NO: 24302 - RNA, 16 nt, Synthetic Construct
  source 1..16: mol_type = other RNA
cgctagtaatcgcgga

SEQ ID NO: 24303 - RNA, 23 nt, Synthetic Construct
  source 1..23: mol_type = other RNA
tggtaatacgtcgtacttagtgt

SEQ ID NO: 24304 - RNA, 30 nt, Synthetic Construct; identical to SEQ ID NO: 2407
  source 1..30: mol_type = other RNA

SEQ ID NO: 24305 - RNA, 22 nt, Synthetic Construct
  source 1..22: mol_type = other RNA
tacagtagtctgcacattggtt

SEQ ID NO: 24306 - RNA, 37 nt, Synthetic Construct; identical to SEQ ID NO: 5125
  source 1..37: mol_type = other RNA

SEQ ID NO: 24307 - RNA, 37 nt, Synthetic Construct; identical to SEQ ID NO: 5125
  source 1..37: mol_type = other RNA

SEQ ID NO: 24308 - RNA, 22 nt, Synthetic Construct
  source 1..22: mol_type = other RNA
taacactgtctggtaacgatgt

SEQ ID NO: 24309 - RNA, 22 nt, Synthetic Construct
  source 1..22: mol_type = other RNA
taacactgtctggtaacgatgt

SEQ ID NO: 24310 - RNA, 16 nt, Synthetic Construct
  source 1..16: mol_type = other RNA
tgcgtagatatgcgga

SEQ ID NO: 24311 - RNA, 22 nt, Synthetic Construct
  source 1..22: mol_type = other RNA
tgaggtagtaggttgtgcggtt

SEQ ID NO: 24312 - RNA, 22 nt, Synthetic Construct
  source 1..22: mol_type = other RNA
tgaggtagtaggttgtgcggtt

SEQ ID NO: 24313 - RNA, 16 nt, Synthetic Construct
  source 1..16: mol_type = other RNA
gtccggatcgtagtct

SEQ ID NO: 24314 - RNA, 23 nt, Synthetic Construct
  source 1..23: mol_type = other RNA
tggtaatacgacgcacttagtgt

SEQ ID NO: 24315 - RNA, 23 nt, Synthetic Construct
  source 1..23: mol_type = other RNA
tggtaatacgacgcacttagtgt

SEQ ID NO: 24316 - RNA, 20 nt, Synthetic Construct
  source 1..20: mol_type = other RNA
tgaggtagtgggttgtatag

SEQ ID NO: 24317 - RNA, 20 nt, Synthetic Construct
  source 1..20: mol_type = other RNA
tgaggtagtgggttgtatag

SEQ ID NO: 24318 - RNA, 24 nt, Synthetic Construct
  source 1..24: mol_type = other RNA
tgtaaacgtccccgactggaagct

SEQ ID NO: 24319 - RNA, 19 nt, Synthetic Construct
  source 1..19: mol_type = other RNA
gggtgcaagcgttaatcgg

SEQ ID NO: 24320 - RNA, 19 nt, Synthetic Construct
  source 1..19: mol_type = other RNA
gggtgcaagcgttaatcgg

SEQ ID NO: 24321 - RNA, 16 nt, Synthetic Construct
  source 1..16: mol_type = other RNA
agttgaccgcctgggg

SEQ ID NO: 24322 - RNA, 16 nt, Synthetic Construct
  source 1..16: mol_type = other RNA
agttgaccgcctgggg

SEQ ID NO: 24323 - RNA, 23 nt, Synthetic Construct
  source 1..23: mol_type = other RNA
agcagcattgtacagggctatgt

SEQ ID NO: 24324 - RNA, 19 nt, Synthetic Construct
  source 1..19: mol_type = other RNA
aacagtcaggatgttggct

SEQ ID NO: 24325 - RNA, 19 nt, Synthetic Construct
  source 1..19: mol_type = other RNA
aacagtcaggatgttggct

SEQ ID NO: 24326 - RNA, 19 nt, Synthetic Construct
  source 1..19: mol_type = other RNA
cctgtctgaatatgggggg

SEQ ID NO: 24327 - RNA, 23 nt, Synthetic Construct
  source 1..23: mol_type = other RNA
tggtagtacgacgtacttagtgt

SEQ ID NO: 24328 - RNA, 23 nt, Synthetic Construct
  source 1..23: mol_type = other RNA
tggtagtacgacgtacttagtgt

SEQ ID NO: 24329 - RNA, 15 nt, Synthetic Construct
  source 1..15: mol_type = other RNA
acggtcctaaggtag

SEQ ID NO: 24330 - RNA, 21 nt, Synthetic Construct
  source 1..21: mol_type = other RNA
gtgggcgtttgaagtgaagtg

SEQ ID NO: 24331 - RNA, 18 nt, Synthetic Construct
  source 1..18: mol_type = other RNA
gcgaaattccttgtcggg

SEQ ID NO: 24332 - RNA, 33 nt, Synthetic Construct; identical to SEQ ID NO: 2638
  source 1..33: mol_type = other RNA

SEQ ID NO: 24333 - RNA, 33 nt, Synthetic Construct; identical to SEQ ID NO: 2638
  source 1..33: mol_type = other RNA

SEQ ID NO: 24334 - RNA, 34 nt, Synthetic Construct; identical to SEQ ID NO: 2298
  source 1..34: mol_type = other RNA

SEQ ID NO: 24335 - RNA, 17 nt, Synthetic Construct
  source 1..17: mol_type = other RNA
gcggctgtagctcagtt

SEQ ID NO: 24336 - RNA, 17 nt, Synthetic Construct
  source 1..17: mol_type = other RNA
gcggctgtagctcagtt

SEQ ID NO: 24337 - RNA, 20 nt, Synthetic Construct
  source 1..20: mol_type = other RNA
tgaggtagtaggctgtatag

SEQ ID NO: 24338 - RNA, 20 nt, Synthetic Construct
  source 1..20: mol_type = other RNA
tgaggtagtaggctgtatag

SEQ ID NO: 24339 - RNA, 22 nt, Synthetic Construct
  source 1..22: mol_type = other RNA
ggaggagttcgaaggtacgcta

SEQ ID NO: 24340 - RNA, 19 nt, Synthetic Construct
  source 1..19: mol_type = other RNA
tctaatgagactgccggtg

SEQ ID NO: 24341 - RNA, 19 nt, Synthetic Construct
  source 1..19: mol_type = other RNA
tctaatgagactgccggtg

SEQ ID NO: 24342 - RNA, 36 nt, Synthetic Construct; identical to SEQ ID NO: 2520
  source 1..36: mol_type = other RNA

SEQ ID NO: 24343 - RNA, 23 nt, Synthetic Construct
  source 1..23: mol_type = other RNA
tgaggggcggagagcgagacttt

SEQ ID NO: 24344 - RNA, 23 nt, Synthetic Construct
  source 1..23: mol_type = other RNA
tgaggggcggagagcgagacttt

SEQ ID NO: 24345 - RNA, 19 nt, Synthetic Construct
  source 1..19: mol_type = other RNA
cccttgtcattagttgcta

SEQ ID NO: 24346 - RNA, 17 nt, Synthetic Construct
  source 1..17: mol_type = other RNA
accaaggggtcgtgggt

SEQ ID NO: 24347 - RNA, 17 nt, Synthetic Construct
  source 1..17: mol_type = other RNA
accaaggggtcgtgggt

SEQ ID NO: 24348 - RNA, 21 nt, Synthetic Construct
  source 1..21: mol_type = other RNA
tggagtgtgacgatggtgttt

SEQ ID NO: 24349 - RNA, 21 nt, Synthetic Construct
  source 1..21: mol_type = other RNA
tggagtgtgacgatggtgttt

SEQ ID NO: 24350 - RNA, 22 nt, Synthetic Construct
  source 1..22: mol_type = other RNA
gcgttgcaaccagtgccggggg

SEQ ID NO: 24351 - RNA, 20 nt, Synthetic Construct
  source 1..20: mol_type = other RNA
ccttggggttgtaggaccac

SEQ ID NO: 24352 - RNA, 20 nt, Synthetic Construct
  source 1..20: mol_type = other RNA
ccttggggttgtaggaccac

SEQ ID NO: 24353 - RNA, 21 nt, Synthetic Construct
  source 1..21: mol_type = other RNA
tgaggggcagagagcgaggct

SEQ ID NO: 24354 - RNA, 21 nt, Synthetic Construct
  source 1..21: mol_type = other RNA
tgaggggcagagagcgaggct

SEQ ID NO: 24355 - RNA, 23 nt, Synthetic Construct
  source 1..23: mol_type = other RNA
tggtaatacgatgtacttagtgt

SEQ ID NO: 24356 - RNA, 23 nt, Synthetic Construct
  source 1..23: mol_type = other RNA
tggtaatacgatgtacttagtgt

SEQ ID NO: 24357 - RNA, 20 nt, Synthetic Construct
  source 1..20: mol_type = other RNA
ccttggggttgtaggaccac

SEQ ID NO: 24358 - RNA, 20 nt, Synthetic Construct
  source 1..20: mol_type = other RNA
ccttggggttgtaggaccac

SEQ ID NO: 24359 - RNA, 20 nt, Synthetic Construct
  source 1..20: mol_type = other RNA
ccgcagagtacagcttggga

SEQ ID NO: 24360 - RNA, 20 nt, Synthetic Construct
  source 1..20: mol_type = other RNA
ccgcagagtacagcttggga

SEQ ID NO: 24361 - RNA, 18 nt, Synthetic Construct
  source 1..18: mol_type = other RNA
gcgccgatgatagtgcgg

SEQ ID NO: 24362 - RNA, 21 nt, Synthetic Construct
  source 1..21: mol_type = other RNA
taaggtagtaggttgtgtggt

SEQ ID NO: 24363 - RNA, 21 nt, Synthetic Construct
  source 1..21: mol_type = other RNA
taaggtagtaggttgtgtggt

SEQ ID NO: 24364 - RNA, 28 nt, Synthetic Construct
  source 1..28: mol_type = other RNA
tgttggttcaagcgtgtagtcgtgctct

SEQ ID NO: 24365 - RNA, 22 nt, Synthetic Construct
  source 1..22: mol_type = other RNA
tcctgtactgagctgccccggg

SEQ ID NO: 24366 - RNA, 22 nt, Synthetic Construct
  source 1..22: mol_type = other RNA
tcctgtactgagctgccccggg

SEQ ID NO: 24367 - RNA, 43 nt, Synthetic Construct; identical to SEQ ID NO: 6202
  source 1..43: mol_type = other RNA

SEQ ID NO: 24368 - RNA, 43 nt, Synthetic Construct; identical to SEQ ID NO: 6202
  source 1..43: mol_type = other RNA

SEQ ID NO: 24369 - RNA, 18 nt, Synthetic Construct
  source 1..18: mol_type = other RNA
cctgaagaataagcaccg

SEQ ID NO: 24370 - RNA, 18 nt, Synthetic Construct
  source 1..18: mol_type = other RNA
cctgaagaataagcaccg

SEQ ID NO: 24371 - RNA, 21 nt, Synthetic Construct
  source 1..21: mol_type = other RNA
tctttggttatctagctgtat

SEQ ID NO: 24372 - RNA, 21 nt, Synthetic Construct
  source 1..21: mol_type = other RNA
tctttggttatctagctgtat

SEQ ID NO: 24373 - RNA, 24 nt, Synthetic Construct
  source 1..24: mol_type = other RNA
ctcactgatcgagtcgtcctgcgc

SEQ ID NO: 24374 - RNA, 24 nt, Synthetic Construct
  source 1..24: mol_type = other RNA
ctcactgatcgagtcgtcctgcgc

SEQ ID NO: 24375 - RNA, 16 nt, Synthetic Construct
  source 1..16: mol_type = other RNA
ggccgtcgtcagctcg

SEQ ID NO: 24376 - RNA, 22 nt, Synthetic Construct
  source 1..22: mol_type = other RNA
tggaatgtgaagaagtatgtat

SEQ ID NO: 24377 - RNA, 22 nt, Synthetic Construct
  source 1..22: mol_type = other RNA
tggaatgtgaagaagtatgtat

SEQ ID NO: 24378 - RNA, 33 nt, Synthetic Construct; identical to SEQ ID NO: 2556
  source 1..33: mol_type = other RNA

SEQ ID NO: 24379 - RNA, 23 nt, Synthetic Construct
  source 1..23: mol_type = other RNA
atatcggaacgtgcccagtcgtg

SEQ ID NO: 24380 - RNA, 21 nt, Synthetic Construct
  source 1..21: mol_type = other RNA
tggagtgtgacagtggtgttt

SEQ ID NO: 24381 - RNA, 21 nt, Synthetic Construct
  source 1..21: mol_type = other RNA
tggagtgtgacagtggtgttt

SEQ ID NO: 24382 - RNA, 16 nt, Synthetic Construct
  source 1..16: mol_type = other RNA
gtctacagccatacca

SEQ ID NO: 24383 - RNA, 35 nt, Synthetic Construct; identical to SEQ ID NO: 787
  source 1..35: mol_type = other RNA

SEQ ID NO: 24384 - RNA, 35 nt, Synthetic Construct; identical to SEQ ID NO: 787
  source 1..35: mol_type = other RNA

SEQ ID NO: 24385 - RNA, 20 nt, Synthetic Construct
  source 1..20: mol_type = other RNA
acccttgtcattagttgcta

SEQ ID NO: 24386 - RNA, 20 nt, Synthetic Construct
  source 1..20: mol_type = other RNA
acccttgtcattagttgcta

SEQ ID NO: 24387 - RNA, 30 nt, Synthetic Construct; identical to SEQ ID NO: 1194
  source 1..30: mol_type = other RNA

SEQ ID NO: 24388 - RNA, 30 nt, Synthetic Construct; identical to SEQ ID NO: 1194
  source 1..30: mol_type = other RNA

SEQ ID NO: 24389 - RNA, 23 nt, Synthetic Construct
  source 1..23: mol_type = other RNA
tcccgtactgagctgccccgagt

SEQ ID NO: 24390 - RNA, 43 nt, Synthetic Construct; identical to SEQ ID NO: 6202
  source 1..43: mol_type = other RNA

SEQ ID NO: 24391 - RNA, 21 nt, Synthetic Construct
  source 1..21: mol_type = other RNA
ccctgtactgagctgccccga

SEQ ID NO: 24392 - RNA, 21 nt, Synthetic Construct
  source 1..21: mol_type = other RNA
ccctgtactgagctgccccga

SEQ ID NO: 24393 - RNA, 20 nt, Synthetic Construct
  source 1..20: mol_type = other RNA
tgaggtggtaggttgtgtgg

SEQ ID NO: 24394 - RNA, 20 nt, Synthetic Construct
  source 1..20: mol_type = other RNA
tgaggtggtaggttgtgtgg

SEQ ID NO: 24395 - RNA, 17 nt, Synthetic Construct
  source 1..17: mol_type = other RNA
aagttgaccgcctgggg

SEQ ID NO: 24396 - RNA, 25 nt, Synthetic Construct
  source 1..25: mol_type = other RNA
ttgaggatatgggatcgagacgaca

SEQ ID NO: 24397 - RNA, 25 nt, Synthetic Construct
  source 1..25: mol_type = other RNA
ttgaggatatgggatcgagacgaca

SEQ ID NO: 24398 - RNA, 27 nt, Synthetic Construct
  source 1..27: mol_type = other RNA
atagtctttgttcgattccgttgagta

SEQ ID NO: 24399 - RNA, 34 nt, Synthetic Construct; identical to SEQ ID NO: 2367
  source 1..34: mol_type = other RNA

SEQ ID NO: 24400 - RNA, 20 nt, Synthetic Construct
  source 1..20: mol_type = other RNA
gctattgacgaccgtaccgc

SEQ ID NO: 24401 - RNA, 20 nt, Synthetic Construct
  source 1..20: mol_type = other RNA
gctattgacgaccgtaccgc

SEQ ID NO: 24402 - RNA, 21 nt, Synthetic Construct
  source 1..21: mol_type = other RNA
acacatgcaagtcgaacggta

SEQ ID NO: 24403 - RNA, 21 nt, Synthetic Construct
  source 1..21: mol_type = other RNA
acacatgcaagtcgaacggta

SEQ ID NO: 24404 - RNA, 17 nt, Synthetic Construct
  source 1..17: mol_type = other RNA
ccgtgtgaaagtaggtc

SEQ ID NO: 24405 - RNA, 17 nt, Synthetic Construct
  source 1..17: mol_type = other RNA
ccgtgtgaaagtaggtc

SEQ ID NO: 24406 - RNA, 22 nt, Synthetic Construct
  source 1..22: mol_type = other RNA
taaggtagtaggttgtgtggtt

SEQ ID NO: 24407 - RNA, 22 nt, Synthetic Construct
  source 1..22: mol_type = other RNA
taaggtagtaggttgtgtggtt

SEQ ID NO: 24408 - RNA, 16 nt, Synthetic Construct
  source 1..16: mol_type = other RNA
cccaaaggtcgtcggt

SEQ ID NO: 24409 - RNA, 16 nt, Synthetic Construct
  source 1..16: mol_type = other RNA
cccaaaggtcgtcggt

SEQ ID NO: 24410 - RNA, 22 nt, Synthetic Construct
  source 1..22: mol_type = other RNA
gcgttgcaaccagtgccggggg

SEQ ID NO: 24411 - RNA, 22 nt, Synthetic Construct
  source 1..22: mol_type = other RNA
gcgttgcaaccagtgccggggg

SEQ ID NO: 24412 - RNA, 28 nt, Synthetic Construct
  source 1..28: mol_type = other RNA
gctttacattggactttgaacagatctg

SEQ ID NO: 24413 - RNA, 28 nt, Synthetic Construct
  source 1..28: mol_type = other RNA
gctttacattggactttgaacagatctg

SEQ ID NO: 24414 - RNA, 23 nt, Synthetic Construct
  source 1..23: mol_type = other RNA
tgaggggcagagagcgagacctt

SEQ ID NO: 24415 - RNA, 23 nt, Synthetic Construct
  source 1..23: mol_type = other RNA
tgaggggcagagagcgagacctt

SEQ ID NO: 24416 - RNA, 15 nt, Synthetic Construct
  source 1..15: mol_type = other RNA
catgccgcgtgcggg

SEQ ID NO: 24417 - RNA, 15 nt, Synthetic Construct
  source 1..15: mol_type = other RNA
cccagaaacccggtc

SEQ ID NO: 24418 - RNA, 15 nt, Synthetic Construct
  source 1..15: mol_type = other RNA
cccagaaacccggtc

SEQ ID NO: 24419 - RNA, 23 nt, Synthetic Construct
  source 1..23: mol_type = other RNA
tgaggggcagagagcgagactct

SEQ ID NO: 24420 - RNA, 32 nt, Synthetic Construct; identical to SEQ ID NO: 3541
  source 1..32: mol_type = other RNA

SEQ ID NO: 24421 - RNA, 23 nt, Synthetic Construct
  source 1..23: mol_type = other RNA
tgaggggcagggagcgagacttt

SEQ ID NO: 24422 - RNA, 23 nt, Synthetic Construct
  source 1..23: mol_type = other RNA
tgaggggcagggagcgagacttt

SEQ ID NO: 24423 - RNA, 26 nt, Synthetic Construct
  source 1..26: mol_type = other RNA
atgcgagagtaggacgttgccaggtt

SEQ ID NO: 24424 - RNA, 26 nt, Synthetic Construct
  source 1..26: mol_type = other RNA
atgcgagagtaggacgttgccaggtt

SEQ ID NO: 24425 - RNA, 21 nt, Synthetic Construct
  source 1..21: mol_type = other RNA
tgaggtggtaggttgtgtggt

SEQ ID NO: 24426 - RNA, 21 nt, Synthetic Construct
  source 1..21: mol_type = other RNA
tgaggtggtaggttgtgtggt

SEQ ID NO: 24427 - RNA, 21 nt, Synthetic Construct
  source 1..21: mol_type = other RNA
cggagtgtgacaatggtgttt

SEQ ID NO: 24428 - RNA, 21 nt, Synthetic Construct
  source 1..21: mol_type = other RNA
cggagtgtgacaatggtgttt

SEQ ID NO: 24429 - RNA, 21 nt, Synthetic Construct
  source 1..21: mol_type = other RNA
tcctgtactgagctgccccgg

SEQ ID NO: 24430 - RNA, 21 nt, Synthetic Construct
  source 1..21: mol_type = other RNA
tcctgtactgagctgccccgg

SEQ ID NO: 24431 - RNA, 21 nt, Synthetic Construct
  source 1..21: mol_type = other RNA
tgaggggcagagagcgagacc

SEQ ID NO: 24432 - RNA, 21 nt, Synthetic Construct
  source 1..21: mol_type = other RNA
tgaggggcagagagcgagacc

SEQ ID NO: 24433 - RNA, 22 nt, Synthetic Construct
  source 1..22: mol_type = other RNA
tgaggtagtagtttgtgctgtg

SEQ ID NO: 24434 - RNA, 21 nt, Synthetic Construct
  source 1..21: mol_type = other RNA
tggagagtgacaatggtgttt

SEQ ID NO: 24435 - RNA, 21 nt, Synthetic Construct
  source 1..21: mol_type = other RNA
tggagagtgacaatggtgttt

SEQ ID NO: 24436 - RNA, 16 nt, Synthetic Construct
  source 1..16: mol_type = other RNA
cccaaaggtcgtcggt

SEQ ID NO: 24437 - RNA, 16 nt, Synthetic Construct
  source 1..16: mol_type = other RNA
cccaaaggtcgtcggt

SEQ ID NO: 24438 - RNA, 23 nt, Synthetic Construct
  source 1..23: mol_type = other RNA
taaggggcagagagcgagacttt

SEQ ID NO: 24439 - RNA, 23 nt, Synthetic Construct
  source 1..23: mol_type = other RNA
taaggggcagagagcgagacttt

SEQ ID NO: 24440 - RNA, 33 nt, Synthetic Construct; identical to SEQ ID NO: 2638
  source 1..33: mol_type = other RNA

SEQ ID NO: 24441 - RNA, 24 nt, Synthetic Construct
  source 1..24: mol_type = other RNA
tatatcggaacgtgcccagtcgtg

SEQ ID NO: 24442 - RNA, 35 nt, Synthetic Construct; identical to SEQ ID NO: 2397
  source 1..35: mol_type = other RNA

SEQ ID NO: 24443 - RNA, 17 nt, Synthetic Construct
  source 1..17: mol_type = other RNA
ccagtaaacggcggccg

SEQ ID NO: 24444 - RNA, 17 nt, Synthetic Construct
  source 1..17: mol_type = other RNA
ccagtaaacggcggccg

SEQ ID NO: 24445 - RNA, 21 nt, Synthetic Construct
  source 1..21: mol_type = other RNA
tgaggggcagagagcgggact

SEQ ID NO: 24446 - RNA, 21 nt, Synthetic Construct
  source 1..21: mol_type = other RNA
tgaggggcagagagcgggact

SEQ ID NO: 24447 - RNA, 21 nt, Synthetic Construct
  source 1..21: mol_type = other RNA
cataaagtagaaagcactact

SEQ ID NO: 24448 - RNA, 21 nt, Synthetic Construct
  source 1..21: mol_type = other RNA
cataaagtagaaagcactact

SEQ ID NO: 24449 - RNA, 17 nt, Synthetic Construct
  source 1..17: mol_type = other RNA
cagagacgagtcgacca

SEQ ID NO: 24450 - RNA, 17 nt, Synthetic Construct
  source 1..17: mol_type = other RNA
cagagacgagtcgacca

SEQ ID NO: 24451 - RNA, 19 nt, Synthetic Construct
  source 1..19: mol_type = other RNA
tggccgtcgtcagctcgtg

SEQ ID NO: 24452 - RNA, 19 nt, Synthetic Construct
  source 1..19: mol_type = other RNA
tggccgtcgtcagctcgtg

SEQ ID NO: 24453 - RNA, 15 nt, Synthetic Construct
  source 1..15: mol_type = other RNA
tcgagtcgtcctgcg

SEQ ID NO: 24454 - RNA, 15 nt, Synthetic Construct
  source 1..15: mol_type = other RNA
tcgagtcgtcctgcg

SEQ ID NO: 24455 - RNA, 23 nt, Synthetic Construct
  source 1..23: mol_type = other RNA
tcctgtgctgagctgccccgagt

SEQ ID NO: 24456 - RNA, 21 nt, Synthetic Construct
  source 1..21: mol_type = other RNA
tgaggtagaaggttgtgtggt

SEQ ID NO: 24457 - RNA, 21 nt, Synthetic Construct
  source 1..21: mol_type = other RNA
tgaggtagaaggttgtgtggt

SEQ ID NO: 24458 - RNA, 21 nt, Synthetic Construct
  source 1..21: mol_type = other RNA
taacactgtctggtaaagatg

SEQ ID NO: 24459 - RNA, 21 nt, Synthetic Construct
  source 1..21: mol_type = other RNA
taacactgtctggtaaagatg

SEQ ID NO: 24460 - RNA, 21 nt, Synthetic Construct
  source 1..21: mol_type = other RNA
tccttcattccaccggagtct

SEQ ID NO: 24461 - RNA, 21 nt, Synthetic Construct
  source 1..21: mol_type = other RNA
tccttcattccaccggagtct

SEQ ID NO: 24462 - RNA, 23 nt, Synthetic Construct
  source 1..23: mol_type = other RNA
tggtaatacgacgtacttagtga

SEQ ID NO: 24463 - RNA, 23 nt, Synthetic Construct
  source 1..23: mol_type = other RNA
tggtaatacgacgtacttagtga

SEQ ID NO: 24464 - RNA, 25 nt, Synthetic Construct
  source 1..25: mol_type = other RNA
ttgaggatatgagatcgagacaaca

SEQ ID NO: 24465 - RNA, 25 nt, Synthetic Construct
  source 1..25: mol_type = other RNA
ttgaggatatgagatcgagacaaca

SEQ ID NO: 24466 - RNA, 23 nt, Synthetic Construct
  source 1..23: mol_type = other RNA
ggtagcgaaattccttgtcgggt

SEQ ID NO: 24467 - RNA, 15 nt, Synthetic Construct
  source 1..15: mol_type = other RNA
tcgagtcgtcctgcg

SEQ ID NO: 24468 - RNA, 23 nt, Synthetic Construct
  source 1..23: mol_type = other RNA
cctcgcgcgattggagcggccga

SEQ ID NO: 24469 - RNA, 23 nt, Synthetic Construct
  source 1..23: mol_type = other RNA
tctttggttatctagctgtatga

SEQ ID NO: 24470 - RNA, 23 nt, Synthetic Construct
  source 1..23: mol_type = other RNA
tctttggttatctagctgtatga

SEQ ID NO: 24471 - RNA, 26 nt, Synthetic Construct
  source 1..26: mol_type = other RNA
atttccccttggggttgtaggaccac

SEQ ID NO: 24472 - RNA, 26 nt, Synthetic Construct
  source 1..26: mol_type = other RNA
atttccccttggggttgtaggaccac

SEQ ID NO: 24473 - RNA, 23 nt, Synthetic Construct
  source 1..23: mol_type = other RNA
cgaggggcagagagcgagacttt

SEQ ID NO: 24474 - RNA, 23 nt, Synthetic Construct
  source 1..23: mol_type = other RNA
cgaggggcagagagcgagacttt

SEQ ID NO: 24475 - RNA, 22 nt, Synthetic Construct
  source 1..22: mol_type = other RNA
tgaggtagtagtttgtgctgta

SEQ ID NO: 24476 - RNA, 22 nt, Synthetic Construct
  source 1..22: mol_type = other RNA
tgaggtagtaggttgtgtggct

SEQ ID NO: 24477 - RNA, 22 nt, Synthetic Construct
  source 1..22: mol_type = other RNA
tgaggtagtaggttgtgtggct

SEQ ID NO: 24478 - RNA, 21 nt, Synthetic Construct
  source 1..21: mol_type = other RNA
gtgggcgtttgaagtgaagtg

SEQ ID NO: 24479 - RNA, 21 nt, Synthetic Construct
  source 1..21: mol_type = other RNA
cattattacttttggtacgcg

SEQ ID NO: 24480 - RNA, 21 nt, Synthetic Construct
  source 1..21: mol_type = other RNA
cattattacttttggtacgcg

SEQ ID NO: 24481 - RNA, 23 nt, Synthetic Construct
  source 1..23: mol_type = other RNA
tcctgtactgagctgccctgaga

SEQ ID NO: 24482 - RNA, 23 nt, Synthetic Construct
  source 1..23: mol_type = other RNA
tcctgtactgagctgccctgaga

SEQ ID NO: 24483 - RNA, 19 nt, Synthetic Construct
  source 1..19: mol_type = other RNA
gtactgacgctcatgcacg

SEQ ID NO: 24484 - RNA, 31 nt, Synthetic Construct; identical to SEQ ID NO: 2423
  source 1..31: mol_type = other RNA

SEQ ID NO: 24485 - RNA, 36 nt, Synthetic Construct; identical to SEQ ID NO: 2478
  source 1..36: mol_type = other RNA

SEQ ID NO: 24486 - RNA, 22 nt, Synthetic Construct
  source 1..22: mol_type = other RNA
ttctgtactgagctgccccgag

SEQ ID NO: 24487 - RNA, 19 nt, Synthetic Construct
  source 1..19: mol_type = other RNA
gcgccgatgatagtgcgga

SEQ ID NO: 24488 - RNA, 22 nt, Synthetic Construct
  source 1..22: mol_type = other RNA
tgagatagtaggttgtgtggtt

SEQ ID NO: 24489 - RNA, 22 nt, Synthetic Construct
  source 1..22: mol_type = other RNA
cccataaagtagaaagcactac

SEQ ID NO: 24490 - RNA, 16 nt, Synthetic Construct
  source 1..16: mol_type = other RNA
gtctatggccatacca

SEQ ID NO: 24491 - RNA, 16 nt, Synthetic Construct
  source 1..16: mol_type = other RNA
gtctatggccatacca

SEQ ID NO: 24492 - RNA, 21 nt, Synthetic Construct
  source 1..21: mol_type = other RNA
tgaggtagtaggttgtatagc

SEQ ID NO: 24493 - RNA, 17 nt, Synthetic Construct
  source 1..17: mol_type = other RNA
cacggcccagactccta

SEQ ID NO: 24494 - RNA, 17 nt, Synthetic Construct
  source 1..17: mol_type = other RNA
cacggcccagactccta

SEQ ID NO: 24495 - RNA, 37 nt, Synthetic Construct; identical to SEQ ID NO: 715
  source 1..37: mol_type = other RNA

SEQ ID NO: 24496 - RNA, 37 nt, Synthetic Construct; identical to SEQ ID NO: 715
  source 1..37: mol_type = other RNA

SEQ ID NO: 24497 - RNA, 17 nt, Synthetic Construct
  source 1..17: mol_type = other RNA
ccagtaaacggcggccg

SEQ ID NO: 24498 - RNA, 17 nt, Synthetic Construct
  source 1..17: mol_type = other RNA
ccagtaaacggcggccg

SEQ ID NO: 24499 - RNA, 22 nt, Synthetic Construct
  source 1..22: mol_type = other RNA
tgaggtagtagattgtgtggtt

SEQ ID NO: 24500 - RNA, 22 nt, Synthetic Construct
  source 1..22: mol_type = other RNA
tgaggtagtagattgtgtggtt

SEQ ID NO: 24501 - RNA, 16 nt, Synthetic Construct
  source 1..16: mol_type = other RNA
accgcttttgtcaggg

SEQ ID NO: 24502 - RNA, 22 nt, Synthetic Construct
  source 1..22: mol_type = other RNA
tatcgcacttgtcccggcctgt

SEQ ID NO: 24503 - RNA, 21 nt, Synthetic Construct
  source 1..21: mol_type = other RNA
tgaggggcagggagcgagact

SEQ ID NO: 24504 - RNA, 20 nt, Synthetic Construct
  source 1..20: mol_type = other RNA
tgaggtagtaggtcgtatag

SEQ ID NO: 24505 - RNA, 20 nt, Synthetic Construct
  source 1..20: mol_type = other RNA
tgaggtagtaggtcgtatag

SEQ ID NO: 24506 - RNA, 34 nt, Synthetic Construct; identical to SEQ ID NO: 2265
  source 1..34: mol_type = other RNA

SEQ ID NO: 24507 - RNA, 15 nt, Synthetic Construct
  source 1..15: mol_type = other RNA
cagtgaaacgagtca

SEQ ID NO: 24508 - RNA, 15 nt, Synthetic Construct
  source 1..15: mol_type = other RNA
cagtgaaacgagtca

SEQ ID NO: 24509 - RNA, 23 nt, Synthetic Construct
  source 1..23: mol_type = other RNA
agcagcattgtacagggctatgt

SEQ ID NO: 24510 - RNA, 23 nt, Synthetic Construct
  source 1..23: mol_type = other RNA
agcagcattgtacagggctatgt

SEQ ID NO: 24511 - RNA, 32 nt, Synthetic Construct; identical to SEQ ID NO: 770
  source 1..32: mol_type = other RNA

SEQ ID NO: 24512 - RNA, 32 nt, Synthetic Construct; identical to SEQ ID NO: 770
  source 1..32: mol_type = other RNA

SEQ ID NO: 24513 - RNA, 18 nt, Synthetic Construct
  source 1..18: mol_type = other RNA
ggctttgaagtaaggtcg

SEQ ID NO: 24514 - RNA, 28 nt, Synthetic Construct
  source 1..28: mol_type = other RNA
ggatttccccttggggttgtaggaccac

SEQ ID NO: 24515 - RNA, 28 nt, Synthetic Construct
  source 1..28: mol_type = other RNA
ggatttccccttggggttgtaggaccac

SEQ ID NO: 24516 - RNA, 18 nt, Synthetic Construct
  source 1..18: mol_type = other RNA
tccgacatgcgagggttc

SEQ ID NO: 24517 - RNA, 18 nt, Synthetic Construct
  source 1..18: mol_type = other RNA
tccgacatgcgagggttc

SEQ ID NO: 24518 - RNA, 17 nt, Synthetic Construct
  source 1..17: mol_type = other RNA
cgaaattccttgtcggg

SEQ ID NO: 24519 - RNA, 22 nt, Synthetic Construct
  source 1..22: mol_type = other RNA
tcctatactgagctgccccgag

SEQ ID NO: 24520 - RNA, 22 nt, Synthetic Construct
  source 1..22: mol_type = other RNA
tcctatactgagctgccccgag

SEQ ID NO: 24521 - RNA, 15 nt, Synthetic Construct
  source 1..15: mol_type = other RNA
gtagctcgttgggct

SEQ ID NO: 24522 - RNA, 15 nt, Synthetic Construct
  source 1..15: mol_type = other RNA
gtagctcgttgggct

SEQ ID NO: 24523 - RNA, 22 nt, Synthetic Construct
  source 1..22: mol_type = other RNA
tgaggtagtaggttgtgtgatt

SEQ ID NO: 24524 - RNA, 22 nt, Synthetic Construct
  source 1..22: mol_type = other RNA
tgaggtagtaggttgtgtgatt

SEQ ID NO: 24525 - RNA, 16 nt, Synthetic Construct
  source 1..16: mol_type = other RNA
tgcacgaaagcgtggg

SEQ ID NO: 24526 - RNA, 16 nt, Synthetic Construct
  source 1..16: mol_type = other RNA
tgcacgaaagcgtggg

SEQ ID NO: 24527 - RNA, 20 nt, Synthetic Construct
  source 1..20: mol_type = other RNA
tgaggtagtaggttgtgtag

SEQ ID NO: 24528 - RNA, 20 nt, Synthetic Construct
  source 1..20: mol_type = other RNA
tgaggtagtaggttgtgtag

SEQ ID NO: 24529 - RNA, 28 nt, Synthetic Construct
  source 1..28: mol_type = other RNA
ggcagggttcgtgactggggtgaagtcg

SEQ ID NO: 24530 - RNA, 28 nt, Synthetic Construct
  source 1..28: mol_type = other RNA
ggcagggttcgtgactggggtgaagtcg

SEQ ID NO: 24531 - RNA, 20 nt, Synthetic Construct
  source 1..20: mol_type = other RNA
tgaggaagtaggttgtgtgg

SEQ ID NO: 24532 - RNA, 20 nt, Synthetic Construct
  source 1..20: mol_type = other RNA
tgaggaagtaggttgtgtgg

SEQ ID NO: 24533 - RNA, 17 nt, Synthetic Construct
  source 1..17: mol_type = other RNA
ggcccttatgggtaggg

SEQ ID NO: 24534 - RNA, 22 nt, Synthetic Construct
  source 1..22: mol_type = other RNA
tcctgtactgaactgccccgag

SEQ ID NO: 24535 - RNA, 18 nt, Synthetic Construct
  source 1..18: mol_type = other RNA
cgactcttagcggtggat

SEQ ID NO: 24536 - RNA, 18 nt, Synthetic Construct
  source 1..18: mol_type = other RNA
cgactcttagcggtggat

SEQ ID NO: 24537 - RNA, 24 nt, Synthetic Construct
  source 1..24: mol_type = other RNA
gatgaggcgtgataacgagtctgc

SEQ ID NO: 24538 - RNA, 23 nt, Synthetic Construct
  source 1..23: mol_type = other RNA
tagtaatacgacgtacttagtgt

SEQ ID NO: 24539 - RNA, 20 nt, Synthetic Construct
  source 1..20: mol_type = other RNA
tgaggtagtaggttgcgtgg

SEQ ID NO: 24540 - RNA, 20 nt, Synthetic Construct
  source 1..20: mol_type = other RNA
tgaggtagtaggttgcgtgg

SEQ ID NO: 24541 - RNA, 36 nt, Synthetic Construct; identical to SEQ ID NO: 11035
  source 1..36: mol_type = other RNA

SEQ ID NO: 24542 - RNA, 25 nt, Synthetic Construct
  source 1..25: mol_type = other RNA
ctgaggatatgagatcgagacgaca

SEQ ID NO: 24543 - RNA, 25 nt, Synthetic Construct
  source 1..25: mol_type = other RNA
ctgaggatatgagatcgagacgaca

SEQ ID NO: 24544 - RNA, 23 nt, Synthetic Construct
  source 1..23: mol_type = other RNA
tggtaatacaacgtacttagtgt

SEQ ID NO: 24545 - RNA, 23 nt, Synthetic Construct
  source 1..23: mol_type = other RNA
cgctcacggaaagagaatgaagc

SEQ ID NO: 24546 - RNA, 17 nt, Synthetic Construct
  source 1..17: mol_type = other RNA
gggtctgtagctcagtc

SEQ ID NO: 24547 - RNA, 17 nt, Synthetic Construct
  source 1..17: mol_type = other RNA
gggtctgtagctcagtc

SEQ ID NO: 24548 - RNA, 19 nt, Synthetic Construct
  source 1..19: mol_type = other RNA
ccagtaaacggcggccgta

SEQ ID NO: 24549 - RNA, 19 nt, Synthetic Construct
  source 1..19: mol_type = other RNA
ccagtaaacggcggccgta

SEQ ID NO: 24550 - RNA, 17 nt, Synthetic Construct
  source 1..17: mol_type = other RNA
gccatgccgcgtgcggg

SEQ ID NO: 24551 - RNA, 20 nt, Synthetic Construct
  source 1..20: mol_type = other RNA
tgagatagtaggttgtgtgg

SEQ ID NO: 24552 - RNA, 20 nt, Synthetic Construct
  source 1..20: mol_type = other RNA
tgagatagtaggttgtgtgg

SEQ ID NO: 24553 - RNA, 20 nt, Synthetic Construct
  source 1..20: mol_type = other RNA
cataaagtagaaagcactac

SEQ ID NO: 24554 - RNA, 34 nt, Synthetic Construct; identical to SEQ ID NO: 385
  source 1..34: mol_type = other RNA

SEQ ID NO: 24555 - RNA, 25 nt, Synthetic Construct
  source 1..25: mol_type = other RNA
ttgaggatatgagatcgagacgacg

SEQ ID NO: 24556 - RNA, 25 nt, Synthetic Construct
  source 1..25: mol_type = other RNA
ttgaggatatgagatcgagacgacg

SEQ ID NO: 24557 - RNA, 25 nt, Synthetic Construct
  source 1..25: mol_type = other RNA
gtgaggatatgagatcgagacgaca

SEQ ID NO: 24558 - RNA, 25 nt, Synthetic Construct
  source 1..25: mol_type = other RNA
gtgaggatatgagatcgagacgaca

SEQ ID NO: 24559 - RNA, 29 nt, Synthetic Construct
  source 1..29: mol_type = other RNA
gtaatggcgggaactctggacagactgcc

SEQ ID NO: 24560 - RNA, 29 nt, Synthetic Construct
  source 1..29: mol_type = other RNA
gtaatggcgggaactctggacagactgcc

SEQ ID NO: 24561 - RNA, 18 nt, Synthetic Construct
  source 1..18: mol_type = other RNA
cccaaaggtcgtcggttc

SEQ ID NO: 24562 - RNA, 18 nt, Synthetic Construct
  source 1..18: mol_type = other RNA
cccaaaggtcgtcggttc

SEQ ID NO: 24563 - RNA, 21 nt, Synthetic Construct
  source 1..21: mol_type = other RNA
tgaggtggtaggttgtgtggt

SEQ ID NO: 24564 - RNA, 21 nt, Synthetic Construct
  source 1..21: mol_type = other RNA
tgaggtggtaggttgtgtggt

SEQ ID NO: 24565 - RNA, 17 nt, Synthetic Construct
  source 1..17: mol_type = other RNA
cagtagctcgaggaaaa

SEQ ID NO: 24566 - RNA, 17 nt, Synthetic Construct
  source 1..17: mol_type = other RNA
cagtagctcgaggaaaa

SEQ ID NO: 24567 - RNA, 16 nt, Synthetic Construct
  source 1..16: mol_type = other RNA
aggtcatcattatctg

SEQ ID NO: 24568 - RNA, 22 nt, Synthetic Construct
  source 1..22: mol_type = other RNA
tgaggtagtaggtcgtgtggtt

SEQ ID NO: 24569 - RNA, 22 nt, Synthetic Construct
  source 1..22: mol_type = other RNA
tgaggtagtaggtcgtgtggtt

SEQ ID NO: 24570 - RNA, 23 nt, Synthetic Construct
  source 1..23: mol_type = other RNA
tcctgaactgagctgccccgaga

SEQ ID NO: 24571 - RNA, 23 nt, Synthetic Construct
  source 1..23: mol_type = other RNA
tcctgaactgagctgccccgaga

SEQ ID NO: 24572 - RNA, 21 nt, Synthetic Construct
  source 1..21: mol_type = other RNA
cgaggtagtagtttgtgctgt

SEQ ID NO: 24573 - RNA, 18 nt, Synthetic Construct
  source 1..18: mol_type = other RNA
agcagcattgtacagggc

SEQ ID NO: 24574 - RNA, 18 nt, Synthetic Construct
  source 1..18: mol_type = other RNA
agcagcattgtacagggc

SEQ ID NO: 24575 - RNA, 16 nt, Synthetic Construct
  source 1..16: mol_type = other RNA
gcagacgaagtgagtg

SEQ ID NO: 24576 - RNA, 19 nt, Synthetic Construct
  source 1..19: mol_type = other RNA
tcctgtaccgatcaatagt

SEQ ID NO: 24577 - RNA, 19 nt, Synthetic Construct
  source 1..19: mol_type = other RNA
tcctgtaccgatcaatagt

SEQ ID NO: 24578 - RNA, 20 nt, Synthetic Construct
  source 1..20: mol_type = other RNA
actgatcgagtcgtcctgcg

SEQ ID NO: 24579 - RNA, 22 nt, Synthetic Construct
  source 1..22: mol_type = other RNA
tcagtagctcgaggaaaagaca

SEQ ID NO: 24580 - RNA, 22 nt, Synthetic Construct
  source 1..22: mol_type = other RNA
tcagtagctcgaggaaaagaca

SEQ ID NO: 24581 - RNA, 25 nt, Synthetic Construct
  source 1..25: mol_type = other RNA
ttgagggtatgagatcgagacgaca

SEQ ID NO: 24582 - RNA, 25 nt, Synthetic Construct
  source 1..25: mol_type = other RNA
ttgagggtatgagatcgagacgaca

SEQ ID NO: 24583 - RNA, 16 nt, Synthetic Construct
  source 1..16: mol_type = other RNA
gtctacggacatacca

SEQ ID NO: 24584 - RNA, 17 nt, Synthetic Construct
  source 1..17: mol_type = other RNA
taggtcatcgtcaggct

SEQ ID NO: 24585 - RNA, 21 nt, Synthetic Construct
  source 1..21: mol_type = other RNA
cgaggtagtaggttgtgtggt

SEQ ID NO: 24586 - RNA, 21 nt, Synthetic Construct
  source 1..21: mol_type = other RNA
cgaggtagtaggttgtgtggt

SEQ ID NO: 24587 - RNA, 21 nt, Synthetic Construct
  source 1..21: mol_type = other RNA
agcgtgcttgactgcgagact

SEQ ID NO: 24588 - RNA, 22 nt, Synthetic Construct
  source 1..22: mol_type = other RNA
tgaggtagtagattgtgtggtt

SEQ ID NO: 24589 - RNA, 21 nt, Synthetic Construct
  source 1..21: mol_type = other RNA
tcccagtaaacggcggccgta

SEQ ID NO: 24590 - RNA, 18 nt, Synthetic Construct
  source 1..18: mol_type = other RNA
ctaatgagactgccggtg

SEQ ID NO: 24591 - RNA, 18 nt, Synthetic Construct
  source 1..18: mol_type = other RNA
ctaatgagactgccggtg

SEQ ID NO: 24592 - RNA, 17 nt, Synthetic Construct
  source 1..17: mol_type = other RNA
gcggctgtagctcagtt

SEQ ID NO: 24593 - RNA, 17 nt, Synthetic Construct
  source 1..17: mol_type = other RNA
gcggctgtagctcagtt

SEQ ID NO: 24594 - RNA, 16 nt, Synthetic Construct
  source 1..16: mol_type = other RNA
tccgaaccgactagtg

SEQ ID NO: 24595 - RNA, 16 nt, Synthetic Construct
  source 1..16: mol_type = other RNA
tccgaaccgactagtg

SEQ ID NO: 24596 - RNA, 19 nt, Synthetic Construct
  source 1..19: mol_type = other RNA
acatgcaagtcgaacggta

SEQ ID NO: 24597 - RNA, 19 nt, Synthetic Construct
  source 1..19: mol_type = other RNA
acatgcaagtcgaacggta

SEQ ID NO: 24598 - RNA, 21 nt, Synthetic Construct
  source 1..21: mol_type = other RNA
ggaggagttcgaaggtacgct

SEQ ID NO: 24599 - RNA, 21 nt, Synthetic Construct
  source 1..21: mol_type = other RNA
ggaggagttcgaaggtacgct

SEQ ID NO: 24600 - RNA, 27 nt, Synthetic Construct
  source 1..27: mol_type = other RNA
agagcagctaataccgcatacgacctg

SEQ ID NO: 24601 - RNA, 19 nt, Synthetic Construct
  source 1..19: mol_type = other RNA
tgtcaactggttgttggga

SEQ ID NO: 24602 - RNA, 19 nt, Synthetic Construct
  source 1..19: mol_type = other RNA
tgtcaactggttgttggga

SEQ ID NO: 24603 - RNA, 35 nt, Synthetic Construct; identical to SEQ ID NO: 2399
  source 1..35: mol_type = other RNA

SEQ ID NO: 24604 - RNA, 15 nt, Synthetic Construct
  source 1..15: mol_type = other RNA
gagagcctggacaca

SEQ ID NO: 24605 - RNA, 22 nt, Synthetic Construct
  source 1..22: mol_type = other RNA
gcactctaatgagactgccggt

SEQ ID NO: 24606 - RNA, 22 nt, Synthetic Construct
  source 1..22: mol_type = other RNA
gcactctaatgagactgccggt

SEQ ID NO: 24607 - RNA, 25 nt, Synthetic Construct
  source 1..25: mol_type = other RNA
ctgaggatatgagatcgagacgaca

SEQ ID NO: 24608 - RNA, 25 nt, Synthetic Construct
  source 1..25: mol_type = other RNA
ctgaggatatgagatcgagacgaca

SEQ ID NO: 24609 - RNA, 20 nt, Synthetic Construct
  source 1..20: mol_type = other RNA
tgaggtagtaggctgtgtgg

SEQ ID NO: 24610 - RNA, 20 nt, Synthetic Construct
  source 1..20: mol_type = other RNA
tgaggtagtaggctgtgtgg

SEQ ID NO: 24611 - RNA, 15 nt, Synthetic Construct
  source 1..15: mol_type = other RNA
cggcccagactccta

SEQ ID NO: 24612 - RNA, 23 nt, Synthetic Construct
  source 1..23: mol_type = other RNA
tggtaatacgacgtgcttagtgt

SEQ ID NO: 24613 - RNA, 22 nt, Synthetic Construct
  source 1..22: mol_type = other RNA
tcggatccgtctgagcttggct

SEQ ID NO: 24614 - RNA, 22 nt, Synthetic Construct
  source 1..22: mol_type = other RNA
tcggatccgtctgagcttggct

SEQ ID NO: 24615 - RNA, 16 nt, Synthetic Construct
  source 1..16: mol_type = other RNA
gcaagaggtcagcggt

SEQ ID NO: 24616 - RNA, 16 nt, Synthetic Construct
  source 1..16: mol_type = other RNA
gtctgcggccatacca

SEQ ID NO: 24617 - RNA, 16 nt, Synthetic Construct
  source 1..16: mol_type = other RNA
gtctgcggccatacca

SEQ ID NO: 24618 - RNA, 16 nt, Synthetic Construct
  source 1..16: mol_type = other RNA
agtcaggatgttggct

SEQ ID NO: 24619 - RNA, 16 nt, Synthetic Construct
  source 1..16: mol_type = other RNA
agtcaggatgttggct

SEQ ID NO: 24620 - RNA, 19 nt, Synthetic Construct
  source 1..19: mol_type = other RNA
agcgaaattccttgtcggg

SEQ ID NO: 24621 - RNA, 19 nt, Synthetic Construct
  source 1..19: mol_type = other RNA
agcgaaattccttgtcggg

SEQ ID NO: 24622 - RNA, 16 nt, Synthetic Construct
  source 1..16: mol_type = other RNA
tgcacgaaagcgtggg

SEQ ID NO: 24623 - RNA, 20 nt, Synthetic Construct
  source 1..20: mol_type = other RNA
tgaggtagtaggttgtgagg

SEQ ID NO: 24624 - RNA, 20 nt, Synthetic Construct
  source 1..20: mol_type = other RNA
tgaggtagtaggttgtgagg

SEQ ID NO: 24625 - RNA, 23 nt, Synthetic Construct
  source 1..23: mol_type = other RNA
tctttgttcgattccgttgagta

SEQ ID NO: 24626 - RNA, 20 nt, Synthetic Construct
  source 1..20: mol_type = other RNA
gctattgacgaccgtaccgc

SEQ ID NO: 24627 - RNA, 20 nt, Synthetic Construct
  source 1..20: mol_type = other RNA
gctattgacgaccgtaccgc

SEQ ID NO: 24628 - RNA, 16 nt, Synthetic Construct
  source 1..16: mol_type = other RNA
atctacggccatacca

SEQ ID NO: 24629 - RNA, 16 nt, Synthetic Construct
  source 1..16: mol_type = other RNA
atctacggccatacca

SEQ ID NO: 24630 - RNA, 21 nt, Synthetic Construct
  source 1..21: mol_type = other RNA
tgaggtagtagtttgtgctga

SEQ ID NO: 24631 - RNA, 21 nt, Synthetic Construct
  source 1..21: mol_type = other RNA
ggagtatgcagagcaagatca

SEQ ID NO: 24632 - RNA, 15 nt, Synthetic Construct
  source 1..15: mol_type = other RNA
acctgcatcgagggt

SEQ ID NO: 24633 - RNA, 15 nt, Synthetic Construct
  source 1..15: mol_type = other RNA
acctgcatcgagggt

SEQ ID NO: 24634 - RNA, 20 nt, Synthetic Construct
  source 1..20: mol_type = other RNA
ctctaatgagactgccggtg

SEQ ID NO: 24635 - RNA, 20 nt, Synthetic Construct
  source 1..20: mol_type = other RNA
ctctaatgagactgccggtg

SEQ ID NO: 24636 - RNA, 23 nt, Synthetic Construct
  source 1..23: mol_type = other RNA
tggtagtacgacgtacttagtgt

SEQ ID NO: 24637 - RNA, 18 nt, Synthetic Construct
  source 1..18: mol_type = other RNA
gaagttgaccgcctgggg

SEQ ID NO: 24638 - RNA, 16 nt, Synthetic Construct
  source 1..16: mol_type = other RNA
caggacggtggccatg

SEQ ID NO: 24639 - RNA, 16 nt, Synthetic Construct
  source 1..16: mol_type = other RNA
caggacggtggccatg

SEQ ID NO: 24640 - RNA, 21 nt, Synthetic Construct
  source 1..21: mol_type = other RNA
ggaggagttcgaaggtacgct

SEQ ID NO: 24641 - RNA, 21 nt, Synthetic Construct
  source 1..21: mol_type = other RNA
gttggttcaagcgtgtagtcg

SEQ ID NO: 24642 - RNA, 21 nt, Synthetic Construct
  source 1..21: mol_type = other RNA
gttggttcaagcgtgtagtcg

SEQ ID NO: 24643 - RNA, 17 nt, Synthetic Construct
  source 1..17: mol_type = other RNA
ccaaggggtcgtgggtt

SEQ ID NO: 24644 - RNA, 22 nt, Synthetic Construct
  source 1..22: mol_type = other RNA
cactgcacttgtctcggtctga

SEQ ID NO: 24645 - RNA, 24 nt, Synthetic Construct
  source 1..24: mol_type = other RNA
gtctttgttcgattccgttgagta

SEQ ID NO: 24646 - RNA, 22 nt, Synthetic Construct
  source 1..22: mol_type = other RNA
tgaggtagtaggttgtggggtt

SEQ ID NO: 24647 - RNA, 22 nt, Synthetic Construct
  source 1..22: mol_type = other RNA
tgaggtagtaggttgtggggtt

SEQ ID NO: 24648 - RNA, 16 nt, Synthetic Construct
  source 1..16: mol_type = other RNA
gagctgtggatagggg

SEQ ID NO: 24649 - RNA, 20 nt, Synthetic Construct
  source 1..20: mol_type = other RNA
tcggaagaaggggtgcctgg

SEQ ID NO: 24650 - RNA, 20 nt, Synthetic Construct
  source 1..20: mol_type = other RNA
tcggaagaaggggtgcctgg

SEQ ID NO: 24651 - RNA, 23 nt, Synthetic Construct
  source 1..23: mol_type = other RNA
taatactgccgggtaatgatgga

SEQ ID NO: 24652 - RNA, 16 nt, Synthetic Construct
  source 1..16: mol_type = other RNA
gcggctgtagctcagt

SEQ ID NO: 24653 - RNA, 16 nt, Synthetic Construct
  source 1..16: mol_type = other RNA
gcggctgtagctcagt

SEQ ID NO: 24654 - RNA, 15 nt, Synthetic Construct
  source 1..15: mol_type = other RNA
gcagagcgtcggtct

SEQ ID NO: 24655 - RNA, 15 nt, Synthetic Construct
  source 1..15: mol_type = other RNA
gcagagcgtcggtct

SEQ ID NO: 24656 - RNA, 31 nt, Synthetic Construct; identical to SEQ ID NO: 2263
  source 1..31: mol_type = other RNA

SEQ ID NO: 24657 - RNA, 17 nt, Synthetic Construct
  source 1..17: mol_type = other RNA
cgaaattccttgtcggg

SEQ ID NO: 24658 - RNA, 25 nt, Synthetic Construct
  source 1..25: mol_type = other RNA
ttgaggatatgagatcgagacggca

SEQ ID NO: 24659 - RNA, 25 nt, Synthetic Construct
  source 1..25: mol_type = other RNA
ttgaggatatgagatcgagacggca

SEQ ID NO: 24660 - RNA, 22 nt, Synthetic Construct
  source 1..22: mol_type = other RNA
tcctgtaccgagctgccccgag

SEQ ID NO: 24661 - RNA, 22 nt, Synthetic Construct
  source 1..22: mol_type = other RNA
tcctgtaccgagctgccccgag

SEQ ID NO: 24662 - RNA, 19 nt, Synthetic Construct
  source 1..19: mol_type = other RNA
tgtcaactggttgttggga

SEQ ID NO: 24663 - RNA, 16 nt, Synthetic Construct
  source 1..16: mol_type = other RNA
gcggctgtagctcagt

SEQ ID NO: 24664 - RNA, 17 nt, Synthetic Construct
  source 1..17: mol_type = other RNA
tcagtagctcgaggaaa

SEQ ID NO: 24665 - RNA, 17 nt, Synthetic Construct
  source 1..17: mol_type = other RNA
tcagtagctcgaggaaa

SEQ ID NO: 24666 - RNA, 43 nt, Synthetic Construct; identical to SEQ ID NO: 1204
  source 1..43: mol_type = other RNA

SEQ ID NO: 24667 - RNA, 43 nt, Synthetic Construct; identical to SEQ ID NO: 1204
  source 1..43: mol_type = other RNA

SEQ ID NO: 24668 - RNA, 22 nt, Synthetic Construct
  source 1..22: mol_type = other RNA
tgaggtagtaggtcgtgtggtt

SEQ ID NO: 24669 - RNA, 22 nt, Synthetic Construct
  source 1..22: mol_type = other RNA
tgaggtagtaggtcgtgtggtt

SEQ ID NO: 24670 - RNA, 18 nt, Synthetic Construct
  source 1..18: mol_type = other RNA
tcccctggacctgtactg

SEQ ID NO: 24671 - RNA, 18 nt, Synthetic Construct
  source 1..18: mol_type = other RNA
tcccctggacctgtactg

SEQ ID NO: 24672 - RNA, 23 nt, Synthetic Construct
  source 1..23: mol_type = other RNA
tgataatacgacgtacttagtgt

SEQ ID NO: 24673 - RNA, 23 nt, Synthetic Construct
  source 1..23: mol_type = other RNA
tgataatacgacgtacttagtgt

SEQ ID NO: 24674 - RNA, 16 nt, Synthetic Construct
  source 1..16: mol_type = other RNA
gtctacggacatacca

SEQ ID NO: 24675 - RNA, 21 nt, Synthetic Construct
  source 1..21: mol_type = other RNA
cactgatcgagtcgtcctgcg

SEQ ID NO: 24676 - RNA, 21 nt, Synthetic Construct
  source 1..21: mol_type = other RNA
cactgatcgagtcgtcctgcg

SEQ ID NO: 24677 - RNA, 22 nt, Synthetic Construct
  source 1..22: mol_type = other RNA
cattgcacttgtctcggtctgg

SEQ ID NO: 24678 - RNA, 16 nt, Synthetic Construct
  source 1..16: mol_type = other RNA
tcagtagctcgaggaa

SEQ ID NO: 24679 - RNA, 16 nt, Synthetic Construct
  source 1..16: mol_type = other RNA
tcagtagctcgaggaa

SEQ ID NO: 24680 - RNA, 21 nt, Synthetic Construct
  source 1..21: mol_type = other RNA
ggaatcgctagtaatcgcgga

SEQ ID NO: 24681 - RNA, 33 nt, Synthetic Construct; identical to SEQ ID NO: 2479
  source 1..33: mol_type = other RNA

SEQ ID NO: 24682 - RNA, 20 nt, Synthetic Construct
  source 1..20: mol_type = other RNA
tggaatgtaaagaagtatgt

SEQ ID NO: 24683 - RNA, 18 nt, Synthetic Construct
  source 1..18: mol_type = other RNA
cgcgacctcagatcagac

SEQ ID NO: 24684 - RNA, 18 nt, Synthetic Construct
  source 1..18: mol_type = other RNA
cgcgacctcagatcagac

SEQ ID NO: 24685 - RNA, 23 nt, Synthetic Construct
  source 1..23: mol_type = other RNA
taaggtgcatctagtgcagatag

SEQ ID NO: 24686 - RNA, 23 nt, Synthetic Construct
  source 1..23: mol_type = other RNA
taaggtgcatctagtgcagatag

SEQ ID NO: 24687 - RNA, 20 nt, Synthetic Construct
  source 1..20: mol_type = other RNA
tgaggtagtaggtcgtgtgg

SEQ ID NO: 24688 - RNA, 20 nt, Synthetic Construct
  source 1..20: mol_type = other RNA
tgaggtagtaggtcgtgtgg

SEQ ID NO: 24689 - RNA, 22 nt, Synthetic Construct
  source 1..22: mol_type = other RNA
gtcagtttgtcaaataccccaa

SEQ ID NO: 24690 - RNA, 16 nt, Synthetic Construct
  source 1..16: mol_type = other RNA
acggcccagactccta

SEQ ID NO: 24691 - RNA, 16 nt, Synthetic Construct
  source 1..16: mol_type = other RNA
acggcccagactccta

SEQ ID NO: 24692 - RNA, 21 nt, Synthetic Construct
  source 1..21: mol_type = other RNA
tcctgtactgagctgccccgg

SEQ ID NO: 24693 - RNA, 15 nt, Synthetic Construct
  source 1..15: mol_type = other RNA
ccagaaacccggtcg

SEQ ID NO: 24694 - RNA, 15 nt, Synthetic Construct
  source 1..15: mol_type = other RNA
ccagaaacccggtcg

SEQ ID NO: 24695 - RNA, 25 nt, Synthetic Construct
  source 1..25: mol_type = other RNA
agctcactgatcgagtcgtcctgcg

SEQ ID NO: 24696 - RNA, 25 nt, Synthetic Construct
  source 1..25: mol_type = other RNA
agctcactgatcgagtcgtcctgcg

SEQ ID NO: 24697 - RNA, 37 nt, Synthetic Construct; identical to SEQ ID NO: 5125
  source 1..37: mol_type = other RNA

SEQ ID NO: 24698 - RNA, 30 nt, Synthetic Construct; identical to SEQ ID NO: 1771
  source 1..30: mol_type = other RNA

SEQ ID NO: 24699 - RNA, 30 nt, Synthetic Construct; identical to SEQ ID NO: 1771
  source 1..30: mol_type = other RNA

SEQ ID NO: 24700 - RNA, 22 nt, Synthetic Construct
  source 1..22: mol_type = other RNA
tgaggtagcaggttgtgtggtt

SEQ ID NO: 24701 - RNA, 16 nt, Synthetic Construct
  source 1..16: mol_type = other RNA
ggccgttcttagttgg

SEQ ID NO: 24702 - RNA, 23 nt, Synthetic Construct
  source 1..23: mol_type = other RNA
tgggctaagggagatgattgggt

SEQ ID NO: 24703 - RNA, 15 nt, Synthetic Construct
  source 1..15: mol_type = other RNA
atccctccgactccg

SEQ ID NO: 24704 - RNA, 15 nt, Synthetic Construct
  source 1..15: mol_type = other RNA
atccctccgactccg

SEQ ID NO: 24705 - RNA, 26 nt, Synthetic Construct
  source 1..26: mol_type = other RNA
tgtcggctcatctcatcctggggctg

SEQ ID NO: 24706 - RNA, 16 nt, Synthetic Construct
  source 1..16: mol_type = other RNA
gtctacagccatacca

SEQ ID NO: 24707 - RNA, 23 nt, Synthetic Construct
  source 1..23: mol_type = other RNA
tgaggggcagagggcgagacttt

SEQ ID NO: 24708 - RNA, 23 nt, Synthetic Construct
  source 1..23: mol_type = other RNA
tgaggggcagagggcgagacttt

SEQ ID NO: 24709 - RNA, 24 nt, Synthetic Construct
  source 1..24: mol_type = other RNA
tgtaaacatccccgaccggaagct

SEQ ID NO: 24710 - RNA, 23 nt, Synthetic Construct
  source 1..23: mol_type = other RNA
tggggggcagagagcgagacttt

SEQ ID NO: 24711 - RNA, 23 nt, Synthetic Construct
  source 1..23: mol_type = other RNA
tggggggcagagagcgagacttt

SEQ ID NO: 24712 - RNA, 22 nt, Synthetic Construct
  source 1..22: mol_type = other RNA
tagcttatcagactgatgttgg

SEQ ID NO: 24713 - RNA, 18 nt, Synthetic Construct
  source 1..18: mol_type = other RNA
tccgacatgcgagggttc

SEQ ID NO: 24714 - RNA, 18 nt, Synthetic Construct
  source 1..18: mol_type = other RNA
tccgacatgcgagggttc

SEQ ID NO: 24715 - RNA, 15 nt, Synthetic Construct
  source 1..15: mol_type = other RNA
gtccggcccgaggca

SEQ ID NO: 24716 - RNA, 15 nt, Synthetic Construct
  source 1..15: mol_type = other RNA
ccgcttttgtcaggg

SEQ ID NO: 24717 - RNA, 23 nt, Synthetic Construct
  source 1..23: mol_type = other RNA
cgctcacggaaagagaatgaagc

SEQ ID NO: 24718 - RNA, 23 nt, Synthetic Construct
  source 1..23: mol_type = other RNA
cgctcacggaaagagaatgaagc

SEQ ID NO: 24719 - RNA, 28 nt, Synthetic Construct
  source 1..28: mol_type = other RNA
tgttggttcaagcgtgtagtcgtgctct

SEQ ID NO: 24720 - RNA, 28 nt, Synthetic Construct
  source 1..28: mol_type = other RNA
tgttggttcaagcgtgtagtcgtgctct

SEQ ID NO: 24721 - RNA, 15 nt, Synthetic Construct
  source 1..15: mol_type = other RNA
accggaggaaggtgg

SEQ ID NO: 24722 - RNA, 21 nt, Synthetic Construct
  source 1..21: mol_type = other RNA
tcctgtactgagccgccccga

SEQ ID NO: 24723 - RNA, 18 nt, Synthetic Construct
  source 1..18: mol_type = other RNA
accaaggggtcgtgggtt

SEQ ID NO: 24724 - RNA, 18 nt, Synthetic Construct
  source 1..18: mol_type = other RNA
accaaggggtcgtgggtt

SEQ ID NO: 24725 - RNA, 23 nt, Synthetic Construct
  source 1..23: mol_type = other RNA
tggtaatacaacgtacttagtgt

SEQ ID NO: 24726 - RNA, 23 nt, Synthetic Construct
  source 1..23: mol_type = other RNA
tggtaatacaacgtacttagtgt

SEQ ID NO: 24727 - RNA, 16 nt, Synthetic Construct
  source 1..16: mol_type = other RNA
acggcccagactccta

SEQ ID NO: 24728 - RNA, 16 nt, Synthetic Construct
  source 1..16: mol_type = other RNA
acggcccagactccta

SEQ ID NO: 24729 - RNA, 31 nt, Synthetic Construct; identical to SEQ ID NO: 2333
  source 1..31: mol_type = other RNA

SEQ ID NO: 24730 - RNA, 25 nt, Synthetic Construct
  source 1..25: mol_type = other RNA
ttgaggatatgagatcgaggcgaca

SEQ ID NO: 24731 - RNA, 25 nt, Synthetic Construct
  source 1..25: mol_type = other RNA
ttgaggatatgagatcgaggcgaca

SEQ ID NO: 24732 - RNA, 32 nt, Synthetic Construct; identical to SEQ ID NO: 3748
  source 1..32: mol_type = other RNA

SEQ ID NO: 24733 - RNA, 32 nt, Synthetic Construct; identical to SEQ ID NO: 3748
  source 1..32: mol_type = other RNA

SEQ ID NO: 24734 - RNA, 20 nt, Synthetic Construct
  source 1..20: mol_type = other RNA
tcagtagctcgaggaaaaga

SEQ ID NO: 24735 - RNA, 17 nt, Synthetic Construct
  source 1..17: mol_type = other RNA
gtcgacgtatagggtgt

SEQ ID NO: 24736 - RNA, 23 nt, Synthetic Construct
  source 1..23: mol_type = other RNA
tggtaatacgacgtacttagtat

SEQ ID NO: 24737 - RNA, 16 nt, Synthetic Construct
  source 1..16: mol_type = other RNA
gagctgtggatagggg

SEQ ID NO: 24738 - RNA, 24 nt, Synthetic Construct
  source 1..24: mol_type = other RNA
tcactgatcgagtcgtcctgcgcg

SEQ ID NO: 24739 - RNA, 24 nt, Synthetic Construct
  source 1..24: mol_type = other RNA
tcactgatcgagtcgtcctgcgcg

SEQ ID NO: 24740 - RNA, 16 nt, Synthetic Construct
  source 1..16: mol_type = other RNA
gctattgacgaccgta

SEQ ID NO: 24741 - RNA, 16 nt, Synthetic Construct
  source 1..16: mol_type = other RNA
gctattgacgaccgta

SEQ ID NO: 24742 - RNA, 17 nt, Synthetic Construct
  source 1..17: mol_type = other RNA
tggccgtcgtcagctcg

SEQ ID NO: 24743 - RNA, 19 nt, Synthetic Construct
  source 1..19: mol_type = other RNA
tggccgtcgtcagctcgtg

SEQ ID NO: 24744 - RNA, 21 nt, Synthetic Construct
  source 1..21: mol_type = other RNA
ctagcaccatctgaaatcggt

SEQ ID NO: 24745 - RNA, 27 nt, Synthetic Construct
  source 1..27: mol_type = other RNA
ggggagctaatcccagaaacccggtcg

SEQ ID NO: 24746 - RNA, 27 nt, Synthetic Construct
  source 1..27: mol_type = other RNA
ggggagctaatcccagaaacccggtcg

SEQ ID NO: 24747 - RNA, 21 nt, Synthetic Construct
  source 1..21: mol_type = other RNA
tgaggtagcaggttgtgtggt

SEQ ID NO: 24748 - RNA, 21 nt, Synthetic Construct
  source 1..21: mol_type = other RNA
tgaggtagcaggttgtgtggt

SEQ ID NO: 24749 - RNA, 22 nt, Synthetic Construct
  source 1..22: mol_type = other RNA
tggaatgcaaagaagtatgtat

SEQ ID NO: 24750 - RNA, 22 nt, Synthetic Construct
  source 1..22: mol_type = other RNA
tggaatgcaaagaagtatgtat

SEQ ID NO: 24751 - RNA, 20 nt, Synthetic Construct
  source 1..20: mol_type = other RNA
taaggtagtaggttgtgtgg

SEQ ID NO: 24752 - RNA, 20 nt, Synthetic Construct
  source 1..20: mol_type = other RNA
taaggtagtaggttgtgtgg

SEQ ID NO: 24753 - RNA, 18 nt, Synthetic Construct
  source 1..18: mol_type = other RNA
ggtgcaagcgttaatcgg

SEQ ID NO: 24754 - RNA, 18 nt, Synthetic Construct
  source 1..18: mol_type = other RNA
ggtgcaagcgttaatcgg

SEQ ID NO: 24755 - RNA, 20 nt, Synthetic Construct
  source 1..20: mol_type = other RNA
tgtcagtttgtcaaataccc

SEQ ID NO: 24756 - RNA, 16 nt, Synthetic Construct
  source 1..16: mol_type = other RNA
atctacggccatacca

SEQ ID NO: 24757 - RNA, 15 nt, Synthetic Construct
  source 1..15: mol_type = other RNA
tagagtagggcggga

SEQ ID NO: 24758 - RNA, 15 nt, Synthetic Construct
  source 1..15: mol_type = other RNA
gttgaccgcctgggg

SEQ ID NO: 24759 - RNA, 23 nt, Synthetic Construct
  source 1..23: mol_type = other RNA
tctttgttcgattccgttgagta

SEQ ID NO: 24760 - RNA, 23 nt, Synthetic Construct
  source 1..23: mol_type = other RNA
tctttgttcgattccgttgagta

SEQ ID NO: 24761 - RNA, 35 nt, Synthetic Construct; identical to SEQ ID NO: 2452
  source 1..35: mol_type = other RNA

SEQ ID NO: 24762 - RNA, 21 nt, Synthetic Construct
  source 1..21: mol_type = other RNA
caaagtgctgttcgtgcaggt

SEQ ID NO: 24763 - RNA, 21 nt, Synthetic Construct
  source 1..21: mol_type = other RNA
caaagtgctgttcgtgcaggt

SEQ ID NO: 24764 - RNA, 23 nt, Synthetic Construct
  source 1..23: mol_type = other RNA
tcctgtgctgagctgccccgaga

SEQ ID NO: 24765 - RNA, 34 nt, Synthetic Construct; identical to SEQ ID NO: 2298
  source 1..34: mol_type = other RNA

SEQ ID NO: 24766 - RNA, 34 nt, Synthetic Construct; identical to SEQ ID NO: 2298
  source 1..34: mol_type = other RNA

SEQ ID NO: 24767 - RNA, 20 nt, Synthetic Construct
  source 1..20: mol_type = other RNA
cgaggtagtaggttgtgtgg

SEQ ID NO: 24768 - RNA, 20 nt, Synthetic Construct
  source 1..20: mol_type = other RNA
cgaggtagtaggttgtgtgg

SEQ ID NO: 24769 - RNA, 21 nt, Synthetic Construct
  source 1..21: mol_type = other RNA
tcctgtaccgagctgccccga

SEQ ID NO: 24770 - RNA, 15 nt, Synthetic Construct
  source 1..15: mol_type = other RNA
gtccggcccgaggca

SEQ ID NO: 24771 - RNA, 15 nt, Synthetic Construct
  source 1..15: mol_type = other RNA
gtccggcccgaggca

SEQ ID NO: 24772 - RNA, 21 nt, Synthetic Construct
  source 1..21: mol_type = other RNA
tgaggtagtaagttgtgtggt

SEQ ID NO: 24773 - RNA, 21 nt, Synthetic Construct
  source 1..21: mol_type = other RNA
tgaggtagtaagttgtgtggt

SEQ ID NO: 24774 - RNA, 23 nt, Synthetic Construct
  source 1..23: mol_type = other RNA
ctcactgatcgagtcgtcctgcg

SEQ ID NO: 24775 - RNA, 23 nt, Synthetic Construct
  source 1..23: mol_type = other RNA
ctcactgatcgagtcgtcctgcg

SEQ ID NO: 24776 - RNA, 18 nt, Synthetic Construct
  source 1..18: mol_type = other RNA
cctgtaccgatcaatagt

SEQ ID NO: 24777 - RNA, 18 nt, Synthetic Construct
  source 1..18: mol_type = other RNA
cctgtaccgatcaatagt

SEQ ID NO: 24778 - RNA, 23 nt, Synthetic Construct
  source 1..23: mol_type = other RNA
tggtgatacgacgtacttagtgt

SEQ ID NO: 24779 - RNA, 23 nt, Synthetic Construct
  source 1..23: mol_type = other RNA
tggtgatacgacgtacttagtgt

SEQ ID NO: 24780 - RNA, 43 nt, Synthetic Construct; identical to SEQ ID NO: 6202
  source 1..43: mol_type = other RNA

SEQ ID NO: 24781 - RNA, 43 nt, Synthetic Construct; identical to SEQ ID NO: 6202
  source 1..43: mol_type = other RNA

SEQ ID NO: 24782 - RNA, 35 nt, Synthetic Construct; identical to SEQ ID NO: 2514
  source 1..35: mol_type = other RNA

SEQ ID NO: 24783 - RNA, 16 nt, Synthetic Construct
  source 1..16: mol_type = other RNA
gcagacgaagtgagtg

SEQ ID NO: 24784 - RNA, 16 nt, Synthetic Construct
  source 1..16: mol_type = other RNA
gcagacgaagtgagtg

SEQ ID NO: 24785 - RNA, 17 nt, Synthetic Construct
  source 1..17: mol_type = other RNA
cctcgcgcgattggagc

SEQ ID NO: 24786 - RNA, 16 nt, Synthetic Construct
  source 1..16: mol_type = other RNA
gtctacggccgtacca

SEQ ID NO: 24787 - RNA, 21 nt, Synthetic Construct
  source 1..21: mol_type = other RNA
tcctgtctgaatatgggggga

SEQ ID NO: 24788 - RNA, 21 nt, Synthetic Construct
  source 1..21: mol_type = other RNA
tcctgtctgaatatgggggga

SEQ ID NO: 24789 - RNA, 21 nt, Synthetic Construct
  source 1..21: mol_type = other RNA
cgtaccgtgagtaataatgcg

SEQ ID NO: 24790 - RNA, 15 nt, Synthetic Construct
  source 1..15: mol_type = other RNA
tcagtagctcgagga

SEQ ID NO: 24791 - RNA, 15 nt, Synthetic Construct
  source 1..15: mol_type = other RNA
tcagtagctcgagga

SEQ ID NO: 24792 - RNA, 16 nt, Synthetic Construct
  source 1..16: mol_type = other RNA
atgcaagtcgaacggt

SEQ ID NO: 24793 - RNA, 16 nt, Synthetic Construct
  source 1..16: mol_type = other RNA
atgcaagtcgaacggt

SEQ ID NO: 24794 - RNA, 16 nt, Synthetic Construct
  source 1..16: mol_type = other RNA
gactacggccatacca

SEQ ID NO: 24795 - RNA, 16 nt, Synthetic Construct
  source 1..16: mol_type = other RNA
gactacggccatacca

SEQ ID NO: 24796 - RNA, 17 nt, Synthetic Construct
  source 1..17: mol_type = other RNA
cagtcaggatgttggct

SEQ ID NO: 24797 - RNA, 17 nt, Synthetic Construct
  source 1..17: mol_type = other RNA
cagtcaggatgttggct

SEQ ID NO: 24798 - RNA, 16 nt, Synthetic Construct
  source 1..16: mol_type = other RNA
gtctacggccgtacca

SEQ ID NO: 24799 - RNA, 37 nt, Synthetic Construct; identical to SEQ ID NO: 2482
  source 1..37: mol_type = other RNA

SEQ ID NO: 24800 - RNA, 20 nt, Synthetic Construct
  source 1..20: mol_type = other RNA
cacatgcaagtcgaacggta

SEQ ID NO: 24801 - RNA, 20 nt, Synthetic Construct
  source 1..20: mol_type = other RNA
cacatgcaagtcgaacggta

SEQ ID NO: 24802 - RNA, 19 nt, Synthetic Construct
  source 1..19: mol_type = other RNA
cttggggttgtaggaccac

SEQ ID NO: 24803 - RNA, 19 nt, Synthetic Construct
  source 1..19: mol_type = other RNA
cttggggttgtaggaccac

SEQ ID NO: 24804 - RNA, 17 nt, Synthetic Construct
  source 1..17: mol_type = other RNA
cagagacgagtcgacca

SEQ ID NO: 24805 - RNA, 17 nt, Synthetic Construct
  source 1..17: mol_type = other RNA
cagagacgagtcgacca

SEQ ID NO: 24806 - RNA, 22 nt, Synthetic Construct
  source 1..22: mol_type = other RNA
tcactgatcgagtcgtcctgcg

SEQ ID NO: 24807 - RNA, 22 nt, Synthetic Construct
  source 1..22: mol_type = other RNA
tcactgatcgagtcgtcctgcg

SEQ ID NO: 24808 - RNA, 33 nt, Synthetic Construct; identical to SEQ ID NO: 2556
  source 1..33: mol_type = other RNA

SEQ ID NO: 24809 - RNA, 35 nt, Synthetic Construct; identical to SEQ ID NO: 757
  source 1..35: mol_type = other RNA

SEQ ID NO: 24810 - RNA, 15 nt, Synthetic Construct
  source 1..15: mol_type = other RNA
gttcggaagattttc

SEQ ID NO: 24811 - RNA, 15 nt, Synthetic Construct
  source 1..15: mol_type = other RNA
gttcggaagattttc

SEQ ID NO: 24812 - RNA, 24 nt, Synthetic Construct
  source 1..24: mol_type = other RNA
tgtaaacatccccgactggaagtt

SEQ ID NO: 24813 - RNA, 21 nt, Synthetic Construct
  source 1..21: mol_type = other RNA
tggggtgtgacaatggtgttt

SEQ ID NO: 24814 - RNA, 21 nt, Synthetic Construct
  source 1..21: mol_type = other RNA
tggggtgtgacaatggtgttt

SEQ ID NO: 24815 - RNA, 15 nt, Synthetic Construct
  source 1..15: mol_type = other RNA
tcagtagctcgagga

SEQ ID NO: 24816 - RNA, 15 nt, Synthetic Construct
  source 1..15: mol_type = other RNA
tcagtagctcgagga

SEQ ID NO: 24817 - RNA, 23 nt, Synthetic Construct
  source 1..23: mol_type = other RNA
tgaggggcagagagcgagactct

SEQ ID NO: 24818 - RNA, 23 nt, Synthetic Construct
  source 1..23: mol_type = other RNA
tgaggggcagagagcgagactct

SEQ ID NO: 24819 - RNA, 24 nt, Synthetic Construct
  source 1..24: mol_type = other RNA
gctcactgatcgagtcgtcctgcg

SEQ ID NO: 24820 - RNA, 23 nt, Synthetic Construct
  source 1..23: mol_type = other RNA
tggtaatacgacgtactcagtgt

SEQ ID NO: 24821 - RNA, 23 nt, Synthetic Construct
  source 1..23: mol_type = other RNA
tggtaatacgacgtactcagtgt

SEQ ID NO: 24822 - RNA, 31 nt, Synthetic Construct; identical to SEQ ID NO: 2412
  source 1..31: mol_type = other RNA

SEQ ID NO: 24823 - RNA, 23 nt, Synthetic Construct
  source 1..23: mol_type = other RNA
agcagcattgtacagggctatgg

SEQ ID NO: 24824 - RNA, 16 nt, Synthetic Construct
  source 1..16: mol_type = other RNA
gtcgacgtatagggtg

SEQ ID NO: 24825 - RNA, 27 nt, Synthetic Construct
  source 1..27: mol_type = other RNA
cgtgtgaaagtaggtcatcgtcaggct

SEQ ID NO: 24826 - RNA, 27 nt, Synthetic Construct
  source 1..27: mol_type = other RNA
cgtgtgaaagtaggtcatcgtcaggct

SEQ ID NO: 24827 - RNA, 26 nt, Synthetic Construct
  source 1..26: mol_type = other RNA
atttccccttggggttgtaggaccac

SEQ ID NO: 24828 - RNA, 26 nt, Synthetic Construct
  source 1..26: mol_type = other RNA
atttccccttggggttgtaggaccac

SEQ ID NO: 24829 - RNA, 23 nt, Synthetic Construct
  source 1..23: mol_type = other RNA
tcctgtactgagctgccctgagt

SEQ ID NO: 24830 - RNA, 23 nt, Synthetic Construct
  source 1..23: mol_type = other RNA
tcctgtactgagctgccctgagt

SEQ ID NO: 24831 - RNA, 23 nt, Synthetic Construct
  source 1..23: mol_type = other RNA
agctacattgtctgctgggttcc

SEQ ID NO: 24832 - RNA, 35 nt, Synthetic Construct; identical to SEQ ID NO: 2397
  source 1..35: mol_type = other RNA

SEQ ID NO: 24833 - RNA, 23 nt, Synthetic Construct
  source 1..23: mol_type = other RNA
atcacattgccagggatttccaa

SEQ ID NO: 24834 - RNA, 31 nt, Synthetic Construct; identical to SEQ ID NO: 1881
  source 1..31: mol_type = other RNA

SEQ ID NO: 24835 - RNA, 22 nt, Synthetic Construct
  source 1..22: mol_type = other RNA
tggaatgtaaagaagtatgcat

SEQ ID NO: 24836 - RNA, 22 nt, Synthetic Construct
  source 1..22: mol_type = other RNA
tggaatgtaaagaagtatgcat

SEQ ID NO: 24837 - RNA, 32 nt, Synthetic Construct; identical to SEQ ID NO: 2052
  source 1..32: mol_type = other RNA

SEQ ID NO: 24838 - RNA, 20 nt, Synthetic Construct
  source 1..20: mol_type = other RNA
gaatcgctagtaatcgcgga

SEQ ID NO: 24839 - RNA, 17 nt, Synthetic Construct
  source 1..17: mol_type = other RNA
ccgtgtgaaagtaggtc

SEQ ID NO: 24840 - RNA, 22 nt, Synthetic Construct
  source 1..22: mol_type = other RNA
taacactgtctggtaacgatgt

SEQ ID NO: 24841 - RNA, 22 nt, Synthetic Construct
  source 1..22: mol_type = other RNA
taacactgtctggtaacgatgt

SEQ ID NO: 24842 - RNA, 23 nt, Synthetic Construct
  source 1..23: mol_type = other RNA
tggcaatacgacgtacttagtgt

SEQ ID NO: 24843 - RNA, 23 nt, Synthetic Construct
  source 1..23: mol_type = other RNA
tggcaatacgacgtacttagtgt

SEQ ID NO: 24844 - RNA, 23 nt, Synthetic Construct
  source 1..23: mol_type = other RNA
tggggggcagagagcgagacttt

SEQ ID NO: 24845 - RNA, 23 nt, Synthetic Construct
  source 1..23: mol_type = other RNA
tggggggcagagagcgagacttt

SEQ ID NO: 24846 - RNA, 22 nt, Synthetic Construct
  source 1..22: mol_type = other RNA
tattgcacttgtcccggcctgc

SEQ ID NO: 24847 - RNA, 22 nt, Synthetic Construct
  source 1..22: mol_type = other RNA
tattgcacttgtcccggcctgc

SEQ ID NO: 24848 - RNA, 27 nt, Synthetic Construct
  source 1..27: mol_type = other RNA
gcgggcgtagctcaggggtagagcgca

SEQ ID NO: 24849 - RNA, 27 nt, Synthetic Construct
  source 1..27: mol_type = other RNA
gcgggcgtagctcaggggtagagcgca

SEQ ID NO: 24850 - RNA, 24 nt, Synthetic Construct
  source 1..24: mol_type = other RNA
cgactcttagcggtggatcactcg

SEQ ID NO: 24851 - RNA, 24 nt, Synthetic Construct
  source 1..24: mol_type = other RNA
cgactcttagcggtggatcactcg

SEQ ID NO: 24852 - RNA, 25 nt, Synthetic Construct
  source 1..25: mol_type = other RNA
agctcactgatcgagtcgtcctgcg

SEQ ID NO: 24853 - RNA, 22 nt, Synthetic Construct
  source 1..22: mol_type = other RNA
tcctgtattgagctgccccgag

SEQ ID NO: 24854 - RNA, 22 nt, Synthetic Construct
  source 1..22: mol_type = other RNA
tcctgtattgagctgccccgag

SEQ ID NO: 24855 - RNA, 21 nt, Synthetic Construct
  source 1..21: mol_type = other RNA
tcctgcactgagctgccccga

SEQ ID NO: 24856 - RNA, 21 nt, Synthetic Construct
  source 1..21: mol_type = other RNA
tcctgcactgagctgccccga

SEQ ID NO: 24857 - RNA, 24 nt, Synthetic Construct
  source 1..24: mol_type = other RNA
gcagctaataccgcatacgacctg

SEQ ID NO: 24858 - RNA, 20 nt, Synthetic Construct
  source 1..20: mol_type = other RNA
tgaggtagtaggttgtgcgg

SEQ ID NO: 24859 - RNA, 20 nt, Synthetic Construct
  source 1..20: mol_type = other RNA
tgaggtagtaggttgtgcgg

SEQ ID NO: 24860 - RNA, 23 nt, Synthetic Construct
  source 1..23: mol_type = other RNA
tgaggggcagagggcgagacttt

SEQ ID NO: 24861 - RNA, 18 nt, Synthetic Construct
  source 1..18: mol_type = other RNA
cagcactctgcaaagacg

SEQ ID NO: 24862 - RNA, 21 nt, Synthetic Construct
  source 1..21: mol_type = other RNA
gttggttcaagcgtgtagtcg

SEQ ID NO: 24863 - RNA, 19 nt, Synthetic Construct
  source 1..19: mol_type = other RNA
aggacagtgaaacgagtca

SEQ ID NO: 24864 - RNA, 19 nt, Synthetic Construct
  source 1..19: mol_type = other RNA
aggacagtgaaacgagtca

SEQ ID NO: 24865 - RNA, 30 nt, Synthetic Construct; identical to SEQ ID NO: 2274
  source 1..30: mol_type = other RNA

SEQ ID NO: 24866 - RNA, 23 nt, Synthetic Construct
  source 1..23: mol_type = other RNA
tggaagactagtgattttgttgt

SEQ ID NO: 24867 - RNA, 22 nt, Synthetic Construct
  source 1..22: mol_type = other RNA
tcctgtactgagctaccccgag

SEQ ID NO: 24868 - RNA, 22 nt, Synthetic Construct
  source 1..22: mol_type = other RNA
tcctgtactgagctaccccgag

SEQ ID NO: 24869 - RNA, 23 nt, Synthetic Construct
  source 1..23: mol_type = other RNA
taaggggcagagagcgagacttt

SEQ ID NO: 24870 - RNA, 16 nt, Synthetic Construct
  source 1..16: mol_type = other RNA
atctacggccatacca

SEQ ID NO: 24871 - RNA, 21 nt, Synthetic Construct
  source 1..21: mol_type = other RNA
tggcagtgtcttagctggttg

SEQ ID NO: 24872 - RNA, 25 nt, Synthetic Construct
  source 1..25: mol_type = other RNA
cgactcttagcggtggatcactcgg

SEQ ID NO: 24873 - RNA, 25 nt, Synthetic Construct
  source 1..25: mol_type = other RNA
cgactcttagcggtggatcactcgg

SEQ ID NO: 24874 - RNA, 22 nt, Synthetic Construct
  source 1..22: mol_type = other RNA
tgaggaagtagtttgtgctgtt

SEQ ID NO: 24875 - RNA, 15 nt, Synthetic Construct
  source 1..15: mol_type = other RNA
cagtgaaacgagtca

SEQ ID NO: 24876 - RNA, 15 nt, Synthetic Construct
  source 1..15: mol_type = other RNA
cagtgaaacgagtca

SEQ ID NO: 24877 - RNA, 16 nt, Synthetic Construct
  source 1..16: mol_type = other RNA
gactacggccatacca

SEQ ID NO: 24878 - RNA, 23 nt, Synthetic Construct
  source 1..23: mol_type = other RNA
tggtaatacgacgtacttggtgt

SEQ ID NO: 24879 - RNA, 18 nt, Synthetic Construct
  source 1..18: mol_type = other RNA
atggccgggacagagggc

SEQ ID NO: 24880 - RNA, 18 nt, Synthetic Construct
  source 1..18: mol_type = other RNA
atggccgggacagagggc

SEQ ID NO: 24881 - RNA, 20 nt, Synthetic Construct
  source 1..20: mol_type = other RNA
tagcgaaattccttgtcggg

SEQ ID NO: 24882 - RNA, 20 nt, Synthetic Construct
  source 1..20: mol_type = other RNA
tagcgaaattccttgtcggg

SEQ ID NO: 24883 - RNA, 27 nt, Synthetic Construct
  source 1..27: mol_type = other RNA
gttggttcaagcgtgtagtcgtgctct

SEQ ID NO: 24884 - RNA, 23 nt, Synthetic Construct
  source 1..23: mol_type = other RNA
tgaggtagtaggttgtgcggttt

SEQ ID NO: 24885 - RNA, 16 nt, Synthetic Construct
  source 1..16: mol_type = other RNA
gtctacggccataccg

SEQ ID NO: 24886 - RNA, 16 nt, Synthetic Construct
  source 1..16: mol_type = other RNA
gtctacggccataccg

SEQ ID NO: 24887 - RNA, 21 nt, Synthetic Construct
  source 1..21: mol_type = other RNA
agaggggcagagagcgagact

SEQ ID NO: 24888 - RNA, 21 nt, Synthetic Construct
  source 1..21: mol_type = other RNA
agaggggcagagagcgagact

SEQ ID NO: 24889 - RNA, 22 nt, Synthetic Construct
  source 1..22: mol_type = other RNA
tcctgtactgaactgccccgag

SEQ ID NO: 24890 - RNA, 17 nt, Synthetic Construct
  source 1..17: mol_type = other RNA
ccaaggggtcgtgggtt

SEQ ID NO: 24891 - RNA, 17 nt, Synthetic Construct
  source 1..17: mol_type = other RNA
ccaaggggtcgtgggtt

SEQ ID NO: 24892 - RNA, 16 nt, Synthetic Construct
  source 1..16: mol_type = other RNA
gtctacggccatacta

SEQ ID NO: 24893 - RNA, 16 nt, Synthetic Construct
  source 1..16: mol_type = other RNA
gtctacggccatacta

SEQ ID NO: 24894 - RNA, 17 nt, Synthetic Construct
  source 1..17: mol_type = other RNA
aagttgaccgcctgggg

SEQ ID NO: 24895 - RNA, 19 nt, Synthetic Construct
  source 1..19: mol_type = other RNA
cctgtaccgatcaatagtg

SEQ ID NO: 24896 - RNA, 19 nt, Synthetic Construct
  source 1..19: mol_type = other RNA
cctgtaccgatcaatagtg

SEQ ID NO: 24897 - RNA, 16 nt, Synthetic Construct
  source 1..16: mol_type = other RNA
gggtgaaagcggggga

SEQ ID NO: 24898 - RNA, 24 nt, Synthetic Construct
  source 1..24: mol_type = other RNA
tatatcggaacgtgcccagtcgtg

SEQ ID NO: 24899 - RNA, 20 nt, Synthetic Construct
  source 1..20: mol_type = other RNA
cccagtaaacggcggccgta

SEQ ID NO: 24900 - RNA, 20 nt, Synthetic Construct
  source 1..20: mol_type = other RNA
cccagtaaacggcggccgta

SEQ ID NO: 24901 - RNA, 16 nt, Synthetic Construct
  source 1..16: mol_type = other RNA
tggccgtcgtcagctc

SEQ ID NO: 24902 - RNA, 16 nt, Synthetic Construct
  source 1..16: mol_type = other RNA
tggccgtcgtcagctc

SEQ ID NO: 24903 - RNA, 20 nt, Synthetic Construct
  source 1..20: mol_type = other RNA
tcctgtctgaatatgggggg

SEQ ID NO: 24904 - RNA, 23 nt, Synthetic Construct
  source 1..23: mol_type = other RNA
tggaatgtaaagaagtatgtata

SEQ ID NO: 24905 - RNA, 23 nt, Synthetic Construct
  source 1..23: mol_type = other RNA
tggaatgtaaagaagtatgtata

SEQ ID NO: 24906 - RNA, 23 nt, Synthetic Construct
  source 1..23: mol_type = other RNA
tggtaatacggcgtacttagtgt

SEQ ID NO: 24907 - RNA, 23 nt, Synthetic Construct
  source 1..23: mol_type = other RNA
tggtaatacggcgtacttagtgt

SEQ ID NO: 24908 - RNA, 36 nt, Synthetic Construct; identical to SEQ ID NO: 2344
  source 1..36: mol_type = other RNA

SEQ ID NO: 24909 - RNA, 27 nt, Synthetic Construct
  source 1..27: mol_type = other RNA
gctttacattggactttgaacagatct

SEQ ID NO: 24910 - RNA, 27 nt, Synthetic Construct
  source 1..27: mol_type = other RNA
gctttacattggactttgaacagatct

SEQ ID NO: 24911 - RNA, 34 nt, Synthetic Construct; identical to SEQ ID NO: 2265
  source 1..34: mol_type = other RNA

SEQ ID NO: 24912 - RNA, 27 nt, Synthetic Construct
  source 1..27: mol_type = other RNA
gacttaccaaacctatgcaaactccga

SEQ ID NO: 24913 - RNA, 27 nt, Synthetic Construct
  source 1..27: mol_type = other RNA
gacttaccaaacctatgcaaactccga

SEQ ID NO: 24914 - RNA, 24 nt, Synthetic Construct
  source 1..24: mol_type = other RNA
tgatatgtttgatatattaggttg

SEQ ID NO: 24915 - RNA, 18 nt, Synthetic Construct
  source 1..18: mol_type = other RNA
acagtcaggatgttggct

SEQ ID NO: 24916 - RNA, 15 nt, Synthetic Construct
  source 1..15: mol_type = other RNA
gtctcgccgacggca

SEQ ID NO: 24917 - RNA, 15 nt, Synthetic Construct
  source 1..15: mol_type = other RNA
gtctcgccgacggca

SEQ ID NO: 24918 - RNA, 25 nt, Synthetic Construct
  source 1..25: mol_type = other RNA
ttgaggatatgagatcgagacggca

SEQ ID NO: 24919 - RNA, 25 nt, Synthetic Construct
  source 1..25: mol_type = other RNA
ttgaggatatgagatcgagacggca

SEQ ID NO: 24920 - RNA, 21 nt, Synthetic Construct
  source 1..21: mol_type = other RNA
tcctgtactgagctgcccgag

SEQ ID NO: 24921 - RNA, 21 nt, Synthetic Construct
  source 1..21: mol_type = other RNA
tcctgtactgagctgcccgag

SEQ ID NO: 24922 - RNA, 16 nt, Synthetic Construct
  source 1..16: mol_type = other RNA
gtctacggctatacca

SEQ ID NO: 24923 - RNA, 16 nt, Synthetic Construct
  source 1..16: mol_type = other RNA
gtctacggctatacca

SEQ ID NO: 24924 - RNA, 15 nt, Synthetic Construct
  source 1..15: mol_type = other RNA
gggtgaaagcggggg

SEQ ID NO: 24925 - RNA, 21 nt, Synthetic Construct
  source 1..21: mol_type = other RNA
taaggtagtaggttgtgtggt

SEQ ID NO: 24926 - RNA, 21 nt, Synthetic Construct
  source 1..21: mol_type = other RNA
taaggtagtaggttgtgtggt

SEQ ID NO: 24927 - RNA, 21 nt, Synthetic Construct
  source 1..21: mol_type = other RNA
tcctgtactgagctgcccgag

SEQ ID NO: 24928 - RNA, 21 nt, Synthetic Construct
  source 1..21: mol_type = other RNA
tcctgtactgagctgcccgag

SEQ ID NO: 24929 - RNA, 17 nt, Synthetic Construct
  source 1..17: mol_type = other RNA
atcgtgacgatagtgca

SEQ ID NO: 24930 - RNA, 17 nt, Synthetic Construct
  source 1..17: mol_type = other RNA
atcgtgacgatagtgca

SEQ ID NO: 24931 - RNA, 16 nt, Synthetic Construct
  source 1..16: mol_type = other RNA
tcgtgacgatagtgca

SEQ ID NO: 24932 - RNA, 16 nt, Synthetic Construct
  source 1..16: mol_type = other RNA
tcgtgacgatagtgca

SEQ ID NO: 24933 - RNA, 21 nt, Synthetic Construct
  source 1..21: mol_type = other RNA
taacactgtctggtaaagatg

SEQ ID NO: 24934 - RNA, 21 nt, Synthetic Construct
  source 1..21: mol_type = other RNA
taacactgtctggtaaagatg

SEQ ID NO: 24935 - RNA, 19 nt, Synthetic Construct
  source 1..19: mol_type = other RNA
ctgatcgagtcgtcctgcg

SEQ ID NO: 24936 - RNA, 24 nt, Synthetic Construct
  source 1..24: mol_type = other RNA
tcggatccgtctgagcttggcttt

SEQ ID NO: 24937 - RNA, 24 nt, Synthetic Construct
  source 1..24: mol_type = other RNA
tcggatccgtctgagcttggcttt

SEQ ID NO: 24938 - RNA, 21 nt, Synthetic Construct
  source 1..21: mol_type = other RNA
ttcacagtggctaagttctgc

SEQ ID NO: 24939 - RNA, 24 nt, Synthetic Construct
  source 1..24: mol_type = other RNA
gatgaggcgtgataacgagtctgc

SEQ ID NO: 24940 - RNA, 22 nt, Synthetic Construct
  source 1..22: mol_type = other RNA
tattgcactcgtcccggcctgt

SEQ ID NO: 24941 - RNA, 25 nt, Synthetic Construct
  source 1..25: mol_type = other RNA
ttgaggatatgagatagagacgaca

SEQ ID NO: 24942 - RNA, 25 nt, Synthetic Construct
  source 1..25: mol_type = other RNA
ttgaggatatgagatagagacgaca

SEQ ID NO: 24943 - RNA, 18 nt, Synthetic Construct
  source 1..18: mol_type = other RNA
tccgacatgcgagggttc

SEQ ID NO: 24944 - RNA, 16 nt, Synthetic Construct
  source 1..16: mol_type = other RNA
gtctacggccatgcca

SEQ ID NO: 24945 - RNA, 16 nt, Synthetic Construct
  source 1..16: mol_type = other RNA
gtctacggccatgcca

SEQ ID NO: 24946 - RNA, 24 nt, Synthetic Construct
  source 1..24: mol_type = other RNA
tgaggtagtaggttgtgtggttaa

SEQ ID NO: 24947 - RNA, 24 nt, Synthetic Construct
  source 1..24: mol_type = other RNA
tgaggtagtaggttgtgtggttaa

SEQ ID NO: 24948 - RNA, 23 nt, Synthetic Construct
  source 1..23: mol_type = other RNA
tggtaaaacgacgtacttagtgt

SEQ ID NO: 24949 - RNA, 23 nt, Synthetic Construct
  source 1..23: mol_type = other RNA
tggtaaaacgacgtacttagtgt

SEQ ID NO: 24950 - RNA, 17 nt, Synthetic Construct
  source 1..17: mol_type = other RNA
aagttgaccgcctgggg

SEQ ID NO: 24951 - RNA, 17 nt, Synthetic Construct
  source 1..17: mol_type = other RNA
aagttgaccgcctgggg

SEQ ID NO: 24952 - RNA, 33 nt, Synthetic Construct; identical to SEQ ID NO: 4947
  source 1..33: mol_type = other RNA

SEQ ID NO: 24953 - RNA, 19 nt, Synthetic Construct
  source 1..19: mol_type = other RNA
agtcgacgtatagggtgtg

SEQ ID NO: 24954 - RNA, 21 nt, Synthetic Construct
  source 1..21: mol_type = other RNA
tcctatactgagctgccccga

SEQ ID NO: 24955 - RNA, 21 nt, Synthetic Construct
  source 1..21: mol_type = other RNA
tcctatactgagctgccccga

SEQ ID NO: 24956 - RNA, 23 nt, Synthetic Construct
  source 1..23: mol_type = other RNA
ccctgtactgagctgccccgaga

SEQ ID NO: 24957 - RNA, 23 nt, Synthetic Construct
  source 1..23: mol_type = other RNA
ccctgtactgagctgccccgaga

SEQ ID NO: 24958 - RNA, 20 nt, Synthetic Construct
  source 1..20: mol_type = other RNA
ggaggtagtaggttgtgtgg

SEQ ID NO: 24959 - RNA, 20 nt, Synthetic Construct
  source 1..20: mol_type = other RNA
ggaggtagtaggttgtgtgg

SEQ ID NO: 24960 - RNA, 21 nt, Synthetic Construct
  source 1..21: mol_type = other RNA
tgaggtagtaggttgtatggt

SEQ ID NO: 24961 - RNA, 21 nt, Synthetic Construct
  source 1..21: mol_type = other RNA
tgaggtagtaggttgtatggt

SEQ ID NO: 24962 - RNA, 17 nt, Synthetic Construct
  source 1..17: mol_type = other RNA
cagtagctcgaggaaaa

SEQ ID NO: 24963 - RNA, 17 nt, Synthetic Construct
  source 1..17: mol_type = other RNA
cagtagctcgaggaaaa

SEQ ID NO: 24964 - RNA, 23 nt, Synthetic Construct
  source 1..23: mol_type = other RNA
tggtgatacgacgtacttagtgt

SEQ ID NO: 24965 - RNA, 23 nt, Synthetic Construct
  source 1..23: mol_type = other RNA
tggtgatacgacgtacttagtgt

SEQ ID NO: 24966 - RNA, 25 nt, Synthetic Construct
  source 1..25: mol_type = other RNA
ttgaggatacgagatcgagacgaca

SEQ ID NO: 24967 - RNA, 25 nt, Synthetic Construct
  source 1..25: mol_type = other RNA
ttgaggatacgagatcgagacgaca

SEQ ID NO: 24968 - RNA, 28 nt, Synthetic Construct
  source 1..28: mol_type = other RNA
ggtggctgtagctcagttggtagagtcc

SEQ ID NO: 24969 - RNA, 28 nt, Synthetic Construct
  source 1..28: mol_type = other RNA
ggtggctgtagctcagttggtagagtcc

SEQ ID NO: 24970 - RNA, 25 nt, Synthetic Construct
  source 1..25: mol_type = other RNA
atgaggatatgagatcgagacgaca

SEQ ID NO: 24971 - RNA, 25 nt, Synthetic Construct
  source 1..25: mol_type = other RNA
atgaggatatgagatcgagacgaca

SEQ ID NO: 24972 - RNA, 20 nt, Synthetic Construct
  source 1..20: mol_type = other RNA
cccagtaaacggcggccgta

SEQ ID NO: 24973 - RNA, 39 nt, Synthetic Construct; identical to SEQ ID NO: 4400
  source 1..39: mol_type = other RNA

SEQ ID NO: 24974 - RNA, 39 nt, Synthetic Construct; identical to SEQ ID NO: 4400
  source 1..39: mol_type = other RNA

SEQ ID NO: 24975 - RNA, 22 nt, Synthetic Construct
  source 1..22: mol_type = other RNA
tgttgcacttgtcccggcctgt

SEQ ID NO: 24976 - RNA, 16 nt, Synthetic Construct
  source 1..16: mol_type = other RNA
ccgcttttgtcaggga

SEQ ID NO: 24977 - RNA, 16 nt, Synthetic Construct
  source 1..16: mol_type = other RNA
ccgcttttgtcaggga

SEQ ID NO: 24978 - RNA, 16 nt, Synthetic Construct
  source 1..16: mol_type = other RNA
gactacggccatacca

SEQ ID NO: 24979 - RNA, 22 nt, Synthetic Construct
  source 1..22: mol_type = other RNA
tgaggtggtaggttgtgtggtt

SEQ ID NO: 24980 - RNA, 22 nt, Synthetic Construct
  source 1..22: mol_type = other RNA
tgaggtggtaggttgtgtggtt

SEQ ID NO: 24981 - RNA, 22 nt, Synthetic Construct
  source 1..22: mol_type = other RNA
tcctgtactgagctgctccgag

SEQ ID NO: 24982 - RNA, 24 nt, Synthetic Construct
  source 1..24: mol_type = other RNA
tgtaaacatccctgactggaagct

SEQ ID NO: 24983 - RNA, 24 nt, Synthetic Construct
  source 1..24: mol_type = other RNA
gctcactgatcgagtcgtcctgcg

SEQ ID NO: 24984 - RNA, 24 nt, Synthetic Construct
  source 1..24: mol_type = other RNA
gctcactgatcgagtcgtcctgcg

SEQ ID NO: 24985 - RNA, 20 nt, Synthetic Construct
  source 1..20: mol_type = other RNA
tgaggtagtaggttgtgtga

SEQ ID NO: 24986 - RNA, 20 nt, Synthetic Construct
  source 1..20: mol_type = other RNA
tgaggtagtaggttgtgtga

SEQ ID NO: 24987 - RNA, 26 nt, Synthetic Construct
  source 1..26: mol_type = other RNA
gagcagctaataccgcatacgacctg

SEQ ID NO: 24988 - RNA, 26 nt, Synthetic Construct
  source 1..26: mol_type = other RNA
gagcagctaataccgcatacgacctg

SEQ ID NO: 24989 - RNA, 30 nt, Synthetic Construct; identical to SEQ ID NO: 2840
  source 1..30: mol_type = other RNA

SEQ ID NO: 24990 - RNA, 21 nt, Synthetic Construct
  source 1..21: mol_type = other RNA
tcctgtaccgagctgccccga

SEQ ID NO: 24991 - RNA, 21 nt, Synthetic Construct
  source 1..21: mol_type = other RNA
tcctgtaccgagctgccccga

SEQ ID NO: 24992 - RNA, 28 nt, Synthetic Construct
  source 1..28: mol_type = other RNA
ggtggctgtagctcagttggtagagtcc

SEQ ID NO: 24993 - RNA, 28 nt, Synthetic Construct
  source 1..28: mol_type = other RNA
ggtggctgtagctcagttggtagagtcc

SEQ ID NO: 24994 - RNA, 16 nt, Synthetic Construct
  source 1..16: mol_type = other RNA
gcagacgaagtgagtg

SEQ ID NO: 24995 - RNA, 16 nt, Synthetic Construct
  source 1..16: mol_type = other RNA
gcagacgaagtgagtg

SEQ ID NO: 24996 - RNA, 18 nt, Synthetic Construct
  source 1..18: mol_type = other RNA
tctaatgagactgccggt

SEQ ID NO: 24997 - RNA, 18 nt, Synthetic Construct
  source 1..18: mol_type = other RNA
tctaatgagactgccggt

SEQ ID NO: 24998 - RNA, 22 nt, Synthetic Construct
  source 1..22: mol_type = other RNA
gtagtgtttcctactttatgga

SEQ ID NO: 24999 - RNA, 22 nt, Synthetic Construct
  source 1..22: mol_type = other RNA
gtagtgtttcctactttatgga

SEQ ID NO: 25000 - RNA, 21 nt, Synthetic Construct
  source 1..21: mol_type = other RNA
tggggtagtagtttgtgctgt

SEQ ID NO: 25001 - RNA, 21 nt, Synthetic Construct
  source 1..21: mol_type = other RNA
tggggtagtagtttgtgctgt

SEQ ID NO: 25002 - RNA, 23 nt, Synthetic Construct
  source 1..23: mol_type = other RNA
tcctgtactgagctgccccgagg

SEQ ID NO: 25003 - RNA, 23 nt, Synthetic Construct
  source 1..23: mol_type = other RNA
tcctgtactgagctgccccgagg

SEQ ID NO: 25004 - RNA, 18 nt, Synthetic Construct
  source 1..18: mol_type = other RNA
ccaaggggtcgtgggttc

SEQ ID NO: 25005 - RNA, 18 nt, Synthetic Construct
  source 1..18: mol_type = other RNA
ccaaggggtcgtgggttc

SEQ ID NO: 25006 - RNA, 22 nt, Synthetic Construct
  source 1..22: mol_type = other RNA
tcccgtactgagctgccccgag

SEQ ID NO: 25007 - RNA, 22 nt, Synthetic Construct
  source 1..22: mol_type = other RNA
tcccgtactgagctgccccgag

SEQ ID NO: 25008 - RNA, 23 nt, Synthetic Construct
  source 1..23: mol_type = other RNA
gggtaatacgacgtacttagtgt

SEQ ID NO: 25009 - RNA, 23 nt, Synthetic Construct
  source 1..23: mol_type = other RNA
gggtaatacgacgtacttagtgt

SEQ ID NO: 25010 - RNA, 20 nt, Synthetic Construct
  source 1..20: mol_type = other RNA
tgaggtagtgggttgtgtgg

SEQ ID NO: 25011 - RNA, 20 nt, Synthetic Construct
  source 1..20: mol_type = other RNA
tgaggtagtgggttgtgtgg

SEQ ID NO: 25012 - RNA, 21 nt, Synthetic Construct
  source 1..21: mol_type = other RNA
tccttcattccaccggagtct

SEQ ID NO: 25013 - RNA, 21 nt, Synthetic Construct
  source 1..21: mol_type = other RNA
tccttcattccaccggagtct

SEQ ID NO: 25014 - RNA, 21 nt, Synthetic Construct
  source 1..21: mol_type = other RNA
gcccgtgttcggaagattttc

SEQ ID NO: 25015 - RNA, 21 nt, Synthetic Construct
  source 1..21: mol_type = other RNA
gcccgtgttcggaagattttc

SEQ ID NO: 25016 - RNA, 23 nt, Synthetic Construct
  source 1..23: mol_type = other RNA
tcccgtactgagctgccccgaga

SEQ ID NO: 25017 - RNA, 17 nt, Synthetic Construct
  source 1..17: mol_type = other RNA
gcggctgtagctcagtt

SEQ ID NO: 25018 - RNA, 17 nt, Synthetic Construct
  source 1..17: mol_type = other RNA
atgcaagtcgaacggta

SEQ ID NO: 25019 - RNA, 17 nt, Synthetic Construct
  source 1..17: mol_type = other RNA
atgcaagtcgaacggta

SEQ ID NO: 25020 - RNA, 19 nt, Synthetic Construct
  source 1..19: mol_type = other RNA
aacagtcaggatgttggct

SEQ ID NO: 25021 - RNA, 19 nt, Synthetic Construct
  source 1..19: mol_type = other RNA
aacagtcaggatgttggct

SEQ ID NO: 25022 - RNA, 30 nt, Synthetic Construct; identical to SEQ ID NO: 1958
  source 1..30: mol_type = other RNA

SEQ ID NO: 25023 - RNA, 30 nt, Synthetic Construct; identical to SEQ ID NO: 1958
  source 1..30: mol_type = other RNA

SEQ ID NO: 25024 - RNA, 15 nt, Synthetic Construct
  source 1..15: mol_type = other RNA
acccttgtcattagt

SEQ ID NO: 25025 - RNA, 15 nt, Synthetic Construct
  source 1..15: mol_type = other RNA
acccttgtcattagt

SEQ ID NO: 25026 - RNA, 23 nt, Synthetic Construct
  source 1..23: mol_type = other RNA
aggtaatacgacgtacttagtgt

SEQ ID NO: 25027 - RNA, 23 nt, Synthetic Construct
  source 1..23: mol_type = other RNA
aggtaatacgacgtacttagtgt

SEQ ID NO: 25028 - RNA, 30 nt, Synthetic Construct; identical to SEQ ID NO: 2308
  source 1..30: mol_type = other RNA

SEQ ID NO: 25029 - RNA, 16 nt, Synthetic Construct
  source 1..16: mol_type = other RNA
gtctacggctatacca

SEQ ID NO: 25030 - RNA, 23 nt, Synthetic Construct
  source 1..23: mol_type = other RNA
tcctgtgctgagctgccccgaga

SEQ ID NO: 25031 - RNA, 22 nt, Synthetic Construct
  source 1..22: mol_type = other RNA
ncctgtactgagctgccccgag

SEQ ID NO: 25032 - RNA, 37 nt, Synthetic Construct; identical to SEQ ID NO: 2482
  source 1..37: mol_type = other RNA

SEQ ID NO: 25033 - RNA, 37 nt, Synthetic Construct; identical to SEQ ID NO: 2482
  source 1..37: mol_type = other RNA

SEQ ID NO: 25034 - RNA, 18 nt, Synthetic Construct
  source 1..18: mol_type = other RNA
cctgtaccgatcaatagt

SEQ ID NO: 25035 - RNA, 18 nt, Synthetic Construct
  source 1..18: mol_type = other RNA
cctgtaccgatcaatagt

SEQ ID NO: 25036 - RNA, 22 nt, Synthetic Construct
  source 1..22: mol_type = other RNA
gtaaacggcgggagtaactatg

SEQ ID NO: 25037 - RNA, 22 nt, Synthetic Construct
  source 1..22: mol_type = other RNA
tctttgttcgattccgttgagt

SEQ ID NO: 25038 - RNA, 22 nt, Synthetic Construct
  source 1..22: mol_type = other RNA
tctttgttcgattccgttgagt

SEQ ID NO: 25039 - RNA, 36 nt, Synthetic Construct; identical to SEQ ID NO: 2444
  source 1..36: mol_type = other RNA

SEQ ID NO: 25040 - RNA, 17 nt, Synthetic Construct
  source 1..17: mol_type = other RNA
cgatctgtagctggtct

SEQ ID NO: 25041 - RNA, 22 nt, Synthetic Construct
  source 1..22: mol_type = other RNA
tgaggtagtaggttgtgtggat

SEQ ID NO: 25042 - RNA, 23 nt, Synthetic Construct
  source 1..23: mol_type = other RNA
tggtaataagacgtacttagtgt

SEQ ID NO: 25043 - RNA, 23 nt, Synthetic Construct
  source 1..23: mol_type = other RNA
tggtaatacgatgtacttagtgt

SEQ ID NO: 25044 - RNA, 23 nt, Synthetic Construct
  source 1..23: mol_type = other RNA
tggtaatacgatgtacttagtgt

SEQ ID NO: 25045 - RNA, 23 nt, Synthetic Construct
  source 1..23: mol_type = other RNA
tggtaatacgacgtactcagtgt

SEQ ID NO: 25046 - RNA, 23 nt, Synthetic Construct
  source 1..23: mol_type = other RNA
tggtaatacgacgtactcagtgt

SEQ ID NO: 25047 - RNA, 21 nt, Synthetic Construct
  source 1..21: mol_type = other RNA
tcctgtgctgagctgccccga

SEQ ID NO: 25048 - RNA, 21 nt, Synthetic Construct
  source 1..21: mol_type = other RNA
tcctgtgctgagctgccccga

SEQ ID NO: 25049 - RNA, 18 nt, Synthetic Construct
  source 1..18: mol_type = other RNA
ggtgcaagcgttaatcgg

SEQ ID NO: 25050 - RNA, 18 nt, Synthetic Construct
  source 1..18: mol_type = other RNA
ggtgcaagcgttaatcgg

SEQ ID NO: 25051 - RNA, 16 nt, Synthetic Construct
  source 1..16: mol_type = other RNA
cccctggacctgtact

SEQ ID NO: 25052 - RNA, 36 nt, Synthetic Construct; identical to SEQ ID NO: 2469
  source 1..36: mol_type = other RNA

SEQ ID NO: 25053 - RNA, 23 nt, Synthetic Construct
  source 1..23: mol_type = other RNA
tggtaatacgacgtacttagtat

SEQ ID NO: 25054 - RNA, 23 nt, Synthetic Construct
  source 1..23: mol_type = other RNA
tggtaatacgacgtacttagtat

SEQ ID NO: 25055 - RNA, 21 nt, Synthetic Construct
  source 1..21: mol_type = other RNA
tctttggttatctagctgtat

SEQ ID NO: 25056 - RNA, 21 nt, Synthetic Construct
  source 1..21: mol_type = other RNA
tctttggttatctagctgtat

SEQ ID NO: 25057 - RNA, 22 nt, Synthetic Construct
  source 1..22: mol_type = other RNA
gcactctaatgagactgccggt

SEQ ID NO: 25058 - RNA, 28 nt, Synthetic Construct
  source 1..28: mol_type = other RNA
tgttggttcaagcgtgtagtcgtgctct

SEQ ID NO: 25059 - RNA, 16 nt, Synthetic Construct
  source 1..16: mol_type = other RNA
gtcaacggccatacca

SEQ ID NO: 25060 - RNA, 15 nt, Synthetic Construct
  source 1..15: mol_type = other RNA
tggccgtcgtcagct

SEQ ID NO: 25061 - RNA, 15 nt, Synthetic Construct
  source 1..15: mol_type = other RNA
tggccgtcgtcagct

SEQ ID NO: 25062 - RNA, 23 nt, Synthetic Construct
  source 1..23: mol_type = other RNA
tgtcagtttgtcaaataccccat

SEQ ID NO: 25063 - RNA, 23 nt, Synthetic Construct
  source 1..23: mol_type = other RNA
tgtcagtttgtcaaataccccat

SEQ ID NO: 25064 - RNA, 28 nt, Synthetic Construct
  source 1..28: mol_type = other RNA
ggcagggttcgtgactggggtgaagtcg

SEQ ID NO: 25065 - RNA, 28 nt, Synthetic Construct
  source 1..28: mol_type = other RNA
ggcagggttcgtgactggggtgaagtcg

SEQ ID NO: 25066 - RNA, 22 nt, Synthetic Construct
  source 1..22: mol_type = other RNA
tggaatgtaaagaagtatgtac

SEQ ID NO: 25067 - RNA, 23 nt, Synthetic Construct
  source 1..23: mol_type = other RNA
gtctttgttcgattccgttgagt

SEQ ID NO: 25068 - RNA, 34 nt, Synthetic Construct; identical to SEQ ID NO: 2183
  source 1..34: mol_type = other RNA

SEQ ID NO: 25069 - RNA, 21 nt, Synthetic Construct
  source 1..21: mol_type = other RNA
agcgtgcttgactgcgagact

SEQ ID NO: 25070 - RNA, 22 nt, Synthetic Construct
  source 1..22: mol_type = other RNA
tgaggtagtaggttgtgtgatt

SEQ ID NO: 25071 - RNA, 23 nt, Synthetic Construct
  source 1..23: mol_type = other RNA
tagtaatacgacgtacttagtgt

SEQ ID NO: 25072 - RNA, 23 nt, Synthetic Construct
  source 1..23: mol_type = other RNA
tagtaatacgacgtacttagtgt

SEQ ID NO: 25073 - RNA, 23 nt, Synthetic Construct
  source 1..23: mol_type = other RNA
cgaggggcagagagcgagacttt

SEQ ID NO: 25074 - RNA, 23 nt, Synthetic Construct
  source 1..23: mol_type = other RNA
cgaggggcagagagcgagacttt

SEQ ID NO: 25075 - RNA, 26 nt, Synthetic Construct
  source 1..26: mol_type = other RNA
gactcttagcggtggatcactcggct

SEQ ID NO: 25076 - RNA, 26 nt, Synthetic Construct
  source 1..26: mol_type = other RNA
gactcttagcggtggatcactcggct

SEQ ID NO: 25077 - RNA, 21 nt, Synthetic Construct
  source 1..21: mol_type = other RNA
tggagtgtgacaatggtgttc

SEQ ID NO: 25078 - RNA, 21 nt, Synthetic Construct
  source 1..21: mol_type = other RNA
tggagtgtgacaatggtgttc

SEQ ID NO: 25079 - RNA, 22 nt, Synthetic Construct
  source 1..22: mol_type = other RNA
tggagtgtaaagaagtatgtat

SEQ ID NO: 25080 - RNA, 22 nt, Synthetic Construct
  source 1..22: mol_type = other RNA
tggagtgtaaagaagtatgtat

SEQ ID NO: 25081 - RNA, 17 nt, Synthetic Construct
  source 1..17: mol_type = other RNA
gaagttgaccgcctggg

SEQ ID NO: 25082 - RNA, 22 nt, Synthetic Construct
  source 1..22: mol_type = other RNA
tcctgtacagagctgccccgag

SEQ ID NO: 25083 - RNA, 22 nt, Synthetic Construct
  source 1..22: mol_type = other RNA
tcctgtacagagctgccccgag

SEQ ID NO: 25084 - RNA, 27 nt, Synthetic Construct
  source 1..27: mol_type = other RNA
ccccccactgctaagtttgactggctt

SEQ ID NO: 25085 - RNA, 16 nt, Synthetic Construct
  source 1..16: mol_type = other RNA
gtctacgaccatacca

SEQ ID NO: 25086 - RNA, 21 nt, Synthetic Construct
  source 1..21: mol_type = other RNA
ggaggggcagagagcgagact

SEQ ID NO: 25087 - RNA, 20 nt, Synthetic Construct
  source 1..20: mol_type = other RNA
cgaggtagtaggttgtgtgg

SEQ ID NO: 25088 - RNA, 20 nt, Synthetic Construct
  source 1..20: mol_type = other RNA
cgaggtagtaggttgtgtgg

SEQ ID NO: 25089 - RNA, 18 nt, Synthetic Construct
  source 1..18: mol_type = other RNA
tcccaagggtatggctgt

SEQ ID NO: 25090 - RNA, 41 nt, Synthetic Construct; identical to SEQ ID NO: 2441
  source 1..41: mol_type = other RNA

SEQ ID NO: 25091 - RNA, 22 nt, Synthetic Construct
  source 1..22: mol_type = other RNA
tcggatccgtctgagcttggct

SEQ ID NO: 25092 - RNA, 20 nt, Synthetic Construct
  source 1..20: mol_type = other RNA
tggggtagtaggttgtatag

SEQ ID NO: 25093 - RNA, 20 nt, Synthetic Construct
  source 1..20: mol_type = other RNA
tggggtagtaggttgtatag

SEQ ID NO: 25094 - RNA, 22 nt, Synthetic Construct
  source 1..22: mol_type = other RNA
tcctgtactgggctgccccgag

SEQ ID NO: 25095 - RNA, 22 nt, Synthetic Construct
  source 1..22: mol_type = other RNA
tcctgtactgggctgccccgag

SEQ ID NO: 25096 - RNA, 18 nt, Synthetic Construct
  source 1..18: mol_type = other RNA
cctgaagaataagcaccg

SEQ ID NO: 25097 - RNA, 20 nt, Synthetic Construct
  source 1..20: mol_type = other RNA
gcgtgcttgactgcgagact

SEQ ID NO: 25098 - RNA, 15 nt, Synthetic Construct
  source 1..15: mol_type = other RNA
aggtgggaggctttg

SEQ ID NO: 25099 - RNA, 15 nt, Synthetic Construct
  source 1..15: mol_type = other RNA
aggtgggaggctttg

SEQ ID NO: 25100 - RNA, 22 nt, Synthetic Construct
  source 1..22: mol_type = other RNA
tcctgtactgagcagccccgag

SEQ ID NO: 25101 - RNA, 22 nt, Synthetic Construct
  source 1..22: mol_type = other RNA
tcctgtactgagcagccccgag

SEQ ID NO: 25102 - RNA, 19 nt, Synthetic Construct
  source 1..19: mol_type = other RNA
aggacagtgaaacgagtca

SEQ ID NO: 25103 - RNA, 19 nt, Synthetic Construct
  source 1..19: mol_type = other RNA
aggacagtgaaacgagtca

SEQ ID NO: 25104 - RNA, 23 nt, Synthetic Construct
  source 1..23: mol_type = other RNA
cgcgacctcagatcagacgtggc

SEQ ID NO: 25105 - RNA, 23 nt, Synthetic Construct
  source 1..23: mol_type = other RNA
cgcgacctcagatcagacgtggc

SEQ ID NO: 25106 - RNA, 17 nt, Synthetic Construct
  source 1..17: mol_type = other RNA
tcagtagctcgaggaaa

SEQ ID NO: 25107 - RNA, 17 nt, Synthetic Construct
  source 1..17: mol_type = other RNA
tcagtagctcgaggaaa

SEQ ID NO: 25108 - RNA, 27 nt, Synthetic Construct
  source 1..27: mol_type = other RNA
cgtgtgaaagtaggtcatcgtcaggct

SEQ ID NO: 25109 - RNA, 23 nt, Synthetic Construct
  source 1..23: mol_type = other RNA
tcctgtactgagctgccccggga

SEQ ID NO: 25110 - RNA, 42 nt, Synthetic Construct; identical to SEQ ID NO: 748
  source 1..42: mol_type = other RNA

SEQ ID NO: 25111 - RNA, 23 nt, Synthetic Construct
  source 1..23: mol_type = other RNA
nggtaatacgacgtacttagtgt

SEQ ID NO: 25112 - RNA, 23 nt, Synthetic Construct
  source 1..23: mol_type = other RNA
nggtaatacgacgtacttagtgt

SEQ ID NO: 25113 - RNA, 35 nt, Synthetic Construct; identical to SEQ ID NO: 2399
  source 1..35: mol_type = other RNA

SEQ ID NO: 25114 - RNA, 23 nt, Synthetic Construct
  source 1..23: mol_type = other RNA
tgaggtagtaggttgtgtggttc

SEQ ID NO: 25115 - RNA, 23 nt, Synthetic Construct
  source 1..23: mol_type = other RNA
tgaggtagtaggttgtgtggttc

SEQ ID NO: 25116 - RNA, 27 nt, Synthetic Construct
  source 1..27: mol_type = other RNA
ccccccactgctgaatttgactggctt

SEQ ID NO: 25117 - RNA, 22 nt, Synthetic Construct
  source 1..22: mol_type = other RNA
tggaatgtaaagaggtatgtat

SEQ ID NO: 25118 - RNA, 22 nt, Synthetic Construct
  source 1..22: mol_type = other RNA
tggaatgtaaagaggtatgtat

SEQ ID NO: 25119 - RNA, 18 nt, Synthetic Construct
  source 1..18: mol_type = other RNA
gcgaaattccttgtcggg

SEQ ID NO: 25120 - RNA, 19 nt, Synthetic Construct
  source 1..19: mol_type = other RNA
aggacagtgaaacgagtca

SEQ ID NO: 25121 - RNA, 19 nt, Synthetic Construct
  source 1..19: mol_type = other RNA
aggacagtgaaacgagtca

SEQ ID NO: 25122 - RNA, 22 nt, Synthetic Construct
  source 1..22: mol_type = other RNA
tgaggtagtaggctgtgtggtt

SEQ ID NO: 25123 - RNA, 21 nt, Synthetic Construct
  source 1..21: mol_type = other RNA
ccctgtactgagctgccccga

SEQ ID NO: 25124 - RNA, 27 nt, Synthetic Construct
  source 1..27: mol_type = other RNA
gttggttcaagcgtgtagtcgtgctct

SEQ ID NO: 25125 - RNA, 27 nt, Synthetic Construct
  source 1..27: mol_type = other RNA
gttggttcaagcgtgtagtcgtgctct

SEQ ID NO: 25126 - RNA, 23 nt, Synthetic Construct
  source 1..23: mol_type = other RNA
tcctgtaccgagctgccccgagt

SEQ ID NO: 25127 - RNA, 23 nt, Synthetic Construct
  source 1..23: mol_type = other RNA
tcctgtaccgagctgccccgagt

SEQ ID NO: 25128 - RNA, 20 nt, Synthetic Construct
  source 1..20: mol_type = other RNA
gcgtgcttgactgcgagact

SEQ ID NO: 25129 - RNA, 20 nt, Synthetic Construct
  source 1..20: mol_type = other RNA
gcgtgcttgactgcgagact

SEQ ID NO: 25130 - RNA, 22 nt, Synthetic Construct
  source 1..22: mol_type = other RNA
tcactgatcgagtcgtcctgcg

SEQ ID NO: 25131 - RNA, 34 nt, Synthetic Construct; identical to SEQ ID NO: 385
  source 1..34: mol_type = other RNA

SEQ ID NO: 25132 - RNA, 34 nt, Synthetic Construct; identical to SEQ ID NO: 385
  source 1..34: mol_type = other RNA

SEQ ID NO: 25133 - RNA, 22 nt, Synthetic Construct
  source 1..22: mol_type = other RNA
tgaggtagtagattgtgtggtt

SEQ ID NO: 25134 - RNA, 22 nt, Synthetic Construct
  source 1..22: mol_type = other RNA
tgaggtagtagattgtgtggtt

SEQ ID NO: 25135 - RNA, 19 nt, Synthetic Construct
  source 1..19: mol_type = other RNA
cctgtaccgatcaatagtg

SEQ ID NO: 25136 - RNA, 15 nt, Synthetic Construct
  source 1..15: mol_type = other RNA
cctcgcgcgattgga

SEQ ID NO: 25137 - RNA, 15 nt, Synthetic Construct
  source 1..15: mol_type = other RNA
ggtggctgtagctca

SEQ ID NO: 25138 - RNA, 15 nt, Synthetic Construct
  source 1..15: mol_type = other RNA
ggtggctgtagctca

SEQ ID NO: 25139 - RNA, 18 nt, Synthetic Construct
  source 1..18: mol_type = other RNA
cctcgcgcgattggagcg

SEQ ID NO: 25140 - RNA, 20 nt, Synthetic Construct
  source 1..20: mol_type = other RNA
tggggtagtaggttgtgtgg

SEQ ID NO: 25141 - RNA, 20 nt, Synthetic Construct
  source 1..20: mol_type = other RNA
tggggtagtaggttgtgtgg

SEQ ID NO: 25142 - RNA, 19 nt, Synthetic Construct
  source 1..19: mol_type = other RNA
cgactcttagcggtggatc

SEQ ID NO: 25143 - RNA, 19 nt, Synthetic Construct
  source 1..19: mol_type = other RNA
cgactcttagcggtggatc

SEQ ID NO: 25144 - RNA, 37 nt, Synthetic Construct; identical to SEQ ID NO: 2482
  source 1..37: mol_type = other RNA

SEQ ID NO: 25145 - RNA, 37 nt, Synthetic Construct; identical to SEQ ID NO: 2482
  source 1..37: mol_type = other RNA

SEQ ID NO: 25146 - RNA, 15 nt, Synthetic Construct
  source 1..15: mol_type = other RNA
agttgaccgcctggg

SEQ ID NO: 25147 - RNA, 36 nt, Synthetic Construct; identical to SEQ ID NO: 2478
  source 1..36: mol_type = other RNA

SEQ ID NO: 25148 - RNA, 22 nt, Synthetic Construct
  source 1..22: mol_type = other RNA
ttcaagtaatccaggataggcc

SEQ ID NO: 25149 - RNA, 37 nt, Synthetic Construct; identical to SEQ ID NO: 5125
  source 1..37: mol_type = other RNA

SEQ ID NO: 25150 - RNA, 40 nt, Synthetic Construct; identical to SEQ ID NO: 2684
  source 1..40: mol_type = other RNA

SEQ ID NO: 25151 - RNA, 40 nt, Synthetic Construct; identical to SEQ ID NO: 2684
  source 1..40: mol_type = other RNA

SEQ ID NO: 25152 - RNA, 18 nt, Synthetic Construct
  source 1..18: mol_type = other RNA
ccaaggggtcgtgggttc

SEQ ID NO: 25153 - RNA, 19 nt, Synthetic Construct
  source 1..19: mol_type = other RNA
cctgtctgaatatgggggg

SEQ ID NO: 25154 - RNA, 20 nt, Synthetic Construct
  source 1..20: mol_type = other RNA
cgaggtagtaggttgtatag

SEQ ID NO: 25155 - RNA, 20 nt, Synthetic Construct
  source 1..20: mol_type = other RNA
cgaggtagtaggttgtatag

SEQ ID NO: 25156 - RNA, 32 nt, Synthetic Construct; identical to SEQ ID NO: 3092
  source 1..32: mol_type = other RNA

SEQ ID NO: 25157 - RNA, 32 nt, Synthetic Construct; identical to SEQ ID NO: 3092
  source 1..32: mol_type = other RNA

SEQ ID NO: 25158 - RNA, 17 nt, Synthetic Construct
  source 1..17: mol_type = other RNA
ctaatgagactgccggt

SEQ ID NO: 25159 - RNA, 17 nt, Synthetic Construct
  source 1..17: mol_type = other RNA
ctaatgagactgccggt

SEQ ID NO: 25160 - RNA, 23 nt, Synthetic Construct
  source 1..23: mol_type = other RNA
tcactgatcgagtcgtcctgcgc

SEQ ID NO: 25161 - RNA, 23 nt, Synthetic Construct
  source 1..23: mol_type = other RNA
tcactgatcgagtcgtcctgcgc

SEQ ID NO: 25162 - RNA, 23 nt, Synthetic Construct
  source 1..23: mol_type = other RNA
tgaggggcagagagcgagactct

SEQ ID NO: 25163 - RNA, 22 nt, Synthetic Construct
  source 1..22: mol_type = other RNA
tggagtgtgacaatggtgcttg

SEQ ID NO: 25164 - RNA, 22 nt, Synthetic Construct
  source 1..22: mol_type = other RNA
tggagtgtgacaatggtgcttg

SEQ ID NO: 25165 - RNA, 17 nt, Synthetic Construct
  source 1..17: mol_type = other RNA
gactcttagcggtggat

SEQ ID NO: 25166 - RNA, 17 nt, Synthetic Construct
  source 1..17: mol_type = other RNA
gactcttagcggtggat

SEQ ID NO: 25167 - RNA, 23 nt, Synthetic Construct
  source 1..23: mol_type = other RNA
tcggatccgtctgagcttggctt

SEQ ID NO: 25168 - RNA, 23 nt, Synthetic Construct
  source 1..23: mol_type = other RNA
tcggatccgtctgagcttggctt

SEQ ID NO: 25169 - RNA, 15 nt, Synthetic Construct
  source 1..15: mol_type = other RNA
atccctccgactccg

SEQ ID NO: 25170 - RNA, 15 nt, Synthetic Construct
  source 1..15: mol_type = other RNA
atccctccgactccg

SEQ ID NO: 25171 - RNA, 18 nt, Synthetic Construct
  source 1..18: mol_type = other RNA
ggtgcaagcgttaatcgg

SEQ ID NO: 25172 - RNA, 22 nt, Synthetic Construct
  source 1..22: mol_type = other RNA
tgtcaactggttgttgggaggg

SEQ ID NO: 25173 - RNA, 22 nt, Synthetic Construct
  source 1..22: mol_type = other RNA
tgtcaactggttgttgggaggg

SEQ ID NO: 25174 - RNA, 25 nt, Synthetic Construct
  source 1..25: mol_type = other RNA
atgaggatatgagatcgagacgaca

SEQ ID NO: 25175 - RNA, 25 nt, Synthetic Construct
  source 1..25: mol_type = other RNA
atgaggatatgagatcgagacgaca

SEQ ID NO: 25176 - RNA, 23 nt, Synthetic Construct
  source 1..23: mol_type = other RNA
tcctgtactgagctgccccgagc

SEQ ID NO: 25177 - RNA, 23 nt, Synthetic Construct
  source 1..23: mol_type = other RNA
tcctgtactgagctgccccgagc

SEQ ID NO: 25178 - RNA, 23 nt, Synthetic Construct
  source 1..23: mol_type = other RNA
tggtaatacgacgtacttagcgt

SEQ ID NO: 25179 - RNA, 23 nt, Synthetic Construct
  source 1..23: mol_type = other RNA
tggtaatacgacgtacttagcgt

SEQ ID NO: 25180 - RNA, 18 nt, Synthetic Construct
  source 1..18: mol_type = other RNA
atagggaacgtgagctgg

SEQ ID NO: 25181 - RNA, 18 nt, Synthetic Construct
  source 1..18: mol_type = other RNA
atagggaacgtgagctgg

SEQ ID NO: 25182 - RNA, 20 nt, Synthetic Construct
  source 1..20: mol_type = other RNA
acccttgtcattagttgcta

SEQ ID NO: 25183 - RNA, 21 nt, Synthetic Construct
  source 1..21: mol_type = other RNA
tgaggtagtaagttgtgtggt

SEQ ID NO: 25184 - RNA, 21 nt, Synthetic Construct
  source 1..21: mol_type = other RNA
tgaggtagtaagttgtgtggt

SEQ ID NO: 25185 - RNA, 16 nt, Synthetic Construct
  source 1..16: mol_type = other RNA
gcaagaggtcagcggt

SEQ ID NO: 25186 - RNA, 16 nt, Synthetic Construct
  source 1..16: mol_type = other RNA
gcaagaggtcagcggt

SEQ ID NO: 25187 - RNA, 19 nt, Synthetic Construct
  source 1..19: mol_type = other RNA
atcacattgccagggattt

SEQ ID NO: 25188 - RNA, 19 nt, Synthetic Construct
  source 1..19: mol_type = other RNA
atcacattgccagggattt

SEQ ID NO: 25189 - RNA, 19 nt, Synthetic Construct
  source 1..19: mol_type = other RNA
cctgtaccgatcaatagtg

SEQ ID NO: 25190 - RNA, 19 nt, Synthetic Construct
  source 1..19: mol_type = other RNA
cctgtaccgatcaatagtg

SEQ ID NO: 25191 - RNA, 23 nt, Synthetic Construct
  source 1..23: mol_type = other RNA
tccctggtggtctagtggttagg

SEQ ID NO: 25192 - RNA, 23 nt, Synthetic Construct
  source 1..23: mol_type = other RNA
tccctggtggtctagtggttagg

SEQ ID NO: 25193 - RNA, 26 nt, Synthetic Construct
  source 1..26: mol_type = other RNA
gaggaacactagtggcgtaggcgaga

SEQ ID NO: 25194 - RNA, 26 nt, Synthetic Construct
  source 1..26: mol_type = other RNA
gaggaacactagtggcgtaggcgaga

SEQ ID NO: 25195 - RNA, 16 nt, Synthetic Construct
  source 1..16: mol_type = other RNA
gatctgtagctggtct

SEQ ID NO: 25196 - RNA, 27 nt, Synthetic Construct
  source 1..27: mol_type = other RNA
gttggttcaagcgtgtagtcgtgctct

SEQ ID NO: 25197 - RNA, 25 nt, Synthetic Construct
  source 1..25: mol_type = other RNA
ttgaggatgtgagatcgagacgaca

SEQ ID NO: 25198 - RNA, 25 nt, Synthetic Construct
  source 1..25: mol_type = other RNA
ttgaggatgtgagatcgagacgaca

SEQ ID NO: 25199 - RNA, 30 nt, Synthetic Construct; identical to SEQ ID NO: 3933
  source 1..30: mol_type = other RNA

SEQ ID NO: 25200 - RNA, 23 nt, Synthetic Construct
  source 1..23: mol_type = other RNA
agcagcattgtacagggctatgt

SEQ ID NO: 25201 - RNA, 23 nt, Synthetic Construct
  source 1..23: mol_type = other RNA
agcagcattgtacagggctatgt

SEQ ID NO: 25202 - RNA, 20 nt, Synthetic Construct
  source 1..20: mol_type = other RNA
tgaggtagtaggttgtgtgt

SEQ ID NO: 25203 - RNA, 20 nt, Synthetic Construct
  source 1..20: mol_type = other RNA
tgaggtagtaggttgtgtgt

SEQ ID NO: 25204 - RNA, 23 nt, Synthetic Construct
  source 1..23: mol_type = other RNA
tggtaatacgacgtacttaatgt

SEQ ID NO: 25205 - RNA, 23 nt, Synthetic Construct
  source 1..23: mol_type = other RNA
tggtaatacgacgtacttaatgt

SEQ ID NO: 25206 - RNA, 23 nt, Synthetic Construct
  source 1..23: mol_type = other RNA
tggtaattcgacgtacttagtgt

SEQ ID NO: 25207 - RNA, 32 nt, Synthetic Construct; identical to SEQ ID NO: 2052
  source 1..32: mol_type = other RNA

SEQ ID NO: 25208 - RNA, 27 nt, Synthetic Construct
  source 1..27: mol_type = other RNA
ggatttccccttggggttgtaggacca

SEQ ID NO: 25209 - RNA, 27 nt, Synthetic Construct
  source 1..27: mol_type = other RNA
ggatttccccttggggttgtaggacca

SEQ ID NO: 25210 - RNA, 16 nt, Synthetic Construct
  source 1..16: mol_type = other RNA
gcctacggccatacca

SEQ ID NO: 25211 - RNA, 23 nt, Synthetic Construct
  source 1..23: mol_type = other RNA
ccctgtactgagctgccccgagt

SEQ ID NO: 25212 - RNA, 21 nt, Synthetic Construct
  source 1..21: mol_type = other RNA
acacatgcaagtcgaacggta

SEQ ID NO: 25213 - RNA, 21 nt, Synthetic Construct
  source 1..21: mol_type = other RNA
acacatgcaagtcgaacggta

SEQ ID NO: 25214 - RNA, 21 nt, Synthetic Construct
  source 1..21: mol_type = other RNA
tgaggaagtaggttgtgtggt

SEQ ID NO: 25215 - RNA, 21 nt, Synthetic Construct
  source 1..21: mol_type = other RNA
tgaggaagtaggttgtgtggt

SEQ ID NO: 25216 - RNA, 36 nt, Synthetic Construct; identical to SEQ ID NO: 2660
  source 1..36: mol_type = other RNA

SEQ ID NO: 25217 - RNA, 20 nt, Synthetic Construct
  source 1..20: mol_type = other RNA
tgaggtagcaggttgtgtgg

SEQ ID NO: 25218 - RNA, 20 nt, Synthetic Construct
  source 1..20: mol_type = other RNA
tgaggtagcaggttgtgtgg

SEQ ID NO: 25219 - RNA, 30 nt, Synthetic Construct; identical to SEQ ID NO: 751
  source 1..30: mol_type = other RNA

SEQ ID NO: 25220 - RNA, 30 nt, Synthetic Construct; identical to SEQ ID NO: 751
  source 1..30: mol_type = other RNA

SEQ ID NO: 25221 - RNA, 21 nt, Synthetic Construct
  source 1..21: mol_type = other RNA
tgaggtagtaggttgtgtagt

SEQ ID NO: 25222 - RNA, 21 nt, Synthetic Construct
  source 1..21: mol_type = other RNA
tggggtagtaggttgtgtggt

SEQ ID NO: 25223 - RNA, 21 nt, Synthetic Construct
  source 1..21: mol_type = other RNA
tggggtagtaggttgtgtggt

SEQ ID NO: 25224 - RNA, 22 nt, Synthetic Construct
  source 1..22: mol_type = other RNA
tcgtaccgtgagtaataatgca

SEQ ID NO: 25225 - RNA, 22 nt, Synthetic Construct
  source 1..22: mol_type = other RNA
tcagcgccgatgatagtgcgga

SEQ ID NO: 25226 - RNA, 22 nt, Synthetic Construct
  source 1..22: mol_type = other RNA
tcagcgccgatgatagtgcgga

SEQ ID NO: 25227 - RNA, 19 nt, Synthetic Construct
  source 1..19: mol_type = other RNA
cggaagaaggggtgcctgg

SEQ ID NO: 25228 - RNA, 19 nt, Synthetic Construct
  source 1..19: mol_type = other RNA
cggaagaaggggtgcctgg

SEQ ID NO: 25229 - RNA, 22 nt, Synthetic Construct
  source 1..22: mol_type = other RNA
gctcttgactgaagtcccagta

SEQ ID NO: 25230 - RNA, 20 nt, Synthetic Construct
  source 1..20: mol_type = other RNA
tgaggtagtgggttgtatag

SEQ ID NO: 25231 - RNA, 20 nt, Synthetic Construct
  source 1..20: mol_type = other RNA
tgaggtagtgggttgtatag

SEQ ID NO: 25232 - RNA, 21 nt, Synthetic Construct
  source 1..21: mol_type = other RNA
tggagtgtgacaatggcgttt

SEQ ID NO: 25233 - RNA, 21 nt, Synthetic Construct
  source 1..21: mol_type = other RNA
tggagtgtgacaatggcgttt

SEQ ID NO: 25234 - RNA, 26 nt, Synthetic Construct
  source 1..26: mol_type = other RNA
gatttccccttggggttgtaggacca

SEQ ID NO: 25235 - RNA, 26 nt, Synthetic Construct
  source 1..26: mol_type = other RNA
gatttccccttggggttgtaggacca

SEQ ID NO: 25236 - RNA, 23 nt, Synthetic Construct
  source 1..23: mol_type = other RNA
tgaggggcagagagcgagacttg

SEQ ID NO: 25237 - RNA, 16 nt, Synthetic Construct
  source 1..16: mol_type = other RNA
atctacggccatacca

SEQ ID NO: 25238 - RNA, 16 nt, Synthetic Construct
  source 1..16: mol_type = other RNA
atctacggccatacca

SEQ ID NO: 25239 - RNA, 22 nt, Synthetic Construct
  source 1..22: mol_type = other RNA
tcagtagctcgaggaaaagaca

SEQ ID NO: 25240 - RNA, 23 nt, Synthetic Construct
  source 1..23: mol_type = other RNA
tgaggggaagagagcgagacttt

SEQ ID NO: 25241 - RNA, 22 nt, Synthetic Construct
  source 1..22: mol_type = other RNA
tgtgcaaatctatgcaaaactg

SEQ ID NO: 25242 - RNA, 22 nt, Synthetic Construct
  source 1..22: mol_type = other RNA
tgtgcaaatctatgcaaaactg

SEQ ID NO: 25243 - RNA, 19 nt, Synthetic Construct
  source 1..19: mol_type = other RNA
tcagtagctcgaggaaaag

SEQ ID NO: 25244 - RNA, 19 nt, Synthetic Construct
  source 1..19: mol_type = other RNA
tcagtagctcgaggaaaag

SEQ ID NO: 25245 - RNA, 15 nt, Synthetic Construct
  source 1..15: mol_type = other RNA
gcagagcgtcggtct

SEQ ID NO: 25246 - RNA, 15 nt, Synthetic Construct
  source 1..15: mol_type = other RNA
gcagagcgtcggtct

SEQ ID NO: 25247 - RNA, 21 nt, Synthetic Construct
  source 1..21: mol_type = other RNA
tgaggtagtgggttgtgtggt

SEQ ID NO: 25248 - RNA, 21 nt, Synthetic Construct
  source 1..21: mol_type = other RNA
tgaggtagtgggttgtgtggt

SEQ ID NO: 25249 - RNA, 21 nt, Synthetic Construct
  source 1..21: mol_type = other RNA
ggaggggcagagagcgagact

SEQ ID NO: 25250 - RNA, 21 nt, Synthetic Construct
  source 1..21: mol_type = other RNA
ggaggggcagagagcgagact

SEQ ID NO: 25251 - RNA, 21 nt, Synthetic Construct
  source 1..21: mol_type = other RNA
tcctgtactgggctgccccga

SEQ ID NO: 25252 - RNA, 18 nt, Synthetic Construct
  source 1..18: mol_type = other RNA
agggaacgtgagctgggt

SEQ ID NO: 25253 - RNA, 18 nt, Synthetic Construct
  source 1..18: mol_type = other RNA
agggaacgtgagctgggt

SEQ ID NO: 25254 - RNA, 17 nt, Synthetic Construct
  source 1..17: mol_type = other RNA
acagtcaggatgttggc

SEQ ID NO: 25255 - RNA, 17 nt, Synthetic Construct
  source 1..17: mol_type = other RNA
acagtcaggatgttggc

SEQ ID NO: 25256 - RNA, 16 nt, Synthetic Construct
  source 1..16: mol_type = other RNA
agttgaccgcctgggg

SEQ ID NO: 25257 - RNA, 23 nt, Synthetic Construct
  source 1..23: mol_type = other RNA
tggcaatacgacgtacttagtgt

SEQ ID NO: 25258 - RNA, 27 nt, Synthetic Construct
  source 1..27: mol_type = other RNA
gactcttagcggtggatcactcggctc

SEQ ID NO: 25259 - RNA, 27 nt, Synthetic Construct
  source 1..27: mol_type = other RNA
gactcttagcggtggatcactcggctc

SEQ ID NO: 25260 - RNA, 21 nt, Synthetic Construct
  source 1..21: mol_type = other RNA
gtgggcgtttgaagtgaagtg

SEQ ID NO: 25261 - RNA, 21 nt, Synthetic Construct
  source 1..21: mol_type = other RNA
gtgggcgtttgaagtgaagtg

SEQ ID NO: 25262 - RNA, 27 nt, Synthetic Construct
  source 1..27: mol_type = other RNA
cggtataccgaagctctaggtgcggca

SEQ ID NO: 25263 - RNA, 27 nt, Synthetic Construct
  source 1..27: mol_type = other RNA
cggtataccgaagctctaggtgcggca

SEQ ID NO: 25264 - RNA, 22 nt, Synthetic Construct
  source 1..22: mol_type = other RNA
tctttgttcgattccgttgagt

SEQ ID NO: 25265 - RNA, 23 nt, Synthetic Construct
  source 1..23: mol_type = other RNA
tggtaatacgacgtacttagtga

SEQ ID NO: 25266 - RNA, 23 nt, Synthetic Construct
  source 1..23: mol_type = other RNA
tggtaatacgacgtacttagtga

SEQ ID NO: 25267 - RNA, 23 nt, Synthetic Construct
  source 1..23: mol_type = other RNA
tggaaatacgacgtacttagtgt

SEQ ID NO: 25268 - RNA, 20 nt, Synthetic Construct
  source 1..20: mol_type = other RNA
tgaggtagaaggttgtgtgg

SEQ ID NO: 25269 - RNA, 20 nt, Synthetic Construct
  source 1..20: mol_type = other RNA
tgaggtagaaggttgtgtgg

SEQ ID NO: 25270 - RNA, 36 nt, Synthetic Construct; identical to SEQ ID NO: 11035
  source 1..36: mol_type = other RNA

SEQ ID NO: 25271 - RNA, 36 nt, Synthetic Construct; identical to SEQ ID NO: 11035
  source 1..36: mol_type = other RNA

SEQ ID NO: 25272 - RNA, 21 nt, Synthetic Construct
  source 1..21: mol_type = other RNA
gtagcgaaattccttgtcggg

SEQ ID NO: 25273 - RNA, 17 nt, Synthetic Construct
  source 1..17: mol_type = other RNA
tgccagcagccgcggta

SEQ ID NO: 25274 - RNA, 17 nt, Synthetic Construct
  source 1..17: mol_type = other RNA
tgccagcagccgcggta

SEQ ID NO: 25275 - RNA, 21 nt, Synthetic Construct
  source 1..21: mol_type = other RNA
ctttgttcgattccgttgagt

SEQ ID NO: 25276 - RNA, 21 nt, Synthetic Construct
  source 1..21: mol_type = other RNA
ctttgttcgattccgttgagt

SEQ ID NO: 25277 - RNA, 16 nt, Synthetic Construct
  source 1..16: mol_type = other RNA
aggtcatcgtcaggct

SEQ ID NO: 25278 - RNA, 16 nt, Synthetic Construct
  source 1..16: mol_type = other RNA
aggtcatcgtcaggct

SEQ ID NO: 25279 - RNA, 33 nt, Synthetic Construct; identical to SEQ ID NO: 2479
  source 1..33: mol_type = other RNA

SEQ ID NO: 25280 - RNA, 22 nt, Synthetic Construct
  source 1..22: mol_type = other RNA
tcctgtactgagctgccccaag

SEQ ID NO: 25281 - RNA, 22 nt, Synthetic Construct
  source 1..22: mol_type = other RNA
tcctgtactgagctgccccaag

SEQ ID NO: 25282 - RNA, 28 nt, Synthetic Construct
  source 1..28: mol_type = other RNA
cgactcttagcggtggatcactcggctc

SEQ ID NO: 25283 - RNA, 28 nt, Synthetic Construct
  source 1..28: mol_type = other RNA
cgactcttagcggtggatcactcggctc

SEQ ID NO: 25284 - RNA, 22 nt, Synthetic Construct
  source 1..22: mol_type = other RNA
gctcttgactgaagtcccagta

SEQ ID NO: 25285 - RNA, 22 nt, Synthetic Construct
  source 1..22: mol_type = other RNA
gctcttgactgaagtcccagta

SEQ ID NO: 25286 - RNA, 23 nt, Synthetic Construct
  source 1..23: mol_type = other RNA
taacactgtctggtaacgatgtt

SEQ ID NO: 25287 - RNA, 23 nt, Synthetic Construct
  source 1..23: mol_type = other RNA
taacactgtctggtaacgatgtt

SEQ ID NO: 25288 - RNA, 16 nt, Synthetic Construct
  source 1..16: mol_type = other RNA
agtcaggatgttggct

SEQ ID NO: 25289 - RNA, 16 nt, Synthetic Construct
  source 1..16: mol_type = other RNA
agtcaggatgttggct

SEQ ID NO: 25290 - RNA, 22 nt, Synthetic Construct
  source 1..22: mol_type = other RNA
ngaggtagtagtttgtgctgtt

SEQ ID NO: 25291 - RNA, 22 nt, Synthetic Construct
  source 1..22: mol_type = other RNA
ngaggtagtagtttgtgctgtt

SEQ ID NO: 25292 - RNA, 16 nt, Synthetic Construct
  source 1..16: mol_type = other RNA
tgcacgaaagcgtggg

SEQ ID NO: 25293 - RNA, 15 nt, Synthetic Construct
  source 1..15: mol_type = other RNA
accggaggaaggtgg

SEQ ID NO: 25294 - RNA, 15 nt, Synthetic Construct
  source 1..15: mol_type = other RNA
atccctccgactccg

SEQ ID NO: 25295 - RNA, 20 nt, Synthetic Construct
  source 1..20: mol_type = other RNA
gctattgacgaccgtaccgc

SEQ ID NO: 25296 - RNA, 20 nt, Synthetic Construct
  source 1..20: mol_type = other RNA
gctattgacgaccgtaccgc

SEQ ID NO: 25297 - RNA, 34 nt, Synthetic Construct; identical to SEQ ID NO: 2375
  source 1..34: mol_type = other RNA

SEQ ID NO: 25298 - RNA, 15 nt, Synthetic Construct
  source 1..15: mol_type = other RNA
gggtgaaagcggggg

SEQ ID NO: 25299 - RNA, 23 nt, Synthetic Construct
  source 1..23: mol_type = other RNA
ccctgtactgagctgccccgaga

SEQ ID NO: 25300 - RNA, 27 nt, Synthetic Construct
  source 1..27: mol_type = other RNA
cgactcttagcggtggatcactcggct

SEQ ID NO: 25301 - RNA, 27 nt, Synthetic Construct
  source 1..27: mol_type = other RNA
cgactcttagcggtggatcactcggct

SEQ ID NO: 25302 - RNA, 15 nt, Synthetic Construct
  source 1..15: mol_type = other RNA
gctttgatccggaga

SEQ ID NO: 25303 - RNA, 17 nt, Synthetic Construct
  source 1..17: mol_type = other RNA
atcgtgacgatagtgca

SEQ ID NO: 25304 - RNA, 17 nt, Synthetic Construct
  source 1..17: mol_type = other RNA
atcgtgacgatagtgca

SEQ ID NO: 25305 - RNA, 21 nt, Synthetic Construct
  source 1..21: mol_type = other RNA
tgaggaagtaggttgtatagt

SEQ ID NO: 25306 - RNA, 22 nt, Synthetic Construct
  source 1..22: mol_type = other RNA
ctttgttcgattccgttgagta

SEQ ID NO: 25307 - RNA, 22 nt, Synthetic Construct
  source 1..22: mol_type = other RNA
ctttgttcgattccgttgagta

SEQ ID NO: 25308 - RNA, 27 nt, Synthetic Construct
  source 1..27: mol_type = other RNA
gacttaccaaacctatgcaaactccga

SEQ ID NO: 25309 - RNA, 17 nt, Synthetic Construct
  source 1..17: mol_type = other RNA
gtccggatcgtagtctg

SEQ ID NO: 25310 - RNA, 21 nt, Synthetic Construct
  source 1..21: mol_type = other RNA
tgtagtgtttcctactttatg

SEQ ID NO: 25311 - RNA, 24 nt, Synthetic Construct
  source 1..24: mol_type = other RNA
cgggcctggttagtacttggatgg

SEQ ID NO: 25312 - RNA, 19 nt, Synthetic Construct
  source 1..19: mol_type = other RNA
gggtgcaagcgttaatcgg

SEQ ID NO: 25313 - RNA, 19 nt, Synthetic Construct
  source 1..19: mol_type = other RNA
gggtgcaagcgttaatcgg

SEQ ID NO: 25314 - RNA, 22 nt, Synthetic Construct
  source 1..22: mol_type = other RNA
tattgcacttgtcccggcccgt

SEQ ID NO: 25315 - RNA, 23 nt, Synthetic Construct
  source 1..23: mol_type = other RNA
tcctgtaccgagctgccccgagt

SEQ ID NO: 25316 - RNA, 23 nt, Synthetic Construct
  source 1..23: mol_type = other RNA
taaagtgcttatagtgcaggtag

SEQ ID NO: 25317 - RNA, 26 nt, Synthetic Construct
  source 1..26: mol_type = other RNA
cgactcttagcggtggatcactcggc

SEQ ID NO: 25318 - RNA, 26 nt, Synthetic Construct
  source 1..26: mol_type = other RNA
cgactcttagcggtggatcactcggc

SEQ ID NO: 25319 - RNA, 17 nt, Synthetic Construct
  source 1..17: mol_type = other RNA
accaaggggtcgtgggt

SEQ ID NO: 25320 - RNA, 17 nt, Synthetic Construct
  source 1..17: mol_type = other RNA
accaaggggtcgtgggt

SEQ ID NO: 25321 - RNA, 22 nt, Synthetic Construct
  source 1..22: mol_type = other RNA
tgaggtggtaggttgtgtggtt

SEQ ID NO: 25322 - RNA, 22 nt, Synthetic Construct
  source 1..22: mol_type = other RNA
tgaggtggtaggttgtgtggtt

SEQ ID NO: 25323 - RNA, 31 nt, Synthetic Construct; identical to SEQ ID NO: 2263
  source 1..31: mol_type = other RNA

SEQ ID NO: 25324 - RNA, 21 nt, Synthetic Construct
  source 1..21: mol_type = other RNA
tgaggggcagagagcgagact

SEQ ID NO: 25325 - RNA, 21 nt, Synthetic Construct
  source 1..21: mol_type = other RNA
tgaggggcagagagcgagact

SEQ ID NO: 25326 - RNA, 16 nt, Synthetic Construct
  source 1..16: mol_type = other RNA
gtctacggccacacca

SEQ ID NO: 25327 - RNA, 16 nt, Synthetic Construct
  source 1..16: mol_type = other RNA
gtctacggccacacca

SEQ ID NO: 25328 - RNA, 22 nt, Synthetic Construct
  source 1..22: mol_type = other RNA
ttcaagtaatccaggataggcc

SEQ ID NO: 25329 - RNA, 22 nt, Synthetic Construct
  source 1..22: mol_type = other RNA
tatcggaacgtgcccagtcgtg

SEQ ID NO: 25330 - RNA, 36 nt, Synthetic Construct; identical to SEQ ID NO: 2456
  source 1..36: mol_type = other RNA

SEQ ID NO: 25331 - RNA, 17 nt, Synthetic Construct
  source 1..17: mol_type = other RNA
ccaaggggtcgtgggtt

SEQ ID NO: 25332 - RNA, 22 nt, Synthetic Construct
  source 1..22: mol_type = other RNA
tcctgtactgagctgccccaag

SEQ ID NO: 25333 - RNA, 22 nt, Synthetic Construct
  source 1..22: mol_type = other RNA
tcctgtactgagctgccccaag

SEQ ID NO: 25334 - RNA, 23 nt, Synthetic Construct
  source 1..23: mol_type = other RNA
tgtgcaaatctatgcaaaactga

SEQ ID NO: 25335 - RNA, 23 nt, Synthetic Construct
  source 1..23: mol_type = other RNA
tgtgcaaatctatgcaaaactga

SEQ ID NO: 25336 - RNA, 22 nt, Synthetic Construct
  source 1..22: mol_type = other RNA
accctgtagatccgaatttgtg

SEQ ID NO: 25337 - RNA, 25 nt, Synthetic Construct
  source 1..25: mol_type = other RNA
ggtaaaatggctgagtgaagcattg

SEQ ID NO: 25338 - RNA, 22 nt, Synthetic Construct
  source 1..22: mol_type = other RNA
tgaggtggtaggttgtgtggtt

SEQ ID NO: 25339 - RNA, 16 nt, Synthetic Construct
  source 1..16: mol_type = other RNA
gtctacggacatacca

SEQ ID NO: 25340 - RNA, 23 nt, Synthetic Construct
  source 1..23: mol_type = other RNA
tcctgtactgagctgccccgagg

SEQ ID NO: 25341 - RNA, 23 nt, Synthetic Construct
  source 1..23: mol_type = other RNA
tcctgtactgagctgccccgagg

SEQ ID NO: 25342 - RNA, 17 nt, Synthetic Construct
  source 1..17: mol_type = other RNA
agtccggatcgtagtct

SEQ ID NO: 25343 - RNA, 17 nt, Synthetic Construct
  source 1..17: mol_type = other RNA
agtccggatcgtagtct

SEQ ID NO: 25344 - RNA, 23 nt, Synthetic Construct
  source 1..23: mol_type = other RNA
cgaggggcagagagcgagacttt

SEQ ID NO: 25345 - RNA, 21 nt, Synthetic Construct
  source 1..21: mol_type = other RNA
agaggggcagagagcgagact

SEQ ID NO: 25346 - RNA, 21 nt, Synthetic Construct
  source 1..21: mol_type = other RNA
agaggggcagagagcgagact

SEQ ID NO: 25347 - RNA, 36 nt, Synthetic Construct; identical to SEQ ID NO: 2444
  source 1..36: mol_type = other RNA

SEQ ID NO: 25348 - RNA, 34 nt, Synthetic Construct; identical to SEQ ID NO: 385
  source 1..34: mol_type = other RNA

SEQ ID NO: 25349 - RNA, 34 nt, Synthetic Construct; identical to SEQ ID NO: 385
  source 1..34: mol_type = other RNA

SEQ ID NO: 25350 - RNA, 20 nt, Synthetic Construct
  source 1..20: mol_type = other RNA
ctctaatgagactgccggtg

SEQ ID NO: 25351 - RNA, 22 nt, Synthetic Construct
  source 1..22: mol_type = other RNA
tcctgaactgagctgccccgag

SEQ ID NO: 25352 - RNA, 22 nt, Synthetic Construct
  source 1..22: mol_type = other RNA
tcctgaactgagctgccccgag

SEQ ID NO: 25353 - RNA, 22 nt, Synthetic Construct
  source 1..22: mol_type = other RNA
gtgccgaagctgtgggattgat

SEQ ID NO: 25354 - RNA, 22 nt, Synthetic Construct
  source 1..22: mol_type = other RNA
gtgccgaagctgtgggattgat

SEQ ID NO: 25355 - RNA, 17 nt, Synthetic Construct
  source 1..17: mol_type = other RNA
cagagacgagtcgacca

SEQ ID NO: 25356 - RNA, 17 nt, Synthetic Construct
  source 1..17: mol_type = other RNA
cagagacgagtcgacca

SEQ ID NO: 25357 - RNA, 22 nt, Synthetic Construct
  source 1..22: mol_type = other RNA
tcaggtagtagattgtatagtt

SEQ ID NO: 25358 - RNA, 17 nt, Synthetic Construct
  source 1..17: mol_type = other RNA
cagtcaggatgttggct

SEQ ID NO: 25359 - RNA, 18 nt, Synthetic Construct
  source 1..18: mol_type = other RNA
tcagtagctcgaggaaaa

SEQ ID NO: 25360 - RNA, 18 nt, Synthetic Construct
  source 1..18: mol_type = other RNA
tcagtagctcgaggaaaa

SEQ ID NO: 25361 - RNA, 21 nt, Synthetic Construct
  source 1..21: mol_type = other RNA
ttataatacaacctgataagt

SEQ ID NO: 25362 - RNA, 21 nt, Synthetic Construct
  source 1..21: mol_type = other RNA
ttataatacaacctgataagt

SEQ ID NO: 25363 - RNA, 23 nt, Synthetic Construct
  source 1..23: mol_type = other RNA
tggtaatacgatgtacttagtgt

SEQ ID NO: 25364 - RNA, 23 nt, Synthetic Construct
  source 1..23: mol_type = other RNA
tggtaatacgatgtacttagtgt

SEQ ID NO: 25365 - RNA, 32 nt, Synthetic Construct; identical to SEQ ID NO: 4734
  source 1..32: mol_type = other RNA

SEQ ID NO: 25366 - RNA, 32 nt, Synthetic Construct; identical to SEQ ID NO: 4734
  source 1..32: mol_type = other RNA

SEQ ID NO: 25367 - RNA, 31 nt, Synthetic Construct; identical to SEQ ID NO: 2423
  source 1..31: mol_type = other RNA

SEQ ID NO: 25368 - RNA, 22 nt, Synthetic Construct
  source 1..22: mol_type = other RNA
tggaatgtagagaagtatgtat

SEQ ID NO: 25369 - RNA, 22 nt, Synthetic Construct
  source 1..22: mol_type = other RNA
tggaatgtagagaagtatgtat

SEQ ID NO: 25370 - RNA, 15 nt, Synthetic Construct
  source 1..15: mol_type = other RNA
tagagtagggcggga

SEQ ID NO: 25371 - RNA, 15 nt, Synthetic Construct
  source 1..15: mol_type = other RNA
tagagtagggcggga

SEQ ID NO: 25372 - RNA, 16 nt, Synthetic Construct
  source 1..16: mol_type = other RNA
gtctacggctatacca

SEQ ID NO: 25373 - RNA, 22 nt, Synthetic Construct
  source 1..22: mol_type = other RNA
tggggtagtaggttgtgtggtt

SEQ ID NO: 25374 - RNA, 21 nt, Synthetic Construct
  source 1..21: mol_type = other RNA
tcctgtaccgagctgccccga

SEQ ID NO: 25375 - RNA, 23 nt, Synthetic Construct
  source 1..23: mol_type = other RNA
tcggaatcgctagtaatcgcgga

SEQ ID NO: 25376 - RNA, 19 nt, Synthetic Construct
  source 1..19: mol_type = other RNA
cagcactctgcaaagacga

SEQ ID NO: 25377 - RNA, 19 nt, Synthetic Construct
  source 1..19: mol_type = other RNA
cagcactctgcaaagacga

SEQ ID NO: 25378 - RNA, 18 nt, Synthetic Construct
  source 1..18: mol_type = other RNA
ggccgtcgtcagctcgtg

SEQ ID NO: 25379 - RNA, 21 nt, Synthetic Construct
  source 1..21: mol_type = other RNA
ggaggagttcgaaggtacgct

SEQ ID NO: 25380 - RNA, 23 nt, Synthetic Construct
  source 1..23: mol_type = other RNA
tcctgtgctgagctgccccgagt

SEQ ID NO: 25381 - RNA, 23 nt, Synthetic Construct
  source 1..23: mol_type = other RNA
tcctgtgctgagctgccccgagt

SEQ ID NO: 25382 - RNA, 23 nt, Synthetic Construct
  source 1..23: mol_type = other RNA
nggtaatacgacgtacttagtgt

SEQ ID NO: 25383 - RNA, 23 nt, Synthetic Construct
  source 1..23: mol_type = other RNA
nggtaatacgacgtacttagtgt

SEQ ID NO: 25384 - RNA, 23 nt, Synthetic Construct
  source 1..23: mol_type = other RNA
tcctgtactgagccgccccgaga

SEQ ID NO: 25385 - RNA, 35 nt, Synthetic Construct; identical to SEQ ID NO: 2518
  source 1..35: mol_type = other RNA

SEQ ID NO: 25386 - RNA, 36 nt, Synthetic Construct; identical to SEQ ID NO: 2469
  source 1..36: mol_type = other RNA

SEQ ID NO: 25387 - RNA, 23 nt, Synthetic Construct
  source 1..23: mol_type = other RNA
tccctggtggtctagtggttagg

SEQ ID NO: 25388 - RNA, 15 nt, Synthetic Construct
  source 1..15: mol_type = other RNA
gtccggcccgaggca

SEQ ID NO: 25389 - RNA, 23 nt, Synthetic Construct
  source 1..23: mol_type = other RNA
tgagaggcagagagcgagacttt

SEQ ID NO: 25390 - RNA, 23 nt, Synthetic Construct
  source 1..23: mol_type = other RNA
tgagaggcagagagcgagacttt

SEQ ID NO: 25391 - RNA, 17 nt, Synthetic Construct
  source 1..17: mol_type = other RNA
gggaacgtgagctgggt

SEQ ID NO: 25392 - RNA, 17 nt, Synthetic Construct
  source 1..17: mol_type = other RNA
gggaacgtgagctgggt

SEQ ID NO: 25393 - RNA, 23 nt, Synthetic Construct
  source 1..23: mol_type = other RNA
tcctgaactgagctgccccgagt

SEQ ID NO: 25394 - RNA, 23 nt, Synthetic Construct
  source 1..23: mol_type = other RNA
tcctgaactgagctgccccgagt

SEQ ID NO: 25395 - RNA, 22 nt, Synthetic Construct
  source 1..22: mol_type = other RNA
ttataatacaacctgataagtg

SEQ ID NO: 25396 - RNA, 16 nt, Synthetic Construct
  source 1..16: mol_type = other RNA
ccgcttttgtcaggga

SEQ ID NO: 25397 - RNA, 22 nt, Synthetic Construct
  source 1..22: mol_type = other RNA
tcagcgccgatgatagtgcgga

SEQ ID NO: 25398 - RNA, 23 nt, Synthetic Construct
  source 1..23: mol_type = other RNA
tcccgtactgagctgccccgaga

SEQ ID NO: 25399 - RNA, 20 nt, Synthetic Construct
  source 1..20: mol_type = other RNA
tcctgtctgaatatgggggg

SEQ ID NO: 25400 - RNA, 20 nt, Synthetic Construct
  source 1..20: mol_type = other RNA
tcctgtctgaatatgggggg

SEQ ID NO: 25401 - RNA, 18 nt, Synthetic Construct
  source 1..18: mol_type = other RNA
gttcgattccggagaggg

SEQ ID NO: 25402 - RNA, 18 nt, Synthetic Construct
  source 1..18: mol_type = other RNA
gttcgattccggagaggg

SEQ ID NO: 25403 - RNA, 22 nt, Synthetic Construct
  source 1..22: mol_type = other RNA
tggaatgtaaagaagcatgtat

SEQ ID NO: 25404 - RNA, 22 nt, Synthetic Construct
  source 1..22: mol_type = other RNA
tggaatgtaaagaagcatgtat

SEQ ID NO: 25405 - RNA, 22 nt, Synthetic Construct
  source 1..22: mol_type = other RNA
tgtcaactggttgttgggaggg

SEQ ID NO: 25406 - RNA, 20 nt, Synthetic Construct
  source 1..20: mol_type = other RNA
tcctgtaccgatcaatagtg

SEQ ID NO: 25407 - RNA, 20 nt, Synthetic Construct
  source 1..20: mol_type = other RNA
tcctgtaccgatcaatagtg

SEQ ID NO: 25408 - RNA, 19 nt, Synthetic Construct
  source 1..19: mol_type = other RNA
tctaatgagactgccggtg

SEQ ID NO: 25409 - RNA, 19 nt, Synthetic Construct
  source 1..19: mol_type = other RNA
tctaatgagactgccggtg

SEQ ID NO: 25410 - RNA, 23 nt, Synthetic Construct
  source 1..23: mol_type = other RNA
tgaagggcagagagcgagacttt

SEQ ID NO: 25411 - RNA, 31 nt, Synthetic Construct; identical to SEQ ID NO: 2295
  source 1..31: mol_type = other RNA

SEQ ID NO: 25412 - RNA, 16 nt, Synthetic Construct
  source 1..16: mol_type = other RNA
gtccccttcgtctaga

SEQ ID NO: 25413 - RNA, 16 nt, Synthetic Construct
  source 1..16: mol_type = other RNA
gtccccttcgtctaga

SEQ ID NO: 25414 - RNA, 23 nt, Synthetic Construct
  source 1..23: mol_type = other RNA
tcctgcactgagctgccccgagt

SEQ ID NO: 25415 - RNA, 23 nt, Synthetic Construct
  source 1..23: mol_type = other RNA
tcctgcactgagctgccccgagt

SEQ ID NO: 25416 - RNA, 21 nt, Synthetic Construct
  source 1..21: mol_type = other RNA
gttggttcaagcgtgtagtcg

SEQ ID NO: 25417 - RNA, 23 nt, Synthetic Construct
  source 1..23: mol_type = other RNA
tgaggggcagagagcgagactta

SEQ ID NO: 25418 - RNA, 23 nt, Synthetic Construct
  source 1..23: mol_type = other RNA
tgaggggcagagagcgagactta

SEQ ID NO: 25419 - RNA, 26 nt, Synthetic Construct
  source 1..26: mol_type = other RNA
gcataagcgtgcttgactgcgagact

SEQ ID NO: 25420 - RNA, 23 nt, Synthetic Construct
  source 1..23: mol_type = other RNA
tgaggggcagggagcgagacttt

SEQ ID NO: 25421 - RNA, 23 nt, Synthetic Construct
  source 1..23: mol_type = other RNA
tgaggggcagggagcgagacttt

SEQ ID NO: 25422 - RNA, 27 nt, Synthetic Construct
  source 1..27: mol_type = other RNA
gactcttagcggtggatcactcggctc

SEQ ID NO: 25423 - RNA, 27 nt, Synthetic Construct
  source 1..27: mol_type = other RNA
gactcttagcggtggatcactcggctc

SEQ ID NO: 25424 - RNA, 18 nt, Synthetic Construct
  source 1..18: mol_type = other RNA
cataaagtagaaagcact

SEQ ID NO: 25425 - RNA, 18 nt, Synthetic Construct
  source 1..18: mol_type = other RNA
cataaagtagaaagcact

SEQ ID NO: 25426 - RNA, 23 nt, Synthetic Construct
  source 1..23: mol_type = other RNA
gcgtggtaggagagcgttctgta

SEQ ID NO: 25427 - RNA, 20 nt, Synthetic Construct
  source 1..20: mol_type = other RNA
ggtcccaagggtatggctgt

SEQ ID NO: 25428 - RNA, 20 nt, Synthetic Construct
  source 1..20: mol_type = other RNA
ggtcccaagggtatggctgt

SEQ ID NO: 25429 - RNA, 22 nt, Synthetic Construct
  source 1..22: mol_type = other RNA
tgaggcagtaggttgtgtggtt

SEQ ID NO: 25430 - RNA, 22 nt, Synthetic Construct
  source 1..22: mol_type = other RNA
tgaggcagtaggttgtgtggtt

SEQ ID NO: 25431 - RNA, 32 nt, Synthetic Construct; identical to SEQ ID NO: 4710
  source 1..32: mol_type = other RNA

SEQ ID NO: 25432 - RNA, 24 nt, Synthetic Construct
  source 1..24: mol_type = other RNA
tgaggtagtaggttgtgtggtttc

SEQ ID NO: 25433 - RNA, 19 nt, Synthetic Construct
  source 1..19: mol_type = other RNA
tcctgtaccgatcaatagt

SEQ ID NO: 25434 - RNA, 19 nt, Synthetic Construct
  source 1..19: mol_type = other RNA
tcctgtaccgatcaatagt

SEQ ID NO: 25435 - RNA, 23 nt, Synthetic Construct
  source 1..23: mol_type = other RNA
tggaaatacgacgtacttagtgt

SEQ ID NO: 25436 - RNA, 21 nt, Synthetic Construct
  source 1..21: mol_type = other RNA
tcctgtactgagccgccccga

SEQ ID NO: 25437 - RNA, 21 nt, Synthetic Construct
  source 1..21: mol_type = other RNA
ccctgtactgagctgccccga

SEQ ID NO: 25438 - RNA, 21 nt, Synthetic Construct
  source 1..21: mol_type = other RNA
tcctgcactgagctgccccga

SEQ ID NO: 25439 - RNA, 21 nt, Synthetic Construct
  source 1..21: mol_type = other RNA
tcctgtgctgagctgccccga

SEQ ID NO: 25440 - RNA, 22 nt, Synthetic Construct
  source 1..22: mol_type = other RNA
tatagcacttgtcccggcctgt

SEQ ID NO: 25441 - RNA, 22 nt, Synthetic Construct
  source 1..22: mol_type = other RNA
tatagcacttgtcccggcctgt

SEQ ID NO: 25442 - RNA, 16 nt, Synthetic Construct
  source 1..16: mol_type = other RNA
acggcccagactccta

SEQ ID NO: 25443 - RNA, 18 nt, Synthetic Construct
  source 1..18: mol_type = other RNA
accaaggggtcgtgggtt

SEQ ID NO: 25444 - RNA, 21 nt, Synthetic Construct
  source 1..21: mol_type = other RNA
tcctgtctgaatatgggggga

SEQ ID NO: 25445 - RNA, 21 nt, Synthetic Construct
  source 1..21: mol_type = other RNA
tcctgtctgaatatgggggga

SEQ ID NO: 25446 - RNA, 19 nt, Synthetic Construct
  source 1..19: mol_type = other RNA
agcgaaattccttgtcggg

SEQ ID NO: 25447 - RNA, 18 nt, Synthetic Construct
  source 1..18: mol_type = other RNA
cccaaaggtcgtcggttc

SEQ ID NO: 25448 - RNA, 18 nt, Synthetic Construct
  source 1..18: mol_type = other RNA
cccaaaggtcgtcggttc

SEQ ID NO: 25449 - RNA, 21 nt, Synthetic Construct
  source 1..21: mol_type = other RNA
cgcgacctcagatcagacgtg

SEQ ID NO: 25450 - RNA, 21 nt, Synthetic Construct
  source 1..21: mol_type = other RNA
cgcgacctcagatcagacgtg

SEQ ID NO: 25451 - RNA, 35 nt, Synthetic Construct; identical to SEQ ID NO: 2615
  source 1..35: mol_type = other RNA

SEQ ID NO: 25452 - RNA, 15 nt, Synthetic Construct
  source 1..15: mol_type = other RNA
agttgaccgcctggg

SEQ ID NO: 25453 - RNA, 23 nt, Synthetic Construct
  source 1..23: mol_type = other RNA
tggtaatacgacgtacttagtat

SEQ ID NO: 25454 - RNA, 23 nt, Synthetic Construct
  source 1..23: mol_type = other RNA
tggtaatacgacgtacttagtat

SEQ ID NO: 25455 - RNA, 30 nt, Synthetic Construct; identical to SEQ ID NO: 3933
  source 1..30: mol_type = other RNA

SEQ ID NO: 25456 - RNA, 30 nt, Synthetic Construct; identical to SEQ ID NO: 3933
  source 1..30: mol_type = other RNA

SEQ ID NO: 25457 - RNA, 20 nt, Synthetic Construct
  source 1..20: mol_type = other RNA
gaatcgctagtaatcgcgga

SEQ ID NO: 25458 - RNA, 20 nt, Synthetic Construct
  source 1..20: mol_type = other RNA
gaatcgctagtaatcgcgga

SEQ ID NO: 25459 - RNA, 23 nt, Synthetic Construct
  source 1..23: mol_type = other RNA
tgtcagtttgtcaaataccccat

SEQ ID NO: 25460 - RNA, 23 nt, Synthetic Construct
  source 1..23: mol_type = other RNA
tgtcagtttgtcaaataccccat

SEQ ID NO: 25461 - RNA, 15 nt, Synthetic Construct
  source 1..15: mol_type = other RNA
tgcaagtcgaacggt

SEQ ID NO: 25462 - RNA, 17 nt, Synthetic Construct
  source 1..17: mol_type = other RNA
gcggctgtagctcagtt

SEQ ID NO: 25463 - RNA, 17 nt, Synthetic Construct
  source 1..17: mol_type = other RNA
gcggctgtagctcagtt

SEQ ID NO: 25464 - RNA, 24 nt, Synthetic Construct
  source 1..24: mol_type = other RNA
tcactgatcgagtcgtcctgcgcg

SEQ ID NO: 25465 - RNA, 18 nt, Synthetic Construct
  source 1..18: mol_type = other RNA
cccttgtcattagttgct

SEQ ID NO: 25466 - RNA, 18 nt, Synthetic Construct
  source 1..18: mol_type = other RNA
cccttgtcattagttgct

SEQ ID NO: 25467 - RNA, 36 nt, Synthetic Construct; identical to SEQ ID NO: 2248
  source 1..36: mol_type = other RNA

SEQ ID NO: 25468 - RNA, 20 nt, Synthetic Construct
  source 1..20: mol_type = other RNA
tgaggtagtaggttgtgcgg

SEQ ID NO: 25469 - RNA, 20 nt, Synthetic Construct
  source 1..20: mol_type = other RNA
tgaggtagtaggttgtgcgg

SEQ ID NO: 25470 - RNA, 34 nt, Synthetic Construct; identical to SEQ ID NO: 2375
  source 1..34: mol_type = other RNA

SEQ ID NO: 25471 - RNA, 32 nt, Synthetic Construct; identical to SEQ ID NO: 4710
  source 1..32: mol_type = other RNA

SEQ ID NO: 25472 - RNA, 32 nt, Synthetic Construct; identical to SEQ ID NO: 4710
  source 1..32: mol_type = other RNA

SEQ ID NO: 25473 - RNA, 23 nt, Synthetic Construct
  source 1..23: mol_type = other RNA
gtctttgttcgattccgttgagt

SEQ ID NO: 25474 - RNA, 23 nt, Synthetic Construct
  source 1..23: mol_type = other RNA
gtctttgttcgattccgttgagt

SEQ ID NO: 25475 - RNA, 16 nt, Synthetic Construct
  source 1..16: mol_type = other RNA
gtccacggccatacca

SEQ ID NO: 25476 - RNA, 16 nt, Synthetic Construct
  source 1..16: mol_type = other RNA
gtccacggccatacca

SEQ ID NO: 25477 - RNA, 18 nt, Synthetic Construct
  source 1..18: mol_type = other RNA
cctgtaccgatcaatagt

SEQ ID NO: 25478 - RNA, 18 nt, Synthetic Construct
  source 1..18: mol_type = other RNA
cctgtaccgatcaatagt

SEQ ID NO: 25479 - RNA, 23 nt, Synthetic Construct
  source 1..23: mol_type = other RNA
tcctgtactgagctgccccggga

SEQ ID NO: 25480 - RNA, 23 nt, Synthetic Construct
  source 1..23: mol_type = other RNA
tcctgtactgagctgccccggga

SEQ ID NO: 25481 - RNA, 22 nt, Synthetic Construct
  source 1..22: mol_type = other RNA
tcctgtaccgagctgccccgag

SEQ ID NO: 25482 - RNA, 33 nt, Synthetic Construct; identical to SEQ ID NO: 2556
  source 1..33: mol_type = other RNA

SEQ ID NO: 25483 - RNA, 16 nt, Synthetic Construct
  source 1..16: mol_type = other RNA
gtctacggccatacaa

SEQ ID NO: 25484 - RNA, 16 nt, Synthetic Construct
  source 1..16: mol_type = other RNA
gtctacggccatacaa

SEQ ID NO: 25485 - RNA, 23 nt, Synthetic Construct
  source 1..23: mol_type = other RNA
ggcggttatgcaagacagaggtg

SEQ ID NO: 25486 - RNA, 23 nt, Synthetic Construct
  source 1..23: mol_type = other RNA
ggcggttatgcaagacagaggtg

SEQ ID NO: 25487 - RNA, 25 nt, Synthetic Construct
  source 1..25: mol_type = other RNA
ttgaggatatgggatcgagacgaca

SEQ ID NO: 25488 - RNA, 25 nt, Synthetic Construct
  source 1..25: mol_type = other RNA
ttgaggatatgggatcgagacgaca

SEQ ID NO: 25489 - RNA, 22 nt, Synthetic Construct
  source 1..22: mol_type = other RNA
tgttggttcaagcgtgtagtcg

SEQ ID NO: 25490 - RNA, 20 nt, Synthetic Construct
  source 1..20: mol_type = other RNA
ggtcccaagggtatggctgt

SEQ ID NO: 25491 - RNA, 19 nt, Synthetic Construct
  source 1..19: mol_type = other RNA
gtccggatcgtagtctgca

SEQ ID NO: 25492 - RNA, 17 nt, Synthetic Construct
  source 1..17: mol_type = other RNA
cccctggacctgtactg

SEQ ID NO: 25493 - RNA, 17 nt, Synthetic Construct
  source 1..17: mol_type = other RNA
cccctggacctgtactg

SEQ ID NO: 25494 - RNA, 16 nt, Synthetic Construct
  source 1..16: mol_type = other RNA
gtctacggccatacaa

SEQ ID NO: 25495 - RNA, 35 nt, Synthetic Construct; identical to SEQ ID NO: 2269
  source 1..35: mol_type = other RNA

SEQ ID NO: 25496 - RNA, 39 nt, Synthetic Construct; identical to SEQ ID NO: 10211
  source 1..39: mol_type = other RNA

SEQ ID NO: 25497 - RNA, 39 nt, Synthetic Construct; identical to SEQ ID NO: 10211
  source 1..39: mol_type = other RNA

SEQ ID NO: 25498 - RNA, 15 nt, Synthetic Construct
  source 1..15: mol_type = other RNA
ggtgaaagcggggga

SEQ ID NO: 25499 - RNA, 21 nt, Synthetic Construct
  source 1..21: mol_type = other RNA
tgaggtagtaggttgtgtggt

SEQ ID NO: 25500 - RNA, 21 nt, Synthetic Construct
  source 1..21: mol_type = other RNA
tgaggtagtaggttgtgtggt

SEQ ID NO: 25501 - RNA, 23 nt, Synthetic Construct
  source 1..23: mol_type = other RNA
ccctgtactgagctgccccgaga

SEQ ID NO: 25502 - RNA, 31 nt, Synthetic Construct; identical to SEQ ID NO: 5506
  source 1..31: mol_type = other RNA

SEQ ID NO: 25503 - RNA, 31 nt, Synthetic Construct; identical to SEQ ID NO: 5506
  source 1..31: mol_type = other RNA

SEQ ID NO: 25504 - RNA, 21 nt, Synthetic Construct
  source 1..21: mol_type = other RNA
tggaatgtaaagaagtatgta

SEQ ID NO: 25505 - RNA, 21 nt, Synthetic Construct
  source 1..21: mol_type = other RNA
tggaatgtaaagaagtatgta

SEQ ID NO: 25506 - RNA, 18 nt, Synthetic Construct
  source 1..18: mol_type = other RNA
cctgtaccgatcaatagt

SEQ ID NO: 25507 - RNA, 18 nt, Synthetic Construct
  source 1..18: mol_type = other RNA
gtaggtcatcgtcaggct

SEQ ID NO: 25508 - RNA, 18 nt, Synthetic Construct
  source 1..18: mol_type = other RNA
gtaggtcatcgtcaggct

SEQ ID NO: 25509 - RNA, 21 nt, Synthetic Construct
  source 1..21: mol_type = other RNA
tcccgtactgagctgccccga

SEQ ID NO: 25510 - RNA, 21 nt, Synthetic Construct
  source 1..21: mol_type = other RNA
tcccgtactgagctgccccga

SEQ ID NO: 25511 - RNA, 21 nt, Synthetic Construct
  source 1..21: mol_type = other RNA
tgaggtagtagcttgtgctgt

SEQ ID NO: 25512 - RNA, 21 nt, Synthetic Construct
  source 1..21: mol_type = other RNA
tgaggtagtagcttgtgctgt

SEQ ID NO: 25513 - RNA, 27 nt, Synthetic Construct
  source 1..27: mol_type = other RNA
agagcagctaataccgcatacgacctg

SEQ ID NO: 25514 - RNA, 25 nt, Synthetic Construct
  source 1..25: mol_type = other RNA
ttgaggatatgagatagagacgaca

SEQ ID NO: 25515 - RNA, 25 nt, Synthetic Construct
  source 1..25: mol_type = other RNA
ttgaggatatgagatagagacgaca

SEQ ID NO: 25516 - RNA, 22 nt, Synthetic Construct
  source 1..22: mol_type = other RNA
ccctgtactgagctgccccgag

SEQ ID NO: 25517 - RNA, 22 nt, Synthetic Construct
  source 1..22: mol_type = other RNA
ccctgtactgagctgccccgag

SEQ ID NO: 25518 - RNA, 25 nt, Synthetic Construct
  source 1..25: mol_type = other RNA
tcgaggatatgagatcgagacgaca

SEQ ID NO: 25519 - RNA, 25 nt, Synthetic Construct
  source 1..25: mol_type = other RNA
tcgaggatatgagatcgagacgaca

SEQ ID NO: 25520 - RNA, 24 nt, Synthetic Construct
  source 1..24: mol_type = other RNA
gtctttgttcgattccgttgagta

SEQ ID NO: 25521 - RNA, 20 nt, Synthetic Construct
  source 1..20: mol_type = other RNA
tccctgagaccctaacttgt

SEQ ID NO: 25522 - RNA, 22 nt, Synthetic Construct
  source 1..22: mol_type = other RNA
tggaatgtaaggaagtatgtat

SEQ ID NO: 25523 - RNA, 22 nt, Synthetic Construct
  source 1..22: mol_type = other RNA
tggaatgtaaggaagtatgtat

SEQ ID NO: 25524 - RNA, 23 nt, Synthetic Construct
  source 1..23: mol_type = other RNA
tcctgtactgagctgccccgggt

SEQ ID NO: 25525 - RNA, 21 nt, Synthetic Construct
  source 1..21: mol_type = other RNA
ggagtatgcagagcaagatca

SEQ ID NO: 25526 - RNA, 21 nt, Synthetic Construct
  source 1..21: mol_type = other RNA
ggagtatgcagagcaagatca

SEQ ID NO: 25527 - RNA, 37 nt, Synthetic Construct; identical to SEQ ID NO: 2211
  source 1..37: mol_type = other RNA

SEQ ID NO: 25528 - RNA, 20 nt, Synthetic Construct
  source 1..20: mol_type = other RNA
acagtagtctgcacattggt

SEQ ID NO: 25529 - RNA, 20 nt, Synthetic Construct
  source 1..20: mol_type = other RNA
acagtagtctgcacattggt

SEQ ID NO: 25530 - RNA, 32 nt, Synthetic Construct; identical to SEQ ID NO: 3713
  source 1..32: mol_type = other RNA

SEQ ID NO: 25531 - RNA, 16 nt, Synthetic Construct
  source 1..16: mol_type = other RNA
gaaattccttgtcggg

SEQ ID NO: 25532 - RNA, 21 nt, Synthetic Construct
  source 1..21: mol_type = other RNA
tggagtgcgacaatggtgttt

SEQ ID NO: 25533 - RNA, 21 nt, Synthetic Construct
  source 1..21: mol_type = other RNA
tggagtgcgacaatggtgttt

SEQ ID NO: 25534 - RNA, 23 nt, Synthetic Construct
  source 1..23: mol_type = other RNA
tggtaatacgacgtacctagtgt

SEQ ID NO: 25535 - RNA, 22 nt, Synthetic Construct
  source 1..22: mol_type = other RNA
tgaggtagtgggttgtgtggtt

SEQ ID NO: 25536 - RNA, 21 nt, Synthetic Construct
  source 1..21: mol_type = other RNA
gcccgtgttcggaagattttc

SEQ ID NO: 25537 - RNA, 21 nt, Synthetic Construct
  source 1..21: mol_type = other RNA
gcccgtgttcggaagattttc

SEQ ID NO: 25538 - RNA, 15 nt, Synthetic Construct
  source 1..15: mol_type = other RNA
tcgagtcgtcctgcg

SEQ ID NO: 25539 - RNA, 20 nt, Synthetic Construct
  source 1..20: mol_type = other RNA
caatggccgggacagagggc

SEQ ID NO: 25540 - RNA, 18 nt, Synthetic Construct
  source 1..18: mol_type = other RNA
tctaatgagactgccggt

SEQ ID NO: 25541 - RNA, 16 nt, Synthetic Construct
  source 1..16: mol_type = other RNA
ggtagctcgttgggct

SEQ ID NO: 25542 - RNA, 23 nt, Synthetic Construct
  source 1..23: mol_type = other RNA
tgaggggcagagagcgagactta

SEQ ID NO: 25543 - RNA, 23 nt, Synthetic Construct
  source 1..23: mol_type = other RNA
tgaggggcagagagcgagactta

SEQ ID NO: 25544 - RNA, 25 nt, Synthetic Construct
  source 1..25: mol_type = other RNA
gtcaggatggccgagcggtctaagg

SEQ ID NO: 25545 - RNA, 25 nt, Synthetic Construct
  source 1..25: mol_type = other RNA
gtcaggatggccgagcggtctaagg

SEQ ID NO: 25546 - RNA, 17 nt, Synthetic Construct
  source 1..17: mol_type = other RNA
tcgctagtaatcgcgga

SEQ ID NO: 25547 - RNA, 16 nt, Synthetic Construct
  source 1..16: mol_type = other RNA
ggtgggggtcgttggt

SEQ ID NO: 25548 - RNA, 20 nt, Synthetic Construct
  source 1..20: mol_type = other RNA
tgaggtagtaggtcgtatag

SEQ ID NO: 25549 - RNA, 20 nt, Synthetic Construct
  source 1..20: mol_type = other RNA
tgaggtagtaggtcgtatag

SEQ ID NO: 25550 - RNA, 19 nt, Synthetic Construct
  source 1..19: mol_type = other RNA
tcagtagctcgaggaaaag

SEQ ID NO: 25551 - RNA, 19 nt, Synthetic Construct
  source 1..19: mol_type = other RNA
tcagtagctcgaggaaaag

SEQ ID NO: 25552 - RNA, 27 nt, Synthetic Construct
  source 1..27: mol_type = other RNA
ggggagctaatcccagaaacccggtcg

SEQ ID NO: 25553 - RNA, 27 nt, Synthetic Construct
  source 1..27: mol_type = other RNA
ggggagctaatcccagaaacccggtcg

SEQ ID NO: 25554 - RNA, 22 nt, Synthetic Construct
  source 1..22: mol_type = other RNA
tcctgcactgagctgccccgag

SEQ ID NO: 25555 - RNA, 22 nt, Synthetic Construct
  source 1..22: mol_type = other RNA
tcctgcactgagctgccccgag

SEQ ID NO: 25556 - RNA, 23 nt, Synthetic Construct
  source 1..23: mol_type = other RNA
tctttgttcgattccgttgagta

SEQ ID NO: 25557 - RNA, 22 nt, Synthetic Construct
  source 1..22: mol_type = other RNA
tcctgtactgaactgccccgag

SEQ ID NO: 25558 - RNA, 22 nt, Synthetic Construct
  source 1..22: mol_type = other RNA
tcctgtactgaactgccccgag

SEQ ID NO: 25559 - RNA, 19 nt, Synthetic Construct
  source 1..19: mol_type = other RNA
ccagtaaacggcggccgta

SEQ ID NO: 25560 - RNA, 19 nt, Synthetic Construct
  source 1..19: mol_type = other RNA
gggtgcaagcgttaatcgg

SEQ ID NO: 25561 - RNA, 16 nt, Synthetic Construct
  source 1..16: mol_type = other RNA
cagtcaggatgttggc

SEQ ID NO: 25562 - RNA, 16 nt, Synthetic Construct
  source 1..16: mol_type = other RNA
cagtcaggatgttggc

SEQ ID NO: 25563 - RNA, 20 nt, Synthetic Construct
  source 1..20: mol_type = other RNA
tgaggtagtaggctgtatag

SEQ ID NO: 25564 - RNA, 20 nt, Synthetic Construct
  source 1..20: mol_type = other RNA
tgaggtagtaggctgtatag

SEQ ID NO: 25565 - RNA, 22 nt, Synthetic Construct
  source 1..22: mol_type = other RNA
tggaatgtaaagaagtatgtaa

SEQ ID NO: 25566 - RNA, 23 nt, Synthetic Construct
  source 1..23: mol_type = other RNA
tctctcggctcctcgcggctcgt

SEQ ID NO: 25567 - RNA, 23 nt, Synthetic Construct
  source 1..23: mol_type = other RNA
tctctcggctcctcgcggctcgt

SEQ ID NO: 25568 - RNA, 21 nt, Synthetic Construct
  source 1..21: mol_type = other RNA
tctttggttatctagctgtat

SEQ ID NO: 25569 - RNA, 21 nt, Synthetic Construct
  source 1..21: mol_type = other RNA
tctttggttatctagctgtat

SEQ ID NO: 25570 - RNA, 17 nt, Synthetic Construct
  source 1..17: mol_type = other RNA
tggccgggacagagggc

SEQ ID NO: 25571 - RNA, 17 nt, Synthetic Construct
  source 1..17: mol_type = other RNA
tggccgggacagagggc

SEQ ID NO: 25572 - RNA, 22 nt, Synthetic Construct
  source 1..22: mol_type = other RNA
tgaggtagtaggttgtgtggct

SEQ ID NO: 25573 - RNA, 20 nt, Synthetic Construct
  source 1..20: mol_type = other RNA
tgaggaagtaggttgtatag

SEQ ID NO: 25574 - RNA, 20 nt, Synthetic Construct
  source 1..20: mol_type = other RNA
tgaggaagtaggttgtatag

SEQ ID NO: 25575 - RNA, 34 nt, Synthetic Construct; identical to SEQ ID NO: 2375
  source 1..34: mol_type = other RNA

SEQ ID NO: 25576 - RNA, 37 nt, Synthetic Construct; identical to SEQ ID NO: 2607
  source 1..37: mol_type = other RNA

SEQ ID NO: 25577 - RNA, 22 nt, Synthetic Construct
  source 1..22: mol_type = other RNA
tattgcgcttgtcccggcctgt

SEQ ID NO: 25578 - RNA, 23 nt, Synthetic Construct
  source 1..23: mol_type = other RNA
tgagaggcagagagcgagacttt

SEQ ID NO: 25579 - RNA, 15 nt, Synthetic Construct
  source 1..15: mol_type = other RNA
catgccgcgtgcggg

SEQ ID NO: 25580 - RNA, 15 nt, Synthetic Construct
  source 1..15: mol_type = other RNA
catgccgcgtgcggg

SEQ ID NO: 25581 - RNA, 17 nt, Synthetic Construct
  source 1..17: mol_type = other RNA
cgcgacctcagatcaga

SEQ ID NO: 25582 - RNA, 17 nt, Synthetic Construct
  source 1..17: mol_type = other RNA
cgcgacctcagatcaga

SEQ ID NO: 25583 - RNA, 22 nt, Synthetic Construct
  source 1..22: mol_type = other RNA
tcaagagcaataacgaaaaatg

SEQ ID NO: 25584 - RNA, 22 nt, Synthetic Construct
  source 1..22: mol_type = other RNA
gaagcacattcgcacatcatat

SEQ ID NO: 25585 - RNA, 22 nt, Synthetic Construct
  source 1..22: mol_type = other RNA
gaagcacattcgcacatcatat

SEQ ID NO: 25586 - RNA, 22 nt, Synthetic Construct
  source 1..22: mol_type = other RNA
tcctgtactgagttgccccgag

SEQ ID NO: 25587 - RNA, 22 nt, Synthetic Construct
  source 1..22: mol_type = other RNA
tcctgtactgagttgccccgag

SEQ ID NO: 25588 - RNA, 15 nt, Synthetic Construct
  source 1..15: mol_type = other RNA
ggtcatcgtcaggct

SEQ ID NO: 25589 - RNA, 21 nt, Synthetic Construct
  source 1..21: mol_type = other RNA
ttcacagtggctaagttctgt

SEQ ID NO: 25590 - RNA, 22 nt, Synthetic Construct
  source 1..22: mol_type = other RNA
tggaatgtaaagaagtacgtat

SEQ ID NO: 25591 - RNA, 22 nt, Synthetic Construct
  source 1..22: mol_type = other RNA
tggaatgtaaagaagtacgtat

SEQ ID NO: 25592 - RNA, 22 nt, Synthetic Construct
  source 1..22: mol_type = other RNA
tgaggaagtagtttgtgctgtt

SEQ ID NO: 25593 - RNA, 16 nt, Synthetic Construct
  source 1..16: mol_type = other RNA
tgttcggaagattttc

SEQ ID NO: 25594 - RNA, 16 nt, Synthetic Construct
  source 1..16: mol_type = other RNA
tgttcggaagattttc

SEQ ID NO: 25595 - RNA, 16 nt, Synthetic Construct
  source 1..16: mol_type = other RNA
gtctacgaccatacca

SEQ ID NO: 25596 - RNA, 16 nt, Synthetic Construct
  source 1..16: mol_type = other RNA
gtctacgaccatacca

SEQ ID NO: 25597 - RNA, 22 nt, Synthetic Construct
  source 1..22: mol_type = other RNA
tatcgcacttgtcccggcctgt

SEQ ID NO: 25598 - RNA, 22 nt, Synthetic Construct
  source 1..22: mol_type = other RNA
tatcgcacttgtcccggcctgt

SEQ ID NO: 25599 - RNA, 24 nt, Synthetic Construct
  source 1..24: mol_type = other RNA
tttccccttggggttgtaggacca

SEQ ID NO: 25600 - RNA, 24 nt, Synthetic Construct
  source 1..24: mol_type = other RNA
tttccccttggggttgtaggacca

SEQ ID NO: 25601 - RNA, 20 nt, Synthetic Construct
  source 1..20: mol_type = other RNA
ccttggggttgtaggaccac

SEQ ID NO: 25602 - RNA, 20 nt, Synthetic Construct
  source 1..20: mol_type = other RNA
ccttggggttgtaggaccac

SEQ ID NO: 25603 - RNA, 23 nt, Synthetic Construct
  source 1..23: mol_type = other RNA
cgactcttagcggtggatcactc

SEQ ID NO: 25604 - RNA, 23 nt, Synthetic Construct
  source 1..23: mol_type = other RNA
cgactcttagcggtggatcactc

SEQ ID NO: 25605 - RNA, 21 nt, Synthetic Construct
  source 1..21: mol_type = other RNA
tgaggtagtagcttgtgctgt

SEQ ID NO: 25606 - RNA, 21 nt, Synthetic Construct
  source 1..21: mol_type = other RNA
tgaggtagtagcttgtgctgt

SEQ ID NO: 25607 - RNA, 23 nt, Synthetic Construct
  source 1..23: mol_type = other RNA
tacagtagtctgcacattggttt

SEQ ID NO: 25608 - RNA, 22 nt, Synthetic Construct
  source 1..22: mol_type = other RNA
gtagtgtttcctactttatgga

SEQ ID NO: 25609 - RNA, 22 nt, Synthetic Construct
  source 1..22: mol_type = other RNA
gtagtgtttcctactttatgga

SEQ ID NO: 25610 - RNA, 23 nt, Synthetic Construct
  source 1..23: mol_type = other RNA
acagtagtctgcacattggttaa

SEQ ID NO: 25611 - RNA, 21 nt, Synthetic Construct
  source 1..21: mol_type = other RNA
cgaggtagtagtttgtgctgt

SEQ ID NO: 25612 - RNA, 21 nt, Synthetic Construct
  source 1..21: mol_type = other RNA
tgaggtagtaggttatgtggt

SEQ ID NO: 25613 - RNA, 21 nt, Synthetic Construct
  source 1..21: mol_type = other RNA
tgaggtagtaggttatgtggt

SEQ ID NO: 25614 - RNA, 21 nt, Synthetic Construct
  source 1..21: mol_type = other RNA
tgaggggcagagagcgaggct

SEQ ID NO: 25615 - RNA, 15 nt, Synthetic Construct
  source 1..15: mol_type = other RNA
gtccggcccgaggca

SEQ ID NO: 25616 - RNA, 21 nt, Synthetic Construct
  source 1..21: mol_type = other RNA
tgaggtagtaggttgtgtagt

SEQ ID NO: 25617 - RNA, 21 nt, Synthetic Construct
  source 1..21: mol_type = other RNA
tgaggtagtaggttgtgtagt

SEQ ID NO: 25618 - RNA, 23 nt, Synthetic Construct
  source 1..23: mol_type = other RNA
tggtaatacgtcgtacttagtgt

SEQ ID NO: 25619 - RNA, 23 nt, Synthetic Construct
  source 1..23: mol_type = other RNA
tggtaatacgtcgtacttagtgt

SEQ ID NO: 25620 - RNA, 15 nt, Synthetic Construct
  source 1..15: mol_type = other RNA
gtagctcgttgggct

SEQ ID NO: 25621 - RNA, 15 nt, Synthetic Construct
  source 1..15: mol_type = other RNA
gtagctcgttgggct

SEQ ID NO: 25622 - RNA, 18 nt, Synthetic Construct
  source 1..18: mol_type = other RNA
gcgccgatgatagtgcgg

SEQ ID NO: 25623 - RNA, 18 nt, Synthetic Construct
  source 1..18: mol_type = other RNA
gcgccgatgatagtgcgg

SEQ ID NO: 25624 - RNA, 23 nt, Synthetic Construct
  source 1..23: mol_type = other RNA
caaagtgctgttcgtgcaggtgg

SEQ ID NO: 25625 - RNA, 21 nt, Synthetic Construct
  source 1..21: mol_type = other RNA
tgagatagtaggttgtgtggt

SEQ ID NO: 25626 - RNA, 21 nt, Synthetic Construct
  source 1..21: mol_type = other RNA
tgagatagtaggttgtgtggt

SEQ ID NO: 25627 - RNA, 23 nt, Synthetic Construct
  source 1..23: mol_type = other RNA
ggcggttatgcaagacagaggtg

SEQ ID NO: 25628 - RNA, 23 nt, Synthetic Construct
  source 1..23: mol_type = other RNA
tgtcagtttgtcaaataccccaa

SEQ ID NO: 25629 - RNA, 23 nt, Synthetic Construct
  source 1..23: mol_type = other RNA
tgtcagtttgtcaaataccccaa

SEQ ID NO: 25630 - RNA, 26 nt, Synthetic Construct
  source 1..26: mol_type = other RNA
gagcagctaataccgcatacgacctg

SEQ ID NO: 25631 - RNA, 26 nt, Synthetic Construct
  source 1..26: mol_type = other RNA
gacttaccaaacctatgcaaactccg

SEQ ID NO: 25632 - RNA, 26 nt, Synthetic Construct
  source 1..26: mol_type = other RNA
gacttaccaaacctatgcaaactccg

SEQ ID NO: 25633 - RNA, 22 nt, Synthetic Construct
  source 1..22: mol_type = other RNA
ttataatacaacctgataagtg

SEQ ID NO: 25634 - RNA, 21 nt, Synthetic Construct
  source 1..21: mol_type = other RNA
tggagcgtgacaatggtgttt

SEQ ID NO: 25635 - RNA, 21 nt, Synthetic Construct
  source 1..21: mol_type = other RNA
tggagcgtgacaatggtgttt

SEQ ID NO: 25636 - RNA, 22 nt, Synthetic Construct
  source 1..22: mol_type = other RNA
acagtagtctgcacattggttt

SEQ ID NO: 25637 - RNA, 23 nt, Synthetic Construct
  source 1..23: mol_type = other RNA
tgaggggcggagagcgagacttt

SEQ ID NO: 25638 - RNA, 20 nt, Synthetic Construct
  source 1..20: mol_type = other RNA
ccgcagagtacagcttggga

SEQ ID NO: 25639 - RNA, 23 nt, Synthetic Construct
  source 1..23: mol_type = other RNA
tgaggagcagagagcgagacttt

SEQ ID NO: 25640 - RNA, 15 nt, Synthetic Construct
  source 1..15: mol_type = other RNA
acggtcctaaggtag

SEQ ID NO: 25641 - RNA, 15 nt, Synthetic Construct
  source 1..15: mol_type = other RNA
acggtcctaaggtag

SEQ ID NO: 25642 - RNA, 16 nt, Synthetic Construct
  source 1..16: mol_type = other RNA
gccagcagccgcggta

SEQ ID NO: 25643 - RNA, 27 nt, Synthetic Construct
  source 1..27: mol_type = other RNA
agagcagctaataccgcatacgacctg

SEQ ID NO: 25644 - RNA, 18 nt, Synthetic Construct
  source 1..18: mol_type = other RNA
ctaatgagactgccggtg

SEQ ID NO: 25645 - RNA, 18 nt, Synthetic Construct
  source 1..18: mol_type = other RNA
ctaatgagactgccggtg

SEQ ID NO: 25646 - RNA, 19 nt, Synthetic Construct
  source 1..19: mol_type = other RNA
tcagtagctcgaggaaaag

SEQ ID NO: 25647 - RNA, 19 nt, Synthetic Construct
  source 1..19: mol_type = other RNA
tcagtagctcgaggaaaag

SEQ ID NO: 25648 - RNA, 22 nt, Synthetic Construct
  source 1..22: mol_type = other RNA
cattgcacttgtcccggcctgt

SEQ ID NO: 25649 - RNA, 22 nt, Synthetic Construct
  source 1..22: mol_type = other RNA
cattgcacttgtcccggcctgt

SEQ ID NO: 25650 - RNA, 24 nt, Synthetic Construct
  source 1..24: mol_type = other RNA
tgtaaacatccccgactggaagcc

SEQ ID NO: 25651 - RNA, 20 nt, Synthetic Construct
  source 1..20: mol_type = other RNA
tgaggtggtaggttgtatag

SEQ ID NO: 25652 - RNA, 20 nt, Synthetic Construct
  source 1..20: mol_type = other RNA
tgaggtggtaggttgtatag

SEQ ID NO: 25653 - RNA, 37 nt, Synthetic Construct; identical to SEQ ID NO: 5125
  source 1..37: mol_type = other RNA

SEQ ID NO: 25654 - RNA, 37 nt, Synthetic Construct; identical to SEQ ID NO: 5125
  source 1..37: mol_type = other RNA

SEQ ID NO: 25655 - RNA, 23 nt, Synthetic Construct
  source 1..23: mol_type = other RNA
tagtgcaatattgcttatagggt

SEQ ID NO: 25656 - RNA, 16 nt, Synthetic Construct
  source 1..16: mol_type = other RNA
ccaaggggtcgtgggt

SEQ ID NO: 25657 - RNA, 16 nt, Synthetic Construct
  source 1..16: mol_type = other RNA
ccaaggggtcgtgggt

SEQ ID NO: 25658 - RNA, 22 nt, Synthetic Construct
  source 1..22: mol_type = other RNA
tcagcgccgatgatagtgcgga

SEQ ID NO: 25659 - RNA, 22 nt, Synthetic Construct
  source 1..22: mol_type = other RNA
tcagcgccgatgatagtgcgga

SEQ ID NO: 25660 - RNA, 21 nt, Synthetic Construct
  source 1..21: mol_type = other RNA
tcctgaactgagctgccccga

SEQ ID NO: 25661 - RNA, 21 nt, Synthetic Construct
  source 1..21: mol_type = other RNA
tcctgaactgagctgccccga

SEQ ID NO: 25662 - RNA, 15 nt, Synthetic Construct
  source 1..15: mol_type = other RNA
ttccgaaagtagtgg

SEQ ID NO: 25663 - RNA, 18 nt, Synthetic Construct
  source 1..18: mol_type = other RNA
gctattgacgaccgtacc

SEQ ID NO: 25664 - RNA, 18 nt, Synthetic Construct
  source 1..18: mol_type = other RNA
gctattgacgaccgtacc

SEQ ID NO: 25665 - RNA, 23 nt, Synthetic Construct
  source 1..23: mol_type = other RNA
tggtaatacgtcgtacttagtgt

SEQ ID NO: 25666 - RNA, 23 nt, Synthetic Construct
  source 1..23: mol_type = other RNA
tggtaatacgtcgtacttagtgt

SEQ ID NO: 25667 - RNA, 23 nt, Synthetic Construct
  source 1..23: mol_type = other RNA
tggtaattcgacgtacttagtgt

SEQ ID NO: 25668 - RNA, 15 nt, Synthetic Construct
  source 1..15: mol_type = other RNA
ggtggctgtagctca

SEQ ID NO: 25669 - RNA, 21 nt, Synthetic Construct
  source 1..21: mol_type = other RNA
cgtaccgtgagtaataatgca

SEQ ID NO: 25670 - RNA, 17 nt, Synthetic Construct
  source 1..17: mol_type = other RNA
cgaaattccttgtcggg

SEQ ID NO: 25671 - RNA, 17 nt, Synthetic Construct
  source 1..17: mol_type = other RNA
cgaaattccttgtcggg

SEQ ID NO: 25672 - RNA, 23 nt, Synthetic Construct
  source 1..23: mol_type = other RNA
tggtaaaacgacgtacttagtgt

SEQ ID NO: 25673 - RNA, 23 nt, Synthetic Construct
  source 1..23: mol_type = other RNA
tggtaaaacgacgtacttagtgt

SEQ ID NO: 25674 - RNA, 23 nt, Synthetic Construct
  source 1..23: mol_type = other RNA
tagcagcacgtaaatattggcgt

SEQ ID NO: 25675 - RNA, 25 nt, Synthetic Construct
  source 1..25: mol_type = other RNA
aaaccgttaccattactgagtttag

SEQ ID NO: 25676 - RNA, 25 nt, Synthetic Construct
  source 1..25: mol_type = other RNA
aaaccgttaccattactgagtttag

SEQ ID NO: 25677 - RNA, 32 nt, Synthetic Construct; identical to SEQ ID NO: 2467
  source 1..32: mol_type = other RNA

SEQ ID NO: 25678 - RNA, 32 nt, Synthetic Construct; identical to SEQ ID NO: 2467
  source 1..32: mol_type = other RNA

SEQ ID NO: 25679 - RNA, 33 nt, Synthetic Construct; identical to SEQ ID NO: 1982
  source 1..33: mol_type = other RNA

SEQ ID NO: 25680 - RNA, 20 nt, Synthetic Construct
  source 1..20: mol_type = other RNA
tgaggtagtaggttgtgtag

SEQ ID NO: 25681 - RNA, 20 nt, Synthetic Construct
  source 1..20: mol_type = other RNA
tgaggtagtaggttgtgtag

SEQ ID NO: 25682 - RNA, 22 nt, Synthetic Construct
  source 1..22: mol_type = other RNA
tcgaaccgtgagtaataatgcg

SEQ ID NO: 25683 - RNA, 19 nt, Synthetic Construct
  source 1..19: mol_type = other RNA
gcgccgatgatagtgcgga

SEQ ID NO: 25684 - RNA, 19 nt, Synthetic Construct
  source 1..19: mol_type = other RNA
gcgccgatgatagtgcgga

SEQ ID NO: 25685 - RNA, 22 nt, Synthetic Construct
  source 1..22: mol_type = other RNA
cccataaagtagaaagcactac

SEQ ID NO: 25686 - RNA, 22 nt, Synthetic Construct
  source 1..22: mol_type = other RNA
cccataaagtagaaagcactac

SEQ ID NO: 25687 - RNA, 18 nt, Synthetic Construct
  source 1..18: mol_type = other RNA
gcgccgatgatagtgcgg

SEQ ID NO: 25688 - RNA, 20 nt, Synthetic Construct
  source 1..20: mol_type = other RNA
acccttgtcattagttgcta

SEQ ID NO: 25689 - RNA, 22 nt, Synthetic Construct
  source 1..22: mol_type = other RNA
tgaggtagcaggttgtgtggtt

SEQ ID NO: 25690 - RNA, 22 nt, Synthetic Construct
  source 1..22: mol_type = other RNA
tgaggtagcaggttgtgtggtt

SEQ ID NO: 25691 - RNA, 35 nt, Synthetic Construct; identical to SEQ ID NO: 2452
  source 1..35: mol_type = other RNA

SEQ ID NO: 25692 - RNA, 18 nt, Synthetic Construct
  source 1..18: mol_type = other RNA
ccaaggggtcgtgggttc

SEQ ID NO: 25693 - RNA, 23 nt, Synthetic Construct
  source 1..23: mol_type = other RNA
aggtaatacgacgtacttagtgt

SEQ ID NO: 25694 - RNA, 23 nt, Synthetic Construct
  source 1..23: mol_type = other RNA
aggtaatacgacgtacttagtgt

SEQ ID NO: 25695 - RNA, 19 nt, Synthetic Construct
  source 1..19: mol_type = other RNA
gcgccgatgatagtgcgga

SEQ ID NO: 25696 - RNA, 22 nt, Synthetic Construct
  source 1..22: mol_type = other RNA
gagagcctggacacaggtgctg

SEQ ID NO: 25697 - RNA, 22 nt, Synthetic Construct
  source 1..22: mol_type = other RNA
ngaggtagtagtttgtgctgtt

SEQ ID NO: 25698 - RNA, 22 nt, Synthetic Construct
  source 1..22: mol_type = other RNA
ngaggtagtagtttgtgctgtt

SEQ ID NO: 25699 - RNA, 23 nt, Synthetic Construct
  source 1..23: mol_type = other RNA
tggtaatacgacgtacctagtgt

SEQ ID NO: 25700 - RNA, 23 nt, Synthetic Construct
  source 1..23: mol_type = other RNA
tggtaatacgacgtacctagtgt

SEQ ID NO: 25701 - RNA, 16 nt, Synthetic Construct
  source 1..16: mol_type = other RNA
ccaaggggtcgtgggt

SEQ ID NO: 25702 - RNA, 25 nt, Synthetic Construct
  source 1..25: mol_type = other RNA
gcgccgctggtgtagtggtatcatg

SEQ ID NO: 25703 - RNA, 25 nt, Synthetic Construct
  source 1..25: mol_type = other RNA
gcgccgctggtgtagtggtatcatg

SEQ ID NO: 25704 - RNA, 22 nt, Synthetic Construct
  source 1..22: mol_type = other RNA
tcctgtactgagctgcctcgag

SEQ ID NO: 25705 - RNA, 22 nt, Synthetic Construct
  source 1..22: mol_type = other RNA
tcctgtactgagctgcctcgag

SEQ ID NO: 25706 - RNA, 22 nt, Synthetic Construct
  source 1..22: mol_type = other RNA
tgggatgtaaagaagtatgtat

SEQ ID NO: 25707 - RNA, 22 nt, Synthetic Construct
  source 1..22: mol_type = other RNA
tgggatgtaaagaagtatgtat

SEQ ID NO: 25708 - RNA, 16 nt, Synthetic Construct
  source 1..16: mol_type = other RNA
tgttcggaagattttc

SEQ ID NO: 25709 - RNA, 16 nt, Synthetic Construct
  source 1..16: mol_type = other RNA
tgttcggaagattttc

SEQ ID NO: 25710 - RNA, 23 nt, Synthetic Construct
  source 1..23: mol_type = other RNA
naaagtgctgttcgtgcaggtag

SEQ ID NO: 25711 - RNA, 23 nt, Synthetic Construct
  source 1..23: mol_type = other RNA
naaagtgctgttcgtgcaggtag

SEQ ID NO: 25712 - RNA, 15 nt, Synthetic Construct
  source 1..15: mol_type = other RNA
gttcggaagattttc

SEQ ID NO: 25713 - RNA, 15 nt, Synthetic Construct
  source 1..15: mol_type = other RNA
gttcggaagattttc

SEQ ID NO: 25714 - RNA, 33 nt, Synthetic Construct; identical to SEQ ID NO: 10232
  source 1..33: mol_type = other RNA

SEQ ID NO: 25715 - RNA, 33 nt, Synthetic Construct; identical to SEQ ID NO: 10232
  source 1..33: mol_type = other RNA

SEQ ID NO: 25716 - RNA, 21 nt, Synthetic Construct
  source 1..21: mol_type = other RNA
tgaggggcagagagcgggact

SEQ ID NO: 25717 - RNA, 20 nt, Synthetic Construct
  source 1..20: mol_type = other RNA
tagcgaaattccttgtcggg

SEQ ID NO: 25718 - RNA, 20 nt, Synthetic Construct
  source 1..20: mol_type = other RNA
tagcgaaattccttgtcggg

SEQ ID NO: 25719 - RNA, 36 nt, Synthetic Construct; identical to SEQ ID NO: 777
  source 1..36: mol_type = other RNA

SEQ ID NO: 25720 - RNA, 36 nt, Synthetic Construct; identical to SEQ ID NO: 777
  source 1..36: mol_type = other RNA

SEQ ID NO: 25721 - RNA, 21 nt, Synthetic Construct
  source 1..21: mol_type = other RNA
tgaggtagtaggtcgtgtggt

SEQ ID NO: 25722 - RNA, 21 nt, Synthetic Construct
  source 1..21: mol_type = other RNA
tgaggtagtaggtcgtgtggt

SEQ ID NO: 25723 - RNA, 34 nt, Synthetic Construct; identical to SEQ ID NO: 2298
  source 1..34: mol_type = other RNA

SEQ ID NO: 25724 - RNA, 34 nt, Synthetic Construct; identical to SEQ ID NO: 2298
  source 1..34: mol_type = other RNA

SEQ ID NO: 25725 - RNA, 15 nt, Synthetic Construct
  source 1..15: mol_type = other RNA
cccagaaacccggtc

SEQ ID NO: 25726 - RNA, 15 nt, Synthetic Construct
  source 1..15: mol_type = other RNA
cccagaaacccggtc

SEQ ID NO: 25727 - RNA, 24 nt, Synthetic Construct
  source 1..24: mol_type = other RNA
tcctgtactgagctgccccgagat

SEQ ID NO: 25728 - RNA, 20 nt, Synthetic Construct
  source 1..20: mol_type = other RNA
tgaggtagtaggttgtatgg

SEQ ID NO: 25729 - RNA, 20 nt, Synthetic Construct
  source 1..20: mol_type = other RNA
tgaggtagtaggttgtatgg

SEQ ID NO: 25730 - RNA, 24 nt, Synthetic Construct
  source 1..24: mol_type = other RNA
tcctgtactgagctgccccgagat

SEQ ID NO: 25731 - RNA, 21 nt, Synthetic Construct
  source 1..21: mol_type = other RNA
tgagatagtaggttgtgtggt

SEQ ID NO: 25732 - RNA, 21 nt, Synthetic Construct
  source 1..21: mol_type = other RNA
tgagatagtaggttgtgtggt

SEQ ID NO: 25733 - RNA, 25 nt, Synthetic Construct
  source 1..25: mol_type = other RNA
ttgaggatatgaggtcgagacgaca

SEQ ID NO: 25734 - RNA, 25 nt, Synthetic Construct
  source 1..25: mol_type = other RNA
ttgaggatatgaggtcgagacgaca

SEQ ID NO: 25735 - RNA, 26 nt, Synthetic Construct
  source 1..26: mol_type = other RNA
gatgcgtggtaggagagcgttctgta

SEQ ID NO: 25736 - RNA, 37 nt, Synthetic Construct; identical to SEQ ID NO: 2365
  source 1..37: mol_type = other RNA

SEQ ID NO: 25737 - RNA, 22 nt, Synthetic Construct
  source 1..22: mol_type = other RNA
tctttgttcgattccgttgagt

SEQ ID NO: 25738 - RNA, 25 nt, Synthetic Construct
  source 1..25: mol_type = other RNA
ttgaggatatgagatcgagacaaca

SEQ ID NO: 25739 - RNA, 25 nt, Synthetic Construct
  source 1..25: mol_type = other RNA
ttgaggatatgagatcgagacaaca

SEQ ID NO: 25740 - RNA, 16 nt, Synthetic Construct
  source 1..16: mol_type = other RNA
cagtcaggatgttggc

SEQ ID NO: 25741 - RNA, 16 nt, Synthetic Construct
  source 1..16: mol_type = other RNA
cagtcaggatgttggc

SEQ ID NO: 25742 - RNA, 22 nt, Synthetic Construct
  source 1..22: mol_type = other RNA
tgaggtagtaggttgtggggtt

SEQ ID NO: 25743 - RNA, 21 nt, Synthetic Construct
  source 1..21: mol_type = other RNA
tgaggtagtagattgtgtggt

SEQ ID NO: 25744 - RNA, 21 nt, Synthetic Construct
  source 1..21: mol_type = other RNA
tgaggtagtagattgtgtggt

SEQ ID NO: 25745 - RNA, 23 nt, Synthetic Construct
  source 1..23: mol_type = other RNA
tggtaatacgacatacttagtgt

SEQ ID NO: 25746 - RNA, 19 nt, Synthetic Construct
  source 1..19: mol_type = other RNA
gctattgacgaccgtaccg

SEQ ID NO: 25747 - RNA, 19 nt, Synthetic Construct
  source 1..19: mol_type = other RNA
gctattgacgaccgtaccg

SEQ ID NO: 25748 - RNA, 22 nt, Synthetic Construct
  source 1..22: mol_type = other RNA
tggaacgtaaagaagtatgtat

SEQ ID NO: 25749 - RNA, 22 nt, Synthetic Construct
  source 1..22: mol_type = other RNA
tggaacgtaaagaagtatgtat

SEQ ID NO: 25750 - RNA, 22 nt, Synthetic Construct
  source 1..22: mol_type = other RNA
tgttgcacttgtcccggcctgt

SEQ ID NO: 25751 - RNA, 15 nt, Synthetic Construct
  source 1..15: mol_type = other RNA
ggtggctgtagctca

SEQ ID NO: 25752 - RNA, 15 nt, Synthetic Construct
  source 1..15: mol_type = other RNA
ggtggctgtagctca

SEQ ID NO: 25753 - RNA, 23 nt, Synthetic Construct
  source 1..23: mol_type = other RNA
tggaatgtaaagaagtatgtatt

SEQ ID NO: 25754 - RNA, 23 nt, Synthetic Construct
  source 1..23: mol_type = other RNA
tggaatgtaaagaagtatgtatt

SEQ ID NO: 25755 - RNA, 26 nt, Synthetic Construct
  source 1..26: mol_type = other RNA
tgtcggctcatctcatcctggggctg

SEQ ID NO: 25756 - RNA, 23 nt, Synthetic Construct
  source 1..23: mol_type = other RNA
gggtaatacgacgtacttagtgt

SEQ ID NO: 25757 - RNA, 16 nt, Synthetic Construct
  source 1..16: mol_type = other RNA
gcctacggccatacca

SEQ ID NO: 25758 - RNA, 22 nt, Synthetic Construct
  source 1..22: mol_type = other RNA
cggaatgtaaagaagtatgtat

SEQ ID NO: 25759 - RNA, 22 nt, Synthetic Construct
  source 1..22: mol_type = other RNA
cggaatgtaaagaagtatgtat

SEQ ID NO: 25760 - RNA, 24 nt, Synthetic Construct
  source 1..24: mol_type = other RNA
acctggcatacaatgtagatttct

SEQ ID NO: 25761 - RNA, 24 nt, Synthetic Construct
  source 1..24: mol_type = other RNA
acctggcatacaatgtagatttct

SEQ ID NO: 25762 - RNA, 16 nt, Synthetic Construct
  source 1..16: mol_type = other RNA
tcgtgacgatagtgca

SEQ ID NO: 25763 - RNA, 16 nt, Synthetic Construct
  source 1..16: mol_type = other RNA
tcgtgacgatagtgca

SEQ ID NO: 25764 - RNA, 23 nt, Synthetic Construct
  source 1..23: mol_type = other RNA
tcctgtaccgagctgccccgaga

SEQ ID NO: 25765 - RNA, 23 nt, Synthetic Construct
  source 1..23: mol_type = other RNA
tcctgtaccgagctgccccgaga

SEQ ID NO: 25766 - RNA, 23 nt, Synthetic Construct
  source 1..23: mol_type = other RNA
taaggtgcatctagtgcagatag

SEQ ID NO: 25767 - RNA, 23 nt, Synthetic Construct
  source 1..23: mol_type = other RNA
tctttgttcgattccgttgagta

SEQ ID NO: 25768 - RNA, 23 nt, Synthetic Construct
  source 1..23: mol_type = other RNA
tctttgttcgattccgttgagta

SEQ ID NO: 25769 - RNA, 24 nt, Synthetic Construct
  source 1..24: mol_type = other RNA
ggttgtaaaccgcttttgtcaggg

SEQ ID NO: 25770 - RNA, 24 nt, Synthetic Construct
  source 1..24: mol_type = other RNA
ggttgtaaaccgcttttgtcaggg

SEQ ID NO: 25771 - RNA, 16 nt, Synthetic Construct
  source 1..16: mol_type = other RNA
ccgcttttgtcaggga

SEQ ID NO: 25772 - RNA, 22 nt, Synthetic Construct
  source 1..22: mol_type = other RNA
tgttgcacttgtcccggcctgt

SEQ ID NO: 25773 - RNA, 22 nt, Synthetic Construct
  source 1..22: mol_type = other RNA
tgttgcacttgtcccggcctgt

SEQ ID NO: 25774 - RNA, 21 nt, Synthetic Construct
  source 1..21: mol_type = other RNA
tcccgtactgagctgccccga

SEQ ID NO: 25775 - RNA, 21 nt, Synthetic Construct
  source 1..21: mol_type = other RNA
tcccgtactgagctgccccga

SEQ ID NO: 25776 - RNA, 21 nt, Synthetic Construct
  source 1..21: mol_type = other RNA
gcccgtgttcggaagattttc

SEQ ID NO: 25777 - RNA, 21 nt, Synthetic Construct
  source 1..21: mol_type = other RNA
gcccgtgttcggaagattttc

SEQ ID NO: 25778 - RNA, 19 nt, Synthetic Construct
  source 1..19: mol_type = other RNA
accaaggggtcgtgggttc

SEQ ID NO: 25779 - RNA, 19 nt, Synthetic Construct
  source 1..19: mol_type = other RNA
accaaggggtcgtgggttc

SEQ ID NO: 25780 - RNA, 19 nt, Synthetic Construct
  source 1..19: mol_type = other RNA
cagcactctgcaaagacga

SEQ ID NO: 25781 - RNA, 19 nt, Synthetic Construct
  source 1..19: mol_type = other RNA
cagcactctgcaaagacga

SEQ ID NO: 25782 - RNA, 17 nt, Synthetic Construct
  source 1..17: mol_type = other RNA
gggtctgtagctcagtc

SEQ ID NO: 25783 - RNA, 23 nt, Synthetic Construct
  source 1..23: mol_type = other RNA
tggtaatacggcgtacttagtgt

SEQ ID NO: 25784 - RNA, 23 nt, Synthetic Construct
  source 1..23: mol_type = other RNA
tggtaatacggcgtacttagtgt

SEQ ID NO: 25785 - RNA, 24 nt, Synthetic Construct
  source 1..24: mol_type = other RNA
gtctttgttcgattccgttgagta

SEQ ID NO: 25786 - RNA, 24 nt, Synthetic Construct
  source 1..24: mol_type = other RNA
gtctttgttcgattccgttgagta

SEQ ID NO: 25787 - RNA, 21 nt, Synthetic Construct
  source 1..21: mol_type = other RNA
tgaggtagtagtttgtgctgc

SEQ ID NO: 25788 - RNA, 19 nt, Synthetic Construct
  source 1..19: mol_type = other RNA
tcctgtaccgatcaatagt

SEQ ID NO: 25789 - RNA, 30 nt, Synthetic Construct; identical to SEQ ID NO: 1236
  source 1..30: mol_type = other RNA

SEQ ID NO: 25790 - RNA, 30 nt, Synthetic Construct; identical to SEQ ID NO: 1236
  source 1..30: mol_type = other RNA

SEQ ID NO: 25791 - RNA, 20 nt, Synthetic Construct
  source 1..20: mol_type = other RNA
tagcgaaattccttgtcggg

SEQ ID NO: 25792 - RNA, 20 nt, Synthetic Construct
  source 1..20: mol_type = other RNA
tagcgaaattccttgtcggg

SEQ ID NO: 25793 - RNA, 28 nt, Synthetic Construct
  source 1..28: mol_type = other RNA
ccccccgctgctaaatttgactggcttt

SEQ ID NO: 25794 - RNA, 22 nt, Synthetic Construct
  source 1..22: mol_type = other RNA
tgaggtagtaggttgtgcggtt

SEQ ID NO: 25795 - RNA, 21 nt, Synthetic Construct
  source 1..21: mol_type = other RNA
cgaggtagtaggttgtgtggt

SEQ ID NO: 25796 - RNA, 21 nt, Synthetic Construct
  source 1..21: mol_type = other RNA
cgaggtagtaggttgtgtggt

SEQ ID NO: 25797 - RNA, 22 nt, Synthetic Construct
  source 1..22: mol_type = other RNA
ggaggagttcgaaggtacgcta

SEQ ID NO: 25798 - RNA, 22 nt, Synthetic Construct
  source 1..22: mol_type = other RNA
ggaggagttcgaaggtacgcta

SEQ ID NO: 25799 - RNA, 20 nt, Synthetic Construct
  source 1..20: mol_type = other RNA
cgcgacctcagatcagacgt

SEQ ID NO: 25800 - RNA, 20 nt, Synthetic Construct
  source 1..20: mol_type = other RNA
cgcgacctcagatcagacgt

SEQ ID NO: 25801 - RNA, 23 nt, Synthetic Construct
  source 1..23: mol_type = other RNA
tcctgtactgagccgccccgaga

SEQ ID NO: 25802 - RNA, 18 nt, Synthetic Construct
  source 1..18: mol_type = other RNA
acagtcaggatgttggct

SEQ ID NO: 25803 - RNA, 18 nt, Synthetic Construct
  source 1..18: mol_type = other RNA
acagtcaggatgttggct

SEQ ID NO: 25804 - RNA, 22 nt, Synthetic Construct
  source 1..22: mol_type = other RNA
tggaatgtaaaggagtatgtat

SEQ ID NO: 25805 - RNA, 22 nt, Synthetic Construct
  source 1..22: mol_type = other RNA
tggaatgtaaaggagtatgtat

SEQ ID NO: 25806 - RNA, 17 nt, Synthetic Construct
  source 1..17: mol_type = other RNA
atgcaagtcgaacggta

SEQ ID NO: 25807 - RNA, 17 nt, Synthetic Construct
  source 1..17: mol_type = other RNA
atgcaagtcgaacggta

SEQ ID NO: 25808 - RNA, 24 nt, Synthetic Construct
  source 1..24: mol_type = other RNA
gcagctaataccgcatacgacctg

SEQ ID NO: 25809 - RNA, 18 nt, Synthetic Construct
  source 1..18: mol_type = other RNA
gtcacggtggccgagtgg

SEQ ID NO: 25810 - RNA, 37 nt, Synthetic Construct; identical to SEQ ID NO: 4277
  source 1..37: mol_type = other RNA

SEQ ID NO: 25811 - RNA, 37 nt, Synthetic Construct; identical to SEQ ID NO: 4277
  source 1..37: mol_type = other RNA

SEQ ID NO: 25812 - RNA, 24 nt, Synthetic Construct
  source 1..24: mol_type = other RNA
tcctgtactgagctgccccgagtt

SEQ ID NO: 25813 - RNA, 24 nt, Synthetic Construct
  source 1..24: mol_type = other RNA
tcctgtactgagctgccccgagtt

SEQ ID NO: 25814 - RNA, 19 nt, Synthetic Construct
  source 1..19: mol_type = other RNA
cccttgtcattagttgcta

SEQ ID NO: 25815 - RNA, 32 nt, Synthetic Construct; identical to SEQ ID NO: 4279
  source 1..32: mol_type = other RNA

SEQ ID NO: 25816 - RNA, 23 nt, Synthetic Construct
  source 1..23: mol_type = other RNA
aatgacacgatcactcccgttga

SEQ ID NO: 25817 - RNA, 23 nt, Synthetic Construct
  source 1..23: mol_type = other RNA
aatgacacgatcactcccgttga

SEQ ID NO: 25818 - RNA, 22 nt, Synthetic Construct
  source 1..22: mol_type = other RNA
ttcaagtaatccaggataggcc

SEQ ID NO: 25819 - RNA, 16 nt, Synthetic Construct
  source 1..16: mol_type = other RNA
ctgacgctcatgcacg

SEQ ID NO: 25820 - RNA, 24 nt, Synthetic Construct
  source 1..24: mol_type = other RNA
tcagtgcatcacagaactttgttt

SEQ ID NO: 25821 - RNA, 20 nt, Synthetic Construct
  source 1..20: mol_type = other RNA
tgaggtagtaggttgcgtgg

SEQ ID NO: 25822 - RNA, 20 nt, Synthetic Construct
  source 1..20: mol_type = other RNA
tgaggtagtaggttgcgtgg

SEQ ID NO: 25823 - RNA, 24 nt, Synthetic Construct
  source 1..24: mol_type = other RNA
ttcaagtaattcaggataggttgt

SEQ ID NO: 25824 - RNA, 20 nt, Synthetic Construct
  source 1..20: mol_type = other RNA
cgaggtagtaggttgtatag

SEQ ID NO: 25825 - RNA, 20 nt, Synthetic Construct
  source 1..20: mol_type = other RNA
cgaggtagtaggttgtatag

SEQ ID NO: 25826 - RNA, 16 nt, Synthetic Construct
  source 1..16: mol_type = other RNA
ggcgggggtcgctggt

SEQ ID NO: 25827 - RNA, 23 nt, Synthetic Construct
  source 1..23: mol_type = other RNA
tggaaatacgacgtacttagtgt

SEQ ID NO: 25828 - RNA, 21 nt, Synthetic Construct
  source 1..21: mol_type = other RNA
ttataatacaacctgataagt

SEQ ID NO: 25829 - RNA, 21 nt, Synthetic Construct
  source 1..21: mol_type = other RNA
ttataatacaacctgataagt

SEQ ID NO: 25830 - RNA, 36 nt, Synthetic Construct; identical to SEQ ID NO: 10333
  source 1..36: mol_type = other RNA

SEQ ID NO: 25831 - RNA, 36 nt, Synthetic Construct; identical to SEQ ID NO: 10333
  source 1..36: mol_type = other RNA

SEQ ID NO: 25832 - RNA, 23 nt, Synthetic Construct
  source 1..23: mol_type = other RNA
tggggggcagagagcgagacttt

SEQ ID NO: 25833 - RNA, 19 nt, Synthetic Construct
  source 1..19: mol_type = other RNA
gcgaaattccttgtcgggt

SEQ ID NO: 25834 - RNA, 20 nt, Synthetic Construct
  source 1..20: mol_type = other RNA
gccatcatttaaagaaagcg

SEQ ID NO: 25835 - RNA, 20 nt, Synthetic Construct
  source 1..20: mol_type = other RNA
gccatcatttaaagaaagcg

SEQ ID NO: 25836 - RNA, 22 nt, Synthetic Construct
  source 1..22: mol_type = other RNA
cagggctggcagtgacatgggt

SEQ ID NO: 25837 - RNA, 23 nt, Synthetic Construct
  source 1..23: mol_type = other RNA
tagtaatacgacgtacttagtgt

SEQ ID NO: 25838 - RNA, 23 nt, Synthetic Construct
  source 1..23: mol_type = other RNA
tagtaatacgacgtacttagtgt

SEQ ID NO: 25839 - RNA, 23 nt, Synthetic Construct
  source 1..23: mol_type = other RNA
ggctcggtctgaggcccctcagt

SEQ ID NO: 25840 - RNA, 23 nt, Synthetic Construct
  source 1..23: mol_type = other RNA
tccctggtggtctagtggttagg

SEQ ID NO: 25841 - RNA, 23 nt, Synthetic Construct
  source 1..23: mol_type = other RNA
tccctggtggtctagtggttagg

SEQ ID NO: 25842 - RNA, 23 nt, Synthetic Construct
  source 1..23: mol_type = other RNA
tgaggagcagagagcgagacttt

SEQ ID NO: 25843 - RNA, 27 nt, Synthetic Construct
  source 1..27: mol_type = other RNA
atagtctttgttcgattccgttgagta

SEQ ID NO: 25844 - RNA, 21 nt, Synthetic Construct
  source 1..21: mol_type = other RNA
acagtagtctgcacattggtt

SEQ ID NO: 25845 - RNA, 23 nt, Synthetic Construct
  source 1..23: mol_type = other RNA
taacactgtctggtaacgatgtt

SEQ ID NO: 25846 - RNA, 23 nt, Synthetic Construct
  source 1..23: mol_type = other RNA
taacactgtctggtaacgatgtt

SEQ ID NO: 25847 - RNA, 25 nt, Synthetic Construct
  source 1..25: mol_type = other RNA
ttgaggatatgaggtcgagacgaca

SEQ ID NO: 25848 - RNA, 25 nt, Synthetic Construct
  source 1..25: mol_type = other RNA
ttgaggatatgaggtcgagacgaca

SEQ ID NO: 25849 - RNA, 21 nt, Synthetic Construct
  source 1..21: mol_type = other RNA
tgaggtagtaggttgtgaggt

SEQ ID NO: 25850 - RNA, 21 nt, Synthetic Construct
  source 1..21: mol_type = other RNA
tgaggtagtaggttgtgaggt

SEQ ID NO: 25851 - RNA, 16 nt, Synthetic Construct
  source 1..16: mol_type = other RNA
ccaaggggtcgtgggt

SEQ ID NO: 25852 - RNA, 18 nt, Synthetic Construct
  source 1..18: mol_type = other RNA
tccgacatgcgagggttc

SEQ ID NO: 25853 - RNA, 18 nt, Synthetic Construct
  source 1..18: mol_type = other RNA
tccgacatgcgagggttc

SEQ ID NO: 25854 - RNA, 20 nt, Synthetic Construct
  source 1..20: mol_type = other RNA
tgagatagtaggttgtgtgg

SEQ ID NO: 25855 - RNA, 20 nt, Synthetic Construct
  source 1..20: mol_type = other RNA
tgagatagtaggttgtgtgg

SEQ ID NO: 25856 - RNA, 23 nt, Synthetic Construct
  source 1..23: mol_type = other RNA
tggtaatacaacgtacttagtgt

SEQ ID NO: 25857 - RNA, 23 nt, Synthetic Construct
  source 1..23: mol_type = other RNA
tggtaatacaacgtacttagtgt

SEQ ID NO: 25858 - RNA, 15 nt, Synthetic Construct
  source 1..15: mol_type = other RNA
gtcgacgtatagggt

SEQ ID NO: 25859 - RNA, 22 nt, Synthetic Construct
  source 1..22: mol_type = other RNA
tgaggtagtaagttgtgtggtt

SEQ ID NO: 25860 - RNA, 22 nt, Synthetic Construct
  source 1..22: mol_type = other RNA
tgaggtagtaagttgtgtggtt

SEQ ID NO: 25861 - RNA, 16 nt, Synthetic Construct
  source 1..16: mol_type = other RNA
ttggcctcaagtcagg

SEQ ID NO: 25862 - RNA, 16 nt, Synthetic Construct
  source 1..16: mol_type = other RNA
ttggcctcaagtcagg

SEQ ID NO: 25863 - RNA, 30 nt, Synthetic Construct; identical to SEQ ID NO: 2353
  source 1..30: mol_type = other RNA

SEQ ID NO: 25864 - RNA, 17 nt, Synthetic Construct
  source 1..17: mol_type = other RNA
cacggcccagactccta

SEQ ID NO: 25865 - RNA, 22 nt, Synthetic Construct
  source 1..22: mol_type = other RNA
tcctgtaccgagctgccccgag

SEQ ID NO: 25866 - RNA, 21 nt, Synthetic Construct
  source 1..21: mol_type = other RNA
tcctgtactgggctgccccga

SEQ ID NO: 25867 - RNA, 19 nt, Synthetic Construct
  source 1..19: mol_type = other RNA
gggtgcaagcgttaatcgg

SEQ ID NO: 25868 - RNA, 22 nt, Synthetic Construct
  source 1..22: mol_type = other RNA
tcctgtactaagctgccccgag

SEQ ID NO: 25869 - RNA, 22 nt, Synthetic Construct
  source 1..22: mol_type = other RNA
tcctgtactaagctgccccgag

SEQ ID NO: 25870 - RNA, 22 nt, Synthetic Construct
  source 1..22: mol_type = other RNA
tattgcactcgtcccggcctgt

SEQ ID NO: 25871 - RNA, 23 nt, Synthetic Construct
  source 1..23: mol_type = other RNA
tggtaatacgatgtacttagtgt

SEQ ID NO: 25872 - RNA, 22 nt, Synthetic Construct
  source 1..22: mol_type = other RNA
tggaatgtaaagaagtacgtat

SEQ ID NO: 25873 - RNA, 22 nt, Synthetic Construct
  source 1..22: mol_type = other RNA
tggaatgtaaagaagtacgtat

SEQ ID NO: 25874 - RNA, 16 nt, Synthetic Construct
  source 1..16: mol_type = other RNA
gatttgggagtgctcg

SEQ ID NO: 25875 - RNA, 15 nt, Synthetic Construct
  source 1..15: mol_type = other RNA
aggtgggaggctttg

SEQ ID NO: 25876 - RNA, 22 nt, Synthetic Construct
  source 1..22: mol_type = other RNA
tgagaactgaattccatgggtc

SEQ ID NO: 25877 - RNA, 22 nt, Synthetic Construct
  source 1..22: mol_type = other RNA
tattgcgcttgtcccggcctgt

SEQ ID NO: 25878 - RNA, 22 nt, Synthetic Construct
  source 1..22: mol_type = other RNA
tattgcgcttgtcccggcctgt

SEQ ID NO: 25879 - RNA, 23 nt, Synthetic Construct
  source 1..23: mol_type = other RNA
tgaggggtagagagcgagacttt

SEQ ID NO: 25880 - RNA, 23 nt, Synthetic Construct
  source 1..23: mol_type = other RNA
tgaggggtagagagcgagacttt

SEQ ID NO: 25881 - RNA, 24 nt, Synthetic Construct
  source 1..24: mol_type = other RNA
tgtaaacatccttgactggaagct

SEQ ID NO: 25882 - RNA, 24 nt, Synthetic Construct
  source 1..24: mol_type = other RNA
tgtaaacatccttgactggaagct

SEQ ID NO: 25883 - RNA, 22 nt, Synthetic Construct
  source 1..22: mol_type = other RNA
atggatttttggagcagggaga

SEQ ID NO: 25884 - RNA, 23 nt, Synthetic Construct
  source 1..23: mol_type = other RNA
tgaggggcagagggcgagacttt

SEQ ID NO: 25885 - RNA, 23 nt, Synthetic Construct
  source 1..23: mol_type = other RNA
tgaggggcagagggcgagacttt

SEQ ID NO: 25886 - RNA, 16 nt, Synthetic Construct
  source 1..16: mol_type = other RNA
ctcagtagctcgagga

SEQ ID NO: 25887 - RNA, 21 nt, Synthetic Construct
  source 1..21: mol_type = other RNA
tgaggggcagagagcgagaca

SEQ ID NO: 25888 - RNA, 23 nt, Synthetic Construct
  source 1..23: mol_type = other RNA
tgataatacgacgtacttagtgt

SEQ ID NO: 25889 - RNA, 23 nt, Synthetic Construct
  source 1..23: mol_type = other RNA
tgataatacgacgtacttagtgt

SEQ ID NO: 25890 - RNA, 31 nt, Synthetic Construct; identical to SEQ ID NO: 758
  source 1..31: mol_type = other RNA

SEQ ID NO: 25891 - RNA, 31 nt, Synthetic Construct; identical to SEQ ID NO: 758
  source 1..31: mol_type = other RNA

SEQ ID NO: 25892 - RNA, 22 nt, Synthetic Construct
  source 1..22: mol_type = other RNA
tggaatgtaaagaagtatgtgt

SEQ ID NO: 25893 - RNA, 22 nt, Synthetic Construct
  source 1..22: mol_type = other RNA
tggaatgtaaagaagtatgtgt

SEQ ID NO: 25894 - RNA, 23 nt, Synthetic Construct
  source 1..23: mol_type = other RNA
atatcggaacgtgcccagtcgtg

SEQ ID NO: 25895 - RNA, 25 nt, Synthetic Construct
  source 1..25: mol_type = other RNA
ttgaggatacgagatcgagacgaca

SEQ ID NO: 25896 - RNA, 25 nt, Synthetic Construct
  source 1..25: mol_type = other RNA
ttgaggatacgagatcgagacgaca

SEQ ID NO: 25897 - RNA, 27 nt, Synthetic Construct
  source 1..27: mol_type = other RNA
ccccccactgctaaatttgactggcct

SEQ ID NO: 25898 - RNA, 21 nt, Synthetic Construct
  source 1..21: mol_type = other RNA
tggctcagttcagcaggaaca

SEQ ID NO: 25899 - RNA, 23 nt, Synthetic Construct
  source 1..23: mol_type = other RNA
tagtgcaatattgcttatagggt

SEQ ID NO: 25900 - RNA, 22 nt, Synthetic Construct
  source 1..22: mol_type = other RNA
ccccttggggttgtaggaccac

SEQ ID NO: 25901 - RNA, 22 nt, Synthetic Construct
  source 1..22: mol_type = other RNA
ccccttggggttgtaggaccac

SEQ ID NO: 25902 - RNA, 22 nt, Synthetic Construct
  source 1..22: mol_type = other RNA
tattgcgcttgtcccggcctgt

SEQ ID NO: 25903 - RNA, 22 nt, Synthetic Construct
  source 1..22: mol_type = other RNA
ggtagcgaaattccttgtcggg

SEQ ID NO: 25904 - RNA, 22 nt, Synthetic Construct
  source 1..22: mol_type = other RNA
ggtagcgaaattccttgtcggg

SEQ ID NO: 25905 - RNA, 23 nt, Synthetic Construct
  source 1..23: mol_type = other RNA
cggtaatacgacgtacttagtgt

SEQ ID NO: 25906 - RNA, 23 nt, Synthetic Construct
  source 1..23: mol_type = other RNA
tcctgtactgagctgccccgggt

SEQ ID NO: 25907 - RNA, 22 nt, Synthetic Construct
  source 1..22: mol_type = other RNA
ttataatacaacctgataagtg

SEQ ID NO: 25908 - RNA, 22 nt, Synthetic Construct
  source 1..22: mol_type = other RNA
ttataatacaacctgataagtg

SEQ ID NO: 25909 - RNA, 20 nt, Synthetic Construct
  source 1..20: mol_type = other RNA
actgatcgagtcgtcctgcg

SEQ ID NO: 25910 - RNA, 20 nt, Synthetic Construct
  source 1..20: mol_type = other RNA
actgatcgagtcgtcctgcg

SEQ ID NO: 25911 - RNA, 22 nt, Synthetic Construct
  source 1..22: mol_type = other RNA
tcacagtgaaccggtctcttta

SEQ ID NO: 25912 - RNA, 22 nt, Synthetic Construct
  source 1..22: mol_type = other RNA
tggaatgtagagaagtatgtat

SEQ ID NO: 25913 - RNA, 22 nt, Synthetic Construct
  source 1..22: mol_type = other RNA
tggaatgtagagaagtatgtat

SEQ ID NO: 25914 - RNA, 23 nt, Synthetic Construct
  source 1..23: mol_type = other RNA
tcctgtactgggctgccccgaga

SEQ ID NO: 25915 - RNA, 23 nt, Synthetic Construct
  source 1..23: mol_type = other RNA
tcctgtactgggctgccccgaga

SEQ ID NO: 25916 - RNA, 20 nt, Synthetic Construct
  source 1..20: mol_type = other RNA
actgatcgagtcgtcctgcg

SEQ ID NO: 25917 - RNA, 25 nt, Synthetic Construct
  source 1..25: mol_type = other RNA
cctcgcgcgattggagcggccgata

SEQ ID NO: 25918 - RNA, 16 nt, Synthetic Construct
  source 1..16: mol_type = other RNA
accgcttttgtcaggg

SEQ ID NO: 25919 - RNA, 23 nt, Synthetic Construct
  source 1..23: mol_type = other RNA
tgtcagtttgtcaaataccccat

SEQ ID NO: 25920 - RNA, 19 nt, Synthetic Construct
  source 1..19: mol_type = other RNA
atcacattgccagggattt

SEQ ID NO: 25921 - RNA, 19 nt, Synthetic Construct
  source 1..19: mol_type = other RNA
atcacattgccagggattt

SEQ ID NO: 25922 - RNA, 22 nt, Synthetic Construct
  source 1..22: mol_type = other RNA
ngaggtagtaggttgtgtggtt

SEQ ID NO: 25923 - RNA, 22 nt, Synthetic Construct
  source 1..22: mol_type = other RNA
tggagtgtaaagaagtatgtat

SEQ ID NO: 25924 - RNA, 22 nt, Synthetic Construct
  source 1..22: mol_type = other RNA
tggagtgtaaagaagtatgtat

SEQ ID NO: 25925 - RNA, 21 nt, Synthetic Construct
  source 1..21: mol_type = other RNA
tgaggaagtaggttgtatagt

SEQ ID NO: 25926 - RNA, 22 nt, Synthetic Construct
  source 1..22: mol_type = other RNA
tgaggtagtagattgtgtggtt

SEQ ID NO: 25927 - RNA, 24 nt, Synthetic Construct
  source 1..24: mol_type = other RNA
cgactcttagcggtggatcactcg

SEQ ID NO: 25928 - RNA, 24 nt, Synthetic Construct
  source 1..24: mol_type = other RNA
cgactcttagcggtggatcactcg

SEQ ID NO: 25929 - RNA, 23 nt, Synthetic Construct
  source 1..23: mol_type = other RNA
tgaggggcagagagcgagacttt

SEQ ID NO: 25930 - RNA, 21 nt, Synthetic Construct
  source 1..21: mol_type = other RNA
agccatcatttaaagaaagcg

SEQ ID NO: 25931 - RNA, 15 nt, Synthetic Construct
  source 1..15: mol_type = other RNA
ccgcttttgtcaggg

SEQ ID NO: 25932 - RNA, 15 nt, Synthetic Construct
  source 1..15: mol_type = other RNA
acccttgtcattagt

SEQ ID NO: 25933 - RNA, 15 nt, Synthetic Construct
  source 1..15: mol_type = other RNA
acccttgtcattagt

SEQ ID NO: 25934 - RNA, 20 nt, Synthetic Construct
  source 1..20: mol_type = other RNA
tgaggtggtaggttgtgtgg

SEQ ID NO: 25935 - RNA, 20 nt, Synthetic Construct
  source 1..20: mol_type = other RNA
tgaggtggtaggttgtgtgg

SEQ ID NO: 25936 - RNA, 22 nt, Synthetic Construct
  source 1..22: mol_type = other RNA
tccagtactgagctgccccgag

SEQ ID NO: 25937 - RNA, 22 nt, Synthetic Construct
  source 1..22: mol_type = other RNA
tccagtactgagctgccccgag

SEQ ID NO: 25938 - RNA, 22 nt, Synthetic Construct
  source 1..22: mol_type = other RNA
gtgccgaagctgtgggattgat

SEQ ID NO: 25939 - RNA, 22 nt, Synthetic Construct
  source 1..22: mol_type = other RNA
gtgccgaagctgtgggattgat

SEQ ID NO: 25940 - RNA, 21 nt, Synthetic Construct
  source 1..21: mol_type = other RNA
tgaggcagtaggttgtgtggt

SEQ ID NO: 25941 - RNA, 21 nt, Synthetic Construct
  source 1..21: mol_type = other RNA
tgaggcagtaggttgtgtggt

SEQ ID NO: 25942 - RNA, 27 nt, Synthetic Construct
  source 1..27: mol_type = other RNA
cggtataccgaagctctaggtgcggca

SEQ ID NO: 25943 - RNA, 27 nt, Synthetic Construct
  source 1..27: mol_type = other RNA
cggtataccgaagctctaggtgcggca

SEQ ID NO: 25944 - RNA, 31 nt, Synthetic Construct; identical to SEQ ID NO: 5506
  source 1..31: mol_type = other RNA

SEQ ID NO: 25945 - RNA, 23 nt, Synthetic Construct
  source 1..23: mol_type = other RNA
taacagtctacagccatggtcgt

SEQ ID NO: 25946 - RNA, 21 nt, Synthetic Construct
  source 1..21: mol_type = other RNA
tgaggggcagagagcgaggct

SEQ ID NO: 25947 - RNA, 23 nt, Synthetic Construct
  source 1..23: mol_type = other RNA
ccctgtactgagctgccccgaga

SEQ ID NO: 25948 - RNA, 23 nt, Synthetic Construct
  source 1..23: mol_type = other RNA
ccctgtactgagctgccccgaga

SEQ ID NO: 25949 - RNA, 21 nt, Synthetic Construct
  source 1..21: mol_type = other RNA
gctattgacgaccgtaccgca

SEQ ID NO: 25950 - RNA, 21 nt, Synthetic Construct
  source 1..21: mol_type = other RNA
agccatcatttaaagaaagcg

SEQ ID NO: 25951 - RNA, 21 nt, Synthetic Construct
  source 1..21: mol_type = other RNA
agccatcatttaaagaaagcg

SEQ ID NO: 25952 - RNA, 22 nt, Synthetic Construct
  source 1..22: mol_type = other RNA
tcctgtactgagctgtcccgag

SEQ ID NO: 25953 - RNA, 22 nt, Synthetic Construct
  source 1..22: mol_type = other RNA
tcctgtactgagctgtcccgag

SEQ ID NO: 25954 - RNA, 20 nt, Synthetic Construct
  source 1..20: mol_type = other RNA
tcctgtaccgatcaatagtg

SEQ ID NO: 25955 - RNA, 29 nt, Synthetic Construct
  source 1..29: mol_type = other RNA
ccccccccactgctaaatttgactggctt

SEQ ID NO: 25956 - RNA, 22 nt, Synthetic Construct
  source 1..22: mol_type = other RNA
ggtagcgaaattccttgtcggg

SEQ ID NO: 25957 - RNA, 22 nt, Synthetic Construct
  source 1..22: mol_type = other RNA
ggtagcgaaattccttgtcggg

SEQ ID NO: 25958 - RNA, 22 nt, Synthetic Construct
  source 1..22: mol_type = other RNA
tggaatgtaaaggagtatgtat

SEQ ID NO: 25959 - RNA, 22 nt, Synthetic Construct
  source 1..22: mol_type = other RNA
tggaatgtaaaggagtatgtat

SEQ ID NO: 25960 - RNA, 32 nt, Synthetic Construct; identical to SEQ ID NO: 4279
  source 1..32: mol_type = other RNA

SEQ ID NO: 25961 - RNA, 32 nt, Synthetic Construct; identical to SEQ ID NO: 4279
  source 1..32: mol_type = other RNA

SEQ ID NO: 25962 - RNA, 23 nt, Synthetic Construct
  source 1..23: mol_type = other RNA
tcctgtactgagccgccccgagt

SEQ ID NO: 25963 - RNA, 23 nt, Synthetic Construct
  source 1..23: mol_type = other RNA
tcctgtactgagccgccccgagt

SEQ ID NO: 25964 - RNA, 16 nt, Synthetic Construct
  source 1..16: mol_type = other RNA
cccaaaggtcgtcggt

SEQ ID NO: 25965 - RNA, 16 nt, Synthetic Construct
  source 1..16: mol_type = other RNA
cccaaaggtcgtcggt

SEQ ID NO: 25966 - RNA, 15 nt, Synthetic Construct
  source 1..15: mol_type = other RNA
gcaagtcgaacggta

SEQ ID NO: 25967 - RNA, 22 nt, Synthetic Construct
  source 1..22: mol_type = other RNA
tggaatgtaaagaagtacgtat

SEQ ID NO: 25968 - RNA, 23 nt, Synthetic Construct
  source 1..23: mol_type = other RNA
tcccgtactgagctgccccgaga

SEQ ID NO: 25969 - RNA, 23 nt, Synthetic Construct
  source 1..23: mol_type = other RNA
tcccgtactgagctgccccgaga

SEQ ID NO: 25970 - RNA, 23 nt, Synthetic Construct
  source 1..23: mol_type = other RNA
tggtaattcgacgtacttagtgt

SEQ ID NO: 25971 - RNA, 22 nt, Synthetic Construct
  source 1..22: mol_type = other RNA
tcctgaactgagctgccccgag

SEQ ID NO: 25972 - RNA, 22 nt, Synthetic Construct
  source 1..22: mol_type = other RNA
tcctgaactgagctgccccgag

SEQ ID NO: 25973 - RNA, 23 nt, Synthetic Construct
  source 1..23: mol_type = other RNA
tgaggggcagagagcgagactat

SEQ ID NO: 25974 - RNA, 23 nt, Synthetic Construct
  source 1..23: mol_type = other RNA
tggtaatacgacgtacctagtgt

SEQ ID NO: 25975 - RNA, 23 nt, Synthetic Construct
  source 1..23: mol_type = other RNA
tggtaatacgacgtacctagtgt

SEQ ID NO: 25976 - RNA, 23 nt, Synthetic Construct
  source 1..23: mol_type = other RNA
tgataatacgacgtacttagtgt

SEQ ID NO: 25977 - RNA, 23 nt, Synthetic Construct
  source 1..23: mol_type = other RNA
tgataatacgacgtacttagtgt

SEQ ID NO: 25978 - RNA, 15 nt, Synthetic Construct
  source 1..15: mol_type = other RNA
gcaagccgaacggta

SEQ ID NO: 25979 - RNA, 15 nt, Synthetic Construct
  source 1..15: mol_type = other RNA
gcaagccgaacggta

SEQ ID NO: 25980 - RNA, 23 nt, Synthetic Construct
  source 1..23: mol_type = other RNA
tcctgtactgagctgccccgggt

SEQ ID NO: 25981 - RNA, 23 nt, Synthetic Construct
  source 1..23: mol_type = other RNA
tcctgtactgagctgccccgggt

SEQ ID NO: 25982 - RNA, 23 nt, Synthetic Construct
  source 1..23: mol_type = other RNA
tggtaatacggcgtacttagtgt

SEQ ID NO: 25983 - RNA, 19 nt, Synthetic Construct
  source 1..19: mol_type = other RNA
agctacattgtctgctggg

SEQ ID NO: 25984 - RNA, 19 nt, Synthetic Construct
  source 1..19: mol_type = other RNA
agctacattgtctgctggg

SEQ ID NO: 25985 - RNA, 23 nt, Synthetic Construct
  source 1..23: mol_type = other RNA
tctctcggctcctcgcggctcgt

SEQ ID NO: 25986 - RNA, 23 nt, Synthetic Construct
  source 1..23: mol_type = other RNA
tctctcggctcctcgcggctcgt

SEQ ID NO: 25987 - RNA, 21 nt, Synthetic Construct
  source 1..21: mol_type = other RNA
tgaggtagtagtttgtgctga

SEQ ID NO: 25988 - RNA, 32 nt, Synthetic Construct; identical to SEQ ID NO: 2435
  source 1..32: mol_type = other RNA

SEQ ID NO: 25989 - RNA, 16 nt, Synthetic Construct
  source 1..16: mol_type = other RNA
tcagtagctcgaggaa

SEQ ID NO: 25990 - RNA, 16 nt, Synthetic Construct
  source 1..16: mol_type = other RNA
tcagtagctcgaggaa

SEQ ID NO: 25991 - RNA, 15 nt, Synthetic Construct
  source 1..15: mol_type = other RNA
gcaagccgaacggta

SEQ ID NO: 25992 - RNA, 15 nt, Synthetic Construct
  source 1..15: mol_type = other RNA
gcaagccgaacggta

SEQ ID NO: 25993 - RNA, 19 nt, Synthetic Construct
  source 1..19: mol_type = other RNA
cttggggttgtaggaccac

SEQ ID NO: 25994 - RNA, 19 nt, Synthetic Construct
  source 1..19: mol_type = other RNA
cttggggttgtaggaccac

SEQ ID NO: 25995 - RNA, 28 nt, Synthetic Construct
  source 1..28: mol_type = other RNA
gctttgatccggagatttccgaatgggg

SEQ ID NO: 25996 - RNA, 23 nt, Synthetic Construct
  source 1..23: mol_type = other RNA
tggtaatatgacgtacttagtgt

SEQ ID NO: 25997 - RNA, 23 nt, Synthetic Construct
  source 1..23: mol_type = other RNA
tggtaatatgacgtacttagtgt

SEQ ID NO: 25998 - RNA, 20 nt, Synthetic Construct
  source 1..20: mol_type = other RNA
tgaggtagtaggttgtacag

SEQ ID NO: 25999 - RNA, 20 nt, Synthetic Construct
  source 1..20: mol_type = other RNA
tgaggtagtaggttgtacag

SEQ ID NO: 26000 - RNA, 22 nt, Synthetic Construct
  source 1..22: mol_type = other RNA
tccagtactgagctgccccgag

SEQ ID NO: 26001 - RNA, 22 nt, Synthetic Construct
  source 1..22: mol_type = other RNA
tccagtactgagctgccccgag

SEQ ID NO: 26002 - RNA, 23 nt, Synthetic Construct
  source 1..23: mol_type = other RNA
tggtaatacgacgtgcttagtgt

SEQ ID NO: 26003 - RNA, 17 nt, Synthetic Construct
  source 1..17: mol_type = other RNA
tcccctggacctgtact

SEQ ID NO: 26004 - RNA, 22 nt, Synthetic Construct
  source 1..22: mol_type = other RNA
tcctgtgctgagctgccccgag

SEQ ID NO: 26005 - RNA, 22 nt, Synthetic Construct
  source 1..22: mol_type = other RNA
tcctgtgctgagctgccccgag

SEQ ID NO: 26006 - RNA, 22 nt, Synthetic Construct
  source 1..22: mol_type = other RNA
tcctgtactgagcagccccgag

SEQ ID NO: 26007 - RNA, 22 nt, Synthetic Construct
  source 1..22: mol_type = other RNA
tcctgtactgagcagccccgag

SEQ ID NO: 26008 - RNA, 28 nt, Synthetic Construct
  source 1..28: mol_type = other RNA
gctttgatccggagatttccgaatgggg

SEQ ID NO: 26009 - RNA, 28 nt, Synthetic Construct
  source 1..28: mol_type = other RNA
gctttgatccggagatttccgaatgggg

SEQ ID NO: 26010 - RNA, 23 nt, Synthetic Construct
  source 1..23: mol_type = other RNA
tggtaatacgacgtacttagcgt

SEQ ID NO: 26011 - RNA, 24 nt, Synthetic Construct
  source 1..24: mol_type = other RNA
tgtaaacatccccgactggaggct

SEQ ID NO: 26012 - RNA, 19 nt, Synthetic Construct
  source 1..19: mol_type = other RNA
aacagtcaggatgttggct

SEQ ID NO: 26013 - RNA, 15 nt, Synthetic Construct
  source 1..15: mol_type = other RNA
gtccggatcgtagtc

SEQ ID NO: 26014 - RNA, 24 nt, Synthetic Construct
  source 1..24: mol_type = other RNA
tcggctcatctcatcctggggctg

SEQ ID NO: 26015 - RNA, 24 nt, Synthetic Construct
  source 1..24: mol_type = other RNA
tcggctcatctcatcctggggctg

SEQ ID NO: 26016 - RNA, 21 nt, Synthetic Construct
  source 1..21: mol_type = other RNA
ctttgttcgattccgttgagt

SEQ ID NO: 26017 - RNA, 15 nt, Synthetic Construct
  source 1..15: mol_type = other RNA
ggtgaaagcggggga

SEQ ID NO: 26018 - RNA, 23 nt, Synthetic Construct
  source 1..23: mol_type = other RNA
tggtaatgcgacgtacttagtgt

SEQ ID NO: 26019 - RNA, 22 nt, Synthetic Construct
  source 1..22: mol_type = other RNA
tgaggtagtaggttgtatggtt

SEQ ID NO: 26020 - RNA, 22 nt, Synthetic Construct
  source 1..22: mol_type = other RNA
tgaggtagtaggttgtatggtt

SEQ ID NO: 26021 - RNA, 24 nt, Synthetic Construct
  source 1..24: mol_type = other RNA
tttccccttggggttgtaggacca

SEQ ID NO: 26022 - RNA, 24 nt, Synthetic Construct
  source 1..24: mol_type = other RNA
tttccccttggggttgtaggacca

SEQ ID NO: 26023 - RNA, 22 nt, Synthetic Construct
  source 1..22: mol_type = other RNA
tgtggtagtaggttgtgtggtt

SEQ ID NO: 26024 - RNA, 21 nt, Synthetic Construct
  source 1..21: mol_type = other RNA
tgaggtggtaggttgtgtggt

SEQ ID NO: 26025 - RNA, 21 nt, Synthetic Construct
  source 1..21: mol_type = other RNA
tgaggtggtaggttgtgtggt

SEQ ID NO: 26026 - RNA, 22 nt, Synthetic Construct
  source 1..22: mol_type = other RNA
aggttccggataagtaagagcc

SEQ ID NO: 26027 - RNA, 22 nt, Synthetic Construct
  source 1..22: mol_type = other RNA
aggttccggataagtaagagcc

SEQ ID NO: 26028 - RNA, 20 nt, Synthetic Construct
  source 1..20: mol_type = other RNA
caggacagtgaaacgagtca

SEQ ID NO: 26029 - RNA, 20 nt, Synthetic Construct
  source 1..20: mol_type = other RNA
caggacagtgaaacgagtca

SEQ ID NO: 26030 - RNA, 22 nt, Synthetic Construct
  source 1..22: mol_type = other RNA
tgtgcaaatctatgcaaaactg

SEQ ID NO: 26031 - RNA, 22 nt, Synthetic Construct
  source 1..22: mol_type = other RNA
tgtgcaaatctatgcaaaactg

SEQ ID NO: 26032 - RNA, 35 nt, Synthetic Construct; identical to SEQ ID NO: 3369
  source 1..35: mol_type = other RNA

SEQ ID NO: 26033 - RNA, 15 nt, Synthetic Construct
  source 1..15: mol_type = other RNA
cgccatttaaagagg

SEQ ID NO: 26034 - RNA, 20 nt, Synthetic Construct
  source 1..20: mol_type = other RNA
aatgacacgatcactcccgt

SEQ ID NO: 26035 - RNA, 20 nt, Synthetic Construct
  source 1..20: mol_type = other RNA
aatgacacgatcactcccgt

SEQ ID NO: 26036 - RNA, 21 nt, Synthetic Construct
  source 1..21: mol_type = other RNA
tggagtgtgacaatggtgtct

SEQ ID NO: 26037 - RNA, 21 nt, Synthetic Construct
  source 1..21: mol_type = other RNA
tggagtgtgacaatggtgtct

SEQ ID NO: 26038 - RNA, 24 nt, Synthetic Construct
  source 1..24: mol_type = other RNA
tcggctcatctcatcctggggctg

SEQ ID NO: 26039 - RNA, 23 nt, Synthetic Construct
  source 1..23: mol_type = other RNA
tggtaatacgacgtacttggtgt

SEQ ID NO: 26040 - RNA, 22 nt, Synthetic Construct
  source 1..22: mol_type = other RNA
tggaatgtaaagaggtatgtat

SEQ ID NO: 26041 - RNA, 16 nt, Synthetic Construct
  source 1..16: mol_type = other RNA
gtctacggccgtacca

SEQ ID NO: 26042 - RNA, 16 nt, Synthetic Construct
  source 1..16: mol_type = other RNA
gtctacggccgtacca

SEQ ID NO: 26043 - RNA, 22 nt, Synthetic Construct
  source 1..22: mol_type = other RNA
tgaggtagtaggttgcgtggtt

SEQ ID NO: 26044 - RNA, 20 nt, Synthetic Construct
  source 1..20: mol_type = other RNA
ccgcagagtacagcttggga

SEQ ID NO: 26045 - RNA, 20 nt, Synthetic Construct
  source 1..20: mol_type = other RNA
ccgcagagtacagcttggga

SEQ ID NO: 26046 - RNA, 23 nt, Synthetic Construct
  source 1..23: mol_type = other RNA
ggcggttatgcaagacagaggtg

SEQ ID NO: 26047 - RNA, 17 nt, Synthetic Construct
  source 1..17: mol_type = other RNA
tcagtagctcgaggaaa

SEQ ID NO: 26048 - RNA, 17 nt, Synthetic Construct
  source 1..17: mol_type = other RNA
tcagtagctcgaggaaa

SEQ ID NO: 26049 - RNA, 21 nt, Synthetic Construct
  source 1..21: mol_type = other RNA
tcctgtactgagttgccccga

SEQ ID NO: 26050 - RNA, 21 nt, Synthetic Construct
  source 1..21: mol_type = other RNA
tcctgtactgagttgccccga

SEQ ID NO: 26051 - RNA, 16 nt, Synthetic Construct
  source 1..16: mol_type = other RNA
gcagacgaagtgagtg

SEQ ID NO: 26052 - RNA, 23 nt, Synthetic Construct
  source 1..23: mol_type = other RNA
tggtaatatgacgtacttagtgt

SEQ ID NO: 26053 - RNA, 23 nt, Synthetic Construct
  source 1..23: mol_type = other RNA
tggtaatatgacgtacttagtgt

SEQ ID NO: 26054 - RNA, 29 nt, Synthetic Construct
  source 1..29: mol_type = other RNA
tgaaggtgggttgtgaagcctgctggagg

SEQ ID NO: 26055 - RNA, 19 nt, Synthetic Construct
  source 1..19: mol_type = other RNA
tggccgtcgtcagctcgtg

SEQ ID NO: 26056 - RNA, 16 nt, Synthetic Construct
  source 1..16: mol_type = other RNA
gcagacgaagtgagtg

SEQ ID NO: 26057 - RNA, 16 nt, Synthetic Construct
  source 1..16: mol_type = other RNA
gcagacgaagtgagtg

SEQ ID NO: 26058 - RNA, 21 nt, Synthetic Construct
  source 1..21: mol_type = other RNA
tgaggtagtaggttatgtggt

SEQ ID NO: 26059 - RNA, 21 nt, Synthetic Construct
  source 1..21: mol_type = other RNA
tgaggtagtaggttatgtggt

SEQ ID NO: 26060 - RNA, 18 nt, Synthetic Construct
  source 1..18: mol_type = other RNA
ggtgcaagcgttaatcgg

SEQ ID NO: 26061 - RNA, 22 nt, Synthetic Construct
  source 1..22: mol_type = other RNA
ngaggtagtaggttgtatagtt

SEQ ID NO: 26062 - RNA, 22 nt, Synthetic Construct
  source 1..22: mol_type = other RNA
ngaggtagtaggttgtatagtt

SEQ ID NO: 26063 - RNA, 19 nt, Synthetic Construct
  source 1..19: mol_type = other RNA
cctgtctgaatatgggggg

SEQ ID NO: 26064 - RNA, 19 nt, Synthetic Construct
  source 1..19: mol_type = other RNA
cctgtctgaatatgggggg

SEQ ID NO: 26065 - RNA, 23 nt, Synthetic Construct
  source 1..23: mol_type = other RNA
caaagtgctgttcgtgcaggtgg

SEQ ID NO: 26066 - RNA, 23 nt, Synthetic Construct
  source 1..23: mol_type = other RNA
caaagtgctgttcgtgcaggtgg

SEQ ID NO: 26067 - RNA, 36 nt, Synthetic Construct; identical to SEQ ID NO: 2456
  source 1..36: mol_type = other RNA

SEQ ID NO: 26068 - RNA, 35 nt, Synthetic Construct; identical to SEQ ID NO: 2514
  source 1..35: mol_type = other RNA

SEQ ID NO: 26069 - RNA, 18 nt, Synthetic Construct
  source 1..18: mol_type = other RNA
gtccggatcgtagtctgc

SEQ ID NO: 26070 - RNA, 18 nt, Synthetic Construct
  source 1..18: mol_type = other RNA
gtccggatcgtagtctgc

SEQ ID NO: 26071 - RNA, 23 nt, Synthetic Construct
  source 1..23: mol_type = other RNA
tggcaatacgacgtacttagtgt

SEQ ID NO: 26072 - RNA, 20 nt, Synthetic Construct
  source 1..20: mol_type = other RNA
cgtaccgtgagtaataatgc

SEQ ID NO: 26073 - RNA, 17 nt, Synthetic Construct
  source 1..17: mol_type = other RNA
gcggctgtagctcagtt

SEQ ID NO: 26074 - RNA, 21 nt, Synthetic Construct
  source 1..21: mol_type = other RNA
tggggtagtaggttgtgtggt

SEQ ID NO: 26075 - RNA, 21 nt, Synthetic Construct
  source 1..21: mol_type = other RNA
tggggtagtaggttgtgtggt

SEQ ID NO: 26076 - RNA, 16 nt, Synthetic Construct
  source 1..16: mol_type = other RNA
agtcaggatgttggct

SEQ ID NO: 26077 - RNA, 20 nt, Synthetic Construct
  source 1..20: mol_type = other RNA
cgaggtagtaggttgtgtgg

SEQ ID NO: 26078 - RNA, 35 nt, Synthetic Construct; identical to SEQ ID NO: 2505
  source 1..35: mol_type = other RNA

SEQ ID NO: 26079 - RNA, 23 nt, Synthetic Construct
  source 1..23: mol_type = other RNA
tgaggggcagagggcgagacttt

SEQ ID NO: 26080 - RNA, 22 nt, Synthetic Construct
  source 1..22: mol_type = other RNA
tatagcacttgtcccggcctgt

SEQ ID NO: 26081 - RNA, 19 nt, Synthetic Construct
  source 1..19: mol_type = other RNA
accaaggggtcgtgggttc

SEQ ID NO: 26082 - RNA, 21 nt, Synthetic Construct
  source 1..21: mol_type = other RNA
ctagactgaggctccttgagg

SEQ ID NO: 26083 - RNA, 23 nt, Synthetic Construct
  source 1..23: mol_type = other RNA
tgaggtagcaggttgtgtggttt

SEQ ID NO: 26084 - RNA, 16 nt, Synthetic Construct
  source 1..16: mol_type = other RNA
gtctacggccatgcca

SEQ ID NO: 26085 - RNA, 16 nt, Synthetic Construct
  source 1..16: mol_type = other RNA
gtctacggccatgcca

SEQ ID NO: 26086 - RNA, 32 nt, Synthetic Construct; identical to SEQ ID NO: 3541
  source 1..32: mol_type = other RNA

SEQ ID NO: 26087 - RNA, 22 nt, Synthetic Construct
  source 1..22: mol_type = other RNA
ctttcagtcggatgtttgcagt

SEQ ID NO: 26088 - RNA, 30 nt, Synthetic Construct; identical to SEQ ID NO: 10539
  source 1..30: mol_type = other RNA

SEQ ID NO: 26089 - RNA, 30 nt, Synthetic Construct; identical to SEQ ID NO: 10539
  source 1..30: mol_type = other RNA

SEQ ID NO: 26090 - RNA, 19 nt, Synthetic Construct
  source 1..19: mol_type = other RNA
tcctgtaccgatcaatagt

SEQ ID NO: 26091 - RNA, 19 nt, Synthetic Construct
  source 1..19: mol_type = other RNA
tcctgtaccgatcaatagt

SEQ ID NO: 26092 - RNA, 23 nt, Synthetic Construct
  source 1..23: mol_type = other RNA
tcctgtactgagctgccctgagt

SEQ ID NO: 26093 - RNA, 28 nt, Synthetic Construct
  source 1..28: mol_type = other RNA
tgttggttcaagcgtgtagtcgtgctct

SEQ ID NO: 26094 - RNA, 28 nt, Synthetic Construct
  source 1..28: mol_type = other RNA
tgttggttcaagcgtgtagtcgtgctct

SEQ ID NO: 26095 - RNA, 21 nt, Synthetic Construct
  source 1..21: mol_type = other RNA
ggagtatgcagagcaagatca

SEQ ID NO: 26096 - RNA, 18 nt, Synthetic Construct
  source 1..18: mol_type = other RNA
atcgctagtaatcgcgga

SEQ ID NO: 26097 - RNA, 19 nt, Synthetic Construct
  source 1..19: mol_type = other RNA
cagcactctgcaaagacga

SEQ ID NO: 26098 - RNA, 19 nt, Synthetic Construct
  source 1..19: mol_type = other RNA
cagcactctgcaaagacga

SEQ ID NO: 26099 - RNA, 21 nt, Synthetic Construct
  source 1..21: mol_type = other RNA
acacatgcaagtcgaacggta

SEQ ID NO: 26100 - RNA, 21 nt, Synthetic Construct
  source 1..21: mol_type = other RNA
acacatgcaagtcgaacggta

SEQ ID NO: 26101 - RNA, 17 nt, Synthetic Construct
  source 1..17: mol_type = other RNA
taggtcatcgtcaggct

SEQ ID NO: 26102 - RNA, 23 nt, Synthetic Construct
  source 1..23: mol_type = other RNA
ctcactgatcgagtcgtcctgcg

SEQ ID NO: 26103 - RNA, 21 nt, Synthetic Construct
  source 1..21: mol_type = other RNA
cactgatcgagtcgtcctgcg

SEQ ID NO: 26104 - RNA, 22 nt, Synthetic Construct
  source 1..22: mol_type = other RNA
tggaatgcaaagaagtatgtat

SEQ ID NO: 26105 - RNA, 22 nt, Synthetic Construct
  source 1..22: mol_type = other RNA
tggaatgcaaagaagtatgtat

SEQ ID NO: 26106 - RNA, 23 nt, Synthetic Construct
  source 1..23: mol_type = other RNA
gcctgtactgagctgccccgaga

SEQ ID NO: 26107 - RNA, 23 nt, Synthetic Construct
  source 1..23: mol_type = other RNA
gcctgtactgagctgccccgaga

SEQ ID NO: 26108 - RNA, 19 nt, Synthetic Construct
  source 1..19: mol_type = other RNA
ctgatcgagtcgtcctgcg

SEQ ID NO: 26109 - RNA, 18 nt, Synthetic Construct
  source 1..18: mol_type = other RNA
tcccaagggtatggctgt

SEQ ID NO: 26110 - RNA, 18 nt, Synthetic Construct
  source 1..18: mol_type = other RNA
tcccaagggtatggctgt

SEQ ID NO: 26111 - RNA, 16 nt, Synthetic Construct
  source 1..16: mol_type = other RNA
caggacggtggccatg

SEQ ID NO: 26112 - RNA, 16 nt, Synthetic Construct
  source 1..16: mol_type = other RNA
caggacggtggccatg

SEQ ID NO: 26113 - RNA, 21 nt, Synthetic Construct
  source 1..21: mol_type = other RNA
tgtcagtttgtcaaatacccc

SEQ ID NO: 26114 - RNA, 21 nt, Synthetic Construct
  source 1..21: mol_type = other RNA
tgtcagtttgtcaaatacccc

SEQ ID NO: 26115 - RNA, 17 nt, Synthetic Construct
  source 1..17: mol_type = other RNA
cctcgcgcgattggagc

SEQ ID NO: 26116 - RNA, 17 nt, Synthetic Construct
  source 1..17: mol_type = other RNA
cctcgcgcgattggagc

SEQ ID NO: 26117 - RNA, 20 nt, Synthetic Construct
  source 1..20: mol_type = other RNA
cgcgacctcagatcagacgt

SEQ ID NO: 26118 - RNA, 20 nt, Synthetic Construct
  source 1..20: mol_type = other RNA
cgcgacctcagatcagacgt

SEQ ID NO: 26119 - RNA, 28 nt, Synthetic Construct
  source 1..28: mol_type = other RNA
gctttacattggactttgaacagatctg

SEQ ID NO: 26120 - RNA, 25 nt, Synthetic Construct
  source 1..25: mol_type = other RNA
gcgccgctggtgtagtggtatcatg

SEQ ID NO: 26121 - RNA, 25 nt, Synthetic Construct
  source 1..25: mol_type = other RNA
gcgccgctggtgtagtggtatcatg

SEQ ID NO: 26122 - RNA, 21 nt, Synthetic Construct
  source 1..21: mol_type = other RNA
tagcaccatctgaaatcggta

SEQ ID NO: 26123 - RNA, 15 nt, Synthetic Construct
  source 1..15: mol_type = other RNA
atccctccgactccg

SEQ ID NO: 26124 - RNA, 15 nt, Synthetic Construct
  source 1..15: mol_type = other RNA
atccctccgactccg

SEQ ID NO: 26125 - RNA, 16 nt, Synthetic Construct
  source 1..16: mol_type = other RNA
ggccgtcgtcagctcg

SEQ ID NO: 26126 - RNA, 23 nt, Synthetic Construct
  source 1..23: mol_type = other RNA
tgaggtagtaggttgtgtggttc

SEQ ID NO: 26127 - RNA, 17 nt, Synthetic Construct
  source 1..17: mol_type = other RNA
tgccagcagccgcggta

SEQ ID NO: 26128 - RNA, 22 nt, Synthetic Construct
  source 1..22: mol_type = other RNA
tggaacgtaaagaagtatgtat

SEQ ID NO: 26129 - RNA, 22 nt, Synthetic Construct
  source 1..22: mol_type = other RNA
tggaacgtaaagaagtatgtat

SEQ ID NO: 26130 - RNA, 21 nt, Synthetic Construct
  source 1..21: mol_type = other RNA
agaggggcagagagcgagact

SEQ ID NO: 26131 - RNA, 21 nt, Synthetic Construct
  source 1..21: mol_type = other RNA
agaggggcagagagcgagact

SEQ ID NO: 26132 - RNA, 21 nt, Synthetic Construct
  source 1..21: mol_type = other RNA
taactccttaagcaatctcgc

SEQ ID NO: 26133 - RNA, 21 nt, Synthetic Construct
  source 1..21: mol_type = other RNA
taactccttaagcaatctcgc

SEQ ID NO: 26134 - RNA, 23 nt, Synthetic Construct
  source 1..23: mol_type = other RNA
tgagaactgaattccatgggttt

SEQ ID NO: 26135 - RNA, 22 nt, Synthetic Construct
  source 1..22: mol_type = other RNA
cggaatcgctagtaatcgcgga

SEQ ID NO: 26136 - RNA, 22 nt, Synthetic Construct
  source 1..22: mol_type = other RNA
cgtaccgtgagtaataatgcgt

SEQ ID NO: 26137 - RNA, 22 nt, Synthetic Construct
  source 1..22: mol_type = other RNA
cgtaccgtgagtaataatgcgt

SEQ ID NO: 26138 - RNA, 23 nt, Synthetic Construct
  source 1..23: mol_type = other RNA
tctctcggctcctcgcggctcgt

SEQ ID NO: 26139 - RNA, 23 nt, Synthetic Construct
  source 1..23: mol_type = other RNA
tctctcggctcctcgcggctcgt

SEQ ID NO: 26140 - RNA, 23 nt, Synthetic Construct
  source 1..23: mol_type = other RNA
tggtaatacgacgtacttagtgt

SEQ ID NO: 26141 - RNA, 22 nt, Synthetic Construct
  source 1..22: mol_type = other RNA
ngaggtagtaggttgtatagtt

SEQ ID NO: 26142 - RNA, 22 nt, Synthetic Construct
  source 1..22: mol_type = other RNA
ngaggtagtaggttgtatagtt

SEQ ID NO: 26143 - RNA, 20 nt, Synthetic Construct
  source 1..20: mol_type = other RNA
ggtcccaagggtatggctgt

SEQ ID NO: 26144 - RNA, 22 nt, Synthetic Construct
  source 1..22: mol_type = other RNA
ggtagcgaaattccttgtcggg

SEQ ID NO: 26145 - RNA, 22 nt, Synthetic Construct
  source 1..22: mol_type = other RNA
ggtagcgaaattccttgtcggg

SEQ ID NO: 26146 - RNA, 22 nt, Synthetic Construct
  source 1..22: mol_type = other RNA
ggaggagttcgaaggtacgcta

SEQ ID NO: 26147 - RNA, 15 nt, Synthetic Construct
  source 1..15: mol_type = other RNA
acccttgtcattagt

SEQ ID NO: 26148 - RNA, 28 nt, Synthetic Construct
  source 1..28: mol_type = other RNA
gctttacattggactttgaacagatctg

SEQ ID NO: 26149 - RNA, 22 nt, Synthetic Construct
  source 1..22: mol_type = other RNA
tcactgatcgagtcgtcctgcg

SEQ ID NO: 26150 - RNA, 32 nt, Synthetic Construct; identical to SEQ ID NO: 3713
  source 1..32: mol_type = other RNA

SEQ ID NO: 26151 - RNA, 32 nt, Synthetic Construct; identical to SEQ ID NO: 3713
  source 1..32: mol_type = other RNA

SEQ ID NO: 26152 - RNA, 22 nt, Synthetic Construct
  source 1..22: mol_type = other RNA
tgtggtagtaggttgtgtggtt

SEQ ID NO: 26153 - RNA, 21 nt, Synthetic Construct
  source 1..21: mol_type = other RNA
aagacgggaggaaagaaggga

SEQ ID NO: 26154 - RNA, 36 nt, Synthetic Construct; identical to SEQ ID NO: 2660
  source 1..36: mol_type = other RNA

SEQ ID NO: 26155 - RNA, 36 nt, Synthetic Construct; identical to SEQ ID NO: 2660
  source 1..36: mol_type = other RNA

SEQ ID NO: 26156 - RNA, 39 nt, Synthetic Construct; identical to SEQ ID NO: 10211
  source 1..39: mol_type = other RNA

SEQ ID NO: 26157 - RNA, 21 nt, Synthetic Construct
  source 1..21: mol_type = other RNA
cactgatcgagtcgtcctgcg

SEQ ID NO: 26158 - RNA, 21 nt, Synthetic Construct
  source 1..21: mol_type = other RNA
cactgatcgagtcgtcctgcg

SEQ ID NO: 26159 - RNA, 28 nt, Synthetic Construct
  source 1..28: mol_type = other RNA
gctttacattggactttgaacagatctg

SEQ ID NO: 26160 - RNA, 28 nt, Synthetic Construct
  source 1..28: mol_type = other RNA
gctttacattggactttgaacagatctg

SEQ ID NO: 26161 - RNA, 29 nt, Synthetic Construct
  source 1..29: mol_type = other RNA
tgaaggtgggttgtgaagcctgctggagg

SEQ ID NO: 26162 - RNA, 37 nt, Synthetic Construct; identical to SEQ ID NO: 715
  source 1..37: mol_type = other RNA

SEQ ID NO: 26163 - RNA, 37 nt, Synthetic Construct; identical to SEQ ID NO: 715
  source 1..37: mol_type = other RNA

SEQ ID NO: 26164 - RNA, 36 nt, Synthetic Construct; identical to SEQ ID NO: 10333
  source 1..36: mol_type = other RNA

SEQ ID NO: 26165 - RNA, 36 nt, Synthetic Construct; identical to SEQ ID NO: 10333
  source 1..36: mol_type = other RNA

SEQ ID NO: 26166 - RNA, 23 nt, Synthetic Construct
  source 1..23: mol_type = other RNA
tggtaataagacgtacttagtgt

SEQ ID NO: 26167 - RNA, 21 nt, Synthetic Construct
  source 1..21: mol_type = other RNA
tgaggtagtaggttgtgtgga

SEQ ID NO: 26168 - RNA, 21 nt, Synthetic Construct
  source 1..21: mol_type = other RNA
tgaggtagtaggttgtgtgga

SEQ ID NO: 26169 - RNA, 28 nt, Synthetic Construct
  source 1..28: mol_type = other RNA
cgactcttagcggtggatcactcggctc

SEQ ID NO: 26170 - RNA, 23 nt, Synthetic Construct
  source 1..23: mol_type = other RNA
tgaggcagtaggttgtgtggttt

SEQ ID NO: 26171 - RNA, 18 nt, Synthetic Construct
  source 1..18: mol_type = other RNA
agcaggacggtggccatg

SEQ ID NO: 26172 - RNA, 22 nt, Synthetic Construct
  source 1..22: mol_type = other RNA
gcactctaatgagactgccggt

SEQ ID NO: 26173 - RNA, 23 nt, Synthetic Construct
  source 1..23: mol_type = other RNA
tcccgtactgagctgccccgagt

SEQ ID NO: 26174 - RNA, 23 nt, Synthetic Construct
  source 1..23: mol_type = other RNA
tcccgtactgagctgccccgagt

SEQ ID NO: 26175 - RNA, 21 nt, Synthetic Construct
  source 1..21: mol_type = other RNA
tgaggtagtaggttgtgtggc

SEQ ID NO: 26176 - RNA, 21 nt, Synthetic Construct
  source 1..21: mol_type = other RNA
tgaggtagtaggttgtgtggc

SEQ ID NO: 26177 - RNA, 19 nt, Synthetic Construct
  source 1..19: mol_type = other RNA
tagcaccatctgaaatcgg

SEQ ID NO: 26178 - RNA, 22 nt, Synthetic Construct
  source 1..22: mol_type = other RNA
tggaatgtaaagaggtatgtat

SEQ ID NO: 26179 - RNA, 22 nt, Synthetic Construct
  source 1..22: mol_type = other RNA
tggaatgtaaagaggtatgtat

SEQ ID NO: 26180 - RNA, 16 nt, Synthetic Construct
  source 1..16: mol_type = other RNA
gggtctgtagctcagt

SEQ ID NO: 26181 - RNA, 21 nt, Synthetic Construct
  source 1..21: mol_type = other RNA
ggaggggcagagagcgagact

SEQ ID NO: 26182 - RNA, 21 nt, Synthetic Construct
  source 1..21: mol_type = other RNA
ggaggggcagagagcgagact

SEQ ID NO: 26183 - RNA, 21 nt, Synthetic Construct
  source 1..21: mol_type = other RNA
tcctgtactgagctgccccaa

SEQ ID NO: 26184 - RNA, 21 nt, Synthetic Construct
  source 1..21: mol_type = other RNA
tcctgtactgagctgccccaa

SEQ ID NO: 26185 - RNA, 37 nt, Synthetic Construct; identical to SEQ ID NO: 715
  source 1..37: mol_type = other RNA

SEQ ID NO: 26186 - RNA, 37 nt, Synthetic Construct; identical to SEQ ID NO: 715
  source 1..37: mol_type = other RNA

SEQ ID NO: 26187 - RNA, 15 nt, Synthetic Construct
  source 1..15: mol_type = other RNA
gcagagcgtcggtct

SEQ ID NO: 26188 - RNA, 15 nt, Synthetic Construct
  source 1..15: mol_type = other RNA
gcagagcgtcggtct

SEQ ID NO: 26189 - RNA, 23 nt, Synthetic Construct
  source 1..23: mol_type = other RNA
tgaggtagtaggttgtgtggtta

SEQ ID NO: 26190 - RNA, 20 nt, Synthetic Construct
  source 1..20: mol_type = other RNA
gtgccgaagctgtgggattg

SEQ ID NO: 26191 - RNA, 20 nt, Synthetic Construct
  source 1..20: mol_type = other RNA
gtgccgaagctgtgggattg

SEQ ID NO: 26192 - RNA, 23 nt, Synthetic Construct
  source 1..23: mol_type = other RNA
aacggaatcccaaaagcagctgt

SEQ ID NO: 26193 - RNA, 23 nt, Synthetic Construct
  source 1..23: mol_type = other RNA
tccagtactgagctgccccgagt

SEQ ID NO: 26194 - RNA, 23 nt, Synthetic Construct
  source 1..23: mol_type = other RNA
tccagtactgagctgccccgagt

SEQ ID NO: 26195 - RNA, 22 nt, Synthetic Construct
  source 1..22: mol_type = other RNA
tgaggtagtaggttgtatagtc

SEQ ID NO: 26196 - RNA, 22 nt, Synthetic Construct
  source 1..22: mol_type = other RNA
tgaggtagtaggttgtatagtc

SEQ ID NO: 26197 - RNA, 19 nt, Synthetic Construct
  source 1..19: mol_type = other RNA
tgtcaactggttgttggga

SEQ ID NO: 26198 - RNA, 19 nt, Synthetic Construct
  source 1..19: mol_type = other RNA
tgtcaactggttgttggga

SEQ ID NO: 26199 - RNA, 18 nt, Synthetic Construct
  source 1..18: mol_type = other RNA
tctaatgagactgccggt

SEQ ID NO: 26200 - RNA, 18 nt, Synthetic Construct
  source 1..18: mol_type = other RNA
tctaatgagactgccggt

SEQ ID NO: 26201 - RNA, 15 nt, Synthetic Construct
  source 1..15: mol_type = other RNA
ggtggctgtagctca

SEQ ID NO: 26202 - RNA, 15 nt, Synthetic Construct
  source 1..15: mol_type = other RNA
ggtggctgtagctca

SEQ ID NO: 26203 - RNA, 19 nt, Synthetic Construct
  source 1..19: mol_type = other RNA
cgactcttagcggtggatc

SEQ ID NO: 26204 - RNA, 24 nt, Synthetic Construct
  source 1..24: mol_type = other RNA
acctggcatacaatgtagatttct

SEQ ID NO: 26205 - RNA, 24 nt, Synthetic Construct
  source 1..24: mol_type = other RNA
acctggcatacaatgtagatttct

SEQ ID NO: 26206 - RNA, 22 nt, Synthetic Construct
  source 1..22: mol_type = other RNA
tcactgatcgagtcgtcctgcg

SEQ ID NO: 26207 - RNA, 22 nt, Synthetic Construct
  source 1..22: mol_type = other RNA
tcactgatcgagtcgtcctgcg

SEQ ID NO: 26208 - RNA, 36 nt, Synthetic Construct; identical to SEQ ID NO: 2520
  source 1..36: mol_type = other RNA

SEQ ID NO: 26209 - RNA, 23 nt, Synthetic Construct
  source 1..23: mol_type = other RNA
tcggatccgtctgagcttggctt

SEQ ID NO: 26210 - RNA, 23 nt, Synthetic Construct
  source 1..23: mol_type = other RNA
tcggatccgtctgagcttggctt

SEQ ID NO: 26211 - RNA, 20 nt, Synthetic Construct
  source 1..20: mol_type = other RNA
tgaggtagaaggttgtgtgg

SEQ ID NO: 26212 - RNA, 20 nt, Synthetic Construct
  source 1..20: mol_type = other RNA
tgaggtagaaggttgtgtgg

SEQ ID NO: 26213 - RNA, 21 nt, Synthetic Construct
  source 1..21: mol_type = other RNA
actcggcgtggcgtcggtcgt

SEQ ID NO: 26214 - RNA, 21 nt, Synthetic Construct
  source 1..21: mol_type = other RNA
actcggcgtggcgtcggtcgt

SEQ ID NO: 26215 - RNA, 22 nt, Synthetic Construct
  source 1..22: mol_type = other RNA
caaagaattctccttttgggct

SEQ ID NO: 26216 - RNA, 17 nt, Synthetic Construct
  source 1..17: mol_type = other RNA
ggcccttatgggtaggg

SEQ ID NO: 26217 - RNA, 22 nt, Synthetic Construct
  source 1..22: mol_type = other RNA
ggtagcgaaattccttgtcggg

SEQ ID NO: 26218 - RNA, 21 nt, Synthetic Construct
  source 1..21: mol_type = other RNA
ggaatcgctagtaatcgcgga

SEQ ID NO: 26219 - RNA, 16 nt, Synthetic Construct
  source 1..16: mol_type = other RNA
cccctggacctgtact

SEQ ID NO: 26220 - RNA, 17 nt, Synthetic Construct
  source 1..17: mol_type = other RNA
cagtagctcgaggaaaa

SEQ ID NO: 26221 - RNA, 17 nt, Synthetic Construct
  source 1..17: mol_type = other RNA
cagtagctcgaggaaaa

SEQ ID NO: 26222 - RNA, 23 nt, Synthetic Construct
  source 1..23: mol_type = other RNA
tccctggtggtctagtggttagg

SEQ ID NO: 26223 - RNA, 23 nt, Synthetic Construct
  source 1..23: mol_type = other RNA
tccctggtggtctagtggttagg

SEQ ID NO: 26224 - RNA, 21 nt, Synthetic Construct
  source 1..21: mol_type = other RNA
tgaggggcggagagcgagact

SEQ ID NO: 26225 - RNA, 22 nt, Synthetic Construct
  source 1..22: mol_type = other RNA
tcctgtactgaactgccccgag

SEQ ID NO: 26226 - RNA, 22 nt, Synthetic Construct
  source 1..22: mol_type = other RNA
tcctgtactgaactgccccgag

SEQ ID NO: 26227 - RNA, 15 nt, Synthetic Construct
  source 1..15: mol_type = other RNA
cgccatttaaagagg

SEQ ID NO: 26228 - RNA, 15 nt, Synthetic Construct
  source 1..15: mol_type = other RNA
cgccatttaaagagg

SEQ ID NO: 26229 - RNA, 22 nt, Synthetic Construct
  source 1..22: mol_type = other RNA
tgaggtagtggtttgtgctgtt

SEQ ID NO: 26230 - RNA, 22 nt, Synthetic Construct
  source 1..22: mol_type = other RNA
tgaggtagtggtttgtgctgtt

SEQ ID NO: 26231 - RNA, 23 nt, Synthetic Construct
  source 1..23: mol_type = other RNA
tcctatactgagctgccccgaga

SEQ ID NO: 26232 - RNA, 23 nt, Synthetic Construct
  source 1..23: mol_type = other RNA
tcctatactgagctgccccgaga

SEQ ID NO: 26233 - RNA, 24 nt, Synthetic Construct
  source 1..24: mol_type = other RNA
tgtcagtttgtcaaataccccaat

SEQ ID NO: 26234 - RNA, 24 nt, Synthetic Construct
  source 1..24: mol_type = other RNA
tgtcagtttgtcaaataccccaat

SEQ ID NO: 26235 - RNA, 23 nt, Synthetic Construct
  source 1..23: mol_type = other RNA
ctcgtaccgtgagtaataatgcg

SEQ ID NO: 26236 - RNA, 20 nt, Synthetic Construct
  source 1..20: mol_type = other RNA
tcggaagaaggggtgcctgg

SEQ ID NO: 26237 - RNA, 20 nt, Synthetic Construct
  source 1..20: mol_type = other RNA
tcggaagaaggggtgcctgg

SEQ ID NO: 26238 - RNA, 16 nt, Synthetic Construct
  source 1..16: mol_type = other RNA
gtccggatcgtagtct

SEQ ID NO: 26239 - RNA, 20 nt, Synthetic Construct
  source 1..20: mol_type = other RNA
tgaggcagtaggttgtatag

SEQ ID NO: 26240 - RNA, 20 nt, Synthetic Construct
  source 1..20: mol_type = other RNA
tgaggcagtaggttgtatag

SEQ ID NO: 26241 - RNA, 21 nt, Synthetic Construct
  source 1..21: mol_type = other RNA
tgaggtagtaggctgtgtggt

SEQ ID NO: 26242 - RNA, 21 nt, Synthetic Construct
  source 1..21: mol_type = other RNA
tgaggtagtaggctgtgtggt

SEQ ID NO: 26243 - RNA, 25 nt, Synthetic Construct
  source 1..25: mol_type = other RNA
ttgaggatatgggatcgagacgaca

SEQ ID NO: 26244 - RNA, 25 nt, Synthetic Construct
  source 1..25: mol_type = other RNA
ttgaggatatgggatcgagacgaca

SEQ ID NO: 26245 - RNA, 15 nt, Synthetic Construct
  source 1..15: mol_type = other RNA
tagagtagggcggga

SEQ ID NO: 26246 - RNA, 23 nt, Synthetic Construct
  source 1..23: mol_type = other RNA
tcctgtactgggctgccccgaga

SEQ ID NO: 26247 - RNA, 34 nt, Synthetic Construct; identical to SEQ ID NO: 2265
  source 1..34: mol_type = other RNA

SEQ ID NO: 26248 - RNA, 24 nt, Synthetic Construct
  source 1..24: mol_type = other RNA
tgaggtagtaggttgtgtggttta

SEQ ID NO: 26249 - RNA, 22 nt, Synthetic Construct
  source 1..22: mol_type = other RNA
gctcacggaaagagaatgaagc

SEQ ID NO: 26250 - RNA, 22 nt, Synthetic Construct
  source 1..22: mol_type = other RNA
gctcacggaaagagaatgaagc

SEQ ID NO: 26251 - RNA, 35 nt, Synthetic Construct; identical to SEQ ID NO: 757
  source 1..35: mol_type = other RNA

SEQ ID NO: 26252 - RNA, 16 nt, Synthetic Construct
  source 1..16: mol_type = other RNA
gtctacagccatacca

SEQ ID NO: 26253 - RNA, 16 nt, Synthetic Construct
  source 1..16: mol_type = other RNA
gtctacagccatacca

SEQ ID NO: 26254 - RNA, 27 nt, Synthetic Construct
  source 1..27: mol_type = other RNA
gcattggtggttcagtggtagaattct

SEQ ID NO: 26255 - RNA, 23 nt, Synthetic Construct
  source 1..23: mol_type = other RNA
caaagtgctgtttgtgcaggtag

SEQ ID NO: 26256 - RNA, 23 nt, Synthetic Construct
  source 1..23: mol_type = other RNA
tgaggggaagagagcgagacttt

SEQ ID NO: 26257 - RNA, 23 nt, Synthetic Construct
  source 1..23: mol_type = other RNA
tggtaatacgtcgtacttagtgt

SEQ ID NO: 26258 - RNA, 15 nt, Synthetic Construct
  source 1..15: mol_type = other RNA
cgatatggcatgaga

SEQ ID NO: 26259 - RNA, 15 nt, Synthetic Construct
  source 1..15: mol_type = other RNA
cgatatggcatgaga

SEQ ID NO: 26260 - RNA, 23 nt, Synthetic Construct
  source 1..23: mol_type = other RNA
tccagtactgagctgccccgagt

SEQ ID NO: 26261 - RNA, 23 nt, Synthetic Construct
  source 1..23: mol_type = other RNA
tccagtactgagctgccccgagt

SEQ ID NO: 26262 - RNA, 24 nt, Synthetic Construct
  source 1..24: mol_type = other RNA
tgtcagtttgtcaaataccccaaa

SEQ ID NO: 26263 - RNA, 24 nt, Synthetic Construct
  source 1..24: mol_type = other RNA
tgtcagtttgtcaaataccccaaa

SEQ ID NO: 26264 - RNA, 27 nt, Synthetic Construct
  source 1..27: mol_type = other RNA
gcatgggtggttcagtggtagaattct

SEQ ID NO: 26265 - RNA, 27 nt, Synthetic Construct
  source 1..27: mol_type = other RNA
tcggctgttaaccgaaaggttggtggt

SEQ ID NO: 26266 - RNA, 16 nt, Synthetic Construct
  source 1..16: mol_type = other RNA
tggccgtcgtcagctc

SEQ ID NO: 26267 - RNA, 16 nt, Synthetic Construct
  source 1..16: mol_type = other RNA
tggccgtcgtcagctc

SEQ ID NO: 26268 - RNA, 22 nt, Synthetic Construct
  source 1..22: mol_type = other RNA
cattgcacttgtcccggcctgt

SEQ ID NO: 26269 - RNA, 22 nt, Synthetic Construct
  source 1..22: mol_type = other RNA
cattgcacttgtcccggcctgt

SEQ ID NO: 26270 - RNA, 16 nt, Synthetic Construct
  source 1..16: mol_type = other RNA
gtctacggccatacaa

SEQ ID NO: 26271 - RNA, 16 nt, Synthetic Construct
  source 1..16: mol_type = other RNA
gtctacggccatacaa

SEQ ID NO: 26272 - RNA, 18 nt, Synthetic Construct
  source 1..18: mol_type = other RNA
gctattgacgaccgtacc

SEQ ID NO: 26273 - RNA, 18 nt, Synthetic Construct
  source 1..18: mol_type = other RNA
gctattgacgaccgtacc

SEQ ID NO: 26274 - RNA, 16 nt, Synthetic Construct
  source 1..16: mol_type = other RNA
agcaagtcgaacggta

SEQ ID NO: 26275 - RNA, 16 nt, Synthetic Construct
  source 1..16: mol_type = other RNA
agcaagtcgaacggta

SEQ ID NO: 26276 - RNA, 19 nt, Synthetic Construct
  source 1..19: mol_type = other RNA
tgtcaactggttgttggga

SEQ ID NO: 26277 - RNA, 23 nt, Synthetic Construct
  source 1..23: mol_type = other RNA
tggcaatacgacgtacttagtgt

SEQ ID NO: 26278 - RNA, 23 nt, Synthetic Construct
  source 1..23: mol_type = other RNA
tggcaatacgacgtacttagtgt

SEQ ID NO: 26279 - RNA, 19 nt, Synthetic Construct
  source 1..19: mol_type = other RNA
acatgcaagtcgaacggta

SEQ ID NO: 26280 - RNA, 19 nt, Synthetic Construct
  source 1..19: mol_type = other RNA
acatgcaagtcgaacggta

SEQ ID NO: 26281 - RNA, 23 nt, Synthetic Construct
  source 1..23: mol_type = other RNA
tgaggtggtaggttgtgtggttt

SEQ ID NO: 26282 - RNA, 16 nt, Synthetic Construct
  source 1..16: mol_type = other RNA
gtctacggccataccg

SEQ ID NO: 26283 - RNA, 19 nt, Synthetic Construct
  source 1..19: mol_type = other RNA
agcgaaattccttgtcggg

SEQ ID NO: 26284 - RNA, 19 nt, Synthetic Construct
  source 1..19: mol_type = other RNA
agcgaaattccttgtcggg

SEQ ID NO: 26285 - RNA, 37 nt, Synthetic Construct; identical to SEQ ID NO: 2211
  source 1..37: mol_type = other RNA

SEQ ID NO: 26286 - RNA, 21 nt, Synthetic Construct
  source 1..21: mol_type = other RNA
tgtcagtttgtcaaatacccc

SEQ ID NO: 26287 - RNA, 21 nt, Synthetic Construct
  source 1..21: mol_type = other RNA
tgtcagtttgtcaaatacccc

SEQ ID NO: 26288 - RNA, 20 nt, Synthetic Construct
  source 1..20: mol_type = other RNA
tgaggtaggaggttgtatag

SEQ ID NO: 26289 - RNA, 23 nt, Synthetic Construct
  source 1..23: mol_type = other RNA
tgaggtagtaggctgtgtggttt

SEQ ID NO: 26290 - RNA, 22 nt, Synthetic Construct
  source 1..22: mol_type = other RNA
cattgcacttgtctcggtctgg

SEQ ID NO: 26291 - RNA, 20 nt, Synthetic Construct
  source 1..20: mol_type = other RNA
tgaggtggtaggttgtatag

SEQ ID NO: 26292 - RNA, 20 nt, Synthetic Construct
  source 1..20: mol_type = other RNA
tgaggtggtaggttgtatag

SEQ ID NO: 26293 - RNA, 16 nt, Synthetic Construct
  source 1..16: mol_type = other RNA
gcaagaggtcagcggt

SEQ ID NO: 26294 - RNA, 23 nt, Synthetic Construct
  source 1..23: mol_type = other RNA
tagcagcacgtaaatattggcgt

SEQ ID NO: 26295 - RNA, 20 nt, Synthetic Construct
  source 1..20: mol_type = other RNA
aacattcaacgctgtcggtg

SEQ ID NO: 26296 - RNA, 23 nt, Synthetic Construct
  source 1..23: mol_type = other RNA
tgaagggcagagagcgagacttt

SEQ ID NO: 26297 - RNA, 21 nt, Synthetic Construct
  source 1..21: mol_type = other RNA
cacgtcatacaatggccggga

SEQ ID NO: 26298 - RNA, 21 nt, Synthetic Construct
  source 1..21: mol_type = other RNA
cacgtcatacaatggccggga

SEQ ID NO: 26299 - RNA, 25 nt, Synthetic Construct
  source 1..25: mol_type = other RNA
ttgaggatatgagatcgagacaaca

SEQ ID NO: 26300 - RNA, 25 nt, Synthetic Construct
  source 1..25: mol_type = other RNA
ttgaggatatgagatcgagacaaca

SEQ ID NO: 26301 - RNA, 18 nt, Synthetic Construct
  source 1..18: mol_type = other RNA
agcaggacggtggccatg

SEQ ID NO: 26302 - RNA, 36 nt, Synthetic Construct; identical to SEQ ID NO: 777
  source 1..36: mol_type = other RNA

SEQ ID NO: 26303 - RNA, 29 nt, Synthetic Construct
  source 1..29: mol_type = other RNA
ttacaggggttcgaatcccctaggggacg

SEQ ID NO: 26304 - RNA, 21 nt, Synthetic Construct
  source 1..21: mol_type = other RNA
ggaggggcagagagcgagact

SEQ ID NO: 26305 - RNA, 21 nt, Synthetic Construct
  source 1..21: mol_type = other RNA
ggaggggcagagagcgagact

SEQ ID NO: 26306 - RNA, 17 nt, Synthetic Construct
  source 1..17: mol_type = other RNA
accaaggggtcgtgggt

SEQ ID NO: 26307 - RNA, 16 nt, Synthetic Construct
  source 1..16: mol_type = other RNA
agcaagtcgaacggta

SEQ ID NO: 26308 - RNA, 16 nt, Synthetic Construct
  source 1..16: mol_type = other RNA
agcaagtcgaacggta

SEQ ID NO: 26309 - RNA, 15 nt, Synthetic Construct
  source 1..15: mol_type = other RNA
accgcttttgtcagg

SEQ ID NO: 26310 - RNA, 15 nt, Synthetic Construct
  source 1..15: mol_type = other RNA
accgcttttgtcagg

SEQ ID NO: 26311 - RNA, 16 nt, Synthetic Construct
  source 1..16: mol_type = other RNA
acggcgggagtaacta

SEQ ID NO: 26312 - RNA, 16 nt, Synthetic Construct
  source 1..16: mol_type = other RNA
acggcgggagtaacta

SEQ ID NO: 26313 - RNA, 22 nt, Synthetic Construct
  source 1..22: mol_type = other RNA
tctttggttatctagctgtatg

SEQ ID NO: 26314 - RNA, 22 nt, Synthetic Construct
  source 1..22: mol_type = other RNA
tctttggttatctagctgtatg

SEQ ID NO: 26315 - RNA, 15 nt, Synthetic Construct
  source 1..15: mol_type = other RNA
tcgagtcgtcctgcg

SEQ ID NO: 26316 - RNA, 15 nt, Synthetic Construct
  source 1..15: mol_type = other RNA
tcgagtcgtcctgcg

SEQ ID NO: 26317 - RNA, 15 nt, Synthetic Construct
  source 1..15: mol_type = other RNA
tcagtagctcgagga

SEQ ID NO: 26318 - RNA, 15 nt, Synthetic Construct
  source 1..15: mol_type = other RNA
tcagtagctcgagga

SEQ ID NO: 26319 - RNA, 21 nt, Synthetic Construct
  source 1..21: mol_type = other RNA
tagcaccatctgaaatcggta

SEQ ID NO: 26320 - RNA, 17 nt, Synthetic Construct
  source 1..17: mol_type = other RNA
aagttgaccgcctgggg

SEQ ID NO: 26321 - RNA, 17 nt, Synthetic Construct
  source 1..17: mol_type = other RNA
aagttgaccgcctgggg

SEQ ID NO: 26322 - RNA, 15 nt, Synthetic Construct
  source 1..15: mol_type = other RNA
gtcaggatgttggct

SEQ ID NO: 26323 - RNA, 16 nt, Synthetic Construct
  source 1..16: mol_type = other RNA
cgactcttagcggtgg

SEQ ID NO: 26324 - RNA, 16 nt, Synthetic Construct
  source 1..16: mol_type = other RNA
cgactcttagcggtgg

SEQ ID NO: 26325 - RNA, 22 nt, Synthetic Construct
  source 1..22: mol_type = other RNA
tcctgtactgagccgccccgag

SEQ ID NO: 26326 - RNA, 26 nt, Synthetic Construct
  source 1..26: mol_type = other RNA
atgcgagagtaggacgttgccaggtt

SEQ ID NO: 26327 - RNA, 26 nt, Synthetic Construct
  source 1..26: mol_type = other RNA
atgcgagagtaggacgttgccaggtt

SEQ ID NO: 26328 - RNA, 21 nt, Synthetic Construct
  source 1..21: mol_type = other RNA
tgaggggcagagagcgagacc

SEQ ID NO: 26329 - RNA, 21 nt, Synthetic Construct
  source 1..21: mol_type = other RNA
tgaggggcagagagcgagacc

SEQ ID NO: 26330 - RNA, 20 nt, Synthetic Construct
  source 1..20: mol_type = other RNA
tgaggtagtaggtcgtatag

SEQ ID NO: 26331 - RNA, 20 nt, Synthetic Construct
  source 1..20: mol_type = other RNA
tgaggtagtaggtcgtatag

SEQ ID NO: 26332 - RNA, 17 nt, Synthetic Construct
  source 1..17: mol_type = other RNA
tggccgggacagagggc

SEQ ID NO: 26333 - RNA, 43 nt, Synthetic Construct; identical to SEQ ID NO: 727
  source 1..43: mol_type = other RNA

SEQ ID NO: 26334 - RNA, 43 nt, Synthetic Construct; identical to SEQ ID NO: 727
  source 1..43: mol_type = other RNA

SEQ ID NO: 26335 - RNA, 22 nt, Synthetic Construct
  source 1..22: mol_type = other RNA
tggaatgtgaagaagtatgtat

SEQ ID NO: 26336 - RNA, 22 nt, Synthetic Construct
  source 1..22: mol_type = other RNA
tggaatgtgaagaagtatgtat

SEQ ID NO: 26337 - RNA, 23 nt, Synthetic Construct
  source 1..23: mol_type = other RNA
tcggaatcgctagtaatcgcgga

SEQ ID NO: 26338 - RNA, 16 nt, Synthetic Construct
  source 1..16: mol_type = other RNA
accgcttttgtcaggg

SEQ ID NO: 26339 - RNA, 16 nt, Synthetic Construct
  source 1..16: mol_type = other RNA
accgcttttgtcaggg

SEQ ID NO: 26340 - RNA, 23 nt, Synthetic Construct
  source 1..23: mol_type = other RNA
tcctgtactgagctgccccggga

SEQ ID NO: 26341 - RNA, 16 nt, Synthetic Construct
  source 1..16: mol_type = other RNA
gtctacggccataccg

SEQ ID NO: 26342 - RNA, 32 nt, Synthetic Construct; identical to SEQ ID NO: 4734
  source 1..32: mol_type = other RNA

SEQ ID NO: 26343 - RNA, 19 nt, Synthetic Construct
  source 1..19: mol_type = other RNA
ctgatcgagtcgtcctgcg

SEQ ID NO: 26344 - RNA, 19 nt, Synthetic Construct
  source 1..19: mol_type = other RNA
ctgatcgagtcgtcctgcg

SEQ ID NO: 26345 - RNA, 15 nt, Synthetic Construct
  source 1..15: mol_type = other RNA
gtcgtcctgcgcgga

SEQ ID NO: 26346 - RNA, 15 nt, Synthetic Construct
  source 1..15: mol_type = other RNA
gtcgtcctgcgcgga

SEQ ID NO: 26347 - RNA, 23 nt, Synthetic Construct
  source 1..23: mol_type = other RNA
tacagtagtctgcacattggttt

SEQ ID NO: 26348 - RNA, 23 nt, Synthetic Construct
  source 1..23: mol_type = other RNA
tacagtagtctgcacattggttt

SEQ ID NO: 26349 - RNA, 17 nt, Synthetic Construct
  source 1..17: mol_type = other RNA
ggcccttatgggtaggg

SEQ ID NO: 26350 - RNA, 17 nt, Synthetic Construct
  source 1..17: mol_type = other RNA
ggcccttatgggtaggg

SEQ ID NO: 26351 - RNA, 32 nt, Synthetic Construct; identical to SEQ ID NO: 10937
  source 1..32: mol_type = other RNA

SEQ ID NO: 26352 - RNA, 23 nt, Synthetic Construct
  source 1..23: mol_type = other RNA
tctctcggctcctcgcggctcgt

SEQ ID NO: 26353 - RNA, 23 nt, Synthetic Construct
  source 1..23: mol_type = other RNA
tctctcggctcctcgcggctcgt

SEQ ID NO: 26354 - RNA, 19 nt, Synthetic Construct
  source 1..19: mol_type = other RNA
cctgtaccgatcaatagtg

SEQ ID NO: 26355 - RNA, 38 nt, Synthetic Construct; identical to SEQ ID NO: 11817
  source 1..38: mol_type = other RNA

SEQ ID NO: 26356 - RNA, 38 nt, Synthetic Construct; identical to SEQ ID NO: 11817
  source 1..38: mol_type = other RNA

SEQ ID NO: 26357 - RNA, 23 nt, Synthetic Construct
  source 1..23: mol_type = other RNA
tagcagcacataatggtttgtgg

SEQ ID NO: 26358 - RNA, 21 nt, Synthetic Construct
  source 1..21: mol_type = other RNA
tgaggtagtaggttgtgtggc

SEQ ID NO: 26359 - RNA, 27 nt, Synthetic Construct
  source 1..27: mol_type = other RNA
ccccccactgctgaatttgactggctt

SEQ ID NO: 26360 - RNA, 15 nt, Synthetic Construct
  source 1..15: mol_type = other RNA
accgcttttgtcagg

SEQ ID NO: 26361 - RNA, 35 nt, Synthetic Construct; identical to SEQ ID NO: 10694
  source 1..35: mol_type = other RNA

SEQ ID NO: 26362 - RNA, 35 nt, Synthetic Construct; identical to SEQ ID NO: 10694
  source 1..35: mol_type = other RNA

SEQ ID NO: 26363 - RNA, 25 nt, Synthetic Construct
  source 1..25: mol_type = other RNA
gagaaagctcacaagaactgctaac

SEQ ID NO: 26364 - RNA, 25 nt, Synthetic Construct
  source 1..25: mol_type = other RNA
gagaaagctcacaagaactgctaac

SEQ ID NO: 26365 - RNA, 18 nt, Synthetic Construct
  source 1..18: mol_type = other RNA
tcccctggacctgtactg

SEQ ID NO: 26366 - RNA, 21 nt, Synthetic Construct
  source 1..21: mol_type = other RNA
tgaggcagtaggttgtgtggt

SEQ ID NO: 26367 - RNA, 21 nt, Synthetic Construct
  source 1..21: mol_type = other RNA
tgaggcagtaggttgtgtggt

SEQ ID NO: 26368 - RNA, 32 nt, Synthetic Construct; identical to SEQ ID NO: 2467
  source 1..32: mol_type = other RNA

SEQ ID NO: 26369 - RNA, 19 nt, Synthetic Construct
  source 1..19: mol_type = other RNA
accaaggggtcgtgggttc

SEQ ID NO: 26370 - RNA, 23 nt, Synthetic Construct
  source 1..23: mol_type = other RNA
ggtagcgaaattccttgtcgggt

SEQ ID NO: 26371 - RNA, 23 nt, Synthetic Construct
  source 1..23: mol_type = other RNA
ggtagcgaaattccttgtcgggt

SEQ ID NO: 26372 - RNA, 23 nt, Synthetic Construct
  source 1..23: mol_type = other RNA
tgaggggcagagagcgagactta

SEQ ID NO: 26373 - RNA, 22 nt, Synthetic Construct
  source 1..22: mol_type = other RNA
tagcagcacgtgaatattggcg

SEQ ID NO: 26374 - RNA, 22 nt, Synthetic Construct
  source 1..22: mol_type = other RNA
tagcagcacgtgaatattggcg

SEQ ID NO: 26375 - RNA, 27 nt, Synthetic Construct
  source 1..27: mol_type = other RNA
gcattggtggttcagtggtagaattct

SEQ ID NO: 26376 - RNA, 23 nt, Synthetic Construct
  source 1..23: mol_type = other RNA
tcccgtactgagctgccccgaga

SEQ ID NO: 26377 - RNA, 23 nt, Synthetic Construct
  source 1..23: mol_type = other RNA
tcccgtactgagctgccccgaga

SEQ ID NO: 26378 - RNA, 22 nt, Synthetic Construct
  source 1..22: mol_type = other RNA
tcctgtactgagctgccccggg

SEQ ID NO: 26379 - RNA, 22 nt, Synthetic Construct
  source 1..22: mol_type = other RNA
tcctgtactgagctgccccggg

SEQ ID NO: 26380 - RNA, 22 nt, Synthetic Construct
  source 1..22: mol_type = other RNA
tgaggtaataggttgtgtggtt

SEQ ID NO: 26381 - RNA, 22 nt, Synthetic Construct
  source 1..22: mol_type = other RNA
tgaggtaataggttgtgtggtt

SEQ ID NO: 26382 - RNA, 24 nt, Synthetic Construct
  source 1..24: mol_type = other RNA
aaaccgttaccattactgagttta

SEQ ID NO: 26383 - RNA, 24 nt, Synthetic Construct
  source 1..24: mol_type = other RNA
aaaccgttaccattactgagttta

SEQ ID NO: 26384 - RNA, 37 nt, Synthetic Construct; identical to SEQ ID NO: 2211
  source 1..37: mol_type = other RNA

SEQ ID NO: 26385 - RNA, 15 nt, Synthetic Construct
  source 1..15: mol_type = other RNA
gcaagtcgagcggta

SEQ ID NO: 26386 - RNA, 15 nt, Synthetic Construct
  source 1..15: mol_type = other RNA
gcaagtcgagcggta

SEQ ID NO: 26387 - RNA, 22 nt, Synthetic Construct
  source 1..22: mol_type = other RNA
tcctgtgctgagctgccccgag

SEQ ID NO: 26388 - RNA, 24 nt, Synthetic Construct
  source 1..24: mol_type = other RNA
tcactgatcgagtcgtcctgcgcg

SEQ ID NO: 26389 - RNA, 24 nt, Synthetic Construct
  source 1..24: mol_type = other RNA
tcactgatcgagtcgtcctgcgcg

SEQ ID NO: 26390 - RNA, 22 nt, Synthetic Construct
  source 1..22: mol_type = other RNA
cattgcacttgtcccggcctgt

SEQ ID NO: 26391 - RNA, 22 nt, Synthetic Construct
  source 1..22: mol_type = other RNA
agggggaaagttctatagtcct

SEQ ID NO: 26392 - RNA, 22 nt, Synthetic Construct
  source 1..22: mol_type = other RNA
agggggaaagttctatagtcct

SEQ ID NO: 26393 - RNA, 15 nt, Synthetic Construct
  source 1..15: mol_type = other RNA
cggcccagactccta

SEQ ID NO: 26394 - RNA, 15 nt, Synthetic Construct
  source 1..15: mol_type = other RNA
cggcccagactccta

SEQ ID NO: 26395 - RNA, 21 nt, Synthetic Construct
  source 1..21: mol_type = other RNA
cgaggggcagagagcgagact

SEQ ID NO: 26396 - RNA, 16 nt, Synthetic Construct
  source 1..16: mol_type = other RNA
ggtagctcgttgggct

SEQ ID NO: 26397 - RNA, 16 nt, Synthetic Construct
  source 1..16: mol_type = other RNA
ggtagctcgttgggct

SEQ ID NO: 26398 - RNA, 19 nt, Synthetic Construct
  source 1..19: mol_type = other RNA
tggccgtcgtcagctcgtg

SEQ ID NO: 26399 - RNA, 19 nt, Synthetic Construct
  source 1..19: mol_type = other RNA
tggccgtcgtcagctcgtg

SEQ ID NO: 26400 - RNA, 22 nt, Synthetic Construct
  source 1..22: mol_type = other RNA
tggaatgtaaagaagtatgtat

SEQ ID NO: 26401 - RNA, 19 nt, Synthetic Construct
  source 1..19: mol_type = other RNA
ttcaagtaatccaggatag

SEQ ID NO: 26402 - RNA, 21 nt, Synthetic Construct
  source 1..21: mol_type = other RNA
ggaggagttcgaaggtacgct

SEQ ID NO: 26403 - RNA, 21 nt, Synthetic Construct
  source 1..21: mol_type = other RNA
ggaggagttcgaaggtacgct

SEQ ID NO: 26404 - RNA, 22 nt, Synthetic Construct
  source 1..22: mol_type = other RNA
tgaggtagtaggttgtgtggtg

SEQ ID NO: 26405 - RNA, 22 nt, Synthetic Construct
  source 1..22: mol_type = other RNA
tgaggtagtaggttgtgtggtg

SEQ ID NO: 26406 - RNA, 23 nt, Synthetic Construct
  source 1..23: mol_type = other RNA
tgaggggcagagagcgagactat

SEQ ID NO: 26407 - RNA, 23 nt, Synthetic Construct
  source 1..23: mol_type = other RNA
ccctgtactgagctgccccgagt

SEQ ID NO: 26408 - RNA, 23 nt, Synthetic Construct
  source 1..23: mol_type = other RNA
ccctgtactgagctgccccgagt

SEQ ID NO: 26409 - RNA, 18 nt, Synthetic Construct
  source 1..18: mol_type = other RNA
ggccgtcgtcagctcgtg

SEQ ID NO: 26410 - RNA, 18 nt, Synthetic Construct
  source 1..18: mol_type = other RNA
acagtcaggatgttggct

SEQ ID NO: 26411 - RNA, 25 nt, Synthetic Construct
  source 1..25: mol_type = other RNA
tttccccttggggttgtaggaccac

SEQ ID NO: 26412 - RNA, 25 nt, Synthetic Construct
  source 1..25: mol_type = other RNA
tttccccttggggttgtaggaccac

SEQ ID NO: 26413 - RNA, 15 nt, Synthetic Construct
  source 1..15: mol_type = other RNA
gtccggcccgaggca

SEQ ID NO: 26414 - RNA, 15 nt, Synthetic Construct
  source 1..15: mol_type = other RNA
gtccggcccgaggca

SEQ ID NO: 26415 - RNA, 24 nt, Synthetic Construct
  source 1..24: mol_type = other RNA
tcggatccgtctgagcttggcttt

SEQ ID NO: 26416 - RNA, 24 nt, Synthetic Construct
  source 1..24: mol_type = other RNA
tcggatccgtctgagcttggcttt

SEQ ID NO: 26417 - RNA, 26 nt, Synthetic Construct
  source 1..26: mol_type = other RNA
atttccccttggggttgtaggaccac

SEQ ID NO: 26418 - RNA, 26 nt, Synthetic Construct
  source 1..26: mol_type = other RNA
atttccccttggggttgtaggaccac

SEQ ID NO: 26419 - RNA, 20 nt, Synthetic Construct
  source 1..20: mol_type = other RNA
tgaggtagtaggttatgtgg

SEQ ID NO: 26420 - RNA, 20 nt, Synthetic Construct
  source 1..20: mol_type = other RNA
tgaggtagtaggttatgtgg

SEQ ID NO: 26421 - RNA, 20 nt, Synthetic Construct
  source 1..20: mol_type = other RNA
tgaagtagtaggttgtgtgg

SEQ ID NO: 26422 - RNA, 20 nt, Synthetic Construct
  source 1..20: mol_type = other RNA
tgaagtagtaggttgtgtgg

SEQ ID NO: 26423 - RNA, 16 nt, Synthetic Construct
  source 1..16: mol_type = other RNA
tcgtgacgatagtgca

SEQ ID NO: 26424 - RNA, 16 nt, Synthetic Construct
  source 1..16: mol_type = other RNA
tcgtgacgatagtgca

SEQ ID NO: 26425 - RNA, 23 nt, Synthetic Construct
  source 1..23: mol_type = other RNA
tggtaatacgacgtacttaatgt

SEQ ID NO: 26426 - RNA, 23 nt, Synthetic Construct
  source 1..23: mol_type = other RNA
tggtaatacgacgtacttaatgt

SEQ ID NO: 26427 - RNA, 21 nt, Synthetic Construct
  source 1..21: mol_type = other RNA
tgaggtaataggttgtgtggt

SEQ ID NO: 26428 - RNA, 21 nt, Synthetic Construct
  source 1..21: mol_type = other RNA
tgaggtaataggttgtgtggt

SEQ ID NO: 26429 - RNA, 25 nt, Synthetic Construct
  source 1..25: mol_type = other RNA
atgaggatatgagatcgagacgaca

SEQ ID NO: 26430 - RNA, 25 nt, Synthetic Construct
  source 1..25: mol_type = other RNA
atgaggatatgagatcgagacgaca

SEQ ID NO: 26431 - RNA, 23 nt, Synthetic Construct
  source 1..23: mol_type = other RNA
cggtaatacgacgtacttagtgt

SEQ ID NO: 26432 - RNA, 23 nt, Synthetic Construct
  source 1..23: mol_type = other RNA
cggtaatacgacgtacttagtgt

SEQ ID NO: 26433 - RNA, 24 nt, Synthetic Construct
  source 1..24: mol_type = other RNA
ggttgtaaaccgcttttgtcaggg

SEQ ID NO: 26434 - RNA, 22 nt, Synthetic Construct
  source 1..22: mol_type = other RNA
tatcgcacttgtcccggcctgt

SEQ ID NO: 26435 - RNA, 22 nt, Synthetic Construct
  source 1..22: mol_type = other RNA
tatcgcacttgtcccggcctgt

SEQ ID NO: 26436 - RNA, 15 nt, Synthetic Construct
  source 1..15: mol_type = other RNA
cggcccagactccta

SEQ ID NO: 26437 - RNA, 25 nt, Synthetic Construct
  source 1..25: mol_type = other RNA
atttccccttggggttgtaggacca

SEQ ID NO: 26438 - RNA, 25 nt, Synthetic Construct
  source 1..25: mol_type = other RNA
atttccccttggggttgtaggacca

SEQ ID NO: 26439 - RNA, 32 nt, Synthetic Construct; identical to SEQ ID NO: 2296
  source 1..32: mol_type = other RNA

SEQ ID NO: 26440 - RNA, 19 nt, Synthetic Construct
  source 1..19: mol_type = other RNA
cacatgcaagtcgaacggt

SEQ ID NO: 26441 - RNA, 22 nt, Synthetic Construct
  source 1..22: mol_type = other RNA
tgggatgtaaagaagtatgtat

SEQ ID NO: 26442 - RNA, 22 nt, Synthetic Construct
  source 1..22: mol_type = other RNA
tgggatgtaaagaagtatgtat

SEQ ID NO: 26443 - RNA, 20 nt, Synthetic Construct
  source 1..20: mol_type = other RNA
tggagtgtgacaatggtgtt

SEQ ID NO: 26444 - RNA, 20 nt, Synthetic Construct
  source 1..20: mol_type = other RNA
tggagtgtgacaatggtgtt

SEQ ID NO: 26445 - RNA, 18 nt, Synthetic Construct
  source 1..18: mol_type = other RNA
tcccctggacctgtactg

SEQ ID NO: 26446 - RNA, 18 nt, Synthetic Construct
  source 1..18: mol_type = other RNA
tcccctggacctgtactg

SEQ ID NO: 26447 - RNA, 32 nt, Synthetic Construct; identical to SEQ ID NO: 4734
  source 1..32: mol_type = other RNA

SEQ ID NO: 26448 - RNA, 16 nt, Synthetic Construct
  source 1..16: mol_type = other RNA
gatttgggagtgctcg

SEQ ID NO: 26449 - RNA, 16 nt, Synthetic Construct
  source 1..16: mol_type = other RNA
gatttgggagtgctcg

SEQ ID NO: 26450 - RNA, 23 nt, Synthetic Construct
  source 1..23: mol_type = other RNA
aggtaatacgacgtacttagtgt

SEQ ID NO: 26451 - RNA, 23 nt, Synthetic Construct
  source 1..23: mol_type = other RNA
aggtaatacgacgtacttagtgt

SEQ ID NO: 26452 - RNA, 22 nt, Synthetic Construct
  source 1..22: mol_type = other RNA
ttcaagtaatccaggataggcc

SEQ ID NO: 26453 - RNA, 25 nt, Synthetic Construct
  source 1..25: mol_type = other RNA
ttgaggatatgagatcgggacgaca

SEQ ID NO: 26454 - RNA, 25 nt, Synthetic Construct
  source 1..25: mol_type = other RNA
ttgaggatatgagatcgggacgaca

SEQ ID NO: 26455 - RNA, 22 nt, Synthetic Construct
  source 1..22: mol_type = other RNA
ggtagcgaaattccttgtcggg

SEQ ID NO: 26456 - RNA, 39 nt, Synthetic Construct; identical to SEQ ID NO: 804
  source 1..39: mol_type = other RNA

SEQ ID NO: 26457 - RNA, 39 nt, Synthetic Construct; identical to SEQ ID NO: 804
  source 1..39: mol_type = other RNA

SEQ ID NO: 26458 - RNA, 15 nt, Synthetic Construct
  source 1..15: mol_type = other RNA
cccagaaacccggtc

SEQ ID NO: 26459 - RNA, 23 nt, Synthetic Construct
  source 1..23: mol_type = other RNA
ttccccttggggttgtaggacca

SEQ ID NO: 26460 - RNA, 23 nt, Synthetic Construct
  source 1..23: mol_type = other RNA
ttccccttggggttgtaggacca

SEQ ID NO: 26461 - RNA, 22 nt, Synthetic Construct
  source 1..22: mol_type = other RNA
tagcttatcagactgatgttga

SEQ ID NO: 26462 - RNA, 22 nt, Synthetic Construct
  source 1..22: mol_type = other RNA
tagcttatcagactgatgttga

SEQ ID NO: 26463 - RNA, 24 nt, Synthetic Construct
  source 1..24: mol_type = other RNA
gctcactgatcgagtcgtcctgcg

SEQ ID NO: 26464 - RNA, 33 nt, Synthetic Construct; identical to SEQ ID NO: 2638
  source 1..33: mol_type = other RNA

SEQ ID NO: 26465 - RNA, 20 nt, Synthetic Construct
  source 1..20: mol_type = other RNA
gcaataacaggtctgtgatg

SEQ ID NO: 26466 - RNA, 20 nt, Synthetic Construct
  source 1..20: mol_type = other RNA
gcaataacaggtctgtgatg

SEQ ID NO: 26467 - RNA, 18 nt, Synthetic Construct
  source 1..18: mol_type = other RNA
accaaggggtcgtgggtt

SEQ ID NO: 26468 - RNA, 18 nt, Synthetic Construct
  source 1..18: mol_type = other RNA
accaaggggtcgtgggtt

SEQ ID NO: 26469 - RNA, 23 nt, Synthetic Construct
  source 1..23: mol_type = other RNA
tgaggggcagagagcgaggcttt

SEQ ID NO: 26470 - RNA, 23 nt, Synthetic Construct
  source 1..23: mol_type = other RNA
tgaggggcagagagcgaggcttt

SEQ ID NO: 26471 - RNA, 23 nt, Synthetic Construct
  source 1..23: mol_type = other RNA
tcgaccggacctcgaccggctcg

SEQ ID NO: 26472 - RNA, 23 nt, Synthetic Construct
  source 1..23: mol_type = other RNA
tcgaccggacctcgaccggctcg

SEQ ID NO: 26473 - RNA, 21 nt, Synthetic Construct
  source 1..21: mol_type = other RNA
tgaggggcggagagcgagact

SEQ ID NO: 26474 - RNA, 21 nt, Synthetic Construct
  source 1..21: mol_type = other RNA
ctagactgaagctccttgaga

SEQ ID NO: 26475 - RNA, 23 nt, Synthetic Construct
  source 1..23: mol_type = other RNA
ctcactgatcgagtcgtcctgcg

SEQ ID NO: 26476 - RNA, 16 nt, Synthetic Construct
  source 1..16: mol_type = other RNA
gtccacggccatacca

SEQ ID NO: 26477 - RNA, 21 nt, Synthetic Construct
  source 1..21: mol_type = other RNA
tggggtagtagtttgtgctgt

SEQ ID NO: 26478 - RNA, 21 nt, Synthetic Construct
  source 1..21: mol_type = other RNA
tggggtagtagtttgtgctgt

SEQ ID NO: 26479 - RNA, 23 nt, Synthetic Construct
  source 1..23: mol_type = other RNA
tggtaatacgacgtacttagtga

SEQ ID NO: 26480 - RNA, 23 nt, Synthetic Construct
  source 1..23: mol_type = other RNA
tggtaatacgacgtacttagtga

SEQ ID NO: 26481 - RNA, 21 nt, Synthetic Construct
  source 1..21: mol_type = other RNA
tggagtgtgacaatggtgttc

SEQ ID NO: 26482 - RNA, 21 nt, Synthetic Construct
  source 1..21: mol_type = other RNA
tggagtgtgacaatggtgttc

SEQ ID NO: 26483 - RNA, 22 nt, Synthetic Construct
  source 1..22: mol_type = other RNA
cggaatgtaaagaagtatgtat

SEQ ID NO: 26484 - RNA, 22 nt, Synthetic Construct
  source 1..22: mol_type = other RNA
cggaatgtaaagaagtatgtat

SEQ ID NO: 26485 - RNA, 23 nt, Synthetic Construct
  source 1..23: mol_type = other RNA
acagtagtctgcacattggttat

SEQ ID NO: 26486 - RNA, 21 nt, Synthetic Construct
  source 1..21: mol_type = other RNA
tgaggtagtgggttgtgtggt

SEQ ID NO: 26487 - RNA, 21 nt, Synthetic Construct
  source 1..21: mol_type = other RNA
tgaggtagtgggttgtgtggt

SEQ ID NO: 26488 - RNA, 21 nt, Synthetic Construct
  source 1..21: mol_type = other RNA
tgaggtagtaggtcgtgtggt

SEQ ID NO: 26489 - RNA, 21 nt, Synthetic Construct
  source 1..21: mol_type = other RNA
tgaggtagtaggtcgtgtggt

SEQ ID NO: 26490 - RNA, 16 nt, Synthetic Construct
  source 1..16: mol_type = other RNA
gtctgcggccatacca

SEQ ID NO: 26491 - RNA, 22 nt, Synthetic Construct
  source 1..22: mol_type = other RNA
tggaacgtaaagaagtatgtat

SEQ ID NO: 26492 - RNA, 21 nt, Synthetic Construct
  source 1..21: mol_type = other RNA
tgagaactgaattccatgggt

SEQ ID NO: 26493 - RNA, 25 nt, Synthetic Construct
  source 1..25: mol_type = other RNA
tgtaaacatccttgactggaagctt

SEQ ID NO: 26494 - RNA, 20 nt, Synthetic Construct
  source 1..20: mol_type = other RNA
tcggaagaaggggtgcctgg

SEQ ID NO: 26495 - RNA, 20 nt, Synthetic Construct
  source 1..20: mol_type = other RNA
tcggaagaaggggtgcctgg

SEQ ID NO: 26496 - RNA, 23 nt, Synthetic Construct
  source 1..23: mol_type = other RNA
tggtaacacgacgtacttagtgt

SEQ ID NO: 26497 - RNA, 17 nt, Synthetic Construct
  source 1..17: mol_type = other RNA
cccctggacctgtactg

SEQ ID NO: 26498 - RNA, 22 nt, Synthetic Construct
  source 1..22: mol_type = other RNA
taacactgtctggtaacgatgt

SEQ ID NO: 26499 - RNA, 22 nt, Synthetic Construct
  source 1..22: mol_type = other RNA
taacactgtctggtaacgatgt

SEQ ID NO: 26500 - RNA, 24 nt, Synthetic Construct
  source 1..24: mol_type = other RNA
tcactgatcgagtcgtcctgcgcg

SEQ ID NO: 26501 - RNA, 23 nt, Synthetic Construct
  source 1..23: mol_type = other RNA
tggtaatacgacgtactcagtgt

SEQ ID NO: 26502 - RNA, 22 nt, Synthetic Construct
  source 1..22: mol_type = other RNA
tgaggtagtaggttgtgtggtt

SEQ ID NO: 26503 - RNA, 35 nt, Synthetic Construct; identical to SEQ ID NO: 2402
  source 1..35: mol_type = other RNA

SEQ ID NO: 26504 - RNA, 22 nt, Synthetic Construct
  source 1..22: mol_type = other RNA
catcgcacttgtctcggtctga

SEQ ID NO: 26505 - RNA, 18 nt, Synthetic Construct
  source 1..18: mol_type = other RNA
tccgacatgcgagggttc

SEQ ID NO: 26506 - RNA, 16 nt, Synthetic Construct
  source 1..16: mol_type = other RNA
cagtcaggatgttggc

SEQ ID NO: 26507 - RNA, 16 nt, Synthetic Construct
  source 1..16: mol_type = other RNA
cagtcaggatgttggc

SEQ ID NO: 26508 - RNA, 24 nt, Synthetic Construct
  source 1..24: mol_type = other RNA
cggagaaggttagctcagccaact

SEQ ID NO: 26509 - RNA, 22 nt, Synthetic Construct
  source 1..22: mol_type = other RNA
gtcagtttgtcaaataccccat

SEQ ID NO: 26510 - RNA, 22 nt, Synthetic Construct
  source 1..22: mol_type = other RNA
gtcagtttgtcaaataccccat

SEQ ID NO: 26511 - RNA, 22 nt, Synthetic Construct
  source 1..22: mol_type = other RNA
tgaggtagtaggttgtgtggtg

SEQ ID NO: 26512 - RNA, 22 nt, Synthetic Construct
  source 1..22: mol_type = other RNA
tagcagcacgtaagtattggcg

SEQ ID NO: 26513 - RNA, 22 nt, Synthetic Construct
  source 1..22: mol_type = other RNA
tagcagcacgtaagtattggcg

SEQ ID NO: 26514 - RNA, 21 nt, Synthetic Construct
  source 1..21: mol_type = other RNA
tcctgtctgaatatgggggga

SEQ ID NO: 26515 - RNA, 21 nt, Synthetic Construct
  source 1..21: mol_type = other RNA
cgaggggcagagagcgagact

SEQ ID NO: 26516 - RNA, 21 nt, Synthetic Construct
  source 1..21: mol_type = other RNA
ggaggagttcgaaggtacgct

SEQ ID NO: 26517 - RNA, 21 nt, Synthetic Construct
  source 1..21: mol_type = other RNA
tcctgtactgagctgccctga

SEQ ID NO: 26518 - RNA, 21 nt, Synthetic Construct
  source 1..21: mol_type = other RNA
tcctgtactgagctgccctga

SEQ ID NO: 26519 - RNA, 30 nt, Synthetic Construct; identical to SEQ ID NO: 1771
  source 1..30: mol_type = other RNA

SEQ ID NO: 26520 - RNA, 23 nt, Synthetic Construct
  source 1..23: mol_type = other RNA
ggaggggcagagagcgagacttt

SEQ ID NO: 26521 - RNA, 20 nt, Synthetic Construct
  source 1..20: mol_type = other RNA
tgaggtagtaggttgtatgg

SEQ ID NO: 26522 - RNA, 19 nt, Synthetic Construct
  source 1..19: mol_type = other RNA
cctgtaccgatcaatagtg

SEQ ID NO: 26523 - RNA, 19 nt, Synthetic Construct
  source 1..19: mol_type = other RNA
cctgtaccgatcaatagtg

SEQ ID NO: 26524 - RNA, 22 nt, Synthetic Construct
  source 1..22: mol_type = other RNA
tgaggtagtaggttgtatggtt

SEQ ID NO: 26525 - RNA, 22 nt, Synthetic Construct
  source 1..22: mol_type = other RNA
tgaggtagtaggttgtatggtt

SEQ ID NO: 26526 - RNA, 20 nt, Synthetic Construct
  source 1..20: mol_type = other RNA
ctctaatgagactgccggtg

SEQ ID NO: 26527 - RNA, 20 nt, Synthetic Construct
  source 1..20: mol_type = other RNA
ctctaatgagactgccggtg

SEQ ID NO: 26528 - RNA, 23 nt, Synthetic Construct
  source 1..23: mol_type = other RNA
tggtaatacgacgtacttagagt

SEQ ID NO: 26529 - RNA, 25 nt, Synthetic Construct
  source 1..25: mol_type = other RNA
gtgaggatatgagatcgagacgaca

SEQ ID NO: 26530 - RNA, 21 nt, Synthetic Construct
  source 1..21: mol_type = other RNA
tcctatactgagctgccccga

SEQ ID NO: 26531 - RNA, 18 nt, Synthetic Construct
  source 1..18: mol_type = other RNA
caacggaatcccaaaagc

SEQ ID NO: 26532 - RNA, 18 nt, Synthetic Construct
  source 1..18: mol_type = other RNA
caacggaatcccaaaagc

SEQ ID NO: 26533 - RNA, 21 nt, Synthetic Construct
  source 1..21: mol_type = other RNA
tccttcattccaccggagtct

SEQ ID NO: 26534 - RNA, 21 nt, Synthetic Construct
  source 1..21: mol_type = other RNA
tccttcattccaccggagtct

SEQ ID NO: 26535 - RNA, 33 nt, Synthetic Construct; identical to SEQ ID NO: 2556
  source 1..33: mol_type = other RNA

SEQ ID NO: 26536 - RNA, 22 nt, Synthetic Construct
  source 1..22: mol_type = other RNA
tcagtgcatgacagaacttggg

SEQ ID NO: 26537 - RNA, 21 nt, Synthetic Construct
  source 1..21: mol_type = other RNA
tcccgtactgagctgccccga

SEQ ID NO: 26538 - RNA, 17 nt, Synthetic Construct
  source 1..17: mol_type = other RNA
tgccagcagccgcggta

SEQ ID NO: 26539 - RNA, 17 nt, Synthetic Construct
  source 1..17: mol_type = other RNA
tgccagcagccgcggta

SEQ ID NO: 26540 - RNA, 16 nt, Synthetic Construct
  source 1..16: mol_type = other RNA
ggccgttcttagttgg

SEQ ID NO: 26541 - RNA, 23 nt, Synthetic Construct
  source 1..23: mol_type = other RNA
tgaggagcagagagcgagacttt

SEQ ID NO: 26542 - RNA, 23 nt, Synthetic Construct
  source 1..23: mol_type = other RNA
tgaggagcagagagcgagacttt

SEQ ID NO: 26543 - RNA, 27 nt, Synthetic Construct
  source 1..27: mol_type = other RNA
cgactcttagcggtggatcactcggct

SEQ ID NO: 26544 - RNA, 27 nt, Synthetic Construct
  source 1..27: mol_type = other RNA
cgactcttagcggtggatcactcggct

SEQ ID NO: 26545 - RNA, 22 nt, Synthetic Construct
  source 1..22: mol_type = other RNA
tgaggaagtaggttgtgtggtt

SEQ ID NO: 26546 - RNA, 22 nt, Synthetic Construct
  source 1..22: mol_type = other RNA
tgaggaagtaggttgtgtggtt

SEQ ID NO: 26547 - RNA, 21 nt, Synthetic Construct
  source 1..21: mol_type = other RNA
tggagagtgacaatggtgttt

SEQ ID NO: 26548 - RNA, 21 nt, Synthetic Construct
  source 1..21: mol_type = other RNA
tggagagtgacaatggtgttt

SEQ ID NO: 26549 - RNA, 19 nt, Synthetic Construct
  source 1..19: mol_type = other RNA
gtccggatcgtagtctgca

SEQ ID NO: 26550 - RNA, 19 nt, Synthetic Construct
  source 1..19: mol_type = other RNA
gtccggatcgtagtctgca

SEQ ID NO: 26551 - RNA, 23 nt, Synthetic Construct
  source 1..23: mol_type = other RNA
tgtagtgtttcctactttatggt

SEQ ID NO: 26552 - RNA, 16 nt, Synthetic Construct
  source 1..16: mol_type = other RNA
gtccggatcgtagtct

SEQ ID NO: 26553 - RNA, 15 nt, Synthetic Construct
  source 1..15: mol_type = other RNA
gtccggatcgtagtc

SEQ ID NO: 26554 - RNA, 27 nt, Synthetic Construct
  source 1..27: mol_type = other RNA
gcgggcgtagctcaggggtagagcgca

SEQ ID NO: 26555 - RNA, 27 nt, Synthetic Construct
  source 1..27: mol_type = other RNA
gcgggcgtagctcaggggtagagcgca

SEQ ID NO: 26556 - RNA, 20 nt, Synthetic Construct
  source 1..20: mol_type = other RNA
actgatcgagtcgtcctgcg

SEQ ID NO: 26557 - RNA, 20 nt, Synthetic Construct
  source 1..20: mol_type = other RNA
gcgtgcttgactgcgagact

SEQ ID NO: 26558 - RNA, 22 nt, Synthetic Construct
  source 1..22: mol_type = other RNA
gctcttgactgaagtcccagta

SEQ ID NO: 26559 - RNA, 23 nt, Synthetic Construct
  source 1..23: mol_type = other RNA
tcctgaactgagctgccccgagt

SEQ ID NO: 26560 - RNA, 23 nt, Synthetic Construct
  source 1..23: mol_type = other RNA
tcctgaactgagctgccccgagt

SEQ ID NO: 26561 - RNA, 23 nt, Synthetic Construct
  source 1..23: mol_type = other RNA
tcctgtgctgagctgccccgaga

SEQ ID NO: 26562 - RNA, 23 nt, Synthetic Construct
  source 1..23: mol_type = other RNA
tcctgtgctgagctgccccgaga

SEQ ID NO: 26563 - RNA, 16 nt, Synthetic Construct
  source 1..16: mol_type = other RNA
gactacggccatacca

SEQ ID NO: 26564 - RNA, 16 nt, Synthetic Construct
  source 1..16: mol_type = other RNA
gactacggccatacca

SEQ ID NO: 26565 - RNA, 21 nt, Synthetic Construct
  source 1..21: mol_type = other RNA
tcctgtactgagctgccccaa

SEQ ID NO: 26566 - RNA, 21 nt, Synthetic Construct
  source 1..21: mol_type = other RNA
tcctgtactgagctgccccaa

SEQ ID NO: 26567 - RNA, 18 nt, Synthetic Construct
  source 1..18: mol_type = other RNA
cctgaagaataagcaccg

SEQ ID NO: 26568 - RNA, 18 nt, Synthetic Construct
  source 1..18: mol_type = other RNA
cctgaagaataagcaccg

SEQ ID NO: 26569 - RNA, 27 nt, Synthetic Construct
  source 1..27: mol_type = other RNA
cgtgtgaaagtaggtcatcgtcaggct

SEQ ID NO: 26570 - RNA, 27 nt, Synthetic Construct
  source 1..27: mol_type = other RNA
cgtgtgaaagtaggtcatcgtcaggct

SEQ ID NO: 26571 - RNA, 37 nt, Synthetic Construct; identical to SEQ ID NO: 2447
  source 1..37: mol_type = other RNA

SEQ ID NO: 26572 - RNA, 16 nt, Synthetic Construct
  source 1..16: mol_type = other RNA
gtctgcggccatacca

SEQ ID NO: 26573 - RNA, 23 nt, Synthetic Construct
  source 1..23: mol_type = other RNA
cgaggtagtaggttgtgtggttt

SEQ ID NO: 26574 - RNA, 20 nt, Synthetic Construct
  source 1..20: mol_type = other RNA
tgaggtagtaggttgcatag

SEQ ID NO: 26575 - RNA, 20 nt, Synthetic Construct
  source 1..20: mol_type = other RNA
tgaggtagtaggttgcatag

SEQ ID NO: 26576 - RNA, 22 nt, Synthetic Construct
  source 1..22: mol_type = other RNA
atggatttttggagcagggaga

SEQ ID NO: 26577 - RNA, 20 nt, Synthetic Construct
  source 1..20: mol_type = other RNA
cccataaagtagaaagcact

SEQ ID NO: 26578 - RNA, 20 nt, Synthetic Construct
  source 1..20: mol_type = other RNA
cccataaagtagaaagcact

SEQ ID NO: 26579 - RNA, 22 nt, Synthetic Construct
  source 1..22: mol_type = other RNA
acagtagtctgcacattggtta

SEQ ID NO: 26580 - RNA, 21 nt, Synthetic Construct
  source 1..21: mol_type = other RNA
tcctgtactgagctgccctga

SEQ ID NO: 26581 - RNA, 39 nt, Synthetic Construct; identical to SEQ ID NO: 2980
  source 1..39: mol_type = other RNA

SEQ ID NO: 26582 - RNA, 39 nt, Synthetic Construct; identical to SEQ ID NO: 2980
  source 1..39: mol_type = other RNA

SEQ ID NO: 26583 - RNA, 21 nt, Synthetic Construct
  source 1..21: mol_type = other RNA
taactccttaagcgaattcgc

SEQ ID NO: 26584 - RNA, 21 nt, Synthetic Construct
  source 1..21: mol_type = other RNA
taactccttaagcgaattcgc

SEQ ID NO: 26585 - RNA, 21 nt, Synthetic Construct
  source 1..21: mol_type = other RNA
cctctgggcccttcctccagt

SEQ ID NO: 26586 - RNA, 21 nt, Synthetic Construct
  source 1..21: mol_type = other RNA
cctctgggcccttcctccagt

SEQ ID NO: 26587 - RNA, 21 nt, Synthetic Construct
  source 1..21: mol_type = other RNA
tgaggtagtagcttgtgctgt

SEQ ID NO: 26588 - RNA, 16 nt, Synthetic Construct
  source 1..16: mol_type = other RNA
gggtctgtagctcagt

SEQ ID NO: 26589 - RNA, 21 nt, Synthetic Construct
  source 1..21: mol_type = other RNA
taatactgcctggtaatgatg

SEQ ID NO: 26590 - RNA, 21 nt, Synthetic Construct
  source 1..21: mol_type = other RNA
taatactgcctggtaatgatg

SEQ ID NO: 26591 - RNA, 23 nt, Synthetic Construct
  source 1..23: mol_type = other RNA
tcctgtactgggctgccccgaga

SEQ ID NO: 26592 - RNA, 15 nt, Synthetic Construct
  source 1..15: mol_type = other RNA
tggccgtcgtcagct

SEQ ID NO: 26593 - RNA, 15 nt, Synthetic Construct
  source 1..15: mol_type = other RNA
tggccgtcgtcagct

SEQ ID NO: 26594 - RNA, 21 nt, Synthetic Construct
  source 1..21: mol_type = other RNA
tgaggtagtagattgtgtggt

SEQ ID NO: 26595 - RNA, 21 nt, Synthetic Construct
  source 1..21: mol_type = other RNA
tgaggtagtagattgtgtggt

SEQ ID NO: 26596 - RNA, 24 nt, Synthetic Construct
  source 1..24: mol_type = other RNA
tgtaaacacccccgactggaagct

SEQ ID NO: 26597 - RNA, 24 nt, Synthetic Construct
  source 1..24: mol_type = other RNA
tgtaaacacccccgactggaagct

SEQ ID NO: 26598 - RNA, 24 nt, Synthetic Construct
  source 1..24: mol_type = other RNA
ctcactgatcgagtcgtcctgcgc

SEQ ID NO: 26599 - RNA, 24 nt, Synthetic Construct
  source 1..24: mol_type = other RNA
ctcactgatcgagtcgtcctgcgc

SEQ ID NO: 26600 - RNA, 16 nt, Synthetic Construct
  source 1..16: mol_type = other RNA
cacaccgcccgtcgct

SEQ ID NO: 26601 - RNA, 16 nt, Synthetic Construct
  source 1..16: mol_type = other RNA
cacaccgcccgtcgct

SEQ ID NO: 26602 - RNA, 20 nt, Synthetic Construct
  source 1..20: mol_type = other RNA
tgagatgaagcactgtagct

SEQ ID NO: 26603 - RNA, 23 nt, Synthetic Construct
  source 1..23: mol_type = other RNA
tctttggttatctagctgtatga

SEQ ID NO: 26604 - RNA, 23 nt, Synthetic Construct
  source 1..23: mol_type = other RNA
tctttggttatctagctgtatga

SEQ ID NO: 26605 - RNA, 19 nt, Synthetic Construct
  source 1..19: mol_type = other RNA
gggtgcaagcgttaatcgg

SEQ ID NO: 26606 - RNA, 23 nt, Synthetic Construct
  source 1..23: mol_type = other RNA
tggtaatacgacgtacttagtga

SEQ ID NO: 26607 - RNA, 23 nt, Synthetic Construct
  source 1..23: mol_type = other RNA
tggtaatacgacgtacttagtga

SEQ ID NO: 26608 - RNA, 20 nt, Synthetic Construct
  source 1..20: mol_type = other RNA
gaatcgctagtaatcgcgga

SEQ ID NO: 26609 - RNA, 23 nt, Synthetic Construct
  source 1..23: mol_type = other RNA
ttccccttggggttgtaggacca

SEQ ID NO: 26610 - RNA, 23 nt, Synthetic Construct
  source 1..23: mol_type = other RNA
ttccccttggggttgtaggacca

SEQ ID NO: 26611 - RNA, 21 nt, Synthetic Construct
  source 1..21: mol_type = other RNA
gtagcgaaattccttgtcggg

SEQ ID NO: 26612 - RNA, 25 nt, Synthetic Construct
  source 1..25: mol_type = other RNA
tcgaggatatgagatcgagacgaca

SEQ ID NO: 26613 - RNA, 25 nt, Synthetic Construct
  source 1..25: mol_type = other RNA
tcgaggatatgagatcgagacgaca

SEQ ID NO: 26614 - RNA, 18 nt, Synthetic Construct
  source 1..18: mol_type = other RNA
cccaaaggtcgtcggttc

SEQ ID NO: 26615 - RNA, 18 nt, Synthetic Construct
  source 1..18: mol_type = other RNA
cccaaaggtcgtcggttc

SEQ ID NO: 26616 - RNA, 22 nt, Synthetic Construct
  source 1..22: mol_type = other RNA
ctttgttcgattccgttgagta

SEQ ID NO: 26617 - RNA, 22 nt, Synthetic Construct
  source 1..22: mol_type = other RNA
tggaatgtaaagaagtatgtgt

SEQ ID NO: 26618 - RNA, 22 nt, Synthetic Construct
  source 1..22: mol_type = other RNA
tggaatgtaaagaagtatgtgt

SEQ ID NO: 26619 - RNA, 31 nt, Synthetic Construct; identical to SEQ ID NO: 5506
  source 1..31: mol_type = other RNA

SEQ ID NO: 26620 - RNA, 23 nt, Synthetic Construct
  source 1..23: mol_type = other RNA
tggtaatacgacgtacatagtgt

SEQ ID NO: 26621 - RNA, 23 nt, Synthetic Construct
  source 1..23: mol_type = other RNA
tggtaatacgacgtacatagtgt

SEQ ID NO: 26622 - RNA, 23 nt, Synthetic Construct
  source 1..23: mol_type = other RNA
tggtaatacgacgtacttagtgt

SEQ ID NO: 26623 - RNA, 23 nt, Synthetic Construct
  source 1..23: mol_type = other RNA
tggtaatacgacgtacttagtgt

SEQ ID NO: 26624 - RNA, 32 nt, Synthetic Construct; identical to SEQ ID NO: 4710
  source 1..32: mol_type = other RNA

SEQ ID NO: 26625 - RNA, 19 nt, Synthetic Construct
  source 1..19: mol_type = other RNA
tggccgtcgtcagctcgtg

SEQ ID NO: 26626 - RNA, 16 nt, Synthetic Construct
  source 1..16: mol_type = other RNA
gtctacggctatacca

SEQ ID NO: 26627 - RNA, 16 nt, Synthetic Construct
  source 1..16: mol_type = other RNA
gtctacggctatacca

SEQ ID NO: 26628 - RNA, 26 nt, Synthetic Construct
  source 1..26: mol_type = other RNA
atttccccttggggttgtaggaccac

SEQ ID NO: 26629 - RNA, 26 nt, Synthetic Construct
  source 1..26: mol_type = other RNA
atttccccttggggttgtaggaccac

SEQ ID NO: 26630 - RNA, 15 nt, Synthetic Construct
  source 1..15: mol_type = other RNA
accggaggaaggtgg

SEQ ID NO: 26631 - RNA, 23 nt, Synthetic Construct
  source 1..23: mol_type = other RNA
tacagtagtctgcacattggtta

SEQ ID NO: 26632 - RNA, 23 nt, Synthetic Construct
  source 1..23: mol_type = other RNA
tacagtagtctgcacattggtta

SEQ ID NO: 26633 - RNA, 20 nt, Synthetic Construct
  source 1..20: mol_type = other RNA
tcacagtgaaccggtctctt

SEQ ID NO: 26634 - RNA, 22 nt, Synthetic Construct
  source 1..22: mol_type = other RNA
tcctgtactgagctgccctgag

SEQ ID NO: 26635 - RNA, 23 nt, Synthetic Construct
  source 1..23: mol_type = other RNA
tggtaatacgacgtacctagtgt

SEQ ID NO: 26636 - RNA, 21 nt, Synthetic Construct
  source 1..21: mol_type = other RNA
cactgatcgagtcgtcctgcg

SEQ ID NO: 26637 - RNA, 21 nt, Synthetic Construct
  source 1..21: mol_type = other RNA
tgaggtagtaggttgtgaggt

SEQ ID NO: 26638 - RNA, 21 nt, Synthetic Construct
  source 1..21: mol_type = other RNA
tgaggtagtaggttgtgaggt

SEQ ID NO: 26639 - RNA, 25 nt, Synthetic Construct
  source 1..25: mol_type = other RNA
ttgagggtatgagatcgagacgaca

SEQ ID NO: 26640 - RNA, 25 nt, Synthetic Construct
  source 1..25: mol_type = other RNA
ttgagggtatgagatcgagacgaca

SEQ ID NO: 26641 - RNA, 22 nt, Synthetic Construct
  source 1..22: mol_type = other RNA
tcctgcactgagctgccccgag

SEQ ID NO: 26642 - RNA, 21 nt, Synthetic Construct
  source 1..21: mol_type = other RNA
gtagcgaaattccttgtcggg

SEQ ID NO: 26643 - RNA, 17 nt, Synthetic Construct
  source 1..17: mol_type = other RNA
ccaaggggtcgtgggtt

SEQ ID NO: 26644 - RNA, 23 nt, Synthetic Construct
  source 1..23: mol_type = other RNA
gggtaatacgacgtacttagtgt

SEQ ID NO: 26645 - RNA, 42 nt, Synthetic Construct; identical to SEQ ID NO: 19836
  source 1..42: mol_type = other RNA

SEQ ID NO: 26646 - RNA, 36 nt, Synthetic Construct; identical to SEQ ID NO: 2478
  source 1..36: mol_type = other RNA

SEQ ID NO: 26647 - RNA, 25 nt, Synthetic Construct
  source 1..25: mol_type = other RNA
ttgagggtatgagatcgagacgaca

SEQ ID NO: 26648 - RNA, 25 nt, Synthetic Construct
  source 1..25: mol_type = other RNA
ttgagggtatgagatcgagacgaca

SEQ ID NO: 26649 - RNA, 22 nt, Synthetic Construct
  source 1..22: mol_type = other RNA
tcttgtactgagctgccccgag

SEQ ID NO: 26650 - RNA, 22 nt, Synthetic Construct
  source 1..22: mol_type = other RNA
tcttgtactgagctgccccgag

SEQ ID NO: 26651 - RNA, 17 nt, Synthetic Construct
  source 1..17: mol_type = other RNA
gtgttcggaagattttc

SEQ ID NO: 26652 - RNA, 17 nt, Synthetic Construct
  source 1..17: mol_type = other RNA
gtgttcggaagattttc

SEQ ID NO: 26653 - RNA, 25 nt, Synthetic Construct
  source 1..25: mol_type = other RNA
cctcgcgcgattggagcggccgata

SEQ ID NO: 26654 - RNA, 16 nt, Synthetic Construct
  source 1..16: mol_type = other RNA
atgcaagtcgaacggt

SEQ ID NO: 26655 - RNA, 16 nt, Synthetic Construct
  source 1..16: mol_type = other RNA
atgcaagtcgaacggt

SEQ ID NO: 26656 - RNA, 16 nt, Synthetic Construct
  source 1..16: mol_type = other RNA
gtctacgaccatacca

SEQ ID NO: 26657 - RNA, 16 nt, Synthetic Construct
  source 1..16: mol_type = other RNA
gtctacgaccatacca

SEQ ID NO: 26658 - RNA, 23 nt, Synthetic Construct
  source 1..23: mol_type = other RNA
tcccgtactgagctgccccgagt

SEQ ID NO: 26659 - RNA, 23 nt, Synthetic Construct
  source 1..23: mol_type = other RNA
tcccgtactgagctgccccgagt

SEQ ID NO: 26660 - RNA, 36 nt, Synthetic Construct; identical to SEQ ID NO: 10982
  source 1..36: mol_type = other RNA

SEQ ID NO: 26661 - RNA, 21 nt, Synthetic Construct
  source 1..21: mol_type = other RNA
tgaggtagtaggttgcgtggt

SEQ ID NO: 26662 - RNA, 21 nt, Synthetic Construct
  source 1..21: mol_type = other RNA
tgaggtagtaggttgcgtggt

SEQ ID NO: 26663 - RNA, 22 nt, Synthetic Construct
  source 1..22: mol_type = other RNA
atataatacaacctgctaagtg

SEQ ID NO: 26664 - RNA, 23 nt, Synthetic Construct
  source 1..23: mol_type = other RNA
gggtaatacgacgtacttagtgt

SEQ ID NO: 26665 - RNA, 23 nt, Synthetic Construct
  source 1..23: mol_type = other RNA
gggtaatacgacgtacttagtgt

SEQ ID NO: 26666 - RNA, 37 nt, Synthetic Construct; identical to SEQ ID NO: 4277
  source 1..37: mol_type = other RNA

SEQ ID NO: 26667 - RNA, 17 nt, Synthetic Construct
  source 1..17: mol_type = other RNA
acagtcaggatgttggc

SEQ ID NO: 26668 - RNA, 16 nt, Synthetic Construct
  source 1..16: mol_type = other RNA
agcaagtcgaacggta

SEQ ID NO: 26669 - RNA, 16 nt, Synthetic Construct
  source 1..16: mol_type = other RNA
acggcccagactccta

SEQ ID NO: 26670 - RNA, 16 nt, Synthetic Construct
  source 1..16: mol_type = other RNA
acggcccagactccta

SEQ ID NO: 26671 - RNA, 15 nt, Synthetic Construct
  source 1..15: mol_type = other RNA
agttgaccgcctggg

SEQ ID NO: 26672 - RNA, 15 nt, Synthetic Construct
  source 1..15: mol_type = other RNA
agttgaccgcctggg

SEQ ID NO: 26673 - RNA, 22 nt, Synthetic Construct
  source 1..22: mol_type = other RNA
tgaggtagtaggttgtgtggtc

SEQ ID NO: 26674 - RNA, 22 nt, Synthetic Construct
  source 1..22: mol_type = other RNA
tgaggtagtaggttgtgtggtc

SEQ ID NO: 26675 - RNA, 23 nt, Synthetic Construct
  source 1..23: mol_type = other RNA
tggtaatacgacgtacttagtgt

SEQ ID NO: 26676 - RNA, 23 nt, Synthetic Construct
  source 1..23: mol_type = other RNA
tggtaatacgacgtacttagtgt

SEQ ID NO: 26677 - RNA, 25 nt, Synthetic Construct
  source 1..25: mol_type = other RNA
ttgaggatatgagatcgggacgaca

SEQ ID NO: 26678 - RNA, 25 nt, Synthetic Construct
  source 1..25: mol_type = other RNA
ttgaggatatgagatcgggacgaca

SEQ ID NO: 26679 - RNA, 23 nt, Synthetic Construct
  source 1..23: mol_type = other RNA
tcctgtaccgagctgccccgagt

SEQ ID NO: 26680 - RNA, 23 nt, Synthetic Construct
  source 1..23: mol_type = other RNA
tcctgtaccgagctgccccgagt

SEQ ID NO: 26681 - RNA, 28 nt, Synthetic Construct
  source 1..28: mol_type = other RNA
tgttggttcaagcgtgtagtcgtgctct

SEQ ID NO: 26682 - RNA, 23 nt, Synthetic Construct
  source 1..23: mol_type = other RNA
tgtaaacatcctacactctcagc

SEQ ID NO: 26683 - RNA, 22 nt, Synthetic Construct
  source 1..22: mol_type = other RNA
tacagtagtctgcacattggtt

SEQ ID NO: 26684 - RNA, 22 nt, Synthetic Construct
  source 1..22: mol_type = other RNA
tacagtagtctgcacattggtt

SEQ ID NO: 26685 - RNA, 22 nt, Synthetic Construct
  source 1..22: mol_type = other RNA
tcctgtactgagctgccctgag

SEQ ID NO: 26686 - RNA, 22 nt, Synthetic Construct
  source 1..22: mol_type = other RNA
tcctgtactgagctgccctgag

SEQ ID NO: 26687 - RNA, 23 nt, Synthetic Construct
  source 1..23: mol_type = other RNA
taaggtgcatctagtgcagatag

SEQ ID NO: 26688 - RNA, 23 nt, Synthetic Construct
  source 1..23: mol_type = other RNA
taaggtgcatctagtgcagatag

SEQ ID NO: 26689 - RNA, 15 nt, Synthetic Construct
  source 1..15: mol_type = other RNA
gtcgtcctgcgcgga

SEQ ID NO: 26690 - RNA, 15 nt, Synthetic Construct
  source 1..15: mol_type = other RNA
aaattccttgtcggg

SEQ ID NO: 26691 - RNA, 15 nt, Synthetic Construct
  source 1..15: mol_type = other RNA
aaattccttgtcggg

SEQ ID NO: 26692 - RNA, 34 nt, Synthetic Construct; identical to SEQ ID NO: 13733
  source 1..34: mol_type = other RNA

SEQ ID NO: 26693 - RNA, 34 nt, Synthetic Construct; identical to SEQ ID NO: 13733
  source 1..34: mol_type = other RNA

SEQ ID NO: 26694 - RNA, 21 nt, Synthetic Construct
  source 1..21: mol_type = other RNA
tcctatactgagctgccccga

SEQ ID NO: 26695 - RNA, 21 nt, Synthetic Construct
  source 1..21: mol_type = other RNA
tcctatactgagctgccccga

SEQ ID NO: 26696 - RNA, 22 nt, Synthetic Construct
  source 1..22: mol_type = other RNA
tcctgtactgagctgccctgag

SEQ ID NO: 26697 - RNA, 22 nt, Synthetic Construct
  source 1..22: mol_type = other RNA
tcctgtactgagctgccctgag

SEQ ID NO: 26698 - RNA, 35 nt, Synthetic Construct; identical to SEQ ID NO: 10694
  source 1..35: mol_type = other RNA

SEQ ID NO: 26699 - RNA, 32 nt, Synthetic Construct; identical to SEQ ID NO: 753
  source 1..32: mol_type = other RNA

SEQ ID NO: 26700 - RNA, 32 nt, Synthetic Construct; identical to SEQ ID NO: 753
  source 1..32: mol_type = other RNA

SEQ ID NO: 26701 - RNA, 21 nt, Synthetic Construct
  source 1..21: mol_type = other RNA
cccataaagtagaaagcacta

SEQ ID NO: 26702 - RNA, 21 nt, Synthetic Construct
  source 1..21: mol_type = other RNA
tggggtagtaggttgtgtggt

SEQ ID NO: 26703 - RNA, 21 nt, Synthetic Construct
  source 1..21: mol_type = other RNA
tggggtagtaggttgtgtggt

SEQ ID NO: 26704 - RNA, 18 nt, Synthetic Construct
  source 1..18: mol_type = other RNA
ccaaggggtcgtgggttc

SEQ ID NO: 26705 - RNA, 18 nt, Synthetic Construct
  source 1..18: mol_type = other RNA
ccaaggggtcgtgggttc

SEQ ID NO: 26706 - RNA, 15 nt, Synthetic Construct
  source 1..15: mol_type = other RNA
gtctcgccgacggca

SEQ ID NO: 26707 - RNA, 15 nt, Synthetic Construct
  source 1..15: mol_type = other RNA
gtctcgccgacggca

SEQ ID NO: 26708 - RNA, 22 nt, Synthetic Construct
  source 1..22: mol_type = other RNA
gtaaacggcgggagtaactatg

SEQ ID NO: 26709 - RNA, 27 nt, Synthetic Construct
  source 1..27: mol_type = other RNA
cgtgtgaaagtaggtcatcgtcaggct

SEQ ID NO: 26710 - RNA, 17 nt, Synthetic Construct
  source 1..17: mol_type = other RNA
catgcaagtcgaacggt

SEQ ID NO: 26711 - RNA, 23 nt, Synthetic Construct
  source 1..23: mol_type = other RNA
tccagtactgagctgccccgagt

SEQ ID NO: 26712 - RNA, 23 nt, Synthetic Construct
  source 1..23: mol_type = other RNA
tccagtactgagctgccccgagt

SEQ ID NO: 26713 - RNA, 16 nt, Synthetic Construct
  source 1..16: mol_type = other RNA
ggtgggggtcgttggt

SEQ ID NO: 26714 - RNA, 16 nt, Synthetic Construct
  source 1..16: mol_type = other RNA
gtctacggccacacca

SEQ ID NO: 26715 - RNA, 21 nt, Synthetic Construct
  source 1..21: mol_type = other RNA
tcctgtactgagctgccccaa

SEQ ID NO: 26716 - RNA, 23 nt, Synthetic Construct
  source 1..23: mol_type = other RNA
taaagtgcttatagtgcaggtag

SEQ ID NO: 26717 - RNA, 17 nt, Synthetic Construct
  source 1..17: mol_type = other RNA
tggccgtcgtcagctcg

SEQ ID NO: 26718 - RNA, 16 nt, Synthetic Construct
  source 1..16: mol_type = other RNA
aggtcatcattatctg

SEQ ID NO: 26719 - RNA, 22 nt, Synthetic Construct
  source 1..22: mol_type = other RNA
tctttgttcgattccgttgagt

SEQ ID NO: 26720 - RNA, 22 nt, Synthetic Construct
  source 1..22: mol_type = other RNA
tctttgttcgattccgttgagt

SEQ ID NO: 26721 - RNA, 22 nt, Synthetic Construct
  source 1..22: mol_type = other RNA
tcctgtactgagctgctccgag

SEQ ID NO: 26722 - RNA, 22 nt, Synthetic Construct
  source 1..22: mol_type = other RNA
tcctgtactgagctgctccgag

SEQ ID NO: 26723 - RNA, 23 nt, Synthetic Construct
  source 1..23: mol_type = other RNA
tgaggggtagagagcgagacttt

SEQ ID NO: 26724 - RNA, 29 nt, Synthetic Construct
  source 1..29: mol_type = other RNA
gcatgggtggttcagtggtagaattctcg

SEQ ID NO: 26725 - RNA, 29 nt, Synthetic Construct
  source 1..29: mol_type = other RNA
gcatgggtggttcagtggtagaattctcg

SEQ ID NO: 26726 - RNA, 21 nt, Synthetic Construct
  source 1..21: mol_type = other RNA
tcctgtacagagctgccccga

SEQ ID NO: 26727 - RNA, 21 nt, Synthetic Construct
  source 1..21: mol_type = other RNA
tcctgtacagagctgccccga

SEQ ID NO: 26728 - RNA, 20 nt, Synthetic Construct
  source 1..20: mol_type = other RNA
tagcgaaattccttgtcggg

SEQ ID NO: 26729 - RNA, 16 nt, Synthetic Construct
  source 1..16: mol_type = other RNA
gtctacggccacacca

SEQ ID NO: 26730 - RNA, 23 nt, Synthetic Construct
  source 1..23: mol_type = other RNA
taaagtgcttatagtgcaggtag

SEQ ID NO: 26731 - RNA, 22 nt, Synthetic Construct
  source 1..22: mol_type = other RNA
tgaggtagtaagttgtgtggtt

SEQ ID NO: 26732 - RNA, 22 nt, Synthetic Construct
  source 1..22: mol_type = other RNA
tgaggtagtaagttgtgtggtt

SEQ ID NO: 26733 - RNA, 31 nt, Synthetic Construct; identical to SEQ ID NO: 2293
  source 1..31: mol_type = other RNA

SEQ ID NO: 26734 - RNA, 37 nt, Synthetic Construct; identical to SEQ ID NO: 4277
  source 1..37: mol_type = other RNA

SEQ ID NO: 26735 - RNA, 18 nt, Synthetic Construct
  source 1..18: mol_type = other RNA
gtccccttcgtctagagg

SEQ ID NO: 26736 - RNA, 18 nt, Synthetic Construct
  source 1..18: mol_type = other RNA
gtccccttcgtctagagg

SEQ ID NO: 26737 - RNA, 16 nt, Synthetic Construct
  source 1..16: mol_type = other RNA
ccaaggggtcgtgggt

SEQ ID NO: 26738 - RNA, 23 nt, Synthetic Construct
  source 1..23: mol_type = other RNA
tccagtactgagctgccccgagt

SEQ ID NO: 26739 - RNA, 23 nt, Synthetic Construct
  source 1..23: mol_type = other RNA
tccagtactgagctgccccgagt

SEQ ID NO: 26740 - RNA, 22 nt, Synthetic Construct
  source 1..22: mol_type = other RNA
tggctcagttcagcaggaacag

SEQ ID NO: 26741 - RNA, 21 nt, Synthetic Construct
  source 1..21: mol_type = other RNA
aatggcgccactagggttgtg

SEQ ID NO: 26742 - RNA, 21 nt, Synthetic Construct
  source 1..21: mol_type = other RNA
aatggcgccactagggttgtg

SEQ ID NO: 26743 - RNA, 25 nt, Synthetic Construct
  source 1..25: mol_type = other RNA
ttggggatatgagatcgagacgaca

SEQ ID NO: 26744 - RNA, 25 nt, Synthetic Construct
  source 1..25: mol_type = other RNA
ttggggatatgagatcgagacgaca

SEQ ID NO: 26745 - RNA, 15 nt, Synthetic Construct
  source 1..15: mol_type = other RNA
acggtcctaaggtag

SEQ ID NO: 26746 - RNA, 15 nt, Synthetic Construct
  source 1..15: mol_type = other RNA
acggtcctaaggtag

SEQ ID NO: 26747 - RNA, 22 nt, Synthetic Construct
  source 1..22: mol_type = other RNA
tggaatgtaaagaagtatgcat

SEQ ID NO: 26748 - RNA, 22 nt, Synthetic Construct
  source 1..22: mol_type = other RNA
tggaatgtaaagaagtatgcat

SEQ ID NO: 26749 - RNA, 21 nt, Synthetic Construct
  source 1..21: mol_type = other RNA
gctattgacgaccgtaccgca

SEQ ID NO: 26750 - RNA, 21 nt, Synthetic Construct
  source 1..21: mol_type = other RNA
gctattgacgaccgtaccgca

SEQ ID NO: 26751 - RNA, 22 nt, Synthetic Construct
  source 1..22: mol_type = other RNA
ncctgtactgagctgccccgag

SEQ ID NO: 26752 - RNA, 17 nt, Synthetic Construct
  source 1..17: mol_type = other RNA
atcgtgacgatagtgca

SEQ ID NO: 26753 - RNA, 17 nt, Synthetic Construct
  source 1..17: mol_type = other RNA
atcgtgacgatagtgca

SEQ ID NO: 26754 - RNA, 32 nt, Synthetic Construct; identical to SEQ ID NO: 3748
  source 1..32: mol_type = other RNA

SEQ ID NO: 26755 - RNA, 32 nt, Synthetic Construct; identical to SEQ ID NO: 3748
  source 1..32: mol_type = other RNA

SEQ ID NO: 26756 - RNA, 21 nt, Synthetic Construct
  source 1..21: mol_type = other RNA
tcctgcactgagctgccccga

SEQ ID NO: 26757 - RNA, 22 nt, Synthetic Construct
  source 1..22: mol_type = other RNA
tattgcgcttgtcccggcctgt

SEQ ID NO: 26758 - RNA, 22 nt, Synthetic Construct
  source 1..22: mol_type = other RNA
tattgcgcttgtcccggcctgt

SEQ ID NO: 26759 - RNA, 23 nt, Synthetic Construct
  source 1..23: mol_type = other RNA
tcctatactgagctgccccgaga

SEQ ID NO: 26760 - RNA, 23 nt, Synthetic Construct
  source 1..23: mol_type = other RNA
tcctatactgagctgccccgaga

SEQ ID NO: 26761 - RNA, 23 nt, Synthetic Construct
  source 1..23: mol_type = other RNA
ggcggttatgcaagacagaggtg

SEQ ID NO: 26762 - RNA, 22 nt, Synthetic Construct
  source 1..22: mol_type = other RNA
tcctgtactgagttgccccgag

SEQ ID NO: 26763 - RNA, 22 nt, Synthetic Construct
  source 1..22: mol_type = other RNA
tcctgtactgagttgccccgag

SEQ ID NO: 26764 - RNA, 22 nt, Synthetic Construct
  source 1..22: mol_type = other RNA
tgaggtagtaggttgtgtggtc

SEQ ID NO: 26765 - RNA, 22 nt, Synthetic Construct
  source 1..22: mol_type = other RNA
tcctgcactgagctgccccgag

SEQ ID NO: 26766 - RNA, 20 nt, Synthetic Construct
  source 1..20: mol_type = other RNA
taaggtagtaggttgtgtgg

SEQ ID NO: 26767 - RNA, 20 nt, Synthetic Construct
  source 1..20: mol_type = other RNA
taaggtagtaggttgtgtgg

SEQ ID NO: 26768 - RNA, 22 nt, Synthetic Construct
  source 1..22: mol_type = other RNA
aggttccggataagtaagagcc

SEQ ID NO: 26769 - RNA, 22 nt, Synthetic Construct
  source 1..22: mol_type = other RNA
aggttccggataagtaagagcc

SEQ ID NO: 26770 - RNA, 17 nt, Synthetic Construct
  source 1..17: mol_type = other RNA
ccaaggggtcgtgggtt

SEQ ID NO: 26771 - RNA, 17 nt, Synthetic Construct
  source 1..17: mol_type = other RNA
ccaaggggtcgtgggtt

SEQ ID NO: 26772 - RNA, 21 nt, Synthetic Construct
  source 1..21: mol_type = other RNA
aagaaagattgcaagaactgc

SEQ ID NO: 26773 - RNA, 18 nt, Synthetic Construct
  source 1..18: mol_type = other RNA
tcccctggacctgtactg

SEQ ID NO: 26774 - RNA, 28 nt, Synthetic Construct
  source 1..28: mol_type = other RNA
ggatttccccttggggttgtaggaccac

SEQ ID NO: 26775 - RNA, 28 nt, Synthetic Construct
  source 1..28: mol_type = other RNA
ggatttccccttggggttgtaggaccac

SEQ ID NO: 26776 - RNA, 20 nt, Synthetic Construct
  source 1..20: mol_type = other RNA
tcctgtctgaatatgggggg

SEQ ID NO: 26777 - RNA, 21 nt, Synthetic Construct
  source 1..21: mol_type = other RNA
tcctgtactgagctgccccgg

SEQ ID NO: 26778 - RNA, 21 nt, Synthetic Construct
  source 1..21: mol_type = other RNA
tcctgtactgagctgccccgg

SEQ ID NO: 26779 - RNA, 21 nt, Synthetic Construct
  source 1..21: mol_type = other RNA
ttcacagtggctaagttctga

SEQ ID NO: 26780 - RNA, 22 nt, Synthetic Construct
  source 1..22: mol_type = other RNA
tcagcgccgatgatagtgcgga

SEQ ID NO: 26781 - RNA, 16 nt, Synthetic Construct
  source 1..16: mol_type = other RNA
tgcacgaaagcgtggg

SEQ ID NO: 26782 - RNA, 16 nt, Synthetic Construct
  source 1..16: mol_type = other RNA
tgcacgaaagcgtggg

SEQ ID NO: 26783 - RNA, 18 nt, Synthetic Construct
  source 1..18: mol_type = other RNA
atggccgggacagagggc

SEQ ID NO: 26784 - RNA, 20 nt, Synthetic Construct
  source 1..20: mol_type = other RNA
tgaggtagtaggttgtgtag

SEQ ID NO: 26785 - RNA, 35 nt, Synthetic Construct; identical to SEQ ID NO: 2514
  source 1..35: mol_type = other RNA

SEQ ID NO: 26786 - RNA, 22 nt, Synthetic Construct
  source 1..22: mol_type = other RNA
tgaggtagtagtttgtggtgtt

SEQ ID NO: 26787 - RNA, 22 nt, Synthetic Construct
  source 1..22: mol_type = other RNA
tgaggtagtagtttgtggtgtt

SEQ ID NO: 26788 - RNA, 24 nt, Synthetic Construct
  source 1..24: mol_type = other RNA
cgactcttagcggtggatcactcg

SEQ ID NO: 26789 - RNA, 24 nt, Synthetic Construct
  source 1..24: mol_type = other RNA
cgactcttagcggtggatcactcg

SEQ ID NO: 26790 - RNA, 22 nt, Synthetic Construct
  source 1..22: mol_type = other RNA
tgaggtagtaggtcgtgtggtt

SEQ ID NO: 26791 - RNA, 22 nt, Synthetic Construct
  source 1..22: mol_type = other RNA
tcctgtactgagctgccctgag

SEQ ID NO: 26792 - RNA, 19 nt, Synthetic Construct
  source 1..19: mol_type = other RNA
acatgcaagtcgaacggta

SEQ ID NO: 26793 - RNA, 19 nt, Synthetic Construct
  source 1..19: mol_type = other RNA
acatgcaagtcgaacggta

SEQ ID NO: 26794 - RNA, 15 nt, Synthetic Construct
  source 1..15: mol_type = other RNA
gtcaggatgttggct

SEQ ID NO: 26795 - RNA, 15 nt, Synthetic Construct
  source 1..15: mol_type = other RNA
gtcaggatgttggct

SEQ ID NO: 26796 - RNA, 27 nt, Synthetic Construct
  source 1..27: mol_type = other RNA
gacttaccaaacctatgcaaactccga

SEQ ID NO: 26797 - RNA, 27 nt, Synthetic Construct
  source 1..27: mol_type = other RNA
gacttaccaaacctatgcaaactccga

SEQ ID NO: 26798 - RNA, 22 nt, Synthetic Construct
  source 1..22: mol_type = other RNA
tacaagtaattcaggataggtt

SEQ ID NO: 26799 - RNA, 23 nt, Synthetic Construct
  source 1..23: mol_type = other RNA
tgaggggcagagagcgaggcttt

SEQ ID NO: 26800 - RNA, 23 nt, Synthetic Construct
  source 1..23: mol_type = other RNA
tgaggtagcaggttgtgtggttt

SEQ ID NO: 26801 - RNA, 23 nt, Synthetic Construct
  source 1..23: mol_type = other RNA
tgaggtagcaggttgtgtggttt

SEQ ID NO: 26802 - RNA, 23 nt, Synthetic Construct
  source 1..23: mol_type = other RNA
atcacattgccagggatttccaa

SEQ ID NO: 26803 - RNA, 21 nt, Synthetic Construct
  source 1..21: mol_type = other RNA
tcctgaactgagctgccccga

SEQ ID NO: 26804 - RNA, 21 nt, Synthetic Construct
  source 1..21: mol_type = other RNA
tcctgaactgagctgccccga

SEQ ID NO: 26805 - RNA, 16 nt, Synthetic Construct
  source 1..16: mol_type = other RNA
ggtgggggtcgttggt

SEQ ID NO: 26806 - RNA, 20 nt, Synthetic Construct
  source 1..20: mol_type = other RNA
tcagtagctcgaggaaaaga

SEQ ID NO: 26807 - RNA, 22 nt, Synthetic Construct
  source 1..22: mol_type = other RNA
tcgaaccgtgagtaataatgcg

SEQ ID NO: 26808 - RNA, 22 nt, Synthetic Construct
  source 1..22: mol_type = other RNA
taaggtagtaggttgtgtggtt

SEQ ID NO: 26809 - RNA, 37 nt, Synthetic Construct; identical to SEQ ID NO: 4277
  source 1..37: mol_type = other RNA

SEQ ID NO: 26810 - RNA, 25 nt, Synthetic Construct
  source 1..25: mol_type = other RNA
agctcactgatcgagtcgtcctgcg

SEQ ID NO: 26811 - RNA, 25 nt, Synthetic Construct
  source 1..25: mol_type = other RNA
agctcactgatcgagtcgtcctgcg

SEQ ID NO: 26812 - RNA, 19 nt, Synthetic Construct
  source 1..19: mol_type = other RNA
gcgaaattccttgtcgggt

SEQ ID NO: 26813 - RNA, 19 nt, Synthetic Construct
  source 1..19: mol_type = other RNA
gcgaaattccttgtcgggt

SEQ ID NO: 26814 - RNA, 36 nt, Synthetic Construct; identical to SEQ ID NO: 2456
  source 1..36: mol_type = other RNA

SEQ ID NO: 26815 - RNA, 21 nt, Synthetic Construct
  source 1..21: mol_type = other RNA
taactccttaagcgaatctcc

SEQ ID NO: 26816 - RNA, 21 nt, Synthetic Construct
  source 1..21: mol_type = other RNA
taactccttaagcgaatctcc

SEQ ID NO: 26817 - RNA, 23 nt, Synthetic Construct
  source 1..23: mol_type = other RNA
tgaggtggtaggttgtgtggttt

SEQ ID NO: 26818 - RNA, 23 nt, Synthetic Construct
  source 1..23: mol_type = other RNA
tgaggtggtaggttgtgtggttt

SEQ ID NO: 26819 - RNA, 23 nt, Synthetic Construct
  source 1..23: mol_type = other RNA
agctacattgtctgctgggttcc

SEQ ID NO: 26820 - RNA, 23 nt, Synthetic Construct
  source 1..23: mol_type = other RNA
tcctgtacagagctgccccgaga

SEQ ID NO: 26821 - RNA, 23 nt, Synthetic Construct
  source 1..23: mol_type = other RNA
tcctgtacagagctgccccgaga

SEQ ID NO: 26822 - RNA, 20 nt, Synthetic Construct
  source 1..20: mol_type = other RNA
tgaagtagtaggttgtgtgg

SEQ ID NO: 26823 - RNA, 20 nt, Synthetic Construct
  source 1..20: mol_type = other RNA
tgaagtagtaggttgtgtgg

SEQ ID NO: 26824 - RNA, 22 nt, Synthetic Construct
  source 1..22: mol_type = other RNA
tggagtgtggcaatggtgtttg

SEQ ID NO: 26825 - RNA, 22 nt, Synthetic Construct
  source 1..22: mol_type = other RNA
tggagtgtggcaatggtgtttg

SEQ ID NO: 26826 - RNA, 20 nt, Synthetic Construct
  source 1..20: mol_type = other RNA
gcaataacaggtctgtgatg

SEQ ID NO: 26827 - RNA, 20 nt, Synthetic Construct
  source 1..20: mol_type = other RNA
gcaataacaggtctgtgatg

SEQ ID NO: 26828 - RNA, 24 nt, Synthetic Construct
  source 1..24: mol_type = other RNA
tgtaaacacccccgactggaagct

SEQ ID NO: 26829 - RNA, 24 nt, Synthetic Construct
  source 1..24: mol_type = other RNA
tgtaaacacccccgactggaagct

SEQ ID NO: 26830 - RNA, 25 nt, Synthetic Construct
  source 1..25: mol_type = other RNA
ttgaggatatgagatagagacgaca

SEQ ID NO: 26831 - RNA, 25 nt, Synthetic Construct
  source 1..25: mol_type = other RNA
ttgaggatatgagatagagacgaca

SEQ ID NO: 26832 - RNA, 21 nt, Synthetic Construct
  source 1..21: mol_type = other RNA
tggagtgtgacgatggtgttt

SEQ ID NO: 26833 - RNA, 21 nt, Synthetic Construct
  source 1..21: mol_type = other RNA
tggagtgtgacgatggtgttt

SEQ ID NO: 26834 - RNA, 24 nt, Synthetic Construct
  source 1..24: mol_type = other RNA
gctcactgatcgagtcgtcctgcg

SEQ ID NO: 26835 - RNA, 24 nt, Synthetic Construct
  source 1..24: mol_type = other RNA
gctcactgatcgagtcgtcctgcg

SEQ ID NO: 26836 - RNA, 22 nt, Synthetic Construct
  source 1..22: mol_type = other RNA
tcctgtactgtgctgccccgag

SEQ ID NO: 26837 - RNA, 22 nt, Synthetic Construct
  source 1..22: mol_type = other RNA
tcctgtactgtgctgccccgag

SEQ ID NO: 26838 - RNA, 23 nt, Synthetic Construct
  source 1..23: mol_type = other RNA
tgataatacgacgtacttagtgt

SEQ ID NO: 26839 - RNA, 17 nt, Synthetic Construct
  source 1..17: mol_type = other RNA
cacggcccagactccta

SEQ ID NO: 26840 - RNA, 17 nt, Synthetic Construct
  source 1..17: mol_type = other RNA
cacggcccagactccta

SEQ ID NO: 26841 - RNA, 23 nt, Synthetic Construct
  source 1..23: mol_type = other RNA
tgaggaagtaggttgtgtggttt

SEQ ID NO: 26842 - RNA, 23 nt, Synthetic Construct
  source 1..23: mol_type = other RNA
tgaggaagtaggttgtgtggttt

SEQ ID NO: 26843 - RNA, 16 nt, Synthetic Construct
  source 1..16: mol_type = other RNA
gtctatggccatacca

SEQ ID NO: 26844 - RNA, 16 nt, Synthetic Construct
  source 1..16: mol_type = other RNA
gtctatggccatacca

SEQ ID NO: 26845 - RNA, 22 nt, Synthetic Construct
  source 1..22: mol_type = other RNA
tggaatgtgaagaagtatgtat

SEQ ID NO: 26846 - RNA, 22 nt, Synthetic Construct
  source 1..22: mol_type = other RNA
tggaatgtgaagaagtatgtat

SEQ ID NO: 26847 - RNA, 15 nt, Synthetic Construct
  source 1..15: mol_type = other RNA
ggccgtcgtcagctc

SEQ ID NO: 26848 - RNA, 15 nt, Synthetic Construct
  source 1..15: mol_type = other RNA
ggccgtcgtcagctc

SEQ ID NO: 26849 - RNA, 32 nt, Synthetic Construct; identical to SEQ ID NO: 753
  source 1..32: mol_type = other RNA

SEQ ID NO: 26850 - RNA, 32 nt, Synthetic Construct; identical to SEQ ID NO: 753
  source 1..32: mol_type = other RNA

SEQ ID NO: 26851 - RNA, 22 nt, Synthetic Construct
  source 1..22: mol_type = other RNA
tgaggtagtaggttatgtggtt

SEQ ID NO: 26852 - RNA, 22 nt, Synthetic Construct
  source 1..22: mol_type = other RNA
gcgttgcaaccagtgccggggg

SEQ ID NO: 26853 - RNA, 22 nt, Synthetic Construct
  source 1..22: mol_type = other RNA
gcgttgcaaccagtgccggggg

SEQ ID NO: 26854 - RNA, 25 nt, Synthetic Construct
  source 1..25: mol_type = other RNA
ttgaggatgtgagatcgagacgaca

SEQ ID NO: 26855 - RNA, 25 nt, Synthetic Construct
  source 1..25: mol_type = other RNA
ttgaggatgtgagatcgagacgaca

SEQ ID NO: 26856 - RNA, 31 nt, Synthetic Construct; identical to SEQ ID NO: 2333
  source 1..31: mol_type = other RNA

SEQ ID NO: 26857 - RNA, 20 nt, Synthetic Construct
  source 1..20: mol_type = other RNA
gcatggccgttcttagttgg

SEQ ID NO: 26858 - RNA, 23 nt, Synthetic Construct
  source 1..23: mol_type = other RNA
tcactgatcgagtcgtcctgcgc

SEQ ID NO: 26859 - RNA, 23 nt, Synthetic Construct
  source 1..23: mol_type = other RNA
tcactgatcgagtcgtcctgcgc

SEQ ID NO: 26860 - RNA, 31 nt, Synthetic Construct; identical to SEQ ID NO: 5943
  source 1..31: mol_type = other RNA

SEQ ID NO: 26861 - RNA, 31 nt, Synthetic Construct; identical to SEQ ID NO: 5943
  source 1..31: mol_type = other RNA

SEQ ID NO: 26862 - RNA, 33 nt, Synthetic Construct; identical to SEQ ID NO: 2209
  source 1..33: mol_type = other RNA

SEQ ID NO: 26863 - RNA, 23 nt, Synthetic Construct
  source 1..23: mol_type = other RNA
tgaggtagtaggttgtatggtta

SEQ ID NO: 26864 - RNA, 23 nt, Synthetic Construct
  source 1..23: mol_type = other RNA
tgaggtagtaggttgtatggtta

SEQ ID NO: 26865 - RNA, 23 nt, Synthetic Construct
  source 1..23: mol_type = other RNA
tctttggttatctagctgtatgt

SEQ ID NO: 26866 - RNA, 23 nt, Synthetic Construct
  source 1..23: mol_type = other RNA
tctttggttatctagctgtatgt

SEQ ID NO: 26867 - RNA, 23 nt, Synthetic Construct
  source 1..23: mol_type = other RNA
tgtcagtttgtcaaataccccaa

SEQ ID NO: 26868 - RNA, 23 nt, Synthetic Construct
  source 1..23: mol_type = other RNA
tgtcagtttgtcaaataccccaa

SEQ ID NO: 26869 - RNA, 23 nt, Synthetic Construct
  source 1..23: mol_type = other RNA
cgagagtaggacgttgccaggtt

SEQ ID NO: 26870 - RNA, 23 nt, Synthetic Construct
  source 1..23: mol_type = other RNA
cgagagtaggacgttgccaggtt

SEQ ID NO: 26871 - RNA, 17 nt, Synthetic Construct
  source 1..17: mol_type = other RNA
aggaattgacggaaggg

SEQ ID NO: 26872 - RNA, 17 nt, Synthetic Construct
  source 1..17: mol_type = other RNA
aggaattgacggaaggg

SEQ ID NO: 26873 - RNA, 24 nt, Synthetic Construct
  source 1..24: mol_type = other RNA
tgtaaacatccctgactggaagct

SEQ ID NO: 26874 - RNA, 18 nt, Synthetic Construct
  source 1..18: mol_type = other RNA
ccagtaaacggcggccgt

SEQ ID NO: 26875 - RNA, 18 nt, Synthetic Construct
  source 1..18: mol_type = other RNA
ccagtaaacggcggccgt

SEQ ID NO: 26876 - RNA, 22 nt, Synthetic Construct
  source 1..22: mol_type = other RNA
ttctgtactgagctgccccgag

SEQ ID NO: 26877 - RNA, 35 nt, Synthetic Construct; identical to SEQ ID NO: 787
  source 1..35: mol_type = other RNA

SEQ ID NO: 26878 - RNA, 35 nt, Synthetic Construct; identical to SEQ ID NO: 787
  source 1..35: mol_type = other RNA

SEQ ID NO: 26879 - RNA, 21 nt, Synthetic Construct
  source 1..21: mol_type = other RNA
cagcattgtacagggctatga

SEQ ID NO: 26880 - RNA, 21 nt, Synthetic Construct
  source 1..21: mol_type = other RNA
cagcattgtacagggctatga

SEQ ID NO: 26881 - RNA, 36 nt, Synthetic Construct; identical to SEQ ID NO: 10333
  source 1..36: mol_type = other RNA

SEQ ID NO: 26882 - RNA, 36 nt, Synthetic Construct; identical to SEQ ID NO: 10333
  source 1..36: mol_type = other RNA

SEQ ID NO: 26883 - RNA, 23 nt, Synthetic Construct
  source 1..23: mol_type = other RNA
tgaggggcagagagcgagactta

SEQ ID NO: 26884 - RNA, 20 nt, Synthetic Construct
  source 1..20: mol_type = other RNA
caatggccgggacagagggc

SEQ ID NO: 26885 - RNA, 22 nt, Synthetic Construct
  source 1..22: mol_type = other RNA
tcccgtactgagctgccccgag

SEQ ID NO: 26886 - RNA, 22 nt, Synthetic Construct
  source 1..22: mol_type = other RNA
tggaatgtagagaagtatgtat

SEQ ID NO: 26887 - RNA, 20 nt, Synthetic Construct
  source 1..20: mol_type = other RNA
tgaggaagtaggttgtatag

SEQ ID NO: 26888 - RNA, 20 nt, Synthetic Construct
  source 1..20: mol_type = other RNA
tgaggaagtaggttgtatag

SEQ ID NO: 26889 - RNA, 23 nt, Synthetic Construct
  source 1..23: mol_type = other RNA
cgaggggcagagagcgagacttt

SEQ ID NO: 26890 - RNA, 25 nt, Synthetic Construct
  source 1..25: mol_type = other RNA
tttccccttggggttgtaggaccac

SEQ ID NO: 26891 - RNA, 25 nt, Synthetic Construct
  source 1..25: mol_type = other RNA
tttccccttggggttgtaggaccac

SEQ ID NO: 26892 - RNA, 21 nt, Synthetic Construct
  source 1..21: mol_type = other RNA
tcctgtctgaatatgggggga

SEQ ID NO: 26893 - RNA, 21 nt, Synthetic Construct
  source 1..21: mol_type = other RNA
tgaggtagtagattgtataga

SEQ ID NO: 26894 - RNA, 17 nt, Synthetic Construct
  source 1..17: mol_type = other RNA
aagttgaccgcctgggg

SEQ ID NO: 26895 - RNA, 26 nt, Synthetic Construct
  source 1..26: mol_type = other RNA
tgtccccgcgaggggcccggggcggg

SEQ ID NO: 26896 - RNA, 26 nt, Synthetic Construct
  source 1..26: mol_type = other RNA
tgtccccgcgaggggcccggggcggg

SEQ ID NO: 26897 - RNA, 21 nt, Synthetic Construct
  source 1..21: mol_type = other RNA
taactccttagcgaatctcgc

SEQ ID NO: 26898 - RNA, 21 nt, Synthetic Construct
  source 1..21: mol_type = other RNA
taactccttagcgaatctcgc

SEQ ID NO: 26899 - RNA, 25 nt, Synthetic Construct
  source 1..25: mol_type = other RNA
ttgaggatatgagatcgaggcgaca

SEQ ID NO: 26900 - RNA, 20 nt, Synthetic Construct
  source 1..20: mol_type = other RNA
tgaggtagtaggctgtgtgg

SEQ ID NO: 26901 - RNA, 20 nt, Synthetic Construct
  source 1..20: mol_type = other RNA
tgaggtagtaggctgtgtgg

SEQ ID NO: 26902 - RNA, 27 nt, Synthetic Construct
  source 1..27: mol_type = other RNA
ncccccactgctaaatttgactggctt

SEQ ID NO: 26903 - RNA, 27 nt, Synthetic Construct
  source 1..27: mol_type = other RNA
ncccccactgctaaatttgactggctt

SEQ ID NO: 26904 - RNA, 16 nt, Synthetic Construct
  source 1..16: mol_type = other RNA
tgcaagtcgaacggta

SEQ ID NO: 26905 - RNA, 22 nt, Synthetic Construct
  source 1..22: mol_type = other RNA
tgaggaagtaggttgtgtggtt

SEQ ID NO: 26906 - RNA, 23 nt, Synthetic Construct
  source 1..23: mol_type = other RNA
tgaggggcagagagcgagacctt

SEQ ID NO: 26907 - RNA, 23 nt, Synthetic Construct
  source 1..23: mol_type = other RNA
tgaggggcagagagcgagacctt

SEQ ID NO: 26908 - RNA, 23 nt, Synthetic Construct
  source 1..23: mol_type = other RNA
tgaggtagtaggttgtgtagttt

SEQ ID NO: 26909 - RNA, 21 nt, Synthetic Construct
  source 1..21: mol_type = other RNA
tgaggtagtaggtcgtgtggt

SEQ ID NO: 26910 - RNA, 21 nt, Synthetic Construct
  source 1..21: mol_type = other RNA
tgaggtagtaggtcgtgtggt

SEQ ID NO: 26911 - RNA, 24 nt, Synthetic Construct
  source 1..24: mol_type = other RNA
gatgaggcgtgataacgagtctgc

SEQ ID NO: 26912 - RNA, 21 nt, Synthetic Construct
  source 1..21: mol_type = other RNA
ggctggtccgaaggtagtgag

SEQ ID NO: 26913 - RNA, 21 nt, Synthetic Construct
  source 1..21: mol_type = other RNA
ggctggtccgaaggtagtgag

SEQ ID NO: 26914 - RNA, 22 nt, Synthetic Construct
  source 1..22: mol_type = other RNA
tgaggtagtaagttgtgtggtt

SEQ ID NO: 26915 - RNA, 29 nt, Synthetic Construct
  source 1..29: mol_type = other RNA
gctaaacctagccccaaacccactccacc

SEQ ID NO: 26916 - RNA, 25 nt, Synthetic Construct
  source 1..25: mol_type = other RNA
ttgaggatatgagatcgagacgacg

SEQ ID NO: 26917 - RNA, 25 nt, Synthetic Construct
  source 1..25: mol_type = other RNA
ttgaggatatgagatcgagacgacg

SEQ ID NO: 26918 - RNA, 23 nt, Synthetic Construct
  source 1..23: mol_type = other RNA
tgaggggcagagagcaagacttt

SEQ ID NO: 26919 - RNA, 23 nt, Synthetic Construct
  source 1..23: mol_type = other RNA
tgaggggcagagagcaagacttt

SEQ ID NO: 26920 - RNA, 22 nt, Synthetic Construct
  source 1..22: mol_type = other RNA
cactgcacttgtctcggtctga

SEQ ID NO: 26921 - RNA, 20 nt, Synthetic Construct
  source 1..20: mol_type = other RNA
tgaggtagtaggttgtatgg

SEQ ID NO: 26922 - RNA, 23 nt, Synthetic Construct
  source 1..23: mol_type = other RNA
ccctgtactgagctgccccgagt

SEQ ID NO: 26923 - RNA, 23 nt, Synthetic Construct
  source 1..23: mol_type = other RNA
ccctgtactgagctgccccgagt

SEQ ID NO: 26924 - RNA, 22 nt, Synthetic Construct
  source 1..22: mol_type = other RNA
nattgcacttgtcccggcctgt

SEQ ID NO: 26925 - RNA, 21 nt, Synthetic Construct
  source 1..21: mol_type = other RNA
tcctgtactgagctgccctga

SEQ ID NO: 26926 - RNA, 21 nt, Synthetic Construct
  source 1..21: mol_type = other RNA
tcctgtactgagctgccctga

SEQ ID NO: 26927 - RNA, 23 nt, Synthetic Construct
  source 1..23: mol_type = other RNA
taccctgtagatccgaatttgtg

SEQ ID NO: 26928 - RNA, 18 nt, Synthetic Construct
  source 1..18: mol_type = other RNA
gctattgacgaccgtacc

SEQ ID NO: 26929 - RNA, 18 nt, Synthetic Construct
  source 1..18: mol_type = other RNA
gctattgacgaccgtacc

SEQ ID NO: 26930 - RNA, 15 nt, Synthetic Construct
  source 1..15: mol_type = other RNA
aggtgggaggctttg

SEQ ID NO: 26931 - RNA, 23 nt, Synthetic Construct
  source 1..23: mol_type = other RNA
cgcgacctcagatcagacgtggc

SEQ ID NO: 26932 - RNA, 23 nt, Synthetic Construct
  source 1..23: mol_type = other RNA
cgcgacctcagatcagacgtggc

SEQ ID NO: 26933 - RNA, 23 nt, Synthetic Construct
  source 1..23: mol_type = other RNA
ctcactgatcgagtcgtcctgcg

SEQ ID NO: 26934 - RNA, 23 nt, Synthetic Construct
  source 1..23: mol_type = other RNA
ctcactgatcgagtcgtcctgcg

SEQ ID NO: 26935 - RNA, 23 nt, Synthetic Construct
  source 1..23: mol_type = other RNA
ctcgtaccgtgagtaataatgcg

SEQ ID NO: 26936 - RNA, 23 nt, Synthetic Construct
  source 1..23: mol_type = other RNA
ctcgtaccgtgagtaataatgcg

SEQ ID NO: 26937 - RNA, 23 nt, Synthetic Construct
  source 1..23: mol_type = other RNA
cgagagtaggacgttgccaggtt

SEQ ID NO: 26938 - RNA, 23 nt, Synthetic Construct
  source 1..23: mol_type = other RNA
cgagagtaggacgttgccaggtt

SEQ ID NO: 26939 - RNA, 18 nt, Synthetic Construct
  source 1..18: mol_type = other RNA
ggtagcgtggccgagcgg

SEQ ID NO: 26940 - RNA, 18 nt, Synthetic Construct
  source 1..18: mol_type = other RNA
ggtagcgtggccgagcgg

SEQ ID NO: 26941 - RNA, 21 nt, Synthetic Construct
  source 1..21: mol_type = other RNA
tcccgtactgagctgccccga

SEQ ID NO: 26942 - RNA, 21 nt, Synthetic Construct
  source 1..21: mol_type = other RNA
ggagtatgcagagcaagatca

SEQ ID NO: 26943 - RNA, 21 nt, Synthetic Construct
  source 1..21: mol_type = other RNA
ggagtatgcagagcaagatca

SEQ ID NO: 26944 - RNA, 27 nt, Synthetic Construct
  source 1..27: mol_type = other RNA
gctttacattggactttgaacagatct

SEQ ID NO: 26945 - RNA, 27 nt, Synthetic Construct
  source 1..27: mol_type = other RNA
gctttacattggactttgaacagatct

SEQ ID NO: 26946 - RNA, 22 nt, Synthetic Construct
  source 1..22: mol_type = other RNA
actggacttggagtcagaaggc

SEQ ID NO: 26947 - RNA, 15 nt, Synthetic Construct
  source 1..15: mol_type = other RNA
aggtgggaggctttg

SEQ ID NO: 26948 - RNA, 15 nt, Synthetic Construct
  source 1..15: mol_type = other RNA
aggtgggaggctttg

SEQ ID NO: 26949 - RNA, 33 nt, Synthetic Construct; identical to SEQ ID NO: 10232
  source 1..33: mol_type = other RNA

SEQ ID NO: 26950 - RNA, 31 nt, Synthetic Construct; identical to SEQ ID NO: 2893
  source 1..31: mol_type = other RNA

SEQ ID NO: 26951 - RNA, 27 nt, Synthetic Construct
  source 1..27: mol_type = other RNA
cagagttctacagtccgacgatcgatc

SEQ ID NO: 26952 - RNA, 27 nt, Synthetic Construct
  source 1..27: mol_type = other RNA
cagagttctacagtccgacgatcgatc

SEQ ID NO: 26953 - RNA, 16 nt, Synthetic Construct
  source 1..16: mol_type = other RNA
cgactcttagcggtgg

SEQ ID NO: 26954 - RNA, 16 nt, Synthetic Construct
  source 1..16: mol_type = other RNA
cgactcttagcggtgg

SEQ ID NO: 26955 - RNA, 34 nt, Synthetic Construct; identical to SEQ ID NO: 6594
  source 1..34: mol_type = other RNA

SEQ ID NO: 26956 - RNA, 34 nt, Synthetic Construct; identical to SEQ ID NO: 6594
  source 1..34: mol_type = other RNA

SEQ ID NO: 26957 - RNA, 16 nt, Synthetic Construct
  source 1..16: mol_type = other RNA
gcggctgtagctcagt

SEQ ID NO: 26958 - RNA, 18 nt, Synthetic Construct
  source 1..18: mol_type = other RNA
cagcactctgcaaagacg

SEQ ID NO: 26959 - RNA, 22 nt, Synthetic Construct
  source 1..22: mol_type = other RNA
cattgcacttgtcccggcctgt

SEQ ID NO: 26960 - RNA, 34 nt, Synthetic Construct; identical to SEQ ID NO: 1526
  source 1..34: mol_type = other RNA

SEQ ID NO: 26961 - RNA, 19 nt, Synthetic Construct
  source 1..19: mol_type = other RNA
cgactcttagcggtggatc

SEQ ID NO: 26962 - RNA, 19 nt, Synthetic Construct
  source 1..19: mol_type = other RNA
cgactcttagcggtggatc

SEQ ID NO: 26963 - RNA, 23 nt, Synthetic Construct
  source 1..23: mol_type = other RNA
tcctgtgctgagctgccccgagt

SEQ ID NO: 26964 - RNA, 23 nt, Synthetic Construct
  source 1..23: mol_type = other RNA
tcctgtgctgagctgccccgagt

SEQ ID NO: 26965 - RNA, 27 nt, Synthetic Construct
  source 1..27: mol_type = other RNA
gcgggcgtagctcaggggtagagcgca

SEQ ID NO: 26966 - RNA, 27 nt, Synthetic Construct
  source 1..27: mol_type = other RNA
gcgggcgtagctcaggggtagagcgca

SEQ ID NO: 26967 - RNA, 16 nt, Synthetic Construct
  source 1..16: mol_type = other RNA
tccggatcgtagtctg

SEQ ID NO: 26968 - RNA, 16 nt, Synthetic Construct
  source 1..16: mol_type = other RNA
tccggatcgtagtctg

SEQ ID NO: 26969 - RNA, 22 nt, Synthetic Construct
  source 1..22: mol_type = other RNA
tagcatatcgagcctgagaaca

SEQ ID NO: 26970 - RNA, 22 nt, Synthetic Construct
  source 1..22: mol_type = other RNA
tagcatatcgagcctgagaaca

SEQ ID NO: 26971 - RNA, 23 nt, Synthetic Construct
  source 1..23: mol_type = other RNA
ccctgtactgagctgccccgaga

SEQ ID NO: 26972 - RNA, 23 nt, Synthetic Construct
  source 1..23: mol_type = other RNA
ccctgtactgagctgccccgaga

SEQ ID NO: 26973 - RNA, 23 nt, Synthetic Construct
  source 1..23: mol_type = other RNA
tggggggcagagagcgagacttt

SEQ ID NO: 26974 - RNA, 23 nt, Synthetic Construct
  source 1..23: mol_type = other RNA
tggggggcagagagcgagacttt

SEQ ID NO: 26975 - RNA, 22 nt, Synthetic Construct
  source 1..22: mol_type = other RNA
gcgttgcaaccagtgccggggg

SEQ ID NO: 26976 - RNA, 22 nt, Synthetic Construct
  source 1..22: mol_type = other RNA
tcctgtactgtgctgccccgag

SEQ ID NO: 26977 - RNA, 22 nt, Synthetic Construct
  source 1..22: mol_type = other RNA
tcctgtactgtgctgccccgag

SEQ ID NO: 26978 - RNA, 21 nt, Synthetic Construct
  source 1..21: mol_type = other RNA
tgaggggcagagagcgggact

SEQ ID NO: 26979 - RNA, 21 nt, Synthetic Construct
  source 1..21: mol_type = other RNA
tgaggggcagagagcgggact

SEQ ID NO: 26980 - RNA, 23 nt, Synthetic Construct
  source 1..23: mol_type = other RNA
gcgtggtaggagagcgttctgta

SEQ ID NO: 26981 - RNA, 20 nt, Synthetic Construct
  source 1..20: mol_type = other RNA
ccgcagagtacagcttggga

SEQ ID NO: 26982 - RNA, 20 nt, Synthetic Construct
  source 1..20: mol_type = other RNA
tgaggtagtaggttgtgcgg

SEQ ID NO: 26983 - RNA, 22 nt, Synthetic Construct
  source 1..22: mol_type = other RNA
tcctgaactgagctgccccgag

SEQ ID NO: 26984 - RNA, 22 nt, Synthetic Construct
  source 1..22: mol_type = other RNA
tcctgaactgagctgccccgag

SEQ ID NO: 26985 - RNA, 16 nt, Synthetic Construct
  source 1..16: mol_type = other RNA
ctctacggccatacca

SEQ ID NO: 26986 - RNA, 16 nt, Synthetic Construct
  source 1..16: mol_type = other RNA
ctctacggccatacca

SEQ ID NO: 26987 - RNA, 21 nt, Synthetic Construct
  source 1..21: mol_type = other RNA
tgtcagtttgtcaaatacccc

SEQ ID NO: 26988 - RNA, 19 nt, Synthetic Construct
  source 1..19: mol_type = other RNA
gcgaaattccttgtcgggt

SEQ ID NO: 26989 - RNA, 32 nt, Synthetic Construct; identical to SEQ ID NO: 4734
  source 1..32: mol_type = other RNA

SEQ ID NO: 26990 - RNA, 31 nt, Synthetic Construct; identical to SEQ ID NO: 2893
  source 1..31: mol_type = other RNA

SEQ ID NO: 26991 - RNA, 22 nt, Synthetic Construct
  source 1..22: mol_type = other RNA
tggaatgtaaggaagtatgtat

SEQ ID NO: 26992 - RNA, 15 nt, Synthetic Construct
  source 1..15: mol_type = other RNA
ggtggctgtagctca

SEQ ID NO: 26993 - RNA, 25 nt, Synthetic Construct
  source 1..25: mol_type = other RNA
atgaggatatgagatcgagacgaca

SEQ ID NO: 26994 - RNA, 25 nt, Synthetic Construct
  source 1..25: mol_type = other RNA
atgaggatatgagatcgagacgaca

SEQ ID NO: 26995 - RNA, 18 nt, Synthetic Construct
  source 1..18: mol_type = other RNA
accaaggggtcgtgggtt

SEQ ID NO: 26996 - RNA, 24 nt, Synthetic Construct
  source 1..24: mol_type = other RNA
gtcagtttgtcaaataccccaatt

SEQ ID NO: 26997 - RNA, 24 nt, Synthetic Construct
  source 1..24: mol_type = other RNA
gtcagtttgtcaaataccccaatt

SEQ ID NO: 26998 - RNA, 23 nt, Synthetic Construct
  source 1..23: mol_type = other RNA
ggaggggcagagagcgagacttt

SEQ ID NO: 26999 - RNA, 23 nt, Synthetic Construct
  source 1..23: mol_type = other RNA
ggaggggcagagagcgagacttt

SEQ ID NO: 27000 - RNA, 21 nt, Synthetic Construct
  source 1..21: mol_type = other RNA
caatggccgggacagagggct

SEQ ID NO: 27001 - RNA, 21 nt, Synthetic Construct
  source 1..21: mol_type = other RNA
caatggccgggacagagggct

SEQ ID NO: 27002 - RNA, 22 nt, Synthetic Construct
  source 1..22: mol_type = other RNA
tgaagtagtaggttgtgtggtt

SEQ ID NO: 27003 - RNA, 22 nt, Synthetic Construct
  source 1..22: mol_type = other RNA
tgaagtagtaggttgtgtggtt

SEQ ID NO: 27004 - RNA, 25 nt, Synthetic Construct
  source 1..25: mol_type = other RNA
ttggggatatgagatcgagacgaca

SEQ ID NO: 27005 - RNA, 25 nt, Synthetic Construct
  source 1..25: mol_type = other RNA
ttggggatatgagatcgagacgaca

SEQ ID NO: 27006 - RNA, 25 nt, Synthetic Construct
  source 1..25: mol_type = other RNA
tcggatccgtctgagcttggctttt

SEQ ID NO: 27007 - RNA, 25 nt, Synthetic Construct
  source 1..25: mol_type = other RNA
tcggatccgtctgagcttggctttt

SEQ ID NO: 27008 - RNA, 22 nt, Synthetic Construct
  source 1..22: mol_type = other RNA
cgactcttagcggtggatcact

SEQ ID NO: 27009 - RNA, 22 nt, Synthetic Construct
  source 1..22: mol_type = other RNA
cgactcttagcggtggatcact

SEQ ID NO: 27010 - RNA, 15 nt, Synthetic Construct
  source 1..15: mol_type = other RNA
cccagaaacccggtc

SEQ ID NO: 27011 - RNA, 22 nt, Synthetic Construct
  source 1..22: mol_type = other RNA
tattgcgcttgtcccggcctgt

SEQ ID NO: 27012 - RNA, 22 nt, Synthetic Construct
  source 1..22: mol_type = other RNA
tattgcgcttgtcccggcctgt

SEQ ID NO: 27013 - RNA, 20 nt, Synthetic Construct
  source 1..20: mol_type = other RNA
tgaggcagtaggttgtgtgg

SEQ ID NO: 27014 - RNA, 20 nt, Synthetic Construct
  source 1..20: mol_type = other RNA
tgaggcagtaggttgtgtgg

SEQ ID NO: 27015 - RNA, 20 nt, Synthetic Construct
  source 1..20: mol_type = other RNA
gctattgacgaccgtaccgc

SEQ ID NO: 27016 - RNA, 16 nt, Synthetic Construct
  source 1..16: mol_type = other RNA
acggcccagactccta

SEQ ID NO: 27017 - RNA, 18 nt, Synthetic Construct
  source 1..18: mol_type = other RNA
aagcggtggatgatgtgg

SEQ ID NO: 27018 - RNA, 18 nt, Synthetic Construct
  source 1..18: mol_type = other RNA
aagcggtggatgatgtgg

SEQ ID NO: 27019 - RNA, 22 nt, Synthetic Construct
  source 1..22: mol_type = other RNA
gtcagtttgtcaaataccccat

SEQ ID NO: 27020 - RNA, 22 nt, Synthetic Construct
  source 1..22: mol_type = other RNA
gtcagtttgtcaaataccccat

SEQ ID NO: 27021 - RNA, 21 nt, Synthetic Construct
  source 1..21: mol_type = other RNA
tagcagcacatcatggtttac

SEQ ID NO: 27022 - RNA, 21 nt, Synthetic Construct
  source 1..21: mol_type = other RNA
tagcagcacatcatggtttac

SEQ ID NO: 27023 - RNA, 16 nt, Synthetic Construct
  source 1..16: mol_type = other RNA
gtctgcggccatacca

SEQ ID NO: 27024 - RNA, 16 nt, Synthetic Construct
  source 1..16: mol_type = other RNA
gtctgcggccatacca

SEQ ID NO: 27025 - RNA, 16 nt, Synthetic Construct
  source 1..16: mol_type = other RNA
ttggcctcaagtcagg

SEQ ID NO: 27026 - RNA, 16 nt, Synthetic Construct
  source 1..16: mol_type = other RNA
ttggcctcaagtcagg

SEQ ID NO: 27027 - RNA, 23 nt, Synthetic Construct
  source 1..23: mol_type = other RNA
tgaggtagtagtttgtgctgttg

SEQ ID NO: 27028 - RNA, 23 nt, Synthetic Construct
  source 1..23: mol_type = other RNA
gtaaacatccttgactggaagct

SEQ ID NO: 27029 - RNA, 23 nt, Synthetic Construct
  source 1..23: mol_type = other RNA
gtaaacatccttgactggaagct

SEQ ID NO: 27030 - RNA, 23 nt, Synthetic Construct
  source 1..23: mol_type = other RNA
tcctgtactgagttgccccgaga

SEQ ID NO: 27031 - RNA, 23 nt, Synthetic Construct
  source 1..23: mol_type = other RNA
tcctgtactgagttgccccgaga

SEQ ID NO: 27032 - RNA, 22 nt, Synthetic Construct
  source 1..22: mol_type = other RNA
ccctgtactgagctgccccgag

SEQ ID NO: 27033 - RNA, 21 nt, Synthetic Construct
  source 1..21: mol_type = other RNA
tgaggtaataggttgtgtggt

SEQ ID NO: 27034 - RNA, 21 nt, Synthetic Construct
  source 1..21: mol_type = other RNA
tgaggtaataggttgtgtggt

SEQ ID NO: 27035 - RNA, 19 nt, Synthetic Construct
  source 1..19: mol_type = other RNA
tagcttatcagactgatgt

SEQ ID NO: 27036 - RNA, 21 nt, Synthetic Construct
  source 1..21: mol_type = other RNA
tgaggtagtaggttgtataga

SEQ ID NO: 27037 - RNA, 16 nt, Synthetic Construct
  source 1..16: mol_type = other RNA
gcctacggccatacca

SEQ ID NO: 27038 - RNA, 16 nt, Synthetic Construct
  source 1..16: mol_type = other RNA
gcctacggccatacca

SEQ ID NO: 27039 - RNA, 29 nt, Synthetic Construct
  source 1..29: mol_type = other RNA
gtgcatgcactctggggttgtgggacagc

SEQ ID NO: 27040 - RNA, 29 nt, Synthetic Construct
  source 1..29: mol_type = other RNA
gtgcatgcactctggggttgtgggacagc

SEQ ID NO: 27041 - RNA, 21 nt, Synthetic Construct
  source 1..21: mol_type = other RNA
atcacattgccagggatttcc

SEQ ID NO: 27042 - RNA, 24 nt, Synthetic Construct
  source 1..24: mol_type = other RNA
tagcagcacgtaaatattggcgtt

SEQ ID NO: 27043 - RNA, 15 nt, Synthetic Construct
  source 1..15: mol_type = other RNA
ggccgtcgtcagctc

SEQ ID NO: 27044 - RNA, 24 nt, Synthetic Construct
  source 1..24: mol_type = other RNA
cgggcctggttagtacttggatgg

SEQ ID NO: 27045 - RNA, 24 nt, Synthetic Construct
  source 1..24: mol_type = other RNA
tgtaaacatccccgactggaagcc

SEQ ID NO: 27046 - RNA, 24 nt, Synthetic Construct
  source 1..24: mol_type = other RNA
gggttgtaaaccgcttttgtcagg

SEQ ID NO: 27047 - RNA, 15 nt, Synthetic Construct
  source 1..15: mol_type = other RNA
gcaagtcgagcggta

SEQ ID NO: 27048 - RNA, 15 nt, Synthetic Construct
  source 1..15: mol_type = other RNA
gcaagtcgagcggta

SEQ ID NO: 27049 - RNA, 23 nt, Synthetic Construct
  source 1..23: mol_type = other RNA
aggtaatacgacgtacttagtgt

SEQ ID NO: 27050 - RNA, 22 nt, Synthetic Construct
  source 1..22: mol_type = other RNA
tggagtgtaaagaagtatgtat

SEQ ID NO: 27051 - RNA, 43 nt, Synthetic Construct; identical to SEQ ID NO: 3562
  source 1..43: mol_type = other RNA

SEQ ID NO: 27052 - RNA, 23 nt, Synthetic Construct
  source 1..23: mol_type = other RNA
tcctgtactgggctgccccgagt

SEQ ID NO: 27053 - RNA, 15 nt, Synthetic Construct
  source 1..15: mol_type = other RNA
agttgaccgcctggg

SEQ ID NO: 27054 - RNA, 22 nt, Synthetic Construct
  source 1..22: mol_type = other RNA
tgtcaactggttgttgggaggg

SEQ ID NO: 27055 - RNA, 22 nt, Synthetic Construct
  source 1..22: mol_type = other RNA
tgtcaactggttgttgggaggg

SEQ ID NO: 27056 - RNA, 17 nt, Synthetic Construct
  source 1..17: mol_type = other RNA
cgaaattccttgtcggg

SEQ ID NO: 27057 - RNA, 15 nt, Synthetic Construct
  source 1..15: mol_type = other RNA
cagtgaaacgagtca

SEQ ID NO: 27058 - RNA, 15 nt, Synthetic Construct
  source 1..15: mol_type = other RNA
cagtgaaacgagtca

SEQ ID NO: 27059 - RNA, 23 nt, Synthetic Construct
  source 1..23: mol_type = other RNA
tacagtagtctgcacattggttt

SEQ ID NO: 27060 - RNA, 23 nt, Synthetic Construct
  source 1..23: mol_type = other RNA
tacagtagtctgcacattggttt

SEQ ID NO: 27061 - RNA, 29 nt, Synthetic Construct
  source 1..29: mol_type = other RNA
ccccccccactgctaaatttgactggctt

SEQ ID NO: 27062 - RNA, 29 nt, Synthetic Construct
  source 1..29: mol_type = other RNA
ccccccccactgctaaatttgactggctt

SEQ ID NO: 27063 - RNA, 22 nt, Synthetic Construct
  source 1..22: mol_type = other RNA
tcctgtactgagctgctccgag

SEQ ID NO: 27064 - RNA, 22 nt, Synthetic Construct
  source 1..22: mol_type = other RNA
tcctgtactgagctgctccgag

SEQ ID NO: 27065 - RNA, 25 nt, Synthetic Construct
  source 1..25: mol_type = other RNA
ggtaaaatagctgagtgaagcattg

SEQ ID NO: 27066 - RNA, 25 nt, Synthetic Construct
  source 1..25: mol_type = other RNA
ggtaaaatagctgagtgaagcattg

SEQ ID NO: 27067 - RNA, 19 nt, Synthetic Construct
  source 1..19: mol_type = other RNA
cgcgacctcagatcagacg

SEQ ID NO: 27068 - RNA, 19 nt, Synthetic Construct
  source 1..19: mol_type = other RNA
cgcgacctcagatcagacg

SEQ ID NO: 27069 - RNA, 20 nt, Synthetic Construct
  source 1..20: mol_type = other RNA
tagcaccatttgaaatcagt

SEQ ID NO: 27070 - RNA, 15 nt, Synthetic Construct
  source 1..15: mol_type = other RNA
tcctgacggccatag

SEQ ID NO: 27071 - RNA, 22 nt, Synthetic Construct
  source 1..22: mol_type = other RNA
tggaatgtaaagaagcatgtat

SEQ ID NO: 27072 - RNA, 22 nt, Synthetic Construct
  source 1..22: mol_type = other RNA
tggaatgtaaagaagcatgtat

SEQ ID NO: 27073 - RNA, 25 nt, Synthetic Construct
  source 1..25: mol_type = other RNA
ttgaggatatgagatcgagacggca

SEQ ID NO: 27074 - RNA, 25 nt, Synthetic Construct
  source 1..25: mol_type = other RNA
ttgaggatatgagatcgagacggca

SEQ ID NO: 27075 - RNA, 36 nt, Synthetic Construct; identical to SEQ ID NO: 777
  source 1..36: mol_type = other RNA

SEQ ID NO: 27076 - RNA, 36 nt, Synthetic Construct; identical to SEQ ID NO: 777
  source 1..36: mol_type = other RNA

SEQ ID NO: 27077 - RNA, 22 nt, Synthetic Construct
  source 1..22: mol_type = other RNA
tcctgtactgagccgccccgag

SEQ ID NO: 27078 - RNA, 16 nt, Synthetic Construct
  source 1..16: mol_type = other RNA
gccagcagccgcggta

SEQ ID NO: 27079 - RNA, 16 nt, Synthetic Construct
  source 1..16: mol_type = other RNA
gccagcagccgcggta

SEQ ID NO: 27080 - RNA, 28 nt, Synthetic Construct
  source 1..28: mol_type = other RNA
ccccccactgctaaatttgaccggcttt

SEQ ID NO: 27081 - RNA, 22 nt, Synthetic Construct
  source 1..22: mol_type = other RNA
tgaggtagaaggttgtgtggtt

SEQ ID NO: 27082 - RNA, 22 nt, Synthetic Construct
  source 1..22: mol_type = other RNA
tgaggtagaaggttgtgtggtt

SEQ ID NO: 27083 - RNA, 22 nt, Synthetic Construct
  source 1..22: mol_type = other RNA
tcctgtactgggctgccccgag

SEQ ID NO: 27084 - RNA, 21 nt, Synthetic Construct
  source 1..21: mol_type = other RNA
ctttgttcgattccgttgagt

SEQ ID NO: 27085 - RNA, 21 nt, Synthetic Construct
  source 1..21: mol_type = other RNA
ctttgttcgattccgttgagt

SEQ ID NO: 27086 - RNA, 17 nt, Synthetic Construct
  source 1..17: mol_type = other RNA
tggccgggacagagggc

SEQ ID NO: 27087 - RNA, 23 nt, Synthetic Construct
  source 1..23: mol_type = other RNA
gtctttgttcgattccgttgagt

SEQ ID NO: 27088 - RNA, 23 nt, Synthetic Construct
  source 1..23: mol_type = other RNA
gtctttgttcgattccgttgagt

SEQ ID NO: 27089 - RNA, 18 nt, Synthetic Construct
  source 1..18: mol_type = other RNA
atagggaacgtgagctgg

SEQ ID NO: 27090 - RNA, 18 nt, Synthetic Construct
  source 1..18: mol_type = other RNA
atagggaacgtgagctgg

SEQ ID NO: 27091 - RNA, 21 nt, Synthetic Construct
  source 1..21: mol_type = other RNA
taatactgcctggtaatgatg

SEQ ID NO: 27092 - RNA, 21 nt, Synthetic Construct
  source 1..21: mol_type = other RNA
taatactgcctggtaatgatg

SEQ ID NO: 27093 - RNA, 22 nt, Synthetic Construct
  source 1..22: mol_type = other RNA
tagcagcacgtaaatataggcg

SEQ ID NO: 27094 - RNA, 22 nt, Synthetic Construct
  source 1..22: mol_type = other RNA
tagcagcacgtaaatataggcg

SEQ ID NO: 27095 - RNA, 22 nt, Synthetic Construct
  source 1..22: mol_type = other RNA
tcctgtattgagctgccccgag

SEQ ID NO: 27096 - RNA, 22 nt, Synthetic Construct
  source 1..22: mol_type = other RNA
tcctgtattgagctgccccgag

SEQ ID NO: 27097 - RNA, 27 nt, Synthetic Construct
  source 1..27: mol_type = other RNA
ccgtgtgaaagtaggtcatcgtcaggc

SEQ ID NO: 27098 - RNA, 17 nt, Synthetic Construct
  source 1..17: mol_type = other RNA
ccgtgtgaaagtaggtc

SEQ ID NO: 27099 - RNA, 17 nt, Synthetic Construct
  source 1..17: mol_type = other RNA
ccgtgtgaaagtaggtc

SEQ ID NO: 27100 - RNA, 22 nt, Synthetic Construct
  source 1..22: mol_type = other RNA
ncctgtactgagctgccccgag

SEQ ID NO: 27101 - RNA, 23 nt, Synthetic Construct
  source 1..23: mol_type = other RNA
tacagtagtctgcacattggttt

SEQ ID NO: 27102 - RNA, 23 nt, Synthetic Construct
  source 1..23: mol_type = other RNA
tggtaatacgacgtacttagtgc

SEQ ID NO: 27103 - RNA, 24 nt, Synthetic Construct
  source 1..24: mol_type = other RNA
cggagaaggttagctcagccaact

SEQ ID NO: 27104 - RNA, 21 nt, Synthetic Construct
  source 1..21: mol_type = other RNA
ctaatcccagaaacccggtcg

SEQ ID NO: 27105 - RNA, 27 nt, Synthetic Construct
  source 1..27: mol_type = other RNA
gctttacattggactttgaacagatct

SEQ ID NO: 27106 - RNA, 16 nt, Synthetic Construct
  source 1..16: mol_type = other RNA
ggaattgacggaaggg

SEQ ID NO: 27107 - RNA, 16 nt, Synthetic Construct
  source 1..16: mol_type = other RNA
ggaattgacggaaggg

SEQ ID NO: 27108 - RNA, 22 nt, Synthetic Construct
  source 1..22: mol_type = other RNA
tcctgtactgagccgccccgag

SEQ ID NO: 27109 - RNA, 22 nt, Synthetic Construct
  source 1..22: mol_type = other RNA
tcctgtactgagccgccccgag

SEQ ID NO: 27110 - RNA, 24 nt, Synthetic Construct
  source 1..24: mol_type = other RNA
tgtcagtttgtcaaataccccatt

SEQ ID NO: 27111 - RNA, 24 nt, Synthetic Construct
  source 1..24: mol_type = other RNA
tgtcagtttgtcaaataccccatt

SEQ ID NO: 27112 - RNA, 24 nt, Synthetic Construct
  source 1..24: mol_type = other RNA
tgtaaacatccccgaccggaagct

SEQ ID NO: 27113 - RNA, 25 nt, Synthetic Construct
  source 1..25: mol_type = other RNA
ttgaggatatgagatcgagacggca

SEQ ID NO: 27114 - RNA, 25 nt, Synthetic Construct
  source 1..25: mol_type = other RNA
ttgaggatatgagatcgagacggca

SEQ ID NO: 27115 - RNA, 26 nt, Synthetic Construct
  source 1..26: mol_type = other RNA
ttaagtgacgatagcctaggagatac

SEQ ID NO: 27116 - RNA, 26 nt, Synthetic Construct
  source 1..26: mol_type = other RNA
ttaagtgacgatagcctaggagatac

SEQ ID NO: 27117 - RNA, 32 nt, Synthetic Construct; identical to SEQ ID NO: 4279
  source 1..32: mol_type = other RNA

SEQ ID NO: 27118 - RNA, 23 nt, Synthetic Construct
  source 1..23: mol_type = other RNA
tgaggggcagagagtgagacttt

SEQ ID NO: 27119 - RNA, 22 nt, Synthetic Construct
  source 1..22: mol_type = other RNA
tattgcacctgtcccggcctgt

SEQ ID NO: 27120 - RNA, 22 nt, Synthetic Construct
  source 1..22: mol_type = other RNA
tattgcacctgtcccggcctgt

SEQ ID NO: 27121 - RNA, 22 nt, Synthetic Construct
  source 1..22: mol_type = other RNA
tggaatgtaaagaagtatgcat

SEQ ID NO: 27122 - RNA, 22 nt, Synthetic Construct
  source 1..22: mol_type = other RNA
tggaatgtaaagaagtatgcat

SEQ ID NO: 27123 - RNA, 19 nt, Synthetic Construct
  source 1..19: mol_type = other RNA
agtcgacgtatagggtgtg

SEQ ID NO: 27124 - RNA, 15 nt, Synthetic Construct
  source 1..15: mol_type = other RNA
acctgcatcgagggt

SEQ ID NO: 27125 - RNA, 15 nt, Synthetic Construct
  source 1..15: mol_type = other RNA
acctgcatcgagggt

SEQ ID NO: 27126 - RNA, 26 nt, Synthetic Construct
  source 1..26: mol_type = other RNA
cgactcttagcggtggatcactcggc

SEQ ID NO: 27127 - RNA, 26 nt, Synthetic Construct
  source 1..26: mol_type = other RNA
cgactcttagcggtggatcactcggc

SEQ ID NO: 27128 - RNA, 21 nt, Synthetic Construct
  source 1..21: mol_type = other RNA
tcctgtactgagctgcccgag

SEQ ID NO: 27129 - RNA, 21 nt, Synthetic Construct
  source 1..21: mol_type = other RNA
tcctgtactgagctgcccgag

SEQ ID NO: 27130 - RNA, 22 nt, Synthetic Construct
  source 1..22: mol_type = other RNA
tcctgtactgagctgctccgag

SEQ ID NO: 27131 - RNA, 24 nt, Synthetic Construct
  source 1..24: mol_type = other RNA
gcagctaataccgcatacgacctg

SEQ ID NO: 27132 - RNA, 17 nt, Synthetic Construct
  source 1..17: mol_type = other RNA
cgactcttagcggtgga

SEQ ID NO: 27133 - RNA, 17 nt, Synthetic Construct
  source 1..17: mol_type = other RNA
cgactcttagcggtgga

SEQ ID NO: 27134 - RNA, 23 nt, Synthetic Construct
  source 1..23: mol_type = other RNA
tggtaataagacgtacttagtgt

SEQ ID NO: 27135 - RNA, 23 nt, Synthetic Construct
  source 1..23: mol_type = other RNA
tggtaataagacgtacttagtgt

SEQ ID NO: 27136 - RNA, 18 nt, Synthetic Construct
  source 1..18: mol_type = other RNA
atggccgggacagagggc

SEQ ID NO: 27137 - RNA, 32 nt, Synthetic Construct; identical to SEQ ID NO: 2052
  source 1..32: mol_type = other RNA

SEQ ID NO: 27138 - RNA, 20 nt, Synthetic Construct
  source 1..20: mol_type = other RNA
tggggtagtaggttgtgtgg

SEQ ID NO: 27139 - RNA, 16 nt, Synthetic Construct
  source 1..16: mol_type = other RNA
agcaagtcgaacggta

SEQ ID NO: 27140 - RNA, 16 nt, Synthetic Construct
  source 1..16: mol_type = other RNA
agcaagtcgaacggta

SEQ ID NO: 27141 - RNA, 32 nt, Synthetic Construct; identical to SEQ ID NO: 3748
  source 1..32: mol_type = other RNA

SEQ ID NO: 27142 - RNA, 32 nt, Synthetic Construct; identical to SEQ ID NO: 3748
  source 1..32: mol_type = other RNA

SEQ ID NO: 27143 - RNA, 15 nt, Synthetic Construct
  source 1..15: mol_type = other RNA
cgactcttagcggtg

SEQ ID NO: 27144 - RNA, 15 nt, Synthetic Construct
  source 1..15: mol_type = other RNA
cgactcttagcggtg

SEQ ID NO: 27145 - RNA, 15 nt, Synthetic Construct
  source 1..15: mol_type = other RNA
gcaagtcgagcggta

SEQ ID NO: 27146 - RNA, 15 nt, Synthetic Construct
  source 1..15: mol_type = other RNA
gcaagtcgagcggta

SEQ ID NO: 27147 - RNA, 22 nt, Synthetic Construct
  source 1..22: mol_type = other RNA
tggagagaaaggcagttcctga

SEQ ID NO: 27148 - RNA, 20 nt, Synthetic Construct
  source 1..20: mol_type = other RNA
tgaggtagtaggttgtgtgg

SEQ ID NO: 27149 - RNA, 30 nt, Synthetic Construct; identical to SEQ ID NO: 768
  source 1..30: mol_type = other RNA

SEQ ID NO: 27150 - RNA, 30 nt, Synthetic Construct; identical to SEQ ID NO: 768
  source 1..30: mol_type = other RNA

SEQ ID NO: 27151 - RNA, 21 nt, Synthetic Construct
  source 1..21: mol_type = other RNA
tgaggtagtagtttgtgctgc

SEQ ID NO: 27152 - RNA, 21 nt, Synthetic Construct
  source 1..21: mol_type = other RNA
tgaggtagtagtttgtgctgc

SEQ ID NO: 27153 - RNA, 23 nt, Synthetic Construct
  source 1..23: mol_type = other RNA
tcctgtactgagctgccctgagt

SEQ ID NO: 27154 - RNA, 23 nt, Synthetic Construct
  source 1..23: mol_type = other RNA
tcctgtactgagctgccctgagt

SEQ ID NO: 27155 - RNA, 21 nt, Synthetic Construct
  source 1..21: mol_type = other RNA
tggagtgtgacaatggtgttc

SEQ ID NO: 27156 - RNA, 21 nt, Synthetic Construct
  source 1..21: mol_type = other RNA
tggagtgtgacaatggtgttc

SEQ ID NO: 27157 - RNA, 22 nt, Synthetic Construct
  source 1..22: mol_type = other RNA
tgggatgtaaagaagtatgtat

SEQ ID NO: 27158 - RNA, 21 nt, Synthetic Construct
  source 1..21: mol_type = other RNA
taactccttaagcgatctcgc

SEQ ID NO: 27159 - RNA, 21 nt, Synthetic Construct
  source 1..21: mol_type = other RNA
taactccttaagcgatctcgc

SEQ ID NO: 27160 - RNA, 19 nt, Synthetic Construct
  source 1..19: mol_type = other RNA
cctgtctgaatatgggggg

SEQ ID NO: 27161 - RNA, 16 nt, Synthetic Construct
  source 1..16: mol_type = other RNA
gtctacggccatacta

SEQ ID NO: 27162 - RNA, 18 nt, Synthetic Construct
  source 1..18: mol_type = other RNA
cctgaagaataagcaccg

SEQ ID NO: 27163 - RNA, 22 nt, Synthetic Construct
  source 1..22: mol_type = other RNA
ttcaagtaatccaggataggtt

SEQ ID NO: 27164 - RNA, 22 nt, Synthetic Construct
  source 1..22: mol_type = other RNA
tggaatgtaaagaagtatgcat

SEQ ID NO: 27165 - RNA, 22 nt, Synthetic Construct
  source 1..22: mol_type = other RNA
tggagtgtgacaatggtgcttg

SEQ ID NO: 27166 - RNA, 22 nt, Synthetic Construct
  source 1..22: mol_type = other RNA
tggagtgtgacaatggtgcttg

SEQ ID NO: 27167 - RNA, 21 nt, Synthetic Construct
  source 1..21: mol_type = other RNA
tgaggggcagagggcgagact

SEQ ID NO: 27168 - RNA, 21 nt, Synthetic Construct
  source 1..21: mol_type = other RNA
tgaggggcagagggcgagact

SEQ ID NO: 27169 - RNA, 27 nt, Synthetic Construct
  source 1..27: mol_type = other RNA
gttggttcaagcgtgtagtcgtgctct

SEQ ID NO: 27170 - RNA, 19 nt, Synthetic Construct
  source 1..19: mol_type = other RNA
cggaagaaggggtgcctgg

SEQ ID NO: 27171 - RNA, 19 nt, Synthetic Construct
  source 1..19: mol_type = other RNA
cggaagaaggggtgcctgg

SEQ ID NO: 27172 - RNA, 20 nt, Synthetic Construct
  source 1..20: mol_type = other RNA
ctgacctatgaattgacagc

SEQ ID NO: 27173 - RNA, 20 nt, Synthetic Construct
  source 1..20: mol_type = other RNA
ctgacctatgaattgacagc

SEQ ID NO: 27174 - RNA, 22 nt, Synthetic Construct
  source 1..22: mol_type = other RNA
tggaatgtgaagaagtatgtat

SEQ ID NO: 27175 - RNA, 18 nt, Synthetic Construct
  source 1..18: mol_type = other RNA
tccgacatgcgagggttc

SEQ ID NO: 27176 - RNA, 18 nt, Synthetic Construct
  source 1..18: mol_type = other RNA
tccgacatgcgagggttc

SEQ ID NO: 27177 - RNA, 25 nt, Synthetic Construct
  source 1..25: mol_type = other RNA
tcgaggatatgagatcgagacgaca

SEQ ID NO: 27178 - RNA, 25 nt, Synthetic Construct
  source 1..25: mol_type = other RNA
tcgaggatatgagatcgagacgaca

SEQ ID NO: 27179 - RNA, 23 nt, Synthetic Construct
  source 1..23: mol_type = other RNA
tgaggcagtaggttgtgtggttt

SEQ ID NO: 27180 - RNA, 23 nt, Synthetic Construct
  source 1..23: mol_type = other RNA
tgaggcagtaggttgtgtggttt

SEQ ID NO: 27181 - RNA, 23 nt, Synthetic Construct
  source 1..23: mol_type = other RNA
tggtaatacgacgtacttaatgt

SEQ ID NO: 27182 - RNA, 18 nt, Synthetic Construct
  source 1..18: mol_type = other RNA
cataaagtagaaagcact

SEQ ID NO: 27183 - RNA, 21 nt, Synthetic Construct
  source 1..21: mol_type = other RNA
gctattgacgaccgtaccgca

SEQ ID NO: 27184 - RNA, 18 nt, Synthetic Construct
  source 1..18: mol_type = other RNA
cctgtaccgatcaatagt

SEQ ID NO: 27185 - RNA, 18 nt, Synthetic Construct
  source 1..18: mol_type = other RNA
cctgtaccgatcaatagt

SEQ ID NO: 27186 - RNA, 23 nt, Synthetic Construct
  source 1..23: mol_type = other RNA
tcctgcactgagctgccccgaga

SEQ ID NO: 27187 - RNA, 23 nt, Synthetic Construct
  source 1..23: mol_type = other RNA
tcctgcactgagctgccccgaga

SEQ ID NO: 27188 - RNA, 23 nt, Synthetic Construct
  source 1..23: mol_type = other RNA
tgtgcaaatctatgcaaaactga

SEQ ID NO: 27189 - RNA, 23 nt, Synthetic Construct
  source 1..23: mol_type = other RNA
tgtgcaaatctatgcaaaactga

SEQ ID NO: 27190 - RNA, 16 nt, Synthetic Construct
  source 1..16: mol_type = other RNA
atgcaagtcgaacggt

SEQ ID NO: 27191 - RNA, 20 nt, Synthetic Construct
  source 1..20: mol_type = other RNA
tcctgtctgaatatgggggg

SEQ ID NO: 27192 - RNA, 20 nt, Synthetic Construct
  source 1..20: mol_type = other RNA
tcctgtctgaatatgggggg

SEQ ID NO: 27193 - RNA, 16 nt, Synthetic Construct
  source 1..16: mol_type = other RNA
agtcaggatgttggct

SEQ ID NO: 27194 - RNA, 24 nt, Synthetic Construct
  source 1..24: mol_type = other RNA
tagcagcacgtaaatattggcgtt

SEQ ID NO: 27195 - RNA, 24 nt, Synthetic Construct
  source 1..24: mol_type = other RNA
tagcagcacgtaaatattggcgtt

SEQ ID NO: 27196 - RNA, 21 nt, Synthetic Construct
  source 1..21: mol_type = other RNA
taacactgtctggtaaagatg

SEQ ID NO: 27197 - RNA, 21 nt, Synthetic Construct
  source 1..21: mol_type = other RNA
taacactgtctggtaaagatg

SEQ ID NO: 27198 - RNA, 22 nt, Synthetic Construct
  source 1..22: mol_type = other RNA
cggaatgtaaagaagtatgtat

SEQ ID NO: 27199 - RNA, 22 nt, Synthetic Construct
  source 1..22: mol_type = other RNA
tgaggtagtaggttgagtggtt

SEQ ID NO: 27200 - RNA, 22 nt, Synthetic Construct
  source 1..22: mol_type = other RNA
tgaggtagtaggttgagtggtt

SEQ ID NO: 27201 - RNA, 22 nt, Synthetic Construct
  source 1..22: mol_type = other RNA
tcctgtgctgagctgccccgag

SEQ ID NO: 27202 - RNA, 25 nt, Synthetic Construct
  source 1..25: mol_type = other RNA
agctcactgatcgagtcgtcctgcg

SEQ ID NO: 27203 - RNA, 22 nt, Synthetic Construct
  source 1..22: mol_type = other RNA
cattgcacttgtctcggtccga

SEQ ID NO: 27204 - RNA, 19 nt, Synthetic Construct
  source 1..19: mol_type = other RNA
tcctgtaccgatcaatagt

SEQ ID NO: 27205 - RNA, 19 nt, Synthetic Construct
  source 1..19: mol_type = other RNA
tcctgtaccgatcaatagt

SEQ ID NO: 27206 - RNA, 15 nt, Synthetic Construct
  source 1..15: mol_type = other RNA
tggccgtcgtcagct

SEQ ID NO: 27207 - RNA, 21 nt, Synthetic Construct
  source 1..21: mol_type = other RNA
cacgtcatacaatggccggga

SEQ ID NO: 27208 - RNA, 22 nt, Synthetic Construct
  source 1..22: mol_type = other RNA
tattgcacttgccccggcctgt

SEQ ID NO: 27209 - RNA, 22 nt, Synthetic Construct
  source 1..22: mol_type = other RNA
tattgcacttgccccggcctgt

SEQ ID NO: 27210 - RNA, 15 nt, Synthetic Construct
  source 1..15: mol_type = other RNA
acggtcctaaggtag

SEQ ID NO: 27211 - RNA, 20 nt, Synthetic Construct
  source 1..20: mol_type = other RNA
tgaggtagtaggttatgtgg

SEQ ID NO: 27212 - RNA, 20 nt, Synthetic Construct
  source 1..20: mol_type = other RNA
tgaggtagtaggttatgtgg

SEQ ID NO: 27213 - RNA, 17 nt, Synthetic Construct
  source 1..17: mol_type = other RNA
cagtcaggatgttggct

SEQ ID NO: 27214 - RNA, 16 nt, Synthetic Construct
  source 1..16: mol_type = other RNA
gtccccttcgtctaga

SEQ ID NO: 27215 - RNA, 18 nt, Synthetic Construct
  source 1..18: mol_type = other RNA
cgtgttcggaagattttc

SEQ ID NO: 27216 - RNA, 18 nt, Synthetic Construct
  source 1..18: mol_type = other RNA
cgtgttcggaagattttc

SEQ ID NO: 27217 - RNA, 18 nt, Synthetic Construct
  source 1..18: mol_type = other RNA
cctgtaccgatcaatagt

SEQ ID NO: 27218 - RNA, 20 nt, Synthetic Construct
  source 1..20: mol_type = other RNA
tgaggtagtaggtcgtgtgg

SEQ ID NO: 27219 - RNA, 20 nt, Synthetic Construct
  source 1..20: mol_type = other RNA
tgaggtagtaggtcgtgtgg

SEQ ID NO: 27220 - RNA, 23 nt, Synthetic Construct
  source 1..23: mol_type = other RNA
tgaggtggtaggttgtgtggttt

SEQ ID NO: 27221 - RNA, 23 nt, Synthetic Construct
  source 1..23: mol_type = other RNA
tgaggtggtaggttgtgtggttt

SEQ ID NO: 27222 - RNA, 18 nt, Synthetic Construct
  source 1..18: mol_type = other RNA
ggtagcgtggccgagtgg

SEQ ID NO: 27223 - RNA, 21 nt, Synthetic Construct
  source 1..21: mol_type = other RNA
cagcattgtacagggctatga

SEQ ID NO: 27224 - RNA, 23 nt, Synthetic Construct
  source 1..23: mol_type = other RNA
atcacattgccagggatttccat

SEQ ID NO: 27225 - RNA, 23 nt, Synthetic Construct
  source 1..23: mol_type = other RNA
tcctgtactgagccgccccgaga

SEQ ID NO: 27226 - RNA, 23 nt, Synthetic Construct
  source 1..23: mol_type = other RNA
tcctgtactgagccgccccgaga

SEQ ID NO: 27227 - RNA, 23 nt, Synthetic Construct
  source 1..23: mol_type = other RNA
tcctgtactgagctgccccgggt

SEQ ID NO: 27228 - RNA, 23 nt, Synthetic Construct
  source 1..23: mol_type = other RNA
tcctgtactgagctgccccgggt

SEQ ID NO: 27229 - RNA, 19 nt, Synthetic Construct
  source 1..19: mol_type = other RNA
gcgccgatgatagtgcgga

SEQ ID NO: 27230 - RNA, 21 nt, Synthetic Construct
  source 1..21: mol_type = other RNA
tggagtgtgacaatggcgttt

SEQ ID NO: 27231 - RNA, 21 nt, Synthetic Construct
  source 1..21: mol_type = other RNA
tggagtgtgacaatggcgttt

SEQ ID NO: 27232 - RNA, 16 nt, Synthetic Construct
  source 1..16: mol_type = other RNA
gtgacgcgcatgaatg

SEQ ID NO: 27233 - RNA, 16 nt, Synthetic Construct
  source 1..16: mol_type = other RNA
gtgacgcgcatgaatg

SEQ ID NO: 27234 - RNA, 32 nt, Synthetic Construct; identical to SEQ ID NO: 3713
  source 1..32: mol_type = other RNA

SEQ ID NO: 27235 - RNA, 22 nt, Synthetic Construct
  source 1..22: mol_type = other RNA
tggaatgtaaagaagtatgtgt

SEQ ID NO: 27236 - RNA, 23 nt, Synthetic Construct
  source 1..23: mol_type = other RNA
tcctgtacagagctgccccgaga

SEQ ID NO: 27237 - RNA, 23 nt, Synthetic Construct
  source 1..23: mol_type = other RNA
tcctgtacagagctgccccgaga

SEQ ID NO: 27238 - RNA, 21 nt, Synthetic Construct
  source 1..21: mol_type = other RNA
tgaggtagtaggttgtgtagt

SEQ ID NO: 27239 - RNA, 21 nt, Synthetic Construct
  source 1..21: mol_type = other RNA
tgaggtagtaggttgtgtagt

SEQ ID NO: 27240 - RNA, 25 nt, Synthetic Construct
  source 1..25: mol_type = other RNA
ggtaaaatggctgagtgaagcattg

SEQ ID NO: 27241 - RNA, 25 nt, Synthetic Construct
  source 1..25: mol_type = other RNA
ggtaaaatggctgagtgaagcattg

SEQ ID NO: 27242 - RNA, 21 nt, Synthetic Construct
  source 1..21: mol_type = other RNA
tgaggggcagagagcgagacc

SEQ ID NO: 27243 - RNA, 22 nt, Synthetic Construct
  source 1..22: mol_type = other RNA
caaagtgctgttcgtgcaggta

SEQ ID NO: 27244 - RNA, 19 nt, Synthetic Construct
  source 1..19: mol_type = other RNA
agcgaaattccttgtcggg

SEQ ID NO: 27245 - RNA, 31 nt, Synthetic Construct; identical to SEQ ID NO: 1881
  source 1..31: mol_type = other RNA

SEQ ID NO: 27246 - RNA, 21 nt, Synthetic Construct
  source 1..21: mol_type = other RNA
tcctgtgctgagctgccccga

SEQ ID NO: 27247 - RNA, 21 nt, Synthetic Construct
  source 1..21: mol_type = other RNA
tcctgtgctgagctgccccga

SEQ ID NO: 27248 - RNA, 23 nt, Synthetic Construct
  source 1..23: mol_type = other RNA
tggtaaaacgacgtacttagtgt

SEQ ID NO: 27249 - RNA, 23 nt, Synthetic Construct
  source 1..23: mol_type = other RNA
tggtaaaacgacgtacttagtgt

SEQ ID NO: 27250 - RNA, 44 nt, Synthetic Construct; identical to SEQ ID NO: 3447
  source 1..44: mol_type = other RNA

SEQ ID NO: 27251 - RNA, 20 nt, Synthetic Construct
  source 1..20: mol_type = other RNA
taaggtagtaggttgtgtgg

SEQ ID NO: 27252 - RNA, 20 nt, Synthetic Construct
  source 1..20: mol_type = other RNA
taaggtagtaggttgtgtgg

SEQ ID NO: 27253 - RNA, 22 nt, Synthetic Construct
  source 1..22: mol_type = other RNA
cccataaagtagaaagcactac

SEQ ID NO: 27254 - RNA, 24 nt, Synthetic Construct
  source 1..24: mol_type = other RNA
tgtagacatccccgactggaagct

SEQ ID NO: 27255 - RNA, 22 nt, Synthetic Construct
  source 1..22: mol_type = other RNA
cgactggtaactgggatgaagt

SEQ ID NO: 27256 - RNA, 22 nt, Synthetic Construct
  source 1..22: mol_type = other RNA
cgactggtaactgggatgaagt

SEQ ID NO: 27257 - RNA, 22 nt, Synthetic Construct
  source 1..22: mol_type = other RNA
cataaagtagaaagcactacta

SEQ ID NO: 27258 - RNA, 21 nt, Synthetic Construct
  source 1..21: mol_type = other RNA
tcctgtactgggctgccccga

SEQ ID NO: 27259 - RNA, 21 nt, Synthetic Construct
  source 1..21: mol_type = other RNA
tcctgtactgggctgccccga

SEQ ID NO: 27260 - RNA, 19 nt, Synthetic Construct
  source 1..19: mol_type = other RNA
cctgtaccgatcaatagtg

SEQ ID NO: 27261 - RNA, 23 nt, Synthetic Construct
  source 1..23: mol_type = other RNA
agcagcattgtacagggctatgg

SEQ ID NO: 27262 - RNA, 33 nt, Synthetic Construct; identical to SEQ ID NO: 2209
  source 1..33: mol_type = other RNA

SEQ ID NO: 27263 - RNA, 33 nt, Synthetic Construct; identical to SEQ ID NO: 2209
  source 1..33: mol_type = other RNA

SEQ ID NO: 27264 - RNA, 18 nt, Synthetic Construct
  source 1..18: mol_type = other RNA
cgccgatgatagtgcgga

SEQ ID NO: 27265 - RNA, 24 nt, Synthetic Construct
  source 1..24: mol_type = other RNA
gcgagagtaggacgttgccaggtt

SEQ ID NO: 27266 - RNA, 24 nt, Synthetic Construct
  source 1..24: mol_type = other RNA
gcgagagtaggacgttgccaggtt

SEQ ID NO: 27267 - RNA, 22 nt, Synthetic Construct
  source 1..22: mol_type = other RNA
tcagtagctcgaggaaaagaca

SEQ ID NO: 27268 - RNA, 25 nt, Synthetic Construct
  source 1..25: mol_type = other RNA
ttgaggatatgagatcgagacgaca

SEQ ID NO: 27269 - RNA, 25 nt, Synthetic Construct
  source 1..25: mol_type = other RNA
ttgaggatatgagatcgagacgaca

SEQ ID NO: 27270 - RNA, 19 nt, Synthetic Construct
  source 1..19: mol_type = other RNA
cgcgcgtcccccgaagagg

SEQ ID NO: 27271 - RNA, 17 nt, Synthetic Construct
  source 1..17: mol_type = other RNA
catgcaagtcgaacggt

SEQ ID NO: 27272 - RNA, 22 nt, Synthetic Construct
  source 1..22: mol_type = other RNA
tgaggtagtaggttgtatagtc

SEQ ID NO: 27273 - RNA, 22 nt, Synthetic Construct
  source 1..22: mol_type = other RNA
tgaggtagtaggttgtatagtc

SEQ ID NO: 27274 - RNA, 30 nt, Synthetic Construct; identical to SEQ ID NO: 751
  source 1..30: mol_type = other RNA

SEQ ID NO: 27275 - RNA, 30 nt, Synthetic Construct; identical to SEQ ID NO: 751
  source 1..30: mol_type = other RNA

SEQ ID NO: 27276 - RNA, 15 nt, Synthetic Construct
  source 1..15: mol_type = other RNA
gctatgggatttgtt

SEQ ID NO: 27277 - RNA, 15 nt, Synthetic Construct
  source 1..15: mol_type = other RNA
gctatgggatttgtt

SEQ ID NO: 27278 - RNA, 21 nt, Synthetic Construct
  source 1..21: mol_type = other RNA
cctctgggcccttcctccagt

SEQ ID NO: 27279 - RNA, 20 nt, Synthetic Construct
  source 1..20: mol_type = other RNA
tgaggtggtaggttgtgtgg

SEQ ID NO: 27280 - RNA, 19 nt, Synthetic Construct
  source 1..19: mol_type = other RNA
tctaatgagactgccggtg

SEQ ID NO: 27281 - RNA, 19 nt, Synthetic Construct
  source 1..19: mol_type = other RNA
tctaatgagactgccggtg

SEQ ID NO: 27282 - RNA, 17 nt, Synthetic Construct
  source 1..17: mol_type = other RNA
tggccgggacagagggc

SEQ ID NO: 27283 - RNA, 23 nt, Synthetic Construct
  source 1..23: mol_type = other RNA
tcctgtaccgagctgccccgaga

SEQ ID NO: 27284 - RNA, 22 nt, Synthetic Construct
  source 1..22: mol_type = other RNA
atggatttttggagcagggaga

SEQ ID NO: 27285 - RNA, 22 nt, Synthetic Construct
  source 1..22: mol_type = other RNA
atggatttttggagcagggaga

SEQ ID NO: 27286 - RNA, 23 nt, Synthetic Construct
  source 1..23: mol_type = other RNA
tggtaatacgtcgtacttagtgt

SEQ ID NO: 27287 - RNA, 23 nt, Synthetic Construct
  source 1..23: mol_type = other RNA
tggtaatacgtcgtacttagtgt

SEQ ID NO: 27288 - RNA, 16 nt, Synthetic Construct
  source 1..16: mol_type = other RNA
gcggctgtagctcagt

SEQ ID NO: 27289 - RNA, 20 nt, Synthetic Construct
  source 1..20: mol_type = other RNA
tgaggtagcaggttgtgtgg

SEQ ID NO: 27290 - RNA, 20 nt, Synthetic Construct
  source 1..20: mol_type = other RNA
tgaggtagcaggttgtgtgg

SEQ ID NO: 27291 - RNA, 22 nt, Synthetic Construct
  source 1..22: mol_type = other RNA
tgaagtagtaggttgtgtggtt

SEQ ID NO: 27292 - RNA, 16 nt, Synthetic Construct
  source 1..16: mol_type = other RNA
gtctatggccatacca

SEQ ID NO: 27293 - RNA, 16 nt, Synthetic Construct
  source 1..16: mol_type = other RNA
gtctatggccatacca

SEQ ID NO: 27294 - RNA, 21 nt, Synthetic Construct
  source 1..21: mol_type = other RNA
cataaagtagaaagcactact

SEQ ID NO: 27295 - RNA, 21 nt, Synthetic Construct
  source 1..21: mol_type = other RNA
cataaagtagaaagcactact

SEQ ID NO: 27296 - RNA, 23 nt, Synthetic Construct
  source 1..23: mol_type = other RNA
aggtaatacgacgtacttagtgt

SEQ ID NO: 27297 - RNA, 23 nt, Synthetic Construct
  source 1..23: mol_type = other RNA
aggtaatacgacgtacttagtgt

SEQ ID NO: 27298 - RNA, 22 nt, Synthetic Construct
  source 1..22: mol_type = other RNA
taactccttaagcgaatctcgc

SEQ ID NO: 27299 - RNA, 22 nt, Synthetic Construct
  source 1..22: mol_type = other RNA
taactccttaagcgaatctcgc

SEQ ID NO: 27300 - RNA, 22 nt, Synthetic Construct
  source 1..22: mol_type = other RNA
atcacattgccagggatttcca

SEQ ID NO: 27301 - RNA, 22 nt, Synthetic Construct
  source 1..22: mol_type = other RNA
atcacattgccagggatttcca

SEQ ID NO: 27302 - RNA, 19 nt, Synthetic Construct
  source 1..19: mol_type = other RNA
gtactgacgctcatgcacg

SEQ ID NO: 27303 - RNA, 36 nt, Synthetic Construct; identical to SEQ ID NO: 2660
  source 1..36: mol_type = other RNA

SEQ ID NO: 27304 - RNA, 23 nt, Synthetic Construct
  source 1..23: mol_type = other RNA
tgaggtagtaggttgtgtggtta

SEQ ID NO: 27305 - RNA, 23 nt, Synthetic Construct
  source 1..23: mol_type = other RNA
tgaggtagtaggttgtgtggtta

SEQ ID NO: 27306 - RNA, 20 nt, Synthetic Construct
  source 1..20: mol_type = other RNA
tgaggtagtaggttgtgtgg

SEQ ID NO: 27307 - RNA, 20 nt, Synthetic Construct
  source 1..20: mol_type = other RNA
tgaggtagtaggttgtgtgg

SEQ ID NO: 27308 - RNA, 15 nt, Synthetic Construct
  source 1..15: mol_type = other RNA
tccggatcgtagtct

SEQ ID NO: 27309 - RNA, 15 nt, Synthetic Construct
  source 1..15: mol_type = other RNA
tcgagtcgtcctgcg

SEQ ID NO: 27310 - RNA, 24 nt, Synthetic Construct
  source 1..24: mol_type = other RNA
tgtaaacatcctacactctcagct

SEQ ID NO: 27311 - RNA, 21 nt, Synthetic Construct
  source 1..21: mol_type = other RNA
tgaggggcagagagcgagacc

SEQ ID NO: 27312 - RNA, 21 nt, Synthetic Construct
  source 1..21: mol_type = other RNA
tgaggtagtaggttgcgtggt

SEQ ID NO: 27313 - RNA, 21 nt, Synthetic Construct
  source 1..21: mol_type = other RNA
tgaggtagtaggttgcgtggt

SEQ ID NO: 27314 - RNA, 21 nt, Synthetic Construct
  source 1..21: mol_type = other RNA
tgaggggcagagagcgagact

SEQ ID NO: 27315 - RNA, 21 nt, Synthetic Construct
  source 1..21: mol_type = other RNA
tcctgtactgagctgccctga

SEQ ID NO: 27316 - RNA, 22 nt, Synthetic Construct
  source 1..22: mol_type = other RNA
gctcacggaaagagaatgaagc

SEQ ID NO: 27317 - RNA, 23 nt, Synthetic Construct
  source 1..23: mol_type = other RNA
tagtgcaatattgcttatagggt

SEQ ID NO: 27318 - RNA, 21 nt, Synthetic Construct
  source 1..21: mol_type = other RNA
ccctgtactgagctgccccga

SEQ ID NO: 27319 - RNA, 21 nt, Synthetic Construct
  source 1..21: mol_type = other RNA
ccctgtactgagctgccccga

SEQ ID NO: 27320 - RNA, 16 nt, Synthetic Construct
  source 1..16: mol_type = other RNA
gtctacggccatgcca

SEQ ID NO: 27321 - RNA, 24 nt, Synthetic Construct
  source 1..24: mol_type = other RNA
acctggcatacaatgtagatttct

SEQ ID NO: 27322 - RNA, 22 nt, Synthetic Construct
  source 1..22: mol_type = other RNA
tggaatgtaaagaagtatgtac

SEQ ID NO: 27323 - RNA, 22 nt, Synthetic Construct
  source 1..22: mol_type = other RNA
tggaatgtaaagaagtatgtac

SEQ ID NO: 27324 - RNA, 22 nt, Synthetic Construct
  source 1..22: mol_type = other RNA
tgaggtagtaggttatgtggtt

SEQ ID NO: 27325 - RNA, 22 nt, Synthetic Construct
  source 1..22: mol_type = other RNA
tgaggtagtaggttatgtggtt

SEQ ID NO: 27326 - RNA, 30 nt, Synthetic Construct; identical to SEQ ID NO: 2840
  source 1..30: mol_type = other RNA

SEQ ID NO: 27327 - RNA, 30 nt, Synthetic Construct; identical to SEQ ID NO: 2840
  source 1..30: mol_type = other RNA

SEQ ID NO: 27328 - RNA, 23 nt, Synthetic Construct
  source 1..23: mol_type = other RNA
tcctgtgctgagctgccccgaga

SEQ ID NO: 27329 - RNA, 23 nt, Synthetic Construct
  source 1..23: mol_type = other RNA
tcctgtgctgagctgccccgaga

SEQ ID NO: 27330 - RNA, 25 nt, Synthetic Construct
  source 1..25: mol_type = other RNA
cgactcttagcggtggatcactcgg

SEQ ID NO: 27331 - RNA, 25 nt, Synthetic Construct
  source 1..25: mol_type = other RNA
cgactcttagcggtggatcactcgg

SEQ ID NO: 27332 - RNA, 21 nt, Synthetic Construct
  source 1..21: mol_type = other RNA
agcgtgcttgactgcgagact

SEQ ID NO: 27333 - RNA, 24 nt, Synthetic Construct
  source 1..24: mol_type = other RNA
tgtaaacgtccccgactggaagct

SEQ ID NO: 27334 - RNA, 33 nt, Synthetic Construct; identical to SEQ ID NO: 4947
  source 1..33: mol_type = other RNA

SEQ ID NO: 27335 - RNA, 33 nt, Synthetic Construct; identical to SEQ ID NO: 4947
  source 1..33: mol_type = other RNA

SEQ ID NO: 27336 - RNA, 21 nt, Synthetic Construct
  source 1..21: mol_type = other RNA
tcctgtactgggctgccccga

SEQ ID NO: 27337 - RNA, 21 nt, Synthetic Construct
  source 1..21: mol_type = other RNA
tcctgtactgggctgccccga

SEQ ID NO: 27338 - RNA, 19 nt, Synthetic Construct
  source 1..19: mol_type = other RNA
acatgcaagtcgaacggta

SEQ ID NO: 27339 - RNA, 19 nt, Synthetic Construct
  source 1..19: mol_type = other RNA
acatgcaagtcgaacggta

SEQ ID NO: 27340 - RNA, 16 nt, Synthetic Construct
  source 1..16: mol_type = other RNA
gtctacggctatacca

SEQ ID NO: 27341 - RNA, 16 nt, Synthetic Construct
  source 1..16: mol_type = other RNA
gtctacggctatacca

SEQ ID NO: 27342 - RNA, 29 nt, Synthetic Construct
  source 1..29: mol_type = other RNA
gtaatggcgggaactctggacagactgcc

SEQ ID NO: 27343 - RNA, 29 nt, Synthetic Construct
  source 1..29: mol_type = other RNA
gtaatggcgggaactctggacagactgcc

SEQ ID NO: 27344 - RNA, 22 nt, Synthetic Construct
  source 1..22: mol_type = other RNA
tggaatgcaaagaagtatgtat

SEQ ID NO: 27345 - RNA, 22 nt, Synthetic Construct
  source 1..22: mol_type = other RNA
tggaatgcaaagaagtatgtat

SEQ ID NO: 27346 - RNA, 28 nt, Synthetic Construct
  source 1..28: mol_type = other RNA
ccccccactgctaaatttgactggcctt

SEQ ID NO: 27347 - RNA, 27 nt, Synthetic Construct
  source 1..27: mol_type = other RNA
tcctgagtagctcagcggcagagcggg

SEQ ID NO: 27348 - RNA, 27 nt, Synthetic Construct
  source 1..27: mol_type = other RNA
tcctgagtagctcagcggcagagcggg

SEQ ID NO: 27349 - RNA, 22 nt, Synthetic Construct
  source 1..22: mol_type = other RNA
tcctgtactgagctgcctcgag

SEQ ID NO: 27350 - RNA, 22 nt, Synthetic Construct
  source 1..22: mol_type = other RNA
tcctgtactgagctgcctcgag

SEQ ID NO: 27351 - RNA, 22 nt, Synthetic Construct
  source 1..22: mol_type = other RNA
tgaggtaataggttgtgtggtt

SEQ ID NO: 27352 - RNA, 22 nt, Synthetic Construct
  source 1..22: mol_type = other RNA
tgaggtaataggttgtgtggtt

SEQ ID NO: 27353 - RNA, 24 nt, Synthetic Construct
  source 1..24: mol_type = other RNA
tgtagacatccccgactggaagct

SEQ ID NO: 27354 - RNA, 16 nt, Synthetic Construct
  source 1..16: mol_type = other RNA
gccagcagccgcggta

SEQ ID NO: 27355 - RNA, 16 nt, Synthetic Construct
  source 1..16: mol_type = other RNA
gccagcagccgcggta

SEQ ID NO: 27356 - RNA, 22 nt, Synthetic Construct
  source 1..22: mol_type = other RNA
tcctgtactgagctgccccggg

SEQ ID NO: 27357 - RNA, 24 nt, Synthetic Construct
  source 1..24: mol_type = other RNA
ttccccttggggttgtaggaccac

SEQ ID NO: 27358 - RNA, 24 nt, Synthetic Construct
  source 1..24: mol_type = other RNA
ttccccttggggttgtaggaccac

SEQ ID NO: 27359 - RNA, 24 nt, Synthetic Construct
  source 1..24: mol_type = other RNA
tgtagacatccccgactggaagct

SEQ ID NO: 27360 - RNA, 19 nt, Synthetic Construct
  source 1..19: mol_type = other RNA
cacatgcaagtcgaacggt

SEQ ID NO: 27361 - RNA, 21 nt, Synthetic Construct
  source 1..21: mol_type = other RNA
tcctgtgctgagctgccccga

SEQ ID NO: 27362 - RNA, 25 nt, Synthetic Construct
  source 1..25: mol_type = other RNA
tattgcacttgtcccggcctgtttt

SEQ ID NO: 27363 - RNA, 25 nt, Synthetic Construct
  source 1..25: mol_type = other RNA
tattgcacttgtcccggcctgtttt

SEQ ID NO: 27364 - RNA, 15 nt, Synthetic Construct
  source 1..15: mol_type = other RNA
acctgcatcgagggt

SEQ ID NO: 27365 - RNA, 22 nt, Synthetic Construct
  source 1..22: mol_type = other RNA
tggaatgtaaggaagtatgtat

SEQ ID NO: 27366 - RNA, 22 nt, Synthetic Construct
  source 1..22: mol_type = other RNA
tggaatgtaaggaagtatgtat

SEQ ID NO: 27367 - RNA, 21 nt, Synthetic Construct
  source 1..21: mol_type = other RNA
agagtaggacgttgccaggtt

SEQ ID NO: 27368 - RNA, 21 nt, Synthetic Construct
  source 1..21: mol_type = other RNA
agagtaggacgttgccaggtt

SEQ ID NO: 27369 - RNA, 20 nt, Synthetic Construct
  source 1..20: mol_type = other RNA
tgaggtagtaggttgtgtag

SEQ ID NO: 27370 - RNA, 21 nt, Synthetic Construct
  source 1..21: mol_type = other RNA
tcctgtactgagccgccccga

SEQ ID NO: 27371 - RNA, 21 nt, Synthetic Construct
  source 1..21: mol_type = other RNA
tcctgtactgagccgccccga

SEQ ID NO: 27372 - RNA, 29 nt, Synthetic Construct
  source 1..29: mol_type = other RNA
tgaaggtgggttgtgaagcctgctggagg

SEQ ID NO: 27373 - RNA, 16 nt, Synthetic Construct
  source 1..16: mol_type = other RNA
gcggctgtagctcagt

SEQ ID NO: 27374 - RNA, 16 nt, Synthetic Construct
  source 1..16: mol_type = other RNA
gcggctgtagctcagt

SEQ ID NO: 27375 - RNA, 17 nt, Synthetic Construct
  source 1..17: mol_type = other RNA
cctcgcgcgattggagc

SEQ ID NO: 27376 - RNA, 21 nt, Synthetic Construct
  source 1..21: mol_type = other RNA
tgaggggcagagagcgaggct

SEQ ID NO: 27377 - RNA, 21 nt, Synthetic Construct
  source 1..21: mol_type = other RNA
tgaggggcagagagcgaggct

SEQ ID NO: 27378 - RNA, 19 nt, Synthetic Construct
  source 1..19: mol_type = other RNA
gctattgacgaccgtaccg

SEQ ID NO: 27379 - RNA, 19 nt, Synthetic Construct
  source 1..19: mol_type = other RNA
gctattgacgaccgtaccg

SEQ ID NO: 27380 - RNA, 22 nt, Synthetic Construct
  source 1..22: mol_type = other RNA
tcctatactgagctgccccgag

SEQ ID NO: 27381 - RNA, 22 nt, Synthetic Construct
  source 1..22: mol_type = other RNA
tcactgatcgagtcgtcctgcg

SEQ ID NO: 27382 - RNA, 22 nt, Synthetic Construct
  source 1..22: mol_type = other RNA
tcactgatcgagtcgtcctgcg

SEQ ID NO: 27383 - RNA, 24 nt, Synthetic Construct
  source 1..24: mol_type = other RNA
tgtcagtttgtcaaataccccaat

SEQ ID NO: 27384 - RNA, 24 nt, Synthetic Construct
  source 1..24: mol_type = other RNA
tgtcagtttgtcaaataccccaat

SEQ ID NO: 27385 - RNA, 22 nt, Synthetic Construct
  source 1..22: mol_type = other RNA
tagcatatcgagcctgagaaca

SEQ ID NO: 27386 - RNA, 22 nt, Synthetic Construct
  source 1..22: mol_type = other RNA
tagcatatcgagcctgagaaca

SEQ ID NO: 27387 - RNA, 15 nt, Synthetic Construct
  source 1..15: mol_type = other RNA
ggtcatcgtcaggct

SEQ ID NO: 27388 - RNA, 15 nt, Synthetic Construct
  source 1..15: mol_type = other RNA
ggtcatcgtcaggct

SEQ ID NO: 27389 - RNA, 23 nt, Synthetic Construct
  source 1..23: mol_type = other RNA
tggtgatacgacgtacttagtgt

SEQ ID NO: 27390 - RNA, 18 nt, Synthetic Construct
  source 1..18: mol_type = other RNA
gtccccttcgtctagagg

SEQ ID NO: 27391 - RNA, 20 nt, Synthetic Construct
  source 1..20: mol_type = other RNA
gcaataacaggtctgtgatg

SEQ ID NO: 27392 - RNA, 20 nt, Synthetic Construct
  source 1..20: mol_type = other RNA
gcaataacaggtctgtgatg

SEQ ID NO: 27393 - RNA, 22 nt, Synthetic Construct
  source 1..22: mol_type = other RNA
tattgcacttgccccggcctgt

SEQ ID NO: 27394 - RNA, 15 nt, Synthetic Construct
  source 1..15: mol_type = other RNA
ggccgtcgtcagctc

SEQ ID NO: 27395 - RNA, 23 nt, Synthetic Construct
  source 1..23: mol_type = other RNA
cggtaatacgacgtacttagtgt

SEQ ID NO: 27396 - RNA, 23 nt, Synthetic Construct
  source 1..23: mol_type = other RNA
cggtaatacgacgtacttagtgt

SEQ ID NO: 27397 - RNA, 23 nt, Synthetic Construct
  source 1..23: mol_type = other RNA
tcctgtaccgagctgccccgaga

SEQ ID NO: 27398 - RNA, 23 nt, Synthetic Construct
  source 1..23: mol_type = other RNA
tcctgtaccgagctgccccgaga

SEQ ID NO: 27399 - RNA, 31 nt, Synthetic Construct; identical to SEQ ID NO: 5506
  source 1..31: mol_type = other RNA

SEQ ID NO: 27400 - RNA, 20 nt, Synthetic Construct
  source 1..20: mol_type = other RNA
tgaggtagtaggtcgtgtgg

SEQ ID NO: 27401 - RNA, 16 nt, Synthetic Construct
  source 1..16: mol_type = other RNA
gtctacggccatgcca

SEQ ID NO: 27402 - RNA, 19 nt, Synthetic Construct
  source 1..19: mol_type = other RNA
agctacattgtctgctggg

SEQ ID NO: 27403 - RNA, 23 nt, Synthetic Construct
  source 1..23: mol_type = other RNA
cattgcacttgtctcggtctgaa

SEQ ID NO: 27404 - RNA, 23 nt, Synthetic Construct
  source 1..23: mol_type = other RNA
cattgcacttgtctcggtctgaa

SEQ ID NO: 27405 - RNA, 21 nt, Synthetic Construct
  source 1..21: mol_type = other RNA
cgtaccgtgagtaataatgcg

SEQ ID NO: 27406 - RNA, 21 nt, Synthetic Construct
  source 1..21: mol_type = other RNA
cgtaccgtgagtaataatgcg

SEQ ID NO: 27407 - RNA, 22 nt, Synthetic Construct
  source 1..22: mol_type = other RNA
tagcagcacgtaaatatcggcg

SEQ ID NO: 27408 - RNA, 22 nt, Synthetic Construct
  source 1..22: mol_type = other RNA
tagcagcacgtaaatatcggcg

SEQ ID NO: 27409 - RNA, 21 nt, Synthetic Construct
  source 1..21: mol_type = other RNA
acacatgcaagtcgaacggta

SEQ ID NO: 27410 - RNA, 21 nt, Synthetic Construct
  source 1..21: mol_type = other RNA
acacatgcaagtcgaacggta

SEQ ID NO: 27411 - RNA, 21 nt, Synthetic Construct
  source 1..21: mol_type = other RNA
tgaggtagtaggttgtgcggt

SEQ ID NO: 27412 - RNA, 21 nt, Synthetic Construct
  source 1..21: mol_type = other RNA
tgaggtagtaggttgtgcggt

SEQ ID NO: 27413 - RNA, 22 nt, Synthetic Construct
  source 1..22: mol_type = other RNA
tgaggcagtaggttgtgtggtt

SEQ ID NO: 27414 - RNA, 23 nt, Synthetic Construct
  source 1..23: mol_type = other RNA
tgaggaagtaggttgtgtggttt

SEQ ID NO: 27415 - RNA, 23 nt, Synthetic Construct
  source 1..23: mol_type = other RNA
tgaggaagtaggttgtgtggttt

SEQ ID NO: 27416 - RNA, 20 nt, Synthetic Construct
  source 1..20: mol_type = other RNA
ccttggggttgtaggaccac

SEQ ID NO: 27417 - RNA, 20 nt, Synthetic Construct
  source 1..20: mol_type = other RNA
ccttggggttgtaggaccac

SEQ ID NO: 27418 - RNA, 23 nt, Synthetic Construct
  source 1..23: mol_type = other RNA
tcactgatcgagtcgtcctgcgc

SEQ ID NO: 27419 - RNA, 23 nt, Synthetic Construct
  source 1..23: mol_type = other RNA
tcctgtactgagctgtcccgaga

SEQ ID NO: 27420 - RNA, 23 nt, Synthetic Construct
  source 1..23: mol_type = other RNA
tcctgtactgagctgtcccgaga

SEQ ID NO: 27421 - RNA, 23 nt, Synthetic Construct
  source 1..23: mol_type = other RNA
caaagtgcttacagtgcaggtag

SEQ ID NO: 27422 - RNA, 23 nt, Synthetic Construct
  source 1..23: mol_type = other RNA
tggaatgtaaagaagtatgtacc

SEQ ID NO: 27423 - RNA, 23 nt, Synthetic Construct
  source 1..23: mol_type = other RNA
tggaatgtaaagaagtatgtacc

SEQ ID NO: 27424 - RNA, 16 nt, Synthetic Construct
  source 1..16: mol_type = other RNA
gtctacggccatacta

SEQ ID NO: 27425 - RNA, 19 nt, Synthetic Construct
  source 1..19: mol_type = other RNA
gctattgacgaccgtaccg

SEQ ID NO: 27426 - RNA, 16 nt, Synthetic Construct
  source 1..16: mol_type = other RNA
atctacggccatacca

SEQ ID NO: 27427 - RNA, 16 nt, Synthetic Construct
  source 1..16: mol_type = other RNA
atctacggccatacca

SEQ ID NO: 27428 - RNA, 22 nt, Synthetic Construct
  source 1..22: mol_type = other RNA
tgaggcagtagtttgtgctgtt

SEQ ID NO: 27429 - RNA, 22 nt, Synthetic Construct
  source 1..22: mol_type = other RNA
tgaggcagtagtttgtgctgtt

SEQ ID NO: 27430 - RNA, 23 nt, Synthetic Construct
  source 1..23: mol_type = other RNA
tgaggtagtaggttgcgtggttt

SEQ ID NO: 27431 - RNA, 18 nt, Synthetic Construct
  source 1..18: mol_type = other RNA
aagcggtggatgatgtgg

SEQ ID NO: 27432 - RNA, 18 nt, Synthetic Construct
  source 1..18: mol_type = other RNA
aagcggtggatgatgtgg

SEQ ID NO: 27433 - RNA, 19 nt, Synthetic Construct
  source 1..19: mol_type = other RNA
aggacagtgaaacgagtca

SEQ ID NO: 27434 - RNA, 19 nt, Synthetic Construct
  source 1..19: mol_type = other RNA
aggacagtgaaacgagtca

SEQ ID NO: 27435 - RNA, 25 nt, Synthetic Construct
  source 1..25: mol_type = other RNA
ttgaggatatgagatcgagacgaca

SEQ ID NO: 27436 - RNA, 25 nt, Synthetic Construct
  source 1..25: mol_type = other RNA
ttgaggatatgagatcgagacgaca

SEQ ID NO: 27437 - RNA, 22 nt, Synthetic Construct
  source 1..22: mol_type = other RNA
tgttgcacttgtcccggcctgt

SEQ ID NO: 27438 - RNA, 22 nt, Synthetic Construct
  source 1..22: mol_type = other RNA
tgttgcacttgtcccggcctgt

SEQ ID NO: 27439 - RNA, 37 nt, Synthetic Construct; identical to SEQ ID NO: 7503
  source 1..37: mol_type = other RNA

SEQ ID NO: 27440 - RNA, 37 nt, Synthetic Construct; identical to SEQ ID NO: 7503
  source 1..37: mol_type = other RNA

SEQ ID NO: 27441 - RNA, 24 nt, Synthetic Construct
  source 1..24: mol_type = other RNA
tagcagcacgtaaatattggcgtt

SEQ ID NO: 27442 - RNA, 24 nt, Synthetic Construct
  source 1..24: mol_type = other RNA
tagcagcacgtaaatattggcgtt

SEQ ID NO: 27443 - RNA, 22 nt, Synthetic Construct
  source 1..22: mol_type = other RNA
catagcacttgtctcggtctga

SEQ ID NO: 27444 - RNA, 22 nt, Synthetic Construct
  source 1..22: mol_type = other RNA
catagcacttgtctcggtctga

SEQ ID NO: 27445 - RNA, 17 nt, Synthetic Construct
  source 1..17: mol_type = other RNA
tcagtagctcgaggaaa

SEQ ID NO: 27446 - RNA, 17 nt, Synthetic Construct
  source 1..17: mol_type = other RNA
tcagtagctcgaggaaa

SEQ ID NO: 27447 - RNA, 22 nt, Synthetic Construct
  source 1..22: mol_type = other RNA
cgactggtaactgggatgaagt

SEQ ID NO: 27448 - RNA, 22 nt, Synthetic Construct
  source 1..22: mol_type = other RNA
cgactggtaactgggatgaagt

SEQ ID NO: 27449 - RNA, 22 nt, Synthetic Construct
  source 1..22: mol_type = other RNA
tcctgtactgagctgccccaag

SEQ ID NO: 27450 - RNA, 22 nt, Synthetic Construct
  source 1..22: mol_type = other RNA
tgaggaagtaggttgtgtggtt

SEQ ID NO: 27451 - RNA, 24 nt, Synthetic Construct
  source 1..24: mol_type = other RNA
tagcagcacgtaaatattggcgtt

SEQ ID NO: 27452 - RNA, 16 nt, Synthetic Construct
  source 1..16: mol_type = other RNA
accgcttttgtcaggg

SEQ ID NO: 27453 - RNA, 17 nt, Synthetic Construct
  source 1..17: mol_type = other RNA
ccagtaaacggcggccg

SEQ ID NO: 27454 - RNA, 17 nt, Synthetic Construct
  source 1..17: mol_type = other RNA
ccagtaaacggcggccg

SEQ ID NO: 27455 - RNA, 22 nt, Synthetic Construct
  source 1..22: mol_type = other RNA
tcctgtactgtgctgccccgag

SEQ ID NO: 27456 - RNA, 21 nt, Synthetic Construct
  source 1..21: mol_type = other RNA
tgaggtagtaggttgtgtgga

SEQ ID NO: 27457 - RNA, 21 nt, Synthetic Construct
  source 1..21: mol_type = other RNA
tgaggtagtaggttgtgtgga

SEQ ID NO: 27458 - RNA, 15 nt, Synthetic Construct
  source 1..15: mol_type = other RNA
cccagaaacccggtc

SEQ ID NO: 27459 - RNA, 20 nt, Synthetic Construct
  source 1..20: mol_type = other RNA
tgaggtagtaggttgcgtgg

SEQ ID NO: 27460 - RNA, 21 nt, Synthetic Construct
  source 1..21: mol_type = other RNA
tcccgtactgagctgccccga

SEQ ID NO: 27461 - RNA, 21 nt, Synthetic Construct
  source 1..21: mol_type = other RNA
tcccgtactgagctgccccga

SEQ ID NO: 27462 - RNA, 23 nt, Synthetic Construct
  source 1..23: mol_type = other RNA
tggggtagtaggttgtgtggttt

SEQ ID NO: 27463 - RNA, 23 nt, Synthetic Construct
  source 1..23: mol_type = other RNA
tcctgtactgagctgccctgaga

SEQ ID NO: 27464 - RNA, 23 nt, Synthetic Construct
  source 1..23: mol_type = other RNA
tcctgtactgagctgccctgaga

SEQ ID NO: 27465 - RNA, 22 nt, Synthetic Construct
  source 1..22: mol_type = other RNA
aatggcgccactagggttgtgt

SEQ ID NO: 27466 - RNA, 23 nt, Synthetic Construct
  source 1..23: mol_type = other RNA
tggaatgtaaagaagtatgtata

SEQ ID NO: 27467 - RNA, 23 nt, Synthetic Construct
  source 1..23: mol_type = other RNA
tggaatgtaaagaagtatgtata

SEQ ID NO: 27468 - RNA, 18 nt, Synthetic Construct
  source 1..18: mol_type = other RNA
ctaatgagactgccggtg

SEQ ID NO: 27469 - RNA, 18 nt, Synthetic Construct
  source 1..18: mol_type = other RNA
ctaatgagactgccggtg

SEQ ID NO: 27470 - RNA, 16 nt, Synthetic Construct
  source 1..16: mol_type = other RNA
agttgaccgcctgggg

SEQ ID NO: 27471 - RNA, 17 nt, Synthetic Construct
  source 1..17: mol_type = other RNA
ggcccttatgggtaggg

SEQ ID NO: 27472 - RNA, 19 nt, Synthetic Construct
  source 1..19: mol_type = other RNA
cggaagaaggggtgcctgg

SEQ ID NO: 27473 - RNA, 19 nt, Synthetic Construct
  source 1..19: mol_type = other RNA
cggaagaaggggtgcctgg

SEQ ID NO: 27474 - RNA, 23 nt, Synthetic Construct
  source 1..23: mol_type = other RNA
tcctgtactgggctgccccgaga

SEQ ID NO: 27475 - RNA, 23 nt, Synthetic Construct
  source 1..23: mol_type = other RNA
tcctgtactgggctgccccgaga

SEQ ID NO: 27476 - RNA, 31 nt, Synthetic Construct; identical to SEQ ID NO: 5943
  source 1..31: mol_type = other RNA

SEQ ID NO: 27477 - RNA, 31 nt, Synthetic Construct; identical to SEQ ID NO: 5943
  source 1..31: mol_type = other RNA

SEQ ID NO: 27478 - RNA, 22 nt, Synthetic Construct
  source 1..22: mol_type = other RNA
tgaggtagtagcttgtgctgtt

SEQ ID NO: 27479 - RNA, 22 nt, Synthetic Construct
  source 1..22: mol_type = other RNA
tgaggtagtagcttgtgctgtt

SEQ ID NO: 27480 - RNA, 44 nt, Synthetic Construct; identical to SEQ ID NO: 5536
  source 1..44: mol_type = other RNA

SEQ ID NO: 27481 - RNA, 27 nt, Synthetic Construct
  source 1..27: mol_type = other RNA
ccccccactgctaaatctgactggctt

SEQ ID NO: 27482 - RNA, 23 nt, Synthetic Construct
  source 1..23: mol_type = other RNA
tggcagtgtcttagctggttgtt

SEQ ID NO: 27483 - RNA, 23 nt, Synthetic Construct
  source 1..23: mol_type = other RNA
tggcagtgtcttagctggttgtt

SEQ ID NO: 27484 - RNA, 32 nt, Synthetic Construct; identical to SEQ ID NO: 2435
  source 1..32: mol_type = other RNA

SEQ ID NO: 27485 - RNA, 21 nt, Synthetic Construct
  source 1..21: mol_type = other RNA
cataaagtagaaagcactact

SEQ ID NO: 27486 - RNA, 21 nt, Synthetic Construct
  source 1..21: mol_type = other RNA
cataaagtagaaagcactact

SEQ ID NO: 27487 - RNA, 15 nt, Synthetic Construct
  source 1..15: mol_type = other RNA
accggaggaaggtgg

SEQ ID NO: 27488 - RNA, 22 nt, Synthetic Construct
  source 1..22: mol_type = other RNA
tgaggtggtagtttgtgctgtt

SEQ ID NO: 27489 - RNA, 22 nt, Synthetic Construct
  source 1..22: mol_type = other RNA
tgaggtggtagtttgtgctgtt

SEQ ID NO: 27490 - RNA, 15 nt, Synthetic Construct
  source 1..15: mol_type = other RNA
gtcgacgtatagggt

SEQ ID NO: 27491 - RNA, 21 nt, Synthetic Construct
  source 1..21: mol_type = other RNA
tcctgtacagagctgccccga

SEQ ID NO: 27492 - RNA, 21 nt, Synthetic Construct
  source 1..21: mol_type = other RNA
tcctgtacagagctgccccga

SEQ ID NO: 27493 - RNA, 20 nt, Synthetic Construct
  source 1..20: mol_type = other RNA
tcctgtaccgatcaatagtg

SEQ ID NO: 27494 - RNA, 20 nt, Synthetic Construct
  source 1..20: mol_type = other RNA
tcctgtaccgatcaatagtg

SEQ ID NO: 27495 - RNA, 17 nt, Synthetic Construct
  source 1..17: mol_type = other RNA
gtcgacgtatagggtgt

SEQ ID NO: 27496 - RNA, 16 nt, Synthetic Construct
  source 1..16: mol_type = other RNA
ctctacggccatacca

SEQ ID NO: 27497 - RNA, 17 nt, Synthetic Construct
  source 1..17: mol_type = other RNA
ccagtaaacggcggccg

SEQ ID NO: 27498 - RNA, 23 nt, Synthetic Construct
  source 1..23: mol_type = other RNA
tgaggtagtaggttgtgtggttc

SEQ ID NO: 27499 - RNA, 19 nt, Synthetic Construct
  source 1..19: mol_type = other RNA
agctacattgtctgctggg

SEQ ID NO: 27500 - RNA, 19 nt, Synthetic Construct
  source 1..19: mol_type = other RNA
agctacattgtctgctggg

SEQ ID NO: 27501 - RNA, 22 nt, Synthetic Construct
  source 1..22: mol_type = other RNA
tatagcacttgtcccggcctgt

SEQ ID NO: 27502 - RNA, 22 nt, Synthetic Construct
  source 1..22: mol_type = other RNA
tatagcacttgtcccggcctgt

SEQ ID NO: 27503 - RNA, 23 nt, Synthetic Construct
  source 1..23: mol_type = other RNA
tggtaataagacgtacttagtgt

SEQ ID NO: 27504 - RNA, 23 nt, Synthetic Construct
  source 1..23: mol_type = other RNA
tggtaataagacgtacttagtgt

SEQ ID NO: 27505 - RNA, 23 nt, Synthetic Construct
  source 1..23: mol_type = other RNA
tgtcagtttgccaaataccccaa

SEQ ID NO: 27506 - RNA, 20 nt, Synthetic Construct
  source 1..20: mol_type = other RNA
tggggtagtaggttgtgtgg

SEQ ID NO: 27507 - RNA, 20 nt, Synthetic Construct
  source 1..20: mol_type = other RNA
tggggtagtaggttgtgtgg

SEQ ID NO: 27508 - RNA, 21 nt, Synthetic Construct
  source 1..21: mol_type = other RNA
tgaagtagtaggttgtgtggt

SEQ ID NO: 27509 - RNA, 21 nt, Synthetic Construct
  source 1..21: mol_type = other RNA
tgaagtagtaggttgtgtggt

SEQ ID NO: 27510 - RNA, 20 nt, Synthetic Construct
  source 1..20: mol_type = other RNA
acccttgtcattagttgcta

SEQ ID NO: 27511 - RNA, 22 nt, Synthetic Construct
  source 1..22: mol_type = other RNA
tccccttggggttgtaggacca

SEQ ID NO: 27512 - RNA, 22 nt, Synthetic Construct
  source 1..22: mol_type = other RNA
tccccttggggttgtaggacca

SEQ ID NO: 27513 - RNA, 23 nt, Synthetic Construct
  source 1..23: mol_type = other RNA
caaagtgctgttcgtgcaggtgg

SEQ ID NO: 27514 - RNA, 16 nt, Synthetic Construct
  source 1..16: mol_type = other RNA
gtctacggccgtacca

SEQ ID NO: 27515 - RNA, 20 nt, Synthetic Construct
  source 1..20: mol_type = other RNA
tgaggcagtaggttgtgtgg

SEQ ID NO: 27516 - RNA, 20 nt, Synthetic Construct
  source 1..20: mol_type = other RNA
tgaggcagtaggttgtgtgg

SEQ ID NO: 27517 - RNA, 17 nt, Synthetic Construct
  source 1..17: mol_type = other RNA
cacggcccagactccta

SEQ ID NO: 27518 - RNA, 15 nt, Synthetic Construct
  source 1..15: mol_type = other RNA
gtagctcgttgggct

SEQ ID NO: 27519 - RNA, 15 nt, Synthetic Construct
  source 1..15: mol_type = other RNA
gtccggatcgtagtc

SEQ ID NO: 27520 - RNA, 23 nt, Synthetic Construct
  source 1..23: mol_type = other RNA
cccagtgttcagactacctgttc

SEQ ID NO: 27521 - RNA, 20 nt, Synthetic Construct
  source 1..20: mol_type = other RNA
tgaggtagtaggttgtgcgg

SEQ ID NO: 27522 - RNA, 20 nt, Synthetic Construct
  source 1..20: mol_type = other RNA
tgaggtagtaggttgtgcgg

SEQ ID NO: 27523 - RNA, 22 nt, Synthetic Construct
  source 1..22: mol_type = other RNA
tagcagcacgtaaatattggtg

SEQ ID NO: 27524 - RNA, 22 nt, Synthetic Construct
  source 1..22: mol_type = other RNA
tagcagcacgtaaatattggtg

SEQ ID NO: 27525 - RNA, 15 nt, Synthetic Construct
  source 1..15: mol_type = other RNA
gttcggaagattttc

SEQ ID NO: 27526 - RNA, 15 nt, Synthetic Construct
  source 1..15: mol_type = other RNA
gttcggaagattttc

SEQ ID NO: 27527 - RNA, 22 nt, Synthetic Construct
  source 1..22: mol_type = other RNA
tcgaaccgtgagtaataatgcg

SEQ ID NO: 27528 - RNA, 23 nt, Synthetic Construct
  source 1..23: mol_type = other RNA
agcagcattgtacagggctatgt

SEQ ID NO: 27529 - RNA, 23 nt, Synthetic Construct
  source 1..23: mol_type = other RNA
agcagcattgtacagggctatgt

SEQ ID NO: 27530 - RNA, 25 nt, Synthetic Construct
  source 1..25: mol_type = other RNA
ttgaggatacgagatcgagacgaca

SEQ ID NO: 27531 - RNA, 25 nt, Synthetic Construct
  source 1..25: mol_type = other RNA
ttgaggatacgagatcgagacgaca

SEQ ID NO: 27532 - RNA, 22 nt, Synthetic Construct
  source 1..22: mol_type = other RNA
tccagtactgagctgccccgag

SEQ ID NO: 27533 - RNA, 17 nt, Synthetic Construct
  source 1..17: mol_type = other RNA
tgccagcagccgcggta

SEQ ID NO: 27534 - RNA, 23 nt, Synthetic Construct
  source 1..23: mol_type = other RNA
tccctggtggtctagtggttagg

SEQ ID NO: 27535 - RNA, 23 nt, Synthetic Construct
  source 1..23: mol_type = other RNA
tccctggtggtctagtggttagg

SEQ ID NO: 27536 - RNA, 22 nt, Synthetic Construct
  source 1..22: mol_type = other RNA
gtagtgtttcctactttatgga

SEQ ID NO: 27537 - RNA, 23 nt, Synthetic Construct
  source 1..23: mol_type = other RNA
tcctgtactgggctgccccgagt

SEQ ID NO: 27538 - RNA, 21 nt, Synthetic Construct
  source 1..21: mol_type = other RNA
tgaggtaggaggttgtatagt

SEQ ID NO: 27539 - RNA, 35 nt, Synthetic Construct; identical to SEQ ID NO: 1497
  source 1..35: mol_type = other RNA

SEQ ID NO: 27540 - RNA, 23 nt, Synthetic Construct
  source 1..23: mol_type = other RNA
nggtaatacgacgtacttagtgt

SEQ ID NO: 27541 - RNA, 16 nt, Synthetic Construct
  source 1..16: mol_type = other RNA
tgcgtagatatgcgga

SEQ ID NO: 27542 - RNA, 23 nt, Synthetic Construct
  source 1..23: mol_type = other RNA
ttcaagtaattcaggataggttt

SEQ ID NO: 27543 - RNA, 21 nt, Synthetic Construct
  source 1..21: mol_type = other RNA
atcacattgccagggatttcc

SEQ ID NO: 27544 - RNA, 21 nt, Synthetic Construct
  source 1..21: mol_type = other RNA
atcacattgccagggatttcc

SEQ ID NO: 27545 - RNA, 43 nt, Synthetic Construct; identical to SEQ ID NO: 6202
  source 1..43: mol_type = other RNA

SEQ ID NO: 27546 - RNA, 23 nt, Synthetic Construct
  source 1..23: mol_type = other RNA
tcctgtactgagccgccccgagt

SEQ ID NO: 27547 - RNA, 23 nt, Synthetic Construct
  source 1..23: mol_type = other RNA
tcctgtactgagccgccccgagt

SEQ ID NO: 27548 - RNA, 17 nt, Synthetic Construct
  source 1..17: mol_type = other RNA
atcgtgacgatagtgca

SEQ ID NO: 27549 - RNA, 17 nt, Synthetic Construct
  source 1..17: mol_type = other RNA
atcgtgacgatagtgca

SEQ ID NO: 27550 - RNA, 16 nt, Synthetic Construct
  source 1..16: mol_type = other RNA
gtctacggccatacaa

SEQ ID NO: 27551 - RNA, 19 nt, Synthetic Construct
  source 1..19: mol_type = other RNA
aacagtcaggatgttggct

SEQ ID NO: 27552 - RNA, 19 nt, Synthetic Construct
  source 1..19: mol_type = other RNA
aacagtcaggatgttggct

SEQ ID NO: 27553 - RNA, 17 nt, Synthetic Construct
  source 1..17: mol_type = other RNA
acagtcaggatgttggc

SEQ ID NO: 27554 - RNA, 17 nt, Synthetic Construct
  source 1..17: mol_type = other RNA
acagtcaggatgttggc

SEQ ID NO: 27555 - RNA, 22 nt, Synthetic Construct
  source 1..22: mol_type = other RNA
gtcagtttgtcaaataccccaa

SEQ ID NO: 27556 - RNA, 22 nt, Synthetic Construct
  source 1..22: mol_type = other RNA
gtcagtttgtcaaataccccaa

SEQ ID NO: 27557 - RNA, 23 nt, Synthetic Construct
  source 1..23: mol_type = other RNA
ttggtccccttcaaccagctgtt

SEQ ID NO: 27558 - RNA, 28 nt, Synthetic Construct
  source 1..28: mol_type = other RNA
ccccccactgctaaatttggctggcttt

SEQ ID NO: 27559 - RNA, 28 nt, Synthetic Construct
  source 1..28: mol_type = other RNA
ccccccactgctaaatttggctggcttt

SEQ ID NO: 27560 - RNA, 22 nt, Synthetic Construct
  source 1..22: mol_type = other RNA
tcctgtgctgagctgccccgag

SEQ ID NO: 27561 - RNA, 22 nt, Synthetic Construct
  source 1..22: mol_type = other RNA
tcctgtgctgagctgccccgag

SEQ ID NO: 27562 - RNA, 17 nt, Synthetic Construct
  source 1..17: mol_type = other RNA
gggtctgtagctcagtc

SEQ ID NO: 27563 - RNA, 18 nt, Synthetic Construct
  source 1..18: mol_type = other RNA
cataaagtagaaagcact

SEQ ID NO: 27564 - RNA, 18 nt, Synthetic Construct
  source 1..18: mol_type = other RNA
cataaagtagaaagcact

SEQ ID NO: 27565 - RNA, 16 nt, Synthetic Construct
  source 1..16: mol_type = other RNA
gtccacggccatacca

SEQ ID NO: 27566 - RNA, 16 nt, Synthetic Construct
  source 1..16: mol_type = other RNA
gtccacggccatacca

SEQ ID NO: 27567 - RNA, 21 nt, Synthetic Construct
  source 1..21: mol_type = other RNA
tgaggtagtaggttgtataga

SEQ ID NO: 27568 - RNA, 21 nt, Synthetic Construct
  source 1..21: mol_type = other RNA
tgaggtagtaggttgtataga

SEQ ID NO: 27569 - RNA, 23 nt, Synthetic Construct
  source 1..23: mol_type = other RNA
tcctgtactgagctgccctgaga

SEQ ID NO: 27570 - RNA, 25 nt, Synthetic Construct
  source 1..25: mol_type = other RNA
ttgaggatatgagatagagacgaca

SEQ ID NO: 27571 - RNA, 22 nt, Synthetic Construct
  source 1..22: mol_type = other RNA
catagcacttgtctcggtctga

SEQ ID NO: 27572 - RNA, 30 nt, Synthetic Construct; identical to SEQ ID NO: 6467
  source 1..30: mol_type = other RNA

SEQ ID NO: 27573 - RNA, 30 nt, Synthetic Construct; identical to SEQ ID NO: 6467
  source 1..30: mol_type = other RNA

SEQ ID NO: 27574 - RNA, 15 nt, Synthetic Construct
  source 1..15: mol_type = other RNA
acccttgtcattagt

SEQ ID NO: 27575 - RNA, 22 nt, Synthetic Construct
  source 1..22: mol_type = other RNA
tgtggtagtagtttgtgctgtt

SEQ ID NO: 27576 - RNA, 23 nt, Synthetic Construct
  source 1..23: mol_type = other RNA
tcctgtaccgagctgccccgagt

SEQ ID NO: 27577 - RNA, 23 nt, Synthetic Construct
  source 1..23: mol_type = other RNA
tcctgtaccgagctgccccgagt

SEQ ID NO: 27578 - RNA, 25 nt, Synthetic Construct
  source 1..25: mol_type = other RNA
ttgaggatatgagatagagacgaca

SEQ ID NO: 27579 - RNA, 25 nt, Synthetic Construct
  source 1..25: mol_type = other RNA
ttgaggatatgagatagagacgaca

SEQ ID NO: 27580 - RNA, 22 nt, Synthetic Construct
  source 1..22: mol_type = other RNA
tatagcacttgtcccggcctgt

SEQ ID NO: 27581 - RNA, 22 nt, Synthetic Construct
  source 1..22: mol_type = other RNA
tatagcacttgtcccggcctgt

SEQ ID NO: 27582 - RNA, 21 nt, Synthetic Construct
  source 1..21: mol_type = other RNA
tgaggtagtagtttgcgctgt

SEQ ID NO: 27583 - RNA, 23 nt, Synthetic Construct
  source 1..23: mol_type = other RNA
cgctcacggaaagagaatgaagc

SEQ ID NO: 27584 - RNA, 24 nt, Synthetic Construct
  source 1..24: mol_type = other RNA
agcagcattgtacagggctatgat

SEQ ID NO: 27585 - RNA, 24 nt, Synthetic Construct
  source 1..24: mol_type = other RNA
agcagcattgtacagggctatgat

SEQ ID NO: 27586 - RNA, 22 nt, Synthetic Construct
  source 1..22: mol_type = other RNA
tcctgtactgagctgcctcgag

SEQ ID NO: 27587 - RNA, 22 nt, Synthetic Construct
  source 1..22: mol_type = other RNA
tcctgtactgagctaccccgag

SEQ ID NO: 27588 - RNA, 22 nt, Synthetic Construct
  source 1..22: mol_type = other RNA
tcctgtactgagctaccccgag

SEQ ID NO: 27589 - RNA, 24 nt, Synthetic Construct
  source 1..24: mol_type = other RNA
tgtaaacatccccgactggaagtt

SEQ ID NO: 27590 - RNA, 16 nt, Synthetic Construct
  source 1..16: mol_type = other RNA
acggcgggagtaacta

SEQ ID NO: 27591 - RNA, 16 nt, Synthetic Construct
  source 1..16: mol_type = other RNA
acggcgggagtaacta

SEQ ID NO: 27592 - RNA, 25 nt, Synthetic Construct
  source 1..25: mol_type = other RNA
ggtaaaatcgctgagtgaagcattg

SEQ ID NO: 27593 - RNA, 25 nt, Synthetic Construct
  source 1..25: mol_type = other RNA
ggtaaaatcgctgagtgaagcattg

SEQ ID NO: 27594 - RNA, 23 nt, Synthetic Construct
  source 1..23: mol_type = other RNA
aggtaatacgacgtacttagtgt

SEQ ID NO: 27595 - RNA, 19 nt, Synthetic Construct
  source 1..19: mol_type = other RNA
tcctgtaccgatcaatagt

SEQ ID NO: 27596 - RNA, 33 nt, Synthetic Construct; identical to SEQ ID NO: 7469
  source 1..33: mol_type = other RNA

SEQ ID NO: 27597 - RNA, 15 nt, Synthetic Construct
  source 1..15: mol_type = other RNA
gtccggcccgaggca

SEQ ID NO: 27598 - RNA, 35 nt, Synthetic Construct; identical to SEQ ID NO: 2505
  source 1..35: mol_type = other RNA

SEQ ID NO: 27599 - RNA, 21 nt, Synthetic Construct
  source 1..21: mol_type = other RNA
tgaggtagtaggctgtgtggt

SEQ ID NO: 27600 - RNA, 21 nt, Synthetic Construct
  source 1..21: mol_type = other RNA
tgaggtagtaggctgtgtggt

SEQ ID NO: 27601 - RNA, 22 nt, Synthetic Construct
  source 1..22: mol_type = other RNA
tattgcacttgccccggcctgt

SEQ ID NO: 27602 - RNA, 22 nt, Synthetic Construct
  source 1..22: mol_type = other RNA
tattgcacttgccccggcctgt

SEQ ID NO: 27603 - RNA, 20 nt, Synthetic Construct
  source 1..20: mol_type = other RNA
caaagtgctgttcgtgcagg

SEQ ID NO: 27604 - RNA, 20 nt, Synthetic Construct
  source 1..20: mol_type = other RNA
caaagtgctgttcgtgcagg

SEQ ID NO: 27605 - RNA, 30 nt, Synthetic Construct; identical to SEQ ID NO: 6405
  source 1..30: mol_type = other RNA

SEQ ID NO: 27606 - RNA, 30 nt, Synthetic Construct; identical to SEQ ID NO: 6405
  source 1..30: mol_type = other RNA

SEQ ID NO: 27607 - RNA, 29 nt, Synthetic Construct
  source 1..29: mol_type = other RNA
gatgcgaaagcaggtcaaagtgatccggc

SEQ ID NO: 27608 - RNA, 29 nt, Synthetic Construct
  source 1..29: mol_type = other RNA
gatgcgaaagcaggtcaaagtgatccggc

SEQ ID NO: 27609 - RNA, 26 nt, Synthetic Construct
  source 1..26: mol_type = other RNA
ccccccactgctaatttgactggctt

SEQ ID NO: 27610 - RNA, 22 nt, Synthetic Construct
  source 1..22: mol_type = other RNA
ccctgtactgagctgccccgag

SEQ ID NO: 27611 - RNA, 18 nt, Synthetic Construct
  source 1..18: mol_type = other RNA
gctgtgatggccgagtgg

SEQ ID NO: 27612 - RNA, 21 nt, Synthetic Construct
  source 1..21: mol_type = other RNA
tgaggtagtaggttgagtggt

SEQ ID NO: 27613 - RNA, 21 nt, Synthetic Construct
  source 1..21: mol_type = other RNA
tgaggtagtaggttgagtggt

SEQ ID NO: 27614 - RNA, 23 nt, Synthetic Construct
  source 1..23: mol_type = other RNA
cgctcacggaaagagaatgaagc

SEQ ID NO: 27615 - RNA, 23 nt, Synthetic Construct
  source 1..23: mol_type = other RNA
cgctcacggaaagagaatgaagc

SEQ ID NO: 27616 - RNA, 23 nt, Synthetic Construct
  source 1..23: mol_type = other RNA
caaagtgctgttcgtgcaggtgg

SEQ ID NO: 27617 - RNA, 23 nt, Synthetic Construct
  source 1..23: mol_type = other RNA
caaagtgctgttcgtgcaggtgg

SEQ ID NO: 27618 - RNA, 21 nt, Synthetic Construct
  source 1..21: mol_type = other RNA
gtagtgtttcctactttatgg

SEQ ID NO: 27619 - RNA, 21 nt, Synthetic Construct
  source 1..21: mol_type = other RNA
gtagtgtttcctactttatgg

SEQ ID NO: 27620 - RNA, 38 nt, Synthetic Construct; identical to SEQ ID NO: 11817
  source 1..38: mol_type = other RNA

SEQ ID NO: 27621 - RNA, 21 nt, Synthetic Construct
  source 1..21: mol_type = other RNA
tcctgtactgagctaccccga

SEQ ID NO: 27622 - RNA, 21 nt, Synthetic Construct
  source 1..21: mol_type = other RNA
tcctgtactgagctaccccga

SEQ ID NO: 27623 - RNA, 22 nt, Synthetic Construct
  source 1..22: mol_type = other RNA
tgaggtagtaggttgtgtggat

SEQ ID NO: 27624 - RNA, 23 nt, Synthetic Construct
  source 1..23: mol_type = other RNA
tgaggtagtaggtcgtgtggttt

SEQ ID NO: 27625 - RNA, 16 nt, Synthetic Construct
  source 1..16: mol_type = other RNA
agtcaggatgttggct

SEQ ID NO: 27626 - RNA, 16 nt, Synthetic Construct
  source 1..16: mol_type = other RNA
agtcaggatgttggct

SEQ ID NO: 27627 - RNA, 17 nt, Synthetic Construct
  source 1..17: mol_type = other RNA
accaaggggtcgtgggt

SEQ ID NO: 27628 - RNA, 17 nt, Synthetic Construct
  source 1..17: mol_type = other RNA
accaaggggtcgtgggt

SEQ ID NO: 27629 - RNA, 23 nt, Synthetic Construct
  source 1..23: mol_type = other RNA
tcctgtactgagccgccccgagt

SEQ ID NO: 27630 - RNA, 22 nt, Synthetic Construct
  source 1..22: mol_type = other RNA
tcctgtactgagctaccccgag

SEQ ID NO: 27631 - RNA, 17 nt, Synthetic Construct
  source 1..17: mol_type = other RNA
ccaaggggtcgtgggtt

SEQ ID NO: 27632 - RNA, 25 nt, Synthetic Construct
  source 1..25: mol_type = other RNA
gagaaagctcacaagaactgctaac

SEQ ID NO: 27633 - RNA, 23 nt, Synthetic Construct
  source 1..23: mol_type = other RNA
taaagtgcttatagtgcaggtag

SEQ ID NO: 27634 - RNA, 23 nt, Synthetic Construct
  source 1..23: mol_type = other RNA
taaagtgcttatagtgcaggtag

SEQ ID NO: 27635 - RNA, 26 nt, Synthetic Construct
  source 1..26: mol_type = other RNA
aatgacacgatcactcccgttgagtt

SEQ ID NO: 27636 - RNA, 26 nt, Synthetic Construct
  source 1..26: mol_type = other RNA
aatgacacgatcactcccgttgagtt

SEQ ID NO: 27637 - RNA, 21 nt, Synthetic Construct
  source 1..21: mol_type = other RNA
tgaggtagtaggttgtatagc

SEQ ID NO: 27638 - RNA, 21 nt, Synthetic Construct
  source 1..21: mol_type = other RNA
cattattacttttggtacgcg

SEQ ID NO: 27639 - RNA, 21 nt, Synthetic Construct
  source 1..21: mol_type = other RNA
cattattacttttggtacgcg

SEQ ID NO: 27640 - RNA, 23 nt, Synthetic Construct
  source 1..23: mol_type = other RNA
tggtaaaacgacgtacttagtgt

SEQ ID NO: 27641 - RNA, 23 nt, Synthetic Construct
  source 1..23: mol_type = other RNA
tggtaaaacgacgtacttagtgt

SEQ ID NO: 27642 - RNA, 31 nt, Synthetic Construct; identical to SEQ ID NO: 7160
  source 1..31: mol_type = other RNA

SEQ ID NO: 27643 - RNA, 31 nt, Synthetic Construct; identical to SEQ ID NO: 7160
  source 1..31: mol_type = other RNA

SEQ ID NO: 27644 - RNA, 25 nt, Synthetic Construct
  source 1..25: mol_type = other RNA
ggtaaaatagctgagtgaagcattg

SEQ ID NO: 27645 - RNA, 25 nt, Synthetic Construct
  source 1..25: mol_type = other RNA
ggtaaaatagctgagtgaagcattg

SEQ ID NO: 27646 - RNA, 22 nt, Synthetic Construct
  source 1..22: mol_type = other RNA
tcctgtactgagctgtcccgag

SEQ ID NO: 27647 - RNA, 22 nt, Synthetic Construct
  source 1..22: mol_type = other RNA
tcctgtactgagctgtcccgag

SEQ ID NO: 27648 - RNA, 23 nt, Synthetic Construct
  source 1..23: mol_type = other RNA
tgtagtgtttcctactttatggt

SEQ ID NO: 27649 - RNA, 23 nt, Synthetic Construct
  source 1..23: mol_type = other RNA
tgtagtgtttcctactttatggt

SEQ ID NO: 27650 - RNA, 22 nt, Synthetic Construct
  source 1..22: mol_type = other RNA
tcccgtactgagctgccccgag

SEQ ID NO: 27651 - RNA, 30 nt, Synthetic Construct; identical to SEQ ID NO: 2840
  source 1..30: mol_type = other RNA

SEQ ID NO: 27652 - RNA, 30 nt, Synthetic Construct; identical to SEQ ID NO: 2840
  source 1..30: mol_type = other RNA

SEQ ID NO: 27653 - RNA, 21 nt, Synthetic Construct
  source 1..21: mol_type = other RNA
tgaggtagtagtttgcgctgt

SEQ ID NO: 27654 - RNA, 21 nt, Synthetic Construct
  source 1..21: mol_type = other RNA
tgaggtagtagtttgcgctgt

SEQ ID NO: 27655 - RNA, 22 nt, Synthetic Construct
  source 1..22: mol_type = other RNA
tgttgcacttgtcccggcctgt

SEQ ID NO: 27656 - RNA, 22 nt, Synthetic Construct
  source 1..22: mol_type = other RNA
tgttgcacttgtcccggcctgt

SEQ ID NO: 27657 - RNA, 20 nt, Synthetic Construct
  source 1..20: mol_type = other RNA
tggaatgtaaagaagtatgt

SEQ ID NO: 27658 - RNA, 20 nt, Synthetic Construct
  source 1..20: mol_type = other RNA
tggaatgtaaagaagtatgt

SEQ ID NO: 27659 - RNA, 15 nt, Synthetic Construct
  source 1..15: mol_type = other RNA
cgatatggcatgaga

SEQ ID NO: 27660 - RNA, 15 nt, Synthetic Construct
  source 1..15: mol_type = other RNA
cgatatggcatgaga

SEQ ID NO: 27661 - RNA, 17 nt, Synthetic Construct
  source 1..17: mol_type = other RNA
ctaatgagactgccggt

SEQ ID NO: 27662 - RNA, 17 nt, Synthetic Construct
  source 1..17: mol_type = other RNA
ctaatgagactgccggt

SEQ ID NO: 27663 - RNA, 16 nt, Synthetic Construct
  source 1..16: mol_type = other RNA
gtcgacgtatagggtg

SEQ ID NO: 27664 - RNA, 22 nt, Synthetic Construct
  source 1..22: mol_type = other RNA
actggacttggagtcagaagga

SEQ ID NO: 27665 - RNA, 23 nt, Synthetic Construct
  source 1..23: mol_type = other RNA
tgaggtagtaggttgtatggtta

SEQ ID NO: 27666 - RNA, 23 nt, Synthetic Construct
  source 1..23: mol_type = other RNA
tgaggtagtaggttgtatggtta

SEQ ID NO: 27667 - RNA, 22 nt, Synthetic Construct
  source 1..22: mol_type = other RNA
cattgcacttgtctcggcctga

SEQ ID NO: 27668 - RNA, 22 nt, Synthetic Construct
  source 1..22: mol_type = other RNA
tgaggtagtaggttgtatagtc

SEQ ID NO: 27669 - RNA, 16 nt, Synthetic Construct
  source 1..16: mol_type = other RNA
ctgacgctcatgcacg

SEQ ID NO: 27670 - RNA, 21 nt, Synthetic Construct
  source 1..21: mol_type = other RNA
tgaggtggtaggttgtgtggt

SEQ ID NO: 27671 - RNA, 21 nt, Synthetic Construct
  source 1..21: mol_type = other RNA
tgaggtggtaggttgtgtggt

SEQ ID NO: 27672 - RNA, 21 nt, Synthetic Construct
  source 1..21: mol_type = other RNA
cataaagtagaaagcactact

SEQ ID NO: 27673 - RNA, 19 nt, Synthetic Construct
  source 1..19: mol_type = other RNA
agcgaaattccttgtcggg

SEQ ID NO: 27674 - RNA, 22 nt, Synthetic Construct
  source 1..22: mol_type = other RNA
cgaggtagtagtttgtgctgtt

SEQ ID NO: 27675 - RNA, 22 nt, Synthetic Construct
  source 1..22: mol_type = other RNA
cgaggtagtagtttgtgctgtt

SEQ ID NO: 27676 - RNA, 23 nt, Synthetic Construct
  source 1..23: mol_type = other RNA
tgaggtagtaggttgtgcggttt

SEQ ID NO: 27677 - RNA, 23 nt, Synthetic Construct
  source 1..23: mol_type = other RNA
tgaggtagtaggttgtgcggttt

SEQ ID NO: 27678 - RNA, 17 nt, Synthetic Construct
  source 1..17: mol_type = other RNA
ctaatgagactgccggt

SEQ ID NO: 27679 - RNA, 37 nt, Synthetic Construct; identical to SEQ ID NO: 715
  source 1..37: mol_type = other RNA

SEQ ID NO: 27680 - RNA, 37 nt, Synthetic Construct; identical to SEQ ID NO: 715
  source 1..37: mol_type = other RNA

SEQ ID NO: 27681 - RNA, 27 nt, Synthetic Construct
  source 1..27: mol_type = other RNA
gttggttcaagcgtgtagtcgtgctct

SEQ ID NO: 27682 - RNA, 27 nt, Synthetic Construct
  source 1..27: mol_type = other RNA
gttggttcaagcgtgtagtcgtgctct

SEQ ID NO: 27683 - RNA, 24 nt, Synthetic Construct
  source 1..24: mol_type = other RNA
tcactgatcgagtcgtcctgcgcg

SEQ ID NO: 27684 - RNA, 21 nt, Synthetic Construct
  source 1..21: mol_type = other RNA
aatggcgccactagggttgtg

SEQ ID NO: 27685 - RNA, 21 nt, Synthetic Construct
  source 1..21: mol_type = other RNA
aatggcgccactagggttgtg

SEQ ID NO: 27686 - RNA, 21 nt, Synthetic Construct
  source 1..21: mol_type = other RNA
ctttgttcgattccgttgagt

SEQ ID NO: 27687 - RNA, 23 nt, Synthetic Construct
  source 1..23: mol_type = other RNA
aggtaatacgacgtacttagtgt

SEQ ID NO: 27688 - RNA, 23 nt, Synthetic Construct
  source 1..23: mol_type = other RNA
ggtagcgaaattccttgtcgggt

SEQ ID NO: 27689 - RNA, 23 nt, Synthetic Construct
  source 1..23: mol_type = other RNA
tcccgtactgagctgccccgaga

SEQ ID NO: 27690 - RNA, 23 nt, Synthetic Construct
  source 1..23: mol_type = other RNA
tcccgtactgagctgccccgaga

SEQ ID NO: 27691 - RNA, 35 nt, Synthetic Construct; identical to SEQ ID NO: 2505
  source 1..35: mol_type = other RNA

SEQ ID NO: 27692 - RNA, 22 nt, Synthetic Construct
  source 1..22: mol_type = other RNA
tcctgtactaagctgccccgag

SEQ ID NO: 27693 - RNA, 21 nt, Synthetic Construct
  source 1..21: mol_type = other RNA
tggagcgtgacaatggtgttt

SEQ ID NO: 27694 - RNA, 21 nt, Synthetic Construct
  source 1..21: mol_type = other RNA
tggagcgtgacaatggtgttt

SEQ ID NO: 27695 - RNA, 33 nt, Synthetic Construct; identical to SEQ ID NO: 4947
  source 1..33: mol_type = other RNA

SEQ ID NO: 27696 - RNA, 23 nt, Synthetic Construct
  source 1..23: mol_type = other RNA
tcctgtactgagctgtcccgaga

SEQ ID NO: 27697 - RNA, 23 nt, Synthetic Construct
  source 1..23: mol_type = other RNA
tcctgtactgagctgtcccgaga

SEQ ID NO: 27698 - RNA, 19 nt, Synthetic Construct
  source 1..19: mol_type = other RNA
ggctggtccgaaggtagtg

SEQ ID NO: 27699 - RNA, 19 nt, Synthetic Construct
  source 1..19: mol_type = other RNA
ggctggtccgaaggtagtg

SEQ ID NO: 27700 - RNA, 21 nt, Synthetic Construct
  source 1..21: mol_type = other RNA
cgtaccgtgagtaataatgca

SEQ ID NO: 27701 - RNA, 22 nt, Synthetic Construct
  source 1..22: mol_type = other RNA
tggggtagtagtttgtgctgtt

SEQ ID NO: 27702 - RNA, 22 nt, Synthetic Construct
  source 1..22: mol_type = other RNA
tggggtagtagtttgtgctgtt

SEQ ID NO: 27703 - RNA, 21 nt, Synthetic Construct
  source 1..21: mol_type = other RNA
ggaggggcagagagcgagact

SEQ ID NO: 27704 - RNA, 21 nt, Synthetic Construct
  source 1..21: mol_type = other RNA
ggaggggcagagagcgagact

SEQ ID NO: 27705 - RNA, 23 nt, Synthetic Construct
  source 1..23: mol_type = other RNA
cccagtgttcagactacctgttc

SEQ ID NO: 27706 - RNA, 16 nt, Synthetic Construct
  source 1..16: mol_type = other RNA
ccaaggggtcgtgggt

SEQ ID NO: 27707 - RNA, 20 nt, Synthetic Construct
  source 1..20: mol_type = other RNA
gcatggccgttcttagttgg

SEQ ID NO: 27708 - RNA, 21 nt, Synthetic Construct
  source 1..21: mol_type = other RNA
ttctgtactgagctgccccga

SEQ ID NO: 27709 - RNA, 18 nt, Synthetic Construct
  source 1..18: mol_type = other RNA
ccaaggggtcgtgggttc

SEQ ID NO: 27710 - RNA, 16 nt, Synthetic Construct
  source 1..16: mol_type = other RNA
gcgtagatatgcggag

SEQ ID NO: 27711 - RNA, 16 nt, Synthetic Construct
  source 1..16: mol_type = other RNA
gcgtagatatgcggag

SEQ ID NO: 27712 - RNA, 17 nt, Synthetic Construct
  source 1..17: mol_type = other RNA
accaaggggtcgtgggt

SEQ ID NO: 27713 - RNA, 20 nt, Synthetic Construct
  source 1..20: mol_type = other RNA
tgaggtagtaggtcgtgtgg

SEQ ID NO: 27714 - RNA, 20 nt, Synthetic Construct
  source 1..20: mol_type = other RNA
tgaggtagtaggtcgtgtgg

SEQ ID NO: 27715 - RNA, 18 nt, Synthetic Construct
  source 1..18: mol_type = other RNA
tctaatgagactgccggt

SEQ ID NO: 27716 - RNA, 23 nt, Synthetic Construct
  source 1..23: mol_type = other RNA
tggtaatacgacgtacttagcgt

SEQ ID NO: 27717 - RNA, 16 nt, Synthetic Construct
  source 1..16: mol_type = other RNA
tgcacgaaagcgtggg

SEQ ID NO: 27718 - RNA, 17 nt, Synthetic Construct
  source 1..17: mol_type = other RNA
cagtagctcgaggaaaa

SEQ ID NO: 27719 - RNA, 17 nt, Synthetic Construct
  source 1..17: mol_type = other RNA
cagtagctcgaggaaaa

SEQ ID NO: 27720 - RNA, 21 nt, Synthetic Construct
  source 1..21: mol_type = other RNA
cgtaccgtgagtaataatgcg

SEQ ID NO: 27721 - RNA, 22 nt, Synthetic Construct
  source 1..22: mol_type = other RNA
tattgcacctgtcccggcctgt

SEQ ID NO: 27722 - RNA, 23 nt, Synthetic Construct
  source 1..23: mol_type = other RNA
tgaggtagcaggttgtgtggttt

SEQ ID NO: 27723 - RNA, 23 nt, Synthetic Construct
  source 1..23: mol_type = other RNA
tgaggtagcaggttgtgtggttt

SEQ ID NO: 27724 - RNA, 22 nt, Synthetic Construct
  source 1..22: mol_type = other RNA
ngaggtagtagtttgtgctgtt

SEQ ID NO: 27725 - RNA, 22 nt, Synthetic Construct
  source 1..22: mol_type = other RNA
ngaggtagtagtttgtgctgtt

SEQ ID NO: 27726 - RNA, 22 nt, Synthetic Construct
  source 1..22: mol_type = other RNA
cattgcacttgtctcggcctga

SEQ ID NO: 27727 - RNA, 37 nt, Synthetic Construct; identical to SEQ ID NO: 11100
  source 1..37: mol_type = other RNA

SEQ ID NO: 27728 - RNA, 37 nt, Synthetic Construct; identical to SEQ ID NO: 11100
  source 1..37: mol_type = other RNA

SEQ ID NO: 27729 - RNA, 22 nt, Synthetic Construct
  source 1..22: mol_type = other RNA
tgagaactgaattccatgggtt

SEQ ID NO: 27730 - RNA, 20 nt, Synthetic Construct
  source 1..20: mol_type = other RNA
tgaggtagtaggttgtgtga

SEQ ID NO: 27731 - RNA, 20 nt, Synthetic Construct
  source 1..20: mol_type = other RNA
tgaggtagtaggttgtgtga

SEQ ID NO: 27732 - RNA, 23 nt, Synthetic Construct
  source 1..23: mol_type = other RNA
tgaggtagtaggttgtgtggttg

SEQ ID NO: 27733 - RNA, 23 nt, Synthetic Construct
  source 1..23: mol_type = other RNA
tgaggtagtaggttgtgtggttg

SEQ ID NO: 27734 - RNA, 22 nt, Synthetic Construct
  source 1..22: mol_type = other RNA
tcctgtactgagctgtcccgag

SEQ ID NO: 27735 - RNA, 15 nt, Synthetic Construct
  source 1..15: mol_type = other RNA
aggtgggaggctttg

SEQ ID NO: 27736 - RNA, 21 nt, Synthetic Construct
  source 1..21: mol_type = other RNA
tggaatgtaaagaagtatgta

SEQ ID NO: 27737 - RNA, 21 nt, Synthetic Construct
  source 1..21: mol_type = other RNA
tggaatgtaaagaagtatgta

SEQ ID NO: 27738 - RNA, 23 nt, Synthetic Construct
  source 1..23: mol_type = other RNA
tggtaatacgatgtacttagtgt

SEQ ID NO: 27739 - RNA, 22 nt, Synthetic Construct
  source 1..22: mol_type = other RNA
atcacattgccagggatttcca

SEQ ID NO: 27740 - RNA, 22 nt, Synthetic Construct
  source 1..22: mol_type = other RNA
atcacattgccagggatttcca

SEQ ID NO: 27741 - RNA, 21 nt, Synthetic Construct
  source 1..21: mol_type = other RNA
caaagtgctgttcgtgcaggt

SEQ ID NO: 27742 - RNA, 22 nt, Synthetic Construct
  source 1..22: mol_type = other RNA
tcttgtactgagctgccccgag

SEQ ID NO: 27743 - RNA, 22 nt, Synthetic Construct
  source 1..22: mol_type = other RNA
tcttgtactgagctgccccgag

SEQ ID NO: 27744 - RNA, 15 nt, Synthetic Construct
  source 1..15: mol_type = other RNA
gctttgatccggaga

SEQ ID NO: 27745 - RNA, 21 nt, Synthetic Construct
  source 1..21: mol_type = other RNA
tggagtgtgacaacggtgttt

SEQ ID NO: 27746 - RNA, 21 nt, Synthetic Construct
  source 1..21: mol_type = other RNA
tggagtgtgacaacggtgttt

SEQ ID NO: 27747 - RNA, 18 nt, Synthetic Construct
  source 1..18: mol_type = other RNA
atagggaacgtgagctgg

SEQ ID NO: 27748 - RNA, 18 nt, Synthetic Construct
  source 1..18: mol_type = other RNA
atagggaacgtgagctgg

SEQ ID NO: 27749 - RNA, 16 nt, Synthetic Construct
  source 1..16: mol_type = other RNA
gaaattccttgtcggg

SEQ ID NO: 27750 - RNA, 29 nt, Synthetic Construct
  source 1..29: mol_type = other RNA
ttacaggggttcgaatcccctaggggacg

SEQ ID NO: 27751 - RNA, 29 nt, Synthetic Construct
  source 1..29: mol_type = other RNA
ttacaggggttcgaatcccctaggggacg

SEQ ID NO: 27752 - RNA, 23 nt, Synthetic Construct
  source 1..23: mol_type = other RNA
tggtaatacgacgtactttgtgt

SEQ ID NO: 27753 - RNA, 23 nt, Synthetic Construct
  source 1..23: mol_type = other RNA
tggtaatacgacgtactttgtgt

SEQ ID NO: 27754 - RNA, 35 nt, Synthetic Construct; identical to SEQ ID NO: 3369
  source 1..35: mol_type = other RNA

SEQ ID NO: 27755 - RNA, 21 nt, Synthetic Construct
  source 1..21: mol_type = other RNA
cgtaccgtgagtaataatgcg

SEQ ID NO: 27756 - RNA, 21 nt, Synthetic Construct
  source 1..21: mol_type = other RNA
cgtaccgtgagtaataatgcg

SEQ ID NO: 27757 - RNA, 20 nt, Synthetic Construct
  source 1..20: mol_type = other RNA
taaggtagtaggttgtatag

SEQ ID NO: 27758 - RNA, 20 nt, Synthetic Construct
  source 1..20: mol_type = other RNA
taaggtagtaggttgtatag

SEQ ID NO: 27759 - RNA, 20 nt, Synthetic Construct
  source 1..20: mol_type = other RNA
ggaggtagtaggttgtgtgg

SEQ ID NO: 27760 - RNA, 20 nt, Synthetic Construct
  source 1..20: mol_type = other RNA
ggaggtagtaggttgtgtgg

SEQ ID NO: 27761 - RNA, 22 nt, Synthetic Construct
  source 1..22: mol_type = other RNA
tcctgtactgggctgccccgag

SEQ ID NO: 27762 - RNA, 19 nt, Synthetic Construct
  source 1..19: mol_type = other RNA
accaaggggtcgtgggttc

SEQ ID NO: 27763 - RNA, 22 nt, Synthetic Construct
  source 1..22: mol_type = other RNA
tcctgtacagagctgccccgag

SEQ ID NO: 27764 - RNA, 22 nt, Synthetic Construct
  source 1..22: mol_type = other RNA
tcctgtacagagctgccccgag

SEQ ID NO: 27765 - RNA, 15 nt, Synthetic Construct
  source 1..15: mol_type = other RNA
gcaagtcgagcggta

SEQ ID NO: 27766 - RNA, 16 nt, Synthetic Construct
  source 1..16: mol_type = other RNA
gtctatggccatacca

SEQ ID NO: 27767 - RNA, 18 nt, Synthetic Construct
  source 1..18: mol_type = other RNA
ccagtaaacggcggccgt

SEQ ID NO: 27768 - RNA, 28 nt, Synthetic Construct
  source 1..28: mol_type = other RNA
gcatgggtggttcagtggtagaattctc

SEQ ID NO: 27769 - RNA, 28 nt, Synthetic Construct
  source 1..28: mol_type = other RNA
gcatgggtggttcagtggtagaattctc

SEQ ID NO: 27770 - RNA, 22 nt, Synthetic Construct
  source 1..22: mol_type = other RNA
tcctgtactgagccgccccgag

SEQ ID NO: 27771 - RNA, 22 nt, Synthetic Construct
  source 1..22: mol_type = other RNA
tcctgtactgagccgccccgag

SEQ ID NO: 27772 - RNA, 23 nt, Synthetic Construct
  source 1..23: mol_type = other RNA
tcctgtactgagctgccctgagt

SEQ ID NO: 27773 - RNA, 16 nt, Synthetic Construct
  source 1..16: mol_type = other RNA
gtctacggccatacta

SEQ ID NO: 27774 - RNA, 16 nt, Synthetic Construct
  source 1..16: mol_type = other RNA
gtctacggccatacta

SEQ ID NO: 27775 - RNA, 25 nt, Synthetic Construct
  source 1..25: mol_type = other RNA
ttcaagtaatccaggataggctttt

SEQ ID NO: 27776 - RNA, 21 nt, Synthetic Construct
  source 1..21: mol_type = other RNA
tgaggcagtaggttgtgtggt

SEQ ID NO: 27777 - RNA, 21 nt, Synthetic Construct
  source 1..21: mol_type = other RNA
tgaggcagtaggttgtgtggt

SEQ ID NO: 27778 - RNA, 22 nt, Synthetic Construct
  source 1..22: mol_type = other RNA
tggaatgtaaagaagcatgtat

SEQ ID NO: 27779 - RNA, 21 nt, Synthetic Construct
  source 1..21: mol_type = other RNA
cgcgacctcagatcagacgtg

SEQ ID NO: 27780 - RNA, 21 nt, Synthetic Construct
  source 1..21: mol_type = other RNA
cgcgacctcagatcagacgtg

SEQ ID NO: 27781 - RNA, 32 nt, Synthetic Construct; identical to SEQ ID NO: 770
  source 1..32: mol_type = other RNA

SEQ ID NO: 27782 - RNA, 32 nt, Synthetic Construct; identical to SEQ ID NO: 770
  source 1..32: mol_type = other RNA

SEQ ID NO: 27783 - RNA, 16 nt, Synthetic Construct
  source 1..16: mol_type = other RNA
aggtcatcattatctg

SEQ ID NO: 27784 - RNA, 23 nt, Synthetic Construct
  source 1..23: mol_type = other RNA
caaagtgcttacagtgcaggtag

SEQ ID NO: 27785 - RNA, 36 nt, Synthetic Construct; identical to SEQ ID NO: 752
  source 1..36: mol_type = other RNA

SEQ ID NO: 27786 - RNA, 36 nt, Synthetic Construct; identical to SEQ ID NO: 752
  source 1..36: mol_type = other RNA

SEQ ID NO: 27787 - RNA, 21 nt, Synthetic Construct
  source 1..21: mol_type = other RNA
acagtagtctgcacattggtt

SEQ ID NO: 27788 - RNA, 21 nt, Synthetic Construct
  source 1..21: mol_type = other RNA
acagtagtctgcacattggtt

SEQ ID NO: 27789 - RNA, 27 nt, Synthetic Construct
  source 1..27: mol_type = other RNA
ccccccactgctaaatttgactggcct

SEQ ID NO: 27790 - RNA, 33 nt, Synthetic Construct; identical to SEQ ID NO: 2386
  source 1..33: mol_type = other RNA

SEQ ID NO: 27791 - RNA, 33 nt, Synthetic Construct; identical to SEQ ID NO: 2386
  source 1..33: mol_type = other RNA

SEQ ID NO: 27792 - RNA, 22 nt, Synthetic Construct
  source 1..22: mol_type = other RNA
tctttggttatctagctgtatg

SEQ ID NO: 27793 - RNA, 22 nt, Synthetic Construct
  source 1..22: mol_type = other RNA
tctttggttatctagctgtatg

SEQ ID NO: 27794 - RNA, 18 nt, Synthetic Construct
  source 1..18: mol_type = other RNA
aagaccctgttgagcttg

SEQ ID NO: 27795 - RNA, 18 nt, Synthetic Construct
  source 1..18: mol_type = other RNA
aagaccctgttgagcttg

SEQ ID NO: 27796 - RNA, 21 nt, Synthetic Construct
  source 1..21: mol_type = other RNA
tgaggtagtagattgtataga

SEQ ID NO: 27797 - RNA, 23 nt, Synthetic Construct
  source 1..23: mol_type = other RNA
tgaggggtagagagcgagacttt

SEQ ID NO: 27798 - RNA, 23 nt, Synthetic Construct
  source 1..23: mol_type = other RNA
tgaggggtagagagcgagacttt

SEQ ID NO: 27799 - RNA, 29 nt, Synthetic Construct
  source 1..29: mol_type = other RNA
gctaaacctagccccaaacccactccacc

SEQ ID NO: 27800 - RNA, 23 nt, Synthetic Construct
  source 1..23: mol_type = other RNA
tgaggtagtaggttgtgtggttt

SEQ ID NO: 27801 - RNA, 22 nt, Synthetic Construct
  source 1..22: mol_type = other RNA
tcctgtactgagctgtcccgag

SEQ ID NO: 27802 - RNA, 22 nt, Synthetic Construct
  source 1..22: mol_type = other RNA
tcctgtactgagctgtcccgag

SEQ ID NO: 27803 - RNA, 25 nt, Synthetic Construct
  source 1..25: mol_type = other RNA
ttgcagctgcctgggagtgacttct

SEQ ID NO: 27804 - RNA, 25 nt, Synthetic Construct
  source 1..25: mol_type = other RNA
ttgcagctgcctgggagtgacttct

SEQ ID NO: 27805 - RNA, 22 nt, Synthetic Construct
  source 1..22: mol_type = other RNA
tactagactgaagctccttgag

SEQ ID NO: 27806 - RNA, 22 nt, Synthetic Construct
  source 1..22: mol_type = other RNA
tactagactgaagctccttgag

SEQ ID NO: 27807 - RNA, 22 nt, Synthetic Construct
  source 1..22: mol_type = other RNA
tgaggtagcagtttgtgctgtt

SEQ ID NO: 27808 - RNA, 22 nt, Synthetic Construct
  source 1..22: mol_type = other RNA
tgaggtagcagtttgtgctgtt

SEQ ID NO: 27809 - RNA, 20 nt, Synthetic Construct
  source 1..20: mol_type = other RNA
tgaggtagtaggttgtgtga

SEQ ID NO: 27810 - RNA, 22 nt, Synthetic Construct
  source 1..22: mol_type = other RNA
tgaggtagtagtctgtgctgtt

SEQ ID NO: 27811 - RNA, 22 nt, Synthetic Construct
  source 1..22: mol_type = other RNA
tgaggtagtagtctgtgctgtt

SEQ ID NO: 27812 - RNA, 16 nt, Synthetic Construct
  source 1..16: mol_type = other RNA
gatctgtagctggtct

SEQ ID NO: 27813 - RNA, 22 nt, Synthetic Construct
  source 1..22: mol_type = other RNA
tcgtaccgtgagtaataatgca

SEQ ID NO: 27814 - RNA, 22 nt, Synthetic Construct
  source 1..22: mol_type = other RNA
gggagtgtgacaatggtgtttg

SEQ ID NO: 27815 - RNA, 22 nt, Synthetic Construct
  source 1..22: mol_type = other RNA
gggagtgtgacaatggtgtttg

SEQ ID NO: 27816 - RNA, 21 nt, Synthetic Construct
  source 1..21: mol_type = other RNA
attagtgacgcgcatgaatgg

SEQ ID NO: 27817 - RNA, 21 nt, Synthetic Construct
  source 1..21: mol_type = other RNA
attagtgacgcgcatgaatgg

SEQ ID NO: 27818 - RNA, 22 nt, Synthetic Construct
  source 1..22: mol_type = other RNA
ggcagcattgtacagggctatg

SEQ ID NO: 27819 - RNA, 22 nt, Synthetic Construct
  source 1..22: mol_type = other RNA
tgaagtagtagtttgtgctgtt

SEQ ID NO: 27820 - RNA, 22 nt, Synthetic Construct
  source 1..22: mol_type = other RNA
tgaagtagtagtttgtgctgtt

SEQ ID NO: 27821 - RNA, 26 nt, Synthetic Construct
  source 1..26: mol_type = other RNA
gactcttagcggtggatcactcggct

SEQ ID NO: 27822 - RNA, 26 nt, Synthetic Construct
  source 1..26: mol_type = other RNA
gactcttagcggtggatcactcggct

SEQ ID NO: 27823 - RNA, 15 nt, Synthetic Construct
  source 1..15: mol_type = other RNA
acccttgtcattagt

SEQ ID NO: 27824 - RNA, 15 nt, Synthetic Construct
  source 1..15: mol_type = other RNA
ccgcttttgtcaggg

SEQ ID NO: 27825 - RNA, 21 nt, Synthetic Construct
  source 1..21: mol_type = other RNA
tcccagtaaacggcggccgta

SEQ ID NO: 27826 - RNA, 21 nt, Synthetic Construct
  source 1..21: mol_type = other RNA
tcctgtactgagctgcccgag

SEQ ID NO: 27827 - RNA, 35 nt, Synthetic Construct; identical to SEQ ID NO: 1095
  source 1..35: mol_type = other RNA

SEQ ID NO: 27828 - RNA, 35 nt, Synthetic Construct; identical to SEQ ID NO: 1095
  source 1..35: mol_type = other RNA

SEQ ID NO: 27829 - RNA, 22 nt, Synthetic Construct
  source 1..22: mol_type = other RNA
tcttgtactgagctgccccgag

SEQ ID NO: 27830 - RNA, 26 nt, Synthetic Construct
  source 1..26: mol_type = other RNA
gaggaacactagtggcgtaggcgaga

SEQ ID NO: 27831 - RNA, 26 nt, Synthetic Construct
  source 1..26: mol_type = other RNA
gaggaacactagtggcgtaggcgaga

SEQ ID NO: 27832 - RNA, 22 nt, Synthetic Construct
  source 1..22: mol_type = other RNA
tggaatgtaaagaagtatgtgt

SEQ ID NO: 27833 - RNA, 22 nt, Synthetic Construct
  source 1..22: mol_type = other RNA
tggaatgtaaagaagtatgtgt

SEQ ID NO: 27834 - RNA, 22 nt, Synthetic Construct
  source 1..22: mol_type = other RNA
tgagaactgaattccatgggtc

SEQ ID NO: 27835 - RNA, 23 nt, Synthetic Construct
  source 1..23: mol_type = other RNA
tgaggtagtaggttgtgcggttt

SEQ ID NO: 27836 - RNA, 23 nt, Synthetic Construct
  source 1..23: mol_type = other RNA
tgaggtagtaggttgtgcggttt

SEQ ID NO: 27837 - RNA, 20 nt, Synthetic Construct
  source 1..20: mol_type = other RNA
cccagtaaacggcggccgta

SEQ ID NO: 27838 - RNA, 27 nt, Synthetic Construct
  source 1..27: mol_type = other RNA
gacttaccaaacctatgcaaactccga

SEQ ID NO: 27839 - RNA, 43 nt, Synthetic Construct; identical to SEQ ID NO: 727
  source 1..43: mol_type = other RNA

SEQ ID NO: 27840 - RNA, 23 nt, Synthetic Construct
  source 1..23: mol_type = other RNA
tggtaatacgacgtacttagtgt

SEQ ID NO: 27841 - RNA, 35 nt, Synthetic Construct; identical to SEQ ID NO: 2452
  source 1..35: mol_type = other RNA

SEQ ID NO: 27842 - RNA, 21 nt, Synthetic Construct
  source 1..21: mol_type = other RNA
tggggggcagagagcgagact

SEQ ID NO: 27843 - RNA, 22 nt, Synthetic Construct
  source 1..22: mol_type = other RNA
tcagcgccgatgatagtgcgga

SEQ ID NO: 27844 - RNA, 22 nt, Synthetic Construct
  source 1..22: mol_type = other RNA
tcagcgccgatgatagtgcgga

SEQ ID NO: 27845 - RNA, 23 nt, Synthetic Construct
  source 1..23: mol_type = other RNA
tgaggggcagagagcgggacttt

SEQ ID NO: 27846 - RNA, 23 nt, Synthetic Construct
  source 1..23: mol_type = other RNA
tgaggggcagagagcgggacttt

SEQ ID NO: 27847 - RNA, 20 nt, Synthetic Construct
  source 1..20: mol_type = other RNA
cgaggtagtaggttgtgtgg

SEQ ID NO: 27848 - RNA, 20 nt, Synthetic Construct
  source 1..20: mol_type = other RNA
cgaggtagtaggttgtgtgg

SEQ ID NO: 27849 - RNA, 22 nt, Synthetic Construct
  source 1..22: mol_type = other RNA
catcgcacttgtctcggtctga

SEQ ID NO: 27850 - RNA, 22 nt, Synthetic Construct
  source 1..22: mol_type = other RNA
tgaggcagtaggttgtgtggtt

SEQ ID NO: 27851 - RNA, 22 nt, Synthetic Construct
  source 1..22: mol_type = other RNA
tgaggcagtaggttgtgtggtt

SEQ ID NO: 27852 - RNA, 16 nt, Synthetic Construct
  source 1..16: mol_type = other RNA
ctgacgctcatgcacg

SEQ ID NO: 27853 - RNA, 16 nt, Synthetic Construct
  source 1..16: mol_type = other RNA
ctgacgctcatgcacg

SEQ ID NO: 27854 - RNA, 22 nt, Synthetic Construct
  source 1..22: mol_type = other RNA
tcctgcactgagctgccccgag

SEQ ID NO: 27855 - RNA, 22 nt, Synthetic Construct
  source 1..22: mol_type = other RNA
tcctgcactgagctgccccgag

SEQ ID NO: 27856 - RNA, 22 nt, Synthetic Construct
  source 1..22: mol_type = other RNA
taaggtagtaggttgtgtggtt

SEQ ID NO: 27857 - RNA, 22 nt, Synthetic Construct
  source 1..22: mol_type = other RNA
taaggtagtaggttgtgtggtt

SEQ ID NO: 27858 - RNA, 16 nt, Synthetic Construct
  source 1..16: mol_type = other RNA
gtctacggccataccg

SEQ ID NO: 27859 - RNA, 16 nt, Synthetic Construct
  source 1..16: mol_type = other RNA
gtctacggccataccg

SEQ ID NO: 27860 - RNA, 17 nt, Synthetic Construct
  source 1..17: mol_type = other RNA
agtccggatcgtagtct

SEQ ID NO: 27861 - RNA, 21 nt, Synthetic Construct
  source 1..21: mol_type = other RNA
tgaggggcagagagcgagaca

SEQ ID NO: 27862 - RNA, 20 nt, Synthetic Construct
  source 1..20: mol_type = other RNA
gctattgacgaccgtaccgc

SEQ ID NO: 27863 - RNA, 20 nt, Synthetic Construct
  source 1..20: mol_type = other RNA
gctattgacgaccgtaccgc

SEQ ID NO: 27864 - RNA, 23 nt, Synthetic Construct
  source 1..23: mol_type = other RNA
agcagcattgtacagggctatgt

SEQ ID NO: 27865 - RNA, 23 nt, Synthetic Construct
  source 1..23: mol_type = other RNA
agcagcattgtacagggctatgt

SEQ ID NO: 27866 - RNA, 23 nt, Synthetic Construct
  source 1..23: mol_type = other RNA
tggtaatacgacgtacttaatgt

SEQ ID NO: 27867 - RNA, 23 nt, Synthetic Construct
  source 1..23: mol_type = other RNA
tggtaatacgacgtacttaatgt

SEQ ID NO: 27868 - RNA, 35 nt, Synthetic Construct; identical to SEQ ID NO: 787
  source 1..35: mol_type = other RNA

SEQ ID NO: 27869 - RNA, 35 nt, Synthetic Construct; identical to SEQ ID NO: 787
  source 1..35: mol_type = other RNA

SEQ ID NO: 27870 - RNA, 21 nt, Synthetic Construct
  source 1..21: mol_type = other RNA
taactccttaagcgaatctcg

SEQ ID NO: 27871 - RNA, 21 nt, Synthetic Construct
  source 1..21: mol_type = other RNA
taactccttaagcgaatctcg

SEQ ID NO: 27872 - RNA, 35 nt, Synthetic Construct; identical to SEQ ID NO: 2518
  source 1..35: mol_type = other RNA

SEQ ID NO: 27873 - RNA, 27 nt, Synthetic Construct
  source 1..27: mol_type = other RNA
cgtgtgaaagtaggtcatcgtcaggct

SEQ ID NO: 27874 - RNA, 21 nt, Synthetic Construct
  source 1..21: mol_type = other RNA
tgaggtagtaggttgtgtgga

SEQ ID NO: 27875 - RNA, 18 nt, Synthetic Construct
  source 1..18: mol_type = other RNA
gttcgattccggagaggg

SEQ ID NO: 27876 - RNA, 18 nt, Synthetic Construct
  source 1..18: mol_type = other RNA
gttcgattccggagaggg

SEQ ID NO: 27877 - RNA, 22 nt, Synthetic Construct
  source 1..22: mol_type = other RNA
nagcagcacgtaaatattggcg

SEQ ID NO: 27878 - RNA, 22 nt, Synthetic Construct
  source 1..22: mol_type = other RNA
nagcagcacgtaaatattggcg

SEQ ID NO: 27879 - RNA, 15 nt, Synthetic Construct
  source 1..15: mol_type = other RNA
acggtcctaaggtag

SEQ ID NO: 27880 - RNA, 22 nt, Synthetic Construct
  source 1..22: mol_type = other RNA
ngaggtagtaggttgtgtggtt

SEQ ID NO: 27881 - RNA, 22 nt, Synthetic Construct
  source 1..22: mol_type = other RNA
ngaggtagtaggttgtgtggtt

SEQ ID NO: 27882 - RNA, 16 nt, Synthetic Construct
  source 1..16: mol_type = other RNA
ggtagctcgttgggct

SEQ ID NO: 27883 - RNA, 22 nt, Synthetic Construct
  source 1..22: mol_type = other RNA
atcacattgccagggatttcca

SEQ ID NO: 27884 - RNA, 16 nt, Synthetic Construct
  source 1..16: mol_type = other RNA
tgcgtagatatgcgga

SEQ ID NO: 27885 - RNA, 16 nt, Synthetic Construct
  source 1..16: mol_type = other RNA
tgcgtagatatgcgga

SEQ ID NO: 27886 - RNA, 19 nt, Synthetic Construct
  source 1..19: mol_type = other RNA
tgaggtagtaggttgtgtg

SEQ ID NO: 27887 - RNA, 19 nt, Synthetic Construct
  source 1..19: mol_type = other RNA
tgaggtagtaggttgtgtg

SEQ ID NO: 27888 - RNA, 22 nt, Synthetic Construct
  source 1..22: mol_type = other RNA
caacggaatcccaaaagcagca

SEQ ID NO: 27889 - RNA, 22 nt, Synthetic Construct
  source 1..22: mol_type = other RNA
tgaggtagtaggttgtatagta

SEQ ID NO: 27890 - RNA, 19 nt, Synthetic Construct
  source 1..19: mol_type = other RNA
gtccggatcgtagtctgca

SEQ ID NO: 27891 - RNA, 22 nt, Synthetic Construct
  source 1..22: mol_type = other RNA
tggaatgtaaagaagtacgtat

SEQ ID NO: 27892 - RNA, 22 nt, Synthetic Construct
  source 1..22: mol_type = other RNA
tggaatgtaaagaagtacgtat

SEQ ID NO: 27893 - RNA, 17 nt, Synthetic Construct
  source 1..17: mol_type = other RNA
aggaattgacggaaggg

SEQ ID NO: 27894 - RNA, 17 nt, Synthetic Construct
  source 1..17: mol_type = other RNA
aggaattgacggaaggg

SEQ ID NO: 27895 - RNA, 21 nt, Synthetic Construct
  source 1..21: mol_type = other RNA
tcctatactgagctgccccga

SEQ ID NO: 27896 - RNA, 23 nt, Synthetic Construct
  source 1..23: mol_type = other RNA
tggtaatacgacgcacttagtgt

SEQ ID NO: 27897 - RNA, 24 nt, Synthetic Construct
  source 1..24: mol_type = other RNA
tcggatccgtctgagcttggcttt

SEQ ID NO: 27898 - RNA, 37 nt, Synthetic Construct; identical to SEQ ID NO: 7503
  source 1..37: mol_type = other RNA

SEQ ID NO: 27899 - RNA, 37 nt, Synthetic Construct; identical to SEQ ID NO: 7503
  source 1..37: mol_type = other RNA

SEQ ID NO: 27900 - RNA, 32 nt, Synthetic Construct; identical to SEQ ID NO: 2435
  source 1..32: mol_type = other RNA

SEQ ID NO: 27901 - RNA, 22 nt, Synthetic Construct
  source 1..22: mol_type = other RNA
tacgcctgtctgagcgtcgctt

SEQ ID NO: 27902 - RNA, 23 nt, Synthetic Construct
  source 1..23: mol_type = other RNA
tcctgcactgagctgccccgaga

SEQ ID NO: 27903 - RNA, 24 nt, Synthetic Construct
  source 1..24: mol_type = other RNA
gctcactgatcgagtcgtcctgcg

SEQ ID NO: 27904 - RNA, 18 nt, Synthetic Construct
  source 1..18: mol_type = other RNA
acagtcaggatgttggct

SEQ ID NO: 27905 - RNA, 22 nt, Synthetic Construct
  source 1..22: mol_type = other RNA
cattgcacctgtctcggtctga

SEQ ID NO: 27906 - RNA, 20 nt, Synthetic Construct
  source 1..20: mol_type = other RNA
tgtcagtttgtcaaataccc

SEQ ID NO: 27907 - RNA, 30 nt, Synthetic Construct; identical to SEQ ID NO: 6467
  source 1..30: mol_type = other RNA

SEQ ID NO: 27908 - RNA, 23 nt, Synthetic Construct
  source 1..23: mol_type = other RNA
tgaggggcagagagcgagacttg

SEQ ID NO: 27909 - RNA, 23 nt, Synthetic Construct
  source 1..23: mol_type = other RNA
caaagtgctgttcgtgcaggtgg

SEQ ID NO: 27910 - RNA, 35 nt, Synthetic Construct; identical to SEQ ID NO: 3369
  source 1..35: mol_type = other RNA

SEQ ID NO: 27911 - RNA, 22 nt, Synthetic Construct
  source 1..22: mol_type = other RNA
tggggtagtaggttgtgtggtt

SEQ ID NO: 27912 - RNA, 22 nt, Synthetic Construct
  source 1..22: mol_type = other RNA
tggggtagtaggttgtgtggtt

SEQ ID NO: 27913 - RNA, 15 nt, Synthetic Construct
  source 1..15: mol_type = other RNA
gcagagcgtcggtct

SEQ ID NO: 27914 - RNA, 15 nt, Synthetic Construct
  source 1..15: mol_type = other RNA
gcagagcgtcggtct

SEQ ID NO: 27915 - RNA, 20 nt, Synthetic Construct
  source 1..20: mol_type = other RNA
tgaggcagtaggttgtgtgg

SEQ ID NO: 27916 - RNA, 20 nt, Synthetic Construct
  source 1..20: mol_type = other RNA
tgaggcagtaggttgtgtgg

SEQ ID NO: 27917 - RNA, 15 nt, Synthetic Construct
  source 1..15: mol_type = other RNA
atccctccgactccg

SEQ ID NO: 27918 - RNA, 22 nt, Synthetic Construct
  source 1..22: mol_type = other RNA
caaagtgctgttcgtgcaggta

SEQ ID NO: 27919 - RNA, 17 nt, Synthetic Construct
  source 1..17: mol_type = other RNA
caggacggtggccatgg

SEQ ID NO: 27920 - RNA, 17 nt, Synthetic Construct
  source 1..17: mol_type = other RNA
caggacggtggccatgg

SEQ ID NO: 27921 - RNA, 22 nt, Synthetic Construct
  source 1..22: mol_type = other RNA
tgaggtagtaggttgtatggtt

SEQ ID NO: 27922 - RNA, 22 nt, Synthetic Construct
  source 1..22: mol_type = other RNA
tgaggtagtaggttgtatggtt

SEQ ID NO: 27923 - RNA, 23 nt, Synthetic Construct
  source 1..23: mol_type = other RNA
agcaacattgtctgctgggtttc

SEQ ID NO: 27924 - RNA, 23 nt, Synthetic Construct
  source 1..23: mol_type = other RNA
ttcaagtaatccaggataggctt

SEQ ID NO: 27925 - RNA, 23 nt, Synthetic Construct
  source 1..23: mol_type = other RNA
ttcaagtaatccaggataggctt

SEQ ID NO: 27926 - RNA, 32 nt, Synthetic Construct; identical to SEQ ID NO: 734
  source 1..32: mol_type = other RNA

SEQ ID NO: 27927 - RNA, 23 nt, Synthetic Construct
  source 1..23: mol_type = other RNA
tggtaatacgacgtacatagtgt

SEQ ID NO: 27928 - RNA, 23 nt, Synthetic Construct
  source 1..23: mol_type = other RNA
tggtaatacgacgtacatagtgt

SEQ ID NO: 27929 - RNA, 21 nt, Synthetic Construct
  source 1..21: mol_type = other RNA
tagcagcacgtaatattggcg

SEQ ID NO: 27930 - RNA, 23 nt, Synthetic Construct
  source 1..23: mol_type = other RNA
aagcttatcagactgatgttgac

SEQ ID NO: 27931 - RNA, 17 nt, Synthetic Construct
  source 1..17: mol_type = other RNA
ccgtgtgaaagtaggtc

SEQ ID NO: 27932 - RNA, 23 nt, Synthetic Construct
  source 1..23: mol_type = other RNA
cggtaatacgacgtacttagtgt

SEQ ID NO: 27933 - RNA, 23 nt, Synthetic Construct
  source 1..23: mol_type = other RNA
caaagtgctgttcgtgcaggtaa

SEQ ID NO: 27934 - RNA, 18 nt, Synthetic Construct
  source 1..18: mol_type = other RNA
ggtgcaagcgttaatcgg

SEQ ID NO: 27935 - RNA, 18 nt, Synthetic Construct
  source 1..18: mol_type = other RNA
ggtgcaagcgttaatcgg

SEQ ID NO: 27936 - RNA, 35 nt, Synthetic Construct; identical to SEQ ID NO: 2402
  source 1..35: mol_type = other RNA

SEQ ID NO: 27937 - RNA, 21 nt, Synthetic Construct
  source 1..21: mol_type = other RNA
tgaggaagtaggttgtatagt

SEQ ID NO: 27938 - RNA, 21 nt, Synthetic Construct
  source 1..21: mol_type = other RNA
tgaggaagtaggttgtatagt

SEQ ID NO: 27939 - RNA, 18 nt, Synthetic Construct
  source 1..18: mol_type = other RNA
ctaatgagactgccggtg

SEQ ID NO: 27940 - RNA, 15 nt, Synthetic Construct
  source 1..15: mol_type = other RNA
acctgcatcgagggt

SEQ ID NO: 27941 - RNA, 23 nt, Synthetic Construct
  source 1..23: mol_type = other RNA
tcctgtgctgagctgccccgagt

SEQ ID NO: 27942 - RNA, 23 nt, Synthetic Construct
  source 1..23: mol_type = other RNA
tcctgtgctgagctgccccgagt

SEQ ID NO: 27943 - RNA, 21 nt, Synthetic Construct
  source 1..21: mol_type = other RNA
taaggtagtaggttgtgtggt

SEQ ID NO: 27944 - RNA, 18 nt, Synthetic Construct
  source 1..18: mol_type = other RNA
ccaaggggtcgtgggttc

SEQ ID NO: 27945 - RNA, 22 nt, Synthetic Construct
  source 1..22: mol_type = other RNA
tcctgtactgagctgtcccgag

SEQ ID NO: 27946 - RNA, 25 nt, Synthetic Construct
  source 1..25: mol_type = other RNA
agctacatctggctactgggtctct

SEQ ID NO: 27947 - RNA, 25 nt, Synthetic Construct
  source 1..25: mol_type = other RNA
agctacatctggctactgggtctct

SEQ ID NO: 27948 - RNA, 21 nt, Synthetic Construct
  source 1..21: mol_type = other RNA
tgaggtagtaggttgtgcggt

SEQ ID NO: 27949 - RNA, 21 nt, Synthetic Construct
  source 1..21: mol_type = other RNA
tgaggtagtaggttgtgcggt

SEQ ID NO: 27950 - RNA, 18 nt, Synthetic Construct
  source 1..18: mol_type = other RNA
gcgaaattccttgtcggg

SEQ ID NO: 27951 - RNA, 23 nt, Synthetic Construct
  source 1..23: mol_type = other RNA
tgataatacgacgtacttagtgt

SEQ ID NO: 27952 - RNA, 30 nt, Synthetic Construct; identical to SEQ ID NO: 2308
  source 1..30: mol_type = other RNA

SEQ ID NO: 27953 - RNA, 23 nt, Synthetic Construct
  source 1..23: mol_type = other RNA
tgaggtagtaggttgtgtggtaa

SEQ ID NO: 27954 - RNA, 23 nt, Synthetic Construct
  source 1..23: mol_type = other RNA
tcctgtaccgagctgccccgaga

SEQ ID NO: 27955 - RNA, 22 nt, Synthetic Construct
  source 1..22: mol_type = other RNA
tggaatgtaaaggagtatgtat

SEQ ID NO: 27956 - RNA, 22 nt, Synthetic Construct
  source 1..22: mol_type = other RNA
tggaatgtaaaggagtatgtat

SEQ ID NO: 27957 - RNA, 26 nt, Synthetic Construct
  source 1..26: mol_type = other RNA
tgtccccgcgaggggcccggggcggg

SEQ ID NO: 27958 - RNA, 26 nt, Synthetic Construct
  source 1..26: mol_type = other RNA
tgtccccgcgaggggcccggggcggg

SEQ ID NO: 27959 - RNA, 22 nt, Synthetic Construct
  source 1..22: mol_type = other RNA
tagcagcacgtaagtattggcg

SEQ ID NO: 27960 - RNA, 22 nt, Synthetic Construct
  source 1..22: mol_type = other RNA
tagcagcacgtaagtattggcg

SEQ ID NO: 27961 - RNA, 35 nt, Synthetic Construct; identical to SEQ ID NO: 2518
  source 1..35: mol_type = other RNA

SEQ ID NO: 27962 - RNA, 25 nt, Synthetic Construct
  source 1..25: mol_type = other RNA
atttccccttggggttgtaggacca

SEQ ID NO: 27963 - RNA, 25 nt, Synthetic Construct
  source 1..25: mol_type = other RNA
atttccccttggggttgtaggacca

SEQ ID NO: 27964 - RNA, 23 nt, Synthetic Construct
  source 1..23: mol_type = other RNA
gtaaacatccttgactggaagct

SEQ ID NO: 27965 - RNA, 23 nt, Synthetic Construct
  source 1..23: mol_type = other RNA
gtaaacatccttgactggaagct

SEQ ID NO: 27966 - RNA, 35 nt, Synthetic Construct; identical to SEQ ID NO: 2402
  source 1..35: mol_type = other RNA

SEQ ID NO: 27967 - RNA, 23 nt, Synthetic Construct
  source 1..23: mol_type = other RNA
tagcagcacataatggtttgtgg

SEQ ID NO: 27968 - RNA, 23 nt, Synthetic Construct
  source 1..23: mol_type = other RNA
tgaggtagtaggttgtgcggttt

SEQ ID NO: 27969 - RNA, 22 nt, Synthetic Construct
  source 1..22: mol_type = other RNA
gtcagtttgtcaaataccccat

SEQ ID NO: 27970 - RNA, 22 nt, Synthetic Construct
  source 1..22: mol_type = other RNA
tgagatagtaggttgtgtggtt

SEQ ID NO: 27971 - RNA, 16 nt, Synthetic Construct
  source 1..16: mol_type = other RNA
cccaaaggtcgtcggt

SEQ ID NO: 27972 - RNA, 16 nt, Synthetic Construct
  source 1..16: mol_type = other RNA
cccaaaggtcgtcggt

SEQ ID NO: 27973 - RNA, 30 nt, Synthetic Construct; identical to SEQ ID NO: 751
  source 1..30: mol_type = other RNA

SEQ ID NO: 27974 - RNA, 43 nt, Synthetic Construct; identical to SEQ ID NO: 727
  source 1..43: mol_type = other RNA

SEQ ID NO: 27975 - RNA, 43 nt, Synthetic Construct; identical to SEQ ID NO: 727
  source 1..43: mol_type = other RNA

SEQ ID NO: 27976 - RNA, 16 nt, Synthetic Construct
  source 1..16: mol_type = other RNA
accgcttttgtcaggg

SEQ ID NO: 27977 - RNA, 16 nt, Synthetic Construct
  source 1..16: mol_type = other RNA
accgcttttgtcaggg

SEQ ID NO: 27978 - RNA, 43 nt, Synthetic Construct; identical to SEQ ID NO: 1204
  source 1..43: mol_type = other RNA

SEQ ID NO: 27979 - RNA, 43 nt, Synthetic Construct; identical to SEQ ID NO: 1204
  source 1..43: mol_type = other RNA

SEQ ID NO: 27980 - RNA, 16 nt, Synthetic Construct
  source 1..16: mol_type = other RNA
gtccacggccatacca

SEQ ID NO: 27981 - RNA, 23 nt, Synthetic Construct
  source 1..23: mol_type = other RNA
tgaggaagtaggttgtgtggttt

SEQ ID NO: 27982 - RNA, 23 nt, Synthetic Construct
  source 1..23: mol_type = other RNA
tcctgtgctgagctgccccgagt

SEQ ID NO: 27983 - RNA, 19 nt, Synthetic Construct
  source 1..19: mol_type = other RNA
cagcactctgcaaagacga

SEQ ID NO: 27984 - RNA, 19 nt, Synthetic Construct
  source 1..19: mol_type = other RNA
cagcactctgcaaagacga

SEQ ID NO: 27985 - RNA, 22 nt, Synthetic Construct
  source 1..22: mol_type = other RNA
tcctgtactgagctgctccgag

SEQ ID NO: 27986 - RNA, 22 nt, Synthetic Construct
  source 1..22: mol_type = other RNA
tcctgtactgagctgctccgag

SEQ ID NO: 27987 - RNA, 25 nt, Synthetic Construct
  source 1..25: mol_type = other RNA
tcggatccgtctgagcttggctttt

SEQ ID NO: 27988 - RNA, 25 nt, Synthetic Construct
  source 1..25: mol_type = other RNA
tcggatccgtctgagcttggctttt

SEQ ID NO: 27989 - RNA, 22 nt, Synthetic Construct
  source 1..22: mol_type = other RNA
tggagtgtaaagaagtatgtat

SEQ ID NO: 27990 - RNA, 22 nt, Synthetic Construct
  source 1..22: mol_type = other RNA
tggagtgtaaagaagtatgtat

SEQ ID NO: 27991 - RNA, 16 nt, Synthetic Construct
  source 1..16: mol_type = other RNA
gcagacgaagtgagtg

SEQ ID NO: 27992 - RNA, 16 nt, Synthetic Construct
  source 1..16: mol_type = other RNA
gcagacgaagtgagtg

SEQ ID NO: 27993 - RNA, 23 nt, Synthetic Construct
  source 1..23: mol_type = other RNA
tgtgcaaatctatgcaaaactga

SEQ ID NO: 27994 - RNA, 22 nt, Synthetic Construct
  source 1..22: mol_type = other RNA
tggaatgcaaagaagtatgtat

SEQ ID NO: 27995 - RNA, 16 nt, Synthetic Construct
  source 1..16: mol_type = other RNA
gactacggccatacca

SEQ ID NO: 27996 - RNA, 21 nt, Synthetic Construct
  source 1..21: mol_type = other RNA
tgaggggcagagggcgagact

SEQ ID NO: 27997 - RNA, 21 nt, Synthetic Construct
  source 1..21: mol_type = other RNA
tgaggggcagagggcgagact

SEQ ID NO: 27998 - RNA, 17 nt, Synthetic Construct
  source 1..17: mol_type = other RNA
gcgtagatatgcggagg

SEQ ID NO: 27999 - RNA, 17 nt, Synthetic Construct
  source 1..17: mol_type = other RNA
gcgtagatatgcggagg

SEQ ID NO: 28000 - RNA, 16 nt, Synthetic Construct
  source 1..16: mol_type = other RNA
gtctatggccatacca

SEQ ID NO: 28001 - RNA, 22 nt, Synthetic Construct
  source 1..22: mol_type = other RNA
tattgcacttgccccggcctgt

SEQ ID NO: 28002 - RNA, 22 nt, Synthetic Construct
  source 1..22: mol_type = other RNA
tagcagcacgtagatattggcg

SEQ ID NO: 28003 - RNA, 22 nt, Synthetic Construct
  source 1..22: mol_type = other RNA
tagcagcacgtagatattggcg

SEQ ID NO: 28004 - RNA, 23 nt, Synthetic Construct
  source 1..23: mol_type = other RNA
tggtaatacgacgtactcagtgt

SEQ ID NO: 28005 - RNA, 22 nt, Synthetic Construct
  source 1..22: mol_type = other RNA
tgaggtagtagtttgtgccgtt

SEQ ID NO: 28006 - RNA, 22 nt, Synthetic Construct
  source 1..22: mol_type = other RNA
tgaggtagtagtttgtgccgtt

SEQ ID NO: 28007 - RNA, 21 nt, Synthetic Construct
  source 1..21: mol_type = other RNA
tgaggtagtaggatgtgtggt

SEQ ID NO: 28008 - RNA, 21 nt, Synthetic Construct
  source 1..21: mol_type = other RNA
tgaggtagtaggatgtgtggt

SEQ ID NO: 28009 - RNA, 38 nt, Synthetic Construct; identical to SEQ ID NO: 7148
  source 1..38: mol_type = other RNA

SEQ ID NO: 28010 - RNA, 38 nt, Synthetic Construct; identical to SEQ ID NO: 7148
  source 1..38: mol_type = other RNA

SEQ ID NO: 28011 - RNA, 21 nt, Synthetic Construct
  source 1..21: mol_type = other RNA
gggagtgtgacaatggtgttt

SEQ ID NO: 28012 - RNA, 21 nt, Synthetic Construct
  source 1..21: mol_type = other RNA
gggagtgtgacaatggtgttt

SEQ ID NO: 28013 - RNA, 23 nt, Synthetic Construct
  source 1..23: mol_type = other RNA
tcctgtactgagctgccccgggt

SEQ ID NO: 28014 - RNA, 23 nt, Synthetic Construct
  source 1..23: mol_type = other RNA
tcctgtactgagctgccccgggt

SEQ ID NO: 28015 - RNA, 22 nt, Synthetic Construct
  source 1..22: mol_type = other RNA
tattgcacttgtcctggcctgt

SEQ ID NO: 28016 - RNA, 23 nt, Synthetic Construct
  source 1..23: mol_type = other RNA
tgaggggcagagagcgagacctt

SEQ ID NO: 28017 - RNA, 20 nt, Synthetic Construct
  source 1..20: mol_type = other RNA
ggtcccaagggtatggctgt

SEQ ID NO: 28018 - RNA, 26 nt, Synthetic Construct
  source 1..26: mol_type = other RNA
gcgggcgtagctcaggggtagagcgc

SEQ ID NO: 28019 - RNA, 26 nt, Synthetic Construct
  source 1..26: mol_type = other RNA
gcgggcgtagctcaggggtagagcgc

SEQ ID NO: 28020 - RNA, 15 nt, Synthetic Construct
  source 1..15: mol_type = other RNA
cgccatttaaagagg

SEQ ID NO: 28021 - RNA, 26 nt, Synthetic Construct
  source 1..26: mol_type = other RNA
gacttaccaaacctatgcaaactccg

SEQ ID NO: 28022 - RNA, 18 nt, Synthetic Construct
  source 1..18: mol_type = other RNA
cccttgtcattagttgct

SEQ ID NO: 28023 - RNA, 18 nt, Synthetic Construct
  source 1..18: mol_type = other RNA
cccttgtcattagttgct

SEQ ID NO: 28024 - RNA, 16 nt, Synthetic Construct
  source 1..16: mol_type = other RNA
tgttcggaagattttc

SEQ ID NO: 28025 - RNA, 16 nt, Synthetic Construct
  source 1..16: mol_type = other RNA
tgttcggaagattttc

SEQ ID NO: 28026 - RNA, 22 nt, Synthetic Construct
  source 1..22: mol_type = other RNA
tcctgtattgagctgccccgag

SEQ ID NO: 28027 - RNA, 31 nt, Synthetic Construct; identical to SEQ ID NO: 2293
  source 1..31: mol_type = other RNA

SEQ ID NO: 28028 - RNA, 20 nt, Synthetic Construct
  source 1..20: mol_type = other RNA
ggaggtagtaggttgtgtgg

SEQ ID NO: 28029 - RNA, 20 nt, Synthetic Construct
  source 1..20: mol_type = other RNA
ggaggtagtaggttgtgtgg

SEQ ID NO: 28030 - RNA, 20 nt, Synthetic Construct
  source 1..20: mol_type = other RNA
tgaggtagaaggttgtatag

SEQ ID NO: 28031 - RNA, 20 nt, Synthetic Construct
  source 1..20: mol_type = other RNA
tgaggtagaaggttgtatag

SEQ ID NO: 28032 - RNA, 17 nt, Synthetic Construct
  source 1..17: mol_type = other RNA
taggtcatcgtcaggct

SEQ ID NO: 28033 - RNA, 17 nt, Synthetic Construct
  source 1..17: mol_type = other RNA
taggtcatcgtcaggct

SEQ ID NO: 28034 - RNA, 22 nt, Synthetic Construct
  source 1..22: mol_type = other RNA
tcctatactgagctgccccgag

SEQ ID NO: 28035 - RNA, 25 nt, Synthetic Construct
  source 1..25: mol_type = other RNA
ttgaggatgtgagatcgagacgaca

SEQ ID NO: 28036 - RNA, 21 nt, Synthetic Construct
  source 1..21: mol_type = other RNA
tactccttaagcgaatctcgc

SEQ ID NO: 28037 - RNA, 21 nt, Synthetic Construct
  source 1..21: mol_type = other RNA
tactccttaagcgaatctcgc

SEQ ID NO: 28038 - RNA, 19 nt, Synthetic Construct
  source 1..19: mol_type = other RNA
gtacagtactgtgataact

SEQ ID NO: 28039 - RNA, 19 nt, Synthetic Construct
  source 1..19: mol_type = other RNA
gtacagtactgtgataact

SEQ ID NO: 28040 - RNA, 23 nt, Synthetic Construct
  source 1..23: mol_type = other RNA
tcctgtactgagttgccccgaga

SEQ ID NO: 28041 - RNA, 23 nt, Synthetic Construct
  source 1..23: mol_type = other RNA
tcctgtactgagttgccccgaga

SEQ ID NO: 28042 - RNA, 23 nt, Synthetic Construct
  source 1..23: mol_type = other RNA
gtgcagatcttggtggtagtagc

SEQ ID NO: 28043 - RNA, 23 nt, Synthetic Construct
  source 1..23: mol_type = other RNA
gtgcagatcttggtggtagtagc

SEQ ID NO: 28044 - RNA, 23 nt, Synthetic Construct
  source 1..23: mol_type = other RNA
gcgtggtaggagagcgttctgta

SEQ ID NO: 28045 - RNA, 23 nt, Synthetic Construct
  source 1..23: mol_type = other RNA
gcgtggtaggagagcgttctgta

SEQ ID NO: 28046 - RNA, 16 nt, Synthetic Construct
  source 1..16: mol_type = other RNA
gtctacggccatacta

SEQ ID NO: 28047 - RNA, 16 nt, Synthetic Construct
  source 1..16: mol_type = other RNA
gtctacggccatacta

SEQ ID NO: 28048 - RNA, 21 nt, Synthetic Construct
  source 1..21: mol_type = other RNA
cgaggggcagagagcgagact

SEQ ID NO: 28049 - RNA, 21 nt, Synthetic Construct
  source 1..21: mol_type = other RNA
cgaggggcagagagcgagact

SEQ ID NO: 28050 - RNA, 22 nt, Synthetic Construct
  source 1..22: mol_type = other RNA
tattgcacctgtcccggcctgt

SEQ ID NO: 28051 - RNA, 36 nt, Synthetic Construct; identical to SEQ ID NO: 10982
  source 1..36: mol_type = other RNA

SEQ ID NO: 28052 - RNA, 23 nt, Synthetic Construct
  source 1..23: mol_type = other RNA
tggggtagtaggttgtgtggttt

SEQ ID NO: 28053 - RNA, 23 nt, Synthetic Construct
  source 1..23: mol_type = other RNA
tggggtagtaggttgtgtggttt

SEQ ID NO: 28054 - RNA, 22 nt, Synthetic Construct
  source 1..22: mol_type = other RNA
tgaggtagtaggttgtgtggta

SEQ ID NO: 28055 - RNA, 23 nt, Synthetic Construct
  source 1..23: mol_type = other RNA
ttcaagtaatccaggataggctt

SEQ ID NO: 28056 - RNA, 20 nt, Synthetic Construct
  source 1..20: mol_type = other RNA
ccgcagagtacagcttggga

SEQ ID NO: 28057 - RNA, 24 nt, Synthetic Construct
  source 1..24: mol_type = other RNA
tgagaactgaattccatgggttga

SEQ ID NO: 28058 - RNA, 16 nt, Synthetic Construct
  source 1..16: mol_type = other RNA
ggaattgacggaaggg

SEQ ID NO: 28059 - RNA, 16 nt, Synthetic Construct
  source 1..16: mol_type = other RNA
ggaattgacggaaggg

SEQ ID NO: 28060 - RNA, 22 nt, Synthetic Construct
  source 1..22: mol_type = other RNA
tggagtgtgacaatggtgcttg

SEQ ID NO: 28061 - RNA, 22 nt, Synthetic Construct
  source 1..22: mol_type = other RNA
tgaggtagtaggttgtgtggta

SEQ ID NO: 28062 - RNA, 22 nt, Synthetic Construct
  source 1..22: mol_type = other RNA
tgaggtagtaggttgtgtggta

SEQ ID NO: 28063 - RNA, 25 nt, Synthetic Construct
  source 1..25: mol_type = other RNA
ttgaggatacgagatcgagacgaca

SEQ ID NO: 28064 - RNA, 27 nt, Synthetic Construct
  source 1..27: mol_type = other RNA
ccccccactgctaaacttgactggctt

SEQ ID NO: 28065 - RNA, 22 nt, Synthetic Construct
  source 1..22: mol_type = other RNA
ccctgtactgagctgccccgag

SEQ ID NO: 28066 - RNA, 22 nt, Synthetic Construct
  source 1..22: mol_type = other RNA
ccctgtactgagctgccccgag

SEQ ID NO: 28067 - RNA, 17 nt, Synthetic Construct
  source 1..17: mol_type = other RNA
atgcaagtcgaacggta

SEQ ID NO: 28068 - RNA, 17 nt, Synthetic Construct
  source 1..17: mol_type = other RNA
atgcaagtcgaacggta

SEQ ID NO: 28069 - RNA, 17 nt, Synthetic Construct
  source 1..17: mol_type = other RNA
agacagcaggacggtgg

SEQ ID NO: 28070 - RNA, 17 nt, Synthetic Construct
  source 1..17: mol_type = other RNA
agacagcaggacggtgg

SEQ ID NO: 28071 - RNA, 22 nt, Synthetic Construct
  source 1..22: mol_type = other RNA
caaagaattctccttttgggct

SEQ ID NO: 28072 - RNA, 24 nt, Synthetic Construct
  source 1..24: mol_type = other RNA
tcctgtactgagctgccccgagtt

SEQ ID NO: 28073 - RNA, 23 nt, Synthetic Construct
  source 1..23: mol_type = other RNA
gggtaatacgacgtacttagtgt

SEQ ID NO: 28074 - RNA, 22 nt, Synthetic Construct
  source 1..22: mol_type = other RNA
tcagtgcatgacagaacttggg

SEQ ID NO: 28075 - RNA, 23 nt, Synthetic Construct
  source 1..23: mol_type = other RNA
tggaatgtaaagaagtatgtatt

SEQ ID NO: 28076 - RNA, 23 nt, Synthetic Construct
  source 1..23: mol_type = other RNA
tggaatgtaaagaagtatgtatt

SEQ ID NO: 28077 - RNA, 23 nt, Synthetic Construct
  source 1..23: mol_type = other RNA
tggtaatacgacgtactaagtgt

SEQ ID NO: 28078 - RNA, 23 nt, Synthetic Construct
  source 1..23: mol_type = other RNA
tggtaatacgacgtactaagtgt

SEQ ID NO: 28079 - RNA, 15 nt, Synthetic Construct
  source 1..15: mol_type = other RNA
tggccgtcgtcagct

SEQ ID NO: 28080 - RNA, 20 nt, Synthetic Construct
  source 1..20: mol_type = other RNA
atcacattgccagggatttc

SEQ ID NO: 28081 - RNA, 20 nt, Synthetic Construct
  source 1..20: mol_type = other RNA
atcacattgccagggatttc

SEQ ID NO: 28082 - RNA, 23 nt, Synthetic Construct
  source 1..23: mol_type = other RNA
tggtaatacgacgtactaagtgt

SEQ ID NO: 28083 - RNA, 23 nt, Synthetic Construct
  source 1..23: mol_type = other RNA
tggtaatacgacgtactaagtgt

SEQ ID NO: 28084 - RNA, 23 nt, Synthetic Construct
  source 1..23: mol_type = other RNA
tggtaatacgacgtacttagtat

SEQ ID NO: 28085 - RNA, 17 nt, Synthetic Construct
  source 1..17: mol_type = other RNA
cagagacgagtcgacca

SEQ ID NO: 28086 - RNA, 17 nt, Synthetic Construct
  source 1..17: mol_type = other RNA
cagagacgagtcgacca

SEQ ID NO: 28087 - RNA, 22 nt, Synthetic Construct
  source 1..22: mol_type = other RNA
tgaggtagtaggttgtgaggtt

SEQ ID NO: 28088 - RNA, 22 nt, Synthetic Construct
  source 1..22: mol_type = other RNA
tgaggtagtaggttgtgaggtt

SEQ ID NO: 28089 - RNA, 23 nt, Synthetic Construct
  source 1..23: mol_type = other RNA
ccctgtactgagctgccccgaga

SEQ ID NO: 28090 - RNA, 23 nt, Synthetic Construct
  source 1..23: mol_type = other RNA
ccctgtactgagctgccccgaga

SEQ ID NO: 28091 - RNA, 15 nt, Synthetic Construct
  source 1..15: mol_type = other RNA
tcagtagctcgagga

SEQ ID NO: 28092 - RNA, 25 nt, Synthetic Construct
  source 1..25: mol_type = other RNA
ttgaggatatgagatcgagacaaca

SEQ ID NO: 28093 - RNA, 27 nt, Synthetic Construct
  source 1..27: mol_type = other RNA
ccccctactgctaaatttgactggctt

SEQ ID NO: 28094 - RNA, 27 nt, Synthetic Construct
  source 1..27: mol_type = other RNA
ccccccactactaaatttgactggctt

SEQ ID NO: 28095 - RNA, 19 nt, Synthetic Construct
  source 1..19: mol_type = other RNA
tcagtagctcgaggaaaag

SEQ ID NO: 28096 - RNA, 19 nt, Synthetic Construct
  source 1..19: mol_type = other RNA
tcagtagctcgaggaaaag

SEQ ID NO: 28097 - RNA, 18 nt, Synthetic Construct
  source 1..18: mol_type = other RNA
cgccgatgatagtgcgga

SEQ ID NO: 28098 - RNA, 37 nt, Synthetic Construct; identical to SEQ ID NO: 11100
  source 1..37: mol_type = other RNA

SEQ ID NO: 28099 - RNA, 37 nt, Synthetic Construct; identical to SEQ ID NO: 11100
  source 1..37: mol_type = other RNA

SEQ ID NO: 28100 - RNA, 23 nt, Synthetic Construct
  source 1..23: mol_type = other RNA
tagcaccatttgaaatcagtgtt

SEQ ID NO: 28101 - RNA, 23 nt, Synthetic Construct
  source 1..23: mol_type = other RNA
tagcaccatttgaaatcagtgtt

SEQ ID NO: 28102 - RNA, 21 nt, Synthetic Construct
  source 1..21: mol_type = other RNA
tgaggtagtagtttgcgctgt

SEQ ID NO: 28103 - RNA, 21 nt, Synthetic Construct
  source 1..21: mol_type = other RNA
tgaggtagtagtttgcgctgt

SEQ ID NO: 28104 - RNA, 22 nt, Synthetic Construct
  source 1..22: mol_type = other RNA
tctttggttatctagctgtatg

SEQ ID NO: 28105 - RNA, 22 nt, Synthetic Construct
  source 1..22: mol_type = other RNA
tctttggttatctagctgtatg

SEQ ID NO: 28106 - RNA, 22 nt, Synthetic Construct
  source 1..22: mol_type = other RNA
tggaatgtagagaagtatgtat

SEQ ID NO: 28107 - RNA, 22 nt, Synthetic Construct
  source 1..22: mol_type = other RNA
tggaatgtagagaagtatgtat

SEQ ID NO: 28108 - RNA, 22 nt, Synthetic Construct
  source 1..22: mol_type = other RNA
tggaatgtaaagaggtatgtat

SEQ ID NO: 28109 - RNA, 22 nt, Synthetic Construct
  source 1..22: mol_type = other RNA
tggaatgtaaagaggtatgtat

SEQ ID NO: 28110 - RNA, 25 nt, Synthetic Construct
  source 1..25: mol_type = other RNA
agctacatctggctactgggtctct

SEQ ID NO: 28111 - RNA, 25 nt, Synthetic Construct
  source 1..25: mol_type = other RNA
agctacatctggctactgggtctct

SEQ ID NO: 28112 - RNA, 23 nt, Synthetic Construct
  source 1..23: mol_type = other RNA
tggtaatacgacgtacttagagt

SEQ ID NO: 28113 - RNA, 23 nt, Synthetic Construct
  source 1..23: mol_type = other RNA
tggtaatacgacgtacttagagt

SEQ ID NO: 28114 - RNA, 20 nt, Synthetic Construct
  source 1..20: mol_type = other RNA
tgaggtagtgggttgtgtgg

SEQ ID NO: 28115 - RNA, 22 nt, Synthetic Construct
  source 1..22: mol_type = other RNA
ctgggtcggtcgggctggggcg

SEQ ID NO: 28116 - RNA, 22 nt, Synthetic Construct
  source 1..22: mol_type = other RNA
ctgggtcggtcgggctggggcg

SEQ ID NO: 28117 - RNA, 24 nt, Synthetic Construct
  source 1..24: mol_type = other RNA
tgtaaacatccccgactgggagct

SEQ ID NO: 28118 - RNA, 22 nt, Synthetic Construct
  source 1..22: mol_type = other RNA
gaagcacattcgcacatcatat

SEQ ID NO: 28119 - RNA, 22 nt, Synthetic Construct
  source 1..22: mol_type = other RNA
gaagcacattcgcacatcatat

SEQ ID NO: 28120 - RNA, 21 nt, Synthetic Construct
  source 1..21: mol_type = other RNA
tcatgtactgagctgccccga

SEQ ID NO: 28121 - RNA, 21 nt, Synthetic Construct
  source 1..21: mol_type = other RNA
tcatgtactgagctgccccga

SEQ ID NO: 28122 - RNA, 20 nt, Synthetic Construct
  source 1..20: mol_type = other RNA
cataaagtagaaagcactac

SEQ ID NO: 28123 - RNA, 20 nt, Synthetic Construct
  source 1..20: mol_type = other RNA
cataaagtagaaagcactac

SEQ ID NO: 28124 - RNA, 17 nt, Synthetic Construct
  source 1..17: mol_type = other RNA
gcggctgtagctcagtt

SEQ ID NO: 28125 - RNA, 17 nt, Synthetic Construct
  source 1..17: mol_type = other RNA
gcggctgtagctcagtt

SEQ ID NO: 28126 - RNA, 23 nt, Synthetic Construct
  source 1..23: mol_type = other RNA
tacagtagtctgcacattggttt

SEQ ID NO: 28127 - RNA, 23 nt, Synthetic Construct
  source 1..23: mol_type = other RNA
taaggtgcatctagtgcagatag

SEQ ID NO: 28128 - RNA, 22 nt, Synthetic Construct
  source 1..22: mol_type = other RNA
atcaagtaattcaggataggtt

SEQ ID NO: 28129 - RNA, 22 nt, Synthetic Construct
  source 1..22: mol_type = other RNA
ttcaagtaatccaggataggtt

SEQ ID NO: 28130 - RNA, 27 nt, Synthetic Construct
  source 1..27: mol_type = other RNA
gcgggcgtagctcaggggtagagcgca

SEQ ID NO: 28131 - RNA, 27 nt, Synthetic Construct
  source 1..27: mol_type = other RNA
gcgggcgtagctcaggggtagagcgca

SEQ ID NO: 28132 - RNA, 20 nt, Synthetic Construct
  source 1..20: mol_type = other RNA
cataaagtagaaagcactac

SEQ ID NO: 28133 - RNA, 24 nt, Synthetic Construct
  source 1..24: mol_type = other RNA
acctggcatacaatgtagatttct

SEQ ID NO: 28134 - RNA, 22 nt, Synthetic Construct
  source 1..22: mol_type = other RNA
tggaacgtaaagaagtatgtat

SEQ ID NO: 28135 - RNA, 22 nt, Synthetic Construct
  source 1..22: mol_type = other RNA
tggaacgtaaagaagtatgtat

SEQ ID NO: 28136 - RNA, 22 nt, Synthetic Construct
  source 1..22: mol_type = other RNA
ttctgtactgagctgccccgag

SEQ ID NO: 28137 - RNA, 22 nt, Synthetic Construct
  source 1..22: mol_type = other RNA
ttctgtactgagctgccccgag

SEQ ID NO: 28138 - RNA, 23 nt, Synthetic Construct
  source 1..23: mol_type = other RNA
gcgtggtaggagagcgttctgta

SEQ ID NO: 28139 - RNA, 22 nt, Synthetic Construct
  source 1..22: mol_type = other RNA
tgaggaagtagtttgtgctgtt

SEQ ID NO: 28140 - RNA, 22 nt, Synthetic Construct
  source 1..22: mol_type = other RNA
tgaggaagtagtttgtgctgtt

SEQ ID NO: 28141 - RNA, 16 nt, Synthetic Construct
  source 1..16: mol_type = other RNA
gtccacggccatacca

SEQ ID NO: 28142 - RNA, 21 nt, Synthetic Construct
  source 1..21: mol_type = other RNA
tgaggtagtaggttgagtggt

SEQ ID NO: 28143 - RNA, 21 nt, Synthetic Construct
  source 1..21: mol_type = other RNA
tgaggtagtaggttgagtggt

SEQ ID NO: 28144 - RNA, 21 nt, Synthetic Construct
  source 1..21: mol_type = other RNA
tgaggtagtaggttgtgcggt

SEQ ID NO: 28145 - RNA, 21 nt, Synthetic Construct
  source 1..21: mol_type = other RNA
tgaggtagtaggttgtgcggt

SEQ ID NO: 28146 - RNA, 21 nt, Synthetic Construct
  source 1..21: mol_type = other RNA
tgaggtagtaggttgtgaggt

SEQ ID NO: 28147 - RNA, 21 nt, Synthetic Construct
  source 1..21: mol_type = other RNA
tgaggtagtaggttgtgaggt

SEQ ID NO: 28148 - RNA, 20 nt, Synthetic Construct
  source 1..20: mol_type = other RNA
tgaggtagtaggttgcgtgg

SEQ ID NO: 28149 - RNA, 20 nt, Synthetic Construct
  source 1..20: mol_type = other RNA
tgaggtagtaggttgcgtgg

SEQ ID NO: 28150 - RNA, 21 nt, Synthetic Construct
  source 1..21: mol_type = other RNA
tgaggtagtaggttgcgtggt

SEQ ID NO: 28151 - RNA, 21 nt, Synthetic Construct
  source 1..21: mol_type = other RNA
tgaggtagtaggttgcgtggt

SEQ ID NO: 28152 - RNA, 22 nt, Synthetic Construct
  source 1..22: mol_type = other RNA
tactgcacttgtcccggcctgt

SEQ ID NO: 28153 - RNA, 24 nt, Synthetic Construct
  source 1..24: mol_type = other RNA
ttccccttggggttgtaggaccac

SEQ ID NO: 28154 - RNA, 24 nt, Synthetic Construct
  source 1..24: mol_type = other RNA
ttccccttggggttgtaggaccac

SEQ ID NO: 28155 - RNA, 22 nt, Synthetic Construct
  source 1..22: mol_type = other RNA
tgaggtagaagtttgtgctgtt

SEQ ID NO: 28156 - RNA, 22 nt, Synthetic Construct
  source 1..22: mol_type = other RNA
gcgttgcaaccagtgccggggg

SEQ ID NO: 28157 - RNA, 23 nt, Synthetic Construct
  source 1..23: mol_type = other RNA
tgggctaagggagatgattgggt

SEQ ID NO: 28158 - RNA, 21 nt, Synthetic Construct
  source 1..21: mol_type = other RNA
tcctgtactgagctgcccgag

SEQ ID NO: 28159 - RNA, 21 nt, Synthetic Construct
  source 1..21: mol_type = other RNA
tcctgtactgagctgcccgag

SEQ ID NO: 28160 - RNA, 21 nt, Synthetic Construct
  source 1..21: mol_type = other RNA
cagcattgtacagggctatga

SEQ ID NO: 28161 - RNA, 21 nt, Synthetic Construct
  source 1..21: mol_type = other RNA
cagcattgtacagggctatga

SEQ ID NO: 28162 - RNA, 17 nt, Synthetic Construct
  source 1..17: mol_type = other RNA
accaaggggtcgtgggt

SEQ ID NO: 28163 - RNA, 23 nt, Synthetic Construct
  source 1..23: mol_type = other RNA
naaagtgctgttcgtgcaggtag

SEQ ID NO: 28164 - RNA, 23 nt, Synthetic Construct
  source 1..23: mol_type = other RNA
naaagtgctgttcgtgcaggtag

SEQ ID NO: 28165 - RNA, 17 nt, Synthetic Construct
  source 1..17: mol_type = other RNA
gggtctgtagctcagtc

SEQ ID NO: 28166 - RNA, 16 nt, Synthetic Construct
  source 1..16: mol_type = other RNA
ctgacgctcatgcacg

SEQ ID NO: 28167 - RNA, 22 nt, Synthetic Construct
  source 1..22: mol_type = other RNA
tgaggtagaaggttgtgtggtt

SEQ ID NO: 28168 - RNA, 22 nt, Synthetic Construct
  source 1..22: mol_type = other RNA
tgaggtagaaggttgtgtggtt

SEQ ID NO: 28169 - RNA, 21 nt, Synthetic Construct
  source 1..21: mol_type = other RNA
aacggaatcccaaaagcagct

SEQ ID NO: 28170 - RNA, 21 nt, Synthetic Construct
  source 1..21: mol_type = other RNA
aacggaatcccaaaagcagct

SEQ ID NO: 28171 - RNA, 23 nt, Synthetic Construct
  source 1..23: mol_type = other RNA
tgaggggcagagagcgaggcttt

SEQ ID NO: 28172 - RNA, 33 nt, Synthetic Construct; identical to SEQ ID NO: 2209
  source 1..33: mol_type = other RNA

SEQ ID NO: 28173 - RNA, 19 nt, Synthetic Construct
  source 1..19: mol_type = other RNA
cacatgcaagtcgaacggt

SEQ ID NO: 28174 - RNA, 21 nt, Synthetic Construct
  source 1..21: mol_type = other RNA
tgaggtagcaggttgtgtggt

SEQ ID NO: 28175 - RNA, 21 nt, Synthetic Construct
  source 1..21: mol_type = other RNA
tgaggtagcaggttgtgtggt

SEQ ID NO: 28176 - RNA, 15 nt, Synthetic Construct
  source 1..15: mol_type = other RNA
atccctccgactccg

SEQ ID NO: 28177 - RNA, 22 nt, Synthetic Construct
  source 1..22: mol_type = other RNA
tggaatgtaaaggagtatgtat

SEQ ID NO: 28178 - RNA, 17 nt, Synthetic Construct
  source 1..17: mol_type = other RNA
cccctggacctgtactg

SEQ ID NO: 28179 - RNA, 21 nt, Synthetic Construct
  source 1..21: mol_type = other RNA
acagtagtctgcacattggtt

SEQ ID NO: 28180 - RNA, 21 nt, Synthetic Construct
  source 1..21: mol_type = other RNA
acagtagtctgcacattggtt

SEQ ID NO: 28181 - RNA, 22 nt, Synthetic Construct
  source 1..22: mol_type = other RNA
tcctgtactaagctgccccgag

SEQ ID NO: 28182 - RNA, 22 nt, Synthetic Construct
  source 1..22: mol_type = other RNA
tcctgtactaagctgccccgag

SEQ ID NO: 28183 - RNA, 28 nt, Synthetic Construct
  source 1..28: mol_type = other RNA
gcatgggtggttcagtggtagaattctc

SEQ ID NO: 28184 - RNA, 28 nt, Synthetic Construct
  source 1..28: mol_type = other RNA
gcatgggtggttcagtggtagaattctc

SEQ ID NO: 28185 - RNA, 22 nt, Synthetic Construct
  source 1..22: mol_type = other RNA
tacagtagtctgcacattggtt

SEQ ID NO: 28186 - RNA, 22 nt, Synthetic Construct
  source 1..22: mol_type = other RNA
tacagtagtctgcacattggtt

SEQ ID NO: 28187 - RNA, 24 nt, Synthetic Construct
  source 1..24: mol_type = other RNA
tgtaaacgtccccgactggaagct

SEQ ID NO: 28188 - RNA, 43 nt, Synthetic Construct; identical to SEQ ID NO: 727
  source 1..43: mol_type = other RNA

SEQ ID NO: 28189 - RNA, 22 nt, Synthetic Construct
  source 1..22: mol_type = other RNA
tgtcaactggttgttgggaggg

SEQ ID NO: 28190 - RNA, 23 nt, Synthetic Construct
  source 1..23: mol_type = other RNA
tagcttatcagactgatgttgaa

SEQ ID NO: 28191 - RNA, 23 nt, Synthetic Construct
  source 1..23: mol_type = other RNA
tagcttatcagactgatgttgaa

SEQ ID NO: 28192 - RNA, 25 nt, Synthetic Construct
  source 1..25: mol_type = other RNA
tgaggggcagagagcgagacttttt

SEQ ID NO: 28193 - RNA, 21 nt, Synthetic Construct
  source 1..21: mol_type = other RNA
tgtagtgtttcctactttatg

SEQ ID NO: 28194 - RNA, 20 nt, Synthetic Construct
  source 1..20: mol_type = other RNA
tgaggtagtaggttgtgtgg

SEQ ID NO: 28195 - RNA, 20 nt, Synthetic Construct
  source 1..20: mol_type = other RNA
tgaggtagtaggttgtgtgg

SEQ ID NO: 28196 - RNA, 23 nt, Synthetic Construct
  source 1..23: mol_type = other RNA
caaagtgcttacagtgcaggtag

SEQ ID NO: 28197 - RNA, 23 nt, Synthetic Construct
  source 1..23: mol_type = other RNA
caaagtgcttacagtgcaggtag

SEQ ID NO: 28198 - RNA, 35 nt, Synthetic Construct; identical to SEQ ID NO: 730
  source 1..35: mol_type = other RNA

SEQ ID NO: 28199 - RNA, 35 nt, Synthetic Construct; identical to SEQ ID NO: 730
  source 1..35: mol_type = other RNA

SEQ ID NO: 28200 - RNA, 22 nt, Synthetic Construct
  source 1..22: mol_type = other RNA
ccacctcccctgcaaacgtcca

SEQ ID NO: 28201 - RNA, 22 nt, Synthetic Construct
  source 1..22: mol_type = other RNA
ccacctcccctgcaaacgtcca

SEQ ID NO: 28202 - RNA, 22 nt, Synthetic Construct
  source 1..22: mol_type = other RNA
tagcagcacgcaaatattggcg

SEQ ID NO: 28203 - RNA, 22 nt, Synthetic Construct
  source 1..22: mol_type = other RNA
tagcagcacgcaaatattggcg

SEQ ID NO: 28204 - RNA, 39 nt, Synthetic Construct; identical to SEQ ID NO: 759
  source 1..39: mol_type = other RNA

SEQ ID NO: 28205 - RNA, 39 nt, Synthetic Construct; identical to SEQ ID NO: 759
  source 1..39: mol_type = other RNA

SEQ ID NO: 28206 - RNA, 30 nt, Synthetic Construct; identical to SEQ ID NO: 2308
  source 1..30: mol_type = other RNA

SEQ ID NO: 28207 - RNA, 30 nt, Synthetic Construct; identical to SEQ ID NO: 2308
  source 1..30: mol_type = other RNA

SEQ ID NO: 28208 - RNA, 32 nt, Synthetic Construct; identical to SEQ ID NO: 2467
  source 1..32: mol_type = other RNA

SEQ ID NO: 28209 - RNA, 22 nt, Synthetic Construct
  source 1..22: mol_type = other RNA
tgaggtagtaggttgtgtggct

SEQ ID NO: 28210 - RNA, 22 nt, Synthetic Construct
  source 1..22: mol_type = other RNA
tgaggtagtaggttgtgtggct

SEQ ID NO: 28211 - RNA, 18 nt, Synthetic Construct
  source 1..18: mol_type = other RNA
gtctgcctcagcgtcggt

SEQ ID NO: 28212 - RNA, 18 nt, Synthetic Construct
  source 1..18: mol_type = other RNA
gtctgcctcagcgtcggt

SEQ ID NO: 28213 - RNA, 22 nt, Synthetic Construct
  source 1..22: mol_type = other RNA
tcctatactgagctgccccgag

SEQ ID NO: 28214 - RNA, 22 nt, Synthetic Construct
  source 1..22: mol_type = other RNA
tcctatactgagctgccccgag

SEQ ID NO: 28215 - RNA, 18 nt, Synthetic Construct
  source 1..18: mol_type = other RNA
gctattgacgaccgtacc

SEQ ID NO: 28216 - RNA, 18 nt, Synthetic Construct
  source 1..18: mol_type = other RNA
gctattgacgaccgtacc

SEQ ID NO: 28217 - RNA, 21 nt, Synthetic Construct
  source 1..21: mol_type = other RNA
taatactgcctggtaatgatg

SEQ ID NO: 28218 - RNA, 21 nt, Synthetic Construct
  source 1..21: mol_type = other RNA
taatactgcctggtaatgatg

SEQ ID NO: 28219 - RNA, 34 nt, Synthetic Construct; identical to SEQ ID NO: 6757
  source 1..34: mol_type = other RNA

SEQ ID NO: 28220 - RNA, 34 nt, Synthetic Construct; identical to SEQ ID NO: 6757
  source 1..34: mol_type = other RNA

SEQ ID NO: 28221 - RNA, 25 nt, Synthetic Construct
  source 1..25: mol_type = other RNA
ctgaggatatgagatcgagacgaca

SEQ ID NO: 28222 - RNA, 21 nt, Synthetic Construct
  source 1..21: mol_type = other RNA
aatggcgccactagggttgtg

SEQ ID NO: 28223 - RNA, 22 nt, Synthetic Construct
  source 1..22: mol_type = other RNA
tgtggtagtagtttgtgctgtt

SEQ ID NO: 28224 - RNA, 22 nt, Synthetic Construct
  source 1..22: mol_type = other RNA
tgtggtagtagtttgtgctgtt

SEQ ID NO: 28225 - RNA, 17 nt, Synthetic Construct
  source 1..17: mol_type = other RNA
agtccggatcgtagtct

SEQ ID NO: 28226 - RNA, 23 nt, Synthetic Construct
  source 1..23: mol_type = other RNA
taaggggcagagagcgagacttt

SEQ ID NO: 28227 - RNA, 23 nt, Synthetic Construct
  source 1..23: mol_type = other RNA
taaggggcagagagcgagacttt

SEQ ID NO: 28228 - RNA, 19 nt, Synthetic Construct
  source 1..19: mol_type = other RNA
aacagtcaggatgttggct

SEQ ID NO: 28229 - RNA, 25 nt, Synthetic Construct
  source 1..25: mol_type = other RNA
tcgaggatatgagatcgagacgaca

SEQ ID NO: 28230 - RNA, 25 nt, Synthetic Construct
  source 1..25: mol_type = other RNA
tcgaggatatgagatcgagacgaca

SEQ ID NO: 28231 - RNA, 23 nt, Synthetic Construct
  source 1..23: mol_type = other RNA
ggctacattgtctgctgggtttc

SEQ ID NO: 28232 - RNA, 20 nt, Synthetic Construct
  source 1..20: mol_type = other RNA
gcgtgcttgactgcgagact

SEQ ID NO: 28233 - RNA, 24 nt, Synthetic Construct
  source 1..24: mol_type = other RNA
tagcagcacgtaaatattggcgtt

SEQ ID NO: 28234 - RNA, 24 nt, Synthetic Construct
  source 1..24: mol_type = other RNA
tagcagcacgtaaatattggcgtt

SEQ ID NO: 28235 - RNA, 33 nt, Synthetic Construct; identical to SEQ ID NO: 2209
  source 1..33: mol_type = other RNA

SEQ ID NO: 28236 - RNA, 20 nt, Synthetic Construct
  source 1..20: mol_type = other RNA
tgaggggcagagagcgagac

SEQ ID NO: 28237 - RNA, 22 nt, Synthetic Construct
  source 1..22: mol_type = other RNA
tgaggtagtaaattgtatagtt

SEQ ID NO: 28238 - RNA, 27 nt, Synthetic Construct
  source 1..27: mol_type = other RNA
ccccccgctgctaaatttgactggctt

SEQ ID NO: 28239 - RNA, 29 nt, Synthetic Construct
  source 1..29: mol_type = other RNA
ccccccccactgctaaatttgactggctt

SEQ ID NO: 28240 - RNA, 29 nt, Synthetic Construct
  source 1..29: mol_type = other RNA
ccccccccactgctaaatttgactggctt

SEQ ID NO: 28241 - RNA, 20 nt, Synthetic Construct
  source 1..20: mol_type = other RNA
tgaggtagtaggctgtgtgg

SEQ ID NO: 28242 - RNA, 16 nt, Synthetic Construct
  source 1..16: mol_type = other RNA
ccggaggaaggtgggg

SEQ ID NO: 28243 - RNA, 16 nt, Synthetic Construct
  source 1..16: mol_type = other RNA
ccggaggaaggtgggg

SEQ ID NO: 28244 - RNA, 31 nt, Synthetic Construct; identical to SEQ ID NO: 2293
  source 1..31: mol_type = other RNA

SEQ ID NO: 28245 - RNA, 20 nt, Synthetic Construct
  source 1..20: mol_type = other RNA
cgaggtagtaggttgtgtgg

SEQ ID NO: 28246 - RNA, 23 nt, Synthetic Construct
  source 1..23: mol_type = other RNA
tggtaatacgacgtactaagtgt

SEQ ID NO: 28247 - RNA, 23 nt, Synthetic Construct
  source 1..23: mol_type = other RNA
tggtaatacgacgtactaagtgt

SEQ ID NO: 28248 - RNA, 23 nt, Synthetic Construct
  source 1..23: mol_type = other RNA
tctttggttatctagctgtatga

SEQ ID NO: 28249 - RNA, 23 nt, Synthetic Construct
  source 1..23: mol_type = other RNA
tctttggttatctagctgtatga

SEQ ID NO: 28250 - RNA, 26 nt, Synthetic Construct
  source 1..26: mol_type = other RNA
tgtaaacatccttgactggaagcttt

SEQ ID NO: 28251 - RNA, 30 nt, Synthetic Construct; identical to SEQ ID NO: 10539
  source 1..30: mol_type = other RNA

SEQ ID NO: 28252 - RNA, 30 nt, Synthetic Construct; identical to SEQ ID NO: 10539
  source 1..30: mol_type = other RNA

SEQ ID NO: 28253 - RNA, 17 nt, Synthetic Construct
  source 1..17: mol_type = other RNA
gcggctgtagctcagtt

SEQ ID NO: 28254 - RNA, 23 nt, Synthetic Construct
  source 1..23: mol_type = other RNA
tccccttggggttgtaggaccac

SEQ ID NO: 28255 - RNA, 23 nt, Synthetic Construct
  source 1..23: mol_type = other RNA
tccccttggggttgtaggaccac

SEQ ID NO: 28256 - RNA, 36 nt, Synthetic Construct; identical to SEQ ID NO: 777
  source 1..36: mol_type = other RNA

SEQ ID NO: 28257 - RNA, 36 nt, Synthetic Construct; identical to SEQ ID NO: 777
  source 1..36: mol_type = other RNA

SEQ ID NO: 28258 - RNA, 22 nt, Synthetic Construct
  source 1..22: mol_type = other RNA
tgaggtagtaggttgtgtggat

SEQ ID NO: 28259 - RNA, 22 nt, Synthetic Construct
  source 1..22: mol_type = other RNA
tgaggtagtaggttgtgtggat

SEQ ID NO: 28260 - RNA, 25 nt, Synthetic Construct
  source 1..25: mol_type = other RNA
ttgaggatatgagatcgagacgacg

SEQ ID NO: 28261 - RNA, 25 nt, Synthetic Construct
  source 1..25: mol_type = other RNA
ttgaggatatgagatcgagacgacg

SEQ ID NO: 28262 - RNA, 23 nt, Synthetic Construct
  source 1..23: mol_type = other RNA
tcctgtactgagctaccccgaga

SEQ ID NO: 28263 - RNA, 23 nt, Synthetic Construct
  source 1..23: mol_type = other RNA
tcctgtactgagctaccccgaga

SEQ ID NO: 28264 - RNA, 16 nt, Synthetic Construct
  source 1..16: mol_type = other RNA
gtctacggccatacaa

SEQ ID NO: 28265 - RNA, 27 nt, Synthetic Construct
  source 1..27: mol_type = other RNA
ccccccactgctaaatttgaccggctt

SEQ ID NO: 28266 - RNA, 15 nt, Synthetic Construct
  source 1..15: mol_type = other RNA
atccctccgactccg

SEQ ID NO: 28267 - RNA, 23 nt, Synthetic Construct
  source 1..23: mol_type = other RNA
tggtaatacgacgtactttgtgt

SEQ ID NO: 28268 - RNA, 23 nt, Synthetic Construct
  source 1..23: mol_type = other RNA
tggtaatacgacgtactttgtgt

SEQ ID NO: 28269 - RNA, 16 nt, Synthetic Construct
  source 1..16: mol_type = other RNA
gtctacgaccatacca

SEQ ID NO: 28270 - RNA, 16 nt, Synthetic Construct
  source 1..16: mol_type = other RNA
gtctacgaccatacca

SEQ ID NO: 28271 - RNA, 19 nt, Synthetic Construct
  source 1..19: mol_type = other RNA
cctgtaccgatcaatagtg

SEQ ID NO: 28272 - RNA, 19 nt, Synthetic Construct
  source 1..19: mol_type = other RNA
cctgtaccgatcaatagtg

SEQ ID NO: 28273 - RNA, 22 nt, Synthetic Construct
  source 1..22: mol_type = other RNA
tgaggtagtaggttgtgtggtc

SEQ ID NO: 28274 - RNA, 22 nt, Synthetic Construct
  source 1..22: mol_type = other RNA
tgaggtagtaggttgtgtggtc

SEQ ID NO: 28275 - RNA, 24 nt, Synthetic Construct
  source 1..24: mol_type = other RNA
gggttgtaaaccgcttttgtcagg

SEQ ID NO: 28276 - RNA, 22 nt, Synthetic Construct
  source 1..22: mol_type = other RNA
tcactgatcgagtcgtcctgcg

SEQ ID NO: 28277 - RNA, 34 nt, Synthetic Construct; identical to SEQ ID NO: 6757
  source 1..34: mol_type = other RNA

SEQ ID NO: 28278 - RNA, 22 nt, Synthetic Construct
  source 1..22: mol_type = other RNA
tgaggtagtaggttgtgtggtt

SEQ ID NO: 28279 - RNA, 22 nt, Synthetic Construct
  source 1..22: mol_type = other RNA
tgaggtagtaggttgtgtggtt

SEQ ID NO: 28280 - RNA, 34 nt, Synthetic Construct; identical to SEQ ID NO: 13733
  source 1..34: mol_type = other RNA

SEQ ID NO: 28281 - RNA, 34 nt, Synthetic Construct; identical to SEQ ID NO: 13733
  source 1..34: mol_type = other RNA

SEQ ID NO: 28282 - RNA, 22 nt, Synthetic Construct
  source 1..22: mol_type = other RNA
tcctgtactgaactgccccgag

SEQ ID NO: 28283 - RNA, 22 nt, Synthetic Construct
  source 1..22: mol_type = other RNA
tcctgtactgaactgccccgag

SEQ ID NO: 28284 - RNA, 32 nt, Synthetic Construct; identical to SEQ ID NO: 3748
  source 1..32: mol_type = other RNA

SEQ ID NO: 28285 - RNA, 32 nt, Synthetic Construct; identical to SEQ ID NO: 3748
  source 1..32: mol_type = other RNA

SEQ ID NO: 28286 - RNA, 22 nt, Synthetic Construct
  source 1..22: mol_type = other RNA
gtcagtttgtcaaataccccaa

SEQ ID NO: 28287 - RNA, 22 nt, Synthetic Construct
  source 1..22: mol_type = other RNA
gtcagtttgtcaaataccccaa

SEQ ID NO: 28288 - RNA, 21 nt, Synthetic Construct
  source 1..21: mol_type = other RNA
tggagtgtggcaatggtgttt

SEQ ID NO: 28289 - RNA, 21 nt, Synthetic Construct
  source 1..21: mol_type = other RNA
tggagtgtggcaatggtgttt

SEQ ID NO: 28290 - RNA, 30 nt, Synthetic Construct; identical to SEQ ID NO: 1771
  source 1..30: mol_type = other RNA

SEQ ID NO: 28291 - RNA, 30 nt, Synthetic Construct; identical to SEQ ID NO: 1771
  source 1..30: mol_type = other RNA

SEQ ID NO: 28292 - RNA, 23 nt, Synthetic Construct
  source 1..23: mol_type = other RNA
gcctgtactgagctgccccgaga

SEQ ID NO: 28293 - RNA, 23 nt, Synthetic Construct
  source 1..23: mol_type = other RNA
gcctgtactgagctgccccgaga

SEQ ID NO: 28294 - RNA, 21 nt, Synthetic Construct
  source 1..21: mol_type = other RNA
tgaggtagtagattgtatagc

SEQ ID NO: 28295 - RNA, 17 nt, Synthetic Construct
  source 1..17: mol_type = other RNA
taggtcatcgtcaggct

SEQ ID NO: 28296 - RNA, 19 nt, Synthetic Construct
  source 1..19: mol_type = other RNA
gtccggatcgtagtctgca

SEQ ID NO: 28297 - RNA, 22 nt, Synthetic Construct
  source 1..22: mol_type = other RNA
ggtagcgaaattccttgtcggg

SEQ ID NO: 28298 - RNA, 22 nt, Synthetic Construct
  source 1..22: mol_type = other RNA
ggtagcgaaattccttgtcggg

SEQ ID NO: 28299 - RNA, 23 nt, Synthetic Construct
  source 1..23: mol_type = other RNA
tcccgtactgagctgccccgagt

SEQ ID NO: 28300 - RNA, 25 nt, Synthetic Construct
  source 1..25: mol_type = other RNA
gcgccgctggtgtagtggtatcatg

SEQ ID NO: 28301 - RNA, 25 nt, Synthetic Construct
  source 1..25: mol_type = other RNA
gcgccgctggtgtagtggtatcatg

SEQ ID NO: 28302 - RNA, 22 nt, Synthetic Construct
  source 1..22: mol_type = other RNA
tgtaaacatccccgactggagg

SEQ ID NO: 28303 - RNA, 22 nt, Synthetic Construct
  source 1..22: mol_type = other RNA
tcctgtactgggctgccccgag

SEQ ID NO: 28304 - RNA, 22 nt, Synthetic Construct
  source 1..22: mol_type = other RNA
tcctgtactgggctgccccgag

SEQ ID NO: 28305 - RNA, 22 nt, Synthetic Construct
  source 1..22: mol_type = other RNA
tagcagcacgtgaatattggcg

SEQ ID NO: 28306 - RNA, 22 nt, Synthetic Construct
  source 1..22: mol_type = other RNA
tagcagcacgtgaatattggcg

SEQ ID NO: 28307 - RNA, 32 nt, Synthetic Construct; identical to SEQ ID NO: 2467
  source 1..32: mol_type = other RNA

SEQ ID NO: 28308 - RNA, 22 nt, Synthetic Construct
  source 1..22: mol_type = other RNA
gggagtgtgacaatggtgtttg

SEQ ID NO: 28309 - RNA, 22 nt, Synthetic Construct
  source 1..22: mol_type = other RNA
gggagtgtgacaatggtgtttg

SEQ ID NO: 28310 - RNA, 22 nt, Synthetic Construct
  source 1..22: mol_type = other RNA
cattgcacctgtctcggtctga

SEQ ID NO: 28311 - RNA, 21 nt, Synthetic Construct
  source 1..21: mol_type = other RNA
tgaggtaggaggttgtatagt

SEQ ID NO: 28312 - RNA, 22 nt, Synthetic Construct
  source 1..22: mol_type = other RNA
tcctatactgagctgccccgag

SEQ ID NO: 28313 - RNA, 31 nt, Synthetic Construct; identical to SEQ ID NO: 5506
  source 1..31: mol_type = other RNA

SEQ ID NO: 28314 - RNA, 23 nt, Synthetic Construct
  source 1..23: mol_type = other RNA
tgaggtagtagtttgtgctgttg

SEQ ID NO: 28315 - RNA, 22 nt, Synthetic Construct
  source 1..22: mol_type = other RNA
tgaggtagtaggttgagtggtt

SEQ ID NO: 28316 - RNA, 22 nt, Synthetic Construct
  source 1..22: mol_type = other RNA
tgaggtagtaggttgagtggtt

SEQ ID NO: 28317 - RNA, 21 nt, Synthetic Construct
  source 1..21: mol_type = other RNA
tggggggcagagagcgagact

SEQ ID NO: 28318 - RNA, 21 nt, Synthetic Construct
  source 1..21: mol_type = other RNA
caaagtgctgttcgtgcaggt

SEQ ID NO: 28319 - RNA, 17 nt, Synthetic Construct
  source 1..17: mol_type = other RNA
tgccagcagccgcggta

SEQ ID NO: 28320 - RNA, 17 nt, Synthetic Construct
  source 1..17: mol_type = other RNA
tgccagcagccgcggta

SEQ ID NO: 28321 - RNA, 22 nt, Synthetic Construct
  source 1..22: mol_type = other RNA
tggaatgtaaagaagcatgtat

SEQ ID NO: 28322 - RNA, 22 nt, Synthetic Construct
  source 1..22: mol_type = other RNA
tggaatgtaaagaagcatgtat

SEQ ID NO: 28323 - RNA, 22 nt, Synthetic Construct
  source 1..22: mol_type = other RNA
tcctgtactgagctgccccaag

SEQ ID NO: 28324 - RNA, 22 nt, Synthetic Construct
  source 1..22: mol_type = other RNA
tcctgtactgagctgccccaag

SEQ ID NO: 28325 - RNA, 34 nt, Synthetic Construct; identical to SEQ ID NO: 6594
  source 1..34: mol_type = other RNA

SEQ ID NO: 28326 - RNA, 34 nt, Synthetic Construct; identical to SEQ ID NO: 6594
  source 1..34: mol_type = other RNA

SEQ ID NO: 28327 - RNA, 24 nt, Synthetic Construct
  source 1..24: mol_type = other RNA
tcagtgcatcacagaactttgttt

SEQ ID NO: 28328 - RNA, 15 nt, Synthetic Construct
  source 1..15: mol_type = other RNA
tcagtagctcgagga

SEQ ID NO: 28329 - RNA, 15 nt, Synthetic Construct
  source 1..15: mol_type = other RNA
tcagtagctcgagga

SEQ ID NO: 28330 - RNA, 23 nt, Synthetic Construct
  source 1..23: mol_type = other RNA
tgaggggcagggagcgagacttt

SEQ ID NO: 28331 - RNA, 20 nt, Synthetic Construct
  source 1..20: mol_type = other RNA
tgaggtagtaggttgtgtag

SEQ ID NO: 28332 - RNA, 20 nt, Synthetic Construct
  source 1..20: mol_type = other RNA
tgaggtagtaggttgtgtag

SEQ ID NO: 28333 - RNA, 21 nt, Synthetic Construct
  source 1..21: mol_type = other RNA
tcctgaactgagctgccccga

SEQ ID NO: 28334 - RNA, 21 nt, Synthetic Construct
  source 1..21: mol_type = other RNA
tcctgaactgagctgccccga

SEQ ID NO: 28335 - RNA, 21 nt, Synthetic Construct
  source 1..21: mol_type = other RNA
tgaggtagtagtttgcgctgt

SEQ ID NO: 28336 - RNA, 21 nt, Synthetic Construct
  source 1..21: mol_type = other RNA
tgaggtagtagtttgcgctgt

SEQ ID NO: 28337 - RNA, 22 nt, Synthetic Construct
  source 1..22: mol_type = other RNA
tcctgtactaagctgccccgag

SEQ ID NO: 28338 - RNA, 22 nt, Synthetic Construct
  source 1..22: mol_type = other RNA
ttataatacaacctgataagtg

SEQ ID NO: 28339 - RNA, 22 nt, Synthetic Construct
  source 1..22: mol_type = other RNA
ttataatacaacctgataagtg

SEQ ID NO: 28340 - RNA, 24 nt, Synthetic Construct
  source 1..24: mol_type = other RNA
ggtaaacatccccgactggaagct

SEQ ID NO: 28341 - RNA, 16 nt, Synthetic Construct
  source 1..16: mol_type = other RNA
gtcaacggccatacca

SEQ ID NO: 28342 - RNA, 16 nt, Synthetic Construct
  source 1..16: mol_type = other RNA
gtcaacggccatacca

SEQ ID NO: 28343 - RNA, 24 nt, Synthetic Construct
  source 1..24: mol_type = other RNA
tcggctcatctcatcctggggctg

SEQ ID NO: 28344 - RNA, 27 nt, Synthetic Construct
  source 1..27: mol_type = other RNA
ccccccactgctgaatttgactggctt

SEQ ID NO: 28345 - RNA, 22 nt, Synthetic Construct
  source 1..22: mol_type = other RNA
tgaggtagcaggttgtgtggtt

SEQ ID NO: 28346 - RNA, 22 nt, Synthetic Construct
  source 1..22: mol_type = other RNA
tgaggtagcaggttgtgtggtt

SEQ ID NO: 28347 - RNA, 23 nt, Synthetic Construct
  source 1..23: mol_type = other RNA
tctttggttatctagctgtatga

SEQ ID NO: 28348 - RNA, 21 nt, Synthetic Construct
  source 1..21: mol_type = other RNA
tggagtgtgacgatggtgttt

SEQ ID NO: 28349 - RNA, 21 nt, Synthetic Construct
  source 1..21: mol_type = other RNA
tggagtgtgacgatggtgttt

SEQ ID NO: 28350 - RNA, 21 nt, Synthetic Construct
  source 1..21: mol_type = other RNA
caatggccgggacagagggct

SEQ ID NO: 28351 - RNA, 21 nt, Synthetic Construct
  source 1..21: mol_type = other RNA
caatggccgggacagagggct

SEQ ID NO: 28352 - RNA, 22 nt, Synthetic Construct
  source 1..22: mol_type = other RNA
tctttggttatctagctgtatg

SEQ ID NO: 28353 - RNA, 21 nt, Synthetic Construct
  source 1..21: mol_type = other RNA
atgtcccacccccactcctgt

SEQ ID NO: 28354 - RNA, 21 nt, Synthetic Construct
  source 1..21: mol_type = other RNA
atgtcccacccccactcctgt

SEQ ID NO: 28355 - RNA, 21 nt, Synthetic Construct
  source 1..21: mol_type = other RNA
ggaggtagtaggttgtgtggt

SEQ ID NO: 28356 - RNA, 21 nt, Synthetic Construct
  source 1..21: mol_type = other RNA
ggaggtagtaggttgtgtggt

SEQ ID NO: 28357 - RNA, 22 nt, Synthetic Construct
  source 1..22: mol_type = other RNA
gctcacggaaagagaatgaagc

SEQ ID NO: 28358 - RNA, 23 nt, Synthetic Construct
  source 1..23: mol_type = other RNA
tggtaatacgacatacttagtgt

SEQ ID NO: 28359 - RNA, 23 nt, Synthetic Construct
  source 1..23: mol_type = other RNA
tggtaatacgacatacttagtgt

SEQ ID NO: 28360 - RNA, 19 nt, Synthetic Construct
  source 1..19: mol_type = other RNA
tcagtagctcgaggaaaag

SEQ ID NO: 28361 - RNA, 23 nt, Synthetic Construct
  source 1..23: mol_type = other RNA
tgaggggcagagagcgggacttt

SEQ ID NO: 28362 - RNA, 20 nt, Synthetic Construct
  source 1..20: mol_type = other RNA
tgaggtagtaagttgtattg

SEQ ID NO: 28363 - RNA, 20 nt, Synthetic Construct
  source 1..20: mol_type = other RNA
tgaggtagtaagttgtattg

SEQ ID NO: 28364 - RNA, 22 nt, Synthetic Construct
  source 1..22: mol_type = other RNA
caacggaatcccaaaagcagca

SEQ ID NO: 28365 - RNA, 20 nt, Synthetic Construct
  source 1..20: mol_type = other RNA
tcctgtaccgatcaatagtg

SEQ ID NO: 28366 - RNA, 22 nt, Synthetic Construct
  source 1..22: mol_type = other RNA
tgtaaacatccccgactggagg

SEQ ID NO: 28367 - RNA, 21 nt, Synthetic Construct
  source 1..21: mol_type = other RNA
tggggtagtagtttgtgctgt

SEQ ID NO: 28368 - RNA, 24 nt, Synthetic Construct
  source 1..24: mol_type = other RNA
tgagaactgaattccatgggttgt

SEQ ID NO: 28369 - RNA, 24 nt, Synthetic Construct
  source 1..24: mol_type = other RNA
tgagaactgaattccatgggttgt

SEQ ID NO: 28370 - RNA, 17 nt, Synthetic Construct
  source 1..17: mol_type = other RNA
cgactcttagcggtgga

SEQ ID NO: 28371 - RNA, 17 nt, Synthetic Construct
  source 1..17: mol_type = other RNA
cgactcttagcggtgga

SEQ ID NO: 28372 - RNA, 25 nt, Synthetic Construct
  source 1..25: mol_type = other RNA
ggtaaaatggctgagtgaagcattg

SEQ ID NO: 28373 - RNA, 18 nt, Synthetic Construct
  source 1..18: mol_type = other RNA
cctgaagaataagcaccg

SEQ ID NO: 28374 - RNA, 22 nt, Synthetic Construct
  source 1..22: mol_type = other RNA
gtcagtttgtcaaataccccat

SEQ ID NO: 28375 - RNA, 22 nt, Synthetic Construct
  source 1..22: mol_type = other RNA
gtcagtttgtcaaataccccat

SEQ ID NO: 28376 - RNA, 19 nt, Synthetic Construct
  source 1..19: mol_type = other RNA
accaaggggtcgtgggttc

SEQ ID NO: 28377 - RNA, 21 nt, Synthetic Construct
  source 1..21: mol_type = other RNA
gtagtgtttcctactttatgg

SEQ ID NO: 28378 - RNA, 21 nt, Synthetic Construct
  source 1..21: mol_type = other RNA
gtagtgtttcctactttatgg

SEQ ID NO: 28379 - RNA, 21 nt, Synthetic Construct
  source 1..21: mol_type = other RNA
cgcatcccctagggcattggt

SEQ ID NO: 28380 - RNA, 21 nt, Synthetic Construct
  source 1..21: mol_type = other RNA
cgcatcccctagggcattggt

SEQ ID NO: 28381 - RNA, 16 nt, Synthetic Construct
  source 1..16: mol_type = other RNA
cagtcaggatgttggc

SEQ ID NO: 28382 - RNA, 16 nt, Synthetic Construct
  source 1..16: mol_type = other RNA
cagtcaggatgttggc

SEQ ID NO: 28383 - RNA, 23 nt, Synthetic Construct
  source 1..23: mol_type = other RNA
ccctgtactgagctgccccgagt

SEQ ID NO: 28384 - RNA, 15 nt, Synthetic Construct
  source 1..15: mol_type = other RNA
cggcccagactccta

SEQ ID NO: 28385 - RNA, 15 nt, Synthetic Construct
  source 1..15: mol_type = other RNA
cggcccagactccta

SEQ ID NO: 28386 - RNA, 23 nt, Synthetic Construct
  source 1..23: mol_type = other RNA
tgaggggcagagagcaagacttt

SEQ ID NO: 28387 - RNA, 23 nt, Synthetic Construct
  source 1..23: mol_type = other RNA
tgaggggcagagagcaagacttt

SEQ ID NO: 28388 - RNA, 22 nt, Synthetic Construct
  source 1..22: mol_type = other RNA
tggaatgtaaagaagtatgtat

SEQ ID NO: 28389 - RNA, 22 nt, Synthetic Construct
  source 1..22: mol_type = other RNA
tggaatgtaaagaagtatgtat

SEQ ID NO: 28390 - RNA, 22 nt, Synthetic Construct
  source 1..22: mol_type = other RNA
tgaggtaataggttgtgtggtt

SEQ ID NO: 28391 - RNA, 26 nt, Synthetic Construct
  source 1..26: mol_type = other RNA
tccctggtggtctagtggttaggatt

SEQ ID NO: 28392 - RNA, 26 nt, Synthetic Construct
  source 1..26: mol_type = other RNA
tccctggtggtctagtggttaggatt

SEQ ID NO: 28393 - RNA, 32 nt, Synthetic Construct; identical to SEQ ID NO: 2052
  source 1..32: mol_type = other RNA

SEQ ID NO: 28394 - RNA, 22 nt, Synthetic Construct
  source 1..22: mol_type = other RNA
tcctgtattgagctgccccgag

SEQ ID NO: 28395 - RNA, 22 nt, Synthetic Construct
  source 1..22: mol_type = other RNA
tcctgtattgagctgccccgag

SEQ ID NO: 28396 - RNA, 22 nt, Synthetic Construct
  source 1..22: mol_type = other RNA
tattgcacttgtcccagcctgt

SEQ ID NO: 28397 - RNA, 18 nt, Synthetic Construct
  source 1..18: mol_type = other RNA
ggccgtcgtcagctcgtg

SEQ ID NO: 28398 - RNA, 27 nt, Synthetic Construct
  source 1..27: mol_type = other RNA
atagtctttgttcgattccgttgagta

SEQ ID NO: 28399 - RNA, 26 nt, Synthetic Construct
  source 1..26: mol_type = other RNA
gcgggcgtagctcaggggtagagcgc

SEQ ID NO: 28400 - RNA, 26 nt, Synthetic Construct
  source 1..26: mol_type = other RNA
gcgggcgtagctcaggggtagagcgc

SEQ ID NO: 28401 - RNA, 17 nt, Synthetic Construct
  source 1..17: mol_type = other RNA
cagtcaggatgttggct

SEQ ID NO: 28402 - RNA, 22 nt, Synthetic Construct
  source 1..22: mol_type = other RNA
tgaggtagtaggttgtatagta

SEQ ID NO: 28403 - RNA, 22 nt, Synthetic Construct
  source 1..22: mol_type = other RNA
tgaggtagtaggttgtatagta

SEQ ID NO: 28404 - RNA, 23 nt, Synthetic Construct
  source 1..23: mol_type = other RNA
caaagtgcttacagtgcaggtag

SEQ ID NO: 28405 - RNA, 23 nt, Synthetic Construct
  source 1..23: mol_type = other RNA
caaagtgcttacagtgcaggtag

SEQ ID NO: 28406 - RNA, 23 nt, Synthetic Construct
  source 1..23: mol_type = other RNA
tcctgcactgagctgccccgagt

SEQ ID NO: 28407 - RNA, 23 nt, Synthetic Construct
  source 1..23: mol_type = other RNA
tcctgcactgagctgccccgagt

SEQ ID NO: 28408 - RNA, 21 nt, Synthetic Construct
  source 1..21: mol_type = other RNA
atcacattgccagggatttcc

SEQ ID NO: 28409 - RNA, 22 nt, Synthetic Construct
  source 1..22: mol_type = other RNA
tgaggtagtaggttgtgaggtt

SEQ ID NO: 28410 - RNA, 24 nt, Synthetic Construct
  source 1..24: mol_type = other RNA
gtctttgttcgattccgttgagta

SEQ ID NO: 28411 - RNA, 29 nt, Synthetic Construct
  source 1..29: mol_type = other RNA
tgaaggtgggttgtgaagcctgctggagg

SEQ ID NO: 28412 - RNA, 29 nt, Synthetic Construct
  source 1..29: mol_type = other RNA
tgaaggtgggttgtgaagcctgctggagg

SEQ ID NO: 28413 - RNA, 27 nt, Synthetic Construct
  source 1..27: mol_type = other RNA
tcggctgttaaccgaaaggttggtggt

SEQ ID NO: 28414 - RNA, 31 nt, Synthetic Construct; identical to SEQ ID NO: 7160
  source 1..31: mol_type = other RNA

SEQ ID NO: 28415 - RNA, 31 nt, Synthetic Construct; identical to SEQ ID NO: 7160
  source 1..31: mol_type = other RNA

SEQ ID NO: 28416 - RNA, 22 nt, Synthetic Construct
  source 1..22: mol_type = other RNA
atggatttttggagcagggaga

SEQ ID NO: 28417 - RNA, 22 nt, Synthetic Construct
  source 1..22: mol_type = other RNA
atggatttttggagcagggaga

SEQ ID NO: 28418 - RNA, 20 nt, Synthetic Construct
  source 1..20: mol_type = other RNA
gggttcgattccggagaggg

SEQ ID NO: 28419 - RNA, 20 nt, Synthetic Construct
  source 1..20: mol_type = other RNA
gggttcgattccggagaggg

SEQ ID NO: 28420 - RNA, 16 nt, Synthetic Construct
  source 1..16: mol_type = other RNA
ccgcttttgtcaggga

SEQ ID NO: 28421 - RNA, 21 nt, Synthetic Construct
  source 1..21: mol_type = other RNA
tcctgtactgggctgccccga

SEQ ID NO: 28422 - RNA, 21 nt, Synthetic Construct
  source 1..21: mol_type = other RNA
tcctgtactgggctgccccga

SEQ ID NO: 28423 - RNA, 22 nt, Synthetic Construct
  source 1..22: mol_type = other RNA
tccagcatcagtgattttgttg

SEQ ID NO: 28424 - RNA, 22 nt, Synthetic Construct
  source 1..22: mol_type = other RNA
tatagcacttgtcccggcctgt

SEQ ID NO: 28425 - RNA, 22 nt, Synthetic Construct
  source 1..22: mol_type = other RNA
tatagcacttgtcccggcctgt

SEQ ID NO: 28426 - RNA, 21 nt, Synthetic Construct
  source 1..21: mol_type = other RNA
tgaggtagtaggttgtgtggc

SEQ ID NO: 28427 - RNA, 17 nt, Synthetic Construct
  source 1..17: mol_type = other RNA
catgcaagtcgaacggt

SEQ ID NO: 28428 - RNA, 24 nt, Synthetic Construct
  source 1..24: mol_type = other RNA
agcagcattgtacagggctatgat

SEQ ID NO: 28429 - RNA, 24 nt, Synthetic Construct
  source 1..24: mol_type = other RNA
agcagcattgtacagggctatgat

SEQ ID NO: 28430 - RNA, 20 nt, Synthetic Construct
  source 1..20: mol_type = other RNA
gtcagtttgtcaaatacccc

SEQ ID NO: 28431 - RNA, 20 nt, Synthetic Construct
  source 1..20: mol_type = other RNA
gtcagtttgtcaaatacccc

SEQ ID NO: 28432 - RNA, 26 nt, Synthetic Construct
  source 1..26: mol_type = other RNA
gactcttagcggtggatcactcggct

SEQ ID NO: 28433 - RNA, 26 nt, Synthetic Construct
  source 1..26: mol_type = other RNA
gactcttagcggtggatcactcggct

SEQ ID NO: 28434 - RNA, 23 nt, Synthetic Construct
  source 1..23: mol_type = other RNA
tggtaatacgacatacttagtgt

SEQ ID NO: 28435 - RNA, 23 nt, Synthetic Construct
  source 1..23: mol_type = other RNA
tggtaatacgacatacttagtgt

SEQ ID NO: 28436 - RNA, 23 nt, Synthetic Construct
  source 1..23: mol_type = other RNA
tcctgtactgagccgccccgagt

SEQ ID NO: 28437 - RNA, 23 nt, Synthetic Construct
  source 1..23: mol_type = other RNA
tctttggttatctagctgtatgt

SEQ ID NO: 28438 - RNA, 22 nt, Synthetic Construct
  source 1..22: mol_type = other RNA
tgtggtagtagtttgtgctgtt

SEQ ID NO: 28439 - RNA, 22 nt, Synthetic Construct
  source 1..22: mol_type = other RNA
tgtggtagtagtttgtgctgtt

SEQ ID NO: 28440 - RNA, 25 nt, Synthetic Construct
  source 1..25: mol_type = other RNA
agctcactgatcgagtcgtcctgcg

SEQ ID NO: 28441 - RNA, 40 nt, Synthetic Construct; identical to SEQ ID NO: 2684
  source 1..40: mol_type = other RNA

SEQ ID NO: 28442 - RNA, 40 nt, Synthetic Construct; identical to SEQ ID NO: 2684
  source 1..40: mol_type = other RNA

SEQ ID NO: 28443 - RNA, 16 nt, Synthetic Construct
  source 1..16: mol_type = other RNA
gtctacggccatacca

SEQ ID NO: 28444 - RNA, 34 nt, Synthetic Construct; identical to SEQ ID NO: 2364
  source 1..34: mol_type = other RNA

SEQ ID NO: 28445 - RNA, 34 nt, Synthetic Construct; identical to SEQ ID NO: 2364
  source 1..34: mol_type = other RNA

SEQ ID NO: 28446 - RNA, 35 nt, Synthetic Construct; identical to SEQ ID NO: 1095
  source 1..35: mol_type = other RNA

SEQ ID NO: 28447 - RNA, 23 nt, Synthetic Construct
  source 1..23: mol_type = other RNA
tgaggggcggagagcgagacttt

SEQ ID NO: 28448 - RNA, 23 nt, Synthetic Construct
  source 1..23: mol_type = other RNA
tgaggggcggagagcgagacttt

SEQ ID NO: 28449 - RNA, 21 nt, Synthetic Construct
  source 1..21: mol_type = other RNA
tggagtgtgacaatggtgtct

SEQ ID NO: 28450 - RNA, 21 nt, Synthetic Construct
  source 1..21: mol_type = other RNA
tggagtgtgacaatggtgtct

SEQ ID NO: 28451 - RNA, 22 nt, Synthetic Construct
  source 1..22: mol_type = other RNA
tcctgtactgagctgccccggg

SEQ ID NO: 28452 - RNA, 22 nt, Synthetic Construct
  source 1..22: mol_type = other RNA
tcctgtactgagctgccccggg

SEQ ID NO: 28453 - RNA, 28 nt, Synthetic Construct
  source 1..28: mol_type = other RNA
ccccccgctgctaaatttgactggcttt

SEQ ID NO: 28454 - RNA, 23 nt, Synthetic Construct
  source 1..23: mol_type = other RNA
tcccgtactgagctgccccgagt

SEQ ID NO: 28455 - RNA, 22 nt, Synthetic Construct
  source 1..22: mol_type = other RNA
tagcttatcagactgatgttga

SEQ ID NO: 28456 - RNA, 22 nt, Synthetic Construct
  source 1..22: mol_type = other RNA
tattgcacttgtcccagcctgt

SEQ ID NO: 28457 - RNA, 20 nt, Synthetic Construct
  source 1..20: mol_type = other RNA
tgaggtagtaggttgtgtgt

SEQ ID NO: 28458 - RNA, 22 nt, Synthetic Construct
  source 1..22: mol_type = other RNA
tgtggtagtagtttgtgctgtt

SEQ ID NO: 28459 - RNA, 21 nt, Synthetic Construct
  source 1..21: mol_type = other RNA
tgaggtagtagtttgtgctgc

SEQ ID NO: 28460 - RNA, 21 nt, Synthetic Construct
  source 1..21: mol_type = other RNA
tgaggtagtagtttgtgctgc

SEQ ID NO: 28461 - RNA, 23 nt, Synthetic Construct
  source 1..23: mol_type = other RNA
tcctgtactgagctgccccgagg

SEQ ID NO: 28462 - RNA, 23 nt, Synthetic Construct
  source 1..23: mol_type = other RNA
tcctgtactgagctgccccgagg

SEQ ID NO: 28463 - RNA, 16 nt, Synthetic Construct
  source 1..16: mol_type = other RNA
tcgtgacgatagtgca

SEQ ID NO: 28464 - RNA, 16 nt, Synthetic Construct
  source 1..16: mol_type = other RNA
tcgtgacgatagtgca

SEQ ID NO: 28465 - RNA, 23 nt, Synthetic Construct
  source 1..23: mol_type = other RNA
tgaggtagtaggttgtgtggttc

SEQ ID NO: 28466 - RNA, 27 nt, Synthetic Construct
  source 1..27: mol_type = other RNA
ccccccactgctaaatttgattggctt

SEQ ID NO: 28467 - RNA, 23 nt, Synthetic Construct
  source 1..23: mol_type = other RNA
tggaatgtaaagaagtatgtacc

SEQ ID NO: 28468 - RNA, 23 nt, Synthetic Construct
  source 1..23: mol_type = other RNA
tggaatgtaaagaagtatgtacc

SEQ ID NO: 28469 - RNA, 21 nt, Synthetic Construct
  source 1..21: mol_type = other RNA
agccatcatttaaagaaagcg

SEQ ID NO: 28470 - RNA, 25 nt, Synthetic Construct
  source 1..25: mol_type = other RNA
ggtaaaatcgctgagtgaagcattg

SEQ ID NO: 28471 - RNA, 25 nt, Synthetic Construct
  source 1..25: mol_type = other RNA
ggtaaaatcgctgagtgaagcattg

SEQ ID NO: 28472 - RNA, 25 nt, Synthetic Construct
  source 1..25: mol_type = other RNA
ttcaagtaatccaggataggctttt

SEQ ID NO: 28473 - RNA, 25 nt, Synthetic Construct
  source 1..25: mol_type = other RNA
ttcaagtaatccaggataggctttt

SEQ ID NO: 28474 - RNA, 26 nt, Synthetic Construct
  source 1..26: mol_type = other RNA
tccctggtggtctagtggttaggatt

SEQ ID NO: 28475 - RNA, 22 nt, Synthetic Construct
  source 1..22: mol_type = other RNA
tgagatgaagcactgtagctca

SEQ ID NO: 28476 - RNA, 23 nt, Synthetic Construct
  source 1..23: mol_type = other RNA
tgtagtgtttcctactttatgga

SEQ ID NO: 28477 - RNA, 23 nt, Synthetic Construct
  source 1..23: mol_type = other RNA
tcctgtactgagccgccccgaga

SEQ ID NO: 28478 - RNA, 23 nt, Synthetic Construct
  source 1..23: mol_type = other RNA
tcctgtactgagccgccccgaga

SEQ ID NO: 28479 - RNA, 20 nt, Synthetic Construct
  source 1..20: mol_type = other RNA
actgatcgagtcgtcctgcg

SEQ ID NO: 28480 - RNA, 23 nt, Synthetic Construct
  source 1..23: mol_type = other RNA
tgaggagcagagagcgagacttt

SEQ ID NO: 28481 - RNA, 23 nt, Synthetic Construct
  source 1..23: mol_type = other RNA
tgaggagcagagagcgagacttt

SEQ ID NO: 28482 - RNA, 21 nt, Synthetic Construct
  source 1..21: mol_type = other RNA
tcctgtactgagctgcctcga

SEQ ID NO: 28483 - RNA, 21 nt, Synthetic Construct
  source 1..21: mol_type = other RNA
tcctgtactgagctgcctcga

SEQ ID NO: 28484 - RNA, 23 nt, Synthetic Construct
  source 1..23: mol_type = other RNA
tcaagagcaataacgaaaaatgt

SEQ ID NO: 28485 - RNA, 27 nt, Synthetic Construct
  source 1..27: mol_type = other RNA
ccccccactgccaaatttgactggctt

SEQ ID NO: 28486 - RNA, 23 nt, Synthetic Construct
  source 1..23: mol_type = other RNA
tcctgtgctgagctgccccgaga

SEQ ID NO: 28487 - RNA, 23 nt, Synthetic Construct
  source 1..23: mol_type = other RNA
tcctgtgctgagctgccccgaga

SEQ ID NO: 28488 - RNA, 20 nt, Synthetic Construct
  source 1..20: mol_type = other RNA
gctattgacgaccgtaccgc

SEQ ID NO: 28489 - RNA, 22 nt, Synthetic Construct
  source 1..22: mol_type = other RNA
tcctgtaccgagctgccccgag

SEQ ID NO: 28490 - RNA, 19 nt, Synthetic Construct
  source 1..19: mol_type = other RNA
tcctgtaccgatcaatagt

SEQ ID NO: 28491 - RNA, 22 nt, Synthetic Construct
  source 1..22: mol_type = other RNA
tgaggaagtaggttgtgtggtt

SEQ ID NO: 28492 - RNA, 22 nt, Synthetic Construct
  source 1..22: mol_type = other RNA
tgaggaagtaggttgtgtggtt

SEQ ID NO: 28493 - RNA, 23 nt, Synthetic Construct
  source 1..23: mol_type = other RNA
ctcgtaccgtgagtaataatgcg

SEQ ID NO: 28494 - RNA, 22 nt, Synthetic Construct
  source 1..22: mol_type = other RNA
tactgcacttgtcccggcctgt

SEQ ID NO: 28495 - RNA, 21 nt, Synthetic Construct
  source 1..21: mol_type = other RNA
tgaggtagtaggttgtgtagt

SEQ ID NO: 28496 - RNA, 22 nt, Synthetic Construct
  source 1..22: mol_type = other RNA
tgaggtagtaggttgtgtagtt

SEQ ID NO: 28497 - RNA, 20 nt, Synthetic Construct
  source 1..20: mol_type = other RNA
cgtaccgtgagtaataatgc

SEQ ID NO: 28498 - RNA, 16 nt, Synthetic Construct
  source 1..16: mol_type = other RNA
aggtcatcgtcaggct

SEQ ID NO: 28499 - RNA, 16 nt, Synthetic Construct
  source 1..16: mol_type = other RNA
aggtcatcgtcaggct

SEQ ID NO: 28500 - RNA, 22 nt, Synthetic Construct
  source 1..22: mol_type = other RNA
tagcagcacatcatggtttaca

SEQ ID NO: 28501 - RNA, 22 nt, Synthetic Construct
  source 1..22: mol_type = other RNA
tagcagcacatcatggtttaca

SEQ ID NO: 28502 - RNA, 30 nt, Synthetic Construct; identical to SEQ ID NO: 2578
  source 1..30: mol_type = other RNA

SEQ ID NO: 28503 - RNA, 30 nt, Synthetic Construct; identical to SEQ ID NO: 2578
  source 1..30: mol_type = other RNA

SEQ ID NO: 28504 - RNA, 18 nt, Synthetic Construct
  source 1..18: mol_type = other RNA
ggtgcaagcgttaatcgg

SEQ ID NO: 28505 - RNA, 22 nt, Synthetic Construct
  source 1..22: mol_type = other RNA
ttcaagtaatccaggataggca

SEQ ID NO: 28506 - RNA, 22 nt, Synthetic Construct
  source 1..22: mol_type = other RNA
tgaagtagtagtttgtgctgtt

SEQ ID NO: 28507 - RNA, 25 nt, Synthetic Construct
  source 1..25: mol_type = other RNA
ttgaggatatgagatcgggacgaca

SEQ ID NO: 28508 - RNA, 27 nt, Synthetic Construct
  source 1..27: mol_type = other RNA
gacttaccaaacctatgcaaactccga

SEQ ID NO: 28509 - RNA, 22 nt, Synthetic Construct
  source 1..22: mol_type = other RNA
tggaacgtaaagaagtatgtat

SEQ ID NO: 28510 - RNA, 23 nt, Synthetic Construct
  source 1..23: mol_type = other RNA
cgctcacggaaagagaatgaagc

SEQ ID NO: 28511 - RNA, 28 nt, Synthetic Construct
  source 1..28: mol_type = other RNA
ggtggctgtagctcagttggtagagtcc

SEQ ID NO: 28512 - RNA, 28 nt, Synthetic Construct
  source 1..28: mol_type = other RNA
ggtggctgtagctcagttggtagagtcc

SEQ ID NO: 28513 - RNA, 17 nt, Synthetic Construct
  source 1..17: mol_type = other RNA
acagtcaggatgttggc

SEQ ID NO: 28514 - RNA, 21 nt, Synthetic Construct
  source 1..21: mol_type = other RNA
tggagtgtgacaatggtgctt

SEQ ID NO: 28515 - RNA, 21 nt, Synthetic Construct
  source 1..21: mol_type = other RNA
tggagtgtgacaatggtgctt

SEQ ID NO: 28516 - RNA, 27 nt, Synthetic Construct
  source 1..27: mol_type = other RNA
ccccccactgctaaattcgactggctt

SEQ ID NO: 28517 - RNA, 22 nt, Synthetic Construct
  source 1..22: mol_type = other RNA
ngaggtagtaggttgtatagtt

SEQ ID NO: 28518 - RNA, 22 nt, Synthetic Construct
  source 1..22: mol_type = other RNA
ngaggtagtaggttgtatagtt

SEQ ID NO: 28519 - RNA, 20 nt, Synthetic Construct
  source 1..20: mol_type = other RNA
cataaagtagaaagcactac

SEQ ID NO: 28520 - RNA, 24 nt, Synthetic Construct
  source 1..24: mol_type = other RNA
tcggatccgtctgagcttggcttt

SEQ ID NO: 28521 - RNA, 16 nt, Synthetic Construct
  source 1..16: mol_type = other RNA
tggccgtcgtcagctc

SEQ ID NO: 28522 - RNA, 30 nt, Synthetic Construct; identical to SEQ ID NO: 6405
  source 1..30: mol_type = other RNA

SEQ ID NO: 28523 - RNA, 30 nt, Synthetic Construct; identical to SEQ ID NO: 6405
  source 1..30: mol_type = other RNA

SEQ ID NO: 28524 - RNA, 20 nt, Synthetic Construct
  source 1..20: mol_type = other RNA
tgaggtagcaggttgtgtgg

SEQ ID NO: 28525 - RNA, 22 nt, Synthetic Construct
  source 1..22: mol_type = other RNA
cattgcacttgtctcggtccga

SEQ ID NO: 28526 - RNA, 23 nt, Synthetic Construct
  source 1..23: mol_type = other RNA
tcctgtactgagctgccctgaga

SEQ ID NO: 28527 - RNA, 21 nt, Synthetic Construct
  source 1..21: mol_type = other RNA
tgaggggcggagagcgagact

SEQ ID NO: 28528 - RNA, 21 nt, Synthetic Construct
  source 1..21: mol_type = other RNA
tgaggggcggagagcgagact

SEQ ID NO: 28529 - RNA, 20 nt, Synthetic Construct
  source 1..20: mol_type = other RNA
tagcgaaattccttgtcggg

SEQ ID NO: 28530 - RNA, 22 nt, Synthetic Construct
  source 1..22: mol_type = other RNA
tggagtgtggcaatggtgtttg

SEQ ID NO: 28531 - RNA, 22 nt, Synthetic Construct
  source 1..22: mol_type = other RNA
tggagtgtggcaatggtgtttg

SEQ ID NO: 28532 - RNA, 22 nt, Synthetic Construct
  source 1..22: mol_type = other RNA
tgaggtagtagattgtatagtc

SEQ ID NO: 28533 - RNA, 24 nt, Synthetic Construct
  source 1..24: mol_type = other RNA
acctggcatacaatgtagatttct

SEQ ID NO: 28534 - RNA, 22 nt, Synthetic Construct
  source 1..22: mol_type = other RNA
tgaagtagtaggttgtgtggtt

SEQ ID NO: 28535 - RNA, 22 nt, Synthetic Construct
  source 1..22: mol_type = other RNA
tgaagtagtaggttgtgtggtt

SEQ ID NO: 28536 - RNA, 21 nt, Synthetic Construct
  source 1..21: mol_type = other RNA
gctttgatccggagatttccg

SEQ ID NO: 28537 - RNA, 21 nt, Synthetic Construct
  source 1..21: mol_type = other RNA
gctttgatccggagatttccg

SEQ ID NO: 28538 - RNA, 22 nt, Synthetic Construct
  source 1..22: mol_type = other RNA
tcctatactgagctgccccgag

SEQ ID NO: 28539 - RNA, 22 nt, Synthetic Construct
  source 1..22: mol_type = other RNA
nagcagcacgtaaatattggcg

SEQ ID NO: 28540 - RNA, 22 nt, Synthetic Construct
  source 1..22: mol_type = other RNA
cggaatgtaaagaagtatgtat

SEQ ID NO: 28541 - RNA, 22 nt, Synthetic Construct
  source 1..22: mol_type = other RNA
ggtagcgaaattccttgtcggg

SEQ ID NO: 28542 - RNA, 27 nt, Synthetic Construct
  source 1..27: mol_type = other RNA
ccccccactgctaagtttgactggctt

SEQ ID NO: 28543 - RNA, 23 nt, Synthetic Construct
  source 1..23: mol_type = other RNA
ggctcggtctgaggcccctcagt

SEQ ID NO: 28544 - RNA, 15 nt, Synthetic Construct
  source 1..15: mol_type = other RNA
gcgtagatatgcgga

SEQ ID NO: 28545 - RNA, 15 nt, Synthetic Construct
  source 1..15: mol_type = other RNA
gcgtagatatgcgga

SEQ ID NO: 28546 - RNA, 22 nt, Synthetic Construct
  source 1..22: mol_type = other RNA
tggaatgtaaagaagtacgtat

SEQ ID NO: 28547 - RNA, 28 nt, Synthetic Construct
  source 1..28: mol_type = other RNA
cccccccactgctaaatttgactggcta

SEQ ID NO: 28548 - RNA, 32 nt, Synthetic Construct; identical to SEQ ID NO: 8547
  source 1..32: mol_type = other RNA

SEQ ID NO: 28549 - RNA, 24 nt, Synthetic Construct
  source 1..24: mol_type = other RNA
tgtaaacatccccggctggaagct

SEQ ID NO: 28550 - RNA, 21 nt, Synthetic Construct
  source 1..21: mol_type = other RNA
tgagaactgaattccatgggt

SEQ ID NO: 28551 - RNA, 21 nt, Synthetic Construct
  source 1..21: mol_type = other RNA
tgagaactgaattccatgggt

SEQ ID NO: 28552 - RNA, 32 nt, Synthetic Construct; identical to SEQ ID NO: 1238
  source 1..32: mol_type = other RNA

SEQ ID NO: 28553 - RNA, 32 nt, Synthetic Construct; identical to SEQ ID NO: 1238
  source 1..32: mol_type = other RNA

SEQ ID NO: 28554 - RNA, 15 nt, Synthetic Construct
  source 1..15: mol_type = other RNA
gctagtaatcgcgga

SEQ ID NO: 28555 - RNA, 15 nt, Synthetic Construct
  source 1..15: mol_type = other RNA
gctagtaatcgcgga

SEQ ID NO: 28556 - RNA, 30 nt, Synthetic Construct; identical to SEQ ID NO: 2308
  source 1..30: mol_type = other RNA

SEQ ID NO: 28557 - RNA, 30 nt, Synthetic Construct; identical to SEQ ID NO: 2308
  source 1..30: mol_type = other RNA

SEQ ID NO: 28558 - RNA, 22 nt, Synthetic Construct
  source 1..22: mol_type = other RNA
actggacttggagtcagaaggt

SEQ ID NO: 28559 - RNA, 28 nt, Synthetic Construct
  source 1..28: mol_type = other RNA
ccccccactgctaaatttggctggcttt

SEQ ID NO: 28560 - RNA, 16 nt, Synthetic Construct
  source 1..16: mol_type = other RNA
gggtctgtagctcagt

SEQ ID NO: 28561 - RNA, 19 nt, Synthetic Construct
  source 1..19: mol_type = other RNA
gtactgacgctcatgcacg

SEQ ID NO: 28562 - RNA, 19 nt, Synthetic Construct
  source 1..19: mol_type = other RNA
gtactgacgctcatgcacg

SEQ ID NO: 28563 - RNA, 16 nt, Synthetic Construct
  source 1..16: mol_type = other RNA
gactacggccatacca

SEQ ID NO: 28564 - RNA, 16 nt, Synthetic Construct
  source 1..16: mol_type = other RNA
gactacggccatacca

SEQ ID NO: 28565 - RNA, 18 nt, Synthetic Construct
  source 1..18: mol_type = other RNA
tccgacatgcgagggttc

SEQ ID NO: 28566 - RNA, 19 nt, Synthetic Construct
  source 1..19: mol_type = other RNA
ccttggggttgtaggacca

SEQ ID NO: 28567 - RNA, 19 nt, Synthetic Construct
  source 1..19: mol_type = other RNA
ccttggggttgtaggacca

SEQ ID NO: 28568 - RNA, 23 nt, Synthetic Construct
  source 1..23: mol_type = other RNA
tggtaatacgacgtactttgtgt

SEQ ID NO: 28569 - RNA, 23 nt, Synthetic Construct
  source 1..23: mol_type = other RNA
tggtaatacgacgtactttgtgt

SEQ ID NO: 28570 - RNA, 21 nt, Synthetic Construct
  source 1..21: mol_type = other RNA
atcacattgccagggattacc

SEQ ID NO: 28571 - RNA, 22 nt, Synthetic Construct
  source 1..22: mol_type = other RNA
tattgcacttgtcccggcctgc

SEQ ID NO: 28572 - RNA, 22 nt, Synthetic Construct
  source 1..22: mol_type = other RNA
tattgcacttgtcccggcctgc

SEQ ID NO: 28573 - RNA, 21 nt, Synthetic Construct
  source 1..21: mol_type = other RNA
tgaggtagtaggttgtatagc

SEQ ID NO: 28574 - RNA, 21 nt, Synthetic Construct
  source 1..21: mol_type = other RNA
tgaggtagtaggttgtatagc

SEQ ID NO: 28575 - RNA, 31 nt, Synthetic Construct; identical to SEQ ID NO: 758
  source 1..31: mol_type = other RNA

SEQ ID NO: 28576 - RNA, 31 nt, Synthetic Construct; identical to SEQ ID NO: 758
  source 1..31: mol_type = other RNA

SEQ ID NO: 28577 - RNA, 21 nt, Synthetic Construct
  source 1..21: mol_type = other RNA
ccctgtactgagctgccccga

SEQ ID NO: 28578 - RNA, 21 nt, Synthetic Construct
  source 1..21: mol_type = other RNA
ccctgtactgagctgccccga

SEQ ID NO: 28579 - RNA, 21 nt, Synthetic Construct
  source 1..21: mol_type = other RNA
tgaggtagtagattgtatggt

SEQ ID NO: 28580 - RNA, 21 nt, Synthetic Construct
  source 1..21: mol_type = other RNA
tgaggtagtagattgtatggt

SEQ ID NO: 28581 - RNA, 23 nt, Synthetic Construct
  source 1..23: mol_type = other RNA
caaagaattctccttttgggctt

SEQ ID NO: 28582 - RNA, 16 nt, Synthetic Construct
  source 1..16: mol_type = other RNA
aggtcatcgtcaggct

SEQ ID NO: 28583 - RNA, 22 nt, Synthetic Construct
  source 1..22: mol_type = other RNA
tgagatagtaggttgtgtggtt

SEQ ID NO: 28584 - RNA, 22 nt, Synthetic Construct
  source 1..22: mol_type = other RNA
tgagatagtaggttgtgtggtt

SEQ ID NO: 28585 - RNA, 20 nt, Synthetic Construct
  source 1..20: mol_type = other RNA
tagcgaaattccttgtcggg

SEQ ID NO: 28586 - RNA, 20 nt, Synthetic Construct
  source 1..20: mol_type = other RNA
tagcgaaattccttgtcggg

SEQ ID NO: 28587 - RNA, 22 nt, Synthetic Construct
  source 1..22: mol_type = other RNA
tgtcagtttgtcaaatacccca

SEQ ID NO: 28588 - RNA, 22 nt, Synthetic Construct
  source 1..22: mol_type = other RNA
tgtcagtttgtcaaatacccca

SEQ ID NO: 28589 - RNA, 22 nt, Synthetic Construct
  source 1..22: mol_type = other RNA
cattgcacttgcctcggtctga

SEQ ID NO: 28590 - RNA, 25 nt, Synthetic Construct
  source 1..25: mol_type = other RNA
ttgaggatatgagatcgagacggca

SEQ ID NO: 28591 - RNA, 23 nt, Synthetic Construct
  source 1..23: mol_type = other RNA
aacattcattgctgtcggtgggt

SEQ ID NO: 28592 - RNA, 22 nt, Synthetic Construct
  source 1..22: mol_type = other RNA
acagtagtctgcacattggttt

SEQ ID NO: 28593 - RNA, 22 nt, Synthetic Construct
  source 1..22: mol_type = other RNA
acagtagtctgcacattggttt

SEQ ID NO: 28594 - RNA, 21 nt, Synthetic Construct
  source 1..21: mol_type = other RNA
gggagtgtgacaatggtgttt

SEQ ID NO: 28595 - RNA, 21 nt, Synthetic Construct
  source 1..21: mol_type = other RNA
gggagtgtgacaatggtgttt

SEQ ID NO: 28596 - RNA, 21 nt, Synthetic Construct
  source 1..21: mol_type = other RNA
tccttcattccaccggagtct

SEQ ID NO: 28597 - RNA, 21 nt, Synthetic Construct
  source 1..21: mol_type = other RNA
tccttcattccaccggagtct

SEQ ID NO: 28598 - RNA, 22 nt, Synthetic Construct
  source 1..22: mol_type = other RNA
tcctgtactgaactgccccgag

SEQ ID NO: 28599 - RNA, 22 nt, Synthetic Construct
  source 1..22: mol_type = other RNA
tcctgtactgaactgccccgag

SEQ ID NO: 28600 - RNA, 35 nt, Synthetic Construct; identical to SEQ ID NO: 1497
  source 1..35: mol_type = other RNA

SEQ ID NO: 28601 - RNA, 18 nt, Synthetic Construct
  source 1..18: mol_type = other RNA
agcagcattgtacagggc

SEQ ID NO: 28602 - RNA, 18 nt, Synthetic Construct
  source 1..18: mol_type = other RNA
agcagcattgtacagggc

SEQ ID NO: 28603 - RNA, 26 nt, Synthetic Construct
  source 1..26: mol_type = other RNA
tgtccccgcgaggggcccggggcggg

SEQ ID NO: 28604 - RNA, 26 nt, Synthetic Construct
  source 1..26: mol_type = other RNA
tgtccccgcgaggggcccggggcggg

SEQ ID NO: 28605 - RNA, 18 nt, Synthetic Construct
  source 1..18: mol_type = other RNA
agggaacgtgagctgggt

SEQ ID NO: 28606 - RNA, 18 nt, Synthetic Construct
  source 1..18: mol_type = other RNA
agggaacgtgagctgggt

SEQ ID NO: 28607 - RNA, 23 nt, Synthetic Construct
  source 1..23: mol_type = other RNA
tctttggttatctagctgtatgt

SEQ ID NO: 28608 - RNA, 23 nt, Synthetic Construct
  source 1..23: mol_type = other RNA
tctttggttatctagctgtatgt

SEQ ID NO: 28609 - RNA, 21 nt, Synthetic Construct
  source 1..21: mol_type = other RNA
tggggtgtgacaatggtgttt

SEQ ID NO: 28610 - RNA, 21 nt, Synthetic Construct
  source 1..21: mol_type = other RNA
tggggtgtgacaatggtgttt

SEQ ID NO: 28611 - RNA, 17 nt, Synthetic Construct
  source 1..17: mol_type = other RNA
gcgtagatatgcggagg

SEQ ID NO: 28612 - RNA, 17 nt, Synthetic Construct
  source 1..17: mol_type = other RNA
gcgtagatatgcggagg

SEQ ID NO: 28613 - RNA, 27 nt, Synthetic Construct
  source 1..27: mol_type = other RNA
catgcgagagtaggacgttgccaggtt

SEQ ID NO: 28614 - RNA, 27 nt, Synthetic Construct
  source 1..27: mol_type = other RNA
catgcgagagtaggacgttgccaggtt

SEQ ID NO: 28615 - RNA, 20 nt, Synthetic Construct
  source 1..20: mol_type = other RNA
tgaggtagtaggctgtgtgg

SEQ ID NO: 28616 - RNA, 20 nt, Synthetic Construct
  source 1..20: mol_type = other RNA
tgaggtagtaggctgtgtgg

SEQ ID NO: 28617 - RNA, 23 nt, Synthetic Construct
  source 1..23: mol_type = other RNA
taaggtgcatctagtgcagatag

SEQ ID NO: 28618 - RNA, 23 nt, Synthetic Construct
  source 1..23: mol_type = other RNA
taaggtgcatctagtgcagatag

SEQ ID NO: 28619 - RNA, 16 nt, Synthetic Construct
  source 1..16: mol_type = other RNA
cccaaaggtcgtcggt

SEQ ID NO: 28620 - RNA, 23 nt, Synthetic Construct
  source 1..23: mol_type = other RNA
tcctgtactgagctaccccgaga

SEQ ID NO: 28621 - RNA, 23 nt, Synthetic Construct
  source 1..23: mol_type = other RNA
tcctgtactgagctaccccgaga

SEQ ID NO: 28622 - RNA, 17 nt, Synthetic Construct
  source 1..17: mol_type = other RNA
aagttgaccgcctgggg

SEQ ID NO: 28623 - RNA, 18 nt, Synthetic Construct
  source 1..18: mol_type = other RNA
ggtagcgtggccgagcgg

SEQ ID NO: 28624 - RNA, 18 nt, Synthetic Construct
  source 1..18: mol_type = other RNA
accaaggggtcgtgggtt

SEQ ID NO: 28625 - RNA, 15 nt, Synthetic Construct
  source 1..15: mol_type = other RNA
gctatgggatttgtt

SEQ ID NO: 28626 - RNA, 15 nt, Synthetic Construct
  source 1..15: mol_type = other RNA
gctatgggatttgtt

SEQ ID NO: 28627 - RNA, 20 nt, Synthetic Construct
  source 1..20: mol_type = other RNA
cataaagtagaaagcactac

SEQ ID NO: 28628 - RNA, 20 nt, Synthetic Construct
  source 1..20: mol_type = other RNA
cataaagtagaaagcactac

SEQ ID NO: 28629 - RNA, 21 nt, Synthetic Construct
  source 1..21: mol_type = other RNA
tagcagcacatcatggtttac

SEQ ID NO: 28630 - RNA, 21 nt, Synthetic Construct
  source 1..21: mol_type = other RNA
tagcagcacatcatggtttac

SEQ ID NO: 28631 - RNA, 22 nt, Synthetic Construct
  source 1..22: mol_type = other RNA
tgaggtagtaggttgtgtggat

SEQ ID NO: 28632 - RNA, 22 nt, Synthetic Construct
  source 1..22: mol_type = other RNA
tgaggtagtaggttgtgtggat

SEQ ID NO: 28633 - RNA, 22 nt, Synthetic Construct
  source 1..22: mol_type = other RNA
tggaatgtaaagaggtatgtat

SEQ ID NO: 28634 - RNA, 23 nt, Synthetic Construct
  source 1..23: mol_type = other RNA
tgaggggcagagagcgagacttt

SEQ ID NO: 28635 - RNA, 23 nt, Synthetic Construct
  source 1..23: mol_type = other RNA
ctcgtaccgtgagtaataatgcg

SEQ ID NO: 28636 - RNA, 23 nt, Synthetic Construct
  source 1..23: mol_type = other RNA
ctcgtaccgtgagtaataatgcg

SEQ ID NO: 28637 - RNA, 16 nt, Synthetic Construct
  source 1..16: mol_type = other RNA
gactacggccatacca

SEQ ID NO: 28638 - RNA, 21 nt, Synthetic Construct
  source 1..21: mol_type = other RNA
tccagtactgagctgccccga

SEQ ID NO: 28639 - RNA, 21 nt, Synthetic Construct
  source 1..21: mol_type = other RNA
tccagtactgagctgccccga

SEQ ID NO: 28640 - RNA, 23 nt, Synthetic Construct
  source 1..23: mol_type = other RNA
tcctgtaccgagctgccccgagt

SEQ ID NO: 28641 - RNA, 23 nt, Synthetic Construct
  source 1..23: mol_type = other RNA
tggtaatacgacgtacttaatgt

SEQ ID NO: 28642 - RNA, 24 nt, Synthetic Construct
  source 1..24: mol_type = other RNA
tgtaaacatccttgactggaagct

SEQ ID NO: 28643 - RNA, 24 nt, Synthetic Construct
  source 1..24: mol_type = other RNA
tgtaaacatccttgactggaagct

SEQ ID NO: 28644 - RNA, 20 nt, Synthetic Construct
  source 1..20: mol_type = other RNA
atcacattgccagggatttc

SEQ ID NO: 28645 - RNA, 20 nt, Synthetic Construct
  source 1..20: mol_type = other RNA
atcacattgccagggatttc

SEQ ID NO: 28646 - RNA, 21 nt, Synthetic Construct
  source 1..21: mol_type = other RNA
tgaggtagtaggctgtgtggt

SEQ ID NO: 28647 - RNA, 21 nt, Synthetic Construct
  source 1..21: mol_type = other RNA
tgaggtagtaggctgtgtggt

SEQ ID NO: 28648 - RNA, 23 nt, Synthetic Construct
  source 1..23: mol_type = other RNA
tgaggcagtaggttgtgtggttt

SEQ ID NO: 28649 - RNA, 23 nt, Synthetic Construct
  source 1..23: mol_type = other RNA
tgaggcagtaggttgtgtggttt

SEQ ID NO: 28650 - RNA, 20 nt, Synthetic Construct
  source 1..20: mol_type = other RNA
tgaggtagcaggttgtatag

SEQ ID NO: 28651 - RNA, 20 nt, Synthetic Construct
  source 1..20: mol_type = other RNA
tgaggtagcaggttgtatag

SEQ ID NO: 28652 - RNA, 21 nt, Synthetic Construct
  source 1..21: mol_type = other RNA
tagcaccatctgaaatcggta

SEQ ID NO: 28653 - RNA, 23 nt, Synthetic Construct
  source 1..23: mol_type = other RNA
tgtcagtttgccaaataccccaa

SEQ ID NO: 28654 - RNA, 25 nt, Synthetic Construct
  source 1..25: mol_type = other RNA
ttgagggtatgagatcgagacgaca

SEQ ID NO: 28655 - RNA, 25 nt, Synthetic Construct
  source 1..25: mol_type = other RNA
ttgagggtatgagatcgagacgaca

SEQ ID NO: 28656 - RNA, 21 nt, Synthetic Construct
  source 1..21: mol_type = other RNA
agagtaggacgttgccaggtt

SEQ ID NO: 28657 - RNA, 21 nt, Synthetic Construct
  source 1..21: mol_type = other RNA
agagtaggacgttgccaggtt

SEQ ID NO: 28658 - RNA, 16 nt, Synthetic Construct
  source 1..16: mol_type = other RNA
gtctacggccacacca

SEQ ID NO: 28659 - RNA, 16 nt, Synthetic Construct
  source 1..16: mol_type = other RNA
gtctacggccacacca

SEQ ID NO: 28660 - RNA, 22 nt, Synthetic Construct
  source 1..22: mol_type = other RNA
tattgcacttatcccggcctgt

SEQ ID NO: 28661 - RNA, 22 nt, Synthetic Construct
  source 1..22: mol_type = other RNA
tattgcacttatcccggcctgt

SEQ ID NO: 28662 - RNA, 15 nt, Synthetic Construct
  source 1..15: mol_type = other RNA
gtagctcgttgggct

SEQ ID NO: 28663 - RNA, 15 nt, Synthetic Construct
  source 1..15: mol_type = other RNA
gtagctcgttgggct

SEQ ID NO: 28664 - RNA, 19 nt, Synthetic Construct
  source 1..19: mol_type = other RNA
ccttggggttgtaggacca

SEQ ID NO: 28665 - RNA, 19 nt, Synthetic Construct
  source 1..19: mol_type = other RNA
ccttggggttgtaggacca

SEQ ID NO: 28666 - RNA, 22 nt, Synthetic Construct
  source 1..22: mol_type = other RNA
tgaggtagtaggctgtgtggtt

SEQ ID NO: 28667 - RNA, 22 nt, Synthetic Construct
  source 1..22: mol_type = other RNA
tgaggtagtaggctgtgtggtt

SEQ ID NO: 28668 - RNA, 22 nt, Synthetic Construct
  source 1..22: mol_type = other RNA
tgaggtagtaggatgtgtggtt

SEQ ID NO: 28669 - RNA, 22 nt, Synthetic Construct
  source 1..22: mol_type = other RNA
tgaggtagtaggatgtgtggtt

SEQ ID NO: 28670 - RNA, 21 nt, Synthetic Construct
  source 1..21: mol_type = other RNA
tgaggtagtaggatgtgtggt

SEQ ID NO: 28671 - RNA, 21 nt, Synthetic Construct
  source 1..21: mol_type = other RNA
tgaggtagtaggatgtgtggt

SEQ ID NO: 28672 - RNA, 15 nt, Synthetic Construct
  source 1..15: mol_type = other RNA
tggccgtcgtcagct

SEQ ID NO: 28673 - RNA, 15 nt, Synthetic Construct
  source 1..15: mol_type = other RNA
gagagcctggacaca

SEQ ID NO: 28674 - RNA, 15 nt, Synthetic Construct
  source 1..15: mol_type = other RNA
gagagcctggacaca

SEQ ID NO: 28675 - RNA, 25 nt, Synthetic Construct
  source 1..25: mol_type = other RNA
gagaaagctcacaagaactgctaac

SEQ ID NO: 28676 - RNA, 25 nt, Synthetic Construct
  source 1..25: mol_type = other RNA
gagaaagctcacaagaactgctaac

SEQ ID NO: 28677 - RNA, 22 nt, Synthetic Construct
  source 1..22: mol_type = other RNA
cgaggtagtaggttgtgtggtt

SEQ ID NO: 28678 - RNA, 22 nt, Synthetic Construct
  source 1..22: mol_type = other RNA
cgaggtagtaggttgtgtggtt

SEQ ID NO: 28679 - RNA, 22 nt, Synthetic Construct
  source 1..22: mol_type = other RNA
tcctgtactgagctgccctgag

SEQ ID NO: 28680 - RNA, 22 nt, Synthetic Construct
  source 1..22: mol_type = other RNA
tcctgtactgagctgccctgag

SEQ ID NO: 28681 - RNA, 34 nt, Synthetic Construct; identical to SEQ ID NO: 749
  source 1..34: mol_type = other RNA

SEQ ID NO: 28682 - RNA, 34 nt, Synthetic Construct; identical to SEQ ID NO: 749
  source 1..34: mol_type = other RNA

SEQ ID NO: 28683 - RNA, 31 nt, Synthetic Construct; identical to SEQ ID NO: 1881
  source 1..31: mol_type = other RNA

SEQ ID NO: 28684 - RNA, 31 nt, Synthetic Construct; identical to SEQ ID NO: 1881
  source 1..31: mol_type = other RNA

SEQ ID NO: 28685 - RNA, 21 nt, Synthetic Construct
  source 1..21: mol_type = other RNA
tgaggtagtaggttgtgtggc

SEQ ID NO: 28686 - RNA, 21 nt, Synthetic Construct
  source 1..21: mol_type = other RNA
tgaggtagtaggttgtgtggc

SEQ ID NO: 28687 - RNA, 23 nt, Synthetic Construct
  source 1..23: mol_type = other RNA
tgaggggcagagagcgagactat

SEQ ID NO: 28688 - RNA, 23 nt, Synthetic Construct
  source 1..23: mol_type = other RNA
tgaggggcagagagcgagactat

SEQ ID NO: 28689 - RNA, 24 nt, Synthetic Construct
  source 1..24: mol_type = other RNA
tgaggtagtaggttgtgtggttta

SEQ ID NO: 28690 - RNA, 24 nt, Synthetic Construct
  source 1..24: mol_type = other RNA
tgaggtagtaggttgtgtggttta

SEQ ID NO: 28691 - RNA, 23 nt, Synthetic Construct
  source 1..23: mol_type = other RNA
tcctgtactgagctgccccggga

SEQ ID NO: 28692 - RNA, 23 nt, Synthetic Construct
  source 1..23: mol_type = other RNA
tcctgtactgagctgccccggga

SEQ ID NO: 28693 - RNA, 22 nt, Synthetic Construct
  source 1..22: mol_type = other RNA
cgaggtagtaggttgtgtggtt

SEQ ID NO: 28694 - RNA, 22 nt, Synthetic Construct
  source 1..22: mol_type = other RNA
tgaggtagtagtttgtgctggt

SEQ ID NO: 28695 - RNA, 33 nt, Synthetic Construct; identical to SEQ ID NO: 7469
  source 1..33: mol_type = other RNA

SEQ ID NO: 28696 - RNA, 33 nt, Synthetic Construct; identical to SEQ ID NO: 7469
  source 1..33: mol_type = other RNA

SEQ ID NO: 28697 - RNA, 24 nt, Synthetic Construct
  source 1..24: mol_type = other RNA
tcggatccgtctgagcttggcttt

SEQ ID NO: 28698 - RNA, 24 nt, Synthetic Construct
  source 1..24: mol_type = other RNA
tcggatccgtctgagcttggcttt

SEQ ID NO: 28699 - RNA, 15 nt, Synthetic Construct
  source 1..15: mol_type = other RNA
gtcaggatgttggct

SEQ ID NO: 28700 - RNA, 22 nt, Synthetic Construct
  source 1..22: mol_type = other RNA
nattgcacttgtcccggcctgt

SEQ ID NO: 28701 - RNA, 18 nt, Synthetic Construct
  source 1..18: mol_type = other RNA
tgcgtagatatgcggagg

SEQ ID NO: 28702 - RNA, 18 nt, Synthetic Construct
  source 1..18: mol_type = other RNA
tgcgtagatatgcggagg

SEQ ID NO: 28703 - RNA, 16 nt, Synthetic Construct
  source 1..16: mol_type = other RNA
gtctacggccgtacca

SEQ ID NO: 28704 - RNA, 16 nt, Synthetic Construct
  source 1..16: mol_type = other RNA
gtctacggccgtacca

SEQ ID NO: 28705 - RNA, 21 nt, Synthetic Construct
  source 1..21: mol_type = other RNA
cataaagtagaaagcactact

SEQ ID NO: 28706 - RNA, 17 nt, Synthetic Construct
  source 1..17: mol_type = other RNA
gtcgacgtatagggtgt

SEQ ID NO: 28707 - RNA, 17 nt, Synthetic Construct
  source 1..17: mol_type = other RNA
gtcgacgtatagggtgt

SEQ ID NO: 28708 - RNA, 29 nt, Synthetic Construct
  source 1..29: mol_type = other RNA
ttacaggggttcgaatcccctaggggacg

SEQ ID NO: 28709 - RNA, 21 nt, Synthetic Construct
  source 1..21: mol_type = other RNA
cgcatcccctagggcattggt

SEQ ID NO: 28710 - RNA, 21 nt, Synthetic Construct
  source 1..21: mol_type = other RNA
cgcatcccctagggcattggt

SEQ ID NO: 28711 - RNA, 23 nt, Synthetic Construct
  source 1..23: mol_type = other RNA
tggtaatacgacgtacttagtat

SEQ ID NO: 28712 - RNA, 25 nt, Synthetic Construct
  source 1..25: mol_type = other RNA
ttgaggatatgggatcgagacgaca

SEQ ID NO: 28713 - RNA, 22 nt, Synthetic Construct
  source 1..22: mol_type = other RNA
tattgcacttgtcccggcctgc

SEQ ID NO: 28714 - RNA, 22 nt, Synthetic Construct
  source 1..22: mol_type = other RNA
tattgcacttgtcccggcctgc

SEQ ID NO: 28715 - RNA, 27 nt, Synthetic Construct
  source 1..27: mol_type = other RNA
ccccccactgctaaatttggctggctt

SEQ ID NO: 28716 - RNA, 32 nt, Synthetic Construct; identical to SEQ ID NO: 5582
  source 1..32: mol_type = other RNA

SEQ ID NO: 28717 - RNA, 22 nt, Synthetic Construct
  source 1..22: mol_type = other RNA
atataatacaacctgctaagtg

SEQ ID NO: 28718 - RNA, 27 nt, Synthetic Construct
  source 1..27: mol_type = other RNA
ccccccactgctaagtttgactggctt

SEQ ID NO: 28719 - RNA, 22 nt, Synthetic Construct
  source 1..22: mol_type = other RNA
tctttgttcgattccgttgagt

SEQ ID NO: 28720 - RNA, 20 nt, Synthetic Construct
  source 1..20: mol_type = other RNA
tgaggcagtaggttgtgtgg

SEQ ID NO: 28721 - RNA, 16 nt, Synthetic Construct
  source 1..16: mol_type = other RNA
gctattgacgaccgta

SEQ ID NO: 28722 - RNA, 21 nt, Synthetic Construct
  source 1..21: mol_type = other RNA
tgaggggcggagagcgagact

SEQ ID NO: 28723 - RNA, 21 nt, Synthetic Construct
  source 1..21: mol_type = other RNA
tgaggggcggagagcgagact

SEQ ID NO: 28724 - RNA, 23 nt, Synthetic Construct
  source 1..23: mol_type = other RNA
tgtagtgtttcctactttatgga

SEQ ID NO: 28725 - RNA, 21 nt, Synthetic Construct
  source 1..21: mol_type = other RNA
tgaggtagtagattgtatagc

SEQ ID NO: 28726 - RNA, 23 nt, Synthetic Construct
  source 1..23: mol_type = other RNA
tgtagtgtttcctactttatggt

SEQ ID NO: 28727 - RNA, 23 nt, Synthetic Construct
  source 1..23: mol_type = other RNA
tgtagtgtttcctactttatggt

SEQ ID NO: 28728 - RNA, 36 nt, Synthetic Construct; identical to SEQ ID NO: 10333
  source 1..36: mol_type = other RNA

SEQ ID NO: 28729 - RNA, 36 nt, Synthetic Construct; identical to SEQ ID NO: 10333
  source 1..36: mol_type = other RNA

SEQ ID NO: 28730 - RNA, 43 nt, Synthetic Construct; identical to SEQ ID NO: 2315
  source 1..43: mol_type = other RNA

SEQ ID NO: 28731 - RNA, 18 nt, Synthetic Construct
  source 1..18: mol_type = other RNA
cgactcttagcggtggat

SEQ ID NO: 28732 - RNA, 31 nt, Synthetic Construct; identical to SEQ ID NO: 5943
  source 1..31: mol_type = other RNA

SEQ ID NO: 28733 - RNA, 21 nt, Synthetic Construct
  source 1..21: mol_type = other RNA
tggggtagtaggttgtatagt

SEQ ID NO: 28734 - RNA, 21 nt, Synthetic Construct
  source 1..21: mol_type = other RNA
tggggtagtaggttgtatagt

SEQ ID NO: 28735 - RNA, 22 nt, Synthetic Construct
  source 1..22: mol_type = other RNA
tcctgaactgagctgccccgag

SEQ ID NO: 28736 - RNA, 22 nt, Synthetic Construct
  source 1..22: mol_type = other RNA
tcctgaactgagctgccccgag

SEQ ID NO: 28737 - RNA, 28 nt, Synthetic Construct
  source 1..28: mol_type = other RNA
cccccccactgctaaatttgactggctt

SEQ ID NO: 28738 - RNA, 15 nt, Synthetic Construct
  source 1..15: mol_type = other RNA
gtagctcgttgggct

SEQ ID NO: 28739 - RNA, 16 nt, Synthetic Construct
  source 1..16: mol_type = other RNA
gcagacgaagtgagtg

SEQ ID NO: 28740 - RNA, 22 nt, Synthetic Construct
  source 1..22: mol_type = other RNA
tatagcacttgtcccggcctgt

SEQ ID NO: 28741 - RNA, 22 nt, Synthetic Construct
  source 1..22: mol_type = other RNA
atcacattgccagggatttcca

SEQ ID NO: 28742 - RNA, 22 nt, Synthetic Construct
  source 1..22: mol_type = other RNA
atcacattgccagggatttcca

SEQ ID NO: 28743 - RNA, 22 nt, Synthetic Construct
  source 1..22: mol_type = other RNA
ttcaagtaattcaggataggtt

SEQ ID NO: 28744 - RNA, 21 nt, Synthetic Construct
  source 1..21: mol_type = other RNA
tgaggtagtagtttgtgctgc

SEQ ID NO: 28745 - RNA, 23 nt, Synthetic Construct
  source 1..23: mol_type = other RNA
tcctgtaccgagctgccccgaga

SEQ ID NO: 28746 - RNA, 23 nt, Synthetic Construct
  source 1..23: mol_type = other RNA
tcctgtaccgagctgccccgaga

SEQ ID NO: 28747 - RNA, 23 nt, Synthetic Construct
  source 1..23: mol_type = other RNA
actggacttggagtcagaaggca

SEQ ID NO: 28748 - RNA, 24 nt, Synthetic Construct
  source 1..24: mol_type = other RNA
tagcagcacgtaaatattggcgtt

SEQ ID NO: 28749 - RNA, 24 nt, Synthetic Construct
  source 1..24: mol_type = other RNA
tagcagcacgtaaatattggcgtt

SEQ ID NO: 28750 - RNA, 21 nt, Synthetic Construct
  source 1..21: mol_type = other RNA
taggtagtttcctgttgttgg

SEQ ID NO: 28751 - RNA, 22 nt, Synthetic Construct
  source 1..22: mol_type = other RNA
cgactcttagcggtggatcact

SEQ ID NO: 28752 - RNA, 19 nt, Synthetic Construct
  source 1..19: mol_type = other RNA
tctaatgagactgccggtg

SEQ ID NO: 28753 - RNA, 25 nt, Synthetic Construct
  source 1..25: mol_type = other RNA
caacggaatcccaaaagcagctgtt

SEQ ID NO: 28754 - RNA, 25 nt, Synthetic Construct
  source 1..25: mol_type = other RNA
caacggaatcccaaaagcagctgtt

SEQ ID NO: 28755 - RNA, 16 nt, Synthetic Construct
  source 1..16: mol_type = other RNA
gatttgggagtgctcg

SEQ ID NO: 28756 - RNA, 22 nt, Synthetic Construct
  source 1..22: mol_type = other RNA
gtcagtttgtcaaataccccat

SEQ ID NO: 28757 - RNA, 21 nt, Synthetic Construct
  source 1..21: mol_type = other RNA
tgaggggcagagagcgagact

SEQ ID NO: 28758 - RNA, 22 nt, Synthetic Construct
  source 1..22: mol_type = other RNA
tattgcactcgtcccggcctgt

SEQ ID NO: 28759 - RNA, 22 nt, Synthetic Construct
  source 1..22: mol_type = other RNA
tattgcactcgtcccggcctgt

SEQ ID NO: 28760 - RNA, 23 nt, Synthetic Construct
  source 1..23: mol_type = other RNA
tgaggtagtgggttgtgtggttt

SEQ ID NO: 28761 - RNA, 42 nt, Synthetic Construct; identical to SEQ ID NO: 19836
  source 1..42: mol_type = other RNA

SEQ ID NO: 28762 - RNA, 19 nt, Synthetic Construct
  source 1..19: mol_type = other RNA
agtaggtcatcgtcaggct

SEQ ID NO: 28763 - RNA, 19 nt, Synthetic Construct
  source 1..19: mol_type = other RNA
agtaggtcatcgtcaggct

SEQ ID NO: 28764 - RNA, 36 nt, Synthetic Construct; identical to SEQ ID NO: 2344
  source 1..36: mol_type = other RNA

SEQ ID NO: 28765 - RNA, 36 nt, Synthetic Construct; identical to SEQ ID NO: 2344
  source 1..36: mol_type = other RNA

SEQ ID NO: 28766 - RNA, 22 nt, Synthetic Construct
  source 1..22: mol_type = other RNA
cattgcacttgtcccggtctga

SEQ ID NO: 28767 - RNA, 23 nt, Synthetic Construct
  source 1..23: mol_type = other RNA
tggtaataagacgtacttagtgt

SEQ ID NO: 28768 - RNA, 23 nt, Synthetic Construct
  source 1..23: mol_type = other RNA
tggtaataagacgtacttagtgt

SEQ ID NO: 28769 - RNA, 23 nt, Synthetic Construct
  source 1..23: mol_type = other RNA
tctttgttcgattccgttgagta

SEQ ID NO: 28770 - RNA, 18 nt, Synthetic Construct
  source 1..18: mol_type = other RNA
aagaccctgttgagcttg

SEQ ID NO: 28771 - RNA, 18 nt, Synthetic Construct
  source 1..18: mol_type = other RNA
aagaccctgttgagcttg

SEQ ID NO: 28772 - RNA, 23 nt, Synthetic Construct
  source 1..23: mol_type = other RNA
tggtaatatgacgtacttagtgt

SEQ ID NO: 28773 - RNA, 34 nt, Synthetic Construct; identical to SEQ ID NO: 6757
  source 1..34: mol_type = other RNA

SEQ ID NO: 28774 - RNA, 34 nt, Synthetic Construct; identical to SEQ ID NO: 6757
  source 1..34: mol_type = other RNA

SEQ ID NO: 28775 - RNA, 21 nt, Synthetic Construct
  source 1..21: mol_type = other RNA
tcctgtaccgagctgccccga

SEQ ID NO: 28776 - RNA, 21 nt, Synthetic Construct
  source 1..21: mol_type = other RNA
tcctgtaccgagctgccccga

SEQ ID NO: 28777 - RNA, 27 nt, Synthetic Construct
  source 1..27: mol_type = other RNA
ccccccactgctagatttgactggctt

SEQ ID NO: 28778 - RNA, 21 nt, Synthetic Construct
  source 1..21: mol_type = other RNA
ggaggtagtaggttgtgtggt

SEQ ID NO: 28779 - RNA, 21 nt, Synthetic Construct
  source 1..21: mol_type = other RNA
ggaggtagtaggttgtgtggt

SEQ ID NO: 28780 - RNA, 23 nt, Synthetic Construct
  source 1..23: mol_type = other RNA
caaagtgcttacagtgcaggtag

SEQ ID NO: 28781 - RNA, 24 nt, Synthetic Construct
  source 1..24: mol_type = other RNA
tgtaaacatccttgactggaagct

SEQ ID NO: 28782 - RNA, 16 nt, Synthetic Construct
  source 1..16: mol_type = other RNA
cagtcaggatgttggc

SEQ ID NO: 28783 - RNA, 20 nt, Synthetic Construct
  source 1..20: mol_type = other RNA
tacagtatagatgatgtact

SEQ ID NO: 28784 - RNA, 20 nt, Synthetic Construct
  source 1..20: mol_type = other RNA
tacagtatagatgatgtact

SEQ ID NO: 28785 - RNA, 32 nt, Synthetic Construct; identical to SEQ ID NO: 1238
  source 1..32: mol_type = other RNA

SEQ ID NO: 28786 - RNA, 32 nt, Synthetic Construct; identical to SEQ ID NO: 1238
  source 1..32: mol_type = other RNA

SEQ ID NO: 28787 - RNA, 20 nt, Synthetic Construct
  source 1..20: mol_type = other RNA
cacatgcaagtcgaacggta

SEQ ID NO: 28788 - RNA, 21 nt, Synthetic Construct
  source 1..21: mol_type = other RNA
tggggggcagagagcgagact

SEQ ID NO: 28789 - RNA, 21 nt, Synthetic Construct
  source 1..21: mol_type = other RNA
tggggggcagagagcgagact

SEQ ID NO: 28790 - RNA, 20 nt, Synthetic Construct
  source 1..20: mol_type = other RNA
cataaagtagaaagcactac

SEQ ID NO: 28791 - RNA, 20 nt, Synthetic Construct
  source 1..20: mol_type = other RNA
cataaagtagaaagcactac

SEQ ID NO: 28792 - RNA, 22 nt, Synthetic Construct
  source 1..22: mol_type = other RNA
gtcagtttgtcaaataccccaa

SEQ ID NO: 28793 - RNA, 22 nt, Synthetic Construct
  source 1..22: mol_type = other RNA
gtcagtttgtcaaataccccaa

SEQ ID NO: 28794 - RNA, 21 nt, Synthetic Construct
  source 1..21: mol_type = other RNA
tgaggtagtaggttgtgtgat

SEQ ID NO: 28795 - RNA, 21 nt, Synthetic Construct
  source 1..21: mol_type = other RNA
tgaggtagtaggttgtgtgat

SEQ ID NO: 28796 - RNA, 23 nt, Synthetic Construct
  source 1..23: mol_type = other RNA
ttcaagtaattcaggataggttt

SEQ ID NO: 28797 - RNA, 22 nt, Synthetic Construct
  source 1..22: mol_type = other RNA
tgggatgtaaagaagtatgtat

SEQ ID NO: 28798 - RNA, 22 nt, Synthetic Construct
  source 1..22: mol_type = other RNA
tgggatgtaaagaagtatgtat

SEQ ID NO: 28799 - RNA, 21 nt, Synthetic Construct
  source 1..21: mol_type = other RNA
cgaggggcagagagcgagact

SEQ ID NO: 28800 - RNA, 21 nt, Synthetic Construct
  source 1..21: mol_type = other RNA
cgaggggcagagagcgagact

SEQ ID NO: 28801 - RNA, 36 nt, Synthetic Construct; identical to SEQ ID NO: 3596
  source 1..36: mol_type = other RNA

SEQ ID NO: 28802 - RNA, 36 nt, Synthetic Construct; identical to SEQ ID NO: 3596
  source 1..36: mol_type = other RNA

SEQ ID NO: 28803 - RNA, 23 nt, Synthetic Construct
  source 1..23: mol_type = other RNA
tcctgaactgagctgccccgaga

SEQ ID NO: 28804 - RNA, 23 nt, Synthetic Construct
  source 1..23: mol_type = other RNA
tcctgaactgagctgccccgaga

SEQ ID NO: 28805 - RNA, 23 nt, Synthetic Construct
  source 1..23: mol_type = other RNA
aacattcaacgctgtcggtgaga

SEQ ID NO: 28806 - RNA, 30 nt, Synthetic Construct; identical to SEQ ID NO: 2353
  source 1..30: mol_type = other RNA

SEQ ID NO: 28807 - RNA, 30 nt, Synthetic Construct; identical to SEQ ID NO: 2353
  source 1..30: mol_type = other RNA

SEQ ID NO: 28808 - RNA, 19 nt, Synthetic Construct
  source 1..19: mol_type = other RNA
ccagtaaacggcggccgta

SEQ ID NO: 28809 - RNA, 22 nt, Synthetic Construct
  source 1..22: mol_type = other RNA
tgaggtagtaggttgtgaggtt

SEQ ID NO: 28810 - RNA, 22 nt, Synthetic Construct
  source 1..22: mol_type = other RNA
tgaggtagtaggttgtgaggtt

SEQ ID NO: 28811 - RNA, 22 nt, Synthetic Construct
  source 1..22: mol_type = other RNA
ttctgtactgagctgccccgag

SEQ ID NO: 28812 - RNA, 22 nt, Synthetic Construct
  source 1..22: mol_type = other RNA
tcccgtactgagctgccccgag

SEQ ID NO: 28813 - RNA, 22 nt, Synthetic Construct
  source 1..22: mol_type = other RNA
tcccgtactgagctgccccgag

SEQ ID NO: 28814 - RNA, 25 nt, Synthetic Construct
  source 1..25: mol_type = other RNA
ttgaggatgtgagatcgagacgaca

SEQ ID NO: 28815 - RNA, 25 nt, Synthetic Construct
  source 1..25: mol_type = other RNA
ttgaggatgtgagatcgagacgaca

SEQ ID NO: 28816 - RNA, 23 nt, Synthetic Construct
  source 1..23: mol_type = other RNA
tgaggtagtaggttgtgtggctt

SEQ ID NO: 28817 - RNA, 17 nt, Synthetic Construct
  source 1..17: mol_type = other RNA
atcgtgacgatagtgca

SEQ ID NO: 28818 - RNA, 23 nt, Synthetic Construct
  source 1..23: mol_type = other RNA
atcacattgccagggatttccaa

SEQ ID NO: 28819 - RNA, 22 nt, Synthetic Construct
  source 1..22: mol_type = other RNA
gaagcacattcgcacatcatat

SEQ ID NO: 28820 - RNA, 22 nt, Synthetic Construct
  source 1..22: mol_type = other RNA
gaagcacattcgcacatcatat

SEQ ID NO: 28821 - RNA, 16 nt, Synthetic Construct
  source 1..16: mol_type = other RNA
tggccgtcgtcagctc

SEQ ID NO: 28822 - RNA, 22 nt, Synthetic Construct
  source 1..22: mol_type = other RNA
caacggaatcccaaaagcagca

SEQ ID NO: 28823 - RNA, 19 nt, Synthetic Construct
  source 1..19: mol_type = other RNA
tggccgtcgtcagctcgtg

SEQ ID NO: 28824 - RNA, 19 nt, Synthetic Construct
  source 1..19: mol_type = other RNA
ctgatcgagtcgtcctgcg

SEQ ID NO: 28825 - RNA, 23 nt, Synthetic Construct
  source 1..23: mol_type = other RNA
tcctgcactgagctgccccgagt

SEQ ID NO: 28826 - RNA, 21 nt, Synthetic Construct
  source 1..21: mol_type = other RNA
tgaggtagtaggttgtgtagt

SEQ ID NO: 28827 - RNA, 21 nt, Synthetic Construct
  source 1..21: mol_type = other RNA
tgaggtagtaggttgtgtagt

SEQ ID NO: 28828 - RNA, 33 nt, Synthetic Construct; identical to SEQ ID NO: 2386
  source 1..33: mol_type = other RNA

SEQ ID NO: 28829 - RNA, 21 nt, Synthetic Construct
  source 1..21: mol_type = other RNA
actcggcgtggcgtcggtcgt

SEQ ID NO: 28830 - RNA, 21 nt, Synthetic Construct
  source 1..21: mol_type = other RNA
actcggcgtggcgtcggtcgt

SEQ ID NO: 28831 - RNA, 16 nt, Synthetic Construct
  source 1..16: mol_type = other RNA
ttggcctcaagtcagg

SEQ ID NO: 28832 - RNA, 16 nt, Synthetic Construct
  source 1..16: mol_type = other RNA
ttggcctcaagtcagg

SEQ ID NO: 28833 - RNA, 23 nt, Synthetic Construct
  source 1..23: mol_type = other RNA
caaagtgctgttcgtgcaggtaa

SEQ ID NO: 28834 - RNA, 21 nt, Synthetic Construct
  source 1..21: mol_type = other RNA
tcgtaccgtgagtaataatga

SEQ ID NO: 28835 - RNA, 25 nt, Synthetic Construct
  source 1..25: mol_type = other RNA
ttgaggatatgaggtcgagacgaca

SEQ ID NO: 28836 - RNA, 19 nt, Synthetic Construct
  source 1..19: mol_type = other RNA
cgcgacctcagatcagacg

SEQ ID NO: 28837 - RNA, 19 nt, Synthetic Construct
  source 1..19: mol_type = other RNA
cgcgacctcagatcagacg

SEQ ID NO: 28838 - RNA, 21 nt, Synthetic Construct
  source 1..21: mol_type = other RNA
gcccgtgttcggaagattttc

SEQ ID NO: 28839 - RNA, 21 nt, Synthetic Construct
  source 1..21: mol_type = other RNA
gcccgtgttcggaagattttc

SEQ ID NO: 28840 - RNA, 16 nt, Synthetic Construct
  source 1..16: mol_type = other RNA
ctgacgctcatgcacg

SEQ ID NO: 28841 - RNA, 16 nt, Synthetic Construct
  source 1..16: mol_type = other RNA
ctgacgctcatgcacg

SEQ ID NO: 28842 - RNA, 22 nt, Synthetic Construct
  source 1..22: mol_type = other RNA
caaagtgctgttcgtgcaggta

SEQ ID NO: 28843 - RNA, 22 nt, Synthetic Construct
  source 1..22: mol_type = other RNA
caaagtgctgttcgtgcaggta

SEQ ID NO: 28844 - RNA, 21 nt, Synthetic Construct
  source 1..21: mol_type = other RNA
caacggaatcccaaaagcagc

SEQ ID NO: 28845 - RNA, 21 nt, Synthetic Construct
  source 1..21: mol_type = other RNA
actcggcgtggcgtcggtcgt

SEQ ID NO: 28846 - RNA, 21 nt, Synthetic Construct
  source 1..21: mol_type = other RNA
actcggcgtggcgtcggtcgt

SEQ ID NO: 28847 - RNA, 15 nt, Synthetic Construct
  source 1..15: mol_type = other RNA
acccttgtcattagt

SEQ ID NO: 28848 - RNA, 22 nt, Synthetic Construct
  source 1..22: mol_type = other RNA
tcctgtactgagctaccccgag

SEQ ID NO: 28849 - RNA, 24 nt, Synthetic Construct
  source 1..24: mol_type = other RNA
gaggtgtagaataggtgggagctt

SEQ ID NO: 28850 - RNA, 24 nt, Synthetic Construct
  source 1..24: mol_type = other RNA
gaggtgtagaataggtgggagctt

SEQ ID NO: 28851 - RNA, 29 nt, Synthetic Construct
  source 1..29: mol_type = other RNA
cccccccactgctaaatttgactggcttt

SEQ ID NO: 28852 - RNA, 23 nt, Synthetic Construct
  source 1..23: mol_type = other RNA
tcctgtactgagctgccctgaga

SEQ ID NO: 28853 - RNA, 23 nt, Synthetic Construct
  source 1..23: mol_type = other RNA
tcctgtactgagctgccctgaga

SEQ ID NO: 28854 - RNA, 22 nt, Synthetic Construct
  source 1..22: mol_type = other RNA
cattgcgcttgtctcggtctga

SEQ ID NO: 28855 - RNA, 22 nt, Synthetic Construct
  source 1..22: mol_type = other RNA
cattgcgcttgtctcggtctga

SEQ ID NO: 28856 - RNA, 23 nt, Synthetic Construct
  source 1..23: mol_type = other RNA
tcctgtactgagccgccccgagt

SEQ ID NO: 28857 - RNA, 22 nt, Synthetic Construct
  source 1..22: mol_type = other RNA
tggaatgtgaagaagtatgtat

SEQ ID NO: 28858 - RNA, 26 nt, Synthetic Construct
  source 1..26: mol_type = other RNA
aatgacacgatcactcccgttgagtt

SEQ ID NO: 28859 - RNA, 26 nt, Synthetic Construct
  source 1..26: mol_type = other RNA
aatgacacgatcactcccgttgagtt

SEQ ID NO: 28860 - RNA, 15 nt, Synthetic Construct
  source 1..15: mol_type = other RNA
ggtcatcgtcaggct

SEQ ID NO: 28861 - RNA, 15 nt, Synthetic Construct
  source 1..15: mol_type = other RNA
ggtcatcgtcaggct

SEQ ID NO: 28862 - RNA, 23 nt, Synthetic Construct
  source 1..23: mol_type = other RNA
tgaggggcagagagcaagacttt

SEQ ID NO: 28863 - RNA, 20 nt, Synthetic Construct
  source 1..20: mol_type = other RNA
gtcagtttgtcaaatacccc

SEQ ID NO: 28864 - RNA, 31 nt, Synthetic Construct; identical to SEQ ID NO: 7160
  source 1..31: mol_type = other RNA

SEQ ID NO: 28865 - RNA, 23 nt, Synthetic Construct
  source 1..23: mol_type = other RNA
tgaggaagtaggttgtgtggttt

SEQ ID NO: 28866 - RNA, 22 nt, Synthetic Construct
  source 1..22: mol_type = other RNA
cgaggtagtaggttgtgtggtt

SEQ ID NO: 28867 - RNA, 22 nt, Synthetic Construct
  source 1..22: mol_type = other RNA
cgaggtagtaggttgtgtggtt

SEQ ID NO: 28868 - RNA, 19 nt, Synthetic Construct
  source 1..19: mol_type = other RNA
tagcagcacgtaaatattg

SEQ ID NO: 28869 - RNA, 19 nt, Synthetic Construct
  source 1..19: mol_type = other RNA
tagcagcacgtaaatattg

SEQ ID NO: 28870 - RNA, 15 nt, Synthetic Construct
  source 1..15: mol_type = other RNA
tccggatcgtagtct

SEQ ID NO: 28871 - RNA, 21 nt, Synthetic Construct
  source 1..21: mol_type = other RNA
tcccagtaaacggcggccgta

SEQ ID NO: 28872 - RNA, 22 nt, Synthetic Construct
  source 1..22: mol_type = other RNA
ttcaagtaattcaggataggtt

SEQ ID NO: 28873 - RNA, 20 nt, Synthetic Construct
  source 1..20: mol_type = other RNA
tgaggtagtaggttgcatag

SEQ ID NO: 28874 - RNA, 20 nt, Synthetic Construct
  source 1..20: mol_type = other RNA
tgaggtagtaggttgcatag

SEQ ID NO: 28875 - RNA, 23 nt, Synthetic Construct
  source 1..23: mol_type = other RNA
tcctgtactgagctgcctcgaga

SEQ ID NO: 28876 - RNA, 23 nt, Synthetic Construct
  source 1..23: mol_type = other RNA
tcctgtactgagctgcctcgaga

SEQ ID NO: 28877 - RNA, 19 nt, Synthetic Construct
  source 1..19: mol_type = other RNA
ggctggtccgaaggtagtg

SEQ ID NO: 28878 - RNA, 23 nt, Synthetic Construct
  source 1..23: mol_type = other RNA
tggtaacacgacgtacttagtgt

SEQ ID NO: 28879 - RNA, 39 nt, Synthetic Construct; identical to SEQ ID NO: 804
  source 1..39: mol_type = other RNA

SEQ ID NO: 28880 - RNA, 39 nt, Synthetic Construct; identical to SEQ ID NO: 804
  source 1..39: mol_type = other RNA

SEQ ID NO: 28881 - RNA, 23 nt, Synthetic Construct
  source 1..23: mol_type = other RNA
taaagtgcttatagtgcaggtag

SEQ ID NO: 28882 - RNA, 23 nt, Synthetic Construct
  source 1..23: mol_type = other RNA
taaagtgcttatagtgcaggtag

SEQ ID NO: 28883 - RNA, 22 nt, Synthetic Construct
  source 1..22: mol_type = other RNA
tattgcacctgtcccggcctgt

SEQ ID NO: 28884 - RNA, 22 nt, Synthetic Construct
  source 1..22: mol_type = other RNA
tattgcacctgtcccggcctgt

SEQ ID NO: 28885 - RNA, 23 nt, Synthetic Construct
  source 1..23: mol_type = other RNA
tggggtagtaggttgtgtggttt

SEQ ID NO: 28886 - RNA, 23 nt, Synthetic Construct
  source 1..23: mol_type = other RNA
tggggtagtaggttgtgtggttt

SEQ ID NO: 28887 - RNA, 22 nt, Synthetic Construct
  source 1..22: mol_type = other RNA
caaagtgctgttcgtgcaggta

SEQ ID NO: 28888 - RNA, 22 nt, Synthetic Construct
  source 1..22: mol_type = other RNA
caaagtgctgttcgtgcaggta

SEQ ID NO: 28889 - RNA, 23 nt, Synthetic Construct
  source 1..23: mol_type = other RNA
tcctgtactgagccgccccgagt

SEQ ID NO: 28890 - RNA, 23 nt, Synthetic Construct
  source 1..23: mol_type = other RNA
tcctgtactgagccgccccgagt

SEQ ID NO: 28891 - RNA, 23 nt, Synthetic Construct
  source 1..23: mol_type = other RNA
tggtaataagacgtacttagtgt

SEQ ID NO: 28892 - RNA, 23 nt, Synthetic Construct
  source 1..23: mol_type = other RNA
tggtaataagacgtacttagtgt

SEQ ID NO: 28893 - RNA, 22 nt, Synthetic Construct
  source 1..22: mol_type = other RNA
cattgcacttgcctcggtctga

SEQ ID NO: 28894 - RNA, 25 nt, Synthetic Construct
  source 1..25: mol_type = other RNA
tagtgcaatattgcttatagggttt

SEQ ID NO: 28895 - RNA, 25 nt, Synthetic Construct
  source 1..25: mol_type = other RNA
tagtgcaatattgcttatagggttt

SEQ ID NO: 28896 - RNA, 18 nt, Synthetic Construct
  source 1..18: mol_type = other RNA
gtccccttcgtctagagg

SEQ ID NO: 28897 - RNA, 19 nt, Synthetic Construct
  source 1..19: mol_type = other RNA
gctattgacgaccgtaccg

SEQ ID NO: 28898 - RNA, 21 nt, Synthetic Construct
  source 1..21: mol_type = other RNA
tcctgtactgagctgccccgg

SEQ ID NO: 28899 - RNA, 18 nt, Synthetic Construct
  source 1..18: mol_type = other RNA
tcccctggacctgtactg

SEQ ID NO: 28900 - RNA, 21 nt, Synthetic Construct
  source 1..21: mol_type = other RNA
cgaggggcagagagcgagact

SEQ ID NO: 28901 - RNA, 21 nt, Synthetic Construct
  source 1..21: mol_type = other RNA
cgaggggcagagagcgagact

SEQ ID NO: 28902 - RNA, 24 nt, Synthetic Construct
  source 1..24: mol_type = other RNA
tgagaactgaattccatgggttgt

SEQ ID NO: 28903 - RNA, 24 nt, Synthetic Construct
  source 1..24: mol_type = other RNA
tgagaactgaattccatgggttgt

SEQ ID NO: 28904 - RNA, 20 nt, Synthetic Construct
  source 1..20: mol_type = other RNA
tgaggtggtaggttgtgtgg

SEQ ID NO: 28905 - RNA, 20 nt, Synthetic Construct
  source 1..20: mol_type = other RNA
tgaggtggtaggttgtgtgg

SEQ ID NO: 28906 - RNA, 23 nt, Synthetic Construct
  source 1..23: mol_type = other RNA
tagcttatcagactgatgttgac

SEQ ID NO: 28907 - RNA, 23 nt, Synthetic Construct
  source 1..23: mol_type = other RNA
tagcttatcagactgatgttgac

SEQ ID NO: 28908 - RNA, 29 nt, Synthetic Construct
  source 1..29: mol_type = other RNA
gatgcgaaagcaggtcaaagtgatccggc

SEQ ID NO: 28909 - RNA, 29 nt, Synthetic Construct
  source 1..29: mol_type = other RNA
gatgcgaaagcaggtcaaagtgatccggc

SEQ ID NO: 28910 - RNA, 31 nt, Synthetic Construct; identical to SEQ ID NO: 15910
  source 1..31: mol_type = other RNA

SEQ ID NO: 28911 - RNA, 31 nt, Synthetic Construct; identical to SEQ ID NO: 15910
  source 1..31: mol_type = other RNA

SEQ ID NO: 28912 - RNA, 38 nt, Synthetic Construct; identical to SEQ ID NO: 7148
  source 1..38: mol_type = other RNA

SEQ ID NO: 28913 - RNA, 23 nt, Synthetic Construct
  source 1..23: mol_type = other RNA
aacggaatcccaaaagcagctgt

SEQ ID NO: 28914 - RNA, 22 nt, Synthetic Construct
  source 1..22: mol_type = other RNA
tatcgcacttgtcccggcctgt

SEQ ID NO: 28915 - RNA, 20 nt, Synthetic Construct
  source 1..20: mol_type = other RNA
tcggaagaaggggtgcctgg

SEQ ID NO: 28916 - RNA, 20 nt, Synthetic Construct
  source 1..20: mol_type = other RNA
tcggaagaaggggtgcctgg

SEQ ID NO: 28917 - RNA, 25 nt, Synthetic Construct
  source 1..25: mol_type = other RNA
aatgacacgatcactcccgttgagt

SEQ ID NO: 28918 - RNA, 25 nt, Synthetic Construct
  source 1..25: mol_type = other RNA
aatgacacgatcactcccgttgagt

SEQ ID NO: 28919 - RNA, 21 nt, Synthetic Construct
  source 1..21: mol_type = other RNA
tcctgtacagagctgccccga

SEQ ID NO: 28920 - RNA, 21 nt, Synthetic Construct
  source 1..21: mol_type = other RNA
tcctgtacagagctgccccga

SEQ ID NO: 28921 - RNA, 21 nt, Synthetic Construct
  source 1..21: mol_type = other RNA
actcggcgtggcgtcggtcgt

SEQ ID NO: 28922 - RNA, 21 nt, Synthetic Construct
  source 1..21: mol_type = other RNA
actcggcgtggcgtcggtcgt

SEQ ID NO: 28923 - RNA, 23 nt, Synthetic Construct
  source 1..23: mol_type = other RNA
aatgacacgatcactcccgttga

SEQ ID NO: 28924 - RNA, 23 nt, Synthetic Construct
  source 1..23: mol_type = other RNA
aatgacacgatcactcccgttga

SEQ ID NO: 28925 - RNA, 22 nt, Synthetic Construct
  source 1..22: mol_type = other RNA
gtcagtttgtcaaataccccaa

SEQ ID NO: 28926 - RNA, 22 nt, Synthetic Construct
  source 1..22: mol_type = other RNA
gtcagtttgtcaaataccccaa

SEQ ID NO: 28927 - RNA, 16 nt, Synthetic Construct
  source 1..16: mol_type = other RNA
gtgacgcgcatgaatg

SEQ ID NO: 28928 - RNA, 16 nt, Synthetic Construct
  source 1..16: mol_type = other RNA
gtgacgcgcatgaatg

SEQ ID NO: 28929 - RNA, 16 nt, Synthetic Construct
  source 1..16: mol_type = other RNA
cgactcttagcggtgg

SEQ ID NO: 28930 - RNA, 21 nt, Synthetic Construct
  source 1..21: mol_type = other RNA
cactgatcgagtcgtcctgcg

SEQ ID NO: 28931 - RNA, 24 nt, Synthetic Construct
  source 1..24: mol_type = other RNA
tctctcggctcctcgcggctcgct

SEQ ID NO: 28932 - RNA, 24 nt, Synthetic Construct
  source 1..24: mol_type = other RNA
tctctcggctcctcgcggctcgct

SEQ ID NO: 28933 - RNA, 22 nt, Synthetic Construct
  source 1..22: mol_type = other RNA
taaggtagtaggttgtgtggtt

SEQ ID NO: 28934 - RNA, 22 nt, Synthetic Construct
  source 1..22: mol_type = other RNA
tggggtagtaggttgtgtggtt

SEQ ID NO: 28935 - RNA, 22 nt, Synthetic Construct
  source 1..22: mol_type = other RNA
aagcttatcagactgatgttga

SEQ ID NO: 28936 - RNA, 22 nt, Synthetic Construct
  source 1..22: mol_type = other RNA
tcctgtactgagctgccctgag

SEQ ID NO: 28937 - RNA, 22 nt, Synthetic Construct
  source 1..22: mol_type = other RNA
tcctgtactgagctgccctgag

SEQ ID NO: 28938 - RNA, 20 nt, Synthetic Construct
  source 1..20: mol_type = other RNA
tagcgaaattccttgtcggg

SEQ ID NO: 28939 - RNA, 41 nt, Synthetic Construct; identical to SEQ ID NO: 10630
  source 1..41: mol_type = other RNA

SEQ ID NO: 28940 - RNA, 41 nt, Synthetic Construct; identical to SEQ ID NO: 10630
  source 1..41: mol_type = other RNA

SEQ ID NO: 28941 - RNA, 22 nt, Synthetic Construct
  source 1..22: mol_type = other RNA
tcctgtattgagctgccccgag

SEQ ID NO: 28942 - RNA, 26 nt, Synthetic Construct
  source 1..26: mol_type = other RNA
aacattcaacgctgtcggtgagtttt

SEQ ID NO: 28943 - RNA, 34 nt, Synthetic Construct; identical to SEQ ID NO: 6757
  source 1..34: mol_type = other RNA

SEQ ID NO: 28944 - RNA, 34 nt, Synthetic Construct; identical to SEQ ID NO: 6757
  source 1..34: mol_type = other RNA

SEQ ID NO: 28945 - RNA, 15 nt, Synthetic Construct
  source 1..15: mol_type = other RNA
aaattccttgtcggg

SEQ ID NO: 28946 - RNA, 15 nt, Synthetic Construct
  source 1..15: mol_type = other RNA
aaattccttgtcggg

SEQ ID NO: 28947 - RNA, 35 nt, Synthetic Construct; identical to SEQ ID NO: 9871
  source 1..35: mol_type = other RNA

SEQ ID NO: 28948 - RNA, 35 nt, Synthetic Construct; identical to SEQ ID NO: 9871
  source 1..35: mol_type = other RNA

SEQ ID NO: 28949 - RNA, 22 nt, Synthetic Construct
  source 1..22: mol_type = other RNA
tcctgtactgagttgccccgag

SEQ ID NO: 28950 - RNA, 21 nt, Synthetic Construct
  source 1..21: mol_type = other RNA
ctagactgaagctccttgggg

SEQ ID NO: 28951 - RNA, 18 nt, Synthetic Construct
  source 1..18: mol_type = other RNA
gttcgattccggagaggg

SEQ ID NO: 28952 - RNA, 18 nt, Synthetic Construct
  source 1..18: mol_type = other RNA
gttcgattccggagaggg

SEQ ID NO: 28953 - RNA, 16 nt, Synthetic Construct
  source 1..16: mol_type = other RNA
gtctacggccacacca

SEQ ID NO: 28954 - RNA, 16 nt, Synthetic Construct
  source 1..16: mol_type = other RNA
gtctacggccacacca

SEQ ID NO: 28955 - RNA, 23 nt, Synthetic Construct
  source 1..23: mol_type = other RNA
tgcggggctagggctaacagcat

SEQ ID NO: 28956 - RNA, 23 nt, Synthetic Construct
  source 1..23: mol_type = other RNA
tgcggggctagggctaacagcat

SEQ ID NO: 28957 - RNA, 22 nt, Synthetic Construct
  source 1..22: mol_type = other RNA
gtgccgaagctgtgggattgat

SEQ ID NO: 28958 - RNA, 22 nt, Synthetic Construct
  source 1..22: mol_type = other RNA
gtgccgaagctgtgggattgat

SEQ ID NO: 28959 - RNA, 22 nt, Synthetic Construct
  source 1..22: mol_type = other RNA
tcaagagcaataacgaaaaatg

SEQ ID NO: 28960 - RNA, 22 nt, Synthetic Construct
  source 1..22: mol_type = other RNA
tcaagagcaataacgaaaaatg

SEQ ID NO: 28961 - RNA, 22 nt, Synthetic Construct
  source 1..22: mol_type = other RNA
tcctgtaccgagctgccccgag

SEQ ID NO: 28962 - RNA, 21 nt, Synthetic Construct
  source 1..21: mol_type = other RNA
tcctgtactgggctgccccga

SEQ ID NO: 28963 - RNA, 21 nt, Synthetic Construct
  source 1..21: mol_type = other RNA
tcctgtactgggctgccccga

SEQ ID NO: 28964 - RNA, 34 nt, Synthetic Construct; identical to SEQ ID NO: 749
  source 1..34: mol_type = other RNA

SEQ ID NO: 28965 - RNA, 34 nt, Synthetic Construct; identical to SEQ ID NO: 749
  source 1..34: mol_type = other RNA

SEQ ID NO: 28966 - RNA, 23 nt, Synthetic Construct
  source 1..23: mol_type = other RNA
gactatagaactttccccctcat

SEQ ID NO: 28967 - RNA, 23 nt, Synthetic Construct
  source 1..23: mol_type = other RNA
gactatagaactttccccctcat

SEQ ID NO: 28968 - RNA, 15 nt, Synthetic Construct
  source 1..15: mol_type = other RNA
gtagctcgttgggct

SEQ ID NO: 28969 - RNA, 23 nt, Synthetic Construct
  source 1..23: mol_type = other RNA
tccctggtggtctagtggttagg

SEQ ID NO: 28970 - RNA, 18 nt, Synthetic Construct
  source 1..18: mol_type = other RNA
agcagcattgtacagggc

SEQ ID NO: 28971 - RNA, 18 nt, Synthetic Construct
  source 1..18: mol_type = other RNA
agcagcattgtacagggc

SEQ ID NO: 28972 - RNA, 22 nt, Synthetic Construct
  source 1..22: mol_type = other RNA
aggagtgtgacaatggtgtttg

SEQ ID NO: 28973 - RNA, 23 nt, Synthetic Construct
  source 1..23: mol_type = other RNA
gcgtggtaggagagcgttctgta

SEQ ID NO: 28974 - RNA, 23 nt, Synthetic Construct
  source 1..23: mol_type = other RNA
gcgtggtaggagagcgttctgta

SEQ ID NO: 28975 - RNA, 23 nt, Synthetic Construct
  source 1..23: mol_type = other RNA
tgaggtagtaggttgtatggtta

SEQ ID NO: 28976 - RNA, 22 nt, Synthetic Construct
  source 1..22: mol_type = other RNA
cgaggtagtagtttgtgctgtt

SEQ ID NO: 28977 - RNA, 16 nt, Synthetic Construct
  source 1..16: mol_type = other RNA
ccggaggaaggtgggg

SEQ ID NO: 28978 - RNA, 16 nt, Synthetic Construct
  source 1..16: mol_type = other RNA
ccggaggaaggtgggg

SEQ ID NO: 28979 - RNA, 22 nt, Synthetic Construct
  source 1..22: mol_type = other RNA
cattgcacttgtcccggcctgt

SEQ ID NO: 28980 - RNA, 22 nt, Synthetic Construct
  source 1..22: mol_type = other RNA
cattgcacttgtcccggcctgt

SEQ ID NO: 28981 - RNA, 22 nt, Synthetic Construct
  source 1..22: mol_type = other RNA
tgaggtagcaggttgtatagtt

SEQ ID NO: 28982 - RNA, 22 nt, Synthetic Construct
  source 1..22: mol_type = other RNA
tgaggtagcaggttgtatagtt

SEQ ID NO: 28983 - RNA, 36 nt, Synthetic Construct; identical to SEQ ID NO: 752
  source 1..36: mol_type = other RNA

SEQ ID NO: 28984 - RNA, 36 nt, Synthetic Construct; identical to SEQ ID NO: 752
  source 1..36: mol_type = other RNA

SEQ ID NO: 28985 - RNA, 30 nt, Synthetic Construct; identical to SEQ ID NO: 2578
  source 1..30: mol_type = other RNA

SEQ ID NO: 28986 - RNA, 30 nt, Synthetic Construct; identical to SEQ ID NO: 2578
  source 1..30: mol_type = other RNA

SEQ ID NO: 28987 - RNA, 28 nt, Synthetic Construct
  source 1..28: mol_type = other RNA
ccccccactgctaaatttggctggcttt

SEQ ID NO: 28988 - RNA, 30 nt, Synthetic Construct; identical to SEQ ID NO: 6405
  source 1..30: mol_type = other RNA

SEQ ID NO: 28989 - RNA, 30 nt, Synthetic Construct; identical to SEQ ID NO: 6405
  source 1..30: mol_type = other RNA

SEQ ID NO: 28990 - RNA, 20 nt, Synthetic Construct
  source 1..20: mol_type = other RNA
cgaggtagtaggttgtatag

SEQ ID NO: 28991 - RNA, 20 nt, Synthetic Construct
  source 1..20: mol_type = other RNA
cgaggtagtaggttgtatag

SEQ ID NO: 28992 - RNA, 34 nt, Synthetic Construct; identical to SEQ ID NO: 2298
  source 1..34: mol_type = other RNA

SEQ ID NO: 28993 - RNA, 34 nt, Synthetic Construct; identical to SEQ ID NO: 2298
  source 1..34: mol_type = other RNA

SEQ ID NO: 28994 - RNA, 22 nt, Synthetic Construct
  source 1..22: mol_type = other RNA
gagagcctggacacaggtgctg

SEQ ID NO: 28995 - RNA, 22 nt, Synthetic Construct
  source 1..22: mol_type = other RNA
gagagcctggacacaggtgctg

SEQ ID NO: 28996 - RNA, 23 nt, Synthetic Construct
  source 1..23: mol_type = other RNA
tgaggggtagagagcgagacttt

SEQ ID NO: 28997 - RNA, 23 nt, Synthetic Construct
  source 1..23: mol_type = other RNA
tgaggggtagagagcgagacttt

SEQ ID NO: 28998 - RNA, 23 nt, Synthetic Construct
  source 1..23: mol_type = other RNA
gtctttgttcgattccgttgagt

SEQ ID NO: 28999 - RNA, 23 nt, Synthetic Construct
  source 1..23: mol_type = other RNA
gactcttagcggtggatcactcg

SEQ ID NO: 29000 - RNA, 23 nt, Synthetic Construct
  source 1..23: mol_type = other RNA
gactcttagcggtggatcactcg

SEQ ID NO: 29001 - RNA, 25 nt, Synthetic Construct
  source 1..25: mol_type = other RNA
cgactcttagcggtggatcactcgg

SEQ ID NO: 29002 - RNA, 25 nt, Synthetic Construct
  source 1..25: mol_type = other RNA
cgactcttagcggtggatcactcgg

SEQ ID NO: 29003 - RNA, 18 nt, Synthetic Construct
  source 1..18: mol_type = other RNA
tctaatgagactgccggt

SEQ ID NO: 29004 - RNA, 21 nt, Synthetic Construct
  source 1..21: mol_type = other RNA
ctaatcccagaaacccggtcg

SEQ ID NO: 29005 - RNA, 23 nt, Synthetic Construct
  source 1..23: mol_type = other RNA
tggtaatacgacgtacatagtgt

SEQ ID NO: 29006 - RNA, 23 nt, Synthetic Construct
  source 1..23: mol_type = other RNA
tggtaatacgacgtacatagtgt

SEQ ID NO: 29007 - RNA, 27 nt, Synthetic Construct
  source 1..27: mol_type = other RNA
ncccccactgctaaatttgactggctt

SEQ ID NO: 29008 - RNA, 27 nt, Synthetic Construct
  source 1..27: mol_type = other RNA
ncccccactgctaaatttgactggctt

SEQ ID NO: 29009 - RNA, 34 nt, Synthetic Construct; identical to SEQ ID NO: 2298
  source 1..34: mol_type = other RNA

SEQ ID NO: 29010 - RNA, 34 nt, Synthetic Construct; identical to SEQ ID NO: 2298
  source 1..34: mol_type = other RNA

SEQ ID NO: 29011 - RNA, 22 nt, Synthetic Construct
  source 1..22: mol_type = other RNA
tgaggtagtaggttgtacagtt

SEQ ID NO: 29012 - RNA, 22 nt, Synthetic Construct
  source 1..22: mol_type = other RNA
tgaggtagtaggttgtacagtt

SEQ ID NO: 29013 - RNA, 17 nt, Synthetic Construct
  source 1..17: mol_type = other RNA
gggaacgtgagctgggt

SEQ ID NO: 29014 - RNA, 17 nt, Synthetic Construct
  source 1..17: mol_type = other RNA
gggaacgtgagctgggt

SEQ ID NO: 29015 - RNA, 22 nt, Synthetic Construct
  source 1..22: mol_type = other RNA
tggaatgtaaggaagtatgtat

SEQ ID NO: 29016 - RNA, 21 nt, Synthetic Construct
  source 1..21: mol_type = other RNA
ttataatacaacctgataagt

SEQ ID NO: 29017 - RNA, 21 nt, Synthetic Construct
  source 1..21: mol_type = other RNA
ttataatacaacctgataagt

SEQ ID NO: 29018 - RNA, 22 nt, Synthetic Construct
  source 1..22: mol_type = other RNA
tagcttatcagactgatgttgg

SEQ ID NO: 29019 - RNA, 19 nt, Synthetic Construct
  source 1..19: mol_type = other RNA
cttggggttgtaggaccac

SEQ ID NO: 29020 - RNA, 19 nt, Synthetic Construct
  source 1..19: mol_type = other RNA
cttggggttgtaggaccac

SEQ ID NO: 29021 - RNA, 19 nt, Synthetic Construct
  source 1..19: mol_type = other RNA
cgactcttagcggtggatc

SEQ ID NO: 29022 - RNA, 21 nt, Synthetic Construct
  source 1..21: mol_type = other RNA
tcctgtactgagccgccccga

SEQ ID NO: 29023 - RNA, 21 nt, Synthetic Construct
  source 1..21: mol_type = other RNA
tcctgtactgagccgccccga

SEQ ID NO: 29024 - RNA, 23 nt, Synthetic Construct
  source 1..23: mol_type = other RNA
tggtgatacgacgtacttagtgt

SEQ ID NO: 29025 - RNA, 22 nt, Synthetic Construct
  source 1..22: mol_type = other RNA
tgtcaactggttgttgggaggg

SEQ ID NO: 29026 - RNA, 24 nt, Synthetic Construct
  source 1..24: mol_type = other RNA
tcggatccgtctgagcttggcttt

SEQ ID NO: 29027 - RNA, 24 nt, Synthetic Construct
  source 1..24: mol_type = other RNA
tcggatccgtctgagcttggcttt

SEQ ID NO: 29028 - RNA, 23 nt, Synthetic Construct
  source 1..23: mol_type = other RNA
tgaggggcggagagcgagacttt

SEQ ID NO: 29029 - RNA, 21 nt, Synthetic Construct
  source 1..21: mol_type = other RNA
tgaggtagtagtctgtgctgt

SEQ ID NO: 29030 - RNA, 43 nt, Synthetic Construct; identical to SEQ ID NO: 6202
  source 1..43: mol_type = other RNA

SEQ ID NO: 29031 - RNA, 19 nt, Synthetic Construct
  source 1..19: mol_type = other RNA
gggataactggcttgtggc

SEQ ID NO: 29032 - RNA, 19 nt, Synthetic Construct
  source 1..19: mol_type = other RNA
gggataactggcttgtggc

SEQ ID NO: 29033 - RNA, 21 nt, Synthetic Construct
  source 1..21: mol_type = other RNA
agcagcattgtacagggctat

SEQ ID NO: 29034 - RNA, 21 nt, Synthetic Construct
  source 1..21: mol_type = other RNA
agcagcattgtacagggctat

SEQ ID NO: 29035 - RNA, 20 nt, Synthetic Construct
  source 1..20: mol_type = other RNA
tgaggtagtaggttgtacag

SEQ ID NO: 29036 - RNA, 20 nt, Synthetic Construct
  source 1..20: mol_type = other RNA
tgaggtagtaggttgtacag

SEQ ID NO: 29037 - RNA, 23 nt, Synthetic Construct
  source 1..23: mol_type = other RNA
ggatatcatcatatactgtaagt

SEQ ID NO: 29038 - RNA, 23 nt, Synthetic Construct
  source 1..23: mol_type = other RNA
ggatatcatcatatactgtaagt

SEQ ID NO: 29039 - RNA, 23 nt, Synthetic Construct
  source 1..23: mol_type = other RNA
tgtagtgtttcctactttatggt

SEQ ID NO: 29040 - RNA, 21 nt, Synthetic Construct
  source 1..21: mol_type = other RNA
tcctgcactgagctgccccga

SEQ ID NO: 29041 - RNA, 21 nt, Synthetic Construct
  source 1..21: mol_type = other RNA
tcctgcactgagctgccccga

SEQ ID NO: 29042 - RNA, 22 nt, Synthetic Construct
  source 1..22: mol_type = other RNA
tggagtgtgacaatggtgcttg

SEQ ID NO: 29043 - RNA, 31 nt, Synthetic Construct; identical to SEQ ID NO: 9212
  source 1..31: mol_type = other RNA

SEQ ID NO: 29044 - RNA, 22 nt, Synthetic Construct
  source 1..22: mol_type = other RNA
atataatacaacctgctaagtg

SEQ ID NO: 29045 - RNA, 22 nt, Synthetic Construct
  source 1..22: mol_type = other RNA
atataatacaacctgctaagtg

SEQ ID NO: 29046 - RNA, 20 nt, Synthetic Construct
  source 1..20: mol_type = other RNA
tgaggaagtaggttgtgtgg

SEQ ID NO: 29047 - RNA, 30 nt, Synthetic Construct; identical to SEQ ID NO: 751
  source 1..30: mol_type = other RNA

SEQ ID NO: 29048 - RNA, 21 nt, Synthetic Construct
  source 1..21: mol_type = other RNA
ctagactgaagctccttgggg

SEQ ID NO: 29049 - RNA, 22 nt, Synthetic Construct
  source 1..22: mol_type = other RNA
cataaagtagaaagcactacta

SEQ ID NO: 29050 - RNA, 21 nt, Synthetic Construct
  source 1..21: mol_type = other RNA
tgaagtagtaggttgtgtggt

SEQ ID NO: 29051 - RNA, 21 nt, Synthetic Construct
  source 1..21: mol_type = other RNA
tgaagtagtaggttgtgtggt

SEQ ID NO: 29052 - RNA, 20 nt, Synthetic Construct
  source 1..20: mol_type = other RNA
tgaggtagtaggttgtgagg

SEQ ID NO: 29053 - RNA, 20 nt, Synthetic Construct
  source 1..20: mol_type = other RNA
tgaggtagtaggttgtgagg

SEQ ID NO: 29054 - RNA, 22 nt, Synthetic Construct
  source 1..22: mol_type = other RNA
ggcagcattgtacagggctatg

SEQ ID NO: 29055 - RNA, 22 nt, Synthetic Construct
  source 1..22: mol_type = other RNA
tggaatgtagagaagtatgtat

SEQ ID NO: 29056 - RNA, 27 nt, Synthetic Construct
  source 1..27: mol_type = other RNA
cggtataccgaagctctaggtgcggca

SEQ ID NO: 29057 - RNA, 27 nt, Synthetic Construct
  source 1..27: mol_type = other RNA
cggtataccgaagctctaggtgcggca

SEQ ID NO: 29058 - RNA, 16 nt, Synthetic Construct
  source 1..16: mol_type = other RNA
gtctacggccacacca

SEQ ID NO: 29059 - RNA, 22 nt, Synthetic Construct
  source 1..22: mol_type = other RNA
cattgcacttgtctcggtctgg

SEQ ID NO: 29060 - RNA, 22 nt, Synthetic Construct
  source 1..22: mol_type = other RNA
cattgcacttgtctcggtctgg

SEQ ID NO: 29061 - RNA, 22 nt, Synthetic Construct
  source 1..22: mol_type = other RNA
atcacattgccagggatttcca

SEQ ID NO: 29062 - RNA, 22 nt, Synthetic Construct
  source 1..22: mol_type = other RNA
atcacattgccagggatttcca

SEQ ID NO: 29063 - RNA, 19 nt, Synthetic Construct
  source 1..19: mol_type = other RNA
atctgctggaactgcaact

SEQ ID NO: 29064 - RNA, 19 nt, Synthetic Construct
  source 1..19: mol_type = other RNA
atctgctggaactgcaact

SEQ ID NO: 29065 - RNA, 21 nt, Synthetic Construct
  source 1..21: mol_type = other RNA
tggagtgtgacaacggtgttt

SEQ ID NO: 29066 - RNA, 21 nt, Synthetic Construct
  source 1..21: mol_type = other RNA
tggagtgtgacaacggtgttt

SEQ ID NO: 29067 - RNA, 31 nt, Synthetic Construct; identical to SEQ ID NO: 15910
  source 1..31: mol_type = other RNA

SEQ ID NO: 29068 - RNA, 31 nt, Synthetic Construct; identical to SEQ ID NO: 15910
  source 1..31: mol_type = other RNA

SEQ ID NO: 29069 - RNA, 20 nt, Synthetic Construct
  source 1..20: mol_type = other RNA
taaggtagtaggttgtatag

SEQ ID NO: 29070 - RNA, 20 nt, Synthetic Construct
  source 1..20: mol_type = other RNA
taaggtagtaggttgtatag

SEQ ID NO: 29071 - RNA, 16 nt, Synthetic Construct
  source 1..16: mol_type = other RNA
gtccggatcgtagtct

SEQ ID NO: 29072 - RNA, 22 nt, Synthetic Construct
  source 1..22: mol_type = other RNA
cataaagtagaaagcactacta

SEQ ID NO: 29073 - RNA, 22 nt, Synthetic Construct
  source 1..22: mol_type = other RNA
cataaagtagaaagcactacta

SEQ ID NO: 29074 - RNA, 21 nt, Synthetic Construct
  source 1..21: mol_type = other RNA
tgaggggcagagagcgagaca

SEQ ID NO: 29075 - RNA, 21 nt, Synthetic Construct
  source 1..21: mol_type = other RNA
tgaggggcagagagcgagaca

SEQ ID NO: 29076 - RNA, 22 nt, Synthetic Construct
  source 1..22: mol_type = other RNA
tgaggaagtaggttgtatagtt

SEQ ID NO: 29077 - RNA, 22 nt, Synthetic Construct
  source 1..22: mol_type = other RNA
tggagtgtaaagaagtatgtat

SEQ ID NO: 29078 - RNA, 22 nt, Synthetic Construct
  source 1..22: mol_type = other RNA
tcctgtactgagctgccccaag

SEQ ID NO: 29079 - RNA, 20 nt, Synthetic Construct
  source 1..20: mol_type = other RNA
ggaggtagtaggttgtgtgg

SEQ ID NO: 29080 - RNA, 20 nt, Synthetic Construct
  source 1..20: mol_type = other RNA
ggaggtagtaggttgtgtgg

SEQ ID NO: 29081 - RNA, 22 nt, Synthetic Construct
  source 1..22: mol_type = other RNA
taaggtagtaggttgtgtggtt

SEQ ID NO: 29082 - RNA, 22 nt, Synthetic Construct
  source 1..22: mol_type = other RNA
taaggtagtaggttgtgtggtt

SEQ ID NO: 29083 - RNA, 23 nt, Synthetic Construct
  source 1..23: mol_type = other RNA
tgaggggcagagagcgagacttc

SEQ ID NO: 29084 - RNA, 27 nt, Synthetic Construct
  source 1..27: mol_type = other RNA
cgactcttagcggtggatcactcggct

SEQ ID NO: 29085 - RNA, 27 nt, Synthetic Construct
  source 1..27: mol_type = other RNA
cgactcttagcggtggatcactcggct

SEQ ID NO: 29086 - RNA, 16 nt, Synthetic Construct
  source 1..16: mol_type = other RNA
agtcaggatgttggct

SEQ ID NO: 29087 - RNA, 21 nt, Synthetic Construct
  source 1..21: mol_type = other RNA
tggagtgtggcaatggtgttt

SEQ ID NO: 29088 - RNA, 21 nt, Synthetic Construct
  source 1..21: mol_type = other RNA
tggagtgtggcaatggtgttt

SEQ ID NO: 29089 - RNA, 15 nt, Synthetic Construct
  source 1..15: mol_type = other RNA
gcgtagatatgcgga

SEQ ID NO: 29090 - RNA, 34 nt, Synthetic Construct; identical to SEQ ID NO: 2364
  source 1..34: mol_type = other RNA

SEQ ID NO: 29091 - RNA, 21 nt, Synthetic Construct
  source 1..21: mol_type = other RNA
tggggtagtaggttgtgtggt

SEQ ID NO: 29092 - RNA, 21 nt, Synthetic Construct
  source 1..21: mol_type = other RNA
tggggtagtaggttgtgtggt

SEQ ID NO: 29093 - RNA, 34 nt, Synthetic Construct; identical to SEQ ID NO: 6594
  source 1..34: mol_type = other RNA

SEQ ID NO: 29094 - RNA, 22 nt, Synthetic Construct
  source 1..22: mol_type = other RNA
ccctgtactgagctgccccgag

SEQ ID NO: 29095 - RNA, 22 nt, Synthetic Construct
  source 1..22: mol_type = other RNA
ccctgtactgagctgccccgag

SEQ ID NO: 29096 - RNA, 26 nt, Synthetic Construct
  source 1..26: mol_type = other RNA
gatgcgtggtaggagagcgttctgta

SEQ ID NO: 29097 - RNA, 26 nt, Synthetic Construct
  source 1..26: mol_type = other RNA
gatgcgtggtaggagagcgttctgta

SEQ ID NO: 29098 - RNA, 25 nt, Synthetic Construct
  source 1..25: mol_type = other RNA
gggttgtaaaccgcttttgtcaggg

SEQ ID NO: 29099 - RNA, 25 nt, Synthetic Construct
  source 1..25: mol_type = other RNA
gggttgtaaaccgcttttgtcaggg

SEQ ID NO: 29100 - RNA, 38 nt, Synthetic Construct; identical to SEQ ID NO: 7148
  source 1..38: mol_type = other RNA

SEQ ID NO: 29101 - RNA, 38 nt, Synthetic Construct; identical to SEQ ID NO: 7148
  source 1..38: mol_type = other RNA

SEQ ID NO: 29102 - RNA, 16 nt, Synthetic Construct
  source 1..16: mol_type = other RNA
aggtcatcgtcaggct

SEQ ID NO: 29103 - RNA, 29 nt, Synthetic Construct
  source 1..29: mol_type = other RNA
ccccccccactgctaaatttgactggctt

SEQ ID NO: 29104 - RNA, 23 nt, Synthetic Construct
  source 1..23: mol_type = other RNA
caaagtgctgtttgtgcaggtag

SEQ ID NO: 29105 - RNA, 31 nt, Synthetic Construct; identical to SEQ ID NO: 960
  source 1..31: mol_type = other RNA

SEQ ID NO: 29106 - RNA, 21 nt, Synthetic Construct
  source 1..21: mol_type = other RNA
tgtcagtttgtcaaatacccc

SEQ ID NO: 29107 - RNA, 22 nt, Synthetic Construct
  source 1..22: mol_type = other RNA
tagcagcacgtaaatgttggcg

SEQ ID NO: 29108 - RNA, 22 nt, Synthetic Construct
  source 1..22: mol_type = other RNA
tagcagcacgtaaatgttggcg

SEQ ID NO: 29109 - RNA, 16 nt, Synthetic Construct
  source 1..16: mol_type = other RNA
gtcgacgtatagggtg

SEQ ID NO: 29110 - RNA, 16 nt, Synthetic Construct
  source 1..16: mol_type = other RNA
gtcgacgtatagggtg

SEQ ID NO: 29111 - RNA, 23 nt, Synthetic Construct
  source 1..23: mol_type = other RNA
ccctgtactgagctgccccgagt

SEQ ID NO: 29112 - RNA, 16 nt, Synthetic Construct
  source 1..16: mol_type = other RNA
aggtcatcgtcaggct

SEQ ID NO: 29113 - RNA, 26 nt, Synthetic Construct
  source 1..26: mol_type = other RNA
cgactcttagcggtggatcactcggc

SEQ ID NO: 29114 - RNA, 26 nt, Synthetic Construct
  source 1..26: mol_type = other RNA
cgactcttagcggtggatcactcggc

SEQ ID NO: 29115 - RNA, 20 nt, Synthetic Construct
  source 1..20: mol_type = other RNA
tggggtagtaggttgtatag

SEQ ID NO: 29116 - RNA, 20 nt, Synthetic Construct
  source 1..20: mol_type = other RNA
tggggtagtaggttgtatag

SEQ ID NO: 29117 - RNA, 23 nt, Synthetic Construct
  source 1..23: mol_type = other RNA
ggaggggcagagagcgagacttt

SEQ ID NO: 29118 - RNA, 23 nt, Synthetic Construct
  source 1..23: mol_type = other RNA
ggaggggcagagagcgagacttt

SEQ ID NO: 29119 - RNA, 30 nt, Synthetic Construct; identical to SEQ ID NO: 1079
  source 1..30: mol_type = other RNA

SEQ ID NO: 29120 - RNA, 30 nt, Synthetic Construct; identical to SEQ ID NO: 1079
  source 1..30: mol_type = other RNA

SEQ ID NO: 29121 - RNA, 25 nt, Synthetic Construct
  source 1..25: mol_type = other RNA
ttggggatatgagatcgagacgaca

SEQ ID NO: 29122 - RNA, 19 nt, Synthetic Construct
  source 1..19: mol_type = other RNA
gggataactggcttgtggc

SEQ ID NO: 29123 - RNA, 19 nt, Synthetic Construct
  source 1..19: mol_type = other RNA
gggataactggcttgtggc

SEQ ID NO: 29124 - RNA, 35 nt, Synthetic Construct; identical to SEQ ID NO: 2567
  source 1..35: mol_type = other RNA

SEQ ID NO: 29125 - RNA, 22 nt, Synthetic Construct
  source 1..22: mol_type = other RNA
nagcagcacgtaaatattggcg

SEQ ID NO: 29126 - RNA, 22 nt, Synthetic Construct
  source 1..22: mol_type = other RNA
nagcagcacgtaaatattggcg

SEQ ID NO: 29127 - RNA, 23 nt, Synthetic Construct
  source 1..23: mol_type = other RNA
tcctgtaccgagctgccccgagt

SEQ ID NO: 29128 - RNA, 33 nt, Synthetic Construct; identical to SEQ ID NO: 2386
  source 1..33: mol_type = other RNA

SEQ ID NO: 29129 - RNA, 33 nt, Synthetic Construct; identical to SEQ ID NO: 2386
  source 1..33: mol_type = other RNA

SEQ ID NO: 29130 - RNA, 23 nt, Synthetic Construct
  source 1..23: mol_type = other RNA
tggtaatacgacgtacttagtgt

SEQ ID NO: 29131 - RNA, 23 nt, Synthetic Construct
  source 1..23: mol_type = other RNA
tggtaatacgacgtactttgtgt

SEQ ID NO: 29132 - RNA, 18 nt, Synthetic Construct
  source 1..18: mol_type = other RNA
gtaggtcatcgtcaggct

SEQ ID NO: 29133 - RNA, 18 nt, Synthetic Construct
  source 1..18: mol_type = other RNA
gtaggtcatcgtcaggct

(The sequence listing continues in the following parts.)

1. A method for treating or preventing amyotrophic lateral sclerosis (ALS) in a subject in need thereof, the method comprising:
isolating RNAs from a sample obtained from the subject, wherein the RNAs have a length of 100 nucleotides or less;
characterizing the RNAs and their relative abundance in the sample to determine a signature, wherein the signature is indicative of presence or absence of ALS; and
administering to the subject a treatment for ALS if the identified signature indicates presence of ALS.

2. The method of claim 1, wherein:
(a) the signature comprises at least one RNA selected from the group consisting of RNAs set forth in SEQ ID NOs: 1-711, 1481-1545, 65683-65745, 66521-66593, 66632-66674, and 66876-66986, and an increased level of the at least one RNA in comparison to a baseline level is indicative of presence of ALS, and/or
(b) the signature comprises at least one RNA selected from the group consisting of RNAs set forth in SEQ ID NOs: 712-1480, 1546-1679, 65746-66520, 66594-66631, 66675-66875, and 66987-67130 and a decreased level of the at least one RNA in comparison to a base line is indicative of presence of ALS.

3. The method of claim 1, wherein the sample is isolated from a cell, tissue or body fluid of the subject

4. The method of claim 1, wherein the sample is isolated from a body fluid, and the body fluid is a plasma, a serum, a cerebrospinal fluid, or combinations thereof.

5. The method of claim 1, wherein the treatment for ALS comprises a glutamate blocker, a muscle relaxant, a physical therapy, or combinations thereof.

6. The method of claim 5, wherein the treatment for ALS comprises the glutamate blocker, and wherein the glutamate blocker comprises riluzole.

7. The method of claim 1, further comprising treating the subject for a bacterial infection by a bacterium, wherein the signature comprises at least one RNA of the bacterium.

8. The method of claim 7, wherein the bacterium is a Verumicrobia or a Proteobacteria.

9. The method of claim 7, wherein the treating for the infection comprises an antibiotic.

10. The method of claim 1, wherein the subject is a mammal.

11. The method of claim 1, wherein the subject is a human.

12. A method for determining speed of amyotrophic lateral sclerosis (ALS) progression in a subject in need thereof, the method comprising:
isolating RNAs from a sample obtained from the subject, wherein the RNAs have length of 100 nucleotides or less;
characterizing the RNAs and their relative abundance in the sample to identify a signature, wherein the signature is indicative of speed of ALS progression; and
determining the speed of ALS progression in the subject based on the identified signature.

13. The method of claim 12, wherein the signature comprises at least one RNA selected from the group consisting of RNAs set forth in SEQ ID NOs: 1680-2725, and wherein an altered level of the at least one RNA in comparison to a reference level is indicative of fast ALS progression.

14. A method for determining a stage of amyotrophic lateral sclerosis (ALS) in a subject, the method comprising:
isolating RNAs from a sample obtained from the subject, wherein the RNAs have a length of 100 nucleotides or less; and
characterizing the RNAs and their relative abundance in the sample to identify a signature, wherein the signature is indicative of a stage of ALS; and
determining the stage of the ALS in the subject based on the identified signature.

15. The method of claim 14, wherein the signature comprises at least one RNA selected from the group consisting of RNAs set forth in SEQ ID NOs: 2726-65054, and wherein an altered level of the at least one RNA in comparison to a reference level is indicative of a later stage of ALS.

16. The method of claim 12 wherein the sample is isolated from a cell, tissue or body fluid of the subject

17. The method of claim 12, wherein the sample is isolated from a body fluid, and the body fluid is a plasma, a serum, a cerebrospinal fluid, or combinations thereof.

18. The method of claim 12, wherein the subject is a mammal.

19. The method of claim 12, wherein the subject is a human. 52380128.1
